United States Patent Application Publication US 2024/0327476 A1 - sequence listing, part 58

SEQ ID NO: 110182 - DNA, 738 bp, synthetic construct
  misc_feature 1..738: note = Description of Artificial Sequence: Synthetic coding sequence
  source 1..738: mol_type = other DNA
atggtggattttcctggttacaacttaagcggagccgtcgcctcgttcctgttcatcctgctgaccatgaagcagagtgaccgactggacaccccaaaggccagcctgaaggtcaacggaccttcgcagccaatcctcgtacgcgttggtgaagatattcagctgacctgttatctgtcccctaaagcaaatgctcagtccatggaagtgcgctgggaccggtcacaccgatatcctgctgtgcatgtctacatggacggtgatcacgtggccggagaacagatggcagagtataggggaagaaccgtcttggtgagcgacgccatagacgagggacgactcaccctccagattctgtcagctagacccagcgacgatggacagtaccgatgtttatttgaaaaggacgacgtgtaccaggaagcctccttggacctgaaggttgtgagtctcgggtcttcgcctctgattactgttgaaggccaggaggacggggagatgcagccaatgtgctcctcagacggatggttcccccagccgcacgtgccctggagggacatggaggggaagaccatcccatcatcctcacaggccctaacccagggatcccacgggctgtttcacgtacaaacccttctgcgggtaaccaacatttctgctgtggatgtcacctgctccatatcaattccatttttgggcgaggaaaaaatcgctacgttcagcttaagcgggtggtag

SEQ ID NO: 110183 - DNA, 1368 bp, synthetic construct
  misc_feature 1..1368: note = Description of Artificial Sequence: Synthetic coding sequence
  source 1..1368: mol_type = other DNA
atggttgacttccctgggtacaacctcagcggcgccgttgcgtcttttctgtttatcctcttgacaatgaaacagtcagaagatttccgcgtaatcggcccagcgcaccccattctcgctggggttggggaggacgcactccttacatgccagttactgcctaaacgtaccacaatgcacgtggaggtcagatggtacaggagcgaaccttctacacccgtttttgttcacagggacggggtggaagttaccgagatgcagatggaagagtatagaggatgggtggagtggatagagaatggcatcgccaaaggtaacgtggcactgaagattcataacattcagccttccgacaacggccagtactggtgccactttcaagacggcaattattgcggtgaaactagtttactcctgaaagtggctgggttaggctctgccccaagtatacacatggaaggccctggagaatcaggtgtgcagctcgtttgtacggcaagaggatggttcccagagccacaagtatactgggaagacattaggggggagaagttgcttgctgtgtctgaacataggatccaggataaggatggcttattctacgctgaggcaactctagttgtacgtaatgccagcgccgagtctgtttcatgcctggtgcacaacccagtgctgacagaagaaaagggctcggtcatctctctgcctgagaagctacaaacagagttggccagcctgaaagttaacggaccgtctcagcctatactggtgcgcgtgggcgaggatatacagcttacctgctacctttcgcccaaagccaacgctcagtcgatggaggtgcgctgggatcgctcacacaggtatccagctgtacatgtctatatggatggtgaccacgtggccggggagcaaatggcggagtaccggggccgtactgttttggtatccgatgctatcgatgagggccgtctgaccctgcagatcttgagtgctagaccctccgatgatggacagtaccgctgtctttttgaaaaggacgacgtgtaccaggaggccagcctggacttgaaggtggtgtcactgggctcctctcccctgatcaccgtggagggccaggaggatggcgagatgcagcccatgtgttcgtctgacggctggttcccacaaccccacgtgccatggcgtgacatggagggtaagactattcctagcagctcacaagccctgacccaggggagtcatggcctgttccatgttcaaacactgctacgtgtgactaacatcagcgccgtagacgtcacctgttcaatttctatacccttcctaggagaagaaaaaattgcgactttcagcttatcgggctggtag

SEQ ID NO: 110184 - DNA, 1368 bp, synthetic construct
  misc_feature 1..1368: note = Description of Artificial Sequence: Synthetic coding sequence
  source 1..1368: mol_type = other DNA
atggtggatttcccagggtataatctgagtggtgcagtcgcttcttttctgttcattctgttaactatgaaacagtcagaggatttccgcgtgataggacccgctcatcccatacttgcaggggtgggcgaggatgctctccttacttgccagttgttgccaaagcgaactaccatgcacgtggaagtgagatggtatcgatccgagccctcgactcctgtttttgtgcaccgggacggggtcgaggtgaccgaaatgcagatggaggagtataggggctgggttgagtggatcgagaacggaatcgctaaggggaatgttgcattgaagatccataacatccagccaagtgataacggtcagtactggtgtcatttccaagatggaaattattgcggagagaccagcctgctcctcaaggtcgctgggttgggaagcgcccccagcattcacatggagggtcccggcgagtccggcgtgcagctagtttgtaccgctcgtggctggtttcccgaacctcaggtgtattgggaggatattcgtggtgaaaaactgctggcggtatccgaacaccgtattcaggataaggacggtctgttctacgccgaggccacacttgtagttcggaacgcctcagccgagtctgttagctgcctggttcataatccagttctaacagaggagaaaggtagtgtgataagtttgcccgaaaagctgcaaaccgagctggctagcctgaaggttaacggtccctcccaaccgattctggtcagagtgggggaggatattcagctgacctgctatttgagtccaaaagctaatgcacaaagcatggaggtgagatgggatcggagccatcgttacccagctgtgcatgtctatatggatggggaccacgtggccggcgagcagatggccgagtaccggggccggactgtgctcgtgtctgacgcgatcgatgagggaaggctgaccctgcagattcttagtgccaggccatcggatgacgggcagtaccgctgtctattcgaaaaagatgatgtgtatcaggaggcatcgcttgacctcaaagtggtctctctggggtcttctcctttaatcacagtcgaaggacaagaggatggggagatgcagccgatgtgctcgtctgatggctggttcccacagccacacgtaccgtggcgcgatatggaagggaagaccatcccctcctcgtctcaggccctgacccaggggtctcacggactgttccacgtgcaaaccctgttaagagtgacgaacatcagtgccgtcgatgtgacctgcagcatttccatacccttcttaggcgaagaaaagattgctacgtttagcctctccggctggtag

SEQ ID NO: 110185 - DNA, 537 bp, synthetic construct
  misc_feature 1..537: note = Description of Artificial Sequence: Synthetic coding sequence
  source 1..537: mol_type = other DNA
atggaggttagatgggatcgctcccacagatatcctgctgtccacgtgtatatggatggggaccatgtagctggagagcaaatggctgaataccggggcaggacagtcctcgtgagcgacgccattgacgagggacgcctgactctccagatactcagcgctagaccttcagacgacggtcagtaccgttgtttattcgagaaagatgacgtctatcaggaagcgagccttgacctcaaggtcgtgagtctgggcagttctccgcttattaccgtggaaggtcaggaggacggggagatgcagcctatgtgttcttctgacggatggttccctcagcctcacgtgccatggcgggatatggagggcaagaccatcccctcctcctcacaggctctgactcaaggttctcatggcctctttcatgtgcagacattgttgagagtgacaaatatttcagcagtagacgtaacttgctctatctccatcccgttcctgggagaagaaaagattgccacttttagcctctcgggctggtag

SEQ ID NO: 110186 - DNA, 1368 bp, synthetic construct
  misc_feature 1..1368: note = Description of Artificial Sequence: Synthetic coding sequence
  source 1..1368: mol_type = other DNA
atggttgatttcccaggctacaatctgtccggcgccgtagcttcattcttattcatactgttgaccatgaaacagtcagaagatttcagagttattgggcccgcgcaccccattctggctggagtcggcgaggatgctttactcacgtgtcaactgctgccaaaaagaactactatgcatgtggaggtgcgttggtatcgatctgaaccatcaacacctgttttcgtacatagggatggtgtggaggtgaccgagatgcagatggaagagtacagggggtgggtcgaatggatagaaaacggaatcgctaagggaaacgtggcccttaaaattcataacatccagccatccgacaacggacagtactggtgccatttccaagatggtaactattgcggtgagacctccctgctccttaaggtggcaggacttggctcggcgccctccatccacatggaaggaccaggtgagtcaggcgtgcaattggtgtgcaccgctagaggatggttccccgaacctcaagtatattgggaggatatcagaggggagaagctcttggctgtatccgagcaccggatccaggacaaggacggtttgttttatgccgaggccacgctggtcgtgcgcaatgcttccgccgagtcagtgagttgcttggtccataaccccgtcctgaccgaggaaaaaggatctgtcatttcccttccagaaaaactgcagacagagctcgcctccctgaaggtaaatggtccttctcaacctattttggtccgggtgggcgaagacatccagttgacttgctacctgtctcctaaagcaaatgcccagtctatggaagttaggtgggaccgcagccatcggtatcctgctgtgcatgtctatatggacggggaccatgtagcaggagaacagatggctgaatacagaggccgaaccgtactcgtgtcggatgccattgatgagggacgcctgaccctgcaaattctttcagcgaggccttctgacgacggacaatatagatgtctgttcgagaaagacgatgtatatcaggaagcctcactggacttgaaggtcgtgagtctcggttcaagtccattaattaccgtcgaggggcaagaagacggcgaaatgcaacctatgtgcagcagcgacggttggtttcctcaaccgcatgttccatggcgtgacatggaaggcaagactatccccagttccagtcaggccctcacccagggatcgcatggactctttcatgtgcagaccctcctgagagtgacgaacatcagcgcggtcgatgtgacatgcagcatctctatccccttccttggtgaggagaagattgcgacgttctcactgagcggttggtag

SEQ ID NO: 110187 - DNA, 816 bp, synthetic construct
  misc_feature 1..816: note = Description of Artificial Sequence: Synthetic coding sequence
  source 1..816: mol_type = other DNA
atggtagattttcctggatataacttatcaggggctgtggcctcttttctgttcatcctgctcactatgaagcagtccgaagacttccgtgtgattggcccagcccaccccatcctcgccggggtcggagaggatgctctgctgacatgccaactgctgccgaaaaggaccacgatgcatgtcgaggttaggtggtaccgaagtgagcctagcactccagtgttcgtgcatcgcgatggagtggaggtgaccgaaatgcagatggaggagtaccggggctgggttgagtggattgaaaacggcatcgctaagggaaatgttgcgttgaaaattcataatatacagccctctgataacgggcaatattggtgccattttcaggatggcaactattgcggtgagaccagtttactgttaaaagtcgctgcagtgttaagggacgatatcatagccagcttaaaggtcaacggtccctctcagcccatcctagtgcgcgtgggtgaggatattcaattaacatgctatttatctcctaaggctaatgcccagtccatggaagtgcggtgggaccgctcacaccgctatcctgccgtgcatgtttatatggatggcgaccacgtcgcaggcgaacaaatggcagaataccgcggccggacagttctggtaagtgatgccatcgatgaaggcagactgaccctgcagatattatccgctcggccctccgatgatggacaataccgctgcctgtttgaaaaggacgatgtataccaggaggcaagtcttgatcttaaagtggtatgggttttgcctcattag

SEQ ID NO: 110188 - DNA, 1368 bp, synthetic construct
  misc_feature 1..1368: note = Description of Artificial Sequence: Synthetic coding sequence
  source 1..1368: mol_type = other DNA
atggttgatttccctgggtacaatctgagtggtgccgtggcaagctttctcttcatcctgctgaccatgaaacagagcgaggattttagggtgatcggccctgcccatcccatcctcgcaggtgtgggagaggatgcattgctcacatgtcagttgcttcccaagagaacaaccatgcatgtggaagtgaggtggtatcgtagcgagccctctactcccgtgtttgtgcatcgcgacggagtcgaagtgaccgagatgcagatggaagaatataggggctgggtggagtggattgagaacggcatcgccaagggaaacgttgcactcaaaattcataacattcagccttcggacaacggacaatactggtgccacttccaggacggcaattactgtggcgagactagcctgctcctgaaggtagcaggactaggatccgccccttccatccacatggagggacccggcgagtctggtgtgcagctggtttgtaccgcccgcgggtggtttcccgaaccccaggtttattgggaggacattcgcggtgagaagctgctcgcggtttcagagcacaggattcaggatgaagatgggcttttttatgcggaagccacactggtggttagaaacgcatccgccgaatcagttagctgcttggtccacaaccccgtcctcacagaggagaaggggtctgtgatctcgctgccggaaaagctccagacagagttggcttctctgaaggtgaacgggccctctcagcccatcctggtgagagtgggtgaagacatccagctcacctgttacctctctccgaaagccaacgcacaatccatggaagttcgatgggacagatctcaccgatatccagccgtgcacgtttatatggacggcgatcatgtagccggagagcagatggccgagtatcggggacgtactgtattggtcagtgatgctatagacgaggggaggctgactttgcagatcctctctgcacggccttcagacgacggacagtaccggtgtctattcgaaaaagatgatgtgtaccaggaagcatcacttgacttgaaggtagtgggccttggaagcagcccattgataacagtggaaggtcaggaggatggagagatgcagccgatgtgctcctccgacggatggtttccacagccccatgtcccatggcgagatatggagggcaagacaatccccagttctagccaggcattaacgcagggctcgcacggtctatttcatgtgcaaactctgctgagggtaactaatatttctgccgtggatgtcacctgctctatttctatccctttcttaggtgaggaaaagatcgcgacttttagccttagcgggtggtag

SEQ ID NO: 110189 - DNA, 1368 bp, synthetic construct
  misc_feature 1..1368: note = Description of Artificial Sequence: Synthetic coding sequence
  source 1..1368: mol_type = other DNA
atggttgatttccccgggtacaacctgtccggggcagtcgccagcttcttgttcatcctgctgactatgaagcagtccgaggactttcgggtaatcgggccagctcatcctatactcgctggcgtgggcgaagacgctctgcttacatgtcagctcttgcccaagcggacaaccatgcacgtggaggttcggtggtatcggtccgaacccagcacccccgtgttcgtccatcgcgacggcgtggaagttacagagatgcagatggaggaatatcggggctgggtggaatggattgagaatggtatcgctaagggaaacgttgccctcaaaatccataatattcaacccagcgataacggccaatattggtgccacttccaggatggaaattactgtggggagaccagccttctgctcaaggtggccggactgggttccgccccttccattcatatggagggtcctggagaatccggagttcaattagtgtgtactgccaggggatggtttcctgagccccaggtgtattgggaagatattcgcggagagaagcttctcgccgtgtcagaacaccggatccaggacgaggacggactcttttatgcggaggccactctggttgtacggaatgcttcagcagaatctgtgtcttgtctggtccacaaccctgtgctgacggaggagaagggaagcgtgatatcccttccagaaaagctccagactgagttggccagccttaaagtgaatggtccctcccagccaatcttggtgagggtgggcgaggatatccagttaacatgctatctgagcccgaaagctaacgctcagtccatggaggtgcggtgggatagatcacaccggtatcccgcagttcatgtgtatatggacggagatcacgtcgcaggagaacagatggctgaatatcgaggcaggacagtgttggtcagcgatgcaattgatgaggggaggctgaccctgcaaattctgtctgccaggccctccgacgacggacagtaccgatgtctattcgaaaaggacgacgtgtatcaggaggcttctctggacctgaaggttgtagggttagggtcttcgcccttaatcacggtagagggtcaggaagacggagagatgcaaccaatgtgttcttctgatggatggttcccccagccacacgtgccatggcgggacatggaagggaagacaatcccaagcagcagccaggccctgacacaggggtcccatgggttgtttcatgtgcagacccttttgagggtgaccaacataagtgcagtagatgtaacatgtagtatatccatcccatttctcggcgaggaaaagatcgctaccttcagtctttccggctggtag

SEQ ID NO: 110190 - DNA, 816 bp, synthetic construct
  misc_feature 1..816: note = Description of Artificial Sequence: Synthetic coding sequence
  source 1..816: mol_type = other DNA
atggtagactttcccgggtacaacttaagcggcgctgtggcaagtttcctgttcatcctattgacaatgaagcaaagtgaagacttcagggtcatcgggcctgcccatccaatcttggctggcgtgggtgaagatgcactgctgacctgccagttgttgcctaagcggaccactatgcacgtcgaagtcaggtggtatcggagtgagccctccactccggtcttcgtgcatagagacggcgtggaagtgacggaaatgcagatggaagagtaccgaggctgggtggagtggatcgagaatggtatcgctaaggggaacgtagcattgaagatccataacattcaaccatccgataacgggcagtactggtgccatttccaggacggtaactactgcggtgagacatccctgctgctgaaagttgctgccgtcctcagggacgatattatcgccagtttaaaagttaacgggccaagtcagcccatcctggtgagggttggcgaagacattcagcttacctgttacctctcgccaaaagccaatgctcagtcaatggaggtgagatgggacagatctcatcgctatcccgccgtccatgtatacatggatggagaccatgttgcaggggaacaaatggccgagtatagaggtcgaaccgtgttagtgtcggacgctatagacgagggcaggttgactctgcagattctaagtgcccgaccctctgacgacggacagtaccgctgcctgtttgagaaggacgatgtgtatcaggaggccagcctggacctgaaagtcgtgtgggtcctgcctcactag

SEQ ID NO: 110191 - DNA, 537 bp, synthetic construct
  misc_feature 1..537: note = Description of Artificial Sequence: Synthetic coding sequence
  source 1..537: mol_type = other DNA
atggaagtaagatgggatcgatctcatcggtatcccgccgtgcacgtttacatggacggggaccatgtggccggtgaacagatggctgagtacagaggccgcacggtcctcgttagcgacgctatcgacgagggacgcttgactctccagatcttaagtgctagaccctctgacgacggccagtatcgatgcctgtttgaaaaggatgatgtatatcaggaggcgtcactcgatctgaaggtggtggggctgggtagttccccactcattacagtcgaggggcaagaggacggtgaaatgcaacccatgtgctccagtgatgggtggtttccccagcctcatgtgccctggagggatatggagggcaaaactatccctagcagcagccaagctctaacacaaggcagtcacgggctgttccacgtacagacactattgagggtgaccaacatcagcgccgtcgacgtgacctgctctatctctattccgttccttggtgaagaaaagatagctaccttctccttatcggggtggtag

SEQ ID NO: 110192 - DNA, 738 bp, synthetic construct
  misc_feature 1..738: note = Description of Artificial Sequence: Synthetic coding sequence
  source 1..738: mol_type = other DNA
atggtggactttcccggatacaatttgtctggagccgtcgcctcatttctttttatactgctgacaatgaagcaaagcgagaagttgcagaccgagctggcttccctgaaggtgaatggcccttcacagccgattttagtccgcgtgggtgaggacattcagctcacttgctacttgagcccgaaggcgaacgcacagagcatggaggtgagatgggacagatctcacaggtatcctgcagtgcacgtctacatggacggtgaccatgtggcaggcgaacagatggccgaatacagaggtcgaactgtactagtcagtgacgctatcgacgagggccggttgacacttcagattctgtcagcgagaccttcagacgacggacagtacagatgtctgttcgagaaggatgatgtttatcaggaagcctccctggatctaaaggtggtggggctgggctcctctcccctcatcactgtcgaaggacaggaggacggggaaatgcagccaatgtgctcaagcgatgggtggtttccgcagcctcacgtgccttggcgtgacatggaggggaagactatcccttcaagttctcaagcgttaacacaaggctctcatggccttttccatgtccagacgctcttgcgggttaccaatatttctgcagttgatgtcacctgttcaatttcaattccctttctgggagaagaaaagatcgctaccttcagcctgtccgggtggtag

SEQ ID NO: 110193 - DNA, 738 bp, synthetic construct
  misc_feature 1..738: note = Description of Artificial Sequence: Synthetic coding sequence
  source 1..738: mol_type = other DNA
atggttgactttccaggttacaacctctccggggcagtggcttccttcctgttcatcttgctgaccatgaaacagagcgagaaattacagacggagctggcctcattgaaagtcaacggtccatcgcagcctatactcgtgagggttggcgaggatatacagctgacctgttatctgtccccaaaggctaatgcacaaagcatggaagtgcgctgggaccggtcccatcggtatcccgcggtccatgtttatatggatggggatcacgttgccggtgagcaaatggctgagtaccgtggccgcaccgttctcgtgtccgacgccatcgatgagggtagactgaccctgcagatcttaagcgcccgcccctcagacgacggacagtatcgatgtcttttcgagaaggacgacgtgtatcaagaagcctctctggatttgaaggtcgtgagcctgggttcatccccgctcattacggtggagggccaggaagatggcgagatgcagcccatgtgttcctccgacggctggtttccacagccccacgtcccctggcgggatatggaagggaaaaccatcccttcctcatcccaggctttaacgcagggaagccatggtctttttcatgtccaaactctattgcgcgtgactaatatatctgctgtggacgtaacatgcagtatcagtataccattcctgggagaggaaaagatagccactttttccctgagcggatggtag

SEQ ID NO: 110194 - DNA, 1167 bp, synthetic construct
  misc_feature 1..1167: note = Description of Artificial Sequence: Synthetic coding sequence
  source 1..1167: mol_type = other DNA
atggtggacttccccggctacaacctgtctggggctgtcgcaagcttcctcttcattctgctgacgatgaagcagtcagaagatttccgcgtgatcggccccgctcaccccatcctggcaggtgtgggggaggatgctcttctaacctgtcagctgctgccgaaaagaacaacaatgcacgtcgaagtccgttggtatcggagtgagccttcaactcccgttttcgtgcaccgggatggcgtggaggtcacagagatgcagatggaagagtatcggggctgggtagaatggatcgagaacggcattgcgaaagggaatgttgctcttaaaatccacaatatccagcccagtgacaatggtcaatactggtgtcatttccaggacgggaattattgtggggagacaagcctgctgcttaaggtggcagaaaaacttctggccgtgcttagttccctcaaagtgaatgggccatcacagcccattctggtacgagttggcgaagacatacagctcacatgttacctgtcgcccaaagctaatgcacagagtatggaagtgaggtgggacagatcccaccgctatccagccgtccacgtttacatggatggagaccatgtcgctggggaacagatggctgagtatcgggggaggaccgtactggtgtctgacgcgatagacgagggccgattgactcttcagattctgtcagccagacccagcgatgatgggcaatacagatgcctcttcgagaaggatgacgtctatcaggaggccagcctcgatttaaaggtggtatcactcggtagcagcccactcataacagtcgagggacaagaggatggtgagatgcaaccaatgtgctcttctgacggttggtttcctcagcctcatgtgccttggcgcgacatggaaggcaaaaccattcccagcagttcccaggctttgactcagggcagccatggtctgttccatgtacaaacactgctcagagttaccaatatcagcgcagtggatgtcacgtgttccatttctatcccctttctcggagaagagaaaattgcaactttcagcctgtccgaatctaggatgacttttctgtggaaaactctgctggtgtggggcttactgctggccgttgccgtgggtctaccacgtaagagatcatag

SEQ ID NO: 110195 - DNA, 1368 bp, synthetic construct
  misc_feature 1..1368: note = Description of Artificial Sequence: Synthetic coding sequence
  source 1..1368: mol_type = other DNA
atggtggatttcccaggctacaatctctctggagccgtggcctccttcctctttatcttactgaccatgaagcagtcggaagacttccgtgtaattggcccagcacacccaattctggctggagttggcgaggatgccctgctcacatgtcagctgctccccaaacggacaacgatgcacgtagaagtgagatggtaccgctctgagccaagcacacccgtgttcgtgcatcgcgacggggtggaggtaaccgagatgcaaatggaagagtatcgcgggtgggtggaatggattgaaaacggcatcgccaaaggaaacgtcgcgctcaaaatccataatattcagccatccgataatggacaatattggtgccacttccaggacggcaactactgcggtgaaacttccctactcctcaaggtggcgggcttgggatctgctccatctatccacatggaaggccctggtgagtccggtgtgcagcttgtgtgtactgctcgcggatggtttcctgagcctcaggtatactgggaggacatcaggggtgagaaacttctcgctgtgtccgaacatcggattcaggacaaagatggactgttctacgctgaagcaacactggttgtgcgcaatgcctccgcggaatcggtgtcctgcctggtgcacaaccctgttcttacggaagaaaaaggatccgttataagtctgcctgagaaactgcagactgagttagcaagcctgaaggtgaacgggccgagccaacccatcctggtgagggtgggcgaggatatacagctcacctgctacctttccccgaaggctaatgcgcagagtatggaagtgaggtgggatcggagccacagatatccagcggttcatgtctacatggacggggaccacgtggccggggaacagatggcagagtatcgcggcaggactgttttggtgtcagacgccatagatgaaggccgcttgaccctgcaaatactttctgcccggccatctgatgacgggcagtaccggtgcctgttcgagaaagatgacgtgtaccaggaagcttctctggacctaaaagtcgtcagtcttgggtcatctccactgattactgtcgaaggccaggaagacggggagatgcagcccatgtgctcttcggatgggtggtttcctcagcctcatgtgccttggagggatatggagggtaagacgatcccctcttcttctcaggcactgacccagggctcccacggcctgtttcacgtgcaaaccctgcttagggtaactaacattagtgcggttgacgtgacgtgtagtatatctataccttttttgggtgaggaaaaaatagccactttctccttaagcggatggtag

SEQ ID NO: 110196 - DNA, 1167 bp, synthetic construct
  misc_feature 1..1167: note = Description of Artificial Sequence: Synthetic coding sequence
  source 1..1167: mol_type = other DNA
atggtggatttccccgggtataacctgagcggcgctgtggcatcctttctctttatactgttaacaatgaaacaatcagaggacttccgggtgattggccccgcacatcccatcctggctggagtcggcgaggacgccctgctcacttgtcagctcctgcccaaacgtacaactatgcacgtcgaagtgcgatggtaccggtctgaaccctctactcctgtctttgtgcacagggatggcgttgaggtcacagagatgcaaatggaagagtatcgggggtgggtggaatggattgagaatggcatagccaaagggaacgttgccctgaagattcacaatatccagccctccgacaacggccagtattggtgccacttccaggacggcaattactgtggcgaaacaagtctcctgcttaaggtggccgaaaagcttctggccgtgctctctagcttgaaggttaacggccccagccaaccgatcctcgtgagagtgggcgaagatatacagttgacctgttatctaagtccaaaggctaatgcgcagtctatggaggtccgatgggaccggagccatagataccccgcggtgcatgtgtatatggacggcgaccacgtggccggggagcagatggctgagtaccgcggaagaactgtcctcgtgagtgatgcaattgacgagggccgtcttacactccagattctgagtgcaaggccctcagatgacggccagtaccgttgcctcttcgaaaaggacgatgtgtaccaggaagccagccttgacctgaaagtggtaggtctggggtcaagtccgctgataaccgtggagggacaggaggacggtgaaatgcaacccatgtgttccagcgacggctggtttccccagccccacgttccatggcgggatatggaaggcaagaccatcccttcatccagccaggccctgacccagggctcacatggcctatttcacgtgcagacactgcttagggtgactaatatatcagccgttgatgtcacctgttccatttctatccctttcctgggggaggaaaagatcgcgacattttccctttctgagtcccgcatgactttcctatggaaaaccttgctggtgtgggggctgctgctggcagtggccgtgggattacctcggaaacgctcgtag

SEQ ID NO: 110197 - DNA, 738 bp, synthetic construct
  misc_feature 1..738: note = Description of Artificial Sequence: Synthetic coding sequence
  source 1..738: mol_type = other DNA
atggtggactttccaggctataacctctctggtgctgtggcgtctttcctcttcatccttctcaccatgaagcagtcggatcggctcgatacacctaaagcgagtctcaaggtgaatggcccatcacaacctatactggtgcgcgtgggagaggacattcagctcacatgttacctttcgccaaaagccaatgcccagagcatggaagttcgctgggatagatcccataggtaccccgccgtgcacgtttacatggacggcgaccatgtggcaggtgaacaaatggccgaatatagagggcgcactgtgctcgtgtccgatgctatcgatgaaggcaggctcacccttcagattctctcggccaggccgtctgacgatgggcaatacagatgcttgttcgaaaaggatgacgtataccaggaagctagtttggacctgaaggtcgtggggctcggatctagccccttgataacggtcgaggggcaagaggacggtgaaatgcaacctatgtgcagtagtgacggctggtttcctcaacctcacgtgccctggagagacatggaaggcaagaccattccaagcagctcgcaggcattgacccaaggctcacacggtctcttccatgttcagaccctgctgcgggtgactaatatcagcgccgtagacgtgacatgctctatctccatcccattcttgggggaagaaaagatagccaccttctccctctccggctggtag

SEQ ID NO: 110198 - DNA, 816 bp, synthetic construct
  misc_feature 1..816: note = Description of Artificial Sequence: Synthetic coding sequence
  source 1..816: mol_type = other DNA
atggttgattttcctgggtataatcttagtggcgcagtagctagctttctgtttatcctgctaaccatgaagcaaagcgaggacttccgggttataggacccgcacatccaatacttgccggcgtcggagaggatgccctgcttacatgccagctcctccctaaacggaccaccatgcacgtggaagtgagatggtatcgcagtgaaccgtcgactcccgtgttcgtgcaccgcgacggagtcgaggtgactgagatgcaaatggaagagtatcggggatgggtcgaatggatcgagaatggcattgccaaaggtaacgtcgcgctgaagatccacaacatccaaccctcagataatggtcagtactggtgccactttcaggacggaaactactgtggagagacctccctgctgctaaaagtcgcagcagtactgcgcgatgacatcattgctagcctcaaagtgaacggaccatcccagcctatcttggtccgcgtgggagaagatattcagctgacttgctatctgtccccaaaagcaaatgctcagtcaatggaggttagatgggaccgctctcataggtatcctgcagtgcacgtatacatggacggcgatcacgtagccggcgagcagatggccgaatatagaggccggacggttctggttagcgacgctatagacgaaggacggctcaccttgcagatcctctcagctcgcccctctgacgacggccagtatcgctgtctgttcgaaaaggatgacgtctaccaggaagcctccttggatctgaaagtcgtgtgggtacttcctcattag

SEQ ID NO: 110199 - DNA, 1167 bp, synthetic construct
  misc_feature 1..1167: note = Description of Artificial Sequence: Synthetic coding sequence
  source 1..1167: mol_type = other DNA
atggtggattttcccgggtataacctctctggggctgtcgccagctttttgttcatattacttacaatgaagcagtcagaggactttcgagtgatcgggccagctcaccccattcttgctggtgtgggtgaagacgcccttctgacgtgccaactgttgccgaagcgaacaaccatgcatgtggaggtgagatggtaccgttccgaaccatcaactcctgtctttgttcatcgggatggcgtcgaagttaccgagatgcagatggaggagtatcggggctgggtggagtggattgaaaatgggatcgcaaagggaaacgttgccttaaagattcataacatccaaccttcagacaacgggcagtattggtgtcacttccaggacggcaattattgcggcgagacatcattgttactcaaagtggcagaaaaactgctagccgttctctcctctcttaaggtaaacggaccctcccagcccatcctggtgcgtgttggtgaagacattcagttgacttgttatttgtcccctaaagcaaacgcccagtccatggaagtccgttgggatcggagtcacagataccctgcggtgcacgtctatatggatggcgatcacgtggcaggagaacaaatggctgagtatcggggcaggacggtcctagtgagtgacgcgattgacgagggccggctcacactccagatacttagtgctaggccaagtgatgacggacaatatcgttgtctgtttgagaaagatgacgtttatcaggaagcttcattagacctgaaggtcgtagggctgggctcaagccctctcatcaccgtggagggccaggaagacggggagatgcagcccatgtgctcctccgacggctggttcccccaaccccatgtaccttggagggacatggagggcaaaaccatccctagttcttcccaggccctgacgcagggcagccacggcttgttccacgtgcagaccttgcttcgagtgaccaatatctctgctgtcgacgtgacttgcagcatttccatcccattcctaggggaggagaaaatcgcaaccttttcactaagcgaatcacggatgacattcctgtggaagaccctactggtttgggggctgctgctggctgtcgctgtcggtctgcccagaaagcggagctag

SEQ ID NO: 110200 - DNA, 1401 bp, synthetic construct
  misc_feature 1..1401: note = Description of Artificial Sequence: Synthetic coding sequence
  source 1..1401: mol_type = other DNA
atggcattcgtcttgatcctagtgctgagcttctacgaattagttagcgggcaatggcaggtgacaggtccaggcaaattcgtgcaggcactcgtgggtgaggatgctgtattcagttgttccctattccccgaaacaagcgctgaggccatggaggtgcggttttttagaaatcagtttcacgccgtggtccacctatacagggacggggaggattgggagtctaaacagatgccgcagtataggggcaggactgagtttgttaaggactccattgccggcggtagagtctcactgaggttgaaaaacatcactcctagtgacatcggactatatggctgctggttctcgagtcagatatacgatgaggaagcaacatgggagctccgggtggccgcactcggctctcttcccctcattagtatagtagggtacgtggacgggggaatccaactgttgtgccttagttctggttggttccctcagcccacggccaagtggaaggggccacagggacaagacctctcatcagatagcagagccaacgctgatggatactctctgtatgacgtggaaatctcaattatcgtacaggagaatgccggctctatcctatgtagcattcatctcgccgagcagtcgcatgaagtagagtcaaaagtcttgattggagagaccttctttcagcccagtccatggcggctcgccagtatccttttggggcttttgtgtggggcactgtgcggcgttgtgatgggcatgataatcgtcttctttaaatcaaagggaaagatacaagcggagctcgactggcgccggaagcacgggcaagccgagttacgcgacgcgcgcaagcacgcagtcgaagtgaccctcgaccccgaaactgcacacccaaagctgtgtgtctccgacctgaagactgtcacacatcggaaagcccctcaagaggtgcctcactctgagaaacggttcacccgcaagtcagtggtcgcctctcagggatttcaagcaggtaaacactattgggaagtagatgttggacaaaacgtgggttggtatgtcggggtctgtagggacgatgttgatcgcggcaaaaacaatgttacgctgtccccgaataatgggtattgggttctcaggctgactacagagcatctatattttacctttaatccgcacttcatatccctcccgccgtcaactcccccaacacgagtaggagtgttcctggactatgagggaggcaccatttctttcttcaacacgaacgaccagagcttaatttataccctcctgacatgccagttcgagggtctgctgcggccatatatccagcacgcaatgtatgacgaggaaaagggcactcctatatttatttgtccagtatcctggggttag

SEQ ID NO: 110201 - DNA, 1299 bp, synthetic construct
  misc_feature 1..1299: note = Description of Artificial Sequence: Synthetic coding sequence
  source 1..1299: mol_type = other DNA
atggcatttgttctgatccttgtactatcattctacgaactggtgagcggacaatggcaggttactggccccgggaaatttgtacaggccctggtcggcgaggacgcagttttttcatgctctctttttccagagacgtccgccgaagctatggaggtgcgctttttccgtaatcagttccacgccgttgttcatctctatcgcgacggcgaggattgggaatccaaacagatgcctcagtatagaggtcgaacagagttcgtcaaggatagcatcgccgggggccgagtcagtctccgactcaaaaatattacaccctctgacattggcctctatggctgctggttctcgagtcaaatatatgatgaagaggctacctgggaactgcgggtcgccgcactagggtcgctccctcttatcagtattgtgggctatgttgacggcggaatccagctgctgtgcttgtcgagcgtccaaccatccccctggcgcctggcctcaatcctgctgggactgctgtgcggcgctctgtgtggggtcgtcatgggcatgatcattgtattctttaaaagtaaaggtaagatccaagctgagctggggatgtgccacgttctttcccttccacacatggtgctgcctggcccgagcctgattcattctctaagcctctggaccactctggcagccggctggacggggagcacagactggcgcaggaagcatggacaagccgagcttcgggacgcgcgtaagcatgcggtagaagtcactctggacccggagactgctcaccctaagctgtgcgtctcagatctgaaaaccgtgacacatcgaaaggccccacaggaagtgccgcactccgagaagcgattcaccagaaaaagcgtggttgcatcacaggggttccaagcaggcaagcattactgggaggtggacgtgggtcagaacgtggggtggtatgtgggcgtctgtcgggatgatgttgacaggggaaagaacaacgtgaccctctcgcccaacaacggatactgggtgctccggttgactacagagcatctgtactttaccttcaacccacatttcataagtctcccccctagcacacctcctacgcgcgtgggcgtcttcttagattatgaaggcggtactatttcatttttcaacactaacgaccagagtctgatctatactttgctgacttgtcagttcgaggggctgttgaggccatatatccagcacgctatgtacgacgaggagaagggtacacccattttcatttgcccagtgtcctggggctag

SEQ ID NO: 110202 - DNA, 1809 bp, synthetic construct
  misc_feature 1..1809: note = Description of Artificial Sequence: Synthetic coding sequence
  source 1..1809: mol_type = other DNA
atgcacagtaaggtcactatcatctgtatacggtttcttttctggttcttgctactgtgcatgcttattggcaagtcccatacagaagatgacattataatcgctaccaaaaatggtaaggtccgaggaatgaatctgaccgtcttcggagggacggtgaccgcctttctcggaatcccatatgctcagccccctttaggaaggctgagatttaagaagccccagtccctcactaagtggagcgatatttggaatgcaaccaaatacgccaactcatgttgtcagaacatcgatcagtcatttcccgggttccacggaagtgaaatgtggaatccgaacaccgatttgtccgaagactgcttgtacctgaacgtgtggatcccggcgcccaaacccaagaacgcaacagtacttatttggatatacggcggtggcttccagaccggaacctcctccctgcatgtgtacgatgggaagttcctcgcacgggtggagagggtcatagtggtgtctatgaattaccgagtgggcgctcttggattcctcgctctgcccggtaaccctgaggctccgggaaatatgggcctctttgaccagcaactagctctgcagtgggttcagaagaacatcgctgctttcggcggcaatccaaagtctgtgaccctgttcggagagagcgctggagcagcatctgtcagcctccacctgctgtcccccggatcgcatagtctgtttactcgggctatcttgcagtctgggtcctttaacgcgccctgggcagtgacttccttgtacgaagccagaaaccgaacgctgaacctggccaagttgactggttgttcccgggaaaacgagactgaaattatcaagtgcctgcgcaacaaggatccacaggagattctcctcaacgaagccttcgtcgtaccctacggaacgccactttccgtgaactttggaccaaccgttgacggagacttccttacagacatgcctgacatactgttggagctcggccaattcaaaaaaacacaaattctagtaggcgtcaacaaagacgagggcacagcatttctggtttatggggcacctgggtttagcaaggataataactcaatcatcacaaggaaagaatttcaggaaggactcaaaattttttttcccggcgtgtcggagtttgggaaagaatcaatactcttccactataccgactgggttgacgatcaacggcctgagaattaccgagaagccctcggtgacgtggttggagactacaatttcatttgccccgccctagaatttacaaagaaatttagcgaatggggtaataacgcgtttttctattatttcgagcaccggtcaagcaaattgccttggccggaatggatgggcgttatgcacgggtacgagattgaattcgttttcggattgcctctggagaggcgcgataattacacgaaggcggaagaaatattgagtagatctatcgtcaagcgatgggctaactttgctaagtatggcaatcccaatgaaacacagaataatagcacttcatggcctgtgttcaagtctactgaacagaagtacctcacactcaatacagagagcactcgcataatgaccaagttgcgggctcagcagtgtaggttttggaccagcttttttcccaaggtactggagatgacaggaaacattgatgaagcggagtgggaatggaaggccgggttccatcgctggaacaattatatgatggactggaagaaccagtttaacgactacacatctaaaaaggagtcttgcgtcggcctgtag

SEQ ID NO: 110203 - DNA, 399 bp, synthetic construct
  misc_feature 1..399: note = Description of Artificial Sequence: Synthetic coding sequence
  source 1..399: mol_type = other DNA
gcggtacagtttaccggttggtcttcctcttgcattctccacttcccagaagtgctccacgactttcattcactgcagactctcccatctttgttgcagcgaattggaaacccaaacgaaacacaaaataattcaaccagctggccagttttcaaatctacagaacagaaatatctgaccctgaacaccgagtccactcgtatcatgaccaaactgcgtgcgcaacagtgccgattctggacatcattttttccaaaagtactggagatgaccgggaacatcgatgaggccgagtgggaatggaaagcagggtttcatcgctggaacaactacatgatggactggaagaatcaattcaatgattacacttccaagaaagagtcgtgcgtcggactctag

SEQ ID NO: 110204 - DNA, 195 bp, synthetic construct
  misc_feature 1..195: note = Description of Artificial Sequence: Synthetic coding sequence
  source 1..195: mol_type = other DNA
atgaccaaactcagagctcaacagtgccggttctggacgagctttttccccaaggtgctggagatgacaggcaacattgacgaagccgaatgggagtggaaggcggggttccaccgatggaacaattatatgatggactggaagaatcagtttaatgattatacttccaaaaaggagtcttgcgtggggctgtag

SEQ ID NO: 110205 - DNA, 1431 bp, synthetic construct
  misc_feature 1..1431: note = Description of Artificial Sequence: Synthetic coding sequence
  source 1..1431: mol_type = other DNA
atggctagtcggatagggctgcggatgcagctcatgcgggaacaggcccagcaggaggaacagcgcgaacgcatgcagcagcaggctgtcatgcactacatgcagcagcagcagcaacagcaacagcagcaactgggtgggccccctacacccgcgataaacacaccagtgcacttccaatcgcctccccctgtcccaggcgaggtcctcaaggtccagagctatctcgagaaccccaccagctatcatttgcagcagagtcagcaccagaaagtcagagagtacctgtcagaaacctatggaaacaagtttgccgcacatatctcgcccgcccaaggctctccaaagcctccccccgccgcctctcccggcgtgagggctgggcacgtactcagttcaagtgcaggcaactcggctcctaactcccccatggccatgcttcatatcggtagtaatcccgaacgcgagctggatgacgtgatagacaatatcatgaggctggatgatgtgctggggtacataaatcccgaaatgcagatgcccaacacgctccctctctcttcctcccacttgaacgtgtactctagcgatccacaggtgacagcttccctggtcggcgtgaccagtagcagctgcccggcagatttgacacagaaacgggaactgaccgacgccgaatcccgggccttggctaaagaaagacagaagaaagacaatcacaacctaattgaaaggcggcgaaggtttaacattaacgaccggataaaggagttggggatgcttatccccaaggcaaacgatctggacgtccggtggaataagggtaccattctcaaagcatccgtggattatatcagaagaatgcagaaggacttacagaagagccgcgagctggaaaaccattcacgccgcctcgaaatgacgaataagcaactgtggcttagaatccaggaactggaaatgcaagcgagggtccacgggcttcccacaacatccccgagtgggatgaatatggctgagcttgctcagcaggtagttaagcaggagctcccctccgaggagggcccgggagaggcactgatgctgggcgctgaggtgcctgaccccgagcctctgccagccctgcctcctcaggctcccctgcctctccctacacagccaccgagcccttttcatcacttagattttagccactctctctcatttggcggacgcgaggacgaaggaccacccggttacccagagcccctcgcgccaggccatggcagcccattcccatctttgtctaaaaaggatcttgatctgatgctcctggatgatagccttctccctcttgcaagtgatcccctcctgtcaaccatgtctcccgaagcttccaaagcaagcagccgtaggagcagtttttctatggaggaaggcgacgttctctag

SEQ ID NO: 110206 - DNA, 426 bp, synthetic construct
  misc_feature 1..426: note = Description of Artificial Sequence: Synthetic coding sequence
  source 1..426: mol_type = other DNA
atggccggtgaggagatcaatgaggactatcccgtagagattcacgaatacctgtccgcttttgagaatagcataggcgccgtcgatgaaatgctgaagactatgatgtcagttagccgcaatgagctgctgcaaaagttggaccctttggagcaggccaaagtcgacttggtatccgcatacaccctcaattctatgttttgggtgtacctggccacgcagggggtgaacccaaaagagcatcctgtgaaacaggaactggagcgaattcgagtctatatgaatagagtgaaggaaatcacagacaagaagaaagcgggaaagctggatagaggcgccgcatcaagattcgtgaagaatgcgctctgggagccgaaatccaagaatgcatctaaagtggctaacaaaggtaaaagcaagagctag

SEQ ID NO: 110207 - DNA, 543 bp, synthetic construct
  misc_feature 1..543: note = Description of Artificial Sequence: Synthetic coding sequence
  source 1..543: mol_type = other DNA
atgcccagcccgagcgtgtcaacatccgcagccagcgtgcttgaaggggtttgtggacgagcaagatccacataccggacgccagaagagggcgaggaacagagttggagcgccatcatggctggcgaggagattaacgaagactatccggtggaaatccacgaatatctgagcgctttcgagaacagcattggcgctgttgacgaaatgctgaagactatgatgagcgtaagtcgaaatgaacttctgcagaagctggatccgttagagcaggcaaaagtagacttagtctcagcctacaccctcaattctatgttttgggtgtacttggcgacccagggcgtcaatccgaaggagcatccagtgaagcaggagctggagaggatccgcgtgtacatgaatcgtgtgaaggagatcacagataaaaaaaaggctgggaaactcgatcggggcgccgcgagccggtttgtcaaaaatgcgctgtgggagccaaaaagtaaaaacgctagcaaagtggccaacaaaggcaagagtaaatcctag

SEQ ID NO: 110208 - DNA, 426 bp, synthetic construct
  misc_feature 1..426: note = Description of Artificial Sequence: Synthetic coding sequence
  source 1..426: mol_type = other DNA
atggcaggcgaagagataaacgaggattatcccgttgagatccatgaatatctcagcgcattcgaaaattctatcggtgccgtggacgagatgttaaaaaccatgatgagtgtgtcacggaatgagctgctgcagaagctggatcccttggaacaggcaaaggtggatctggtatccgcctacactctgaacagcatgttttgggtatacctagctactcagggagtaaatcctaaagaacacccggtcaaacaggaattggagcgcatccgtgtgtatatgaatcgtgtgaaggagataactgacaaaaaaaaggccgggaagttggataggggcgccgctagccgtttcgttaagaacgccctatgggagccgaaatccaagaatgcctctaaagtcgctaataaaggaaagtccaagtcctag

SEQ ID NO: 110209 - DNA, 426 bp, synthetic construct
  misc_feature 1..426: note = Description of Artificial Sequence: Synthetic coding sequence
  source 1..426: mol_type = other DNA
atggcgggcgaggagatcaacgaagattatcccgtcgagatccacgagtacctgtctgcttttgaaaatagcattggcgctgtggatgagatgctgaagaccatgatgagtgtatccaggaatgagctcctgcagaaactagatcccctagaacaggcgaaggtggacctggtgtctgcgtatacacttaattctatgttttgggtttatctcgctactcagggggtcaatcccaaggagcaccccgtgaaacaggaattggaaagaatacgagtctacatgaaccgagtgaaggaaattacggacaagaaaaaggccgggaaactggatagaggcgccgcgagcaggtttgtgaaaaacgcactgtgggagcccaagtccaaaaacgcctctaaggtggctaataagggtaagtccaagtcatag

SEQ ID NO: 110210 - DNA, 957 bp, synthetic construct
  misc_feature 1..957: note = Description of Artificial Sequence: Synthetic coding sequence
  source 1..957: mol_type = other DNA
atgctgagtgaaagttcatcttttctgaaaggcgtcatgctggggagcattttctgcgctctcatcacaatgctggggcatattcgaatcgggcacggcaaccgcatgcaccaccatgaacaccaccatctccaagctcccaataaggaagacatcctgaaaatttccgaagatgagcggatggaactaagtaaatcttttagggtgtactgtatcatcttagtcaagccgaaggacgtctcactgtgggcggctgtgaaggaaacatggaccaaacattgcgataaggccgaatttttttcatctgagaacgtgaaagtctttgagtcaatcaacatggacacaaatgatatgtggctgatgatgcgcaaggcatataagtatgcatttgataaatatagagaccaatacaactggttcttcttagcaaggccgacgacgttcgccattatagagaatctgaagtactttctgctgaagaaggacccatctcagcccttctatctgggacatactataaagtcaggcgacctcgagtatgttggcatggagggcggcatagtgctgtcagtggaatcaatgaaacggttgaattcgctactcaacatccccgagaaatgtcccgagcagggaggaatgatttggaagatttcagaggataagcagctagcagtgtgtctcaagtacgccggcgtcttcgcagagaacgcagaagacgcagatggcaaagacgtattcaacacaaagagcgtaggactgagtatcaaggaagccatgacctaccaccccaaccaggtggtagagggctgttgttcagacatggccgtgacattcaatggcctgacaccaaaccagatgcacgtgatgatgtacggcgtgtacagattgcgcgcttttggacatatattcaacgacgcacttgtgtttctgccacccaatggatccgacaacgattag

SEQ ID NO: 110211 - DNA, 957 bp, synthetic construct
  misc_feature 1..957: note = Description of Artificial Sequence: Synthetic coding sequence
  source 1..957: mol_type = other DNA
atgctttctgagtcatcatctttcttgaagggagtcatgctgggcagtatattctgcgccttgataacaatgctgggccatatccggattggacatggcaaccgtatgcaccaccatgaacatcatcacctgcaggccccaaacaaagaggatatcctgaagatttctgaggacgagcggatggagctttcaaaaagtttcagggtgtactgtattattctggtaaaaccaaaggacgtatcgctttgggcagccgtgaaagaaacctggacgaaacactgcgataaagccgaattttttagttctgagaacgtcaaagtgtttgaaagcatcaacatggacaccaatgacatgtggctgatgatgcgaaaagcctacaagtatgcattcgacaagtatcgcgaccagtacaattggttttttttagccagacctacaactttcgcgattattgaaaacctgaaatatttcctacttaaaaaggacccttctcaaccattctatctgggacacaccattaagtcaggagacctcgaatatgtcgggatggagggaggaatcgtcctcagcgtggagtctatgaagaggcttaattctctgcttaacatccctgaaaaatgccctgaacagggcgggatgatttggaaaatttctgaggataagcaactggctgtgtgtctgaaatacgctggtgtctttgctgagaacgctgaggatgctgacggtaaagacgttttcaataccaagtccgttggcctttcaatcaaagaggctatgacttatcaccccaaccaggtggtggagggctgttgctcagacatggctgtaacattcaatggactgacgcccaatcagatgcacgtgatgatgtacggtgtttacagacttagggctttcgggcatattttcaacgacgccctggtcttccttccaccaaacgggagtgacaacgactag

SEQ ID NO: 110212 - DNA, 732 bp, synthetic construct
  misc_feature 1..732: note = Description of Artificial Sequence: Synthetic coding sequence
  source 1..732: mol_type = other DNA
atgagacctttattggtactgctcctcctcggcctcgcagcaggcagccctcctcttgatgacaacaagatcccttctctgtgtccgggccaccctggcctgcccgggacccccgggcatcatggatctcaaggactgcccggacgagatggcagagatggaagggatggcgccccgggagctccaggggaaaagggggaaggcggaaggcctggacttcccgggccacggggcgaccctggcccccggggagaggctggaccagccggaccgaccgggccagccggcgagtgttccgtcccccctcgttcagctttttctgctaaacgcagtgagtcccgtgtgccaccacccagcgacgctccattaccgtttgacagagtcctggtgaacgagcagggacattatgacgccgtcaccggtaaattcacatgccaagtgccaggagtatactacttcgctgtgcatgcaaccgtgtacagagctagtctgcagtttgatctcgtgaagaatggcgagagtatagcctcttttttccagttcttcggtggatggccaaaacctgcttccctttccgggggcgctatggttaggttggagccagaggaccaagtgtgggtccaggtgggagtgggggattatatcgggatttatgccagtatcaagactgactctacctttagtggcttccttgtgtattccgactggcattcaagtcccgtctttgcgtag

SEQ ID NO: 110213 - DNA, 732 bp, synthetic construct
  misc_feature 1..732: note = Description of Artificial Sequence: Synthetic coding sequence
  source 1..732: mol_type = other DNA
atgcgccctttactcgtactcctcctcctggggctggccgccggcagccctccactagacgacaacaagatcccatccctgtgcccagggcaccccggtctgcccggaactcccggccaccatggcagtcaagggctaccagggcgggacggtcgagatggcagggacggagcccctggagcaccaggagagaaaggcgaggggggaaggcccggactgcccggcccccgtggtgatcctggcccccggggtgaagcaggaccagccgggcccacgggtcccgctggggagtgttctgtacctcccagatctgccttttcagctaaacgctctgaatctcgcgtgccccctccatccgacgccccattgccatttgacagggtgttggtcaatgagcaagggcattacgacgccgtgactggcaagttcacttgccaagtgccaggcgtctattactttgcagtccatgcaacggtctaccgggcgagtctgcagttcgatctggtgaagaatggcgaatccattgcttctttcttccagttttttggcggatggccaaaacccgcctccctctctggtggcgcgatggtgagacttgagcctgaagatcaggtttgggtgcaggtgggcgttggtgactacataggaatttacgcttcaattaaaaccgatagcacgttcagtgggtttctggtgtactcggactggcactcaagtcccgtgttcgcttag

SEQ ID NO: 110214 - DNA, 759 bp, synthetic construct
  misc_feature 1..759: note = Description of Artificial Sequence: Synthetic coding sequence
  source 1..759: mol_type = other DNA
atggccgcccccgctttgctgcttcttgccttgttgctccctgtcggagcatggccaggcctcccgcgccgaccatgtgtgcactgctgtagaccagcctggcccccaggaccttatgccagggtctccgacagagacctctggaggggggatctgtggagaggcctgcccagagtaagacccaccattgacattgagattttaaagggcgaaaaaggcgaggcgggcgtgaggggccgcgccggccggtcagggaaagaagggccgccaggggcacgagggctgcagggtcggcgcggtcaaaaaggtcaagtgggccctccaggcgccgcttgtagacgcgcttatgcggctttctctgtgggcaggcgcgagggattgcactccagcgatcactttcaggccgtgcctttcgacaccgagttggtcaatcttgacggtgcgttcgaccttgcagccggaagattcctgtgcacggtgccgggagtgtactttttgtcgctcaatgtccacacatggaattacaaggagacctatcttcatattatgttgaaccgcaggccagctgccgtgctgtatgctcagcccagcgagagatccgtgatgcaagctcagtcgttgatgctcctgctagccgctggggatgccgtttgggttaggatgttccaacgggatcgggataacgcaatatatggcgagcacggcgatctctacatcaccttctctggccaccttgtcaaaccagccgctgaactttag

SEQ ID NO: 110215 - DNA, 1002 bp, synthetic construct
  misc_feature 1..1002: note = Description of Artificial Sequence: Synthetic coding sequence
  source 1..1002: mol_type = other DNA
atgcggatttggtggttgcttctggctattgagatttgtaccggcaatatcaatagccaggatacctgtcggcagggccacccaggaattccaggaaacccggggcacaacggactgccgggcagagatggtagggacggagctaagggtgacaagggcgacgcaggggagcccgggagacccggatccccaggtaaggacggaacgagcggtgagaagggagagcggggggcagacgggaaggtcgaggccaaaggcatcaaaggtgaccagggcagccgaggcagtcccgggaagcacggccctaagggtctcgccggaccaatgggagaaaaggggctgcggggagagacagggccacaggggcaaaagggaaacaaaggggacgttggcccgaccggacctgagggtccacgtgggaacatcgggccattggggcctaccggtctgccaggtccaatgggcccaattgggaaacccggtcctaagggtgaagctggaccaactggcccgcagggagaacccggcgtccggggaatcagaggatggaagggagacaggggagaaaaaggaaaaattggagaaacgttagtgctacctaagtcagccttcaccgtgggtttaaccgtcctctcaaaattcccatcgtccgacatgccaataaagttcgacaaaatcctctataacgaatttaaccactacgacaccgctgcaggaaagttcacttgtcatatagcaggtgtgtattatttcacctaccatattacggtgttctctcgaaacgtacaggtgagcctcgtcaagaatggggtcaaaattcttcacaccaaagatgcatacatgtcaagcgaggaccaggcatcagggggcatcgtcctacaacttaagctcggagatgaggtttggctacaggtaaccggcggagagcgttttaacggcttgtttgccgatgaggatgatgatactacgtttacggggttcctcctgttcagcagcccttag

SEQ ID NO: 110216 - DNA, 1002 bp, synthetic construct
  misc_feature 1..1002: note = Description of Artificial Sequence: Synthetic coding sequence
  source 1..1002: mol_type = other DNA
atgcgtatctggtggttacttctcgctatcgagatctgcactgggaacataaactcacaggatacgtgtcgacaagggcatcctggcatccctggaaatccagggcataatggtttaccaggcagggacggcagagacggagctaagggcgataagggagacgcaggcgaacctgggcgccccggtagtcccggaaaggacggaacttctggtgagaaaggcgaaaggggcgccgacggcaaggttgaggccaaggggatcaaaggcgaccaaggtagccgcggttcgccaggaaaacatggacccaaaggcctggctggccctatgggagagaaagggttaagaggggaaactgggcctcagggtcagaagggaaacaagggagacgtgggtcccactggtcccgagggaccccgcggcaatatcggaccattgggcccaacaggcctgcccggcccaatgggacctatcggcaagccaggccccaagggcgaagcagggccaactggtcctcagggggagccaggagtccggggaatcagggggtggaagggagatagaggcgaaaaagggaaaatcggagaaaccctggtgctgccgaagagtgcttttaccgtgggcctaaccgtcctgtctaagtttccctcaagcgatatgcctatcaaatttgacaagatactgtacaacgagtttaatcactatgatacagccgccggaaagttcacctgccacattgccggtgtatattactttacgtaccatattacagtgttctccagaaatgtgcaggtgagtttggtgaagaatggcgtgaaaattctgcatacaaaggatgcctatatgtcctctgaagatcaggccagcggaggcattgtgctgcagttgaaactaggggacgaggtgtggctgcaggtaacaggtggagaaagatttaatggtctcttcgccgacgaagacgacgatactacctttacaggattcctcctattctcctccccctag

SEQ ID NO: 110217 - DNA, 300 bp, synthetic construct
  misc_feature 1..300: note = Description of Artificial Sequence: Synthetic coding sequence
  source 1..300: mol_type = other DNA
atgaggatctggtggttgctgcttgctatagagatctgtacagggaatatcaactcacaagatacttgccgccagggccatcctggcatccctggcaacccaggccataatggcttaccaggacgcgacgggcgtgatggcgcaaaaggggataaaggtgatgctggcgagcccggttgcccagggtcccctggcaaggacggcacaagtggcgaaaaaggagagcgcggcgctgatggcaaggtagaggccaagggtattaagggaatgttccgctgcctctggagcaaaacagaatag

SEQ ID NO: 110218 - DNA, 1002 bp, synthetic construct
  misc_feature 1..1002: note = Description of Artificial Sequence: Synthetic coding sequence
  source 1..1002: mol_type = other DNA
atgaggatctggtggctcttgctcgcaattgaaatctgtaccggcaatatcaacagtcaagacacatgcagacagggacaccctggtattccaggcaatcctggacataacggactgcctgggcgggacgggagagatggcgccaaaggcgacaaaggggacgctggagagccgggatgtccaggatccccgggtaaggatggaacgtctggcgagaagggcgaacggggtgccgatggcaaagttgaagcaaaggggatcaagggcgatcagggctcccgagggtctccaggcaagcatggccctaagggcttggctgggcccatgggggagaagggtctaaggggcgagaccggcccacagggccaaaaaggcaataaaggcgatgtcggacccaccgggcccgagggtccaaggggaaacattggtccactgggaccgaccggcctgccagggccaatgggtcccatcgggaagccaggccctaagggagaggccggcccaacgggaccccaaggggaaccaggagtcagagggattcggggatggaaaggagatcgtggagagaaagggaaaattggagagactctagtactacctaaatcagccttcactgtcggcttgacggtgttaagcaaattcccctcttccgacgtgcctataaaatttgacaaaattttatacaacgagttcaaccattatgatacagcggtggggaagtttacttgtcatatcgcgggtgtgtactacttcacttatcacatcaccgttttttctcggaatgtgcaagtctccctcgtgaagaatggcgtgaagattttacacacgcgcgatgcatacgtgagctccgaagatcaagcttccgggtctattgtactgcaactcaagttgggcgacgagatgtggctacaagtgacgggcggcgaaagattcaatggactctttgctgatgaggacgacgatactacattcactgggttccttctcttctcttctcagtag

SEQ ID NO: 110219 - DNA, 1002 bp, synthetic construct
  misc_feature 1..1002: note = Description of Artificial Sequence: Synthetic coding sequence
  source 1..1002: mol_type = other DNA
atgaggatctggtggcttctgctcgcaatcgaaatttgcactggaaacattaatagtcaagatacttgccgccagggccatcccggaattcctggcaaccccgggcataacggcttaccaggtagggatggcagggatggtgcaaaaggcgataagggagatgccggcgaacctggttgccctgggtctcctgggaaagatggaaccagcggtgagaaaggtgagcggggggccgacggaaaggtggaggccaaaggtatcaaaggcgatcaagggtctcgcggtagccctggcaagcatggaccaaagggcctggcagggcccatgggggagaagggtcttcgaggggaaacaggcccacagggtcagaagggcaacaaaggggacgtgggccccacagggccagaagggccgagagggaacattgggcctttaggaccaacagggctgcccggccccatgggtcctattggcaagccaggccccaaaggcgaggctggccctaccggaccccagggtgagccaggcgtgcggggcatacggggctggaaaggcgaccggggcgaaaaaggaaagatcggggaaactcttgtactgccaaagtcagcttttacggtgggcctgaccgtgctgagcaaattcccaagttccgatgttccgatcaagttcgacaaaattctctataatgagttcaatcactacgacaccgccgtgggcaaatttacatgtcacatagctggggtttattacttcacataccatattaccgtgtttagtcgcaacgtccaggtaagtttggtgaagaatggggtgaaaatattacacacccgtgatgcctatgtgtctagtgaggatcaggcctccgggagcattgtgctgcaacttaagttaggcgatgaaatgtggctccaagtgacaggtggagagcgtttcaatggactgtttgccgacgaagacgacgacacgacgtttactggattcctgctcttttcgagccaatag

SEQ ID NO: 110220 - DNA, 150 bp, synthetic construct
  misc_feature 1..150: note = Description of Artificial Sequence: Synthetic coding sequence
  source 1..150: mol_type = other DNA
gttgggcccactgggcccgaagggccgaggggaaacatcggtccactggggcccactggcttgcccggtccgatggggccgattggtaagccaggacctaagggagaagcaggccctactgggccccaggtgtttcccttctgcatctag

SEQ ID NO: 110221 - DNA, 1110 bp, synthetic construct
  misc_feature 1..1110: note = Description of Artificial Sequence: Synthetic coding sequence
  source 1..1110: mol_type = other DNA
atgtggtgtctggagagactgaggttagggcctgaatgcctgagacgatccggagattggctcctccccggccgggcccgcggcgcgaaaagcaggaccaccgccgcctgtgctaatgtcctgacccccgatcgaataccagaattctgcattccgccgcggctgatgccaaggttggcactggcagcacttcgcaatagctgggtagaggaagctgggatggacgagggagctggcagaaccgactgggacccaaggtctcaggccgctctttccctaccacacttgcctagggtccggaccgcttatgggttctgcgctctgctggagtctcctcatacaaggagaaaggagtccctcctgctcggcggaccacccgccccacgacctcgcgctcacacatacggcgggggaggcggccctgacgcattgctcggcaccctcagggttccccgagccccaggccccgctactccggctgcccccgggtgtccgcgtccgccgcaggacgcccttgcacggagacctaggggctgtcggctcctgcgtgtgcccgatggtctcttgtcaagagcactgcgcgccgggaggagcagacgtctaacccgggtgcgttcagtttccagcggcaacgaggataaagagcgccgtgcgggatctcagtcgcctgctagggcccctagcaccagtcctccaagctctcgagtgccatttccagaaaggctggaggcggagggaacagtcgcacttggcagggcaggcgatgccctaaggctcgctgcagagtactgtcctgggaccggaagacttagactgaggctcttgcgggccgagtctcccgcagggggcgctcctggcccaagagccgtgtcctgtagactatctctagtcctgaggcccccagggaccgctctcagacagtgttcaaccgttgtgggtaggtccagaaaagcctcattcgatcaggacttttgttttgatgggctcagcgaggacgaggtgcgaaggctcgcggttagagtgaaagctagggatgaggggcgagggcgggagcgcggtcgactgctgggtcagggtgagcttagtctcggggcgttgttgttactgtag

SEQ ID NO: 110222 - DNA, 1095 bp, synthetic construct
  misc_feature 1..1095: note = Description of Artificial Sequence: Synthetic coding sequence
  source 1..1095: mol_type = other DNA
atgcgattattagaaaagctctgtagctcagccgccggctcaagcgcccccaaaccagcctttgccaaggtgcttactcctaatcgcatcccagaattctgcattccaccccggcttccggctccttgcaccctcgaatcacctatccgagccgcagcggtccctcgccggtgcgcagcagagtcagatctctggccaagagccgccgacgaagatgccggccgcaccgattgggacccacgttctcaggccgctcttagtctgcctcaccttccacgcgtccggactacctatggtttttgcgccctgttagagagtccacacaccagacgcaaggagagcttgctgttgggaggtcccccagctcctagaccacgggctcacagctgcggtggaggcgggggacccgatgctccgttgggcacactctgtggtcctagaggcccgggcccagctaccccagcagctccggggggcccacgacttccacaagacgccttggccgccggcccccgtcgctgtaggttgctgcgggtgccagacggacttctcagcagggccttacgagctgggaggtctagaaggctagctagagttcggtcagtaagttccggtaacgaggatgaagaaagaagagccggcagcgaatctccagctcgagcgccaagtagttcgcccctgagcagccgtgcacctctgcctgagcgactcgaagcgaaagggacagtggctttgggaagggctggggatgccctccgactggccgcggagtattgtccggggacgcggagattgcggctccgccttctcagagccgagtctctgttcggcggcgcccctgggcctcgtgcagtccgctgtaggctgagcctcgtgctcaggcccccgggtaccgctcggtggcagtgtagcgccgtggtcgggcgctctagaaaagctagtttcgatcaagacttctgcttcgatggcctgtcagaagacgaagtccggaggctggccgtcagggttaaggcgcgagatgagggcagaggtcgggacagagggagactgctgggtcaaggcgagctcagtttgggggcactcctactgctttag

SEQ ID NO: 110223 - DNA, 1266 bp, synthetic construct
  misc_feature 1..1266: note = Description of Artificial Sequence: Synthetic coding sequence
  source 1..1266: mol_type = other DNA
atgagaaaaacaaacatgtggtttctggagagactccgaggaagcggggagaacggcgccgctcggggcgtcggtagcgaagcaggcgataaagccagcaagggacccctttattccaacgtcttgactcccgataaaatccccgatttcttcatacccccaaaactgcccagcggtccagcagagggagagggccaggccgctttggggcctagtacgtctgagcagaacttggcatcggctgcacctaggcaaactccccgatccccgagactgccagctaaactagctgcggagagcaaatctcttctgaaggccgccaccagacacgtcatacagatagaatccgccgaggattggctgagcgaggaagccaccgacgccgatccacaggcgcagggcgcaatgtcccttccatccgttccaaaggctcagacttcctatggcttcgcgatgctggcagaaagcccccataccagacgcaaggagtctttgttccattccgagcatggggctcttgcacaggtcgggtcacctggagctgggaggaggcgagccgccgccaaggctaatgggggcgacggaggaccccgagaagccggtggtgccttgatgtcacctgggcggtatttctccgggggtgagagcgacaccgggtcaagtgctgagagttccccgttcgggagccccctgctaagtcgatccgtctcgttgcttaaagggtttgctcaggactcccaggccaaggtgtcgcagctcagacactccgtcgggcgtcacggttcacttagtgcagacgattcaacgccagacgcttctcctggtagccggaggagacttactagaagggccccacctgagcctgggcccgaatccggccaggcgaggggcgagcataccgtgcacgtaggacctcgcgggagtgtccgtctcctggccgagtacgaagcggggcaggcacggctgagggtgcacttgcttgccgcagaagggctttatgacaggctttgtgatgctagatccataaactgctgtgtgggcttatgcttggttcccggaaagctccaaaagcagcgcagcaccatagtcaagaacagccggaggccagtcttcaatgaagacttcttttttgacggtttaggtccagcaagtgtgagaaagctagctcttagaattaaagtcgtcaataaggggagctctctcaagagggataccctgctgggtgaaaaggaactgcctttgaccagtctgctccccttcctgtag

SEQ ID NO: 110224 - DNA, 3945 bp, synthetic construct
  misc_feature 1..3945: note = Description of Artificial Sequence: Synthetic coding sequence
  source 1..3945: mol_type = other DNA
atgttggatccttcctcctctgaggaagaaagtgacgagattgttgaagaggagagcggcaaggaagtcttggggagcgcaccttcgggtgctcgcttgagtccctctcgcacaagtgaaggaagcgccggatcggccggcctagggggcggcggtgcaggggccggggcaggtgtcggtgccggcggggggggtggctccggggcctccagcggcggtggcgcaggtggcttgcagccttcctccagagccggtgggggtaggcccagctcaccatcaccgagtgtagtgtcagagaaagaaaaggaggagctggaacgccttcaaaaagaagaggaagaaaggaagaaacgtttacaactgtatgtgttcgtcatgcggtgcattgcatatccgttcaatgccaaacaacccaccgacatggcacgccggcagcaaaagatcagcaaacaacagctgcagacagtcaaggatcgatttcaagcgttcctgaacggtgagacacaaattatggcagacgaggcctttatgaatgccgtgcaaagctattacgaggtattcctgaaatccgacagggtcgccaggatggtccagtcaggcggctgtagcgccaatgattctcgagaggtgtttaagaagcacatagagaagcgggtccgcagtctgcccgagattgacgggctgagcaaggaaaccgtgctaagcagctggatggcaaagtttgacgcaatctatagaggggaagaagatcctcgaaaacagcaggcacgcatgactgcgagtgccgcaagcgagctgatcctatcaaaagagcaattatatgaaatgtttcaaaacatcctgggaattaagaagttcgaacatcagttgctctataatgcttgccagctggacaacccggacgaacaggccgcacagattagacgggaactagacggcagattacaaatggccgatcagatagcccgcgagaggaagtttcccaagtttgttagcaaagaaatggagaatatgtatatcgaagaactcaaatcatctgttaatctgcttatggccaacctggagtctatgccagtctcaaagggtggcgagttcaaactgcaaaagctgaagaggagccacaacgctagtattattgatatgggtgaggaatctgagaaccagctgtccaagagcgacgttgtgctgtccttctccttggaggtggtaatcatggaggtccagggtctgaagtcactggcccccaataggatcgtctattgcactatggaggtggaaggaggcgagaaactgcagactgaccaagctgaggcttccaagcctacctgggggacacaaggtgacttctctacaacacatgccctccctgctgtgaaagtgaagctcttcacagaatcaactggcgtgctcgctctagaggataaggagctggggagagttattctgcatccaactcccaactctccaaagcagtctgagtggcacaaaatgacagttagtaaaaactgccctgaccaggatctgaagatcaaactggctgttcgcatggacaaaccccagaatatgaaacactcggggtatctgtgggcgatcggcaagaacgtctggaagcgctggaaaaagcggtttttcgttctggtgcaagtgtcacagtatactttcgcgatgtgtagttatagggagaagaaggcagaaccccaggaactgctgcagctggacgggtacaccgtagattacactgaccctcagcctggcctggaggggggacgagcgttctttaacgccgttaaggagggagatacggtaatcttcgcatccgacgacgaacaggacagaattctctgggttcaggccatgtacagagcaacagggcagagccataagccagtcccacccactcaagtacagaaattaaacgcgaaggggggaaacgtgccccagctcgacgctcccatctcccagttttacgctgaccgggcccaaaaacacggcatggatgaatttatttcatctaacccttgtaatttcgaccatgcttctctgtttgagatggtccagcgtctaacgctcgatcaccggctgaacgactcctactcttgcctaggatggttctccccaggccaagtttttgttttggacgagtactgcgctagaaatggggttaggggatgtcacagacatctttgttacctccgcgacttgctggaacgggcggagaacggggcaatgattgatcccaccctactgcactatagtttcgccttttgtgccagccatgtccacggtaataggccagacgggatcggtaccgtgactgtggaggagaaagagcgcttcgaggagatcaaggagagactgcgtgtgttgctggaaaaccagattacacactttcgatactgctttccatttggacgtcctgaaggcgctctgaaagccacactatcgctcctggagcgggtactcatgaaagacatcgtgactccagtccctcaagaggaagtcaagacagtcatacgaaagtgcctggaacaggcagctctggtaaactatagtaggctgtccgagtatgctaagattgagggcaaaaagcgcgagatgtacgagcacccagtgttctgtttagctagccaggttatggacctgacgattcaaaatgtgggcaggttgattacaccagctaaaaaacttgaagatacaatacgactcgccgaactcgtcatagaagtcctccagcaaaatgaagagcatcacgccgaggcttttgcttggtggtcagacctgatggtggaacatgctgagactttcctgagtctgttcgccgtggatatggatgctgctctcgaagttcaaccacctgacacgtgggatagtttcccattgttccaactcttaaatgactttctcaggaccgattacaatctatgcaatggcaagttccacaaacacctgcaagacctatttgctcctctcgtcgttcgatacgtggacctcatggaatcatctatcgctcagagcatccatcgtggatttgagcgagaaagttgggagcctgtcaataacggatccggcacatctgaggacctcttttggaagctggacgccctccagacatttatcagagatctgcactggcccgaggaggaattcgggaagcatctggagcagcgtctgaaattgatggcttccgacatgattgagtcctgcgttaagaggaccagaattgcttttgaagtcaaactgcagaaaacctctcggagcacggatttccgggtgcctcagtcgatttgcactatgttcaacgtcatggtggatgcaaaagcgcaatcaactaaactgtgctctatggagatgggccaggagcaccaataccatagtaagattgatgagctgatcgaagaaaccgtgaaagagatgataactttactagtagcaaaatttgttaccatcctggaaggcgtcctcgccaagctcagtaggtacgacgaaggtactctgttcagcagcttcctttcttttactgtgaaagctgcttctaaatatgtagatgtgccaaagccaggaatggacgttgccgatgcatatgtcactttcgtccgccactcgcaggacgtactgcgggacaaagtgaacgaggaaatgtacatcgaacgcctcttcgaccagtggtacaattcgtccatgaatgtgatttgcacttggctgactgaccgcatggacttgcagctccacatctaccagctaaaaacattgatcaggatggtcaagaaaacctatcgagattttaggctacaaggtgttcttgactctactcttaacagcaaaacgtacgagacgattcggaaccggctgactgtagaggaggcaacagccagcgtcagcgaaggcggtggcctccaggggatctcaatgaaggactccgacgaagaggacgaggaggacgactag

SEQ ID NO: 110225 - DNA, 3825 bp, synthetic construct
  misc_feature 1..3825: note = Description of Artificial Sequence: Synthetic coding sequence
  source 1..3825: mol_type = other DNA
atgctagacccgagttcatctgaggaagagtcggacgagattgttgaagaggagtcaggcaaggaggtactgggatcagcacccagcggtgccaggctaagtccttcgagaacaagtgagggcagtgctggctccgctggtttgggcggcggaggcgccggagctggagccggggtgggtgccggtgggggcggagggtcgggagcatctagcggaggaggagccggcggcctacaaccaagttccagggccggtggaggacgtcctagtagtcccagtccttctgtcgtctcagaaaaagagaaagaagagctggaacgtctccaaaaggaggaagaggagaggaagaagaggctgcagttgtacgtgttcgtgatgcgctgtatcgcctaccccttcaacgctaagcaacccacagatatggcccggcgacagcaaaagatcagcaaacagcaactccagactgtaaaagataggttccaggctttcctcaatggtgagactcagatcatggctgacgaggctttcatgaacgccgtgcagagctattacgaagtcttcctgaaatcggatcgggttgcaaggatggtgcagtccggcggatgctcagcaaacgactctcgtgaagtgttcaaaaaacacatcgaaaagcgagtacggagcctgccagaaatagacggccttagtaaggaaaccgttctctcatcttggatggctaaattcgatgctatatatcggggcgaagaggatcctagaaagcagcaagcccgcatgactgcttcagccgcatccgaactgatcctgtcaaaggaacaactatacgagatgttccaaaacattctggggattaagaagtttgaacatcaactcttgtataatgcgtgtcagctggacaaccctgacgagcaggccgcccagattagacgggagcttgacggacgtctgcagatggccgatcaaatcgctcgggaaagaaagtttccaaagttcgtcagtaaggaaatggaaaatatgtatattgaggaacttaagtccagcgtcaaccttctgatggccaatcttgagagtatgcctgtctccaagggcggggagttcaagctccagaaattgaagcggagccacaatgcttcaattattgacatgggcgaggaatctgaaaatcaattatccaaaagcgacgtggtcctttcattctcgctcgaagtcgtaataatggaagttcagggcctgaagagtctcgcaccaaaccgcatagtgtattgcacaatggaagttgagggtggcgagaagttgcagacagaccaggctgaagcaagcaagcctacctgggggacgcaaggggacttttctaccacgcatgcactgcctgcggtgaaggttaaacttttcacagagagcacgggcgttctggcactggaggataaagaacttgggcgggttatcctgcatccgaccccaaatagccccaagcagtccgagtggcacaaaatgacagtgtccaagaattgccctgaccaggaccttaaaatcaaactggcggtccggatggacaaaccccagaacatgaagcattccggttacctctgggccattggtaagaacgtatggaagcgctggaaaaagagatttttcgtgttagttcaggtaagccagtatacttttgctatgtgtagttacagagaaaaaaaagccgaaccccaagagcttctgcagctcgacggatataccgtggactacaccgatccacagccaggcctagaaggggggcgcgctttttttaacgccgtcaaagaaggggacaccgtcatatttgcatctgatgacgaacaggataggatcctgtgggtgcaggccatgtatcgggcgacaggccagagccacaaaccagttcctccaacccaggtgcagaagctgaacgccaaaggggggaacgtgcctcagctagacgctcccatttcccaattttacgcggacagggcccagaaacacggcatggacgaattcatctcaagtaatccctgcaattttgatcacgcatctcttttcgaaatgggatggttctctcccggccaggtgtttgtgttagacgaatattgtgcaaggaatggcgtgcgcggatgccatagacacttgtgttatctgcgtgaccttttggagagagcggaaaacggagctatgatagatccgaccctcttgcattattcatttgccttttgtgcaagccacgtacacggaaaccgccctgacggcattggaaccgttacagtagaggagaaagaacgctttgaagaaattaaggagaggctgcgggtgcttctggagaatcagatcactcacttcaggtactgtttccctttcggccggcctgaaggggctttgaaggcaactttgagcctgctggaaagagttctaatgaaggacatcgtgacacctgttccacaagaagaggtcaagaccgtgatccgcaagtgtctagaacaagctgcattggtgaactactcccggctgtccgagtatgctaagatcgaggagaacgtgggtcgcctgataacccctgctaaaaaacttgaggacaccatcagattagccgaactggtaattgaggtgctacagcagaacgaagagcatcatgccgaggcctttgcttggtggtcagacctgatggtcgagcatgccgaaacctttctatcactgttcgccgtggatatggacgctgccctggaggttcagcccccagatacctgggactcttttcccctattccagctgctgaacgacttcttgcgaaccgattataacctgtgcaatggtaagtttcataaacatctgcaggatctcttcgcaccactggtggtgaggtatgtagatctgatggagagcagcatcgctcagtctatccaccgagggttcgaacgggaatcgtgggaacccgtaaacaacggtagtggaacatccgaagacctattctggaaattggatgcactgcaaacttttatccgtgatctgcactggcctgaggaggaattcggtaaacatctggagcagcgcctcaagctcatggcaagcgacatgatcgagtcatgtgtcaagcgaactcggattgcgttcgaggttaagctgcagaaaactagtcggtcgactgattttagggtgccacagtctatctgtactatgttcaacgtcatggtggacgcaaaggcacagagtactaaactgtgcagcatggaaatgggtcaggaacaccagtaccacagcaagattgacgaactgatcgaagagaccgttaaagagatgatcacactattggtggctaagtttgtgacgatactggagggcgtcttagccaagctgagccgctacgatgagggcacactgttcagctctttccttagctttacagtgaaagctgcatccaagtatgtggatgtgcccaaacctggtatggacgtggctgatgcatacgttacctttgtgaggcattcacaagatgttctccgtgacaaagtgaacgaagagatgtatattgagagactgttcgaccagtggtataacagcagcatgaatgtgatctgtacgtggttgaccgataggatggatctgcaactgcacatttaccagttgaagacactgatccgaatggtcaagaagacctatcgtgattttcggttacaaggcgttctcgatagcaccttaaacagtaaaacatacgagactattaggaatcgactaaccgtcgaagaagccactgcgtccgtcagcgagggcggcggactgcagggaatcagcatgaaggacagcgacgaagaggatgaagaagatgactag

SEQ ID NO: 110226 - DNA, 4080 bp, synthetic construct
  misc_feature 1..4080: note = Description of Artificial Sequence: Synthetic coding sequence
  source 1..4080: mol_type = other DNA
atgctggaccccagtagctctgaggaagaaagtgacgaaattgtcgaggaggagtcaggtaaagaagtgctgggaagcgctcccagcggggcgcgcctgtctcccagtcgcaccagcgaaggatctgcaggttcagcaggcctcggtgggggaggagcgggggccggggccggcgtaggggcgggcggcggtggtggatctggggccagctccggcgggggggctggcggcctccagccatctagcagagcaggagggggcagaccttcaagcccctccccatcagtggtctctgagaaggagaaggaagagttggaacgcctgcagaaagaagaagaggaacgcaagaaaagactacagctgtatgtctttgtgatgcgctgcattgcataccctttcaatgctaaacagccaaccgatatggccaggcgacagcagaaaatcagtaaacagcaactgcagacggtgaaggaccgctttcaggcgttcctcaacggcgagacgcaaatcatggctgatgaggccttcatgaatgctgtgcagagttattacgaggtcttcctgaagtccgatcgtgtagcgcggatggttcaaagtggtggctgctcagccaatgacagcagagaggtttttaaaaaacatatcgagaaaagggttcgctctttgcctgaaatcgacggtctgtcaaaggagacagttctgagttcgtggatggccaaatttgatgctatttatcgcggagaagaggatccacggaagcagcaagctcgcatgaccgcgtcagcagcttctgagcttatcctctcaaaagaacaactgtacgagatgtttcagaatattctgggtatcaagaagtttgagcaccagctcttgtacaatgcctgccagctggataaccccgacgaacaagctgcgcagattcggcgggagctggatgggcgtctgcaaatggcagatcaaattgcacgtgagcgcaagtttcctaaattcgtctccaaggagatggaaaatatgtacatcgaagagctgaagagctcggtcaacttactgatggccaatctggagtctatgcctgtcagcaaagggggggaatttaaactgcagaaacttaaacgaagccataatgctagcatcatcgatatgggcgaggagtcggaaaaccagttgagcaaatcggacgtggtgctgtccttctcccttgaggtcgtgatcatggaggtccagggcctcaagagtcttgccccgaaccgcattgtgtactgtacaatggaggtggaggggggagaaaaactgcagaccgaccaagctgaagcaagcaaacctacctggggaacccagggtgatttctccaccacccatgccctccccgccgtcaaagttaaactgttcactgaatcaaccggcgttctcgcactggaggacaaagagctggggcgtgtgatcttgcaccccaccccaaacagtccgaaacagagcgaatggcacaagatgacagttagcaagaattgtcccgaccaggacctcaaaatcaaacttgctgtgagaatggacaagccccaaaacatgaaacactcaggctatctttgggcgatcggcaagaatgtttggaagcggtggaaaaaacggttttttgtgttagttcaggtgtctcaatatacatttgccatgtgtagttacagggagaagaaagccgagccacaggaactgctgcagctcgacggttatacagtagactatacggatccacagccagggctagaaggtggacgcgctttttttaacgctgtgaaggagggagacaccgtcatttttgcttctgatgacgagcaggaccgaatactttgggtacaggccatgtaccgcgccactggacaaagccataagcctgtgccccccacgcaggttcagaagttgaacgccaaaggcggcaatgtgcctcagctagatgccccgattagccagttttatgctgaccgcgcccagaagcacgggatggacgagtttatttcatctaatccatgcaactttgatcacgctagcctctttgagatggtgcaacgtttgaccctcgatcaccgcctgaacgattcatactcctgcttaggatggttcagccccgggcaagtttttgtgttggacgaatattgtgcacggaatggagttcggggatgccacagacatctctgctatctcagggacctcctagaacgagctgagaatggggcaatgatagatcctaccctgttgcactattccttcgctttttgtgcatcccacgtccacggcaatagacccgacggaattggtactgtcactgttgaagagaaggaacgttttgaggaaatcaaggaacggttgagggtgcttcttgaaaaccagataacccacttcagatactgctttcccttcggccggcccgaaggcgcgcttaaggcaaccctgtccctcctggaacgagtgttaatgaaagacatcgttactcccgttccccaggaagaagttaagactgtaatacgaaagtgccttgagcaggctgccctcgtgaactatagtcgcctctctgaatatgccaagatcgaggctaacagctgtacgacagagaatgtcgggcgcctgatcactcccgctaaaaagctcgaagataccattcggttagctgagctggtcatcgaggtgctgcaacagaacgaagagcatcacgccgagccacatgtggataaaggcgaagccttcgcttggtggtctgacctgatggtcgaacatgctgagacctttctttccctatttgccgttgacatggacgctgccttggaagtacagccccctgatacctgggacagtttccccctttttcagttactcaacgacttcctgaggaccgactataatttgtgcaacggcaagttccataagcacctgcaggatctgttcgcccctttggtcgttaggtacgtcgacctgatggagagcagcatcgcacagtctatccacagaggtttcgaacgcgagtcttgggagcctgttaagtctttgactagcaatcttccaaatgtgaatctccccaacgtaaacctgcccaaagtgcccaatctacctgtcaacataccactgggcataccccagatgcctactttctccgccccctcctggatggcggcaatctacgacgcggataatggctctggcactagcgaagatctgttttggaagctggatgctcttcagacatttatcagggatcttcactggccagaagaagaatttggaaagcacctggagcaacgcctaaagttaatggcctccgacatgatcgaaagctgtgtgaaacggacacggatcgccttcgaggtgaagctgcaaaagacgagccgcagtaccgattttcgggtgcctcagagtatttgcaccatgtttaacgttatggtcgacgccaaggctcaaagcaccaagctgtgctccatggagatgggccaggagaagtacaagaaaatgaggcatcagtaccatagcaaaatagacgagctgattgaagaaaccgtgaaggagatgattacactcttggttgcaaaattcgtgaccatcctcgagggggtactcgcaaaactctctcggtatgacgagggcaccctgttcagcagcttcttaagctttactgtaaaagcagccagtaaatacgtggacgtccctaagcctggtatggatgtcgccgatgcttacgtcacctttgtgaggcacagccaagacgtcctccgagataaagtcaatgaagaaatgtacatcgaaaggctgtttgaccagtggtacaactctagcatgaacgtgatttgcacctggcttactgatcggatggatctccaattgcacatttatcagttaaagacactcatcagaatggtgaaaaagacatatcgcgatttccggcttcagggagtgctagattccacccttaattcgaagacctatgagacaatccgcaaccgtctgactgtggaggaagccactgcctcagtctcggaaggaggcggcctgcagggcatttccatgaaagacagtgatgaagaggatgaggaggatgactag

SEQ ID NO: 110227 - DNA, 4062 bp, synthetic construct
  misc_feature 1..4062: note = Description of Artificial Sequence: Synthetic coding sequence
  source 1..4062: mol_type = other DNA
atgctggacccctcctcctccgaagaggaaagcgatgaaatcgttgaagaagagtccggaaaggaggtcctgggaagcgctccaagtggagcccggctcagcccctccaggacaagcgagggcagcgcaggttccgctggactagggggagggggggctggagcaggcgccggagtgggcgcgggtggaggcggcggctccggtgcgagctctggagggggggccggcggcttgcagccttcctcccgtgcaggcgggggcaggccctccagcccaagcccgtccgtcgtttctgaaaaggagaaggaagagctggaacggctgcagaaagaagaagaagagagaaagaaacggctacagctgtatgtttttgtgatgcgctgtatcgcttaccctttcaacgccaaacaacctaccgatatggcaagaaggcagcagaaaattagcaaacagcaactgcagactgtgaaggaccggttccaagcgttcttgaacggcgagacacagattatggcggacgaagcttttatgaacgcagtgcagagctattacgaagtctttttaaagtcagaccgagtggcgaggatggtgcaatcaggtggctgcagcgccaacgattcccgggaagtattcaaaaaacatatagagaaacgggtaaggtcactgcccgagatagacggcctgagtaaagagactgtgctgtcgtcctggatggcaaaattcgatgcgatctaccggggggaggaggatcctcgaaagcagcaggccaggatgaccgcatccgccgctagcgaactaatcttatcaaaggagcagctatacgaaatgtttcagaatattctgggcattaaaaaatttgagcaccagttgctctacaatgcatgtcagctcgataatccggatgagcaagcagcacagattcgccgcgagctggatgggcggctgcaaatggcagaccaaatcgcgagggagcggaaatttccaaaatttgtgagtaaagagatggagaatatgtatatcgaggaactcaaatccagcgtcaacctgcttatggctaatctggagtccatgccggtcagtaagggaggcgaatttaagctgcaaaagctgaagagatctcacaatgcctctattatcgacatgggcgaggagagcgagaaccaacttagcaagagcgatgttgtgctgtctttcagtcttgaagtggtgatcatggaggtgcagggacttaagtccctggctccgaacaggattgtctattgtacgatggaagtggagggtggtgaaaagctgcaaacagatcaggccgaggcatcaaagcccacctgggggacacagggagatttctccaccacgcacgccctgcctgccgtgaaggtgaaactgttcactgagtccaccggggtcctcgcactggaggacaaggagttgggacgcgtaattctacaccctaccccaaacagtcctaagcagtctgaatggcataagatgacagttagtaaaaactgtcccgatcaggacctcaaaataaaactggccgtgcgcatggacaaaccccaaaacatgaaacactctggatacctgtgggccatcggaaagaacgtttggaagaggtggaagaaaagattttttgtgctcgtgcaggtgtcacaatatacatttgctatgtgtagttatcgggagaagaaggctgaacctcaggaactcttgcaactagatggctatacagtggactacactgatcctcagccagggctggaaggtggacgggcctttttcaacgctgttaaagaaggcgacactgtgatatttgcaagcgacgatgagcaggatcggattctttgggtgcaagccatgtatcgcgccaccggccaatcacacaaacccgtgcccccaacccaggtgcagaagctgaacgctaaaggaggtaatgtgccgcagctggacgcgccaatatcccagttctacgcggatagagcccagaagcacggaatggatgagttcattagcagcaatccctgcaacttcgatcacgcttcactctttgaaatggtgcagcgtctgaccctagatcacaggctcaatgattcttatagctgtttaggttggtttagccctggccaagtgtttgtgctagacgagtattgcgctaggaatggggtgagagggtgtcatcgacacctttgttatctccgggacctgctggagagagcagagaacggggctatgattgatccaacactcctacactactcttttgcattctgcgcaagtcatgttcatggaaataggcctgacggcattggaacggtgaccgtggaggagaaagagaggttcgaggaaattaaggagcgactgcgcgtgctgctcgagaaccagatcacgcacttcaggtattgttttccattcggacggcctgaaggagctcttaaggctactttgtccttactggaacgcgtgcttatgaaagacatcgtgacacccgtccctcaagaggaggtgaaaactgtgataagaaaatgcctcgaacaggcagccctcgtgaattactcccgcctcagcgaatatgctaagattgaagagaaccagaaagacgccgagaacgtggggaggctcataacacctgcaaaaaaactggaggacactatcagactcgcagaactggttatcgaggtcttgcagcagaacgaggagcaccatgcggagccacacgtggataagggggaggcctttgcctggtggtccgatttaatggtcgagcatgctgagacgttcctctcactgtttgctgtggatatggatgctgcactcgaagtgcagcccccagacacctgggactctttccccttgtttcagctgctaaacgatttcctgcggactgattacaatttgtgcaatggaaagttccacaaacacctccaggatctgttcgcccctctggtcgtgaggtacgtggaccttatggaatcctctatcgcccagtccatacacagagggttcgagagggagtcatgggagcccgtaaagtcccttactagcaacctgcccaatgtaaatttgcctaatgtgaatcttcctaaggtgcccaacctacccgtcaacatccccttgggaattccccagatgcccactttctctgctcccagctggatggcggcgatctatgatgccgataacggctcagggaccagtgaagatctgttctggaaactcgatgcgctgcagacattcatcagggatttacattggcctgaagaggaatttgggaaacacttggagcagaggctcaaactgatggctagcgacatgatagaatcctgtgtgaagcgcacaaggatcgctttcgaggtgaaactccaaaagacttccaggtcaaccgatttcagggtcccccagtcaatttgcacgatgtttaacgttatggtcgacgccaaggctcagtccaccaagctgtgctcaatggaaatgggccaggaacaccagtaccactctaagattgatgaactcatagaggaaaccgtgaaggagatgattaccctgctggttgctaaatttgtcactattttggagggggtgttggccaagctgtctcgatacgatgagggaactctgttctcatctttcctctcctttactgttaaggccgcatccaagtacgtagatgttccaaaaccaggcatggatgtagcggatgcatatgtaacttttgttaggcattcacaggatgtccttagagacaaagtgaatgaggagatgtacatcgaaaggctctttgaccagtggtacaactcctctatgaatgtgatctgtacttggctgactgataggatggacctgcagctgcacatttaccagctcaagaccctgatacggatggttaaaaagacctatagagactttcgcctccagggcgtcttggactctaccttaaactcaaagacatacgagacaattcgcaaccggctgaccgtggaagaagccaccgcctccgtcagcgagggcggaggtctgcaggggatctcaatgaaggattccgatgaggaggacgaagaggacgactag

SEQ ID NO: 110228 - DNA, 1038 bp, synthetic construct
  misc_feature 1..1038: note = Description of Artificial Sequence: Synthetic coding sequence
  source 1..1038: mol_type = other DNA
tgactgcctaacgttaatttgccgaatgtgaacctccctaaagttcccaacttgcctgttaacatccccctgggtattccacagatgcccacattttctgcaccaagctggatggccgctatctacgatgcagacaacggaagcggcacctctgaggatctcttctggaagctggacgcacttcagacttttatacgagacttacattggcctgaggaggagtttggaaaacatctggagcagaggttgaagttaatggccagcgatatgatagagagctgcgttaagagaactagaattgctttcgaggtgaagctccagaagacgtctagatctactgattttagggtcccacagtcaatctgtaccatgttcaacgtgatggtggatgccaaagcccagtcgactaagttgtgctctatggagatgggccaggaatttgcaaaaatgtggcaccagtaccactctaagatcgacgaactcattgaggaaaccgtcaaagagatgatcactctcctggttgccaagttcgtaacaatcctcgagggcgtcctggccaagttgagtcggtatgacgaagggacccttttttcctcattcctgtcttttaccgtcaaagccgcttcaaaatacgtagatgtgcctaaacccggtatggacgtagcagatgcttatgtgacattcgtacgacacagccaggacgtgctgagagacaaagtgaacgaggagatgtacatcgagagactctttgaccagtggtacaactcaagcatgaatgtcatctgcacctggttgacggatcgaatggaccttcaactgcatatctaccaattgaagacactcatcaggatggtgaagaaaacttaccgcgattttcgcctccagggggttcttgattctactttaaatagcaaaacttacgaaaccataaggaacaggcttaccgtggaggaggctacagctagtgtgagcgaaggaggcgggctgcaaggtatctccatgaaggacagtgacgaagaagatgaggaagatgattag

SEQ ID NO: 110229 - DNA, 3768 bp, synthetic construct
  misc_feature 1..3768: note = Description of Artificial Sequence: Synthetic coding sequence
  source 1..3768: mol_type = other DNA
atgctcgatccctcttctagcgaggaagagagcgatgaaggcttggaggaggaatctagagacgtgctggtggccgcaggcagctctcagagggctcccccagccccgacacgggaagggcgaagggatgccccagggcgtgccggcggtgggggagctgcgagaagcgtaagtccctctccgtcagtgctctctgagggcagagacgagcctcagagacaactggacgacgaacaggagcgccgaatcagactgcaactgtacgtctttgtggtccgctgcatcgcctacccatttaacgctaaacagcctacagacatggcgcggcgtcagcagaagctgaacaaacaacaactgcagctgctgaaggaacggtttcaggctttccttaatggggagacgcagatcgtcgccgatgaggcgttctgcaatgccgtgaggtcctactatgaggtttttctgaaatctgatcgggtggcgcgaatggtgcagtcagggggatgttctgctaatgattttcgggaagtgttcaaaaagaatattgagaagcgggttcgcagtctccccgagatcgacgggcttagcaaagagaccgtattaagctcctggatagccaagtacgacgcgatttaccgaggtgaggaagacctctgtaaacaaccaaaccgaatggctctgagcgcggtatccgaacttattcttagtaaggaacaactctacgaaatgttccagcagatcctcggcatcaagaagctggagcatcaacttctgtacaatgcctgccagctggacaacgcagatgaacaggcagcccaaattcgacgcgagttagatggacgcctgcagttggcagacaagatggcaaaggaacgaaagtttcctaaattcatagctaaagatatggaaaacatgtacatcgaagaacttcgatccagcgtaaatctgcttatggcaaatctcgagtcactgcctgtgagcaagggcggccccgaattcaaactccaaaaacttaaacgcagccagaactccgcttttctggacataggggacgagaatgagatacagctctctaaaagcgatgtggttctctccttcacactggagatcgttataatggaggtccagggcttaaagtctgtggctccaaatcgtatcgtctattgtactatggaggtggaaggtgagaaattgcagacagatcaggctgaggcttccaggccccagtggggtacccaaggggatttcacaacaacgcatcctcgaccagtcgtcaaagttaagctctttactgaatccactggtgtcctggcccttgaagacaaggagctgggacgtgtgattctttacccaaccagtaactccagcaaaagtgctgaactacacagaatggtggtccccaagaacagtcaagactccgatttgaaaattaaacttgcggtgcgcatggacaaaccagcccacatgaaacattctggatatctctacgccttaggtcagaaagtgtggaaaagatggaagaaacggtattttgtcctggtgcaggtgtctcagtacacctttgccatgtgcagttacagggagaaaaagtcagagccacaggaactcatgcagctagaaggctatacagtggattacacagatcctcatccaggccttcagggtggatgtatgttttttaacgctgtgaaggagggagatactgtgattttcgcctcagacgacgagcaagaccggatcctatgggtccaggccatgtacagagctacggggcagagctacaagccagtcccagcaattcagacccagaagttaaaccccaagggcggtactctacacgcagatgcacaactctatgccgataggttccagaaacacggtatggacgagttcatatctgctaatccctgtaagctcgatcatgcatttctgtttcggatcttgcaaaggcagactctggaccatagactgaatgatagctactcgtgtttgggctggttcagcccaggacaggtctttgtgcttgacgagtattgtgcccgctatggggtccgggggtgtcatcggcatttgtgctaccttgctgagttaatggaacattcagagaacggagcagtgattgacccaactctgctgcattacagcttcgccttctgtgcatcccatgtgcacggaaatagacccgacggcatcggcactgtgtccgtggaagaaaaggagcgctttgaggagattaaagaacggctgtccagccttctcgagaatcagatttctcacttccggtactgcttcccttttgggcggcccgagggcgccctgaaggcgactctctctctgctcgaacgagtgctcatgaaggacatcgccacccctattcccgctgaggaggttaaaaaagtcgttcggaagtgtctggaaaaggcggcccttatcaactatacaagattgactgagtatgctaagatagaggagactatgaaccaagcgagcccagcgagaaagttagaggaaattttgcacctcgccgaattatgcattgaagtgctccaacaaaatgaggaacaccatgctgaggcttttgcttggtggcctgacctgctcgcagagcatgcagagaaattctgggctctcttcacagtcgacatggatacagctctggaagcccagcctcaggactcatgggacagttttccacttttccaactactaaacaacttcttgcgcaacgataccctcctttgcaacgggaagtttcataaacacctgcaggagatcttcgtccctttggtagtgagatatgttgacttaatggaatcttccatcgctcagagcatccacagagggtttgaacaagaaacctggcagcctgtgaacaatggctctgcaacctctgaggatctgttttggaaactagacgcccttcagatgttcgtgttcgatctacattggccagagcaggaattcgcacaccatctggaacagcgtctgaagcttatggctagcgatatgcttgaagcatgcgttaagagaacccggactgcctttgaattaaagttacagaaggccagcaagacgactgacctccgtataccagcttctgtgtgcactatgttcaacgttctcgtggatgctaaaaagcagagcaccaagttgtgcgccctggatggtggacaggaagtgtgcagaatttttcagcagtaccactccaaaatagatgaccttattgacaacagtgtgaaggaaattatttcacttttagtgagcaaatttgtgtctgtgttggaaggcgtgctgagtaagctgtctcggtacgacgagggcacgtttttttccagcatcctgagtttcactgtgaaggcagccgcaaagtacgtggatgtgccaaagccaggcatggacctggctgacacatacatcatgtttgtccgccagaaccaagacatcctccgggaaaaggtgaacgaggagatgtatattgaaaaactgttcgaccagtggtactcatcttctatgaaagtgatttgcgtttggttaactgatcgcttagacttacagctacatatctaccagcttaagacactcatcaaaattgtaaagaaaacgtaccgtgattttcggctgcagggagtgctcgaaggcaccttgaactccaagacatacgacaccgtccaccgacgcctcacagtagaggaagcgactgccagcgtgtccgagggcggaggactccagggcattactatgaaggatagcgacgaagaagaggaaggttag

SEQ ID NO: 110230 - DNA, 3885 bp, synthetic construct
  misc_feature 1..3885: note = Description of Artificial Sequence: Synthetic coding sequence
  source 1..3885: mol_type = other DNA
atgcttgatccatcaagttcagaggaagaatctgatgagggcctggaggaggaaagccgcgacgtattagttgcggcagggagctctcaacgggcgcctcccgccccgacccgcgagggaaggagggacgcaccgggccgagcgggcggtggcggcgctgcgaggagtgtatccccgtcaccgagcgtactcagtgaaggaagggacgaaccccagcggcagcttgatgacgagcaggaaaggcgcatccggttacagctatatgtgtttgtggttaggtgtatcgcataccccttcaacgccaagcagccaaccgatatggcaaggagacagcagaaactcaataagcagcagttgcaactcctgaaagagagattccaggcctttctgaatggggaaacacaaatcgttgcagacgaggccttctgtaatgccgtgcgatcttattatgaggtgttcctgaaatccgatagagtggcaaggatggtgcagtctggaggatgctcagcgaacgatttccgtgaggttttcaaaaagaacattgaaaaaagagtgcggtccctgcctgaaatagatggcctgtccaaagagactgtcctgagcagctggatcgctaaatacgacgctatctatcgaggggaagaagatctgtgcaagcagcctaatcgcatggctcttagtgccgtaagtgagctgattctctcaaaagaacaactgtacgagatgttccaacagatactgggcataaagaaattggaacaccagcttctgtataatgcgtgccagcttgataacgccgacgagcaggcagcccaaattcgaagggaattagatggtagactacagctggccgataaaatggcaaaagagagaaagttcccaaaatttattgcgaaggacatggagaatatgtatattgaggaactgcgtagctctgttaatttacttatggccaatttagagtccctccctgtcagtaaagggggcccagaatttaagctgcagaagctgaaacggtcccagaactccgcttttttggacatcggagacgagaatgagatacagcttagtaagtcagatgttgtgcttagtttcaccctcgagatcgtcattatggaggtgcaggggttgaaatccgtggcacccaaccggattgtctactgtacaatggaggtggagggcgagaagctccagacagaccaggccgaagcatcccgaccacagtgggggacgcagggcgattttacaacaacccaccctagaccagtggtcaaagtgaagctgtttaccgaaagtacaggagttttggcccttgaggataaggaattgggtagagtaatcctgtatccaacatctaactctagtaaatcagccgagttgcataggatggtggtgcctaaaaattcacaggattccgacttgaagatcaaactggccgtgaggatggacaaacccgcccacatgaagcacagcggctacctctacgctctgggacagaaagtgtggaagcgttggaagaagaggtactttgtgttagtgcaagtaagccagtacacctttgctatgtgttcataccgcgagaagaaaagtgagccacaggagctgatgcagctggagggctacacagtggactatacagatccccaccctggccttcagggcggatgcatgttctttaatgctgtgaaagaaggcgatacagtgattttcgccagcgatgacgaacaggatcgcatattatgggttcaggccatgtaccgcgcgacagggcagagctacaagcctgttcctgctatccagactcagaagttgaaccccaagggaggcaccctccacgcagatgcacagctgtctgagttcaccgacgcggaccgtttccagaagcatggaatggatgagttcatctctgctaacccctgcaaactcgaccatgcctttctgtttaggatcctccagcgacagactttagatcatagactcaacgattcttattcttgtctcggttggttcagccccggccaggtgttcgtcctggacgagtactgtgcacgctatggagtgcgagggtgtcaccggcacctgtgctatttggccgaactgatggaacatagtgagaacggcgcagtgatcgatcccactcttctccattattcattcgcattctgcgcttctcatgtacacggcaataggcccgatggcattgggacagtgtcagtggaagagaaagagcgatttgaggagatcaaggaacggctgtcatctctactggaaaatcagatctcacacttcagatattgctttccctttggccgcccagagggggcccttaaggccaccctgtctctcctggagagagtcttaatgaaagatatagccacccctatccctgctgaggaggtgaaaaaggtggtgagaaagtgcctggagaaagccgccctcattaattacactcgcctgactgagtacgccaaaatagaagagactatgaaccaggcgtctccggcacgaaagctggaggaaatactgcatctagctgaattatgtatagaggtcctgcagcagaatgaggagcaccacgctgaagcttttgcttggtggccagacctgctcgcggaacacgctgaaaaattctgggctctcttcactgtcgatatggacaccgccctcgaagcacagccccaggattcctgggactcctttcctctgttccagctcctgaacaattttctgcgaaacgatacactgctttgcaacggcaaattccataagcacctgcaggagatttttgtgccactcgtggtgcgctacgtcgatctgatggagtcaagcatcgcacagagcatccatcgcggcttcgagcaagagacctggcagcccgtgaagaacattgcgaacagccttcccaatgttgctctccctaaggtgccgtctctacctctcaatctacctcagatccccaatataagcacggcatcttggatgccctcactgtatgaaagcactaacggctctgctactagtgaggatctattttggaagctcgacgcactccagatgtttgtgtttgacttgcactggcctgagcaggagtttgcccaccacctggaacagagactcaaattgatggcctcagatatgctggaggcatgcgtcaagcgaactcggacagcattcgagttgaaactacagaaggccagtaagaccacagacctgcgcatacccgcgtctgtttgtacaatgtttaatgtgttggtcgacgcgaaaaagcaatccaccaaactgtgcgcactcgatggtggacaggagcaacaatatcattctaaaatcgacgatttgattgacaacagcgtgaaggagattatcagcttgcttgtgtcaaaattcgtgagtgttctggagggcgtactctccaaactgtctcggtacgacgagggtacattcttttcttcaatattgtcttttaccgttaaggctgccgcgaaatacgttgacgtgcccaagccaggcatggatcttgcagacacttatatcatgtttgttagacaaaatcaagatatattaagggagaaggtcaacgaggagatgtatatcgagaaactctttgatcagtggtactcgtcaagtatgaaagtcatctgcgtgtggctgacagatcgacttgaccttcaactccatatatatcagctcaaaaccttgattaagatagtcaagaaaacatacagggatttcagactccagggggtgctggaaggcacccttaactcaaaaacctacgacacagttcatcgccgtttgacagtcgaagaagcaacggcttctgtgagcgagggaggtggactgcagggcattacaatgaaagactcggatgaggaggaagaaggctag

SEQ ID NO: 110231 - DNA, 1410 bp, synthetic construct
  misc_feature 1..1410: note = Description of Artificial Sequence: Synthetic coding sequence
  source 1..1410: mol_type = other DNA
atgaatcaggcttctccagcacgcaaattggaagagattctacacttggccgaattgtgcatcgaggtcctgcagcagaacgaagagcatcacgctgaactcagacacgcctttgcttggtggccagacctgttggccgaacacgctgagaagttttgggcactgtttaccgtggacatggacacagccctggaggctcagccccaggattcatgggacagcttccccctctttcaacttctcaacaacttcctcagaaacgataccctgttgtgtaacggaaaatttcataagcacctgcaagaaatcttcgtccctctggtggttaggtatgtggatctaatggagtcgtccatagctcagtccatccaccgaggttttgaacaggagacctggcagcccgtgaagaatattgcgaactctctaccaaatgtcgctcttccgaaagtgccctccctgcccctaaatttaccgcagatcccaaacatatctacagcttcctggatgccttcactatatgagtcaaccaacggctctgctactagcgaggacttgttctggaagcttgacgccctccaaatgttcgttttcgatcttcattggccggagcaagaatttgcccatcatctggaacagaggctgaagctgatggcaagcgatatgctggaagcctgcgtgaaaagaaccaggacagccttcgagctcaagctccaaaaagctagtaaaaccacggacctgagaataccggcatcggtgtgcactatgttcaacgtgttagttgacgctaagaagcagtcaacaaagctgtgtgctctggacggcggacaggaacagcaataccattcaaagattgatgaccttattgacaacagcgttaaggagatcatctccctgctggtctcgaaatttgtgagtgtacttgaaggtgtgctcagtaagctgagccgctacgacgagggcacctttttttcttcgatactgagcttcaccgttaaggctgcagcaaaatatgtggatgtgccaaagcccggcatggacctggctgatacttacatcatgttcgtacggcagaaccaggatattcttagggagaaggttaacgaggaaatgtacatcgagaaattatttgaccaatggtactcctcctctatgaaggttatttgcgtctggctaactgaccgtctggacctacagcttcatatctatcagctcaaaacccttatcaaaattgtaaaaaagacatacagggacttccgtcttcagggagtgttagagggcacactgaacagcaagacttacgacactgtgcaccggcggctcactgtggaagaagccaccgcttcggtaagcgaggggggtggacttcagggtataacaatgaaggatagcgacgaagaggaagagggatag

SEQ ID NO: 110232 - DNA, 2700 bp, synthetic construct
  misc_feature 1..2700: note = Description of Artificial Sequence: Synthetic coding sequence
  source 1..2700: mol_type = other DNA
tgagagatccagctttctaaatccgatgtagtgttgagtttcacactggagatcgtcatcatggaggtccaaggcctcaagtctgtggcaccaaacagaatagtgtattgtaccatggaagtggaaggggagaagcttcaaacagaccaggcggaggcatcgcgaccacaatggggcacccagggtgatttcacaacaacccacccccgccccgtcgtgaaagttaaactgttcacagaatccaccggagtcctggccttggaagacaaggaactgggccgggtaatattgtacccaacttccaacagttcaaagtccgccgaacttcacagaatggttgtccctaagaatagtcaggattctgacctgaaaataaaactggcagtgcgcatggataagcctgcgcacatgaagcattccggctacctgtacgcccttggacagaaggtttggaaacgctggaaaaaacggtattttgtgctggtccaggtctcccagtacacttttgccatgtgttcttatagggagaagaaatccgaacctcaggagctgatgcagctggaaggttacactgtggattacactgatccccatccgggcctacaaggaggctgcatgtttttcaacgccgtgaaagagggagataccgtaatatttgccagtgatgacgaacaggatcgaatactatgggttcaggcgatgtacagagctaccggccagtcttataagccggtccctgccattcagactcagaagctgaatcccaagggagggacactccatgccgatgctcaactgtacgcagatcgatttcagaagcatggcatggatgaattcatatcagccaatccctgtaagctcgatcatgccttcctgtttcgaatcctgcagcgacagacactggatcaccgtcttaatgacagttattcttgcttgggatggttttcgccagggcaggtttttgtgttagacgaatactgcgcccgatatggtgtcaggggatgtcatcgacacctatgttaccttgccgaattaatggagcacagtgagaatggcgccgtgatagaccctacactcctgcactatagctttgctttttgtgccagtcacgtgcacggaaacaggccggatggtatcggaacggtatccgtcgaagaaaaagagagatttgaggagatcaaagagcgcctgtcatcacttctcgagaatcagatatcacatttcaggtattgttttccgttcgggaggccagagggggccctgaaagccaccctctcactgctggaacgtgtcttgatgaaggacatcgccacccccatcccagcagaggaggttaaaaaggtggttagaaaatgcttggaaaaagctgctcttatcaactacaccagactgacggaatacgcgaaaatcgaagaaaccatgaatcaggcctcacctgccagaaaactggaggagattcttcacctggctgagctgtgcattgaggtgctgcaacagaatgaagaacaccatgctgaggccttcgcatggtggcctgatttactcgcggaacatgctgagaagttttgggccctgtttacggttgatatggatacagcattggaagcccagcctcaggactcttgggactctttccctctgtttcaactattaaacaatttcctcaggaatgataccctgctgtgtaacggaaagttccacaagcatctccaggagatctttgtccctctggtggttcgctacgtcgacctgatggagtctagtattgcacagagcatccatagaggctttgaacaggagacatggcagcctgtaaataacgggtccgcaacatctgaagacctgttttggaaattggacgcgctgcagatgtttgtcttcgacctgcactggcccgagcaggagttcgcgcatcatctggagcaacggcttaaactgatggcctctgatatgctggaagcttgcgtcaaacgaacaagaactgcattcgagttaaagctgcaaaaggcctcaaaaaccactgatcttcgcatccccgccagcgtctgtacaatgtttaacgtgcttgtggacgcaaaaaaacagtccacaaagctgtgcgctcttgacggcggccaggagcagcagtatcactctaaaattgatgacctcatagataacagtgtgaaggaaattatttcactgctggtgagtaaatttgtgtctgtactcgaaggcgtgctgagtaaactgagcaggtatgacgaaggaacgttctttagctcaatcctatcctttacagttaaagctgcagccaagtacgtggatgtgcctaagcccgggatggatctggccgatacatacataatgtttgttaggcagaaccaggacattttgcgcgagaaagttaacgaagagatgtacatcgagaagctatttgatcaatggtattcgagctccatgaaggtgatttgcgtttggctgactgacagactcgacctgcaactacatatctatcagctgaagacccttataaagattgtgaaaaaaacatatcgtgatttcagactgcaaggcgtgctggaggggaccctcaatagcaaaacatatgacacagttcatcgacgtctgacggttgaggaagccaccgctagcgtcagtgagggaggcgggctgcagggcattactatgaaggattcagatgaggaggaagaaggctag

SEQ ID NO: 110233 - DNA, 3768 bp, synthetic construct
  misc_feature 1..3768: note = Description of Artificial Sequence: Synthetic coding sequence
  source 1..3768: mol_type = other DNA
atgctggacccgagctcatctgaagaggaatcagatgaaggtcttgaggaggagtcaagggacgtcctcgtcgctgcaggatcgagtcaacgcgcgcctcccgcacccacgcgggagggtagaagagatgcacccggccgtgccggtggtggaggggcagcccgctcagtcagccccagcccatcagtcctgtctgaggggcgcgatgaaccacagcggcagctcgatgacgagcaggagagacgtattcgcttgcagctctacgtgttcgtggtgaggtgcatcgcctacccattcaacgctaaacagccaacagatatggctcgtagacagcagaagctgaacaaacagcagctgcagctgctaaaagagcgcttccaggccttcctgaatggggaaacccagattgttgccgacgaagctttctgcaacgctgtgcgcagttactacgaagtttttcttaagtcagatagagtggcccgcatggttcagagtggcgggtgttccgctaacgacttcagggaagtcttcaagaagaatatcgagaagagggtccggtcccttcctgagatagacggactgagcaaggagacagtgctgagctcttggatcgcgaaatatgacgcgatctatcggggagaggaggatttatgtaaacagcctaaccgaatggctctgtcggccgtcagtgagcttatactttccaaggagcagttgtacgagatgtttcagcagattctcggcatcaaaaagctggagcatcagctcctttacaacgcctgccagctggacaatgcggacgaacaagccgcccagatccggcgggagctcgatggaaggctgcagcttgcagacaaaatggcaaaagaaaggaagttccccaagttcatcgctaaagatatggaaaacatgtacatcgaagagctgcgatcaagcgtgaatctactgatggctaatctggaaagtctccctgtgtctaaaggcgggccggaattcaaactccagaaactcaaacggtcacagaacagcgcctttctggacataggggacgagaacgagattcagcttagcaaaagcgatgtcgtgctgagctttacattggagattgtgataatggaggtgcaggggctaaagagcgtggctccaaataggatagtttattgcacaatggaagtggaaggcgaaaagctccagacagatcaggctgaggccagtaggccgcaatggggaacgcaaggagattttaccaccacacaccccagacccgtggtgaaggtgaaactcttcaccgaatcaacgggggttcttgctctggaggacaaagagctagggcgcgtgatcttgtacccgacatctaactcctcaaaaagtgctgagctacacagaatggtcgtccccaagaacagccaggacagtgacctgaaaataaaactcgccgttcggatggacaagcccgcgcacatgaaacacagcggttacttatacgccctggggcagaaggtgtggaaacgttggaaaaaacgatattttgtgttagttcaggttagtcagtatacctttgctatgtgcagctatagagaaaagaaatctgagcctcaggaattaatgcaattggagggctatacagtcgattacacagatccccaccctggtctgcaaggcgggtgtatgttcttcaacgccgttaaagaaggagataccgtgatcttcgcatctgatgacgagcaagatcggatcctgtgggttcaggctatgtaccgggccaccggccagagttacaaaccagtgccagccatccagacacagaagttgaaccctaaggggggcacccttcatgctgacgctcagctctacgccgatcggttccaaaaacacggaatggacgagttcatttccgctaatccctgtaaacttgatcatgccttcctttttcgaatcctgcaaaggcagactctggaccaccgtctcaacgatagttactcatgtcttggctggttctctccgggccaggtgtttgtccttgacgaatactgcgccaggtatggcgttagaggttgtcataggcatctgtgttatttggctgagctgatggaacacagtgagaacggggctgtcatcgacccaaccctcctgcactattcttttgccttctgcgcctcccatgtgcatggtaatcggcctgacggtattggcacagtctccgtagaggaaaaagagagattcgaggagataaaggaaaggttgtccagcctgctggagaatcagatttcccatttccggtattgctttccttttggtagacccgagggcgcactcaaagccaccttgtccctgctcgaaagagtcttaatgaaggatattgctacgccaattcctgccgaggaggtgaaaaaggtggtcaggaagtgcctggagaaggccgctttgatcaactatacccggctaaccgagtacgccaaaattgaggagacgatgaaccaggccagtcccgcaaggaagctcgaggaaattctgcatctggccgagctgtgcattgaagtgctccagcagaacgaagaacatcacgctgaggccttcgcttggtggccagatctgctagccgagcacgcagagaagttttgggctctgttcaccgttgacatggataccgcactcgaagcacagccccaggatagctgggatagcttccctcttttccaactgcttaacaatttcctccgcaacgacactttgctctgtaatggaaaattccacaaacatttgcaagaaatcttcgtccctctggtagtgaggtacgtcgacctgatggaaagttccattgctcagtcaatccatcgaggatttgagcaggagacctggcagcctgtaaacaatggctcagccacctcggaagacctgttctggaagttagatgccctgcagatgtttgtatttgatctgcactggcctgaacaggaatttgcccaccacctggaacagcgcctgaagcttatggccagtgacatgctggaggcatgcgtgaagagaacacgcaccgcattcgaattgaaactacaaaaggcctcaaaaacaacagaccttaggattccagcaagtgtgtgtacaatgttcaacgtgcttgttgacgcaaaaaagcagtccaccaagctctgtgccttggacggcggccaggaattcggatctcagtggcaacagtatcacagcaagatcgacgacctaatagataacagtgtgaaggagatcatctctctcctggtgtccaagttcgtgtctgtattggaaggggtcctgagcaaacttagtcgctatgacgagggaacattcttttcctcaatcctctccttcaccgtgaaagctgccgcgaaatatgttgacgttccaaaaccagggatggacctggctgatacatatattatgttcgtcaggcagaatcaggatatcttgagagagaaagtcaatgaggagatgtacattgaaaaactttttgaccagtggtactcctcttccatgaaggtcatttgcgtgtggcttaccgatagacttgatctacagcttcatatttatcagcttaagacactgattaaaatcgtcaagaagacttacagggattttaggttacagggtgtgctggaagggacactcaactcaaaaacatacgatacggtccatcgacggcttaccgtggaggaggccacagcttccgtgagtgagggtggtggcctccagggcattacaatgaaagactcagacgaagaagaggagggctag

SEQ ID NO: 110234 - DNA, 3906 bp, synthetic construct
  misc_feature 1..3906: note = Description of Artificial Sequence: Synthetic coding sequence
  source 1..3906: mol_type = other DNA
atgctggacccctcctccagcgaggaggaatcagacgaaggattagaggaggagtcccgagatgtattagtagccgctggctcgagtcagcgggctcctcccgcaccaacccgggagggacgaagggatgcccccggtcgcgccggcggggggggggctgctagatcagtctccccgagcccctccgtcctgtcagagggccgtgacgaacctcagcgccaactggacgacgagcaagaacgaaggatcaggttgcaattatacgtgtttgtggtccggtgtatagcctatcctttcaacgcgaagcagcccactgatatggctcggcggcaacagaaactaaacaaacaacagctccagctgctgaaggaacggttccaagcttttctaaacggggagactcagatagtggccgatgaggcattttgtaacgctgtgaggtcttattatgaagtttttctaaagtctgatagagtggctagaatggtacagtccggcggatgttcggcaaacgatttcagagaagtgttcaaaaagaatatagaaaagagagtccgctctctgccagaaatcgacggccttagtaaagaaaccgtgttgtccagttggatagccaagtacgacgccatatatcgaggggaagaagacctttgcaagcaaccaaaccgcatggcactgtctgccgtatccgagctcattctatctaaagagcagttgtacgagatgttccaacagatcttggggatcaaaaaactggagcaccagctcttgtataatgcatgccaacttgacaatgccgacgagcaagccgcacagatccggcgggaattagatggaagattgcaattggcggataaaatggctaaagaaaggaaattcccgaagttcatcgcgaaggatatggagaacatgtatatcgaggagctcaggtcttcagttaatttactgatggccaacctcgagtcactccctgtctctaaaggtggccctgagtttaagcttcaaaaactcaagcggtcacagaattcggcgttcctggatatcggcgacgaaaacgagatccagttaagcaaaagtgacgtggtcttgtcctttactctcgagatcgtcatcatggaagtccagggcctgaaatctgtagcccctaataggatcgtgtattgtaccatggaagtagaaggggagaagttacagacggatcaggccgaggctagccgtcctcaatgggggactcaaggtgacttcaccacaacccaccccaggccggtggtaaaagttaaattgtttactgagtctacaggggtcctggccttagaggacaaagagttgggtcgcgtcatcctctacccgacctccaattcgagtaagagcgcagaactgcaccgtatggtggttccaaaaaattcacaagacagtgatctaaagatcaaactggctgtaagaatggacaaaccagcccacatgaaacattctggatatctgtacgctctaggccagaaagtttggaagaggtggaaaaagaggtacttcgtgcttgttcaggttagccagtacaccttcgccatgtgttcctaccgggagaaaaagtcggaacctcaagagctgatgcaacttgaaggctacaccgtggattatacagatccacacccaggcctgcaaggaggctgcatgttcttcaatgcggtcaaggagggagacactgttatctttgcatctgacgatgaacaggaccggatcctgtgggtccaggcaatgtaccgcgccacaggtcaatcctataagccggtccctgcgatccaaacccaaaagctgaacccaaagggaggcacgctgcacgccgatgcgcagctatcagagtttactgatgcagacagattccagaaacacggaatggacgaattcattagcgccaacccgtgtaaacttgaccacgccttcctttttcggatcttgcaaaggcaaacattggatcatcggctcaacgatagctatagctgcttgggatggttcagccctgggcaagtcttcgtgcttgacgagtattgcgccaggtatggcgtgcgaggttgtcatagacatctctgttacctggcagagctcatggagcatagtgaaaacggagccgtgatcgaccctactctgctccactactccttcgccttttgcgccagccacgttcatgggaacagacctgacggcatcggtactgttagtgtcgaggagaaggaaagattcgaggagatcaaagagcgactgtcttccctgcttgaaaatcagatttcacattttagatactgctttcctttcggccgtcctgaaggggcactgaaagccactctgagccttctagaacgagtccttatgaaagatatagcaaccccaataccagctgaagaagttaagaaagtggtccggaagtgtctagagaaggccgccttgattaactacaccagattgacagagtacgccaagattgagggtccagccgagaaggagaccgagacgatgaatcaggctagcccagccagaaaattggaggaaatattacacttggccgagctgtgcatcgaggtgcttcagcagaatgaagagcaccatgcggaagccttcgcatggtggcctgacttactggcagaacatgccgagaagttctgggccctttttaccgtcgacatggatactgccttagaagcccagccccaggactcatgggattcatttcccttgttccagctcctgaacaactttttgagaaatgacaccctgttatgtaatggaaaatttcataagcatctacaggagatatttgtgccccttgtagtgagatacgtcgacctgatggagtcttccatcgcacagagcatccataggggatttgagcaagaaacatggcagccagtcaagaacattgctaactccttgccaaacgtagcactgcccaaggtcccgtccctgcccctcaaccttccgcagatccctaacatttcaacagcttcatggatgcccagtttatacgaaagtactaacggaagcgcaacgtccgaggacctgttctggaaactcgacgctttgcaaatgtttgtcttcgacctccactggcctgagcaggagttcgcccaccaccttgagcaaagactcaagctcatggctagtgatatgttggaggcttgtgtgaaacgcactcgaaccgccttcgagctcaaactgcagaaggcttctaagacaaccgacctccgcattcctgcttctgtgtgcaccatgttcaatgtcctggtcgacgccaaaaagcagtctacaaagttgtgcgcgcttgacgggggccaggaacagcagtaccactcaaaaattgacgatttgatcgataactccgttaaagagattattagcctgctggtcagcaagttcgtgagtgtccttgaaggggtgctatccaaactctcacgctatgatgagggaacattttttagcagcattctctccttcaccgtgaaagcagcggccaagtacgtagacgttcccaagcccggcatggatctggccgacacatatattatgttcgtcaggcagaaccaggacatcctgagggaaaaggttaacgaagagatgtatatagagaaattgttcgaccagtggtacagctctagcatgaaagtgatatgcgtgtggcttaccgatagattggatcttcagctgcacatttatcaactgaaaaccctgatcaagatcgtgaagaaaacctatcgggattttagactgcaaggggtcctggaaggcactctgaatagcaagacttacgatacagttcaccggcgactgaccgtagaagaggccacagcatccgtatcagaagggggtgggttgcagggaataacaatgaaggatagcgatgaggaagaagaggggtag

SEQ ID NO: 110235 - DNA, 3891 bp, synthetic construct
  misc_feature 1..3891: note = Description of Artificial Sequence: Synthetic coding sequence
  source 1..3891: mol_type = other DNA
atgctagatcctagcagcagcgaggaggagagcgatgagggcttggaggaggaaagcagagatgtactagtcgccgcagggtcaagccagcgagcgccccccgcccccacaagagaaggcaggagagatgctccgggaagagcaggaggtggaggagctgcacgaagcgtttccccatcccctagtgttctgagtgaggggcgcgatgaaccacagcgacaactcgacgatgaacaagagaggcggattagactgcagctgtacgtgtttgtagtcagatgtatcgcatacccattcaacgccaaacagcccaccgatatggctaggagacaacagaaacttaataagcaacagctgcagctcctgaaggagaggttccaagcattcctgaatggcgagactcaaatagtggctgacgaggcattctgtaatgcagtgagaagttactatgaagtgttcctaaagtccgacagagttgctcgaatggtgcagagtggtgggtgctccgcaaatgatttcagagaggtgtttaagaagaacatcgaaaaacgggtgcgcagcctccctgagattgatggcctgagtaaggaaaccgtgctttccagttggatagccaagtatgatgctatatatagaggtgaggaggatctgtgcaagcagccgaaccgcatggctctgtcagcagtctcagagcttatcctgagcaaagagcaactgtatgaaatgttccagcagatactgggaatcaaaaagcttgagcatcagctgctgtacaatgcctgccagcttgacaatgctgatgagcaggccgcacagatcaggcgggaacttgacggacggctgcaactggcagataagatggccaaggagaggaagttccccaaatttatcgccaaggacatggaaaatatgtacattgaggagctccggagctctgtcaatttgttaatggctaatctggaatctctccctgttagcaaaggcggtccagagtttaagctgcagaagctgaaacgtagccaaaatagcgcattcttggacatcggagatgaaaacgagatccagctgtctaaatcagacgtggtcctttccttcactctcgaaatagttatcatggaggttcaaggtcttaaaagcgtggcaccaaaccggatcgtgtactgtacaatggaagtagaaggagagaaactgcagactgatcaggcagaagcctctaggccccagtggggcactcaaggtgactttacgacaacccatccccgtccagttgttaaagtcaaactgttcaccgagtcaacaggcgttctggcactggaagacaaagaactgggtagagtcatcctctacccaacttctaattcctccaaatcagccgaactccacaggatggtggtgcccaaaaattcccaagactctgacctaaagattaaactggccgtccgcatggataagcctgcccatatgaagcactcaggatacctctatgcactggggcaaaaggtgtggaagagatggaagaagaggtatttcgtactcgtgcaggtgtctcagtatacattcgcaatgtgcagttatcgggaaaaaaaatctgagccgcaagagctaatgcagttagagggatatacagtggactatacagacccacaccctggactgcaggggggctgcatgttttttaatgccgtcaaagaaggcgacaccgttatctttgccagcgacgacgagcaggaccgcatcctgtgggttcaagccatgtaccgagccactgggcagtcttacaaacctgtgcccgcaattcagacccagaagctgaatcccaaagggggaaccttacacgccgatgcgcagttgtcgggcaaagatgcggatagatttcagaagcatggaatggacgaattcatcagtgcaaatccatgtaaacttgaccacgcttttctctttcggattctgcagaggcagaccttggatcaccgcttgaacgatagctacagttgcctgggatggttctcccccgggcaagtattcgtgctggatgaatattgcgcacggtacggagtccgagggtgccacagacatctctgctacctggcagaattgatggaacactcagagaatggcgcggtcatcgatcctacactactacactatagcttcgccttttgcgcaagccatgtccatgggaatcggcccgacgggatcggcaccgtcagtgttgaggaaaaagagaggttcgaagaaataaaggaacggcttagcagtctgcttgagaaccaaattagccacttcaggtactgtttccccttcggaagacccgagggagcgctgaaagcgaccctttccctgctggagcgtgtgctcatgaaggatattgctacgcccatccccgctgaggaggtcaaaaaggtcgtgcgcaaatgtctggagaaagctgctttaattaactacaccagactgacggagtatgcgaaaattgaggagactatgaatcaagctagcccagccaggaagcttgaagagatcctgcacctggccgagctttgcatcgaggtgctccagcaaaacgaagaacatcatgctgaaggaagggaggcctttgcctggtggcctgacttactcgcagaacacgcggagaagttctgggctctattcactgttgacatggatactgccctcgaagcccagccccaggatagctgggacagtttcccactcttccaattgctcaacaacttcttacgtaacgatactcttttgtgcaatggcaagtttcacaagcatctgcaggagatcttcgtcccactcgtggtgcggtacgtggaccttatggagtccagcattgcacagtccatccaccggggtttcgagcaggagacctggcagcccgtgaagaatatcgccaactctttgcccaatgtggccctgcctaaggtaccgtccttacccttgaacttaccgcagatccccaacatttccacagcctcatggatgcctagcctgtatgagtcgaccaatggaagtgcaacatccgaggacctgttttggaaactggatgcactgcagatgtttgtgtttgacctacactggccagagcaggagtttgcgcatcacctggagcagcgtctaaaactcatggctagcgatatgctggaagcctgcgttaaacgcacgcggactgcgttcgagctcaaattgcagaaagccagcaagacaacggatctaaggatccccgcaagcgtgtgtacaatgttcaatgtgctggtcgatgccaagaagcagagcactaagctgtgcgctcttgacggcggccaggagcagcagtatcattctaaaatagatgatctgattgataatagcgtgaaagagatcattagcctcctggtctctaagtttgtcagtgtccttgagggtgtgctgtccaaattgagccgctatgacgagggcacattttttagctcaatactgtcattcaccgtcaaagcggccgctaaatacgtggatgtccccaaacctggaatggacctcgcggatacttatatcatgttcgtgcggcagaaccaggacatcctgcgggaaaaggtaaatgaagagatgtatatcgagaagttattcgatcaatggtacagttcaagtatgaaggttatctgtgtctggttaaccgaccgccttgacctccagctccacatataccagttaaaaaccctcatcaaaatcgtaaaaaaaacctacagggatttccggctacagggcgtgcttgagggcaccctcaactctaaaacttacgatacagtgcacaggcggctcacagttgaagaggccaccgccagcgtcagtgagggtggggggctccagggtatcactatgaaggactccgatgaggaggaagaggggtag

SEQ ID NO: 110236 - DNA, 1473 bp, synthetic construct
  misc_feature 1..1473: note = Description of Artificial Sequence: Synthetic coding sequence
  source 1..1473: mol_type = other DNA
taatatacacggctcaccgagtatgcgaagatcgaggggcctgcagaaaaagagacagaaacaatgaaccaggcctctcccgctcggaagttggaagaaatcctccacctagccgagctttgtattgaagttctgcaacagaacgaggagcatcacgcagagggcagggaggcgttcgcctggtggccagatcttctagccgagcacgctgagaagttctgggcactcttcaccgtggatatggataccgccctggaagcccaacctcaggacagttgggacagtttcccgctgttccagctgctgaacaacttcctgcggaacgacacattgttatgtaatggtaagtttcacaagcatctacaggaaattttcgtccccctggttgtcagatatgtagaccttatggaatcaagtattgctcaatccattcaccgcggcttcgagcaggagacatggcagcccgtgaaaaacattgccaattccctgcccaacgtggccctgcctaaggtaccctccctgccccttaatttgccacagatacccaatatttctaccgcttcctggatgccctctctgtatgaatccaccaatggatccgccacctcggaagatttattttggaagctggacgctttgcagatgttcgtgtttgacttgcattggcctgagcaggaatttgctcatcatctggaacagcggctgaaactgatggctagcgatatgttggaggcttgcgtgaagcgaacgagaacggcatttgagctgaagttgcagaaagcttctaaaacaactgatctgcgtataccagcctctgtgtgcaccatgtttaatgtcctcgtggatgccaaaaagcagtccactaaactctgcgccctcgacggcggccaggaacagcagtatcacagcaagatagacgacctgattgacaacagcgtcaaggagatcatttccctgcttgtcagtaagttcgtttctgttctggagggcgtgcttagcaaactgagccgctacgatgaggggactttcttctcctctatcctctcttttactgtgaaagcggccgcaaagtatgtggatgttcctaagcccggtatggacctagcagacacatacattatgtttgtgaggcagaatcaagacattctgcgcgaaaaggttaacgaagaaatgtacatcgagaagcttttcgatcagtggtacagctccagcatgaaagtgatctgcgtatggttaactgatagactcgacctgcagctacacatatatcagttgaagactctgattaagatagtaaagaagacctatcgggacttccgactgcaaggtgtgttggagggcacgctaaattctaagacttatgatacagtccacagaagattgactgttgaggaggcaactgccagtgtcagcgagggaggtggtctccagggcattactatgaaggatagcgatgaagaggaggagggctag

SEQ ID NO: 110237 - DNA, 3669 bp, synthetic construct
  misc_feature 1..3669: note = Description of Artificial Sequence: Synthetic coding sequence
  source 1..3669: mol_type = other DNA
atgctggatccaagctccagtgaagaagagtcagacgagggtcttgaggaggagtctcgtgatgttttggtggcagcgggctcatcccagcgggctccccccgccccgactagagagggccaactggacgatgagcaggaacggagaattaggttgcagctgtatgtctttgtggtacgctgcattgcgtaccccttcaatgcaaaacagccaacagatatggcacgaagacagcagaaacttaacaagcaacagctacagttgctgaaggagcgcttccaggcttttttaaatggggaaacccagatcgtggctgacgaggccttttgcaacgctgtccgctcatactacgaggttttcttgaagtccgatagggtagcgcggatggtgcaaagcgggggctgcagcgccaatgacttccgggaggtgtttaagaaaaacattgagaagcgggtgcgcagtctgccagaaatagatggactttcgaaggagacagttctgtcaagctggatcgcaaagtacgatgccatttatagaggcgaagaagacttgtgtaaacagcctaataggatggctctctcagctgtgtccgaactgatcctgtccaaggagcagctgtacgagatgtttcagcaaattttgggaataaagaaactcgaacatcaactgctttacaacgcttgtcagctagataatgcagacgaacaggccgcccagattaggcgcgagctagacggtaggctgcaactcgccgacaagatggcaaaggagcggaaattccccaaatttattgccaaggatatggaaaatatgtatattgaggagctccgctcctcagtgaatctgctgatggccaaccttgagtcactgccggtctctaagggcggcccggaattcaaattgcagaagctcaagagatcacaaaactcagcatttcttgacattggggatgagaatgagatccagctgtctaaatctgatgtcgtgttgtccttcacactggaaatagtgataatggaagtccaggggttaaaatctgtagcccctaataggatagtctactgtactatggaggtggagggggagaaactgcagacagatcaagccgaagcctcacgtcctcagtggggtacacagggcgactttaccacaacccatccaaggcccgtcgtaaaggtcaagttgttcaccgaaagtacgggggtactagcgttggaagacaaggagcttgggcgggtgatcctatatcctacctctaatagcagcaaaagtgccgagctgcaccggatggtggtgcccaaaaattcccaagactcagatttgaaaatcaaactcgcggtaagaatggataaacctgcgcatatgaagcactctggctacttgtatgcattaggacagaaggtttggaagcgttggaagaagaggtattttgtcctcgtccaggttagtcagtacacctttgcaatgtgctcatacagagagaagaaaagtgagcctcaggagttgatgcagctggagggttatactgtcgattacacagatccccaccccggtctccagggcggctgtatgttctttaacgccgttaaggagggggacaccgtgatctttgccagcgacgacgaacaggaccggatcctatgggttcaggcgatgtacagggccaccggccagagctacaaacctgtgcctgcaatccaaacacagaaactgaatccaaaaggtggaaccctgcacgcagatgcacaattgtatgctgacaggttccaaaagcatggcatggacgaattcatttctgccaatccctgcaaactggatcatgcctttctattcagaattttgcagagacaaactctagaccatagacttaacgactcatactcatgcctcggctggttttcccctggccaagttttcgttctggacgagtactgtgcccgctatggggtacggggatgccaccggcacctctgctacctcgccgagttgatggagcacagcgaaaacggagccgttatcgatcctacactattacattacagcttcgccttttgtgcaagccacgtccacggaaaccgccctgacggcatcggcaccgtgtccgtggaggaaaaagagcgctttgaggaaatcaaagaacggctctccagtctgctcgaaaaccagatcagtcatttcaggtactgctttccctttggtaggcccgagggagctctcaaggcgacactgtcgctgctggagcgagttctgatgaaggatattgccacgccaatacccgctgaggaggtaaaaaaagtggtgagaaagtgtctggagaaggccgcactgatcaactacaccagactcacagagtatgccaaaatcgaggaaactatgaaccaggcaagtccagcaaggaaacttgaggagattctccacttggcagaactgtgcattgaggttctacaacagaatgaagagcaccacgccgaggcctttgcatggtggccagacctcctggcggagcatgcggaaaaattctgggctctgtttactgtggacatggacaccgctctggaagcacagccccaggactcatgggactcctttccactgttccaactgttaaacaatttcctgaggaacgacaccctcttgtgcaatggaaaatttcataagcacctccaagaaatctttgtgccattggtcgtgcgctatgtagacttaatggaaagctcgattgcacaatccatccatagaggcttcgagcaggaaacgtggcagcctgtcaataatggatctgccacgtccgaagacctcttctggaagttggacgcactgcagatgttcgttttcgaccttcactggcctgagcaggaatttgctcatcacttagaacagaggctcaagctaatggcatccgacatgctggaggcatgcgtgaaaagaactagaacagcctttgaactgaagctccagaaagctagcaaaacaactgatttgcgcattcctgcatccgtgtgcacaatgttcaatgtgctcgtcgacgccaagaaacaatcaactaagctgtgtgctcttgatggaggccaagagttcggctctcaatggcagcagtatcattcgaaaatcgacgacctgattgataattctgtgaaggagataatttcactgctggtgtcaaaattcgtgtccgtgctcgagggcgtactgtctaaactgagtaggtatgacgagggtacgtttttctcatctatcctctctttcactgtgaaggctgccgctaagtatgtagacgtccctaagcctggaatggacttggcagacacctacatcatgtttgtgcggcaaaaccaggacattctccgtgagaaagtaaacgaggaaatgtacatcgagaagctgttcgatcagtggtactcatcatccatgaaggttatctgtgtgtggctcacagatagactggatctccaactccacatttaccagctgaaaacactgataaaaatagtcaagaagacctatcgggactttcgcctacagggagtgctggagggtacattaaattccaaaacatatgataccgtgcatcgacggctcacggttgaggaggccaccgccagcgtgtcagagggcggtggcctgcagggcattaccatgaaggattcagatgaggaggaggaagggtag

SEQ ID NO: 110238 - DNA, 2367 bp, synthetic construct
  misc_feature 1..2367: note = Description of Artificial Sequence: Synthetic coding sequence
  source 1..2367: mol_type = other DNA
atgactatccaccaatttcttctgctctttttgttttgggtgtgtttgccccacttttgtagcccggaaatcatgtttcgacgcaccccagtgccccaacagcggatcctcagtagtcgcgtccctaggagtgacggaaagatcctacatcggcagaagcgcggatggatgtggaaccagttctttctgttggaagaatataccggttctgactatcagtacgttggaaagttacactcggatcaagataagggcgacggatccctgaagtatatcctctcgggagatggtgccgggaccttgttcattatcgacgaaaaaacaggagacatccacgccacgcggagaatcgatagagaggagaaggccttttatactctgagagctcaggctataaaccgtcgaacgcttagaccagtggagccagaatctgaatttgtaatcaaaattcacgacatcaacgacaatgaaccaaccttccctgaagagatctacaccgcctctgttcccgaaatgtccgtggtcggcaccagcgttgtgcaggtgacagcaacagacgctgatgaccctagctatgggaacagcgctagggtgatctactcaatcctacagggtcagccctactttagcgtggaaccagagacaggtatcataagaaccgcactgcccaatatgaatcgagaaaatcgggagcaatatcaggttgtgatccaggcaaaggacatgggcggacagatgggcggcctcagcgggacaactacggtcaatatcacactaacggatgtaaacgacaaccccccccgattcccacaaaacaccatccatctgcgcgttctggagtctagtcccgtggggaccgctatcgggtcagtgaaagctaccgacgccgataccgggaagaatgctgaggtggagtacagaataattgatggcgatgggaccgacatgttcgatattgtgaccgaaaaagacacacaggagggaatcataacggtcaaaaagcctctggactacgaatcaaggagactgtacacattaaaggtggaggccgaaaacacacatgtagaccccagattctattatctcggaccatttaaggacaccacgattgtgaaaatttccatcgaggacgtggatgagcctcctgtattctctagatccagttatctctttgaggtgcatgaggatatagaagtggggacaattatcggaactgtcatggcgagggatccagatagtatttcctcccccatcagattctcactcgatcggcacaccgacttggacaggatttttaatattcacagcgggaatggttccctgtacacttccaagccactggacagagagctgtcacagtggcacaatctcaccgtcatcgccgccgagatcaataaccccaaggagacgacgcgggtggccgtcttcgtccgcatactggacgtgaatgataacgcgccccagttcgcagtattctatgatacatttgtttgtgagaatgcaaggccggggcagctgatacagactatatcggctgtagataaagatgatcccttaggcgggcagaagttcttcttctcactggcggctgtgaaccctaatttcactgtccaggacaatgaggacaatacggccaggatactgacgagaaagaatggcttcaaccggcacgagataagcacatatctcctgcctgtcgtgatatccgataacgactaccccattcagtcttctaccggcaccttaacaataagagtatgtgcctgtgactcccagggtaatatgcagagctgttcagccgaggctctactgcttcccgctggactgtcaactggagctttgattgccatactgctgtgcataattatccttcttgtcatagttgtgctcttcgccgctctgaaaagacagcgcaaaaaagaacctttgatcctgagcaaggaagacataagagacaacatcgtcagctacaacgatgagggcgggggcgaggaagatacgcaagctttcgacatcgggactttacgcaacccagccgcaatagaggaaaagaagctgcgacgggatatcatccctgaaaccctcttcatcccccgccgaacacccactgcaccagacaatactgacgtcagggacttcatcaatgagcggttaaaagagcatgacttagaccctaccgctcctccatacgattctttggcgacctatgcttacgaagggaacgatagcatagctgaaagcctctctagtctcgaatctggaactacagagggcgatcaaaattacgactatctgagagaatggggcccccgtttcaacaagctggccgagatgtatggaggaggtgagtcagataaggatagctag

SEQ ID NO: 110239 - DNA, 2385 bp, synthetic construct
  misc_feature 1..2385: note = Description of Artificial Sequence: Synthetic coding sequence
  source 1..2385: mol_type = other DNA
atgctcacaaggaattgcctgtctttactcctgtgggtgcttttcgacggaggacttttaactcccctgcagccacaaccacaacagaccctagctaccgagccaagggaaaatgtgattcacctgccgggacagagatcccacttccagagggtgaaacgcgggtgggtgtggaatcagttcttcgtgcttgaggaatacgtcgggtcggagcctcagtatgtcgggaaactgcattccgacctggataagggagaagggacagtgaaatacaccctcagcggcgatggtgccggaacagtcttcaccatcgatgaaaccaccggggacattcatgccattagatccctcgaccgagaagaaaaaccgttctatacgctgagagcccaggctgtggacatcgagactcggaagcctctggagcccgaatctgagtttatcattaaggtccaggatatcaatgacaatgagccaaagtttctagatggcccctacgtcgctacagtgcccgaaatgtcaccagtaggtgcttacgtactgcaagtgaaggctactgacgcagatgaccctacttacggtaactccgcaagggtggtgtattctatccttcaggggcagccatatttcagcattgacccgaagacaggcgttatccgaactgctctcccgaacatggatagggaggtgaaagaacagtaccaggtgttaattcaggccaaggatatgggcggccagctcggtgggctggcagggacaactatcgtcaacatcaccctgacggatgtcaatgacaacccacccaggtttcccaagtcgatatttcacctgaaagttccagagagttcgccaatcggtagcgccattggaaggattcgagcagtggacccggacttcggacagaatgcagagatcgaatacaacattgtccctggagacggcggcaacctgttcgatatagtgactgacgaggatactcaagagggtgtgataaaattgaaaaaacctcttgactttgaaaccaagaaggcctataccttcaaggtcgaagcatccaacctgcacctggatcacagatttcacagcgcgggaccatttaaggacactgctactgtgaaaatttctgtgcttgatgtcgatgagcccccggtcttctcgaagcccctgtacaccatggaagtctatgaagacaccccggtcgggactatcattggcgccgtaacagctcaagatctggatgtcggcagtagcgcagtccgctatttcatcgattggaagtcggacggtgatagttatttcaccattgacggcaatgagggaaccattgccacaaacgaattactggatagggagagcaccgcgcaatataatttttccatcatagcatctaaggtatccaatccccttttaacctccaaagtgaacattctgattaacgtgttggatgtcaatgaattcccgcctgagatctccgtgccgtacgagactgccgtgtgtgagaacgccaagcctggtcaaattatccagatcgtgtcagccgcggatagagacctgagccctgcaggacagcaattttcatttcgtctgagccccgaggctgccattaagccaaactttaccgtacgggattttcggaataatacagcaggaatcgaaaccagacgcaacggttattcccgacgtcagcaggaattgtatttcctcccagtagtgatagaggatagttcttatccggtccagtccagtaccaataccatgacaatccgggtctgcaggtgcgactctgacgggacaatcctcagctgtaacgtggaagctatatttttaccagtgggactgtcaactggagcgctgattgccatccttttatgcatcgtgatattactcgccatagttgtcctgtatgtggcattacgcagacagaagaaaaaggataccctgatgacaagcaaggaggacattcgggataatgtcattcattacgatgatgagggcgggggagaggaagatactcaagcgttcgacataggagctttacggaaccctaaggtcatcgaagagaataagatccgaagagatatcaagcccgattctctctgtctgccgaggcaacgaccccccatggaagataatactgatattagggatttcatccaccagcggttgcaggagaatgacgtcgatccaaccgcccctccttacgatagcctagccacatatgcatacgaagggagtggatccgtggctgaatctctgagttccattgactctctgactacagaggctgaccaggactatgactacctgactgattggggcccacggtttaaggtgctcgccgacatgttcggcgaggaggagtcgtacaatcctgacaaagtaacatag

SEQ ID NO: 110240 - DNA, 2385 bp, synthetic construct
  misc_feature 1..2385: note = Description of Artificial Sequence: Synthetic coding sequence
  source 1..2385: mol_type = other DNA
atgctcactcgcaactgtttgagcctcttgctgtgggtactgttcgatggtgggttattgactcccctgcagcctcagccacaacaaaccctggctaccgaaccacgagagaatgtcatccacctgccaggccagcgtagtcattttcagagggtcaaacggggatgggtttggaaccagtttttcgttttagaggaatacgtgggtagcgagccccagtacgttggaaaactgcacagcgatttagataagggcgagggaaccgtgaagtatacactctcaggggatggcgcggggactgttttcacgatcgatgaaaccaccggagatattcatgccatcagatctctggaccgagaggaaaaacctttctatacactcagagcccaggctgtggatatcgagacgcgtaaacctctggaacccgagagcgagttcattataaaggtgcaggatattaacgataatgaacccaagttccttgacgggccttacgtcgctactgtgcctgaaatgtcacccgtcggggcatatgtgttgcaggtgaaagccaccgacgcagatgatcctacctacggaaacagcgccagggtggtctactccattttacaggggcaaccctacttctcaatagatcccaagactggggtgattagaacagcactaccaaacatggacagagaggttaaagaacagtatcaggtgttaatacaggcaaaggatatgggtggtcagctggggggtcttgcaggcaccactattgttaacatcacgttgacagacgtgaatgataatccacctcgctttcccaagagcattttccatttgaaagtccctgagtcttctcctatcgggagcgcaatcggtcggatccgcgccgtagaccctgatttcggccaaaacgccgaaatcgagtacaacattgtccccggtgacggcgggaacctgtttgacattgtgaccgatgaggacacccaggagggcgtcataaaactgaaaaaacctttggacttcgaaacaaagaaagcctacacatttaaagtggaggcctcaaatctgcacttggatcatcggtttcacagtgctggccctttcaaggatacggcaactgttaaaatatccgtactggatgtggacgagccacccgtcttctcaaaaccgctgtataccatggaagtgtacgaggacacacccgtgggcactatcattggagcggtgaccgcccaagatctggatgtgggcagcagcgctgtgcgctatttcatagattggaagagtgacggcgatagttacttcactatagatgggaacgagggcacaatagcaactaatgagcttcttgaccgggagtccactgctcagtacaatttttcgattatagcgtccaaggtttccaatcctctgctgacctcaaaggtgaatattctgatcaatgtgctggacgtcaacgaattcccgcctgaaatctcagttccctacgagacagcggtgtgtgaaaacgccaagcccggccagatcatccagatcgtatccgctgccgacagagatctgtcaccagcagggcagcagttttctttccggctttcacccgaggccgccattaaacctaattttaccgtccgagactttcgaaacaatacagctggaatcgagactaggcgaaatgggtatagccgccgacaacaggaactctacttcctacctgtggtgatcgaggacagttcctaccccgttcagtcctctacaaatacaatgaccattcgggtctgccgctgtgattcagacggtaccatcctcagttgtaatgtggaagcaatttttctccctgtcggattgtccacaggagcccttattgcaatcctgctgtgcatcgtaatcctgctcgctattgtggtgctctacgtggcattgagaaggcagaagaagaaagatactctcatgaccagtaaggaggacataagagataatgtgatccactatgacgacgagggggggggcgaggaggacacacaagcattcgacattggcgctctacgcaatccaaaggtgatcgaggagaacaagatccggcgagatattaaacccgactcactttgtctgcccagacaacgccccccgatggaggacaatacagatatcagagactttattcaccaacgactgcaggagaacgacgttgacccaaccgctccgccttatgactccctcgccacctatgcctatgaaggatcaggcagcgtggcagagtccctctcaagcatagactctctcaccaccgaggcggaccaagactacgactacctgactgattgggggcccaggttcaaagttctcgctgatatgttcggagaagaggagagctataaccccgataaagtgacatag

SEQ ID NO: 110241 - DNA, 2265 bp, synthetic construct
  misc_feature 1..2265: note = Description of Artificial Sequence: Synthetic coding sequence
  source 1..2265: mol_type = other DNA
atgcttacgcggaactgtctgagtctgctgctgtgggtcctcttcgacggcgggcttttaacaccactccagccacaaccccaacagactctcgctaccgaaccacgggagaacgtgatccacctacctggtcaaagaagccacttccaaagggtgaagcggggctgggtgtggaatcagttttttgtcctggaggagtatgtggggtccgagccacagtacgtggggaagttacactctgatctggataagggcgagggaactgttaaatacactctaagcggagacggcgcagggactgtatttaccattgacgaaacaacaggggacattcatgccattagaagcttagacagagaggaaaagcctttttacacactccgggctcaagccgtcgatatagaaactcgtaagccactggaaccagagtccgagtttattatcaaggtccaagatataaacgacaacgaaccgaagttcctggatggtccctacgttgcaaccgttcccgagatgtcacccgtaggcgtgatacgcactgcattgcctaacatggatagagaagtaaaggagcaataccaagtcctgatacaggccaaggatatgggcgggcagctggggggcctggctgggactaccattgtgaacattaccctcacagacgtgaacgacaaccctcctcgttttccgaagtccatcttccacttgaaagttccggaatcctctcccatcgggtcagccatcggtcgcatccgggctgtcgacccagatttcggtcaaaatgccgagatcgaatacaatatcgttcccggagatggaggcaacctgtttgacatcgtgaccgatgaggacactcaggagggcgtgattaaactgaaaaagcctctggacttcgagaccaagaaggcttatacatttaaagtggaggctagcaacttgcacttggaccatcggttccattctgccggcccatttaaggatacggccacagtgaagatatccgttcttgatgtcgatgagcctcccgttttctccaagcccctttacactatggaagtgtacgaagataccccagttggaaccatcataggggctgttacggcccaggatctggacgtggggtcttctgccgtgcgctactttatcgactggaaaagtgatggggactcctattttacaatcgacggaaatgaaggtactatcgccacgaatgagttgttggaccgcgaatccactgcacagtataacttctctatcattgcaagcaaggtaagcaacccactgttgaccagcaaggtaaacattctgatcaatgtgttagacgtgaacgagttcccacctgaaattagtgtcccctatgaaaccgctgtgtgtgagaacgcaaaacctggtcaaattattcaaattgtttcggctgcagaccgagatcttagtcccgccggtcaacaattctcttttaggctcagccctgaagcggctatcaaaccaaattttacagtgcgcgactttagaaacaacactgccgggatcgaaacccgtagaaacgggtacagccgccgccagcaggagctgtacttcctcccagtcgtaattgaagatagcagctatcccgtacagagcagcacgaataccatgaccataagggtttgtagatgtgatagcgatggcacgattttgtcatgtaacgttgaggccatttttcttcccgtcggtctctctactggcgccttgattgccatactgctatgcatcgtgatcttattggctatcgttgtcctgtacgtggccctgaggagacagaaaaagaaggacaccctgatgacctccaaagaggacattagggataacgttatccattatgatgacgaaggaggaggcgaagaggacactcaggctttcgatatcggggccctgcggaaccctaaggtcatcgaagaaaacaaaattagaagggacatcaaacctgactccctgtgtctgcctcgacagagaccacccatggaggacaatacagatatccgggactttatccaccaaagactgcaagaaaatgacgtcgacccaactgccccaccttacgatagtctcgccacatacgcatacgagggcagtggttccgtggctgagtcactttcctccatagatagtctgacgacggaggcggaccaagactacgattacctcacagactggggacccaggttcaaagtcctggccgatatgttcggagaagaagagagctataacccagacaaggtgacgtag

SEQ ID NO: 110242 - DNA, 2445 bp, synthetic construct
  misc_feature 1..2445: note = Description of Artificial Sequence: Synthetic coding sequence
  source 1..2445: mol_type = other DNA
atggatgccgcattcctcctggtgcttggtctgctggcgcagtcactgtgcctgagcttgggagttcccgggtggcggcgacctaccacgctttatccatggaggcgggcaccagctctcagccgcgtgcggcgcgcatgggtaatccctcccattagcgtttcagagaatcacaagcgattgccttatcctctggtccagatcaaaagtgacaagcaacaactgggttcggtgatatattcaatccaaggtcccggtgtagacgaggagccgcgcggcgtgttctcaatcgacaagttcaccggtaaagtattcctcaatgccatgctagaccgggaaaagaccgacagattcaggttacgcgctttcgcgcttgatctgggcgggtcaaccttagaggacccaaccgatctcgaaattgtagttgttgatcagaatgacaaccggcccgcttttcttcaggaagcctttactgggagagtcttggagggagcagttccaggcacctatgttactagggcagaggccaccgatgccgatgatccggagacagacaatgccgcattacgattctccattttacagcagggctctccagaacttttcagcattgatgagctgactggtgaaatcaggaccgtgcaggtgggcctggatagagaagttgtggctgtttacaacttaaccctgcaggtagctgatatgtcaggcgacgggctgacagcaaccgcctctgccataataactctggacgatatcaacgataacgcccccgaattcacgcgcgacgagtttttcatggaggctattgaggccgtgagcggagtggacgtgggaaggctagaagtggaggaccgggatttgccagggagccctaactgggtcgcccggttcactatcctggagggagatcctgatggccagtttacaatacgaaccgacccgaagaccaacgagggagttctgtctatcgttaaagctcttgactacgagtcttgcgagcattacgagctgaaggttagcgtacagaacgaagcaccactccaggctgcagccctgagagccgagcggggtcaggctaaggtgagagttcacgtccaagatactaatgagccccccgtgtttcaggagaaccccttacggaccagcctcgctgaaggtgccccgccaggcaccctggtggcgacctttagtgcccgggaccctgacactgagcagctgcagcggctgtcttactccaaggactatgatccggaggactggctgcaggtggacgcggccaccggaaggatccaaacacagcacgtcctctcccccgcgtctccctttttgaaaggcgggtggtatcgcgccattgtcctggcccaggacgacgcgagtcagccccgaacagcaacaggtacccttagcatcgagattttggaagtaaacgaccatgcccctgtgttggctccccccccccccggctctctgtgcagcgaaccccatcagggacccggtttgcttctcggagccacagacgaggatctccccccccacggcgcgcctttccacttccagttatcacccaggctgccggagttaggtcgcaattggtctctatcacaagtgaatgtctcacatgctcgactgagaccacggcatcaggttcccgagggcctgcacaggctgagcctcctcctcagggacagcgggcagcctccgcaacagagggagcaaccacttaatgtgaccgtgtgtcgctgcggcaaggacggcgtttgccttcccggcgctgccgctctcctggccggcggcacaggcttatccctgggggcgctagttattgtgctcgcgtcagcactattgttgctcgtgctggtcttgctggtggccctacgcgctcgcttttggaagcagagccggggaaagggtctcttgcacgggccccaggacgatctaagggacaacgtcctcaactatgacgagcagggtggaggggaagaggaccaagatgcatacgatattagtcagctgaggcaccctaccgccctgagcctgcccctaggcccccccccattgcgacgcgatgccccccaggggaggttgcaccctcagcccccaagggtgcttcctacctctcctttggacatcgccgactttatcaatgatggcctagaagccgccgactctgacccatcagtgcccccttatgatacggcgcttatttatgactacgaaggcgacggaagcgttgccggcacacttagctctatcctgagttcccagggggatgaagatcaggattacgactacctgcgggactggggcccaagatttgcgcggctggcagatatgtatgggcacccatgcggactggagtacggagcccgttgggaccaccaggccagagagggcctatcccctggcgccctcttgcctcggcaccgaggacgaaccgcatag

SEQ ID NO: 110243 - DNA, 2373 bp, synthetic construct
  misc_feature 1..2373: note = Description of Artificial Sequence: Synthetic coding sequence
  source 1..2373: mol_type = other DNA
atggtcccagcctggttatggctcctgtgcgttagcgttccccaggcactgcctaaggcacagcctgcagagctatccgtcgaagtgcctgaaaattacggcggcaatttccccctgtacctaaccaaacttcccctaccccgggagggagctgaggggcaaatcgtactcagtggagattcgggaaaggccaccgagggtccttttgctatggatcctgatagcggcttcctcctggtgacccgggccttggatcgcgaggagcaagctgagtaccagctgcaggtgaccttggaaatgcaggacggccatgtgctgtggggaccccaacccgtgctggtacatgtaaaggacgaaaatgaccaggtcccacactttagtcaggcgatttatcgtgcaaggttgtccaggggaaccagacctggcatccctttcctgtttttggaggcgtctgatcgtgacgaacctggaaccgccaactccgacttgcggtttcatattctgtcacaagccccagctcagcccagcccggacatgttccagcttgagccccgacttggggctctggctctctctccaaaggggagcactagcttggatcatgccttagagcgcacttaccagctacttgtacaggtcaaagacatgggtgatcaggcatccggccaccaggccactgcaactgtggaagtttccatcattgagtcaacttgggtgagcttggagccgatacacctcgccgaaaacttgaaggtgctctatccacaccacatggctcaggttcattggagcggaggggacgttcactatcacttggagtctcatcctcccggaccatttgaagtcaatgccgaaggcaacctgtacgttacccgagaactagacagagaagcgcaggctgagtacttgctgcaggtgcgggcacaaaattcacacggcgaggattatgcggcacccctggagttgcatgtgctcgttatggacgaaaatgacaatgtgcctatctgtccccctagggatcccaccgtttccattccagagttgtcccctccaggcacggaggtgacaaggttgtccgcggaagacgccgacgcacctggctcgccaaatagccatgttgtgtatcaactcctgagccccgaacctgaggacggggtggaaggtcgtgctttccaggtggaccctacctctggatcagttaccctcggggtgctccccctgcgtgccgggcagaacatcctccttttagtgctcgccatggatctggccggagcagagggcggcttcagttctacctgcgaggttgaggtggccgtaacagatatcaacgaccatgcccctgaattcatcacttcacagattggaccgatcagcctgccggaagatgtcgagccaggcacgctcgttgccatgttgacagcgattgacgcagatttagaacccgcattccgcctgatggattttgctattgaacggggcgacacagagggcaccttcggccttgattgggagccagactcaggccatgtccggctacgcctgtgtaaaaatctgtcttatgaggccgctccaagtcatgaagtggtcgtggtggtgcagagtgtcgctaaactggtgggccccggaccaggacccggggccaccgcaaccgtaaccgtgttggtcgagcgggtgatgcctccacctaaactggaccaggagagctatgaggcaagcgttcccatctccgctccagcaggatcattcttgttaaccattcagccatctgatcctattagtcggacacttcgattttcacttgtcaacgactctgaaggatggctgtgtattgagaagttcagcggcgaagtacatactgcccaatctttacagggggcacagccaggagatacctacactgtgctggtagaggctcaggacactgaccacggactgatagtttcgggtcccagcaaggatccagacttggcctccggtcacggcccatatagcttcacactagggcctaatcccaccgtgcaacgggactggagactgcaaaccctcaatgggtctcatgcttacctcaccctagctctgcactgggtcgagcctcgagagcatataatcccggtagtagtgagtcacaacgctcagatgtggcagttgctggttagagtgattgtatgtaggtgtaacgttgagggccaatgcatgcgcaaggtggggcgaatgaagggcatgccaactaagctgtcggctgttgggatcctggtgggcacactcgtcgccatcgggatcttcctgatattgatctttacacattggaccatgtctaggaaaaaggacccagatcagcccgctgactctgtacctctcaaagcgacagtttag

SEQ ID NO: 110244 - DNA, 2199 bp, synthetic construct
  misc_feature 1..2199: note = Description of Artificial Sequence: Synthetic coding sequence
  source 1..2199: mol_type = other DNA
atggtgcccgcttggctgtggctgctgtgcgtttctgtgccacaagcgctcccaaaggcccaacctgccgagctctccgtggaagtgccggagaactacggaggcaactttcctctgtatctcacaaagctgccgttgccaagggagggagccgaaggccagattgtcctcagcggagactcgggcaaagccacagagggcccatttgctatggatcccgactctggatttctcctggtcacacgcgccctagatagggaagaacaggccgagtatcagctgcaagtgaccctggaaatgcaggatgggcatgtactctggggccctcagccagtgttggtgcatgtgaaggatgaaaacgaccaggcttccggacatcaagctacagccactgtggaggtgagcatcattgagtctacatgggtgtcactggagcccatccatcttgcagaaaacctgaaggtgctctacccacaccacatggcccaggtccattggagtgggggcgatgtacattaccatctggaaagccacccacccggccccttcgaggtgaacgcggaggggaacctttacgtcactcgcgagctggaccgcgaggcacaggcagaatatctgctacaggtcagggcccagaatagccacggggaggactatgccgcccccttggagctgcacgttctagtaatggacgaaaatgataacgtgcccatctgcccaccacgcgatccaaccgtgagcattcctgagctttccccccccgggacagaagtcactcgcctatcagcagaagacgccgacgccccgggcagcccaaattcacatgtagtgtatcaactgttaagtcccgagccagaggatggagtggaaggcagagcgtttcaggtggatccaacttccggtagcgtcaccctgggggtgctcccactgagagctggacaaaatatcctgctgttagtgctcgccatggatctagctggggcagaggggggcttctcatctacctgcgaggtagaggtggcagttaccgacatcaatgatcacgctccagaatttatcacatctcagatcggacccatctccctcccagaggatgtggagcccgggaccctggtagccatgttaaccgcgattgatgccgatctcgaaccggcgttcaggctgatggacttcgccatagaacgaggcgacactgagggaacctttggtctggactgggagcccgactcaggacacgtgcgcctgaggctgtgtaagaacctgagctacgaggcagccccctcacacgaagtagtcgttgtggttcaatctgtggccaagctggtggggcctggccccggccctggagcaaccgcaaccgtgactgtgctggtggagagagtcatgcctccaccaaaactcgaccaagaaagctacgaggcctccgttcccatcagcgctcctgccgggtctttcctgttaacaatacaacccagtgatcctatctctcggacactgcgttttagcctcgtcaatgattccgagggttggctctgcatcgaaaagttttcaggggaggtgcacacggctcagtccctacagggggcacaaccaggagatacatataccgtgctggttgaagcccaggacaccgatgagcctagactcagcgcttcagcccccctggtgatccacttccttaaagccccgcccgccccagccctgaccctggcccctgtaccgtctcaatacttgtgcactcctcgtcaggaccacggactgatcgtgtcgggcccttcaaaagacccagacctggcctccggccatggtccctattcattcacgctcggtcctaatccaaccgtacagcgggactggaggcttcagactttaaacgggtcccatgcttacctcacactcgccctccactgggtcgaacctcgggagcatattattcctgtggtggtgtcgcacaatgcacagatgtggcaactgctagtgagggtaattgtctgcagatgcaatgtcgagggccagtgtatgcgaaaagtggggcgtatgaagggaatgcctacaaaactcagcgccgtgggcatccttgtgggaacgcttgtggccattggaatcttcctgattctgattttcacccattggacaatgagcaggaaaaaggacccagaccaacccgccgattcggtgccactcaaggccactgtgtag

SEQ ID NO: 110245 - DNA, 2490 bp, synthetic construct
  misc_feature 1..2490: note = Description of Artificial Sequence: Synthetic coding sequence
  source 1..2490: mol_type = other DNA
atggttccggcatggctttggctgttgtgtgtttctgtgcctcaggctctgcccaaggcccaaccagccgagctcagcgtggaggtgccagagaattacggcgggaactttccactctacttgacaaagttgccgttgccgagggagggggccgaaggacagattgtgctcagtggagatagcggaaaggcaaccgaaggccctttcgctatggatcccgattctggatttctgctcgtgacccgcgcacttgaccgtgaagagcaggctgaataccagctgcaggtgaccctggagatgcaagacgggcacgtgctgtgggggccacaacctgttctggtgcacgttaaggacgaaaacgaccaggttccccacttctcgcaagctatctatcgcgctcgcctctccagaggcacccggccaggtataccgtttctctttcttgaagccagcgacagggacgaaccaggcacagctaactcggacctcaggtttcatattctctcacaagctcctgcccagccttcccccgatatgttccagctagaaccacgcctgggcgctcttgctctctcccccaaaggatctaccagcctcgatcatgctttggaaaggacataccaactccttgtgcaagtcaaagacatgggggaccaagcctcaggacaccaggcgactgctactgtcgaggtgagcatcatcgagtccacatgggtcagcttagaacccatccatctggctgaaaatctaaaagtcctgtatccacatcatatggctcaggtccattggtccggcggagatgttcattatcacctggagagccacccccctggacccttcgaagtcaatgccgaggggaacctgtacgtgactagggaacttgacagggaagcccaggctgagtacctgttacaagtgcgcgcgcagaattcccacggcgaggattatgccgcgcccctcgagttacacgttctcgtaatggacgagaacgacaacgtgcctatctgcccacctcgtgaccccactgtcagtattcctgagctgtcgccgccgggtaccgaagttacacgactctcagctgaggacgccgatgccccgggcagccctaacagccatgtggtgtatcaactgctgtcccctgagccagaggacggggtggaggggcgggcctttcaagtagacccaacctccggctcggtgactctcggtgttctccctcttcgggccggtcaaaacatactgctgctggttctcgccatggatctggccggcgccgaaggcggattctcctccacttgcgaagttgaagtggcggtgactgacattaacgatcatgctccagaattcattacctctcagattgggcctatcagcctgcccgaggacgtagagccaggtacccttgtcgctatgctgacagccatcgatgcggaccttgagccagccttccgtctgatggactttgcaatcgaaaggggggacacagagggaacatttggactcgactgggagcccgactccggacacgtccgactgcgtctgtgcaaaaatttgtcttacgaggctgcaccgagccacgaagttgtggtggtggtacagagtgtggcaaagctggtgggtccaggccccggcccaggtgctaccgctaccgtcacagtcttggttgaaagggttatgcctcctcctaaactggatcaggagtcctatgaagcatcagtacccattagcgctcccgccggaagtttcttgttaaccattcaaccaagtgatccaataagccgcacgttaagattttcccttgttaatgacagtgagggatggctgtgtatcgaaaaattttccggcgaagtgcacacagcccaaagcctccagggggctcagcctggggacacatatactgtgcttgttgaagcgcaggacaccgacgagccacggctgagcgcaagtgctccgctagttatacactttttgaaggcacccccggcaccagctctaactctggcaccggtaccctctcagtatctctgcacaccccggcaggaccacggtctgattgtctccggcccaagtaaggaccctgaccttgcatcgggtcatggcccatatagtttcaccctgggtcctaaccccactgtccagcgcgattggaggttgcagacattgaacggctcgcacgcatacctgactctggctttacactgggtagagccaagggaacatatcatcccagtggtggtgtcacataacgctcagatgtggcagttgttagttagggttattgtctgccgttgcaatgtagaaggccagtgcatgcggaaggtggggcggatgaaggggatgcccaccaagctgagtgccgtcggaatcctcgtgggtacactggttgcaattggcatcttcctgattctcatcttcactcattggactatgtctaggaaaaaggatccggatcagccggcagattcagtccccctcaaagccaccgtgtag

SEQ ID NO: 110246 - DNA, 2424 bp, synthetic construct
  misc_feature 1..2424: note = Description of Artificial Sequence: Synthetic coding sequence
  source 1..2424: mol_type = other DNA
atggttcctgcctggctatggctgctgtgtgtgtccgtcccgcaagccttacctaaggcacagccagctgagctgtcagtggaagtgccagaaaattacggcggtaatttcccactgtatctgactaaactaccattgcccagggagggtgctgagggccagattgtcctgagcggcgattccgggaaggctaccgaggggcccttcgctatggaccccgattcgggattcttgctggtgacacgcgctctggatagggaggaacaggcagagtaccagcttcaggttactctagaaatgcaggatggacacgtgttatggggtccacagcccgtcctggtgcacgtcaaggacgaaaatgaccaagtgcctcacttcagccaagctatttacagggcccgcctttcacgaggcacaagacccggtattcccttcttgttcctagaggccagcgaccgagacgagccagggaccgctaactccgatctccgatttcatattctgtcacaggccccagcccaaccatcaccggatatgtttcagctagaacccagattaggcgccctggctctctcaccgaaggggtcaaccagtcttgaccacgcattagaaaggacctatcagctcctggtgcaagtgaaagatatgggtgaccaggctagcgggcaccaggcaacggctaccgtcgaggtctccataatcgagtcgacatgggtcagcctggagcccattcatctggccgagaatctaaaggtcctttatccccaccatatggcccaggtgcactggtccggcggggacgttcattatcatctggagtctcatcctcctgggccatttgaagtaaatgcagaaggcaatctctacgtgactcgagaacttgaccgggaggcacaggcagagtacttgctgcaggtcagggctcagaacagtcacggagaggactatgctgcaccattagagttgcacgtcctggtcatggatgagaacgacaacgtcccaatttgtcctcccagagaccctaccgtgtctatcccagagctctctccccctggaacagaagtgacaagactgagcgccgaggatgccgatgccccaggaagcccaaattcccacgtggtctaccaacttcttagccctgagcctgaagacggcgtggaaggtagagctttccaggtagatccaacttctggctccgtcactttgggggtcctccccctccgtgctgggcagaatatcttactgctggtactcgccatggaccttgcaggtgcggagggagggtttagctctacatgtgaggtggaggtagctgtgacagatatcaatgaccatgcccccgagttcattacttcacagattggaccaatctccctcccggaggacgtcgagcccggcaccctggtagccatgttgacggccattgacgcagacctggagcccgcctttagactgatggattttgccatcgagaggggggacactgagggcacattcggcctagactgggaacccgatagtggccatgttcgcctgagactgtgcaagaatctgagctacgaggccgcaccgtcccacgaggttgtggtggtggtccagtccgtggctaagcttgttgggcctggtcccggtcctggagcaactgccactgttaccgtacttgtcgaacgcgtcatgcccccacccaagctggatcaggagtcatatgaagcctcagtccccatctctgccccagctggcagtttcctgcttacaatacagcccagcgacccgatctcacgaacccttcgtttcagtctggttaatgacagtgagggatggctgtgcatcgaaaagttctccggagaagttcacacagcccagtctctgcagggggcccaacctggggacacttataccgtcctcgtcgaagctcaggacactgccctgacactggcccccgtgccgtctcaatacctctgtaccccccgacaagatcatggattaattgtatccgggcctagtaaggaccctgacttagcctccggacatggcccatacagtttcaccctgggaccaaatccaaccgtacagcgcgattggagactccagaccctgaacgggagccacgcgtaccttacccttgccctgcactgggttgaacctagagagcatataattcccgttgttgtgtcgcataatgcacaaatgtggcagcttttggtgcgcgtaatcgtatgtcgatgcaatgtggagggccagtgtatgagaaaagttgggaggatgaaaggtatgccaaccaaactttccgccgttggaatattggttggcactctggtagcgatcggaattttccttatcctgatctttacgcactggactatgagtagaaaaaaggatccagaccagcctgcagacagcgtacccctgaaggcaaccgtttag

SEQ ID NO: 110247 - DNA, 2382 bp, synthetic construct
  misc_feature 1..2382: note = Description of Artificial Sequence: Synthetic coding sequence
  source 1..2382: mol_type = other DNA
atggtacccgcctggctatggttattatgcgtgagtgtaccacaggccctgccaaaggcacagccagccgagctttccgtggaggtgcctgagaattatggtgggaattttccactgtaccttaccaaactcccactgccgagggagggcgccgagggacagattgtactttccggcgagcaagcagagatgcaagatgggcacgttctatggggcccccagcccgtattggtgcacgtgaaggacgaaaacgatcaagtgcctcatttcagtcaagcaatttaccgggcgagactgagtcgggggacccgccctgggatcccattcctctttctggaggccagtgacagggatgagcctggcacagccaacagtgacctgcgcttccacattttgagccaagcgccggcccagccctctcccgatatgttccaactcgagccccgtctcggggcactagctttatcgcccaagggaagcacaagtctggaccatgccctggagaggacttatcagcttcttgtacaggtgaaggatatgggcgaccaggcatcaggacaccaggcaacagccaccgtggaggtttcaatcatcgagtccacctgggtcagtttggaacctatccatttggccgaaaatctgaaagtgctgtacccccaccatatggctcaggtgcactggagcgggggcgacgttcattaccatctggagtctcacccccccgggccgtttgaggtaaatgccgagggtaacttgtacgtgacacgcgaactggatcgcgaggcccaggcagagtaccttctgcaggtgagagcccagaactctcacggggaggattatgccgcccctcttgagctgcatgttctcgtcatggatgaaaacgataatgtaccaatttgtccacctcgggaccctactgtgtccataccagagctctcacccccaggcaccgaggtaacccggctttccgctgaagatgccgacgcccccggcagccctaactcccacgtcgtgtaccaactactgagccccgagccagaggacggtgtcgagggcagagcatttcaggtagaccctactagcgggagcgtgaccctcggagtgctccccctccgcgctggtcagaatatactgttgctagttctcgcgatggacctggccggcgcggaaggcggctttagctctacttgtgaggtcgaggtcgccgtgactgatataaatgaccatgcccctgagtttatcacatctcaaattggacctataagtttacccgaggacgtggagccaggaaccttggtagctatgctaaccgcaatcgacgccgacctggagccggccttccggcttatggatttcgcaatagagcgcggagatactgaggggactttcggacttgactgggagcctgactccggccatgtgaggctgcgtttatgcaagaatttgagctacgaggccgcaccgtcacacgaggttgtcgttgtggtgcagagcgtcgccaaactcgttgggcctggaccgggtccgggcgcaactgctacggtgactgttttggttgagagggtgatgcccccccctaaactcgatcaggagtcatacgaggccagcgttcccatctccgcccccgcaggatcttttttattgaccattcagccctccgatcctatctctaggactcttcgatttagcctggtgaacgactcagagggatggctctgtattgaaaagttcagcggagaagttcatacagctcagtctcttcaaggggcgcaacccggggatacttatactgtgcttgtggaggctcaagatacagacgaaccaagacttagcgcctccgctcctctcgtgatccattttctgaaagctcccccggctccagcgttgacgttggcacctgtgccctcccaatacctctgtactccccggcaggatcatggcttaattgtgtctggaccctctaaagatcccgatctcgcttctggccacggaccctatagcttcactcttgggcccaatcccacagtccaaagggactggcgcttacagactctcaatggatcacatgcatatctgacactggcacttcattgggttgagcccagggagcatataatccctgtcgtagtgagccataatgcacagatgtggcagctgttggttcgggtgatcgtgtgccgctgtaatgtggaggggcagtgtatgagaaaggtgggccgcatgaaaggcatgcccaccaaattatcggctgtggggatcctagtggggacccttgttgccataggcatcttcctcatcttgattttcacccactggacaatgtcacgcaaaaaagaccccgaccagcccgccgattccgttccccttaaggctacggtctag

SEQ ID NO: 110248 - DNA, 2499 bp, synthetic construct
  misc_feature 1..2499: note = Description of Artificial Sequence: Synthetic coding sequence
  source 1..2499: mol_type = other DNA
atgatcctgcaggctcaccttcacagtctgtgcctcctgatgctgtatttagccacaggatatggccaagagggtaagttctctgggccactaaaaccaatgacattcagcatatacgaaggccaggaaccatcccaaatcatatttcagttcaaggctaacccacccgcggtcactttcgaattgacaggagagacggataacatattcgtaatcgagcgagagggcttactgtactataatcgagcccttgacagggagacccgctctacccacaacttacaggtggcagcgctcgacgcaaatggtattatcgtcgaggggcccgtccctattacaataaaggtgaaagatatcaatgacaaccggcctacctttttacagagcaaatacgaaggtagtgtgaggcaaaacagcaggcctggcaaacccttcctatatgtgaacgctactgacctagacgatcccgccacccctaatggtcaactatattaccagattgtcatccaattgcccatgatcaataacgtgatgtacttccaaattaacaataagactggtgcgatcagcctgactcgagaaggctcccaggaactgaatcctgcaaaaaaccctagttacaacctggtcatctctgtaaaggacatgggtggacagagtgagaactccttcagtgacacaacctccgtcgacataattgtaacagaaaacatctggaaggctcctaaacccgtagagatggtagaaaactccactgacccgcatcccatcaaaattacccaggtccgttggaacgacccgggggcacagtacagcctggtggacaaagagaaactcccccggttccctttcagcatcgatcaggaaggggacatatacgtgacccagcctctcgacagagaggaaaaagatgcttacgtcttttatgccgtcgctaaggacgagtatggtaagcccctctcttaccctctggaaatacatgtgaaagttaaggatattaatgataacccaccaacttgtccttcacctgtgaccgtcttcgaggtgcaggaaaacgagcgactcgggaatagcattgggacactcacggcccacgatagggacgaagagaatacagcaaattctttcctgaattataggattgtagagcagaccccaaagttgcccatggacggattgttcctcattcagacttacgcagggatgctccagctggccaagcagtctctcaagaagcaggataccccacagtataatctgacaattgaggtgagcgataaggacttcaaaacactttgtttcgtacaaataaacgttattgacatcaatgaccagatacctattttcgagaagtccgactacggtaatcttactctggcggaggatacgaacattgggtctaccattctgactattcaggctaccgatgcggatgagcccttcacaggctctagtaaaattctatatcatatcatcaaaggggactcagaaggccgacttggcgtggatacagacccacataccaacacgggttatgtcatcataaagaaacccctggattttgagacggccgctgtgtcgaacatagtgtttaaggccgagaaccccgaaccactcgtgtttggagtgaaatacaacgcatcaagtttcgcaaaatttactttgatcgtgaccgacgtaaatgaggccccccagtttagccagcacgtgttccaggccaaggtgtctgaagacgtggctattgggacaaaagtcggaaatgttaccgccaaggatcccgaagggcttgacatcagttactcgttgcgtggggatacgcgtggatggctgaagatcgatcacgtcacgggggagatattcagtgtagcccccctggatcgggaagcagggtctccctatagagtccaggtcgtagccacagaggtagggggaagctctctcagtagcgtgagtgagttccatctgatcctaatggacgtcaatgataatcctccgcggctcgccaaggattacacaggtctgttcttttgtcaccccttgtccgctcccggctccctgattttcgaagcaaccgacgacgatcaacacctctttcgtggtccacattttaccttttcacttggttctggcagcctgcagaatgattgggaagtctctaagattaacggcacgcacgcccgcttatccacccgccataccgagttcgaggagagagagtacgtggtcctgattcgaatcaacgatggcggcagacctccattggaagggatcgtgtcgctgcccgtcaccttttgttcttgtgttgagggatcatgttttcggccagccggacaccagacaggaataccaaccgtgggaatggccgtggggatcctgctgaccacattgcttgtaattggaattatcctggcggtggtgttcattcggattaaaaaagacaaaggcaaagataatgttgagagcgcccaggctagcgaagtgaaaccgctccggtcttag

SEQ ID NO: 110249 - DNA, 2499 bp, synthetic construct
  misc_feature 1..2499: note = Description of Artificial Sequence: Synthetic coding sequence
  source 1..2499: mol_type = other DNA
atgattctccaagcacatcttcactcgctgtgcttgctgatgctctatcttgctacaggatacggtcaggaaggcaagttcagcgggcctttaaaacctatgacattctcaatctatgagggccaggagccgagccagatcattttccagtttaaggccaatccacccgctgtgacctttgaattaacgggcgagacagacaacatttttgtcattgaaagagaggggcttctctactacaatcgagccttagacagagaaactaggagcacgcataacctccaggtggctgctctagacgctaatggaatcatagttgagggccccgttcccatcactatcaaagtcaaagacatcaatgacaacagaccaacgtttcttcagtctaagtatgaaggatctgtcaggcaaaactcacgacccggcaaacccttcctctacgtcaacgccactgacttagatgacccggccacaccaaatgggcagctgtattatcagatcgtgattcagctcccaatgatcaacaatgtaatgtatttccagattaacaataaaactggtgccataagcctcacacgcgaggggagccaggagctcaatccggcaaagaatccatcctacaatctggtcatttccgtgaaggatatgggtggtcaatcggagaattcgttctccgatactacatcagtggatatcattgttacagagaatatctggaaggctccaaaacctgttgaaatggtagaaaactccaccgatccacaccctataaaaatcacccaagtccgctggaacgacccgggtgcacagtactccctggttgacaaagaaaagctaccccgcttcccattcagcattgatcaagagggcgacatatacgtgacccagcccctcgatagagaagagaaggacgcttacgtcttttatgccgtggctaaagatgagtatgggaagcccttaagctatcccctggagatacacgtgaaagtcaaagacatcaacgataatccacctacatgcccttcaccagtgacagttttcgaagttcaggaaaatgaacggttaggcaactccattggcacgctaaccgcccatgacagagacgaggaaaacactgccaatagttttttaaattacagaattgtggagcagactccaaaactccccatggatggccttttcctcatccagacctacgctggcatgctgcagctggccaaacagagtctgaaaaagcaggacactccccagtataacttgaccatagaagtgagtgataaagattttaaaaccctttgttttgttcaaatcaacgtgattgacatcaacgaccagatacccatttttgaaaaaagcgattatggtaatctgaccctagcggaagataccaacatcggaagcactatcttgacaattcaagctacagacgccgacgagccctttactggctctagtaagattctgtaccatattatcaagggcgacagcgaaggcaggctgggtgtggacaccgatccccacactaacacggggtatgtgataattaagaagcccctcgattttgagacggccgccgtctccaacattgtgttcaaagccgaaaatcctgaaccgctcgtgtttggagtgaagtataatgcctcatcatttgccaagttcacactgattgtgacagacgtgaatgaagcccctcaattctctcaacacgtttttcaggccaaggtgagcgaagacgtggcgatcggcacaaaagttggcaacgtcacagccaaagacccggagggcctggacataagctactccctccgcggagatacgcggggatggctgaaaatagatcacgtcacaggtgagatattcagtgtcgcacccctggatagggaggctggtagcccatatcgggtgcaggtagttgctaccgaagtggggggctcgagcttatcttccgtcagcgaattccatctgattctgatggacgtgaacgacaacccaccacgacttgccaaggactatacaggcctctttttttgtcatcctctgtccgcgcctggttccctcatttttgaagccacagacgacgatcaacatttgttccgcgggccccattttactttttctctgggaagcgggagcctccagaatgactgggaagtttccaaaatcaacgggacccatgcgcgcctcagcactcggcacactgaattcgaggagcgggaatacgtggtgctcatcaggataaatgacggtgggagacccccactcgaaggcatagtgagcctgccagttaccttctgctcctgcgtggagggaagttgtttcaggccggccgggcaccagaccgggattcccactgtgggaatggcggtgggcatactgctgaccacccttctggttatcgggattattctggcggtcgtgtttatcaggatcaagaaggacaagggaaaagataacgttgaatccgctcaggcctctgaagtgaagcccctcagatcatag

SEQ ID NO: 110250 - DNA, 444 bp, synthetic construct
  misc_feature 1..444: note = Description of Artificial Sequence: Synthetic coding sequence
  source 1..444: mol_type = other DNA
atgatccttcaggcccatctgcatagcctctgtcttctgatgctgtacctggctaccgggtacggacaggaaggcaagtttagcgggcccctcaaacccatgacattttctatatacgagggccaagagcccagtcagataatcttccagttcaaggccaacccgcctgctgtcacttttgaattaactggcgagactgacaatatatttgtgatcgagcgagagggactactctactataatagggccctggatcgggaaacacggagcacacataatcttcaagttgccgccttggatgcaaacgggatcatcgtagaaggtcccgtgccgattacaattaaagtgaaggatattaacgacaacagacctaccttcctgcagtctaagtatgaagggtctgtgaggcagaattccagaccaggaaagccttttctctactag

SEQ ID NO: 110251 - DNA, 2373 bp, synthetic construct
  misc_feature 1..2373: note = Description of Artificial Sequence: Synthetic coding sequence
  source 1..2373: mol_type = other DNA
atgaagattacctccactagctgtatctgtcctgttctcgtctgtctgtgctttgttcagcggtgttacggaactgcccatcactcatctatcaaggtgatgagaaatcagaccaagcacatcgagggagagacagaagtgcaccacagaccaaaacggggatgggtgtggaaccagtttttcgtgctggaggaacatatgggcccagatccacagtatgtgggcaaacttcatagcaatagcgataaaggcgatggaagcgtgaaatacatacttaccggcgaaggcgccgggacaatatttattatcgacgatacgaccggggacattcattccaccaaaagcttggacagggagcagaagactcactatgtgctccacgcacaggcgatcgacagacgcacaaataaacctctggagcctgagtccgaatttatcatcaaagtacaggatattaatgacaatgctcccaagtttaccgatgggccttacatcgttaccgtgcctgagatgagcgatatgggaacctcagtactgcaagtgactgcaactgatgcagatgaccctacctacggtaattcagcccgagtcgtctactcaattctgcagggtcagccgtatttctccgtggatcccaaaacaggtgtcataagaaccgctctgcacaacatggaccgcgaagcccgagagcactatagcgtggtgatccaggccaaagatatggcgggtcaggtggggggtctgagtgggtctacaacagttaacattactctgacggacgtgaacgacaacccccctaggttcccgcagaagcactaccagctttatgtgcccgagagcgcccaggtgggatcagcagtcggcaaaatcaaggctaatgacgccgatacaggctccaatgcagatatgacatattctatcataaatggtgacgggatgggtatcttttctataagcacggataaggaaactcgtgaaggcatactgtccctgaagaagccactaaattacgagaaaaaaaaaagttacaccctcaatatagagggcgccaacacacatctggacttccgtttctcccacctgggtccttttaaggacgcaactatgctaaaaattatcgtgggggacgtggacgagccacctcttttctcgatgccatcctacctgatggaggtctacgaaaacgccaagatcggaactgtggtgggaaccgtactggcgcaagaccccgacagcacgaactctctggtacgttacttcatcaattacaatgtggaggatgacaggttctttaacatagatgccaatactggtactataagaacaactaaagtgcttgatagggaagaaacgccgtggtataacattaccgtcacagcatcggagattgacaacccagatctcctgagtcatgtgacagtcggtatccgggttcttgacgtgaatgataacccaccagagctggcccgagagtatgatattatcgtttgtgagaatagtaaaccagggcaagttatccacaccatatctgctaccgataaagatgatttcgccaatggtccacgctttaacttcttcctggacgagagactgcctgtgaaccctaatttcaccctcaaggacaatgaagacaataccgctagtatcttgactagacgacgacggtttagtcgtacagtgcaggatgtctattatttacctatcatgattagcgatggcgggattccttctctgagcagtagctccacactaaccattcgggtctgcgcctgtgagagggacggaagagtacgaacttgtcatgctgaagcatttctgagtagtgcgggactgtccacaggagccctcatagcaatcctcctctgcgtgttgatcctcctggccattgtcgttctcttcatcacactccggcgctccaagaaagagcccttgataatctctgaggaggatgtacgcgagaacgtggtgacctatgacgacgagggcgggggcgaggaagacaccgaggcattcgacattaccgccctgaggaaccctagcgccgccgaagagttaaaatatcgcagagacattaggcccgaagtgaaattaacgcctcgccaccagacaagcagcacattagagtctattgacgtccaagagtttattaaacagcggctggccgaagcggaccttgaccccagcgtcccaccatacgactcgctgcagacctatgcctacgagggccagcggagcgaggccggatccatcagtagcctggactcagccacaactcaatccgaccaggattaccattacctgggggactggggaccagaatttaagaagcttgcggaactttatggggagatcgaaagtgagcgaactacctag

SEQ ID NO: 110252 - DNA, 2373 bp, synthetic construct
  misc_feature 1..2373: note = Description of Artificial Sequence: Synthetic coding sequence
  source 1..2373: mol_type = other DNA
atgaaaattactagtaccagttgcatctgccccgtcctagtgtgtttatgttttgtgcagagatgttatggaactgctcatcactcctccataaaggtgatgcgtaaccagacaaaacatattgagggtgagacggaagtccaccatcggccaaaacgcgggtgggtgtggaatcagttttttgtgcttgaagagcacatgggccccgacccacaatacgtgggcaaactccatagcaattccgacaagggggatggaagcgtcaaatatatccttaccggagagggggctgggactatattcattatcgacgatactactggagatattcattccactaaatctctcgaccgggaacagaaaacccattacgtgctccatgcccaagcgatcgaccgaaggacaaacaagcctctggagcctgaatctgaattcatcatcaaggtacaggatatcaacgataacgcaccaaagttcacagacggcccatatatcgtcaccgtgcccgagatgtccgatatgggcaccagcgttctccaagtcaccgcgactgacgcggatgatccaacgtacggtaactccgcgcgcgtggtctattccatcttgcagggacaaccctacttctccgtcgaccccaaaaccggtgtgattcggaccgcccttcacaacatggatagagaggcaagggaacattatagcgtggtgatccaggccaaagacatggctggacaggtagggggtttatccggtagcacaacggtgaacattacactcactgacgtaaatgataacccccctcgattccctcaaaagcactatcagctctatgtgccagagtccgcacaggtggggagtgcagtggggaagatcaaagcaaacgatgccgataccggaagtaatgcagatatgacctactcaatcataaatggtgacggaatgggaatttttagtatttccactgacaaagaaacacgggagggcattctttccttgaagaagccccttaattacgaaaagaaaaagtcttacactctgaatatcgagggcgctaacacccacctagacttccggttctcgcacctgggcccattcaaagacgccacaatgcttaagatcatcgtaggtgacgtcgatgaaccccctctgttcagtatgccatcctatttgatggaggtctatgagaacgccaaaatcgggactgtggtgggtaccgtgctagctcaggatcccgactctactaattccctggtgaggtactttattaattacaatgttgaggacgaccgcttcttcaatatcgacgctaacactgggacaatacggacgaccaaagtcctggaccgcgaagagacaccatggtataacatcactgtgactgcaagcgaaatcgacaacccagatctccttagccacgtgaccgtggggatccgagtgcttgacgtgaatgacaacccacccgaattggcaagagagtacgacatcatcgtgtgcgagaacagtaagcccggccaagttatccacaccatttccgctaccgacaaggacgacttcgctaatggtcccaggttcaacttcttcctggacgagaggctgcctgtcaaccccaactttaccctcaaggataatgaggacaacacagctagtattttaaccaggcggcgccggttttctcgcacagtccaggacgtgtattacctgcccatcatgatttcagatggcggcatacccagtctgtctagctcatcaaccctgaccatccgcgtctgtgcatgtgagcgagacgggcgagtgcgtacctgccatgcagaagcatttttatcttctgccggcctctcgaccggtgcgctgatagctatactcctgtgcgtgttgatcctcctcgccattgtggtcctattcatcacgctccgcaggtctaagaaggagcctttgatcatcagtgaggaggacgtgagggaaaacgtggtcacatatgacgacgaaggagggggcgaggaggacacagaggccttcgacatcacagccctgcggaatccaagcgccgctgaggaactcaaatatagacgtgatataaggcctgaggtgaagcttacccctaggcatcaaacaagctccaccttagaaagcatagacgtacaagagttcattaaacagcgccttgcggaagccgacctggacccttcagttcctccttatgactctctgcagacgtacgcctatgagggacagagatcagaagccggtagcatcagcagcttggactccgctactacccagtccgaccaggactaccactatctgggggattggggaccagagtttaagaagctcgccgagctctatggagaaatcgagtcggagagaacgacctag

SEQ ID NO: 110253 - DNA, 1725 bp, synthetic construct
  misc_feature 1..1725: note = Description of Artificial Sequence: Synthetic coding sequence
  source 1..1725: mol_type = other DNA
atgaagataactagtactagttgcatttgccccgttttagtgtgtctctgtttcgttcagaggtgctacgggaccgctcaccatagctctatcaaagtcatgcgaaaccagaccaaacatattgaaggtgagaccgaagtgcaccataggccaaagcgaggttgggtctggaatcagttcttcgttctcgaagagcacatggggcccgacccacagtatgtcggcaaactgcattcaaacagtgacaaaggtgacggcagcgtgaaatacatcctgaccggtgagggggccggcaccatctttattatcgacgacaccaccggggacatccatagtacaaaatctttagatagagaacaaaagactcactacgtcctgcatgcccaggcaatagacaggaggacaaataagccattggagccagagtcagagttcattatcaaagtgcaggacataaatgataacgcacccaagtttacagacgggccctatattgtaaccgtacctgagatgagtgacatggggacatcagtgctgcaggtgacggccaccgatgcggatgaccccacatacgggaactctgctagggtcgtatacagcatccttcaggggcagccctatttttccgtcgacccaaagacgggcgttatacgtacagccctgcacaacatggaccgggaggctagggagcactatagcgttgtaatccaggctaaggatatggcaggtcaggttggtgggttgagtggaagcacaaccgtaaatattacactcaccgatgtaaatgacaacccaccacgcttccctcagaaacactaccagctgtacgtgccggaaagcgcgcaagttggctctgctgtgggcaagatcaaagcaaacgacgcagacaccggctcaaacgccgatatgacctactcaattattaatggcgatggtatgggaatctttagcatctcaaccgacaaagaaacacgtgagggcatcctgtccctgaagaagccgctcaactacgaaaaaaaaaagagctacaccctgaacatcgaaggtgcaaacacccaccttgacttccgatttagccatctcgggccttttaaggacgctactatgcttaaaattatcgtcggcgatgtagatgagcctccattgttctcgatgccttcctacttaatggaggtctatgagaatgccaaaatcgggaccgtggtgggaactgtcctggcacaggatcctgacagtaccaactccctggtccgctactttatcaactataatgtagaggacgacagattctttaacatcgatgcaaacaccggaactatcagaactaccaaggttctggacagagaggagacaccttggtataatataacggtcacggcttcagagatcgacaatcctgatttgctgagccatgttacagtgggaatacgagtgcttgatgtgaacgataatcccccagaattagccagagagtacgacataattgtgtgcgaaaactcaaaacctggacaggtcatccataccattagcgctactgataaggacgatttcgctaacgggcctcgcttcaactttttcctggatgaaagactacctgtgaatcccaacttcacactcaaagacaatgaggccgctgctccatctccgtctggttttgtgcacgctcgcgaaatgggcgtgtgtggcccagcaatgcagaaaccgtcatgtcccaggctcgtctag

SEQ ID NO: 110254 - DNA, 2373 bp, synthetic construct
  misc_feature 1..2373: note = Description of Artificial Sequence: Synthetic coding sequence
  source 1..2373: mol_type = other DNA
atgaagattacctccacgagctgcatttgtcccgtactcgtgtgcctgtgtttcgttcagaggtgctacggaaccgcccaccatagctccatcaaggttatgcggaatcaaaccaagcacatcgagggggagactgaagtgcatcatcggccaaagcgtggctgggtctggaaccagttcttcgtcctagaggagcacatgggtcctgacccacagtacgtggggaaactgcacagtaactccgataaaggagacgggtcagtaaagtatatactgaccggggagggcgccggaactatatttattatagatgacaccacaggtgatattcactcaacgaaaagtctggatagagagcaaaaaacacactacgtgctccatgctcaagcaatcgatcgaaggacaaacaaaccactggaacctgagtccgaatttatcatcaaggtgcaagatatcaatgataatgctcctaagttcactgacggaccttacatcgtcactgtcccagagatgtccgatatgggaacatcggtactccaggtcaccgccactgacgccgatgaccccacatatggcaatagcgcaagggtagtgtactccatactgcaaggccagccatacttcagtgtagaccctaaaaccggggttatccgcaccgccctgcacaacatggacagagaggctcgcgaacactacagtgtcgtgatccaggccaaagacatggcaggccaggtggggggcctgagtggttcgacaacagtgaatattaccttaacagacgtgaatgataacccaccacgattccctcagaagcactatcagctttatgttcccgagagtgcccaggtgggtagtgccgttggcaaaattaaggccaatgacgctgatacgggcagcaacgccgacatgacctacagtatcataaacggagacggcatgggcatcttctctatttctaccgataaggagacaagagaggggattctctcacttaagaagcctctgaattacgaaaagaaaaaaagctacactctgaatatcgaaggagccaacacccacctggactttagattcagtcacctgggcccatttaaagatgcaactatgctgaagataattgtaggagatgtcgacgagccacccttattcagcatgcccagctatctcatggaggtatacgagaacgccaaaattggcaccgtggtcggaaccgtcctcgcgcaggaccccgactcaactaacagcctggttcgatactttatcaattacaacgtggaggatgatagattctttaatatcgatgcgaatacaggaacgatacggaccactaaagttttagatcgggaagaaaccccttggtataatattaccgtgacagcttccgagattgataatcctgatctgttgtcacatgttactgtggggataagagtgctcgatgtgaatgacaatccgcccgagctcgccagggaatacgatatcatagtttgcgaaaattcgaaaccaggccaggttattcacaccataagcgcaaccgataaggacgattttgccaatgggcccaggttcaatttttttctggacgagcggctgcccgtcaatccgaacttcactttaaaagataatgaggacaacacagctagtattctgacccggaggcgccggttttcgcggacagtacaagatgtgtactatctgcctatcatgatctccgacgggggcattccaagcctctctagcagcagcacactcactattagagtttgcgcttgtgagagggacgggagagtcagaacctgccacgcagaagcctttctgtcctcagccggcctgtctacaggcgctctgatcgcaattcttttatgtgttctcattctcctcgccattgtcgtactgttcattactcttcgcagatccaaaaaggaacctttgatcattagcgaggaggacgtcagggagaacgtggtgacctatgacgatgaggggggcggggaggaagatacagaggcctttgacattacagccctgcgaaatcctagcgccgctgaagagctgaagtaccgccgggatatcaggcctgaagtaaagctcactcctcgtcatcagaccagctctactttggagagcattgatgtccaggagttcatcaagcagagactagccgaggcagatctcgatccctctgtgcccccttacgactcactgcagacttatgcttacgaagggcagcgctctgaagcagggagtatcagctcactcgattctgcaacgactcagagtgatcaagattaccactatcttggtgattggggcccggaatttaaaaaactcgctgaactctacggcgaaattgaatctgaaagaaccacctag

SEQ ID NO: 110255 - DNA, 2373 bp, synthetic construct
  misc_feature 1..2373: note = Description of Artificial Sequence: Synthetic coding sequence
  source 1..2373: mol_type = other DNA
atgaagatcacctctaccagctgcatctgtcccgttctcgtttgcctgtgctttgtccagcgctgttatggaacagctcaccacagcagcattaaggttatgagaaaccagacaaaacacatcgaaggcgagaccgaggtgcatcaccgccctaagagggggtgggtgtggaatcagttcttcgtgctcgaggagcatatgggaccagacccgcagtatgtaggaaaacttcacagcaactccgacaaaggcgacgggagcgtgaagtacatactgaccggcgaaggcgccggtaccatctttataatcgatgacacaaccggggacattcactcaacaaaaagtttggatagggagcagaagacccactacgtacttcatgctcaagcaattgataggcgaaccaacaaacccctcgaacccgagtcggagtttataatcaaggttcaggatatcaatgacaacgcacctaagtttactgacggcccctatatcgtcaccgtcccagaaatgtccgatatgggtacctctgtcctgcaagtgacagcaacagacgcggatgaccccacatacggtaactccgcgcgagtcgtctatagtatcctgcagggtcaaccgtacttctccgtggatcctaaaacaggcgtgatccggacagctcttcataatatggacagagaggcgagggagcactattctgtggtgatacaagcgaaggacatggcaggccaggtggggggtctctcaggatctactaccgtgaacattaccctgacggacgttaacgacaacccccccaggtttccgcagaagcactatcagttatacgtacccgagtcagcacaggtcggcagcgcagtgggaaagatcaaggcgaacgacgcagacaccggatcaaatgctgatatgacatactcaattatcaatggcgacgggatgggcattttctccatctcaaccgacaaggaaacgcgtgagggaattctctcattaaagaagccgctgaattatgaaaaaaaaaagtcatatactttgaacatcgaaggagccaacactcatctggatttccgcttctctcatttgggtcccttcaaggacgccacgatgctcaagattattgtgggtgacgtcgacgagccaccccttttttccatgcctagctacctcatggaagtttacgagaatgccaagatcggcaccgtagtggggaccgtcctggcacaggacccggattccacaaattccctggttcgctattttattaactataacgttgaggacgaccgcttttttaatattgacgccaatacagggaccataagaaccactaaagtactcgatcgcgaggagactccctggtacaatattactgtgacagcttccgaaattgataacccagacctcctttcgcatgtaaccgtcggaatccgggtcttggatgtcaatgacaacccacccgagcttgcccgagagtacgatattatagtgtgtgagaactctaaaccaggccaagtcatccatacaatatccgcaaccgataaggatgattttgccaacggaccgaggtttaatttttttcttgacgaacgcctcccagttaaccccaatttcaccctgaaggacaacgaggacaataccgcatcaatactgacaaggcgacgtcgattctcacggacagttcaagacgtgtactatttgccaattatgatctcagatggcggaatcccttccctgagctcctcctccacgctaacaattcgggtgtgcgcgtgtgaacgcgacgggagggtgaggacgtgccacgcagaagcattcctgtcctcggcagggctaagcactggcgccttaattgcaatcttgttgtgcgtgctgattctgttagcaatagtcgtcttgtttattactctaaggcggagcaagaaagagcccctcatcatctccgaagaagacgtgcgagagaatgttgttacatacgacgacgagggtgggggcgaggaagacacagaggcgtttgacattacagctctgcggaatcctagcgccgctgaggaactcaagtatcggcgagacatccggccagaagtaaaattaacaccacgccatcaaacatcatccacactggagagtatagatgttcaggaattcatcaaacagcgtctggcagaagccgaccttgacccctcagtccctccatatgacagtctgcaaacctatgcgtatgagggtcagaggtctgaggctggatctatctctagcctggacagcgcaacaacccagtccgaccaggactatcattacttaggtgactggggtcccgaattcaagaagctcgccgagctatacggcgagatagagagcgagaggactacctag

SEQ ID NO: 110256 - DNA, 2319 bp, synthetic construct
  misc_feature 1..2319: note = Description of Artificial Sequence: Synthetic coding sequence
  source 1..2319: mol_type = other DNA
atgaactgctacctattgctcaggtttatgcttgggattcctcttctgtggccatgtctgggcgctactgaaaattcacaaactaagaaagtgaagcagccggtgaggagtcacctgagggtcaagaggggttgggtgtggaatcagttcttcgttccagaggagatgaacaccaccagccatcacatcggtcagctcaggtcggatcttgataatggaaacaatagttttcagtacaaactcctcggcgcgggtgcaggctcgacctttatcatcgatgaaagaaccggagatatatatgcaatccaaaaattggaccgggaggaacgcagtctgtatatattaagagcccaggttatcgatattgcaaccggaagagccgtcgaacccgagagcgagttcgtaattaaggtctccgatatcaatgacaacgaaccaaagtttcttgacgaaccatacgaagccattgtccctgaaatgtcccctgagggaaccctagttatccaggtaaccgcaagcgacgcagatgaccctagctcgggaaacaatgctaggctcctatatagcctattacaggggcaaccgtacttctccgtcgaacctactaccggcgtgatccgcatctcatctaaaatggacagagaactgcaagatgagtactgggtaatcatacaagcgaaggatatgattggccagccgggtgccttatctggcaccacctccgtgttaatcaaactctctgacgtgaacgacaataagccaattttcaaggagagcctgtacaggctgaccgtgtctgagagcgcccctaccggcacatccatcggaacaattatggcttatgacaacgatatcggtgagaacgcagaaatggactattccatcgaagaagatgatagtcagacctttgacataatcacgaaccacgagacgcaagaagggattgttattctaaagaaaaaagtggatttcgagcatcagaatcactatggcatacgagcgaaggtcaagaatcatcatgttcccgaacagttaatgaaatatcacaccgaggccagcacaacatttatcaaaatacaggtcgaggatgtagatgagcctcccttgttcctactcccctactatgtgtttgaggtgtttgaagaaacgccccagggatcctttgtcggtgtagtgagcgctacggatccggacaacagaaagtctccaatccgatattcaattaccaggtccaaagtgttcaatattaacgacaatgggaccatcaccacatccaactccttggatcgtgaaatcagcgcctggtacaatctgagcatcactgccactgaaaaatacaatattgagcagatctcatccattcctctgtatgttcaggtcctcaatatcaatgaccacgctccagaattctcccagtattacgaaacctacgtatgcgaaaacgcaggctccggacaagtgatccaaacaatttcagccgtggacagggatgagtcaatcgaggagcaccatttctattttaaccttagcgttgaagataccaacaattccagcttcacgattattgataaccaggacaataccgccgtgattttgacaaataggaccggtttcaacttgcaggaggaacccgtattttacatttcaattctcattgcggacaatggcataccctcactgacgtccacgaacacgcttactattcacgtctgcgattgcggagattccggtagcacgcagacatgtcagtatcaagagctggtgctgtccatgggattcaagactgaggtgatcattgcaattctgatttgcataatgattatcttcgggttcattttcctgacgttaggattgaagcagagacgcaaacagattttgttccccgagaagtcagaggattttagggaaaatatctttcagtacgatgacgaggggggaggcgaggaagataccgaagcttttgatatcgccgagctgaggtcctcaacaatcatgagggaaaggaagactagaaaaaccacgtccgccgaaattcggtccctgtatagacaatctctccaggtcggacccgactccgccatctttcgcaaattcatcttagagaaactggaggaggccaatactgatccatgcgctccaccttttgatagtttgcagacatacgcgttcgaagggactggttcgctggccggatctctgtcgtccctcgaaagtgctgtgtctgatcaggatgaatcatacgactatcttaatgaactcggacccagatttaaacgacttgcctgcatgtttggaagtgccgtgcagtctaacaactag

SEQ ID NO: 110257 - DNA, 1173 bp, synthetic construct
  misc_feature 1..1173: note = Description of Artificial Sequence: Synthetic coding sequence
  source 1..1173: mol_type = other DNA
atgaatactacgtcacaccatatcggtcagttgagatctgatcttgataacggcaacaactccttccagtacaaactcttgggggcaggtgctgggagtacctttatcatcgacgaacgaaccggcgacatttatgcaattcagaagctggatagggaggagcgcagcctctatatcctgagggcgcaggtgatcgacatcgcaaccggcagggcagtggagccggagtctgagtttgtgatcaaggtgtcagacatcaatgacaacgagcccaaattcctggacgaaccctatgaagccattgtccccgaaatgagccctgagggcactttagtcatccaagtcaccgcaagtgacgcggatgatcccagctcgggcaataacgccaggttactttattcgctgcttcaaggccagccctatttttccgtggagccaacaaccggggttatcaggatctcttcaaagatggacagggagctgcaagacgagtattgggtgattattcaagccaaagacatgatcggccagccgggagctctgtcagggaccaccagcgtcctcataaaactcagcgatgtaaatgataacaagcctattttcaaggagagcctgtatcgcctgacagtaagtgagtcagcgcccactggcacgagtatcggaactatcatggcctacgataatgacatcggggagaatgctgagatggattactccattgaagaggacgatagccaaacgttcgatataataacgaatcatgaaactcaggaaggcatagtaatcctgaaaaagaaggtcgatttcgagcatcagaaccactacgggattcgagcgaaggtcaagaaccatcatgtaccagagcagctgatgaagtaccacaccgaagccagcacaacatttataaagatacaagtagaagacgtagacgaacctcctctgtttcttcttccctactacgttttcgaagtcttcgaagagacaccgcagggctcgtttgtgggtgtagttagcgccactgacccggataatcggaaaagccccattaggtactccataaccaggtccaaagtcttcaacatcaatgataatggaacaatcaccaccagtaattctcttgaccgggaaatttccgcatggtacaatttgtctatcaccgccaccgaaaagtag

SEQ ID NO: 110258 - DNA, 1473 bp, synthetic construct
  misc_feature 1..1473: note = Description of Artificial Sequence: Synthetic coding sequence
  source 1..1473: mol_type = other DNA
atgaattgctacctgctgctcagatttatgttaggaattcctctgctctggccatgtcttggcgccactgaaaacagtcagaccaagaaggtgaagcagccagttaggtcacacctgcgggtgaaacggggctgggtgtggaatcaattcttcgtgccagaggaaatgaacaccacaagtcatcatatcggacagttacgctcagacttggacaacgggaataatagctttcagtataagctcctgggcgccggggcggggagcacgttcattatagatgagcgcaccggagacatatatgccatccaaaaactcgatagagaggaacgttcattgtacattttacgcgctcaagtcatcgatatcgccactggaagggctgtggagcccgagtccgaattcgtgataaaggttagtgacatcaacgacaacgaacccaagttccttgatgaaccctacgaggctatcgtgccagagatgtcacccgaaggtactctcgtgatccaggtcacagcaagcgacgccgacgacccctcctcgggcaataacgcacggctgttgtacagtctgctccagggacagccttacttttcggtagagcccactaccggggtgattagaatcagctcaaaaatggaccgggaattacaggatgagtactgggtaatcattcaggccaaagacatgatcggccaaccgggcgccttgtctggcaccacgagcgtactgattaaactatctgacgtgaacgacaacaaaccgatcttcaaagaaagcctgtacaggcttactgtcagcgagtctgcccccaccggtacctccattgggaccattatggcctatgacaatgatataggagagaacgcggaaatggactactcaatcgaggaagacgattctcagaccttcgacataattaccaaccacgaaacacaggagggcattgtcatactgaaaaagaaggtagactttgagcaccagaatcactatggaatcagagccaaggtgaagaaccatcacgtgccggagcaacttatgaaatatcacactgaagctagcactacctttatcaaaattcaggtagaggacgtggatgagccccccctgttcctgctgccttactatgtattcgaggtttttgaagagaccccgcaggggagctttgttggggtggtatctgcaactgaccccgacaatcgcaagagtccaattcggtatagcattacccggtcaaaggtttttaacattaatgacaacgggactatcaccacttccaacagtttggaccgggaaatttccgcatggtataatctgtccataactgctaccgagaagtacaacatcgagcagatctctagcatccccttgtacgtccaggttctgaatattaatgaccatgctcctgagttttcccagtactatgagacgtacgtctgtgaaaatgccgggtccggacagggactgttcttttag

SEQ ID NO: 110259 - DNA, 2406 bp, synthetic construct
  misc_feature 1..2406: note = Description of Artificial Sequence: Synthetic coding sequence
  source 1..2406: mol_type = other DNA
atgtggacctcagggcgtatgtcaaacgctaagaactggctcggattaggcatgagcctgtacttctggggcttaatggatctgaccaccacagtgctgtccgatacaccgacgccccagggagaacttgaggccctgttgtccgataagccccagagccaccagcgcacaaagaggtcatgggtgtggaatcagttcttcgtcctggaggagtataccggcactgacccactctatgtaggtaagttgcattcagacatggaccggggcgatggttcaatcaaatacatcctttccggcgaaggggccggcatcgtctttacaatcgatgacactaccggagatatccatgctatccagagactggatcgtgaagagcgcgcccagtacacattgagagcccaggcccttgatcgcagaacaggccggccaatggagcccgagtccgaattcatcattaaaattcaggacattaacgacaacgaacccaagtttttggacggcccctatgtggccacagttcccgaaatgagtcccgtgggcacttccgtaatccaagtgactgctaccgacgccgatgaccccacatatggcaacagcgcccgtgtcgtatactctattctccaggggcagccatatttttcagtggactccaaaacaggtgtcatccgaacggctcttatgaatatggatcgtgaagcgaaagagtattacgaagtaatcatacaagccaaggatatgggcgggcagcttgggggacttgccggtaccaccaccgtaaacataaccctgtccgatgtcaatgataaccctcctcggttcccgcaaaaacactaccagatgagcgtcctcgagtccgcccctatatctagcactgttggcagggtttttgccaaggatctggacgaaggcattaatgccgaaatgaagtacaccatcgttgatggggatggagccgacgcctttgatataagcactgatccgaactttcaggttggaatcataacagtaaagaagcccctgagcttcgaaagcaagaaatcttacacactcaaggtagaaggggccaacccacatctcgagatgagattccttaacctgggcccttttcaggataccactaccgtgcatatcagtgtagaggatgtagacgagccccctgtgtttgagcctgggttttatttcgttgaagttcccgaagacgtcgccatcgggaccactattcagattatcagtgcgaaagatcccgacgtgactaataactcgattagatacagtattgaccgctcatcagatccaggcaggtttttctacgtagacattacgaccggggcactgatgacagcacgcccactggatagggaggaattctcatggcacaatataacggtactggctatggagatgaacaaccccagtcaggtcggctcagttccagtcacaatcaaggttctggacgtgaacgataacgcgccagaatttccgaggttctacgaagccttcgtatgtgagaatgcaaaagccgggcaattgatccagaccgttagcgccgtggaccaggacgacccacggaacgggcagcatttttattactcgctcgctcctgaagctgccaataacccaaatttcactatacgcgataaccaagataacactgctaggattctcacaaggagatccggattccgacagcaagagcagtccgtgtttcatttacccatactgattgctgattcggggcagcctgtgctttccagcacgggaaccctcacaattcaggtgtgctcctgcgacgatgacggacacgtaatgtcctgtagcccagaggcctacatgctgcccgtttctctctcgaggggcgccctcattgctatcctggcttgcatattcgtgctgttagtcttggttctgctcattcttagcatgcgcagacaccggaagcagccatatatcatcgacgatgaagagaatatccatgagaatattgtgcgctacgacgacgaagggggcggggaggaagataccgaggcatttgatattgccgctatgtggaaccccagagaagctcaagcaggggcagcgccaaaaacccgccaggatatgttacccgagatagaatccttgtcccggtacgtgccgcaaacctgtgcagtgaattccacagtgcatagttacgtgcttgctaagctgtacgaggccgacatggatttgtgggcaccccccttcgacagcctgcagacctacatgttcgaaggggacggatcagtggctggatctctcagctccttgcaatccgccactagtgacagtgagcaatcattcgacttcttgactgactggggcccgagattcagaaagctagccgaactgtatggggcgtctgaaggacccgctcctctttggtag

SEQ ID NO: 110260 - DNA, 2406 bp, synthetic construct
  misc_feature 1..2406: note = Description of Artificial Sequence: Synthetic coding sequence
  source 1..2406: mol_type = other DNA
atgtggaccagtggccgcatgtccaatgcaaagaattggctgggactaggcatgtcactctatttctggggtctgatggaccttaccactacagtgctgtccgataccccgaccccccagggcgaactcgaggccctgctgagcgacaaaccgcagagtcaccagagaactaagcgctcatgggtttggaaccagtttttcgtgctggaggaatataccggaaccgaccctctgtacgtggggaaactgcattccgacatggaccgaggcgatgggtcaataaagtacatcctaagcggagagggcgccgggattgtgtttaccattgatgataccaccggtgacattcacgccatacagcgtctcgaccgcgaagagagagcccagtacacactgcgcgcccaggccttggatagacgcaccgggagacccatggagcctgagagtgagttcatcattaagatacaggatattaatgataatgagccgaaatttctagacgggccttatgtggccactgtgcccgagatgtcacctgtggggacctccgtaattcaggtaacagcaactgacgcagatgaccccacatacggcaatagcgctagagtggtgtatagcatcttgcaaggccagccatacttctctgttgactccaaaacgggagttattcgcactgctttgatgaatatggacagggaggccaaggagtattacgaggtgatcatacaagccaaggatatgggtggccagctcgggggcctggctggaacaacaacagtgaatatcacactgagtgacgttaatgataaccctcccagattccctcagaagcattaccagatgtcagttctagagtccgccccgatatccagtactgtcggaagggtgtttgctaaagacctggacgagggaatcaatgcagagatgaagtatacaatagtcgacggcgacggagccgacgcatttgatatttctacagacccgaattttcaggtaggcatcatcacggtcaaaaagcccctgagcttcgagtccaagaaaagctacaccctaaaggtcgagggtgccaatcctcacctggaaatgaggtttctgaaccttgggccattccaggatacaacaacagtgcatatttccgtcgaagatgtcgacgagcctcccgtgttcgagcctggcttttattttgtggaagtgccagaggacgtggctataggaaccaccatccagatcatctctgccaaagaccctgacgtcaccaataactcaatccgctattcgatcgacagaagcagtgatccagggcgcttcttttatgtggacatcaccacaggcgcactcatgacagccaggccgttagatcgcgaggaatttagctggcacaacatcaccgtcttagctatggagatgaataacccatcccaggtcggctccgttcctgtgaccataaaggtgctggacgtcaatgataatgcccctgaattccccagattctacgaggcctttgtgtgcgagaatgctaaagcaggacagcttattcagacggtcagcgctgtagaccaggacgatcccaggaacggacagcatttctactacagcctcgcacctgaggcggcaaacaatccaaacttcactatcagggacaaccaggacaacacggcaagaattctgacaagaaggtccggtttcagacaacaggagcagagcgtattccacttgccaattctcatcgcagatagtggccagcctgtactgtcatccacaggaaccttgaccattcaggtctgttcttgtgacgatgacggccatgttatgtcttgctcccccgaggcttacatgctccctgtgagcttatcccgtggcgcactcatagcaatcttagcttgcatctttgtgcttttagtgctcgtgctgcttatcctgagcatgcgtagacatcggaagcagccgtatataattgatgatgaagagaacattcatgagaatattgtgcgctacgatgatgaaggaggcggcgaagaggacactgaagcttttgacattgccgctatgtggaaccccagagaagctcaagctggagcagcccccaaaacccgccaggatatgctgccggagatagagtcattgtccagatatgtccctcagacatgtgctgttaacagcaccgtgcatagctacgtgctggcaaagttgtacgaggccgatatggatctctgggctccaccctttgacagcctgcagacttatatgttcgagggggacggctccgttgctggcagtcttagcagtttacagtccgcaaccagtgactcagagcagtcttttgactttctgaccgactgggggccacggtttcgtaagcttgcagaactgtacggagcgtcggaggggccggccccactgtggtag

SEQ ID NO: 110261 - DNA, 2406 bp, synthetic construct
  misc_feature 1..2406: note = Description of Artificial Sequence: Synthetic coding sequence
  source 1..2406: mol_type = other DNA
atgtggacgagtggtcgcatgagcaacgccaaaaactggttgggcctcggcatgtctctgtacttctggggcttgatggatctgaccacaaccgttctgtccgacactccaacaccgcagggcgagctggaggctctcttgagcgacaagccccagtctcatcagcgtaccaagcgctcctgggtctggaaccagtttttcgtcctcgaggagtacacaggaactgacccattatatgtcggcaaattgcactcagacatggatcgaggcgacggttctatcaaatatatactctcaggcgaaggggcaggcattgtatttaccattgacgacacgacaggggatattcacgcgattcaacgcctcgaccgtgaggaaagagcacagtacacactgcgcgcacaagcactggaccgcagaaccggcaggcctatggaaccagagtcagagtttattatcaagatccaagacattaatgacaatgaaccaaagttcttagacggaccgtatgttgccacagtaccagagatgagccctgtgggaactagtgtgatacaagttacagccactgacgccgatgaccctacatatgggaactcagctcgtgtggtctatagcatcctccagggacagccatacttctctgtggattctaagacaggcgtaatcaggaccgccctcatgaacatggatcgggaggctaaggagtactacgaggtgatcattcaggccaaagacatgggggggcagctcggtggactggcggggacaacaacagtgaacataacactcagcgatgtgaacgataaccctccacgtttcccacagaagcactatcagatgagtgtcctggagtccgcgcctatatcttctacagtcggccgcgtatttgctaaagaccttgacgaaggtataaacgctgaaatgaaatatacaatcgttgacggggatggcgcagatgcttttgacatttccaccgatcctaatttccaggtgggaattatcacggtcaagaagccattgtcctttgaatcaaagaaaagctacaccttaaaagtcgaaggtgccaacccgcaccttgaaatgcgctttctgaatctaggtccttttcaggatacaacaaccgtccacatatctgtggaggacgtggatgaaccccctgtttttgagcctggtttttacttcgtggaagttcccgaagacgtggctataggcaccaccatacaaatcatctccgccaaggatccggacgtcacaaataacagcatccggtatagcatcgaccggtcatccgatccagggcgtttcttttatgtagacatcacaactggggcacttatgactgcacggcctctggaccgggaggaattcagctggcataatatcaccgtcctggctatggaaatgaataacccttcacaggtcgggtcggtaccagtgacaatcaaggtgctggacgttaatgataacgcgccggaattcccgcgcttctacgaggcctttgtatgcgaaaacgccaaagccggccagctaatccagactgtatccgccgtggatcaggatgacccgcgcaacggtcagcacttctattatagtttggcacctgaggctgctaataatcctaattttactattagagataaccaggacaatacagctcgtatcctaacaaggaggtccgggttcagacagcaggaacagtctgtgttccaccttcctatcctgatcgcggattcaggtcagcctgtcctatcctctaccggcacactcaccattcaggtctgcagctgcgatgacgatggacacgtgatgtcctgcagtccagaggcctatatgctgcccgtaagcctttcgagaggagctctcatagccatcttggcatgcatttttgtgttgctggtgctggtgctcctcattctctctatgagacgccatcggaagcaaccctatataattgacgacgaagagaatatccatgaaaatatcgttaggtatgatgacgagggcggaggagaagaagacacagaagctttcgatatagccgctatgtggaaccctcgtgaggcccaggctggtgccgccccaaagactagacaagacatgcttcccgaaatcgaaagcctgtcacgatatgtgccgcagacatgcgccgtgaacagcaccgtccactcctacgtgctggcgaaattatatgaggctgacatggacctctgggcgcctccattcgacagcctgcagacatacatgttcgagggcgacggctcagtcgctggtagtcttagttccctgcaatcggcaacatctgactccgagcagtccttcgacttcttaactgattggggccctcgatttcgcaaactggccgagctttacggggcatccgaagggcccgcgccactgtggtag

SEQ ID NO: 110262 - DNA, 2487 bp, synthetic construct
  misc_feature 1..2487: note = Description of Artificial Sequence: Synthetic coding sequence
  source 1..2487: mol_type = other DNA
atgcggcctcgccctgaggggcgcggtctacgagctggcgttgcgctgagtcccgcactgctgctccttctgctgttgccacccccacctaccctgctgggtcgtctgtgggccgcagggactccttccccctcagcgcccggtgccaggcaggatggcgccctcggtgccgggagggtgaaacggggatgggtctggaaccaattctttgttgtcgaagagtatacagggaccgagccgctctatgtaggcaaaatccacagtgactccgacgagggggatggggccatcaaatacacgatcagcggagaaggcgccgggactatcttcctaattgatgagctaacaggcgatatccatgccatggaacgactcgacagggagcagaaaaccttctatacccttcgagcacaggcaagggaccgcgccaccaaccgactgcttgaacccgagagcgagtttattatcaaggtgcaggatataaacgatagcgagccacgctttctgcacgggccgtatattgggtctgtggccgagttatctccaaccggaacttctgtgatgcaagtgatggcatccgatgcagacgaccctacttacggttcgagtgccaggctggtgtacagtgtgctggatggagaacaccacttcacagttgacccaaaaaccggagtgattcgcaccgcagttccggatctcgatcgcgagagccaagagaggtacgaagtcgtcatacaggcaacagacatggccggacagctgggggggctgagcgggtcaactactgtaaccatcgtcgttaccgacgtaaacgataaccccccccgctttccacagaagatgtaccagttttccatccaggagagcgcccccatcggaacagcagtagggcgtgttaaggctgaggatagcgatgttggcgagaacacagatatgacataccatctgaaggacgagagctcatcaggaggagacgtgttcaaggtgaccaccgactccgacacccaggaggccattattgttgtgcagaaaagattggacttcgagagccaacctgttcatacagtgattctagaggccttgaataagttcgtagacccgaggtttgcggacctggggacatttagggaccaagccatcgttcgcgtggcggtcacggatgtagacgagccacccgagtttcgtcctccatccgggctcctagaagtgcaggaagatgcgcaagtaggtagcttggttggcgttgttaccgcccgcgatccggacgccgccaatcgaccagtccggtacgctattgaccgagagtcggatctggaccagatattcgacatagatgccgacaccggcgccattgtgactggtaagggcctcgaccgggagacagcgggatggcacaacatcactgtgctcgctatggaagcggataatcacgcccagttaagcagggcgtcactgagaattcggatcttggatgtgaacgacaacccccccgagttagctacaccttacgaagctgccgtgtgtgaggatgcaaaaccaggtcagctcattcagacaatcagtgttgtcgacagggatgagccccaggggggccacagattttactttcgtttagtacctgaggccccatcgaacccccatttcagtctgctggatatccaagacaacactgccgcagtgcatacacagcatgtgggtttcaaccgccaggaacaggatgtgtttttcctgcctatcctcgtggtcgatagtgggccgcccaccctgtcatccacaggcaccttgaccatccgcatttgtgggtgtgatagttctggaactattcagagctgcaacacaaccgcgtttgtcatggccgcctccctctctccaggcgccctaatcgccctgctggtgtgtgtactcattttagttgtcctcgttctcttaattttgactctcaggcgtcaccacaagtcacacctttctagtgatgaagatgaagacatgcgcgacaatgtcattaaatataacgacgagggtggcggtgagcaggataccgaggcctacgatatgtcagcgctccggtccctgtatgatttcggggagcttaaagggggggacggcggcgggagtgccggcgggggtgccggcggaggtagcgggggtggagcggggagccccccccaggcccacctcccctcagagcggcattctctgcctcagggtcctccaagcccagaacctgacttctccgtgttccgggattttatctctcggaaggtggcactcgccgacggcgacctctcagtgcccccctacgacgccttccagacttacgctttcgagggggccgactcgccagcagcaagtttatcttcattgcattcaggctcgagtggtagcgagcaggactttgcatacctgtcctcctggggccctcgatttcggcctctggctgccctttacgccggtcacaggggcgacgacgaggctcaggcttcatag

SEQ ID NO: 110263 - DNA, 2487 bp, synthetic construct
  misc_feature 1..2487: note = Description of Artificial Sequence: Synthetic coding sequence
  source 1..2487: mol_type = other DNA
atgcggccaagaccagaagggcgcgggctcagagctggcgtggcacttagccctgccttacttctcctcttgctgctgccaccccctccgaccctgctggggaggctctgggcagccggaaccccgtcaccaagtgcccccggagcacggcaagacggcgccctgggggccggccgtgttaagaggggatgggtgtggaatcagtttttcgtagttgaagaatatacagggacagagcccctgtacgtggggaagatccacagcgattcggatgaaggggacggggctatcaaatacacgataagcggcgaaggcgcaggcacaatttttctgatagacgagctgaccggggatatccacgctatggaaaggctagacagggaacagaagaccttctataccttgagagcgcaggccagagatcgcgcaaccaatagattgttggagccagagagcgagtttatcatcaaagtccaggacatcaacgattctgagccacgattcctccacggcccgtatatcggctcagtggctgaactgtcccccactggtaccagtgtaatgcaagttatggctagcgacgccgatgatcctacgtacggatcttctgcgcgtttggtttactccgtgctggatggcgaacaccattttacagtggacccgaaaacaggggtcatccggaccgcagtccctgacctggatagggagtctcaggagcgatacgaggtagtcatccaggctaccgatatggcaggacagctcgggggactgagcggcagcacgaccgttactatcgtggtaaccgacgtcaatgataaccctcctcggtttccacagaagatgtaccagttcagtatacaggagtccgcacccataggaactgccgtgggcagggtgaaggctgaggacagtgacgtcggtgagaatacagatatgacttaccatctaaaggacgagtcatcatcagggggtgacgtgtttaaagtgacaactgactccgatacgcaggaggcaatcatcgtggtgcagaaaagattagacttcgagagccagcccgtgcatactgtcattttagaggctttaaataagttcgtggaccccaggttcgcagatctgggtacgtttcgagaccaggccatcgtccgggttgcagtaaccgatgtagatgaacctccggagttccgacctccaagcggcctcctggaagtgcaagaggatgctcaggtcggatcactggtcggggtggtgaccgcccgagaccccgatgccgcgaaccgaccagtgaggtacgctattgaccgcgaaagtgacctggaccagatctttgatattgacgccgatacaggagcaatcgtgacgggcaagggactggatagagagacggcgggctggcacaacataaccgttctggccatggaggcagacaatcacgcccagctctccagggcttctctccggataagaatcctcgatgtcaacgacaaccctcctgagttggcaacaccatacgaagccgccgtttgtgaagacgctaaaccaggccagctaatacagaccatcagcgttgtcgacagggatgagcctcagggaggccataggttctattttcgcctggtgccagaagctcctagcaacccgcatttctcactgctcgatattcaggacaacacggccgccgttcatacccagcacgtcggctttaaccgccaggaacaagacgtgtttttcctccccattctggtcgtggactccggccctccaaccctttcatctactggcacactgaccatccgcatctgtggctgcgattccagcgggacgattcagtcttgcaacaccacggccttcgttatggcagcctccttgtcgcccggcgcgcttattgcactgctggtttgtgtactgatcctcgtcgtcttggtgttgcttattctcacattaagacggcatcataaatcccatctgagcagtgacgaagacgaagacatgagagacaacgtcatcaagtacaacgacgagggcggcggtgagcaggataccgaagcctacgacatgagcgctttaagatccttgtacgactttggcgagctgaaagggggagatgggggcgggtccgcaggtggaggggccggtggggggtccggtggaggcgctggtagcccaccccaggcccatttgccatctgaacgtcattctttgccacagggcccaccttcgccagagccagattttagcgtatttcgggattttatttcaagaaaagtggcgttagccgacggggatctttccgtccccccttacgatgcctttcagacgtacgccttcgaaggcgccgactcaccggccgcaagtctgagctctctccatagtggctcgagtggatctgagcaggattttgcttatcttagcagttggggtccccgcttccgtcctctggcagctctgtatgcaggacaccggggcgacgacgaagctcaagcctcttag

SEQ ID NO: 110264 - DNA, 2490 bp, synthetic construct
  misc_feature 1..2490: note = Description of Artificial Sequence: Synthetic coding sequence
  source 1..2490: mol_type = other DNA
atggggctgcctcgtgggcctctcgcgagtctcttgctgctgcaagtttgctggttgcagtgcgcagcaagcgaaccgtgtcgggccgtgttcagggaggctgaggtgaccttggaggccggcggtgctgagcaggagcctggacaggctctgggtaaggtctttatggggtgtccaggacaggagcccgcactgttctccacggacaatgatgacttcactgtgcggaacggggaaaccgtgcaggaaagaagatccctgaaggaacggaacccacttaagatattcccatcaaaaagaattttacgcagacacaagagagactgggtggtggcccccatttcagtcccagaaaacggaaagggtcccttcccacagcggttaaatcaactcaaatcaaataaggatcgcgacacaaagatattttactccatcaccgggcctggggcagactctccacccgaaggggtctttgccgtggagaaggaaacgggctggctgttgcttaacaagccgctggatcgagaagagattgctaagtacgagttgttcggtcacgcggtgtctgaaaacggtgcctcggtggaggacccaatgaatatcagcatcatagtgacagatcagaacgaccataagcccaagtttacgcaggacactttcagagggtccgttctagaaggtgtgctgcccggtaccagcgtgatgcaagtaactgcaacggatgaggacgatgctatttatacttacaacggagtggtcgcctacagtattcactcccaagagcccaaagacccccacgaccttatgtttaccattcaccgcagcaccggaaccatttctgtgattagctcaggcctggacagagagaaggtaccggagtacacactgaccatacaggcaacggacatggacggggacgggagtacgactacagccgtcgcggtggttgagattctggatgccaatgataacgctccgatgtttgacccacagaaatacgaagctcatgtccccgaaaacgctgtggggcacgaggtccagcggctgacggtgacggacctcgacgcccccaactcccctgcctggagggcaacatatctgatcatggggggggatgacggggatcactttacaataactacgcatcccgagtctaatcagggaattctaactacgcggaaaggactcgactttgaggccaagaatcagcacactttgtacgtggaggtgacgaacgaggccccttttgttctaaagctgcccaccagtacagctaccatcgtcgtgcacgtggaggatgtcaacgaggcccccgtctttgtccccccatccaaagtcgtagaggtgcaggagggcatacctacgggcgaacccgtgtgtgtctacaccgccgaggatccagacaaggagaaccaaaagatctcctacagaatactgagagatccagctgggtggctggcaatggaccccgattcgggccaggtcacagccgttgggaccctcgacagggaggacgagcagttcgtaaggaacaatatatatgaggtgatggttcttgccatggacaatgggtcaccccccaccacagggactggcaccctgctgctgaccctgattgacgtaaacgaccacggccctgtgcctgaacccagacaaataactatttgtaatcagtcccccgtacgccaggtccttaatattacagataaggatttgtcacctcatacatccccattccaggcccagctgaccgatgacagcgacatctactggaccgcagaagttaatgaagaaggagatacagttgttctgtctctgaaaaaatttctgaagcaagatacatatgacgtacacttgtctctttcagaccacggcaacaaggagcagttgacagttatcagagctaccgtgtgcgattgccatgggcacgtggaaacctgcccaggtccctggaagggcggcttcatactgcctgtactgggggcggtcctagccctgctctttctgctgttagtgctcctgctactcgtgcgaaaaaagagaaagataaaggagccgttactgctccctgaggacgacacacgtgataatgtgttctattacggagaggagggtgggggcgaagaggatcaggactatgacattacgcagttgcacagagggctggaggcgcgaccggaagtggtgcttcgcaacgatgtcgctcccacaatcattcccactccaatgtatcgacctcgcccggctaatccggatgagattgggaatttcatcatcgagaacctgaaggccgccaataccgacccgactgccccgccttacgataccctgcttgtgtttgactacgaggggagcggctccgacgccgcgtcacttagctcactgacgtcctcagcgagcgatcaggaccaagactatgactacctcaatgaatggggctctaggttcaagaagttggctgatatgtatggcggaggagaagacgactag

SEQ ID NO: 110265 - DNA, 2355 bp, synthetic construct
  misc_feature 1..2355: note = Description of Artificial Sequence: Synthetic coding sequence
  source 1..2355: mol_type = other DNA
atgggtctcccacgcggccccctcgcctctctcctactgcttcaagtctgctggctgcagtgcgcagcctctgaaccatgtcgcgctgttttccgtgaggccgaagttacacttgaggctggaggcgccgagcaagaaccaggacaggctctcggtaaagtcttcatgggctgccccggccaggagcccgccctcttttctactgacaacgacgacttcacggttaggaacggggagactgtgcaggaacgtcggtcactgaaagagcgaaaccctctcaagatatttccatctaagaggatcctcaggcgccataaacgcgattgggtcgtggcacccatcagtgtaccggagaatggcaagggtccctttcctcagagactcaatcagctgaagtccaataaggatagggacacaaagattttttatagcatcactggtcctggcgccgacagtccacctgagggtgtttttgccgtagaaaaagagacagggtggctgcttctgaataagcctcttgacagggaagagatcgctaaatatgagctgtttggtcatgccgtttccgagaatggagcctccgtcgaggatcccatgaatatctcaataattgtgaccgatcagaacgaccataaaccgaagttcacacaggacacctttagaggaagcgtgcttgagggagtcctccccgggacaagcgtcatgcaggtgaccgcaactgatgaggatgatgcgatttatacatataacggggtagtggcctactccatacacagccaagaaccgaaagacccgcatgatctcatgttcacaattcaccgcagtaccggaacaataagcgtgatcagttcgggcttagacagagaaaaggtccccgagtacacactcaccatccaagccactgatatggatggcgatgggtcaacgaccactgccgtggcagtcgttgagattctagatgccaacgacaacgctccgatgtttgatcctcagaaatacgaagcacacgtgcccgagaacgcagtggggcacgaggtgcagcgactaacagtcactgatttagacgctcctaattccccggcatggcgtgctacctatttaattatggggggggacgatggggatcacttcacaattacaacgcatcccgaaagcaatcaggggatcctgaccaccagaaaaggtctcgactttgaggccaaaaaccaacacacactgtatgtggaggtgacaaacgaggcccccttcgtcctgaaactgccgactagcactgccacaatagtggtccatgtcgaagacgtcaacgaggcccctgtctttgttccccccagcaaggtggtagaagtgcaagaaggcatcccaactggcgaaccagtgtgcgtgtacacggccgaggatcccgacaaggaaaaccaaaaaatctcctaccggatcctgagagacccggctggatggctcgctatggaccccgattcaggacaggtgacagccgtcggcactctggaccgagaggatgaacagttcgtccgtaacaacatctacgaagtgatggtgctggccatggataacggcagcccacccaccacagggaccggcacccttctcctgactctgatcgatgttaacgatcatggaccagttcctgagccccgtcagattacaatttgcaaccagagtccagtgagacaggtactcaatatcactgacaaggacctgtccccccacacctccccctttcaggctcagctgacggatgactcagacatctactggactgccgaggtaaacgaagagggagacacagtcgtattatccttgaaaaaattcctgaaacaggatacctatgacgtgcatctcagcctgtcggaccacggtaataaagagcagttgactgttatcagggccaccgtctgcgattgccacggccacgtggaaacttgtcctggtccctggaaggggggattcatcttgccagtgctgggtgcggtgttagccctgctgttccttctgttggtgcttctgctcctcgtcaggaagaagaggaaaattaaggaacctctattgctgccagaagatgatacaagggacaatgttttctactacggtgaggaaggcggaggcgaggaggatcaggactatgatataactcagctgcatagaggcctcgaagcgagaccagaagttgtactgaggaatgacgtggcgcctaccatcattccaactcccatgtatcggcctcgccctgccaaccccgacgaaattggcaacttcattatcgaagggcggggcgaaaggggttcacagcgcggcaacggggggctccagctagctagagggaggacccggcggagctag

SEQ ID NO: 110266 - DNA, 2325 bp, synthetic construct
  misc_feature 1..2325: note = Description of Artificial Sequence: Synthetic coding sequence
  source 1..2325: mol_type = other DNA
atggggtgccctggccaggagccagccctattttccaccgataatgatgacttcaccgttagaaatggggagacggtccaggagcgtagaagtctgaaggaacggaatccattgaaaatatttccatctaaaaggatcctgaggagacataagagagactgggtcgtggcacctatcagcgtgccagagaatggaaaggggccatttccccagagactcaaccaacttaagagtaataaggacagagatacgaagatcttttattccattactgggcccggcgctgactcaccaccagaaggtgtgttcgcggtcgaaaaagaaacgggttggctgcttttgaataagcctctggatcgcgaggagattgccaagtatgagctttttggacacgctgtgtctgaaaacggagccagcgtggaagaccctatgaacatcagcatcatcgtgacagaccagaatgatcataagcctaagttcactcaggacaccttcagaggcagcgtcttggaaggcgttctccctggcacatcagtcatgcaggtgacagccaccgacgaagatgacgccatctatacttataatggagtggtagcttattctatacactcacaggaacctaaggaccctcacgatctaatgttcacgattcataggagcacgggcacaatatccgtgatttcaagcggtttggatcgcgaaaaggtgccagaatacacactgaccatccaggctacagatatggatggagacggctccactacaacagcagttgctgtcgtcgaaatcctggacgcaaacgataacgcacccatgttcgatccccagaagtatgaggcacacgtgccagagaacgctgtgggccacgaggtgcagcggctcactgtcaccgacctggatgcacccaattctcctgcctggcgggcgacgtatttgattatgggtggcgatgacggcgaccactttacgatcactacccatccagagagcaaccaaggtatcctgactaccagaaagggcttagattttgaggcgaagaatcaacatacgctgtacgtcgaggttactaatgaggcaccctttgtgctgaaactgccgacatccacggccaccatcgtcgtgcatgtggaggacgttaacgaggcacccgtcttcgttcctccaagtaaagtggtggaagtccaggagggaattcctactggcgaaccggtgtgcgtgtatacggcagaggaccctgataaggagaatcagaaaatcagttaccgcattctacgcgaccccgcagggtggctggctatggatcccgacagcggccaggtgacagcagtgggcaccctcgatcgtgaggatgaacagttcgtgcgcaataatatttatgaggtgatggtgctggcaatggacaacgggagtccgcccacaaccggtacagggaccctgttgttgacgttaattgacgtgaacgaccatggaccagtcccagagccacgtcagatcaccatttgcaaccagtcaccagtccgccaagttctcaatattacggacaaagatctgagcccccataccagcccctttcaggctcaactcaccgatgacagtgacatctattggacggctgaggttaatgaagagggcgacacagtggtcctatccctcaagaagtttcttaaacaggacacctacgatgtgcacctatctctgagcgatcacggcaacaaggaacaactcaccgttatccgcgccactgtctgtgactgtcacggtcacgtggaaacttgccccgggccgtggaagggaggatttatactgcccgttcttggagccgttctggccctactgtttttacttctggtattattgctgctggtcaggaagaagcggaaaatcaaggagcccctgctgctgcccgaggacgacacacgagacaacgtgttctactacggcgaagaaggaggcggtgaagaagaccaggactacgacatcactcagttgcaccgtggccttgaagccagacctgaagtcgtgctcaggaacgacgtggcaccaaccattattccgaccccaatgtatagacctagaccagccaaccccgatgaaattggcaatttcattattgaaaatctaaaggccgccaataccgaccccactgcacctccatatgatacgctactcgtttttgactacgagggctcagggagcgacgctgcctcgttgtcttcattaacttcctcagcttcagatcaggaccaggactacgactacctcaacgagtggggatctcgcttcaaaaaacttgcggacatgtatggcgggggagaggatgattag

SEQ ID NO: 110267 - DNA, 2751 bp, synthetic construct
  misc_feature 1..2751: note = Description of Artificial Sequence: Synthetic coding sequence
  source 1..2751: mol_type = other DNA
atgacagcgggagctggcgtgctgctgctactgctgtcactaagcggggcccttcgagcacataacgaggatctgacaacaagagaaacttgcaaagctggattcagcgaagatgactacactgctcttatatcacagaacatactggagggggagaagctattgcaggtgaagttcagtagctgcgttggtaccaaggggacgcagtacgaaaccaatagcatggactttaaggtcggtgccgacgggactgtttttgccactcgagagctccaggtgccttccgagcaggtcgcctttacagttaccgcttgggactctcaaactgccgagaaatgggacgcagtagttagattactagtggcacaaacttcttcccctcattcaggccacaaaccacagaaaggtaagaaggtggtggctctcgatccctccccccctcccaaagatactcttctgccctggccccagcaccagaacgccaacgggcttcgccggcggaaaagagactgggtaataccgccgattaatgtgcctgaaaacagtcgtggacccttcccacagcaactggttcgcattagatctgataaagacaatgatatcccgattcgttattccatcacaggagtgggggcggaccagccgcctatggaagtattcagtatcgacagcatgagcggccgtatgtacgtaacacgtcctatggacagggaagaacatgcaagttaccaccttagggcacatgccgtggacatgaacgggaataaagtagagaatccaatcgatctgtatatatacgtgatcgacatgaatgacaaccgtccagaattcataaaccaggtttacaatggctccgtcgacgagggcagtaaaccagggacatacgtgatgaccgtcacagccaacgatgcggatgatagcacaacggcgaatggaatggtacgatacagaattgtgacccagacaccacagtcaccctctcaaaacatgttcacaatcaactcagagacaggcgacattgtgacagtggcagccgggctggacagagagaaggttcagcagtatacagtgatagtgcaggctaccgatatggagggtaacctgaattacggcctctccaatacagcaactgccatcatcaccgtcaccgacgtgaatgacaacccccccgagtttaccgcaagtacttttgctggggaggtacccgagaacagagtggagactgtggtggccaacctgaccgttatggacagggaccaaccccatagccccaactggaacgctgtgtataggattataagcggggatcccagcggacacttctcggttaggactgaccccgtcaccaatgagggtatggtcacagtggtcaaggccgtggactacgaactcaatcgagcgtttatgctcacagtaatggtcagcaatcaggctccactggcctctggaatccagatgagctttcagtccactgccggagtgactatatctatcatggacataaacgaagccccgtactttcctagcaatcacaaactgattcggctggaggaaggtgtaccccctggaacagtgctgactacatttagcgctgtggatcctgaccgtttcatgcaacaggcagttagatattccaagctgtccgatcccgccagctggctgcacataaacgcaaccaacgggcagatcacaacggctgctgtcctggaccgggaatcactttatactaagaataacgtatacgaagcgacatttttagccgcagataacggcatcccacccgctagtggaaccggcactctccaaatctatcttatagatatcaacgacaacgctccagaattactgccaaaggaggctcagatctgcgaaaaaccgaacctgaacgcaatcaacatcaccgctgccgatgcagatgtagaccccaacataggaccttacgtgtttgagctcccttttgtacctgccgccgtcagaaagaattggactattacacggctgaacggggactatgcccagcttagccttagaattctctatttggaagcagggatgtacgacgtgcccattattgttaccgactccggcaatccacctctgagcaatacaagcattatcaaggtgaaggtgtgcccttgcgacgacaacggtgactgtaccacaatcggcgctgtggctgcagcagggttaggaacgggtgccatcgtcgctatcctgatttgcatactgatcctgctgacaatggttcttctgttcgtaatgtggatgaagaggagagagaaggagaggcacacaaagcagctgctaatcgacccagaggatgacgtgcgggataacattcttaagtacgacgaggaaggaggcggggaggaagaccaggattacgacctgtctcagctgcagcagccggaggccatgggccacgtcccaagcaaggcaccaggcgtacgacgcgtggacgaacgtcccgtcggcgccgaaccacagtatcccatccggcctatggtgcctcaccctggcgacattggggacttcatcaacgagggtctccgggctgccgacaatgaccccacagcacctccttatgactcactgctggtctttgactatgagggctccggttcgaccgcggggagcgtatcctcactgaacagttcaagcagcggtgaccaagactatgattacctgaatgactggggcccccgctttaaaaagctggcggacatgtatggcgggggcgaagaagactag

SEQ ID NO: 110268 - DNA, 2475 bp, synthetic construct
  misc_feature 1..2475: note = Description of Artificial Sequence: Synthetic coding sequence
  source 1..2475: mol_type = other DNA
atgcccaaatctacgggcatgctgcacggagggagagaaaacgccggggtgaaattcagcagctgcgtgggcaccaaagggacacagtacgagaccagctctccacactccggccacaaaccccagaagggtaaaaaagtagtggcactggacccatccccacccccaaaagatacactgctgccatggccacagcatcaaaacgcaaacggtctaagacgacggaaacgtgactgggtgatccctcctattaatgtccccgaaaattctcgaggtccattccctcagcagttggtacggattcgtagtgataaggataatgacatccctattaggtactcaatcacgggcgtgggcgctgaccagcctcctatggaagtgttctctatcgatagtatgtcagggagaatgtacgttacccgccccatggatagggaggaacacgcaagctatcacttgagagcccacgcggtcgacatgaatggaaataaggtggaaaatccaatagacctgtacatctatgtgatcgatatgaatgataatcgccctgagttcataaaccaagtctataacggatccgtggatgagggtagcaagcctggcacttatgtcatgaccgtgactgccaacgacgctgacgattctacaacagcaaatggcatggtgagataccggatcgtgacccagacccctcagtcacccagccagaacatgttcactatcaactctgaaaccggggacattgttaccgtcgcagccggcttggatagagaaaaagtccagcagtacactgtgattgtgcaagcaaccgatatggagggtaacctgaattacgggctatcaaatacagccaccgcgataatcacggtgactgatgttaacgacaatccacccgaatttaccgccagtactttcgctggagaggtccctgaaaatagagttgaaactgtggtggctaatctgacggtcatggacagagaccagccacattctcctaactggaacgccgtgtaccgcattatatcaggtgacccgtccggtcacttcagtgtgaggaccgacccagttactaatgagggtatggtgaccgttgtgaaagccgtcgactacgagctaaatcgggccttcatgctgaccgtgatggtgtctaatcaggctcccctggcatcagggatccagatgagcttccagagcactgcaggagtcacaattagcattatggacatcaacgaggccccctacttcccgtccaaccacaaactcattcggcttgaagagggcgtaccacctggtacagtgttgacaaccttttcagccgtagaccctgatcgcttcatgcagcaggctgtgcgctacagtaagctgtcggatccggcctcctggctgcatattaatgccaccaatggtcagatcacaaccgccgctgtgctggatagggaaagcctgtatactaagaataacgtatatgaggccaccttcctggctgcggataacgggatcccaccagcctccggaactgggacactgcagatctatctaattgatataaatgacaacgcgccggagctgcttcccaaagaagctcagatctgcgaaaagcccaacctgaatgctatcaatataacagccgccgatgccgacgttgaccctaacattggcccatacgtgttcgaacttcccttcgttcccgctgcagtccggaagaactggacaataaccagacttaacggagattacgcacagttatccttacggattttatatcttgaagccggtatgtatgacgtgcccattattgttacagattcaggtaatccccctctgagcaacactagcatcatcaaggtaaaggtctgcccctgtgatgataatggagactgcactactattggcgccgtcgccgcagcaggacttggcacaggcgctattgttgccatcctcatctgtatcttaattctgctcactatggtcctgttgtttgtgatgtggatgaagcggcgtgaaaaagagcggcacacgaaacaactgttaatcgaccctgaggatgatgttcgcgacaatattcttaagtacgacgaggagggcggtggggaagaagaccaagactatgacctatcacagctccaacagccagaggccatgggccacgttcccagtaaagctccgggggttcggcgggtggacgaaagaccggtgggcgctgaaccccagtacccaatcagacccatggtcccgcatcccggcgacatcggtgactttatcaacgaaggtctgcgggccgcagacaatgaccctaccgccccgccttacgactctcttctggtgtttgactatgaaggatcaggttctacagccggcagcgttagtagcctcaattcatccagctcgggcgaccaggattatgattacctaaacgactgggggccacggtttaagaaactcgccgacatgtacggaggaggggaggaagactag

SEQ ID NO: 110269 - DNA, 2529 bp, synthetic construct
  misc_feature 1..2529: note = Description of Artificial Sequence: Synthetic coding sequence
  source 1..2529: mol_type = other DNA
atggacttcaaagtcggagcagatggaaccgttttcgccactcgggaactgcaggtgccttcagaacaggttgctttcactgtaacagcctgggacagccagacggccgagaagtgggacgctgtcgttagacttttggtcgcccagactagctcaccccatagcgggcacaaaccacaaaagggaaagaaggtggttgccctggacccctcgccccctcctaaagatacactcctaccctggccccagcaccagaacgctaatggtcttcgtcggagaaagagagattgggtaattccacccattaacgtgcccgagaacagccgcggcccattccctcagcaactggtgcggattcgatcagacaaagataatgatatacctatccggtacagcatcactggggtgggggccgaccagccgcctatggaggtcttctccatcgattcaatgtccggacgaatgtatgttactcgccccatggaccgagaggagcatgcaagttaccatcttcgggcccacgccgtggacatgaatggaaacaaggtggaaaatcccatagacctgtacatctacgtcattgacatgaatgataacagacccgagttcataaatcaggtgtacaacggcagcgtcgacgaggggtctaaacccggcacatacgttatgacagtcaccgccaatgatgctgatgatagcacaaccgcaaacggcatggtgaggtaccgaatagtcacacagacccctcagtctcccagccagaatatgttcacaattaattccgaaactggagatattgtgacagtggcagcaggacttgatagagaaaaggtgcagcagtatactgttatcgttcaggccactgacatggaaggcaatctaaattatggattgagtaatacggcgaccgccataatcacagtgactgacgtcaatgataaccccccagagtttaccgctagcacatttgccggtgaggtgccggagaatcgggtggaaacagtggtggcaaatctgactgtgatggatcgggatcagccacactcccctaattggaatgcagtgtaccggatcatcagcggtgatccttcaggtcacttctcagtacgcaccgatccagtcaccaacgaagggatggttactgtcgtgaaggcagtagactatgagctgaatcgcgccttcatgctgaccgtgatggtctccaatcaggctcccttggcatccgggattcagatgagttttcaaagcactgctggagtcacaataagtatcatggatattaatgaagctccttattttcccagcaaccacaagctgatccgactggaagaaggagtccctccgggaaccgtcctgacaacatttagcgccgttgatcccgataggtttatgcagcaagcggttagatatagcaaattaagcgacccagcttcatggcttcacatcaacgcgacaaacggtcagataaccaccgcggccgtgctggatagggagagtctctacacaaaaaacaacgtatatgaagcgacctttctggccgcagataatgggatcccgccggcttccggcaccggcacacttcaaatttacctcattgatattaacgacaacgccccagaattgcttccaaaagaagcacagatctgtgagaaacctaacttgaatgcaatcaatatcactgccgcagatgcagacgtagacccaaacattggcccttacgtttttgaactgccattcgtgccggcggcagtgaggaagaattggacaattaccagactgaacggggattacgctcagttgtctctccgcatcttgtacctcgaagcaggtatgtacgacgtgccaatcattgtcacagactcaggcaaccctcctttgtccaacacgtcaatcataaaagtgaaggtatgcccctgcgatgataatggggactgtactaccatcggagctgtagcagcagcggggctgggcacgggagcaatcgttgcaatcctaatttgtattctgattctcttgacgatggttctgctgtttgttatgtggatgaaacgccgcgagaaggaaagacatactaagcagctgctgattgatccagaggatgacgtaagagacaatatccttaaatatgatgaggagggcggcggggaggaggatcaagactacgatctgtctcagcttcagcagcctgaagccatgggacacgttccaagtaaggcgccaggcgtccgccgagttgatgaaaggcccgtgggagccgagccccaataccccattcgccccatggtaccccaccctggggacatcggagactttattaacgaggggctgcgggccgctgacaatgacccgaccgcccctccatatgatagcctgctggttttcgattacgaaggttcaggaagtacggcggggagcgtgagttcactaaactcctcctcaagcggcgatcaagattacgattatctgaatgattggggtccacgcttcaaaaagttggccgacatgtacggggggggggaggaagattag

SEQ ID NO: 110270 - DNA, 2358 bp, synthetic construct
  misc_feature 1..2358: note = Description of Artificial Sequence: Synthetic coding sequence
  source 1..2358: mol_type = other DNA
atgaaactgggcaaggtggagttctgccactttcttcagcttatcgctctctttctgtgtttttccggaatgtcccaggccgagctgagtcgcagtcgtagcaagccttatttccagagcggcaggtctcgtactaaaagatcttgggtgtggaatcagttttttgtgctcgaggaatatatgggcagtgacccactatatgtgggaaaactgcatagcgacgtggacaaaggggatggtagtattaaatacatactcagcggcgagggggcgtcatctatcttcatcattgatgagaacacaggcgatattcatgctactaaacggctagaccgcgaggagcaggcatactatacactcagggcccaggctcttgacagattaactaataaacccgtcgagcctgagtccgagttcgtcataaaaatacaggatataaacgacaacgaacccaagtttctggatggcccttacactgccggggtgcctgaaatgtctccggttggcacctcagtcgtccaggtgacagctaccgatgccgatgaccccacctatggaaattctgcgcgggtagtttactccattttgcaaggtcagccttattttagcgtggagcctaagaccggcgtaatcaaaaccgctctgcccaatatggaccgcgaagcgaaagaccagtacttacttgtgatccaggctaaggacatggtgggacagaacggcgggctgagcggcacaaccagcgtgaccgtcaccctcaccgacgtgaatgacaatccccctagattcccacggcggagttaccaatataatgtgcctgagagtcttcccgtggcctcagtggtagctcgcatcaaagccgcagatgctgatattggcgccaacgcagagatggagtacaaaatcgtcgacggcgatggcctgggcatctttaagatctctgtggataaagagacccaagagggcatcatcactattcagaaggaactggattttgaggcaaagactagttatacgctgagaatcgaagcagccaacaaagatgcagatccaaggttcctgagcctaggcccattcagcgacactaccacagtcaaaattatcgtggaggacgttgatgagccccctgttttcagcagtcctctgtaccctatggaggtttctgaggctactcaggttggtaatatcataggaacggtggccgcccacgaccctgactcctcgaactctcccgtgcgttattccattgatcgcaataccgacctggagcggtatttcaatatcgacgcgaactccggcgtcatcactactgctaaatcactggatagagaaacgaatgcaatacacaatatcaccgtgcttgccatggaatcccagaaccctagtcaggtaggacggggatacgtagccattactatcctggacattaacgacaacgctccggagttcgcgatggattatgagaccacagtttgcgaaaatgcacaaccgggtcaggtgatacagaaaatttccgcagtggataaggatgagccttccaatggtcatcagttctacttctctctgaccaccgacgccactaataaccacaacttctcactgaaggacaacaaagataacaccgcctcaatactcacacggcgaaacggattcaggagacaggagcaaagcgtctattacctcccgatctttatcgtagatagcggcagtccttctctttcatccacaaacactttgacaatccgtgtctgcgattgtgatgctgatggagtggctcagacatgtaatgcagaagcctatgtgttgcccgccggcctgtctacaggtgcattgatagcaatactggcctgtgtgctcacgcttctggtgttgatactgctcatcgtgactatgaggcggagaaaaaaggagcccctgatttttgacgaggaacgggacatccgggagaatatagtcagatatgacgacgaaggaggcggggaggaagacacggaggcattcgatatggcagccctgaggaatttaaatgtaatacgtgacaccaagaccagaagagacgtcactccagaaatccaatttctgtctcgcccagcatttaagagtattccagataatgtgatcttccgagaatttatctgggagcgtctgaaagaggctgatgtcgacccgggcgctcctccatacgactcactccaaacctatgcatttgagggaaatggcagcgtcgcagagtccctgtcaagtctggattccatcagtagtaacagtgaccagaactatgactacctctccgattggggtccccggttcaagcgtctcgcagacatgtatggcacaggtcaggaatcattgtattcttag

SEQ ID NO: 110271 - DNA, 2358 bp, synthetic construct
  misc_feature 1..2358: note = Description of Artificial Sequence: Synthetic coding sequence
  source 1..2358: mol_type = other DNA
atgaagctcggaaaagtcgagttctgccacttcttgcagctgatcgccttatttctctgtttcagcggtatgtctcaggctgagctttctagaagccgatcaaaaccttatttccaatctggcaggtctaggaccaagagaagttgggtgtggaaccagttcttcgtgttagaggaatacatgggaagcgaccctctttacgttgggaagttgcactccgacgtcgataagggggacggctcgattaagtatatactcagcggcgagggcgcctcttccattttcatcattgacgagaataccggcgacatacacgccaccaagagacttgatcgcgaggaacaggcctactacaccttaagggcccaggccctggatcggttgacaaataagcccgtcgaaccagaaagtgagttcgtgattaagatccaggatattaatgacaacgaacctaaattcctcgacggaccctacacggctggcgtgccagagatgtccccagtgggcaccagtgttgttcaggtcactgcaaccgacgccgacgatccaacttacggtaatagcgctcgggtggtttactcaattttacagggtcaaccctatttttcagtggagcccaagaccggagtgatcaaaactgccctgccaaacatggatagggaggcgaaagatcaataccttttagtcatccaggccaaagatatggtcggtcaaaacggcgggttatcagggacaaccagcgtgactgtgacactcacagacgtcaatgacaacccgcctcggtttccccggcgatcttaccagtataacgtcccagagtctctgccagttgcaagcgtggtggcgagaattaaggccgccgatgcagatatcggcgccaatgccgaaatggagtataaaattgtcgacggtgacggcttaggcatttttaagatcagtgtggacaaagagactcaggaaggcattatcacaatccaaaaggagctggattttgaggctaagacgagttacacactcaggatagaagcagctaataaggacgccgaccctaggtttctatctctggggccattctccgatactactacagtgaagattattgtggaagacgttgacgaacctccagtctttagcagccccttgtatcccatggaggtgagtgaggccactcaggttggtaacatcatcggcactgtagctgctcatgatccggattcctctaactcccccgtaagatactccatcgacaggaacacggatcttgagaggtattttaacatcgatgcaaattccggagtcatcacaacagctaagagcctcgaccgagaaactaacgctatccataacattaccgtactcgctatggagagccagaacccgtcgcaggtgggacgagggtatgtggctatcaccatcttggatattaacgataacgctcccgagttcgccatggattatgagacaacagtttgtgagaacgcgcaacctggccaggtgattcaaaagattagcgccgtcgataaggacgagcccagtaacggccaccagttttatttcagcctgactaccgatgcgactaataatcacaattttagcctgaaagataacaaagataatactgcctctattctcaccagacggaacgggtttcgcagacaagaacagtcggtatattacctgcccatcttcatcgtcgattccggatccccctcattgagctctacaaacaccctgaccatacgggtctgcgactgtgacgccgatggcgtcgcacagacctgtaatgccgaggcctacgtgctgccagctggcctgtcgaccggagctctcatcgcaatactcgcctgcgttttaaccttgctggtgttgatcctgttgattgtcaccatgcggcgaagaaaaaaggagcctcttatattcgacgaggaacgggatatcagggagaacatcgtgcgctacgatgacgaaggggggggagaggaggacacagaggctttcgacatggcggccctccgcaaccttaatgtcatccgagataccaagactcggcgagatgtcacccccgagattcagttcctgagtagacctgctttcaagtccattcccgataacgtgatatttagggagttcatctgggagaggcttaaggaagccgacgtcgacccaggcgctcccccatacgattcccttcagacatatgcctttgaaggaaacgggtccgtagctgaaagcttgagtagtcttgactcaatcagcagtaacagcgaccagaattatgactatctgtcggactggggccctcgttttaaacgactggccgatatgtacgggacagggcaggagagtctctattcctag

SEQ ID NO: 110272 - DNA, 2358 bp, synthetic construct
  misc_feature 1..2358: note = Description of Artificial Sequence: Synthetic coding sequence
  source 1..2358: mol_type = other DNA
atgaaactcggcaaggtagagttctgtcattttttacaactgatagccctcttcctctgcttctcagggatgtcccaggcagagttgtcacgctccagatccaaaccctattttcagagtggtcgctcgaggactaagagaagctgggtctggaatcaattcttcgttcttgaggagtacatggggtcggacccattgtatgtcggaaagcttcattcggacgttgacaaaggcgacgggagcatcaaatacattctctctggggagggtgcttcttctattttcattatcgacgaaaacactggggacatccatgccactaaaaggctggacagggaagagcaggcatactatactttacgcgcacaagctctggatagactcacaaataagcccgtggaacctgaaagcgaattcgtaataaaaatccaagatattaatgacaacgagccaaagtttctcgatgggccctacaccgcaggggtgcctgagatgtcaccagtgggaacctctgtggtccaggtgaccgctaccgatgcggacgatcccacatacggaaacagtgcacgggtcgtctacagtatcctccaaggtcagccctatttctctgttgagcccaagacaggcgtgatcaagactgccctccccaacatggacagagaggctaaggaccagtatctgctggtgatccaggcaaaggatatggtggggcagaatggcggcctgtccggcacaacctctgtgaccgtgaccctgactgatgtgaatgataatccaccaaggtttccaaggcgaagttatcagtataacgtcccagagtcacttcccgtggcttctgtggttgcccggatcaaggctgccgacgcggatatcggggctaatgccgagatggagtacaagattgtagatggggacggactggggatcttcaaaatctccgtggacaaagagacccaagaaggcataattactatacagaaggagctggatttcgaggctaagacatcctatactctgagaattgaggctgcgaataaggatgcagacccccgcttcctgagcctgggacctttttccgacaccactactgtgaaaatcatcgttgaggatgtggacgagcctcctgtattcagttctcccctgtatccgatggaggtctccgaggccacacaggttggtaacattataggaacagttgccgcgcatgatccagatagcagtaatagcccagtcagatatagcattgacagaaataccgatctggaacggtattttaatattgatgccaattccggggttatcactacggcaaagagcctagatagagaaacaaatgccattcataacattacagtgctggctatggagtcccagaacccgagccaggtcgggagaggatatgtggcaattaccatacttgatattaacgataatgcgccagaatttgcgatggactacgagactacagtgtgcgaaaacgctcagcctggacaggtgattcagaaaattagtgcagtcgataaagatgagccaagcaatggtcaccagttctatttttcattaacaactgacgccacaaataaccataatttcagtctgaaagacaataaggacaatactgcctccatcctgacccggcgtaacgggttcagacgccaggaacaaagcgtgtactatctgcccatctttatcgtagactcaggctctcccagtctttcttcaactaacactctgaccatccgagtgtgcgactgtgacgcggacggtgttgcccagacctgtaacgccgaggcttatgttctgcccgctggactgagtaccggagccctgattgccattttagcctgcgtgcttactctgttggtgctcattctgttgatcgtgaccatgcgcagacggaagaaggaacccttgattttcgacgaggaacgggatattagggagaatattgtgagatatgacgacgaggggggaggggaggaggataccgaagcgtttgatatggccgcccttcgtaatcttaacgtgatccgagacacgaagactcggagggatgttactcctgagattcagttcctaagccgaccagcgtttaagtccattcccgataatgtcattttcagagagttcatctgggagagactgaaagaggccgacgtcgacccaggcgccccaccttatgatagtttgcagacatatgcctttgaaggaaatgggagcgtggccgagagcttgagcagtttggacagtatcagctctaacagcgaccagaattatgactatctttccgactgggggcctcgctttaagcggcttgccgatatgtatggcactggacaggaaagcctgtacagctag

SEQ ID NO: 110273 - DNA, 1893 bp, synthetic construct
  misc_feature 1..1893: note = Description of Artificial Sequence: Synthetic coding sequence
  source 1..1893: mol_type = other DNA
atgaaactaggcaaagtggagttctgtcactttctgcagctcatcgcactgtttctgtgtttttcaggcatgagccaggccgaactgagcagaagccgctctaaaccatacttccagtccggaagaagccggaccaagcgttcttgggtctggaaccaatttttcgtcctagaagagtatatggggtctgatcctctttatgtcgggaaactacacagtgacgttgacaagggagacggctcaatcaagtacatcttgagcggagaaggcgccagctctatttttattatcgatgaaaatacaggtgacatccacgccaccaaacgcctggatagagaggaacaggcatactataccctgcgggctcaagccctcgatcgtctcacaaacaaaccagtcgagcctgagagcgaatttgtcattaaaattcaggacattaatgataatgaaccaaaatttctagatggaccatacacagcaggagttccagagatgagtccggtgggaacctccgtcgttcaagtcacggctactgatgcggacgatcccacgtacggaaatagtgcaagggtagtgtactctattctgcaggggcagccttatttcagtgtggaacccaagacgggagtgatcaaaaccgcactgcccaatatggacagggaggcgaaggatcagtaccttctcgtcatacaggccaaagacatggtgggccagaacggcgggctctcaggcactacaagtgttaccgtaactctgaccgatgtgaacgataacccacccaggttcccccgccggtcctaccaatataatgtgccggagagcctgccagtagccagcgttgtagccaggattaaggcagctgatgccgatatcggggccaacgcagagatggagtataagatcgtggatggagatggcctggggatcttcaaaatctcggtggacaaggagactcaggaggggattatcactatacagaaggaactcgactttgaagcgaagacaagttacaccctgcgaatagaggccgcaaataaggacgccgacccaaggttcctcagcttgggcccatttagcgacacgacgacggtgaagataatagtggaagatgtagacgagccaccggtgttttcgagcccactgtatcccatggaggtatccgaggccacacaggttggtaacattatcgggaccgtggcagctcacgatcccgattcatcaaactcaccagtgaggtattcaatcgacagaaatacagatttggaaagatatttcaatattgatgccaactcgggtgttattacaacagctaaatcactggatagggaaacaaacgctattcacaacattacagtgctggcgatggagtcccaaaatccgtctcaagtcggaagaggatacgtggccatcactattctcgatatcaacgacaatgctccagaattcgccatggactatgaaaccaccgtatgcgaaaacgcgcagccaggccaagtgattcaaaaaatcagcgcggtggataaagatgagccctctaatggacaccagttttatttctcccttaccactgacgccacgaataaccacaacttctccctgaaagataataaggataatacggcctctatcttaacaagacgtaatgggtttaggcggcaggagcagtcagtctactatctgccgatcttcatagtggattcaggctccccctcccttagttctacaaataccctgactatcagagtgtgcgactgcgacgcggacggagtagcgcagacgtgtaatgcagaggcttatgtcctgcctgctggcctctcgaccggagcactgattgcaattctcgcatgtgtgctgactcttctaggaagatattgtttccagggcctgctctag

SEQ ID NO: 110274 - DNA, 2400 bp, synthetic construct
  misc_feature 1..2400: note = Description of Artificial Sequence: Synthetic coding sequence
  source 1..2400: mol_type = other DNA
atgcccgaaagacttgcagagatgcttttggacctgtggacccctctgattattctctggattaccctcccgccatgcatatacatggcaccaatgaaccagagtcaggtcttaatgagcggttcgcccctggaattaaacagtctgggagaggagcagaggattctgaacagatccaaacgaggctgggtgtggaatcagatgtttgtcctggaggagttcagcggtcccgaaccaattctggtcggcagattacacacggatctcgaccccggctcaaagaagattaagtacatccttagcggggacggagccgggaccatattccagatcaacgacgtaacaggagatattcatgcgatcaaacgtctggaccgcgaggaaaaagcggagtacacccttacagctcaggccgtggattgggagaccagcaaacctttagagccacccagcgagttcattattaaagtccaggacatcaatgacaatgctcctgaatttcttaatggcccgtaccacgccaccgttcctgagatgtcgatcctaggcacatcagtgactaacgtgacagctaccgatgctgatgacccggtatacggcaactcggccaaacttgtgtactctattctagaaggccaaccttatttctctatcgaaccagagactgcaattattaagaccgccctaccaaacatggatcgtgaagccaaagaagagtatctggtggtcatccaggccaaggacatgggaggccactctgggggtcttagcggcacaactactctgacagtgactctgaccgacgtgaacgacaaccctccaaagtttgcccagtccctctaccatttttccgtgccagaggatgtcgtcctaggcactgcaattggacgtgtgaaagccaatgaccaagacatcggtgaaaacgcacagagcagctacgacataatcgacggggatggcacagcgcttttcgaaattacctctgacgcccaggcccaggatggaattatacggctgaggaaaccgctggacttcgaaaccaaaaagtcttacacactaaaagtggaagcggcaaatgtgcacatcgatcccaggttttccggcaggggaccattcaaggacaccgccaccgtgaaaatagtggtggaggatgccgacgagcctcctgtgttctcctccccaacgtacctgctggaggtgcacgaaaatgccgctctgaactccgtcatcgggcaagtgaccgctagagatcccgacatcacatcctctcccattagattctccattgataggcatactgatctggaacggcagttcaatatcaatgctgatgacggaaagatcacactggcaacaccattagatcgggagttgtcggtctggcataatatcacaataattgcaaccgagattcggaatcactcacagatttctcgagtgccggtcgctataaaggtcttagacgtgaatgataacgcccccgagtttgcaagtgaatacgaagcctttctttgcgagaatggaaaacccggacaagtgatccagaccgtgagcgctatggacaaggacgaccctaagaacggacactacttcctgtatagcctgttgcccgaaatggtgaacaatccgaatttcaccataaaaaagaacgaagataacagtctgagcattctcgccaaacacaatggtttcaaccgccagaagcaagaggtgtatctacttcctatcatcatatccgatagtggcaatccgcctctgtccagtacaagcactctcaccataagggtgtgcgggtgctctaatgacggtgttgtgcagtcctgcaacgttgaggcctacgtgctgccaattggtttgtctatgggagcgttgattgccatccttgcttgtatcatcctcctgctggtaattgtggtcctcttcgtcacactgaggcgacacaaaaatgaaccactcattataaaggatgatgaagacgtacgggaaaacattatcaggtacgacgacgaagggggcggggaggaagatacggaagcctttgacatcgcaacattacaaaacccagacggaatcaacggctttctgccacgcaaagacattaaacccgatttgcagttcatgccccgtcagggcttggccccggtccccaacggagtcgacgtggatgaatttatcaatgtccgactgcacgaagcagataatgatcctacagcgccaccatacgactccattcagatctatgggtatgaggggagagggtcagtagctggatccttatcctctctggaatcgaccactagcgacagcgatcagaacttcgactacctttccgattggggcccacggttcaagagactcggggagctctatagcgttggcgagagcgataaggagacctag

SEQ ID NO: 110275 - DNA, 2400 bp, synthetic construct
  misc_feature 1..2400: note = Description of Artificial Sequence: Synthetic coding sequence
  source 1..2400: mol_type = other DNA
atgcccgaaaggttggctgagatgttactggacctgtggactcctctgatcatcctctggataacactacccccttgcatctatatggcacctatgaatcaaagtcaggttctcatgtccggatccccactggagctgaactccctgggcgaggaacagcggattttgaatcggagcaaacgtggctgggtgtggaatcagatgttcgtccttgaggaattttccggtcctgagcccatactcgtggggcgcttgcacaccgacctggatccaggatctaagaagatcaaatatatactgtccggcgacggtgcaggcaccatcttccagattaacgacgtcacaggggatattcacgcaattaaaaggttggacagggaagagaaggcagagtacaccctcacagctcaggccgttgattgggaaaccagcaagcccctcgagccaccatctgagtttattatcaaagtgcaagacatcaacgataacgcacccgagtttctgaacggtccctaccacgccacagtgccagaaatgtctattctaggtaccagcgtaacaaacgtaacagccaccgacgcagatgaccccgtatatggcaattccgctaaactggtctatagcattctggagggccagccctatttttccatagagcccgaaaccgccataatcaagacggcactcccaaacatggaccgggaggctaaggaggagtacctcgtagtgatccaggccaaggacatgggaggccactctggcggcttgtccggtacaaccactctgaccgtgactctgacagatgtaaacgataatccaccaaagtttgcgcagagtctgtaccatttctccgtccccgaggacgtagtgctaggaactgctattggccgcgtcaaggcgaacgaccaagatataggcgagaacgctcagagttcctacgatattattgatggagacggaactgcgctattcgaaataacttcggacgcacaggcacaggacgggattattaggctacgcaagcctcttgacttcgagaccaaaaaaagctacaccttgaaagttgaggctgcgaatgttcacattgatcctaggttttcaggacggggacccttcaaagacacggcaaccgttaagattgttgtcgaagacgccgacgaaccgccagttttcagcagtcccacctatttgctggaagttcacgagaatgcagccctcaatagtgtgatcggccaggtgaccgctagggatccagacatcacgagtagccctatcagattttctattgatcggcataccgatcttgaaaggcagttcaacataaacgcggatgatggtaaaatcacactagcgacgcctctggacagggagctgtcagtgtggcataacatcacaatcatcgctacagaaatacgtaaccattctcagatcagcagggtgcccgtcgccattaaagtcctcgacgtcaacgataatgcaccagaatttgcctctgagtacgaagctttcctgtgtgaaaacggaaagcccgggcaggtcatccagacagtgagtgccatggacaaggatgatcctaaaaatggacactactttctttacagcctgctacccgaaatggtcaataaccctaattttacaattaagaaaaacgaggacaactctctgagcatactcgcgaaacacaacggctttaaccgccaaaaacaggaggtgtacctcttaccgataattatcagtgatagcgggaatccgccactgagctctacgagcacattgaccatccgggtgtgtggttgtagcaatgacggggtcgtccagagctgtaatgtggaagcgtatgtcctgcccattggattatccatgggggctttgatagcaatcttggcctgtataattctgttactggtgattgtggttctgtttgttacacttcgccgacacaaaaatgagcctctgataatcaaggacgatgaggatgtgagggaaaatataattcgctatgatgatgaaggaggcggggaggaagacacagaagcctttgacattgccacactgcaaaatccggacggcattaatgggtttcttcccaggaaagacatcaagccagatctgcaattcatgcctaggcaaggccttgcccctgtgcctaacggagtggacgttgacgagttcattaatgtgcggctccacgaggctgacaacgatcccaccgctcccccttacgactcaatacagatttacggttacgagggtagaggttctgtggccgggtcactcagctccctcgagtctaccacatcggatagcgaccagaacttcgattacctgtccgactgggggcctagattcaagcgtctgggtgagctgtactctgtgggggaaagtgacaaagagacttag

SEQ ID NO: 110276 - DNA, 795 bp, synthetic construct
  misc_feature 1..795: note = Description of Artificial Sequence: Synthetic coding sequence
  source 1..795: mol_type = other DNA
atgacaaagttcagttctttctcattgtttttcttgattgtgggagcctatatgacgcatgtgtgcttcaatatggagatcataggcggcaaggaagtgtcccctcactctcgccccttcatggcttccatccagtatgggggccaccatgtgtgcggaggagtgctcattgacccccagtgggtgttgactgccgcacactgccagtacagattcacgaaagggcagagtcccacagtggtactcggcgcccactccctgtcaaagaacgaagcttcaaagcagacgctggagatcaaaaagttcattccgtttagcagagtaacttctgatcctcagtccaacgacataatgttggtgaaactgcagactgcagccaagttgaacaagcacgtgaagatgctacatatccgttccaaaacttctctgcgttctggcaccaaatgtaaggtgaccggctggggggccaccgaccccgatagcctccggccctctgatacactgcgagaagttacagtgacggtcctgtcgcgcaagttgtgcaattctcagtcctattacaacggcgaccctttcattaccaaggacatggtgtgcgcaggggatgctaaggggcagaaggatagctgtaaaggtgactccggtggaccactcatttgcaaaggtgtgtttcacgctattgtgtccggtggtcacgagtgcggggtggcaaccaaacctggcatatatacattactgactaaaaagtatcaaacctggatcaaatcaaatctggtgcccccccacacgaactag

SEQ ID NO: 110277 - DNA, 246 bp, synthetic construct
  misc_feature 1..246: note = Description of Artificial Sequence: Synthetic coding sequence
  source 1..246: mol_type = other DNA
atgcggacttaccattacatccccttgttcatctggacttacatgttccatacagtggatacaatcctcctccaggagaagcccaacagttatctttcatcaaagaagatcgcaggcctcaccaaggacgacggcaaaatgctgagacgcaccaaacgggggtggatgtggaatcaatttttcctgcttgaggaatataccggtactgatacacagtacgtggggaagctccacaccgatcagtag

SEQ ID NO: 110278 - DNA, 399 bp, synthetic construct
  misc_feature 1..399: note = Description of Artificial Sequence: Synthetic coding sequence
  source 1..399: mol_type = other DNA
atgcggacttatcactatatccctctgttcatctggacatatatgtttcacactgtcgacacaatattgctgcaagagaaaccaaatagctatttgtcttcgaagaaaatagccggtctcactaaagacgacggcaagatgcttcggcgcaccaaaagaggctggatgtggaaccagtttttcctgctggaagagtacacaggcacagacacacagtacgtgggcaagttgcataccgatcaggataagggggatggcaatctgaaatacattctgacaggcgatggggctgggagcctctttgtgatcgatgagaataccggggacatccacgccgccaagaagttggatcgcgaagaaaagtctctgtatattcttagagccaaggctatcgactag

SEQ ID NO: 110279 - DNA, 9045 bp, synthetic construct
  misc_feature 1..9045: note = Description of Artificial Sequence: Synthetic coding sequence
  source 1..9045: mol_type = other DNA
atggcccctccccccccccccgtcctccccgtgctgctgctactcgcagctgccgctgccttgcccgccatgggactgcgcgctgcagcatgggagccccgtgtgccgggcgggacacgcgccttcgcgctgagaccagggtgcacgtatgccgtgggcgccgcctgcacccccagagctccacgggagcttctcgacgttggaagagacggccgactcgctggacgccgcagagtatctggggccggtcggccactacctcttcaggtgagattggttgctcgtagcgctccaacagccctttcccggagactgagggcgagaacccacctgcccggctgcggcgctcgcgcccgcctgtgcggcaccggagccaggttatgcggcgccctctgctttcccgttccaggcgggtgcgccgcggcacagcactctgctctggctgcacccacaaccctgccagcttgtaggtgccctccccgccctaggcccagatgccctgggagaccaatctgcctgccccccggcggttcagtgagactgaggctcctgtgtgcacttcgccgcgcagctggtgccgtgcgagtagggctggccttagaagctgctactgccggtaccccctccgcatccccatcgccctctccacccctgcctccaaatctccccgaagctcgtgccgggccagctaggcgagcccggcgaggtacttcaggcaggggctcacttaaatttccgatgccgaactatcaggtcgccttgttcgaaaatgagcccgcagggacactcatcttacagctccacgcgcattataccattgaaggagaggaagagcgcgtgtcctactacatggaaggactttttgacgaaaggagccgcgggtatttccgcatcgacagcgctaccggggccgtatcgaccgactcagtgctggatagagagaccaaggagactcacgtactgcgcgtgaaagccgttgactactctaccccacctcgtagcgctacgacatacattacggttcttgtgaaagacaccaatgaccatagtccggtattcgagcagagtgaatatcgagagagggtgcgagagaacctcgaagtaggttacgaagtcctgactatccgggctagcgaccgtgatagcccaatcaacgcaaacctgagatatcgggtgctgggtggcgcatgggacgtcttccagctgaatgagagcagtggcgtcgtgtccacaagggctgtcctcgaccgcgaggaggccgccgagtaccaactgctggtggaggcaaacgatcagggtagaaatcccggtccgctgagtgccacagccaccgtttacatcgaggtcgaagacgagaacgacaattacccccagttcagcgaacagaactatgtcgtccaagtccctgaagatgtgggtcttaatacggctgtactgagggtgcaggccaccgatcgcgaccagggccaaaacgctgcgatccattattctattttgtcggggaacgttgccggccagttttacctgcactcactgagtggcattcttgatgttatcaaccctctcgactttgaggacgtgcagaaatactcactgtccatcaaagcgcaggacggaggccgtcctccgttgatcaacagcagcggcgtggtgtccgtccaggttttggacgttaatgataatgaaccaatctttgtgagcagtccctttcaggccaccgtgttggaaaatgtcccgctgggataccctgtggtgcacatacaggcggtggacgctgattccggcgaaaacgccagactgcattaccgcctagttgatacagccagcacttttcttgggggtgggagtgccggcccaaaaaacccggcacccacccctgactttccctttcagatacacaacagcagtggatggatcaccgtgtgcgctgaactggacagggaagaagttgaacactatagcttcggtgtagaggctgttgatcatggcagtcctcctatgtcctcaagtacatccgtgtctatcactgtgttagatgtcaatgataatgacccagtattcacccagccgacatacgaactccgactcaacgaggatgccgccgtgggtagttccgtgctgactctccaagcacgggacagggatgcaaactcagtgattacttaccagctcacaggcgggaacacacgcaatcgatttgcactgagcagccagcggggtggagggctgattacacttgcattgcccctggactataaacaggagcaacaatatgttctggctgtgactgcaagtgacggcactcggtcgcacacggcgcacgtgcttataaatgtgaccgacgccaacacccacagacccgtattccagagctctcactacaccgtgtcagtctcagaagatagacctgtaggcaccagtattgccaccctgtctgctaacgacgaagatacaggcgaaaatgcgcgaatcacatatgtcatacaagaccctgtccctcagttccgcattgatcctgactccggaaccatgtacactatgatggagctcgattacgaaaatcaagtggcgtacaccctgaccattatggcgcaggataatggaatcccccagaaatctgacacgactacactggaaatcctgatcttggatgctaatgacaatgcccctcagttcctttgggatttttatcagggaagtattttcgaggatgcccccccttcaacaagcatactccaagtgtcggctaccgatcgtgacagcggccctaatggacgcctcctctacacattccagggcggggacgatggcgacggggacttttatatcgagcccacaagcggagtcatccgaacacagcgacgtctggaccgtgagaacgtggccgtctacaatctctgggctctggcagttgatcggggatcgccaacaccactttctgcgtctgtcgagatccaggtcactatactcgacatcaacgataatgcccccatgttcgaaaaggatgaactggaactgttcgtagaggagaacaaccctgtgggatccgttgtggcaaagatccgggctaatgatcccgacgagggtccgaacgcccagattatgtaccaaattgtcgagggcgacatgcgccacttctttcagttggatctactcaacggggacctgagagccatggtggaactggatttcgaggtgcgtcgggagtatgtgctcgtggtgcaagccactagtgcccctttagtgagcagagctacggtccatatcctactggtggatcagaacgataaccctcctgttctaccagattttcagattctattcaataactacgtgacaaacaaatctaattcttttcctacaggggtgatcggctgcattcctgcccatgaccccgacgtgagcgactccctaaactacacattcgtgcagggcaacgagctcagactactgctactggatcctgctacaggcgagctacagctgtcacgggacttagacaataacaggcccctggaagccctcatggaagtttcggtttcagatgggattcattcggtgactgccttttgcactctgagagtgactataatcacagatgacatgctcaccaacagcatcacagttcggctggagaatatgtcacaggagaaatttctgagcccactgcttgcactgttcgtagaaggtgttgcagctgtgctcagcacaaccaaagacgatgtcttcgtgtttaatgttcaaaacgacaccgatgtgagttcgaacatcctgaatgttacattcagtgcgctgctgcccggaggtgttcgaggccagttttttccgtccgaagacttacaagaacagatctacctcaaccgaaccctgcttactacaatttcaacccagcgggtgctgccttttgacgacaacatctgccttagggaaccatgcgagaattatatgaagtgcgtctccgtcctgcgcttcgattcgagcgcgcctttcctgtcgtctactactgttttgttccgccccatacacccaatcaatggactgcgatgtagatgtccgcccggctttactggcgactattgtgagacagaaattgacctttgctattccgacccctgcggtgccaacgggcgttgtaggtctcgcgagggaggatacacttgcgagtgcttcgaggacttcaccggggagcactgtgaggttgatgccagaagtggccgctgtgcgaatggggtgtgcaaaaatggtgggacctgcgtcaacctccttattggcgggttccattgtgtctgtccccctggcgagtacgagaggccctactgcgaagtgaccaccaggagcttccccccacagtcctttgtgacttttagaggtttacgtcagagatttcatttcactattagtctcacgtttgccactcaggagcgaaatggactcctgctgtataatgggagatttaatgaaaaacatgatttcatcgccttggaaatcgtagacgaacaggtccaattaacatttagtgctggtgagactacaacgactgtggctcccaaggtcccttcaggcgtgtctgacggtagatggcacagtgtccaagtgcagtactataacaaacctaacatcggacacctgggcctgccacacgggccatctggcgagaaaatggccgttgtgacagtggacgactgtgacactacaatggccgtgagatttggtaaggacatcggcaactactcctgtgcagcccagggaacacaaacaggctcaaagaagtctctggacctcactgggcctctgctgctgggaggagtcccaaatctgcctgaggacttccccgtccacaatcgccaattcgtgggctgcatgcgcaatctgtcggtggacggcaagaacgtggacatggccggcttcattgctaacaacggaacgagggagggatgcgcagctcgacgcaatttctgtgatgggcggcggtgtcagaatggaggaacttgcgtgaatcgctggaacatgtatctgtgtgaatgccctctcaggttcggagggaagaattgcgaacaagctatgccccatccccaattgttttcgggcgagtccgtggtctcctggagcgacctgaacattatcatctctgtcccttggtaccttgggctgatgttcagaactaggaaagaggactcagtgctgatggaggcaacttcaggaggacctacttcgttccgcttacagattcttaacaactatttgcagtttgaggttagccatggcccatctgacgtagagtcggtgatgctgtcagggctgcgggtgacagacggggaatggcaccatcttttaattgagctgaaaaatgtgaaagaggacagcgagatgaagcatctggttactatgacactcgactacgggatggatcaaaataaagctgacatcggaggtatgttgcccggactgacggtccggagtgttgttgtgggcggtgcatcagaagacaaggtttctgtgagacggggatttagaggatgcatgcagggcgttcggatgggtggcactcctacaaacgtggctacattgaacatgaataatgctctgaaagtgcgagtgaaggacggatgtgacgtcgacgatccatgcacatccagcccctgccccccgaattccagatgccacgacgcttgggaggattattcatgcgtttgtgataaaggatatctggggattaactgtgtcgacgcctgtcatctcaacccgtgcgagaatatgggggcatgcgtgcggtctcccggcagcccacagggttacgtgtgcgagtgtggtccttcacattacggtccctattgcgaaaacaagctagacctcccctgtccacggggctggtgggggaacccggtttgcggtccttgtcactgtgccgttagcaagggcttcgatccggattgtaacaaaacgaatggccaatgccagtgcaaggagaactattacaagctactagcccaggacacatgtctgccctgcgactgcttcccacatgggtcgcacagtcgtacttgcgatatggctactggccaatgcgcttgtaagccaggcgtgattgggaggcaatgtaacaggtgtgataaccctttcgcggaggtcacaacactgggctgcgaggtcatttacaacggctgccctaaggccttcgaggccgggatatggtggccgcagacaaagtttggacaacccgctgctgtaccatgccccaaaggatctgtgggcaacgcagtgaggcattgttcgggtgaaaagggttggcttccgcctgagttatttaactgcactacaattagttttgtagacctgagagctatgaacgaaaagctctcccgaaacgagacgcaggtcgacggcgccagagccctgcagctggtgcgagctctaagatccgccactcagcacactggaacactattcggtaatgatgtccgaactgcctatcaactgctcggacatgtactccagcacgagagctggcaacaggggttcgacctggccgccacccaagatgcagacttccacgaggatgtcatacacagcggtagcgctcttctggcacctgccacccgcgccgcttgggagcagatacagcggagtgaaggaggcaccgctcaactgttgaggcggcttgaggggtactttagcaatgtggcacgtaacgtacgccgaacctatcttaggccctttgtgatcgtaaccgccaacatgattctggcagttgatattttcgataagtttaactttactggggcgcgagtgcctcgattcgatacgatacacgaggagtttcctagagagctggagtcatccgtgtccttccctgcggatttcttcagaccacctgaagaaaaggaaggccccctcttgcgccctgcgggccgcaggaccacacctcagacaaccagacccggccctggcaccgagagggaagcgcctatctctcgtcgtcgcagacacccagacgacgcaggccagtttgctgtagcactcgtcatcatctacaggacactggggcagcttctgccagaaagatatgatcctgatagacgctccctgaggctcccccacaggcccataattaataccccaatggtgtccacactggtatacagtgaaggtgcgccccttccccggcccctcgaacgccctgtcctggtcgaattcgccctgttggaagtggaagaacgtacaaagcccgtgtgcgttttttggaaccattctctggccgttgggggcacagggggatggtccgcccgggggtgcgaactcctttctagaaatcggacccatgttgcctgtcagtgctcgcatactgcgtcctttgcagttctgatggacattagcaggcgggagaacggtgaggtgctccctcttaaaatagtcacatacgctgctgtgtccctgagtctggctgccctgttggttgcatttgttctgcttagtctggtccggatgctgcgctctaacctacactcgattcacaagcatcttgcagtggcactttttctgagccagctcgtttttgtcatcgggataaaccaaaccgagaatccatttttgtgtacagttgtggccatcctccttcactatatatacatgagcaccttcgcctggacactggtggaaagtttgcatgtataccgcatgttgaccgaagtgaggaatattgataccggccccatgcgtttttactacgtggtgggctggggcatcccagctattgtgaccggcctggccgtgggattggaccctcaggggtacggaaatccagacttttgctggctctctttgcaagacaccctcatctggagctttgccggtcctatcggggcagtaataataatcaacaccgtcacttcggtgctttcagcaaaagtttcctgtcagagaaagcatcattattatggcaagaaagggattgtatccctgctcagaacggctttcctgctgctactgctgatatccgccacgtggctcctcggcctgttggcggtaaatcgcgacgcacttagcttccactaccttttcgccatcttcagtggactgcagggcccctttgtacttctgttccactgtgtattgaaccaggaagtgcggaaacatttgaagggtgtccttggcggacggaagctgcaccttgaggactctgcgaccacaagagccactcttttgaccaggtctcttaattgtaatactaccttcggagatggacccgacatgcttagaaccgatctaggcgaatcaacagcttctctagatagcatcgtaagggatgaagggatccagaaactgggcgtgtcatccggtttagtgagaggctcgcacggcgagcccgacgcgtcccttatgccccgaagttgtaaggaccctcccggccacgatagcgattctgattcggagctgtcgttggacgaacagtcatccagttacgccagttcacactcaagcgactcggaggatgatggggtgggagctgaagaaaagtgggatccagcacggggagccgtccatagtactccaaagggggacgctgtggcaaatcatgttccagctgggtggcccgaccagtcacttgccgaatcagacagtgaggatcccagcggtaagcctcggctgaaggtcgagaccaaagtctcagtcgagttgcatagggaggagcagggcagtcacaggggtgagtacccccctgaccaagaatccggcggagccgcacggctcgcgtcttcacaaccacctgagcagcgaaaaggcatcctcaaaaacaaggtcacatatccaccccccctcacattaacggagcagaccctcaaggggcgcctgcgagaaaagctggctgactgcgagcagagcccgaccagcagtcgcacctctagccttgggagtgggggtccagactgcgctatcacagtcaagagccccggacgcgaaccaggtagagatcacctcaacggtgttgccatgaacgtgaggaccggcagcgctcaggctgatgggagcgactctgagaaaccctag

SEQ ID NO: 110280 - DNA, 4194 bp, synthetic construct
  misc_feature 1..4194: note = Description of Artificial Sequence: Synthetic coding sequence
  source 1..4194: mol_type = other DNA
atggccccccctccaccacctgtgcttccagtgctgctcctgttggccgcagcagctgcactcccagccatgggcctgcgggctgcagcatgggaaccccgcgtcccggggggcacccgcgctttcgctctgaggccaggatgcacctacgctgtgggcgccgcttgcacacccagggcccccagagaactccttgacgtcggccgagacggacggctggccgggaggcgcagggtcagtggggccggcagaccgttaccgctgcaggtgcgactagtcgcacgttctgcgcccacagcgctttcccggcgcctccgcgccaggacgcatctccccggttgcggcgccagagcgagactttgtggtacaggcgcccgcctatgcggggccttatgttttccagtccccggtggctgtgcggccgcccagcactccgcgctcgcagccccaaccactttacccgcttgccgctgccccccaagaccccgacctaggtgccctggcaggcccatttgcctcccgcccggaggatccgtgaggcttcggctcctctgtgcactgagaagggcggctggggcggtgagagttggactggcattagaggccgctactgccggcactccctctgcttcgccatcccccagccctcccctgcccccgaatctccccgaggcccgcgccggcccagcccgccgtgctcggcgcggaacgagcggtcgcgggagcctgaagtttccaatgccgaactaccaggtggccttgtttgaaaacgagccagctggaacactgatcctgcaattacacgcacattataccatcgaaggagaggaggagagggtcagctactatatggaggggctcttcgacgaacggagcagaggatactttagaatagattctgccaccggggccgtctcaaccgattctgtgctcgacagggagaccaaagaaacacacgtgctgcgtgttaaagccgtcgactattctaccccacctagatcagccactacatacataaccgtgttagtaaaggacacgaacgaccacagtcctgtgttcgagcagagtgagtaccgagaacgggttcgggagaacctggaggtggggtatgaggtcttgacaatccgggctagtgatcgcgattctccaattaacgctaatcttaggtaccgcgtcctgggcggggcatgggacgtttttcagctcaatgagtcgtctggcgtcgtgagtacgcgagccgtgctcgaccgggaggaggcagctgagtaccagctgctagtggaagccaatgaccaggggcggaaccccggccctctctcagctactgcaacagtctatattgaggtagaagatgaaaacgataattacccgcagttttcagagcagaattatgtggtgcaagtgcccgaggacgtgggattaaatactgcagtgctgagggtgcaggccacagatcgcgatcaggggcagaatgcagcgatacactacagtatcctgtcaggcaatgttgctggccagttttacctccattccctctcgggcattttggacgtgataaaccccttagatttcgaggatgtccaaaagtattccctctcaatcaaggctcaggatggaggccgccctcccctaataaacagctctggggtcgtgagtgtgcaggtcttggacgtcaatgataatgagcctatctttgtttcatcaccattccaggccacagtgctagagaacgtaccgctgggctaccctgtggtgcacattcaggccgtcgatgctgacagcggggaaaacgcacggcttcactacagactcgtggataccgccagtacattcctcgggggcgggtccgcgggccccaagaacccagcacccacacctgattttccgttccaaattcacaactctagcggctggataacagtgtgtgcagagctagatagagaggaggtggagcactatagtttcggagtcgaggcggtggaccacgggagtcctccaatgagctctagtacctccgtcagtattaccgtgttggatgtgaatgacaacgacccggtcttcactcagcccacctatgagttgcgacttaatgaagatgctgctgttggctctagcgtgctgaccctgcaggcgcgtgacagagacgccaattcagtaattacttatcaattaacgggcgggaatacacgcaatcgattcgcactgtcttcccaacgggggggagggcttatcactctggccctcccactagattataaacaagaacaacagtatgtactggcggtcacagcttctgacggcacccgcagccataccgcccatgtcttgattaatgtaacagatgccaacacccaccgcccagtcttccaatcctcccactatactgtgagtgtcagtgaggaccgcccagtcggcacatcaattgcgacgctatcagcaaatgacgaggacaccggtgaaaatgcccgtatcacatacgttattcaggacccagtcccacagttccgcattgaccccgatagtggcactatgtataccatgatggagctggactacgaaaatcaggtggcctacaccctcaccataatggcacaggataatggaatacctcagaagagcgataccactacgctcgaaatcctgatcctcgacgcaaatgacaacgcgccacagtttctttgggatttttatcagggttccatctttgaggacgcacccccctctacatcaatcctgcaggtaagtgcaactgacagggacagcggccccaatggccggctgctgtacaccttccagggcggagacgatggggacggggacttttacattgagcctacttctggcgtgattagaacccaacgccgcctggaccgggaaaatgttgctgtctacaacttgtgggcgctcgccgtcgataggggttcccccacaccacttagtgccagtgtggaaatccaagtgactatccttgacattaacgacaacgctcccatgtttgagaaggacgagctagaattatttgtggaagagaacaaccccgtgggatccgttgtggcaaagatccgggcaaatgacccagatgaaggccctaacgctcagatcatgtatcagatcgtggagggggacatgcgacacttcttccagctggatctgctgaatggagatttgagggctatggtggaactggattttgaggttcgtcgcgagtatgtgctagtcgtgcaggcaacttccgctccccttgtgtctagggcgaccgttcatatactgctggttgaccagaacgataatccaccagtgctcccagatttccagattctgtttaacaactatgttaccaataagagcaactcctttcctacaggggtcattggctgcatccctgcacatgatcctgacgtcagcgacagcctcaattatacctttgtgcagggtaacgagctccgcctgctactcctggatccagccacaggagaactgcagctgagccgagacctcgacaataaccggccgctcgaggctctcatggaagtgtctgtcagcgatgggatacacagcgttacagccttttgtacactccgggtgacaattatcacggacgacatgcttacaaacagcattaccgttcgcctggagaatatgagtcaggagaagtttttgtcacctctgcttgccctttttgttgagggcgtggccgccgtgctgagcacaacaaaggacgatgtgtttgtttttaatgtgcagaatgacactgatgtgtcgtccaatatcctgaacgtcacattttcggcgctgctccctgggggtgttcgggggcaatttttcccaagtgaagatctgcaggagcaaatctacctgaaccggaccctgcttaccacaatctccacgcagcgcgttctgcctttcgatgataatatctgtttgagggaaccctgtgaaaactatatgaaatgcgtgagcgtcttgcgatttgactcctccgccccctttctttcttccaccacagtactttttcggccaatccaccccatcaacggactgagatgtcgctgcccacctggttttaccggcgattactgcgagactgagattgacctctgttattccgacccttgtggtgccaatggccgttgtcgtagccgggaggggggatacacctgtgagtgttttgaagactttaccgccgtgtcctag

SEQ ID NO: 110281 - DNA, 2319 bp, synthetic construct
  misc_feature 1..2319: note = Description of Artificial Sequence: Synthetic coding sequence
  source 1..2319: mol_type = other DNA
tgagattttcctttccagatccataactcctccggatggattaccgtctgcgccgagctcgacagagaggaagtagaacactactcttttggcgtggaggccgtggatcacggcagtccgccgatgtctagctctacatcagtatctatcactgtgttagacgtgaacgataatgaccctgtgttcacccagcccacatacgaactccggctcaatgaggatgctgccgtggggtcatcggtattgactctgcaggcgcgtgatagagacgcaaattcagtgatcacataccagctcaccggcggcaacacccgcaacaggtttgcgctctcatcacagcgaggtgggggcctcattacgctggccctccctctagattataagcaggaacagcagtacgtgttagcggtgacggccagtgacggcacgcgtagtcatactgcgcatgtgctgattaatgtgaccgatgccaacacacacagaccagtgttccaatcatcccactatacagtttccgtgagcgaagacaggcctgtcgggacaagtatagctacactgtctgctaatgatgaagatacaggcgaaaacgcgagaattacatacgtcatacaagatcccgtgccacaatttcggatcgatccggatagcggcacaatgtacaccatgatggaacttgattatgaaaatcaggttgcttataccctgacaataatggcgcaggataacggaattcctcagaagtccgacacaaccacactggagattctcatcctggacgctaacgacaatgcgcctcagttcctttgggacttttatcaggggtccattttcgaggatgctcctccctccacgtccattctgcaggtgtccgcaacagatagggatagcggacccaatgggagattgctctacacctttcaggggggcgacgacggagatggggacttctatatagaacctacatctggagtgattaggactcagaggaggcttgacagggagaacgttgcagtgtacaatctgtgggcactggcagtcgatcgcggctccccaacccctctgtccgctagcgttgagatccaggtaactattctggacatcaatgataatgcacccatgttcgaaaaggatgagttggagctctttgtcgaggagaacaacccagtgggttccgtcgttgcaaaaatacgagctaacgaccccgatgagggtcctaacgcgcagattatgtaccagattgttgaaggagatatgagacacttcttccagctcgacctgttgaatggtgatctccgcgcaatggtcgagctggatttcgaggtgcgccgcgagtatgtactggttgtccaggccacatccgccccgctggtcagtcgggccacagtgcatatcctattggtggaccagaatgataacccccccgtgctgccagactttcagattcttttcaacaattatgtgaccaataagtccaactcttttcctaccggagtgattggttgcattcccgcccacgatccagatgtgtcagacagcctgaactataccttcgttcagggtaacgagctgcgcctgttgctcctggaccctgccacgggtgaattgcaactgtctcgggatctagacaataaccgaccgctggaggcgctgatggaagtttcagtgtccgacgggatccattccgtgacggccttctgtacgttacgggtaaccatcattaccgacgacatgcttactaattccataacagtccgcctagaaaacatgtcccaggagaaatttctgagcccactgctggccctgttcgtcgagggagtggccgccgtccttagtacgaccaaggatgatgtattcgtgtttaatgttcagaacgacactgacgtctcttctaacatcctcaacgttactttcagcgcacttctccccggcggtgtgcgcggccagttctttccatcagaagacctgcaggagcagatttaccttaatcgaaccttactgaccaccatctccacacagagagtactcccctttgatgataacatctgcctgcgcgaaccatgcgagaattatatgaagtgcgtgtctgtgctacggttcgactcctcagctccttttttgagctcaactacagtgttatttagacctatccatcctattaacggccttagatgcagatgtccaccaggctttacaggcgattactgcgagacagagattgacctctgctattccgatccttgtggcgctaacgggaggtgcaggtcccgagagggagggtacacctgcgaatgtttcgaggattttacagaaatcagttag

SEQ ID NO: 110282 - DNA, 8772 bp, synthetic construct
  misc_feature 1..8772: note = Description of Artificial Sequence: Synthetic coding sequence
  source 1..8772: mol_type = other DNA
atgagatcacctgctacgggcgtgcctttaccaactcccccacctcctttacttctcctgctcctccttttgcttccccccccgctactcggagatcaggtgggcccttgccgatctcttggaagccgcgggagaggctcgagtggcgcgtgtgcccctatggggtggttatgccccagtagcgcgtcaaatctgtggctctatacttcacgatgtcgggacgccggcactgagctgaccggacatcttgtaccacaccatgatgggttgagagtgtggtgtccggaatctgaagcccatatcccactgcccccagccccagaaggatgcccatggtcctgtcgcttattaggcataggcggccacctgtctcctcaggggaagctcactctgcctgaggaacatccttgtctgaaggctcctcggttaaggtgccagtcctgtaagttagctcaggcccccggcttaagggcaggcgaaaggtctcctgaggaaagcctgggcggcaggcgcaagcggaacgtgaatactgctcctcaatttcagcctcccagttatcaggcaaccgtgccagagaaccaaccagccggcacccctgttgccagtttgagggcgatcgatcctgacgagggcgaggccggcaggctcgaatacaccatggatgctctgttcgactcaaggtccaaccagttcttttcacttgaccccgtgaccggtgccgtcaccaccgctgaagaacttgatcgggagaccaagtccacgcatgtatttcgggtgaccgcccaggatcacggaatgccccgcagaagcgccttggccaccctgacgatcctagtcaccgacaccaacgatcatgacccggtgtttgagcaacaggaatacaaggaatccctgagagagaacctggaagtaggctacgaggtactaactgtgagggcgactgacggcgatgctcctccaaacgccaacatactgtacagactactcgagggctccggggggagtccttcagaagtattcgaaatcgaccctaggtcgggtgtgatacggacccgcgggccggttgaccgtgaggaggtggaatcctatcagttaacagtagaagccagcgatcagggcagagaccccggccccaggtctaccacagcagcggtgtttcttagcgtggaagatgacaacgacaatgcccctcaattctccgagaaacgttacgtagtccaagtgagagaggatgttacccccggagcccccgtcctacgcgtgacagcgagtgaccgagataagggttcaaacgcagtggttcattattccatcatgagtggcaacgcacgcggacagttctatctggacgcacagactggggctcttgacgtggtgtcccccctcgactatgagaccaccaaagagtatactcttagggttcgagcgcaggatggaggccgacctcctctgagcaatgtctccggcttagtcacagtgcaggtgctcgatatcaatgataacgctcccatcttcgtttccacccccttccaggctactgttttggagtctgtgcccctcggatacctggtgttgcacgtgcaggccatagacgctgacgcaggagacaatgctcggcttgagtataggctagcaggcgttggtcatgactttccttttactatcaataacggaaccggctggattagcgtggcggcagagttggaccgcgaagaggtagatttttatagttttggagtggaggcccgtgaccatggaacgcccgcccttaccgcctcagcaagtgtgagcgtcaccgttctagacgtgaacgacaataaccctacgtttacacaacctgagtacactgtcaggttaaacgaagacgcagctgtagggaccagcgtggtgacagtgtccgccgtggaccgcgatgcccatagcgtcatcacctatcagatcacttccgggaatacccgtaataggttctccatcactagtcagtctggcgggggattggtgtcactcgctctgccactcgactataagctggagagacagtacgtgctggccgtcacagcctccgacggaactagacaggatacggctcagattgtggtgaacgtcactgatgctaacacccatcgtccggtattccagtcttctcattatactgtaaacgtgaacgaggacaggcccgctggtacaaccgtggtgctcatatcagccaccgacgaagataccggggagaacgcccggatcacgtacttcatggaagactctatacctcaatttagaatagacgccgatacaggcgctgtcacaacgcaggccgaactcgattacgaggatcaagtgagctatactttagccattactgccagagataacggtataccacagaagtccgacacgacatacctagagatcttggttaacgacgtcaacgacaatgcaccccaatttctcagagacagctatcagggctcagtctacgaagatgtacccccattcaccagtgtgctccagattagcgccactgaccgggactctggactcaacggtcgggtcttttatacatttcagggcggcgatgacggcgatggtgactttattgtcgagtctaccagtggtatcgtgcggactctgaggaggctggaccgcgaaaatgtggctcaatacgtattgagagcatatgcagtggataagggcatgcctcccgcaagaacgcccatggaggtgacagtgactgtactggatgtgaatgacaatccacctgtctttgaacaggacgagttcgatgtgttcgtcgaggagaacagtcctattggactggcagttgcgcgcgtcactgcaacggaccctgatgaggggaccaacgcccaaatcatgtatcaaatcgtcgagggaaacatcccagaagttttccagttagacatttttagcggggagctcaccgcactggtcgacttagattatgaggaccggcctgagtacgtgctggtcatccaagctacttctgccccgctggtctctagagctacagtgcatgtgagactgctggaccggaatgacaacccccccgttttagggaattttgagattctgtttaacaactatgttacaaatagatcttcatcctttcctgggggggccatcgggcgggttccggcccacgacccagatattagcgattctcttacatattccttcgagcggggcaacgaactgagcctggtgctgctgaatgcttcaacaggagagctcaagttatctcgcgctctggataataatcgtcctcttgaggccatcatgtctgttttggtttccgacggcgtgcattcagtcacagcccagtgcgctctcagggtgacaattatcacagacgagatgctaacccattcgatcacgctgcgtctagaagatatgtctcctgaacgattcctcagccccctgttgggcctgttcatccaggccgttgcagctactctggccactcctccagaccatgtcgtcgttttcaatgtgcagagggatacagacgcacccggcggacacattctcaatgtatcactatccgttggacaacctcccggccccgggggtggccccccttttctaccgagcgaggacttacaggaacgtctatacctgaaccggtccctgttaaccgccatctcagctcagagagtccttcctttcgatgacaacatctgtctcagggagccctgtgaaaattacatgcggtgtgtttcagtcctccgtttcgactcttcagccccgtttatcgcctcctcgtccgtgctgttcagacctatacaccccgttggtggattaagatgccgctgtccacccggctttacgggggattactgcgagaccgaggtggatctgtgttatagccgtccttgcggtccacatggacgttgtagaagtcgggagggggggtacacttgtctgtgccgggacggatatactggcgagcactgtgaggtttccgctcggtcaggaagatgtaccccaggagtgtgtaagaatggcgggacatgcgtcaatctattggtcggaggctttaagtgcgattgcccttcaggagacttcgagaaaccttattgccaggtgaccacaaggtcttttcctgcccacagctttatcacctttcgggggttgcgccaaaggttccatttcaccctggcgctgagcttcgcaaccaaagaaagagacggactgctgttgtacaacggaaggtttaatgaaaaacacgactttgtggctctggaggtcatacaagagcaagtgcaactaacattctcagctggggaaagcacaaccacagtgtcaccttttgtccccggcggagtatccgacgggcagtggcatacagtccagctaaaatattacaacaaacctcttttggggcagacggggctacctcagggaccaagcgagcagaaagtcgcagtggtcaccgttgatggatgtgatacgggtgttgccctccgcttcgggtccgtcctggggaactattcctgcgcagcccaggggacgcagggaggcagtaagaagtcattggacctgacaggtccccttcttcttggcggagtgcccgatttgcctgagtctttccctgtgcggatgcgccagttcgtggggtgcatgagaaacttgcaggttgacagtcgccatattgacatggcagatttcatagccaacaatgggacagtgcccggttgtccagccaaaaaaaacgtgtgcgactcaaatacttgccataacggcgggacctgcgtgaatcagtgggatgccttttcctgcgagtgccccttggggttcggtgggaaatcttgtgcacaagaaatggccaatccacaacactttctgggttcaagcttagtcgcctggcatggtctttcccttcctataagtcagccttggtatctgtccttgatgttccggaccagacaggccgatggagttttactacaggccatcacacgaggacgatccacaattacactccaattgcgagagggccacgtgatgctgagcgttgaaggcaccggactacaggcatcctcactgcgcctggaacctggacgggccaacgacggtgattggcatcacgcccagcttgcactgggcgcttccggcgggcccggccacgctattctgtccttcgattacggccagcaacgagcagaggggaacctcggaccacgtctgcatggtctgcatctctccaatatcacagtgggcggtatccccgggcctgccggcggcgttgcacggggcttcagaggctgtctgcaaggcgtaagagtgtccgacacccccgaaggggtgaatagcttagatccctcacatggagaaagcatcaacgtggaacagggatgctctcttccagatccctgtgattctaacccctgtcccgcgaacagttactgctccaacgactgggatagttatagctgctcttgtgaccccgggtattacggtgacaactgcactaatgtttgtgacctaaatccctgtgaacaccaatcagtatgtacccggaaaccatcagccccccacggatacacatgcgaatgtcctccgaattatctgggaccctattgcgagaccaggatcgatcagccctgcccacgaggttggtgggggcatcctacgtgtggaccttgcaattgtgacgtttcaaaagggttcgaccccgattgcaataaaaccagtggggagtgtcattgtaaggaaaatcattatcgtcctccagggtccccgacttgtcttctgtgcgactgttatcctacaggaagcctgagtcgagtttgtgacccagaggatggccagtgtccctgcaagcctggggtgatcggtaggcagtgcgaccgctgtgacaatccttttgcggaagtgacaacgaatggctgcgaagtcaattatgatagctgccccagggctatcgaagcagggatttggtggcctcgcacgagattcggtttgccagcagcagctccttgccctaaggggagcttcggtacagctgttcgtcattgcgacgagcatcgcggctggttgcccccaaacctattcaattgcacaagcattacctttagcgaactgaaagggtttgccgaacggttgcagcggaacgagtccggcttagatagcgggagaagccagcagctcgccctcctcttaaggaacgctacccagcacaccgcagggtatttcgggagcgacgtaaaggtggcctaccagctggccactcggcttctcgctcatgaatccactcaaaggggtttcggtctgtccgcaactcaggacgtgcactttactgagaatttgctaagggtgggaagcgctctccttgataccgccaacaagaggcattgggaactgattcaacagacagaagggggcacggcctggttgctccaacactatgaggcttatgcatccgctcttgcgcagaatatgagacacacttatctgtcgccatttacgattgtcactcctaatatcgtgatttcagtggtacgcctggacaagggcaattttgctggggctaagcttccccgctacgaggctctgcgtggggaacaacctccagacctggaaaccacggttattctcccagaaagcgtgttcagggaaaccccgcccgtcgtgaggccagctggccccggagaggctcaggagcccgaggaacttgccagacgccaaaggcggcatccagagttgtctcaaggcgaggcagtagcttctgttattatctatagaaccctggccggcttactccctcacaactatgatcccgataagaggtctctgagagtccctaagcggccgattattaacacaccagttgtgagcatcagtgtccacgatgacgaagaattgctgccccgcgccctggacaaacctgtgaccgtccaatttaggctgctggagaccgaggagagaacgaaaccaatctgtgtattttggaaccattcgatcctcgtgtcaggaaccggcggttggtcagcacgcggctgtgaggttgtgttccgcaacgaatcacacgtatcgtgccagtgcaatcacatgacatccttcgccgtcctgatggatgtgtctagaagagagaacggcgagatcctacctctcaagaccttgacctacgtggcactcggagttactttggccgccctgctcctgacttttttctttttgaccttgctgaggattctaaggagtaatcagcatggaattcggcggaacctcacagccgcgttggggctcgctcagctggtttttctgttgggcattaatcaggccgatctgccttttgcttgcacagttattgccatcctcttacatttcctttacctatgtactttctcatgggctttacttgaagcactgcacctgtaccgggcactcaccgaggtacgggatgtaaacacaggcccaatgagattctactatatgttggggtggggagtcccggccttcatcacgggtctggcagtgggactggatccagagggctatgggaaccctgatttctgttggcttagcatctacgacacactgatttggagctttgcaggcccagtagcgttcgcagttagtatgagcgtgttcttgtatattcttgcagcaagggcctcctgcgcagcccagagacagggcttcgagaagaagggacccgtaagtggccttcagccaagctttgcagtgttgctgcttctctctgccacttggctcttggccctgctgagtgtcaactcggatacactcttgtttcattatctgttcgccacctgtaactgcatccagggcccttttatctttctcagctacgtcgtcttgagtaaggaggttaggaaggccctcaagctcgcttgctcccgaaagccgagtccggatcctgctttgaccaccaaatctactctaacctccagctataactgcccttctccctacgccgacgggcgcctgtaccaaccctacggtgattcagcagggtcactgcacagtaccagcagatctggcaagtcccagccttcctacatcccattcctccttagagaggagtctgctttgaaccctggtcagggcccccccggcctgggagatccgggctctctgttccttgaggggcaagatcagcaacatgaccctgataccgacagtgattctgatctctcactggaagatgatcaatctggttcctatgcttccactcattcatcagacagcgaagaggaggaggaggaagaagaagaggaggctgctttcccaggtgagcaaggatgggacagcttactggggccaggagcagagcgcctccccctccattcaactcccaaagacggcggcccaggccccggtaaggccccttggccaggtgatttcggtacgaccgccaaggagagctccggtaatggggctcccgaggagagactccgcgagaacggcgacgcgctgagtcgcgagggatccctcggccctctacctggatcaagcgcacaaccacacaagggcattctaaaaaaaaagtgtctgcctaccataagcgagaagagctctctgctccggcttcccctggagcaatgtaccggaagttctagaggtagctctgccagtgagggaagccgcggtggtcctccacctcggcctccacctagacagagcctgcaggaacagctgaacggggtgatgcccatcgcaatgtcaattaaggccgggaccgttgacgaagattccagtggcagtgaattcctgtttttcaattttctgcactag

SEQ ID NO: 110283 - DNA, 9939 bp, synthetic construct
  misc_feature 1..9939: note = Description of Artificial Sequence: Synthetic coding sequence
  source 1..9939: mol_type = other DNA
atgatggcccgaagacctccttggagaggcctgggggggcgatcaactcctatcctgcttctgctgttactaagtctattccccttgagtcaagaagagttaggcgggggtggccatcaggggtgggatcccgggcttgctgccacaaccgggccccgagcccacattgggggaggggccctggctctgtgccctgagtcgtccggcgtgcgagaagatggcggaccgggactcggtgtgcgcgagcctatttttgtaggactgagaggaaggaggcagagtgcaaggaacagccgcggaccaccagaacaacccaacgaagagctagggatcgagcacggtgtccagcctctgggctcccgtgaaagagagaccggtcaggggcctggcagtgttctgtactggaggcctgaggtttcctcctgtggacggaccgggccactgcaaaggggttcattatcccccggagccctctcgagcggcgtccctggcagcggcaattccagccctctgccctccgactttctgattcggcaccatgggccaaaacctgtcagctcccagcggaacgcaggtaccggtagtagaaaacgagtcggtacagctcggtgctgcggggagctgtgggccaccggctctaagggacagggagagcgtgccaccacaagcggcgccgaacgtaccgcaccccgcagaaactgccttccaggggcttctggcagtggaccagagctagactccgccccacgcacagctaggactgctccagcatcaggcagcgccccgcgtgagagccggacggcaccagagccggcaccaaagcggatgaggtctcggggcctattccgatgccgattcctcccacagcgacctggccctcgtccacctggtttgccggcgcgccccgaggcccggaaggtgacttcagccaatcgtgcgcgctttcgaagagctgcaaaccgccacccccagtttcctcagtataactaccagacactggtgcctgagaatgaggccgctggcactgccgtactgcgcgtcgtggcacaagatccagacgctggcgaggctggaaggcttgtatatagcctagctgctctgatgaacagcagatcattggagctgttctctattgatccacagtccggtctgataagaactgctgccgccctggatagggagtccatggagcgccattatctgcgggtaactgcacaggaccatggaagccctaggttgtcggccactactatggttgctgtcaccgtagccgaccggaacgaccatagccccgtattcgagcaggcccaatatcgcgaaactctgcgcgaaaacgttgaagagggctaccctattctccagctgagagcaacagatggcgacgcacctcctaatgcaaaccttcgctaccggtttgttgggcctcccgccgcccgggccgccgctgccgctgcctttgagatagaccctcgcagtggcctgatctccacatcaggtcgtgtggatagggaacacatggagtcctacgagctagtggtggaggcttcggaccagggtcaggaaccaggaccccgttcagcgaccgttagagtccacataacagtgctggacgagaacgacaacgccccgcaattttctgaaaaaaggtatgttgcccaagtacgagaggacgtacgcccacacactgtggtcttgcgagtgactgcaacagatcgggacaaagatgcgaatgggctagtccactataacatcatttcagggaattctcgaggccacttcgccatcgattcactgacaggtgaaattcaggtagttgcccccctggattttgaggccgaaagggaatatgccctgaggatccgggcccaggatgccggtaggcccccactctcaaataacaccgggctggctagcatccaggtggtggatatcaacgaccacatccccatctttgttagcacaccctttcaggtgtcagtgttggagaacgcccctcttggccactctgtaattcacattcaggctgtggatgctgaccacggagagaacgctcgactggagtattcactgaccggtgtcgcccctgacaccccatttgtgattaattctgccactggctgggtgagcgtgtctggaccacttgatagagaatctgttgaacactacttcttcggagttgaggcaagagatcacggctcccctcccctgtccgcatcagccagtgtcacagtgaccgtactagatgtgaacgataaccgacctgaattcacgatgaaggagtatcatttgcgccttaacgaggacgccgcagtgggaacttccgtggtgtccgttacggccgttgacagagacgccaacagcgcaatttcttatcagattacaggcgggaacacacggaacaggttcgcaatttctacccaggggggcgtcggtctggtcaccctggccctcccactcgattacaagcaggagaggtacttcaaactcgtgctgactgcatccgacagggcgcttcatgaccactgttatgttcacattaacatcactgatgccaacactcatagacctgtgttccagagtgctcactattccgtttctgtcaatgaggatcgccctatgggaagtacaattgtcgttatcagcgcaagcgacgacgatgtcggagaaaacgcccggatcacctacctgctggaagataatcttccccagtttcgaattgatgctgacagcggggcgattacactgcaggcccccctggactatgaggatcaggtcacttacacactggccataacagctcgggacaacggaatcccacagaaagccgacacaacctacgtggaggtgatggtcaacgacgtgaacgataatgctcctcagttcgtcgcgagtcactacaccggtcttgtgtccgaggatgcgcccccattcacatctgtgttgcagatctcagccactgaccgtgatgctcacgcaaacggccgcgtacaatacacattccaaaatggcgaggacggggatggggactttacaatcgagcccactagtggtattgtccgaactgttaggcggctcgacagggaggctgtctccgtgtacgaactgacagcatatgccgtggacagaggggttccccccctaaggacgccagtcagcattcaggtcatggtgcaagatgtcaatgacaatgcccccgtctttcccgcagaggaatttgaggtgagggtcaaagaaaactcaatagtcgggtccgtggtggcacaaatcaccgctgtggaccccgacgagggccccaacgcacatattatgtaccagattgtcgaaggcaacatccccgaactgttccagatggacattttttctggagagctgacagcgctgattgacctcgactacgaggcccgtcaggaatatgtgatcgtcgtgcaggcgacctcagcacccctggtgtctagggctaccgtgcacgtcagactggtcgaccaaaacgacaacagtccagtgctgaataactttcagatcctgtttaacaattacgtatcaaacaggagtgatactttccccagcgggatcatagggcgcatcccagcgtacgaccccgatgtctcggatcacttgttctattcttttgaacgaggaaacgagctgcagttgctggtggtcaaccagaccagcggggaactgcggctctcccgaaagctagacaacaacagacctcttgtggcaagcatgctcgtgacggtcaccgacggcctgcatagcgtgactgcccagtgcgtattgagagtagtgatcatcactgaggaactcctggccaactccctgaccgtaagactggaaaacatgtggcaagagcggttccttagtccgctcctgggtaggttcttagaaggagtcgctgcagtcctagctactccggcggaagacgttttcattttcaacatacagaatgatactgacgtgggcggtacagtgctgaatgtgtctttttctgcgttggcgcctcgcggcgccggcgccggggcagctggaccctggttttcttctgaagaattgcaggaacaactctacgtgcgtcgcgcagccctagccgctagatctttactggatgtgctcccgttcgatgacaatgtttgcctgagagagccttgtgaaaactacatgaaatgcgtttcggtcttacgttttgattcctccgcccccttcctggcctctgcttccacactctttcggcctatccagcccattgcaggactgcgatgtagatgccctcctggcttcacaggtgacttctgcgagacagagttggacctctgttatagtaatccctgccgcaacggaggtgcgtgtgcccggcgtgaaggtggctacacatgcgtgtgtaggccccggtttaccggagaggattgtgagttagatactgaagcaggacgatgtgtgcctggagtgtgtcgtaatggcggtacgtgcaccgatgcacccaacggtggatttaggtgccagtgcccggcaggcggggcattcgaaggtccccgttgtgaagtcgcggccagatcatttccccctagctcatttgttatgtttaggggactgcggcagcgcttccacttaacactctccctgtcatttgctaccgtccagcagtctggcctcctcttttataatggtcgtctgaacgagaaacacgactttctcgccctggagctcgttgcagggcaggtccggctgacttatagcactggtgagtctaacaccgttgtctctccaacagtgcccgggggattatccgacgggcagtggcacacagtgcacttgcgttattacaacaagcctaggacggacgcgctgggcggcgcacagggtccttcgaaggataaggttgcggttcttagtgtcgacgactgcgatgtagccgttgctctccagttcggggcagagattggcaactactcctgtgccgctgcaggagtccagactagctcgaagaagagtcttgatctgacaggccccctgctcttggggggggttcctaacctgccggagaatttcccagtaagtcacaaggatttcatcgggtgtatgcgggatctccatatcgacgggcgaagagtggacatggctgcgttcgtggccaacaatggcaccatggccggctgtcaggcaaaactgcacttttgcgactccggcccatgcaaaaactctgggttctgttccgaaagatggggatcgttcagttgtgattgccccgttgggttcggagggaaagattgtcagctgactatggctcaccctcatcattttcggggcaatggtaccctttcatggaactttggctccgacatggccgtgtctgtgccttggtacctcgggctggcatttaggactcgggccacacagggcgtgctgatgcaagtccaagccgggccacattccaccctcttatgtcaactggaccgtggcctcttatcagtcacagttaccaggggctctgggcgcgcttctcacctgttgttggatcaggtgacagttagcgatggaaggtggcacgacctcaggctggagttacaggaggagccaggagggcgcaggggtcatcacgtgctgatggtttccctggattttagccttttccaggatacaatggctgtggggtctgagctccagggcctcaaagtgaaacagctacatgtgggaggcttacctccagggtcagcagaggaggcacctcagggactggtcggatgtatccagggagtatggctgggcagcaccccctccgggtcacccgccctgctccctcctagtcacagagtgaatgcagaaccaggatgcgtagttaccaatgcttgcgcttccgggccatgcccaccacatgcagactgcagggatctgtggcagacctttagttgcacttgtcagcctgggtattatggaccaggttgcgtggatgcttgtctgctcaacccatgccagaatcagggatcttgccgacatctccccggcgcaccacacgggtacacatgtgactgcgtaggcggatactttggccatcattgtgagcacaggatggaccaacaatgtcctaggggttggtgggggtcccccacctgcgggccttgcaattgcgatgtccacaagggatttgacccaaactgtaacaagaccaacggtcaatgccattgcaaagagtttcattacagaccaaggggatctgattcctgccttccttgtgattgttatccagtggggtccacttcaaggagctgtgcaccacacagcggacagtgtccctgcagacccggagctctcggaaggcagtgtaatagctgcgacagtccttttgctgaagtgaccgcgagcggctgccgcgtgctgtatgacgcatgtccaaaaagcttacggtcaggcgtctggtggccccaaacaaaatttggcgttctggcgacagtgccctgtcctcgtggcgcactgggcgctgccgtgagactctgtgacgaggcacagggctggctggaaccagacctctttaactgcactagtcccgccttcagagagctatctttgctactggacggcctagagctgaataagaccgctctggatacgatggaggctaaaaaactggcacaacgcctgagggaagtgactggccacaccgaccactacttctcccaggacgtgagggttactgctcgcctactcgcgcaccttctggcctttgaatcacaccaacaaggatttgggctgacagccacccaagatgcacactttaacgagaatcttctatgggcaggatccgccctccttgctccagaaactggtgatctttgggccgccctcggacaacgcgctcccgggggatcgcccggatcggctggactagttaggcaccttgaggagtatgctgcaacactggccaggaacatggagctgacttaccttaacccaatgggtttggtcacaccaaacataatgctctcgatcgaccggatggagcacccatcatcgcctcgcggagcgagaagatatccacggtaccactccaacctgtttcgtggccaggatgcttgggacccacatactcacgtccttctgccatctcagagtcctcgtccttcaccgagtgaagtgctgccaacatcatcaagtattgagaactctacaacaagcagcgtggtacccccaccagcaccacccgagcctgagcctggaatctccattatcatcctgctggtctacagaactttgggcggactcttgcctgcacagttccaagcagaacggagaggtgcacgcctgcctcagaacccggtgatgaactcacctgtggtttcagttgcagtgtttcatggacgcaattttctgaggggtatccttgagtctccaatctctctcgaatttcggttgttgcagaccgctaacagaagtaaggccatctgcgtccagtgggatccacccgggctcgcagagcagcatggggtatggactgctcgggattgcgagctggttcaccggaacggttctcatgcacggtgccgctgcagccgcaccggcacgtttggagtgctaatggatgcctccccacgagaacgcctggagggcgatctcgagcttctggctgtgtttacccatgttgtggtggctgtaagcgtcgccgccctcgtgctgaccgccgctatcttactgtctttgcgtagcctgaaaagcaacgttcgaggcatccacgcaaatgttgcagcagccctgggggtcgccgagctcctgtttctgctagggatccaccgtactcacaaccagctagtctgtaccgcggtcgcaatattgttacattatttcttcctcagcacattcgcatggctttttgtgcaaggtctgcatttgtacagaatgcaagtggagcctagaaacgtggacaggggagccatgcgcttctatcatgcccttgggtggggcgtgcccgcagtacttttgggattagcggtcggtctcgaccctgagggctatgggaatcccgacttctgctggattagcgtgcacgagccactgatctggagtttcgctgggcccgtggtacttgtaattgtgatgaatggaaccatgtttctcctagcggcgaggacctcatgctcaaccggtcaacgtgaagctaaaaagaccagcgctctgaccttgagaagcagtttcctactcctcctgctggtgtccgccagttggctgttcgggttgctggccgtgaaccattccattctggccttccactaccttcatgcgggcctctgcggcttacaggggctggccgtactactccttttttgcgtgttgaacgccgatgcccgagccgcttggatgcctgcatgtctggggcgcaaggcggcccctgaagaagcccgccctgcccccggccttggaccaggcgcttacaacaataccgcgctgttcgaggagtccgggctgattaggatcacactcggcgcgagcaccgtgagtagcgtctctagcgcccgatccggccgaacacaagaccaggattctcagaggggacgctcttatttgagagataatgtgctggtgaggcacggatctgcagctgatcacacagaccatagtctccaagcccatgcaggacctactgacctggatgtggctatgtttcacagagacgctggagctgattccgactccgactcagacctgtccctagaggaagaacggtccctgtcgatcccctccagtgagtccgaggataatgggcgcaccaggggaagattccagaggcctctctgccgagccgcacaatccgaacggctcctcactcaccccaaagatgtcgacgggaacgacctgctgtcttattggccggccctgggagagtgtgaggcggctccctgtgctcttcaaacctgggggtcggaacgccggctgggcctggatacctcgaaagatgccgctaacaacaatcagccagaccccgcccttacatcgggggatgagacgagcttaggcagagcacaacgccagaggaaagggattctcaagaacagactgcagtaccccctcgtccctcagacccgcggcgcaccagagctgtcatggtgtcgggcggcaacactgggccaccgtgctgtgcccgcagcctcctatgggcgtatctatgcgggggggggaacggggtctttatcccagccagctagtcgttactcttctagagagcaactggatctcctcctccgacggcagctgtctcgagaacggctggaggaggcccccgcccccgtccttcggccattgtctcgcccaggctcgcaggaatgcatggatgcagcccctggacgtttggagccaaaagatcgaggttcaacactaccgcgcagacagccacccagagattatcccggcgccatggccggcagattcgggagtcgcgatgcgctggacctaggcgcaccgcgcgaatggttgagcacactgccacctcccagaagaactagagatctcgacccccagccaccacccttgcccctgagccctcaaaggcaactgagtcgggatcccttactgccatctagaccacttgatagcctttccagaagctcgaacagccgcgagcaattggaccaggttcccagtagacacccaagcagggaggcccttgggcccctgcctcagctgcttagagctagagaagactccgtgagcgggcctagtcatggtccctcaacggagcaactggatattctgtctagtattctggcaagctttaattcatccgcattgtctagcgtccagtccagctcaactcctctaggcccccatactacagccacaccctctgccacagcctcagtgcttgggccctcaactccccggtctgccacttcacatagcatcagcgagttgtcacccgatagcgaggtcccccgatctgaaggtcattcctag

SEQ ID NO: 110284 - DNA, 9954 bp, synthetic construct
  misc_feature 1..9954: note = Description of Artificial Sequence: Synthetic coding sequence
  source 1..9954: mol_type = other DNA
atgatggcgcgccgtcccccctggcggggcttgggtggtcgaagtactcccatcttactcctcctgctcttgtcactcttcccactcagtcaggaagaactgggcggggggggccatcagggatgggaccccggtcttgcggccaccacgggaccaagagcccacattggaggcggagctctggcactttgtcctgagagttccggcgttcgagaagacggtggccccggcctcggagtccgagaaccaatattcgtcggccttcgcgggagacggcagagcgcacgcaattctcgagggcccccagagcaacctaatgaagagctcggaatagaacacggagtgcagccgctcggaagtagagaacgagaaaccgggcaggggcccggatctgtactgtactggcgaccagaagtgtctagctgtggtcggacgggtcctctgcaacgtggcagcttatcacccggtgcactgagtagcggagtgccaggatcgggcaactcatcccccctgccgagcgactttttgatcagacatcacggccccaagccagtgagtagccagcgcaatgcaggaaccggttcaaggaagcgggtcggtacagcacggtgctgtggcgagctctgggctaccggctccaagggacaaggagagagagcaactacaagcggggccgaacggactgctcctaggcggaactgcctaccaggagccagcggctctggcccagaactggacagcgcccctcggaccgcccggaccgcccccgcctctggatcagcccccagagagtctaggaccgcgccagaaccggcccctaagagaatgcggagtcgaggactcttcaggtgcaggttcctaccacaacgcccgggtccacgacctcctgggctgcccgccaggccggaagctcgcaaggtcacaagtgccaatcgtgcgaggtttagaagggctgctaatcgacaccctcagtttccgcagtacaattatcagactttggtgccagaaaatgaagccgctggaaccgcagtgttacgtgtggtcgcccaagatcctgacgccggagaggccgggagactcgtatattccctcgccgcactaatgaacagccgtagtttagagcttttctcaatagatccacagtcaggtctcataagaaccgccgctgccctggaccgcgagtcgatggagcggcactacctcagagtgacagcacaggatcacggctctcctagactgagcgctaccaccatggtcgccgtgacggtcgctgacagaaatgaccattcgccggttttcgaacaggctcagtaccgcgaaacactgagagagaacgttgaggagggctaccccattctccagctgagagccacagatggtgatgcccccccaaatgctaacctgcggtacagatttgtgggcccccccgctgctcgcgccgctgcggcggcagccttcgagatcgatccgcggtcaggactaatatcaacctcaggcagggtcgaccgcgagcatatggaaagctacgaactcgtcgtcgaggcaagcgaccagggacaggaaccagggcctcgttcagccaccgtacgggtgcatatcaccgttctcgacgagaacgacaacgctcctcagttttccgaaaagcggtatgtcgcgcaagtacgagaggacgtacggcctcataccgtggtattgcgcgtgactgcaacagatcgggacaaggatgctaacggcctggtacattacaatatcattagcgggaattcacgcggtcacttcgcaatcgatagtctgacaggcgaaattcaagttgttgcacccctcgattttgaagccgagcgcgagtatgcactgagaattcgcgcccaggacgctggccgcccacctctttcaaacaacactggattggccagcatccaagtcgtggatatcaacgatcacattccaatatttgtgtcgacacccttccaggttagtgtgctggagaatgcaccgcttggtcactctgtcatccacattcaggcagtggacgccgaccatggagaaaacgctcgcctcgaatattctctgacaggagtggcgcccgatacacctttcgtgatcaatagcgctaccgggtgggtctcagtgtccggaccgctagaccgagagagtgtggagcactatttttttggcgtcgaagcgcgggaccacgggagtccccccctgagtgcctctgcctctgtgaccgtaacagtgctcgatgtcaatgacaaccgacccgaattcacgatgaaggagtaccatctgcggctgaatgaggatgcagctgtgggaacttccgtcgtatccgttaccgctgttgaccgagacgccaactctgctatcagttatcagattaccggagggaatacacggaaccgattcgctatatcaacccaggggggcgtgggattggtgactttagctctcccccttgactataaacaggagcggtactttaaactggttttaactgcttccgatagagccctgcacgaccactgctatgtacacattaatattaccgacgcgaatacccacaggcccgtgttccagagtgcccactacagcgtgagtgttaacgaggaccggcctatgggcagtacgatcgtggtgataagcgccagcgatgatgacgttggggaaaatgctaggattacttacctgctagaagataacttaccccaatttcgcattgatgctgattccggagccataacacttcaggcaccgctggattacgaagatcaagtgacatacaccctagctattacggcgcgagataatgggataccacaaaaggctgatactacctacgtggaggtgatggtcaacgatgtgaatgacaacgctcctcaattcgtggcgagccattacacgggtctggtgagtgaagatgcccctccttttaccagcgtgctgcagatctccgctaccgacagagacgcacatgctaatggccgcgtacagtacactttccagaacggggaggatggcgatggggactttacgattgagcccacctcaggaatcgttcgaaccgtcaggagattggatagggaagccgtgtctgtttacgaactgaccgcctatgctgtggaccggggcgtaccaccactgagaactccagtgtcaatccaagtcatggtgcaagacgtgaatgacaacgctcctgtatttcccgctgaggagtttgaagtcagggttaaggagaattccattgtcggaagtgttgtagcccagatcacagctgtggaccccgacgagggccctaacgcacatatcatgtatcagatagtcgaagggaatatcccggagttgttccagatggatattttttccggcgagctcactgcactaattgaccttgattacgaagccagacaggaatacgtgattgttgtccaagctactagtgcgccactggtgtcaagggccacggttcacgttcggctagtcgatcagaacgataatagcccagtactcaataatttccaaatactgtttaataactatgtatccaataggtcagatacatttccctccggtattatagggcggattcccgcgtacgatccggacgtttccgaccacttattttatagtttcgagagaggcaacgaactgcaactgctggtggtgaaccaaacaagtggagagctcagattgtcacggaagctggataacaacagacctctggtcgcctctatgctggtaactgtaaccgatggtctccacagcgtgacggctcagtgcgtcttgcgcgtggtgataattactgaagagctactagccaattctcttaccgtccgccttgagaacatgtggcaggagcgattcctcagccccttgctggggagatttctggagggcgtcgctgccgtcttagctactcccgccgaggatgtctttatctttaatatacagaatgatactgatgtcggtggcactgtcctgaacgtctcctttagtgctctcgcccctaggggcgctggagcaggtgcggctggtccgtggttttccagcgaagagctccaggaacagttatatgtccggagagccgccctagcagccaggagcctccttgacgtcctacctttcgatgacaacgtctgtctgcgtgaaccatgtgagaattatatgaaatgtgtgtctgttctaagattcgattcatccgctccgtttctcgcatcagccagcacactctttcgccccatccaaccgattgccggactgaggtgcagatgcccaccagggttcactggggatttttgtgaaacagaactagatttgtgttactcgaatccttgtcggaacggaggagcctgtgcgcgcagggagggcggctacacttgcgtttgcaggcctcgtttcactggagaggactgtgaactggacaccgaagctggaaggtgcgtacccggagtgtgtaggaacggcggtacttgtaccgatgcccccaatggtggcttccgctgtcaatgtcctgccggcggggcatttgaaggacctagatgcgaggttgccgcccggtcttttccaccaagctctttcgttatgtttcgcggcctgcgccaaaggttccacctgacactctctctgtctttcgcgacggtacaacagagtggccttttattttataacggacgcctcaacgaaaagcacgacttcctggccttagagctggtcgccgggcaagtgaggctcacttactcaaccggtgagtccaataccgtggtttctccaacagtgccggggggcctctcagacggtcagtggcatacagttcatttgcgatactacaataaacccaggactgatgcattagggggggcacaggggccaagcaaagacaaagtcgccgtcctttctgtcgacgattgcgacgttgcagtcgccttgcagtttggggcagagatagggaattacagctgtgcggcagctggggtacagaccagctcaaagaaatccctggatttgactggaccccttctgcttggcggcgtcccaaacctccctgagaatttcccagtgtcacacaaagatttcatcggttgcatgcgggatctgcatatcgacggaagaagggttgacatggccgccttcgtcgccaataatggcaccatggcaggctgccaggcaaaattacacttctgtgatagcggaccttgtaagaactccggtttttgttccgagcggtggggcagcttctcctgtgactgcccagtggggttcgggggcaaggattgccaactaacaatggctcacccacatcatttcagaggcaatgggacgctcagctggaatttcggcagcgacatggccgtatcagttccatggtatctaggcctcgcatttaggacaagagccactcaaggcgtgcttatgcaggttcaagcggggcctcattccacactcttgtgccagctggaccggggcctcctgtccgtcacagtcacccgcggatctggccgcgctagccatctcttgctggaccaggttacagtttccgacggcaggtggcatgacctacgtcttgagctgcaggaggaaccgggaggccggagaggacaccatgtgctgatggtgagcctggacttctcactcttccaagatactatggccgtggggtcagagctccagggtctcaaagtcaagcagttacatgttggcggactcccaccagggtcagctgaggaagcccctcaaggcctggttgggtgtattcaaggcgtgtggctgggctctaccccgagcggctcgccagccctgctccccccatcccacagagtcaatgctgagccgggatgtgtcgtgacaaatgcgtgcgcttctgggccctgtcctccccacgcagattgtcgcgacttatggcagacattctcctgcacatgtcagcctggctactatggccctggatgcgttgacgcatgtctcctgaacccttgtcagaatcagggcagctgtaggcatctgcccggtgcgcctcacggctatacctgcgattgcgttgggggttattttggccaccactgtgagcaccgcatggaccaacaatgtccccggggatggtggggctcacccacctgcggcccctgtaattgtgacgttcacaaaggtttcgatcctaattgcaataagaccaacggccagtgccattgtaaggagttccactataggccccggggctctgacagctgtttgccatgcgattgctatcccgtagggtctacatctcgctcatgcgccccccattcaggacagtgtccatgtcgtccaggcgccttaggacggcagtgcaattcatgcgatagtccctttgcagaagtcacggcaagcggctgtcgggtactgtatgacgcctgccccaagagtctgagatcaggtgtgtggtggccccagacaaagttcggagttctcgccaccgtgccatgcccaagaggagctctggggcttcgtggggccggagctgctgtgagactgtgcgatgaggcgcagggatggctggaaccagacctgtttaattgtacatctcccgcttttcgcgaactctcattactcctggatggactggagctcaacaagaccgccttagatacaatggaagctaagaagctggcacaacgcttaagagaggtgaccgggcatacagaccactatttttctcaggacgtcagggtaactgcccgactcttggcacacctgctggctttcgaaagccaccagcagggtttcggtctgacagcaactcaggacgcacacttcaatgagaacttgttgtgggccggctcagctctgctggcacctgaaacgggggatttgtgggcagctttagggcagcgcgccccaggcggtagccctgggagcgccggtctcgtgcgccacctcgaggagtatgcggcaactctagcacgtaatatggagctcacctacttgaaccccatgggcctggtcacaccaaatattatgctttcgatcgatagaatggaacatccatctagcccgcgcggagccaggcgttaccccagataccactcaaatctgttcagaggacaggatgcctgggaccctcacacccacgtcctcctcccttctcaatctccgaggccttccccttccgaagtcctgcccacttcatcaagtattgagaattcaactaccagcagcgtagtgcccccccccgctcccccagagccagaacctgggatcagcatcattatcctgctggtgtatcggaccttaggcggcctgctgcctgcccagttccaggcagagcgacgcggcgcacggcttcctcagaacccggttatgaatagccccgtcgtctccgtcgcagtgttccacggccgaaattttctgaggggcattctcgagtctcctatttctctggaatttcgactcctgcagaccgccaatcgcagcaaggccatctgtgttcagtgggatccccctgggttggccgagcagcacggagtgtggaccgctagggattgtgaactcgttcaccgcaacggctctcacgctcgttgtagatgctcgcggaccgggacatttggcgttctgatggatgcaagtccacgggaacgcctagaaggcgatctggagttactcgcggtgtttacacacgttgtcgtggcagtctcagtggctgctcttgtccttacggccgctatactgcttagcctccggtccctaaagtcgaacgtcagggggatccacgcaaatgtggcagcagctctgggtgtcgccgaactgctgtttctgttgggaattcatcggacccataatcagttagtgtgtaccgctgtggccatcctgctgcattacttttttctcagcacattcgcctggctgttcgtgcaaggactgcacctttatcgcatgcaggtggaaccgcgtaacgtggaccgaggggctatgcgtttctatcacgctcttggatggggtgtacctgctgtgctattgggcttggccgtgggccttgatccagagggatacggcaaccccgatttttgctggatttccgtccacgagccacttatatggagtttcgcagggccagttgtcttggtgatcgtaatgaacggcactatgttcttgctggcagccaggacctcatgctctacaggccaacgagaggccaaaaaaacatcggcgctaaccctgcgaagtagcttcttgttactgctgctggtgtccgcaagctggttattcgggctgctggcagtcaatcactctattcttgccttccattacctgcatgctgggttatgtgggttgcaggggttggctgtgctcctgttgttctgcgttctgaacgctgacgcaagggctgcatggatgcctgcttgtctcggccgaaaggcagcgccagaagaagctcgccctgcacctggtctaggaccgggagcctataacaatactgcccttttcgaagaatcagggttaataagaattaccttgggcgctagcactgtgtcatccgtgtccagcgctcggtcgggaagaacacaagaccaggacagtcagcgcggtagatcttacttgagagacaacgtgctggtgcgccacggatcagctgcagatcatacagaccacagcctgcaagctcatgcgggaccaaccgacctggacgtggcaatgtttcacagagacgcaggcgccgactctgactctgatagtgacctctcactggaagaggagcgatccctaagcattcctagttctgagtccgaagataatggacgcacaagaggccgattccagaggccactctgtcgggccgctcagagtgaaagactgctgacacaccccaaggatgtggacgggaacgatctgctcagctattggcccgctctaggcgagtgtgaagcagctccctgcgccctgcagacttggggatctgaacgccggctgggcctggacacgtctaaagacgccgcgaataacaaccagccagaccccgctctaaccagtggtgacgagacctctctgggcagggctcagagacagaggaagggcatccttaaaaatcgcttgcagtatccactcgtcccccagaccagaggagctcctgagctgtcatggtgccgggccgccactctagggcaccgggcggtgcctgctgcaagctatggcaggatttacgcgggtggaggcacaggttcgctgtctcagccggcctctcgctacagttccagagaacaactagacctcctcctgaggagacaacttagccgcgaacggctagaggaagccccggcccccgttctgcggcccctcagccgacctggcagccaggagtgtatggacgcagctcctggtcggctggaacctaaggacagagggtctaccctgcctcggcggcagccacctcgggactaccccggggcaatggctggaagattcggaagccgtgacgccttggacctgggagcacctcgagaatggttatctacactgcccccaccaaggaggacccgcgaccttgacccccaaccacccccactgccactgagcccacagaggcagttatctagagaccctctcttgccctccagaccattagactcactctcccgtagctcaaactcaagagaacagcttgaccaggtgcccagccgccaccccagccgcgaggctctgggacccctccctcagctgttgcgggctagggaggattcagtgagcggaccgtcccacggcccttccacagaacagctcgatattctctcatctatccttgcttcttttaattcctccgctcttagcagtgtgcagtctagttcaactcctctcggccctcacaccaccgccacccccagtgccacagcctcagtccttggaccatcaacccccaggtctgccaccagtcattccatttcagagttgtctccagacagcgaggtgcctcgcagcgaggggcacagctag

SEQ ID NO: 110285 - DNA, 1557 bp, synthetic construct
  misc_feature 1..1557: note = Description of Artificial Sequence: Synthetic coding sequence
  source 1..1557: mol_type = other DNA
atggcattctgggccggaggttcccctagtgtggtagactactttccaagcgaggatttctatcggtgcggatattgtaagaatgaatctggtagtcgttccaacggcatgtgggcccatagtatgactgtccaggactaccaggatctaattgatagaggctggcggagatcaggtaaatacgtctacaaaccagtgatgaatcagacctgttgtccccagtacacgattcgctgtcggccgctgcaattccagccctctaagtcacataaaaaggttttgaagaagatgttgaaatttcttgctaagggtgaggtgcctaaagggagttgtgaggacgaaccaatggactcaactatggacgatgctgtcgctggcgattttgcactgattaacaaactcgatatccagtgtgatttgaaaaccttgagtgacgacatcaaggagagcttagaaagcgagggtaagaattcaaaaaaggaggaaccccaggaattgctacagagtcaagactttgtaggggaaaaacttggatccggggaaccaagtcactcagtcaaggtgcacacagtgcccaagcccgggaagggagctgatcttagtaagccaccatgcagaaaagcgaaagagatcaggaaagaaaggaaacgtctaaaattgatgcagcagaatcccgcaggggaattggagggctttcaggcacaggggcacccaccgagtttgttcccccctaaagcgaaatcgaatcaacccaaaagtctcgaggacctgatctttgaaagcttaccggagaatgcatctcataaattggaagttagggtggtgaggtcctccccaccttcaagccagtttaaggctacattgctcgagtcttatcaagtctataagcggtatcagatggtcatccataaaaacccacccgataccccaaccgagtctcagttcacgcgattcctttgttcaagtcccctggaggccgaaactccccccaacggtccagactgcggatacggatcctttcatcaacagtattggctggacggtaagatcattgcagttggcgtaatcgacatcctccctaactgtgtgtcttccgtgtacttgtactatgacccagactacagtttccttagtctgggtgtgtatagcgctctccgggaaatcgcttttacccggcagctgcatgagaaaacctctcagttgagctattattacatgggcttctatatccatagctgccccaaaatgaaatataaagggcaatatagaccttccgacctcctgtgtcctgagacgtatgtgtgggtgcccatcgaacagtgtctcccttcccttgagaattccaagtactgccgcttcaaccaagatcccgaagccgttgatgaggacagatccactgagccagaccgactgcaagtgttccacaagcgagctattatgccatacggggtgtacaagaagcaacagaaggaccccagtgaagaagccgcagtgctccaatatgccagtctggttgggcagaagtgcagcgagagaatgctgctgttccgcaactag

SEQ ID NO: 110286 - DNA, 3195 bp, synthetic construct
  misc_feature 1..3195: note = Description of Artificial Sequence: Synthetic coding sequence
  source 1..3195: mol_type = other DNA
atgggcagacacgtcgcgactagctgtcacgtggcttggttacttgtcctgatcagcggttgctgggggcaggtgaacagattgccgttctttactaatcacttcttcgatacctatctgctgatatccgaagacacccctgtgggatcctctgttacgcagttgctggcccaagatatggataacgaccctctggtatttggcgtgagtggagaggaagcctcccgcttctttgccgtggagcccgatacaggagttgtctggcttcgtcagcctctagaccgcgagactaaaagtgagttcactgtcgagttctccgtgtcagaccaccagggcgtgatcaccaggaaagtgaatatccaagtgggtgacgtcaatgataacgccccaacctttcataaccagccatactctgtgagaatcccggaagtaggtgccaccggtaatactccggtggggacccctattttcattgtgaatgcaacagatccagaccttggcgcgggaggttctgtgttgtactcatttcagcctccttctcagttttttgcaatcgattccgctcggggaatagttaccgtgattagggaactggattatgaaactacccaggcatatcaactgactgtgaacgctaccgaccaggacaagacacggcctctctccactcttgcaaatctggcaattataattacagatgtacaagatatggacccgatcttcatcaatcttccttactcgaccaatatctacgagcactccccgcctgggacaacggttagaatcatcacggcaattgaccaggacaaaggtcggccacgtggcataggttacacaattgtgtcaggaaatacgaatagcatcttcgcgctggactatatcagcggcgtgctgaccctgaatggccttctggacagggaaaaccccctttactcccacggcttcatcctcacggttaaggggacagagctgaatgatgacagaactccctctgacgcgacagtgactaccacattcaatattttggtcatagatatcaacgacaacgcacctgaattcaactcttctgagtacagcgtggcaatcaccgagttagctcaagtgggatttgccctgcccttattcattcaggtagtcgacaaagatgaaggtctgaattcaatgttcgaagtctatctcgtaggcaacaactctcatcatttcatcatctcacctacttccgtccaaggtaaggccgacattagaattagggtcgctattccgctggattacgagacggttgaccggtacgattttgacttgttcgcgaatgagtcagtcccagaccacgtgggttacgctaaagtgaagatcacgttaatcaatgagaacgacaaccgcccaatttttagccagcccctgtacaacatttctctatacgagaacgtcactgtgggcacatcagtgttaacggtgcttgctacagataatgacgcggggactttcggcgaagtgtcctactttttcagtgacgatcctgaccgctttagcctcgataaggataccggcctgatcatgctgattgcaagactcgattacgagcttatccaacgcttcactctcacaattattgccagggacgggggaggtgaagagaccaccggtcgtgtgcggataaacgttctcgacgtcaatgacaacgttccaacattccagaaagacgcctatgtgggagctctgcgcgagaacgaaccttctgttacccaactggttcgcctcagagctacagacgaggatagccctccgaataaccagatcacatatagcattgtgtctgcatcagcatttggatcatattttgatatctccctctatgagggatacggggttatttcagtttcacggccgcttgactatgagcagatatcaaatggattgatctatttaaccgttatggctatggacgctggtaaccccccactgaatagtacggtacctgtgaccattgaggtttttgatgagaacgataacccaccaacgttttccaaacccgcctacttcgtatctgtggtagaaaacattatggccggcgctacggttctgtttctgaacgccacggatctggacagatccagggaatacggtcaggagtccataatctacagcctcgagggaagcacccagttcaggattaatgctcgatcaggcgaaataaccaccacttcattgttagacagggagacaaagtcagagtatatccttattgttcgagccgtcgatgggggggtgggacataaccagaagaccggtattgcaaccgtgaacatcactctgctggatatcaatgataaccacccgacatggaaagatgcgccatactatataaacctagtggaaatgacgcccccagactcagatgtgacgaccgttgtggcagtagatccggacctgggggagaacggaaccctggtgtactccatccagccccccaacaagttttactctctaaattcaactacaggcaaaatccggacgactcatgccatgctggaccgggagaatcccgaccctcacgaggccgagctgatgcgaaagatcgtggtttctgtaaccgattgcgggagaccgcctctgaaggccacatcaagcgccaccgtttttgttaaccttctagacttaaacgacaatgatcccaccttccaaaacctcccattcgtcgcggaggtattagagggcattcccgcaggggttagcatttatcaggtggttgcaatcgatctggacgaggggcttaacggtctggtgtcttacagaatgccggtgggaatgcctcggatggatttcctgattaatagcagttcaggagtcgttgtgacgaccacagaactggatagagagcggatcgcagagtaccagctcagggtcgttgccagcgatgcaggcacccctaccaagagcagtacctcgacccttaccatccacgtgcttgatgtgaatgatgaaacaccaacatttttccccgccgtgtacaacgtttctgtcagcgaggacgtcccacgggagtttagagtggtttggttaaactgcactgacaacgatgtgggcctcaacgccgaattgtcttatttcattacaggcgctgcgcccgcttccgcacacctgtgcaggccccctggcgcactccctcccccgctgcctgacggccagccggactag

SEQ ID NO: 110287 - DNA, 3345 bp, synthetic construct
  misc_feature 1..3345: note = Description of Artificial Sequence: Synthetic coding sequence
  source 1..3345: mol_type = other DNA
atggtgaaatcccccatgaatcgtgagctggttgccacatacgaagtgacactgtccgtcatcgataatgcttcagatctgcctgagcgctccgtctccgtcccaaatgctaaactcaccgtgaacgtgctggacgtgaatgacaatacacctcagtttaagcctttcgggatcacgtattacatggagcgcatactggaaggcgccacacccgggactacgcttattgccgtggccgccgtcgatccggataaaggtttgaatggcttggtgacatatactctgctggatctggtccctccagggtatgtgcagttggaagactcttccgccggtaaagttattgcgaatcgtacagtggattacgaagaggtccactggttaaattttactgttcgggcctcggataatggctctccgccccgcgctgctgaaattcccgtctacctcgaaatcgttgatattaacgataacaatccaatctttgaccagcctagttatcaggaggccgtctttgaggacgtgcccgtgggcacaattattctgactgtcacggcaactgatgccgattcagggaatttcgctctcatagaatactccctcggcgacggagaatcgaagttcgcgatcaatccaaccaccggcgatatctatgttctgagtagccttgaccgtgagaagaaagatcactacattctcacagcactcgccaaagataatcccggtgatgttgcttccaacaggcgcgaaaactccgtgcaagttgtcatccaggtgctcgacgttaatgactgtaggccacaattctccaagcctcagtttagcacaagtgtctacgagaatgagcccgccggcacttccgtgattacgatgatggccactgatcaggatgagggccccaacggagaattaacctacagtttggaggggcccggagtcgaggcgttccatgtagatatggacagcggtctggtcaccactcagagacccttacaaagttatgaaaaattttcacttacagtggtcgcaactgacgggggggagccaccactctggggcacaactatgctccttgtagaggtaattgacgtgaacgacaaccgtccagtgttcgtacggccacctaatgggacgattctgcacatccgtgaggagatccctcttcggtccaatgtgtacgaagtttatgccaccgacaaggacgagggccttaacggtgccgtacggtacagcttcttgaaaactgcgggaaatcgtgattgggaattcttcattattgaccccatctccggactcatacaaactgcacagcgcctggacagggaatctcaggcagtgtatagtctcattctggtagcaagcgatctcgggcagcccgtcccctatgagaccatgcaacccctccaggtggctcttgaagacattgatgataatgagcctttgtttgtgcgtccacctaaagggtcaccccaataccagctcttgacagtgccagagcactcaccaaggggtacgctcgttggaaacgtaacaggtgcggtcgacgcagatgagggtcccaatgctatcgtgtactattttatcgccgccgggaacgaggagaagaactttcatcttcaacctgatgggtgcctcctggtgctccgggacctggatagagagagggaggctatctttagctttatcgtaaaagcaagcagcaacagatcatggactcctcctcggggcccatcgccgactctggatttagtggccgacctgacactgcaggaagtaagagtggtgcttgaagacatcaatgaccagcctccccgattcaccaaggccgagtacacagcaggtgtggcgacggatgctaaggtgggctcggagttaattcaggtgctagcccttgatgctgacatcggaaacaactcgctcgtattttactccatcctcgctatccactacttcagggctctggctaacgatagcgaggatgtcggacaggtattcaccatgggttctatggatggcatcctgcggaccttcgatctttttatggcttactcgcctggctatttcgtggttgacatcgtggcccgcgacttggccggccacaatgatacggctatcatcggtatttacatccttagagacgaccagagggtcaaaatagtgattaacgagattccggatcgagtccgcggattcgaggaagaatttatccacctcttgagcaatatcactggtgctattgtgaatacagacaacgtgcagtttcacgtggacaaaaaaggccgcgttaacttcgctcagacagaactgctcattcatgtcgtgaacagggacactaaccggatcttagatgtggacagagtgattcagatgattgatgagaacaaggagcagctgcgaaacctttttagaaattacaacgttctagacgtgcagcctgccatcagcgtccgccttcccgacgatatgagtgctctgcagatggccattattgtcctggccatcttgctgtttctggccgccatgttgttcgtcctgatgaactggtattaccgcaccgttcacaaaaggaagctgaaagccattgtcgccggatctgccggcaatcgtgggtttatcgacatcatggacatgccaaacaccaataagtattcttttgacggggcgaatcctgtgtggttggacccgttttgccgcaatctggaacttgcagcccaggctgaacacgaggacgatctgccagagaatctttcagaaattgcagatctctggaacagtcccaccagaacacatggtacattcggacgggagcctgccgccgtcaagccggatgacgacaggtatctgagagccgcgattcaagaatatgacaatatcgcaaaactggggcagatcatcagagaaggcccaattaaagggagtctcttgaaagtcgtgctggaggattacctacgcctcaagaaactcttcgcccaacgcatggtgcaaaaagcctcctcgtgtcacagctccatcagtgagttaatccagactgaactcgacgaagaacctggcgaccactctcctggtcagggcagcttacggtttaggcataagcccccggtcgagttgaaaggaccggatggcatccatgtggttcatgggagcactggtaccttgcttgccaccgacctgaattcgttgccagaggaagaccagaaaggcctcggccggagcctggagaccctcaccgccgctgaggctacagcatttgaaaggaacgcccgcaccgaatctgccaaatccaccccactccacaagctccgagacgtgatcatggaaacacctctcgagatcaccgagctatag

SEQ ID NO: 110288 - DNA, 1368 bp, synthetic construct
  misc_feature 1..1368: note = Description of Artificial Sequence: Synthetic coding sequence
  source 1..1368: mol_type = other DNA
atgagggcttccctcggcgtgtgcggaaccgcttcatcaatggttattgtatatgttgaagacatcaacgatgaggcaccagtgtttacccaacagcaatactctcgcctgggactgcgggagaccgctggaatcggcacgagtgtgatcgttgtccaggccacagaccgcgactcaggagacggcggactggtaaattataggattttgagcggcgccgagggaaagtttgagattgacgagtctacagggctgatcattaccgtgaactacctggactatgaaacaaaaacctcttatatgatgaacgtgtctgcgaccgatcaggctccccccttcaatcaggggttttgctccgtatacatcactttattgaatgagttagatgaagcagtacagttcagtaacgcctcttacgaagccgcgatcctggagaacctcgccttaggaacggaaatagtgagagtccaagcttattcaatcgacaatctgaaccaaattacctaccggtttaatgcctatacctccactcaggcaaaagcactctttaagatcgacgccattaccggcgtcataacagtccaaggccttgtcgatagagaaaagggcgacttctacaccctcacggttgtcgctgacgacggaggaccaaaggttgatagcacggttgtttacattacagtcctggacgaaaacgacaattcacctcgcttcgattttacttctgactcagccgtgtctataccagaagattgtcccgtgggtcagcgggtcgccaccgtcaaagcatgggacccagacgctggctccaatggccaagtcgtgttttctctggctagcgggaacatagcaggcgccttcgaaatagtgactactaatgattctatcggggaggtgttcgtggcgcggcctctagatcgtgaagagcttgatcactatatactacaggttgttgcatctgatcgcggcacccccccaaggaagaaagaccacatattacaggtcactatcctagacatcaacgataaccctccagtaatagagagccccttcggttacaacgtgtccgtcaatgaaaatgtgggaggcggtactgccgtagttcaggtgagggcaacagaccgtgatattggcatcaactctgtgctttcatattacatcaccgagggcaacaaagatatggcctttcgcatggatcggatttcgggcgagatcgccacccggcctgctccaccagatagggagcgacagtctttctaccatttagtggctaccgtagaggatgagggaaccccgacactctccgtttccgatgggggtggccatcgcgaggagagagttggacaggggtcctccgcttctgaatag

SEQ ID NO: 110289 - DNA, 1593 bp, synthetic construct
  misc_feature 1..1593: note = Description of Artificial Sequence: Synthetic coding sequence
  source 1..1593: mol_type = other DNA
atggggaggcatgtggcaacctcctgtcacgtggcctggctcctggttctgattagcggatgttggggacaggttaacaggctcccattctttacaaatcacttttttgacacatatctacttatctcggaagatactccagttgggagcagcgtgacacagctgttggctcaggacatggataacgaccccttagtctttggtgtctctggcgaagaagcaagcagattttttgccgtggagccagatacaggggtcgtttggcttagacagcctctggaccgagagactaagtccgaattcactgtggaatttagtgtcagtgatcaccagggcgtgatcacaagaaaggtgaacatccaggttggtgacgtaaatgataatgctcctacgtttcacaaccagccctactccgtccggattcccgagaacacacccgtgggaacacctatcttcatcgtaaacgccacagatcccgaccttggggcaggcggcagtgtgctctactcttttcagcctccgtctcaattcttcgcaattgacagtgccagaggcatcgtgacagtgatccgagaattagactatgagacgacacaagcctatcaattgactgtcaatgcgacagaccaggacaaaacacgacccttaagcaccctggctaatctggctataattattacagacgtgcaagacatggacccgattttcattaatctgccgtactcgacgaacatttatgagcacagccctcccggcacgactgtcaggattatcactgcaatagaccaggacaaaggacgaccccgaggtatcggctataccatagtcagcggcaatacgaacagcatcttcgccctggattatatttccggcgtcctgacccttaatggactactcgaccgggaaaatccactgtatagtcatggcttcatactcaccgtgaaagggactgagctgaatgatgacagaacgccatcagatgccacagtcacgactacatttaatattctcgtgattgatataaatgataacgccccagagtttaactcgtccgagtactccgtggccatcaccgaactcgcgcaagttggattcgctctgccattattcattcaggtggtagacaaggacgaaaacttaggcctcaactctatgtttgaggtttacctggtaggcaataactctcaccactttatcatttctcccacctccgtacaggggaaggcggacatccgcatccgagtggccatccctctagattacgaaaccgttgaccgatatgacttcgacctcttcgccaatgaatctgtgcccgaccatgtgggttatgccaaagttaaaataacgttgataaacgagaacgacaaccgcccgatttttagccagcccctgtataatatttctctttatgaaaacgttaccgtcggcacgtctgtactgacagtcctggtttcccctcgtttcaccgccggcccacttagctctcctgggcccacagtcgtacggcatccagagggcttttgccccagagatttatccaaccaaggaagacggcatccccaaataccagagctgtgtctgctcgtttactag

SEQ ID NO: 110290 - DNA, 3639 bp, synthetic construct
  misc_feature 1..3639: note = Description of Artificial Sequence: Synthetic coding sequence
  source 1..3639: mol_type = other DNA
atgggacgacacgttgccacatcctgccacgtggcctggctccttgtactgatctccggctgctgggggcaggtgaaccgcctgccattcttcaccaatcacttcttcgatacctaccttttgatcagtgaggacacaccagtgggatccagcgttactcagctcctagctcaggacatggataatgatccactcgtttttggcgtctcgggcgaagaggccagcagattcttcgccgtagaaccggacacaggtgtggtatggctccgccagccactggaccgggaaactaagtcagagttcactgtggagtttagtgttagcgatcaccaaggcgtgatcaccagaaaagtgaatatccaggttggagacgtgaacgacaatgcccctaccttccataaccagccctattcagtgagaatccccgagaataccccagtgggcactccaattttcattgtgaacgccactgaccctgatctgggagccggcgggtcggttctgtactcctttcaaccgccttcccagttttttgctattgactctgcgcgcggaatcgtcaccgtgatccgtgagctggactacgagaccactcaggcttaccagctgactgtgaatgcaaccgaccaggacaaaacacggcctctcagcacactggccaatctggccatcataatcaccgacgtgcaggacatggacccaatattcattaatctcccctactctactaacatctacgagcacagtcccccaggcacaacggtcaggatcattacagccattgaccaggataagggccgaccacggggaattggctataccattgtctccggtaatacaaattcaattttcgccctggactacatctcaggcgttctgacgcttaacggactgctcgatagggagaaccctctatattcacacggatttatcttgacagtcaagggcactgaactgaatgacgatagaactccttctgacgcaaccgtgaccacaacttttaacatcctcgttattgacatcaacgacaatgcccctgagttcaacagctctgaatactcagtcgccataaccgaactggcacaagttggctttgcattacccctgttcatccaggttgttgacaaagacgagactcagggcctaaattccatgtttgaggtctacttggtcgggaacaattcgcaccacttcattatttcacccacctcagtccagggcaaagccgacatccgcataagagtcgcaatccctcttgactacgaaacggtggatcggtacgactttgacctgttcgctaacgaatctgtgcccgaccacgtcggctacgccaaagtgaaaatcacactgattaatgagaacgacaatcggccaatcttcagtcagcctctgtataacatctcactgtatgaaaacgtcacagttgggaccagcgtcctcacggtcctagccactgacaatgacgccgggacatttggagaggtttcatatttcttctccgatgacccggatcggtttagtctggacaaggataccgggctgataatgcttatcgccagattggattatgagttaattcaaagattcaccttaaccatcattgctcgggatggtggcggggaagagaccactggccgggtgagaatcaatgtgctggatgtgaatgacaatgttccaacttttcagaaagacgcttatgttggcgctctacgagaaaatgagccatctgttactcaactcgttagactgagggccactgatgaagactctccccctaacaatcaaatcacatattcaattgtttctgcatctgccttcggctcttactttgacattagcctgtacgagggctacggtgtgatctctgtctcacggcctctggattacgagcagatctctaacgggctgatctatcttaccgttatggctatggatgctggcaatccccccctcaattcgaccgtgccggtaaccatcgaagtgtttgatgagaacgacaaccctccaactttcagcaaacctgcctacttcgtgagcgtggtggagaatattatggctggagccactgtactgttcttgaatgctaccgatctcgatcgttccagggagtatgggcaagaatcaatcatatacagccttgagggcagcacccagttcagaattaacgcccgatccggagaaataactaccacaagtctgctggaccgggagactaaatcagagtatattttgatagtgcgcgcagttgatgggggggttggccacaaccagaagactggcatagccacggtcaacattacacttctggacattaatgataaccacccgacatggaaggatgctccatattacatcaatctggttgagatgactccacctgactccgacgtgacaaccgtagtagcggtggaccctgacctgggcgagaacgggacgctcgtctactctattcagcccccgaacaagttctattcgctgaatagcaccacgggcaaaattagaacaactcacgccatgctggacagggagaacccagaccctcacgaggccgagcttatgcggaagatcgttgtctcagtcaccgattgtggaaggccaccgctgaaggcgacgtcctccgccacggtattcgtgaatctattagatctaaacgataacgaccccacctttcagaacttgccatttgttgcagaggtactggaggggatccccgccggcgtttcaatatatcaagtggtcgcgatcgaccttgatgagggtctgaatggtctggtgagctatcgtatgcccgtcggaatgcctagaatggactttctgatcaattcaagctcgggggtggtagttaccacgaccgaactggatagagaaaggattgcagaataccagttgcgcgtggtggcttctgatgctggcacgccaacgaaatcctcgacatcaaccttaaccatccatgtcctggacgtgaacgatgagacacctactttctttcccgctgtgtataatgtttccgtgagtgaggatgtgccccgcgagtttagagttgtttggctaaattgcactgacaatgacgtgggtttaaacgctgagttgagttatttcatcaccggtggaaatgtcgatgggaagttctctgtgggttacagggatgccgtagtgcggacagtggtcggattggacagggagacaaccgctgcctatatgttgattctggaagctatcgataatggtcctgtaggcaaacgtcacaccgggaccgctacagtgttcgttacagtgctggacgtcaatgataaccgccccatcttcctgcagtcgtcctacgaggcgtctgtcccggaggacatcccggaagggcactctattcttcaagaagaagacctcgcctctccttgcatatcacccgcacccccgagaagagcatttcaatcctcaggggagaaagagaccagccagttccccggtaaagaactgaggagggaacctggccctagtaaggcacagaatcgcgcagcctttaccgagcctcttgccgaagcgccactgctcggcagtaagcaggcccaagaggaacgcgcccccctgcctagagagcaagctcagcagctgcagggttcagagggcgagaagggcggcccctag

SEQ ID NO: 110291 - DNA, 1593 bp, synthetic construct
  misc_feature 1..1593: note = Description of Artificial Sequence: Synthetic coding sequence
  source 1..1593: mol_type = other DNA
atggggaggcatgtcgccactagttgccacgtggcgtggcttctggtcctgatatctggttgctggggccaggttaaccgcctgccattcttcacgaaccacttctttgatacatatctgctgatcagtgaagacacgcccgttggaagtagtgtcacccaactcctggctcaggatatggataatgaccctttagttttcggagtgagtggcgaggaggccagtaggttcttcgcggttgagcccgataccggcgtggtctggctccggcagccacttgacagggagactaaatccgagttcaccgtggaatttagcgtgtctgaccatcagggagtgatcactcggaaagtaaatattcaagtgggagatgtgaatgataacgctccaacttttcacaaccaaccttatagcgtgcggattcctgaaaacacccccgtcggcacgcccattttcatagtaaacgccaccgatcctgacctgggggccggtggaagcgtgctgtactcttttcagcccccttcccagttttttgcaatcgactccgcacgcggcatagtgaccgtgattcgggaacttgattacgagacaacccaagcttaccaactgaccgtaaacgcgacagatcaagataagactagacccttaagcaccttagccaatcttgctatcatcataacggacgtgcaggatatggaccccatttttatcaatttgccctacagtaccaacatttatgaacacagtccccctggcaccaccgttagaatcataacggctatcgaccaagataagggacgccccaggggcatcggatacaccatagtgagtgggaacacgaatagcatctttgcattggattatatttccggtgtgttgacgctcaacgggctgcttgacagggaaaatcctctctacagtcatgggtttatcctgacagtgaaaggaaccgagctgaacgacgacagaaccccttcagatgcgaccgtgaccaccacctttaacatcttggtaatcgacatcaacgataacgcccccgagttcaattcatctgagtatagcgtcgccataaccgagttagcacaagtagggttcgctcttcccctgttcatacaagtggtggacaaagatgagacttggggccttaacagcatgtttgaggtttatctagtcggaaataactcgcatcacttcataatcagcccgacttctgtgcagggaaaggctgatattagaatcagggtcgcgattcccctggactacgagaccgtggatagatatgatttcgacttatttgctaatgaatcagtccctgatcacgtgggctacgccaaagtgaaaattaccctcatcaacgagaatgataaccggcctatctttagtcaacccctctataatatttcgctgtatgagaatgtcactgtgggcacgtcggttctgaccgtgctggtttcaccaaggttcacagctgggcctctgagctcccctggcccgaccgtggtaaggcacccagagggattttgcccgcgggacctgtctaatcaaggtcgccggcacccccagattccagagctctgtctactggtctactag

SEQ ID NO: 110292 - DNA, 9960 bp, synthetic construct
  misc_feature 1..9960: note = Description of Artificial Sequence: Synthetic coding sequence
  source 1..9960: mol_type = other DNA
atgggccgccatgtggccacaagttgccacgtggcctggctccttgtgttgataagcgggtgctggggacaagtcaacaggctgccctttttcactaaccactttttcgatacttatctgcttatcagtgaggatactccagtaggttcttctgtgacacagctcctcgcccaggacatggacaacgacccgctggtcttcggagtttcaggcgaggaagcatcaaggttctttgcggtcgaacccgacaccggcgtggtatggctccgccagcctctagatagagaaacaaagtccgagtttacagtggagttcagcgtcagcgatcaccagggggtgattactcggaaggtaaatattcaggttggtgacgtgaacgacaatgcacctacattccacaatcaaccttattctgtgagaatacccgagaatactccggtgggcactcccatttttatcgtcaacgccaccgacccagatcttggagccggaggatccgtgctctacagctttcagccccctagtcagtttttcgccatcgattccgctcgcggtatcgtgaccgtaattcgcgaactcgactacgaaaccacacaggcctatcagctcaccgtcaacgctaccgatcaggacaaaacccggccactgtctacgctggctaacctggcaatcatcattactgatgtgcaggatatggaccccattttcatcaaccttccgtattcgactaacatatacgagcacagcccacccggaactactgtgagaatcatcaccgcaatagaccaggacaagggcagaccccgtggcatcggttataccatagtgtccggtaatacgaattctatctttgcgctggactatatttcgggggtgctcacccttaacggcttgctggaccgtgagaatccactatatagccatggtttcattttaactgttaaggggaccgaacttaatgacgatagaactccctctgatgcaaccgtaaccaccaccttcaatattctagtcatcgacattaacgataatgctcccgaatttaacagttccgaatacagtgtggctattacagaactggcccaggttggattcgccctccccctattcatccaggtcgttgataaggatgagacacagggcctgaactctatgtttgaggtgtacctcgtcggcaataatagtcaccattttatcatttcaccgacctctgtccagggaaaggcagacatcagaataagggtggccattcccttagattacgagacagtggaccgatatgactttgatcttttcgcaaatgagagtgtcccagatcacgtcggttatgcgaaggtgaagataactctgattaacgagaacgataaccgccctattttctctcagcccttgtataacatatcgctgtacgagaatgtaaccgtgggcacctctgttttgaccgtccttgcaacagacaacgatgcgggaacgtttggagaggtctcatatttttttagcgatgatcctgaccgctttagcctcgataaggacacggggctcatcatgctgattgccagactggactacgagctaatccagcgattcactttaacgatcattgctagggatggggggggggaggagactactggacgtgtacggattaacgttctagatgtgaacgataatgtgccaaccttccagaaagacgcatatgtgggagccctacgcgaaaacgagccttcggttacacagctggtgcggctcagagccacagacgaggatagcccccccaacaaccagatcacctatagcattgtgagcgcgagtgcatttggttcttacttcgacatcagtctgtatgaaggctatggagtgattagtgtgagtagaccactcgattatgagcaaatctctaacgggctcatatacctgacagtgatggctatggacgccggcaacccgccgctcaacagcaccgttccggtaactattgaagtcttcgatgaaaacgacaaccccccaactttcagcaaaccagcgtactttgtatctgtggtcgaaaacattatggcaggagccaccgtactctttctcaatgccactgacctggacaggagtcgcgaatacggacaagagagtatcatctactccctggagggcagcacacagtttcgaatcaacgcccggagtggcgagatcacaacaacctcactgcttgatagggaaaccaagtcagagtatatcttaattgtccgtgccgtcgacggtggagtgggacacaatcagaagactggaatagcaaccgtcaacatcacgcttctagacataaacgataatcaccccacatggaaggacgctccctactacattaatctagtcgagatgactcccccagattccgatgtcacaacggtcgttgccgtagacccggacctgggggagaacgggactctggtttactctattcagccccctaacaaattctactcacttaatagtaccactggaaaaatccgaacgacccacgcaatgctggatcgagaaaacccagacccacatgaggcagaattgatgcgcaagatcgtggttagtgtgaccgattgtggcagaccacccttaaaagccaccagctctgctacagtttttgtgaacctgctggatctgaacgataacgatccgactttccagaatttgccattcgtggctgaagtccttgagggcattcccgcaggagtgtcgatataccaggtggtagccatagatctggacgagggactcaatggcctcgtatcttaccggatgcccgtggggatgccaagaatggacttcctcattaactcctcttccggagtggtcgtgaccaccaccgagttagatcgcgagagaattgcggaataccagctcagagttgtggcatccgatgccgggacaccaactaagtccagcactagcacactcactatacatgtgctggatgtgaatgatgaaactcccacattctttcccgccgtgtacaacgttagcgtgagcgaagacgttccgagagaatttcgtgtcgtatggttgaattgcactgacaacgacgtgggcctgaacgcagaattaagttattttatcaccggaggtaatgtggacggaaagttcagcgtgggataccgcgacgccgtggtgcggacagttgtgggactcgatagggagacaacagcagcctacatgctgatattggaggcgatagacaacggacccgtcggcaagaggcatacgggcaccgccactgtgtttgtgacagtgctcgatgtcaacgacaacaggcccatattcctccaatctagctatgaggcttctgtacccgaagatatccctgaggggcatagcatcctgcagctcaaggcaaccgacgccgatgaaggagaattcgggcgcgtttggtacaggattctgcatggcaatcacggcaacaatttccgcattcacgtttcaaacgggctgctaatgcgtggaccccgtcctctcgaccgcgagcgcaactcatctcatgttctcatagtggaagcatacaaccacgatctgggcccaatgcgctccagtgtccgggttattgtgtacgttgaagacatcaatgacgaagcccctgtgttcacacagcagcaatatagtaggttaggcttgcgggaaacagccggtattggcacatccgttattgtcgtgcaggcgacggatcgagattccggcgatgggggccttgtgaactaccgtattctgtccggcgcagaaggcaaattcgagattgacgagagtactgggctgattataactgtcaactacttagactacgagacaaaaacgagttatatgatgaatgtttctgccaccgaccaggccccccccttcaaccaaggtttctgttccgtctatattacacttctcaacgagctggacgaggccgtccaattcagtaatgccagctatgaagccgctatccttgagaacctagcattgggaacagagattgtgagagtgcaggcgtacagtatcgataacctgaatcagattacatatagattcaatgcctatacctccactcaagctaaggcccttttcaaaattgacgctattacaggcgtgatcacagtccagggcctcgtggaccgcgaaaaaggggacttttacacactgaccgtagtcgcggacgacggaggccccaaggtggactcaaccgtgcaggtgtacataactgttttggatgagaacgataacagtccacgctttgatttcacttccgacagtgctgtgagcatcccggaagattgtcccgtcggccagagggtggccactgttaaggcctgggatccggatgccggtagcaacgggcaggtggtcttcagcctggccagcggcaatatcgccggcgcatttgagatcgtcaccactaatgactctatcggagaggtatttgtggcccgccctttagacagagaagagctggaccactatatcctccaggtggtggcctccgaccggggtacaccaccaaggaaaaaagaccatattttgcaggtcactatcctggacatcaatgataatccacctgtaatcgagagcccattcggctataatgtcagcgttaatgaaaatgttgggggaggtacagcagttgtacaagtccgggcgaccgacagggacattggcataaactcagtcctctcctactacattacggaaggcaacaaggatatggcctttagaatggatagaatttctggcgagatagccactcggcctgcacccccggaccgtgagaggcaatcattttaccatctcgttgctacagtggaggatgagggtactcccaccctctccgccactactcacgtttacgtgacaatcgtcgatgaaaacgataacgcacccatgttccaacaacctcactatgaagtgctgctggacgagggtccggacacgctgaacacatccttgattactatacaagcgctggaccttgacgaaggtccgaacggaacagtcacttacgctattgtagccggtaacatcgtcaacacctttagaattgaccgtcatatgggtgtgattactgcggccaaagagctcgactacgagatcagtcacggtcgctatacactcatcgtgactgccaccgaccagtgcccaattctgtcacacagactaacttcaacaaccacggtcctggtcaatgtgaacgacataaacgacaatgtgccaacatttccacgggattatgaggggcccttcgaagttactgaaggccagcccgggccaagagtatggacattcctggcccacgatcgcgactcaggacctaacggccaagtggagtactcgatcatggatggcgaccctctcggcgagtttgttatcagccccgtcgagggggtgcttcgtgttcgcaaagatgtggaattggacagagagacgatcgctttttataacttgacgatctgcgccagagatcgaggtatgcccccgctgtcatcgacaatgttagtcggaatcagagtgcttgatatcaacgacaatgaccctgtgctcctgaacttacccatgaacatcacaattagcgagaattcaccagtgagcagcttcgtcgcgcacgtgttagcctctgatgctgatagtgggtgtaacgcacggctgacatttaacatcactgccgggaatagggaacgcgccttctttattaatgccacgacaggaattgtgactgtgaatcggccactggaccgagagagaattccagaatataagttgactatctccgtaaaagacaatcctgagaatccaagaatagctcggagagactacgatttgttactcattttcttgagtgacgagaacgataaccatcctttgttcaccaaatctacatatcaggctgaggtgatggaaaacagtcccgccggtaccccgctgaccgtcttgaatgggccaatactggccctggacgccgaccaggacatttatgccgtggtcacgtaccagctgctgggtgcacagtctggtctcttcgacataaatagctctacgggtgtggtcaccgtacgaagcggagtgataatcgacagagaggcctttagcccccccattctggagctgcttctgttggcagaagatatcggactgctcaactcaactgcccatctgttaattaccatcttagacgacaacgacaataggcccaccttctctccagcaacgctcactgtgcaccttctggaaaactgtccacctgggtttagcgtgcttcaagtgaccgccacggatgaagacagcggcctgaacggtgagttggtatatcggatagaggccggagcccaggacaggtttctcatacatctggttacgggcgttattcgggtcggcaatgcgactatcgatcgggaggagcaggagtcttatagactcactgttgtcgcaacagataggggaacagtaccgctatcaggcactgccatcgtgaccattcttatcgacgatattaacgactccaggccagagttcttaaacccaatacaaacagtgagcgttctcgagtccgccgaacctggcaccgtcattgctaacatcactgcaattgatcatgacctcaatcctaaacttgagtaccatatcgtaggcatcgttgcgaaggacgacactgacagattggtaccaaaccaagaggatgcattcgctgtgaacatcaacactggatctgtaatggttaagtcacctatgaaccgtgagttggttgcgacctatgaagtgacactttcagttatcgacaacgccagcgacctgcctgaaagatccgtttctgtcccaaatgctaagcttaccgtgaacgtcctagacgttaacgataataccccccaattcaagccttttggaataacatactacatggagcgtatcctggagggagccacgccgggaaccactctcattgccgtcgcagcagtcgacccagacaagggacttaatggactagttacctacacactattggacctagttccgccgggctatgtgcagttggaggactcttccgccggcaaagtgatcgctaaccggacagtcgactacgaggaagtgcactggttaaacttcacggttcgcgcttcagataatgggagcccccctcgggcggccgagatcccagtctaccttgagatcgtggatatcaatgacaacaaccctatcttcgaccagccatcataccaggaggcagtctttgaagacgtccccgtgggcacaatcatactgactgtgaccgcaacagatgcagattcaggcaacttcgcactgattgagtattcacttggggacggcgagagcaaattcgcaataaatcccacaaccggcgacatctacgtgctcagctctctagaccgcgagaagaaggatcactacattctcacagcgttagcgaaggacaacccgggtgatgtcgcaagtaataggcgagaaaactccgtccaggttgtgatacaggtgcttgacgtgaatgactgccggcctcagttttctaagcctcaattcagtacgagcgtatatgagaatgagccagcaggaacatctgtcattacaatgatggccactgatcaggatgaggggcccaatggtgaactgacatactcgctggagggcccaggcgttgaggctttccatgtcgacatggacagcggtcttgttaccacgcagcgcccattacagagctatgaaaaattcagtttgactgtggtcgcaaccgacgggggagaaccacctctgtgggggaccacgatgctgctagtggaagtcattgacgttaacgacaatcggcctgtattcgtcagacctccgaatggaaccatccttcacatcagggaagagattccactgagatctaatgtgtatgaggtgtacgcgacagacaaggacgagggtttaaacggggctgtaaggtactcattcctgaagacggctggcaatagggactgggaattctttatcattgaccccatcagcggcctcatccagacagcccagagattggaccgtgaatcccaagcagtgtattctcttattcttgtggcctcagacctggggcagccagtaccttacgagaccatgcagcctctccaggtcgccctggaagacatcgacgataatgagcctctcttcgtccgcccgcccaaaggatcaccgcagtaccagctccttaccgtgcctgagcactccccacgcggcacgctggtggggaatgtcaccggggctgtggatgctgatgaaggtccaaacgcaattgtgtactattttattgcggcaggaaacgaggagaagaactttcacctccagcccgatggatgtcttctggttctgagggacctggaccgagagcgggaggcaatattcagttttatcgtgaaggcttcaagtaacaggagttggacaccacctagaggtcctagccccacccttgacctcgttgccgatctaacactgcaagaagtcagggtggtgcttgaagacattaacgatcagccccccaggttcacaaaggccgaatacacggccggcgtggcaaccgatgctaaagtcggatctgaactgatacaagtgctcgcgctggacgccgatattgggaacaacagcctggtcttctattcgatcctggccatacactacttcagagccctggcaaatgacagcgaggacgtcggacaggttttcactatgggctctatggatggtattctgagaacattcgacctgttcatggcttactcaccggggtacttcgtcgtggatatagtggctcgggacttagccggacataatgatactgcaattatcggtatttacatcctgagggatgatcagcgggtgaagatcgttatcaatgaaatccctgacagagttcgaggattcgaggaagaatttatccatttacttagtaatataacaggggccattgtgaacaccgacaatgtgcagtttcacgttgacaaaaaggggcgcgtcaattttgcccagacggagctgctaatccacgttgtgaatcgcgatacgaacaggattttggatgtggaccgagttatccagatgatcgatgaaaataaggagcagctccggaatctgttcagaaattataacgtgctggacgtccagcctgccattagtgttcgcttgccagacgacatgagtgccttacagatggccatcattgtgcttgccatactgttatttcttgccgccatgctctttgtcctgatgaattggtactaccgcacagttcacaagcgtaagctgaaagccatcgtagctggcagcgccgggaatcgaggcttcatcgacatcatggatatgccaaacaccaataagtattcatttgacggagccaaccccgtgtggctcgatcccttttgcaggaacctggagctggccgctcaggccgaacacgaagacgatctgcctgaaaatctgagcgaaatcgccgatttatggaattcgccgacccgaactcatgggacgtttggcagagagcctgctgccgtgaaacccgacgacgataggtacctgagagcagccattcaggagtacgataacatcgccaaattaggtcagattatccgggaaggtccaatcaaacttatacagacagaactagacgaggaaccaggcgaccattctcctggtcagggttcactcagattccggcacaaacccccggtggagctgaaaggccctgacgggattcatgtcgtccatggctcaactgggactctgctcgcaacggatcttaacagcctacccgaagaggatcaaaagggccttgggcgctcattagaaacactgaccgctgctgaagctactgctttcgagagaaacgccaggacggagtcagcgaagagcacaccccttcataagctccgggacgtgattatggaaaccccactcgagattactgagctttag

SEQ ID NO: 110293 - DNA, 10080 bp, synthetic construct
  misc_feature 1..10080: note = Description of Artificial Sequence: Synthetic coding sequence
  source 1..10080: mol_type = other DNA
atggggcgccacgtggcaacctcttgccacgtcgcatggctcctggtgctgatttctgggtgctggggccaggtgaatcgacttccttttttcactaaccatttctttgacacatacttactcattagtgaggacactcccgtgggttcctctgtgactcaactgttggcacaggatatggataacgatccattggtgttcggggtaagcggcgaggaagcctctcgcttcttcgcagtcgaacctgatactggcgtagtgtggttacgccagccactggaccgggagacaaaaagcgagttcaccgttgagttctctgtatctgaccatcaaggcgtcatcactagaaaggtcaatattcaagtgggggacgtgaacgataacgccccaaccttccacaatcaaccatactccgtgcgcatacccgaagtaggtgcaacagggaataccccggtgggcacaccaatctttatcgttaacgcaaccgatcccgacctaggagctggtggaagtgtgctgtatagtttccagccccctagccaattttttgcgattgattcagcccggggtatcgtaacggtgatcagggaactggattacgaaacaacccaggcttatcagctgaccgtcaatgcaaccgaccaggataaaactcgaccactgagcactttggctaatcttgccatcattattaccgatgtgcaggacatggacccaatatttattaacctcccatattctactaatatctacgagcattctccaccaggcactacggtgcgtatcatcactgccatcgaccaggacaagggacgtcccagaggcataggttacactatagtgtcagtcgctggcaataccaacagtatctttgcactggattatatctccggcgtcctgacattgaacggacttctggatcgagaaaatcccctttattctcacgggtttatcctcaccgtcaagggcaccgaactcaacgatgatagaaccccatctgacgccacagtcacaaccacctttaacatcctggttattgatattaatgacaatgccccagaatttaattcctccgaatattctgtggctataaccgaactggctcaagtcggattcgcattgccccttttcatacaggtcgtcgacaaagatgaaggactgaactctatgtttgaagtgtacctggtcggcaacaacagccaccacttcatcattagccccacctccgtgcaagggaaagccgatattcgtattagggtggcaattcccctggactacgagacagttgataggtacgacttcgatcttttcgctaatgagtcagtacccgatcacgtgggctacgccaaagtaaagatcacgctcattaatgaaaacgacaataggcccatattcagccagcctctgtataacatctccctgtacgagaacgtgactgtaggaacttcagtcctgaccgtcctggctaccgacaacgatgcggggacctttggcgaagtgagctacttcttctcagacgatcccgacagatttagcctcgacaaagacactggcttaataatgctgatcgcccgtctggactatgaattgatccagcggttcacacttactatcatcgcccgcgacggggggggcgaagagactaccggccgggtgcgaatcaacgtgctggacgtgaacgacaacgtacctacattccaaaaagatgcctacgttggagcacttcgggaaaatgagccaagcgtgacccaattggttaggctgcgagccaccgacgaagactcaccgcctaacaatcagatcacttactctattgtgtctgccagcgcctttggatcatactttgacatctctctatatgagggttacggtgtaatttcagtgtcacgaccactggattacgagcagatcagcaatggattgatctaccttaccgtgatggctatggacgcaggcaacccacccctgaatagcacagttcctgttacaatagaagtatttgatgaaaatgacaacccccctacatttagcaaaccagcgtattttgttagcgtggtggagaatattatggcaggagccactgtgctgtttctgaacgctactgatctggaccggtctcgggagtacggacaggaaagcataatttatagtctggagggtagtacgcagtttcgaattaatgcacgtagtggggaaattaccaccaccagtctgctcgatcgcgagactaaaagtgaatacatactcattgtgagagctgtcgacgggggagtgggccataaccagaaaactggaatcgctactgtgaacattacactcctggatattaacgataatcatccgacttggaaggatgctccttattatattaacctggtggagatgacgccacccgactctgacgtcaccacagtggtggcggttgatcctgacctgggggagaatggaacgctggtgtacagtatccagccccctaacaaattttatagtctgaactctacaaccggcaaaattcgcacaacacatgctatgcttgatcgggaaaatccggacccacacgaagcagaattaatgcgcaagatcgtggtttccgtgaccgattgcggccggccacccctgaaagccaccagttccgccaccgtattcgtcaatcttttggatctaaatgacaatgatcccacattccaaaatctgccttttgttgccgaggtattagaaggcattccagccggggttagcatctaccaggtcgtagcaatcgacctcgacgaaggcctcaatggtctggtgagttaccgcatgccagtgggcatgccccgaatggacttcctcattaacagttcctctggcgttgtcgtgaccacaacagaattggatagggagcggatagctgagtatcaacttagagttgtcgctagcgatgcggggacacccacgaaaagcagtacttccaccttgactattcacgtgctcgacgtcaatgatgagactcccactttctttccggctgtctacaacgtatcagttagcgaagacgtgcctagagagttcagggtcgtgtggctcaactgcaccgacaatgacgtcggtctgaatgcagaactgtcttattttataactggaggtaacgtggacggcaaattttctgttggctatagggatgccgtggtcaggacagtcgtgggtctcgaccgcgagacaaccgccgcctatatgctgatcctggaggccatcgacaatgggccagtcggaaagagacacaccggaaccgcgacggtctttgtgaccgtcctggatgtgaatgacaatcgccccattttcctgcagtcatcctatgaagctagtgtgccggaggacatccccgaaggacatagtatacttcaactcaaggccacggacgccgatgaaggcgaattcggacgagtgtggtacaggatcctgcatggtaaccatggtaacaattttcgaattcacgttagtaacgggttgctgatgcgaggcccacgcccactcgaccgtgagcggaattcctctcacgttctgatcgtggaagcctacaatcatgatctcgggcccatgagaagcagtgttcgcgtcattgtgtatgttgaagacatcaacgatgaagcgcctgtgttcacccagcagcaatactctagactgggactccgggagacggctgggattggaacaagtgtgattgtcgtgcaggccaccgatcgcgacagtggcgacggaggattggtcaactaccgcatattgtccggagctgaggggaagttcgagattgacgagtctaccggtctgattattacggtgaattatctcgactacgagacgaagaccagttatatgatgaacgtgagcgcaaccgaccaggccccacctttcaatcaggggttttgttccgtatatatcactttgctcaacgaattggatgaggccgtgcagttcagtaatgcctcctatgaggcagcaatcctggaaaacttggctctagggaccgagatagtaagggtgcaggcttactccatcgataatctgaatcagattacttatcggttcaatgcatacacctcaactcaggctaaggctctgttcaagattgatgctatcacaggcgtaatcacggtacagggacttgtggatagggagaagggtgatttttacaccctgaccgtcgtagcagacgatggcgggcctaaagtggattccaccgtgcaggtgtatatcacagtattggacgagaacgacaactctccacgattcgactttacaagcgattccgcagtgtctatacctgaagattgtcctgtcggtcagcgggtcgccaccgtgaaggcctgggatcccgacgccggctcaaatgggcaggtagttttttcgctggcatcaggcaatatagccggtgcctttgagatcgtcacaactaacgacagtattggagaggtgttcgtcgcccgccctctggatagggaggaattagaccattacatacttcaggtcgttgcctccgacagaggcactcctccccgcaagaaagatcacatattgcaggtaaccatccttgacataaacgataacccgccagttatcgaatctcctttcggctacaatgtgagtgtgaacgaaaatgtgggagggggaaccgcagtggtgcaagttcgcgcgaccgaccgcgatattggcattaactcagtgcttagctactatatcacagaaggaaataaagacatggccttccgaatggacagaatctccggcgaaatcgctactaggcccgctcccccggatcgagaaaggcagagtttctatcacctagtggccacagtggaggacgaaggcacaccaactttgtcagccactacccacgtatacgtgaccattgtggatgaaaatgataatgcccccatgtttcagcaacctcactatgaagtgctactggacgaaggacccgatactttgaacacctcactgattactattcaagccttggatctggacgaggggcccaacgggaccgtgacctacgctatcgtggcagggaacatcgtgaacacatttcggatcgacaggcacatgggcgtcataaccgccgcgaaagagctagactatgagatatctcacggaaggtacaccctgatagttacagcaactgatcagtgtcctatcctgagccaccggctgacctcaactaccacagtcctagtgaacgtcaatgacattaatgacaatgtaccgacgtttcccagggattatgagggaccattcgaggtgaccgaggggcaacccggaccccgagtgtggacttttctagcgcatgatagggacagtggtccgaacggacaggtggagtactccatcatggacggcgaccccctcggagaatttgtcatttctcccgtggaaggagttttgcgggtcaggaaggatgtcgaattagacagagagaccatcgcattctataatcttacgatatgcgcaagggatagaggcatgccaccattaagtagcacgatgttggttggcatcagagtgctggatataaacgacaatgacccagtcctgctgaatctcccaatgaacattactattagcgagaactctcccgtgagcagctttgttgcacacgtcttagcaagcgacgccgactctggatgtaacgccaggctgacatttaacataaccgcaggtaatcgcgagagagcgttctttatcaatgcaaccactggtatcgtgaccgtcaatagacctctggacagggaaaggatccctgagtataaactgacgatatctgtgaaggataatcccgaaaatccaaggatagccaggagggactatgacctgttgttgatttttctgtccgacgagaatgacaatcatcccctgttcactaagtctacctaccaggccgaggtcatggagaatagccccgcaggaactcctctaaccgtgctgaatggacctatcctggctcttgatgccgatcaagatatatacgcggttgtgacatatcaactccttggtgctcaaagcggcttatttgacatcaactcttctactggggtcgttactgtgcggagcggtgtgatcattgaccgcgaggcatttagcccaccaatcttggaactcctgctgctggccgaagatatcggtttgctgaactcaaccgcccacctactcataactattcttgacgacaacgacaatcggcctacttttagtcccgcgactcttactgtgcacctcttagaaaattgtcctccaggtttttcagtgctgcaggtaacggcaaccgatgaggatagtggccttaatggcgagcttgtttaccgcatcgaggcgggcgcccaggacaggttcctgattcacctcgtgaccggggtgatccgggtggggaacgcaacaatcgaccgagaggagcaggaaagttatagactgacggttgttgccactgatagaggcaccgtgccactaagtggcaccgctatcgtgacaatcctgatcgatgacatcaacgatagcaggcccgaatttctgaatcctatccaaaccgtgagtgttttggagagtgccgaacctgggaccgtgatcgcgaatattactgccatagatcatgatttgaacccaaaactggaatatcacatcgtcggcatcgtagcaaaggatgatacagataggctggttcctaatcaggaggatgcttttgcagttaatattaacaccggatccgtaatggttaaaagccctatgaatagagagcttgttgcaacttacgaggtgaccttgtccgtgatagacaacgcttccgacctgcccgagcgatctgtgtccgtcccaaatgcaaagcttaccgtgaatgtgctggatgtaaatgacaacacgcctcagttcaagcctttcggaatcacttactatatggagcgtatcttagagggcgcaaccccgggtactacactcatcgccgttgctgccgtcgaccctgataagggtctcaacgggttagtgacctatacactgttagacttagtcccacctgggtacgtgcagctagaggattcaagcgccggaaaagttattgctaaccgcactgttgactacgaggaagtgcactggttaaacttcaccgtgagggcttcggataacggatcacctcctagggccgccgaaattcctgtctatctggaaattgtggatattaacgataataacccaatttttgaccagcccagctatcaggaggcagtctttgaagatgtcccagtgggcacgattattttgacagtgaccgctacggatgctgactctgggaactttgcactgatcgaatattccctcggagatggggagagcaaatttgccataaatcccacaactggggacatctatgtgttgtcctcccttgacagggagaaaaaggatcactacattctgaccgcactagctaaggataaccccggcgacgttgcttctaaccggagggaaaactctgtgcaggttgttatccaggtgttggacgtgaacgactgtcgcccccaattctctaaacctcaattctcgacatctgtgtatgagaacgagccggccggcacctcagtgatcactatgatggcaacagatcaggacgaaggacccaatggcgaactgacatatagcctcgaagggccaggtgtcgaggcattccacgtggacatggactccggacttgtgaccacgcagcgccccttacagtcgtatgagaaattttctctgactgtggttgcaaccgacggaggagaaccaccactgtgggggacgactatgctgctggtcgaagtaatcgatgtgaacgacaaccgccctgtctttgttcgcccgcctaatggtactattctgcacattcgcgaggagatccccctgcgctcaaacgtgtacgaggtgtacgctaccgacaaggacgaaggccttaatggggccgtccgttattcttttctaaagaccgctggcaatcgggattgggagttttttatcatcgaccccatctctggtttgatccaaactgcccagagattagacagggagtcccaggctgtctacagcctgatcttggtcgccagcgatctggggcagcctgtcccatacgagacaatgcagccactccaggtcgcattggaagatattgatgacaacgaacctttgttcgtcaggcctcccaaaggcagtccgcagtaccagctcctcactgtgccagagcatagccctcgcggcactctcgttgggaacgtcaccggggcagtggacgccgatgaggggcctaacgctatcgtctattactttatcgccgcggggaacgaagaaaagaatttccacctgcagcctgatgggtgcctgctagtgttgcgggatttggaccgggagcgggaagccatcttctccttcatcgtgaaagcctcatcaaaccggagctggacccctccccgtggcccatcacctactctggacctcgtggctgacctgactctgcaagaggtgcgcgttgtgctggaggacataaatgaccaaccccctaggttcactaaagccgagtacacagccggggttgcgactgacgctaaagttggctccgaactaatccaggtgcttgctctggacgctgatattgggaataatagccttgtgttttattccattctcgccattcactattttagagcactagccaacgatagcgaagacgttggacaggtctttactatgggttcaatggacggcattcttcggactttcgatctgtttatggcttacagtccgggctactttgttgtggacatcgtggctagggacctcgctgggcacaacgacaccgccattattgggatttacatcctgagagacgaccagagagttaagatagtcatcaacgaaattccagatagggtccgtggttttgaggaggagttcattcacctgctctctaacattacaggagcgatagttaatacggacaacgtccagtttcatgtggataaaaaggggcgcgttaacttcgctcagacggagttattaatccacgtggtgaatagagatacaaacagaatcttggacgtggacagagtgatccaaatgatagatgaaaacaaggagcagctaagaaatctgttccggaattataatgtgctggacgtgcaaccagccatatccgtccgcctgcctgacgacatgtccgctttgcagatggctatcattgtgctcgcaatcttactctttctggccgccatgctgttcgtgctgatgaactggtactatcggaccgtgcataaacggaaactaaaggccattgtggctggcagtgctggaaatcgggggttcatagacatcatggatatgcccaacactaacaagtattctttcgatggggctaatcccgtgtggcttgaccccttctgtagaaaccttgaacttgccgctcaagcagagcatgaggacgacttgcccgaaaacctatcagaaattgccgatctctggaacagtcctacccggacccacgggacattcggtagagagccagccgccgtcaaacccgacgatgaccggtatttgagggcagccatccaagagtatgataacatcgccaagctcggacagattatccgtgaaggccctattaaaggttcactcctcaaagttgttctggaagactatttgaggttgaaaaaactcttcgcccaacgtatggtccaaaaagcttcctcttgtcactcaagtatatctgagctgatacaaaccgagcttgatgaagaacccggtgaccatagtccagggcaggggtctctgcgctttaggcataaacccccggtcgagctaaaagggcccgacgggattcacgtggtgcatggtagtacaggtacacttctggccaccgacctgaattcgcttcctgaggaggatcagaagggcctggggcgctccctggagaccttgaccgccgcggaggctaccgcctttgagaggaatgcgcgaacagagagtgcaaagtccacacctcttcacaagctgagagatgtcattatggagacacctctcgagatcacagaattgtag

SEQ ID NO: 110294 - DNA, 1338 bp, synthetic construct
  misc_feature 1..1338: note = Description of Artificial Sequence: Synthetic coding sequence
  source 1..1338: mol_type = other DNA
atggacaacgatccattggtctttggagtctccggcgaagaggcaagcagattcttcgctgtcgaacctgatactggagtggtctggctgcgacagccgctcgaccgtgagaccaagagcgagttcacggtggagttctctgtatcagaccaccagggcgtgatcactagaaaagtcaacattcaggtgggagacgtgaatgacaatgctcctacgtttcataatcagccttattctgtaagaattcctgaaaacacacctgttggtacccctattttcatcgtaaatgcgacagaccctgatctgggagcaggcggctccgtgctgtacagcttccagcccccgtcacagttctttgccattgacagcgcaaggggcatcgtgactgtcatcagagaacttgactacgaaactacgcaagcctaccagctcactgtcaacgctctcgctattatcataactaacctcccatacagtactaatatttatgagcattctccgcccggtaccactgtgaggattatcaccgccattgaccaggacaaggggcgtccgcggggaatcgggtacaccattgtttcagggaatactaactctattttcgcgttggactacatctccggagttctgacactgaacgggttgttggatagggagaatcccctgtacagccacggattcattctgactgtcaaggggactgaactgaacgatgatcgcaccccttctgatgccactgtcacaactactttcaacatcctggtgattgatatcaacgacaatgcgcccgagtttaattccagtgaatatagtgttgctatcaccgagctggcccaggtcggcttcgccctacctctgttcatccaggtggtggataaggacgaggggctgaactccatgtttgaagtgtatttggtaggtaataacagccatcattttatcatatctcccacaagtgtccagggcaaagcggacatacggataagagtagctatcccccttgattatgagaccgtagaccggtatgactttgacttatttgccaacgagtcggttccagaccacgtgggatatgccaaggtgaaaatcaccctcataaacgagaatgacaatcgacctattttctcacagcccttatacaacatctctctgtacgaaaatgtgactgtcgggaccagtgtcttgacggtcttggtgtccccaaggttcactgccggtccactgagctcccctggacctactgtagtacggcacccggagggattttgcccccgggatctgtctaatcaagggcgccggcaccctcagatccctgagctctgcctgttggtctactag

SEQ ID NO: 110295 - DNA, 2187 bp, synthetic construct
  misc_feature 1..2187: note = Description of Artificial Sequence: Synthetic coding sequence
  source 1..2187: mol_type = other DNA
gctactgacaacgacgccggcacattcggcgaggtgtcctatttcttcagcgatgaccctgaccggttttctctcgataaggacaccggtctgataatgctgattgctagactggactatgagttgattcagagattcacactgaccattatagctagggacggaggaggcgaggaaactacagggcgcgtgcggattaacgttcttgacgttaacgacaatgtacccacttttcagaaagacgcttacgtcggggctctgagagagaacgagccatccgttactcaactggtgaggttacgagcaacagatgaggattctccgcctaataaccagattacatactccatcgtcagcgcgtctgcattcggctcatacttcgacatcagcctgtacgaaggatatggcgtgatttccgttagccgtcctctcgattacgaacagatctctaatggtttaatctacttgacagtgatggccatggacgccggaaatcctcccctaaactccactgtcccagtgaccatcgaagtatttgacgaaaatgataaccctccaacattcagtaaacccgcgtacttcgtcagcgtggtagagaacataatggctggggcaactgtgctgttcctcaatgccacagatcttgatagaagccgagagtatggacaggagtcaataatttactctctggagggatccacacagttccgcattaatgccagaagcggagagatcactactacgtcactgttagatcgtgagaccaagtccgagtatatcctcattgtgcgcgctgtcgatggcggagtgggacacaaccagaagaccggaatcgccactgtaaacatcacgctcctggacatcaatgacaatcatccaacttggaaggatgccccatactacataaatttggtcgagatgactccccccgactccgatgttacaaccgtggtcgctgttgaccccgacctcggggagaatgggactctcgtctacagcatccagccccctaataagttctactctcttaactcaaccaccggcaagatcagaactacgcacgccatgttagatagggagaatcccgatccccacgaggccgagcttatgcgcaaaattgttgtgagtgtgactgactgtggaaggccaccgctgaaagctacatctagcgcgacggtgtttgtgaacctccttgatttgaacgataacgaccccaccttccagaacctgccattcgtcgctgaggttctggagggcatcccggccggggtttctatatatcaggtggtggcaattgatttggatgaaggcctgaatgggttggtttcgtatcgcatgcccgtaggcatgcctcgtatggacttcctaattaactccagcagtggagtcgttgtaactacaactgagctggatcgcgaacgaattgcagaataccagctacgtgttgtggcctccgacgctgggacgcccaccaagagctccacttcaacccttacaattcatgtgcttgacgtcaacgacgagactccgaccttcttcccggccgtgtacaatgtcagcgtcagcgaagacgtgcctcgagagtttcgggttgtgtggttaaactgtacagacaacgatgtgggtttgaacgccgaactgtcctattttattaccggcggaaatgtggatggtaaattttcagtgggctatcgagatgccgtggtgagaaccgtggttgggctagatcgtgagactaccgcggcttacatgctaattctagaggcaattgacaatggcccagtggggaagcgacacacgggtactgccaccgtatttgtcaccgtcttggacgtaaatgacaatcgcccaatctttctacagagctcgtacgaggcttccgtgcctgaggatatccctgagggccatagcatccttcaagaagatttggccagtccttgtatcagccccgcgccgccgaggcgggcattccagtcaagcggagagaaagagacaagtcagtttcctggcaaggagctgcggagagagcccggcccaagcaaagcgcagaacagagcagcgttcactgagccccttgccgaggcgcctctgttgggctctaagcaggcacaagaagagcgcgctcccctcccccgtgagcaggcacagcagctgcagggctccgagggagaaaagggtggtccatag

SEQ ID NO: 110296 - DNA, 2238 bp, synthetic construct
  misc_feature 1..2238: note = Description of Artificial Sequence: Synthetic coding sequence
  source 1..2238: mol_type = other DNA
atgagacgctgtcggtgggccgcgcttgccctgggtttactgcgcttatgcctcgctcaggcaaactttgctccacactttttcgataatggggtgggatccacaaatggcaacatggcgttgttctccctccctgaagatacccctgtgggttcacacgtgtacaccctcaatgggaccgatccggagggcgaccccattagttatcatattagctttgacccttccacacgttctgttttcagcgtggaccccaccttcggcaacattaccctggttgaggagttagaccgtgaacgggaggacgaaatcgaagccatcatctccatctcagacggactcaacctagtggccgaaaaggtggttattctcgtgacagacgccaatgatgaggccccacgctttattcaggagccgtatgttgctttggtcccggaggacatcccagcaggttctatcatcttcaaagtgcatgctgtcgaccgagatacaggctcggggggttctgtgacctactttttgcagaacctgcacagcccattcgccgtcgaccgacactctggggtcctgagactccaggctggggcaaccctggattacgagcggagccgcacccattatatcacagttgtggcaaaagacggggggggccgccttcacggagccgatgtagttttttcagctaccacaaccgtgactgtgaatgtagaggatgtgcaggacatggctcccgtgttcgtcggcaccccctactatgggtacgtgtacgaggacaccctgcccgggagcgaggttctgaaggttgtcgctatggatggtgatcgcggcaagcctaatagaattctctactctctggtgaatggaaacgacggggcctttgagatcaacgagaccagcggcgcaattagcatcacacagagccctgcgcagcttcaacgcgaggtgtacgagctccacgtacaggtgactgaaatgagccccgcaggttctccggccgcacaggcaactgtacctgtgaccatccggatcgtggacctgaacaatcaccccccaacattctacggagagtctggacctcagaataggttcgaactttcaatgaacgaacaccctccccagggcgaaatccttcgagggctgaagatcacagttaatgactcagatcagggtgcgaatgctaagttcaacctccagcttgtggggcccagaggtattttcagagtggtccctcagacggttctgaacgaggcacaggtgacaatcatcgttgaaaacagtgcggctatcgacttcgaaaaaagcaaggtcctgacttttaagctgcttgctgtggaagtcaatacccctgaaaaattctccagtaccgccgacgtcgtgattcaattgctggacaccaatgacaacgtccctaagtttgactctctttattacgtagcccggatacccgagaatgctccagggggtagttcagtcgtggccgtaacagctgtcgatccggataccggcccttggggggaggtaaagtactcgacttatggcactggcgccgacctgttcctcatacaccccagcacaggattgatctacacgcagccctgggcctctttagatgccgaagccactgcaagatacaacttctacgtaaaggccgaagacatggaaggaaaatattccgtagctgaagtattcattactctcctggacgtgaacgaccatcctccacagttcggcaagtctgttcagaagaaaaccatggtcctgggcacccccgttaagatcgaagccatcgacgaggatgcagaggagcccaacaacctcgtcgactattctataacccacgcagaacctgcaaacgtgtttgacatcaacagtcacactggcgaaatatggctgaaaaactcaatccgttccctggatgccctccacaatattacaccggggcgagactgcctgtggagtctggaggttcaggctaaggaccgtggcagcccgtcgttttccaccaccgcactgctaaaaattgatattaccgatgccgaggttcggaggttgcgatacatgaagaactccaacttcccgggcaccacaaagtccgtgcgtaagccaaagtttaagcccaagaagccacattcaagccaaggcttgtttctccatccccattgtgagatcgcattgtttaaccttagcaacgtgaacctctatagtagggtcttccaaggagccgcccaggcctcctag

SEQ ID NO: 110297 - DNA, 2580 bp, synthetic construct
  misc_feature 1..2580: note = Description of Artificial Sequence: Synthetic coding sequence
  source 1..2580: mol_type = other DNA
atgaggcgctgccgctgggctgccctggctttagggctgctgaggctctgcctcgcccaggctaacttcgcccctcacttctttgacaacggggttggatctaccaacggtaacatggctctcttttcactccccgaggatacccccgtaggatcacacgtctacaccctgaatggcaccgatcctgaaggtgatcctatttcctaccatattagcttcgatccctccaccagatctgtgtttagtgttgatccaactttcgggaatataacattggtggaagagctggatcgagagcgcgaggatgaaattgaggctataataagcatatcagacgggctcaaccttgtggctgagaaggtcgtcatactggtgacagacgcgaacgacgaggccccccgctttatccaggagccatacgttgccctagtgcccgaagacatccccgccggatcaatcattttcaaagtgcacgccgttgatcgagataccggatctggggggtccgtgacctattttttgcagaaccttcacagcccgtttgctgttgaccgtcatagtggagttctacggctgcaggccggcgccaccttggactacgaaaggtcaaggacacattatataacagtagttgccaaagatggtgggggccggctccatggagcagacgtcgtgtttagtgccacaactaccgtcactgtgaacgtcgaggacgtccaggatatggccccggtttttgtcggcactccctactatggatacgtctatgaggacaccctaccaggatctgaggttcttaaagttgtggccatggatggagaccgtggtaagcccaacagaatcctgtacagtcttgttaatggaaacgatggagcctttgagattaacgagacaagcggggcgatcagcattactcaatctccggctcagctgcagcgggaggtttatgagctccacgtgcaggtgacagaaatgtctccagcaggttcccctgccgctcaagctacagtaccagtgactatacgtattgtcgatctgaacaaccatcctccaaccttttacggggaatctgggccacagaatcggttcgagctcagcatgaatgagcatccgccccaaggcgagattctacgcggcctgaagattaccgtcaacgattctgaccagggcgccaatgcgaagttcaacctgcaactcgtgggacccagagggatcttcagagtcgtgcctcagactgtgctgaacgaagcacaggttaccattattgttgagaattcagcagctattgacttcgagaaatccaaggtcctgacttttaagctcctcgcagtggaagtcaacactcccgaaaaattctccagtaccgcagacgtggtgattcagctgctggacaccaacgataatgtgcccaagttcgacagtctgtattacgtggccaggattccggagaacgccccaggaggttcctctgtggttgccgtgacggcagtcgaccccgatacagggccctggggggaagtgaagtacagcacctatggaactggcgccgatctgttcttgatccatccatccacgggattgatttacacacagccatgggcctctttggatgctgaagcaaccgcccgttacaatttctatgtcaaagccgaagacatggaagggaaatacagcgtcgccgaggttttcatcactctcctagatgtgaacgatcaccctcctcaatttggaaaatctgtacagaaaaagacgatggtgttgggcacgcctgttaagatagaggctattgatgaagacgctgaggagcctaacaacttggtggattactcaattacgcacgccgagcctgctaatgtatttgatattaacagtcataccggtgagatctggctgaaaaactcaattcggagtctggacgcattacataacatcacccctggccgagactgcctctggtccctggaggttcaggctaaggacagaggctccccttccttcagcactactgctttgctgaagatcgacatcacggatgcagaaacactgagcaggtctcccatggcagcattcttaatccaaactaaggacaatcccatgaaggctgttggtgtgcttgctggaactatggcgactgtggttgccattaccgtcctcatctccacggctaccttttggcgtaataagaagagcaataaagtgcttcctatgcggagagttcttaggaaacgaccttcacctgctccacgcacgatcaggatcgaatggttgaagagcaagagcactaaggcagctacgaagttcatgttgaaggaaaaaccgccaaatgaaaattgtaataataattctcctgagagcagtctcctgcctcgtgcccctgctctcccccctccccctagcgtcgccccatccacaggtgccgcgcagtggacagttcctactgtttctggaagccttacaccccaacccactcagcctcctccgaaaccaaaaacaatgggttctcccgtccagtccacactcatcagcgagctgaagcagaaatttgaaaagaagtccgtgcacaataaagcctacttttag

SEQ ID NO: 110298 - DNA, 1692 bp, synthetic construct
  misc_feature 1..1692: note = Description of Artificial Sequence: Synthetic coding sequence
  source 1..1692: mol_type = other DNA
atggctcccgttttcgtgggcacaccatactatggatatgtctatgaagataccctgccgggcagcgaagttctgaaagtcgtggccatggacggagaccgcgggaagccaaatcgcatattgtacagtctggtgaatggaaatgatggcgccttcgagattaatgagacctctggcgctattagtattacacaaagcccggctcagttgcaaagggaagtgtatgagctacacgtccaagtcaccgaaatgagtcccgccggctcgccagctgcacaggcgacagtcccggtgacaattcggatcgttgatctgaataaccatccaccaaccttttacggagagtccggacctcagaatcgtttcgaactctccatgaacgagcacccaccccaaggggaaatcttgcgtggactgaaaattacagttaatgacagcgaccagggtgctaatgcgaaattcaacctacagctagtgggccctcgcgggattttccgagtggttccacagacggtgctaaacgaagcccaagtgacgattatcgttgaaaactctgccgcaattgattttgagaaatccaaggtgcttacgtttaaggctgtcgatcctgatacaggcccttggggtgaggtaaaatattccacctacggcaccggtgccgacctcttcctcattcatccatctaccgggctgatatatacgcaaccctgggccagtctcgacgccgaagctactgctcggtataatttttacgttaaagcagaggacatggaaggtaagtactcagtggcagaagtgttcattacattactggacgtgaatgatcatcctccacagtttggtaagtcagtccagaaaaagactatggtccttggcactccagtgaagatcgaggcgatagatgaagacgcggaagagcccaacaatctggtagactactcgatcacccatgccgagcccgcaaacgtctttgatatcaactcacatactggtgaaatttggctgaaaaactcaattcgttccctggacgctcttcacaacataacacccggcagagattgcctgtggagcttggaagtgcaggccaaagacagaggatctccttcattctcgaccaccgcactgcttaagatcgacataactgatgctgagacgctgtcaagatcccccatggctgcctttctcatccagaccaaggacaacccgatgaaggcagttggagtgttggcaggtactatggcaaccgtggttgcaatcaccgtcttgatctctaccgccactttctggcgtaataagaaatccaacaaggtcctgccaatgaggagagtgctgcggaagcgcccgtcgcctgcaccgcggacaattcggatcgaatggctgaagtctaaatctaccaaggccgccactaagttcatgcttaaagaaaagccccccaatgagaactgcaacaacaactcaccagaaagttcccttctgcccagggcccccgcactacctccacccccatctgttgcacctagcacaggcgccgctcagtggacagttccaactgtcagcggctctctgacaccccagcctacacagcctccgccaaagcccaagaccatggggtcgcccgttcagtcgaccttaatcagcgagctaaagcagaaattcgagaagaaatcagttcacaacaaggcatacttctag

SEQ ID NO: 110299 - DNA, 1464 bp, synthetic construct
  misc_feature 1..1464: note = Description of Artificial Sequence: Synthetic coding sequence
  source 1..1464: mol_type = other DNA
atgggaagttgggcactgctgtggccgcccctgttgttcaccggactgctcgttaggccccccggtacaatggctcaagcacagtattgtagcgtaaataaagatatatttgaagtcgaggagaacactaacgtgacagaacctctggtggatattcatgtgcccgagggacaggaagtgacccttggagccttatctacccctttcgcattcagaatacaagggaatcagctgttcctaaacgtaacgcctgattatgaggagaaatccttgttggaagcgcagcttctgtgtcagtcaggcgggacactcgtgacccagctccgcgtgttcgtgagcgtcctcgatgtaaatgataatgcccccgagtttcctttcaaaaccaaagaaattagggtagaagaggataccaaggtgaatagcactgtgattcctgaaacccaactccaggctgaagaccgagataaggacgacattctgttctatacactccaagagatgacagcgggagcctccgactacttcagcctcgtgagcgtcaatcggccagcactgcggctggatcgccctctggacttttatgagagacctaatatgactttttggctcctagtccgcgacacccccggggaaaatgtggagccttctcacacagcaacggctacactagtgctgaacgtcgtgccagctgaccttcgtcccccttggttcctcccttgcacattctctgacggatacgtgtgtatccaggcacaatatcacggggccgttcccacagggcacattctgccttcacctttggtgttgaggcctggccccatttatgctgaggatggggaccgtgggattaatcaacccattatctactccatcttccgggggaacgtcaacggtacttttatcattcaccctgactctggcaacctcaccgttgcccggtcggtcccaagccctatgacctttctgctactggtgaaaggccagcaagcagacctggctaggtacagtgttacacaggtcaccgtggaggcagtggccgccgcaggcagccccccaaggtttccacaacgactctaccgaggaaccgttgcccggggggccggcgctggagtggtcgtgaaggacgccgctgcccctagtcaacctctgagaatccaggcccaggaccctgaattctctgacctgaactccgcaatcacgtaccgaataacaaaccacagtcacttccgtatggagggagaggttgtccttactaccaccactctagctcaggcaggggccttctacgccgagccaccgacatgcacgggcgacctccgccaccctgcacacctcaggcccccagccccagatcccactcagcgtcttcctggtgaagccgaagaacctatgcagacccctaaagctacccacctgggcgctggagggctgaaacatctcccaggagttctcgtccctttctag

SEQ ID NO: 110300 - DNA, 1956 bp, synthetic construct
  misc_feature 1..1956: note = Description of Artificial Sequence: Synthetic coding sequence
  source 1..1956: mol_type = other DNA
atgggatcctgggccctgttgtggcccccactgctgtttaccggtctgctggttagacccccaggtaccatggcacaagctcagtattgttcagttaataaggacattttcgaggtcgaggagaataccaacgttactgaacccctggtggatatccacgtgcctgagggccaggaggtcaccctcggtgccctttccaccccgttcgctttccggattcagggaaaccagttgtttctgaacgtgacccctgattacgaggagaaatcactgcttgaagcacagttattatgtcagtccggtggcacgctggtgacacaattacgcgttttcgtttccgtgctcgacgtcaacgataatgcccccgagttccccttcaagacaaaggagattcgggtcgaggaggatacaaaggtcaatagtactgtgattccagaaacccagcttcaggcggaggatagagacaaagatgacatcttattttacacactgcaagagatgacagcaggggccagcgattatttcagcctcgtttctgtgaatcgtcccgcgctgcggctggatcgccccctagatttttacgagcggcctaacatgacattctggttgctagttagggacacccccggggagaacgtagagccttcacacaccgctactgctactctagttctcaatgtcgtgccagccgacttaaggccgccctggttcctcccatgtaccttcagtgacgggtacgtttgtatccaagcccagtatcatggcgcagtgcccactggtcatattctgccaagccctctcgtcctgcggccaggtcccatctacgcagaggatggggatagaggcatcaaccagcctataatttattcaattttccgaggcaacgtcaacggcaccttcatcatccacccagactccggcaatctgaccgtcgcccgatctgtgcctagcccaatgaccttccttctgctcgtcaagggtcagcaggccgatctggcacgttacagcgtaacccaggtaacagtggaggccgttgccgccgccggaagccccccgaggttcccgcagagattatacagaggtacagtggcacggggagccggcgcaggcgtcgtggtcaaagacgccgccgcaccctctcagccactgaggatacaagcccaggacccggaattttcagacctgaactcggccattacgtaccggatcactaatcactcccatttcagaatggaaggggaggtggttttgactaccaccactctcgcccaggccggagctttttatgcggaggtggaggcacacaacaccgtcacatccggaactgccacgaccgtcatagagatccaggtgagcgagcaggaaccacctagcacgggcggtggtccttccgaagataagcggttcagcgtggtcgacatggcggcacttgggggagtgctgggagccctactactgctcgcactcttgggattagctgtgctcgtgcacaagcattacgggcctcggctcaaatgttgttgcggaaaagcccctgagccccaaccccagggctttgataaccaagccttcttgcccgatcacaaagccaattgggccccagttccatcacccacccacgaccccaagcctgctgaggctcccatgcccgccgagcctgctccccccggcccagcctcccccggcggagctccagagcccccagctgcggcgagagcaggcggttccccaaccgctgtgcgttctattctcaccaaagaaaggcgcccagagggaggttacaaggctgtgtggtttggcgaggatatcggcaccgaggccgacgtggtggttctgaatgctcccaccctggatgtggatggcgccagtgactcaggctccggggatgaaggagagggcgctggtcgtggaggagggccctacgatgctccaggcggggatgactcctacatatag

SEQ ID NO: 110301 - DNA, 2538 bp, synthetic construct
  misc_feature 1..2538: note = Description of Artificial Sequence: Synthetic coding sequence
  source 1..2538: mol_type = other DNA
atggggagttgggctctactgtggcctcccttacttttcaccgggctgctggtaaggcccccaggaactatggcccaagctcagtactgtagcgtcaacaaagacatctttgaggttgaggagaatacaaacgtaactgaaccactggtggacatacacgtgcccgagggacaagaagttaccttaggtgccctgagcactccatttgcctttcgaatccaggggaatcaactatttctgaatgtgacaccagactatgaagagaagagtctgctggaagcacaattgctctgtcaaagcggaggcacattggtgactcagctacgggtctttgtttccgttctagacgtgaacgataatgctcctgaatttcccttcaaaacaaaggaaatcagggtggaggaggatactaaagtcaactctactgtgataccggaaactcaactgcaagctgaggacagggataaagacgacatcctgttctacactctccaggagatgaccgccggcgccagcgattactttagcttagtatctgtaaaccgtcctgctctgagactcgatagacctctggacttctatgaacgacctaatatgacattttggctgctagtcagggacacccccggcgaaaacgtcgaaccaagtcatacagccaccgctacgctcgttctaaacgtggtgcctgcagatctccggcccccttggttcctgccctgcacattttccgatggatatgtctgtatccaggcccagtatcatggcgccgtccctaccgggcacatcctgccctcacctctggtgcttaggcccggccctatctatgccgaggacggcgaccgaggaataaatcaacccatcatatacagcattttcagaggtaatgtaaatgggacctttatcatccaccccgatagcggcaacttgacagtcgccaggtccgtcccaagcccgatgaccttcctgctgttggtaaaaggacagcaggcggacttagctaggtattcagtgacgcaagtcactgtcgaggcagtcgccgctgctggcagccctcccagattcccccaacgtctgtacaggggtactgtcgcgagaggagccggcgcaggggtggtggttaaggacgccgccgcccccagccagcctctcaggattcaagcccaggacccagagttttccgatctgaattccgcaattacttacagaatcacaaatcactcccattttcgcatggagggggaagttgttttgaccactactacactagcacaagctggcgccttctacgcggaggtagaagcacataacacagtaacttccggcacggctacaaccgtgattgaaatccaggtgtctgagcaggagcctccctctactgacgttccccctagccctgaggcggggggtactactgggccctggacaagcaccacatctgaagtacccagaccacctgagccatcgcagggtccatctaccacttcctctgggggcgggacaggacctcacccgcctagtggtacaaccctccggccccccaccagcagcactccgggcggcccgcccggcgcggagaattcaactagtcaccagccagcaaccccgggcggagacaccgcacagacccccaaacctgggacatcacagcctatgccccctggggttgggacctcgacatctcaccagccggccaccccttctgggggcactgctcagacccctgagcccgggacaagtcagccgatgccaccatccatgggtacctccaccagccaccagcctgcaacaccaggaggcggcacggcacaaaccccagaagctggcacaagccagcctatgccccccggaatgggaacctccacgtcacaccaacctacgaccccaggtggcggcacagcacagaccccagagccaggaacctcccaacccatgccattgtcaaagtctactccatcctctgggggcggtccctccgaggacaaacggtttagcgtggtcgatatggccgccctaggaggagtgttgggggcattgctcctgctcgcattgttgggacttgccgtactggtgcacaagcattatggccccaggttgaaatgttgttgtgggaaggcaccagagcctcagccacaggggtttgacaaccaggcctttctccctgatcataaggccaattgggcccccgtgcccagccccacacacgatcccaagcccgcggaggcacctatgcctgctgagccagccccgcccggacccgctagcccaggaggtgccccggagcctcccgctgccgcccgcgcgggcggctctcccaccgccgtgcggtccattctcaccaaagagcgccgccctgaaggcggctataaggccgtgtggtttggggaggatattgggaccgaagccgatgtagtcgtactgaacgctcccaccctggacgttgacggcgccagcgatagcggttcaggtgatgagggggagggcgccggacgcggagggggaccctacgacgctcctgggggagacgactcatacatatag

SEQ ID NO: 110302 - DNA, 2538 bp, synthetic construct
  misc_feature 1..2538: note = Description of Artificial Sequence: Synthetic coding sequence
  source 1..2538: mol_type = other DNA
atgggttcctgggcccttctgtggccaccactgctgtttactggacttctggtgcgtccccctggcactatggcccaggctcagtattgtagcgtgaataaggacattttcgaggtggaggagaatactaacgttaccgaaccactagtggatattcatgtgccagaaggtcaggaggtaaccctgggggcactctcaaccccctttgctttccgcatccaagggaaccagctgtttctgaatgtaacccccgactacgaggaaaagagcctgctggaagctcagctcctctgccagtccgggggtactcttgtaacccaactccgggtgttcgtaagtgtcctggatgtcaatgacaacgcccccgagttccccttcaaaacgaaagaaattagggtagaagaagataccaaagtgaacagcactgtgatacccgagacccagctgcaggccgaggaccgcgacaaagacgacatactcttttatacgctccaggaaatgactgccggagccagtgattatttctctctggttagcgtcaaccgcccagccctgcggttagaccggccattagacttttacgagagacctaacatgacattttggttattggtccgcgacaccccaggagagaatgtggaaccctcccatacagcaacagccacattggtcctgaacgtggtgcccgcggacctgcggcccccttggttcctgccatgtactttttcagacggatatgtgtgtattcaagcccagtatcatggtgcggtcccaactggtcacatcctgccgtccccactggtgctgcgtcccggaccaatctacgcagaagatggagaccgggggataaaccaaccaattatctacagcatctttcggggcaacgtcaatggtacttttattattcatcctgattccggcaacttgaccgtcgcgcgctccgtaccttccccaatgacatttctgcttctggtgaaaggacagcaggccgaccttgcccgctactctgtgacacaggtaacggtggaagcagttgccgctgccggttcacctccaaggtttccccagcgactgtacaggggaaccgtcgcgcggggtgcaggggcaggcgtggtcgtcaaagacgcggcagcaccgagtcagccgctaaggatacaggcacaagaccccgaattttcagatctgaactcggcgattacttaccggattaccaaccactcgcacttcagaatggaaggcgaggtcgtcttaacaactactaccctggcgcaggcaggagccttctatgccgaggtggaggctcataacactgtgacatctgggaccgccaccacagtgatcgagattcaggttagtgagcaggaacctccctctaccgacgtcccaccgagtcctgaagccggcggaacaacaggcccctggacaagcactacatcagaggtcccgaggccgcccgaacccagtcaaggcccgagcactactagctccggggggggaacaggaccccatcctcccagcggcactaccttacgccctcctacctctagcactcctggcggaccccccggagctgaaaattccacctctcaccagcccgcaactcccggtggcgacactgcacagactccgaagcccggcacgtcccagccgatgccccccggcgtaggaactagtactagccaccagccagctactccttccggtgggacagctcagacacctgagcccggaaccagccagccgatgcccccctctatgggtacaagcacgagccaccagcccgctacccctggggggggcacagcacagacccctgaggcaggaacttcccaacctatgccacctggcatgggcacttccacgtcccaccagccgaccacaccgggtggcggcactgcccagactccagagccaggaaccagtcagccgatgcccctgtccaaatctaccccaagcagcgggggcggaccttccgaggacaagcgattttcggtggtcgatatggccgctctgggaggcgttctgggagctctgctgctgctggctctgttgggtctcgcagttctggttcacaaacattacggtccaaggctgaaatgttgctgtggaaaggcccccgaacctcagcctcaaggatttgataatcaagctttcctccccgaccataaggcaaactgggccccagtgcctagtccaacacacgatcccaaaccagccgaagcacccatgcctgctgagcccgctccacctggaccagcctcccctggcggagcccctgagccgcctgcggctgcaagggccggcgggtcaccaaccgccgttaggagtattctcacaaaggaacggagaccagagggaggttacaaagcagtgtggttcggagaggatatcgggactgaggctgatgtcgtggttctgaacgctccaaccctcgacgtagacggagcgtccgatagtggcagcggagatgaaggggagggcgccggcagagggggaggcccctacgatgccccaggaggcgatgactcctatatctag

SEQ ID NO: 110303 - DNA, 786 bp, synthetic construct
  misc_feature 1..786: note = Description of Artificial Sequence: Synthetic coding sequence
  source 1..786: mol_type = other DNA
atggcagaatcccacttgcagagctcactgattactgcgtcacagtttttcgagatctggttacactttgatgccgatggcagcggctatttagaggggaaggaattgcagaaccttattcaggagctgcagcaggctcggaaaaaggcgggacttgagctttcacctgagatgaaaacctttgtggatcagtatggccagagggacgatggcaagatcggaatagtggaactggctcacgtgctaccgacagaagagaactttctgctcctattccgctgccagcagctcaaatcatgcgaggagttcatgaagacctggcgcaaatacgatactgaccatagcggttttatcgagactgaggagctgaaaaacttcctgaaggatctcctggaaaaagccaacaagaccgtggatgacacgaaattggccgaatacacagatctgatgctcaaactattcgactctaacaatgatggaaagttggagctgaccgaaatggcgcgactattgcccgttcaggagaatttcctgctgaagttccaggggataaaaatgtgtggcaaggaattcaacaaagccttcgagctatatgaccaagatggcaatgggtatatcgacgagaatgaactggacgctctgctcaaggacctgtgcgagaaaaataaacaggatctggatattaataacatcacaacatataagaaaaatatcatggccctctcagatggcgggaaactctatcggacagacctggccttgattttgtgcgcgggcgataattag

SEQ ID NO: 110304 - DNA, 615 bp, synthetic construct
  misc_feature 1..615: note = Description of Artificial Sequence: Synthetic coding sequence
  source 1..615: mol_type = other DNA
atgaaaacatttgtggaccagtacggacaaagggatgacggcaagattggcattgtagagctggctcacgtgttgccaacggaggagaactttctgctgctgttccggtgccaacagctaaagagctgcgaggagtttatgaagacttggagaaagtacgatacagatcatagcggctttattgagacggaagaactgaagaatttccttaaagatctgctggagaaagcaaacaaaactgtggatgacacaaaactcgccgagtacacagatttaatgcttaagctctttgactctaacaacgatggcaagctcgaactgaccgaaatggcgcgcttactcccagtgcaggagaattttctcctgaagttccaagggataaagatgtgcggaaaggaatttaacaaagcttttgaactgtatgatcaagatggaaatggctacatcgacgaaaatgagctcgacgcactgcttaaggatttatgtgagaagaacaaacaggaccttgacatcaacaacattactacctataagaaaaacatcatggccctaagtgatggaggcaagttataccgcacggacctcgcgctgattctctgtgccggggacaactag

SEQ ID NO: 110305 - DNA, 816 bp, synthetic construct
  misc_feature 1..816: note = Description of Artificial Sequence: Synthetic coding sequence
  source 1..816: mol_type = other DNA
atggctggcccccagcagcagccaccatatttacacctggcagagttgacggcttcccagttcctggaaatatggaagcactttgacgcagacggtaatgggtatatagaagggaaagaattagagaacttttttcaagagctggaaaaggcccgcaaaggctcggggatgatgagtaaatctgacaactttggagagaagatgaaggaattcatgcagaaatacgacaaaaattccgatgggaagatcgagatggccgaactggcgcagattctgcctaccgaggaaaactttcttctgtgctttaggcaacacgttgggagctccgcagagttcatggaggcctggagaaaatatgatactgatcgtagcggttacattgaagccaacgagcttaagggctttctgagcgaccttctcaagaaagctaatcgtccatacgacgagcccaagttacaagagtacacgcagactatcttgagaatgtttgatttgaatggcgatgggaagttgggactgtcagagatgagtagattgctgcctgtgcaggagaactttctgttaaaattccaagggatgaaattgaccagtgaggaattcaacgccatctttaccttctatgataaggataggtcgggatacatagacgaacacgagctggacgctctattaaaggacctgtatgagaagaacaaaaaggaaatgaacatccagcagctgacaaattatagaaagtctgtcatgtctctcgctgaggctggtaaactctataggaaagaccttgagattgttttgtgctcagagccccccatgtag

SEQ ID NO: 110306 - DNA, 579 bp, synthetic construct
  misc_feature 1..579: note = Description of Artificial Sequence: Synthetic coding sequence
  source 1..579: mol_type = other DNA
atggctgggcctcaacagcagcctccttatctgcacctggccgaactcacggcctcacagttcctcgaaatctggaagcacttcgatgccgacggcaatggttatattgaaggcaaagagctggagaacttctttcaggaactggagaaggctaggaagggctccggcatgatgagtaagagcgacaacttcggcgagaaaatgaaggaattcatgcagaagtacgacaagaatagcgacgggaagatcgagatggcagaactcgctcagatactccccactgaggaaaatttcctgctctgttttagacaacacgttgggagttccgcggaatttatggaagcatggcgcaagtatgacacagatcggagtggctacatcgaggctaatgaactgaaaggctttctgagtgacctgttgaagaaggctaacagaccttacgatgaacctaagctgcaagagtacacgcagaccatcctgcggatgttcgacctgaacggtgacggaaagctgggcctcagcgaaatgagccgaatagaggcagccactcttacttcaatgtcctggatgccattttag

SEQ ID NO: 110307 - DNA, 6663 bp, synthetic construct
  misc_feature 1..6663: note = Description of Artificial Sequence: Synthetic coding sequence
  source 1..6663: mol_type = other DNA
atgattcgcatcgccgcactaaacgcttctagcacaatcgaggacgaccatgaagggtcctttaagagtcacaaaacacagacaaaagaggctcaggaagcagaagcttttgcactctaccacaaagccctcgacctccagaaacacgaccgatttgaggagagcgccaaggcttaccacgaactcctggaagccagcctgttgagggaggcagtcagttctggtgacgaaaaggaaggcctcaagcaccccggtctcatccttaagtattcgacatataaaaacctcgcccagctggccgctcagcgggaagatctggaaaccgctatggaattttacctcgaggcagtgatgctcgactctacagatgtgaatctgtggtataagatcggacacgtggccctccggctgatccgcatcccactcgcgcgccatgctttcgaggaagggctgcggtgtaatcccgaccattggccctgtctggacaacctgatcaccgttctgtataccctgtccgattacactacttgtctgtacttcatttgcaaagccttggaaaaagattgcaggtactcgaagggactggttttaaaagaaaaaatcttcgaggaacaaccctgcctgagaaaggattctttgcgtatgttcctgaagtgcgatatgtccattcatgacgtctctgtgagcgccgctgagacacaggctatcgttgacgaagctctgggccttcggaaaaagcgacaggctctaattgtgagggagaaggagcccgatctcaaactcgttcagcccatccctttctttacatggaaatgtttgggcgaatctctactggcgatgtacaatcacctgaccacatgcgaaccccctcgcccttcgctgggcaagcgaatagacctctcggactatcaagacccctcacagccgttggaatctagcatggttgtgaccccagttaatgtaatccagcctagcaccgtttccaccaatccagcagtggccgttgccgaacccgttgtgtcctacacatccgttgccaccacctctttccctcttcactccccaggtctgctggagacaggagctcctgtgggtgatattagcggcggcgataaaagcaagaaaggggtaaaacgtaagaagatttctgaagagagtggtgaaactgctaaaaggcgaagtgcccgtgtgcgaaacactaaatgtaagaaggaggagaaagtcgatttccaggagctcctcatgaagtttctgccatctaggctgcgaaagctggaccctgaggaggaggatgacagcttcaacaattatgaggtccagtccgaagccaagctggagtcattcccgagtatagggccacagcggctgagtttcgattcagcgacttttatggaatcagaaaaacaagacgtgcacgaatttctccttgagaatctgaccaacggagggatacttgaactcatgatgaggtacctgaaagccatgggccacaagttcctggtgcgctggcctcccggtctagccgaagtagttcttagtgtgtatcactcctggcgcagacacagtacaagcctgcccaatccactactgagagactgctccaacaagcacattaaagacatgatgttaatgtctctttcttgtatggaacttcaactcgatcaatggttgttaacaaaaggcaggtctagcgccgtaagcccccgcaactgtccagccggaatggtgaacgggaggttcggtccagactttcccggaacccattgtttaggcgatctgttgcagctgagcttcgcgtctagccaaagggacttattcgaagacggctggctggagtttgtggtccgagtttactggctcaaggccagattcctggcccttcagggtgatatggaacaggcactggaaaactatgatatttgtacagaaatgctgcaaagttcaacagccattcaagtggaagcgggggcagaacggagggatatcgttatccggctgcctaacctacacaacgacagcgtggttagtctcgaggaaattgataagaacctgaagagcctcgagaggtgccagagcctagaggaaattcagcggctgtacgaggccggggactacaaggccgtcgtgcaccttttgcggccaaccctctgcacttccgggtttgacagggccaaacacctggagttcatgacaagcatcccagagagacccgcacaattactcctcctccaggatagcctactaagactaaaagattatagacagtgtttcgagtgtagcgatgtcgctctaaacgaggctgtccaacagatggtgaactcaggagaggctgccgctaaggaggagtgggtggccacggttactcagctcctgatgggcatcgagcaggcactgtcagccgactcttcaggctccatcctgaaagtctccagttccacaacaggtctggtccgcctcaccaataacctaatacaagtcatcgactgctctatggcagtccaagaggaagcgaaagaaccgcacgtttcctccgtgctgccttggataatcctccatcgcataatttggcaggaagaagacacgtttcactcgctgtgccaccagcagcagctgcagaacccggccgaagagggaatgtccgagactccaatgcttccaagcagccttatgctgttgaacacggcacacgagtaccttggtagaaggagctggtgctgcaactccgacggagccttgttgcggttttatgtgcgggtgctgcagaaggagctcgctgctagcacgtctgaagatacacatccttataaggaggaactggaaacggccttggaacagtgtttttactgcctgtacagtttcccttctaagaagagcaaagctcggtatctggaggaacattctgctcagcaggtggatctgatttgggaggacgctttatttatgtttgaatacttcaaacccaagacccttccggagtttgacagctacaagacctctaccgtgagcgccgacctagccaatctgcttaagaggatcgccactattgtgccaagaacggaacgccctgccttgagcctcgacaaagtgagcgcttatatcgaggggacttccacggaggtaccatgccttcctgaaggtgctgacccatctcctcctgtggtgaacgagctttattatttactggccgactatcatttcaagaataaggaacagtccaaggccatcaaattctacatgcacgatatatgtatatgccccaatcggtttgacagttgggctggcatggccttggctagagcgtcccggattcaagataagctgaacagtaatgaactgaaatccgacgggccgatatggaaacacgcaactcccgttttgaattgtttccggcgagccctggagatagattcctccaacctcagtctttggatcgagtacggtaccatgagctatgctttgcacagtttcgcttcacggcagctgaagcagtggagaggagaactgccacctgagctggtacagcagatggaggggcggagggactcaatgctggagacagccaagcactgctttacctccgccgcccggtgcgaaggcgacggggacgaggaggagtggctgattcactatatgctgggaaaggtcgcagagaagcagcagcagccgccaacagtgtatctcctgcattataggcaggctggccactatctgcacgaggaggccgcccgatatcctaaaaaaattcattaccacaacccgcccgaactcgccatggaggccctggaggtttacttccggcttcacgcatcaatcctgaaactgcttggaaagccagattcaggggttggggccgaggtcctggtgaatttcatgaaggaggcggcagaagggcccttcgcgcgtggtgaggaaaaaaacacacctaaagccagtgaaaaagagaaggcctgcttagtggatgaagactcacacagctccgcgggtacactgcctgggcctggcgctagtctgccttcctcttccggaccaggactgacctcccctccatataccgccactcccatagatcacgactacgtcaaatgcaaaaaaccccatcaacaggcgaccccagatgacagaagtcaggactctactgcagtggcactgagtgactccagctctacccaggactttttcaacgagcccacctcgctgctggaaggcagccgaaaatcttacacggagaaacgcctccctatcctgagtagccaagccggtgccacaggaaaggatctccagggcgcaacagaggaacgcggcaagaacgaagagtcacttgagtcaaccgaaggtttccgcgcagcagaacagggggttcaaaagcccgcggccgagaccccagcaagtgcgtgtattccaggcaaaccctcagccagcactcctaccctttgggatgggaagaaaagaggggacttgcccggggaaccggtcgcgttcccgcaggggctcccagccggagccgaggagcagagacagtttcttacggaacaatgtatcgctagttttcgactttgcctgagccgctttccccagcactataaatcactttatcgcctggcctttctctacacatactccaaaacccacaggaaccttcagtgggccagagacgtgctgctggggagctcaatcccgtggcaacagctgcaacacatgcccgctcagggccttttttgcgaacgaaacaagacgaacttcttcaacggaatttggcgcattccggttgatgagattgaccgcccagggagtttcgcctggcacatgaatagaagcatcgtgctgctgttgaaagtcctcgcacagctgcgcgaccacagcacccttctcaaggtgagctctatgctgcagagaaccccagatcaggggaagaagtatctcagggacgcggaccggcaggtgcttgcacagagagcctttatcctgacagtcaaagttctggaggacaccttgtcagagctggccgagggcagcgagagacccgggcccaaagtctgcgggctgcctggggctcgcatgaccacagacgtctcccataaagcctccccagaggatggccaggagggactcccacagccaaagaaaccgccgctcgcagacggtagcggccctggacccgaacccggcggcaaagtcggcctcctaaaccacagaccggtggcgatggatgccggcgattccgctgaccagtcaggcgagagaaaagacaaggagtcaccgagagctggacctactgaacccatggacaccagcgaagctaccgtctgccactctgacctggagaggaccccgcctctgttacccggacggccagcccgggacagggggcccgaaagccgtccgacggagctaagccttgaggagctcagcattagtgcccgtcagcagccaacaccactgacccctgcccaaccggccccagcgccagccccagccactaccacaggtacaagggccggcggtcaccctgaagagcccttatccagactgtctcggaagaggaagctgctcgaggacactgagtctggcaaaaccctgctgctcgacgcgtatagagtttggcagcaaggccagaaaggcgtagcatatgacctgggaagggtggagaggataatgtcggagacctatatgctcatcaagcaggtggatgaagaggctgccctagagcaagcggtcaagttttgtcaggtacacctgggagccgcagcccagcggcaggcatccggcgatacacccacaactcctaagcatccaaaggattctcgcgaaaacttctttccggtgactgtggtgcctaccgcccccgatccagtgccagctgactctgtccagcggccctctgacgctcacaccaagcctaggcccgccctcgcagccgcaacgactattattacatgccccccgtccgcctcggcatctacgctggaccagtccaaggaccccggccctccgcgcccacatcggcctgaggctaccccgtctatggcaagcctggggcctgagggcgaggagctcgctcgggtggcagaagggactagttttccccctcaggagcccagacattccccgcaggtcaagatggctccaaccagctctccagctgaaccccattgctggcctgcggaagcagctcttggcacgggcgcagagcctacatgttctcaagagggcaaactgagacccgaaccgagaagagatggggaagcgcaggaggctgcctcagagactcagcccctttcctctcctccaacagcagcatcttccaaagccccaagttcaggctcagcacagccccccgagggccaccccggcaagcccgaaccctccagggcaaagagtagacctcttcctaacatgcctaagctcgtcattcctagcgcagctaccaagtttcctccagagattaccgttacccctcctacgcccaccctcctgagtcccaaggggagcatctccgaggagacgaagcagaagctcaaaagcgcaatcctctcagcccagagtgcagcgaatgtgcggaaggagagcctgtgtcagccagccctggaggtcctggagacaagcagtcaggagtcctctctggaaagcgaaactgacgaagacgacgattatatggatatatag

SEQ ID NO: 110308 - DNA, 6663 bp, synthetic construct
  misc_feature 1..6663: note = Description of Artificial Sequence: Synthetic coding sequence
  source 1..6663: mol_type = other DNA
atgattagaatcgctgctctgaatgcgagctcaaccatcgaggacgatcatgaggggtcttttaagtcacacaaaactcagactaaggaagcccaggaagctgaagctttcgctctgtaccataaggctctggacctgcaaaaacacgataggtttgaggagagcgcgaaggcctaccacgaattgctggaagcctctctgttgcgcgaggcagtatcttctggagacgagaaggagggcttaaaacatcctgggcttattttgaagtacagcacctacaagaaccttgcccagctagctgctcagcgggaagacctcgagacagctatggaattctatctggaagcggtgatgctggatagtaccgacgttaatctttggtataaaatcggacacgttgcgctgagactgatcaggatacctctggctcgccacgcctttgaggaaggcctgcggtgtaacccggaccactggccatgtctcgataacttaataacagtgttatacactctttccgattataccacctgcctgtactttatctgcaaagcgttggaaaaagactgtcgctacagtaaaggactggtcctcaaagagaaaatcttcgaagagcagccttgtctgagaaaggactcgcttcggatgttccttaagtgcgacatgagcattcacgacgtttctgtttctgccgctgaaactcaggccatcgtcgatgaggccctgggactgagaaaaaaacgacaagctctgattgtgcgggagaaagagcccgatttgaaacttgtgcaaccaatcccattcttcacttggaagtgtcttggagagagcctcctcgcaatgtacaatcaccttacaacatgtgagcctccccgaccctccctgggcaagaggatcgatctgagcgactatcaagacccctcccagccacttgagagctcaatggtggttacgccagtgaatgtgatccagccttccacagtgtccacgaacccagctgtcgccgtggccgaacctgtggtaagttatacatcggtggcgacaacttcattccctctgcatagccctggcctgctggaaactggcgcgccagttggcgacattagtggaggcgataaaagtaagaagggcgtgaaacgcaaaaagattagtgaagaaagtggggagacagcaaaaaggcggtcggcgagggtgcggaatactaagtgcaagaaggaggagaaagttgacttccaggagctgcttatgaaatttctgccctctcgcttgaggaagctcgaccctgaagaggaggacgacagctttaataactatgaggtccagtctgaagccaagttggagtcgttcccctccattgggccccaaagactgagcttcgactccgccacatttatggagagcgagaaacaggatgtccatgagtttctcctcgagaatctcacaaatgggggcattctcgaactgatgatgcgctacctcaaggccatggggcataagttcctggtgcggtggccccctggtctcgcagaggtcgtactgtcagtataccattcgtggagacgccatagcactagccttcctaaccccctgctacgtgactgttccaataagcatatcaaagatatgatgttgatgtcgcttagctgcatggaactccagttagatcagtggttattgacaaaggggcggagtagcgctgtgagccctcgaaactgccccgcaggaatggttaacggaaggttcggccccgattttcctggaacacattgtcttggtgacctgttgcagctctcttttgcatcaagccagcgggacctctttgaggacggctggctcgagttcgtggttcgtgtgtattggctgaaagcacgattcctcgcccttcaaggggatatggaacaagccctcgaaaactacgacatatgcactgagatgctgcagtcctccactgcaatacaggtggaggccggcgctgagcgccgggacatcgtcatacgactgcccaacctgcataacgacagtgttgtgtccctggaggaaatagataagaatttgaagagtctggagcggtgccagagcctggaggaaattcagcgattgtatgaagcgggggattataaagccgtcgttcatctcttgcggcccacactgtgtaccagtggcttcgacagggcaaaacaccttgagttcatgaccagcatccctgaacggcctgcccagctattactgctacaggactccctcctcagacttaaggattaccgtcagtgtttcgagtgctctgatgtggccttaaatgaggctgtgcagcagatggtgaactccggtgaggccgccgcgaaggaagagtgggttgccactgtcacgcaacttctgatgggaattgagcaggctctgtccgccgactcttcgggaagcatcttgaaggtgtcttccagcactaccggtttggtacgactgaccaataatctcatccaagtgatcgactgctcgatggccgtccaggaggaggccaaagaaccgcatgtcagctcagtgctgccgtggataatccttcaccggattatttggcaagaggaagatacatttcattcattgtgccatcagcagcagctccagaatccagctgaggagggcatgagcgagactcccatgcttcctagcagcttgatgctgcttaacaccgcccacgagtatctggggcggaggtcttggtgttgtaatagtgacggggccttgctgagattctatgtacgcgtgctccaaaaagaattggccgcatctacttctgaagatacccacccatataaggaggaactggagacggccctggagcagtgcttctactgcttgtactcttttccctctaagaagtccaaagctaggtatctcgaggagcactccgctcagcaggtagacctgatctgggaagacgctcttttcatgttcgagtatttcaagcctaagacgttgcccgagtttgattcttataagacgagcacagtgtccgcagatctcgccaatcttcttaaacggattgctaccattgtacccaggacagagaggcccgcgctgtccttggataaggtgagcgcatacattgagggcacttctactgaagtaccatgtctgcccgagggggccgatccatctccacctgtggttaatgaactctactacctgcttgccgactaccatttcaaaaacaaagagcagtccaaagccattaagttctacatgcacgatatctgcatttgccccaatcggtttgatagctgggcaggcatggcactcgcccgcgcctctaggatacaagataaactgaactccaacgaactcaagtccgatggacccatttggaaacacgccacgcccgtgctcaattgctttaggcgggcactggagattgactcttctaatctcagtttgtggatcgaatacggtactatgtcatatgcactgcactcattcgcatccagacagttgaagcagtggcgcggggagcttcctcccgaattggttcaacagatggaaggccgccgagattccatgcttgaaacagcgaagcactgctttaccagtgcggctcgctgcgaaggggacggagacgaagaggagtggctgatacattatatgctggggaaagtggcagaaaaacagcagcagcctcctacagtctatctgctgcactatcggcaggctggacactatttgcacgaggaggctgccagatacccaaaaaagatacactatcacaaccctcctgaactagccatggaggctctcgaagtctacttccgcctacacgctagtatcctgaagctgttgggaaaaccagactctggcgtaggtgccgaggttctggtcaattttatgaaggaggctgccgaagggccctttgctagaggtgaagagaagaatactcctaaggcaagtgaaaaagagaaagcatgcttggtcgacgaggactcccactcttctgcgggtaccttgccaggcccaggagcttcactccccagtagtagcggcccaggcctcacctcccccccatacaccgcgacaccaatagatcacgactacgttaaatgtaaaaaaccacaccaacaagcaacacccgatgatcgttctcaggactcaaccgctgtggctctaagcgactccagttctacccaggatttctttaatgaaccaacctcccttttagaaggctctcggaagagttacacggagaagcgcctgcctattctgagctcccaagcaggcgcaaccggcaaagatctgcagggcgcgaccgaggaacggggtaagaacgaagaatctttggaaagcacggagggattccgcgcggctgagcaaggcgtgcagaaacctgccgccgaaactccagcgagcgcttgcatcccaggaaagcctagcgcctccacacctaccctgtgggatggtaaaaagaggggcgaccttcctggcgaacctgtggcttttcctcagggtctcccagccggagctgaagaacagcgacagtttctcactgagcagtgtatcgcatcctttagactttgcctctcacgcttcccgcagcactacaagagcctgtacaggctcgcattcctgtacacctattcgaaaacccatcggaatctccagtgggcacgagatgtgttgctcgggtcatccattccctggcagcagttgcagcacatgccagctcagggactgttttgcgaaaggaataagacaaatttttttaacggtatttggcgtattcccgttgatgaaatcgaccgcccgggaagtttcgcatggcatatgaaccgatcaatcgtgttactgctgaaggtgctcgcacaactgcgggatcacagtacactcctcaaagtaagcagtatgctccagagaacacccgaccagggaaagaaatacctccgcgatgctgaccggcaagtgctcgctcagagagcttttattctgactgtgaaagtgctagaggacacattgtccgagctggccgagggctcagaacgcccgggacctaaagtgtgtggactcccaggggcccgaatgacaactgatgtgtcccataaggcttcacctgaggatggccaggagggactgccccagcccaaaaagccaccgctggccgatgggagcggacctggtcccgagcccggagggaaagtgggattattgaaccaccggccagttgcaatggatgctggagatagcgcagaccagagcggtgagcggaaggataaagagagccctagggccgggcccacggaaccaatggacacttccgaggcaacagtgtgccattccgatcttgagcgcactccacctcttctgcccggacgacctgcacgcgacagagggcctgaatccagaccaacggagctatcacttgaggagctgtcaatctctgcccgccagcaacccactcccctaacacctgcccagccagcgcccgcgcccgctcccgccacaaccacgggaactagggctggcggacaccctgaggagcccttgtcaagactgagtcgaaagcgaaagttgctcgaggatactgaatcaggaaaaacgctccttctcgatgcttacagagtgtggcagcagggacagaaaggagtcgcgtatgatctggggagagtcgagaggattatgtcagagacatacatgttgataaagcaggtcgatgaggaggcggccctcgaacaggccgtgaagttctgtcaggtccacctcggtgctgcagctcagcggcaggcttcaggcgacaccccgacaacccccaagcaccccaaggatagtcgcgaaaatttcttccctgtgactgtggtccccactgcccccgatccagtccctgccgactccgtccaaaggcctagcgatgctcacaccaaaccccgaccagctctcgcagccgccacaaccattatcacctgccctcccagcgcctctgcaagcactctagaccagtctaaggaccccggcccccctcgcccccatcgcccggaggctacgccgagcatggcctccttaggcccagagggtgaggagttggcgagagtcgccgagggaacctctttccctccacaggagccacggcactcaccccaggtaaaaatggccccgacttctagcccagcagagcctcactgttggcccgccgaggcagccctcgggacgggagcggaaccgacatgttctcaggaggggaagctccgcccggagcccaggcgggacggtgaggcccaggaggctgccagcgagacgcaaccactaagctccccacctactgctgcgagtagcaaagcgccatcctccggctccgcgcagcctccagaggggcaccccggcaaaccagagccctccagagctaagagcaggcctctgccaaacatgcccaagttggtcatccccagcgccgccaccaagttcccacctgagatcaccgtgaccccgccaacacctacactgctctcacccaagggtagcatcagcgaagaaactaaacagaagttgaagtcggctatcctgagcgcccagtcagccgctaacgttagaaaggaatccctgtgtcaaccagccctcgaagtcctcgaaacctcgtcccaggagtcgagcctcgaatctgagacagatgaggacgacgattatatggatatttag

SEQ ID NO: 110309 - DNA, 1770 bp, synthetic construct
  misc_feature 1..1770: note = Description of Artificial Sequence: Synthetic coding sequence
  source 1..1770: mol_type = other DNA
atgccccgccgttcccggcgtggaatttggaggatcccagtggatgagatcgatagacccggaagctttgcgtggcacatgaatcggagcatcgtcctactcttgaaagtgctcgctcaactgcgggaccactcaaccttactcaaagtcagcagcatgttacagaggacaccagaccaggggaagaaatatctaagagatgctgacaggcaggtgctagcccagcgagcctttatcctcacagtgaaagttctggaggacactctgtcagaactggccgaggggtcagagcgtcctggccccaaagtctgcggccttcccggcgccaggatgacaaccgacgtctcgcacaaggcctctccggaggacgggcaggagggactgccacaaccaaagaagcccccgcttgctgatggctccggaccgggcccggagccaggagggaaggtgggactcctgaatcataggcccgtcgccatggatgccggagattctgctgaccagagcggagagcgcaaagataaagaaagtccacgagcaggtcctaccgagcccatggatacatcagaagccaccgtctgccactcagatctcgaacgaactccaccactgctgcccgggcgtcccgcccgagacagggggccagaatccaggcccaccgagttatctctggaggagctatcaataagcgctcgtcagcaacctacacccctgacacccgcacagcccgctcccgcgcctgccccagcgaccacaacaggcaccagagccggtgggcaccctgaggagcccctgagcaggctttcgcgaaaacggaagttgcttgaggacaccgaatccggcaaaaccttgctactggatgcatacagagtatggcagcaggggcagaaaggagtcgcctacgacttagggcgtgtcgaaaggatcatgtccgagacatacatgctgataaagcaagtggacgaggaggccgccctcgagcaggccgtgaaattttgtcaagttcacctgggtctgcctcccagagatcggccgagagatacccccaccacaccaaagcaccccaaagattcgcgggagaattttttccccgttactgtagttcccacagcgccagacccagtccctgccgattctgtacagcgcccctcagatgcccacacaaaaccacggcctgctcttgcagcggccactacgatcatcacctgcccaccttcagccagtgcctccaccctcgatcaatctaaggaccccggtcctcctcgtccacatcgtcctgaggccacacctagcatggcctcactggggcctgaaggtaaattaaggccggaaccgagacgggacggagaagcccaagaggctgcttctgaaacacagccactgtcatccccccctacagcagccagctccaaggcccctagctcaggatctgcacaaccacccgagggccatcccggcaaaccagagccttcacgggcaaagagtcgacctctccccaatatgcccaagttagtaattccatcagccgccaccaaattcccacctgaaataacagtcacgccgccaaccccaaccttactgtcccccaaagggagtattagtgaagagaccaagcagaagcttaaaagcgccatcctttccgcacaaagcgctgcgaatgtgcgaaaagagtctctctgccagcccgctctggaggtgctcgagacgagttctcaagagagctccctggagagtgagacagatgaagacgatgattacatggatatctag

SEQ ID NO: 110310 - DNA, 1224 bp, synthetic construct
  misc_feature 1..1224: note = Description of Artificial Sequence: Synthetic coding sequence
  source 1..1224: mol_type = other DNA
atgatacgtattgccgcactgaacgcttcttcaacaattgaagacgatcatgaaggttcattcaagtctcacaagacccagacaaaggaagcccaggaagcagaggcatttgcgctgtaccacaaggcactagacctccagaaacatgaccgctttgaggagagtgccaaagcttatcatgagctcctggaagcctccctgctccgcgaagctgtgagctcaggagacgagaaggaagggctgaagcaccctggtctgatattgaagtattcaacttataaaaacctggcacagctggcagcccagagagaggatctggagactgctatggaattttatctcgaagctgtcatgctcgattccaccgatgtaaacctgtggtacaaaatcggccatgtggccctgagactgatcagaatccctttggcaagacatgccttcgaggagggtctccgctgcaatcccgatcactggccatgtcttgacaacctgataacggtgttgtacacattgtctgactacacaacatgcctatacttcatttgtaaagcattagagaaagattgcagatattccaaaggcctcgtccttaaggaaaagattttcgaggagcagccatgtttgagaaaggattctcttcgaatgttcctcaagtgtgatatgtctatccacgatgtgagcgtatcagccgccgagacgcaagctattgtggacgaagccttaggcttaaggaagaagcgacaagccttgatcgtccgcgaaaaagagccagatctgaaactggtgcagcccatcccattctttacttggaagtgtctgggcgagtcccttctcgccatgtacaaccatctgactacatgcgaaccccctaggccgtctctagggaaacgcatagacctttccgactatcaggaccccagccaacccctagaatcttctatggtggtgacaccggtgaatgttatccagccctctacggtctctactaatccagccgtggccgttgcggaacctgtcgtgagttacacttctgtcgcgacaacctccttcccactccattctcctgggttattagaaaccggagctccagtgggggatatttccggaggcgataaatccaagaagggcgtcaagcgtaaaaaaatttcagaagagtctggggaaaccgccaagagaaggtcggctagagtgagaaacactaagtgcaaaaaggaggaaaagtag

SEQ ID NO: 110311 - DNA, 1527 bp, synthetic construct
  misc_feature 1..1527: note = Description of Artificial Sequence: Synthetic coding sequence
  source 1..1527: mol_type = other DNA
atgcagttcagcggtgaaaagatatccggtcagcgcgacctccagaagagtaagatgcgctttacctttacgtctagatgccttgccctatttctcctgctcaaccaccccacccccatactcccagcattctccaaccagacatatcctacgatcgaacccaagccattcctgtacgtggttgggcgaaagaaaatgatggatgcgcaatacaaatgctatgataggatgcagcagctgccagcttaccagggcgaagggccctactgtaaccgaacatgggacgggtggctgtgctgggacgacacacccgcaggagtgctatcttaccaattttgtcctgattacttcccagactttgacccgtcagagaaagtgacaaaatactgcgatgagaagggagtgtggttcaaacaccccgaaaataaccgtacctggtctaactatacaatgtgcaatgcttttacacccgagaaacttaagaacgcttacgtcctctattatctagctattgtaggccacagcttgagcattttcactttggtgatcagcctggggatattcgtgttcttcagaaagctgacgacaatctttcccctgaactggaaatatcgtaaggccctgagtctcgggtgtcaaagggtaaccctgcacaagaatatgttcttaacatatattttgaactccatgattatcatcatccatctcgtcgaggtagttcctaacggggagctggtgcgccgagatcccgtgagttgcaagatactgcacttcttccaccaatacatgatggcctgtaattatttttggatgctatgcgaagggatttatctccacacacttatcgtagtggctgtgtttacagaaaagcagcggttgagatggtattatctgctgggctggggctttcccctggtacccaccaccatccatgcaatcaccagagccgtctatttcaacgacaattgctggctatctgtggagacccacctgctatatataatccatggccccgtgatggcagccctggtggtaaactttttcttcctcttgaacattgtgagggtgcttgttacaaaaatgagagaaacacacgaagctgaatcgcacatgtacctgaaagctgtgaaggctactatgatcctggtccctctgctgggaatacagttcgttgtgttcccatggagaccctctaacaagatgctgggaaagatttacgattatgttatgcacagcctcatccactttcagggctttttcgtcgccaccatctactgcttctgtaacaatgaggtccagaccacagttaagcgtcagtgggcgcagtttaaaattcaatggaaccagagatggggacgcaggccttctaataggagtgcccgagccgcagcggctgccgctgaggcaggcgacatacccatttacatttgtcatcaagagcttaggaacgagcccgccaataatcaaggtgaggaaagtgctgagatcatacctctgaacattatcgagcaggaaagctccgcctag

SEQ ID NO: 110312 - DNA, 1473 bp, synthetic construct
  misc_feature 1..1473: note = Description of Artificial Sequence: Synthetic coding sequence
  source 1..1473: mol_type = other DNA
atgcggtttaccttcacctcacgctgcctggccttatttttgcttctgaatcacccaacacctatcttaccagccttttccaaccagacatatccaaccatagagcccaagccattcctgtacgtggtcggccgcaaaaagatgatggacgcccagtacaaatgttatgataggatgcagcagctcccagcatatcagggcgagggtccttattgcaaccggacttgggatggctggctgtgctgggacgataccccggctggtgtcctgtcttaccagttttgcccagattacttccccgacttcgacccttctgaaaaggtcacgaagtactgcgatgagaaaggcgtttggttcaagcaccctgagaacaataggacatggtctaactacaccatgtgtaacgcctttactcctgagaagctcaaaaatgcctatgtattatattatttggcaatcgtggggcactcgctgagcattttcaccttggtcatctctctggggatctttgttttttttagaaagcttactactatctttccgctgaactggaaatatcgcaaggcgctgtcacttggttgtcagagggtgactcttcataaaaatatgtttctgacgtacatcctaaactcaatgatcataattatacatttggttgaggttgtgcccaacggggaactagtacggcgcgatcctgtgagctgcaagatattgcatttctttcaccagtacatgatggcctgcaattacttctggatgctgtgcgagggcatctatttacatactcttatagtagttgctgtgtttacagagaagcagagacttcgctggtactatctgcttggctggggcttcccacttgttcctacgaccatacatgctattaccagagcggtgtattttaatgataattgttggctctcagtcgaaacccatctgctttatattatacacggaccagtgatggcagccctggtagttaacttctttttccttctgaacatcgttagggttctggtcacaaaaatgcgtgagactcatgaggctgagagccacatgtatctcaaggcggtcaaagccacaatgattctggtgccactgctgggcatccagttcgtggtctttccttggcggccatccaacaaaatgctgggaaaaatttacgactacgtaatgcattcattgatacacttccaaggattctttgtggctacaatatattgtttttgcaacaacgaagttcaaaccaccgtcaagcgccagtgggctcagttcaaaattcagtggaaccagcgttggggtaggaggccctctaatcgatccgctcgagctgccgctgcagcagccgaagctggtgatatcccaatctacatctgccaccaggagctgaggaatgagccagcaaacaaccaaggagaggagtccgccgaaatcatcccgcttaatattatcgagcaggaaagctccgcttag

SEQ ID NO: 110313 - DNA, 1425 bp, synthetic construct
  misc_feature 1..1425: note = Description of Artificial Sequence: Synthetic coding sequence
  source 1..1425: mol_type = other DNA
atgcggtttacttttacttccagatgtctagccctgtttctgctattgaaccaccctacaccaatcctgcccgcattttcaaatcagacctaccccaccatagaacctaagccattcctgtacgtagtaggtaggaagaagatgatggatgcccagtataaatgctacgaccggatgcagcagctccccgcctaccagggagagggcccttattgtaacagaacctgggacgggtggctgtgctgggatgatacaccagctggggtgctttcttaccagttctgcccggattactttcctgacttcgatcccagtgagaaggtgacaaaatactgtgatgagaagggtgtgtggttcaagcatccagaaaacaaccgtacgtggtctaattacactatgtgcaacgccttcacaccagagaaactcaagaatgcatacgtgctgtactatctggccattgtgggacatagtctctccatctttacactcgtgatatcactggggattttcgtgtttttcagatccctgggctgccagcgcgttactctgcataaaaacatgtttctaacttatattctgaatagcatgatcatcattatacatctggttgaagtcgtgcccaatggagagctggtgcggcgcgatcccgtatcctgcaagatattacactttttccatcagtacatgatggcctgcaactatttttggatgctatgtgaggggatttatctgcataccctgatcgtggtagcggtgttcaccgaaaaacagagacttcggtggtactacctgcttgggtgggggttcccattggttcctaccactatacatgcaatcactcgcgctgtttattttaatgacaactgctggctgtcggtggagactcacctgctatacataattcacggacctgttatggccgcccttgttgtgaatttttttttccttttaaacatagtgcgtgtcctcgtgaccaaaatgcgcgagacccacgaggccgaatcccacatgtacttaaaggccgtgaaggccactatgatcctggtgccacttctgggtatccaattcgtggtctttccgtggaggccctctaataaaatgctgggcaaaatctacgactatgtaatgcatagcctaattcacttccaagggttctttgttgctactatctactgcttttgtaacaacgaggttcaaaccaccgtgaaaaggcagtgggcccagtttaagattcagtggaatcaacggtggggaagaagaccctccaatcgcagcgctcgcgcagcggctgcagccgccgaggccggcgatattccaatctacatttgtcatcaggagctaagaaatgaaccagcaaacaatcaaggcgaggagtccgcggagatcatcccactgaatataatcgaacaggaaagcagcgcttag

SEQ ID NO: 110314 - DNA, 825 bp, synthetic construct
  misc_feature 1..825: note = Description of Artificial Sequence: Synthetic coding sequence
  source 1..825: mol_type = other DNA
atgcgttttacctttacgtcgagatgtttagccctcttcctgctgctcaatcatcctacacccatcctgccagcctttagtaaccagacctaccccactattgaaccaaagccttttctctacgtggtggggcgcaaaaaaatgatggatgcacagtataagtgctacgatagaatgcagcagttgccggcataccagggcgaaggtccctattgtaaccggacctgggacgggtggctgtgttgggacgacacccccgctggcgtccttagctatcagttctgtcccgactactttccagactttgaccctagcgagaaggtgacaaagtactgtgatgagaaaggggtttggttcaagcacccagaaaacaatcgtacttggtctaactatacaatgtgcaacgcgtttacaccagaaaagctaaagaacgcctacgtcctctactacctggcaatcgtggggcactctctgagcattttcaccctggttatctcactcggaatcttcgtgttctttagatcactggggtgccagcgagttacactgcacaagaatatgtttctgacctatatccttaattccatgattatcatcatccatctcgttgaagtagtgcctaacggagaactggtccgacgcgatccagtgtcctgcaagatcttgcacttcttccatcaatacatgatggcctgtaattatttctggatgctatgcgaaggaatatatctacacacgcttatcgtcgtggccgttttcactgagaaacagcgactgaggtggtactacttgctgggttgggcccctgcattccatagggactag

SEQ ID NO: 110315 - DNA, 1473 bp, synthetic construct
  misc_feature 1..1473: note = Description of Artificial Sequence: Synthetic coding sequence
  source 1..1473: mol_type = other DNA
atgcgctttacttttacaagtcggtgtctcgcgctctttctcttactaaatcatccgacccctatcctgcctgcatttagcaaccaaacttaccccactatcgagccaaagccctttctgtacgttgtaggacggaagaagatgatggacgcccagtacaagtgctatgatcggatgcaacagctacctgcatatcagggcgaaggaccgtattgcaacagaacttgggatgggtggctctgttgggatgatactcctgcgggtgtactctcttatcagttctgccctgattacttccctgattttgatccctccgagaaagtcactaaatactgcgacgaaaaaggtgtctggttcaaacatcctgagaataatagaacgtggtccaattacacaatgtgtaatgcctttacacccgagaagttgaagaacgcctacgtgctttattacctagccatagtaggccatagcctgtcaatcttcacgctggttatcagcttagggatctttgtcttcttcagaaagctgacgacgatttttcccctgaactggaaataccgtaaagccctgtcactcgggtgccagagagtcacattgcataaaaatatgttcttaacctatattctgaatagtatgatcatcataattcatttagtggaagtagtgcctaacggagaactggtgagacgcgatcctgtgagctgcaagatcttgcattttttccatcaatatatgatggcttgtaactacttttggatgctgtgtgaaggaatctaccttcatactctcatcgtcgtagctgtgtttactgagaagcagaggcttcgctggtactacctcctgggttggggttttccgctcgtccccacaaccattcacgcaataaccagggccgtgtactttaacgataactgctggctcagcgtcgagacacacctgttatacattattcacggcccagtgatggccgcactggtcgtcaacttcttcttcctcctgaatattgttcgtgtgctggtgacaaaaatgagagagactcacgaagccgaaagccatatgtacttaaaggcggtgaaagccactatgatcctggtgcccctcctggggatccagttcgtggtatttccatggcggccatccaacaagatgcttggaaagatttatgactacgtgatgcactcccttattcactttcagggcttcttcgtggctaccatctattgtttttgtaacaatgaagtccagaccacagttaagagacagtgggctcagtttaagattcaatggaatcagcggtggggcagaaggccatctaatagatcagcgcgggctgcggctgccgcagccgaagccggcgacatccctatttatatttgccaccaggagctgcgtaacgaacctgcaaataaccagggcgaggagtctgccgagatcatccccctgaatatcatagagcaggagtcttcagcttag

SEQ ID NO: 110316 - DNA, 873 bp, synthetic construct
  misc_feature 1..873: note = Description of Artificial Sequence: Synthetic coding sequence
  source 1..873: mol_type = other DNA
atgcgctttaccttcacaagtcggtgcctggccctttttctactcctgaaccatccaactccaatcctgcctgcattcagtaatcagacatatcccaccattgaaccaaagccattcctgtacgtggtaggcaggaaaaaaatgatggacgcccagtataagtgctacgacaggatgcagcagctgccggcctaccagggagaaggcccatactgtaacagaacctgggatggctggttatgttgggatgatacaccagcaggagttctgtcctatcagttctgtccagattactttccggatttcgatccttccgagaaagtcactaaatattgtgatgaaaagggtgtgtggtttaaacacccggagaacaaccgtacatggtcaaactataccatgtgcaacgcattcacacccgagaagctgaaaaatgcatacgtgctgtattacctagctattgttggacactctctgtcgatctttacactggtcatttctctcggaatttttgtgttctttagaaagttgacaacaattttcccccttaattggaaatacagaaaagccctgtcgcttggttgtcaacgcgtgactctgcacaaaaacatgttcctgacatacattttgaattccatgataattatcatacatttggtcgaggtcgtcccgaacggtgagctagtccgccgggacccagtgagctgtaaaatcctgcacttcttccatcagtacatgatggcgtgcaattacttttggatgctatgcgaaggaatctacctgcacactctcatcgtcgtggccgtgttcactgaaaaacaacggctgcgctggtactacctcttgggttgggcccctgcttttcaccgcgattag

SEQ ID NO: 110317 - DNA, 1425 bp, synthetic construct
  misc_feature 1..1425: note = Description of Artificial Sequence: Synthetic coding sequence
  source 1..1425: mol_type = other DNA
atgcggttcacatttaccagtagatgcttggcactgtttctgttgttgaaccaccctactcccattctgcctgcctttagtaaccagacttatcccaccatcgagcccaaaccctttttatacgtggtcgggagaaagaagatgatggatgcccagtataaatgctacgataggatgcagcagctgccagcttaccagggcgaggggccctattgcaaccggacctgggatgggtggctttgttgggacgacacacctgccggcgtactcagctatcagttctgtcccgattatttcccagatttcgatccttctgaaaaggttactaagtactgtgatgagaagggcgtgtggttcaaacaccccgagaataatcgtacttggagtaactataccatgtgcaatgctttcacgcccgagaagctgaagaacgcttacgtgttgtactatttagcaatcgtgggtcattctctgagtattttcacccttgtgatttctttgggcattttcgtgttcttccgaagcctgggatgtcagagggtgaccctgcataaaaatatgttcctgacatacattctgaacagcatgatcataattatccatctggtcgaggtggtcccaaacggtgaacttgtacggcgcgaccccgtgagctgcaagatcctgcatttcttccatcagtatatgatggcctgcaattatttctggatgctgtgcgagggaatttatctgcacacattgattgtcgtggccgtgtttaccgaaaaacagcggctacggtggtattacctgcttggctgggggttccccctggttcctactacaatccacgcgattacgcgggcggtttattttaatgataactgctggctatccgtagagacccatctattatatataatccacggtcctgtcatggctgctctggtcgtgaactttttctttctcctgaacatcgtcagagtcctggttacaaagatgagagagactcatgaggccgaatcccatatgtatctgaaagctgttaaagccacaatgattcttgtgcccctgctgggcattcagtttgttgttttcccatggagaccgtccaataagatgttggggaagatttacgattatgtaatgcatagtctgatccactttcaaggcttcttcgtcgcgaccatctactgtttttgtaacaatgaagttcaaacgaccgtgaagcggcagtgggctcagttcaagattcaatggaaccaacggtggggcagaaggccctccaataggtccgcccgcgcggcagccgccgctgccgaagctggcgacatccccatatatatctgtcatcaggagctgagaaacgaaccagctaataaccagggggaagaatctgccgagattattccgctgaacatcattgagcaagaatcgagtgcttag

SEQ ID NO: 110318 - DNA, 489 bp, synthetic construct
  misc_feature 1..489: note = Description of Artificial Sequence: Synthetic coding sequence
  source 1..489: mol_type = other DNA
atgagattcacgttcacttcccggtgcttagctctttttttactcctgaatcacccaacccccatcctccctgccttcagtaatcagacctatccaacaatcgagcctaaaccgttcctctacgtggtgggtagaaaaaaaatgatggacgcacagtacaagtgctacgaccgcatgcagcaattaccggcataccagggagaaggaccatattgcaaccgcacgtgggacggctggttgtgctgggatgacacgcccgcaggagttttatcatatcagttctgccccgactactttcccgatttcgatccaagcgagaaagtcactaagtactgcgacgaaaaaggcgtgtggttcaaacaccccgaaaataataggacgtggtccaattatactatgtgcaacgccttcacccccgaaaaactgaagaacgcctacgtcctctactatctggcgattgtcggacactcctgtcagttcagcccttag

SEQ ID NO: 110319 - DNA, 1386 bp, synthetic construct
  misc_feature 1..1386: note = Description of Artificial Sequence: Synthetic coding sequence
  source 1..1386: mol_type = other DNA
atggaaaaaaagtgtaccctgaacttccttgtgcttcttcctttcttcatgattttagtgactgcagagttggaggaatctcctgaggatagcattcaactcggggtgacacgcaataagatcatgacagctcagtacgagtgttaccagaaaataatgcaggatcctattcagcaggcagaaggtgtgtactgtaaccgaacctgggatggctggttgtgctggaatgatgtcgctgccggtaccgaatcaatgcagttgtgccctgattattttcaagactttgacccttcggagaaagttaccaaaatctgcgaccaggacggaaattggtttcgccaccctgcgagcaatagaacttggacgaactacacccagtgtaacgtcaacacacacgagaaggtcaagaccgctctcaatcttttttatctgacaatcattggacacggcctttcgatcgcgtccctcctgatctctctggggatttttttctacttcaagtcactttcttgccaaaggatcacgttgcataagaatctctttttttccttcgtatgtaatagtgtggtaactattattcatcttacagctgtggcaaacaaccaggccctggttgcgaccaatccagttagctgcaaagtttcacagttcattcatctgtatcttatggggtgcaactacttttggatgctttgcgagggcatttatttacatactctaatagtggtcgcagtgtttgctgagaagcagcaccttatgtggtactattttctgggatgggggtttccacttatccctgcctgtatccacgccatcgctaggtctctttattataatgataattgctggatctctagtgatactcacctgctttacataatacacggacccatctgtgccgctctcctagtgaatcttttcttcttattgaacatcgtgcgggtcctcataactaaactaaaagtgacccatcaagccgagtccaacctctacatgaaggctgtgagggcaaccctgatcctcgtgcccctactcggaattgagtttgttctgattccctggcggcccgaagggaaaatcgcagaagaggtctacgattatatcatgcacatattgatgcacttccaaggcctactcgtcagcacgattttttgcttctttaatggggaggtacaggcaatcctacgaagaaactggaatcagtacaagatacagtttggtaattcattcagcaactctgaggcattacggagcgcttcctacactgtctccacaattagcgatggtcctggatactcacacgattgtccttctgagcacctcaacgggaaaagcatccatgatatcgaaaacgtcttactgaaacccgagaacctttataactag

SEQ ID NO: 110320 - DNA, 1386 bp, synthetic construct
  misc_feature 1..1386: note = Description of Artificial Sequence: Synthetic coding sequence
  source 1..1386: mol_type = other DNA
atggaaaaaaagtgtactttgaattttctggtactgcttcccttttttatgatactcgtgacagctgaactagaggagtctccagaggacagtatacaacttggcgtaacacgtaataagatcatgactgcccagtacgagtgttatcagaaaattatgcaggatccgatacagcaggccgaaggcgtttactgcaatagaacttgggatgggtggctgtgttggaacgatgttgccgcgggtaccgagtcgatgcagctttgtccagactatttccaggatttcgacccatccgaaaaggtaaccaagatctgtgaccaggatggcaattggttccgacatccagctagcaacaggacctggaccaattacacacagtgcaatgtgaatacccatgagaaagtgaaaactgctttgaacttgttctacctgaccatcataggacatgggttgagcatcgcaagcctgctgatatctttgggcattttcttttacttcaagtcactgtcatgtcagcgcatcaccttgcataagaacctgttcttttcattcgtgtgcaattctgtagtgaccatcattcatctcacagccgtggctaataaccaagctttagtggctacaaaccctgtgagctgcaaagtgagccagttcattcacttatatctcatgggatgcaactatttctggatgctttgtgaagggatttacctacatactctaatagttgtggccgtttttgcagagaaacagcaccttatgtggtattacttcctgggatggggttttcccctgataccagcatgtattcatgctattgctcggagcctctattacaacgacaactgttggatttcaagcgatacgcacttactgtacattattcatggacctatctgcgctgctctgctggtaaatctcttcttcctgctgaacatcgtgcgggtgttgattacaaagctcaaggtgactcatcaagccgaatccaacctttatatgaaggcagtgcgggccactctgatcttggtgcctctgttgggaatcgaatttgtgctgatcccgtggaggcctgagggcaagatcgcagaggaggtgtatgactatattatgcatattctgatgcacttccagggcttgttggtgtccactatcttctgcttttttaatggtgaagtgcaggccattctccgccgaaactggaatcagtataagatccagttcggaaacagttttagcaacagcgaggccctgagatctgcttcctatactgtgtcaacaatctccgacggtcctgggtacagccatgactgcccatcagaacaccttaatggaaaaagtatacatgacattgagaatgtgttgttgaagcctgagaatttatataattag

SEQ ID NO: 110321 - DNA, 1386 bp, synthetic construct
  misc_feature 1..1386: note = Description of Artificial Sequence: Synthetic coding sequence
  source 1..1386: mol_type = other DNA
atggaaaagaagtgcaccctcaacttcctggtgctccttccatttttcatgatattagttaccgcagagctagaggaatcccccgaagacagcatccagcttggggtaacccgcaacaaaataatgaccgcccagtatgaatgctaccagaagatcatgcaagatccaatacaacaagccgagggggtctactgtaataggacatgggatggctggctgtgttggaatgatgtggcagcagggactgagtccatgcaactctgtcctgattactttcaagattttgatcccagcgagaaggtaaccaagatatgcgatcaggatggcaattggttcaggcatccagcaagcaataggacctggactaactacacccaatgtaacgtgaacactcatgagaaagtgaaaaccgccctaaatctcttttaccttacaatcatcgggcacggcttatccatagcttccctgctgatctctttagggatattcttctatttcaagagtcttagttgccagaggatcaccctccacaagaatctttttttctctttcgtttgcaattcggtcgtgacaatcatacacctgactgcagttgctaacaatcaggccctggtggccacaaatccggtcagctgcaaggtatcccagttcattcatctgtacctgatgggctgcaattacttctggatgttgtgcgaggggatctaccttcatactctcattgtagtggctgtctttgccgaaaagcagcatttgatgtggtactacttcctcgggtggggcttcccccttatccctgcttgcattcacgccatcgcaagaagtctgtattataacgataattgctggatttccagcgacactcacctactgtatattattcatggtcctatctgcgccgcactgctggtgaatcttttcttcttactaaatatcgttcgagtactcataactaaactgaaagtgacacatcaggctgagagtaacttgtacatgaaggccgtgagggcaacactgattctggtcccgttgctggggattgagtttgtgctcataccctggaggcccgaagggaagatcgccgaggaggtttatgactatatcatgcatatccttatgcactttcaaggtctgttggtatctaccatcttttgtttcttcaatggcgaggttcaagccatcctaagaagaaactggaatcagtataagatccagttcgggaacagcttcagcaactccgaggccctccgtagcgcttcttacactgtgagcaccatctctgacggtcccggatatagtcatgactgtccctctgagcacctgaacggaaagtctattcatgacatcgaaaacgttctgcttaagcccgagaatctctacaattag

SEQ ID NO: 110322 - DNA, 114 bp, synthetic construct
  misc_feature 1..114: note = Description of Artificial Sequence: Synthetic coding sequence
  source 1..114: mol_type = other DNA
atggaaaagaagtgcacgctgaatttcctagtgttactacccttctttatgatcctggtcaccgctgaactggaggagtctcccgaagattcaatacagctcggcgtgacttag

SEQ ID NO: 110323 - DNA, 237 bp, synthetic construct
  misc_feature 1..237: note = Description of Artificial Sequence: Synthetic coding sequence
  source 1..237: mol_type = other DNA
atggaaaagaagtgtacacttaacttcctggtgctcctgccattcttcatgatcctggtgaccgcagaactggaagagagccctgaggattcaattcagctgggagtcacaaggaataagattatgaccgcgcagtatgagtgctatcaaaaaattatgcaagaccccatacagcaagctgaaggcgtgtattgcaatagaacatgggacggctggctttgctggaacgacgtgtag

SEQ ID NO: 110324 - DNA, 426 bp, synthetic construct
  misc_feature 1..426: note = Description of Artificial Sequence: Synthetic coding sequence
  source 1..426: mol_type = other DNA
atgggttttcagaaattcagcccgtttctggccctgtctatacttgtgctgctgcaggctggcagcctgcatgccgctccctttcgatccgcccttgaatcgagcccagcagatcctgctacattgtcagaagatgaggcgcgccttctgctggccgctctggtccagaactacgttcagatgaaagcctccgagctagagcaagagcaggagagggaaggaagctcgctggacagcccacgttcaaaaaggtgtgggaacctgtccacctgcatgctaggcacatacacccaggacttcaacaaatttcacacatttccgcagacagctattggtgtgggcgcgcccggcaaaaaacgcgacatgtctagcgacctggagagggatcataggcctcacgtgagcatgcctcagaacgccaactag

SEQ ID NO: 110325 - DNA, 426 bp, synthetic construct
  misc_feature 1..426: note = Description of Artificial Sequence: Synthetic coding sequence
  source 1..426: mol_type = other DNA
atgggctttcaaaaatttagtccattcctggcactttcgatcctagttctgttgcaggccggctccctccacgctgccccattccgcagcgccttggagtccagccccgcagaccctgcaactctgtcagaggatgaggcccgtctgttactggctgccctggttcagaattacgttcagatgaaagccagtgaactagaacaagagcaggagcgagaagggtcctcactggatagccctagatccaagcgctgcggcaacctgtcaacatgcatgctaggaacctacacccaggactttaacaaatttcatacttttccacaaaccgcgatcggcgttggcgcacccgggaaaaaaagagacatgtcttccgacttggagcgcgatcacagacctcacaatcattgtcccgaagagtcactatag

SEQ ID NO: 110326 - DNA, 387 bp, synthetic construct
  misc_feature 1..387: note = Description of Artificial Sequence: Synthetic coding sequence
  source 1..387: mol_type = other DNA
atggggtttcagaaattttctccctttttagccttgagcatccttgtcctgctccaggctggatcactacacgctgccccttttaggtcagccctcgagagttccccagctgaccctgctaccttatctgaggatgaggcgcgcctgcttctggccgccttggttcagaactacgtccaaatgaaagcttctgaactcgaacaggagcaagaaagagaaggctcacggatcatcgcacaaaagcgggcctgcgatactgctacttgcgtgacacacagactcgccggacttctctctcggtccggtggtgtggtgaagaacaactttgttcctactaacgtcggcagtaaggccttcggtcggaggaggcgagacttacaggcatag

SEQ ID NO: 110327 - DNA, 426 bp, synthetic construct
  misc_feature 1..426: note = Description of Artificial Sequence: Synthetic coding sequence
  source 1..426: mol_type = other DNA
atgggcttccaaaaattttcaccttttctggctttgagcattctggtcctgcttcaggcaggaagcctgcacgccgccccatttaggtcagcactcgaatcgagcccagccgatcccgccactttatccgaagatgaggcaaggctgttgctggctgcacttgtacagaactatgtgcagatgaaggcgagtgaactggagcaggaacaggagcgagagggctcctcacttgactcccctcgtagcaagcggtgcgggaatttaagtacctgcatgcttggtacttacacacaggactttaacaagttccacaccttcccgcagacggctatcggagtgggggctccaggtaagaagagagatatgtcttccgaccttgaacgagaccatcgtccccacgtcagtatgccccaaaatgcaaactag

SEQ ID NO: 110328 - DNA, 387 bp, synthetic construct
  misc_feature 1..387: note = Description of Artificial Sequence: Synthetic coding sequence
  source 1..387: mol_type = other DNA
atgggcttccaaaagttttcccctttcctggcactgtcaatcctggtgcttctgcaggccggaagtctccatgctgctccctttcgtagcgcattagagtccagtcccgccgatcctgcaaccctgtctgaggacgaggctagactcctactggcagctctggtacaaaattatgtccaaatgaaggctagcgagctggaacaggaacaggaacgcgaggggtccagaattatcgctcagaaacgggcttgcgatacagccacctgtgttacccaccgtttggctggcctgctgtcaaggagtggaggcgtcgtgaagaataactttgtcccaaccaacgtcggcagcaaggcctttggacgcaggcgccgggacttacaggcctag

SEQ ID NO: 110329 - DNA, 384 bp, synthetic construct
  misc_feature 1..384: note = Description of Artificial Sequence: Synthetic coding sequence
  source 1..384: mol_type = other DNA
atgggctttcgaaagttttcccccttcctggctctgagtatcctggttctctaccaggctgggagcctccaggcggctccctttagaagcgcgctggagagcagccctgatcctgcgacactgagtaaggaagatgcccggctcctgctggcagcccttgtccaggactacgtccagatgaaggccagtgagcttaagcaggagcaggaaacgcaggggtcctcatctgcagcccagaaacgtgcttgtaatacagcgacctgtgttacacacagactggctggactcctgtcacggtctggaggcatggtgaagagtaactttgtccccacaaatgtgggcagtaaggcattcggaaggaggaggagagacttgcaggcatag

SEQ ID NO: 110330 - DNA, 417 bp, synthetic construct
  misc_feature 1..417: note = Description of Artificial Sequence: Synthetic coding sequence
  source 1..417: mol_type = other DNA
atgaaaaaagaagcaaatttgcagcgaggaggtatgggcttccgcaagttcagtccattcctggccctctccatcctcgtcttatatcaggcaggcagtctgcaggccgctccttttcggtcagccctggaatccagcccagatcccgctacactttccaaagaggatgctagattgctacttgcagctctggttcaggactatgtccagatgaaagcgtcagagctcaagcaagagcaagagacgcagggatcttctagtgctgctcaaaagagggcttgcaatacagcaacatgcgtcactcaccgactggccggcttactgagtcggagcggaggcatggtgaaatccaacttcgttcccacaaatgtcgggtcaaaggcctttggaagaaggagacgggatctgcaggcctag

SEQ ID NO: 110331 - DNA, 384 bp, synthetic construct
  misc_feature 1..384: note = Description of Artificial Sequence: Synthetic coding sequence
  source 1..384: mol_type = other DNA
atgggattcagaaaattcagcccatttctggctttgtctatcctggtactgtatcaggcaggatcactgcaagccgcccctttcaggtccgcactggaatcttcccctgatcccgcaacactgtccaaagaggacgccaggctgttacttgccgcattggtgcaggactatgtccagatgaaggccagcgagctgaagcaagagcaggagactcagggctcttcctctgccgcccagaaaagggcttgtaacaccgccacgtgcgtgacccacaggctggccggactcctgtcgaggagcggagggatggtgaagagcaatttcgtgccaactaatgtcggctccaaagccttcggacggagaaggcgcgatttgcaggcatag

SEQ ID NO: 110332 - DNA, 1206 bp, synthetic construct
  misc_feature 1..1206: note = Description of Artificial Sequence: Synthetic coding sequence
  source 1..1206: mol_type = other DNA
atgccagtgcagctctcagaacaccctgagtggaacgagagcatgcattctctgaggatctccgtaggaggcctgcctgttctagcctctatgactaaagcagctgacccacggtttcgccccaggtggaaagttatactaacctttttcgtgggggcggcaatattatggttgttatgttcccatcggcccgcaccagggcgccctcccacccataatgctcacaactggaggctcggccaggctccagcgaactggtataacgacacttacccattgtctccaccacagagaacacccgccggcattcgctatagaattgccgtgatagcagatctggacacagagtctagggcccaggaggagaatacgtggttctcctaccttaagaaggggtatctcactttgagtgactcaggggacaaagtggcagtagagtgggataaagatcacggcgtcctagaaagccacctggctgagaagggacgaggcatggaactgtctgacttgatcgtgttcaatggcaagctttactccgtggacgatagaacaggggtcgtctatcagatagagggctcaaaagcagtcccttgggtgatactcagcgacggtgatggcacagtggaaaagggcttcaaggctgagtggcttgcggtgaaggatgagagactgtatgtcggaggcttaggcaaggaatggaccacaaccactggggatgtcgtgaatgaaaacccagagtgggttaaggtggttggctataaagggagcgtggatcatgagaactgggtgtctaactataatgccttacgtgccgcggctggcatccagcctcccgggtatctgattcatgagtcggcatgttggtctgacactctgcaacggtggtttttcctccctcgaagagcctcccaggaacgatattcggagaaagacgatgagaggaaaggcgcgaaccttctactgtccgcatctccagatttcggagacattgccgtgagccacgtcggtgctgtcgtaccaactcacggattctcctccttcaaatttattccaaacacagatgatcaaattatcgttgccctgaagtccgaagaagactctggcagagtcgccagctacattatggctttcactctcgacggccgcttcctgcttcctgaaactaagatcgggtccgtgaagtacgaaggcatagagttcatctag

SEQ ID NO: 110333 - DNA, 1053 bp, synthetic construct
  misc_feature 1..1053: note = Description of Artificial Sequence: Synthetic coding sequence
  source 1..1053: mol_type = other DNA
atgcccgttcagttgagtgaacatccagaatggaacgaaagcatgcactctttacgcatctcggtgggtgggctcccggtacttgccagtatgaccaaagcagccgatcccaggttccggccccggtccccacctcagcggacccctgccggaattaggtatagaattgcggtgatcgcggatctcgacaccgagagcagggcccaggaggagaatacttggtttagttacctgaaaaaaggatatttgacgctctctgatagcggcgataaggtggctgtggagtgggataaggaccacggcgtgctagagagtcacctggccgagaagggacgaggcatggagctctcagatctaattgtgttcaacggtaaactatactcagtggacgacagaaccggcgttgtctatcagatcgagggatcaaaagcagtgccctgggtcatcctgtcagatggggacggtacggtcgagaagggattcaaggccgagtggctggcagttaaggatgaaaggctctacgtgggtgggctgggaaaagagtggactaccacaactggggatgtagtcaatgagaacccggaatgggtcaaagttgttgggtacaaaggaagcgttgatcacgaaaactgggttagcaactacaatgcactgcgcgcagctgccggtatccaacctcccggttatcttatacatgaaagcgcctgttggagtgatacattgcagcgctggtttttcctaccacgtagggctagtcaggagcggtatagtgagaaggacgatgagaggaagggagcgaacctgttactgtccgcaagtcccgacttcggagatattgcagtgtctcatgtgggcgcagttgttcccacccatggctttagtagtttcaaattcatcccgaataccgacgaccagatcatcgttgctttaaagagtgaggaggatagtggcagagtggcttcttatattatggcttttacactcgatggtaggtttctgctgcccgaaactaaaataggttccgtcaagtatgaggggatcgaatttatctag

SEQ ID NO: 110334 - DNA, 1206 bp, synthetic construct
  misc_feature 1..1206: note = Description of Artificial Sequence: Synthetic coding sequence
  source 1..1206: mol_type = other DNA
atgcctgtacaactgagcgaacaccccgaatggaatgagtctatgcactcactccggatttctgtcggtggcctgcctgtgctagcctcgatgacaaaggctgcagacccccggttccgcccccgatggaaggtcatactgactttctttgttggcgccgcgatattatggctgctgtgttcgcatcggcccgctccgggtaggcctcccactcacaatgcacacaactggaggttgggccaggctccagctaactggtataatgatacataccccttatcacccccccagcggacaccggcaggcatcagatatcggatagccgtcatcgctgacttggataccgagagccgggcccaggaggaaaacacatggttctcttacctgaagaaaggatatctgaccctgtctgactccggagataaggtcgcggtcgagtgggataaggaccacggcgtgctggaatctcatctcgccgaaaaaggacgcggcatggagctgtccgacctcattgtgttcaatggcaagttgtattcagtcgatgataggacgggagtggtataccagatcgagggatctaaggcagtgccctgggtgatactgtctgacggggatggaaccgttgagaaggggtttaaggctgaatggctggccgtgaaagatgagaggttatacgtggggggtctggggaaagaatggaccacaactaccggggatgtggtaaacgagaaccccgagtgggtcaaagtggtgggatacaagggctctgtcgaccacgagaattgggtgtcgaattataatgccctgcgcgcggccgccggaatacagccccctggttacctaatccatgagtcagcctgttggtcggacacactgcagagatggtttttcctgccccgacgggcttcccaagaacgttatagtgaaaaagacgatgagagaaagggtgctaatctacttctgtcagccagccccgacttcggtgacattgcagtaagccatgtaggtgccgtagttcctactcacggtttcagcagtttcaaattcatacctaataccgacgaccagatcattgtggccctgaagtcagaggaagatagcggccgtgtggctagctacatcatggcgttcacattggatggaagatttctcctccctgaaaccaaaatcgggtccgttaagtacgaggggatcgagtttatctag

SEQ ID NO: 110335 - DNA, 738 bp, synthetic construct
  misc_feature 1..738: note = Description of Artificial Sequence: Synthetic coding sequence
  source 1..738: mol_type = other DNA
atgccggtgcagctttcagagcatcctgagtggaacgaatcaatgcacagcctgaggatctccgtgggggggttaccagtactcgcatccatgacaaaggctgcagaccccaggtttcggccgcggtggaaagtcatcctcaccttcttcgttggggccgccattctgtggctcctgtgttcccatcgacccgcacccgggcgccctcctacccacaatgcacacaactggcgcttgggacaggcacctgcaaactggtataatgacacctatcctctgagtcccccccaacgaacacctgcgggaatcagatatcgcatagcagtaattgctgacttagatacagagagccgggctcaagaggaaaacacttggtttagctacttaaaaaagggttatctgaccttatccgacagtggtgacaaagtggcagtcgaatgggataaagatcatggagtccttgagagtcacctggccgagaaggggcgcggtatggaactcagtgacctgattgtgtttaatggaaaactgtatagcgtagacgaccgcacaggcgtcgtgtaccaaattgaaggatccaaggccgtgccctgggtgatcctttcggatggggacggaaccgtggagaaaggcgtcggcggggaatgggaggccgtgagagagatagtgaggaagagatggagactggtgaaacaggtctcacacgtgggcgtcttgggtcagtggatccaaaggtag

SEQ ID NO: 110336 - DNA, 663 bp, synthetic construct
  misc_feature 1..663: note = Description of Artificial Sequence: Synthetic coding sequence
  source 1..663: mol_type = other DNA
atgggtaattgtgccaaacggccctggcggcgcggtccaaaagacccactgcagtggcttggaagcccgcctcgcggcagttgccccagtccaagctcttctcccaaggagcagggagaccccgcccctggcgtacagggttactccgtgctgaacagcctggtagggcccgcttgtatctttctaaggcccagtatcgcagccacacagctcgatagggagttaaggccagaggagattgaagagctgcaggttgcattccaggaatttgatcgggaccgcgatggttatatcggatgccgggagcttggggcttgcatgcgcaccctggggtacatgccaactgagatggagttgattgagatttcccagcagatctcgggggggaaagtcgattttgaagacttcgtggagctgatgggacctaaactgctggcggagaccgccgatatgattggcgtgagggagctgcgagatgcatttagagagtttgatacgaatggtgacggacggatatcggtgggtgagctgcgcgctgccctaaaggcccttctgggagagcggctgtcccagcgcgaggttgatgagattctccaggacgtcgatctgaacggagacggtctagtggactttgaagagttcgttagaatgatgtcgcgctag

SEQ ID NO: 110337 - DNA, 1026 bp, synthetic construct
  misc_feature 1..1026: note = Description of Artificial Sequence: Synthetic coding sequence
  source 1..1026: mol_type = other DNA
atgccctttccattcggcaagtcccacaagagtcccgcggacattgtgaagaatctgaaggagagcatggctgtgctggaaaagcaggacatttcggataaaaaggccgaaaaggcaaccgaggaggtatccaaaaacctggtcgcgatgaaagagatcttgtatggaacgaatgagaaggaacctcaaacggaggccgtggcccagcttgcgcaagagctgtacaacagtggcctattgagcactctggtggcagatttacagttgattgattttgaaggcaagaaagacgtagcacaaatctttaataatatcctgagacgccaaatcgggactaggactcccacagtagaatatatctgcacccagcaaaatattctcttcatgttgcttaagggctatgagagcccggagatcgcattaaattgcggcatcatgctgcgggagtgtatccgccacgagcctcttgcaaagatcatcctatggtccgagcagttttatgacttcttccggtacgtggagatgagcaccttcgatattgcctctgatgccttcgctaccttcaaggacctcctcacacgtcacaaactgctgtctgccgagtttctcgagcaacactacgaccgttttttttcggagtatgaaaagctgttgcactcggagaactatgtgacaaaaaggcagtccctgaagttgcttggtgagttattgttggatcgtcacaattttaccataatgacgaagtatatttctaaacctgaaaatctgaaactgatgatgaacctcctgcgtgacaagagcagaaacatacagttcgaagcctttcacgttttcaaggtgttcgtcgccaacccgaataagacacagccaatcctggacatacttctaaaaaaccaggccaaactgatcgagtttcttagtaaattccagaatgataggacggaggatgagcagttcaatgatgaaaaaacctaccttgtgaagcagatccgggatctaaagaggccagcacagcaggaagcttag

SEQ ID NO: 110338 - DNA, 1026 bp, synthetic construct
  misc_feature 1..1026: note = Description of Artificial Sequence: Synthetic coding sequence
  source 1..1026: mol_type = other DNA
atgcctttcccatttgggaagagccacaaaagtcccgctgacattgtgaagaacctgaaagagtccatggccgtactggagaagcaggatatttcagacaagaaggctgaaaaagcaacagaggaggtctcaaaaaatctggtggctatgaaggaaatactctatggaaccaatgagaaggagccccagacagaggcagtggcgcagcttgcccaggaactgtataacagcggactactgtctactctagtggccgacctgcagttgatcgacttcgaggggaagaaagatgtggcccaaatctttaacaacattcttcgaagacagatcggaacccgtacccctactgtggagtatatctgcacgcagcaaaatattttattcatgctgctgaaagggtacgagtccccagaaattgcgttgaattgtggtattatgctccgcgaatgtatacggcatgagcctctcgccaagataattctgtggagtgaacagttttatgatttttttcgatacgttgaaatgtccacatttgacatagcctctgacgcatttgcaaccttcaaagacctcctgactcgacacaagcttttgagtgcagagtttttggagcaacactacgacagattcttttccgaatacgaaaaactgctccatagtgagaactacgtgaccaagagacagagtttgaaacttctaggtgaactactcctggacagacacaattttacaatcatgactaaatacatctctaagccggagaacttgaagctgatgatgaatctgctgcgtgacaagtctaggaatatacagttcgaggcattccacgtgttcaaagtgtttgtcgcaaatccaaacaagactcaaccgatcctcgacatactgctgaaaaaccaggccaaactgattgagtttctgagtaaattccagaatgacagaactgaggacgaacagttcaatgatgaaaaaacatatttggtgaagcaaatccgagatctcaagcggcctgcacagcaggaggcatag

SEQ ID NO: 110339 - DNA, 1026 bp, synthetic construct
  misc_feature 1..1026: note = Description of Artificial Sequence: Synthetic coding sequence
  source 1..1026: mol_type = other DNA
atgcctttcccctttggcaagtcccacaagagtccggccgatatagtcaaaaatctgaaggaatctatggctgtgctcgagaagcaggacatctctgacaaaaaagccgaaaaggccactgaggaagtgagtaaaaacctggtggctatgaaggagatactctatggtactaacgaaaaggaaccacagactgaagctgtcgcgcagctggcgcaagaactgtacaatagtgggctcctcagtacacttgtggccgacttgcagttgatcgatttcgagggcaagaaggatgttgcgcaaatcttcaacaatatacttcgacgccagatcgggacccggacacccactgtggagtacatctgcactcaacaaaatatcctcttcatgctgcttaaaggctatgagagtccagaaatcgcacttaactgtggaatcatgctgagggaatgcattaggcatgagccactggccaaaataatattgtggagtgagcagttttatgattttttccgatacgtggagatgtcaacattcgatatagctagtgatgctttcgctacatttaaggatttacttacccggcacaaactgctgtcagcagaatttctggaacaacattatgaccgattctttagcgagtacgaaaaactgctgcattccgaaaactacgttaccaaacgccagtctttaaagctcctgggcgagcttttgctagatcgccacaacttcacgatcatgacaaaatacatctcgaaacccgagaacttgaagctgatgatgaacctcttgagagacaagtctcggaacattcagtttgaagctttccacgtattcaaggtgtttgtggctaatcctaacaaaactcaacccattttagacattctgctgaagaatcaagccaagctgattgagtttctctcaaaatttcagaacgatagaacagaagatgaacagttcaacgacgagaaaacgtacctggtgaaacagattcgtgatctcaaacggcccgcccagcaggaggcctag

SEQ ID NO: 110340 - DNA, 1014 bp, synthetic construct
  misc_feature 1..1014: note = Description of Artificial Sequence: Synthetic coding sequence
  source 1..1014: mol_type = other DNA
atgaaaaaaatgcccctgttcagtaagtcccacaagaaccctgcggaaattgtgaaaatcctaaaggataatctggccatcctggagaaacaggacaagaagaccgacaaggcctcagaggaagtatctaaaagtttgcaggccatgaaggagatcctgtgcgggaccaatgagaaggagcctcccacagaagctgtcgctcaactggctcaggagctttatagcagcggactgctcgtcactctcatcgccgaccttcagctcatcgatttcgagggcaaaaaggacgtgacccaaattttcaacaacatcctccgccgacagattggaactcgctccccgacggtcgaatatattagcgcccacccacatatcctttttatgctactcaagggctacgaggccccccagatcgctttacgttgtggcatcatgttacgcgaatgtatcaggcacgaacccctggccaagataattctgttctccaaccaattcagagatttcttcaaatacgtggaactatccaccttcgacatcgccagtgatgcctttgccaccttcaaagatctccttacaagacataaagttctcgtagccgattttctcgagcagaattatgacactatctttgaggattacgagaagctcctccagagcgaaaactacgtgaccaagcgacagtctctgaaacttttgggtgaactgatccttgaccgccacaacttcgctattatgacaaagtacattagcaagccggaaaacctgaaacttatgatgaaccttctccgcgataagtcaccgaacatccagtttgaagcctttcacgtgttcaaggtattcgtggcatcccctcacaaaacacagcccattgtagaaattctgctgaaaaatcagcccaagctcatcgaatttctctcaagcttccagaaagaaagaaccgatgatgagcaatttgctgatgagaaaaattatttgatcaagcagattagagatctgaaaaaaacagcaccatag

SEQ ID NO: 110341 - DNA, 1014 bp, synthetic construct
  misc_feature 1..1014: note = Description of Artificial Sequence: Synthetic coding sequence
  source 1..1014: mol_type = other DNA
atgaaaaagatgccactgtttagtaaatcccacaagaaccctgcagaaattgtcaaaatcctaaaggataacctggctattctggagaagcaggacaagaaaacagacaaggctagcgaggaagttagtaaatcgctgcaagcaatgaaagagatcctctgtggaacaaacgaaaaagagccccccactgaggctgtcgcccagctggcacaagaactgtactcctccggcctactagttacgttgattgctgacctccagctcatcgacttcgaagggaagaaggacgtgacccagatcttcaacaatatactccggcgccagatagggacaagaagcccgactgtggagtacatctctgctcatccccatatattgttcatgctccttaaaggatacgaggctccccaaatcgcgctgcgatgtgggattatgctacgggagtgcatccgtcacgagcccctagctaagattatcttgttcagtaatcaattcagagactttttcaaatacgtggagctaagcacattcgatatcgcttctgatgcatttgcgacatttaaggacctgctcactcgccacaaggtgctagtggccgatttcctggagcaaaactacgacactatttttgaggattatgagaagcttctgcagtctgagaactacgtcaccaagaggcagagcctgaagctcctgggcgaactcattttagacagacataattttgcgatcatgaccaaatacatctccaagccggagaaccttaagctcatgatgaaccttctgcgggacaagagcccaaatattcagtttgaggcttttcacgtgtttaaggttttcgtcgcatcgccccataagacccagccgattgttgaaattctattgaagaaccagccaaaactgatcgaatttctcagctccttccaaaaggaaaggaccgatgatgagcaattcgccgacgagaaaaattatctgattaagcagattcgagatctcaagaaaacggccccctag

SEQ ID NO: 110342 - DNA, 945 bp, synthetic construct
  misc_feature 1..945: note = Description of Artificial Sequence: Synthetic coding sequence
  source 1..945: mol_type = other DNA
atgcccctcttttccaagagtcacaagaatcccgcggagatcgtgaaaattctgaaggataatctggccatcttggagaagcaagacaaaaaaactgataaggccagcgaggaggtcagtaagagtctgcaagccatgaaagagatcttgtgcggaacaaacgaaaaggaaccccccactgaagccgtggctcaactagcccaggagctctactcttccggattactggtcacactgattgcagatctgcagttgattgactttgaaggtaagaaggatgtcactcaaatattcaacaacattctaaggcggcagattggaacgagaagtccgactgtagaatacatttctgcacatccccatattctgtttatgctgctgaaaggctatgaggcaccacaaattgctctgcgctgtggcatcatgctcagagaatgcattcgacacgagccactcgccaagataattcttttcagtaatcagttccgcgatttttttaaatatgtggaattgagcacctttgatatcgcttctgatgccttcgcaacattcaagatattcgaagactatgaaaagctgctgcagagcgagaactacgtgacaaaacgccagagccttaaacttctcggggaactgattctggatcggcacaatttcgcaattatgaccaagtacattagcaagcccgagaatctcaaactcatgatgaatctcctgagggataaatcacccaatatacagttcgaggcctttcacgtgttcaaggtttttgtggcgtccccacataagacacagcccatagtcgagattctgctcaaaaatcagcccaagttaattgagttcttaagtagctttcagaaggagagaacagacgacgaacagttcgccgacgaaaaaaactacctcatcaagcagatccgcgatctgaagaagacagccccttag

SEQ ID NO: 110343 - DNA, 282 bp, synthetic construct
  misc_feature 1..282: note = Description of Artificial Sequence: Synthetic coding sequence
  source 1..282: mol_type = other DNA
atgaaaaaaatgccattattctcgaaatctcacaagaaccctgcagagattgtaaaaatcctgaaggacaatcttgcaatcctggagaaacaggataagaaaactgataaggctagcgaggaagtaagtaaatccctgcaagcgatgaaggagatactgtgtgggacgaatgagaaagagccacccacagaggctgtagcacagcttgctcaagagttgtattcgagcgggttactcgtgacgctgattgctgacctacagttgattgacttcgaggtatag

SEQ ID NO: 110344 - DNA, 1014 bp, synthetic construct
  misc_feature 1..1014: note = Description of Artificial Sequence: Synthetic coding sequence
  source 1..1014: mol_type = other DNA
atgaagaaaatgccccttttctcaaagtcacacaagaaccccgctgaaattgtcaagatcttgaaggataatctcgccatcttagaaaagcaggacaaaaagaccgacaaggcatccgaggaagtgtctaagtctctgcaagcaatgaaggaaatcttgtgcgggacgaacgagaaggagccccctacagaagcggtggcccaactagcacaagaactgtacagttccggcctgctggtaactctaatcgcagacctgcagctgattgattttgagggaaagaaggatgtaacccagatttttaataatattttgaggaggcagattggaacccgaagcccaaccgtcgagtacatttccgcccatccacatatcctgtttatgctgttgaagggctatgaagctccccagatcgcgctcaggtgtgggatcatgctgagagagtgcattcgacatgaacctttggctaagatcattctattcagcaaccagtttcgggacttctttaagtatgtggagctctccacattcgacatcgcatcagatgcctttgccaccttcaaggatctgctgactaggcataaagtgcttgtggccgatttcctcgaacaaaattatgataccatcttcgaagattatgaaaagttgctgcagtctgaaaactacgtcacgaaacggcaatcccttaaactcctcggggagctaattctggatcggcataactttgctattatgacaaagtacatttccaaaccagagaacctcaagctgatgatgaatcttctccgagacaaaagccctaatatccaatttgaggccttccacgtgttcaaagtttttgttgcaagtccacataagacccaacctatcgttgagattttactaaaaaaccagccaaaattgattgagttcctctcatcattccagaaggaacgtacagacgacgaacagtttgccgatgaaaagaactatttgattaaacagatccgagatctcaagaagaccgcaccttag

SEQ ID NO: 110345 - DNA, 1014 bp, synthetic construct
  misc_feature 1..1014: note = Description of Artificial Sequence: Synthetic coding sequence
  source 1..1014: mol_type = other DNA
atgaagaaaatgcccctcttcagcaaatcccacaagaatcccgctgagattgtaaagatccttaaggacaatctagctattctcgaaaaacaagataagaagacagacaaagcatcagaggaagtcagcaagtcactccaggctatgaaggagatcctctgtgggacaaatgaaaaagagccacctaccgaagccgtcgcacagctggcccaggaactctactctagtgggctgctggtcacacttatcgcggacctgcaactgatcgattttgagggcaagaaggatgtgactcaaatctttaataatatattgcgccgccagatcggcacaaggagtcccacagtggagtacatttccgcccacccccacattctgtttatgctacttaagggatacgaagcacctcaaatcgccctgagatgcgggatcatgctccgagaatgtattcggcatgaacccttggcaaaaatcatactgttttcaaaccagttccgcgacttcttcaaatacgttgagctgtcaacgttcgacatcgcctcagacgcttttgccaccttcaaagacctcctgactcgtcataaagtcctcgtggcggactttctcgagcagaactacgatacgatctttgaggattacgagaagctgctccagagcgagaactacgttaccaagcggcagtccctcaagcttttaggtgaattgatcctggataggcacaacttcgcaattatgacgaaatatattagcaagcccgagaatttgaagctgatgatgaacctgctcagggacaaatcgccgaatatccagtttgaggccttccatgtttttaaagtgtttgtagcatccccgcacaaaactcagccaatcgttgagatcttgctgaagaaccagcccaaattaatcgagttcttgtcatcatttcaaaaagaaaggactgatgatgagcaatttgctgatgaaaagaactacctcatcaagcagatcagagatctgaaaaagaccgctccatag

SEQ ID NO: 110346 - DNA, 387 bp, synthetic construct
  misc_feature 1..387: note = Description of Artificial Sequence: Synthetic coding sequence
  source 1..387: mol_type = other DNA
atgaagaaaatgcccctcttctccaagtctcacaaaaacccggcagagatcgttaaaatcttaaaagacaacttagcaatactggaaaagcaggataagaagaccgataaagcttccgaggaggtgtccaaaagcctgcaggccatgaaggagatcctatgcgggaccaatgaaaaagagccacccacagaggcagtcgcgcaactggcccaggaattgtattctagcggcctgctggtgaccctgatcgccgatttgcaactgatcgattttgaaggtaaaaaagatgtgacccaaattttcaacaacattctgaggcgccaaataggcacaaggtctcccacagtagagtatatctcagcacaccctcacattctcttcatgtag

SEQ ID NO: 110347 - DNA, 567 bp, synthetic construct
  misc_feature 1..567: note = Description of Artificial Sequence: Synthetic coding sequence
  source 1..567: mol_type = other DNA
atgaaaaagatgcctttattcagcaagagtcataaaaatcctgcggaaattgtgaaaatcctgaaggacaacctggctatcctagaaaaacaggacaagaaaactgataaggccagtgaagaggtaagtaagtctctacaggccatgaaagaaatactctgcggtactaacgagaaagaacctccaaccgaagctgttgcacagctggctcaggaattatactccagcggcttgctggtcactctgatagccgacctgcagctcatcgatttcgagggaaaaaaggatgtgactcaaatattcaataacattttgagacgtcagattggaaccaggagtcctaccgtcgaatacatatctgcccatccccatatcctcttcatgctcctgaagggatacgaggcacctcagatcgctcttcgatgcggcatcatgcttcgcgaatgtattagacacgaacctctcgccaaaatcatcctgttctctaaccagtttcgagatttcttcaaatatgtggagctgagcacttttgatattgcctcggacgcatttgccacatttaagtag

SEQ ID NO: 110348 - DNA, 828 bp, synthetic construct
  misc_feature 1..828: note = Description of Artificial Sequence: Synthetic coding sequence
  source 1..828: mol_type = other DNA
atgaccacagaacaggcgcgtggacagcagggacccaacctggcgatcggacgacagaaaccaccagctggcgtcgttactcctaaatcagatgctgaagagcctccccttacaagaaaaaggtccaaaaaagagaggggacttcgcggaagccggaaaaggaccggaagttctggggaacagactgggccagaggctcccggatcttccaacaacccaccgtctactggcgagggccccgctggcgcacctcccgctagccccgggcctgccagctctagacagtcccaccggcaccggcctgacagcctgcatgatgctgcccagcgaacatatggtccattactgaatcgtgtcttcgggaaagacagggaattgggtcccgaggagctagacgaactccaggccgcctttgaggagtttgacacagaccgcgatggttatatctcacatcgtgaactaggggattgcatgcgcacacttggctacatgccaaccgagatggaacttctggaggtgtcccaacacatcaagatgcggatgggagggagggtggactttgaggagtttgttgaattgattggccctaagttgcgcgaggagaccgcacacatgttaggcgtaagggagctaagaatcgcgttcagagaatttgatcgagatcgtgacggcagaatcactgttgctgaactccgcgaagcagtgcctgccctcctgggggagccactagccggacccgaactggatgagatgctccgcgaggtggatctcaatggcgacggcactgtcgatttcgatgagttcgttatgatgctttctagacactag

SEQ ID NO: 110349 - DNA, 513 bp, synthetic construct
  misc_feature 1..513: note = Description of Artificial Sequence: Synthetic coding sequence
  source 1..513: mol_type = other DNA
atgaccgagccatggctggcgctcggcacaagctggacactgccgctgcaagaccgagagcttggaccagaggagttagatgagctgcaggcagctttcgaagagttcgacaccgatcgtgacggttacatttcccatagagaactcggtgactgcatgagaacactcgggtatatgccaacagaaatggagctgcttgaagtgtctcagcacattaaaatgagaatgggcggccgcgtggactttgaggaatttgtcgaactgatcgggcctaagttgagggaagagacagcccatatgttaggggttagggaactgcggatagcctttagagagtttgatagagatcgcgatggtcgcataacagtggccgaactgcgcgaggctgtgccagccttgctgggcgaacctctggctggccccgaactggacgagatgcttcgggaggtggatctcaatggcgatggtacggtggacttcgatgaatttgtgatgatgctttcgcgacactag

SEQ ID NO: 110350 - DNA, 522 bp, synthetic construct
  misc_feature 1..522: note = Description of Artificial Sequence: Synthetic coding sequence
  source 1..522: mol_type = other DNA
atgcagttcccgatgggcccagcctgtatttttcttcggaaaggcattgccgaaaagcagagggagcgccctttggggcaggatgagattgaagaactgagagaggccttcctcgaatttgacaaagatagagatgggttcatctcctgcaaagacttggggaatttgatgcggaccatgggatatatgcctacagagatggagttgatcgaattagggcaacagattaggatgaatctgggcggaagagtggacttcgatgacttcgtcgaattaatgacccctaagctactggctgagactgctggtatgatcggcgtacaggagatgagagatgcttttaaggagtttgacacgaacggcgatggagaaatcaccctggtggaattacagcaagcaatgcaacgtctgttaggcgagagacttacccctagggagatctcagaggtagtcagagaagccgacgttaacggcgacgggacagttgacttcgaggagtttgtgaaaatgatgagccgctag

SEQ ID NO: 110351 - DNA, 846 bp, synthetic construct
  misc_feature 1..846: note = Description of Artificial Sequence: Synthetic coding sequence
  source 1..846: mol_type = other DNA
atggaaaagagtacagacacggatgaggacaacgtgaccagaactgagtattctgataaaactacgcagtttccctccgtctacgctgtgccagggacagagcaaaccgaagctgtgggaggactcagtagcaaacccgccacgccaaaaactaccaccccgccttccagcccacctcctaccgctgtcagtccagaatttgcgtatgtgccagcggacccagcccaactcgccgctcagatgctggccatggcaacttccgagaggggacaaccacctccatgctccaacatgtggacactctactgcctcaccgacaaaaaccagcaggggcacccctcccccccgcccgcaccaggaccattccctcaggccacactgtatctaccaaatcccaaggaccctcagttccagcagcaccctcctaaggtcacatttcctacttacgtgatgggcgatacaaagaaaacaagcgccccccccttcatccttgttggcagcaatgtgcaagaggcccaaggctggaagccccttcctgggcacgccgtggtgtcccagagcgacgtgctccgatacgtggctatgcaagtgcctatagctgtgcctgccgacgagaagtatcagaagcacactctgtctcctcagaatgccaaccctccttcaggacaggatgtgccccggccaaagagccccgtgttcctctcagtcgcctttcctgttgaggacgtggctaaaaaatcctcgggttctggagacaagtgcgcgccgttcgggtcgtatgggatcgccggggaagtcacagtgactacagcgcacaagaggcgaaaagcggaaaccgaaaattag

SEQ ID NO: 110352 - DNA, 1188 bp, synthetic construct
  misc_feature 1..1188: note = Description of Artificial Sequence: Synthetic coding sequence
  source 1..1188: mol_type = other DNA
atggaaaagtccaccgataccgacgaggataacgtgacaagaaccgagtacagtgacaaaactactcagtttccatcagtgtacgccgtaccaggtaccgagcagaccgaagccgtgggggggctgtcatcgaagcccgccaccccaaaaacaacaacacccccatcttctccacctccaaccgccgtaagccccgagttcgcatacgtacccgccgacccagcacagcttgcagcgcaaatgcttggcaaagtgtcctccatccactcggatcagtccgatgttttgatggtcgatgtcgctacctccatgcccgtcgttattaaggaggttcccagctcagaggcagccgaagacgtaatggtggccgcccctctggtgtgtagtggcaaggtgctggaggtgcaggtagttaatcagacaagcgttcatgtggacctgggatctcagcccaaagagaacgaagcggagccatctactgcgagctccgtgccactccaggatgaacaagagcctccagcatacgatcaagcccccgaagtgaccctccaggctgacatcgaggtgatgagtacagtgcacatcagtagcgtgtataatgatgtccctgtgacagagggcgtagtgtatattgagcaattaccagagcagattgttatacctttcactgaccaagtagcttgcctcaaagaaaacgaacaatccaaggaaaacgaacagtctccaagagtgtcaccaaagagtgtggtggaaaagaccaccagcgggatgagcaagaagagtgtagagagtgttaaactggcacagctagaggagaacgctaagtattcctccgtttacatggaggcggaggccactgctcttctgagtgataccagcttgaaaggccagccagaggtcccagcacagctgttggatgcagagggggctataaagatcggctcggaaaagtcacttcatctggaagtggagatcaccagtattgtgtctgataataccggccaagaagaatccggcgagaacagcgtaccacaggagatggagggtaaaccagtgctaagcggcgaagctgccgaagcagtgcattccggtacctccgtgaagagcagcagcggccccttcccccccgcccctgaggggttgactgccccagaaatagagccagagggcgagagtacagccgaatag

SEQ ID NO: 110353 - DNA, 1140 bp, synthetic construct
  misc_feature 1..1140: note = Description of Artificial Sequence: Synthetic coding sequence
  source 1..1140: mol_type = other DNA
atgatcagttctaagccccgcttagttgttccctacgggttgaaaactctactggagggtatctccagagctgttctgaagacaaatcccagtaacattaatcagtttgctgcagcctactttcaagagctgacaatgtaccgtggaaacaccaccatggacatcaaggatctggtgaagcagttccatcaaatcaaggtggagaaatggtctgagggtacaacgccccaaaagaagttggagtgtctcaaggaacccggcaaaaccagcgttgagtccaaagtccctactcaaatggagaagtcgaccgacaccgatgaagacaatgttacaaggacggaatactctgacaagaccacccagtttccttctgtttatgccgttcctggcaccgaacaaactgaagcagtagggggcctttcctcaaagccagccacgcccaaaaccaccacacccccctcatcccctccacctacagctgtctctccagagtttgcctacgtgccagccgatccagcccagctagcagcacaaatgcttgccatggctacttccgagagggggcagccccctccatgcagcaacatgtggacactatactgcttgacggacaaaaatcagcaggggcatccatctccccccccagccccagggcccttccctcaggctacgctctacctccccaaccccaaggacccccagtttcagcagcaccccccaaaggtaaccttccccacctacgtcatgggagacaccaagaaaacttcggcccccccatttattctggttggtagcaacgtacaggaggctcagggctggaagccactgcccggtcacgcagtggttagccagagtgacgtgctcagatacgttgcaatgcaagtgcccattgccgtcccggccgacgagaagtaccagaagcacactctctcgccgcagaacgcgaaccctccatcgggccaggacgttccaaggccgaaatctcctgtgtttctttctgtggctttcccggtggaggacgtcgccaagaagtcaagcgggtccggcgacaaatgcgcccccttcggctcgtacggtatcgcgggtgaggtaactgtaaccacggctcacaaacgaagaaaggcggaaaccgagaactag

SEQ ID NO: 110354 - DNA, 1140 bp, synthetic construct
  misc_feature 1..1140: note = Description of Artificial Sequence: Synthetic coding sequence
  source 1..1140: mol_type = other DNA
atgatttctagtaagccaagactggtcgtcccttacggactaaaaaccctgctagaggggatcagcagagccgtcctgaaaaccaacccctctaacatcaaccagtttgccgctgcttattttcaggaactcacaatgtaccgcggaaatacaaccatggacattaaagaccttgtcaaacagttccaccagatcaaggtagagaagtggtccgaaggcaccactccgcagaagaagttagagtgcctgaaagagccaggtaagacctcagtggagtccaaagtgccaacacagatggagaaaagcaccgatacagatgaggataatgttactcgaacagaatactctgacaagaccacgcagttcccaagcgtttacgcagtgccaggtacggagcagaccgaggcagtgggcgggctttcctccaaaccagcaactccaaaaaccactacgcctccttcttctcctccccctacggccgttagccccgagtttgcctatgtgcccgccgaccccgcccaacttgctgcgcagatgctggcaatggctactagcgaaagaggtcaacctcccccatgttccaatatgtggacactgtactgtctgactgacaaaaaccagcagggccatccaagtccaccccccgctccaggcccattcccacaggcgaccctctatctgcccaaccccaaagatccacagttccagcagcaccccccaaaggttacttttcctacatacgtgatgggggatactaagaaaacatccgctccgccatttatccttgtcggatcaaacgtgcaagaagcacagggttggaagcctctcccagggcatgccgtcgtcagtcagagtgatgtgctgcggtacgtggccatgcaggtcccaatcgccgttccagcggacgagaagtatcaaaagcacactctgtccccgcagaacgccaatccaccctccgggcaggatgtaccccggccaaaatcccccgtcttcctctctgttgcattcccagtggaggacgtggcaaagaagagtagtggaagcggggataagtgcgctccctttggctcctacggtatcgcaggagaagtcaccgtgacgactgcgcacaagcggcggaaggcagagacagaaaattag

SEQ ID NO: 110355 - DNA, 666 bp, synthetic construct
  misc_feature 1..666: note = Description of Artificial Sequence: Synthetic coding sequence
  source 1..666: mol_type = other DNA
atgatttcctcaaaaccacggctagtagtgccttacggattgaagaccctcctggaaggcatcagccgagcagtgctcaaaaccaacccatccaacatcaatcagtttgccgcagcgtacttccaggagctcaccatgtacagaggaaacactactatggatattaaagacctggtgaaacaattccaccagatcaaggtggagaagtggtccgaaggaaccactcctcaaaagaagctggaatgtctgaaagaacccggtaaaacgagcgtagagtccaaggttcccactcagatggagaaatctactgacacggatgaggacaacgtgaccaggacggagtactctgataaaacaactcaattccccagcgtgtacgccgtacctgggaccgaacagaccgaggcggtgggcggcctgagctccaagcccgccacgccaaaaacaactactcctccttcctccccaccccccaccgccgtctctccagagtttgcctacgtgccagcggaccccgctcagctagccgctcagatgctagaagatgtggccaagaaatcatctggatctggcgacaagtgcgctcctttcggttcttatggaatagcgggagaagtcacagtcaccactgcacacaaacggcgcaaggcagaaacggagaactag

SEQ ID NO: 110356 - DNA, 1482 bp, synthetic construct
  misc_feature 1..1482: note = Description of Artificial Sequence: Synthetic coding sequence
  source 1..1482: mol_type = other DNA
atgatcagttcgaagccacgactcgtagtcccatatggtctaaagacacttctggaaggcatctctcgggctgtccttaagaccaatccatcgaatataaaccagtttgccgcagcttatttccaggagctgacaatgtatcgggggaatacaacgatggacataaaggacctcgtgaagcaatttcaccagatcaaggttgaaaagtggtcagagggcacaacgcctcaaaaaaagcttgagtgtctaaaagaacctggaaaaacgtctgtcgaatccaaagttccgacgcagatggagaaatccactgatactgatgaagacaatgtcacccggaccgaatattctgacaagacaacacaatttccatctgtctatgccgtccccggcaccgagcaaacagaagcagtgggaggattgagcagcaaaccggccacaccaaagactacgacaccacccagctccccaccgccaactgcagtgagtcccgagtttgcgtatgtgccggcagaccccgctcagttggccgcacagatgttaggtaaggtgagctcaatccactccgatcagtctgacgtgttaatggtggacgttgccactagtatgcctgtggttataaaggaggtcccctcttcagaggctgcagaggatgtgatggtggccgcccctctggtctgtagtggcaaagtgttagaagtccaggttgtcaatcagacctcagttcacgtagacctcgggagccagcctaaggagaatgaggctgagccttctaccgcatccagcgtgcccctgcaggacgagcaagagccccctgcctacgatcaggcccctgaagttaccctccaagcagacatagaagttatgagcaccgtccacatctcgtctgtttacaacgatgtgcccgtgactgagggagtcgtttatatcgaacagctgcccgagcagattgtgattcccttcacagatcaggttgcctgcctgaaggagaatgagcagtccaaagaaaacgagcagagtcctagagtctcccctaaatccgttgtagaaaaaaccactagtggcatgtcgaagaaatcggtagaatcagtgaagcttgcccagttggaagaaaacgctaagtactctagcgtgtacatggaagccgaggctacggccctgctgtccgatacttcactcaagggacagcctgaagtccccgcgcagctcttggatgccgagggcgccattaaaattgggagtgaaaagagcttgcacctggaagtcgagatcacatcgatcgtctccgacaacactggacaagaagaatccggcgaaaatagcgttccccaagagatggaaggcaagcccgtgttgtctggggaggcagcagaagctgtacattcaggtacttctgtcaaaagttcctccggaccatttccgcccgcccccgaagggcttactgctcccgaaatcgaaccggaaggggagtctacagctgagtag

SEQ ID NO: 110357 - DNA, 1428 bp, synthetic construct
  misc_feature 1..1428: note = Description of Artificial Sequence: Synthetic coding sequence
  source 1..1428: mol_type = other DNA
atgatatctagcaagcctcggcttgtggtcccttacggcctgaagaccctgctggaaggtattagccgggctgtgctcaagacaaacccttccaacattaatcagttcgccgccgcttatttccaagagcttactatgtaccgagtcgagaaatggtcggaggggaccactccacagaaaaagctggaatgcctgaaagaaccaggcaaaacgtctgtagagtctaaagtacccacacaaatggagaagtcaacagacactgacgaagataatgtgacaaggaccgagtactcagacaaaacaacccaatttccctccgtttatgctgttcctggtaccgagcagaccgaagcagtcggcggcttatcttctaagcccgccaccccaaaaacaacaacacctccgtcttcaccaccaccaaccgctgtctcccccgagttcgcctacgtgcccgctgatccggcacaattggccgcgcagatgttagggaaggtgagcagcatacattctgaccagtccgacgtgctaatggtggacgtggccaccagtatgcccgttgtgatcaaagaggtgccttcttccgaagccgcggaagacgtgatggtagctgctccactcgtgtgcagcggtaaagtgctggaggtgcaggtcgtcaaccagacgtcggtacacgtggatctggggtcccagcctaaggagaacgaagcggaaccgtctacagcttcctctgtgccccttcaggacgagcaggaacccccggcttacgatcaggccccagaggtcactctccaagcagacatagaggtgatgagcaccgtacatatttcttctgtctataacgacgttccagtaaccgagggtgtcgtgtacattgagcagctgccggagcaaattgtgataccattcactgaccaggtggcttgtctaaaggaaaatgaacagtcaaaggagaatgagcagtctccgcgagtgagtccaaaatcggtcgtggagaaaactacaagcggcatgtccaagaagtccgtcgaatcggtaaagttggcgcaattagaagagaatgccaaatactcctctgtgtatatggaagcggaagctaccgccctgcttagtgacacaagtctgaaggggcagccagaggttcccgcacagttactggacgctgagggcgctatcaaaattgggtctgagaaatctttacaccttgaggtcgagatcacctccatcgtgtcggataatactgggcaggaagaaagtggcgagaacagcgtcccacaggagatggagggaaagcctgtcctatctggcgaggctgcagaggcagtacacagcggtacatctgtgaagtcgagctccggccccttccctcctgcccctgagggactcaccgctcctgaaattgagcccgaaggcgaaagcacagccgagtag

SEQ ID NO: 110358 - DNA, 1452 bp, synthetic construct
  misc_feature 1..1452: note = Description of Artificial Sequence: Synthetic coding sequence
  source 1..1452: mol_type = other DNA
atgtctttttcagactctagcgctacgtttcttctgaatgagggcagtgcggatagctacacatcacgtccaagtttggactccgacgtgtcccttgaagaggatcgggagagcgcacggcgtgaggtggaatcacaggcccagcagcagctggagcgagccaaacataagcccgtggccttcgccgtgagaacgaacgttagttactgcggcgtactcgatgaagagtgccctgtgcagggttccggagtgaacttcgaggccaaggactttttgcatatcaaggaaaaatactcgaacgattggtggatcggacgcctcgttaaggaagggggtgatattgcctttattccttctccacagagactcgaaagtattcgcctgaagcaggagcagaaggcgcggagatccggcaatccctcatccctgagtgatatcgggaacagaagaagcccaccaccgtcactggccaagcagaaacaaaagcaggccgagcatgtccccccctatgatgtggtcccatctatgcggcccgtggtgttagtgggtccgtcccttaaggggtacgaagtgacagacatgatgcaaaaggcccttttcgactttctcaagcacagatttgatgggcggatttctatcacgagagtgactgccgacctttctctcgccaagcgcagtgtcctgaataatcccgggaagcgaacaataatcgagcgctctagcgctaggagtagcatcgcagaggttcaaagcgagattgaaagaatctttgaactggccaaaagcctccagttagtcgtactggacgccgatactatcaatcaccctgctcaactcgccaaaaccagtctggcacccattatcgtttttgttaaggtgtcgagcccgaaggtactgcagaggctgataagaagccgaggaaagtcccaaatgaaacacttgaccgttcagatgatggcctatgataaactggtccagtgcccccctgagagttttgacgtaattttagatgaaaaccaattggaggacgcctgcgaacacttggccgaatacctggaggtgtattggcgcgcaacccatcacccagcaccaggccccggccttctcgggccgcctagtgcgatcccgggacttcaaaaccaacagctcctaggggaacgaggcgaggagcattcccccctcgagcgagactctctgatgccaagcgacgaggcctctgagtcgtcacggcaggcttggacggggagcagccaacgtagctcgcggcacctggaggaggactatgccgatgcttatcaggatctgtatcagccacaccggcaacatacaagcggattgcctagtgcgaatggacacgacccccaggatcgcttgttagcccaggattccgaacataatcatagcgaccgcaactggcagcgaaatagaccctggcccaaagatagctactag

SEQ ID NO: 110359 - DNA, 1416 bp, synthetic construct
  misc_feature 1..1416: note = Description of Artificial Sequence: Synthetic coding sequence
  source 1..1416: mol_type = other DNA
atggaaggctctgccgattcttacacctcccgcccctccttagacagcgacgtgagcctagaagaggacagagaaagcgcccgccgagaagtagagagccaggcccagcagcagctagagcgcgcaaagcataaaccggtggctttcgccgtacggaccaacgtcagttactgcggcgtgctagacgaagaatgccccgtacaagggtccggagtgaatttcgaggctaaggatttcctgcacatcaaggaaaagtactccaatgattggtggattgggaggctcgtgaaagagggcggtgatattgcctttattccaagcccacagcgactggaaagcattcgtctaaaacaggagcaaaaggccagaaggtcaggaaatcccagctcactctcagatatcggaaataggcgctcccctccccccagcctcgccaagcagaaacagaaacaggccgaacacgtaccgccatatgacgtcgtcccttccatgcgcccagtggtactcgtgggaccgagcctaaaaggctacgaggttactgacatgatgcagaaagcactttttgactttctcaagcacaggtttgacgggagaatctccatcacaagagtgactgccgatctctccctcgcgaagcggtctgtccttaataaccccgggaaacggactattattgagagaagctctgctcggagttctatagctgaagtccaaagcgagattgagcgcatcttcgaactagccaagtccttacaactagtcgtcctggacgctgatacaattaaccatcccgcacaactcgccaagacctcgctggcccccatcatcgttttcgtgaaggtgtccagccccaaggtattgcagcggctgatcaggtcacgtgggaaatcccagatgaagcacctgacagtccagatgatggcttacgataaactagtacagtgccctcctgagagcttcgacgtgattcttgacgagaaccaactggaagacgcttgcgagcatctcgctgaatatctagaggtttactggcgagctacgcaccatccggctccagggccaggtcttctggggcctccaagtgcaataccgggcctacagaatcaacagttgttgggtgagagaggcgaagaacatagccccttggaaagagacagccttatgcccagtgatgaagcttcagaaagttccagacaagcatggacgggatcctcccaacgaagcagtcggcaccttgaagaagactatgccgacgcataccaggacctctaccagccacaccgccaacacaccagcggcttaccatccgctaacggccatgacccgcaggatcgtctgctggcacaggatagtgagcacaatcactccgatcggaattggcagaggaatcgcccttggccaaaggattcttattag

SEQ ID NO: 110360 - DNA, 1332 bp, synthetic construct
  misc_feature 1..1332: note = Description of Artificial Sequence: Synthetic coding sequence
  source 1..1332: mol_type = other DNA
atgtatgatgactcttacgttccaggcttcgaggatagcgaggctgggtcagccgactcctatactagcagaccaagccttgattccgatgtatcgctcgaagaggatcgcgagtcagccaggcgggaggtcgagagccaggcccagcaacaactggaaagggcgaagaaatacagtaacgattggtggatcggccggctggtgaaggaggggggcgatattgcgtttatcccatctcctcagaggctcgaatccataagactgaaacaggagcagaaggcacggcggtctggaaatccaagcagtctgagtgatatcggcaaccgaaggtcccccccaccctcactggcgaagcaaaagcagaagcaggccgagcacgtacccccttatgacgtagtgccaagcatgcgacctgtggttttagtggggccctccctgaagggatacgaagtgacggatatgatgcagaaggcgttgttcgactttctcaagcaccggttcgacggccgaatttctataactcgggtaaccgctgacctgtctctggccaaacggtcagtgttaaataatcctggaaagcggactatcatcgagcggagcagcgcaagaagttctatagcagaggtgcaatctgaaatcgagaggatttttgaactcgccaaaagtctgcaactcgtggtgctagatgctgataccatcaatcacccggcccaactggctaagacttccctggccccaataattgtgtttgtcaaggtcagcagtccaaaagttttacagaggcttattcggtctcggggaaaaagtcaaatgaaacatcttactgtgcagatgatggcctacgataagctggtgcagtgccctccagaatccttcgatgttatcttggatgagaatcagctggaagacgcgtgcgagcatctggccgagtatctggaagtgtactggcgggcaacccaccaccccgctccgggccccggactgttaggacctcctagcgctatacccggtttacaaaaccagcagcttctgggcgaacgcggagaagaacatagccccctggagagggactctttgatgccaagcgatgaggccagtgagtcttcacgtcaagcttggactggtagttcccaacggagttcaagacatctggaggaagactacgcggacgcctaccaagacctttatcaaccccatagacagcacacatccggcctcccctctgcgaacggtcacgatccgcaggaccggctgcttgcacaggattctgagcacaatcacagcgatcggaactggcagcgaaatcggccatggccaaaggactcatactag

SEQ ID NO: 110361 - DNA, 1377 bp, synthetic construct
  misc_feature 1..1377: note = Description of Artificial Sequence: Synthetic coding sequence
  source 1..1377: mol_type = other DNA
atgagcagctcttcctacgctaagaatggcacggctgatggccctcattccccgaccagccaggtggcccgaggaaccacaactaggaggagtcggttgaagcgatcagacgggtccacaacgagcacaagcttcatcctgcgacagggcagcgctgactcttacacaagtaggcccagtgatagtgatgtctccctcgaggaggatcgcgaagccatcaggcaggaacgggaacaacaagccgcgattcaactggagagagctaaaagtaagcccgttgccttcgctgtgaaaaccaacgtgagttactgcggcgctctcgatgaggacgtccctgtaccctcgaccgccatttctttcgatgccaaagacttcctgcacataaaagagaaatacaacaacgattggtggatagggaggcttgtgaaggaggggtgcgagattggtttcattcccagccctctgcgtttggagaacatccgtattcagcaggagcagaagagggggcgcttccatggtgggaaaagcagcggcaacagcagcagtagcttgggtgaaatggtgtcaggaacctttagagctaccccaacaagcacagccaagcagaagcaaaaggtgacagaacacattccaccctacgacgtcgttcctagcatgaggccagtagtgctcgttgggccatccctcaaaggctacgaagtgaccgacatgatgcagaaggctttgtttgattttcttaaacatagattcgacgggcgcataagtatcactagggtcactgcagacataagcttggcaaaacgtagtgtactcaataatccttccaagagagctataattgagcgttccaacacgcgctcctccttggccgaggtgcagtccgaaatcgagcgaatcttcgagctggcccgcagtttgcagcttgtggttctggacgctgacactattaatcacccagctcagctaataaagacttctcttgccccaatcatagttcacgttaaagtttccagtcctaaagtgctgcagagattgatcaagtcacgtggtaaaagtcagagtaaacatctcaatgttcagctggtcgccgccgacaagttggctcagtgcccgccctcccaacggatgagacactctaatcactccactgaaaacagccctatagagcgaagatccctgatgacgtctgatgagaattatcacaacgagcgggcccgcaagtctagaaacagactgtcttcctcaagccagcactctagagaccactatcccctcgttgaggaagactacccggattcataccaggacacatacaagccccatcgtaaccgaggcagtccagggggttattcccacgactctcggcaccgtctgtag

SEQ ID NO: 110362 - DNA, 1509 bp, synthetic construct
  misc_feature 1..1509: note = Description of Artificial Sequence: Synthetic coding sequence
  source 1..1509: mol_type = other DNA
atggacgtggttgcccgaggtacaactacgcgacggtcccgcctgaaaaggtctgacggcagcacaacgtccacatcctttattctccggcaaggatccgctgatagctataccagcagacccagtgatagcgacgtctctctggaagaggacagggaggctattagacaggagcgagaacaacaggctgccatccagcttgagagagctaaaagcaaacccgtcgcctttgcagtgaagaccaatgtgtcctactgcggagccctcgacgaagacgttcccgtgccctcaacagccatttcgttcgatgcaaaagacttcctacatatcaaggaaaagtataataacgattggtggatcggcaggttggtgaaagaggggtgcgaaattggatttataccctccccactccgactcgagaacataagaatccaacaagagcagaagcggggccgctttcatggcggtaagagttcaggcaattcgtccagcagcctcggggagatggtgtctggaacattccgtgcaaccccgacgtccaccgctaaacagaagcaaaaggtaactgagcatatccccccttacgacgtggtcccttccatgcgcccagttgttctcgtaggcccatctctcaagggctacgaggttactgacatgatgcaaaaggccctgtttgatttcctcaaacaccgcttcgatgggcggatatcgattactcgagtcactgcagacataagcctggccaaaagatccgttcttaacaacccttctaagagagccatcatcgaaagatcgaacacaagatcttccctcgccgaggtacaatcagaaatcgagagaatttttgaacttgctcggagcctgcaactcgtggtactggatgcggacaccattaaccaccccgctcagctgataaagacctccctcgcacccattatagtgcatgtcaaggtgtctagccctaaagtgctacagcggctgattaaatctagaggtaagtcgcagtctaaacacttgaacgttcaactcgttgccgcagacaaattggctcaatgccctcccgagatgtttgatgtgatcctggacgagaaccagctggaggatgcctgtgagcatctaggagagtacttggaggcctactggcgagcaacacataccacatccagcaccccaatgaccccgttgttagggcggaatctcggatctacagcattatcaccgtaccctactgcgatttcaggcctgcagtctcagcgcatgaggcactctaaccactcaactgaaaactctccgatcgagcggcggtcactaatgacaagcgacgagaactaccataatgaaagggcaaggaagtcccgcaatcggctctcctccagtagccagcatagcagggaccactaccctctcgtggaggaggattaccctgacagctaccaagacacttacaaacctcaccgcaaccgcggcagtccagggggatactcacatgactcaaggcaccgcctttag

SEQ ID NO: 110363 - DNA, 3438 bp, synthetic construct
  misc_feature 1..3438: note = Description of Artificial Sequence: Synthetic coding sequence
  source 1..3438: mol_type = other DNA
atggccgttcctgcacgcacgtgcggggccagcagaccagggcccgctaggaccgcccgaccgtggccagggtgcgggccacaccctggcccaggaacacggaggccaacgtctggaccgcctcgaccactgtggttgctccttcctctgctgccgttactcgcggcccccggagcctccgcgtatagctttcctcagcagcatacgatgcagcactgggcccggcggctcgagcaggaggtagacggcgttatgcgcatctttggcggcgtacaacagctgagagagatttataaagataatcgcaacctctttgaagttcaggagaacgaaccacagaaattagtggaaaaagttgctggcgacatagaaagcctgttggatcgcaaagtccaggctcttaaacgcctggccgatgctgcagagaatttccaaaaagcgcatcgctggcaagacaacatcaaggaagaggacatcgtgtattatgatgctaaagctgacgctgagctggacgaccccgagtccgaggatgtagagcgcggatctaaagcctcaaccttacggcttgactttattgaggatcccaactttaagaacaaagtcaattactcatacgctgcggtacaaattcccacagatatctataaaggaagtacagtaatcctgaacgaactcaactggacggaagctttagaaaacgtgttcatggagaataggaggcaggatccgacattgctctggcaggtgttcggtagcgctactggcgtgacacggtactatccagccaccccctggcgcgcccccaaaaagattgatctttatgatgtccgtcgaaggccttggtatatccaaggagcctcttcgcctaaagacatggtcatcatcgtagacgtgtccgggtcggtcagtgggttgacgctaaagcttatgaagacgagcgtgtgcgaaatgctcgatactctctccgacgatgattacgtaaacgttgcctcattcaacgagaaggcacagcctgtgtcatgttttacacacttggtgcaagctaatgttaggaataagaaggtgtttaaggaggcggtccagggaatggtcgctaaaggcaccacaggctacaaagcagggtttgagtacgcctttgatcagctccagaacagtaacattacaagagctaattgcaataaaatgataatgatgtttacagacggaggcgaggaccgcgtgcaggacgtgttcgagaagtataattggccgaatcggacggtgcgcgtctttaccttctccgtaggccaacacaactacgacgtgacaccactgcagtggatggcatgtgctaacaagggatactattttgagattccatctatcggtgcgatccgaattaatacccaggaataccttgatgtgctcgggcggcccatggtattggcaggaaaagaagctaaacaagtgcaatggaccaacgtgtatgaggacgcacttgggctaggtctggtagtcacaggcacactgcctgtctttaatctgactcaggatggccctggcgagaaaaaaaatcagttgatactcggagtgatgggcattgacgtggcgctgaacgacatcaagcgcctgacccctaattataccctgggcgcaaacgggtatgtctttgctatcgacctcaacggatatgttttgctgcaccctaacttgaaacctcaaacaaccaactttagggagcctgtgaccttagatttcctggatgccgaactggaggacgaaaacaaagaagaaattcggcggtcgatgatcgatggaaacaagggtcacaaacaaattcgcactctggtcaagtctttggacgagcgttatatcgatgaggtaactcgcaattacacttgggttcctatacggtccactaactacagcctgggcctggttctgccaccttactctaccttctatctgcaggccaatctaagcgatcagattctgcaggtgaaatattttgagttcctgctaccctcatccttcgagagcgaagggcacgtgttcattgccccacgcgagtattgcaaggacttgaacgcatccgataacaacaccgagtttctgaagaactttatagaacttatggagaaggtcacaccagattcaaaacagtgcaacaattttctgcttcacaatcttatcctggacacagggatcactcagcagctggttgaaagagtgtggcgggatcaggacctgaacacttacagcctactggccgtcttcgcagcaacggatggcggtattacccgagtcttcccgaacaaggcagccgaggactggaccgagaaccccgagcccttcaatgcttccttttatcgccgcagtctcgacaaccacggttacgtgtttaaaccacctcaccaggacgcgctgctccgaccactggagttggagaacgacactgtgggcatactggtctcgacagcagtagaactcagtctcggccgcaggacccttagacccgcggtggtgggggttaaactggacctggaggcttgggccgaaaaattcaaggtgctagcatctaacagaacccatcaagatcaaccgcagaagtgcggacccaattcccactgcgaaatggactgcgaagtcaataatgaggacctgctttgtgtactgattgacgacggtgggttcctcgtgctgtccaaccaaaaccaccagtgggaccaggttggacgctttttcagtgaagtcgatgctaacttgatgcttgctctatataataatagcttttacacccggaaggagagctacgactaccaagcagcctgtgcgccacaaccaccaggtaaccttggggccgcacctcgtggcgtatttgtccctaccgttgcggactttctcaatctggcatggtggacgtccgcagccgcttggtccctattccagcagctgttatacggccttatctaccactcatggtttcaggcggatccagctgaggctgaagggagtcctgagacacgtgagtcatcttgcgtgatgaaacagactcagtactattttggaagcgtgaacgcctcgtataacgccattattgattgcggaaattgttctagactcttccacgcacagcgtttaaccaacactaaccttctcttcgtagtcgccgagaaacctctctgctcccagtgcgaggccggaagactcctccagaaagagacacattgtccagcagatggacccgaacagtgcgaactagttcagaggccccgatatagacgcgggccacacatctgctttgattacaacgctacagaggataccagcgattgtggaagaggtgcatctttccccccttccctgggcgttctcgtaagtctgcagctgctcttgttgttggggctgccccccagaccacaaccccaagtgttggtacacgcaagcagaaggctgtag

SEQ ID NO: 110364 - DNA, 3231 bp, synthetic construct
  misc_feature 1..3231: note = Description of Artificial Sequence: Synthetic coding sequence
  source 1..3231: mol_type = other DNA
atgcaacattgggctaggagattggagcaggaagtcgatggggtaatgcgaatcttcggcggcgtacaacagcttagagaaatatataaagacaaccgcaaccttttcgaagttcaggagaatgaaccgcagaagctagtggaaaaggtggcaggtgatattgagtcattgttggaccggaaggtgcaggcattaaagcggctggccgatgccgccgaaaactttcaaaaagctcaccggtggcaggacaacatcaaggaggaagacatcgtgtactatgacgccaaagccgacgccgaactggacgatccagaatcagaggacgtggaaaggggatctaaagcctccacactgagactagactttatagaggaccccaactttaagaataaggtgaattactcgtatgctgccgtgcaaatcccaaccgatatttacaaggggtcgacagtcattctgaacgagttgaactggactgaggcccttgagaacgtctttatggaaaatagaaggcaggacccaacactcttatggcaggtcttcggatccgcgacaggtgttacgcgctattacccagctactccgtggagagccccgaaaaagatagacctatatgacgtccgccgaagaccctggtatatccaaggggcgtcctcacctaaagatatggttatcatcgtcgatgtaagcggctcagtgtctggcctcactttaaagctgatgaagacttctgtgtgtgaaatgctggacacactctcggatgatgactacgtgaatgtggcttccttcaacgagaaagcccagcctgtgtcctgctttacgcacctggtacaggctaacgtgcggaacaaaaaagtgtttaaggaggctgtacagggcatggtggcaaaaggtactactggctataaggcaggattcgagtacgcattcgaccagttgcaaaacagcaacattacgagagccaattgtaacaaaatgatcatgatgttcacagatgggggcgaggatagagtccaggacgtcttcgaaaagtataattggccgaataggaccgtaagagtctttaccttttctgttggccagcataattatgacgtgactccactgcagtggatggcttgcgctaacaagggttactatttcgagattcccagcatcggggctatccggatcaatacacaggagtacctcgacgtgctaggccgcccgatggtcttggccggaaaagaggctaagcaggtccaatggaccaatgtgtatgaggatgccctcggtctcgggctcgtggtaactggcacgctgccagtgttcaacctcactcaggatggtcctggcgagaagaaaaatcagctgattctaggtgttatgggcattgacgtggcattaaacgacattaagaggctgacgccaaattacacactgggggcgaatgggtatgtatttgccattgatcttaacggttatgtgctgctgcatcccaatcttaagcctcagactacgaatttccgagagcccgtgaccctggactttctggacgcagaattggaagacgagaataaggaggaaatccgtagatccatgatcgatggaaataaaggccataagcaaatccgaaccttggtgaagagtctggatgaaagatatatcgacgaggtgacccggaattacacgtgggttcccatccggtcaactaattattctctcggcctggtgttgccaccttattcaacgttttatttgcaagcgaacctctctgaccagatccttcaagtgaaatattttgagtttctgctgccttcaagctttgagtctgaaggacatgtgttcatagcccctcgtgagtactgtaaggatcttaatgctagcgacaacaatactgagttcctaaagaatttcattgaactaatggagaaggtcaccccagactctaaacagtgcaataacttcctgctgcacaatttgatcttggatactggtattacacagcaattggtggagcgcgtatggcgggaccaggatcttaacacctattccctgctagcagtgttcgccgctacggatggtgggattacacgagtgtttcctaataaggcggccgaggattggaccgaaaatcctgaaccgtttaacgcctcattttaccgaaggagcctggacaaccacggctacgtctttaaaccacctcaccaggacgccctgctgcgccctttagagctggagaatgacacagtcggtattctagtgtccacggctgttgagttgtccctgggccgcagaacactccggccggcggttgttggcgtcaagcttgacttagaagcctgggccgaaaagttcaaggtattggcatccaaccggacccaccaggaccaaccccaaaagtgtgggcccaactcccattgtgaaatggattgcgaggtaaataacgaggaccttttgtgcgtcttgattgacgacggcgggttcctggttctctcaaatcaaaatcaccagtgggaccaggttgggcggtttttctcagaggtagacgctaatctgatgcttgccctgtataacaacagcttctacacacgcaaggaatcttatgattaccaggccgcttgcgccccccaaccacctggaaaccttggagccgcccctcgaggggtgttcgtgccaaccgtggctgattttctgaacctcgcatggtggactagtgctgctgcatggagcttatttcagcagctgctatacgggttaatataccatagctggtttcaggcagacccagcagaggccgagggctctccggagacccgtgagagcagctgtgtaatgaagcaaacccagtactacttcgggtctgtgaatgccagctacaacgctatcatagattgtgggaactgtagccggctctttcatgcccagaggctgaccaatactaacctcctgttcgtggtggccgaaaagccgctgtgctcccaatgcgaggccggaaggctgctccagaaagagactcattgtccagctgacggccctgagcagtgtgagctcgtccagcgcccccggtaccgacggggtccacatatctgctttgactacaacgcaacagaggatacatccgattgtggacggggggcgtccttcccccccagcctcggtgtgcttgtcagcctccagctgctgctgcttcttggattaccacccaggccacagccacaggtgctggtacacgcaagccggcgactctag

SEQ ID NO: 110365 - DNA, 3441 bp, synthetic construct
  misc_feature 1..3441: note = Description of Artificial Sequence: Synthetic coding sequence
  source 1..3441: mol_type = other DNA
atggcagtgccagctcgcacttgcggagcttctcgtcctggccccgctagaactgcgagaccctggcccggctgcgggccgcacccgggccctggaacccggcggccgacctccggccccccacgccccctgtggctgctgctgcctctgctgccactcctcgctgctcccggtgccagtgcctactccttccctcaacagcacacaatgcagcactgggcacgaaggctcgagcaggaggttgatggcgttatgagaatttttggaggggtgcagcagcttcgggaaatatacaaagacaaccgaaatctcttcgaggtacaggagaacgagccccagaaactcgtagagaaagtggcaggcgacatcgagtctctcttggaccggaaagttcaggctctcaaaaggttggccgatgccgccgagaatttccaaaaagctcatcgctggcaggataatataaaagaagaggatattgtctattacgacgccaaagccgatgccgagctcgatgacccagagtccgaagatgtggagagaggttcaaaagcatccacccttcggctcgactttatcgaagacccaaattttaagaataaagtgaattactcttatgccgctgtgcagatccccacagatatatataaggggagcaccgtgatcttgaacgaactcaactggacagaagccctggagaatgtattcatggaaaatagacggcaagacccaacccttctttggcaggtatttgggtctgctacgggggtgactcgttactaccccgccaccccgtggagagcaccaaaaaaaatcgatctatatgacgttaggagacgcccgtggtacatacagggggccagctctccgaaggacatggttattatcgtcgatgtctcgggctctgtgagcggtttgacactgaagctgatgaaaacctccgtttgtgagatgctagatactcttagtgatgacgattacgttaatgtggcttcctttaatgagaaggcccaacctgtcagctgtttcacacacctggtccaggccaatgtgcgtaataagaaagtgtttaaggaggctgtccagggcatggtggccaaggggacaaccggctacaaggcagggttcgagtacgcctttgaccagctccaaaactctaatattacacgagctaactgcaacaaaatgataatgatgtttaccgacggcggcgaggaccgcgtccaagacgtgtttgagaagtacaattggcccaacagaacggtcagggtctttaccttcagtgtaggacagcataattatgatgttactcccctgcagtggatggcatgcgccaacaagggatactattttgagatcccgagcattggtgctattcgcattaacacacaggaatatttagatgtgctggggagacctatggtgctcgccggaaaggaagcgaaacaggtccagtggaccaatgtgtacgaagatgctttgggtctgggtctagtcgtgactggcaccctgcccgtctttaacctgactcaagatggtcccggagaaaagaaaaatcagctgatcctgggcgttatgggaatcgacgtcgcgctcaatgacattaaacggctgacccccaactatacattaggtgcaaatggctacgtctttgcaattgatctcaacggctatgtcctactgcatcctaaccttaagcctcagacgacaaacttcagggagccagtgactctggactttttggacgctgaactggaggacgaaaataaagaagagataaggcggagcatgatagatggcaacaaaggccacaaacagatcagaacactcgtcaaatcattagatgaaaggtacattgatgaggtaacccgcaattacacctgggtccctataaggagcactaactacagcctgggccttgtcctgcccccttattctaccttctacctccaagcaaacctctcggatcagattctccaggtaaaatactttgagtttttgcttccgtcaagttttgagagcgaaggacacgttttcatcgctcctagggagtattgcaaggacctaaatgcatctgataacaatacagagtttctaaagaattttatcgaactgatggagaaagttactcccgacagcaagcagtgcaacaatttcctgctgcataatttaatacttgataccggaatcactcagcagttggtcgagcgggtgtggcgagatcaggatctcaatacttacagtctactcgccgtcttcgctgcgactgacggaggcatcactcgggtctttcccaataaagctgccgaggactggacagaaaacccagagccttttaatgcctccttctataggagatccttggacaatcatggctatgtattcaaaccgccacaccaagacgccctgctgaggcctttggagttggagaatgacacggtgggaattctggtgtcgacagccgtcgagctatccctcgggaggaggactctaagaccggccgtggtcggagtcaaattggatctggaagcatgggctgaaaaatttaaggtgttagccagcaaccgcacgcaccaggatcagcctcaaaagtgtgggcctaactcccattgcgagatggattgtgaagttaacaatgaagacttattatgtgtgctgatcgacgatgggggtttcctcgtcttatcgaatcagaaccatcagtgggaccaggtgggccgctttttttctgaggtagatgctaatttaatgcttgccctctacaacaattccttctacacccgaaaggaatcttacgactaccaggctgcgtgtgcccctcagcccccaggaaacttgggagccgcgccacggggggtgttcgtaccaactgttgcggattttctcaacttagcctggtggacctccgccgccgcttggtctctgttccagcagttgctgtatgggctaatttaccactcttggttccaggctgatcctgccgaagccgaaggcagccccgaaacacgagagtccagttgtgtgatgaagcagactcagtattacttcggatcagtcaatgcctcatataatgctataatcgattgtgggaactgcagccgcctgtttcacgcacaacggttgactaatactaacctgttgttcgtcgtcgctgagaaacccttgtgctcacaatgtgaggccggtcgtctgttgcagaaggagacccactgctgtcccgccgacggtcccgagcaatgtgaacttgttcagagacctagatataggcgcggcccacatatttgttttgactacaatgcgactgaagatacgtctgactgcggcagaggggcaagctttccccctagcctgggggttctggtgagtctacagctcttgctgcttctgggcctgcctccccggccccagccccaggtgctggtgcatgcctcacggcggttgtag

SEQ ID NO: 110366 - DNA, 3432 bp, synthetic construct
  misc_feature 1..3432: note = Description of Artificial Sequence: Synthetic coding sequence
  source 1..3432: mol_type = other DNA
atggccgtgccggcccggacctgtggggcctccagacccgggcccgccagaaccgctcggccctggccgggatgcggaccacaccctggtccgggcaccaggcgaccgacatctggtccaccgagacccctctggctcttactgcccctcctaccactcctcgccgctcccggggcatccgcttattccttccctcaacaacataccatgcagcactgggcgcgaagactcgagcaagaagtggacggtgtaatgcgcatatttggtggtgtgcagcagctgagggaaatttacaaagataacaggaacctgtttgaagtccaagagaatgaaccccagaagttggtggagaaggtagcgggcgacattgaatctctgttggatcgaaaggtgcaggctcttaagcgactggccgacgccgccgaaaattttcagaaggcacaccgctggcaagataacatcaaagaggaagacatcgtgtattacgatgctaaagccgacgctgaattggatgaccctgagtctgaagacgtggagcgcggctccaaggcatccaccctgcggttggacttcatcgaggatccgaacttcaagaataaagtgaactacagctacgccgctgtccaaatccctaccgacatctacaaaggctctactgtgatactcaacgaattgaactggaccgaggctctcgagaatgtctttatggagaatcgcaggcaagatccaactctgctgtggcaggtctttggcagtgctaccggcgtgacccgctattacccagccacaccttggcgggccccaaagaaaatcgacctgtatgatgttaggcgacgcccctggtatattcaaggggcctcaagcccaaaggatatggtgataatcgtggatgtgagcggctctgtctcgggcctaaccttgaagctgatgaaaactagtgtctgcgagatgcttgatacgttgtcagacgatgattatgtgaatgtggcctctttcaatgaaaaagcgcaacctgtgagctgctttacacatctcgttcaggccaacgtgcgaaacaagaaagtgttcaaggaggccgtgcagggcatggttgccaagggtacgacgggatacaaagcagggtttgagtatgcgttcgatcagctgcagaacagcaacatcacacgcgccaattgcaataaaatgattatgatgtttaccgacggcggtgaagacagggtccaggacgtcttcgaaaaatacaattggcccaacaggaccgttcgcgtgtttacattttccgtcgggcagcataattatgacgtgacaccacttcagtggatggcttgtgctaacaaaggctactacttcgaaatcccttccattggagcaattagaataaatacacaggaatatctggatgtccttggtcggcccatggtcctggcaggtaaggaggcaaaacaggttcagtggaccaacgtctacgaagacgccctcgggttgggattagtggtaactggcaccctgccagtgtttaatctcactcaggacggacctggggaaaagaagaaccagctgatcctcggcgtgatgggcattgacgtcgcactgaacgacataaaaaggctgacccctaattatactctcggtgccaatggctacgtcttcgctattgatctgaatggatatgtgctcctgcaccccaatttgaagccgcagacaaccaacttccgcgaacctgtgacacttgattttcttgatgccgaacttgaggatgagaataaggaagagatccgccgatccatgattgacggaaacaaaggccacaagcaaattagaacactcgtgaagagcctagacgaacgatacatcgacgaggtgacccgcaactacacctgggtgcctattcggtctacgaactacagcttgggactggtactgcccccctacagtaccttctacctgcaggccaatctatctgatcagatcctccaagtgaagtactttgagttcttgttaccttcttcctttgagtcagaaggtcatgtcttcattgccccccgggagtattgtaaagatctcaatgcctccgataacaacacagagtttttgaaaaactttatcgagctaatggaaaaggtgacgcctgacagcaagcagtgtaacaacttcctccttcacaacttgatcctcgacactggcattactcagcagcttgtggagagggtgtggagagaccaggacttgaacacatacagtcttctggcggtcttcgcagctactgacggtggtatcacacgggtgttccctaataaggcagcagaggactggaccgaaaaccctgagccatttaatgcaagcttttatcggcgatcattggataatcacggatatgtgttcaagcccccacatcaagacgccctcttaaggcctctcgagttggaaaacgataccgtgggaattttggtgagtacagctgtggagctgtctctgggccggcggacactccggcccgcagtagtcggtgtcaagctagatctggaagcgtgggcagaaaagttcaaggtgctagcgagcaaccgaactcaccaggaccagccccagaaatgtggcccaaactcacactgtgagatggattgcgaagtcaataatgaagacttgctctgcgtgctaatcgacgatggaggttttctggtcctatccaaccagaatcaccagtgggaccaggtcggtcgcttcttctccgaagtggacgctaacctcatgttagctctgtacaataattcattctatacaaggaaggagagttatgactatcaggccgcatgcgcaccccagccgcctggtaatctcggtgccgctcctcggggcgtgtttgtgcccacagtggcagacttcctcaatctggcctggtggactagtgcagctgcctggtctctattccaacaactcttatacggtctgatataccacagctggtttcaagcggatccagcagaggccgaagggagccccgagacaagagaatcctcttgtgtgatgaaacagacgcaatactatttcgggtccgtgaacgcgagctataatgctatcatcgactgcgggaattgctctcgcttgtttcatgctcagcgcctgacaaacactaacctattgttcgttgtagctgagaaacccttatgctctcagtgtgaagccgggcgtctcttacagaaggagacccacagtgacgggcccgagcaatgcgagctcgtccagaggcctcgttatcgccgggggcctcatatttgctttgattacaatgctacagaggacacttcagattgcgggagaggcgcaagtttcccaccgtcattaggggtgctcgtctccctgcaactcctactcctgttggggctgcccccccgaccacaaccccaggtcctggtgcacgcaagccgtcgcttgtag

SEQ ID NO: 110367 - DNA, 3462 bp, synthetic construct
  misc_feature 1..3462: note = Description of Artificial Sequence: Synthetic coding sequence
  source 1..3462: mol_type = other DNA
atggctgtccctgcccgcacatgcggcgcaagccggcctggcccagcacggaccgcgcgaccctggcccggctgcggcccacacccaggcccaggaactcgtaggcccacctctggccctcccagacccttgtggctcctcttgcccctcctgcccctgctcgccgcgccaggagctagtgcttattcttttccacagcagcacacaatgcaacactgggcccgccgcctcgagcaagaagtggacggggtgatgcgtatattcggtggcgtgcaacagctccgcgaaatttataaggataaccggaatctgttcgaggtgcaggaaaatgagccccagaagctcgtggaaaaagtggcaggtgatatcgagtccctgcttgacaggaaggtccaagctctcaagcgtctagctgacgccgcagagaattttcagaaggcccataggtggcaggataatatcaaggaggaagacatcgtgtactacgacgccaaagctgacgctgagctagacgatcccgaatctgaggatgtggagcggggctccaaagcatccacccttcgcctggactttatagaggatcctaactttaaaaacaaagtaaactatagctacgctgcagtgcaaatccccacagacatctacaaaggatctactgtaatcctgaatgagctcaactggactgaagcattggagaacgttttcatggaaaacaggaggcaggatcctacccttttgtggcaggtcttcgggtccgcaacgggcgttactcggtattaccctgcgaccccgtggcgggcccccaagaagatagacttatacgacgtgaggcgtcgcccatggtacattcaaggagccagctctccaaaggacatggttattatcgtagatgtatcagggagtgtctcaggcctgactctgaagctcatgaaaacaagtgtgtgtgagatgctagatactctgtccgatgatgattatgtaaatgtcgcttcctttaacgaaaaggcacaacccgtcagctgcttcactcacctagtgcaggctaatgttaggaataaaaaggtgttcaaggaagccgtacaaggtatggtggccaagggcactaccgggtacaaggcggggtttgagtatgctttcgaccagctgcagaactccaacatcacacgagccaactgtaataagatgataatgatgttcacagatggcggtgaggatagggtgcaggacgtttttgagaaatacaactggcctaacaggactgtgagagtcttcacattcagtgtgggtcagcacaactacgatgtgacacctctgcagtggatggcatgcgccaacaaaggctattatttcgaaattcctagtatcggcgctatccggattaatacccaggaatatttggatgtgcttggaagacccatggtgctggctggcaaagaggccaaacaggtgcaatggactaatgtgtacgaagatgcccttggattaggccttgtggtgacaggtacactgcctgtttttaacctcacgcaggatggtccaggagagaagaagaatcagctaatcctgggagtaatggggatcgatgtcgcgctcaatgacataaagcgcctcactccaaattatactttaggtgccaacgggtatgtctttgcgatagacctgaacggctatgtcctgctgcatccgaatctgaagccacaaaccaccaattttagggagcccgttacactggatttcctggacgctgagttagaggacgagaataaggaggagataaggcggtcaatgatcgacggcaacaagggacacaaacagatccgcacgttggtcaagtctttggacgagagatacatcgatgaagtaacacgaaattacacttgggtgccaattcgctctaccaattattctctggggctcgtgctgccaccgtactccacgttctaccttcaggctaacctgagcgatcagatactccaggtcaagctgcccatttcaaaactcaaggatttcgagtttctcttgccgtctagctttgagagtgagggccatgtcttcatcgcccccagggagtactgcaaggacctgaatgcatcagacaacaatactgagttcttaaaaaattttattgaactgatggagaaggttactccagactctaaacagtgcaataacttcctgctgcacaatctgattttagataccggcataacccagcagctggttgaaagggtctggcgggatcaggatctgaacacatactccctgctcgctgtgtttgccgccactgacgggggaattacgagagttttccctaacaaagccgccgaggactggaccgagaacccagagccattcaacgccagcttttaccgccgctctctcgacaatcacggttacgttttcaagcccccacaccaggacgcccttctgcggcctctggaacttgagaacgataccgtaggaattcttgtcagcacagccgtcgagttgtcactgggtcggcgcacactacgccctgccgtcgtgggcgtcaaactggatttggaagcatgggccgagaaattcaaagtactggccagcaatcgaactcatcaggaccagccgcagaagtgcggcccgaattctcattgtgagatggattgcgaagtgaataacgaggacctgttatgtgtgctgatagacgacggcgggttcctggtgctctcaaatcagaatcatcagtgggaccaggtgggccgctttttcagcgaggtagacgcaaatttgatgctggctttatacaacaattctttttacactcggaaggagagttacgactaccaggcagcttgcgcccctcaaccccccggcaacctgggcgccgcacctaggggggtcttcgttcctactgttgcagacttcttgaatctggcatggtggacttctgctgccgcttggagcttgtttcagcagttactgtatggactcatttatcactcctggttccaggctgatccagccgaagccgaaggaagtcccgaaacgcgcgagtcatcatgcgtaatgaaacagactcagtattacttcgggtcagtcaatgccagttataatgccataatcgattgtggcaattgttctaggttgtttcacgctcagagactgaccaacactaatctgctattcgtagtggccgagaagccgctgtgcagccagtgtgaggccggtcgtctcctccagaaagaaacacattgctgcccagccgatggtccagaacagtgcgaattagtgcagcgacccaggtaccgacgagggcctcacatttgttttgattataacgctacggaggatacttcagactgtggcagaggtgcttcctttcccccatccctcggtgtgctggtctcacttcagcttttgctgctcctggggcttccacccagaccccagccccaagtgctcgtgcacgcatctagaaggctgtag

SEQ ID NO: 110368 - DNA, 3453 bp, synthetic construct
  misc_feature 1..3453: note = Description of Artificial Sequence: Synthetic coding sequence
  source 1..3453: mol_type = other DNA
atggccgtacccgcccggacatgcggagcaagcaggccaggtccagctcgaacagcacgaccctggcctgggtgcggtccacacccaggccccgggactaggcgccctacttctggacccccccgcccgctttggctgctgctaccactgctccccttgctcgccgctcctggggcttcagcatacagctttccacagcaacataccatgcagcactgggcccgccggctggaacaggaggtggatggggtgatgaggatctttggaggcgtccagcagctccgcgagatttacaaagacaacaggaatctgttcgaggtgcaagagaatgagcctcagaagctcgtggagaaggtggccggggacattgaatctctgcttgaccggaaagtgcaagcactgaagcgtctggcagatgcggcagagaatttccaaaaagcccatcgttggcaggacaatataaaagaggaggacattgtttattatgacgccaaagccgacgctgagctagacgaccccgagtctgaggacgtagagaggggcagcaaagctagcaccctgcggctggatttcatagaagacccgaatttcaagaacaaggtcaactactcctatgctgcagtacagattcccacggacatctacaaggggtctaccgtgatcctcaacgagctgaattggaccgaggcactggagaacgttttcatggaaaatcggcggcaggacccaaccctgctgtggcaggtgttcgggtcagcgacaggagttacccgctattatcctgccactccttggagagcaccgaagaagattgacctgtatgatgtacgaaggaggccatggtacatacagggtgcaagcagtcctaaagatatggtcatcatcgtcgatgttagtggtagcgtcagtggcttaaccctgaaactgatgaaaactagcgtatgcgaaatgctggacacgctgtcagacgatgactacgtgaatgtggcatcattcaatgagaaagcccagccagtcagctgttttactcacttggtgcaggccaatgttaggaacaagaaggtttttaaagaagccgtgcaagggatggtggcaaaaggaactactggttacaaagctggctttgagtacgccttcgaccaactccagaattccaacatcactagggctaactgcaataaaatgattatgatgttcaccgatggaggagaggatcgcgtgcaagacgtgtttgaaaaatacaattggccaaataggactgttcgggtattcacattttcagtcgggcaacacaactatgacgtaacccccctccaatggatggcgtgtgccaataaaggctactactttgagataccaagcatcggagctattagaatcaatacacaagagtacctggatgtgcttggacgccccatggtgctcgccggcaaagaggccaagcaggtgcagtggacgaacgtatatgaggacgcattaggactcgggttagtcgtcaccggcactctgcctgtgttcaacctcacgcaggatgggcccggcgagaagaaaaatcaactgatcctgggcgtgatgggcatcgacgtagcccttaatgacataaaaaggctcactccgaattacaccctcggcgccaatggttacgtgtttgctattgatctgaatggctatgtcctgcttcaccctaatctgaaacctcaaaccaccaattttagggagcctgttactcttgattttctggacgcagaactggaagacgaaaataaggaagaaattcggaggagtatgatcgacggtaacaaaggtcacaaacaaataaggacactagttaagagtctcgatgagcgttacatcgacgaggtaacccggaactacacgtgggtgccaatccgaagcactaactattccttgggacttgttttgcctccctattccaccttctacctccaggcaaatttaagcgaccaaattcttcaggtgaagctgcccatcagtaagcttaaagattttgagttcctattgccttccagcttcgaatccgaaggacacgtgttcattgctccaagggagtactgcaaagatctcaatgccagcgacaataacactgaattcctgaaaaactttattgagctgatggagaaggtgacaccagattcaaagcaatgtaacaattttctactacacaatctcattttggacactgggatcacacagcagctggtagagcgagtttggcgcgatcaggacctgaatacctactcattgctggctgtcttcgctgcaacagacggaggaataacgagagtctttcccaacaaggcagctgaggattggactgaaaatccagaaccttttaatgctagtttctaccggagaagcctcgataatcacggctacgttttcaaacccccacaccaggacgccttattacgtcccctggagcttgagaatgacaccgtggggatcctggtttctactgctgtggaactgtcactaggacgtaggactctgcgccccgcagtagtcggagtgaagctagacctggaggcttgggccgaaaaattcaaggttctcgcaagcaataggacgcaccaggatcagccccagaaatgtggaccaaatagccactgtgagatggactgcgaggtcaacaacgaggacctgctctgcgtgctgattgatgacggcgggttcctggtgctctccaatcagaaccaccaatgggaccaggtcggtagattctttagtgaggtagacgcaaatctgatgctcgccctctataacaattcgttttatacaagaaaagagtcatatgattatcaggccgcatgtgccccccagcctcctggaaatcttggagccgctccgcgaggcgtctttgttcccaccgtggcggacttcctgaatttggcttggtggacctctgcagctgcttggagtctgttccagcagctgctgtacggcttaatttatcacagctggtttcaagctgatccagccgaggccgaaggatctcccgagactcgcgaaagctcttgcgttatgaaacagactcagtactactttgggtcagtcaatgctagctataacgctattatcgattgtggcaattgttctagattgtttcatgcacaaagattgactaacaccaatctgcttttcgtcgtggctgaaaagccgctctgctcgcagtgcgaggctggcagactgctgcagaaggagactcactccgacgggcccgagcagtgtgagctggttcaaagaccccgctatcgccggggaccacacatctgtttcgattacaacgcaacggaagacacatccgattgtggcagaggagcttctttccccccttcactcggggtgctggtttctctccagctcctgcttctgcttggcctgcctccccgcccacaaccccaagtgctggtgcacgcgagcagacgcttatag

SEQ ID NO: 110369 - DNA, 3276 bp, synthetic construct
  misc_feature 1..3276: note = Description of Artificial Sequence: Synthetic coding sequence
  source 1..3276: mol_type = other DNA
atggccggtcctgggtccccacgacgggcctcccgcggggctagcgccttactggccgccgccctactttacgccgccctgggcgatgtcgtgcgctctgaacaacagatccccctgagcgttgtaaaactctgggctagtgcgttcggaggcgagattaaatctattgcagccaagtatagtggcagccaactgctgcagaaaaaatacaaagagtacgagaaagatgtggcgatcgaagagatcgacggcttgcaattagtcaagaaactggcaaagaatatggaagagatgttccacaagaaaagcgaagcggtgcggcgcctcgtggaagctgccgaagaggcccatctcaagcatgagttcgacgctgatcttcaatacgagtattttaacgctgtgcttatcaacgaacgagacaaggatggaaatttcctggaacttggaaaagagtttatcctcgcacctaatgaccatttcaataacctgccagtaaacatcagcttgagcgacgtacaggtgcccactaacatgtataataaagaccccgccatcgtgaacggagtttattggtcagagtccctgaacaaggtattcgtggataacttcgacagggaccctagtctgatctggcagtatttcggatcagctaagggctttttcaggcagtaccctggaatcaagtgggagcccgacgagaatggcgtaattgcctttgattgcagaaacagaaagtggtatatccaagcagcaacctcaccaaaggacgtggtgattctggtggatgtgagcggctctatgaaaggcctccggctcaccatcgccaagcagacggtgagtagtattctggataccctgggagatgacgacttctttaacattatagcctacaacgaagaattgcactatgtggaaccctgcttgaacggaactctcgtgcaagcggaccggacaaacaaagagcacttcagagagcatttggataagcttttcgccaagggcattgggatgctggatatcgcattgaacgaggcattcaatatcttaagcgattttaaccacactggacaagggtccatctgctcccaggccataatgttgataaccgatggcgcggtcgatacttatgatactatattcgccaaatacaattggcccgaccgcaaagtgagaattttcacttacctgatcggaagggaggccgcatttgccgataaccttaaatggatggcgtgtgcgaacaagggattcttcacacaaatcagcactctcgccgacgttcaggaaaacgttatggaatatttgcacgtgctttcgcggcctaaggtcattgaccaagagcacgacgtggtttggaccgaggcctacatagacagtacgctccctcaggcgcaaaagttgaccgatgaccagggcccagtgcttatgacaacggttgctatgcctgtgttttcaaaacagaatgagacaagatctaagggcatcctgcttggtgtggtcgggaccgacgtacccgtgaaggaactcctgaagactatccctaagtacaagctcggtattcacggttatgcattcgccatcactaacaacggctatatactcacccacccggagctgcggttgttgtatgaggagggtaagaaaagacgcaaaccaaactacagttccgtagacctgtctgaggtagagtgggaggaccgcgacgacgtcctgcgcaatgccatggtgaatagaaaaacaggcaagttctccatggaggtgaaaaagactgtcgacaaaggcaaacgcgttctcgtgatgaccaacgattactattacaccgatattaaaggtactcctttctccctgggggtggctctctcacggggtcatgggaagtatttctttcgtgggaatgttactatcgaggagggccttcacgacttggagcatcccgatgttagcttggccgacgagtggagttactgcaatactgacttgcacccagagcaccggcacctcagccagctggaggctataaaactatatctgaagggaaaagaacccctgctccagtgcgacaaggagctgattcaggaggtactgttcgacgccgttgtgagtgcccctattgaagcctattggacttcactcgccctgaacaaaagcgagaactctgataaaggtgttgaagttgccttcctgggcacacggaccggactttctagaattaacctgtttgtaggggccgagcagctaacaaatcaggatttcctcaaggcaggcgacaaggagaatatcttcaacgcggatcacttccccctctggtacagacgggccgctgagcagatccccgggagctttgtttacagtattccattttcgacaggaccggtcaataagtccaatgtggtgacggctagcacttctatccagctcctggacgagaggaagagcccagtggtcgctgcagttggaattcagatgaaactggagttcttccagaggaagttctggacagcttcaagacagtgcgcgagcttagacgggaagtgcagtatttcgtgtgatgacgaaacagtgaactgttatctgatcgacaacaacggctttatcctcgtgtctgaagattacacacagactggggacttctttggtgaaatcgaaggcgccgtgatgaacaaattactgaccatgggttctttcaagagaattactctgtacgattaccaggcaatgtgtcgtgccaacaaggagtcatccgacggcgcccacggcctgctcgatccctacaacgcattcttgtcagcagtgaagtggattatgaccgagctcgttctctttcttgttgagttcaacctgtgctcttggtggcattcagacatgacagccaaagctcagaagttaaagcagaccctcgaaccctgtgacactgagtacccagccttcgtgagcgaacggaccatcaaggagacaaccgggaacatagcctgtgaggactgtagtaagagctttgttattcagcagattccttcatccaatctgttcatggtcgtggtcgacagcagctgcctgtgcgagtccgtggcccctatcaccatggctcctatcgaaattagatacaacgaaagtctgaagtgcgagcggttaaaagctcagaagatccgccgccggccagagtcatgccacggcttccaccccgaggaaaatgcaagggagtgtggtggcgctccgagcctgcaggcacaaaccgtactgctcttacttcctttgctcctgatgttgttttccaggtag

SEQ ID NO: 110370 - DNA, 2997 bp, synthetic construct
  misc_feature 1..2997: note = Description of Artificial Sequence: Synthetic coding sequence
  source 1..2997: mol_type = other DNA
atgggtgagctccggcaggagcggtcaaccgctctgcagcgcttagttgaggccgctgaagaggcccacctcaagcatgagttcgacgctgatctgcagtatgagtactttaacgccgtgctgattaatgagagagacaaggacgggaactttctggaacttggtaaggaatttattcttgctcccaacgatcactttaataatcttcccgtcaacatatctttgagcgacgtgcaggtccctaccaatatgtataataaagaccccgccattgtcaacggcgtctattggtccgagtcactgaataaggtctttgtggataactttgaccgggaccccagcctcatttggcagtactttgggagcgccaaaggcttcttccggcaataccctggaattaaatgggagcccgatgagaatggcgtgattgcgttcgattgccgaaatcggaaatggtacatacaggcagccacaagcccaaaggacgtggtgatcctcgtcgatgtgtctgggagtatgaagggcttacggttgaccatagcgaaacagactgtatccagcattctagacacccttggcgacgacgatttctttaacatcatagcttataatgaggaattgcactacgtagagccgtgccttaatggcacgcttgtgcaggccgacagaaccaacaaggagcacttcagggaacacttggacaagctgtttgccaaaggcatcgggatgttagatattgctctgaacgaggcattcaacatattgtctgatttcaatcataccgggcagggttctatctgtagccaagccattatgcttatcaccgatggagctgtcgatacctacgacacaatcttcgctaaatacaactggcccgacaggaaggtacgaattttcacttacctgatcggtagggaagcggccttcgcagataatttaaagtggatggcctgtgcaaacaaagggttctttacacagattagtactctcgctgatgtgcaggaaaacgttatggaatacttacacgtgttgtctcgacccaaggtgatagaccaagagcatgacgtggtttggacagaagcatacatcgatagcaccgtgtctcaggccgaacagctgacggacgaccagggcccagtcttgatgaccaccgtggctatgcccgtcttcagcaaacagaacgagactagaagcaagggcatcctgcttggtgtggtcggtacggatgtcccagttaaggaactcctgaagactatcccgaagtacaaacttggaattcatggatacgccttcgctattactaacaacggatatatcttaactcaccctgaacttcggctgttatatgaagaaggcaaaaaaaggcggaagcctaattactcatccgttgacctctccgaagtggaatgggaggaccgcgatgacgtgctccgaaacgccatggtgaataggaaaaccggtaagttctctatggaggttaaaaaaaccgtcgacaagggcaagcgagttctcgtgatgacaaatgattactactatacggatattaaaggcacgcccttcagcctgggcgtggccttgagtagaggccacggcaagtatttctttcgaggcaatgtgaccatagaggagggcctgcacgatttagagcacccagatgtgagcctggcagacgaatggtcctattgcaacacagatttgcatccagagcataggcaccttagccagcttgaagccatcaagctctaccttaaaggcaaggagccactgttacagtgtgacaaagaactgatccaggaagttctattcgatgcagtcgtctctgctcccatagaggcatattggaccagcctggctctgaataagagtgaaaatagtgacaaaggcgtagaagtggcctttctgggaacgaggactgggctttcccgcattaatcttttcgtcggcgctgaacagctcaccaatcaggacttcctgaaagcaggcgacaaagagaatattttcaacgctgaccactttccgctttggtatagacgagctgcagagcagattcctggcagcttcgtgtactccatccccttttccactgggccggtgaataagtctaacgtcgtcacagcctctaccagcatacaactgctggacgaacggaagtcgcctgtggtcgcggcggttgggatccagatgaaactcgaattctttcagagaaagttttggacagctagcagacaatgcgcctcactggacggcaagtgctctatcagttgcgacgatgagaccgtcaactgttatctaattgataacaatgggttcatcctggtgtccgaagattatacgcagacgggagacttcttcggcgagattgaaggagcagttatgaataaactgcttaccatgggaagcttcaagagaattactttgtatgattaccaagctatgtgtcgtgcgaacaaggaatcatcagacggcgcccatggtcttctcgacccatacaacgcttttctctctgcggttaaatggatcatgactgaactagtgctgtttctcgtagagttcaacttgtgcagttggtggcactcggacatgacagcgaaagctcagaaattaaaacagactctggaaccttgcgacacagaatacccagcgttcgtgtctgaaaggacaattaaggagacaacgggaaacatagcatgtgaggactgcagcaagtctttcgtcattcagcagatcccctcgagcaacctgttcatggtggtggtggattcatcatgcctgtgtgagagtgtggctccaatcacgatggcaccaattgagatttctcaacacaacgagtcactgaaatgcgagcgtcttaaggcccagaaaatccgtcgacgaccagagagctgtcacggctttcaccctgaggaaaatgcacgcgaatgcggaggggcaccaagtcttcaggcccaaaccgtccttctccttctacctttgttattgatgctgttttcccgttag

SEQ ID NO: 110371 - DNA, 3276 bp, synthetic construct
  misc_feature 1..3276: note = Description of Artificial Sequence: Synthetic coding sequence
  source 1..3276: mol_type = other DNA
atggctggaccaggcagccctcggagagcgtctcgaggagcttccgctcttctagcagccgctctgctgtatgcagccctgggcgatgtggtgagatctgaacaacagatacccctaagcgtggtgaaactctgggctagcgcctttggtggcgaaatcaaatctatcgcagccaagtacagtggatcgcagctgttgcaaaagaaatataaggagtacgaaaaggacgtagcaatcgaggagatcgatggcttgcagttagtgaaaaagctggccaaaaacatggaggaaatgtttcataaaaaatccgaggccgttagacggctggtggaggccgccgaggaagcacacttaaagcatgagttcgatgcagacctccagtacgagtatttcaatgccgtactcatcaacgagcgggacaaggatggaaattttctcgagctcggaaaggagtttatcctagcccccaacgatcattttaataatctgccagtgaacatcagcctgtcagacgttcaagtaccaacgaacatgtataacaaagacccggcgatcgtgaatggcgtctactggtctgagagtctaaataaagtgtttgtagacaatttcgaccgagacccaagtctgatttggcagtacttcgggtctgctaagggattttttcggcaatatccaggtatcaaatgggaacccgatgagaacggagtcatagcatttgactgtagaaaccgaaaatggtatatacaggctgccacttctcctaaggacgtcgtcatcttagtggacgtcagtggctctatgaagggcctcagacttaccatagcaaagcaaactgtatccagcattctggatacactcggcgatgatgacttcttcaacataattgcctacaatgaggaactgcactacgtcgagccatgtctgaacggtactctcgtacaagccgatcgtacgaacaaagaacactttcgcgaacacctggataaactgttcgccaagggcatcgggatgctggatatagcgctgaacgaggcgttcaatatactgtccgattttaatcatactggacagggctctatctgctcccaggctataatgcttatcacggatggcgcggtggacacttacgataccattttcgcaaaatacaattggcctgaccgtaaggttcgtatttttacctatctgattgggagagaggccgctttcgccgataatctgaagtggatggcctgcgccaataagggcttttttactcagatttctactcttgccgatgtccaagagaacgtcatggagtacctgcacgtgttaagcagaccaaaggttattgaccaggaacacgacgtggtgtggaccgaagcctacatcgatagcaccctgcctcaggctcaaaagctcaccgatgaccaggggcccgttctgatgacaaccgtcgctatgccagtgttttcaaagcaaaacgagacacgctccaaagggatacttctgggggtggtgggaaccgatgtgcctgtgaaggagttactgaagaccatccctaaatacaagctgggcattcatggctacgcatttgccatcaccaataacggatacattctgactcaccccgagttgaggctcctctacgaagaaggaaaaaaaaggcggaaacctaactattcatccgtggacctctccgaggtggaatgggaggaccgcgatgatgtgctcagaaacgccatggtcaatcgcaagacgggaaagtttagcatggaagtgaagaaaactgtagataagggtaagcgggttcttgtcatgaccaatgattattattacactgacattaaaggcacaccttttagtctaggagtggcgctctcacgcggtcacgggaagtatttctttaggggtaacgttacaatcgaggagggactccacgatttggagcatccagatgtgagcctagccgacgaatggtcttattgtaacacggatctgcatccggaacataggcacctttcacaactggaggctatcaaactctatcttaaaggcaaagagcctctattacagtgcgataaagaactcattcaggaagtactgttcgatgccgtggtgagcgcgccgattgaagcctattggacttctctggccctgaataagtccgagaactctgacaaaggagtggaggtcgcatttttggggactcgcacaggcctgagtagaattaacctgttcgttggcgccgaacagctcactaaccaggatttcttgaaggccggtgataaggaaaatatctttaatgcagaccattttccgctgtggtaccggagagccgctgagcaaatacccggatcattcgtctacagtataccattttccaccggtccagtcaacaagtccaacgtcgtcacagctagcacttctatccagctgctggacgagagaaagagccccgttgtggccgctgtgggaatccagatgaagctggagtttttccagcgcaagttttggacagcatctcggcagtgtgcctcgctcgacggaaagtgtagcattagttgtgatgacgagacggtcaattgttatttaatagacaacaacggctttatattggtgagcgaagactacacacagactggggacttctttggagagatcgagggcgcagtgatgaacaagctcctgaccatgggttcctttaaacgcattaccttatatgattatcaagctatgtgcagagctaacaaagaatccagcgacggagcacacggcttgcttgatccctataacgcatttctctcggccgtgaaatggattatgactgagctcgtccttttcctggtggagtttaacctctgcagctggtggcatagcgacatgacagctaaagcccagaaattgaagcagacactggagccatgcgataccgagtatcccgcttttgtctcagaacgcacgattaaggaaaccacaggcaatattgcctgcgaggattgctccaagagcttcgttatccagcaaattcctagttccaatctgttcatggtggtggtcgatagttcttgtctctgcgagtccgtggcccctattacaatggcaccaatagagattcgatacaatgaatccctgaaatgcgaaaggctgaaggcccaaaagatcagaagacgacccgagtcctgtcatggattccaccccgaagaaaacgctcgggaatgtggtggggctccaagcctccaagctcagaccgtcttgcttctgttaccactgcttctgatgttgtttagccgttag

SEQ ID NO: 110372 - DNA, 1557 bp, synthetic construct
  misc_feature 1..1557: note = Description of Artificial Sequence: Synthetic coding sequence
  source 1..1557: mol_type = other DNA
gagatcctatttcaccagatgcagaaccagatcaagcgccttgtagaagccgccgaggaggcccaccttaaacacgaattcgatgcagacctgcagtacgagtatttcaacgccgtcttgatcaacgaacgtgacaaggatggcaacttcctggaactagggaaggagtttatcctggccccgaatgatcatttcaacaatctgccagtaaatatcagcctgtctgacgtgcaggtccccaccaatatgtataataaggaccctgcaatcgttaacggtgtctactggagtgagagcctgaacaaagttttcgtggacaattttgacagggacccttcgctgatctggcagtattttgggtctgccaagggattttttcgccagtaccccggcattaaatgggaaccggacgagaacggagttattgcatttgattgtcgcaatagaaagtggtatattcaggcagcaacctcccctaaggacgtagtaatcctcgttgacgtgagcggctctatgaaaggcctgcgattgacgatcgctaagcagaccgtatcgagcatcctcgacaccttgggcgatgacgattttttcaatattattgcttataacgaggagctgcattatgtagaaccatgtctcaatgggacattggtgcaggccgaccgtacaaacaaggagcacttccgtgagcatttggataagctcttcgccaaagggataggaatgctcgacattgccctgaacgaagcgttcaatatcctgagcgattttaatcataccggtcaaggctcgatttgctcccaggcgattatgctgattaccgacggcgcggtggatacctacgatacaattttcgctaagtacaattggcctgacagaaaagtgcgcatctttacttacttgatcggacgcgaagctgcatttgcagataacctcaaatggatggcatgcgccaataaggggtttttcacgcagatcagcaccctggcggacgtgcaagagaacgtgatggagtatctgcacgtcttgtccagaccaaaagtgatagatcaggagcacgacgtggtctggactgaggcctatatcgactctaccctgaccgacgaccagggccctgttctcatgacgactgtggctatgcctgtgttctctaagcagaacgaaacacggtccaaggggattctgttaggcgttgttggaaccgatgtacccgtcaaagagctcctgaagactattccaaaatataagctgggtatacacgggtacgcgtttgcaataacgaacaacggttacatactgactcaccccgagctgcgcctgttgtacgaggaaggaaagaagaggcgcaaaccaaattacagcagcgtggacctcagtgaggtggaatgggaggatcgggacgacgttctgcgaaacgccatggtaaaccgcaaaactggcaaatttagtatggaggtaaaaaagaccgtagacaaaggatttcggtgtggggcttttcaacgatcatgggagatctttcttccgcgggagtgcaaccaccggagaagacccgcctag

SEQ ID NO: 110373 - DNA, 3276 bp, synthetic construct
  misc_feature 1..3276: note = Description of Artificial Sequence: Synthetic coding sequence
  source 1..3276: mol_type = other DNA
atggccggccccgggagtcccagacgagcgagcagaggggcaagtgcgctcttggcagccgccttattgtacgccgccttaggcgatgtagtccgaagtgagcagcaaattcccctgagcgtagtgaaactctgggcgtcagctttcggcggcgagatcaagtcaatagctgcaaaatatagtggcagccagctgcttcaaaagaagtacaaagaatatgaaaaagatgtggccattgaggaaatcgatggcttgcagctggtcaaaaagctcgccaagaacatggaggagatgtttcataagaaatcagaagccgtcagacgactcgttgaggctgccgaagaggcccacctgaagcacgagttcgacgcagacctgcagtacgaatatttcaatgccgtacttatcaatgagagagacaaggatggcaactttcttgagttgggtaaagagtttatcctcgcccctaacgaccactttaataacctcccagtgaacatttcactgtctgatgtccaagtaccaactaacatgtataataaggacccagccatcgtgaatggagtctactggtcagagtcgctgaataaggtttttgtggataatttcgatagagacccatcacttatatggcagtatttcggctccgccaagggtttcttcaggcaatatcccggcattaagtgggagcccgacgagaacggcgtgatcgctttcgattgtcggaaccggaagtggtacattcaggccgccaccagtcctaaggacgtagtcattcttgttgatgtaagcggatcaatgaaggggcttcgactcactattgcaaagcagactgtgtcctccatcctggacacgctgggcgatgacgatttcttcaatattattgcctacaacgaggaactgcactatgtagagccatgcctcaacggaaccctggtccaggccgatcggactaataaggagcatttcagagagcacctggacaaactctttgctaaagggattggaatgctagatatcgcactgaatgaagcattcaacatactttcagatttcaaccacaccggtcagggatccatctgcagtcaggctattatgttgatcaccgatggggcggtggatacctacgatactatatttgcaaagtacaactggccggatcgtaaggtaaggatcttcacttatttgatcggaagagaggcagctttcgctgataaccttaaatggatggcgtgcgccaataagggcttctttacacagatttccaccctggcagacgtgcaagagaatgtgatggaatatcttcacgtgctgtctaggcccaaagtcatagatcaggagcacgatgtggtctggacggaagcctacatcgacagcacactaccccaagcgcagaagctgactgacgaccagggccccgtacttatgactactgttgcaatgcctgtgttttccaaacagaatgagacacggagtaagggcattctcctcggtgtggtgggcacagatgtgcccgtcaaggagttgctcaagaccattcccaaatataagctgggcatacacggatacgcatttgccataactaataatggttatatcttgacccatccggagcttaggctactgtacgaggagggcaaaaagcgacgcaagcctaactacagttccgtggacctgagcgaagtagagtgggaagaccgcgacgatgtgctgcgtaacgcaatggttaacagaaaaactgggaaatttagcatggaggtcaaaaaaaccgtcgataagggtaagagggttctcgtcatgaccaacgattactactacacagacatcaaggggacccccttctctctcggagttgctctgagcagagggcacggaaaatacttttttcgtgggaatgtgactatagaagaggggctccatgatctggaacacccagatgtcagcctggcagacgaatggtcctactgtaatacagacctccatcccgaacatcgccacctgtcgcagctcgaagccatcaagttgtatttaaagggcaaggaacctctgctgcagtgcgacaaggaattgatccaggaagtgctgttcgatgccgtggtgtctgcccccattgaggcctactggacttctctcgcactgaataagtctgagaattccgataaaggtgttgaagtcgcgtttctggggaccagaacaggattatccagaatcaatctgtttgtgggggccgagcaactgacaaaccaagactttctgaaggcaggtgataaggagaacattttcaatgcggatcacttcccactctggtatcgccgagcagccgagcagattccagggtcattcgtgtatagcattcctttttccactggccccgttaacaagagtaacgtggtcacagccagcacatctatccagctgctcgacgagcggaaatctccagttgtggccgccgtagggatacaaatgaagctggagttctttcaacggaaattctggaccgcctctagacagtgtgctagcctcgacggcaagtgctcaataagctgtgacgatgagactgtgaattgctatttaatcgataacaacgggtttatcctcgtgtctgaggactatacgcagactggggacttctttggggagattgaaggcgccgttatgaacaagctgctgaccatgggctcattcaaacgtatcaccctgtacgattatcaagcaatgtgtagggccaataaagaaagcagcgatggcgcccatgggctgctggatccttataacgctttcctctcagccgtgaagtggatcatgaccgaactcgtgctgttcctcgtcgaatttaatctgtgttcatggtggcattcggacatgacggccaaagcccagaaattaaagcagactctcgaaccatgtgatactgagtacccagcctttgtgagcgaaagaacgataaaagagaccactggaaatatagcgtgcgaagattgcagtaagtcttttgtgatccaacagataccttcatctaatctgtttatggtggtggttgattctagttgtctgtgcgaatcagtggccccaattaccatggccccaatcgaaatacgctacaatgagtccttgaaatgcgagcgtctaaaagcgcagaagattagaaggcggcccgaatcctgtcacggttttcaccccgaggaaaacgcacgggaatgtgggggagccccaagtttgcaggcacagacagtactcctgctgcttcccctcctcctgatgctgttcagtcgctag

SEQ ID NO: 110374 - DNA, 1578 bp, synthetic construct
  misc_feature 1..1578: note = Description of Artificial Sequence: Synthetic coding sequence
  source 1..1578: mol_type = other DNA
atggaggaaatgttccacaagaagtccgaggcagtgcggcggctcgtcgaagcagctgaggaggcgcatctgaaacacgagttcgacgcagatctacagtatgagtattttaatgcagtgctaattaacgagcgggacaaggatggtaacttccttgaattagggaaggaatttatcctggcccccaacgaccattttaacaacctacccgtcaacatcagccttagtgatgtgcaggtacccacaaacatgtacaacaaggatcccgctatcgtgaatggagtatactggtcggaatccctaaataaagtttttgtggacaattttgaccgggacccgtcactcatatggcagtactttgggagtgcaaagggtttttttaggcaatatcccggaatcaagtgggaacccgacgagaatggagtgattgctttcgattgccggaatcgcaagtggtatattcaggccgctacctcgccgaaggacgttgtgatactggttgacgtgtccggctctatgaaagggctgcgattgaccatcgctaaacaaacagtgtcgagcatcttggacactctcggagatgacgactttttcaatatcatcgcgtacaatgaggaactccactatgtggaaccctgcctgaacggtaccttagttcaggccgaccgtacaaataaggaacattttagagagcacctcgataaactctttgccaaaggtattgggatgctcgacatcgcactcaacgaggcctttaacattctcagtgatttcaatcatacaggacagggcagcatctgcagccaggccattatgctgattacggacggagccgtagatacttatgatacaattttcgcaaagtataattggcctgaccggaaggttcggattttcacctatctgataggccgagaggcagctttcgctgacaatttgaaatggatggcttgcgcaaataaaggcttctttacgcagattagcactttagcagatgttcaagagaatgtcatggaatatctccacgtcctgagccgacctaaagtgatcgaccaggagcatgacgtcgtttggaccgaggcctatatcgacagtactctcccacaggcacagaagctcaccgatgatcagggcccagtgctcatgacaactgtagctatgccagtgttttctaagcaaaatgaaaccaggagcaagggcatcctcttgggggtagtggggaccgacgtacccgttaaagaactccttaaaaccatccccaaatataaactgggcattcacggctacgcatttgctattaccaataacgggtacattctcacccaccccgagctccgtcttttatatgaagaaggaaaaaagcgcaggaagcctaactatagtagcgtggatttatcagaggttgaatgggaagaccgggacgacgtgctgcgtaacgctatggtgaacaggaagacagggaagtttagtatggaggtgaaaaaaactgtggataaggggttccggtgcggggcctttcaacggtcttgggagatttttctccctcgggagtgtaatcatagacgcagaccggcttag

SEQ ID NO: 110375 - DNA, 2994 bp, synthetic construct
  misc_feature 1..2994: note = Description of Artificial Sequence: Synthetic coding sequence
  source 1..2994: mol_type = other DNA
atggaggagatgttccacaagaagtccgaagcggtccgaaggttggttgaggctgcagaggaggcccacttgaaacatgagttcgacgccgacctgcaatatgaatacttcaatgccgtcctgatcaacgagcgtgacaaagatggtaacttcctcgagttgggaaaggagtttatcctagccccaaacgaccattttaataatctgcctgtgaatatttccttaagtgatgtgcaagtgccaacaaacatgtacaacaaggacccggccatagttaacggcgtttattggagtgagagcctcaataaagtctttgtggataacttcgacagggacccgagcttaatctggcagtactttggttccgccaaggggttttttcgccagtacccggggatcaaatgggaacctgacgagaatggggtcatcgcttttgattgccgcaataggaaatggtacattcaggctgccaccagtcccaaggacgttgtaatactggtcgacgtgtctggaagcatgaagggactgaggctgaccatagccaagcagactgtcagcagcattctggacacgcttggcgacgatgattttttcaacatcatagcgtacaatgaagaactccactacgtggagccttgcctaaacgggacactggtccaggccgaccgcactaacaaggaacacttcagggagcacttagataaattgtttgccaagggcattggcatgttagatattgccttaaacgaggcatttaacatcctgagtgactttaaccatactggccaggggtccatctgttcccaggccattatgctgattaccgatggggccgttgacacttacgataccatcttcgcgaaatacaattggcccgatagaaaagtgcggatattcacatacctgattggaagggaggcagcgttcgccgacaacttgaagtggatggcatgcgcaaacaaggggtttttcacgcagatcagcacgctggctgacgttcaagagaatgttatggaatacttgcatgtcctgagccgccccaaggtcattgatcaagagcacgacgtggtgtggacagaagcatacattgactcaacacttccacaggctcagaaactgacagatgaccagggaccagtcctgatgactactgtggccatgcctgtgttttcgaaacagaatgagacaagatcaaaaggcattctgcttggagtcgtgggaacagacgttcctgtaaaagaattactgaagactattcccaagtataaactggggatccacggctatgcttttgcgattacaaacaacgggtatatcttgacacatcctgagctgcggttgctgtacgaggagggaaaaaaaaggcgcaagccaaattacagttccgtggatctgagcgaagttgagtgggaagaccgcgacgacgttttgcggaatgctatggtgaacaggaagaccggtaaatttagcatggaggttaagaaaactgtcgacaaggggaagcgggtgctggtgatgactaacgattactactacactgatataaaaggtaccccattcagcctcggcgtcgccctctctagagggcacgggaaatattttttcaggggcaatgttaccatcgaggaagggctgcacgacctggagcaccctgacgtcagtctggccgatgaatggtcctattgcaacacggatctgcatcctgagcacagacacttgagtcagctggaagctatcaaactgtaccttaaaggaaaagagcccctgctgcagtgcgacaaggagctgatccaagaggtgttgttcgacgccgtggtgagtgcaccgatcgaagcctattggacctctctagccctaaacaaatcggagaactctgacaagggcgtggaagtagccttcctcggaacccgcaccggactgtcacgcattaacctgttcgtgggcgctgaacagctgacaaaccaggactttctgaaagcaggcgataaggagaacattttcaatgctgatcatttcccactgtggtaccggagggcggcagagcagattccaggtagcttcgtctatagcattccattcagcaccggaccggtgaataaatccaatgtcgtaacagcatccacctctatccagttgcttgatgagcgcaagagtccggtggtggccgccgtggggatacagatgaaactcgagtttttccagaggaagttctggaccgctagccggcagtgcgcttccctcgatggaaagtgctctatatcgtgcgatgatgagacagtcaattgttacttgatcgataataatggcttcatactcgtgtctgaagactacacgcaaactggcgacttttttggagaaattgaaggagccgtgatgaataagctgctaactatggggagtttcaagcggatcaccctttatgactaccaggcaatgtgtagagcaaacaaggaaagttccgacggcgcacacggcctcctcgatccttacaatgccttcctctctgctgtcaagtggattatgacggagttggtactgttcctggtcgagtttaatctctgcagctggtggcattctgacatgactgccaaagcacagaagctcaaacagaccctggaaccttgtgacacagagtaccctgcattcgtatctgaacgcaccattaaggaaacaacaggcaacatagcatgcgaagactgttctaaatccttcgtcattcagcaaatccctagttctaacttatttatggttgtggtcgattcatcatgtctgtgtgaaagcgtcgcccccataacaatggctccaattgagatcaggtacaatgagagtctcaaatgcgagaggctgaaagcacagaaaattagacgccgaccggagtcctgtcacggcttccaccccgaggaaaacgcccgtgagtgcgggggggctccaagcctccaggcccagactgttctcctgcttctgcccttactgctgatgctcttcagccgctag

SEQ ID NO: 110376 - DNA, 381 bp, synthetic construct
  misc_feature 1..381: note = Description of Artificial Sequence: Synthetic coding sequence
  source 1..381: mol_type = other DNA
atggaagagatgtttcacaagaagagcgaagccgtgaggaggctggtcgaggctgccgaggaagcccacctgaagcatgaattcgatgccgatctccagtacgagtacttcaacgcagtgctgatcaatgaaagagataaagacggcaacttcctcgagctgggcaaagagttcatactcgcccctaacgaccacttcaataacctgcccgtgaatattagtttgtctgacgttcaagtacctactaatatgtacaacaaagacccagccatcgtgaatggggtgtattggtccgagtccctgaacaaagtgtttgttgataatttcgaccgtgacccaagcctaatctggcagtactttggctccgcaaaaggcttttag

SEQ ID NO: 110377 - DNA, 2925 bp, synthetic construct
  misc_feature 1..2925: note = Description of Artificial Sequence: Synthetic coding sequence
  source 1..2925: mol_type = other DNA
atggtttgcggttgtagtgcgttgctccccctgccgaacccacgaccaacaatgcccgcgacacctaacttcctcgctaatccctcatcgtcgtcccgctggatccccctccagcccatgccggtcgcctgggcgttcgtgcagaagacatcagccctcctgtggctgcttttactgggtacttcactgtcccccgcttggggtcaggcaaagattcctttggaaactgttaaattgtgggcagacactttcggtggagacctttataacaccgtgacaaaatattcaggttccctgttacttcagaagaagtataaagacgtggagagcagtcttaaaatcgaggaggtggatggactcgaacttgtaagaaaattcagcgaagacatggaaaatatgttgcgccgaaaagtcgaagctgtccagaaccttgtagaagccgcggaggaggctgacctcaaccacgagtttaatgaaagtctggtctttgactattacaactctgtgcttattaatgagcgcgatgagaagggtaattttgtcgaactgggagctgaattcctcctggagtctaacgcccacttttctaatctccccgtgaacacatctatttcgtccgtgcagctgcccactaatgtgtacaataaggatccagatatattgaacggcgtttatatgtcagaagcactcaacgctgtcttcgttgaaaatttccagagggaccccacgctaacctggcaatacttcggttctgcgacaggtttcttcagaatttaccccggcattaagtggacgcccgacgaaaacggggtaattacgttcgactgcaggaacagggggtggtacatccaggctgccacgtccccaaaggatatcgtgattctagtggatgtaagcggtagcatgaaagggcttcgaatgacgatagcaaagcatacaataaccaccattctggatactctgggtgagaacgattttattaacattatagcctacaacgactacgtccactatatcgaaccatgcttcaagggaatcctcgtgcaagcagaccgagataaccgggagcatttcaaactcctcgtggaggagctcatggtgaagggtgtcggcgttgtggatcaagctttgagggaagcctttcagattctgaagcagtttcaggaagctaagcaaggaagtttgtgtaatcaggccatcatgctaattagcgacggcgcagtggaagattatgagcctgtcttcgagaaatacaattggcccgattgtaaagtgagggtgtttacatacctgatcggacgcgaggtgtcctttgccgatagaatgaaatggatcgcttgtaacaataagggttattacactcaaatctccactttggctgatacccaggagaatgtcatggagtacctgcacgtcctgagccgaccgatggttattaaccacgaccacgatatcatttggaccgaagcttacatggactccaaactcctctctagtcaggcgcagagcttaaccttgttaactacagtggctatgcccgttttttccaagaagaacgagactcgttcccatggaatccttcttggggtcgtgggttcagatgtggccctgcgagaattgatgaaattggctccccgctacaagcttggcgtgcatggatatgccttcttgaataccaacaatggctacatactgtcccatcccgacctgcgccctctgtatcgtgaaggaaaaaaacttaagccgaagcccaattataactcagtagacttgtccgaggtagaatgggaagatcaggcagagtccttgcgtacagccatgattaatcgggagaccggcaccctgtcaatggacgtcaaagtcccgatggataaaggaaaacgcgtactgttcctgaccaacgactacttctttaccgatatcagcgatactccattcagtctcggagtagtgctttcgcgggggcacggagagtatattctactgggaaatacctctgttgaagagggactgcacgatctgctccatcccgatctggccctcgccggggactggatatattgtataactgacatagatcctgaccacagaaaactatcacagctcgaagccatgattcgctttctaacccgtaaagatcccgatttagagtgtgacgaggagctcgtgcgcgaagtactgttcgatgcggtggttacagctcctatggaagcttattggacagcacttgccctgaatatgtctgaggagagcgaacacgttgtggacatggcatttctcgggactcgggctgggttactgaggtcttctctgttcgttgggtccgaaaaggtaagcgatcgcaaatttctcaccccagaagatgaagcctctgtgtttaccctagatcgtttccccctgtggtatcggcaggcgtcagaacacccagccggcagtttcgtcttcaacctcaggtgggcagagggtcccgagagcgccggggaaccaatggttgtgactgccagtacagctgttgccgtgacggtagataaacgaacagcaattgcggcagccgctggtgtgcagatgaagctggagttcctacagaggaagttctgggcagccaccagacagtgttctactgtcgacggcccctgtacacagagctgtgaagacagcgatctggattgcttcgttatcgacaataatggctttattctcatctcaaaacgatctcgtgagacgggacgattcttaggagaagtagatggggcagttctcacacaactgctgtcgatgggagttttttcccaagtaacaatgtatgattatcaggcaatgtgtaagcccagctcacatcatcacagcgccgcacagcccctggtgagtcccatcagtgctttcctgactgcgacaagatggctcctgcaggaacttgtactgtag

SEQ ID NO: 110378 - DNA, 3414 bp, synthetic construct
  misc_feature 1..3414: note = Description of Artificial Sequence: Synthetic coding sequence
  source 1..3414: mol_type = other DNA
atggtatgcgggtgctctgctttgttgcccctgcccaatccccgaccaactatgcccgccaccccaaatttccttgcaaatcctagctcttcctcacgttggattcctctgcagcctatgccagtcgcctgggcatttgtgcagaaaacgtctgcactgctatggctgctcctgttgggaacaagtctgtctcctgcttggggccaggccaagatccctctggaaactgtcaagctgtgggcagacacctttggaggcgatctgtacaacacggtcaccaagtactccggctcgctgctgctgcagaagaaatacaaggatgtggagtccagcttgaagattgaagaagtggatgggctcgaactagtccggaagttcagtgaagatatggaaaatatgctccgacgcaaagtggaggccgtccagaatctcgtggaggctgccgaggaggcagacctcaatcacgaatttaatgaatcattggtgttcgactactataatagcgttctgataaatgaacgggatgagaaagggaactttgtcgagctgggcgccgaatttctcctggaatccaacgcgcatttcagcaacttgcctgtaaacacctccatatcctcagttcagcttcctaccaatgtgtacaataaagacccagatatcctaaacggcgtgtacatgtccgaagctctgaacgctgtgttcgtagagaattttcaacgagatcccaccctgacatggcagtactttggttcagctaccgggttctttagaatatatcccggcataaagtggactcccgacgaaaacggtgttattacattcgattgcagaaaccgaggctggtacattcaggctgccacttctccaaaagacatcgtgatcctggtggatgtaagcggaagcatgaaaggtctgcgtatgaccatcgccaagcacacgattactaccattctggacacactgggggagaacgatttcattaacattattgcatacaatgattacgttcactatattgaaccctgcttcaagggcatacttgttcaggcagaccgtgataaccgcgaacattttaaactccttgtagaggaattgatggtcaaaggagttggggtggtggaccaggctctgcgggaagcattccagattctgaagcagtttcaggaagccaagcagggctcactttgcaaccaagctattatgctgatatcggacggcgcggtggaagactacgaacccgtgtttgagaagtacaactggcctgactgtaaggttagggtgttcacatatctaattggacgggaggtttcattcgccgatcggatgaagtggattgcgtgtaataacaagggctactatactcaaatctcgactcttgccgacacccaagagaatgtaatggagtacctccacgtgctaagcagaccgatggtcatcaaccacgaccatgatattatttggacagaagcttatatggacagcaagcttctctccagtcaggcccaatccctcacactactgactaccgtggccatgccggtgtttagtaagaagaatgagaccagaagccatggcatcttgttaggcgtggtgggaagtgatgtggccttgcgagagcttatgaagttagccccaagatacaagctcggggtccacgggtacgcttttctgaatacgaacaacggttatatactgtctcatcccgatctaagacctttataccgggaggggaagaaactaaaaccaaaaccgaactacaacagcgtggacctgtctgaagttgaatgggaagaccaagctgagtctctcagaacagcgatgatcaatcgcgagactggcactctgtcaatggatgtgaaggtccctatggataaaggaaagagggtgctattcctgacgaacgactacttttttactgacatctctgataccccatttagtctgggagtggtgctatcaaggggccacggagaatatatactcctaggtaatacttccgtggaagagggactgcacgatctgcttcatcctgatcttgccctggccggtgattggatatactgtatcacagatatagatcccgatcataggaaactgtctcagttggaggcgatgattaggtttctgactaggaaggacccagacttggagtgcgacgaggaactcgtcagagaagtgctgttcgatgcagtggtgaccgcccctatggaggcctattggacggccttggcccttaatatgagcgaagaatcagaacatgtagtcgacatggcatttctggggacacgtgctgggctgctacggtctagcctattcgtgggaagtgaaaaagtgtcggatcggaagttccttacgcctgaagatgaagcaagtgtgttcacactggacaggttccctctgtggtacagacaggctagtgaacatccggcgggttcatttgtctttaatcttaggtgggcggaaggtccagagagtgcaggggagcctatggttgtgactgcttcaacagccgtcgccgttaccgtcgataagcgaactgcaatcgccgctgctgcaggtgtgcagatgaagctggaattcttacagagaaagttttgggctgctacacggcaatgctctactgtcgatggcccctgtacacagtcatgcgaggattcggaccttgattgtttcgtcattgataacaatggtttcatcctgatctcaaagcgcagccgggagaccggaaggtttctgggcgaggttgatggtgccgtcctgacccagctgctgagcatgggagtcttctcccaggttaccatgtatgactaccaggccatgtgcaagccaagctctcatcatcatagcgccgctcagccgctggttagtccaatttctgcctttcttacagctacacggtggctgctgcaggagttagtcctgttcttgctcgagtggtctgtttggggctcctggtatgatcgtggcgctgaagccaagtcggtctttcatcactcccacaaacataagaagcaggaccctctgcagccgtgcgatactgaatacccagttttcgtgtaccagcccgccatccgggaggccaatggcattgtggagtgcggaccatgtcagaaggtcttcgtggtccagcaaatacctaacagcaatctgctgttactagtcaccgaccccacctgcgactgtagcatctttccgccggtgctacaggaagcgacagaagtcaaatacaatgccagcgtgaagtgcgacagaatgcggagtcagaagctgcggcgcagacccgatagttgtcatgctttccatcccgaagaaaacgcacaggactgcgggggggcctccgataccagtgccagtcccccattgctgctgctgcccgtgtgtgcctggggcctgctgcctcaactcctgcggtag

SEQ ID NO: 110379 - DNA, 3222 bp, synthetic construct
  misc_feature 1..3222: note = Description of Artificial Sequence: Synthetic coding sequence
  source 1..3222: mol_type = other DNA
atggcggtggctctgggcaccaggaggagagacagagtcaagctctgggcggacacgtttggtggagacttatataacacggtcaccaagtactccgggagcttactgctacaaaagaagtacaaagatgtggaaagtagcttgaagattgaagaggtggacggactcgagctggtgcgaaaattttctgaggacatggaaaacatgctgaggcggaaggtggaagctgtacaaaacctggtggaggccgctgaggaggccgaccttaaccacgagtttaacgaaagtctggtgtttgattactacaattcagtattgattaatgagcgtgatgagaaaggaaactttgtggagctgggtgctgagttcctgttagaatccaatgcccacttctcaaacttgccagtgaataccagcatcagcagtgtccaactgccaacgaacgtttacaacaaagatcccgatattctgaacggagtctacatgtcagaagccctcaacgccgtatttgtcgagaacttccagcgggaccccaccctgacctggcaatatttcggctcagcaacaggattttttcgcatctatccaggcattaaatggaccccagatgagaacggagtgattaccttcgattgcaggaaccggggatggtatattcaggccgctacttcaccaaaggatatcgtaattctggtcgacgtgtccggcagtatgaagggtttgcgcatgacgatcgcgaagcacactattactaccattctggatacattgggtgaaaacgacttcataaatatcatcgcctataatgactatgtgcactacatcgagccatgctttaaaggaatcctggtccaggccgaccgtgacaatcgcgagcactttaagttactggtggaagagctgatggtcaagggggtgggggtggtggaccaggccttgcgggaggccttccagatcctgaagcagttccaagaggccaaacagggctctctgtgcaaccaggctattatgctgatcagcgacggagccgtcgaagactatgagcctgtattcgaaaagtataactggcccgattgtaaagtgagagtattcacttacctaattgggagagaagtctcctttgcagacaggatgaagtggatcgcttgtaataacaaaggatactacacccaaatctctactttagctgatacacaggagaacgtgatggagtacctccacgttctgtctcggccaatggtcatcaaccatgatcatgacattatctggactgaagcatacatggatagcaagttattgtcatcacaggcccagtctttgacgttactcactactgtagccatgcctgttttctctaaaaaaaacgagacacgctcgcacgggatcctgctgggagtggtagggtctgatgtcgccctcagggaattgatgaaattggccccacgctacaagctaggagtgcatgggtacgctttcctgaacactaacaatggctacattctgagtcatccagatctgcgacctctttacagagagggtaagaagcttaaaccaaaacctaactataattcagtcgatcttagcgaggtggagtgggaggatcaggcggagagcctgcggacagccatgattaatcgtgagactggaactctctccatggacgttaaggtccctatggacaaaggtaagcgggtactctttctgacgaacgactattttttcacagacatttccgacacccccttctccctgggagtggtgctgtcccgcgggcacggggaatacattctgctcggcaatacctctgtcgaagagggactgcacgatctcctgcatcctgatctggccttggcgggagactggatttactgtattactgatattgatccggatcatcggaagctttcacagctggaggctatgatccggttcttgactagaaaagatcctgatctggagtgcgacgaggagcttgtgagagaggttttattcgacgcagtagtcacagccccgatggaggcctattggaccgcactcgcgcttaacatgtctgaggaatcagagcacgtcgttgatatggccttcctaggcacccgggccgggctactccgatctagcttgttcgtgggttccgagaaagtatcagaccgcaaattcctcactccagaagatgaagcctcagttttcacacttgatcgcttcccgctgtggtaccgtcaggcaagcgagcacccagcaggctcattcgtattcaacctgaggtgggccgagggtccagagtccgccggcgagcctatggtagtgaccgcaagtacagcagtcgcggtcacggtggacaagagaacagcgatcgcagccgccgccggcgtgcagatgaaactcgaattcctccaaagaaagttttgggcagctaccagacagtgctcaaccgttgatggtccgtgtacacagagctgtgaggactccgatcttgattgcttcgtaattgataataatggttttatcctcatctccaagagatctcgcgaaaccggtcgctttttaggagaggttgacggagctgtcttgacccagctgttgtccatgggagtgttctctcaggttaccatgtatgattaccaggccatgtgcaaaccttcgagccaccaccattctgccgcccaacccttagtctctccaattagtgcctttctgacagccacgagatggcttctccaggagctggtgttattcttgctggaatggtcagtttggggctcctggtacgataggggggcggaggccaaaagtgtctttcatcattcccacaaacataagaaacaggatccactccagccttgtgataccgagtatcccgtgttcgtatatcaacccgccattcgcgaggcaaatggcatcgtggagtgtggtccgtgccagaaggtgttcgttgtgcagcagatacccaactctaatctgctgctactggtgactgacccaacatgtgattgcagcatctttccacccgttttacaggaggcaaccgaggtcaagtataatgcctcagtgaagtgcgatcgcatgagatcccaaaaactgcgcagaaggcctgactcatgccatgccttccaccccgaggaaaacgctcaagactgcggcggagcctctgatacctctgctagccctcccctgctgctcctcccagtttgcgcctggggtcttttgccgcagttgctgcgctag

SEQ ID NO: 110380 - DNA, 615 bp, synthetic construct
  misc_feature 1..615: note = Description of Artificial Sequence: Synthetic coding sequence
  source 1..615: mol_type = other DNA
atgtatgattatcaggctatgtgcaaaccatcctcgcatcaccactctgcagcacagcccctggtctccccaatcagtgcctttctcaccgctaccaggtggttgcttcaggaactcgttctcttcctgctggaatggtccgtgtggggatcttggtacgacagaggcgcagaggccaagtctgtttttcaccattcacataagcacaaaaagcaggacccactgcagccctgcgacacagagtatcctgtgttcgtctaccagccagccatccgggaagcaaacgggatagtcgagtgcgggccttgtcagaaggtattcgttgtccagcagattcctaattctaatttgctgctattagtgacagatccgacctgcgattgctcaatttttccccctgtgctccaggaggctaccgaggtcaaatacaatgcgtctgtgaagtgcgatcgaatgcgctcgcagaagctgcgaaggcggcccgattcttgccacgctttccaccccgaagagaacgcgcaggattgcgggggcgccagtgacacatccgcctctcctcctcttctgttactgcccgtttgcgcatggggactgctgccacaacttctgcggtag

SEQ ID NO: 110381 - DNA, 615 bp, synthetic construct
  misc_feature 1..615: note = Description of Artificial Sequence: Synthetic coding sequence
  source 1..615: mol_type = other DNA
atgtatgattaccaggccatgtgcaagccctccagccaccaccatagtgctgcccagcccctggttagtcctatttcagcattcctgaccgctaccagatggctgttgcaagaattggtgctgttcctgctggagtggagtgtgtggggcagttggtacgacagaggagccgaagcgaaatctgtgttccaccattctcacaagcacaagaagcaggaccccctccagccatgtgacaccgaatacccagtcttcgtgtatcaacccgcaatccgcgaggctaacggcatagtggaatgtggaccttgtcagaaagtgtttgtggtccagcagatccccaactctaacctcctcctgctagtgaccgatccaacgtgcgactgtagcatttttccccccgtcctgcaggaagctacggaagtcaagtataatgcctcagtgaaatgtgatcggatgcggtcccagaaattaagaaggaggcccgattcttgccatgcctttcatccggaagagaacgctcaagattgtggcggcgcaagtgacacaagcgcaagcccaccactcctcctactgccagtatgtgcctggggtctgcttccccaactgctcaggtag

SEQ ID NO: 110382 - DNA, 804 bp, synthetic construct
  misc_feature 1..804: note = Description of Artificial Sequence: Synthetic coding sequence
  source 1..804: mol_type = other DNA
atgaaacttgagttcctccagcgcaagttctgggctgctacccggcaagatctagattgcttcgtaatcgataataatggctttatcctgataagtaagcggtcgagggagaccggtcgatttctcggtgaggtggatggtgcggtattaacgcaactgctgagtatgggtgtgttctcgcaagttaccatgtacgactaccaggccatgtgcaaaccgtcttcacatcaccactcagccgctcagccattggtatcccctatctcagcattcctgaccgccactcgatggcttctgcaggagttagtgctcttcctactggagtggtcggtctggggcagttggtacgatcggggcgcagaagctaaaagtgtattccaccacagccataaacataaaaagcaggaccctctgcagccttgtgacaccgagtacccggtattcgtgtaccagcccgccatcagggaggcaaatggtatcgtcgagtgcggcccctgccagaaggtgtttgtggtgcaacagatcccaaattctaacctgctcctgttggttaccgacccaacgtgcgactgcagtatctttcctccagtgttacaagaggccacagaagtcaagtacaacgccagcgtgaagtgcgaccgaatgaggagccagaaactgagaaggcgcccagattcttgtcacgcgttccacccagaagagaacgcacaagattgtgggggtgcttcagatacaagcgctagtcccccactgctactcctccctgtgtgtgcctgggggctgctgccgcaattgctcaggtag

SEQ ID NO: 110383 - DNA, 615 bp, synthetic construct
  misc_feature 1..615: note = Description of Artificial Sequence: Synthetic coding sequence
  source 1..615: mol_type = other DNA
atgtacgattaccaagcgatgtgcaaaccgagcagtcaccatcactccgccgcacagcccttggtatctccgatatcagccttcctgactgccacaaggtggctgctgcaggaactggtgctgtttctcctggaatggagcgtgtgggggagctggtacgacaggggagctgaggccaaaagtgtttttcaccatagccataagcataagaaacaagaccctctccagccatgcgacactgaataccctgtgtttgtgtaccagcccgcaatacgcgaggcgaatgggatagttgaatgcggcccctgccaaaaggtcttcgtagtccaacagatccccaatagtaatctcctgctactggtgactgaccccacctgcgactgcagcatttttccgccggttctgcaagaggccactgaggtgaaatataacgcctccgtgaagtgcgacagaatgcgctcacaaaaactaagaaggcgaccggactcgtgtcacgcctttcacccggaagagaacgcccaggattgcgggggcgcctctgatacatctgcatcccctccactgctactactgcccgtctgtgcctggggcctccttcctcagcttctgaggtag

SEQ ID NO: 110384 - DNA, 1572 bp, synthetic construct
  misc_feature 1..1572: note = Description of Artificial Sequence: Synthetic coding sequence
  source 1..1572: mol_type = other DNA
atggtgcagaaaacatcaatgtccaggggcccatatcctccatcccaggagatacccatggaggtttttgacccatccccccagggtaagtatagcaagaggaaaggtaggtttaaacggagcgatggaagcacgagctcagatacaactagcaactcatttgttagacaggggagcgccgaatcctatacaagccggcccagcgactccgacgtgagtctggaggaagacagggaagctctgcgcaaagaggccgagaggcaggccctagctcagctagagaaggccaagacaaaaccggtggcatttgccgtgcgaacaaatgtagggtataatccatccccgggggatgaggttccagtgcaaggtgtcgccattacatttgagcctaaagattttctgcacatcaaggagaagtacaataacgattggtggattggtcgtcttgttaaggagggttgcgaggtgggctttattccctcccccgtgaaactggacagtctgcgtttgcttcaggagcagaagctgcgtcagaatagactaggtagctccaagagtggcgacaatagctcctcttctctcggagatgtcgtcaccggcacaaggcgtcccacacccccagcttcgggcaacgaaatgacaaacctggcttttgaattggatccgctcgaacttgaggaagaggaggcggaacttggcgaacagagtggtagtgctaaaacttcagtaagcagcgtgaccacgcctccgccccatggcaaaagaatcccattttttaagaagactgagcacgtcccaccttatgacgtggtgccctccatgcgacccattatcctcgtcggtccgagccttaagggatatgaagtgacggatatgatgcagaaagctttattcgatttcctgaagcatagattcgacggtagaattagcatcacaagggtgacagcagacatctcactcgcaaagagaagcgtgcttaacaaccccagcaaacacattatcatcgagcgttcaaacacacggtcatctctcgcggaagtgcagtctgaaattgagagaatctttgaactggccagaacactccagctggtcgctctcgatgccgataccatcaatcacccggctcagctgtctaagacaagtcttgccccaataatagtttacatcaagatcacctcgccgaaggttcttcagcgactgattaagtcaagaggcaagagtcagagcaaacacttaaacgtacagatcgccgctagcgagaagttggctcagtgcccgcctgagatgttcgacattatcctcgacgagaaccaactggaggacgcatgtgagcacctggcggaatatctggaagcctactggaaagccacacatcctccgagctccacacctcccaaccccctgctgaatcggacaatggcaactgctgcgttggccgcatccccagcccccgtcagcaatctccaggttcaagtcctgacatccttgcgccggaatttgggcttctggggcggattggagtcaagtcagcgcggctccgttgtgcctcaagaacaggagcatgctatgtag

SEQ ID NO: 110385 - DNA, 1797 bp, synthetic construct
  misc_feature 1..1797: note = Description of Artificial Sequence: Synthetic coding sequence
  source 1..1797: mol_type = other DNA
atggtgcagaagacaagcatgtctcgcggaccctatccaccgtctcaggaaatccctatggaagtatttgacccaagccctcaaggcaagtactcaaagcgtaagggtaggtttaaacgatccgatggctctaccagcagcgacactacctccaattcttttgtgcggcaaggttccgccgagagctataccagccggccctctgacagcgacgtttccctggaggaggaccgcgaggcactgaggaaggaagccgaacgccaagcccttgcacaattagagaaagcaaagactaagcctgtcgccttcgccgtcaggaccaacgtgggctataatccctccccaggggacgaagtgccagtgcagggcgtcgctatcaccttcgaaccgaaagattttctccacattaaggaaaagtacaataatgattggtggatcggccgccttgtgaaagagggatgcgaggtcgggttcataccgtcccctgtcaaactagattctctacggttgttacaggaacagaaattacggcaaaatcggttaggaagctcaaagtccggcgacaactcatcatcttccctgggggacgtggtcaccggcacacgacggcccacgcctccagcatccgcaaagcagaaacagaagtcaacagagcatgtacctccctacgatgtggtgcccagtatgcgaccaatcattctcgtagggccttcgctgaaggggtacgaagtcactgatatgatgcagaaggccttgtttgatttcctcaaacacagattcgacggaaggattagcattacccgagttacagcggacatctccctcgccaagagatctgtgcttaacaatccctccaagcacataatcattgagcgttccaatactcggtctagtttggccgaggtccagagtgaaatcgagcgtatattcgaactagccaggaccctacagctcgtcgcccttgatgcagacactattaaccaccccgcccaattaagcaagacatctcttgcccctatcatagtgtacataaagattacctctcccaaggtgctgcaacggctcattaagtctcgtggaaaatcacagtccaagcatttgaacgtccagattgccgccagcgagaaactggcgcagtgcccaccagaaatgttcgacatcatacttgatgagaatcagctcgaagacgcgtgtgagcatttagctgaataccttgaggcgtactggaaggcgacgcaccctcccagcagcacgccccctaaccccctactaaaccgcactatggcaactgcagcgctagcagcatcacctgcacccgtcagcaacctgcagggcccctatctggcctccggggaccagcccctcgaacgcgctacaggcgagcacgccagtatgcacgaatatccaggagaactaggccagcctcccggactgtatccaagcagccaccctccagggcgtgcaggtacccttcgcgctctcagcaggcaggatacattcgatgctgacacaccaggatctaggaattcggcctatacggagctgggtgattcatgcgttgatatggaaaccgacccttccgaagggcctgggctcggcgacccggcaggagggggcactcccccagcccggcagggttcttgggaggatgaagaagaagattacgaggaggagctgactgataatcggaaccgtgggaggaataaggcaaggtactgcgccgaggggggggggcctgtgttaggcaggaataagaatgaactcgaaggctgggggcgcggtgtatacattagatag

SEQ ID NO: 110386 - DNA, 1437 bp, synthetic construct
  misc_feature 1..1437: note = Description of Artificial Sequence: Synthetic coding sequence
  source 1..1437: mol_type = other DNA
atggtgcagaagacctccatgtctagggggccctaccctcccagccaggagatccctatggaggtgtttgacccctcaccccagggaaaatactcgaagcggaagggacgctttaagcggtcagacggatccactagctctgatacaactagtaacagcttcgtccgacagggctcagcagagagctacacgtcgaggccatctgatagtgacgtgtcgctcgaggaagatagggaggcattgcggaaggaggctgaacgtcaggcactggcccagctggagaaggctaaaaccaaacccgtggcttttgctgtccggaccaatgttggatataatccatccccaggcgacgaggttccagtgcaaggcgtcgccataactttcgagcctaaggacttcctacatatcaaagagaagtacaacaatgactggtggatcggaagactggtgaaagagggctgtgaggtcggattcatcccttcccctgtgaagttggacagtttgaggttgctgcaggagcagaagctgcgccagaaccggctcggctcttctaagtccggagataacagtagcagcagtttgggggacgtggtgacagggacaagaagacccacccctccagccagcgccaagcagaagcaaaagtccaccgagcacgtacctccttatgacgtagtgccatcgatgcgtccaattattttggttggccctagtttaaaaggctacgaggttactgatatgatgcagaaggccctgtttgatttccttaagcaccggttcgatggacgcatctctatcactcgtgtgaccgcggatatctcccttgcaaagaggtcagttttaaacaacccttctaagcatataattattgaaagatctaacactaggtcctcgctcgccgaggtccagtcagaaatagaacgaatatttgagctggctcggaccctccagctagtcgcacttgacgcagacaccattaaccaccctgcccagctcagcaaaacctctctggccccgatcattgtgtatatcaagatcacaagtcctaaagtactgcagcggctgattaagtcaagaggaaagagtcagtctaagcacctgaatgttcagatcgctgcatctgagaagctggcgcagtgtccacccgagatgtttgacatcattctggatgagaaccaactcgaagatgcatgtgagcatctggccgagtatctcgaggcctattggaaggccactcaccccccatcatccactccgcccaatcccctgctgaaccggaccatggcaaccgcggctcttgccgccagccccgcacctgtttctaatctccaggtgcaggtgctgacctccctcaggagaaatctggggttctggggtgggctagaatcctcacaacggggaagtgtggtgccgcaggaacaggaacacgctatgtag

SEQ ID NO: 110387 - DNA, 1290 bp, synthetic construct
  misc_feature 1..1290: note = Description of Artificial Sequence: Synthetic coding sequence
  source 1..1290: mol_type = other DNA
atggaggccccgagtagaaccgtggtggtcggttcagccgagtcatacacgtccaggccatccgattccgatgtgtcgctggaggaggatagggaggccctacggaaggaggcggagcgccaggcgcttgcccaacttgaaaaagccaagaccaaaccagtggccttcgccgttagaactaacgtgggctacaaccctagtcctggcgatgaagtacccgtccagggtgtcgctatcacctttgagccgaaggactttcttcatatcaaagagaaatacaacaacgattggtggattggcaggctggttaaggaagggtgtgaagtgggcttcatcccatccccagtgaagctcgatagtctccgtcttctgcaagaacaaaagctgaggcagaatagactcggatcctctaaaagcggcgacaattcctcgagttcgctgggagacgtggtgaccggaacccgccggcctacacccccggcctctgactctcccgtccagacggaacacgtgccaccctatgatgttgtgccctctatgcgaccaatcatcctggtgggacccagccttaagggctacgaagtgacagacatgatgcaaaaagccctcttcgacttcctgaagcaccggttcgacggccggatctctatcacaagagtgactgcagatatctccctcgccaaaaggtccgtcctgaataatccgtcgaaacacatcattattgaacgctctaacacccggtctagtctggccgaagtccaatccgagatagagagaatttttgagctggcccggacgttgcagctggtggcgttggacgctgacactatcaatcacccagcccaattgtcaaagacatccttagcacccatcatcgtgtacataaaaatcacatctcctaaggtcctgcagaggctgattaaaagccgcggaaaaagccagtccaagcacctgaacgtccaaatcgccgcctcagagaagctggctcagtgcccgcccgagatgttcgacatcatactcgatgagaatcaactggaagatgcttgtgaacacctggccgaatacctggaagcctactggaaggctacccatcctccctcttctacacccccaaatcccttactgaacagaaccatggcaactgccgctttagccgcttcacctgctccagtatctaatcttcaggtccaggtactgacctcacttcgccggaacctcggattctggggtggtctggagagctctcagaggggtagcgtggtgccacaggagcaagagcacgctatgtag

SEQ ID NO: 110388 - DNA, 1647 bp, synthetic construct
  misc_feature 1..1647: note = Description of Artificial Sequence: Synthetic coding sequence
  source 1..1647: mol_type = other DNA
tccgggagcctgtattttcagggcagcgccgaaagctacacaagccgccccagcgatagtgacgtatcacttgaagaagacagggaagctctccgaaaagaagctgagcgccaggctctggcccagttagaaaaggccaagaccaagcccgtggcttttgccgtccggactaatgtcgggtacaaccccagtcctggcgacgaggtgcccgttcagggggttgcgattacatttgagcccaaagattttctacatataaaggagaaatacaacaatgattggtggatcggtagactggtgaaggaaggttgcgaggtaggtttcataccttcccctgtcaaactggattctcttcggcttctccaggaacagaagttgaggcaaaatagattgggctccagtaagagcggtgacaactccagctcctcacttggcgatgtagtgactgggacacgacgacccactccccccgctagcggcaagagccaccgtcacgcaacagagcacgtgcctccatacgacgtagtgccctcaatgaggcccattatcctggtcgggcccagcttgaagggctacgaggtgacagacatgatgcaaaaagcactgttcgacttcctcaagcacagattcgacggacgaattagcataactagggtgacagccgacattagcctcgccaaacgttctgtgttaaacaatccctctaagcacatcataatcgagcgctccaatacacggtctagtctcgctgaggtccagtcagagattgaacgcatctttgagttagctcgaacactccagcttgtcgcactggacgctgataccattaaccatccagcccagctgagtaagacctccctagccccgataatagtatatatcaaaattacatcccccaaggtgctgcagcgccttatcaagtcaagaggtaagtcccagtccaagcatttaaacgtccagattgcggcctctgaaaaacttgctcagtgcccccctgagatgttcgacatcatcctggacgagaatcagttggaagacgcctgcgaacacctcgccgagtacttggaggcttactggaaagcaactcatcctccctctagcacccccccaaaccctctcctcaataggacgatggccaccgcggccttagccgcttccccagcacccgtgagtaatctgcaaggtccgtatctggctagcggcgaccagcccctggagagggccactggggagcacgcgagcatgcacgaatatccgggcgaactcggccagccccccggcctgtacccatcaagccacccccctggtagagctggcacattacgagccctgagcagacaggacacattcgacgccgatacccccggatctcgtaactccgcctacacagagttgggcgatagctgtgttgacatggaaacagacccttctgagggcccaggcttgggtgaccctgccggtggcggcacccctcccgctcgacaaggctcatgggaagacgaggaagaggattacgaagaagagttgacagataataggaataggggacgaaataaagccagatattgcgctgaaggagggggaccggtgctgggcagaaacaagaacgagctcgaaggatgggggaggggggtttacatcaggtag

SEQ ID NO: 110389 - DNA, 1899 bp, synthetic construct
  misc_feature 1..1899: note = Description of Artificial Sequence: Synthetic coding sequence
  source 1..1899: mol_type = other DNA
atgaatcagggatcaggattggatctcctcaaaatttcttacggaaaaggagcacgaagaaagaatcgattcaagggctctgatggatcgaccagttccgatacaacttcaaattcatttgtgcggcagggatccgcagatagctacacatctcgcccttcagactctgatgtttcactggaggaggacagagaggccgtccgccgcgaagccgagcgccaagcccaggcacaactcgagaaggccaaaaccaaacccgtagcatttgctgttagaactaatgtttcatattccgcagcacacgaggacgacgtgccagtgccggggatggcaattagctttgaggcaaaagatttcctgcatgtcaaagagaaatttaataatgattggtggatcggaagacttgtcaaagaaggctgcgaaattggttttattcccagcccggtcaagcttgagaacatgcggctacagcatgagcagagggccaaacagggcaagttttactcttccaaaagcggaggcaactcttccagcagcctcggtgacatcgtgccaagctctcgtaagagcacaccgccctcaagcgctatcgacattgatgctactggccttgatgcggaagaaaatgatatacccgccaaccatcggagcccaaagcccagcgctaacagtgtcaccagccctcacagcaaggagaaacggatgccgttcttcaagaaaacagagcacactccaccttacgatgtggtaccaagcatgagacctgttgtactggtgggaccttcgctgaaggggtacgaggtgaccgatatgatgcagaaagctctttttgactttcttaaacacagattcgaagggcgcatcagtattactagggtaaccgctgacattagcctggccaagcgaagcgtcctgaacaacccttctaagcatgcgatcattgagagatccaacacacgttcgtccttggcagaggtgcagagtgagattgaacggatttttgaactggcaagaacactccagttagtggtcttagatgcggacaccataaatcacccagcccaattatctaagacatcgctagcgcccattatcgtgtatgtcaaaatctcttcacctaaggtgctgcagaggcttattaagtcccgaggaaagtctcaggccaagcacctcaatgtgcaaatggtcgccgccgacaaattggcccagtgccctcccgaattatttgatgtgattctggatgagaatcagctggaggacgcttgtgaacacctggccgactatctcgaggcgtactggaaggcaacgcatcccccttcgtcgtcgctgcctaaccccttgctgagcaggaccctcgccacatcctcattacccctgtccccaactctggccagcaactcacagggctctcagggagaccagcgaactgacaggtctgccccaattagatcagccagccaggccgaggaggaaccctcagttgagccagtaaaaaagagtcaacaccggtcttcctctagtgcccctcatcacaatcacagaagcggcacttctaggggactgagtcgccaggaaactttcgactctgagactcaggagtccagagacagtgcctacgtagaacctaaagaagattacagccatgaccacgtggatcactatgcgtcacacagagatcataaccaccgcgatgaaacgcacgggtcatccgaccaccgccacagagaaagtcgtcatcgttcaagagatgtcgatagagaacaggaccataatgaatgcaataaacagcggtctcgacataagtccaaggatcgctattgcgaaaaggatggcgaagtgatctctaaaaaaaggaatgaggcaggcgagtggaacagggacgtttatatccgccagtag

SEQ ID NO: 110390 - DNA, 1983 bp, synthetic construct
  misc_feature 1..1983: note = Description of Artificial Sequence: Synthetic coding sequence
  source 1..1983: mol_type = other DNA
atggtgcagagagatatgtccaaatccccaccaacagccgccgccgcagttgcccaggagattcagatggaactgctggaaaacgtggcaccagctggcgccctgggcgcagccgctcagagctacggcaagggggccaggaggaagaaccgcttcaaaggaagcgatggctcaacctcaagcgacacaacatccaattcttttgtcagacagggaagcgcagacagctacaccagtcggcccagtgactccgacgtttccctggaggaggaccgggaggccgtccgacgggaagctgagaggcaggctcaggcccagcttgaaaaggcaaagactaagccagttgccttcgctgtccgtacaaatgtcagctacagcgcagcccacgaagacgatgtacccgtgccaggcatggcgatttcctttgaagccaaagacttcctccacgttaaggagaaatttaataacgactggtggatcggaaggttagttaaagagggctgtgagatagggttcatacccagccctgttaagctggaaaacatgaggctgcagcatgagcagcgcgccaaacaggggaagttctacagcagcaaaagtggcggcaacagctccagctccctcggagatatcgtgccaagctcccgcaagtcaacccccccatcgtctgccatcgacattgacgctactggcctggatgcagaagaaaatgacatacctgccaatcaccggagccctaagccttcagctaacagtgtaacatctcctcactcaaaagagaagcgcatgcctttttttaagaagactgaacataccccgccatacgatgttgtgccgagtatgcgcccagtagtccttgtgggcccatccttaaaggggtatgaagttactgatatgatgcaaaaagctctattcgatttcctcaagcaccgcttcgaaggccggatctcaataaccagagttaccgcggatatctctctggccaaaaggagcgtgttgaacaacccttccaagcatgcaattattgaaagaagcaatacaagaagttccctcgccgaggtacaaagtgaaatcgaacgcattttcgagctcgccagaacactgcagcttgtggtgctggatgcggatacaatcaaccacccagcacaacttagtaaaacttctctggcgccaattatagtgtatgtgaaaattagctcccctaaggtcctccagaggctgatcaagtcccggggtaagtctcaggcaaaacatctgaacgtgcagatggtggccgccgacaaactggcacagtgcccacctgaactgtttgatgtgattcttgatgaaaaccaactggaggacgcgtgtgagcacttggctgattatctggaggcttactggaaagctacccatcctccctcctcctctcttccaaatcctctgttgtctaggaccttggctacctcctctctgccgctgtctcccacactggctagtaattcgcagggtagccaaggcgatcagcgcactgataggtctgccccgattagatccgcatcccaagccgaggaggaaccaagtgtggaaccagtgaaaaagtcccagcataggtcttcgagttccgctccccatcacaaccacaggagcgggacctcacgaggtctgagtaggcaggagaccttcgatagtgaaacgcaggagtccagggactccgcttacgtggagcctaaagaggactacagccatgatcatgtcgatcactacgcatcccacagagaccacaatcatcgcgatgaaactcatggctcatcagatcaccggcatagggagtctcgtcaccgctccagggatgtggatagagaacaggatcacaacgaatgtaacaagcagagatctcgtcataaaagcaaagatcgatattgcgaaaaggacggagaggttatttccaagaagcggaacgaagccggcgagtggaaccgtgacgtgtacatccgccaatag

SEQ ID NO: 110391 - DNA, 1911 bp, synthetic construct
  misc_feature 1..1911: note = Description of Artificial Sequence: Synthetic coding sequence
  source 1..1911: mol_type = other DNA
atggtgcaaagagatatgagcaaaagtccccccacagccgcagctgccgtggcccaggaaatccaaatggagctcttagaaaatgtggcacccgccggcgccctgggggcggccgctcagagctacggcaagggagctagaagaaagaatcggtttaaagggagtgatggatccacttcttccgacactacatcaaattccttcgttcggcaggggtccgccgatagctacacttcgcgacctagcgatagtgacgtgtctctagaagaggaccgtgaagcagttagacgggaagccgaaagacaggcccaggcacagctggagaaagctaaaactaaacccgtggcattcgctgtgcgcacaaatgtttcctatagtgccgcccacgaagacgatgtgccagtgccaggaatggccatctctttcgaggctaaggattttctccatgttaaagagaagttcaataatgattggtggatcggacgactggttaaggaggggtgcgaaatcggtttcatcccctcccccgttaagcttgagaatatgagacttcagcatgagcagcgggccaagcagggtaagttttactccagcaaatcaggagggaactcctccagctctctcggtgatatcgttccgagcagtcgcaagtcgactccaccctcttctggtgccaagagcgctgatgaacaagaccaatggaagacggcagggctcttctggagattcaccacagagcacaccccaccctatgatgtggtgccctccatgcgacctgtggtgctcgtggggccatcccttaaggggtatgaggtgaccgacatgatgcagaaagcccttttcgacttcttaaaacaccggttcgagggtcggatatctatcactagggttactgccgatatttctctggcaaagagatcagttttgaacaatcctagtaagcatgcaattatcgagagatctaatacacgttcaagtcttgccgaagtacagtccgaaatcgagcgtatttttgagcttgcaagaactctgcaattggttgttctggatgcggacacaattaaccatcccgcccaactctctaaaacctctctggctcctatcattgtgtatgtgaagatctctagccccaaagtcctgcagcgactcattaaatcaaggggcaagtctcaggccaagcatctcaacgtccaaatggtagctgcggacaagctcgctcagtgtccccccgagctgtttgacgtcatcctcgacgaaaatcagctggaagacgcttgtgaacacctggctgactatctggaggcatattggaaagccactcacccaccttcttcctctcttcctaaccctttgctttctagaactttggcgactagcagcctacccctgtcccccacactggcatcaaatagtcaagggtctcagggggatcaaagaactgatcggtccgctcccatccgctctgcctctcaggcggaagaagaaccttctgtggagccagtgaaaaaaagtcagcacagatcttccagctcagccccacaccataatcaccgctccggaactagtcggggtttgagcaggcaggagacttttgatagcgagacacaggagtcccgtgacagtgcctacgtggaaccgaaagaagactacagtcacgatcatgtcgaccactatgcatctcatcgcgaccacaatcaccgggacgagacccacggctcaagcgaccacagacatagggagtcacgtcaccgttcgcgtgacgtggatcgcgagcaggatcacaatgaatgcaacaaacaacggtctaggcataaatccaaggacagatactgcgagaaagatggcgaagtgatctccaagaagcgcaacgaagccggcgaatggaaccgggatgtatacatccggcaatag

SEQ ID NO: 110392 - DNA, 1839 bp, synthetic construct
  misc_feature 1..1839: note = Description of Artificial Sequence: Synthetic coding sequence
  source 1..1839: mol_type = other DNA
atgaaagcaacatggattcggttgttaaagagagctaaagggggccgcttaaagaactctgatatctgtgggtccgctgactcttacacaagtaggccgagtgattcagacgtctcgctggaggaggacagggaggcagtgcgacgcgaggcagaaagacaggcccaggctcagcttgagaaggctaaaaccaagcccgtggcgtttgctgtacgcacgaacgtatcgtattctgccgcccatgaagatgacgtcccggtgcccggcatggcgatctcatttgaggctaaggattttctgcatgtgaaagagaaattcaacaatgactggtggatcggccgccttgtgaaggaagggtgtgaaattgggtttatcccctctcctgtgaagctcgaaaatatgcggcttcagcacgagcaaagagctaagcaggggaagttctattcttcaaaaagcggtggaaattcctcatctagcctgggggatatcgtgcccagctctcgcaagtcaaccccccctagctcagctatcgacatagatgctaccgggttggacgccgaagaaaacgacatccctgccaatcaccgatcacctaagccatccgccaactcagtcacctctcctcattcaaaagaaaaacgaatgccctttttcaaaaaaactgagcacacacccccatatgatgtggtgccatccatgcgtccagtcgtacttgtcggcccatcgctaaaggggtacgaagttaccgacatgatgcagaaagccctttttgatttcctaaaacatcgctttgaagggcgtattagcatcaccagagtgaccgcggatatctccctggccaagcgttcagttctgaataatccctcaaaacacgcgattatcgagaggagtaacacgaggagctcgttagcggaggtgcaatcagagatcgagcgtatcttcgaactcgcgcggaccttacaattagtggtgctcgacgccgacaccataaaccacccagcccaattgagtaagactagcctcgcccccattatcgtgtatgtgaaaatcagcagccctaaggttctgcagcggctgattaaatctcggggcaaaagccaggccaaacacctaaatgtccagatggttgcggccgataaactggcacaatgcccaccagaattgtttgacgtgattcttgacgaaaaccagttagaggatgcgtgtgaacacctcgccgactatctcgaagcttactggaaagccacacacccaccgagcagttctcttcccaatcccttgctgagccggacactggccacaagctcactgcccctgagcccaacactcgcctcaaatagtcaggggagtcagggtgatcaacgcacagacagaagtgcgccaattcgctccgctagccaagctgaggaggaaccctctgtggagccagtaaagaagtcccagcatcgctcctcgtcaagtgctccacaccataatcatcgatcagggactagcagaggtctgagccggcaggaaacattcgacagcgagacacaggaaagccgtgatagcgcttacgtcgaacctaaagaggattactcccacgatcacgtcgatcattacgctagtcaccgagaccacaatcacagggacgaaacacacggttctagcgaccaccgacaccgagaaagtagacaccggagccgtgacgtggatagagaacaggatcacaatgagtgtaataagcagcgctctcgccataagtcaaaggaccgttactgcgagaaggacggggaggtgatttccaaaaagcgcaacgaagcgggggagtggaatcgggacgtgtacatcagacaatag

SEQ ID NO: 110393 - DNA, 1704 bp, synthetic construct
  misc_feature 1..1704: note = Description of Artificial Sequence: Synthetic coding sequence
  source 1..1704: mol_type = other DNA
atgcaatgttgtggcctcgtgcaccgtagaagagtcagagtaagttatggcagcgctgattcctacacctcccgcccttctgatagtgacgtttctttggaggaggacagagaggcagtacgacgggaagccgaacggcaggctcaggcccaacttgaaaaagcgaaaacaaaacctgtggcattcgctgttaggactaacgtatcatactccgcagctcatgaggacgatgtgcccgtccctggcatggccatttctttcgaagcaaaagacttcctacacgttaaagagaagtttaacaacgactggtggatcggcagacttgttaaagaggggtgtgagatcggttttatccccagtccagtgaaattggaaaacatgcggcttcagcatgagcagcgggctaagcagggcaagttctattcatcgaaatccggggggaatagtagtagctccttaggagacattgttccatcctctcgaaagtcgacccctccctcctccgcgaagcagaaacagaagagtactgaacacactccgccttatgatgtcgtcccaagcatgagaccggtcgtgttagtgggaccttcacttaagggctatgaagtgactgacatgatgcagaaagccctcttcgatttcctcaagcatcgatttgaaggacggatcagtattaccagggtaaccgccgacataagcctcgcaaagcgttccgtgctgaacaacccctcaaaacacgcaattatcgagagatccaatacacgctctagcttggctgaagtccagtccgagatcgagagaattttcgagctggccagaactctgcagctcgtggtgctggatgcggatacgattaatcacccagcacagcttagcaaaacgtcccttgctcccatcatcgtttacgtaaagatcagctcccctaaggtgctgcagcggcttattaaatcgagaggaaagtcccaggctaaacacttaaacgttcagatggttgcggcagataagctggctcagtgtcctcccgagctctttgacgtaattctggatgaaaaccagttggaggacgcctgtgaacatctagcggactatctcgaggcctattggaaagctacccacccaccctctagctccctgcccaacccattactctctcggactctcgcaacgtcctccttgcctctttctcccaccctggcttctaacagccaaggatcccagggggatcaacgcacagatcgatctgccccgatccgatccgcctcacaggccgaggaggagccatcagtggagccggtgaagaagtcccagcaccggtcttctagctctgccccccaccacaaccatcgctctggcacgagtagggggctgagccgtcaggaaaccttcgacagcgagacccaggagtctcgcgatagcgcttatgttgagcctaaagaggattactcgcacgaccatgtcgatcattatgcgtcccaccgagaccataatcaccgcgatgagacgcatggctcaagcgaccaccgtcacagagagagtagacatcggtcaagggatgtcgaccgggagcaggatcataatgaatgcaataaacagaggtcccggcacaagagtaaagacagatactgcgaaaaagatggtgaggtcattagcaagaaacggaacgaggctggagaatggaatagggatgtgtatatacgacaatag

SEQ ID NO: 110394 - DNA, 1821 bp, synthetic construct
  misc_feature 1..1821: note = Description of Artificial Sequence: Synthetic coding sequence
  source 1..1821: mol_type = other DNA
atgttggacagacgactgattgccccgcagacaaagtacatcattccaggaggttccgcagactcttatacaagcaggccttctgatagcgacgtttcccttgaagaggaccgcgaggcggtgcgacgcgaggccgaacgccaggcacaggcacagttggaaaaggctaagacaaaacctgtagcctttgccgtccgcacaaacgtttcctactccgccgcccatgaggatgatgtgcccgtgcccgggatggccatttcgttcgaggcgaaggatttcctgcacgtgaaggagaagtttaacaatgattggtggatcggccggctggttaaggagggatgcgaaatcggatttataccaagccctgtgaaattggagaatatgcgtctgcaacatgaacagagagctaagcagggcaagttttattctagcaaatctggaggcaatagctcttcttccctgggcgacattgtaccttccagccggaagtcgacacccccaagttccgctattgatattgacgcaaccgggctggacgctgaagagaatgacatccctgcaaatcaccgtagcccaaaaccttcggcaaatagtgtgaccagcccccacagcaaagagaaaagaatgcctttttttaaaaaaacagagcacactccgccttacgatgtggtcccatctatgcggcctgtcgtgcttgttggccctagccttaagggctacgaggtgaccgacatgatgcagaaagctttgttcgacttcctgaaacatagattcgagggccgcatttcgatcacccgagttacggccgacatctcattagccaaaaggtctgtgcttaataatcctagcaagcacgctatcatcgaaagaagcaatacacgtagcagtcttgcagaagtgcagagtgaaattgaaagaattttcgagttagccaggacattgcagctggtggtgttggacgccgacaccataaatcatcctgcccagttgtccaaaacgagcctggcacccataatagtgtatgtcaaaatctcttctccaaaggtgctccagcgacttattaagtctcgaggcaagagccaggcgaaacacctgaatgtgcaaatggtggccgctgataaactcgcgcagtgtccacccgaactatttgacgtgatcctagatgagaaccagctggaagacgcatgcgagcatttggccgattatctggaggcatattggaaggccacacatcccccctcatcctcccttcctaatcctctgctgtctcggacactggcgactagctccctgcctctcagcccgactctcgcctccaattcccaaggcagccagggcgaccagcgtacagatcgcagcgcacctatccgatccgcatcccaagctgaggaggagccttcagtcgaaccggtcaaaaagagtcagcaccgatccagcagtagcgcaccgcaccacaaccaccgaagtggaactagccggggactgtcaaggcaggagacattcgactccgaaacgcaagagtcacgtgattcagcgtacgtcgaaccaaaggaggattatagccacgatcatgtggatcactacgcttcacaccgggaccataaccacagggacgagacgcacgggtccagtgatcatcggcatcgagagagcaggcataggagtagggacgtcgatagagaacaggatcacaatgagtgtaacaagcagcgttctaggcataagagtaaggaccgctactgtgagaaggatggggaggtaatctctaaaaagagaaatgaagccggagaatggaatcgcgacgtctatattagacagtag

SEQ ID NO: 110395 - DNA, 1827 bp, synthetic construct
  misc_feature 1..1827: note = Description of Artificial Sequence: Synthetic coding sequence
  source 1..1827: mol_type = other DNA
atgaaccaggggagcggcttagacttacttaagatctcctatggcaagggcgctcgccgcaaaaatcggttcaaaggatctgatgggagcacttcttccgacaccacgagtaactcctttgtgcggcaggggtccgcggattcctatactagtagaccatcagacagcgatgtctctctggaggaggacagggaggctgtgagacgcgaagcagagaggcaggcacaggcccagttagaaaaagctaaaactaagcctgtggccttcgcggtgagaacaaacgtttcctactctgccgcccacgaggacgatgtgcctgtgcctggcatggcgattagcttcgaagcaaaggacttcttacacgtgaaggaaaagttcaacaacgactggtggatcggtaggctggtgaaggaaggttgcgaaatcgggttcatcccttctccagtgaaattggagaacatgcgtttacagcacgagcagagagcaaaacaaggtaagttctacagcagtaaatctggtggcaactcaagctccagcctaggcgatattgtcccttcctcccgcaaatccaccccgccatcatccggcgctaaaagtgctgatgagcaagaccaatggaagaccgccgggctcttctggcggtttacaactgagcacacccccccttatgacgtagtgccaagtatgagacccgtggtccttgtgggcccctcactgaagggttatgaggtaacagatatgatgcagaaggcactgtttgactttttaaaacacaggtttgaggggcgtatctccataacgcgagtcactgctgacatcagtctcgctaagaggagcgtgctcaacaatccctccaagcacgccatcattgagagatcaaacaccaggtcttccctggccgaggtccaatccgaaattgaaaggatctttgaactagcacgcaccctccagttggttgtgctggacgctgatacgattaatcatccagcccaactgtcgaagacttcactggccccaattatcgtgtacgtgaagatatcttccccgaaagtgctccagcggctgatcaagtccagaggtaagagccaagccaagcatctaaatgtccaaatggtggcagctgacaagctggctcagtgcccaccagagctgttcgatgtcattctggacgagaatcagttggaggacgcctgcgaacacctcgcagactatctcgaggcttactggaaggcaacgcatccgccttcttcctcactgcctaaccctctgttatcgagaacgctcgctacatcaagtctcccactctctcctacactggccagtaatagccaaggaagccagggcgatcagcggaccgaccgcagtgctcccatcagatccgcttcccaggccgaagaggagccatctgtagagcctgtcaagaaatcacagcataggtcttcatctagcgccccccaccacaaccatcggagcggaacatccagggggctatctagacaggaaacctttgactcggaaactcaggaaagtagggattcagcgtacgtcgaacccaaagaggattattctcacgaccatgtggaccattacgctagtcatcgggatcataatcatcgggacgagacccatggaagctccgatcaccgccatcgcgagtcgcgacaccggagcagagatgtggatcgtgagcaggatcacaacgagtgtaacaaacagcgttcacggcataagtctaaggatcgatactgtgaaaaggatggcgaggtgatcagcaaaaagagaaatgaagctggagaatggaatagagatgtatatataaggcagtag

SEQ ID NO: 110396 - DNA, 1818 bp, synthetic construct
  misc_feature 1..1818: note = Description of Artificial Sequence: Synthetic coding sequence
  source 1..1818: mol_type = other DNA
atgcagtgctgtggcctggtccacaggaggagggtgagagtctcttacggctctgcggattcttacacctctagaccatccgactccgacgtcagtttagaagaagatagagaggcagtccgcagggaagcagaaagacaggcacaggcccaactggaaaaggccaagacaaaacctgtggcctttgctgtgaggaccaacgtgtcttactcagcagcacatgaggacgacgttcctgtgcccgggatggcaatctcattcgaggctaaagattttcttcatgtgaaggagaaattcaataatgattggtggatcggccggctggtgaaagaaggctgtgaaattggcttcatccctagccctgttaagctggagaacatgcgcctgcagcatgaacagcgcgccaagcagggtaagttctactcaagcaagagtggcgggaattcatctagctccctcggtgacatcgtaccaagttctagaaaaagcacacccccatcatccgccatagacatcgatgctactggcctggatgctgaggagaatgatataccagcaaaccatcgatcccctaagccttcagcaaattctgtgacgtctccccactctaaagaaaaaagaatgcctttctttaagaagaccgaacacactcctccatatgatgtggtacctagcatgcggccagtcgtcctcgtcggaccatctttaaagggatatgaagtaaccgacatgatgcaaaaagcgctcttcgatttcctcaaacaccgctttgagggcagaatctctattacacgagtgacagccgacatcagtcttgccaagagaagcgttctgaataatccatctaaacatgccataatcgaacgaagcaatactcgaagctctctggcagaggtccagtccgagatcgagcggatatttgaacttgcacgcacgctccagctggtagtgctggacgctgacacgatcaatcatcctgcacagctatcgaagacgtctcttgcacccataattgtatatgtgaagatttcatctcccaaggtgctacaacggctgatcaagtcccgcgggaagtcccaggccaaacacttgaatgtgcagatggttgccgcagacaaattggcccagtgcccacccgagctcttcgacgttatcttggacgagaaccagctagaggacgcctgcgaacacttggctgactatctagaagcctactggaaggcaacacacccaccgtctagctccctgccgaatcccctgctgtcccgcaccctagcaacaagttcgctccccttgtctcctaccctcgcgagtaattctcaggggtcccaaggagaccagcggacggaccgctccgcccctatacgctcagccagtcaagccgaagaggagccctcggtagagcctgtgaaaaagtctcagcacaggagcagctccagtgcgccacaccacaatcaccgaagtggtacatcccgcggtctgtcccgacaggagaccttcgatagtgaaacccaagagtcccgggattctgcctatgtcgagcccaaagaggactactcccatgaccacgtcgatcattatgcgagccaccgtgatcataaccaccgcgatgagacacatggcagctccgatcacagacaccgcgaaagcaggcataggtccagggatgtagaccgcgaacaggatcataatgagtgtaacaagcagcgaagtaggcacaaatcaaaggatcggtattgcgagaaggacggggaagttattagtaagaaaagaaatgaggccggagaatggaatcgggatgtatacatccggcagtag

SEQ ID NO: 110397 - DNA, 1455 bp, synthetic construct
  misc_feature 1..1455: note = Description of Artificial Sequence: Synthetic coding sequence
  source 1..1455: mol_type = other DNA
atgtatgacgacagttatgtgcccggattcgaggacagtgaggcgggaagtgctgactcatacaccagccgcccaagtctcgattctgacgtgtccctggaggaggacagggagtcagccagacgtgaagttgaatcccaagcgcagcaacagctcgagcgagctaagcacaaacctgtagcctttgcggtcagaacaaatgtaagttactgcggagtcctcgacgaagagtgccccgttcaaggcagcggcgtgaactttgaagcaaaagacttcctccacattaaagagaagtattccaacgattggtggattggacgcctggtgaaggagggcggggatatcgccttcattcccagccctcagcgcctcgaaagcatccgcttaaaacaggagcaaaaagcaagaaggtccggtaaccctagctctctttcggacataggaaataggcggtcacccccacccagcctcgctaagcagaagcagaaacaggccgagcacgttcctccatacgatgttgttccttctatgcgcccagtggttctagtcggtcctagtctgaaggggtatgaggttacagatatgatgcagaaggccttattcgacttcctgaaacaccggtttgacggcagaataagtataacacgcgtaacagctgacttatctctggctaagagatccgtccttaataatccaggaaaaagaactatcatcgaacgctcttcagctcggtcttccattgcagaagtccagtcagagattgaaaggatcttcgagctagcaaaaagccttcagctggttgtgttagacgccgatactattaaccatccagctcaactggcaaagacatcactcgctccaataatagtcttcgtcaaggtgtcatcacccaaggtgctgcagcgcctgattcgatctaggggaaaatcccagatgaaacatctcaccgtccaaatgatggcttacgataaactcgttcagtgcccacctgaatcatttgacgtcattctcgacgaaaatcagttggaggacgcatgcgagcacctcgccgagtacttagaggtgtattggcgcgcgactcatcatcccgccccggggcccgggctgctcggccctccttcagctatacccggtttgcaaaaccagcagctattgggggaacggggagaggagcatagtcccttggagcgggacagcctaatgccaagcgacgaggcctctgaaagtagccgacaggcttggaccggatcgagccaacggtcctcaaggcatttggaagaggactacgccgatgcttatcaggatctgtaccagcctcacagacaacacaccagcggcttaccgtctgcaaatggccacgatcctcaggacagacttctagcacaggatagcgagcacaatcacagcgatcggaactggcagcgaaatcgaccctggcctaaggacagctattag

SEQ ID NO: 110398 - DNA, 1566 bp, synthetic construct
  misc_feature 1..1566: note = Description of Artificial Sequence: Synthetic coding sequence
  source 1..1566: mol_type = other DNA
atgagttctagcagctacgccaagaatggcacggccgacgggccccactccccaacttcacaggtggcacgcgggactaccactcgacggtcccgcctcaaacgctcagatggttctaccacttccacaagctttattctccggcaggggtctgccgactcctatacctccaggcccagtgactccgatgtgtctttagaagaagatcgggaagccatccgacaggagcgtgaacagcaagccgctattcagctggagagggctaaatctaagcccgtggcctttgcggtgaagactaatgtatcatattgtggagccctggatgaagacgtgcctgttcccagcacagccatctccttcgacgccaaggatttcctgcatatcaaagagaaatataataatgattggtggatagggcgcctggttaaagaaggctgtgagatcggttttattccatcaccacttcggctcgagaacattagaattcaacaggaacagaagagaggccgttttcacggcggcaaaagtagcggcaactcgagttccagtctgggcgagatggtgtcgggaacatttcgagccacccctacctcgacagtcaagatggtacttaagatccacaccgaacacattcctccttacgatgtcgtcccctcgatgcgtcctgtcgtcttggtagggccaagtttgaagggctatgaggtgacggatatgatgcaaaaagctctttttgacttcctgaaacacagattcgacgggagaatatcaatcacccgggtaacagcagatataagccttgctaaaagatccgtcctcaacaacccgagtaagcgcgccattattgaacgaagcaatactcgaagcagcctcgctgaagtgcagtcagaaattgagaggattttcgaactggccaggtccctgcaactggtggtactcgatgctgatacgattaatcaccccgctcagctgatcaaaaccagcctggcaccaatcatcgtgcatgttaaagtctctagtcccaaagtactgcagcggctcattaaatcccgaggcaaaagccagtccaagcacctcaacgttcaactggtggccgccgataaactggctcagtgcccccctgaaatgtttgatgtgatacttgatgagaaccaactcgaagatgcatgcgagcatctaggtgagtatctcgaggcttattggcgggccacgcataccacctcttctactccaatgactccgctgctagggcggaacttggggagcacagcactgtctccatatcccacagccattagcgggctgcagagccagaggatgcgtcactccaaccacagcactgaaaactctcccatagagaggagatcactgatgacctccgatgagaactatcataacgagagggctaggaaatcccgcaacagactgtcatcgtcaagtcagcacagccgggatcactatccattagtggaagaggattaccctgatagctaccaagacacctacaagccccaccgcaaccgggggagccccggcggctatagccacgacagcagacaccgtctatag

SEQ ID NO: 110399 - DNA, 1464 bp, synthetic construct
  misc_feature 1..1464: note = Description of Artificial Sequence: Synthetic coding sequence
  source 1..1464: mol_type = other DNA
atgtacgacaatctgtatctgcatgggatagaagactctgaggcaggtagcgccgattcctacacctccaggccatccgactcagacgtgagcctggaggaggatagggaagctataagacaagagagagagcaacaggccgccatccagctagagcgtgcaaaatccaaacccgtagccttcgcggtaaagacaaatgtgagttattgtggcgcactggatgaagacgttcccgtaccctctacagccatctcattcgatgcaaaagattttttgcacattaaggaaaaatacaataacgattggtggattggccgcttagtgaaggagggttgcgagatagggttcatcccatctccactgaggttggagaacatccgcatacaacaggagcagaagcgtggccgcttccacggggggaaaagctccggcaatagtagctctagccttggagagatggtctcaggcaccttcagagccacgcccacgagcaccgtcaagatggtgctgaagatccataccgagcatatacctccctatgatgttgtcccatcaatgcgccccgttgtgttggtaggaccaagtttgaaagggtatgaagttactgacatgatgcagaaggccctttttgacttcctgaagcatcgttttgacggaagaatcagcattacacgtgtgacagctgacatcagcctggcgaaacggagcgtcctgaacaatccatccaagagggccatcatcgagcgaagtaatacacgctctagccttgctgaagtgcagagcgaaattgagcggatctttgaactcgcgaggtctctgcagcttgtggtccttgacgccgacaccattaaccacccagctcagctgatcaagacttccctggcacctattattgtccatgtgaaggtgtccagcccgaaggtacttcaacggctcataaaatcaagggggaaatctcagagtaaacacctgaacgtgcagctggtggctgcagacaagcttgctcagtgtccccctgagatgttcgacgtgattcttgatgagaatcagctagaggacgcttgcgagcacttaggggagtatttagaagcctactggagggccactcacactactagctccaccccgatgacgccattactgggacgaaatcttggcagcactgctctgagtccctaccctacagccattagtggtctgcagagtcaaaggatgcgccactccaatcatagtacagagaactctcccatcgagaggcgaagtctgatgactagcgacgagaactaccataatgaacgggcacgcaagtctcggaaccgtctgtcttcctctagtcagcatagtagggatcactatcctctagttgaagaagattatccagatagttaccaagatacatacaagccacaccgtaaccgagggagtcctggaggatatagtcatgacagccgacacaggctgtag

SEQ ID NO: 110400 - DNA, 1461 bp, synthetic construct
  misc_feature 1..1461: note = Description of Artificial Sequence: Synthetic coding sequence
  source 1..1461: mol_type = other DNA
atgtacgataacttgtacttacacggcatcgaagacagtgaagctggtagcgccgattcgtatacaagccgcccctccgattcagatgtctccctcgaagaggatcgcgaagcaattcgtcaagagcgagagcagcaggcggccatacaactggaacgggccaagtccaagcccgttgccttcgcggtgaaaaccaatgtgtcttactgcggagctctcgatgaagatgttcctgtgccctcaaccgccatctccttcgatgcgaaagatttcctccacattaaagagaaatataataatgattggtggattggaagacttgtgaaggaggggtgcgaaattggcttcatcccctccccactgcggctcgaaaacatcaggatccagcaggagcagaagcgagggcggttccacgggggaaagtcttccgggaacagtagctcatctcttggtgagatggtgtcaggcacattccgggccaccccaacatccaccgctaagcagaaacaaaaggtaactgagcatataccaccgtatgatgttgttccttccatgagacctgtcgtgttggtcgggcccagtcttaaaggctacgaagtgaccgacatgatgcaaaaagcccttttcgatttcctgaaacacaggtttgacggtaggatttccattacccgggtaacagcagatatctcactggccaaaagatctgtactgaataacccttccaaacgggctatcatcgaaagatctaacacacggtcttcactagctgaagtgcagagtgaaattgagagaatatttgaactggcccggtctttgcagctagtcgtcctggatgcagacactattaaccaccccgcgcagctcatcaagaccagtttggccccaattatagtccacgttaaggtgtcgtccccaaaagtcctgcaaaggctcataaagtctcggggaaagtcccagtccaaacacctgaacgtgcaactggtggcagccgataaattggcacagtgtcctccagaaatgtttgatgtgatccttgacgaaaatcagcttgaggatgcttgtgagcacttaggcgaatatctcgaagcctattggagagcgacacacaccacctcaagcacccccatgacaccattgcttggacgaaatcttgggagtaccgctctgtccccctacccaacggccatctccggacttcagtcccagcggatgaggcattctaatcactcgaccgagaattcaccaatagagagacggtccttaatgacaagcgatgaaaactaccataatgagagggccaggaaaagtaggaaccgcttgtcgtcttcttcgcagcacagccgcgaccattatcctcttgtagaagaagactatcccgatagctatcaggacacctacaaaccacatagaaatagggggagccctggggggtacagtcatgactcgagacaccgtctgtag

SEQ ID NO: 110401 - DNA, 1563 bp, synthetic construct
  misc_feature 1..1563: note = Description of Artificial Sequence: Synthetic coding sequence
  source 1..1563: mol_type = other DNA
atgtcttcttcttcctatgccaagaacggtaccgctgacggaccccacagccctacgtcccaagtggctagaggaactaccacccggcggagccgcctgaagcggagtgatgggtccactacgagcacttcctttattctgagacaaggatctgcagattcgtacacgtcccggccatctgactcagacgtcagcttggaggaagatagagaagccatcagacaagagagggagcagcaagccgcaatccaactggagcgcgcaaagtccaaacccgtcgcctttgcagtcaaaaccaacgtttcatattgcggggctttggatgaggatgtaccagtaccatccacagcgatctccttcgatgccaaggacttcctgcacataaaggagaaatacaacaatgattggtggattggtcgcttggttaaggaaggttgcgagatcgggtttattccttcacccttaagattagagaatattcgtatccagcaagagcagaagcgcggacgctttcacggcggtaaaagcagtggcaattcctcaagctccctgggtgagatggtctctgggacctttcgagccactcccaccagcacggccaagcaaaagcaaaaggtcaccgaacatattccgccgtatgacgtggtgccaagtatgaggcctgtcgtcctggtgggtccttctctgaaaggttacgaagtcactgatatgatgcagaaggcccttttcgacttcctaaagcacaggtttgacgggaggatctcaataacccgagtgaccgcagacatctccctggctaagagaagtgtgctgaacaatccatccaagcgggctattatcgagaggtcaaacacccgatcgagcctggccgaggtccaatccgaaatcgagaggatttttgaattagcaagatcccttcagctggtggttttagacgcagatacaatcaatcatcccgcacagcttatcaagacatcacttgccccaattatagtacacgtgaaggttagctcccctaaggtgctgcagcggctaatcaagagcagaggtaagtcccagagtaaacaccttaacgtgcagttggtggccgcagataagctggctcagtgccctcccgagatgttcgacgtcatcttggatgaaaaccaattggaggatgcctgcgagcacctgggtgaataccttgaagcatactggagggctactcacaccacttcatcaactccaatgaccccccttctgggtcgtaatttgggctccacagcccttagtccgtacccaactgcaatttcaggactccagtcacagagaatgcgccatagtaaccactctactgagaattctcctatcgagcgccgcagtctaatgaccagcgacgaaaactaccacaacgagcgggctcggaagtctagaaatcgactgagtagcagcagtcagcatagtcgagaccattacccattagtcgaggaggattatcctgatagctatcaggacacttataaaccccatcggaaccgtgggtctccaggaggctattcccacgactctcgccaccgtctatag

SEQ ID NO: 110402 - DNA, 1248 bp, synthetic construct
  misc_feature 1..1248: note = Description of Artificial Sequence: Synthetic coding sequence
  source 1..1248: mol_type = other DNA
ttctattttctctgtcagggaagcgcagatagctacacctcccgccccagcgactctgatgtgtccttggaggaggaccgggaagccattcgccaggagcgcgagcagcaagcagccattcagctcgagcgcgcgaagagcaaaccagtggcgttcgctgtgaagacaaatgtctcgtactgcggagctctggacgaggacgtaccggttccatcaactgccatctccttcgacgcgaaagattttctgcacattaaagaaaaatataacaatgactggtggatcgggaggctagtgaaggaagggtgtgagataggctttatcccttcccctctcaggttagaaaacattcggatccagcaagagcaaaaaagaggcaggtttcacggcgggaagtcaagtgggaactcgagcagtagcctgggcgagatggtgagtggcacgttccgtgcgacacccacttccacggcaaagcaaaaacagaaagtgactgaacatatacccccatacgatgttgttcccagcatgagacccgtcgtgcttgtcggaccttcactgaagggctacgaagtcacagacatgatgcagaaagcactcttcgactttctgaagcaccggtttgacggcaggatatctataacaagggtgacagcagatatttctctggcaaagagaagcgtgttaaacaacccttcaaaaagagctataatcgagcgaagtaacaccagatccagtctggctgaggtacagtcagaaatcgagcggattttcgaactggcccgaagcttgcagttagtggtactggacgccgacaccattaatcaccctgcccagctcattaagaccagtctcgcccccatcatagtgcacgtgaaggtgtccagccccaaagtgttgcagaggctgatcaagagcagaggcaaatcccaatcaaaacatttgaacgttcaactcgtcgccgcagacaagcttgcccaatgccccccctctcagagaatgagacatagtaaccactccaccgaaaattctccaattgaaaggagaagtttgatgacctcagacgagaactatcacaacgagagggcaagaaaatcccggaatcggttgagtagctccagccagcattctagggatcattaccctcttgtcgaagaagattacccagacagctaccaggacacgtacaaaccacaccgaaatcgaggtagtcctggcggatacagtcacgacagtcgtcaccgtctctag

SEQ ID NO: 110403 - DNA, 558 bp, synthetic construct
  misc_feature 1..558: note = Description of Artificial Sequence: Synthetic coding sequence
  source 1..558: mol_type = other DNA
atgtccggcagctttgaactgagcgtgcaagacctgaatgacttgttaagcgatggttccggctgttactccttgccaagccagccatgcaatgaagtgacaccgcggatttatgtaggaaatgcctcggtggctcaagatatcccaaagctgcaaaagcttggcatcacacatgttctgaatgctgccgaaggcagaagttttatgcacgtgaatacaaatgcaaatttttacaaggacagcggtattacttacctgggcataaaggccaacgatacccaagagtttaatctctcagcttattttgagagggctgctgacttcattgatcaggcgctcgcccagaaaaatggtagagtgctggtgcattgcagagaaggctacagtcgctcccccacgctggtgatagcatacctgatgatgcggcaaaagatggatgtgaaatcggccctgtcaattgtcaggcagaatagggagattgggccaaatgacggattcctcgcacagctgtgccaactgaatgatcgactggccaaagagggaaaattaaagccttag

SEQ ID NO: 110404 - DNA, 972 bp, synthetic construct
  misc_feature 1..972: note = Description of Artificial Sequence: Synthetic coding sequence
  source 1..972: mol_type = other DNA
atggggctatttgatagaggcgtgcaaatgttgctgacaacagtcggagcatttgccgccttttcactaatgactatagctgtgggaacggactactggctttactctcgaggcgtctgcaaaaccaagagcgttagcgagaatgaaactagcaaaaaaaacgaagaagtgatgacccactccggactttggaggacatgttgtctcgagggaaatttcaagggcctctgtaaacagatcgaccacttcccagaagatgctgactacgaggcagataccgcagagtatttcttgagagccgtgcgcgcctcgagcatctttcctatcctttccgttatcctgctcttcatggggggcctttgcatcgcagcttcggaattctacaagacgcgccataacatcatactctctgcaggcattttctttgtcagtgcgggactctctaacatcatcggaataatagtgtacatcagcgccaatgccggagacccctccaaaagcgacagcaagaagaatagttactcttacggctggagcttctatttcggggccctttcttttatcattgcggaaatggtgggggttctcgctgtacatatgttcatcgatcgccataagcagctgcgcgcaactgctcgcgctacggactatcttcaggccagcgccataaccagaattccttcctatcgctatagataccagcgtcggagtagatcaagttcccggagcacagagccatcccacagcagggatgccagcccagtgggcataaagggctttaatactctccctagtacagagatatccatgtatacacttagtcgagatcctttgaaggcagccacgacgcctaccgccacgtataattccgacagagacaatagctttctgcaggtgcacaactgtatccaaaaagaaaataaggattcgttgcacagcaatacagcaaaccggcggacaacccccgtttag

SEQ ID NO: 110405 - DNA, 948 bp, synthetic construct
  misc_feature 1..948: note = Description of Artificial Sequence: Synthetic coding sequence
  source 1..948: mol_type = other DNA
atgcggatgtgcgacaggggaatccagatgctcatcactaccgtgggtgcctttgctgccttctctctaatgacaatagccgtgggcacagactattggctttacagccgcggggtgtgtcgtaccaagagtacatctgacaatgagacatcgagaaagaatgaggaggtcatgacacactcaggactttggagaacatgttgcctggagggcgcctttcggggtgtgtgcaaaaaaattgaccacttccccgaagacgccgattatgagcaagatactgctgaatatctcctgagagctgtgagagccagctcagtcttccctatcttgagcgtgacactcctcttttttggtggcctgtgcgtggcagcaagtgaattccaccgaagtaggcacaacgtcattctctcagccggcattttcttcgtgtcggcaggactaagcaacatcataggcattatcgtgtatatttccgccaacgcaggtgatcctggacaaagggattccaagaagtcctactcatacgggtggtcattttacttcggggccttcagttttatcattgctgaaattgttggcgtggtggccgtgcacatttatattgagaaacaccagcagttaagggcgaagtctcattccgaattcctaaagaagtctaccttcgccagattgcccccgtaccgctacagatttagacgacgaagttcaagtaggtccaccgaacctcggtcacgggacctgtcacccataagcaaggggttccacaccattccttccacggacatctctatgttcaccctgtccagggatccatccaaaataacaatggggaccctcctgaacagtgaccgggaccacgcttttctccaattccacaatagcacaccaaaggagtttaaggagagtctgcataacaaccccgccaatagacggacaactccagtctag

SEQ ID NO: 110406 - DNA, 891 bp, synthetic construct
  misc_feature 1..891: note = Description of Artificial Sequence: Synthetic coding sequence
  source 1..891: mol_type = other DNA
atgtctgcctgcgggcggaaggcacttaccctgctgtcaagcgtatttgcagtgtgcggcctgggcctacttggtatcgccgtgagcaccgactactggctgtacctggaggagggcgtgatcgtgccgcagaatcagtcaaccgagatcaagatgagtctacacagcggactctggagggtttgctttctcgctggagaggaacgggggaggtgcttcaccattgaatatgttatgccgatgaacactcagcttacatccgagtccaccgtgaacgtgctgaagatgatacgctccgcaacaccattcccactggtctccctgtttttcatgtttattgggtttatcctgaataacatcggtcacatcagacctcaccgcaccatcctcgcatttgtctccggtatcttctttattttgagcggtctgtcccttgtggtgggactggtgttgtacatttcatctataaacgacgaaatgcttaacaggaccaaagatgccgaaacctacttcaattataagtatggctggagctttgctttcgctgcaattagtttccttctgaccgaagtcaagcccgtgacactgagcatggatagactcggcctcggaacagctcccttatctcgaggcgagtggggatggggcagacgcgacatacctcaacctttttggacccctgaccaccctctgtattttccctcctcttctcaaaatgtaagcttgagctatctgtccggcagtcctccagcccgtatgagccccggtccatgttcttgccctcacgtgcactttcccccccactctagctgcgtcctttgtaggcctcagccacgggagatgagacaagctccagctgcaagtcccagcagcgccgttttctcgctgtag

SEQ ID NO: 110407 - DNA, 828 bp, synthetic construct
  misc_feature 1..828: note = Description of Artificial Sequence: Synthetic coding sequence
  source 1..828: mol_type = other DNA
atgagcgcttgcggcaggaaagccttgacattgctttcttctgtgttcgccgtgtgcgggcttggcctgctggggatcgctgtgtccactgattactggctttacctagaggagggggtgattgtgccacagaatcaatcaactgagatcaagatgagtctccattcaggactctggcgcgtatgttttctggcgggtgaggaaagggggcgctgtttcacaatcgagtatgtgatgccaatgaacactcaactgacctccgagtcgaccgtaaacgtcctgaagatgatacggtctgctactccatttccactagtgtcactgtttttcatgttcattggtttcatcctgaacaacattggccacatccgaccacataggactatactcgccttcgtgagcgggatcttctttatactgtcaggactgtctctggtggtgggtttggtgctctatatctctagcatcaatgatgaaatgttaaatcggaccaaggatgcagagacatacttcaactataaatatggatggtccttcgccttcgccgcgattagcttcctcctcactgagtccgctggagtcatgtccgtatacctgtttatgaaacggtataccgccgaggatatgtataggccacatcccggtttctaccggccccggctgagcaactgcagcgattactctggacaatttctgcatcctgacgcatgggttaggggccggtcgccatccgatattagttcagaggcgagcctgcagatgaactcaaattatcccgccctgttgaaatgtccagactatgaccaaatgtcttcgtccccctgttag

SEQ ID NO: 110408 - DNA, 828 bp, synthetic construct
  misc_feature 1..828: note = Description of Artificial Sequence: Synthetic coding sequence
  source 1..828: mol_type = other DNA
atgagtgcttgcgggcggaaggccctgaccctcctttcatctgtcttcgctgtgtgtgggcttggattgctgggaattgccgtgagcaccgactattggctctacctggaggaaggcgtcatcgtcccacagaatcagtcgacagaaatcaagatgtcgcttcactccggcctttggcgggtgtgtttcctggcaggcgaggaaagaggaaggtgcttcacaattgagtacgttatgccgatgaatacccaactaacatccgagtccacggttaatgttttaaagatgatcaggagcgcaacgccgtttcccctcgtgagcctattttttatgtttatcggattcatcctcaataacatcggccacatcagaccgcataggaccatcttggccttcgtgagcgggatttttttcatcttgtccggtctgtctctcgtggtagggctggtgctgtacatatccagtattaatgatgaaatgctgaaccggacaaaagacgctgagacgtattttaactacaagtatgggtggtctttcgcctttgcagcaatctcattccttctcacagaatccgccggtgtgatgtccgtgtatctgtttatgaagcggtacaccgccgaagacatgtatcgaccacatccgggcttttaccgtccccgcctgtctaactgttccgactattcaggtcaattcctacaccctgacgcctgggtgcggggcagatcaccttccgacattagcagcgaggccagcttgcagatgaactctaactatcccgcgctgctcaagtgtcccgactacgaccagatgtcttccagcccttgctag

SEQ ID NO: 110409 - DNA, 783 bp, synthetic construct
  misc_feature 1..783: note = Description of Artificial Sequence: Synthetic coding sequence
  source 1..783: mol_type = other DNA
atgatgtggagtaactttttcctgcaggaggagaatagacggcggggcgccgcgggtcgccgccgagctcatgggcagggccgaagcggtctgactccagagagagagggaaaggtgaaactcgcgctgctgctggcagcggtcggcgctacactcgctgtccttagtgtgggaactgagttttgggtggagctgaacacttacaaggccaatgggtccgccgtgtgcgaggccgctcatcttggtctctggaaagcatgtaccaaacgtctttggcaggctgacgtcccagtggaccgagacacatgtggccccgcggagttacccggtgaagccaactgtacttatttcaagtttttcaccacaggagaaaatgcgcgcatttttcagaggacaacaaagaaggaagttaaccttgccgctgcagtcatcgccgtattggggttggcagtcatggctctggggtgtctctgtatcattatggtcttgtccaaaggggccgaattcctgttgagagtaggtgctgtatgttttggcctgtctggtctgctgctactggtaagtctcgaggtgtttcggcactccgtcagggcactcctgcagcgagtgagtcccgaaccaccacctgccccgcgcctcacatacgaatactcatggagtctcggctgcggggtcggtgcgggcctcattttgttactgggcgctggctgcttcctcctccttacactcccctcttggccctgggggagcctgtgtcccaaacgtggacaccgcgcaacctag

SEQ ID NO: 110410 - DNA, 645 bp, synthetic construct
  misc_feature 1..645: note = Description of Artificial Sequence: Synthetic coding sequence
  source 1..645: mol_type = other DNA
atgatgtggtctaacttctttctgcaggaagagaacaggcggcggggcgccgcaggccgcagacgggcacacggccagggcaggagcggtctgacaccagagagggagggcaaagtgaaacttgctctcctcttggctgcagttggcgctacgctggctgtgctgagtgttggcaccgaattctgggtcgaactgaacacgtacaaggcaaacggctccgcagtgtgtgaggctgcccacctgggactctggaaagcatgcactaagcgcctgtggcaggccgacgttcctgttgacagagatacatgtggcccagccgaattgccaggcgaagccaactgcacctatttcaagttttttaccactggagaaaatgcgcggatttttcagcgcactaccaagaaggggttactcctgttggtgagtctggaggtgttcaggcactctgttagagcactccttcaacgcgtgtcaccagaaccacctcctgccccccgccttacgtacgaatactcctggagcctaggctgtggggtaggggccggactgatcctcctattgggtgccggctgttttttattactgacactgccttcctggccttggggctcactctgcccaaagagaggtcacagagccacttag

SEQ ID NO: 110411 - DNA, 570 bp, synthetic construct
  misc_feature 1..570: note = Description of Artificial Sequence: Synthetic coding sequence
  source 1..570: mol_type = other DNA
atgatgtggtccaatttcttcctgcaagaggaaaataggcggagaggcgctgcgggcaggcgaagagcacatgggcagggtcgatcaggactgacccctgagagagagggcaaggtcaagctcgccttactcctcgctgcggtaggggcaaccctcgcggttctgtccgtaggcaccgagttttgggtggaactgaatacatacaaagccaatggctccgcagtgtgtgaagcagcccacttaggactgtggaaggcgtgtaccaagagattgtggcaggccgatgtaccagtggaccgggatacatgcggtccagccgaacttccaggcgggttgctcctgctggtgagccttgaggtgttcagacattcagtcagagctctgctgcagcgcgtttcacctgagccaccaccagcccctcgtctaacctacgagtactcctggtcgctgggctgcggcgtcggcgccgggcttattctgctgttaggcgcaggttgctttctgctgctgaccctgcccagctggccttggggaagcctttgcccaaagagaggtcaccgcgctacgtag

SEQ ID NO: 110412 - DNA, 321 bp, synthetic construct
  misc_feature 1..321: note = Description of Artificial Sequence: Synthetic coding sequence
  source 1..321: mol_type = other DNA
atgagtacgaataacatgtccgacccccgcagacccaacaaagtgttacggtacaagcccccccctagtgaatgcaacccagcccttgacgacccgactccggactacatgaacctgctcggaatgattttttcaatgtgtggactgatgctcaagctgaaatggtgtgcctgggttgccgtgtattgttcattcatttcttttgctaactccagatcatcggaagacaccaagcagatgatgtcttcttttatgctgtcaattagcgccgtggttatgagttaccttcagaatccgcagcctatgacacccccatggtag

SEQ ID NO: 110413 - DNA, 828 bp, synthetic construct
  misc_feature 1..828: note = Description of Artificial Sequence: Synthetic coding sequence
  source 1..828: mol_type = other DNA
atgagccattgcagcagtagggctctcacactgctgtcctccgtattcggcgcgtgtgggcttctgctcgtaggaattgcagtgtccaccgattactggctctacatggaagaaggaaccgtgcttccccagaatcagaccactgaagtgaaaatggccttacatgcaggactttggagagtatgttttttcgccggccgcgagaagggccggtgtgtcgcaagtgagtattttctagagcccgagattaacctagtgactgagaatactgagaatattctgaaaacagtcaggaccgcgactcccttcccaatggtgagcctgttccttgtttttaccgccttcgtcatctcaaatattggccatatcaggccccagaggacaatcctcgcattcgtctcagggatctttttcatactgagcggcctgtctctggtggtaggtttagttctctatatcagtagtattaatgatgaagtcatgaatcgaccgagtagcagcgagcagtattttcactacaggtatggatggagttttgcttttgcggcatccagtttcctcctcaaggagggcgcgggtgtcatgtcagtctacttgttcaccaaaaggtatgccgaggaagagatgtatcggccgcatcctgctttttacagacctaggctctccgactgctctgactactccggccagttcctccagcccgaggcttggaggcggggtcggtctcccagtgacatttcctccgatgtttccattcaaatgacccagaactatccacccgctatcaaatatcccgaccacctgcacatttctaccagcccttgctag

SEQ ID NO: 110414 - DNA, 1278 bp, synthetic construct
  misc_feature 1..1278: note = Description of Artificial Sequence: Synthetic coding sequence
  source 1..1278: mol_type = other DNA
cttgagtcacttaaacgatggaacgaagagaggggcctgtggtgtgagaaaggcgtccaggtgctcttgacaacggttggagcattcgctgcgttcgggctgatgacaatcgcaatctccaccgattactggctgtacacacgggcactaatctgcaacacgaccaacctaaccgcaggaggggacgatggcaccccccaccgcggaggcggcggcgcttccgagaagaaggaccctggcggtctcacgcacagcggattatggcgaatttgttgtttagaaggcctaaaacgtggagtctgtgtcaaaatcaatcatttccccgaggatacagattacgatcatgatagtgcggagtatctccttagggtggtgagagccagctcaatctttccgattctgtccgccatactgctcctcctgggcggtgtgtgtgtcgctgcatctcgcgtgtataaatcaaaacgtaatatcattcttggggctggcatcctattcgtggccgccggtttatcaaatataattggcgtcattgtgtatatatcagccaatgctggggaacccggtcccaagcgagacgaggagaagaagaaccactactcctatggttggagcttctactttggcggtcttagttttatcttggccgaggtgatcggtgtcttggcagtgaacatttatattgaacgcagtagagaggctcactgtcagagccgctccgacctgctgaaggccgggggcggagccggtgggagcggtgggtctgggccctcagctatcctccgactgccaagctatcgattccggtatcgtaggagaagccggagttcttcccggtcttcagagccatctcccagtagggatgcttccccaggcgggcctggaggtccagggtttgccagtacggacattagcatgtacaccctttcaagggacccaagcaaaggatctgtggcggcaggcctggctggggcaggaggcggtggaggcggcgctgtgggagccttcggaggtgcagctggtggcgctggcggagggggtggcggcggggggggggccggcgcagagagagaccggggcggcgcttcagggtttctaaccttacacaatgctttccccaaagaggctgggggcggggtaaccgttacagtgacaggtccgcctgctcctcccgctccagcgccccctgccccgtctgccccagctccagggaccctggctaaagaggcagcagcctctaacacgaatacgttaaatcgcaagactacgccggtgtag

SEQ ID NO: 110415 - DNA, 6540 bp, synthetic construct
  misc_feature 1..6540: note = Description of Artificial Sequence: Synthetic coding sequence
  source 1..6540: mol_type = other DNA
atggtgaatgaaaatacaagaatgtatattccagaagagaaccaccagggctccaactatggatccccacgtccagcacacgctaacatgaatgccaacgcagcggcaggcctggcccccgagcatattccgacaccgggagccgcactaagttggcaagccgctatagacgctgcccgtcaggccaagcttatgggttccgcaggaaacgccacaatttctactgtgagttccacacagagaaaacggcaacagtacgggaagcccaagaagcagggaagcactacggccaccagacccccacgagccctgctgtgtctgacgctgaagaacccgatacggagggcttgtatcagcatcgtcgaatggaaacctttcgaaattatcatactactcacaatcttcgcgaattgcgttgctctggccatttatatccctttccccgaagacgacagtaacgccaccaactcaaatctggaacgggtggaatacctgttcctaatcattttcacagtggaagcgtttctaaaagtgatcgcttatggcttgctgttccatcctaacgcttacctccgcaacggctggaatctgctggacttcatcatcgtcgttgtcggacttttctcggcaattctcgaacaggccaccaaagccgatggagcaaatgcgctgggtgggaaaggtgccggcttcgatgtgaaagcattgagggcatttagagtgcttcgaccgctcaggcttgtgtctggggtgccgtctcttcaagttgtgctcaactccatcattaaggccatggtccctcttctccacatagcactcctggtcctctttgtgattattatctacgccatcatcggcctggaattgttcatgggcaagatgcataaaacctgctacaaccaggaagggatcgccgacgtccctgctgaggatgaccctagtccgtgcgccctggagaccggccacgggagacaatgccagaacggaacggtatgcaagcctggctgggacggcccaaagcatggcatcacgaacttcgacaacttcgcctttgcaatgctcactgtttttcagtgtattaccatggaagggtggaccgatgtgctgtactgggtgaacgatgctgtgggacgagattggccttggatttactttgtgacgcttataattataggaagcttttttgttctgaatctcgtgttgggagtgctgagcggagagttcagtaaagagcgggagaaggcaaaggctcgtggggattttcagaagctacgagagaaacagcagctcgaagaagatctgaagggctatctggattggattactcaagcggaggatatagatccggagaatgaggatgagggcatggacgaggaaaagccccgaaacatgtctatgcccacaagtgagactgaaagtgttaataccgagaacgtggcaggcggcgacatcgaaggggagaactgcggggccaggctggcccatagaatttctaagtccaagttctcccgttattggagaaggtggaatagattctgccgccgaaagtgcagagctgctgtcaaatccaacgtgttctattggctagtgatttttctggttttcctgaataccttgactatcgctagcgagcattataaccagcccaactggctgacagaagtccaggatactgccaacaaggctcttctagctctgttcactgccgagatgctgctgaagatgtacagccttgggctacaggcctactttgtgtcactcttcaatagatttgattgttttgtcgtgtgtggggggattctcgagacaatcctagtggagacgaaaatcatgagtcccctgggcatctctgtgctgagatgcgtgcggctgctgcgcatttttaaaataaccaggtattggaacagccttagtaacctggtagcttctctgctgaatagcgtgcggtccattgcaagtctgctgttgttgctgtttttatttattattatattttctctacttgggatgcaacttttcggcggaaagttcaattttgacgaaatgcagacgaggaggtcgacctttgataatttcccacagtcgctcctgaccgttttccagatactgaccggggaggattggaactcagtcatgtacgatgggattatggcctacgggggtccttccttcccaggcatgctcgtgtgtatctacttcattattctgtttatctgcggaaattatatccttctaaacgtgttcctcgcaatcgctgtcgacaatctcgcagacgctgagagcctgaccagcgcccagaaagaagaagaagaggaaaaagaacgcaagaaactcgcgagaactgcctctcctgagaaaaagcaagaacttgtggaaaagccagccgttggggagtctaaggaagaaaagatcgaactgaagtccatcaccgccgatggtgaatcccctcccgctactaagattaatatggacgatctgcaacctaacgaaaatgaagataaaagcccgtatccaaatccggaaaccactggagaggaagatgaggaagagcctgagatgcctgtcgggccaagaccaagaccgctgtcagagctacaccttaaggaaaaagccgtcccaatgcccgaagcgagcgctttcttcatcttctcctccaacaacaggttccgtttacaatgccatagaattgtgaacgacactatcttcactaacttgatcctatttttcatcctgctgtcgagcatctctctggcggcagaggatccagtgcagcatactagcttccgaaatcacatcctattttattttgatattgtgtttacaacaattttcaccatcgagatcgcacttaaaatgactgcctacggagcttttcttcataaaggaagcttttgcaggaattacttcaatatactggatctcctggttgtttcggtatcactgatttcgttcggcattcagtcttcagcgatcaacgttgttaaaatcctgagagttctgagggtgctgcgccctttgagagctattaacagagcaaagggcctgaagcacgttgttcagtgtgttttcgtggctatccgtaccattggcaacattgtcatagtcacaacactgctgcaattcatgtttgcatgtataggagtgcagttgtttaaagggaaactgtatacgtgtagcgactcttcaaagcaaacggaggccgagtgtaaagggaattacatcacttataaggatggtgaagtcgatcaccccatcatccagccgcgatcgtgggaaaattctaaattcgattttgataacgtccttgccgctatgatggcactgttcactgtcagtaccttcgagggctggcccgagttgctgtatcgctctattgacagtcatacagaagataaagggcctatttacaattaccgagtggagatatcaatcttctttatcatatatatcattatcatagctttctttatgatgaacatctttgtagggttcgtcattgtcacgttccaggaacagggggagcaggaatacaagaattgtgaactggacaagaaccaacgacagtgtgtcgagtacgccttaaaagctcgtcctctgcgtcgttatattccgaagaatcagcaccagtacaaagtatggtacgtggttaattcaacctattttgaatacctgatgttcgtgctcatcctcttgaataccatttgtttggcgatgcagcactacggacagtcttgcctgttcaaaatcgcaatgaacatacttaatatgttatttactggcctgtttaccgtcgaaatgatattaaagttaattgcctttaaaccgaagcattatttttgcgatgcctggaataccttcgatgcccttatcgtggtcggctcaatcgttgacattgctatcaccgaagtcaatccagctgaacacacacagtgctcaccaagtatggggccgtcatgcagccacccacctctagcggttctcacagcccctcctgtcgccgacggatttcagaatgctgaagagaatagcaggatctcaatcacattttttagactgttcagagtaatgcgacttgtgaaattgctcagccgcggggaaggcattaggacactcctctggaccttcattaaatcattccaagcactcccttatgtggctctgctgattgtgatgcttttttttatctacgcagtgattggaatgcaggtctttgggaaaatcgctctcaacgacaccactgaaattaatcggaataacaactttcaaactttcccacaagccgtgctcctgctgttcagatgcgctacgggggaggcttggcaagacattatgttggcttgtatgccagggaagaaatgtgctccggagagcgagccctcaaactctaccgaaggagagacaccttgtgggagtagcttcgccgtcttttatttcataagtttttatatgctctgtgcctttttgatcatcaatctttttgttgcggttatcatggataatttcgattacctgacaagggactggtctatcctcggaccccatcacctggatgaatttaagaggatttgggccgaatacgatcccgaggcaaagggccggatcaagcatctggatgtggtgaccctcctgaggcggatacagcctcccctgggattcgggaagttgtgcccacacagagtggcatgcaaacgtctggtgtccatgaatatgcctctgaatagtgacggaaccgtcatgttcaacgcaacactgttcgcactagttagaacagccttgaggatcaaaacggaggaagggccttctccctcagaggcccatcagggggctgaagacccctttcgccctgcggggaatctggagcaggcaaacgaggaattaagggccattattaagaagatctggaaaaggacttcaatgaagttgctggaccaagtggtgccccctgccggagacgatgaagtgacggtcggaaaattttacgcgacattccttattcaggagtacttccgcaagttcaagaagagaaaagagcagggcctcgtgggtaaacctagtcagcggaatgccctgagtctacaggctgggttgaggacccttcacgatattggtcccgagataaggcgggctatatccggagatctaacagctgaggaggaactggataaggcaatgaaagaggctgtgagtgcggcttcagaggacgatatattccggcgggccggggggctgttcgggaatcacgtgtcctattatcagtccgatggccggtcagcatttccacagacctttaccacgcagaggccactgcacattaataaggccgggtcctcccagggcgataccgagagccccagccacgagaagctggtggattccacattcaccccttcttcttacagtagtacaggcagcaacgcgaacataaataatgcaaacaacactgcactgggtaggctcccccggcccgcagggtacccttccaccgttagtaccgtcgaaggccatgggccccccctctcacctgccatacgtgtccaggaagtagcttggaaactgtcaagcaatcgatgtcattcaagggaatctcaggccgcaatggctggacaagaggagactagtcaggatgaaacgtacgaggtcaagatgaaccatgacactgaagcatgttctgagcctagcctcctcagtactgagatgctgtcctaccaggatgatgagaatagacagcttacccttcctgaggaagacaagagagatatcagacagtctcctaaacgcggcttcttgaggagcgctagtcttgggaggcgcgcctcatttcatcttgagtgtttgaaaagacagaaagatcgcggcggagacatctcacagaagacagtactgcccctgcatctggtccaccaccaggcactcgctgtagccgggctgtctcctctgttgcagcgctcacacagccccgcttccttccctagaccctttgctacccctcccgccacgccgggcagtaggggatggccccctcaaccggtgcccactctacgactagagggagtggaatcttctgaaaagttaaactccagcttcccctccatccattgcggttcttgggccgagaccactccagggggggggggaagcagtgccgccagacgcgtgcgaccggtgtccctgatggtccccagccaggccggggcaccaggacggcagtttcacgggtctgctagctcgctggtcgaagccgtcctgatttcagaaggtcttggccagttcgcccaagacccaaagttcatcgaagtcaccacccaagagctggctgatgcgtgcgatatgaccatcgaggagatggagtctgctgcagataacattctttcaggcggcgcgccacagtctccaaatggagccctgctgccttttgtgaactgtagagatgctggtcaggaccgagctgggggcgaagaagacgccggctgcgtgcgcgcccggggccgcccttctgaggaagagctgcaggactctcgagtttatgtaagctcactttag

SEQ ID NO: 110416 - DNA, 6561 bp, synthetic construct
  misc_feature 1..6561: note = Description of Artificial Sequence: Synthetic coding sequence
  source 1..6561: mol_type = other DNA
atggtcaacgagaacacacgcatgtatattcccgaggagaaccaccaaggttctaactatgggtcacccaggccagctcatgcaaacatgaatgccaacgccgcggcggggctggccccggaacatatccctacccctggggccgccttgtcctggcaggcagcaatcgacgctgcccgccaggccaaactgatgggcagcgcgggaaacgcaactattagcacagtgagcagcacccagcgcaagcggcagcaatatgggaagcctaagaagcagggatccacaaccgccactaggcctccccgcgcgttgctgtgcctaaccctgaagaatcccatccgacgggcctgtataagtattgtggaatggaaaccttttgaaattattattttactaacaatcttcgcaaactgtgtggctcttgctatctatattcccttccccgaggatgattccaacgccaccaattcgaatttagagcgggtcgagtatttattcctgattattttcaccgttgaagcctttctcaaagtcattgcatacgggctcctgttccaccctaatgcctatctgaggaacggttggaacctcttggatttcataattgtggtggtggggctgttcagcgccattctggaacaggccactaaagctgacggcgccaacgcactggggggaaaaggtgcgggctttgacgtaaaggccctgcgggccttcagggtacttaggccattgcgccttgtcagtggagtgccatcactccaggttgtgttgaactccataattaaggcaatggtgccactcctgcatatagcgttgcttgtcctgtttgtaattattatctacgctataatcggactggagttattcatgggaaaaatgcataagacgtgttacaatcaggaaggaatcgccgatgtaccagccgaagacgacccttccccttgcgcgcttgagaccggccatgggcggcagtgtcagaatggaacggtctgcaagcccggctgggacgggcccaaacacggtattacaaacttcgataatttcgcttttgccatgttgactgtattccagtgtatcacgatggaaggttggaccgatgtcttatactgggttaacgacgctgtgggacgcgactggccctggatctacttcgttacgctcatcataatcggttctttttttgttctgaaccttgtcctcggtgttttgtccggtgagttctcaaaagagagagaaaaagcaaaggcccggggggacttccagaagctacgggaaaaacaacagctcgaagaagacctgaaagggtacctagattggatcacccaggccgaggacatcgaccccgaaaacgaagatgaaggcatggacgaggagaaaccacgtaatatgagcatgcccaccagtgagacagaatcggtgaacaccgaaaacgtcgccggcggcgatatcgagggtgaaaattgcggagcccgtcttgctcatcgcataagcaagtctaagttttcacggtactggcgtcgctggaaccgtttctgccgacgcaaatgtcgagcggctgtcaaatcaaatgtgttctactggctcgtaatctttctcgtgttcctcaacaccctcaccatagcctcagaacattacaatcagccaaattggctcacggaagttcaggacactgctaacaaggcgttgctagcattgttcaccgctgagatgctactgaaaatgtatagtctagggctacaggcttatttcgtatctctgtttaacagattcgattgctttgttgtttgcggagggatcttggagactatcctggtcgaaactaaaattatgtcccctttaggaatatccgtcctaagatgtgtgcgactcctgcgtattttcaagatcacccggtactggaatagtttgagcaacctggtggctagcctcctaaattcggtgcgcagtatcgcctctctcctactcttgctgtttctcttcataattatatttagcttactgggtatgcagctgtttggcgggaaatttaatttcgatgaaatgcagacacgccggagtaccttcgataattttccacagtccctgctcacagttttccaaatccttacaggcgaagattggaactccgtgatgtacgatggcattatggcgtatggtgggccctcgttccctggcatgttagtttgtatctactttattattttgtttatatgtgggaactacatcctcttgaatgtgttcctcgctatcgccgttgacaacctggccgacgcagagagtttgacgtccgctcagaaagaggaagaagaagaaaaagagcgcaagaaacttgcaagaaccgcctctcctgaaaaaaagcaggagctcgtcgagaaacctgcagtgggcgagtctaaggaagagaagattgaactcaagtccataaccgccgatggcgaatctccccccgccaccaagatcaatatggacgacctccaacccaatgaaaatgaggataagtccccgtatcccaaccccgagaccaccggagaggaggacgaggaggagccagagatgcccgtgggaccccgaccgaggcccctatctgaattacatttgaaggaaaaggccgtacccatgcctgaggcgagcgcattctttatcttcagctccaataatcgcttccggctccagtgccacaggatcgttaatgacactatctttaccaatttgattcttttctttattctcctgagtagtatcagtttagccgcagaggaccctgtgcagcatacctctttcaggaatcacatacttttctattttgacattgtctttaccactatttttacaatcgagattgcactgaagattctgggaaacgcagattatgtctttacttctattttcaccttggaaatcattctgaagatgaccgcctatggcgcgtttttacataaaggctccttctgtagaaactatttcaatatcctggatctcctggtcgtttccgtctcattgatctctttcggaattcagagctccgctattaacgttgttaagatcctcagagttctaagggtgcttcggcctctcagagccatcaatcgggctaagggtctgaagcacgtggtgcagtgcgtgttcgtagctatccggacaatcgggaacatcgtgatcgtgactaccctactccaatttatgttcgcatgtataggcgtccagcttttcaagggcaagctgtacacttgctcagattctagtaaacaaactgaagccgagtgcaaaggaaattatatcacctataaagatggcgaagtggatcatcccataatccagccaagatcttgggagaacagcaagttcgatttcgacaatgtcttggcagcgatgatggccctgttcacagtcagtacattcgaaggttggcccgagctgctttatagatccatcgactctcatacagaggataaaggcccaatctacaactacagagtggaaatcagcatcttttttataatatatattatcataattgccttttttatgatgaatattttcgtcggatttgtgattgtaacattccaagaacaaggcgaacaggaatacaaaaattgcgagctggataagaaccagaggcagtgcgtggagtatgctctgaaagcacgtcccctgcgtagatacattccaaaaaaccagcaccagtataaggtgtggtacgttgtgaactctacgtacttcgagtatctcatgtttgttcttatccttctgaatactatttgcttggccatgcagcattatggccagtcctgtttgttcaaaatagcaatgaacattctgaacatgctctttaccggcctgtttactgtggagatgatcctcaaactcatcgcattcaaacccaaagggtactttagcgacccatggaacgttttcgactttttaattgtgatcggctcaatcatagacgtgatcctgtctgagacaaaccattacttttgtgacgcgtggaacaccttcgatgcactcattgtcgtcggatcaatagttgacatcgcaattaccgaggtgaatcctgctgagcacacccagtgcagcccttcaatgaacgctgaagagaactctcgcattagcattaccttctttcggctttttcgcgttatgcgactggttaagctcctgtctcgtggcgaggggatcaggactctgctgtggaccttcataaaatcctttcaggccctgccctacgtggccttactgattgtaatgctgttcttcatctatgcggtcataggaatgcaggtgttcgggaagattgccctgaatgataccaccgagattaaccgcaataacaatttccagacatttccacaggcagttctcctgctgttccggtgcgctaccggtgaggcttggcaggacattatgctagcgtgtatgccaggtaagaagtgcgcgccagaatccgaaccatccaattcgacagagggcgaaactccgtgtggctcctccttcgccgttttctactttatcagcttttacatgctttgtgcctttctgattattaatttgtttgttgccgtgatcatggacaacttcgactacctgactcgggactggtccattctgggcccacatcatctggatgaattcaaaaggatctgggctgagtacgacccagaagcaaagggtcgaattaagcacctggatgttgtaactcttttgcggcggatccaacctcccttaggttttggaaagctgtgcccgcatcgggtcgcctgcaagcgccttgtaagcatgaacatgccactgaattcagacggaaccgttatgtttaacgccacactctttgcactcgttagaacagctctcagaatcaagaccgagggcaacctggagcaggcaaacgaggaattacgtgcaatcatcaagaagatttggaagcgcacatctatgaaacttctcgatcaggtggttccgccggctggggacgatgaagttacggttggcaagttctacgcaaccttcctcatccaagaatactttcgcaagtttaaaaagaggaaggagcagggtttggttggtaaaccgtcacagcgcaatgctcttagcttgcaagctgggctccgcactcttcatgatattgggccagaaattcggagggccatttcaggcgatctgaccgccgaggaggaattggataaagcaatgaaggaggccgtgagcgccgcgagcgaagatgatattttcaggcgggctgggggcttattcgggaatcatgtgagctattatcagtcggacggccgctcagccttccctcagacattcactacccagcgccctctacacattaacaaagccggatcgtcccagggcgacaccgagtcacctagccacgagaaattggtcgattccaccttcacacccagcagttactcttcgacaggaagtaatgctaatatcaataatgccaacaataccgccctgggcagattacctcgccctgccgggtaccccagcacggtgtccaccgtggagggacacgggccccctctttctcccgccatcagagtccaagaggtcgcctggaagctcagctctaataggtgccactccagagagtcccaggctgccatggccggtcaagaggagacgtctcaggatgaaacatatgaggtaaagatgaaccatgatactgaagcatgttccgagcccagccttctcagcaccgaaatgttgagctatcaggatgatgagaataggcagctgactctgccggaagaagataaacgcgatattcggcagtctcccaagcgaggctttctacgatctgccagccttggcagaagagcctctttccacctggagtgtttgaaaagacagaaagaccggggaggggacatttcccagaaaaccgttctgccactgcatcttgttcatcaccaggccctggcggtcgccggactttctccgttactccagcgatcccattcaccagcatcgttcccccgtcccttcgcgacaccccccgctactccgggctctcgggggtggcccccgcagccggtacccacactgagactcgaaggggtggaaagcagcgagaagcttaactcgagcttccccagcattcactgtgggtcatgggccgagaccacaccgggaggcggaggcagtagcgctgcacggcgggtcaggcctgtgtccctgatggtcccatctcaggctggagcgccgggccggcagtttcacggtagtgcatcgtctctggtggaagcagtgctcatctcggagggcttaggacagttcgcgcaggatcccaaattcatcgaagtcactacccaggagctggcagacgcttgcgatatgacaatcgaggagatggaaagtgctgcggacaatattctgagtgggggcgccccccagagccccaacggcgcattgctgccgttcgtgaattgtagagacgctggacaagatagagctggcggggaagaagacgctggatgtgtccgcgccaggggtcgcccttccgaagaggaattgcaggatagtcgcgtttatgttagctccctatag

SEQ ID NO: 110417 - DNA, 6441 bp, synthetic construct
  misc_feature 1..6441: note = Description of Artificial Sequence: Synthetic coding sequence
  source 1..6441: mol_type = other DNA
atggtgaacgaaaacactcggatgtatatccccgaagagaaccatcaaggctctaactatggttcaccaagaccggctcacgccaatatgaacgccaacgccgcagcagggctcgcaccagaacacataccgacccccggtgccgccttgagttggcaggccgctatcgatgctgcaaggcaggcgaaactgatgggatccgcaggaaatgccacaatttctaccgtctctagcacacagcggaagcgccagcaatacggcaagcctaagaagcagggctcaactacagcgactcgtcctccaagggcccttctgtgtctgacactgaaaaatccaatacgccgcgcttgcatttcaatcgttgagtggaaaccatttgaaattatcatactgctgacaatcttcgcgaactgcgtcgctctcgctatctatataccatttcctgaggatgattccaatgccacgaattctaatctcgagcgcgtagaatatctcttcctcatcatttttactgtagaggccttcctgaaggtgattgcctacgggctgttgttccacccaaatgcttatttgcggaacggctggaatctcttagattttattatcgtcgtggtggggctcttcagcgctattctggagcaggcaacaaaggccgatggcgcaaacgctctgggtggcaaaggagctggcttcgatgtcaaagcacttagagccttcagggtgctacggccgctgcgcctcgtctctggggtgccttccctacaggtggtgctgaacagcatcattaaggccatggtccctctacttcacatcgcactgctggtcttattcgtgattataatatacgctatcatcggtctggaactgtttatgggcaagatgcacaagacgtgttacaatcaagaaggcattgcagacgtgcctgcagaagacgatccaagcccctgcgctctggaaaccggccacggaagacagtgtcagaacggaacagtgtgcaagcctggatgggatgggcctaagcatggcattacgaattttgataatttcgctttcgccatgctgaccgtattccaatgtatcaccatggaaggctggactgatgtcttgtattgggtgaacgatgcagtaggacgtgactggccttggatttacttcgtgaccttaatcataattgggtcattctttgtgctgaacctcgtcctgggcgtgctcagcggcgagtttagcaaggaacgggagaaggccaaggctcggggagactttcagaagttgagggagaagcaacagctggaagaggatcttaaaggatacctggattggatcactcaggctgaagacatcgaccctgagaacgaggatgaggggatggatgaggagaagccccgcaatatgagcatgcctacgtccgagaccgagtctgtgaacactgagaatgtggccggcggggacatagagggggagaattgcggcgctagacttgcacaccgaatctccaaaagcaagtttagccgatactggagaaggtggaatcgattctgcagaaggaagtgccgggccgctgtaaagtcaaacgtattttactggttggtcatttttctggtcttcctaaataccttgacaatagcctcagaacactacaatcagcccaattggctaactgaagtgcaggataccgccaataaagcactacttgccttgttcaccgcagaaatgctcttgaaaatgtactctcttgggctacaggcttacttcgtgtccctttttaatcgcttcgactgttttgtcgtctgtggagggatcttagagacaatattagtggagacgaagataatgtctcccctgggcatcagtgtgctccgatgcgtgcggctactgaggatcttcaaaattaccaggtactggaactccctcagcaacttggtggcgagcctgctgaacagtgtgcgcagcatagcgagcctcctgctgttgctgttcctgtttattatcattttttctctcttggggatgcagctcttcggcggcaagtttaacttcgacgagatgcagactcggaggtctactttcgataatttcccacagagcctgctgaccgtcttccaaattctgaccggcgaggactggaacagtgttatgtacgatggaattatggcctacggaggcccatccttccctggcatgctggtttgcatctacttcattattctttttatctgtgggaactacatactgcttaacgtgttcttggccatcgcagtggataatctggctgatgctgaaagcctgacctctgcgcagaaggaggaagaggaagaaaaggagcggaagaagctggctcggacagccagtcccgagaagaaacaggagctcgtagaaaaacctgcggttggagagtctaaggaagaaaagatcgagctgaaatcaattactgccgacggcgaatctccgcctgctactaaaatcaacatggacgacttgcagcctaatgagaatgaagacaagtccccgtacccaaaccctgagacgacaggagaggaggacgaggaggagcccgagatgcctgtgggaccgagaccgagaccgctgtcagagctccacctgaaggagaaggccgttcccatgcctgaggcctcggccttctttatcttctcatccaataacagatttaggctccagtgccataggatcgtcaacgatactatcttcactaacctcatcctgttcttcatcctgttgagtagcatttcactcgccgctgaggatccagtccagcacacctctttcagaaaccatatccttgggaacgccgactatgtgttcacgagcatctttacccttgagatcattctaaagatgactgcgtacggcgcctttctacataaagggagcttttgccgcaactatttcaacattttggatctgctggtcgtgtctgtaagcttgatcagcttcgggatccagagttccgctattaatgtggtgaagattttacgcgtcttgcgcgttctcagaccactgcgcgccattaatagggctaaggggctcaagcatgttgtgcagtgtgtctttgtggcgattcgaacaattggaaacattgtgatagtgaccactctcctgcagtttatgttcgcatgcatcggggttcagctgtttaaaggcaagctctatacctgttcggattcaagtaagcagactgaggcagaatgcaaaggcaattacatcacctataaagacggagaggtagatcacccaattatacagccaaggtcgtgggaaaactcaaagtttgatttcgataacgtgttggctgcaatgatggccttgtttaccgttagcacattcgagggctggccggagctactgtaccgtagcatcgattcccatactgaggacaagggacccatctacaattacagagttgaaatctccattttctttattatttatattatcatcatcgcgttttttatgatgaacatttttgtgggcttcgtcatcgtcacttttcaggaacagggagagcaggagtataaaaactgcgaacttgataaaaaccaacgccagtgcgtggaatatgccctgaaggcacgacccctgcggaggtacattccgaagaaccagcaccaatacaaggtttggtatgttgtgaactctacatattttgaatatctaatgtttgtcctgatactcttaaataccatttgtctcgctatgcaacactacggccaatcgtgcctgttcaagatagctatgaacatcttgaacatgctgttcactggcctctttaccgttgagatgatcctgaaactgatagcattcaaacctaagcactatttttgcgacgcctggaataccttcgacgcattaattgtggtgggatctatagtggacatcgcaatcacagaggtaaacaatgcagaggagaattccagaatctccattacatttttccgacttttcagggtcatgagacttgttaagctcctgagccgaggtgaggggatcaggactctgctgtggacattcattaagagctttcaagctctcccttatgtggcactgcttatagttatgctgttctttatttatgccgtgatcggcatgcaggtcttcgggaagatagctttgaatgatactacggagataaatagaaacaacaacttccagacgttccctcaggcggtcctcctactgttcaggtgcgccactggcgaggcctggcaggacattatgttagcttgtatgccaggcaaaaagtgcgcccccgagagcgaaccaagcaacagcaccgaaggcgagactccttgtggcagcagcttcgctgtgttttacttcatctcattctacatgctgtgcgcttttcttattatcaacctctttgtggcagtaattatggacaactttgactacctcacacgggactggagcatactggggcctcaccacttggatgagttcaaacgaatttgggctgagtacgatcctgaggctaagggacggatcaaacatctggatgttgtcaccctcctgcgccggatccaacctcctctgggcttcggaaagctgtgtccccaccgggtagcctgcaagcggttggtttccatgaatatgccactaaactctgacgggaccgtcatgttcaatgcaactctatttgcactggtgagaaccgctctccggatcaaaaccgaggagggccccagtccttccgaggcacaccagggagctgaggaccccttccgccccgctggcaacctggagcaggccaacgaagaactcagggctattattaagaaaatatggaagcgaaccagtatgaaacttctggaccaggtcgtccctccagccggcgatgacgaggtcacggtgggaaagttttatgccacctttcttatccaggagtactttcgcaagttcaagaagaggaaagagcagggactggtgggcaaacccagccagagaaatgccctgtcattacaggctggcctccggacactccatgacataggacctgaaatccgtcgtgctatttctggcgatctgacggcagaggaagagcttgacaaagctatgaaggaggcggtgtctgccgcatctgaggatgacatcttccgccgggccggtggtctgtttggaaaccatgtgagctactaccagtccgacggtaggtccgcgttcccccagacatttactacacaacggccccttcacattaataaggcaggttcgagccagggggataccgaatcaccttcccacgagaaactcgtcgattccacatttacgcccagcagttactcttcaaccgggtcgaacgcaaatataaataacgctaacaacacggcattggggcgtctgccccggccggctggatacccatctaccgtgtccaccgtcgaaggccacggaccccctctctccccagcgatccgtgtgcaggaggtcgcttggaagctgagctccaaccgctgccatagtcgtgagagtcaggcggcaatggctggacaggaagagaccagtcaggatgagacctatgaggtcaaaatgaaccatgatacagaggcctgtagcgaaccctctctgctctccaccgagatgctgagctaccaggatgatgagaacaggcaactgacgttgccagaggaggataagagagatatccggcagagccccaagagagggttcctgagaagtgcttccttgggccgtagagcatcctttcacttggagtgtttgaagaggcagaaggataggggcggagacatctcccagaaaactgtgttacctctacacttagtgcaccatcaggcactcgcagttgcaggactgtcacctctcctccagcgctcccatagcccagcatccttccctagacctttcgccacaccgcctgcaaccccgggcagccgcggctggcccccccaacctgtgcccacactacgccttgaaggcgtggaatcctcagaaaagctcaattcctcatttccaagtatccactgtggatcttgggccgaaacgactcctggtgggggcgggagctcagctgccaggcgggttcggcctgtgagcctcatggtaccatcacaggccggcgctcctggccgacagtttcacggctcagcaagttcattagttgaggcggtcctgatcagtgaggggctgggacagttcgcccaagacccaaagtttattgaagtcactactcaagagttggctgacgcttgtgacatgaccatagaggagatggagtctgctgccgacaacatacttagcggcggcgctccacagagcccaaacggagctctgcttccattcgtgaactgcagggatgcgggtcaggatcgcgccggaggggaagaggatgccggctgtgttcgcgcgcgaggtcgaccttccgaggaggaactgcaggactccagggtttacgtatcgagcctgtag

SEQ ID NO: 110418 - DNA, 6441 bp, synthetic construct
  misc_feature 1..6441: note = Description of Artificial Sequence: Synthetic coding sequence
  source 1..6441: mol_type = other DNA
atggttaatgagaatacacgcatgtacattcccgaagagaatcatcagggaagcaattacgggagcccgcgcccggctcacgctaatatgaatgcaaatgccgccgcaggcctggcgcccgaacatattccaactccaggcgctgctctctcttggcaggccgccattgatgctgctcgccaggccaaactgatgggcagtgcagggaacgcaactatctctactgtgagttcaacccagaggaagcgacagcagtatggcaagccaaaaaagcaaggctcaaccaccgctactcggccaccacgcgcgctgttgtgcctcacactaaagaatcccatacgccgagcttgcatatccatagtcgagtggaaaccgttcgaaatcatcatcctcctcacaatatttgccaactgtgtggcgttggctatctacataccctttccagaggacgacagcaatgccaccaattcgaatctcgagcgcgtggagtatctgttcctgatcatctttaccgttgaagcgttccttaaagtcatcgcatatggccttctcttccaccccaacgcctacttgcggaacggatggaatctgctggactttattatagtagtggtgggcctctttagcgccatcttggagcaggcaacaaaagccgatggggctaacgcacttggcggcaaaggggctgggtttgacgtgaaggccctgcgagcctttagagtgcttaggccacttagactggtcagcggggtgccctcattacaggtggtactgaattccatcattaaggcgatggttcctctgcttcacattgctctgctggtcctttttgtgatcatcatctatgccattattggccttgagctctttatgggaaagatgcataagacctgttataatcaggagggaatcgcagacgtgcccgctgaggatgatccgtccccatgtgctctagaaaccgggcacggtagacagtgccagaacgggacggtgtgcaagccgggttgggacggcccgaaacacgggattacgaatttcgataatttcgctttcgcaatgctaaccgtattccagtgcatcactatggagggctggactgacgtgctatactgggtgaacgatgctgtgggccgcgactggccctggatctactttgtaaccctcattatcatcggatccttcttcgtgctgaacctcgtactcggcgtgttgtccggggagttttctaaggagcgtgagaaagcgaaagccaggggcgacttccaaaaactccgagagaagcaacagctcgaggaagatttgaaaggatatctcgactggatcactcaggccgaggacatagaccccgagaacgaggacgaggggatggacgaagagaaaccgcgcaacatgagcatgcccacgtcggagactgaatcagtgaacaccgagaatgttgccggtggggatatagagggagaaaactgcggcgcacgtctcgcacacagaattagcaagagcaaattctcaaggtactggcgcaggtggaacaggttctgtcgcaggaagtgccgggcagccgtaaagtccaatgtgttttactggctagtcatcttcctggtgtttcttaacaccctcacaatcgctagcgagcattataaccagccaaactggctgactgaagttcaggatactgccaataaagctctgctcgctctattcactgcggaaatgctgctgaagatgtattcccttggccttcaggcctactttgtatcactgtttaaccggtttgactgcttcgtcgtttgcggaggtatcctggaaactatactggtggagactaaaatcatgtctcccttgggaatttctgtcctgagatgcgtcaggctgctgcgtatctttaagataacaagatattggaactcactctctaacctggtggccagcctgcttaattcggtacggagcatcgcctcattgctcttgctgctcttcttatttataatcatcttctcactccttggtatgcagctctttgggggcaagtttaacttcgacgaaatgcagacccggcgctctaccttcgataatttcccacagtcactgcttaccgttttccagatcctgaccggtgaggactggaatagcgtcatgtatgacggtattatggcctatggcggcccttcctttcccgggatgctggtatgcatctacttcataatcctattcatttgcggaaattacattcttctgaacgtttttctagcaatcgctgttgacaacttggcagacgccgagtcactgaccagcgcccaaaaggaggaggaggaggagaaagaacgaaagaaactagcgagaaccgccagccctgaaaagaagcaggagttggtcgagaaacctgcagtcggcgaatccaaagaagaaaaaattgagctgaagagcattacagccgatggggagtcaccccctgccaccaaaataaatatggacgacctgcaacctaacgagaacgaggataagtccccttaccccaatcccgagaccaccggcgaggaagatgaagaagagcccgaaatgcccgtgggtccccgccccagacccctctccgagctgcacctcaaggaaaaagctgtgcctatgcccgaagcctccgccttctttatcttcagctcaaataacagattccggttgcaatgtcatcgcattgtgaatgacactatttttaccaatctgattctgttttttattctcctttcttccatttctctcgctgccgaagaccccgtccagcatacctcctttagaaaccatatactgttctacttcgatatcgtttttaccaccatatttactattgaaatcgctctgaagatgaccgcttacggcgcctttctccacaagggttccttctgtcgaaattatttcaacattttggacctgctggtcgtttccgtcagtctgatttcgttcggtattcagtcttcggccatcaatgtggtaaaaatcctgcgagttttacgggtgctacggccccttcgcgctattaacagggcaaaggggctgaagcatgtagtgcaatgtgttttcgtcgctattcgcacaatcggcaacatcgtgatcgttacaaccctgctccaattcatgtttgcctgcattggcgtgcagctgtttaaagggaaactttacacgtgtagtgatagttccaagcagacagaagctgaatgcaagggtaactacattacttacaaggacggagaagtggatcacccaataattcaacctcgcagctgggagaatagtaagttcgacttcgataatgtgctggctgctatgatggcgttgtttactgtgagcacctttgaaggctggccggaactcctttaccgatcgatagattcccacaccgaagataaaggccccatctacaattatagggtcgaaatttcaatcttctttatcatttatattatcatcattgccttctttatgatgaatatctttgtgggcttcgtgattgtgaccttccaggagcagggcgagcaggagtacaaaaactgcgagctggacaagaaccagagacagtgcgtggaatatgcattaaaggctcgaccactgcgaagatacatacctaagaatcagcaccagtacaaggtttggtacgtcgttaacagcacctattttgagtatcttatgtttgttctcatactgctcaacacaatctgtttggctatgcagcattacggccaatcatgtctcttcaaaattgcaatgaacatcctgaatatgctgttcaccggcctgtttactgtcgagatgatattgaaactgatcgcatttaagcctaaacactacttctgcgatgcctggaataccttcgatgccctaattgtggtgggcagtatcgtcgacattgctatcaccgaagttaataacgccgaggaaaactcgaggatttccatcacgttcttcagactctttagggtgatgcggctggtaaagctcttgtcgaggggagaggggataagaaccctgttgtggacatttattaaaagcttccaggcccttccctacgtggcactgctaatcgtgatgttgttcttcatctatgctgtgattggaatgcaggtatttggaaagatcgcactaaatgacactactgagatcaacaggaataacaattttcagacattcccgcaagccgtgctactgctatttcgttgcgctaccggtgaggcctggcaggacatcatgctggcctgcatgcctggcaagaaatgcgctcccgagtcagagcctagcaatagcaccgagggcgaaacaccatgcggaagttcctttgccgtgttttattttatttccttctacatgctgtgcgcttttctgatcataaacctgttcgtcgccgtgattatggataactttgattatctgactcgggactggagcatcttaggacctcatcatttggatgaattcaagcgcatttgggcagagtacgacccagaagccaaaggacggatcaaacacttggacgtggtcaccttgctgcgaaggattcagccacccctggggtttgggaaattatgtccgcaccgagtggcttgtaaacggctcgtcagtatgaacatgccgttaaacagcgacggaactgttatgttcaatgctaccctctttgccctagttaggaccgccctcagaattaaaacagaggaaggcccgagccccagtgaagcgcaccagggtgcagaggatcctttccgaccagcagggaacctggagcaggctaatgaagagctgcgcgccataattaaaaagatatggaaacggacatctatgaagctcctggaccaggtcgtgccacctgcaggggatgatgaggtgactgtcgggaaattctacgctaccttcttaatccaggagtatttcaggaaattcaagaagcggaaagaacagggactcgtaggtaagccttcccagagaaatgcactgagtctgcaggccggcctgaggaccttacatgatattggcccagaaattaggcgggctatttcgggagatctgactgcggaggaagaacttgataaagccatgaaagaagctgtctcagcagcgagcgaggatgatatttttaggagagccggggggcttttcggaaatcacgttagttattatcaatctgatggccgctctgcctttccacagactttcacaacacagcgtcctctgcacatcaataaggcaggcagttcccagggtgatactgagtccccgtcacacgaaaagcttgttgactctacctttacacctagcagttattcaagcactggttcaaatgctaatattaataatgctaacaacactgcgttgggtcggctgccaaggcccgcaggttatccatccacagtctcgaccgtagaaggtcatggtcctcccctgtcacctgctataagggttcaggaggtcgcatggaaactctcatctaaccggtgccactctcgggagagtcaagccgcaatggccgggcaggaggaaacctctcaggacgagacctatgaagtaaagatgaatcacgacacggaagcttgcagcgagcctagcctcctgagcaccgagatgctgagctaccaagacgacgagaacagacagctgacattgcccgaggaagacaaaagagacatccgtcaatcacccaagagaggttttctcagaagcgcgtcactgggcaggcgcgccagctttcatctggagtgcttgaaacgccagaaagatagagggggcgatataagccagaaaaccgtcctaccgttgcacctggtacatcaccaagccctggccgtggctgggctgtcacccttacttcagcgaagccatagcccagcctcttttcccagacctttcgcgacaccaccagcgacacctgggagcagaggatggcctcctcagcctgtgcctacactccgactagagggagtggagtcaagcgaaaaactgaatagctcctttccttccattcattgtggctcgtgggctgaaacgaccccaggcgggggagggtccagtgccgcaagaagggtcagaccagtgtcactgatggtcccaagtcaggccggagctccgggaagacaattccacggcagtgcttcttcgttagttgaggccgttctgatctccgaggggctcggccaattcgctcaggacccaaagttcattgaggttacaactcaggagcttgctgacgcctgcgatatgactattgaagaaatggagagcgccgccgacaacatcctctcgggcggggcgcctcagtctccaaatggcgcattgctcccattcgttaactgtcgcgacgccggccaagaccgcgccggaggcgaggaggatgccggatgcgttcgtgcccgcggccggccatccgaggaagaactgcaggattcacgggtgtatgtcagcagtctgtag

SEQ ID NO: 110419 - DNA, 6417 bp, synthetic construct
  misc_feature 1..6417: note = Description of Artificial Sequence: Synthetic coding sequence
  source 1..6417: mol_type = other DNA
atggttaacgagaacaccaggatgtatatacctgaggaaaatcatcagggttcaaattatggctcacccaggcccgcacacgcgaacatgaatgcaaacgctgcagcaggtttagcaccggagcatatacccacacctggggccgctctgtcctggcaagcagccatagatgccgcacgccaggctaaactaatgggtagcgccggaaacgcaacaatttcaacagtgtctagcactcagcgcaagagacagcagtatggaaaacctaaaaagcaggggagcacgaccgctaccaggccaccccgggctcttctctgcctaacactgaaaaatcccatccggcgcgcatgcattagcattgtggagtggaaaccatttgagattatcatcctgctgacaatcttcgctaattgcgtcgccctcgcaatctacatcccgtttccagaagatgattccaacgctactaactccaacttggaacgcgttgaatacctttttctcataatattcaccgtcgaagctttcttaaaggtcatagcatacggtctgctgttccacccaaacgcctatctgcggaacggctggaacctgttggacttcataatcgttgtggtgggtctctttagcgccattcttgagcaggcaaccaaagccgacggcgcgaatgcactgggcggcaaaggggcagggtttgatgttaaggcactccgggcctttcgagttctgaggcctctgcgtttagtgtccggcgtgccatcactgcaggtggtgctgaattcaatcattaaggccatggtgccactccttcacatcgccctgcttgtgctgttcgttattatcatttacgccatcatcgggctagaactgttcatgggaaaaatgcacaaaacatgttacaatcaagaagggatagcagatgtgcctgccgaggacgatccatcaccctgtgccctggaaacagggcatggtagacagtgtcagaatggcactgtttgcaagcctggctgggacgggccgaaacatggcattacgaactttgataacttcgcgttcgccatgctgacagtcttccagtgcatcaccatggagggttggactgatgtgttgtactgggtcaacgatgcagtgggtagagactggccttggatatatttcgtgactctgatcataattgggtctttcttcgtgctgaacttggtgctgggggtcctgagcggagaattcagcaaagagagagaaaaggccaaggcgcgaggtgacttccagaagctgagagaaaagcagcagctggaggaggatctgaagggctaccttgactggataactcaggctgaggacattgatcctgagaacgaagatgagggcatggacgaagaaaaaccccgcaatatgagtatgcccacctcagagactgaatctgtgaatactgagaatgtcgcgggaggggatatcgagggcgagaactgtggggctcgcctggcccacagaatctccaaatcaaaattttcacggtattggcgccggtggaacaggttttgcaggagaaagtgcagagccgccgtcaagtcaaacgtgttttactggttagtgattttccttgtgtttcttaacaccttgacaatcgcaagcgagcactataatcagccgaactggttgaccgaggtgcaggataccgccaataaggcactattggcactgttcaccgccgaaatgctgctcaaaatgtactccttgggacttcaggcgtattttgtatccctgtttaatagatttgactgctttgtcgtatgcggcggaatacttgaaactatcctggtggaaaccaagatcatgtcgccactgggcatcagcgtactgcggtgcgtgaggctgttgcgcattttcaaaattacacgctactggaacagcctgtctaacctagtggcttccctcctgaattcagtgaggagtattgcttccttgctactcctcctgttcttgttcattattattttcagcctgctaggcatgcagctcttcgggggaaaatttaacttcgacgaaatgcagaccaggcgcagtacttttgataactttccccagtccctcttaaccgtgttccagatccttaccggcgaagattggaactccgtgatgtatgacggtatcatggcatatgggggcccatctttccctggcatgctggtgtgtatctacttcatcatactttttatttgtgggaactacatcttgctaaacgtgtttttggccatcgctgtcgataacctggccgatgccgaatcattgacgtcagcacagaaagaagaggaagaggagaaggagcgaaagaaactggcccgaacggccagtcccgagaagaagcaggagctggtggagaaacctgccgtgggggagtcaaaggaggagaaaattgagctgaagtccataacggcagatggcgagtccccaccagccacgaagatcaacatggatgacttacagccaaacgagaacgaagacaaatccccctatcctaatcccgaaaccaccggggaggaagacgaagaagaacccgaaatgcctgtcggacctaggccccggccattgagcgagttacacctaaaggagaaagcagtcccaatgccagaggcaagtgcgttttttatcttcagtagtaacaaccgattccggctgcaatgtcatcgaatcgtcaatgacactattttcactaacctgatcctgttcttcatattactaagcagtatttcacttgcagccgaagatcctgtccagcacactagctttcgcaaccacatcctgttctattttgatatcgttttcacaacaatcttcacaatcgaaatcgcactgaaaatgacggcttacggggcctttctgcataaagggtccttctgtagaaattatttcaacatcctggatctgctggtcgtgtccgtgtccttgatttccttcgggattcaatcctcagccattaacgtagtaaaaatcctgcgggtgctacgcgtgcttcgcccgttacgagcaattaaccgggctaaggggctgaagcacgtggtgcaatgcgtgttcgtagcaatcagaacaattggaaatattgtgattgtgaccactcttcttcagtttatgtttgcctgtattggcgtccagttgtttaagggcaagttgtacacatgcagtgactccagcaagcagacagaggctgagtgcaagggaaattatatcacatataaggatggtgaagtggaccaccccatcatccagcccaggtcttgggagaatagtaaatttgatttcgataatgttttagctgcaatgatggccctcttcacggtgagcaccttcgagggctggcctgaattactgtaccgaagcattgacagtcacaccgaggacaaaggacccatctataactatagggtagaaattagcatattttttatcatctatatcattatcattgcgtttttcatgatgaacattttcgtaggatttgttatcgtgactttccaggagcagggtgagcaggagtataaaaactgcgagcttgataaaaaccagaggcaatgcgtggaatacgccctcaaggctcgtccgctccgcaggtacattcccaaaaatcagcatcagtacaaagtatggtatgtagtgaacagcacctactttgaatatctaatgttcgtgctgatcttgctcaacaccatttgtttggccatgcagcactacggacagtcttgtctcttcaagattgcaatgaatatcctaaacatgcttttcactggcctcttcactgtagagatgatcctcaaactgatcgcattcaaaccgaaaggatacttcagcgatccatggaatgtgttcgatttcctgatagttatcggatccattattgacgtgatcctgtctgaaaccaaccctgcagagcacacccaatgcagcccgagcatgaacgcggaggagaatagcaggatctccattacttttttcaggctgtttagagtgatgagattggtgaagttgttatcaagaggtgagggcattagaaccctactctggacttttataaaatcctttcaagccttgccatacgtggctctgttgatcgtaatgctgttttttatctatgctgtcatcgggatgcaggtctttggcaaaatcgctctgaacgacacaactgagatcaatagaaataataacttccagacttttcctcaagccgtgctgcttctattccgatgtgctaccggggaagcatggcaggacataatgctagcctgtatgcctggtaagaagtgcgctcctgaatcagagccgtccaattccacggaaggcgagaccccatgcgggagtagtttcgcagtgttctactttatctcattctacatgttgtgtgcatttctgatcatcaatctgttcgtcgctgtcatcatggacaacttcgactatcttacccgcgattggagtatcctaggaccacatcaccttgacgaattcaagaggatctgggccgaatacgatcccgaagctaaaggcaggatcaaacaccttgacgttgtcacgcttttaaggcgaattcagccaccactgggatttggaaaactttgcccgcacagggtagcatgcaagcggttagttagcatgaacatgcctcttaactctgatggcactgtgatgtttaatgccaccttgttcgcacttgtcagaaccgccctgagaatcaaaacagaggggaatcttgaacaagcaaacgaggaactgcgagccattattaagaaaatttggaaacggactagtatgaagctgctggaccaggtggttccgcctgctggcgacgacgaagttacggtggggaaattctatgctacatttctgattcaagagtactttaggaaattcaagaaacgtaaagagcaagggctggtggggaagccaagtcagcgtaacgcgttgagcctgcaggccggcctgcggacactgcatgatattggacccgagatccggcgtgctattagtggggacttgaccgcagaggaggaactggacaaagcaatgaaggaagccgtttctgcagcgtccgaggatgacattttcaggcgggcaggtggactgtttgggaaccacgtgtcatactatcagagtgacgggaggtccgcttttccacagacgtttaccacacaaaggcctctgcatattaataaagccggttcctcacaaggcgatacggaaagcccaagccacgagaaattggtggacagcacatttactccatcgtcgtatagcagtactggctctaacgccaatatcaacaacgccaataatacagctctcggccggctcccacgcccggctggctatccctcaaccgtgagtacagtggaggggcacgggccacccttgtctcctgcaatcagggtgcaggaggtggcctggaaacttagcagcaatcgttgtcatagtcgggagagtcaggccgccatggcaggtcaggaggagacatctcaggatgagacctatgaagttaagatgaatcacgatactgaggcgtgcagtgagccaagtctgctcagtacagagatgctatcctatcaggacgatgagaatcggcagctcaccctgccagaagaagataagagagatattcgccagtccccaaagagggggttccttcggagtgcttctctcggccgtagagcctcatttcatttggaatgtctcaaacgtcagaaagaccggggaggtgatatatctcaaaaaactgtgctgcctctccatctggtgcaccatcaggccctggcagtcgccggcttgtcaccgctgctgcagcgctctcattcacctgctagctttcctcggccattcgcaacccccccggccacccccggctcacggggttggcccccccaacctgttccaacactgcggttagaaggcgtggagtcttctgagaagctgaatagcagctttccttcaatccattgtggatcatgggccgagaccaccccgggcgggggtggctctagcgcagccagacgggtgcgtccggtatctctgatggtcccgtctcaggcaggggctccaggacgccaatttcacggatccgcatcaagccttgtggaggccgtactgatttcagaagggctaggacagtttgcccaggatcccaagttcatcgaggtgaccacccaagaactagccgacgcctgcgatatgacaattgaagagatggagtccgctgctgataacatcttgtctggcggagcaccccagagtcctaatggtgctctgctgccattcgtgaattgtagggatgctggccaagatagagcaggcggtgaggaggacgcagggtgtgtgcgggctaggggacgcccctctgaggaagagttgcaggacagtcgcgtctatgtatcctccttgtag

SEQ ID NO: 110420 - DNA, 6417 bp, synthetic construct
  misc_feature 1..6417: note = Description of Artificial Sequence: Synthetic coding sequence
  source 1..6417: mol_type = other DNA
atggtcaacgagaataccaggatgtatatacccgaggagaatcaccaaggctccaactacggttcacctaggcctgctcacgcgaatatgaacgcaaacgccgccgccggactggctcccgagcacatcccaacacccggcgccgctctatcgtggcaggccgctatagacgctgcccggcaagccaaactaatgggctccgcaggaaacgcaactatctcaacagtgagtagtactcaaagaaaaagacagcaatatggcaagcctaagaaacagggatccaccactgccactcgaccgccccgagccttactatgcctgaccttgaagaaccccataaggagggcttgtatctcaattgtggaatggaagccattcgagatcattatcttgttgaccatcttcgcaaactgtgtggctttggctatctacataccatttcctgaggacgacagcaacgcgacgaactcgaatctggagcgagtcgaatatctgtttctgatcatcttcactgtggaggcctttctgaaagttattgcttacgggttgctgttccatccaaacgcatatttacgcaacgggtggaatcttctggactttattatagtggtggtgggcctgttctccgccatactcgagcaggctacaaaagcagatggcgcaaatgctcttggtggtaaaggcgcggggttcgatgttaaggcgttaagggcatttagagtcctgcgtccattgcgcctggtgtccggagtgccaagtctgcaagtggtccttaacagtatcatcaaagccatggtcccattgctgcatattgctctgctggtgctcttcgttatcattatttatgcgattattggcctggaactgttcatgggcaagatgcacaaaacatgctacaaccaggagggcatcgctgatgtcccagcagaagacgatccatccccttgcgctctggagaccggtcacgggagacagtgccagaatgggacagtgtgtaagccaggctgggatggaccgaaacatggaattactaacttcgataatttcgccttcgctatgctgaccgtcttccagtgtattaccatggagggatggacagacgtgctttactgggtgaatgatgccgtgggaagagactggccttggatctatttcgtgacactgattatcataggcagctttttcgtgttgaaccttgttttgggtgtgctctctggcgaattctccaaggagcgggagaaagcaaaggctagaggagacttccagaagcttcgggagaaacagcagctagaggaagacttgaaagggtaccttgactggatcacacaggccgaagatattgacccggagaacgaagatgagggcatggacgaagagaagcctcggaatatgagtatgcctactagtgaaaccgagtccgtaaacacagagaacgtggcgggaggcgatattgaaggtgaaaactgtggggctaggctggcccaccgcatttcaaagagtaagttttctaggtattggagacgctggaatagattttgccgtagaaaatgtcgcgccgccgtgaaatctaacgtgttttactggctagtcatttttttggtcttcctcaatacccttactatcgcatcagaacactacaaccaacctaattggttgacagaagtgcaggatactgccaataaggcacttcttgccctattcacagccgagatgctacttaaaatgtactctctgggcctgcaagcctacttcgtctcactgttcaacaggtttgattgctttgtggtctgtgggggtattcttgagacgattttggtggagactaagataatgagcccattgggcattagcgtgcttcgctgcgtacgattactcaggatattcaagattacacgatactggaacagtctgtccaacctggtggcctcactgctaaattctgtgaggagtatcgcaagtctgctgctgctgttatttctgttcattatcatcttctcgctattaggtatgcagctgttcggtggcaagtttaactttgacgagatgcagactcggagatcaactttcgataacttccctcagtccctgctgacggtctttcagattttgacaggtgaagactggaatagtgtgatgtacgatggtattatggcctacgggggaccttctttccccggaatgcttgtgtgcatttactttattatcttattcatttgcggaaattacatcttgcttaacgtcttcttggctatagccgtggacaatctagcggacgctgagtctctaacttctgctcagaaagaagaggaggaggagaaggaaagaaagaaattagctaggacagcaagccccgagaaaaaacaagagctagtggaaaagccagcagtgggcgaatccaaagaagagaagatcgagctgaagagtattactgctgatggcgagagtcctccagctaccaagatcaacatggatgatctgcagcccaatgaaaatgaggacaagagtccataccctaaccctgaaaccaccggcgaggaggacgaggaggaacccgagatgccagtgggacctaggcctaggccgttgtctgaactgcacctcaaggaaaaggcagtgccgatgccagaagcctccgctttcttcatcttttcctctaacaatcggttccgtctgcaatgccatcgaatcgttaacgatacgatttttacgaacctcatcctgtttttcatcttgttatcatcaatttctcttgccgcggaggacccggtccagcatacttctttcaggaaccatattctgggcaatgccgattacgtgtttacatcaatcttcaccttagagataattctcaagatgacagcctacggagcgttcctgcacaagggatcattctgccggaactactttaacatcttagacctgctagtggtgagtgtttcactcattagttttggcattcagtcttcagcgataaacgtggtcaagatcctgcgtgtccttcgggtgctgcggcctctccgggctattaaccgggctaaagggcttaaacatgttgttcaatgtgtttttgtggccatccgaactattgggaacattgtcatcgtgaccaccctcctccagttcatgttcgcttgtatcggtgtgcaactattcaaagggaaactgtacacttgtagcgactcttcaaagcagaccgaagccgagtgcaaaggtaattatatcacctacaaagacggcgaggtggatcaccctattatacagcccaggtcatgggagaactcgaagttcgactttgacaacgtgctggctgcgatgatggcactatttactgtgtccacctttgaaggttggccagaactcttgtatcggtctatcgatagtcataccgaagacaaagggcccatttataattacagagttgaaatctctatcttttttattatctatattataataattgccttctttatgatgaacatttttgtcgggttcgtgattgttacatttcaggagcagggcgagcaagaatacaagaactgtgagctcgataaaaatcagagacagtgtgtcgagtacgcactgaaagcgcgacctcttagaagatacattcctaagaatcaacaccagtataaggtgtggtacgtcgtgaacagcacctacttcgagtatttgatgtttgtactcatactgctcaacactatttgtcttgcaatgcagcactatggccagtcttgcctgtttaaaatcgcgatgaacattctcaacatgctgtttacaggtctttttaccgtagaaatgatcctgaaattgatcgcatttaagcctaagcattacttctgtgacgcgtggaatacattcgacgccctgattgtagtggggagcatcgtggatattgccatcaccgaggttaacccagcggagcacacccagtgctccccctcgatgaatgccgaggaaaacagtagaatctctataacgtttttccggttgttccgcgtaatgagactagttaaactcctcagtaggggcgagggaatcagaactctgttatggaccttcataaagagctttcaggctctgccttacgttgctctgcttattgtgatgctgtttttcatttatgcggtaatcggtatgcaggtatttgggaaaattgcactgaatgatacaactgagattaaccgcaacaacaatttccaaactttcccccaggccgtgctcttgctgttcagatgcgctactggagaggcgtggcaggatataatgctggcctgcatgcctggcaagaagtgcgcacctgaatcagaacctagcaattctactgagggtgagaccccttgcggtagtagtttcgcagtgttttattttatttctttctatatgttgtgcgcctttttaattattaaccttttcgtagccgtcattatggataattttgactatctgacccgtgattggtccatcctgggcccccaccacctggacgaattcaaaaggatttgggccgagtatgaccctgaagccaaaggtcggataaaacatctggatgtggtaacattgctaagacgtatccaaccacccctcggctttggaaaactgtgtccccaccgtgtcgcgtgtaaacgtcttgttagcatgaacatgcccttgaattccgacgggaccgtgatgtttaacgctaccctctttgcactcgttcgtacagcactgagaatcaaaaccgaggggaatctcgagcaggccaacgaagaactgcgcgccattataaaaaagatctggaaaaggacctccatgaagcttctggaccaggtagtcccaccggctggcgacgatgaggtaacagtgggaaaattttacgcaacctttctgatccaggaatactttaggaagtttaaaaaacgaaaggaacagggactcgtgggcaagccttcccagcgtaatgctctcagcctgcaggcggggctgcgtaccttacacgacattggccctgaaatcaggcgtgcgatcagcggagatttaaccgccgaagaggagctcgacaaggcaatgaaggaggcggtctccgccgcatctgaagacgacatctttagaagggctggggggctttttggcaaccacgtgagctattaccaatcagacgggcgatctgctttcccccagactttcaccacccagagacctctccatataaataaagctgggtcatcacagggagataccgaatctccttctcacgagaagctggtggattccacatttactccttccagctacagttccacaggatcaaacgcaaatatcaacaatgcaaataacaccgccctcggacgactcccacgcccggccggttatccctccactgtgagtaccgtggaaggacatggcccacctctgtctcctgctattcgagtccaggaggtcgcatggaagttatcttctaataggtgtcactcaagggagtcacaggcagcgatggcaggtcaggaggagaccagtcaggacgagacttatgaggtcaaaatgaaccatgataccgaggcgtgcagcgagccctctctactgtccacagaaatgttgtcttaccaagacgacgagaatcggcaactcacactacccgaggaagataagagagatatacgacaaagccctaagcggggattcttgcggagcgcctctttgggacgccgggccagttttcacctggagtgcctaaagcgtcagaaggatcgagggggtgatatttcacaaaagacagtcttacctctgcatctagtccaccaccaagctcttgccgttgctggcttgtcaccgctcctgcaaagaagtcacagccctgccagtttcccccggccctttgctacacccccagcaactccgggctcccgcgggtggcctccacagcctgtgcccaccctcagactggagggtgttgagtcttctgaaaagctgaatagtagtttcccttctatacattgcggaagctgggccgagactacacccggaggcgggggctcttccgcagcccggcgtgtccgacccgtgagtctgatggtgcctagccaagccggagcccctggacgccagtttcatggatctgcatcctcactggtggaggccgtgttaattagcgagggacttgggcagttcgcccaggatcctaaatttatagaggtgacaacacaggaactcgccgacgcctgcgatatgaccattgaagaaatggagagtgctgctgataatatcttgagcgggggcgcaccacagtcccctaatggggccctgctcccctttgtcaattgtcgtgacgctggccaggatagggccgggggcgaggaagatgccggctgcgtgcgcgccagagggcgtccctccgaggaggaattgcaggactctagagtctatgttagttctctgtag

SEQ ID NO: 110421 - DNA, 6417 bp, synthetic construct
  misc_feature 1..6417: note = Description of Artificial Sequence: Synthetic coding sequence
  source 1..6417: mol_type = other DNA
atggtgaatgaaaatacacggatgtacataccggaagaaaatcaccagggcagcaactacgggtctccaagacctgctcatgccaatatgaacgcaaacgccgccgcagggttagctcctgagcatatacccacgcctggtgcagcactgtcttggcaggccgctattgacgccgcccgccaagctaaactgatgggtagtgccggaaatgccacaatctccacagtcagttccacacaacggaagcggcaacagtatggcaaaccaaagaagcaggggtcaaccaccgctacacgccctccccgcgcccttctctgtctcacacttaagaatccaatcagacgggcctgtatttccattgtagaatggaagccctttgagattatcatcttactaactatcttcgccaactgcgtggccctagcaatctacattccttttccagaggacgattctaatgcaacaaactccaacctcgaacgggtagagtacctttttctgatcatcttcaccgtcgaggctttcctgaaagtgattgcatacggactgctctttcatccaaacgcttatcttagaaatggatggaacctattggatttcatcattgttgtggtagggttgttctccgcgatcttggaacaggccacaaaggcagatggggctaacgctcttgggggaaagggcgctggattcgatgtgaaagctttgagagccttccgcgtattgagacccctccggctggtaagtggggtgccttcactgcaggtggtactgaatagtatcattaaggccatggttccacttctccatatcgcactgcttgtactgttcgtgattatcatttacgcaatcatcggccttgagctcttcatgggtaaaatgcacaaaacatgttacaatcaggaaggaattgcagacgtgcctgcagaggacgatcccagtccttgcgctctggaaacgggccatggcaggcagtgccaaaacgggacggtatgtaagcctggctgggacgggccaaaacatggtattactaactttgacaacttcgcttttgctatgctgactgtgtttcagtgtattacaatggagggatggaccgacgtactgtattggatgcaggacgccatggggtatgaactaccctgggtctactttgtttcactcgtcatctttggaagctttttcgttctcaatctggttctcggagtgttgtcaggcgagttcagtaaagagagagagaaggccaaggcacgtggcgattttcagaaactcagagaaaagcagcagcttgaagaagacttaaaggggtatctagattggataactcaggccgaggatatcgatccagagaacgaagacgaagggatggatgaagaaaaaccaagaaacatgagtatgccaacttcggagacagagagcgtcaacacagagaacgtggcaggcggggatatcgaaggcgagaactgtggcgcccgactggctcatcggattagtaaaagcaagttcagtagatattggcggaggtggaaccgtttttgcagacggaagtgtcgcgctgctgtgaaatccaatgtgttctattggttggtcatcttcctcgtcttcctgaacaccttgaccatcgccagtgagcattacaaccagccaaactggctgacagaagtgcaggatactgcgaataaggcgctcttggccttgtttaccgcggagatgctgttgaagatgtatagtctcggtcttcaggcatacttcgtgtcactgtttaatcggttcgattgcttcgttgtctgtggaggcatactcgaaacaatcttggtcgagactaaaatcatgtccccacttgggatctccgtgctgaggtgtgttcgcttacttcgtatcttcaagattaccaggtactggaattctctctcaaatctcgtggcctcccttttgaattcagtgagatctatcgcctctctactactcctgctctttctttttattatcatttttagccttctggggatgcagttgtttggggggaaatttaactttgacgagatgcagaccaggcggtccactttcgataacttcccccagtcattgctgactgtctttcaaatcctaaccggggaggattggaacagtgtaatgtacgatggcatcatggcgtacgggggaccttcttttcccggaatgcttgtgtgcatttactttattatcctgtttatttgtgggaactatatcctgttaaatgtgttcctggctattgccgttgacaacctagccgatgctgagtctttgacgtctgcacagaaggaggaggaggaagaaaaagagaggaagaaactagcgcggacagcctccccggaaaagaaacaggaactcgtggagaagccagccgtgggggagtcgaaagaggaaaagatagaactgaaatcaatcacagctgatggtgaatcccccccagccaccaagatcaacatggatgacctacaacctaacgagaacgaggataagtccccttaccctaaccccgaaacaaccggggaagaggatgaagaagagccagaaatgcccgtgggtccacgaccacggcctctaagcgagctgcacttgaaggaaaaggccgttccaatgcccgaggccagcgctttcttcatcttttcttcaaataataggtttagactgcagtgccataggatcgtgaatgatacaatattcactaacctgattctgttttttattcttctcagcagtatctctctggcggctgaggatcccgtccagcataccagcttccggaatcacatcctgttttacttcgacatagtttttacaaccatattcactatcgaaatcgctcttaagatgacggcctacggagcctttctgcacaaggggtccttttgtcggaattactttaacatcttggacctactcgttgtgtctgtttcattaattagctttgggattcaatcgtccgcgatcaacgtcgtgaaaatcttacgggtgttaagagtgctgcgtccgttacgagccataaatcgggcgaagggtttaaagcatgtggtgcaatgtgtttttgttgcaatccgaacaatcggaaatattgtgatcgtgacaactctcctgcagtttatgttcgcatgcattggggtccaactcttcaagggcaagctgtacacttgctccgacagctccaaacaaaccgaggcagaatgtaagggtaactatattacatacaaagacggggaggtggaccaccctattatacagccacggagctgggagaattcaaagttcgattttgacaatgttcttgctgctatgatggccctgttcacagtcagcaccttcgaaggttggcctgaactattgtatcgtagcatcgactctcacacagaggacaagggaccaatctataactatcgggttgagatttcaatcttcttcatcatctatatcattattatcgctttttttatgatgaacatttttgtgggcttcgtaattgtcaccttccaggagcagggagagcaggagtataaaaactgtgagctggacaagaaccagagacagtgcgtggagtacgccctgaaggcaagaccgctgcgacggtacattcccaaaaaccaacaccagtacaaggtgtggtatgtggtgaatagcacctactttgaatacctcatgttcgtccttatcttgttgaatactatctgtttagccatgcagcattatggtcagtcctgccttttcaaaatagctatgaacatcttgaatatgctgttcactggactcttcactgtggagatgatcctgaagcttatcgcgtttaaacctaagggttacttctctgacccctggaacgtgttcgattttctgatcgtgatcggatcgatcatcgatgtcatcctcagcgaaactaatcccgcagaacacacgcagtgctctccaagcatgaacgccgaagaaaattccaggatctctattactttttttcgactgttccgggtaatgaggctggtgaaactcctgtcccgtggggaaggcatccgaactttactttggacctttatcaagagttttcaggctctgccgtacgtggctttgctgatcgtcatgttgttctttatctacgctgtgattggtatgcaagtttttggaaagattgccctgaacgacaccaccgagattaatcgcaacaataactttcaaacgttcccccaggcagtgctattactcttccgatgcgccaccggagaggcatggcaagacatcatgctcgcctgtatgccaggcaagaagtgtgccccggaatccgaaccatctaactcaaccgagggagagacaccatgcggatcatctttcgcagtcttttacttcattagcttctacatgttgtgcgcatttctgataataaacctgttcgtggccgttataatggataacttcgactacctcactcgcgactggtcaatcttgggcccacaccacctggacgaatttaaacgaatctgggccgagtatgacccggaggcgaagggccgcatcaaacacttggatgtggtaactttactgcgcaggattcagcctcccctcggattcgggaagctgtgtccccaccgggtggcatgcaagaggctagtatcaatgaacatgcctctcaatagcgacgggacagtgatgttcaatgccaccctgtttgcccttgtccgcactgccctgaggataaaaacagaaggcaatcttgaacaggcaaacgaggagctccgtgcgatcattaaaaaaatctggaagaggacaagcatgaaactgttggaccaagtggtgccaccagcaggggatgatgaggttacagtggggaagttctacgcaaccttcctcatccaagagtacttccgcaaattcaaaaaaaggaaagaacagggattggttggtaaaccatcccaacggaacgcactttctttgcaggcagggctgaggactctgcacgacatcggccccgagattagacgcgccatttcaggcgatcttacagctgaggaggagctcgataaagcgatgaaagaagctgtgtctgccgcctcagaggacgatatttttcgtagagctggcggcctgtttggtaaccatgtatcgtattaccaatccgatggacggtccgctttcccccagacattcactacccagagacctctccatatcaacaaggctggttcgagccagggtgacacagagtctccgtcacacgagaaactggtggacagtaccttcacacctagttcctactcatccacaggcagtaacgccaacattaataacgcgaacaatactgctctgggacgtttaccacgaccagccggttatccgtccaccgtgtccaccgtggaaggacacggcccacctctctcacccgccattagggtccaggaagtggcatggaagctcagtagtaatagatgccactcgcgtgagagccaggcagcaatggcaggccaggaagagacttcgcaagacgaaacctacgaggtgaagatgaatcacgataccgaggcatgtagcgaacccagcctcttgagcacagagatgttgtcttaccaggacgacgagaatcgtcagctgactttgcctgaggaagataagagggatatccgacaatccccaaagcgtggttttttgcgatctgccagcctcggacgccgggcctcttttcacctggaatgcttgaagagacaaaaggaccgcgggggcgatatcagccagaaaaccgtcttgcccctacatctggtgcatcatcaagctctggccgtggcaggactcagtccgctgttacaaagatcgcacagtccagcatcgtttcctaggccatttgctacacctcccgctacgcccggcagccgcggctggccaccacagccagtccccactctaaggctggagggggtagagtcatccgagaaactgaacagcagtttcccgtccatccactgtggatcatgggccgagacgacacctggaggcggcggcagcagcgcagctcggagggtcagacccgtgtccctaatggtgccttctcaggcaggggcccccgggcgacaatttcatggcagtgcctcctctctcgtagaagctgtgctgattagcgaagggctgggacaatttgctcaagatcctaagtttatcgaggtaacaactcaggagctggctgatgcttgcgatatgacaatcgaagagatggaatccgcagcagataacattctcagcggcggagccccccagagccccaatggcgcacttctcccatttgtgaattgtcgagacgccgggcaggatagggcgggcggggaggaggacgccgggtgcgtgcgcgctaggggcaggccctcagaggaggaactgcaggatagcagggtatacgtgtctagtctgtag

SEQ ID NO: 110422 - DNA, 6477 bp, synthetic construct
  misc_feature 1..6477: note = Description of Artificial Sequence: Synthetic coding sequence
  source 1..6477: mol_type = other DNA
atggttaacgaaaatacccgtatgtatatacccgaggagaaccatcagggatctaactatgggtctcctcgcccagctcatgccaatatgaacgccaacgccgctgccgggctcgctcccgaacatatccctaccccaggagctgcgctcagttggcaggccgccattgatgccgcacgccaggcgaaactcatggggagcgcaggaaacgctacgatctcgacggtgtcgtctacccaaaggaagcgccagcaatacggcaagcccaaaaagcaaggctcaaccacagcaacgcggccgccccgcgccctgctgtgcctgaccttaaagaacccgatccgccgggcctgtatcagcatagttgaatggaaacccttcgaaattatcatcctgctgactatttttgctaattgtgtggctctcgccatctacatcccgttcccagaggatgattcgaatgccacaaattctaatctggagagggtcgaatacctctttctgatcatcttcaccgtcgaggcgttcttgaaagtgatcgcctatggccttctgtttcaccctaacgcatatttaaggaacggctggaacctcctggacttcatcatcgtggtggtaggcctcttctctgcaatattagagcaagctaccaaagccgacggagccaacgctctcggaggtaaaggtgccgggttcgacgttaaggcactgcgcgccttccgtgtactccggccactgcggctcgtgtcaggcgtgccttcgttacaagtagtcctcaactctattatcaaagccatggtccctctcctccacattgctctcttagtccttttcgtgatcatcatctacgcaataattgggcttgagctcttcatgggtaagatgcacaagacatgctacaaccaggagggtatagccgacgtgcccgccgaggacgacccctccccctgcgcactagagacgggccatggacgtcaatgtcaaaacgggaccgtgtgcaaaccgggctgggacgggcccaagcacggaatcaccaatttcgataatttcgcattcgcaatgttaacagtgttccagtgcattactatggagggatggacagatgtcctgtactgggttaacgatgccgttggacgagactggccctggatttattttgtcacgctaattatcatcgggtcctttttcgtcctgaatcttgtgttgggcgtcttgtctggggagttctcaaaggaacgggagaaggccaaggcaaggggagatttccagaaactgcgggagaaacagcagcttgaggaggacctgaaaggttacctcgactggattacccaggcagaggacattgacccagagaacgaggatgaggggatggacgaagagaaacctaggaatatgagcatgccgacgtcggaaactgagagcgtaaacaccgaaaatgtcgcagggggtgacatagaaggcgagaactgcggcgcacgactcgcacaccggatatctaaaagcaagttctcacgctactggcgccgatggaacaggttttgccggcggaaatgccgtgccgccgtcaagtcaaacgtgttttactggctcgtcatctttctcgtgtttcttaacacactgaccatcgcaagcgagcattacaaccagcctaattggctgaccgaggtccaggatactgcgaataaagcgctgcttgccctgttcacagccgagatgttgctgaaaatgtactctcttgggctgcaggcctattttgtatcacttttcaatagattcgactgtttcgtcgtgtgtggcgggatcctcgaaactattctcgtcgagacaaagattatgagccccctgggaatcagcgtcctgaggtgtgtcaggctgctgcgtattttcaaaataacccgctactggaacagcctgtctaacctcgttgcgagcttgttaaattctgtgaggtctatcgcttctcttctgctgctgctgttcttgttcataatcattttttctctactgggaatgcagctgtttgggggaaaattcaattttgatgagatgcagacccgacggagcacttttgataattttccacaaagcctgctcacagtttttcagatcctgaccggagaagattggaatagcgtaatgtacgacggtattatggcttatggaggcccaagctttccgggcatgctggtgtgcatctactttattattctgttcatctgcggtaattacattcttcttaatgtgttcctcgcgatagccgtggacaacctggccgacgctgagagcctcacatctgctcagaaagaagaggaagaggagaaggaacgcaaaaaacttgccagaacagcatctcccgagaagaaacaagaattggttgagaagcccgcagtcggagagtctaaagaagaaaaaattgagcttaagagcataactgccgatggtgagtcgccccccgccacaaaaataaacatggatgacttgcagcctaatgaaaatgaagataaatccccctacccaaatcctgagacgactggggaagaagacgaggaggagcccgagatgcctgtggggccacgtccacgacccctgagtgaattgcatcttaaagagaaggcagtcccaatgcccgaggcctcagcattcttcatcttctcatctaataaccgttttcgactgcagtgccatcggatcgttaacgatacaatctttacaaatctcattttgtttttcattctcctgagttcaatttcattggcagccgaggaccctgttcaacacacttccttccgaaatcatatcttgttttacttcgacatagtgttcactacaatcttcacaatcgagatcgctctaaagatcctgggcaacgccgattacgtgtttacatccatctttaccctcgaaattatcttgaagatgacagcctatggagctttcctccataaaggatctttttgtcgcaactattttaatatcctggatctactcgtggtgagcgtgtcattaatcagttttgggatacagtctagcgcaatcaacgtcgttaagattctaagagtgctgcgagtactccgcccacttagggcaatcaatagggcgaaaggcctgaagcacgtggtgcagtgtgtatttgtggctatccgcaccatcggcaatatcgttatcgtgacgacactgttacagtttatgtttgcgtgcattggcgtccagctattcaaaggtaagctgtacacatgttctgatagctccaagcagacagaggcggaatgcaaggggaattatattacatataaggacggagaggtagatcatcctatcatccaaccacgctcatgggagaactctaagttcgacttcgataacgttttggcagccatgatggcactgttcaccgtgtccacgttcgagggatggcccgaactgctgtaccgctcgatcgatagccatactgaggacaaaggaccaatttacaattacagagtcgagatcagcatcttcttcatcatatacatcatcatcatcgccttcttcatgatgaatattttcgtgggcttcgttatcgtaacatttcaggagcagggagagcaggagtacaaaaactgtgaactggataaaaaccaacggcagtgtgtcgaatacgcgctcaaagcacggcctcttagacggtatatccccaagaatcagcaccaatataaggtctggtacgtggtcaattcaacgtatttcgagtacctgatgttcgtactcatcttgctgaacacaatttgtctggccatgcaacactacggccagagttgtctgttcaagatcgccatgaacatcctgaatatgctgttcaccggactctttactgtggaaatgattttaaagttgatcgcgtttaaacccaaacactatttttgtgacgcctggaacacgtttgatgccttgatagttgtgggatcgatcgtggacattgcaatcacggaggtgaaccctgctgagcacacccaatgtagtccctccatgaacgcagaagagaactctagaattagcatcacattctttcgtctgttcagggtgatgaggctggtgaagctactttctcggggtgaagggattcggaccctgctgtggacatttatcaaatcttttcaggccttgccctatgtggctttgctgatagtgatgctgttctttatctacgccgtgataggaatgcaggtattcggtaagattgcccttaatgacactactgaaatcaaccgtaacaataattttcagacctttccacaagccgttttgttactgtttcggtgtgctactggcgaggcttggcaagacataatgcttgcttgtatgcccggaaaaaagtgtgccccagagtctgagccctccaattcaacggaaggtgagacgccctgcggttctagctttgctgtcttttacttcatcagtttctacatgctgtgcgcattccttataattaacctgttcgtagctgtgatcatggacaactttgattacctgacaagggactggagtatcctgggccctcaccatctggacgagttcaaaagaatctgggccgaatacgatccagaggcaaaaggccgtatcaagcatttggatgtggtgacactgctgagaagaattcagcctcctcttggcttcggaaaactgtgcccgcaccgggttgcatgcaagagattggtgtccatgaatatgccactcaatagtgacgggactgtgatgtttaatgccaccttgtttgcgttggtcagaacggctctgagaatcaaaacggagggcaacctcgagcaggctaacgaggagctgcgtgccatcatcaagaaaatctggaaacgaactagtatgaagctgttagaccaagtggtgcctccagcaggggacgatgaggtgactgtgggtaaattttacgcaacctttttgatccaggagtacttcaggaagttcaaaaaaaggaaggagcagggactggtgggtaagccatcccagcgtaacgcactttctttgcaagcagggctcagaaccctgcatgatatcgggcccgagatcaggagggcaatatccggcgacctgaccgccgaagaagagttggataaggcaatgaaggaggcagtaagcgcagcctcggaagacgacatctttcgaagggcaggcgggctcttcgggaaccacgtatcctattatcagtccgacggtcgcagcgccttcccccagacattcacgacacagcggccacttcacatcaataaagccggtagctcacagggtgataccgaatcaccttcacatgagaagctggtggactccacttttacgccaagcagctattcttccactggatccaacgctaatattaacaacgccaacaatacagcgctcgggagactgcctcggccggccgggtatccaagcactgtcagcactgtcgaaggacacggaccccccctatctccggcaatccgtgtgcaggaagtggcatggaaattaagcagtaatcgttgtcactctcgggagagtcaagccgctatggctggccaagaagagacctcacaagatgagacctacgaggtaaagatgaatcacgatactgaagcctgctctgaaccctcactcctgagcaccgagatgctctcatatcaggacgatgaaaatcgccagctcactctccctgaggaggacaaacgggacataaggcagtcgccgaaaagggggttcctcagatctgcctctctcggtcggagagcctctttccatttggaatgcctaaagcgtcagaaggaccgcggaggcgacatctcccaaaaaacagttcttccattgcatctggtgcaccaccaggctctcgccgtggccgggctgtcaccactcttacagagatcccactcccccgcaagcttcccccgccctttcgctacaccccccgcaacacccggctcaaggggatggcctcctcagcctgtgcccactttgcgtcttgaaggcgtggagtcttccgagaaactcaatagttcattcccttccattcactgcggatcctgggctgagactacaccaggcggagggggcagttccgcagccaggagagtgcgccctgtatctctgatggtgcccagccaggctggggcgccgggacgccagtttcacggaagtgcctcttccttagtggaagctgtgttgatctcggaggggttgggccagtttgcccaggaccccaaatttatagaagtcaccactcaggagctcgccgacgcctgtgatatgactattgaggagatggagtcagccgctgataatattctgtcaggcggcgctccacagagtccaaatggagccctactcccctttgttaactgtcgcgatgccggacaagatcgggccggcggtgaagaggatgcgggctgcgtgagagccagaggtaggcccagtgaggaggaattgcaggattcacgcgtgtacgtatcatctctgtag

SEQ ID NO: 110423 - DNA, 6522 bp, synthetic construct
  misc_feature 1..6522: note = Description of Artificial Sequence: Synthetic coding sequence
  source 1..6522: mol_type = other DNA
atggtgaacgagaataccaggatgtacattccagaagaaaaccaccaaggcagcaactatggttccccccgccctgcccacgccaacatgaacgcaaacgccgctgccggactggcccctgagcacatccctactcctggagctgctttgagctggcaggcagcaatagacgccgccagacaggccaaactcatgggaagtgccggcaacgctacgatctccactgtatccagtacacagaggaaacgtcagcagtatgggaagccaaaaaagcaggggtccaccactgctactcggccaccaagagccctgctctgtctaacgctaaaaaatcccatccggagagcatgcatttcgatcgtggagtggaagccttttgaaatcatcatccttcttactattttcgccaattgcgtagcgttggctatctacattcctttccctgaggatgattctaatgcgaccaattccaacctggaaagggtggaatacctgtttctaatcatttttacagtggaggcctttctgaaagtgatagcatatggtttacttttccaccccaatgcttacctcagaaatggctggaacctcctggactttattattgtagtggtcggcctcttttcggctattttggagcaggccactaaggccgatggcgctaatgccctcggcggtaagggggctggcttcgacgtgaaggcgctcagagccttcagggtgttgcgtcccttgcggctcgtgagtggcgtcccttcactccaggtggtgctcaacagcattataaaggccatggtcccacttctacacatcgcgctgctggtgctcttcgttatcatcatatatgctatcatcggactggagctgtttatgggaaagatgcacaagacatgttataaccaagagggcatcgccgacgtgccagccgaagacgacccgtcaccctgcgctctcgagaccggacatggccgacaatgccaaaacgggacagtctgcaagcccggatgggacgggcctaagcatggcattaccaattttgataattttgcctttgcgatgctgacagttttccagtgtattacaatggaaggttggaccgacgtgctgtactggatgcaggatgcaatgggatacgaactaccttgggtgtacttcgtgtccctggtgatttttggcagtttttttgtactcaatctggtgctcggcgtcttaagcggggaattcagcaaggaacgagaaaaggcaaaggcaaggggggatttccaaaagttgagggaaaagcagcagttagaggaggacttgaagggctatcttgactggattactcaggccgaggacatcgatcctgagaacgaggacgaagggatggatgaagaaaaaccccgcaatatgtccatgcccacaagtgaaaccgagtccgtaaacaccgagaatgtggctgggggagatatagaaggggaaaactgtggtgcaagattggcacacaggatttccaagagcaagttctcccgttactggcgacggtggaacagattctgcagaagaaaatgccgggccgcagtgaagtcaaacgtcttctattggctggtgatcttccttgtgtttcttaacacacttactatcgcttcagagcactacaaccagcctaactggctgactgaggtgcaggatacggcaaataaggccctgcttgccctgtttaccgcagaaatgcttttaaagatgtactcactcggtctgcaggcctattttgtgtcactctttaatcggtttgactgctttgtcgtctgtggtgggattttagagaccatcctcgtggagaccaagatcatgagtcctctaggaatttcggtgcttcgctgcgtcagacttctccgtatttttaagatcacacggtattggaattcactgtccaacttggtagcctcgctgctgaactcagtgaggtctatagcttccctgttactgctactgtttctgtttatcatcatatttagccttcttggaatgcagctgtttggaggtaagttcaactttgacgagatgcagaccagacggtctaccttcgataatttcccacagagcctgttaaccgtctttcagattctcaccggagaggactggaactccgtgatgtatgacggtatcatggcttacggaggcccaagcttccctggaatgctggtgtgcatttattttattatactcttcatctgtggaaattacattctactgaatgttttcttagcaattgccgtggataacctagctgacgcagaaagcctcacctcagcacagaaggaagaggaagaagagaaagagcggaagaagcttgctagaactgcaagtcctgagaaaaagcaggagctggtggaaaagcctgccgtgggcgagagcaaagaggaaaagatcgaactgaagtcaattaccgccgacggcgagtcccctcccgccactaagataaacatggacgaccttcagccaaacgagaatgaggataagtctccgtatcccaatcccgaaaccacaggagaagaagatgaagaagagcccgaaatgcctgtcggccctaggccgagacccctctccgaactgcacctgaaagagaaagcagtgcctatgccagaagcctccgcatttttcattttcagctccaataatcggttcagacttcagtgtcaccggattgtgaacgacaccattttcaccaatctgattctgttctttatattactctcctctatatctcttgctgccgaggatcccgtgcagcacacttcatttcgtaaccacatcctcttctacttcgacattgtgttcactacaatcttcaccatcgagatcgccctcaagatgaccgcctatggtgctttcctgcataagggttccttctgcagaaactacttcaacatactcgatctgttagttgtgtcagtttcactgatttcttttggcatccagagctcagctataaacgtcgtcaaaatactgcgggtgttgcgagtgctccgccccttgcgtgccatcaaccgcgccaagggcttgaaacacgtcgtgcagtgtgtgttcgtggccatcaggacgattggaaacattgtcatagtgactacgctgttgcagttcatgtttgcctgtataggggtccagctattcaagggaaagttatacacgtgcagcgactcatccaagcaaaccgaagctgagtgtaaaggaaactacattacatataaggacggggaagtggatcacccaatcatccagccccggtcttgggagaatagcaaattcgactttgataatgtactggctgcaatgatggctctcttcaccgtgtcgacttttgaaggttggcccgagctgctgtacagaagtatcgattcccacaccgaagacaaggggcccatttacaattaccgtgtcgaaattagcatcttctttattatttatataataatcatagctttctttatgatgaatattttcgtgggtttcgttattgtaaccttccaggagcagggggagcaggagtataagaattgtgagctcgacaagaaccagaggcagtgtgtggagtacgccctgaaggcccgacccttaagaaggtatatcccaaagaatcaacaccagtataaggtgtggtatgtggtcaatagtacgtactttgagtacctgatgtttgtccttatactgttgaataccatctgtctggccatgcagcactatggccagtcctgtctgtttaagatcgcgatgaatattctgaacatgctgttcaccggactattcaccgtagagatgatcttgaaattgatcgccttcaagccaaaggggtacttttcagatccctggaacgtgtttgatttcttaatagtgataggctcaatcatcgatgtcattttaagtgagaccaacccggccgagcacacccaatgcagcccctctatgaacgccgaggaaaattcgagaattagcattaccttcttccggctattccgggtgatgcgattagtaaagctcctctcacgtggcgaaggaatcaggactctcctctggactttcatcaaatcgtttcaggccctgccatacgtcgccctgctcattgtgatgctcttcttcatctatgctgtgatcggcatgcaggtgtttggtaagatcgccttaaatgacacgactgagatcaacagaaacaataattttcagaccttcccacaggctgttttactcctgttcagatgcgccactggcgaagcgtggcaggatataatgttggcctgcatgccaggaaagaaatgtgcaccagagtcagaacctagcaattctaccgaaggtgagaccccctgcggctccagcttcgccgtgttttactttatcagcttctatatgctgtgcgccttcctcatcattaatctcttcgtggctgtgatcatggataattttgattacctgacacgagattggtccattttagggccccatcatctggacgaatttaagcgtatctgggccgagtacgacccagaggctaaagggcgaataaagcacttggatgtcgtgacacttttacgacgcattcagcccccgctcggatttgggaagctgtgccctcatagagtggcttgcaagcgactggtgagtatgaacatgcctctgaattcagacggaaccgtaatgtttaacgccaccctgttcgctttggtccgtaccgccctgcgtatcaaaactgaggggaacctggaacaggctaatgaggagcttcgggccattattaaaaagatctggaagagaacctcgatgaagcttctcgatcaggtggtgccgcctgctggcgatgatgaggtgaccgtcggcaagttttatgccacatttttgatccaggaatatttccggaagtttaagaaaaggaaagagcaggggctggtggggaagccttcccagcggaacgccctgtctttgcaagccgggctgcggactttgcacgatattggcccagaaattagacgtgcaatcagcggagacctgacggctgaggaggagcttgataaagccatgaaggaggctgtctccgcagcttctgaggacgacatttttcggagagccggtggcttgtttggtaatcacgtctcgtactaccagagcgacggacgaagcgcttttccccaaacctttactactcagcgtcccctgcacattaataaggccggtagcagtcagggcgacactgagtccccctcacacgaaaagttagtcgacagcacgttcacccctagcagttattcaagcacgggctccaacgccaacattaataacgcaaataacaccgctctcgggcggctgcctaggcccgctgggtacccttctacagtgagcacagtggagggccacggacctcctctgtcacctgctattcgcgttcaggaagtcgcttggaagttatcatccaatcgcgagcggcatgtgcccatgtgcgaagacctcgagcttagaagggatagcgggtctgcaggaacacaggcccactgtttacttctgaggaaagcaaatccttctaggtgtcactcacgcgagagccaggccgccatggctggacaggaggagacttctcaggacgagacctacgaggtcaaaatgaaccacgatacggaggcctgctctgaaccctcgctattatctactgagatgctgagttaccaggatgatgaaaaccgacagctgaccctgcccgaagaggacaaacgcgacatcaggcagagccctaagcgtggctttctaaggtcggccagcctggggaggagagccagtttccatctggagtgcctgaaacggcagaaggatcgcggaggagacatctctcagaaaacagtattacctttacacctggttcaccatcaggccctggccgttgctggtctctcgccgcttctgcaaagaagtcacagcccagcctcgttcccaagaccattcgctacccctccagccactccaggcagcagagggtggccaccacagcccgtgcccacactccgccttgaaggcgtggaatcctctgagaagctcaactcctccttcccatcaatacactgcgggagctgggccgaaacaacccctggtggaggcggcagtagcgcagcaagacgagtgcggcccgtgtcactaatggtgccctcccaggccggggcgccagggagacaatttcacggatcagcttcttcgctcgtagaggcagtgctgattagcgaggggttgggacaattcgcgcaggatccaaagtttatcgaagtcacaacgcaagagctcgccgacgcctgtgatatgaccatcgaggagatggaatccgccgcggataacattcttagcggcggagctccacagagcccgaacggagccctgctaccctttgtgaattgtcgggatgctgggcaggaccgagccggcggcgaggaggatgccggttgtgtgcgggctagagggagaccctccgaagaggagctgcaagattctcgcgtgtacgtgtcatccctgtag

SEQ ID NO: 110424 - DNA, 6474 bp, synthetic construct
  misc_feature 1..6474: note = Description of Artificial Sequence: Synthetic coding sequence
  source 1..6474: mol_type = other DNA
atggttaatgagaacactagaatgtacataccagaagaaaaccatcaaggtagtaattatggatccccaagacctgcccacgcgaacatgaatgcgaatgccgcggcaggtcttgctccagaacatatcccaactccgggcgctgccctgagctggcaggcagcgattgacgccgctcgccaagctaagctaatgggatctgccggtaatgcgacgatttctactgtgagtagcacgcagcggaaacggcaacagtatgggaagccaaagaagcagggttcaacaactgcaacaaggccgccacgcgcccttctatgccttacactgaaaaatccaatccgccgggcttgcatcagtatcgtcgagtggaagccattcgagattatcattctgctcactatttttgcaaactgtgtggcgctggccatttatataccgttccccgaggacgacagtaatgctaccaactcaaacttggagcgggttgagtacctattcctgattattttcactgtcgaggcgttcctaaaagtgattgcgtacggtttgcttttccacccaaatgcctacctccggaatggctggaatcttctggacttcattatcgtagtagttgggttgttcagtgccatccttgaacaggcgacaaaggctgacggagctaatgcattggggggcaaaggtgccggatttgatgttaaggcactgcgagcgtttcgcgtacttcgtcctctccggttggtgagcggagtgccctcactgcaggtggttctcaattccataattaaggccatggtgcctcttctgcacattgctctgctggtccttttcgtcatcatcatctacgctattatcgggttggaactgttcatggggaaaatgcataaaacttgttacaaccaggagggcattgccgatgttcccgccgaggacgatccatccccgtgcgcattggagacaggccatggaaggcagtgtcagaacggcaccgtgtgcaagccaggctgggatgggcctaaacacggaattactaactttgacaatttcgcctttgctatgctgactgtgttccagtgtatcactatggagggttggacggacgttctctattgggtgaatgatgcagtgggaagagactggccgtggatctatttcgtgacactgatcattatcggctctttcttcgtgttgaaccttgtgctgggggtgctgagtggcgaattcagtaaggaacgggagaaggctaaggctagaggcgacttccagaaattacgggaaaagcagcaactagaagaagacctgaaaggttacttggactggatcactcaggccgaagatattgaccctgaaaacgaagacgaagggatggacgaagaaaaacccagaaatatgtccatgcctacctccgagacagagtcagttaacaccgagaatgtggctggcggtgacatagagggggagaattgtggagccagactggcccaccggatctcgaagtccaagtttagtaggtactggcgccgctggaatcgcttttgccgtcgtaaatgccgtgcggctgtgaagagcaatgtattctattggcttgtcatcttcctggtgttcctgaacactctgaccatcgccagtgaacattacaaccagcctaattggcttactgaagtccaggatacagccaataaagccctgctggccctattcacggccgaaatgctgctcaagatgtattctttgggtctgcaggcctactttgtgtcactgttcaaccgcttcgactgcttcgtggtctgtggggggatcttggagaccatactggttgaaacaaaaataatgtccccgctcggaattagtgtcttgcggtgcgtccgtttgctacggatcttcaagattaccagatattggaattcactgagtaatcttgtggcttctctcctgaactcggtgcgatcaattgctagtctcctgcttttgttgtttctgttcatcataatcttctccctgctcggaatgcagctgttcggcggcaaattcaatttcgacgaaatgcagacacgcagatcaacgttcgataattttccacagtccctgctgacggtgtttcagattctcacaggagaagattggaactccgtgatgtatgatgggattatggcatatgggggacctagcttcccgggaatgttggtgtgcatctatttcattatactctttatttgcggaaactacatcctactgaacgttttcctggcgattgcggtggacaatcttgcggatgctgagtcactaacgtcagcacaaaaggaagaggaagaggagaaggagagaaagaagctggcccgaaccgcatctcctgagaagaagcaggagctggtagagaagcccgcagtcggggagtccaaagaggaaaagattgaactgaagagcattacagccgatggtgaaagccctcctgccactaaaatcaatatggacgacttgcagccaaatgaaaacgaagacaaaagcccataccccaacccagaaacaactggagaggaggatgaggaggagccggaaatgcctgtcgggccacgtcccagacctctgagtgaattgcatctcaaggaaaaagcggttcctatgcctgaggcttcagccttttttattttctccagcaacaaccgattccggttgcaatgccatcggattgtgaatgacacaattttcacgaacctcatactatttttcattttactctcctccatcagcctcgccgctgaggatccggtccagcacacctcctttcgcaaccacatactgttttatttcgatatcgtctttaccacaatcttcacaatagagatagccctgaaaatgactgcctacggggcttttctccacaaagggtcgttctgtcggaactactttaatatcctcgacctccttgtggtgagcgtctctctcatctcgtttggcatccaatcctccgctatcaatgtggtcaagatcttgcgcgtgttgcgtgttctgcggcctctccgggcgatcaaccgagccaaaggactgaagcacgttgttcagtgcgtgtttgtggccattagaactataggcaacatcgtgatcgtgaccacccttctgcagttcatgttcgcgtgcattggagtccagctttttaagggcaagctgtacacctgctccgattctagtaaacagaccgaggcagaatgtaaaggtaactacattacgtataaggacggagaggtcgaccaccctatcatacagccccggtcttgggagaattcaaaatttgacttcgataacgtcctggctgctatgatggcactgtttaccgtgtcaacgttcgagggctggcccgagcttctgtataggagcattgatagccataccgaagacaagggacccatctacaactaccgagttgagatatccatatttttcatcatttatattatcattatagccttcttcatgatgaatattttcgtgggatttgtgattgtgaccttccaggaacagggggaacaagaatataaaaactgtgaactggataaaaatcaacgccagtgtgtggagtatgctctcaaggcgcgcccactgaggcggtatattcctaaaaatcagcaccagtacaaagtgtggtatgtcgttaactcaacgtatttcgaatacttgatgttcgtgctgattctgctgaatacaatttgtctggcaatgcagcactacggtcaatcgtgcctgttcaagatcgctatgaatatcttaaacatgctgtttacgggcctattcaccgttgagatgattctcaagctcatagccttcaaacctaagcattacttctgcgacgcgtggaatacattcgacgcactgattgtggtggggtctatcgttgacatcgctatcacagaagtcaacccagcggagcatacacagtgttccccttctatgaatgccgaggagaactccaggatctccatcacttttttccggttgttcagagtgatgagactggttaaacttttgagccgcggagagggaatcagaacactactctggacctttatcaaaagttttcaggccctgccgtatgtggccctgttgattgtgatgttattctttatttatgctgtcatcgggatgcaggtgtttgggaaaatcgccctgaatgacacaacagagatcaaccgcaacaataatttccaaactttcccacaggcggtcctcctgttgttccgttgcgcaacgggcgaggcctggcaggatatcatgctcgcgtgcatgcccggtaagaagtgcgcccctgaatctgagccaagcaacagtacggagggagagaccccctgtggctcgtcttttgctgtgttctattttatctctttttatatgctgtgcgcctttttgatcattaacctgtttgtggctgtgatcatggataatttcgattacctcaccagagattggagcatcttgggtccccatcacttagacgagttcaaacgcatctgggccgaatatgacccggaggcgaaaggtaggatcaaacacctggacgtggtgacattgctgcggaggatccagcccccactggggtttgggaagctctgcccccacagggttgcctgtaagaggctagtcagtatgaacatgcccctgaacagtgatgggaccgtcatgtttaatgccacattgtttgccctggtgcggaccgccttgcgcataaaaaccgaggagggacctagcccaagcgaggcacaccaaggtgctgaagaccctttcaggcccgccggcaacttggagcaggccaatgaggagttacgggcaattatcaagaagatatggaagagaacatcgatgaaactgttggatcaggtcgttcctcctgctggagatgacgaagtaactgtgggtaagttctacgctacatttctcatccaggagtacttccgaaagttcaaaaagaggaaagaacaaggactcgttgggaaaccatctcagaggaacgccctcagtctgcaggccggattgcgtacactccatgatatcgggccggagattcgcagggccattagtggcgacctgactgccgaggaagagttagacaaggctatgaaagaagcggtgtccgccgcgagcgaagatgacatctttaggagagctggtggtttgtttgggaatcacgtgtcctactaccaatcggacggccggtctgcatttccccagacctttacaactcaaaggcctttacacataaataaggccggatcctcccaaggcgatactgaaagcccaagccatgaaaagcttgtggactccacctttacaccaagctcctatagctcaaccggttcaaatgcaaatatcaacaatgccaacaacacagcccttggcaggttgcccaggccagcggggtaccccagtacggtgagcactgttgaaggccatggaccgcctttgagtcccgccatccgggtgcaggaggttgcctggaagctgtcttccaatcggtgtcattcaagagaatcccaggctgcaatggccggacaggaggagaccagccaggatgaaacttatgaggttaaaatgaaccacgatactgaagcatgttcagagcccagcctgttgagcaccgaaatgctctcataccaggacgatgagaataggcagcttacgctgcccgaggaggataagagggacatccgacagtcgccaaagcgggggttcctaagatcagcctctctggggcggagagcatcattccatctggagtgtctgaaaagacaaaaggacaggggaggagatatttcccagaagacagtcctgcctctgcacctggtccaccaccaggctttggcagtggcaggactgtctccattattacagcgttcccattccccagcgagctttccccggcctttcgccaccccccccgcaactccaggttccagaggttggcctccgcagcctgttcccacattgaggctcgagggagtggagtccagcgagaagctcaattctagtttcccctccattcattgcggctcctgggctgaaactacccccggagggggaggcagttccgcagcccgacgagtccggcccgtctctctgatggttccctcccaagcaggggcgcctgggcgacaatttcacggctcagcaagttcacttgtggaagccgtcctgattagtgagggattaggccagttcgcccaggatcctaagtttattgaggtgactacgcaagaactcgctgatgcatgcgatatgaccatcgaggagatggaatccgccgccgataacatcttgtctggaggggcccctcaatcacctaatggagccctgctcccatttgtgaactgtcgcgacgcaggccaggacagagccggcggagaagaggacgccggttgtgtcagggcaagaggtaggccttcagaggaggaactgcaggactctagggtgtacgtctcctcgctgtag

SEQ ID NO: 110425 - DNA, 6468 bp, synthetic construct
  misc_feature 1..6468: note = Description of Artificial Sequence: Synthetic coding sequence
  source 1..6468: mol_type = other DNA
atggttaatgaaaataccaggatgtatatccctgaggaaaaccaccagggatccaactacggtagcccccgcccggctcacgccaatatgaacgcaaacgccgcagccgggctcgccccggagcacattcctactcccggggcggctttgtcttggcaggcagctatagatgctgcacggcaggccaaattaatgggaagcgctggtaatgcgacaattagcaccgtgtccagtacccagcgcaaacggcaacaatacggcaagcccaaaaagcagggaagtactacagccacacgtccccccagagccttgctctgcctaactctgaaaaaccccatccgacgggcctgcatctcaattgtagagtggaagcccttcgagattataatccttctgaccatattcgccaactgtgtggctctggccatatacattcccttcccggaggatgactctaacgcaacaaatagcaatctggaaagagtcgagtacctcttcctgattatctttaccgtcgaggctttcctgaaagtgatcgcatacggactccttttccatcctaacgcctatctgagaaacggctggaacttgcttgacttcataatcgttgtggttgggttattctcagcaatcttggagcaagccaccaaggcggacggagcaaacgcactgggcgggaaaggcgccggctttgatgtgaaagctctaagggcttttagagtcttgagaccgctaaggctggtaagcggagtgccaagccttcaggtagtgcttaactccatcattaaagctatggtgcctctgctccacattgctctgctggtgctttttgttatcatcatttatgcgattattgggcttgagctgttcatggggaaaatgcacaagacatgctataatcaggaggggattgctgacgtgcctgctgaagatgatccatctccatgtgcactcgagaccggacacggacggcaatgtcaaaatggcacagtctgcaagcccgggtgggacggccctaagcacggaatcactaattttgataacttcgcttttgctatgctgactgttttccaatgtatcacaatggagggctggacagacgtgctttattgggtcaatgacgccgtcggccgtgattggccctggatttatttcgtcacactaatcatcatcggatccttttttgtactaaatctggtgctgggtgtgctgtcgggggagttctccaaggagagagaaaaagcgaaggcccgcggggacttccaaaagctgcgtgagaaacagcagctcgaggaggacctcaagggctacctggactggatcactcaggccgaagacattgatccagaaaacgaagatgagggtatggatgaggaaaaacctcgcaacatgtctatgccgacctcggaaaccgaatcagttaatacagagaacgtcgccggaggggacatcgagggcgaaaactgtggcgcaagattggctcatcgaatatcaaaaagcaaattcagtagatactggaggcgctggaaccgtttttgtcgtcgcaagtgtagagccgccgtcaaaagcaatgtgttttactggcttgtgatctttctggtattcctgaacaccctgaccatcgccagtgagcactacaaccaacctaactggttaaccgaggttcaggacactgctaacaaggcactgctcgctctatttaccgctgaaatgctgttaaagatgtattccctcggccttcaagcctactttgtgtccctgtttaatcggttcgactgcttcgtggtgtgtgggggaatcctcgagacaatcctggtcgagactaagattatgtccccactcggtatctccgtgttgcgttgcgtgagactgctcaggatattcaagattacccgctactggaactctctgagcaatctggttgcgagcttgctgaacagcgtgaggagtatcgcctcccttctcttgttgctctttctcttcattatcatattctctctgctggggatgcaactgttcggagggaaattcaacttcgacgagatgcagacgcgccggtccaccttcgacaattttccgcagtctctgcttaccgtgttccagatactcaccggcgaagattggaactctgtcatgtatgacggaattatggcttacggcggacctagctttcccggcatgctggtttgtatttatttcatcatacttttcatctgtggtaactatatcttgctgaatgttttcttagccattgcagtcgataacctggccgacgcagaaagcttgacgtccgcccagaaggaggaggaggaggagaaagaaagaaagaaacttgcaagaacggcgtcaccagagaagaaacaagagcttgtcgaaaaaccagctgtgggagaaagtaaagaagaaaagatagaactcaagtcaatcaccgccgacggggagagcccccctgccactaagatcaatatggatgatctccagcccaacgagaacgaggacaagagcccctaccctaatccagagaccacgggcgaagaggacgaagaggaaccagaaatgcctgtgggcccgaggcccaggcccctgtccgaattgcatctcaaagagaaagctgtccccatgccagaggcatcagcattttttatcttcagcagcaacaatagattccggctgcaatgccatcggattgtgaatgacaccatctttactaacctaatcttgttctttattctcctgtcctctatctctttggccgcagaggatcctgtgcaacatactagtttccgcaaccacatcttaggcaacgctgactacgtgtttacgagtatctttactcttgagattatcctgaaaatgacggcttatggcgccttcttgcataagggatctttctgtagaaattacttcaatattcttgacttattagtggtgtccgtgtccctgatctcattcggaattcaaagctctgccattaacgtcgtaaagatcctacgagtgcttagggtacttagaccactaagggctatcaacagagccaaaggtctaaagcacgttgtgcagtgtgtgtttgtggcaattagaactatcggaaacatcgtcatcgtgactaccctgttgcagttcatgtttgcctgcatcggcgtccaattgttcaagggcaaactatacacctgctccgattcatcaaaacaaaccgaagccgaatgcaaagggaattatattacttataaagacggcgaggttgatcaccctataattcagccgcgcagctgggaaaacagcaaatttgactttgataacgttttggctgccatgatggcactttttacagtcagcactttcgagggctggccagagttgctgtatcgctcaatcgattcacacactgaagacaagggtccaatctacaattacagagtggagataagtatcttttttattatctacattatcattatcgcttttttcatgatgaacatcttcgtcgggttcgttattgtgacattccaggaacaaggtgagcaggaatacaaaaactgcgagctggacaagaatcagagacagtgcgttgagtatgctctaaaggcccgccccctcaggagatatatcccaaaaaaccagcaccagtataaggtgtggtatgtcgttaacagtacatatttcgagtacttgatgttcgttttaattctgttaaacacaatatgtctcgcaatgcagcattatgggcagtcttgcctttttaagatagcaatgaatatactcaatatgttgtttacaggactatttaccgtggaaatgatcttgaagctgatcgcttttaagcctaaggggtacttttcagatccatggaatgtgttcgatttcctcattgtgatagggtccataatagacgtcattctgagcgagaccaaccactacttctgcgatgcctggaatacttttgatgcccttatcgtggtgggatctattgtggatatcgccattactgaggtgaataacgccgaggagaatagtagaatttcaatcacatttttccgactatttagagtgatgaggctggtcaagctactctcccgcggagaagggatcaggacccttttgtggacttttatcaaatcctttcaagcactgccatatgtggcccttctcattgtaatgctattcttcatttacgccgtgataggcatgcaggtcttcggcaagatcgcactcaacgacaccaccgagatcaatcgaaataacaacttccaaaccttcccgcaagcggtgctcctcctgtttcggtgtgccactggtgaggcttggcaggatataatgttagcctgcatgcccgggaagaaatgcgcacccgagagcgagccgagcaattccaccgaaggcgaaacaccctgtggatccagcttcgccgtattctattttatctccttttacatgttgtgcgccttcttaattatcaatctgttcgttgccgttattatggacaactttgactacctcaccagggactggtccatcctgggcccccaccatctggatgaatttaagcgcatctgggctgagtacgaccccgaggcaaagggccgcataaagcatctcgacgtggttacactgcttcggaggattcaaccccccctcggcttcggcaaattatgcccgcatcgggttgcatgcaagcgattggtgtcaatgaacatgcctctgaactctgacgggactgtaatgtttaatgcaacacttttcgccctggtccgaactgccctgcggatcaaaaccgaggggaacctcgaacaggctaatgaggagctgagggcaattataaagaagatctggaaacgtacctccatgaaacttctggatcaagtcgtccctcctgctggcgacgatgaggtgactgttggtaagttctacgccacatttcttattcaggagtacttccgtaagtttaaaaagaggaaagaacaagggttggtaggcaagccatcccagaggaacgcgctgtcgttgcaggccggcctcaggacccttcacgacattggtcctgagataagacgcgcaattagcggcgacctgaccgccgaggaagaactcgacaaggccatgaaggaggccgttagcgctgcctcagaggatgatattttccgtagagccggcggtctgttcggcaaccacgtgtcttactatcagagtgacggccggtcggcctttcctcagacatttactactcaacgcccactgcacattaacaaggctgggagcagccaaggagacacagagtcgcccagtcacgagaaactggtggatagtaccttcacacccagctcctactccagtaccggcagtaacgcaaacattaataacgccaataataccgcccttggtagactgccacggcccgctggctatccctctactgtgagcaccgtggaggggcatgggccccctctctcgcctgctatccgtgttcaagaggtggcttggaaactatcttcaaatcggtgccacagccgcgaatcccaggcagctatggcagggcaggaagagacatcacaagacgaaacctacgaagtgaagatgaaccacgacacagaggcctgttcagagccctcactcctgagcaccgagatgctaagctaccaagatgatgaaaacaggcaactcacattgccggaggaggacaagcgtgatatacgccaatccccaaaaaggggctttttgcggtctgcctccctggggaggagggccagcttccatctggagtgcctgaaaaggcaaaaagaccggggcggcgacatctcacagaaaacagtactgcccctacatctggtacatcatcaagccttggccgtggcaggattgagtccgcttttgcaaaggagtcacagccctgcctcatttcctcggccctttgcaaccccacccgccacgcccggatccagagggtggccgcctcagccagtgcctacgcttaggttagagggcgtcgaatcttccgagaaactcaactcgtctttcccatccattcattgcggctcctgggccgaaaccacccctggtggtggcggatcaagtgcagctcgccgggtacgacctgtgagtctgatggtgccatcacaagccggagcccccggcagacagtttcatggctcagctagtagcttagtagaggctgtgctgatcagtgaaggactggggcaatttgcgcaggatcccaagttcattgaagttaccactcaggaacttgccgacgcttgcgatatgaccattgaagagatggaaagcgccgcggacaatatcctgagcggtggcgctccccagtcccccaacggcgccctgctgcctttcgtaaattgccgcgacgccggacaggaccgcgctggaggtgaggaggatgccggttgcgtgagggctcgggggaggccatcagaggaggagctgcaagacagccgggtgtatgttagttctctgtag

SEQ ID NO: 110426 - DNA, 6630 bp, synthetic construct
  misc_feature 1..6630: note = Description of Artificial Sequence: Synthetic coding sequence
  source 1..6630: mol_type = other DNA
atggttaatgagaacacgcggatgtatatcccagaggaaaaccaccagggaagcaactacggcagtccccgccctgcacacgccaatatgaacgcaaacgcagctgccggtttggcgccagagcatataccgacacctggggccgcactcagctggcaggccgccatagacgcagccagacaggcgaagcttatggggagtgcgggaaatgcaacgatatccacagtcagttcaactcagaggaaacgccagcagtacggaaagcctaagaagcagggctcgactaccgccactagacctcccagagccctgttatgtctaactctgaagaaccctattaggcgtgcttgcatatcaatcgtcgagtggaaaccatttgaaatcattatcctactgaccatctttgctaattgtgtggctctggcaatttatattcccttcccagaggacgattcaaatgccacgaactctaacctagaacgggtggaatatctgtttttaatcatcttcaccgtcgaggctttcctgaaggtaatagcctatggtctcctgtttcatcccaatgcgtacctgcgaaatggctggaacctgcttgacttcataatcgtcgtggtgggcctctttagcgccatcctggaacaagccacaaaagctgacggagccaatgctttaggagggaagggggcaggtttcgatgtgaaagctctacgggccttcagagtgctgcgtcccctaagactggtgtctggagtcccttccctgcaggttgttctgaattcaataatcaaagccatggtccccctcctgcatatcgctctactggtcttattcgtgataataatatatgccattatcggcttggagctgttcatgggcaaaatgcacaagacctgttataatcaggaaggaatcgccgatgtacctgcggaagatgacccgtctccctgcgccctcgagaccgggcatggcagacagtgtcagaacggcaccgtctgtaaaccgggctgggacggacccaaacacggcatcacgaattttgataactttgctttcgcaatgttgactgtgttccaatgtatcacaatggaaggatggactgacgttctgtactggatgcaggacgccatgggctatgaactgccgtgggtctattttgttagtctggtgatcttcggctcctttttcgtgttaaaccttgttctaggggttctttctggcgagttcagcaaggagagagaaaaagccaaggctagaggggatttccagaagttgagagagaagcagcaactggaagaggacctgaagggttatctggattggatcactcaggctgaggacatcgatccagaaaatgaggatgaagggatggacgaggagaaaccccggaatatgtccatgcccaccagcgaaacagaatccgtgaacaccgagaacgtagcgggcggtgatatagagggggaaaactgtggagcccggctcgctcacagaatctctaaaagtaaattctcccggtactggcgtcgctggaatcgattttgccgccgtaagtgtagggctgcagtcaagtccaatgttttttactggctggtgatcttcctggtcttcctgaacacgttgacaatcgcgagcgagcactataatcagccgaattggttgactgaggttcaggacaccgccaataaggccctgttggccttattcacagctgaaatgctgctcaagatgtattccttaggactacaggcctacttcgtgtctctgtttaacagattcgactgcttcgtcgtttgcgggggcatactcgaaactatattggtagagacgaagataatgtcccccctcggaatcagcgtgctaaggtgcgtgcgattgcttcgcatcttcaagatcacaagatattggaattctttgagcaacctggtggcctctttgctgaacagcgtcaggtcaatagcctcgttgctgctgctgctgtttctatttatcattattttcagtctgctgggcatgcagttattcggaggtaaattcaatttcgacgaaatgcagacccgtaggtcaacatttgacaattttccacaatccctgttgacagtcttccagatactgaccggcgaagactggaattcagtaatgtatgatgggatcatggcctacggcggaccctcttttccagggatgctggtgtgcatctactttattattctcttcatctgtggtaactatatcctgctgaatgtgttcttagctatcgccgtggataatttagctgatgcagagtctctcactagcgcccagaaggaggaagaggaggaaaaggagcggaagaagctcgccagaacagctagcccagagaagaagcaagaactagtagagaagccagccgtgggcgaaagcaaggaagagaagattgagctcaagtctattacagccgatggagagtctccccctgccacaaaaattaacatggacgacctgcagcccaatgagaacgaagacaagagcccatatcctaatcctgaaacgacaggcgaagaggatgaggaagaacccgagatgcccgtggggccacggccccggccgctctcggagctccacctgaaagaaaaagccgtacccatgcccgaagccagtgccttttttatattttctagtaataatcgattccgactccagtgtcaccgtatcgtcaatgatactatttttacaaaccttattctcttttttatactcctcagttccatctcgcttgctgccgaggatccggtgcaacacacgtcttttagaaatcacatcctcttttacttcgatattgtgttcacgaccattttcacgatcgagatcgccctgaagatgaccgcttatggggcgtttctgcacaaaggtagcttttgcaggaattacttcaatatcctggacctgctagtggtgtcagtaagtctaatatcgtttgggatacagtcatcggctatcaacgtcgtgaagattctccgagtgctccgtgtcctgaggccccttcgggcaatcaatagagcgaagggactcaagcatgtagtacagtgtgttttcgtggccatccggacaatcggaaatatcgtcattgtaactacactcctccagtttatgttcgcatgcatcggggtgcagctgttcaaaggaaagttatatacatgttccgattcttctaaacaaactgaggccgagtgtaagggcaattatattacctacaaggacggtgaagtggatcatcccattatccaaccacggagctgggagaatagcaagttcgacttcgacaatgtgcttgctgcaatgatggctctgttcactgtcagtactttcgaaggctggcccgagctgttgtaccggtcaatcgattctcatacagaggacaaaggaccgatctataactatcgtgtggagattagcattttctttatcatctatatcataatcattgctttcttcatgatgaatattttcgtggggttcgtgattgtcacgttccaggagcagggtgaacaggagtataagaactgcgagctcgataaaaatcagcgccagtgcgtcgagtacgcgctgaaagcccgaccactgcgccgttacatccccaaaaatcaacaccagtacaaggtttggtatgtagtgaactctacatacttcgaatacctgatgtttgtgttaatcctgttgaacacaatttgcctcgccatgcaacactatggacagtcctgcctgtttaaaatcgcaatgaacatccttaatatgcttttcactggactctttacagttgagatgatcctcaagctaattgctttcaagccaaaacactatttctgcgacgcttggaacacgttcgatgcactgatcgtggtgggctcgattgttgacatcgcaatcacagaggtcaatcctgctgagcatactcagtgttctccatctatgaatgcagaggaaaactctcgtatcagcattactttttttagacttttccgggtgatgcgcttggtcaagcttctgtcacggggtgaggggattcgcacattgctttggacatttattaaatcgtttcaagccctgccttacgtggccttactgatcgtgatgttgttcttcatatatgccgtgatcggcatgcaggtgttcggtaaaatcgcactgaatgatactacagagattaaccgaaataataactttcaaacgttcccacaggccgtgttgttgctattccggtgtgccaccggtgaagcctggcaggacatcatgcttgcctgtatgcccgggaaaaaatgtgcccctgaatccgagccgagcaatagcactgaaggagaaaccccttgtgggagcagtttcgctgtgttctacttcataagcttttatatgttatgtgcgttccttattattaacctgttcgtagctgtgattatggacaacttcgattacttaacacgtgactggagcatcttagggcctcatcatttggacgaatttaaacgaatttgggctgagtatgaccctgaagcgaaaggtcggattaaacatctggacgtggtgactctgctgaggagaatacaaccccccctcggcttcgggaagctgtgcccccacagagtggcctgcaagagattggtttccatgaatatgcctctcaattcagacggcaccgtgatgttcaatgctacactgtttgctcttgttagaacagcactcagaattaagaccgaaggtaacctggagcaggccaatgaagaacttcgagcaattataaaaaagatctggaagcgcacgagtatgaaacttctggaccaagtggtgccacctgctggtgacgacgaagtaacagtggggaaattttacgcaacttttctgattcaagagtattttcggaagttcaaaaaacgtaaggagcaaggcctcgtgggcaagccatctcaaagaaacgctctctctctgcaggccgggctcagaacactccatgatatcgggcctgagatacgccgggcaatctccggcgatctgacggcagaggaagaacttgataaagctatgaaggaagctgtgtccgccgcaagtgaggatgatatttttagacgagccggcggcctcttcggcaaccacgttagttactaccagagcgatggtcgtagcgccttccctcaaaccttcacaacccagaggccactccacatcaacaaggccggtagtagtcagggagacacagaaagcccaagtcacgagaaactagtggacagcacattcactccaagctcctacagcagtacggggtccaacgctaacattaataacgctaataatactgccctgggtaggttacctcgcccggcgggatatcccagtaccgtctccacggtggagggtcacggtccacccctgtccccagcaatccgggtgcaggaggtcgcttggaagctcagctcaaatagaatgcactgttgcgatatgcttgatgggggtactttccctccagccctcggacccaggcgggccccaccctgtctgcaccagcaacttcaaggcagcttagctggcctacgtgaagatacaccctgcatcgtcccaggccacgcctccctttgctgttcctcacgggtgggagaatggcttccagccgggtgcacagcccctcagcatgctagatgccatagccgggaatctcaggccgctatggcagggcaggaagaaacatcacaagacgaaacttatgaggtcaaaatgaatcatgacacagaagcttgttctgagccgagcctgttatcaaccgagatgttgtcttaccaggatgatgaaaaccgccagctcactctgccagaagaagacaaacgcgatatcaggcaatctcccaagcgaggcttcctgaggagcgctagtcttggacgccgagcatcattccacttggaatgcctaaagagacagaaagaccggggaggagacatcagccaaaagaccgttctgccgctgcacctggtccaccaccaggcactcgcggtggcaggtctttctccactactgcagcgcagccattctcctgcctctttcccccggccctttgctaccccccctgcgacaccaggatctcggggctggcctcctcagcctgtgccgactctgaggctggaaggagtggagagctcagagaagctcaactcctctttcccatccatccactgcggatcttgggctgagaccaccccgggaggcggcggaagttccgctgcacgacgcgttaggcccgtgagcctgatggtgccgtcccaagctggcgcccctggacgtcaatttcatggttccgccagcagtctggtcgaggccgtgttgatcagtgagggacttgggcagttcgcccaagatcccaagttcattgaggtgacaacacaggaacttgccgatgcctgtgatatgactatagaagagatggagagcgcagctgacaatatcctgtctggcggtgctcctcagtctccaaatggcgctttgcttcccttcgtcaattgtagagatgccgggcaggaccgcgctggcggcgaggaagacgcggggtgcgtgcgcgccagaggcagacctagcgaggaggagttgcaggactcaagagtgtacgtctccagcctttag

SEQ ID NO: 110427 - DNA, 6474 bp, synthetic construct
  misc_feature 1..6474: note = Description of Artificial Sequence: Synthetic coding sequence
  source 1..6474: mol_type = other DNA
atggtgaatgagaacactcggatgtacattcctgaggagaaccaccagggttcaaattatggaagcccacgcccagcacacgctaatatgaacgctaatgctgcggctggcttagccccagaacatatacctacccccggggcagcgctgtcttggcaggctgctattgacgctgctaggcaagccaagctcatggggagcgcaggcaatgctacaattagcactgtgagcagtacacaacggaagagacagcagtacgggaagcccaaaaaacagggctctacaacagctaccagaccacctagggctctgctatgcctcacacttaagaaccctatccggcgtgcttgtatttccattgtggagtggaagcctttcgagataatcatactgcttactattttcgcgaactgtgtggccttggccatttatatcccctttccagaggatgatagcaatgccactaatagcaacctggaaagggtggagtatctatttctgatcatttttacggttgaggcgttcttgaaggtgattgcttacggcctgctgtttcatcctaatgcttacctgcgtaatggatggaatctcctggactttatcatcgtggttgtggggctgttctctgctatactggaacaagccacgaaagccgatggagcgaatgcactaggtggcaaaggcgcaggttttgacgtcaaagcactccgggccttccgtgttctgcggcccttgcggctggtctccggcgtgcccagcctgcaagtcgtactcaatagcattattaaagctatggtgcccctgctgcacatagctctgttggtgctgttcgtgattatcatttacgctattataggactggaactgtttatgggaaaaatgcataagacctgttataaccaggaagggatcgcagatgtccctgccgaggatgatcctagcccttgcgccctggaaactgggcacggccgccagtgccaaaatggaacggtgtgtaaacctggttgggacggcccgaagcacgggatcacaaactttgacaatttcgcctttgctatgctgacggtgtttcagtgcattacgatggaaggatggaccgacgttctttattgggtcaacgatgcagtcggccgtgactggccatggatttactttgtgaccctgatcatcatcggtagcttctttgtcttgaacctggtgctaggggtgctgtccggcgagttttccaaggagcgtgagaaggccaaagcacgtggggattttcagaaactacgagagaagcaacagctggaagaggatctgaagggctacctggactggattactcaagctgaagatatcgacccggaaaacgaagatgaagggatggatgaggagaagccaagaaatatgtctatgcccacttccgagactgaatcagttaatacggaaaacgtcgccggcggcgacatcgagggagagaactgtggcgcccgcctcgcacaccggatctctaagtcaaagttctccaggtattggagacgatggaaccggttctgcaggcgcaaatgcagggccgccgttaaatcgaatgtgttttactggctggtgatcttcttagtgtttctgaacactctgacgattgcaagcgaacactacaatcagcccaattggctcactgaggtgcaggacaccgccaataaagcactccttgccctgttcactgctgagatgctcctgaagatgtacagtctggggttacaagcctacttcgtatcattgtttaacagatttgactgcttcgtggtgtgtgggggtatactggaaactattctggtcgagaccaaaattatgagtcctttaggcatttcagtacttcgttgcgtccgcctgctgcgcattttcaagataactcggtactggaactccctgagcaatttagtcgcgagcctcttgaattccgttaggtctatcgccagtctgttgctgcttctgttcttattcataatcattttctccttgctgggaatgcagctgtttgggggcaagttcaatttcgacgaaatgcagaccaggagaagcacctttgacaatttcccccagagcctcctcaccgtgttccagatcctgaccggagaggactggaactcggtgatgtatgatggaattatggcctacggcggcccaagttttcccggtatgcttgtgtgtatctattttattatcctcttcatatgcggtaattacatcctactgaacgtgtttctggccattgccgttgacaacctggctgatgctgaatcactcacatctgctcaaaaagaggaggaagaagaaaaggaacgtaaaaagctggcgagaaccgcctcgcctgagaaaaaacaggaattagtggaaaagcccgcagtgggggagagcaaggaggaaaagattgagctgaagtcaataactgccgatggcgagtcccctcctgcgactaagatcaatatggacgatcttcagccgaacgagaatgaagataagagcccttatcccaaccctgagaccaccggagaagaagatgaggaagagcccgaaatgcccgtcggtccaaggccacgacctttgtccgaattgcacctgaaggaaaaggctgtgccaatgcccgaagctagtgcgtttttcatcttctcatccaataaccggttcaggctacagtgccacagaatcgtgaacgacactatctttactaatcttatcctctttttcattctgctatctagcatctccctggccgccgaagatcccgtacaacacacttctttccgcaatcacatcttagggaacgctgactacgtctttaccagcatcttcaccctggaaatcatactgaagatgacggcttatggcgcatttttgcacaaggggtccttctgccgcaactattttaacatcctggatctgcttgtcgtttcagtatccctcatctccttcgggatacagagctctgccattaacgtggtcaaaattctaagagtgctccgggttttaaggcctctgagggcgataaatagggcgaaaggcctgaaacatgtggtgcagtgtgtttttgttgccatcaggacaattggcaacattgtgatcgttactaccctccttcagtttatgttcgcttgcattggagtccagctgttcaaaggtaaactgtacacatgcagtgactctagcaaacagactgaggcagaatgcaaaggaaattatatcacttataaagatggggaagtagaccaccctattatccagcctaggtcatgggaaaatagcaagttcgactttgataatgtgttagctgcgatgatggccctcttcactgtttcaaccttcgaagggtggccagagctgctgtaccggtctattgacagtcacacagaagacaaagggccaatctataactacagggttgagataagcatcttttttatcatttacattatcataattgctttttttatgatgaatatctttgtaggcttcgtgattgtaacgtttcaagaacagggggaacaagagtacaaaaactgtgagctcgacaagaaccaaaggcagtgtgtggaatacgctttgaaggcacgtcctcttcgcagatacatccctaagaaccaacatcagtataaggtctggtatgttgttaactctacgtacttcgaatacctgatgttcgtattaattctccttaataccatatgcctcgccatgcagcactatggccagtcttgtctttttaaaatagccatgaatattctgaatatgttattcacagggttattcacggtggagatgatcttgaagctgattgctttcaagcccaaacactatttttgtgatgcctggaatacattcgacgctcttatagtggtggggtcaattgtcgatattgccatcacagaagttaaccctgccgagcacacacagtgctcgccaagcatgaacgctgaagagaacagccggatctccataaccttcttcaggctgttcagggttatgagactggtgaaactgttgagccggggtgaggggattcggacgctgctgtggacatttatcaaatcattccaagcgctcccttacgttgcactcctgattgtcatgctcttctttatctacgcagtgattgggatgcaggtctttggaaagatcgcccttaacgatactacagaaattaatagaaataacaatttccaaaccttccctcaggccgtgttgcttctctttaggtgtgccacgggagaagcctggcaggacattatgctcgcatgcatgcccggtaagaaatgcgcacccgagagcgagccctctaactccacagagggagagaccccttgtggtagctcctttgccgttttctactttattagtttctacatgctctgcgccttccttataataaatctcttcgtcgccgtaataatggacaatttcgactatctgacccgcgattggtctattctagggcctcaccacctcgatgagtttaagcgtatctgggcagaatatgatcctgaggcgaaaggtcgcattaagcaccttgacgtagtgaccttgctgaggagaatccagccgcctctcgggtttgggaaactctgtccgcaccgggttgcatgtaagcgactagtctcaatgaacatgcctttgaatagtgatggcaccgtgatgtttaacgcaaccctgttcgcgctagtgcgcactgcgctcaggattaagacagaggaagggccctctccttcagaagcacatcaaggcgcggaagatcccttcaggccagctggcaacttagaacaggcgaacgaagagttaagagccattatcaaaaagatttggaaacgaacctctatgaaactgctagatcaggtcgtgcccccggccggcgatgatgaagtgaccgttggtaaattttatgccacttttctgatccaggaatacttccgaaagtttaagaagcgcaaggagcagggcttggtcggcaaacctagccagagaaatgccctttctctgcaggctgggctgagaacactgcacgatattggtccagagatcaggcgtgcgatctccggcgatcttacggccgaggaggaattagataaagctatgaaagaagcggtgtcagccgcctctgaagatgacatattccgacgagccggtgggttgttcggaaaccatgtcagttactaccaaagcgatgggcgcagtgcgtttccccaaacctttaccacacaaaggcctctgcacatcaataaggctggttcatctcagggggacaccgagtcacccagtcacgagaaattggttgattccacgttcacgccatcttcctatagctcaactggatcgaacgcaaatatcaacaacgcaaacaacacagcccttggaaggctccctcgacctgccgggtatccctccaccgtgtccacagtcgagggccatggccctccactgagccccgctattagagtacaagaagtggcgtggaagttaagctcaaacagatgccatagtcgggagtctcaagccgccatggccggacaggaggaaacctcccaagatgaaacctacgaagtcaaaatgaatcatgacaccgaagcttgttctgagccatcactgttgagtacggagatgttgtcatatcaggatgacgagaaccggcagctaaccctccctgaagaggataagcgggacattcgccaaagtcctaagagggggtttcttaggtctgctagtctgggcagacgcgccagcttccacttagagtgccttaagcggcagaaagacaggggaggcgatatctcacagaagacggtgttgcccctccacttggtgcatcatcaggcccttgctgtggcaggactgagccccttactacagagaagtcattccccggcctctttcccaagaccctttgctaccccacctgctacacccgggagtagaggctggccccctcagcccgtgcccactttgcgcctcgaaggggtagaaagtagcgaaaagctgaattccagctttccatccatacactgtggaagttgggccgagacaactccagggggtggcggcagttccgcagctcgccgcgtgaggccggtgtcattgatggttccctctcaggccggggccccaggccgccagttccacggatctgctagcagcttagtggaagccgtcttgatcagcgaggggcttggccagtttgcacaagaccccaagtttatcgaagttactacacaggagctggcagatgcttgcgacatgacgatcgaggagatggagagtgctgccgacaatatcctaagcggtggcgccccacagagccctaacggcgccctactgccatttgtgaattgcagggacgcaggccaggatagagccggaggagaggaagacgctggttgtgttagggccagggggcggccaagcgaggaggaactgcaggacagtagggtgtacgtttccagcctatag

SEQ ID NO: 110428 - DNA, 6501 bp, synthetic construct
  misc_feature 1..6501: note = Description of Artificial Sequence: Synthetic coding sequence
  source 1..6501: mol_type = other DNA
atggttaacgaaaatacacgaatgtacatccccgaagaaaatcaccaagggagtaactatggttcaccacgacctgcacacgctaatatgaatgccaacgcagccgccggtctggcacccgagcacatccctactcccggcgctgccttatcctggcaggccgctatcgacgctgctagacaggccaaactgatggggtccgctgggaatgctacaatcagtaccgtttcttccacacagaggaagcgccagcagtacggaaagccaaagaagcaagggtccaccacagcaactcggcctccccgagccctcctgtgcctcactttgaagaaccccatacgccgcgcttgtatatctatcgtggaatggaagccttttgagattattattctgttaactatttttgccaactgtgtggcactcgctatctacattccgttcccggaggatgatagcaacgcgaccaacagtaatcttgagagagtggagtacttattcctcattatctttacagttgaagcattcctgaaggtgatcgcgtatgggttactgttccacccgaacgcctacctaaggaatggatggaatctcctggatttcatcatcgtagtggtcggattgttctctgccatcctcgaacaggcaacaaaagctgatggcgctaacgctctgggaggcaaaggagctgggttcgatgtaaaagcccttcgggctttccgcgtgctgcggcctttaaggcttgtttccggcgttccatctctacaagtggtactgaatagcattataaaggctatggtacctctgctgcacattgcgctgttggtacttttcgtcataatcatatatgcaatcatcggactcgaactgttcatggggaagatgcataagacatgctacaaccaagaaggcatcgccgatgtacctgccgaggacgatcctagcccttgtgcactcgaaaccggacacggcaggcaatgccagaacggaacagtgtgcaaacccgggtgggacggcccaaagcatggtattacgaacttcgacaattttgcctttgcaatgctgacagtcttccagtgcattactatggagggatggaccgacgtactttactgggtcaatgacgcagtcggcagggattggccatggatctatttcgttactctcattattattggttcctttttcgtgttaaacctggttcttggcgttctcagtggcgagttttcaaaggagagagagaaggcaaaggccagaggtgactttcagaagttgcgggaaaaacagcagctggaagaggacctgaaaggatatttggattggatcacacaagccgaagatattgatccagaaaatgaggacgaagggatggacgaggagaagccacgcaatatgtccatgcctacatccgagacggagtctgtcaatacagagaatgtcgccggcggcgacatagaaggcgagaactgtggtgccaggctggctcacagaatcagcaagtccaagttcagtagatattggaggagatggaaccgtttttgccgcaggaagtgtcgggcagctgtgaagtcaaatgtcttctattggctggtgatatttctggtttttctcaatactctgacaatcgcttctgagcattacaaccaaccaaattggttgaccgaggtgcaggacacagcaaataaggccctgcttgccctgttcacggcagaaatgctgctgaaaatgtacagtctcggcctgcaggcgtactttgtctcactgttcaaccggttcgactgcttcgttgtttgtgggggcatcttggaaacaattctcgtagagactaaaattatgtcacccctgggtatctcggtgctgaggtgcgtgcggttgctgcgaatattcaagatcaccaggtattggaattccctcagcaatttggtcgccagtctccttaactctgtacgcagtatcgcgtcgttattgctattgctgtttctgttcatcataattttctcactccttggcatgcaactgttcggaggcaaatttaatttcgatgaaatgcagaccaggcgcagcacctttgataatttcccgcagtctttgcttactgtttttcagattctgaccggggaagattggaattcagttatgtatgatgggatcatggcatacggaggccccagctttcctggcatgctggtgtgtatttactttataattctgttcatatgcggcaattacattctcctcaacgtattcttggccatcgccgtcgataacctagccgatgctgagagcttaacgagcgcccaaaaagaggaggaggaagagaaggaacggaagaagttggctcggacagcatcacctgagaaaaaacaggagcttgtggagaaacctgccgtgggggagagcaaggaggagaaaattgagctgaagtccatcaccgctgatggagaaagccctcccgcaactaaaattaatatggatgatctgcaacccaatgaaaacgaggataagagcccctacccaaaccctgaaactactggcgaggaagatgaggaagaacccgaaatgccagtaggaccacgtccaaggcccttgtctgagctccacctgaaggaaaaagccgttcccatgccggaggcaagcgcattttttatcttctccagtaacaatagatttagactgcagtgtcacaggatcgtgaatgatactatcttcaccaacttaatcctgttttttatcctactctcaagtatctccctggccgccgaagatccagtgcagcatacttcgttccgtaaccacatcctgttttacttcgacattgtcttcacaaccatctttacgattgagattgctctgaagatgaccgcctatggggcattcctgcataaaggatctttctgccgcaattattttaacatcctggatttgctcgtggtcagcgtgtctctaattagtttcgggatccaaagctctgccattaatgttgttaaaatccttagggtgttacgggttctaagaccactacgagcgataaatcgggccaaaggcctgaagcatgtggtccagtgtgtgtttgtcgccattcggacaattggcaacatcgtaatagtcacgactctgctgcagttcatgtttgcttgcatcggagtgcagctattcaagggcaaattgtacacctgttcggactccagtaagcagactgaagccgagtgtaagggcaattacattacgtacaaggacggtgaggtcgatcatcctatcatccaacccagaagttgggagaattccaagttcgattttgacaacgtcttagcagctatgatggctcttttcacagtctccacttttgagggctggcccgagctcttgtacaggtctatcgattctcacaccgaagataaaggacccatctacaattaccgcgtcgagatttctattttctttattatctacatcatcatcattgcgttctttatgatgaacatatttgtcggctttgtgatagtcacattccaggagcagggagagcaggagtacaaaaattgcgaactggacaagaatcaaaggcaatgtgttgaatatgccctaaaagcccgacctctccgacgctacattccaaaaaatcaacatcagtacaaagtctggtacgtggtgaactcgacctacttcgagtaccttatgtttgtgttgattctcctgaacactatatgcttggcaatgcaacattacggccagagctgtctgtttaaaattgcaatgaacatcctaaatatgttgttcactgggttattcacggtggagatgattctgaaattaattgcgttcaagcctaagggttatttctccgatccatggaatgtgttcgacttcttgattgtcattggctctatcatagacgtgatattatccgaaaccaaccactatttctgcgacgcttggaacacattcgatgctctgatagttgtagggtctattgtggacatcgcaattacagaagtaaaccccgcagaacacacccagtgtagtccgagcatgaacgccgaagagaactctaggatttcaattactttttttagactcttccgcgttatgaggttggtgaaattgcttagccggggcgagggaatccgcactctgctttggacgtttatcaaatccttccaggctctcccgtatgtcgctctcctgatagtgatgctgttcttcatatatgctgtgattgggatgcaggtgtttggtaagatagcactgaatgatactactgagattaacagaaacaataacttccagacgtttccccaggcagtgcttttgctgtttcggtgtgcaactggtgaggcatggcaggacattatgctagcgtgtatgcctggcaagaaatgtgccccagaatccgaaccctcaaactccaccgaaggagagacgccctgtggttcctctttcgcggtgttttatttcattagcttctacatgttatgcgccttcctaataattaatctcttcgtcgcagtgatcatggacaactttgattacctcactcgagattggagtatcctgggcccacatcacttagatgagttcaaacgaatatgggcagagtacgaccctgaggctaaagggagaataaagcatctggatgtcgtcacactgttgcgacgcattcagccccccctcggtttcggaaaactttgtccccaccgggtggcgtgcaagagactggtgtccatgaatatgccccttaattcagatggaaccgtgatgttcaacgctaccctgttcgctctcgtgaggactgcattgcgcattaaaactgaaggcaatctcgagcaagctaacgaagagctcagagccatcattaagaaaatctggaaacgtacgtccatgaaattacttgatcaggtggtgccgccagctggagacgacgaagttacagtgggcaaattctatgctacgtttctgatacaggagtacttccgcaagtttaagaaacggaaggaacagggtctggtaggtaagcccagccagagaaatgcactgtcccttcaggcaggattgcggacactgcacgacataggcccagagatcaggcgggcgatttcaggtgatctgactgcagaggaggaactcgacaaagctatgaaggaagctgtgagcgccgccagcgaggacgatatcttcagacgggccggaggcctcttcggtaatcatgtgagttattatcaaagtgatggacggtctgcttttcctcagactttcaccactcaacgcccactacacatcaataaggccgggagttctcagggagacactgaatctccttcgcatgaaaaactggttgacagcacctttactcctagctcttactcctcaactggcagcaacgccaacattaataatgccaacaatactgccctcggtagattgcctcgaccagcaggctatccttctactgtctctactgtggaaggccatggccctcctctctcaccggctatccgtgtccaggaggttgcctggaagctttcctcaaacagatgccactcccgcgaatctcaggctgctatggccggtcaggaagaaacctcccaagatgaaacatacgaagtcaagatgaaccacgacaccgaggcttgtagcgagccttctctgctgtctaccgagatgctcagctaccaggatgacgaaaacagacagctgacattgcccgaggaggacaaacgagatattcgacaatcacctaaacgtggttttcttcgaagtgcatcactgggtcggagagcctcttttcatctagaatgcctgaaaaggcagaaggacagaggtggcgatataagccagaagacagttttacccctacacttagtgcaccatcaggcactggctgtagccgggttgtcacctctgctccagcgatcccattcacccgcttcttttcctagaccgttcgcaaccccacctgcaaccccggggagtagaggatggccacctcagccagtgccgacccttcgccttgagggagtagaatcatcagagaagctgaattcaagcttcccttccatccattgcggcagctgggcggaaaccaccccaggaggcggggggagcagcgccgcgaggagggtaaggcccgtaagcttaatggttccgagccaggcgggagcacctggacgacagtttcatggttcagcctctagtttggtcgaagctgttttgatttctgaaggcttgggccagttcgctcaagaccctaagtttattgaggtgactacacaggaattggcggacgcctgcgatatgacaatcgaggagatggaatctgccgctgacaacattctcagtggaggcgccccacagtcccccaacggcgctcttctcccatttgtgaattgtcgagacgccgggcaggacagggcaggcggtgaggaagacgctggttgcgttagagctcgagggcggccatctgaagaagagctccaggactcacgggtttatgtgtcttcactgtag

SEQ ID NO: 110429 - DNA, 6417 bp, synthetic construct
  misc_feature 1..6417: note = Description of Artificial Sequence: Synthetic coding sequence
  source 1..6417: mol_type = other DNA
atggtaaacgagaatacccgtatgtatattcccgaggaaaaccatcaaggctctaactacgggtcgccacgcccagctcatgcaaacatgaacgctaacgccgccgcaggcctggcccctgaacacatcccaacccccggtgcggctctcagctggcaggccgccatagatgccgcccgccaggctaagctgatgggttccgcaggcaacgccacaattagcaccgtgtcaagcacacaacggaagcgccagcagtacggcaagccaaaaaaacagggatccaccactgccacccgaccgccacgtgccctactgtgcctcactttgaagaatcctatccgaagagcctgtatcagcattgtggaatggaagccgtttgaaatcatcattcttctcacaatatttgctaactgcgttgctcttgcaatctatattcctttccccgaggatgactctaatgccactaactccaacctagagagggtagaatatctgtttttgatcatctttaccgtcgaggctttcctgaaggtgatcgcctatgggctactgttccatcccaacgcgtatctcagaaacggctggaatcttctggattttattatcgtggtcgtggggctattcagtgctattctcgagcaggctaccaaggcagacggagcaaacgctctggggggcaaaggagctggattcgacgtaaaggccctacgcgccttccgcgtgctacggccgctccggctggtgtccggggtcccctcgctccaagtggttctgaattccattatcaaggcaatggttccgctcctgcacatcgcactgctggtgctgttcgtgatcatcatatatgcaatcattggtctggaactcttcatgggtaagatgcataagacctgttacaaccaagaaggaattgccgacgtgccggcggaagacgatccctcaccatgcgccttggaaacgggccacggacgacagtgtcagaacggtactgtgtgcaagcccggatgggacgggccaaagcacggcattacaaactttgacaacttcgcctttgctatgttaaccgtgttccagtgtattactatggagggttggactgacgtgctttattggatgcaagacgctatgggatacgagttaccgtgggtatattttgtctcactcgtcattttcggctccttttttgttctcaacttagtcttgggggtgttgtccggggagttttcaaaagaacgcgagaaagctaaggcccggggcgattttcagaagttaagagaaaaacagcagctggaggaagacctgaaaggatatttagattggatcactcaggccgaggacatcgatcccgagaacgaggacgagggcatggacgaagaaaaaccccgcaacatgtcgatgcctacctctgagactgaaagcgtgaacaccgagaatgttgccgggggggacatcgaaggcgagaactgcggcgcaaggctggctcacaggatatcaaagtccaagttctccagatactggaggaggtggaatcggttctgtagaaggaagtgcagagcagccgttaaatctaatgttttttattggctggtcatctttctcgtattcctgaacaccttaacaattgctagtgaacactacaatcaacctaactggctgaccgaagtgcaggatactgccaataaagcactgctggccctttttaccgcggagatgctcctgaaaatgtatagcttgggccttcaggcctattttgtgtcactctttaatcgcttcgactgctttgtcgtctgtggcgggatcctggaaactatcctggttgaaaccaagataatgagccctttgggcatcagtgtgttgaggtgtgtgcgattactacgcatctttaagataacacgctattggaactctctaagtaacctggtggctagcctcctgaattctgtgagatcaattgcatccttgctgctactactgttcctctttattattatattctccctcctggggatgcagctcttcggcggaaaatttaactttgacgagatgcaaacacgaagatccacattcgataactttcctcaaagtttactgactgtgtttcagattcttactggcgaggattggaatagcgtgatgtacgatggtattatggcctatgggggcccatctttccctggcatgttggtgtgcatttacttcatcatcctatttatttgcgggaactacatcttgcttaacgtgtttctggccattgctgtggacaatcttgccgatgccgagagtttgacatcagcgcagaaagaggaggaggaggagaaggaacggaaaaagctggcgagaacagcatcccccgagaagaaacaggaattggtggaaaaacccgcagttggggagtctaaggaggaaaagatcgaactcaagagcatcaccgcagacggggaatctccacctgctactaaaataaacatggatgatcttcagccaaacgagaatgaagacaaatcgccttacccgaatcccgagactactggcgaagaggatgaagaagaacccgagatgccagttgggccccgcccccgacctctgtcagaactacatctcaaagagaaagccgttcctatgcccgaggcatcagcattcttcattttttccagcaacaacagattccggcttcaatgtcacaggatcgtgaacgatacaatcttcacaaacctgatcttgttcttcattctcctaagtagtatttccttggcggccgaggatcccgttcagcacacttccttccgaaaccacattttgggcaatgcagactatgtgttcaccagtatttttacgctcgaaatcatcctcaaaatgactgcttacggtgcatttcttcataaaggtagcttttgtagaaattatttcaacattctggatttgcttgttgtgtccgttagccttatttccttcggaatccagtcatcagcaattaatgttgtcaagatcctgagggtcctcagagtcctgagacctctgagagccatcaaccgggctaagggcttgaaacacgtggtgcagtgcgtgttcgtagctatcaggaccattggtaacatagtcatcgtgaccacactgttgcaattcatgtttgcctgcatcggagttcagctatttaagggcaagctttacacttgttccgattctagtaagcagactgaagcggaatgcaagggaaactacatcacttacaaggatggggaagtcgaccacccgataatacagcctaggtcttgggaaaacagcaaattcgatttcgacaacgtactggcggctatgatggccctgtttacagtgtccacgtttgaaggttggccggaattattgtaccgcagcatcgactcccacacagaggataaaggtccaatctataattacagggttgaaatatctatcttcttcatcatttacatcatcatcattgcattctttatgatgaatatctttgtggggtttgttatcgtcactttccaggagcagggagagcaggagtacaaaaactgcgagctcgacaagaaccagagacagtgtgttgagtacgccctcaaggcccgtcctctcaggaggtacattccaaagaaccagcaccaatacaaagtgtggtatgtcgtcaactcaacttattttgagtatctgatgttcgtgcttatcctgctgaatacaatctgcctggcaatgcagcattatgggcagagttgcttgtttaagatcgccatgaacatattgaacatgctgttcacaggtctgtttaccgtggagatgatcctgaagttaattgcattcaagccaaagcactacttttgcgacgcctggaatactttcgatgccctgatagttgtggggtccatcgtcgatattgccattactgaggttaaccctgccgaacacacccagtgttcaccttccatgaatgctgaagagaattcaagaatctcaatcactttctttcgcctgttcagagtgatgagactggtcaagctcctatccaggggcgaggggattcgtaccttgctttggacctttatcaaaagcttccaggccctcccttatgttgccctgcttatcgtcatgctattcttcatctacgctgtcattgggatgcaggtgtttggcaagatagctttgaacgatacaactgaaatcaatcggaacaacaacttccaaactttcccgcaagctgttctcttgttatttcgctgtgctaccggcgaagcttggcaagatattatgctggcctgcatgcctggaaagaagtgcgctcccgagtctgaaccctccaactctactgagggggagacaccctgcggctctagctttgctgtcttttatttcatctctttctacatgttatgtgctttcttaatcattaacctgtttgtggccgtcattatggataacttcgactaccttactagggactggtccatcttggggcctcaccatctggacgagttcaagcgcatttgggcagagtacgatccagaggccaaaggtcgcatcaaacatctcgatgtggtgacgctgctgcgccgcattcaaccaccgctcggattcggcaaactttgccctcatcgagtggcttgcaagaggctcgtgagtatgaacatgcccctaaattctgacggcaccgtgatgttcaacgctacacttttcgccctggtcaggacagcactccgcattaaaacggaaggtaatcttgaacaggcaaatgaagaactacgggctatcattaaaaagatctggaagagaacctccatgaaactgttagatcaggtagtcccccccgctggcgacgacgaagtcacagtgggcaaattctatgctacgttcctgattcaagaatactttaggaagtttaagaagcggaaggagcaaggactggtgggaaaaccctctcaacgcaatgccctctcactgcaagccggcctccggaccttgcacgacataggtcctgagatccggagggccatctctggagatttaaccgccgaggaagaattggacaaggcaatgaaagaggcggtctccgcagcatccgaggatgatatcttcagaagagctgggggcctctttggcaatcacgtcagctactaccaatccgatggaagaagtgcttttcctcagaccttcactacacaacggcccttgcatataaacaaggcagggtctagccagggcgatactgagtccccgtctcatgagaagctggtcgacagtaccttcactcctagctcttattcctcaactggaagcaatgcgaatataaataacgccaacaataccgccctgggcagactcccaagacctgcgggatatccaagcactgtgtcaacagtggagggacatgggccccccttgtccccagcaattcgagtccaggaggtggcctggaaactctcttctaatcgctgtcactctcgcgagtcacaggcagccatggcagggcaagaggagacgtctcaggacgagacctatgaggtcaagatgaaccatgacacagaggcgtgctctgaacccagcctgttgtccacggagatgctctcttaccaggacgacgaaaaccgccagttaaccctgcctgaggaggacaaacgtgacataaggcagtctccaaaacgcggatttctgcggagcgcatccctgggcaggcgcgcttcgtttcatttggagtgcctgaagagacagaaggataggggtggtgatatatcgcagaaaaccgttctgccactccacttagtgcaccatcaggcgctggctgtggccgggctgtcacctctgctgcagcggtcccactcccccgcctccttcccccgccccttcgccacaccacccgctacacccggttcacgcgggtggcctccgcaacctgttcccaccctgcggctcgagggtgtggagagttccgaaaaactgaactctagcttcccgtccatacactgcggatcttgggccgaaaccacacctgggggcggcggttccagtgctgccaggagagtgcgtcccgtctctctgatggtgccgtctcaggccggggcccctggtcggcaattccatggttccgcatctagtctggtcgaggcggttctaatctcagagggcctcggccaattcgcacaagaccccaagttcattgaggtaaccacccaagaactggcagacgcatgtgatatgaccattgaggagatggagtcggccgccgataacatcctgagcgggggagccccccaatccccaaatggagcactgctgcccttcgtcaattgtcgagacgcaggccaggatcgagcagggggtgaggaagacgcaggatgcgtgcgggcccgtggcaggcccagcgaggaggagctacaagattccagagtttacgtttcttccttgtag

SEQ ID NO: 110430 - DNA, 6417 bp, synthetic construct
  misc_feature 1..6417: note = Description of Artificial Sequence: Synthetic coding sequence
  source 1..6417: mol_type = other DNA
atggtcaatgagaatacaagaatgtatatcccagaggagaatcaccagggatccaattatggttccccccgccctgcgcacgccaatatgaatgcgaacgcagccgccggactggctccggaacatatacccactccaggcgctgcgctgtcttggcaggcggccatagacgcggcgcggcaggccaagctcatggggagcgcggggaacgctacaatctccacagtcagctctactcagcgcaagaggcagcagtatggaaagcctaaaaagcagggctcaactaccgccaccaggccccctcgcgcactcctttgcctgacactgaaaaatcccatcaggagagcctgtatctctatagtggagtggaaacccttcgagatcattatactcctgaccatcttcgccaattgtgtggccctggccatctacatccctttccctgaggacgactctaatgctaccaactcaaatctggagcgggtggaatacctgtttcttattatcttcaccgttgaggcgttcctgaaagttatagcatatgggctattgtttcaccccaacgcctatctcagaaatggttggaatctactagacttcattatcgttgtggtggggctcttttccgcaatcctcgagcaggccacaaaggccgacggagccaacgcactgggcggaaagggtgcaggattcgatgtaaaggcactccgcgccttcagggtgctccgccccttacgcttagtatcaggcgttccttcactgcaggtggtgttgaattccatcatcaaggctatggtccctttgcttcacatcgcattgctggtgttatttgttatcatcatctacgccattatagggcttgaactattcatgggtaagatgcataagacttgctataaccaagaggggatcgccgatgtccctgctgaggacgatccatctccgtgcgctctggaaactggacatgggaggcagtgtcagaatggtaccgtttgcaaaccagggtgggacgggcccaagcacggcatcacaaacttcgacaattttgcattcgctatgcttacagtctttcagtgtatcactatggagggctggactgatgtcctttattgggtgaatgatgctgtgggaagagactggccatggatttactttgtcactttaatcatcattggatctttctttgtgctgaatctcgtgctcggagtgctttccggggagttcagcaaagagcgagagaaggccaaggccagaggagacttccagaagctgagagaaaagcagcagctggaagaggacttgaagggatatctggattggattacccaagccgaagatatcgaccccgagaatgaggacgaaggtatggacgaggagaagccacgaaatatgagtatgcctacttctgagactgagagtgtgaacaccgaaaacgtcgccggcggagatatcgagggggagaattgtggagcccgcctggcgcatagaatcagcaagtccaagttcagccggtactggcgcagatggaataggttttgtcgccgcaaatgtagagctgctgttaagtctaacgtgttctactggctagtgatcttcttagttttcctaaacacccttacgatagcctccgagcactacaatcagccaaactggctcactgaagtccaagacactgccaataaagccctcctggcactgtttactgccgagatgctgcttaagatgtactcgcttgggctacaggcttactttgtcagcctttttaaccggtttgattgttttgtggtgtgcggcggcattttggagacaattctggtcgaaacaaaaatcatgtcgcctctcggtatttccgtgcttcggtgtgtgaggctcttacggattttcaagatcacccgatactggaacagtctgtccaacttagtagccagcctactcaactccgtcagatctatagcatcgttgctgctgcttctatttctcttcataatcattttctccctcctcggaatgcaactgtttggaggaaagtttaatttcgatgagatgcagacgcgcaggtctacctttgacaatttcccacaatctctgctcaccgtcttccagatcctgaccggggaagattggaacagtgttatgtatgatgggataatggcatatggaggtccaagctttccagggatgctggtgtgcatctattttattattctgtttatctgtggaaactacatcttacttaatgtgttcctagctattgcggtcgataacctggccgacgcagaatccctcacctcagctcaaaaggaggaggaggaagaaaaagagaggaaaaaattagcgcgaacggcgtctcccgagaaaaaacaggaactcgtggagaaaccagcagtcggcgagtccaaggaagagaaaattgagctgaagagcatcacggcggacggtgagtctcctccagcgaccaagattaacatggatgacttgcagcctaacgaaaacgaagacaagagtccatatcccaatccggagacaacaggcgaggaggatgaggaagagccagagatgcccgtgggtcccagaccccggcctctcagcgagctgcaccttaaggaaaaagccgtgcctatgcccgaggcctcagccttctttattttctcaagtaataatcgctttagactacaatgccatcgtatagtcaacgatacaatcttcactaacctgattctttttttcatattactatctagtatctccctggctgccgaggacccagtccaacatacctcattcaggaaccacatactggggaacgctgattatgtttttacctccatcttcaccctcgaaattattctcaagatgactgcttacggcgcttttctgcacaaaggctccttttgccgaaactatttcaatatactcgacctcctggtggtgagtgtctccctgatttcgtttggcatacagtccagcgcgattaatgtagtaaagatcctgcgcgtcttgcgggtccttagacccctcagggccataaacagagctaagggcctgaagcacgtggtgcagtgcgttttcgtggcaataagaactatcggtaatatcgttatcgtcaccacactacttcagtttatgttcgcgtgcattggagtgcagcttttcaagggaaaattatacacctgctcggactcctccaaacagacggaggcagagtgtaaggggaactatatcacgtacaaggacggtgaggtcgaccatcccattatacagcccaggtcgtgggagaatagtaaattcgattttgataatgtgcttgcagctatgatggctctattcacggtgtctacctttgagggatggcccgaactgctttacaggtccattgacagtcacacagaggacaaaggccccatttacaattatagggtcgagatctcaatcttcttcatcatctatattatcataattgcttttttcatgatgaatatcttcgtcggattcgtgatcgttacctttcaagagcagggcgagcaggagtataaaaattgtgaactggataaaaaccagaggcagtgcgtggagtatgctctaaaagccaggccattaaggagatatatccccaagaaccagcaccagtacaaggtgtggtacgttgtcaatagcacttatttcgaatacttaatgttcgtgctgatccttcttaatacaatctgcttggccatgcagcactacggacagtcgtgtcttttcaaaatcgccatgaacattctcaacatgctctttacaggcctgtttacggtcgaaatgattttgaagctgatcgcattcaagcccaagggctacttctctgacccttggaacgtatttgattttttgattgtcataggaagcattatcgatgtgatccttagcgagacgaaccccgccgagcacacccagtgtagtccctccatgaatgctgaggagaatagtcgaatttcaataacattttttcgcttgtttagggttatgaggcttgtcaaactgctttcccggggggagggtatcaggactctcctctggactttcatcaaatcctttcaggccctgccgtacgtggctctgttgatcgttatgcttttctttatttatgcagtaatcggtatgcaggtgtttggtaaaatcgcccttaatgatacaactgagatcaatcgaaacaataattttcagaccttcccacaggcagtcctcttgctgtttcggtgcgctaccggcgaggcatggcaggatatcatgctggcatgtatgcccggaaagaaatgtgcccccgagagcgagcctagtaattccaccgagggcgaaacaccctgcggatcttctttcgccgttttctactttatcagtttctatatgctctgtgccttcttgattattaacctgttcgtggcagtgatcatggacaactttgattaccttacaagagactggtcaatcctgggccctcaccatttggacgagtttaaacgcatctgggcagagtacgaccccgaggccaaaggcagaataaagcacttggatgtggtgaccctcttgcgccgaattcagccacctctcggattcggaaagctgtgtccccacagggtcgcctgcaagcgcttggtaagtatgaacatgccactcaatagcgacgggaccgtaatgtttaatgcaacccttttcgctctagttcgaactgccttaagaatcaagaccgaaggcaatctggagcaggccaacgaagagttaagggctataatcaaaaaaatctggaagagaaccagcatgaagctgctcgatcaggtcgtgcccccagccggtgatgatgaggtgaccgtcgggaagttctacgctacgttcttgatccaggaatattttagaaagttcaagaaacggaaggagcaggggctcgtagggaaaccaagccaacgcaatgcactttccctccaggctggcctgaggaccctgcacgatatcgggcccgaaatcaggagagcaatttccggagatttgacagctgaggaggaactcgataaggccatgaaagaggccgtttctgccgctagcgaagacgacatattccgccgggctggcgggcttttcggaaatcacgtatcttactaccaatctgacggccgatctgcctttccccagacatttactacccagcgcccactccatataaataaagctggaagctcccagggcgacacagaatcaccatcccatgaaaagctagtggactccacatttaccccatcttcatattcatcgacaggctctaatgccaatataaacaatgctaacaacaccgctctcggacggctacctcgccccgccggctaccccagcactgtctctaccgttgaaggtcatgggcccccgctaagcccagccatcagggttcaggaagtggcgtggaaattatcatcaaaccgctgccacagccgagaaagccaggctgctatggcaggccaggaagaaacaagccaggatgagacctatgaggtgaaaatgaatcacgacactgaagcatgctccgagccctccttgctttcaaccgagatgttaagttatcaggatgacgaaaatagacaactcacactccctgaagaggacaaacgagacattcggcagtctccaaagcgagggtttttgagatccgcttctctgggtcgtcgagcatccttccacctggagtgtctgaaaaggcaaaaagatcgaggtggcgatatatctcagaagactgtcctgcctttgcacttagtgcaccaccaagcgctcgctgtggcaggcctgtcgcccctcctgcaacggtcccatagtcctgcatccttccctagaccattcgccacccctcccgccactcctgggtctcggggatggcccccacaaccagtgcctacactgcgcctggaaggggtggagagctcagagaagctgaattcatcttttcccagtattcattgtgggagctgggccgaaacaacgcccgggggaggcggctcttctgccgcccgccgtgtgcgccccgtcagtcttatggtgccatcgcaagccggagcacccggacgacagtttcacggtagcgccagctctctggttgaagccgtacttatcagtgaagggctgggacagtttgcgcaggacccaaagttcatcgaggtaactactcaagaactcgctgacgcatgtgacatgacaattgaagaaatggaaagcgccgccgacaacatcctgagcggaggcgccccccagtcacctaatggtgccctcctaccttttgttaattgccgggacgccggccaagaccgcgccggaggcgaagaagacgctggatgcgtccgcgcgagagggcgcccatccgaggaggagcttcaggacagcagggtttatgtgagctctctttag

SEQ ID NO: 110431 - DNA, 6435 bp, synthetic construct
  misc_feature 1..6435: note = Description of Artificial Sequence: Synthetic coding sequence
  source 1..6435: mol_type = other DNA
atggtcaatgaaaacacccgaatgtatatccctgaagagaatcatcaaggcagtaactatggttctcctcgaccagcccacgccaacatgaatgccaatgcagccgctgggcttgctcctgagcacatccccacccccggcgcagcgctctcctggcaggctgccattgacgcagcccgtcaggccaagctcatgggcagcgccgggaacgccaccatctctaccgtgtcatccacacaacggaaacggcagcagtacggcaagcccaaaaagcagggatcaactaccgctacgagaccccctcgcgccctactgtgtctgacgctgaagaaccctattaggagagcttgcattagcattgtcgagtggaagccttttgaaattattattctcctcactattttcgccaattgtgtcgccttagcgatctacattcctttcccagaggacgactccaatgccacaaatagcaacttagagcgggtcgagtacctctttttaatcattttcacagtcgaggcatttctgaaagttatcgcctacggtctgctgtttcacccaaatgcctacctccggaacgggtggaaccttctggactttattattgtcgttgtcgggctgttctcagctattcttgaacaggctacaaaggccgatggggccaatgcactggggggcaaaggagctgggttcgacgtcaaagccttgcgggctttcagggttcttaggcctcttagactcgtgtctggtgtaccgtcccttcaggtggtgctgaacagtatcataaaagctatggtgccccttcttcatatagccctgctggtcctgttcgtgatcattatttatgccattattgggttagaactcttcatgggcaaaatgcataagacatgttacaatcaggaagggattgctgacgtcccggctgaggatgatcctagtccttgtgctctcgagaccggtcacgggaggcagtgccaaaacggcactgtgtgcaagcccgggtgggacggccccaagcatggaattactaattttgataatttcgcttttgccatgcttacggttttccagtgtataaccatggaaggatggactgacgtgctttactgggtgaatgatgctgtgggtagagactggccgtggatttactttgtcactcttattatcattggtagctttttcgtcttaaatctggtgctgggagtgctgtccggggagtttagcaaagagcgcgaaaaggctaaggctcgcggagactttcagaagttgcgggaaaaacagcaactggaggaggatctcaaaggctatctggattggataacccaggccgaagatattgaccctgaaaacgaagatgagggcatggatgaggagaagccacgcaacatgtccatgcctactagtgagaccgagagtgtgaacaccgaaaatgtggccggcggagacattgagggcgagaattgcggtgcaagattagctcaccgaattagcaagtcaaagttctcaagatattggaggcgctggaacaggttttgtagacgtaagtgccgggcagccgtgaagtctaacgtgttctactggctggtaatctttctagtttttctgaacacgctcactattgcatctgagcactacaatcagccgaactggctgacagaagtgcaagacactgctaacaaggccctactggctctgtttacggccgagatgcttctcaaaatgtattccttaggcctgcaggcctattttgtgagcctcttcaatcgctttgactgctttgtcgtctgcgggggtatcctggagactatccttgtcgagaccaaaatcatgtctccgctcggtatttccgtgctgagatgcgtgcgcctgctcaggattttcaagattacacgctattggaacagtttatccaaccttgtggcttccttgctcaactcggtaagaagcattgccagtctcctgctcctcttgttcttgttcattataattttttccctgctgggcatgcagctgttcggaggcaagttcaatttcgacgaaatgcaaacacgacgctccacgtttgataatttcccacagtctctgctgaccgtgtttcaaatcctcactggagaggactggaactcagtgatgtatgacgggattatggcctacggcggcccatcatttccagggatgctggtgtgtatttattttatcattctgtttatttgtggaaattatattctgctcaatgtttttctggccattgctgtcgacaacctggcagacgcggaatcccttacatcggcacaaaaggaggaagaagaagaaaaggaaagaaagaaattagccaggaccgcttcaccggagaagaaacaggaacttgtcgagaagcccgctgttggggagtcgaaagaggaaaagattgaactgaagtccatcactgcagacggggagtctccccccgctacaaaaattaacatggacgatttacagcccaacgagaatgaggataaaagcccgtacccgaacccagagactacaggggaggaggatgaggaagagccagagatgcccgtcgggccccggcccaggcccttgtcggagcttcatcttaaagagaaagccgtgcccatgccggaggcctcggccttctttatattctcaagcaataaccggttcaggttgcagtgtcatagaatagttaatgataccatcttcaccaatttaatactcttcttcatactgctcagctccatcagtttggccgccgaagatcctgtgcagcacactagtttcaggaaccatatactgttctacttcgacatagtcttcacaactatctttactattgagattgcattgaaaatgactgcatacggcgcttttttgcacaaaggatccttctgcaggaattacttcaatattctagacctacttgttgtgtccgtgtccttgatttcgtttggcatccagtcatctgctattaacgtggtgaagatcctgagagtcctcagagttttacgccccctgcgcgccataaacagggccaaggggctgaaacacgtggtgcaatgcgtgtttgtggcaatccggactattggcaatattgtgatcgtaaccaccctcctacagttcatgttcgcttgtataggcgtccagctctttaaaggaaaactgtacacctgtagcgactcttcaaaacagaccgaagccgaatgcaaaggcaactatattacctataaggacggtgaagtggaccaccccatcatccagcccaggtcctgggaaaatagtaagttcgacttcgataacgtattggctgcaatgatggccctattcactgtctccactttcgagggctggcctgagctcctttatcgtagcattgactcccacaccgaggacaagggacccatatacaactatagagtggaaatttccatcttcttcatcatctacatcatcatcatcgccttcttcatgatgaatatcttcgtcggtttcgttattgtaacgttccaggaacagggagagcaggaatataagaactgtgaactcgataaaaaccaacggcagtgcgtggaatacgcccttaaggcccgccccctcagacgctatattccgaaaaatcagcaccaatacaaggtgtggtatgttgttaatagtacttactttgaatacctgatgttcgtattgatcctgctcaatacgatctgcctggcgatgcagcactacggccagagctgtctctttaagattgccatgaacattctgaacatgctattcacaggactctttactgtggagatgatactgaaacttattgcttttaaacccaagcactatttctgtgacgcatggaacacctttgatgctctgatcgtggtgggttccattgttgatattgccatcacggagaacgcagaggagaacagccggatttccattaccttctttcgccttttcagggtgatgcgcctggtgaaactgttaagtcgcggagagggaatccgtacactactatggacctttatcaagtctttccaggccttgccctatgtggccctgcttattgtgatgctcttttttatatacgcagtaatcgggatgcaggtgtttggcaagatcgctcttaatgacacgactgagataaaccgcaataacaacttccaaacctttccacaggcagtcctgttgctcttccgctgtgctactggggaggcctggcaggacatcatgctcgcatgcatgcccggtaagaagtgtgctccagaaagcgaaccgagtaatagtacggagggtgagaccccttgcggcagctcgtttgccgtattctactttattagcttctacatgctgtgtgccttcctgataatcaatctcttcgtcgcagtcataatggacaacttcgattatctaacccgggattggagtattctcgggcctcatcacctagatgagtttaaacgtatttgggccgagtatgatccagaagccaaaggtcgcataaaacacctcgacgtggtcactttgctccgtcggatacagcctcccctgggctttggaaagctgtgtccccaccgggtagcctgtaagcggctagtttccatgaatatgcctttgaattctgacggcacagtgatgttcaatgccactttatttgctcttgttcgaaccgctctccggatcaaaacggaggaggggcctagtccgtcagaggcccaccaaggcgcggaggaccctttccgccctgcaggtaatctggagcaggctaatgaggagctaagagccatcatcaagaagatttggaagcgaaccagtatgaaactgttggaccaggtggtgccgccggccggcgacgatgaagtcacagtaggcaagttctatgccaccttcctgatccaagagtacttccgaaaatttaagaaaaggaaggagcagggcctggtagggaaaccatctcagaggaatgcactttctctacaggctggcctgaggaccctccatgatatcggtcccgaaattcgaagggctatatcaggagatcttaccgctgaagaagagttggataaagccatgaaggaggccgtgtcagccgccagcgaagatgacatcttcagaagagcaggtggcctttttggtaatcatgtctcatactaccagtcagacggacgctccgcgtttccccagacttttacaacgcagcgcccactgcacatcaacaaagccggctcaagccagggtgacacagaatcaccttcacatgaaaagcttgtggatagcactttcaccccatccagctattcaagtaccgggtctaacgccaacatcaataatgccaataacacagccctcggtcgcctccccagaccagccggctacccatcaactgtgtccaccgttgagggccatggtccccctttgtcccctgccattagggtgcaagaggtagcttggaagctgagcagcaacaggtgccacagccgggaatcccaggcagcgatggcaggacaggaagaaacaagtcaggacgagacctacgaagttaagatgaaccatgatactgaggcttgtagtgaaccctctctgctgtctaccgagatgctgagttaccaggatgacgaaaacagacagttgaccttgcctgaggaggacaaacgcgatatccgccagagccctaaacgcgggttcctccgcagcgcctcgcttggtcggagagcgtcatttcatttggaatgccttaagcgtcagaaggatcggggcggcgatatctcgcagaagaccgtacttcctttacacctcgttcatcatcaagcccttgctgttgctggattgtccccactcctgcagaggtctcattcccccgcctcatttccccgcccttttgcaactccgccagccacgcccgggagcaggggatggccgcctcaacctgtgcccacactcagattggaaggtgtggagtcatccgaaaaattgaatagtagttttccgagtatccactgcggctcgtgggcagagacaaccccaggtgggggaggctcaagcgctgctaggagagttagacccgtaagtctcatggtcccaagtcaggcaggtgcacccggtcggcaattccacgggagcgcgtctagtctggtcgaggcagtcttgatttctgaaggcctgggccagtttgcccaggaccccaaattcatcgaagtaactactcaagaactggccgatgcctgtgatatgactatcgaggaaatggaaagtgctgcagataatattttgtctggcggagcaccacagtcgccaaacggcgcgctgttgccctttgtcaattgcagggacgctggacaggacagagccggaggagaagaggatgctggatgcgtgcgggcacggggccgcccatccgaggaggagttacaagactctagggtctacgtgagttccctgtag

SEQ ID NO: 110432 - DNA, 6417 bp, synthetic construct
  misc_feature 1..6417: note = Description of Artificial Sequence: Synthetic coding sequence
  source 1..6417: mol_type = other DNA
atggtcaacgagaacactcgtatgtacatccctgaggaaaatcaccaggggagtaactatggctctccccggcccgctcacgcaaacatgaacgcgaatgccgcagccgggttagctcctgaacacattcctacacccggagccgccttgtcctggcaggctgccattgacgccgccagacaggcaaagttaatgggctccgccgggaacgccaccatcagtacagtgtcctcgactcagcgcaaacgccagcagtatgggaaaccaaaaaaacaggggagcacaacagcaacccggccacctcgggcactgctttgtttaactctgaagaaccctattagaagagcctgtatttcaatcgttgagtggaaaccattcgaaattattatactgcttaccatatttgctaactgtgtggctctcgccatttatattcccttccccgaggatgatagtaatgcgacaaactccaacctcgagagagtggaatacctgtttctcattatatttacagtggaagcttttctcaaagttattgcctatggactcttgtttcaccctaacgcataccttcggaatggctggaatctgcttgatttcattatcgtagtcgtggggctgttttcagcaatcctcgaacaagcaacaaaagcggatggagctaatgcgttaggcgggaagggcgctgggttcgacgtaaaggcattgagggcattcagagtcttacgcccactccgtctggttagcggagtcccttcactccaggtcgtgctgaattcaatcattaaagctatggttccactgctccacattgcccttctggtcttatttgtgattataatttacgcaattatcggactggagctgtttatgggtaagatgcacaagacttgttacaaccaggagggcatagccgacgtgccagccgaagatgacccgtccccttgtgctttagagactggacacggacgtcagtgccagaacggtacagtatgtaaacccggttgggacggccccaaacacgggatcacaaacttcgacaacttcgcatttgctatgctgactgtattccaatgtataacgatggagggctggacggatgtgctttactgggtgaacgacgcagttggtagggactggccatggatctacttcgttaccttgattattatcgggtccttctttgtactaaatctggtcctgggcgtgctgagcggtgagttttcaaaggagcgcgagaaagccaaggcccgcggcgattttcagaaactgcgcgagaaacagcagctggaggaagatctcaaaggctatctcgattggatcacacaggctgaagatattgaccccgagaacgaagacgaaggaatggatgaggagaaaccgagaaacatgtctatgccaacgagcgaaacagagtccgtcaacacagaaaacgtggctggcggtgacatagagggggagaattgcggagccaggctggcacaccgcattagcaaaagcaaattttctagatattggcggcgatggaaccgcttttgtagacggaaatgtagagctgccgttaaatccaacgtgttctactggctggttattttcctggtctttctgaatacactcaccatagcaagtgaacactacaaccaaccaaactggctgactgaggtgcaggacacagccaacaaggctctcttggctctgttcactgcggagatgctcctcaagatgtactctctgggtctccaagcctacttcgtctccctgttcaatcgatttgactgttttgtggtgtgtggaggcattctcgaaactatactcgtggaaacaaaaataatgtcccctctggggatctctgtgcttcgctgtgtgagacttctgcgcatattcaagattactcggtactggaattccctcagcaatcttgtggcgtccctgctcaatagcgtgcggagtatcgccagcctactgctgctactattcctctttatcattattttttcactgctcggaatgcagttgttcggcgggaaattcaattttgatgaaatgcagacccgtcggtctacctttgataactttcctcaaagcctgttaactgtgttccagatcctaactggagaggattggaactccgtcatgtatgatggaatcatggcatacggtggtccatccttccccggaatgttggtgtgcatctacttcatcatcctctttatctgtggcaactatattctgcttaacgtgtttcttgcaattgccgtagataacctggcagatgctgagtcgctgacttccgctcagaaggaagaggaagaggagaaggagagaaaaaagctcgctcgcacggcatctcccgagaaaaagcaggaacttgtcgagaagccagccgtcggcgaatctaaggaagaaaaaattgaactaaaatctatcactgcagatggtgagtcacctccagctaccaagatcaatatggatgacctccagcctaacgaaaacgaagataaaagcccttatcccaatcccgagacgactggagaagaagatgaggaggagcccgagatgcctgtgggcccccgtccgagacctctgtctgaattacatcttaaggagaaggcagtacctatgccagaggcaagtgcttttttcattttctctagcaataatcgcttccgcttgcaatgccataggattgtaaacgacaccatttttactaacctgatacttttttttatactcctttcctctattagcctggccgcagaagaccctgtccagcacacctcttttaggaaccatatacttttttatttcgacatagtcttcacaacaatatttacaatcgagatcgccctgaagatgaccgcttacggggcgtttctccacaaaggctccttctgcagaaattactttaacatcctggatcttctggtggtctctgtgagcctgatctcttttggtattcagtcctcggcaatcaacgtggtcaagatcctgcgtgtactgcgggttctaagaccgctgagagccattaaccgagctaaaggtctgaagcacgtggtccaatgcgtgtttgtggccatacgcaccatcggcaatattgtgatagtgaccacattgttacaattcatgtttgcctgtatcggggttcagcttttcaagggtaagttgtatacttgcagtgatagcagtaagcagaccgaggctgagtgcaagggcaactacattacctataaggacggggaggtagaccacccaattattcagccgagaagctgggagaatagcaagttcgactttgataacgtcctggccgccatgatggccctgttcaccgtatctaccttcgaggggtggcccgagttactatacagatcaattgatagtcacaccgaggataagggaccaatctataattaccgcgtagagatctccatctttttcattatctacattataataattgcattctttatgatgaatatttttgtcgggtttgtgatcgtgactttccaggagcagggtgaacaggagtacaagaattgcgaactagataagaaccaaaggcaatgcgtagagtacgcgttgaaagcccggcctctgcggaggtacatacccaagaaccaacatcagtataaggtgtggtatgtcgtcaattcaacatatttcgagtaccttatgtttgtgttaatcttgctgaacacgatatgcctcgccatgcagcattacggccaatcttgtttgtttaagattgctatgaacatcctgaacatgttatttaccggactgttcactgttgagatgattctgaaacttatagctttcaaacccaaacattacttttgcgatgcatggaacacattcgatgccctgattgtcgttgggtctattgttgatatcgcaattacagaagtgaatccagcggagcatacgcaatgctctccctctatgaacgcggaggagaattcgagaattagcatcacctttttccgattattccgcgtcatgaggctggtcaagctgctgtcgcggggagagggcatccggacactgctctggacttttatcaagtcattccaggccctgccatatgttgccttactgattgttatgttgttcttcatttatgccgttattggaatgcaagtattcggtaaaatagctcttaatgatacaacagaaattaacagaaacaacaacttccagactttccctcaggccgtcttgctcctatttcggtgcgcaacaggagaggcttggcaggacatcatgctggcttgtatgccaggtaaaaagtgcgcacctgagtccgaaccaagcaactctaccgagggggaaactccctgcggctcgagctttgccgtgttctacttcatctctttttatatgctgtgcgcatttcttatcattaatctcttcgtcgctgtcataatggacaactttgattatcttaccagagactggtccatactgggtcctcatcatttggacgagtttaaaagaatctgggccgagtacgaccctgaagccaaaggtagaataaagcacctggatgtcgtcacgctcctcaggcggatacagcccccactggggttcggaaagctttgccctcacagagtcgcatgcaagaggctggtgagcatgaatatgccactgaacagcgacgggacagtcatgttcaacgctaccctattcgccttagtaagaacagccctgcggataaagacagaaggtaatctcgaacaagccaatgaggagttgagggcaataatcaagaaaatctggaagcggactagcatgaagctgctcgaccaggttgtgccaccggcaggcgacgatgaggtcacggtggggaagttctatgcaacatttctgatccaggagtacttccgcaaatttaagaagaggaaagagcaagggctcgtggggaaaccatcacagaggaacgccctgagcctccaggctggattaagaacgcttcatgatatcggccccgaaataaggagggctatatcaggcgacctcacggctgaggaagagttggacaaagcaatgaaggaggccgtgagcgccgctagtgaagacgacatcttccggcgggctggcggtctcttcggaaaccacgtgagctattaccagtcggatggtcgatcagcctttccccagaccttcacaacacagcgaccgctgcacataaacaaggcaggatccagccagggagatacagagagtccctcccacgaaaaactggttgattctacctttacaccatcatcatacagcagcactgggagcaatgcaaacatcaacaacgccaacaatactgccctaggcagactcccgagacccgccggctatccctccacagtttccaccgtggaggggcacgggccccccctctcgccagcgattagagtccaggaagtcgcttggaagctgagtagtaacagatgccatagcagagagtcccaggcagccatggccggtcaggaggagactagccaagacgaaacgtacgaagtaaaaatgaaccacgatacagaagcctgctcggaaccgtctctgctgtctaccgaaatgctgagttatcaagatgacgagaatagacagctcacactgccagaggaggataagagggacatccggcagtctcccaaacgcggctttctgagatccgcctccttagggcgcagggctagtttccacctcgagtgcctcaagcggcagaaagatcgcgggggagatatcagtcaaaagaccgtacttcctctacatctggtacaccatcaggctctcgccgtggctggactgtcacctctgcttcaacgcagccattcccctgccagcttccctcgaccctttgccactcccccagcaaccccaggtagccgcggctggcctccccagcccgtccctaccctccgactggaaggcgtcgagtcctctgagaaattgaattccagttttcccagtattcattgtgggtcctgggcggagaccacccctggcggcggcggatcgagcgctgctagacgagtcagaccagttagcctgatggtcccttcccaagcaggtgctcctggacgacaatttcacggcagtgcaagttctctggtagaagctgtactgattagcgagggcctggggcaattcgcgcaagaccccaaattcattgaggttactactcaggagttggctgacgcttgcgatatgactattgaggagatggaatcggctgctgacaacatcttgtcgggtggagctccacagagcccaaacggggctctgctgccctttgtgaattgccgagatgctggtcaggaccgggcaggaggcgaggaggatgccggctgtgtgcgcgcgagggggcggccttccgaagaggagcttcaggatagtagagtgtatgtgagcagtctctag

SEQ ID NO: 110433 - DNA, 6474 bp, synthetic construct
  misc_feature 1..6474: note = Description of Artificial Sequence: Synthetic coding sequence
  source 1..6474: mol_type = other DNA
atggtgaacgagaacacccgcatgtacattccggaagaaaatcaccagggcagtaactatggttcgccccgaccagcacacgccaatatgaacgcaaacgcggcggccggcttggctccagaacacatacccactccgggggcggccctgtcctggcaggctgctatcgatgctgcacggcaggcgaagcttatgggtagtgcagggaacgccacaataagcaccgtgtcatctactcagaggaagaggcaacaatacggcaagccgaagaaacaagggtcaacaactgccacccgccctccccgtgctctgctgtgtctgacactcaagaatcccatccgccgcgcctgcatttcgatcgtggagtggaaaccctttgagatcataatcctgttgactatattcgcgaattgtgttgcactcgccatttacataccgttcccggaggacgattctaacgcaactaactctaatctggaacgcgtggaatatctatttctgattatctttacagttgaagctttcctcaaggttatagcctacggacttctgttccaccctaatgcatatctgcgcaatggttggaacctgttggattttatcatcgtcgtcgtgggtcttttttcggcgatcctggagcaagcaaccaaggctgacggggccaacgctcttggcggcaaaggcgctgggttcgacgtcaaagctttgcgggcattcagggttctcaggccattacggctggtttcaggagtgccttcactgcaggtcgtgctaaactctattatcaaggctatggtgcccctactgcacattgccctcctagtcctgtttgtaattataatatacgctatcattggactggagttatttatgggcaaaatgcataaaacctgttacaaccaagagggtatcgccgacgtgcctgccgaggatgacccatcgccctgtgccctcgagacaggacacggcaggcagtgccagaatggcaccgtgtgcaagcccggctgggatggtcccaaacatggaattacgaatttcgacaatttcgctttcgcgatgctcacagtgtttcagtgtattaccatggagggctggaccgatgtactttattgggtcaacgatgccgtcggccgggattggccctggatctacttcgtgacattgatcattatcggaagcttcttcgtgctgaacctggtcctgggcgtgctatcgggggagttctccaaggaaagggagaaagcgaaagccagaggagattttcaaaagctgcgggagaaacaacagttggaagaggatctgaaaggctatctagattggataacccaagctgaagacattgatcctgagaatgaagacgagggcatggatgaagagaaacctagaaatatgtcaatgccaacgtcagagacggaaagcgtgaacacagaaaatgtggcggggggcgacatagagggcgagaattgtggcgcacgtctggcccatcggatctccaaatccaagttcagtaggtattggcgaagatggaacaggttttgccgaagaaaatgtcgcgctgcggtgaaatcaaacgtcttctactggctggtcatcttcctggtgttccttaatactttgaccatagccagtgaacattacaatcagcctaattggttgacagaagtgcaggatactgccaataaggccctgctggctttgtttaccgccgaaatgctgttgaagatgtactccctgggcctgcaggcttactttgtgagcctctttaacagatttgactgtttcgttgtctgtggaggaattctggagacaatcctggtggagactaagatcatgagcccactcgggatttccgtcctgcgatgcgtccgtttgctgcggatcttcaagattactcgatattggaactctttatccaacctcgtcgcaagtctgttgaattctgttcgctcaattgcctccttgctgctgctgttgtttctgtttatcattattttctcactcctaggcatgcagctctttggaggtaaatttaactttgacgagatgcagactcggaggtccacctttgataacttcccccaatctctactgaccgtgtttcagattttaacaggagaagattggaattctgtaatgtacgacggaattatggcatacggaggcccctcatttcccgggatgctggtctgtatctacttcatcatacttttcatatgtggaaactacattttacttaatgtgttcctcgctatcgctgtcgataacctcgccgacgctgaatccctcaccagtgcccagaaggaggaagaggaggaaaaagaaagaaagaagttggctcggaccgcttcgcctgagaagaagcaggagctcgttgaaaagcctgcagtgggcgaaagcaaggaggaaaagatagaattgaagtccatcaccgccgacggggagtcgccacccgctaccaaaatcaatatggacgatctacagccaaacgaaaatgaggacaaatctccataccccaatccagaaacaacgggcgaggaagacgaagaggaacccgaaatgcccgtgggcccgcgaccgcggccactttctgaacttcacctgaaagaaaaagccgtccctatgcctgaagcctctgcctttttcatcttctcctccaacaacaggttccggttacagtgccaccgaatagttaatgatacaattttcacaaatcttatcttattttttatcctcctctcttctatttcactggccgcagaggaccctgtacaacatacgtcttttcgaaatcacatcctgttttactttgatatcgtgtttaccacgatttttaccattgagattgcattgaagatgaccgcctacggggccttcctgcataagggcagcttttgtaggaactactttaatatcctggacttactggtggtgtcagtatctctcatctcctttgggatccagtccagtgcaatcaatgtggtcaagatccttcgcgtgcttagagttcttagacctctcagagccatcaacagggccaagggactgaagcatgtcgtccagtgcgtcttcgttgccatacggacaattggtaatatcgtcatcgtaacaacactcctgcaattcatgtttgcctgcatcggggtccagctcttcaagggaaaactgtacacctgtagcgattcctcaaagcagaccgaagcagaatgtaaggggaactacatcacttacaaggacggagaagtggatcacccgattatccagccccggagctgggaaaactcaaaattcgacttcgacaacgtgctggccgcaatgatggctctctttacggtgagtaccttcgaagggtggcctgaactcctgtatcggagcattgattcacacaccgaagataagggtcctatatataattaccgggtggagatttccatctttttcattatctatattatcatcatcgccttcttcatgatgaatatcttcgtgggttttgtaattgtgacgttccaggaacagggcgagcaagagtacaaaaattgtgagctcgataagaaccagaggcaatgcgtcgaatacgccctgaaggctcgaccgttacgccggtatataccaaagaaccaacatcagtacaaggtgtggtatgtggtgaattctacctactttgagtaccttatgttcgtgctgattctgctcaacaccatatgcctggcaatgcaacattacggccagagctgcctctttaaaatcgcgatgaacattttgaatatgttgtttaccggattgtttacagtcgagatgattttgaaactgattgcttttaaacccaaggggtacttctccgatccctggaacgtgttcgattttttgatcgtcatcggtagcattatcgatgtgatactaagtgagactaaccccgcagaacacactcagtgttcccctagcatgaacgccgaggagaacagcaggatctcgattacattcttcaggctcttcagggtgatgaggctcgtgaaattactatccaggggcgagggtatccggaccttgctatggacatttataaagagcttccaggccttgccttacgtcgctctgcttatcgtgatgctgtttttcatatatgctgttatcggaatgcaggtcttcggaaaaattgcgctgaacgacacaaccgagatcaacagaaataacaacttccagacctttcctcaggccgtcctgttgctattcaggtgtgccacaggggaggcctggcaggacattatgcttgcctgcatgcccggcaagaagtgcgcccctgagagcgaaccctctaactccactgagggcgaaactccctgtgggtccagcttcgctgtgttttacttcatatccttttacatgctctgtgcattcttgatcatcaacctgttcgtggctgtcataatggacaacttcgattatcttacccgcgactggtcgattctagggcctcatcatctggatgagttcaaacgtatatgggctgaatatgatccagaagcaaaaggccgcatcaagcacttggacgtcgtgactctgttgcgccgaattcagcctcccctcgggtttgggaaattatgcccccaccgggttgcctgcaaacgactcgttagcatgaatatgcccctcaacagcgacggaaccgtcatgttcaacgccacattattcgccctcgtgagaaccgcactgcggatcaagaccgaagaggggccttctccttcagaggcccaccagggagcagaggacccattccgccctgctgggaacctagaacaggctaatgaagagctcagggccatcatcaagaagatctggaaacggacctcgatgaaactgctggaccaggtggtcccaccagcaggagatgatgaagtgacagtggggaagttctatgccaccttcctgattcaggagtacttccggaagtttaagaaacggaaagaacagggactagttgggaagcccagtcagagaaatgccttatctttgcaggcgggactgcgaaccttgcatgatattgggccagagatacggcgggcgatttccggcgacctgacagctgaggaagaactcgacaaggctatgaaggaagctgtgtccgccgcttcagaagacgatatattcagacgggcagggggcttgttcggaaaccacgtgagttactatcagtctgatggcaggtcagcattcccacagacctttacaacgcagcgccctctccacatcaataaggcgggtagttcccagggcgatacggaatctccctctcatgagaagctagtcgattcgacttttaccccttcctcatactctagcacaggtagcaacgccaacatcaacaatgccaacaacacagcacttgggcggttaccacggcccgccggataccccagcactgtgagtacggttgaaggacatggcccgccactttcaccagcaattcgcgtacaagaagttgcatggaagctgagctccaaccgctgtcacagccgggaatcgcaggcagcaatggctggccaggaggagacaagtcaggatgaaacatatgaagttaagatgaatcacgacacagaggcctgtagcgaaccttctcttctgagcactgaaatgctcagttaccaggatgatgaaaaccggcaactgacccttccggaagaagataagagggatatcaggcagagccccaaacgggggtttttgcgcagtgcttcgctaggacgacgagcttcatttcatcttgaatgtttaaagcgccaaaaggatcgaggaggcgatatttcgcagaaaactgttctccccctccacctcgtccatcaccaggctttggcagtggccggcctgagccccctcttacagaggagtcatagtcctgcaagctttccacgccctttcgctacccctcccgccacacctggctccaggggttggccaccacagcccgtaccaactctgagactggagggcgtggaaagttctgagaagctgaattcatcctttccttctatacactgtggaagttgggccgaaactacgcctggcggaggtggctcttccgccgctaggagagttcgcccagttagcctgatggttccttctcaagctggcgcccctggtcgtcagttccatggaagcgcttcttctctcgttgaggctgtgctgatttccgaaggtttggggcaatttgcccaagatccaaagttcattgaagtgaccactcaggagctcgcggatgcctgcgacatgacaatcgaggagatggaatcagccgccgacaacatcctaagcggaggcgccccccaaagtcctaacggggccctgctgccatttgtgaactgcagggatgccggtcaggacagggcagggggtgaagaggacgccggatgcgtgcgggcacgagggagaccctcagaagaagagctgcaagattccagagtgtacgtcagctcactgtag

SEQ ID NO: 110434 - DNA, 6630 bp, synthetic construct
  misc_feature 1..6630: note = Description of Artificial Sequence: Synthetic coding sequence
  source 1..6630: mol_type = other DNA
atggtcaacgaaaacacccgaatgtacattcctgaagagaatcatcagggatcaaattacggaagccctagacctgcgcatgccaacatgaatgccaatgctgcagctggccttgcacccgaacacattcccacacccggagccgctttgtcctggcaggcggccatcgacgcggcccgccaggcgaagctgatgggcagcgctggcaatgctaccatctctaccgtgtcatcaactcaacgtaagcgtcagcagtatggcaaaccaaagaagcagggtagcactactgccacgcgcccacctagggctcttctatgcttaacgttaaagaacccaattcgcagggcgtgcatttctattgtcgagtggaagccatttgagattatcatactcctcacaatcttcgctaattgcgtagcgcttgcgatttacattccttttccagaagacgattccaacgctaccaattcaaacctagagagggtcgagtacttatttctgataatttttacagtggaagcatttttgaaagtgattgcgtatggactgctattccatccgaatgcctacctgcgtaacggctggaacctcctggactttatcatagtcgttgtcggactgttcagtgccattttggaacaggctaccaaggccgacggggccaatgcacttggcggtaagggagccggctttgatgtgaaggcattgagggccttcagggtgctgagaccactgcgcttggtgagtggagttccttctttacaagtcgtcctcaattccatcattaaggctatggttccgctgcttcacattgctcttctggttctgtttgtcatcatcatttatgctatcatcgggcttgagctgtttatgggaaagatgcataagacatgctataatcaagaaggcattgctgatgtcccagctgaggatgaccccagcccttgcgcacttgagacaggccacggaaggcagtgtcagaacggcaccgtctgtaagccgggttgggatggacccaagcacggaatcacaaacttcgataattttgcatttgcaatgctgaccgtcttccagtgtatcacaatggaagggtggacagacgtgttatactggatgcaggatgcaatggggtacgaactgccatgggtgtacttcgtatcccttgtcatctttgggagctttttcgtactgaacctggtgttgggagtcttgtccggggaattttcgaaagaacgggaaaaggcaaaggcccgaggagatttccaaaagctcagagaaaagcagcagcttgaagaggacctaaagggttacctggactggatcacccaggcagaggatattgaccccgaaaatgaggatgagggcatggacgaggagaaaccaaggaatatgtctatgcctactagcgagaccgagagcgtgaacactgagaacgtggccggcggcgatattgaaggagaaaattgtggcgccaggctggctcaccggatttccaagtccaagtttagtcgctactggaggcggtggaatcggttctgccgcaggaaatgcagagccgcagttaagtcaaacgtgttttattggttagtcatttttcttgtgtttctgaacacactcacgatcgcatctgagcattataatcaaccaaactggctgacagaggtccaagacaccgcaaataaggccctgctagctctgtttactgccgagatgctgctgaaaatgtacagcctcggtcttcaggcctatttcgtgtctctgttcaaccggtttgactgcttcgtggtatgtggtggcattctggagaccattctggtggaaacaaaaattatgagtcccctaggcattagcgtgttaagatgtgttagactgttgaggatcttcaagattacccgctattggaattcgctgagtaatcttgtggcctctctgctcaactcggtgagatcaatcgcgtccctcctgcttctcctgtttctcttcataatcatcttcagcctccttgggatgcagctattcggcggaaagttcaactttgatgaaatgcagacccggcgctccacgttcgataatttccctcagagtttgttaaccgtgttccaaatcctgacaggagaggactggaacagcgtgatgtatgatggaatcatggcatacggcggcccatcttttccaggtatgctggtgtgcatctacttcatcatactgtttatttgtggaaactacatactacttaacgttttcctggctattgccgtcgacaatcttgctgatgcggaatccctgacatctgcccagaaggaagaagaggaggagaaagagagaaagaaactagcccggactgctagcccagaaaaaaagcaggaactagtcgaaaaaccagcagtcggagaatctaaggaggaaaaaatcgaactcaagtcaattaccgcagatggggaaagtccccctgctacaaaaatcaacatggatgacctgcagcccaacgaaaacgaggataagtctccataccccaatccagaaactactggtgaggaggatgaggaagaaccggaaatgccggtgggtcctagaccaaggcccctctcggaactccatctcaaggaaaaagccgtgcccatgcccgaagcatcggccttcttcatctttagcagtaataaccgatttcggctccagtgccatagaatagtgaacgatacgattttcactaacctaattcttttctttatcttgctgtcttccatctctctagccgccgaagaccctgtccagcacacctcatttcggaatcatattctgttttatttcgatatcgtgtttaccacaattttcaccatcgagatcgccctgaagatgactgcatatggcgcattcctacacaaagggagtttttgccggaattacttcaacatcctggaccttctcgtagttagtgtgagtttgatatcctttggcatccagagctctgctattaacgtggtgaaaattctcagggtgctccgcgtgctgcggcctcttagggctattaacagagcgaagggccttaagcatgtggttcagtgcgtttttgttgcgatccgcacaatcggtaacatcgttatcgtaacaaccctactacagtttatgtttgcttgcataggcgttcagctgttcaagggcaagctttacacatgcagtgacagcagcaagcaaacggaggcagagtgcaagggcaattatatcacatacaaagacggcgaggtggaccatcctattatccagcctaggtcctgggagaatagtaaattcgacttcgataatgtcctggccgctatgatggcccttttcacagtaagtacatttgaaggctggcccgaactgctgtatcgttccatcgactcccatactgaagataagggcccaatttacaactatagagtcgaaatttccatcttcttcatcatttacatcatcatcatcgccttctttatgatgaacatctttgtcggctttgtaattgtgacatttcaggaacagggtgagcaggagtacaagaattgcgagctcgataagaatcagcgccagtgcgtagagtacgcattgaaggccaggcccctaagacgatacatacctaagaaccagcatcagtataaggtctggtacgtggtgaattcaacttacttcgagtacctgatgtttgtgctcatactgcttaacaccatttgcctggctatgcaacactatggccagagctgcctgttcaagattgctatgaacattctgaatatgctgtttacaggtctgtttactgtggaaatgattttgaagcttatcgcatttaaacccaagggctatttctccgatccgtggaatgtgttcgatttcctcatcgtaatcggctccattattgacgtgatcttgtccgagaccaacccagccgagcatactcagtgctcccctagcatgaacgctgaggaaaattctcgtatttctattactttctttcgcttgttccgagtaatgagattggtcaaacttttgtcgaggggtgagggaattcggacactgctgtggactttcatcaagtcctttcaagccctgccatatgttgccctgctcatcgtgatgctattttttatttacgcagtgattggtatgcaggtgtttggaaagatcgctcttaatgataccacagagattaaccggaataataactttcagacctttccgcaggccgtattactgctgtttcggtgcgcgactggcgaggcttggcaggacattatgctcgcatgcatgcctggaaaaaaatgcgcccctgaatccgaaccttctaactcgactgagggcgaaaccccctgcgggtcatctttcgccgtgttttactttatatcgttttatatgctatgcgcgtttctcatcatcaacctgttcgttgcagtcataatggataacttcgactatctcaccagagattggtctatcctaggccctcatcatttggacgagtttaagaggatctgggcagaatacgaccctgaggcaaaaggacgcattaagcacctggatgttgttaccctactgcgacgaatccagcctccccttggctttggcaaactgtgtccccacagggttgcttgcaagcgtctggtgtcaatgaatatgcccttgaacagtgacggtacagtgatgtttaatgcaacgctgtttgctctcgtaagaactgccctccggattaaaaccgaaggtaacctggaacaggcaaatgaggaactccgggccataattaagaaaatctggaagcgcacctcaatgaaacttttggatcaggttgtgccacctgcgggtgacgacgaggtaaccgtggggaaattttacgccaccttcttgattcaggaatacttccgcaaatttaagaagcgcaaagagcagggtctggtgggcaagccatcccagcgcaacgcgctgagcctgcaggcagggcttcggacactccatgatattggaccagaaatcagacgcgcaatcagcggggacctgactgccgaagaggaactggataaggctatgaaagaagctgtgtccgcagcttctgaggatgacatatttagacgggccggtgggttgtttggcaatcatgtgtcctattatcagagtgatggccgctcagccttcccacagacatttactacgcagagacccctccatatcaacaaggcgggcagctcccaaggcgacaccgagagtccctctcacgaaaagctggtggatagtactttcactccttcatcctactcgagcacagggagcaatgcaaacataaataatgctaataacaccgcccttggtcgccttcccaggcccgctggataccccagcaccgtatccacagtagaggggcacggtcctcctttaagtccggctatccgtgtacaggaagtggcctggaagctttcgtccaacagaatgcattgctgcgatatgctggatggcgggacctttcctccagccctgggcccccgcagagcacccccctgcttacaccagcagttgcagggatcattagctggcctgcgcgaagataccccatgcatcgtccccgggcacgcaagtctgtgttgctcatctcgggtgggggagtggctgcctgcaggatgcactgctcctcagcacgcaaggtgtcacagtcgcgagagccaggccgctatggcaggtcaggaggagacaagccaggacgaaacctacgaagtgaagatgaatcacgatacagaggcttgttccgaaccatctcttttgagcacagagatgttgtcctatcaggacgatgaaaataggcagctcaccctgccagaggaggacaagagggacatccgccagagcccaaagcgcggctttctgaggagcgcttccctgggcaggcgcgccagctttcacctagaatgccttaaacgccagaaagaccggggcggcgatattagccaaaaaactgtcctgcctctccatctagttcatcatcaggctctggctgtagctggactgagtcccctgctccagcgcagtcactctccagcctcctttccccgtccttttgccacgcccccggcgaccccaggttcccgtggctggcctccccagcctgtgcctacattgcgcctggagggcgtggagtcttcggagaagctgaacagcagcttcccctctatccattgcggctcatgggctgagacaacaccgggggggggaggctcctcagctgctcggagagttcggccagtgagtctgatggtcccgagtcaggccggtgcacctggccgccagttccacggatccgcttcatctctggtggaggcagtgctgattagcgagggcttaggtcagttcgctcaagatccgaagttcattgaagttaccacgcaggaactcgccgacgcttgcgacatgaccattgaagagatggagagtgctgccgacaacattcttagtggaggcgctcctcagtcgcccaacggagcactgctgcccttcgtgaattgtagagacgcagggcaagatagagcaggcggcgaagaggacgcaggatgtgtgcgagctcgcggacgaccctctgaagaagagctccaggactctcgagtgtacgtgtcctccctttag

SEQ ID NO: 110435 - DNA, 3840 bp, synthetic construct
  misc_feature 1..3840: note = Description of Artificial Sequence: Synthetic coding sequence
  source 1..3840: mol_type = other DNA
atggtcaatgagaatactaggatgtacattccggaggagaaccaccagggcagcaattacggttcaccccgcccagctcatgccaatatgaacgcgaatgccgcggccggactggcccctgagcatatccctacgcctggagcagctctctcttggcaggcagctattgatgctgctaggcaggccaaactgatggggtctgcaggaaatgcgaccatctctaccgtgtcttccacacagcggaagcggcagcagtatggcaagcccaaaaagcagggaagtactacagccaccagaccacccagagcacttctctgccttaccttgaagaaccctataaggagggcttgcatcagcatagtggagtggaaaccgttcgaaatcatcattcttctgacaattttcgccaactgtgtggcgctggccatttacatccccttcccagaagacgacagcaatgccaccaatagtaacttggagcgtgtcgaatatttgttcttaatcatctttaccgtggaggcctttcttaaggtcatcgcgtacgggctcctgtttcacccaaacgcatacctgcggaacggatggaatctactggacttcattatcgtcgtcgtgggactgttcagtgccatattagaacaggccactaaggctgatggtgctaacgctctcggcgggaagggtgccggattcgacgtaaaagccctcagagccttccgcgtgctaaggccactgaggctagtttctggtgtgccctcccttcaggtggttttaaacagtatcattaaggctatggtaccattgctccacatagcactcctggtcctgtttgtcattatcatttatgccataattggcttagagctgttcatgggaaaaatgcacaagacatgctacaatcaggagggaatcgcagacgtgcctgctgaggatgacccatctccctgtgccttggaaacaggacacggtagacaatgccaaaacggaacagtctgtaagccagggtgggacggccccaaacatggtattacgaactttgacaacttcgccttcgccatgctgaccgttttccagtgcattacaatggaagggtggaccgacgtcctttactgggtgaacgacgcagtgggcagagattggccatggatctacttcgttactctgattattataggatccttcttcgtgctcaacttagtgttaggggtcctctctggtgaatttagtaaggaacgggagaaggctaaggctcgcggcgattttcaaaaactgcgggaaaagcagcagcttgaagaggacctgaagggatatctagattggattactcaagcggaagatattgacccggaaaacgaggacgagggcatggacgaggagaaacctcgcaatatgtccatgccgacgtctgaaaccgaatctgtgaatacagagaatgtagccggcggcgacatcgagggcgagaactgcggggcaagactggctcacagaattagtaagtccaagttttccagatactggcgacgttggaaccgattttgcagaaggaagtgtcgggcagccgtaaaatctaatgtgttctattggctggtgatctttctggtgttcctaaatactcttaccatcgcctctgaacattacaatcagcccaattggctgactgaggtccaggacacggctaacaaagccctgctcgccctttttacggccgaaatgctgcttaaaatgtattcactagggcttcaggcctacttcgtgagtctgttcaatcgatttgactgcttcgtggtgtgcgggggcatcctcgaaaccatactggtggagacgaagatcatgagcccactaggtatctctgtgctccgctgtgttcgccttctacgcattttcaaaattacccggtattggaactccctcagcaatcttgtagccagtcttctgaattcagtgcggagcatcgccagcctactcttacttttgttcctgtttattatcatttttagtctgctgggaatgcaactgttcggtggtaagttcaactttgacgagatgcaaacccgacggagcaccttcgacaactttccccagtcactcctgaccgtgtttcagatacttaccggcgaagattggaatagcgtaatgtatgacggtataatggcctacggagggcctagcttcccgggaatgctggtttgtatttactttattatcctgttcatatgtggaaactatatccttttgaacgtctttttagccattgcagtggacaacctcgcagacgccgagagtctcacaagcgcccaaaaggaagaggaagaggaaaaagaaaggaagaaactcgcccgtacagcctctccagaaaagaaacaggagctggttgaaaagcccgctgtcggagagtcaaaggaggaaaagatcgaactgaagtctatcaccgccgacggggaatcacccccagctaccaagattaatatggatgaccttcaaccaaacgaaaatgaggataagtctccatatcctaatccagagaccacgggcgaagaagacgaggaagagccggaaatgcctgtcggacctcgtccgcggccgctgagcgagttgcacctgaaagaaaaggctgtgccaatgccagaagctagcgcgttctttatttttagtagcaacaatcgattccgactccaatgtcatcggatcgtgaatgacaccatttttaccaatctcattttgtttttcatcctcctgtcgtcaatctccttggctgcggaggatcccgtgcagcatacctcatttcgaaaccacattctggggaacgctgactatgtttttaccagcatcttcaccctggaaattatcctcaaaatgacggcgtacggagctttcttgcataagggctccttctgccggaactattttaatattctagacctgcttgtggtgtcagttagcttgattagttttggaatccaatcctccgctataaacgtcgtaaagattctgcgggtcctgcgggtcctgcgtcccctgcgggctattaatagggcaaagggattgaagcacgtggttcagtgtgtcttcgtggcaattaggacaataggcaacatcgttatcgttacaacgctgctgcaattcatgttcgcttgtataggtgttcagttgtttaagggtaagctgtacacctgttctgacagctccaaacaaactgaagctgaatgtaaaggcaattacattacatataaggacggcgaagtggaccatccgatcatacaacccaggagctgggagaattcaaaattcgactttgacaatgtgctcgccgccatgatggccctgttcactgtcagcacattcgaaggatggcctgaactgttatacagaagcatagacagccataccgaggataaggggcccatctacaattaccgggtggaaatctcgatctttttcataatatacattatcatcatcgccttttttatgatgaacatctttgtaggtttcgttattgttaccttccaggagcagggggagcaggaatacaagaattgtgaactcgacaagaatcagcgacagtgcgtggagtatgccctcaaggctagacccctgcgcagatatattccaaaaaatcagcaccagtacaaagtatggtatgtggtgaatagcacctactttgagtatcttatgtttgtgcttattttgctcaacacaatatgcctcgcgatgcaacattacggccagagctgtctatttaaaatcgccatgaacattctgaacatgctgttcaccggcctattcactgttgagatgattctgaagctgatcgcctttaagcccaaagtaggactatag

SEQ ID NO: 110436 - DNA, 6546 bp, synthetic construct
  misc_feature 1..6546: note = Description of Artificial Sequence: Synthetic coding sequence
  source 1..6546: mol_type = other DNA
atgatgatgatgatgatgatgaagaaaatgcaacaccaacgacagcagcaggcagaccacgccaacgaggccaattacgctaggggaactcggctccccttatcgggtgaaggtcctacctctcagccaaattccagcaagcagactgtgctctcctggcaagctgccattgacgcggctcgacaggctaaggcagctcagactatgtctacctctgctccaccacctgttggttccctctctcagaggaaaagacagcagtatgctaaaagcaaaaagcagggcaatagttcaaattccaggccagccagagctcttttttgtctttctctgaataatcccattcgcagagcctgcatatccatcgtggaatggaagccctttgacatattcattctgctagcaatctttgccaattgcgtcgctctcgctatctatatccctttcccagaggacgactccaactccaccaaccacaatctggaaaaggtcgaatatgcctttctcataatttttactgttgaaactttcttgaagattatagcctacggactattactgcaccctaacgcctacgtgaggaatggatggaacctgctcgattttgtgatagttatcgtgggattgttttccgtgatcctggagcaattgaccaaggagaccgaagggggtaatcacagcagtgggaagtcaggggggtttgatgtaaaggccctaagagcatttcgcgtcttgaggcccctgcggttagtgagcggggtgccctcactgcaagtcgtgcttaatagtataattaaagccatggtcccacttctgcacatagcccttcttgtgctcttcgtgataattatctatgcaatcatagggctggagttattcattggcaagatgcacaagacttgcttctttgctgactcagacattgtcgcagaggaagatccagccccctgcgcctttagtggcaatggcaggcagtgtacagccaatggtaccgaatgccgaagcgggtgggtggggccaaacggcgggattacaaacttcgacaattttgcctttgccatgctgactgtttttcagtgtatcaccatggagggatggactgatgtgctttactgggttaatgacgctatcgggtgggagtggccgtgggtgtactttgtcagccttattatcctcggaagcttttttgttcttaatttagtgctgggagtgctgtctggcgagttcagcaaggagcgcgaaaaagcgaaagccaggggggattttcagaagttgcgggaaaagcagcagctggaggaagacctcaaaggctatttagactggatcacacaagctgaggacattgatccagaaaacgaggaagagggtggcgaggaggggaaaaggaacaccagtatgcccacatctgagacggaaagtgtcaacacggagaatgtatccggtgagggtgagaaccgcgggtgttgtggatccctctggtgttggtggaggaggcgtggagccgcaaaggccggcccaagtggttgccgccgatggggccaagccatcagcaaatctaaacttagtcggcggtggcggaggtggaatcgctttaatagacgtagatgtcgggcagctgtcaagtctgttaccttctattggctcgtgatcgtgttggttttcctcaacactttgacaatttcctcagaacattataaccagcccgactggctgacacaaatccaggacatcgcaaataaagtactgctcgcgctgttcacatgtgagatgctggtcaaaatgtattcactggggctgcaagcatatttcgtgtccttgttcaaccggttcgattgcttcgtggtgtgcggcgggataacagagactatcttagtagagctcgaaattatgagcccactgggtatctccgtgtttcgatgcgtgaggctcctgagaatctttaaggtaacaagacattggacgtcactgtccaacctcgtggcctctctgctgaattccatgaaaagcatagcatctttactgttgctactgttcctgttcattatcatcttcagcttgctaggtatgcaactctttggcggcaaatttaattttgacgaaacacagacgaagcgatccaccttcgacaacttcccgcaagctctgctcaccgtattccaaattctaaccggcgaggattggaacgcagtgatgtacgatggaattatggcctatggaggcccctcgagctctggcatgattgtgtgtatctacttcatcattctgtttatttgtgggaactacatactgctgaatgtattcctggctattgccgtcgataacctggcggacgcggaatctctcaataccgctcagaaggaagaagccgaggagaaggagaggaagaaaattgccagaaaggaatcgctcgagaataagaagaacaataaacccgaggtaaaccagattgccaactctgacaataaagtgaccattgacgattacagagaagaggatgaagacaaggatccttatcccccttgcgacgtacccgtcggcgaagaggaagaggaagaagaggaagacgagcccgaagtgcccgccgggccccgtcctcggagaatttctgagctcaacatgaaggagaagattgctccaatacccgagggatctgccttcttcatcctgagcaaaacaaaccctattagagtcgggtgtcataaactcatcaaccatcatatttttacgaatctcatcctcgtgtttattatgcttagttctgctgctctggccgctgaggatccgatccgaagccacagtttcaggaacaccattttggggtactttgactacgcttttaccgccatctttacagtcgagattctgcttaaaatgactacctttggggccttcctgcacaagggagcattttgtcgtaactacttcaacctgttggatatgctggttgtgggtgttagtctagtatctttcggcattcagagtagcgccattagtgtggtgaagattcttagggtactgcgcgtcctacggcccctgagagctataaatagggccaagggcttgaaacatgtggtacaatgtgtttttgtcgcaattaggaccatcggtaacattatgatcgtgactacactcctacagttcatgttcgcttgcattggagtgcagttgtttaaaggcaaattctataggtgtacggatgaagccaagagcaacccagaggagtgccgcggcctgttcattctttataaagatggggacgtggactcccccgttgttcgggaaaggatctggcaaaactcagacttcaatttcgacaatgtgctcagcgccatgatggcactgttcaccgtgtctacatttgaaggttggccggcgctgctctataaggccattgactctaatggtgagaacatcgggcccatctacaaccaccgcgtggaaatctcaattttctttattatctatatcatcatcgtagctttcttcatgatgaatatctttgttggtttcgtgatcgtcacctttcaggagcagggtgagaaggagtataagaattgcgagctggacaagaatcagcggcagtgtgtggagtacgctctgaaagctcgccctctgaggcggtatattcccaaaaacccatatcagtacaagttttggtacgtggtgaattcatctccctttgagtatatgatgtttgtgctcatcatgctgaacacgttgtgcttagcaatgcagcactacgaacaatccaaaatgttcaacgatgcaatggatatcttaaatatggtctttaccggggtgttcacagttgagatggtgcttaaggtcattgcctttaaaccaaaaggatattttagtgacgcttggaacactttcgattcactgatcgttatcggatcaatcatcgatgtggcattaagtgaagcagatcccactgaatcggagaatgtgccggtgccaaccgcaacaccaggaaacagtgaggagtccaatagaatctcaattacattcttcagattgttccgtgtcatgagacttgtgaagctgctgagccggggagaaggcatccgaactctcctctggacatttattaagagctttcaggccctcccctatgtcgctctgctgatagcaatgctgttcttcatttatgctgtgatcggtatgcagatgttcggcaaggtggctatgcgcgacaacaatcagatcaaccggaacaataattttcagacatttcctcaggccgtcttgctgcttttcagatgcgcgaccggagaggcctggcaggagattatgctggcgtgccttccagggaaactgtgtgacccagaatccgactataaccccggcgaagagtatacctgcggtagcaacttcgcaattgtgtacttcataagcttctacatgctctgcgccttcctgataatcaacctttttgtcgcggtgattatggataacttcgactacctgacacgcgactggagtatcctgggtcctcatcatctggacgaatttaagagaatatggtccgagtacgaccccgaggccaagggacgaattaagcatctggatgtggtgactttgctgcgccgaattcagccccccttggggtttgggaaactgtgccctcaccgagtcgcctgtaaaaggctcgtggcgatgaatatgcctctaaattccgatgggacagtcatgtttaatgcaacactttttgcacttgtacgcactgctctcaagattaagacagagggcaatttagaacaggccaacgaagaactgagggctgtgattaagaaaatatggaaaaaaaccagcatgaaactcctcgaccaagtggttcctccagctggtgacgatgaagtgacagtgggtaagttttatgccaccttcctgatccaggactactttcggaagtttaagaagcggaaagagcagggattggtcggaaaatacccggccaagaataccacaattgccctgcaggctggcctgaggaccctgcatgacatcggcccggagatacgccgagctatcagttgtgatctccaggacgacgaacccgaagagacgaagcgtgaggaagaagatgatgtctttaagaggaacggggccttgctcggtaatcacgtaaaccacgtgaacagtgatagaagagatagtctgcagcagacgaacacaacccacagacccctgcatgtccagaggccaagtatccctcctgcatcagacactgaaaagccactttttccccctgccggcaacagcgtgtgccacaatcaccacaaccataacagtatcggtaaacaggtgcctaccagtacaaatgccaacctcaataacgctaacatgtctaaggccgctcatgggaagcggccaagtatcggaaatttggagcacgtatctgaaaacggacaccacagttcacacaaacacgacagggaaccccaacggagatcttctgtgaagagaactcgctactacgagacctatattcgtagtgactcaggagacgagcagctgccaacaatctgccgggaggacccagagattcacgggtattttcgagatccacactgcctcggggaacaggagtatttttcaagtgaagaatgttatgaagacgattcctcaccaacgtggtcaagacaaaactacgggtactactccagatacccaggcaggaacatcgactctgagcgacctcgcgggtaccaccatccgcaggggttcctggaagacgatgatagccccgtgtgctatgacagtagacggagcccccggcgcagactgctgcccccaactcctgctagccaccgtcggtcatccttcaatttcgagtgcctgcgcaggcaatctagccaggaggaagttccttcgagccctatcttccctcaccgaactgcattacctttacacttaatgcagcaacagatcatggcagttgccggcctggattcatcaaaggctcagaagtacagcccttcacacagtactcggagctgggctacacctccagccacacctccttaccgggattggacaccgtgctacactcctctcatccaggtggagcagtccgaggccctcgaccaggtcaacgggagcttaccaagcctgcatcgatcatcctggtatactgacgagccagacatctcctaccgcacctttacccccgccagtctgactgtacctagctccttccggaataaaaatagcgacaaacagaggtccgcagattccctggtggaagctgttctgatctctgaagggcttggacgctatgcccgcgatcctaaattcgtttccgctaccaaacacgagatcgctgatgcctgcgatctgactattgacgagatggagagcgctgcttctactctgctaaatggaaacgtgcggccccgtgcgaatggcgacgtgggccccctgagccatcgccaagattacgagcttcaggatttcggaccaggctactccgacgaggagccagatccagggcgtgacgaggaagacctggctgatgagatgatatgcatcacaacactgtag

SEQ ID NO: 110437 - DNA, 6486 bp, synthetic construct
  misc_feature 1..6486: note = Description of Artificial Sequence: Synthetic coding sequence
  source 1..6486: mol_type = other DNA
atgatgatgatgatgatgatgaagaaaatgcagcatcagcgccaacagcaggccgatcacgccaatgaagccaattacgctagaggcacacgccttcccctcagcggggaggggccaaccagccaacctaacagctccaagcagaccgtgctgagctggcaggcggccatagatgcagctagacaggctaaagccgcacagaccatgtcaacctccgctcctcctccggttgggagccttagccagcggaagagacagcagtacgccaaaagtaagaagcaaggaaattcttctaattccagacctgctcgagccttgttttgtctctcacttaacaatcctattaggcgggcttgcatctccattgtagaatggaagcccttcgacatcttcatcctcctcgccatctttgcgaattgcgtagccctcgccatttacataccgtttcctgaagatgattctaactccactaaccataatttggagaaggtggaatacgcattcttgatcatctttacagtcgaaaccttcctcaagatcattgcgtacggcttactgctgcacccgaacgcatacgtgcggaacggatggaatctcctggattttgtgatcgtgattgtgggcctcttctctgtgattttagagcaattgaccaaagagactgaaggaggcaaccatagcagcgggaaatcaggcgggttcgacgtaaaggcattgcgagccttcagagtgctgcggccactgaggctggtgtctggcgttccctctttacaggtggtcctgaactcaatcattaaggcaatggttcctctgctgcacattgcactgttagtgctgtttgtaattattatttatgccattatcggcctggaactcttcattggtaagatgcacaagacctgtttcttcgcagattcagatatagtagcagaagaagatccggccccctgtgccttctcaggtaacgggcggcagtgcaccgccaatgggaccgaatgccggagcggttgggtcgggcctaacggcggcatcactaactttgataactttgctttcgctatgctgaccgtgttccaatgtattacaatggagggctggacagatgtcctgtactggatgaacgatgccatgggatttgaacttccgtgggtgtatttcgtgagccttgtgatattcggatccttttttgtgctgaatctcgtgctgggggttcttagcggcgagttctctaaggagagggagaaggccaaggcccgaggagattttcaaaagctgcgggagaaacagcagctggaagaggaccttaagggatatcttgactggattacacaagccgaggatattgaccctgagaatgaggaggaaggcggtgaagaagggaagcgcaacacttcaatgccaacgtccgagaccgaatctgtgaacacagagaacgttagcggagagggggaaaaccggggctgttgtggttcactgtgtcaggctatatccaaatctaagctgtcccgacggtggaggcggtggaacaggttcaaccgaaggcgctgtcgggccgccgttaagtctgtcaccttctattggcttgtgatcgttctcgtgtttctgaacaccctgacaattagcagtgagcactacaatcagccagactggctgacacagattcaggatatcgcgaacaaggtattgctcgcccttttcacttgcgaaatgcttgttaagatgtactctctcgggctgcaagcttacttcgtcagtttgtttaatcggtttgactgcttcgtcgtgtgtggagggataactgaaactatacttgtcgagctggaaattatgagccccctggggatctcagttttccgctgcgtgcgcctgctgcgaatctttaaggtgaccaggcactggacatcacttagtaatctggtcgcttcattacttaattctatgaagagtatcgcaagcctcctgctgctgctgttcttgtttatcattattttctctttgctgggtatgcagctgttcggcgggaagttcaacttcgacgaaacgcagacaaagcgatcaacattcgataacttcccacaggcgttgctgacagtgttccagatcctcacaggcgaggattggaacgccgtaatgtacgacgggattatggcatatggagggccttccagtagcgggatgatagtctgtatttattttattatcctgttcatttgtggcaactatatcctcctcaatgtgtttctcgccatagccgtggataatctggctgacgctgagagccttaataccgcgcagaaggaggaagcagaggaaaaagagcgcaagaagattgcccgcaaggagagcctggagaataaaaaaaataataagcccgaagtgaatcagatcgccaattcagacaacaaggtgactatcgacgattaccgggaagaggacgaagacaaagatccgtaccctccgtgtgacgtgcccgtgggagaagaagaggaagaagaggaggaagacgagcctgaagtgcctgcgggcccgagacccagaagaatcagtgagctgaacatgaaagagaagattgcccccattcccgagggcagtgcctttttcatcctgagcaagactaaccccattagggtagggtgtcataagttaatcaaccatcacattttcacgaacctgattctcgtgtttatcatgctcagcagcgctgctctggctgccgaggaccctatccgctctcatagtttccggaacaccattttagggtactttgattacgcttttactgcaattttcactgtggagatcctgctaaagatgacgacttttggcgccttccttcacaagggggcgttttgccgtaattacttcaacttattggacatgctggtcgtgggcgtgagcctggtctccttcgggatacaatcgtctgcaatctcagtggtcaaaatactccgggtgctacgcgtgctgcgccctctacgggctatcaacagagcaaagggactcaagcacgtagtccagtgcgtcttcgtcgcaatccgaacaattggcaatattatgatagtaaccacgctccttcagttcatgttcgcgtgcatcggcgttcagctattcaagggaaaattctacaggtgcacggacgaggccaaaagcaatccagaggaatgccgtggactgtttattctgtacaaggacggcgacgttgatagtcctgttgtgagggagcgaatatggcagaattccgatttcaattttgataacgtcctctcagcaatgatggcactgttcactgtgagcactttcgagggatggcccgctctgctctataaagctatcgattcaaacggcgaaaacatcggcccgatctataaccatcgggtcgagattagtatattcttcattatttacatcattatagtcgcctttttcatgatgaatatatttgttgggtttgtaatcgttactttccaggagcagggagagaaggaatataagaactgtgaactcgataagaatcagcgccaatgcgttgagtacgcattaaaagcccggcccctccgccgttacatccccaaaaatccctatcagtacaagttctggtacgtcgttaactccagcccattcgagtatatgatgttcgtactgattatgctcaacactctttgtcttgcaatgcaacactatgaacagtcgaagatgttcaatgacgctatggatattctgaatatggtatttactggggtctttacagtggagatggttcttaaagtgatagcatttaaacccaaaggctacttcagcgacgcatggaatacctttgactcccttatagtgattggatccatcatcgatgtagccctgtctgaagctgaccccaccgagagcgaaaacgttcccgttccgaccgcgacgccgggaaattctgaggaaagcaatcggatcagtatcaccttcttccgcctctttagagtaatgcgcctggtcaaacttctttcaaggggggaaggcattcgcactctgttatggacctttataaaaagctttcaagcattgccatatgttgccctcctgatcgccatgctattttttatttacgcagtaatcggaatgcagatgtttgggaaggttgccatgagggacaacaatcagattaataggaataataattttcagacattcccgcaggctgtgctgctcctgtttagatgtgccactggcgaagcctggcaagaaatcatgctggcttgcctgccaggtaaactctgcgatcccgaatctgattacaacccaggcgaggagtacacatgcggctcgaactttgctattgtgtacttcattagcttttacatgctgtgtgctttcctaatcatcaacctcttcgtagctgtgatcatggacaatttcgactatctcaccagagattggtctattctggggccccaccacttggacgaatttaaacgtatctggtccgagtatgaccccgaggctaagggcaggataaagcacctggatgttgtgacgctgctgcggcgcatccagccaccgttaggattcggcaagctttgtccgcatagggtggcttgtaaaagacttgtcgcaatgaacatgccattaaactcagacggaacagtgatgtttaatgccacattgtttgccctggtgagaactgcgctcaagattaagaccgaaggcaatctggaacaagccaatgaagaactgagggctgtaatcaaaaagatctggaagaagactagcatgaaactgttggaccaggtggttccacctgccggagatgacgaagtcacagtggggaagttttatgccacttttttgatccaggattacttccggaaattcaagaagaggaaagagcaaggcctcgtcggaaagtaccctgctaaaaataccactatcgctttgcaagccggccttcgtactctgcacgacattgggcctgagatacggcgcgccatcagctgcgatctgcaagacgacgaaccagaggagaccaagcgcgaggaagaggatgatgtctttaaacgaaacggggctttgctgggtaaccatgttaatcacgtcaattctgacagacgggattccctgcagcagacgaacactacccaccggcccctgcacgttcaaaggccatccatcccacccgcctccgatactgagaagcccttattcccccctgctgggaattccgtgtgtcataaccatcataatcacaattctatcggaaagcaagtgcccactagcaccaacgccaatctcaacaacgccaatatgtcaaaagccgctcacgggaagaggccctctattggtaacctggagcacgtgagcgagaacggccatcattcaagccacaagcacgaccgtgaaccccagcggcggtcaagcgttaaaaggacgcgatattatgaaacgtacataaggagcgattctggcgacgagcagctccctaccatatgtcgtgaagacccagagattcatggttacttccgcgacccccactgcctcggggaacaagaatactttagctcagaggagtgctacgaagacgacagcagccccacatggtcccgccagaactacggatactactccaggtaccccggccggaatattgactcagagcgacctcgtgggtaccaccatcctcagggcttcctggaagatgacgatagccccgtttgttacgactctagacggagcccaaggcgacggctgcttccccctacgccggcctcgcaccggcgctcctcgtttaactttgaatgcctgcggcgacagagctcccaggaggaagtcccctcaagcccaatcttccctcacaggacggcgcttcctctgcacctgatgcagcagcagatcatggccgtggctggcctagactcctctaaggcccagaagtatagccccagtcattccacccgatcttgggcaaccccgccggccacccctccctatcgggactggacgccatgttacacccccctaattcaggtggagcaatctgaagccctcgaccaggtgaacggctccctgccttccctccaccgttcttcctggtacacagatgaacctgatattagctaccggactttcacaccagcttctctgacggttcctagctcttttaggaacaaaaactctgataagcagagatccgccgattcactggtggaggcggttttgattagcgaggggctcggcaggtatgccagggatccgaagttcgttagcgcgactaagcatgagattgctgatgcttgtgacctgaccatcgatgagatggagtctgccgcaagcaccctgctgaacggaaatgttcgtccacgcgctaatggagatgtcggacctctctcgcatagacaggattatgaattgcaagacttcggccctgggtatagcgacgaagaacctgatcccggcagagacgaggaagacctggcagatgagatgatttgtatcactacactgtag

SEQ ID NO: 110438 - DNA, 6414 bp, synthetic construct
  misc_feature 1..6414: note = Description of Artificial Sequence: Synthetic coding sequence
  source 1..6414: mol_type = other DNA
atgatgatgatgatgatgatgaagaagatgcagcaccaacgacagcaacaggccgatcacgctaacgaggctaattacgccagagggactaggctgcccctcagcggtgaaggcccaacttcacaacccaattcttccaaacaaactgtgttgagttggcaggcagccatagatgcagcaagacaggcaaaagccgctcagaccatgtccaccagcgctcctccgcccgtagggtctcttagtcagcgcaaacgccagcagtatgctaagtcaaagaaacagggtaacagtagtaattctagaccagcccgggcgcttttttgcctttcgctcaacaatcccatcaggagagcgtgcatcagcatcgttgagtggaagcctttcgacatcttcatactgctggcaattttcgccaactgtgttgcgcttgcaatctacatcccttttcccgaagatgacagcaattcaaccaatcataacctagagaaggtggagtatgcatttctgatcattttcaccgttgagacctttctcaagatcattgcatatggcctccttttacaccctaacgcatacgttcgaaatggttggaatcttctagacttcgtgatcgtcatcgtcggtttattctcagtgatactcgaacagctgactaaggaaacagagggcgggaaccatagcagcggaaagtcaggtggcttcgacgtcaaagctctgagagcgtttagggttctgcgccccctgcgtttggtgagcggggttccctccttgcaggttgtgcttaactctattatcaaagccatggtgccattgctccacattgcactgctagtgctgttcgtcatcattatatacgccatcatcggcttagagctgtttataggcaagatgcacaagacctgcttttttgccgatagcgacattgtagccgaagaggatccagccccatgtgctttcagcggtaatggtaggcagtgcacagccaacggaacggagtgtaggtcaggctgggtagggcctaatggtggtattaccaatttcgacaactttgcgtttgctatgctcaccgtcttccagtgtatcactatggagggatggaccgacgttctgtactggatgaacgacgccatgggattcgagctcccttgggtttatttcgtctctctggtgatctttgggtcattctttgtcttaaacctggtgctcggggtgctaagcggggagttcagtaaagagagagaaaaggctaaggcccggggggacttccagaagcttagggagaagcagcagctggaagaggatttaaaggggtatctcgactggatcacacaggccgaagacattgaccccgagaatgaagaagaggggggggaggagggcaaacggaacacttccatgcccacctctgagaccgagagcgtgaacactgaaaatgtgagtggggaaggcgagaaccgcggttgctgcggatccctgtgtcaagcgatctctaagagcaaactttcaaggcgctggagacgatggaatcggttcaataggaggcgctgtagagccgccgttaaaagtgttactttttattggctggtgatcgtgctcgtgtttttgaacacactgaccataagctccgagcactacaaccagcctgattggctgactcagatccaggatatcgcaaataaggttctcctggcactctttacgtgcgagatgctggttaagatgtacagcttgggcttacaggcttattttgtgtctttattcaacaggttcgactgttttgtggtctgtgggggcatcacagagacaattttagtggagcttgaaatcatgtccccactgggaatcagcgtgtttcgatgtgtaagactcttgcgaatttttaaagtgactcgccactggacgtccctgtccaatctcgttgcaagtctactgaattcaatgaagagcattgcttcactgttgctcctcctgttcctgtttattatcatattctccttgctcgggatgcaactgtttggaggtaagtttaacttcgatgagacccagaccaagcgctccacatttgacaattttccgcaggctctgcttacagtattccaaattttgacaggggaagattggaacgccgtgatgtacgatggcataatggcatacggcggcccaagctctagcggcatgattgtctgtatctactttatcattttgttcatctgcggcaattatatactgctcaacgtgttcctggctatagccgtggacaatttggccgatgcggaaagcttaaataccgcccaaaaagaggaagccgaagagaaggagcgcaagaaaatcgctaggaaagaatcactggagaacaagaagaacaataagcccgaagtgaaccagattgctaactctgacaataaggtgaccatcgacgactacagggaagaggacgaggacaaagacccttatccgccttgcgatgtcccggttggtgaggaggaggaagaggaagaggaagacgagccagaagtgccagccgggccacggccacggaggatcagtgaactcaatatgaaagagaagatcgctcctatccctgaggggtcagcgttcttcatcctgtctaagacgaaccctatcagagtggggtgtcacaagctcattaaccaccatatcttcaccaatttgatccttgtgttcatcatgctgtcatctgcagccttggccgccgaggacccaatccggagccattcttttcgcaataccattctgggctatttcgactatgcttttacagccatcttcacagttgagatcctcctcaagatgactactttcggtgcattcttgcataagggagcattttgcaggaattactttaatctcttagacatgctagtcgtcggggtctcactagttagctttggcattcagtcctctgcaatttctgtagtgaaaattctgcgcgtcctccgggtcctgagaccgctgcgcgccattaatcgggccaagggcctgaagcacgtggtccagtgcgtcttcgttgccattcgcacgattggaaacataatgatagtgaccaccctcttgcagtttatgttcgcatgcattggggtgcagctctttaaaggtaagttttatagatgcacagatgaagctaagtccaacccggaagagtgcagaggactcttcattctgtataaggacggcgatgtggacagccctgttgtgcgagagcgaatctggcagaacagcgattttaactttgacaacgtcctgtctgcaatgatggccctgttcaccgtttcgacttttgagggctggccagcgttattgtataaggccatcgactctaacggcgagaatatcgggccgatctacaaccatcgggttgagatctccatctttttcattatctatattatcatcgtggccttcttcatgatgaacatcttcgtcggttttgttatcgtgacattccaggaacagggagaaaaggaatataagaattgtgaactggataaaaatcaacgacaatgcgtggaatacgctttgaaggcccggccactacggcgttatatacccaagaacccatatcaatacaagttttggtatgtggtgaactcgtccccctttgagtacatgatgtttgtgttaattatgctcaacactctatgcctggcaatgcagcactacgagcagtctaagatgttcaatgatgcaatggatatcttgaatatggtgttcactggcgtgtttactgttgagatggttctaaaagtaatcgcctttaaaccaaagggctacttctctgatgcctggaacacctttgacagcctgatcgtcatcggaagcattatagacgtggccctgtcagaggccgacaatagcgaggagagcaataggatatcaattacttttttcagactgttccgggtcatgcgcctggtgaaactcctgagccggggagagggcattcggaccctgctgtggacctttatcaaatctttccaggccttgccatacgtggcccttctgatcgctatgctctttttcatatacgctgtgattggtatgcagatgttcggaaaggtcgccatgcgagacaacaaccagatcaacagaaacaacaatttccagacatttccacaggctgtgttattgttgtttaggtgtgccaccggggaagcatggcaagaaatcatgctggcttgcctgcctggcaaattgtgcgatcccgaatccgattacaatccaggcgaggaatacacctgcggtagcaactttgccatcgtctactttatttctttttatatgctctgtgccttcttaataattaatctctttgtagccgttatcatggataatttcgactacctgacgagagactggtcaatcctcgggccccaccatcttgatgagttcaaacgcatttggtccgagtatgacccagaggctaaagggagaattaagcatctcgatgtggtgactctgctgcgcagaattcagcctcctctgggctttgggaaactgtgcccccatcgcgttgcatgtaagagactggtcgccatgaatatgcctctcaacagcgatggaacagtcatgtttaacgcaacactgtttgccctagttcgcacagccctcaagattaagacagaaggcaacctggagcaggcaaacgaggagttgcgggccgtgatcaaaaagatctggaaaaagacatctatgaagctgctcgaccaagtcgtaccccctgctggggatgacgaagtgactgttggcaagttctatgccacctttctgattcaagactactttcgaaagttcaagaaacgtaaggaacagggtctcgtggggaagtatcctgcaaaaaacacgaccatcgctctgcaagctgggctacgaactctgcacgatattgggcccgaaatcagaagggcgattagctgcgatcttcaggatgatgaaccagaggagaccaaacgtgaggaggaagatgacgtatttaagcggaacggcgcgctcctgggcaatcatgtcaaccacgtcaatagcgatagaagggactctctgcagcaaacaaacactacacacagacctctgcatgtgcagaggccttccatcccacctgcctcagatactgagaaacctcttttccctccagctggtaatagtgtctgtcataaccatcataaccacaatagtatcggcaagcaagtgccaacatcaacaaatgccaacctgaataacgccaacatgtctaaagcagcccatgggaaacggccctcaatcggcaacctggaacacgtgtccgagaatggtcatcattcctcgcataagcatgatagggagcctcagaggcgctcttccgtgaaaaggagcgattcaggggacgaacagttgcctacaatttgtcgcgaggatccggagatacacggctacttccgtgaccctcactgtctgggcgagcaggaatatttcagttccgaagaatgttacgaggatgattcaagcccaacctggagcagacaaaactacggttactactcgaggtatcccggaaggaatattgacagtgaacggccacggggctaccatcacccccaaggatttctggaagacgacgactcaccagtgtgctacgattctcgtagatcaccccgaagaagattgctgcccccaaccccagccagccacagaagaagcagcttcaacttcgagtgtctcagaagacaaagcagccaggaggaggttccgagtagtcctatcttccctcaccgcaccgctctcccccttcatcttatgcagcagcaaattatggctgtcgctggtctggatagtagtaaagcgcagaaatatagcccatctcattcaactagatcttgggccactccgccagccaccccaccctatcgggattggacgccatgctatacccccttaattcaagtggagcagagcgaagcactcgaccaggtcaatggctccctgccctctttgcacaggtcaagctggtatactgatgaaccagacatctcctatagaacctttactccggcctccctcactgtcccgagcagctttcgcaacaaaaatagcgacaagcagcgcagtgctgatagtctggtggaagctgtgctcattagcgaaggactgggaagatacgcacgggacccaaagttcgtgtctgccactaagcacgaaatcgcagatgcctgcgatctaaccatcgacgagatggaatctgccgcaagcactctgttgaacggaaacgtgaggccccgcgccaatggggacgtgggtcctctctcacacagacaggattacgaattacaggactttggacctggctactccgatgaagaaccagacccaggtagggacgaggaggatctggcggatgagatgatctgcatcactactctttag

SEQ ID NO: 110439 - DNA, 5565 bp, synthetic construct
  misc_feature 1..5565: note = Description of Artificial Sequence: Synthetic coding sequence
  source 1..5565: mol_type = other DNA
gctaatgggacagagtgtcgctcaggttgggtgggcccaaatggcgggatcacgaatttcgataactttgcattcgccatgttgactgtatttcagtgtataaccatggaagggtggactgatgtgctgtactggatgaacgatgcaatgggctttgagctcccttgggtctacttcgtgtcactcgttatctttgggagcttcttcgtgctcaacttggtgcttggcgtacttagcggcgaattctctaaagaaagggagaaggcgaaagctcgtggcgacttccagaagttacgagagaaacagcagttggaggaggacctgaagggttatctcgattggattactcaggccgaagacattgaccccgaaaatgaagaagaggggggcgaagagggtaagcgtaacacaagtatgcctacgtccgaaaccgagagcgtgaataccgagaacgttagtggagagggggagaatagaggatgctgcggatctctgtggtgctggtggaggcggcgcggcgctgcaaaggctggtccttcgggatgtcgcagatggggacaagcaattagtaagtccaaactgagccgaagatggcggcgctggaatcgcttcaatcgacggaggtgccgagcagccgtcaagagtgtaaccttctactggctcgttatcgtactggtgtttctgaatactctcaccatatcttctgagcactacaatcaacccgattggttgacacagatccaagacatcgcaaacaaggttctattggctctatttacttgcgagatgctggtcaagatgtattctttaggcctccaggcctattttgtatcattattcaaccgctttgattgcttcgtggtatgtggaggcatcaccgaaaccatattagtggaactagagattatgtcacctctgggaattagtgtctttcgctgcgtccgtctgctccggatatttaaagtgacccggcattggactagcttaagtaacctggtcgcatcccttctaaattcaatgaagagcatagcctcacttcttctcctgttattcctgttcatcatcatcttttctctgttgggtatgcagttatttggaggaaaatttaactttgacgaaactcagacaaaacggtccacctttgacaatttccctcaagccctgctgactgtcttccagattttgacgggagaggactggaacgctgtcatgtacgatgggataatggcctacggcggcccatctagtagcgggatgattgtgtgtatctattttatcatcctgttcatctgcgggaactacatcctcctgaatgtttttctcgccatcgctgtagataacctggcagatgcagaaagcctgaacaccgctcagaaggaggaggcagaagagaaggagaggaagaagattgcacgcaaagagtctttggaaaacaagaaaaataacaaaccagaggtgaaccagattgccaactctgacaataaggtgactattgacgactaccgggaagaagatgaggataaggatccctatcccccatgcgatgtgcctgtgggggaagaggaggaggaagaagaggaagacgaacccgaggtgcccgctggtccacggcccaggcgaattagcgagctcaatatgaaggagaagatagctcccatccccgagggcagcgccttttttattttgtccaaaaccaacccaattcgagtcggctgccataagcttattaatcatcacatctttacgaacctgatcctggtatttatcatgctgtcttcagctgcactggcggccgaggatcccatcagatctcacagctttcgtaataccattctgggctactttgattacgcctttacagcaattttcaccgtcgaaatcctactcaagatgaccacctttggcgcatttttacacaagggcgcattctgcaggaactattttaatctactagatatgctcgtggtgggtgtgtcgttggtaagttttgggatccagtcttccgcaatatctgtggtcaaaatcctgcgagtcctgagggtcttaagacccctacgggccatcaaccgagccaagggcctgaaacacgttgtccagtgcgtcttcgtggcaatccgtacgattggaaacatcatgatcgtgacgacactgctgcagttcatgttcgcctgtataggcgttcagctttttaaaggcaagttttacaggtgcacagacgaagctaagtcaaatccggaagagtgtagggggctgtttatcttgtacaaggacggcgatgtcgatagcccagttgttagagaacgaatatggcagaatagtgactttaacttcgacaacgttctgtccgccatgatggccctctttacagtctctacattcgaggggtggccagcgctgctgtataaggctatcgacagcaatggtgagaatattgggcccatctacaaccatagggtggagatctctatcttctttatcatctacatcattatcgtggccttttttatgatgaatatcttcgtaggattcgtcattgtaacatttcaggaacagggagagaaagagtataagaactgcgagcttgacaagaaccaacgccagtgcgtcgaatacgccttaaaggctcgcccactgcgtaggtacatccccaagaacccataccagtataagttttggtacgtggtaaattctagcccgttcgagtatatgatgttcgttttaataatgctcaacacactttgtctggctatgcagcattatgaacaaagcaagatgtttaacgatgccatggacatccttaacatggtttttacaggggtgtttacagtcgaaatggtcctgaaagtcatcgcttttaaacccaaacattattttacagacgcatggaatacctttgatgcactgatcgtagtgggctccgtagtggatatcgcaatcacagaggtgaacccaaccgagtccgaaaacgtccctgtgccaactgccacccccggcaattccgaggagagtaaccgcatttccatcaccttttttaggttatttcgagtcatgcgacttgtcaagctcctcagcagaggggagggaattcggacccttctttggaccttcatcaaatccttccaggcactgccatatgtggcgctattgatagcaatgttgtttttcatctatgcagtgatcggaatgcagatgttcggcaaagttgctatgcgcgataataaccagatcaaccggaataataatttccagaccttcccacaagccgtgctgctcctgtttagatgtgctaccggggaggcctggcaggagattatgctcgcatgcctcccgggcaaactgtgcgatcccgaatccgattacaatcccggcgaggagtatacatgtggctcaaatttcgcaattgtgtattttatttccttttatatgctatgtgcatttttgataatcaacttattcgttgctgttattatggacaattttgactatctgaccagggactggtcaatcctgggacctcaccacctcgacgaattcaaacggatatggagcgagtacgatccagaggccaaagggcggattaagcacttggacgttgttacactactgcgcaggattcagcctcccttgggatttggtaagctgtgtccacatcgtgtggcatgcaagcgcctggtcgcgatgaatatgcccttgaactcagacgggacagttatgttcaatgcgaccttgtttgccctggtgaggaccgcattgaagatcaaaacagaagggaacctcgagcaagccaacgaggaattacgggccgtgattaagaagatttggaagaaaacttcaatgaaactgctcgaccaggtggtgcctccagcaggagatgatgaggtcacggttggtaaattttatgctacgttcttgatccaggactattttcgaaaattcaaaaaaagaaaggaacagggactcgtgggaaagtaccctgcgaaaaacacaacgattgcacttcaggcaggacttcggaccctgcacgacatcggtcctgagatccgccgagccattagctgtgatctgcaggatgacgagccggaggagactaagcgagaagaggaggatgacgtctttaaacggaacggagccttgttaggaaatcacgtgaatcacgttaatagtgatagaagagactccctgcaacaaaccaacactacacaccgcccactgcacgtgcaaaggccatcaatacccccggccagtgacacagagaagcccctgttcccaccagcagggaattctgtttgccacaaccaccacaaccacaatagcattgggaagcaggtgccaaccagcacgaatgcgaatttgaacaacgccaacatgagcaaggccgctcatggcaagaggccctctattggtaacctggagcatgtgtctgaaaatggccatcacagctcgcataaacacgatagggaaccacagagaagaagctctgtgaagaggacccgttactacgagacgtacattcgctccgatagcggggatgaacaacttcccacaatttgtagagaagacccagaaattcacggctactttagggatccccattgtctgggcgagcaggaatatttctctagtgaggaatgttacgaggacgacagctcccctacctggtctaggcaaaactatggctactattcgagatatccaggaaggaatattgacagtgagagaccccggggatatcatcatccccagggcttcctagaggatgacgattcacctgtgtgctatgactctagacgaagtccacgcagaaggctgctgccacctacccccgctagtcacagaaggagctctttcaattttgaatgtctgcgtaggcaaagttcccaggaggaggtccccagcagtcctatttttccacacagaacagcactgcccttacatctgatgcagcaacagatcatggcggtggccgggctggatagtagcaaggctcagaaatatagcccgagccacagcaccagatcatgggccaccccgccggcgactccaccataccgagactggaccccatgttacacaccccttatccaggtggagcaatccgaggcccttgaccaggtcaacggctcgctgccttccctccatagaagctcttggtatactgacgaaccagacattagctatcgtacgttcacacccgcgagtcttaccgtaccatccagttttagaaacaagaattctgataagcagcggtctgccgattccctggtggaggccgtcctgattagtgagggcctgggtagatacgccagggatcctaagtttgtcagtgctaccaaacacgaaatcgccgacgcttgcgaccttactatagatgaaatggaaagtgccgcaagtactttgctgaacggcaatgttcgacccagggccaacggtgatgtaggacctctgtcccatagacaggactacgagttacaggacttcggccccggctacagcgacgaggaaccagatcctggacgggatgaggaggatctagccgatgaaatgatctgtataacgacgctgtag

SEQ ID NO: 110440 - DNA, 1620 bp, synthetic construct
  misc_feature 1..1620: note = Description of Artificial Sequence: Synthetic coding sequence
  source 1..1620: mol_type = other DNA
atgggagagacatggttgtgtccagccgccctgggactgctatacaaggccatcgatagtaacggcgaaaatatagggccgatttacaaccatcgggtggaaatctccatcttctttattatctatattattattgtcgccttctttatgatgaacatttttgttggctttgtaattgtgactttccaggagcagggtgaaaaagagtacaagaactgcgagttagataagaatcaacgtcagtgcgtagagtatgcactgaaggccagacccctacgccgttatatacctaagaacccttatcagtacaaattttggtatgtcgtgaacagcagtcctttcgaatatatgatgttcgtgctgatcatgcttaacactctctgcctagccatgcaacactatgagcagtcaaagatgttcaatgacgcaatggatatcctgaacatggtgttcactggagtatttactgtggaaatggtgctcaaggtgattgcctttaaacccaaaggctattttagcgatgcttggaatacatttgacagcctgatagtgatcgggtctatcatcgatgtggctctgtcggaagccgataactcggaagagtccaaccgtatctccatcacgttctttagactgttccgagtaatgagactagtgaagctactctccagaggggagggaatccgaacccttctttggacgtttatcaaaagtttccaggcactgccctatgtggccctgctgattgcaatgctgttctttatttacgcagtcattgggatgcagatgtttggtaaggtggccatgcgcgacaataaccaaatcaaccgtaataataatttccagacatttccacaggccgtgcttctcctgtttaggtgcgctaccggcgaggcgtggcaagagattatgctcgcctgtctgccagggaagctctgcgatcccgaatcagattacaacccaggcgaagaatacacctgcggctccaactttgctatcgtgtactttatctccttctacatgctgtgcgcttttctgattataaatctcttcgttgcggtgatcatggacaattttgactaccttacccgggactggtcaatactaggtcctcaccacctggacgagttcaagcgaatctggtcagagtacgaccccgaagccaaaggccgtattaagcacctggatgtcgtgacattactgaggagaatacagccccccttaggttttgggaagctttgtccgcaccgggttgcttgtaaaaggctggtggccatgaacatgcctcttaatagtgacgggaccgtgatgtttaacgcaacactgtttgccctggtgagaacagcattaaagatcaaaacagaagggaatttggagcaggccaatgaggaattacgcgctgtcattaagaagatctggaagaagacatcgatgaagctcctggatcaagtagtccctccagctggcgatgacgaagtgaccgtcggcaaattctatgcaaccttcctcatccaagattattttcgtaagttcaagaaaaggaaagagcaaggcttggttggcaagtaccctgccaagaataccacaatcgccttgcagatgctagagaggatgctttag

SEQ ID NO: 110441 - DNA, 1056 bp, synthetic construct
  misc_feature 1..1056: note = Description of Artificial Sequence: Synthetic coding sequence
  source 1..1056: mol_type = other DNA
atgaacgggctggctcaatctcgcttggagacttgtattagttaccttcactgctacagcgctgggctgaggaccttgcacgatatcggccctgaaatccgtcgagccatctcttgcgacctgcaagatgacgaaccggaagagaccaagagagaggaggaagatgacgtatttaaacgcaacggagcacttctgggtaaccacgtcaatcacgtgaattctgacagacgtgactctctgcaacaaaccaataccacccaccggcccctccatgttcagaggccctctatcccccccgccagcgacacagagaaaccattgttcccacctgctggaaattcagtctgtcacaatcaccacaatcacaattccatcggaaagcaggtccccacgtccactaatgccaatctgaataacgcgaacatgtctaaggccgcccacggtaagcgaccctcaattgggaatctggagcacgtttcagagaatggacatcactcgagtcataaacacgacagggaaccacagaggaggagtagcgtgaagaggactagatactacgaaacctacattcgctcagattctggcgacgaacagttaccaacaatttgcagagaggatccagagattcatggctactttagggatccccattgtctaggggagcaagaatacttttcctccgaagagtgttatgaagacgactcaagtcctacatggtctagacagaattacggatattacagtagatatccgggccgcaatatcgatagcgaacgtccaagaggatatcaccatccccaaggcttccttgaagatgacgacagccccgtctgttacgactcgaggcggagcccccgtagacggctgctgcctccaacgccggcctcacatagacggtccagctttaattttgagtgccttcgtaggcaatctagtcaagaggaggttccatcaagcccaatttttccccacaggacggccttgcctctccaccttatgcaacagcagagcccattgtcctcagatcatggttcctgtaggcccaggttcaaatag

SEQ ID NO: 110442 - DNA, 5901 bp, synthetic construct
  misc_feature 1..5901: note = Description of Artificial Sequence: Synthetic coding sequence
  source 1..5901: mol_type = other DNA
atgtctgagtccgagggcggaaaggatacgaccccagagccgagtccggcaaatggggccggacctggacccgaatggggcctttgccccggacctccagcagtcgaaggagagagctcaggcgctagcggcctgggcactcctaaacggagaaaccagcactctaaacataagacggttgctgtggcatcagcccaacggagccctcgggcccttttctgtttgaccctggcaaatccgctcagaagaagctgtatttcgattgtggaatggaaaccattcgacattctgatcctcctgaccatcttcgctaactgtgttgccctaggtgtgtatattccgttccctgaagatgactccaacacggcgaaccataacctagagcaggtggagtacgtcttcttagttatctttacagtagagactgtcctgaagattgtggcctacggcctggtgctgcacccgtccgcttatattaggaatggctggaatttgctggactttattatcgtggtcgttggccttttctctgtgctcctggaacagggaccggggagacctggggacgcacctcatacgggtggaaaacccggcggattcgatgtcaaggccttacgggcattccgcgtgctacgtccattgcggctggtgtccggcgttccttcactgcatatagtgctaaactccatcatgaaggccctggtcccattactgcacatcgctttgttggtgctcttcgttataataatctacgccatcatcggactggagctgttcttgggccggatgcataagacctgttacttcctggggagtgatatggaagcagaggaggatcctagcccctgtgcttcaagcggatccggccgagcatgcacacttaaccagactgaatgcaggggcaggtggccaggcccgaatggagggattaccaattttgacaacttcttcttcgccatgttaacggtcttccaatgtgtaacaatggaggggtggactgacgtgctgtactggatgcaagacgctatgggatacgagcttccgtgggtttactttgtatccctcgtcatcttcggtagctttttcgtgcttaatctggttctgggcgtgctgagcggagagttctccaaggagcgtgagaaggccaaggcaagaggcgattttcaaaaacaaagagagaagcagcagatggaagaagatctaaggggctatctggattggattactcaagctgaggagcttgacatggaagatccaagcgctgacgacaacctcggccctcagctggctgaactgactaatagaaggcgagggcgcctgagatggttctcacactcgaccagatcaacccacagcactagctcccatgcctcgctgcccgctagcgataccggctctatgaccgagactcagggagacgaagacgaggaagaaggagcgctggcgagttgtactcgctgtctgaataaaattatgaagacgagagtctgtagacgcctccggagagctaacagggtgctcagggcgcgatgcaggagagccgtgaagtctaacgcctgctactgggcagtccttttgctcgtgtttcttaacaccctgacgatcgcaagcgagcatcatgggcagcctgtctggctcactcaaattcaggaatacgccaataaggtactgctttgtctgttcactgtagagatgttactcaagctttatgggttgggcccctctgcctatgtgtcctccttttttaacaggtttgactgttttgtcgtttgtgggggcatcctggaaacaactctggtagaagtaggcgccatgcagcccctgggaatatccgtgcttagatgcgttcggctattgcgtatttttaaagttactcggcattgggctagcctgtcgaatcttgtggccagtctgctgaactctatgaaatctatcgcctcactactgttacttctctttctttttattatcatattttctcttctgggcatgcaactttttgggggaaagtttaacttcgaccaaactcataccaaaaggtccacctttgacacattcccccaagcactgctgactgtatttcagattctcacaggggaagattggaacgtggttatgtatgatggaattatggcctacggcggcccgttctttcctggcatgcttgtctgcatttacttcataatcctgtttatatgtgggaactatatcctgttaaacgtgtttctcgccattgccgtggacaacctggcttccggggacgcaggaacagccaaagacaagggcggcgagaagtccaatgaaaaagacctgccgcaagaaaatgaagggctggtgcctggcgtcgagaaggaagaggaggaaggcgcaaggagagagggcgctgacatggaagaggaggaagaagaggaagaggaagaagaagaagaggaggaggaggaaggagctggtggagtagagcttcttcaggaggtggtcccaaaagaaaaggtcgttccgataccagaggggagtgccttcttctgtctgagccagactaatccactcagaaagggatgccataccctcatccaccaccatgtcttcaccaatcttatcctagtttttataatcctttctagcgtgtcccttgccgcagaggatcctatacgggctcatagctttcggaaccatattttaggatacttcgattacgcttttactagtattttcaccgtggagattctccttaagatgactgtcttcggcgctttcttgcaccggggctctttttgtcggagttggttcaacatgctagatctgctcgttgtgtctgtatctctgatctcatttggtatccatagcagtgccattagcgtggtgaagattttgcgtgtgttaagggtgctccgtccgctgcgagccataaatcgtgccaaggggttgaagcatgtcgtgcaatgcgtgtttgtggccatccggactattgggaacattatgatcgtgacaaccttgctccaattcatgttcgcttgtatcggtgttcagctgttcaagggaaagttttacacctgtactgacgaggcaaagcacacccctcaggagtgtaagggaagttttctggtataccctgacggtgatgtaagtcggcccctggtccgtgaaaggctgtgggtaaatagcgactttaactttgacaatgtcctgtcagctatgatggcgttatttactgtgtctacgttcgagggatggccagcgctcctctataaggccatcgacgcctatgccgaagaccatgggcccatctacaattaccgtgtggaaatatcagtgtttttcatcgtttatatcattatcatagcctttttcatgatgaatatttttgtgggattcgtgattatcacttttcgcgcacagggcgaacaagaataccagaactgcgaattggataagaaccagagacagtgcgtcgagtatgccctcaaggctcagcccctacggcggtatatacccaagaatccccaccagtaccgcgtctgggctacagttaattctgctgcctttgaatacctgatgttcctgttaatcctcctaaacacggttgccctcgccatgcagcactatgaacagaccgctccattcaactacgcaatggacatactgaacatggtgtttacgggcctgttcacaatagagatggttctgaagattatagcgttcaagccaaagcactacttcaccgacgcatggaacactttcgacgccctgatcgttgtcgggtctatcgttgacattgcagtgaccgaggtcaataatggaggtcacctgggcgaatcttcggaggactcttccagaatctcaattacgttcttcaggctttttcgggtgatgagactggtaaaactgcttagtaaaggcgaagggatcagaactttgctttggactttcatcaaatcattccaggcactaccatacgtggcactgctgatcgcaatgattttcttcatctatgccgtaatcgggatgcagatgttcggaaaggtggccctgcaggacggaacccaaataaacaggaacaacaatttccaaactttcccgcaggccgtactgctactgttcaggtgcgcaactggtgaagcttggcaggaaataatgctcgcaagcttgcctggcaatagatgcgacccggaatccgattttggcccaggggaagagttcacatgcggctctaatttcgccattgcatacttcatctcatttttcatgctctgcgctttccttatcattaatctgttcgttgcagtgatcatggataattttgattacctgactagagattggtcgatcttgggccctcaccaccttgacgagttcaaacggatatggtctgaatacgatcctggagctaagggtcgcatcaagcacctggacgtggtggcactcctccgaaggattcagcccccattagggtttggcaagctgtgtccccatagagtggcttgtaagaggttagtcgcaatgaacatgcctctcaactcagacggaacagtaacttttaacgcaactctctttgctctggtacgcacatccctgaaaataaagacggaaggcaacctcgagcaggcaaaccaggaactacgaatcgtgattaagaagatatggaaacggatgaagcaaaagctcctggacgaggtcattcctccacctgatgaagaggaggtgaccgttggcaagttttatgcaactttcctgattcaggactatttcaggaaattccgacggcgcaaggagaagggactgctgggcaacgatgcggctccatcaacctcgtcggccctgcaggcgggactgaggtcccttcaggatttaggtccagaaatgcggcaggcactcacatgtgatactgaggaggaagaagaagaaggacaagagggggtagaggaagaggatgaaaaggacctggagactaataaagcaacaatggtttcacagccttccgcccgccgcgggtccgggataagcgtgtccttgccagtgggagaccggctgcccgactctttgtcatttggccccagcgatgacgacagaggcactccaaccagtagccagccgagcgtcccccaggctggctcaaacacgcatcgccgcggatccggagcgctgatcttcacaatccccgaagagggaaacagtcaacccaaaggcaccaagggccagaacaagcaggatgaggacgaggaagtgcccgacaggctgtcgtacctggatgaacaggcaggcaccccaccttgtagcgtcctcctcccgccccaccgcgcacagagatacatggacggtcacctcgttcctcgccggcgacttttgcctcccacacctgctggccgcaagccatcattcacaatccagtgtctacagcgccagggaagctgtgaggatttgccgatcccggggacctaccaccggggaagaaactctgggcctaaccgggcccagggtagttgggccacgccacctcaacgaggccgcctcctgtatgccccactgcttctggtcgaagagggggctgccggagaaggatacctgggtagatccagtggcccactcagaacctttacttgtcttcatgtgcctggcacccacagtgacccgagccatggaaaaaggggctcggccgattcactcgtggaggcagtcctgatcagcgaaggacttggcctgtttgcacgcgacccgcgctttgtcgctcttgcaaagcaggagattgcggacgcatgtagattaaccctggatgagatggacaatgctgcatccgacctactcgcccaaggcactagttcactgtactcagatgaggaatccattttgtctaggttcgatgaagaggaccttggagatgagatggcgtgcgttcacgccttatag

SEQ ID NO: 110443 - DNA, 5739 bp, synthetic construct
  misc_feature 1..5739: note = Description of Artificial Sequence: Synthetic coding sequence
  source 1..5739: mol_type = other DNA
atgtcagagagtgagggtggtaaaggagagcggatccttccaagcctgcagaccctcggcgcgtccatagtcgagtggaaaccctttgacatcctgatccttcttactatttttgcaaactgcgtggctctgggagtttacatccctttcccagaagatgattcaaacactgccaatcataatcttgagcaggttgagtacgtattcctggtgattttcacggtcgagacggtgttgaaaatagtggcatacggcctcgttctccacccttctgcttacatccggaatggatggaacctgcttgattttatcatagtcgtggtgggcctcttttccgtactgttagaacaggggccagggaggcccggcgatgcacctcacacgggtggtaagcccggcggtttcgatgttaaagctctcagagctttccgggtcctgcgaccactgaggctggtctcaggcgtgcctagccttcacatagtcttgaactcaatcatgaaagccctcgtgccattgctgcacatcgcgctcttggtgcttttcgttatcattatctacgccatcataggcttggaactgttcctgggacggatgcataagacctgttatttcctgggaagcgacatggaggcagaggaggaccccagcccctgcgcgtccagcggtagcgggcgcgcttgtacattgaaccagaccgagtgtcggggaagatggcccggccctaatggaggaatcaccaattttgataactttttttttgccatgctgacagtgttccagtgtgtcaccatggagggctggacagatgtcttgtactggatgcaggatgcaatgggatatgagctcccttgggtctactttgtctcactggtgatcttcggttccttttttgtactgaacttggtcttgggagttctgtctggcgagttctccaaggagcgcgagaaggccaaagctcgaggggatttccagaaacagcgggaaaagcagcaaatggaggaggacttaagagggtatttagattggattacccaggccgaggaattagatatggaggatccatccgctgacgacaaccttggaagtatggcggaggaggggagggcaggtcacaggccccaattggccgagttgaccaaccgaaggcgagggcgtctacggtggtttagccactcgacaaggtccactcacagtacgtcttctcacgcaagtctgcccgccagtgacacggggtcaatgacagaaactcagggggatgaggacgaggaggaaggggcgcttgcatcatgcactcggtgtctgaataaaattatgaagaccagggtttgtcgcagacttcggagggccaatcgggttctccgcgctcgatgcagaagagcagtaaagagtaacgcgtgctactgggccgtcctgttgctcgtttttctaaatactctgacaattgccagtgaacatcacgggcagcccgtgtggttgactcaaattcaggagtacgctaataaggtattactgtgcctgtttacagtcgaaatgctcctgaagctgtacggactgggaccttctgcatacgtaagcagtttctttaatcgatttgattgtttcgtggtgtgcggcgggatcctagagacaaccctcgttgaagtaggagccatgcagcccctcgggatttctgtccttagatgcgtcaggttgctgcgcatttttaaagtgacaagacactgggcctctttatcaaatctggttgcaagtttgctaaattcgatgaaatctattgccagtctgctcctcttgctgttccttttcattataatcttctctttacttggtatgcagctgtttggagggaagtttaacttcgaccaaactcacaccaaacgctctactttcgatacatttcctcaggcgcttctgacagtgtttcagatcctgactggggaagactggaacgttgtgatgtacgatggcattatggcttacggaggtcccttttttccgggcatgttggtctgtatatatttcatcatactgttcatatgtggaaattacattctactgaacgttttcctggctattgccgttgacaacttggcatccggcgacgcaggaactgcgaaggataaaggtggagaaaaatccaacgagaaggatctgccccaagaaaacgaaggcctggtccccggggtggaaaaggaagaggaggagggcgcccgccgggagggcgcggacatggaagaagaggaagaagaggaggaggaggaggaagaagaggaggaggaggagggcgccgggggcgtggagctcctgcaggaggtggttcccaaagaaaaggtggtgcccatccctgaaggctctgcctttttttgcttgagccagactaacccacttagaaagggttgtcacaccctgattcatcaccacgtgtttacgaatttgattcttgtcttcatcatattgtctagcgtctccctagcagccgaggatcctatccgcgcgcactctttccgtaaccatatcttgggatactttgactatgcctttacatcgattttcactgtggaaatcttgctcaagatgaccgttttcggtgccttcctacacaggggctcattctgtcgatcatggttcaacatgctagatctgctcgtcgtgtcagtatctcttatatcctttggcattcactcttcagctatctctgttgttaagattctccgagtgctacgtgtcctgagacctctgcgggcaattaaccgggctaagggcctgaagcatgttgttcagtgtgtatttgtggcaattcgaacaattggtaacattatgattgtgactactttacttcagtttatgtttgcatgcattggtgtccagctctttaagggaaaattctatacctgtaccgacgaggcaaagcacaccccccaagaatgtaagggctcctttctggtgtatcccgacggagatgtgagccggccactggtgagggaacgactgtgggtgaattcagacttcaactttgataatgtgctgtccgccatgatggcactcttcaccgttagcacattcgaagggtggcccgccctgttgtataaggcaattgatgcttatgctgaggatcacggaccgatctataattatcgggttgaaatatcggttttctttatcgtgtacatcatcattatagccttctttatgatgaacatcttcgtgggcttcgttatcatcacctttcgggcccagggtgagcaggaatatcaaaactgtgagttggacaagaaccagcgtcaatgcgtcgagtacgcactgaaggctcagccgttacggagatacatcccgaagaacccacatcaataccgagtgtgggctacggtcaatagcgcagcttttgagtacctcatgtttcttcttattcttctgaataccgttgccctggccatgcagcactacgaacagacagcccctttcaattatgccatggatattcttaatatggtgtttacaggcctgttcaccattgagatggttctgaagatcatcgcttttaaacctaaacactattttaccgatgcctggaatacattcgacgcactgattgtagttggctcaatagttgacattgcagtaactgaggtgaataacggcgggcacctgggagaatccagtgaagacagttccagaataagcatcactttcttccgtctgtttagggttatgcgtctggtgaaactgctcagtaaaggggagggcattagaactctgttgtggacattcattaagagctttcaagcccttccttatgttgccctcctgatcgccatgatctttttcatctacgcagtgataggaatgcagatgttcggtaaagtggcgctccaggacgggacacagattaaccgtaataacaactttcagacgttcccccaggctgtcctgctactgtttagatgcgctacgggggaagcctggcaggagatcatgctggccagcctaccaggcaacagatgcgatcctgagtctgattttggacctggtgaagagttcacatgcggaagcaatttcgccatcgcgtactttatcagtttttttatgctgtgtgccttccttatcatcaacctttttgtagctgttatcatggacaacttcgactatcttacccgagactggagtatcctcggccctcaccatttggatgagtttaaaagaatatggtccgaatacgatcccggcgctaaaggacgcattaagcatctagacgtcgtagctcttctccgccgaatacaacctccactaggctttggcaagctatgcccgcatcgggtcgcgtgtaagaggcttgtggccatgaacatgccactgaacagcgatggaactgttacttttaacgcaactctgtttgctcttgtgcggacttctctgaagatcaaaacggaaggtaacctggaacaagcaaatcaagagctgagaatagtgattaagaagatttggaagaggatgaagcaaaagctgctggacgaagttattcctccccctgacgaagaggaggtaacagtagggaagttctatgctacctttctcattcaggattactttcggaagtttcgcagaaggaaggaaaaaggccttctgggaaacgacgccgcgccttccacgtccagcgccctccaggctgggctgcgtagcctacaggaccttggtcccgaaatgaggcaggccttgacatgcgacacagaggaggaagaagaggaaggccaggagggcgtcgaagaggaagatgagaaagatctggagacaaacaaggcaactatggtaagccaaccatccgcaagaagaggaagtggtataagcgtctctttgccggtcggcgacagactaccggattcactgtcttttgggccatcagacgacgatcggggtaccccgaccagttcccagccttctgtgccccaggctggttccaatacacaccgaaggggaagtggcgccctgattttcaccatcccggaagagggcaactcacagcccaaagggaccaaaggccagaacaagcaggatgaagacgaagaggtgcctgatagattgtcctacctcgacgagcaggcaggcacccctccatgcagtgtcctgctgcctccccatagagcccagagatatatggatggacatctggttccccggaggcggctgctccccccaaccccagctggtcggaaaccttcctttacgatccaatgcctccagcggcagggcagttgtgaggacctcccaatccccgggacataccaccgcggccgaaattccggaccgaatagggcacaggggtcctgggctacacccccgcaacggggtaggttgttatatgcacctctgctgctcgtggaggagggcgcagcaggcgagggctacttgggccgcagcagcggcccactccgcacattcacttgtctgcatgtaccaggcacacacagtgacccatcccacgggaaaagaggaagcgctgacagcctggtagaagctgtgctgatctctgaggggttgggactgttcgcgagagatccccggttcgtggcccttgccaagcaggaaatcgctgatgcgtgcagactgactctggacgagatggacaacgccgcctctgatctattggcccaaggcacatcatccttatactcagatgaggagtcaatcctttctcggttcgacgaggaggatcttggggacgagatggcctgcgtacacgccctgtag

SEQ ID NO: 110444 - DNA, 5934 bp, synthetic construct
  misc_feature 1..5934: note = Description of Artificial Sequence: Synthetic coding sequence
  source 1..5934: mol_type = other DNA
atgtctgaatcagagggcgggaaagataccacacctgaacccagccccgctaacggcgctggccccggaccagagtggggcctatgccccggcccccccgcagtggaaggagaaagcagcggggcttccggattaggaacacctaaacgaaggaaccagcattccaagcacaagacagttgcggtggcctccgctcagagaagtcctcgagccctgttctgcctcactctcgcaaatccactgagacggtcatgtatttctatcgttgaatggaagccctttgacattctaattctgctgactatcttcgcaaactgtgttgcacttggcgtgtacatccccttcccagaggatgacagtaataccgcgaatcacaacctagaacaagtggagtatgtatttctcgttatattcactgttgagacggtcctcaaaatcgtagcttacggcttggtgttacatcccagtgcatacatcagaaacggctggaatctattagattttattattgtcgtggtcggactgttctccgtcttgctggagcaagggcctgggaggcccggagatgctccccacaccggtgggaaacctggtggcttcgatgtgaaagctttacgtgcgttcagggtgctgcgacctctgcgactcgttagtggcgtgcctagcctccatatcgtgctgaacagcatcatgaaggcgctggttcccctgctgcacatcgcgctgctggtcctctttgtgataattatctatgctataatcggactcgaactcttcctgggcaggatgcacaagacctgctatttcctaggcagcgatatggaggctgaagaggatcctagcccttgtgcgagtagtggcagtggacgggcatgtaccctgaaccaaacagaatgtcgggggagatggccagggcctaacggaggaataaccaacttcgacaacttcttcttcgctatgctcacagtgttccaatgcgtgaccatggaaggttggacggacgtgctgtactggatgcaggacgcgatgggatatgagcttccttgggtgtattttgtgagtctggtcattttcggctcttttttcgtgctgaacctcgtgctcggggtgttgtccggggagttctctaaagaacgcgagaaagcaaaggcccggggcgatttccagaagcagagggaaaagcagcagatggaggaagacctacggggctatctcgactggataactcaagctgaagaactagacatggaggacccctccgccgatgacaatctggggagtatggcggaggaaggaagggccgggcatcgcccccagctcgccgagctcaccaacagacgcaggggaaggttgcgatggttctcacattcgactcgtagtacacatagtacaagtagccacgcgtcactgcccgcatctgacacaggcagcatgaccgagacacagggcgacgaggacgaggaggaaggcgcgctggccagctgcacaagatgcctgaataagatcatgaagactagggtgtgccgtcgtctgagacgggctaaccgggtgctacgcgcccggtgtcgcagggccgtgaagagtaatgcttgttactgggcagtgctgctccttgtattcctcaacaccttgactatcgcatcagagcaccacggccagccggtctggctaacccagatacaggagtatgccaataaagtgctcctttgcttgttcacagtagaaatgctgctgaagttgtacgggctagggccctctgcatatgtgagctccttcttcaatcggttcgactgctttgttgtgtgcggcgggatcctggagacaacactcgtagaagtcggggctatgcagccattgggcatttccgtattacgatgtgtgaggctgctgcggatctttaaagtaacacgtcactgggctagcctgtcaaacttagtggccagcctgctgaatagtatgaaatccatagcctccctcctcttgctcttgtttttgttcatcattattttcagtttactcgggatgcaactgtttggggggaaattcaactttgatcaaacacacactaaacgaagtacatttgataccttccctcaggcactgctcaccgtgtttcagattttgactggagaggactggaatgtggtcatgtacgatggaattatggcatacggcgggccgttttttccgggtatgctggtgtgcatctatttcattatactatttatatgtgggaactacattcttcttaacgttttcttggctatagccgttgataatctcgctagcggggatgcgggcaccgctaaagataaaggaggtgaaaaaagcaatgagaaggacttgcctcaggaaaatgaaggcctcgtcccgggtgtggagaaggaagaagaagagggggctaggcgggaaggggcggacatggaggaggaggaagaggaggaggaggaggaagaggaagaggaagaggaggagggagccgggggggtcgaactgttgcaggaagtcgttccaaaagagaaggttgtacccattcctgaagggagtgcttttttctgtctgagccagaccaatccactgcggaagggctgtcataccttaattcaccaccacgtgttcaccaacctcattctggtgtttataatactgtccagcgtgtctctcgctgcagaagaccccataagggctcatagcttccgcaatcacatccttggttactttgattacgcctttacctcaatcttcacggtcgagatccttctgaagatgactgtgttcggggcctttctgcacagaggatccttttgcagaagctggttcaacatgttggacttattagtggtcagtgtctcgctaataagctttgggatccactcctcagctatttctgtagtgaaaatcctgcgcgttttgcgggtgctgagacctcttcgcgccatcaatcgcgccaagggccttaagcacgtggtgcagtgcgtattcgtcgccattaggacaatcggtaacataatgattgttacaacactgctgcagtttatgtttgcttgtatcggtgtgcagctgttcaagggaaagttctatacttgtaccgacgaagcgaagcatactccccaagaatgcaaaggcagcttcctcgtataccccgacggcgacgtcagtcggcccctggtgagggagaggctctgggtgaactccgacttcaacttcgacaatgtcctaagcgcaatgatggccctttttaccgtgtccacatttgagggctggcctgctctcctatataaggcaattgacgcgtacgccgaggatcatgggccaatatacaattaccgtgtagaaatcagtgtgtttttcattgtttacatcataattatcgcattctttatgatgaacatctttgttggatttgtgatcattacctttcgggcccaaggggagcaggaatatcagaattgtgagctggataagaaccagcggcagtgtgttgagtatgcgttgaaagctcagccattgcgccggtatattcctaagaatccccatcagtacagagtgtgggctacagtcaactcagcggctttcgaatatctgatgttcctgctgattctgttgaatacagttgccctagcgatgcaacattacgaacagacagcaccgttcaattacgccatggatatcctcaacatggttttcaccggactattcacaatagagatggtgctgaaaatcattgcctttaagcctaagcactacttcacagacgcttggaacacttttgacgcactcattgtggtgggatcgatcgtcgatattgcggtgaccgaggtgaacaacggcggccatcttggcgaaagcagtgaagatagcagtcggatttctataacattttttcgcctctttagagtgatgaggctggtgaagcttttgagcaaaggggaagggatccgtacactgctctggactttcattaagtctttccaagctttgccctacgtcgcattactgatcgctatgatcttcttcatctatgcggtgataggaatgcaaatgttcggaaaagttgcccttcaggacggaacccagatcaaccggaacaacaattttcagacatttccgcaggccgttctactgctgttccgttgtgcgaccggtgaagcatggcaagagatcatgctcgcctccctccctggaaacagatgcgaccctgagtctgactttgggcctggagaagagtttacctgtggttcaaactttgccattgcctactttattagcttttttatgctttgcgccttccttattattaatctttttgtcgccgttattatggataacttcgactacttgacacgggactggagcatcctcggacctcaccacttagatgaattcaaacgaatatggtccgagtatgatcccggcgctaagggacgcattaagcacctcgacgtggttgctctgttaaggcggatccagccacccctgggattcggaaagttgtgcccacaccgcgtagcctgtaaacgcctggttgcaatgaacatgcccctgaatagtgacgggaccgtgacctttaacgccactctgtttgcattggtccggactagtctgaaaataaaaacggaggggaaccttgagcaggccaatcaggagttgcgcatagtcattaagaagatttggaagcgcatgaaacaaaagctgttagacgaggtgattcccccgccagatgaggaggaagttacggtgggaaaattttacgctacttttctcattcaggactattttaggaaattccggcgccggaaggagaagggactcctaggtaacgatgctgccccctcaacatcaagcgctctgcaggcaggtcttcgcagcctgcaggatctggggcctgaaatgaggcaggcactcacgtgcgacacagaggaggaagaagaggagggacaggagggcgtggaggaagaagacgaaaaagatcttgaaactaataaggcaactatggtgtctcagccctctgccagacgcggcagcggtattagcgtgtccctacccgtcggagatagactgcctgactcactgagcttcggtccttctgacgatgaccgcggcacccctacaagtagccagccgagtgtccctcaagctggctccaacactcaccgcagagggagcggagccctcatcttcactattccagaggaggggaacagccaaccaaaagggactaagggacagaataagcaggatgaggatgaggaagtaccagataggctaagttacctggatgaacaggcaggcacacccccctgctctgtgctcctcccaccccatcgcgctcagaggtatatggacggacacctggtaccgagacggaggctattaccccctactccggcaggacgcaaaccatcctttaccatccagtgcctgcagcgacaggggtcatgtgaagatctgcctatccctggaacgtaccataggggccggaacagtgggccgaatcgggcccagggttcttgggccacccccccacagcgcgggcgcctgctctacgcaccgctgctgctcgtcgaggagggagccgccggagaggggtaccttggtcgaagcagcgggcccctacggacattcacttgcctccacgtgccaggcactcactcagatccttctcacgggaagaggggaagcgccgactccctagtggaggctgttctcattagtgagggcctggggctttttgcaagagaccctaggtttgtagccctggctaagcaggaaatcgccgacgcctgtcgccttaccctggacgagatggataacgctgccagtgatctgctggcccagggcactagctcactgtattcagacgaggagtccatcttaagtaggttcgacgaggaagatctcggagatgaaatggcttgtgtgcacgccctgtag

SEQ ID NO: 110445 - DNA, 5622 bp, synthetic construct
  misc_feature 1..5622: note = Description of Artificial Sequence: Synthetic coding sequence
  source 1..5622: mol_type = other DNA
atggagccctcctcccctcaggacgagggactcaggaagaagcagcctaagaagcctgtgccagaaatcctgccccggccaccacgggctcttttctgtctcacattggagaaccccctgagaaaagcctgtatcagcattgttgagtggaagccgttcgagaccattatattattgactatttttgcaaactgtgtagctctagcagtgtaccttcctatgccggaagatgacaacaatagtctgaaccttggtctggaaaagctggagtacttcttcctgattgtcttctccatagaggcagcaatgaagatcattgcatatggattcctgtttcaccaggacgcttatctcagatctggttggaatgtgttggatttcacgatagtgtttctcggcgtgttcaccgttatcctggagcaggtcaatgtgatccagtctcacactgctcctatgtctagtaaaggagccgggttagacgtgaaagccctgagggcctttagggtgcttcgtcccctccggcttgtgagtggcgtcccgagccttcaggtcgtgttgaattccatctttaaagcgatgttgcctctgtttcacattgcccttctggtactcttcatggttattatttacgcaattatcgggttggagttatttaaagggaaaatgcataaaacctgctatttcattgggacagatatcgtcgcgaccgtcgagaatgaggagccctccccgtgcgcccgcactgggtccggccgtagatgtacaataaacggaagcgagtgtcggggcggctggccgggacccaaccacggaatcacacatttcgataactttggattttccatgctgaccgtgtatcagtgtattacgatggagggctggaccgatgtgctttactgggtgaacgatgcgatcggcaatgaatggccttggatttattttgtcaccctaatacttcttggcagtttctttatcctcaacctcgtgctgggcgtcctttcaggtgaatttaccaaggaacgagaaaaggcaaaatctagggggacttttcagaagctgcgggaaaagcaacagctagacgaggacctgaggggatacatgagttggatcacacagggtgaggtgatggacgtagaggacttccgggagggaaaactgagcttagacgaggggggatcagatacggaatctctttacgagatcgcaggcctgaataagatcattcagtttattcgacattggagacagtggaatcgaatatttcggtggaaatgccatgacattgtcaaaagtaaggttttttactggctcgtgatcttgattgttgcactgaatacgcttagtatcgcctccgagcaccacaatcagcccttgtggcttacacgcctccaggatatagcaaaccgcgtgttactcagcttgtttacgacagagatgctcatgaagatgtacggtttgggactgagacagtactttatgtctattttcaataggttcgactgcttcgtggtgtgtagcggtatcctcgaaattctcctggtagagtctggagcgatgactccgcttggaatctccgtgctgcgatgcatcaggctcctgcgcatctttaagatcactaaatactggacttcactgtccaacctcgtggcctccctcttgaactccattagatctattgcctctctgcttctgctgctgtttttattcatcgtgatcttcgccctgcttggaatgcagctttttggcggccggtacgattttgaggacaccgaggttcgacgaagtaacttcgacaacttcccacaggctctcatatccgtgttccaggtcctcacaggagaagattggacatctatgatgtataacggtatcatggcctatggtggtccatcttaccctggtatgcttgtgtgtatttattttatcatcctctttgtttgcggcaattatatactcctgaatgtcttcctcgccattgctgtagacaatttggccgaggccgaaagtctgacctctgcacaaaaggcaaaggctgaggaaaaaaaacgaagaaagatgtctaaggggctcccggataaatcagaagaagaaaaatctactatggcgaaaaaactggaacagaagcccaaaggggaaggcatccccacgactgccaaacttaagattgacgagttcgaatccaatgtgaacgaagtaaaggacccttacccgtccgctgattttccaggggatgacgaagaggatgagcctgagattcccctctctcctcgaccaaggccacttgctgagctccagctcaaggaaaaggcagtgcctatccccgaagcctcgtctttttttatattcagtcccaccaacaaaattagggtgctctgtcacaggattgtaaacgccacctggttcactaacttcatactgttatttattcttctctcttccgctgctttggccgctgaagatcctatcagagccgactccatgagaaatcagattctaaagcatttcgatatcggattcaccagtgtatttactgtagagattgtcttaaagatgaccacatacggagcattcttgcacaagggcagtttctgcagaaactactttaatatgctcgacttgctggtggtggccgtttccctcatctctatgggcctggagtcctctgcgatcagcgttgtaaaaatcctgcgagtgcttcgtgtcctgcgcccattacgcgccataaacagagctaagggactcaagcacgtggttcagtgcatgttcgtggccatttcgacaatcgggaacatcgtcctcgttaccactcttttacaattcatgttcgcctgtatcggagtgcagctatttaagggaaagttctttaggtgtacggatctaagcaagatgactgaggaagaatgcagagggtactactacgtttacaaagatggggatcctatgcaaatcgaactgcgccacagagaatgggtgcactcagatttccacttcgacaatgtgctctccgccatgatgagcctgtttaccgttagcacatttgaagggtggcctcagcttctctataaagccatagatagcaatgccgaggacgttggcccaatctacaacaaccgcgtcgagatggcaatattttttataatctacatcatcttgattgcctttttcatgatgaacatttttgtcggatttgtgatcgtcactttccaagagcagggcgaaactgagtacaagaactgtgaactcgacaaaaatcagaggcagtgtgtccagtatgccctcaaagcacgtcctttgagatgttatatccctaagaacccctaccagtatcaggtctggtatattgtgaccagttcgtatttcgaatatctgatgtttgccttaataatgctgaacacaatttgtctgggaatgcagcattacaaccagtccgagcagatgaatcatatcagcgacatactgaatgtggcctttacaattattttcacactcgaaatgatcttgaagttgatggctttcaaagcgcggggctattttggtgatccgtggaatgttttcgactttctgattgtcatcggaagcataatcgatgtaatcctgtcagagattgatacgtttctcgcaagctcaggcggtttatactgtctcggcggaggttgcgggaacgtggatcctgacgaaagcgcccgcattagcagtgcgttcttcagactcttccgagtgatgcgactgattaaactgctgtcccgcgccgaaggtgtcagaacactgctctggactttcatcaagagcttccaggcattaccatacgttgccctgctgatagtcatgctgttctttatatatgctgtcattggaatgcagatgttcggcaaaatcgccttagtggacggcactcagatcaatagaaataacaacttccaaacctttccgcaggcagttctcttactgtttagatgtgctacaggggaggcctggcaggaaattctgctggcatgtagctatgggaaactatgtgaccccgaatccgactatgctcccggggaggaatacacgtgtggcaccaacttcgcctactattacttcatttccttttacatgttatgtgcgtttttggtaatcaatttgttcgtggccgtgatcatggataactttgattacctgaccagggattggagtatcttgggccctcaccacttagacgaatttaaggccatatgggcagagtacgatcctgaggccaagggcaggataaagcacttagatgtggtaacactactccgacggattcagcctccactaggcttcggaaagttttgtccgcaccgcgtcgcatgcaaaaggctcgtgggaatgaatatgcccttaaattcagatggcaccgtaacgttcaatgcaactctgttcgctcttgttcggaccgcactcaaaatcaaaaccgaggggaattttgaacaagccaacgaggagctgagagctatcattaagaagatctggaagcgaacgtctatgaagctcctggaccaggttatccctccaataggggacgacgaggttacagtcggcaaattttatgccacgttcctgattcaggagcactttaggaaattcatgaaaagacaggaagaatactacggatacaggcccaaaaaagatatcgtgcagatccaagctggcctgaggactattgaggaagaagccgctccggagatttgtcgaactgtcagcggagacttggcagccgaagaagaattggaacgggccatggttgaggccgcaatggaggaaggaatctttcgtcgtacaggggggctgtttggacaggtggataacttcctcgaacggacgaactcactgccacctgtgatggcaaatcagcgcccgcttcagtttgctgaaatcgagatggaggaaatggagtcccccgttttcttggaagatttcccgcaagatccccgcacaaacccacttgcgcgtgcaaacacaaataacgcaaatgctaatgttgcttacggtaatagcaatcactccaactcccacgtattcagctccgtgcattacgagcgggaattccctgaggagaccgaaacacccgccaccaggggtcgggccttgggtcagccatgtagggttctgggtccacacagtaaaccctgcgtggagatgctcaagggtttgctcacacaaagggcaatgcccagaggccaggcccctccagcaccgtgtcaatgtccccgggtggaatctagcatgcccgaagatcgcaaaagcagcacccctggttctctgcatgaggagactccacactccagatctacgagagaaaacacgtctcggtgtagcgcccccgccaccgctctcctgatccagaaagcgctagtccggggagggctcggcactctggctgctgacgctaatttcattatggctaccggacaggccctggctgacgcctgccagatggaaccagaagaagtcgagataatggctaccgagcttcttaagggcagagaggccccggagggaatggcaagcagcttgggatgcctgaatctggggtcttctttgggttccctggatcagcaccagggttctcaggagaccctcatcccccctagactgtag

SEQ ID NO: 110446 - DNA, 5565 bp, synthetic construct
  misc_feature 1..5565: note = Description of Artificial Sequence: Synthetic coding sequence
  source 1..5565: mol_type = other DNA
atggagccatctagcccccaggacgagggcctccgaaagaagcaacccaaaaaaccagtgccagaaattttacctcggcctcctagagcactgttctgtctgaccctcgaaaaccccctgagaaaggcctgcatctctatcgtcgagtggaagcccttcgaaactatcatactactgactatttttgcaaattgcgtcgcgctagcagtgtatctccccatgcctgaagatgataacaattcactgaaccttgggcttgagaagcttgaatacttcttcctgatcgtcttctctatcgaggccgccatgaagattatcgcatacggctttcttttccaccaagacgcatacctgcgctccggctggaatgtcctcgactttaccatagtgtttctcggcgtgttcaccgtcatcctggaacaggtgaatgtgattcagtctcataccgctcccatgtcgtctaaaggggccggtttggacgtgaaagcgctgcgcgctttccgggtccttcgcccattaaggttggtgtcgggcgtgccttccttgcaggttgtacttaattctatctttaaagccatgctacccctgttccacatcgcgcttttggtgctgtttatggtgattatttacgctatcattggactcgagctgttcaaaggcaaaatgcataaaacttgttattttatcggtacagatatcgtcgcaacagtcgagaatgaagagccatctccatgcgcccgtaccggttctggccgacgatgtaccatcaatgggtctgagtgcagagggggatggccggggccaaatcacggtatcacacacttcgataatttcgggttttctatgcttaccgtatatcagtgtattacaatggaaggttggactgatgtattgtactgggtgaacgatgcaatcggcaatgaatggccttggatttacttcgtgaccctgatcctgctgggatccttctttattttgaatcttgtgctgggagtgctttcaggcgaattcaccaaagaacgtgagaaagcaaagtcccgaggcacattccaaaagttgagggagaagcagcaactcgacgaggatttaaggggctacatgtcctggatcacccaaggcgaggtaatggacgtcgaagacttccgagagggaaagttgagcctggatgagggcggttccgataccgaatccctgtatgagatcgccggtcttaataaaatcatccagttcatacggcactggaggcagtggaatagaattttcaggtggaagtgccacgatattgtgaagagtaaagtgttttattggttggttatccttatcgtcgctctgaatacactcagtattgcttctgagcaccacaatcagccattatggctgactagactgcaagatatcgcaaatcgggttctgctgtctctgttcactaccgagatgctgatgaaaatgtacggcctgggtctgcggcagtacttcatgtccatcttcaatcgtttcgactgctttgtcgtgtgcagtgggatcctggaaatcctgctagtcgagtcgggggccatgacccctttggggatcagtgtcttacgttgtataaggctgctcagaatcttcaagataacaaaatattggacctctctatcgaatctcgtggcctccctccttaacagtattcggtccatcgcttcactcttacttctgctgtttctcttcatcgtcatatttgcactgctgggaatgcagctgttcggaggcaggtatgacttcgaggatacggaggtccggaggagcaactttgataatttccctcaggccctgatctctgtcttccaggtgttaacaggtgaggactggacatcgatgatgtacaacgggataatggcatacggcggaccctcctatcccggcatgcttgtttgtatctatttcatcattctgtttgtatgcggaaattacattttgttaaacgtctttttggctatcgcagtggataatttggctgaggcggagagtttgacatcagcgcagaaagccaaggccgaggaaaaaaagcggcgtaagatgagcaagggcttgcctgacaaatctgaagaagagaagagtaccatggccaagaagcttgaacaaaagcccaaaggagagggaatcccaactacagcaaaactgaaaatcgacgagtttgagtctaacgtgaatgaagttaaggacccttatccttccgccgatttccccggtgacgacgaggaggatgaacccgagatcccactttctccccgacctcgaccattggcagagctccagttgaaggaaaaggccgtgcctatccctgaggctagtagctttttcatcttttcaccaacaaataagatccgggtcttatgccatagaattgtcaatgctacttggttcacaaactttatcttactctttatactgctgtcctccgccgccttagccgccgaagatcccattagagcagactctatgcgcaatcaaatcctgaagcatttcgacattggcttcaccagcgtcttcactgttgagattgtgctgaagatgactacctacggggcttttctacataagggttctttctgtcgaaactattttaatatgctggacctccttgtagtggcagtgagcttgatcagcatgggattggagtctagtgctatctcagtggttaagattttacgcgttcttagggtactgcggcctctccgggcaattaaccgcgccaagggactgaaacatgtggttcaatgcatgtttgttgcgattagtacaatcgggaacattgtactggttacaacacttctccagtttatgtttgcatgcataggtgtccaactgtttaagggcaaattcttcagatgtactgacttgagcaagatgactgaagaggaatgtcgtggctattattacgtgtataaggatggagacccaatgcagatcgagctgagacaccgtgagtgggtacactcagactttcacttcgacaatgtgctgtcggccatgatgtccctgtttacagtttccactttcgaagggtggccccagcttttatataaagccattgactccaacgctgaggacgtgggacctatttataataatagagttgaaatggccatcttctttatcatttacattattcttatcgctttttttatgatgaacattttcgttggattcgtgatcgtcacgttccaggaacagggcgaaacagagtacaaaaactgcgaattggacaagaaccaaagacagtgcgtgcaatacgccttgaaagctcgtcccttgcgctgttacatacccaaaaatccctaccagtatcaagtatggtatatagtaaccagcagttatttcgagtatctgatgttcgcgctgatcatgctcaatactatctgtctgggtatgcagcactataatcagagcgaacagatgaaccatattagtgatatattaaatgtggcgttcactatcatattcacattggaaatgattctgaagctgatggcctttaaggctagaggctacttcggagacccctggaacgtgttcgatttcctaatcgtcatcggcagcattatcgacgtgatcctctcagaaattgacgaccctgatgagtccgccaggatttcttctgcatttttcaggctatttcgggtgatgagattgattaagttgctgtcacgggctgaaggggtgaggaccttgctctggacttttatcaaaagctttcaggctttaccgtacgtcgctcttttgattgtcatgctatttttcatatacgccgttattggtatgcaaatgttcgggaagattgctctagtggacggcacgcagattaataggaataacaacttccaaacatttccacaagctgtcctacttttgtttcggtgtgcgaccggcgaagcttggcaggagatactgctggcctgcagctacggaaaactctgcgatcctgagtctgattatgcccccggggaagaatacacgtgtggcactaatttcgcctactactatttcatttcattctatatgctctgtgcctttttagtcataaacttgtttgtcgctgtgataatggataatttcgactacctgacaagggactggtccattctggggccccaccaccttgacgaatttaaagccatatgggctgaatatgacccagaagccaagggtcgcataaagcatctggatgtcgtcaccctgctgcggcgcattcagccccctcttggattcggcaagttttgccctcaccgagtggcttgtaaaaggcttgtcggcatgaacatgcccctcaattccgacgggactgtgacctttaatgctacattgttcgctctggttagaacggcacttaagatcaagacagaaggcaatttcgaacaggctaacgaggaactcagggccatcattaagaagatctggaagcgcacctccatgaagctcctcgatcaagtgattccacctatcggagacgatgaggtgacagtcggcaaattctacgccacattcctgattcaggagcacttccgaaagtttatgaagcgccaagaggaatactatgggtacagacccaagaaagacatcgtgcaaatccaggccggtcttcgcaccatagaagaggaagcggctccggagatatgcaggaccgtctcaggcgatctcgcagctgaagaagagctagaaagggctatggtggaggccgccatggaagaagggatctttcgcagaacaggcgggcttttcggacaggttgataattttctcgaacgcaccaattctctccccccagtgatggccaatcagaggccacttcagttcgccgagatagagatggaggagatggagtcacccgtcttccttgaagattttccccaggacccgagaactaatccactagcccgggctaatacaaataatgctaatgctaatgtggcctacggaaacagcaaccactcaaatagccacgttttttcatccgtccactacgagcgcgaattcccagaagagacagagacacccgcaactcggggcagggctctgggacagccttgtagagtgttggggccgcactccaagccctgcgtggaaatgttgaaagggcttctcacccaacgagcaatgccccgaggacaggcccccccagccccttgtcagtgccctcgggtcgaatcctctatgccagaggaccgcaaatctagtactcctgggtccctgcacgaggagactccacactcacggtccacgagagaaaatacctcccgctgctctgccccagcaaccgcactcctcatccagaaggctcttgtcagaggtggtctaggcacacttgcagccgacgctaatttcattatggctaccggccaggctctcgccgacgcttgccagatggagcctgaagaagtcgagattatggccacagaactcttaaagggcagggaagcccccgaaggaatggcctcctccctggggtgcctgaaccttgggtctagcctggggtcactggaccagcaccaggggtctcaagagacgctcatccctcctcgactgtag

SEQ ID NO: 110447 - DNA, 4602 bp, synthetic construct
  misc_feature 1..4602: note = Description of Artificial Sequence: Synthetic coding sequence
  source 1..4602: mol_type = other DNA
atgaaaacacacctggataggccacttgtggtggagttagggcgagatggggcccgaggtcccgtagggggcaaggcccggcctgaggccgcggaggccccggaaggagttgatccacccagacgacatcaccgtcacagggataaagataagacccccgcggctggggaccaggatcgcgccgaagctcccaaagctgaatccggcgagcccggagcaagggaagagaggccacggcctcacaggtcccatagtaaagaggccgctggacccccagaggcacgctccgaaagaggtcgcggacctggacccgaaggtgggagaaggcatcatcgccgaggatcccctgaggaggctgccgaacgcgaaccccgccgtcatagagcacacaggcaccaggatccctcaaaggagtgcgcgggggcaaagggagaaaggcgggcgcggcaccgcggggggccacgggctggaccaagagaagcggagtccggggaagaaccagctcggaggcaccgggcccgacacaaggctcagcctgcacatgaggctgtcgagaaggagaccactgaaaaggaggcaactgaaaaagaggctgaaatagtcgaggccgacaaggagaaggagttgcgtaatcaccagccacgtgaaccgcattgtgatcttgaaacttctggaaccgtgacagttgggcctatgcacacactgccatctacatgcctccagaaggtcgaagaacaaccagaagatgccgataaccagcgcaatgttacccggatgggctcccagcccccagatccgaacacaatcgtccacatacccgtcatgttaactgggcctctcggggaggccacggtggtcccaagcgggaacgtcgacctcgagtcccaagcagaaggtaaaaaagaggtggaggccgacgatgtcatgaggtctggaccccgccccatcgtcccgtactcctctatgttctgtctgagcccaacaaatctgctgagacgcttttgtcactatatcgtgaccatgcgatacttcgaggttgtgatacttgtggtcatcgccctgtccagcattgccctcgctgcagaagacccagttcgcacagactctccaagaaataacgctttgaaatacctggattatatattcactggcgttttcacttttgagatggtcataaagatgattgacctgggactcttactgcaccccggtgcttatttccgcgatctgtggaacatcttggacttcatcgtggtgtccggcgcactcgtcgcttttgcgttctcctcattcgtaggaggttccaaaggtaaggatatcaacacgataaaatctcttagggtgctccgcgtgcttcgccctctgaagactattaaacgcctgccaaaattgaaggcagtctttgactgcgtggtgaacagcctgaagaatgtgctcaacattctgattgtctacatgctattcatgttcatctttgctgtaattgccgttcagttgtttaaaggcaagtttttctactgcactgatgagtccaaggagcttgaacgtgattgccgcgggcagtatcttgactacgaaaaggaggaggttgaagcgcagcctcggcagtggaagaagtatgacttccactacgacaatgttctatgggcccttttaacactgtttacggtgtctaccggtgagggctggcctatggttctgaagcactccgtggatgctacatatgaggagcagggcccctcacctggataccgcatggagttaagtattttctacgtggtttacttcgttgtatttccgtttttctttgtaaacatcttcgtggctctcataattattacattccaggagcagggtgataaagtgatgagcgaatgttccctcgaaaaaaatgagagggcctgtatcgactttgccatctctgccaaacccctcacaagatatatgccccagaaccggcagagtttccagtacaagacatggacatttgtcgtatctccccccttcgagtatttcatcatggcaatgatagcattgaataccgtcgtccttatgatgaaattctacgatgccccctatgaatacgagctcatgctgaaatgtctgaacatagtgttcacctctatgttttcaatggagtgcgtcctcaaaatcatagcattcggggtgctgaattattttcgggacgcctggaacgtctttgatttcgtgacagtcttaggcagtatcaccgatattctggttacagaaatcgccaataattttataaacctgtcctttctccgcctgtttagagcagcccggctgattaaactgctaaggcaaggatacactatcagaattctgctatggacctttgtccagtctttcaaagctctaccctatgtgtgtcttttaatcgcaatgctgttttttatttacgcaataatcggtatgcaggtcttcgggaatatagccctcgatgatgacaccagcatcaatcgacataataacttcaggactttcctgcaggcactgatgcttctgtttcgaagtgcaacaggtgaggcctggcatgaaattatgctgagctgcctcagtaatcaggcctgcgacgagcaagcaaatgccacagaatgcggctcggatttcgcctatttctatttcgtctcctttattttcctctgtagtttcttaatgttgaatctttttgttgcagtcataatggataacttcgaatatctgacccgggacagttctatcctggggccccaccatctagacgaattcatccgcgtctgggctgagtatgaccctgcagcttgcggacggatttcctataatgacatgttcgaaatgttaaaacacatgagcccccctttggggttgggcaaaaaatgtcctgcccgggtggcttacaaaagactggtgaggatgaacatgcctatatccaacgaagacatgacagtacactttacaagcacattgatggcactcatcaggaccgcgctggagattaagctggctcctgctgggacaaaacagcaccagtgtgacgcggaactgcgcaaggagatctctgtcgtgtgggccaatctgcctcagaagacgctagaccttctcgtcccccctcataaaccggatgagatgacagtgggcaaggtctatgccgccctgatgatctttgatttctataagcagaataagactacaagggaccagatgcagcaggcccccggaggcctgtcccagatgggccctgtgtccctgtttcatccgcttaaggctaccttggaacagacccagcctgcagtacttagaggagctagggtgttcctgcgtcagaagagttccacctcactgagtaatggcggggctatacagaaccaagagagcggcatcaaggaaagcgtgtcatgggggacacagagaacgcaagacgccccccatgaggccaggccccctttagaacgaggacactcaactgagattccagttgggaggagcggtgcgctggccgtggacgtgcagatgcagtccatcacaaggcgaggcccggacggcgagccacagcctggtctggagtcccaaggaagggcagcctccatgccccggctggcggcagagacgcagccagtaaccgacgcttctccgatgaagcggtccatctctactctggcccagaggcctcgaggcactcatctctgtagcacaactcctgatagaccaccaccaagtcaagcaagcagccatcatcaccaccatcgttgccatcgtcgacgtgatcggaaacagcggtctttggaaaagggtccctctctgtccgctgacatggacggcgcaccatcttcagcagtagggcccggattgcctccgggggagggtcctactggatgccgcagagaacgtgagagacggcaggagcgcggtaggtctcaggaaaggcgccagccatcatcaagctcctcagagaagcagcgattctactcatgcgaccggttcggaggccgtgagcctcccaagcccaagccatctcttagctcgcacccaacctctcctacggcgggccaggagccagggcctcacccacagggaagtgggtctgtaaatggctctcccctgctatccacgagcggggcatccaccccgggcagaggcggacgacggcaactcccccaaaccccactcacacccaggccctctattacttacaagactgctaattcatcacccattcatttcgcgggagcacagacatcccttcctgccttcagtcctggtcggctttcacgtgggctctcagagcacaatgccctgctccaaagagatcccctcagtcaacctctggccccagggtcaaggatcggcagcgatccttacctgggtcagagactcgactcagaggctagtgtgcacgctttgccagaggacacattgacctttgaagaggctgtagccaccaactctggacggtcctctcggacttcatatgtgagttcgctgacaagccagtctcaccccctgaggagggtgccaaacggctatcactgcactctggggttaagttccgggggcagagctaggcacagttatcatcatccagaccaggatcactggtgttag

SEQ ID NO: 110448 - DNA, 306 bp, synthetic construct
  misc_feature 1..306: note = Description of Artificial Sequence: Synthetic coding sequence
  source 1..306: mol_type = other DNA
gataacctggccaacgcgcaggagctgacaaaagacgaggaagaaatggaggaagctgcaaaccagaaactcgctctccagaaggccaaagaagtggccgaggtgtccccaatgagcgctgctaacatttctatcgcggcttttgtgaaacaggcccgaggtacagtgtctaggagcagctcagttagcagtgtgaactccccacggcagcagaactcagccaaagcccgatccgtttgggagcagcgggcttcccagttaagattacagaatcttagggcatcatgcgaagctctctattcttag

SEQ ID NO: 110449 - DNA, 6714 bp, synthetic construct
  misc_feature 1..6714: note = Description of Artificial Sequence: Synthetic coding sequence
  source 1..6714: mol_type = other DNA
atggttcggttcggagacgagctcggcggacgctacgggggccccgggggtggagagcgcgcccgtggcggcggcgccgggggggccggaggccctgggcctggcggtctgcagcccgggcagagggtattgtataaacagtccattgctcagagggccagaaccatggccttgtataaccctatccctgtcaagcagaattgttttacagtgaaccgaagtctctttgtgttttccgaggataacgtagtcaggaagtacgccaagaggataactgagtggcctccatttgaatacatgatcctcgccactatcatagctaactgcattgtgctagcactggagcagcacttgccagatggggataagacacctatgagcgaacgattggacgacaccgagccctacttcattggcatcttctgctttgaggccgggatcaagatcatcgcgctgggcttcgtgtttcataaaggaagctacttgaggaatggctggaatgtgatggactttgtggtggtacttacaggaatcctagcaacagccgggaccgacttcgatctgagaaccctcagagccgttagagttctccggcctctgaaactggtatccggcatccctagcctgcaggttgtgctgaaaagcatcatgaaggctatggtgccactcctccaaataggacttctcctgttcttcgcaatcttgatgttcgccataattgggctggaattctatatgggtaagttccataaagcttgttttccgaattcaactgatgctgaacccgttggcgattttccttgcgggaaagaagcacccgccagactgtgtgagggtgatactgagtgccgtgaatactggcctggaccaaattttggaataaccaactttgataacatactgtttgccatcctcacagtgttccagtgtataacaatggagggctggacagatattctctataatacaaatgacgctgcggggaacacttggaattggctctattttattccactgattatcataggtagcttctttatgctgaatcttgtactcggagttctgagtggagagttcgctaaggaacgcgagagagtagaaaaccgtcgggctttcctcaaattgcgacgccaacagcagatcgagcgggaactgaatggctatcttgagtggatatttaaggcggaggaagtaatgctcgcagaagaagatcgtaacgccgaggaaaagtctccactggacgtactgaaaagagcggctacaaagaaatctaggaacgacctgatacacgcggaagaaggagaggaccgtttcgccgacttgtgcgctgtgggctctccattcgccagagcaagcctcaaaagcggcaagacagaaagttcatcctactttagacgtaaggagaaaatgttcagattctttattcgtcggatggtcaaggctcagtctttttattgggtagtactatgtgttgtggcactgaatactctatgtgtcgccatggtgcactacaaccagcctcgccgtctgacgaccaccctctattttgcagagttcgtatttctcggcttattcctcacagaaatgagcctcaagatgtatggcctcgggcctagaagctactttcgcagtagcttcaattgcttcgacttcggcgtgattgtaggaagcgtttttgaggtcgtgtgggctgctatcaagccagggtcttcgtttggaatttcagtactgcgggccctgagattgcttcgcatcttcaaggtcactaaatattggtccagcctgagaaatctagtagtatcactgctgaatagcatgaaatccataatcagccttttatttctgttgttcctattcattgtggtattcgccttgctcggcatgcagttattcggcggccagtttaactttcaggatgaaacccccacgactaatttcgatactttcccagcagccatcttgactgtcttccagatcctgacaggcgaagattggaatgctgtcatgtatcacggtatcgagtcgcaggggggggtgagcaaaggcatgttttccagtttttacttcatcgtcctgacactgtttgggaactataccctgctgaacgtttttcttgctatagccgtcgataacttagccaatgcacaggagctgaccaaggatgaagaggagatggaagaggccgccaatcagaaactcgcactgcaaaaggctaaagaggtggctgaagtttcccccatgagcgccgccaacattagtattgctgctagacagcaaaattcagctaaagcgaggagtgtctgggagcaacgcgcctcacagttacgtctccagaacctgagagccagctgcgaggccctttattctgaaatggaccccgaagagcgcctgcgcttcgcaacaacacgacacctgcgcccggatatgaaaactcatctcgacaggccactggtcgttgaactgggtagggacggcgccagaggacctgtgggaggaaaggcacgtcccgaggccgccgaagctcccgaaggcgtggatccaccccgaagacaccataggcacagggacaaggataagacaccagccgcgggcgatcaggacagagcagaagctcctaaggctgagtcgggggagccaggcgcccgagaagagcgacctcgcccacataggtctcacagcaaggaagcagcaggccctccggaggcccgttccgagcgcggccggggacctggacctgaaggggggagaaggcaccaccggagggggagtccggaggaggccgcggaaagggagcctcgccgtcaccgcgcgcaccggcaccaggacccctccaaggagtgtgccggtgccaagggtgagaggcgcgccagacacagaggtggtccgcgtgcagggcctagggaagccgagtcaggcgaggagcccgcccgacgccaccgggcgagacacaaagcacagcccgctcatgaggccgtcgagaaagagacaaccgagaaggaagcaacagagaaggaggcggagattgtcgaggcagataaggagaaggaactgagaaatcatcaacccagggaaccccattgtgatctggaaacaagcggaactgtcactgtaggacctatgcatacgctaccttctacttgtcttcaaaaggtcgaggaacaacccgaagacgctgataatcagaggaacgttactcgaatgggttcgcagcctcccgatcctaataccatcgtacatatccccgtcatgctcactgggcctctgggggaggctacggtcgtgccttctgggaacgtggacctggagagtcaagccgagggtaagaaggaagtcgaggctgacgacgtaatgcgtagtggtccgaggcccatcgtgccctactcctctatgttttgcctctcacccaccaacctcctgcgtcgattctgccattatattgtgacgatgcgctacttcgaagtcgtgatccttgtggtgatcgctctgagttccatagccttagccgccgaggaccccgttcgaaccgacagtcccaggaataatgccctaaaataccttgattacattttcactggcgtgtttaccttcgagatggtcatcaaaatgatagacttaggactgctgttgcatccgggtgcatattttcgcgacctgtggaatattctagactttattgtggtcagtggcgctcttgttgccttcgcgtttagcggatctaagggaaaggatattaatactatcaaatcccttcgggtactgcgcgtacttaggccgctgaagaccataaagaggctgcccaagctcaaggctgtatttgactgcgttgtaaatagcctcaagaatgtactgaacatcttgatcgtatacatgcttttcatgtttattttcgctgtgattgcagtacagttgttcaagggcaagtttttttattgcaccgatgagagtaaagagctagagcgcgactgccgggggcagtatctggattacgagaaggaagaggtcgaagcccagcctaggcagtggaagaagtacgatttccattacgataacgtgctttgggctctgctaactttatttaccgtatccaccggcgaaggctggccaatggtcctgaagcactcagtagacgccacatatgaggagcagggaccaagtccaggttatagaatggagctgagcatcttctatgtggtatactttgtagtgtttcctttttttttcgtgaacatcttcgtggccctcatcattatcacttttcaggagcagggtgacaaagtgatgtctgagtgctcccttgaaaagaatgagagggcctgcatcgacttcgcaatctctgccaagcctctcacacgctacatgccccagaatcggcagagcttccagtataagacgtggacattcgttgttagtcccccctttgaatacttcatcatggcgatgattgcactgaacacagttgtcctcatgatgaaattctacgacgctccatacgaatacgagctcatgttaaagtgcctgaacatcgtgtttacatctatgttctccatggagtgtgtcctcaagataattgctttcggggtactgaactatttcagggatgcttggaacgtgtttgactttgtgacagtgctgggatccatcaccgatattcttgtcacagagatcgcagaaacaaacaatttcatcaatttgagcttcttgcggctttttcgcgcggcccgcctcatcaagcttcttaggcagggatacacgatcagaatacttctgtggactttcgtccagtctttcaaggccctcccgtacgtttgccttcttatagctatgctgtttttcatttatgccattatcggaatgcaggtgtttggaaatatcgcactcgatgatgacacatcaatcaacaggcataataattttcggacctttttgcaagctctgatgcttctctttagatcggcaactggcgaggcctggcacgaaatcatgcttagctgtctgtccaaccaagcttgtgacgagcaggcgaacgctactgagtgtgggagcgacttcgcttatttctatttcgtgtcgttcatctttctgtgttcattcctcatgttgaatttatttgtagcagtgattatggataactttgagtaccttacacgcgattcatctattttggggccacaccatctggatgaattcatccgcgtctgggcagagtacgacccggcggcatgcggccgtatctcttataatgacatgttcgaaatgctgaagcatatgtcgcctcccctgggactgggtaagaaatgccctgctagggtggcatacaagagactggtgcggatgaacatgccgatctcgaacgaggacatgaccgttcatttcacctcgaccctgatggctttaattcgcacagcacttgagattaagctcgctcctgcggggaccaagcagcaccagtgcgacgcagagctgcgcaaggagatctctgtggtatgggccaatctgccacaaaaaacccttgacctgcttgtgcctccccacaaacctgacgagatgaccgtcggtaaagtgtacgcagccctcatgatcttcgatttctataagcagaataagaccaccagagatcaaatgcaacaggctcccggaggtttatcccagatgggtccagtgtctctgttccacccactgaaagccacgctcgagcagacacagccagccgtactgagaggagctagggtttttctccgacaaaaatcttccacatccctgtctaatgggggagcgattcaaaaccaggagagcggaatcaaagagtcagtgagttgggggacgcagcggactcaggatgctccacacgaggctcgtccgccccttgagcgaggccatagtactgagatccccgtcggacgttcgggagctttagccgtcgatgtacaaatgcagtccatcacgagacggggtcctgacggagaaccacaacccgggctcgagtcacaagggcgcgccgcctccatgccacggcttgccgcagagacacagccggttactgatgcgagcccaatgaaacggagtatttctaccctcgcacagagaccccggggaactcacctgtgcagcaccactccagacagacccccacccagtcaggcaagctcacaccaccaccatcataggtgccacaggcgacgggacagaaaacaaagatcgctggagaaaggccccagtctgagtgcagatatggacggggctccttcatccgctgtgggtccgggtctgccccccggagagggcccgactgggtgccgccgcgagcgagagcgtcggcaagaacgcgggagaagccaggagaggagacagccttcctctagttcgtccgaaaaacaaagattttattcttgcgataggtttggcggacgagaaccaccaaagccaaagccctcgctgtcgagccacccaaccagcccaaccgccggacaggaaccaggtccacaccctcaagccgggagcgccgtcgggttcccgaataccaccccttgctgtcgggagacgccatctgcaagtccctggcccctggctcttgaactcgcactcaccttgacttggggaagtgtctggactgtgcggcccctgtccacgccttgtttgcggaccctaagtttgagccgccgactttggccacctacaagagccgcccctcccggtttaccaacctgccctccatag

SEQ ID NO: 110450 - DNA, 7023 bp, synthetic construct
  misc_feature 1..7023: note = Description of Artificial Sequence: Synthetic coding sequence
  source 1..7023: mol_type = other DNA
atggtccgattcggtgacgagttgggtgggcgctatggaggacccggaggcggcgagcgggcccgcggtggcggcgctggcggggcagggggtccagggccaggcggattacaaccgggccagcgggtgctgtacaagcaatccattgcacagcgagccagaactatggccctctataatccaattccagtgaagcagaattgctttactgtcaatagatccttattcgtgtttagcgaagacaacgttgtgcgcaaatacgccaaaaggatcacggagtggccacccttcgagtacatgatccttgcgaccataattgccaattgcattgtccttgctcttgaacagcacctccctgacggagacaagactcccatgtccgagaggctcgacgacaccgaaccatattttataggaatcttctgtttcgaagccgggattaaaattattgcgttggggtttgtttttcacaaagggtcttacttacgaaacggatggaacgtgatggatttcgtggtcgtcctcacaggcatcctagccacagctgggaccgatttcgacctgcgaactctccgcgctgtaagggtgttgcgccccctcaagctggtgagcggcataccaagtttgcaggtcgtgttgaaaagcatcatgaaggctatggtcccacttctgcagatcgggctgcttcttttttttgcgattttgatgttcgccatcataggccttgagttttacatgggtaaatttcacaaggcatgtttccctaacagcacggacgcagaacctgtcggagatttcccatgcggcaaggaggcaccagcacgcctctgtgaaggggataccgagtgtcgagaatattggccaggccccaacttcggcatcacgaattttgataacattctgtttgctatcctgacagtattccagtgcattaccatggaggggtggactgacatcctgtataacaccaacgatgctgctggaaatacctggaactggctttatttcatcccattaataattatcggtagctttttcatgctcaatctggtcttaggggtccttagcggtgaattcgctaaggagagggaaagagtagagaatcgcagggcctttcttaagctaagacggcagcagcagatcgaaagggagctgaatgggtatttggagtggatcttcaaggccgaagaggtcatgctggccgaggaggacaggaacgcagaggagaaatcaccgcttgacgctgtgcttaagagagccgccacaaagaaatcgcgaaacgatctcatccacgctgaggaaggagaggaccgtttcgcggacctgtgcgcagtgggaagtcctttcgctcgcgccagcctgaaatccgggaagaccgaaagttcatcctactttagaaggaaagaaaaaatgttcaggtttttcatccgtcggatggtcaaagcccaatcattctactgggtggtgctatgtgtggtggcgctcaatactctctgcgtcgctatggtgcactataatcagccgcggcgacttaccacgaccctgtattttgctgagttcgtgttcttgggattgttcctgacagaaatgagtctgaagatgtatggcttaggaccaaggtcgtattttaggagcagcttcaactgctttgacttcggtgtgatcgtgggcagcgttttcgaagtagtttgggctgccatcaagcccggttcttcatttggcatttccgtgctccgggcacttagattgcttcggatctttaaggttaccaaatactggtcttcactcagaaatctggtcgtaagcttactcaacagcatgaagtccatcatatctctcttgttcctgctttttctgttcattgttgttttcgcattgttgggaatgcagctgtttggcggacagttcaatttccaagatgagacccctaccaccaactttgacacattccctgcagctattttgaccgtgttccagattctgacaggcgaagattggaacgccgttatgtaccacggaatcgagagccagggcggagtttccaagggaatgtttagctctttttatttcatcgtcctcactctgttcggcaattataccctgctgaacgtttttctggcgattgccgtggacaacctagcaaatgctcaggagcttacaaaggacgaggaggaaatggaggaggcggccaaccagaagctggcactgcaaaaggccaaggaagtggccgaggtatctcctatgagcgcagccaacatcagcatagctgctagacagcagaactcagccaaagcccgtagcgtgtgggagcagagggcaagtcaactgagactgcagaatttgcgtgcctcatgcgaagcattgtacagcgagatggatccagaggaaagattgcgtttcgccaccactaggcatctgaggcctgacatgaaaacacacctggaccggccattggtcgtcgagcttggccgcgacggagctagggggcctgtgggaggcaaggcaagaccggaggccgctgaggcaccagagggagtggacccacctcgaagacatcacaggcacagagataaagataagacgcctgctgccggagaccaggaccgggccgaggccccaaaggccgaaagtggcgaacctggggccagggaggagcggccccgccctcatcggtcacatagcaaagaggctgctggaccccccgaagccagaagcgagcgcggtcggggaccaggtcctgagggaggacggcgacaccataggcgcggtagtcccgaagaagccgccgagcgcgaaccgcggcgtcatcgcgctcacagacatcaagatcctagcaaggagtgcgctggagcaaaaggggagaggcgggcacggcaccggggtggacccagagcaggcccaagagaagcagagtcaggcgaagaacctgcccggaggcacagagcgcggcacaaggctcaacctgcccacgaagcggtggagaaggaaaccaccgaaaaggaggctaccgaaaaggaggccgaaattgtggaagctgacaaagaaaaggaactacggaaccaccagcccagggagccacattgtgatcttgaaaccagcggcactgttactgttggccccatgcacacattgccatctacatgcctgcagaaggtcgaggaacagcctgaggatgccgacaaccagaggaatgtgaccagaatgggctcccaacccccggaccccaacacaattgtgcatattcccgtgatgcttaccggacccctgggcgaagctactgtggtgccctctgggaatgtggatctagagagccaggctgagggtaagaaggaagtagaggccgatgacgtcatgcgctccgggccaagaccaattgttccctacagcagtatgttctgtctgtccccgacaaacctcctcagacgcttctgccattacattgtgactatgagatacttcgaggtggttattctggtggttattgctctttcttccattgctttggccgccgaggatcccgtgcggactgactcccctcgtaataatgctctcaagtatctagattacatattcacaggcgtcttcacattcgagatggttatcaaaatgatcgacctggggctgttgttgcaccccggcgcatatttccgggacctttggaacattctggattttatcgtggtatcaggggctctggtagcattcgcattctccgggtctaaggggaaagacatcaacaccattaagagcttgcgggtgttgcgcgtcttgagaccattaaagaccattaagaggctccctaaactcaaggcagtttttgactgcgtagtgaattccctcaagaacgttctgaacattttaattgtgtatatgctgtttatgttcatcttcgctgtcatagctgttcagctcttcaaaggcaagtttttttactgcactgatgagagtaaagaactggagcgggattgtcgtggacaatacctagattatgagaaagaagaggtcgaggcccagccaagacagtggaagaagtatgacttccactacgacaacgtgctgtgggcgcttcttaccctcttcactgtctctacaggggaggggtggcccatggtgctgaaacattccgtagacgccacctatgaggaacagggaccctccccaggttacagaatggaactttccattttctatgtggtgtactttgttgtattccccttcttcttcgtcaacatcttcgtggccctaataattattacttttcaagaacagggcgacaaggtaatgagtgaatgcagtctggagaagaacgaacgcgcctgtatcgatttcgccatcagtgcgaagcctctcacccgctatatgccccagaacagacagtctttccagtataagacatggacgttcgttgtcagccctccctttgagtatttcattatggcgatgatcgccttgaatacagtagtgctgatgatgaagttctatgatgcaccatatgaatacgaactcatgcttaaatgcctgaacattgtttttacatccatgtttagtatggagtgcgtcctgaaaatcattgcattcggcgtcctaaattactttcgcgatgcttggaatgtgttcgacttcgtgactgtactgggatccattaccgatattcttgttacggaaatagccgagaccaataatttcatcaacctatcattcttgagattgttcagggcggcccggctgatcaagctcctgagacagggctatactatccgtattttactatggacattcgtgcagtctttcaaagccttgccctacgtgtgtctcctgattgctatgttattcttcatatatgcgataatcggcatgcaggtgttcgggaatattgctttagacgatgacactagcattaataggcataacaacttccgtacctttctgcaggcgctcatgttgctgtttcgcagcgcaaccggtgaagcatggcacgagattatgctgagctgcctgagtaatcaagcatgcgacgagcaggctaacgccaccgaatgcggatctgactttgcttacttttacttcgtcagctttatcttcctctgctcatttttaatgctgaaccttttcgttgcagtaataatggacaacttcgaatatttgacccgggatagtagtatcttgggtcctcaccatttggatgaattcatccgtgtgtgggcggagtacgatccagctgcatgcggtcgcatttcttacaatgatatgttcgagatgttaaaacacatgagcccccctctggggcttggcaaaaagtgccccgcacgagtggcctataagaggttagtacggatgaatatgcctatcagtaacgaagacatgacagtgcatttcacatctactctgatggctttgatacggactgccctcgagattaagcttgcacccgctggcacaaaacagcaccagtgtgatgccgaattgcgtaaggagatctctgtggtgtgggccaacctcccccagaaaactctggaccttctggtgccaccgcataaacctgacgagatgacagtaggcaaggtttacgcggctctcatgatctttgatttctataaacaaaacaagacaacaagggaccagatgcagcaagctccagggggactgtcgcagatgggcccggtatccctgttccacccactgaaggccactttggaacagacccaaccggccgtgcttaggggggctcgggttttcctcagacagaaaagttcgacttctctatctaatggcggagcaatccagaaccaggagtcaggtattaaggagtccgttagctgggggacccaacgcacgcaagacgcccctcatgaggcccggccacccctggagagaggtcacagcacagagatcccagtaggcaggtcaggggcgctggcagttgatgtgcaaatgcagtccatcacccggagaggacccgacggcgaaccgcagcccgggctggaaagccaagggcgggcagcatcaatgccaaggctcgctgccgagactcaaccagtcacagatgcaagtcctatgaagaggagtatctcgaccctcgcccagaggcctcgcggcacacacctgtgtagtactactcccgaccgcccccccccaagtcaagcatcttcccaccaccatcaccaccgctgtcaccggcggcgagatcgcaaacagcggtctctagagaagggtccctccctgtcggcagacatggacggagctccaagtagtgccgtgggcccaggactgccccccggcgaagggcctactgggtgccggcgcgagcgtgaacggaggcaggaacgcggaagaagccaggaacgacgccagccgagctccagttcaagcgagaagcagagattctattcttgtgacagatttggtgggcgcgaacctcctaagcctaagccatcacttagttcccatccaaccagccctacagcaggtcaagagcccggaccccacccacagggaagcggctctgtgaacggctctccactattatccacatctggcgcctccactcccggtagaggtggccgacgacagcttcctcaaactcccctgacccctcggccatccatcacctataaaaccgcaaatagcagccccattcacttcgcaggagctcagacaagtctgcctgccttcagcccaggacgactctcacggggcctctcagagcacaatgccttgcttcagcgggatcctctatcccagccacttgcccctggaagccggatcgggtcagacccgtatctggggcagagactcgatagtgaggcctccgtacatgctctaccggaggacaccctgacatttgaagaggccgttgcgaccaattcaggacgatctagcaggacgagttatgtgtcctctctgaccagccaatcccatcccctgcggcgggtccccaatggataccattgtaccttgggactctcttccggcggcagggcaaggcacagttaccaccatcccgatcaagatcattggtgctag

SEQ ID NO: 110451 - DNA, 7017 bp, synthetic construct
  misc_feature 1..7017: note = Description of Artificial Sequence: Synthetic coding sequence
  source 1..7017: mol_type = other DNA
atggtccggttcggagatgaactaggcgggcggtatggtggtcccggaggaggagagagagcacgcggagggggagctgggggggcaggggggccagggcccggaggtctgcagccgggtcagcgggtgctctacaaacagtccattgcgcaaagagcacgtactatggccctctacaacccaatccccgtgaaacagaattgcttcaccgtcaacagatcactgtttgtattctcagaggacaatgttgtcaggaaatacgcaaagcggattacggagtggccaccttttgaatacatgatccttgcaactattattgccaattgtatcgttttagcacttgagcaacacttgcctgacggagataagacaccaatgtctgaaagactggatgacactgagccctattttatcggcatcttctgtttcgaggccggaatcaaaattatagccctaggatttgtgttccataaaggctcgtacctgcgaaatggatggaacgtgatggacttcgtagtggtgctgaccgggatcttagccacagcgggtacagactttgatttacgaacactcagagcggtgcgtgtgctgagaccactgaaactggtttccgggatcccatccctccaagtggtgctgaagtccatcatgaaagccatggtacctctcctgcagattggcctgctccttttctttgcaatactaatgtttgctatcataggcctggagttctatatgggcaagttccataaggcgtgcttccctaacagtaccgatgcagaaccagtcggtgactttccatgcggtaaagaagctcccgctcgactgtgtgaaggcgacactgagtgtcgcgagtattggcccggccctaattttgggattacaaacttcgacaacatcctttttgccatcctcacagtgttccagtgcatcacaatggagggatggactgatatcctgtataatactaatgatgccgctgggaacacgtggaactggctgtacttcatacccttgattattatcgggtcattcttcatgttaaatctggtattgggggtcttatctggcgaatttgcaaaagagcgcgagcgtgtcgagaaccggagggcctttctgaaactcaggcgccagcagcagatcgagcgagaacttaacggatatctggaatggatctttaaggctgaagaagtaatgctcgcagaggaggaccgcaatgccgaagagaagtctccactcgacgctgtattgaagcgagcggctaccaagaaatcacggaatgacctgattcacgccgaggagggagaggacaggtttgccgacctctgtgccgtgggatcaccatttgctcgagcctcactgaagtcaggaaaaacggagtctagcagctacttccgtcgaaaagaaaagatgtttcggttttttattcggagaatggtgaaggctcagagcttctactgggtggtactttgtgttgtcgcgctgaacactctttgcgttgctatggtccactacaaccagccacggcgcctgacaaccacactgtattttgctgagtttgtttttctgggactgtttctaacagagatgagcctcaagatgtatgggctggggcccaggtcgtacttcaggtccagttttaactgcttcgacttcggggtgatcgtgggaagcgtgtttgaagtggtgtgggcagccatcaaacccggaagtagtttcggaatctccgtcctgcgagcgctgcggctgctgcgtattttcaaagtgactaagtactggagttcattgcgcaacctcgtggtgtccctcctaaactctatgaaatcaatcatatccctgctttttttgctatttctgtttatcgtcgtgttcgctctcctgggaatgcagctatttggcgggcagtttaattttcaagatgaaacacctactactaattttgacacatttccggctgccatcttaaccgtgttccagatactgactggagaggattggaatgctgttatgtatcatggcattgaaagtcaaggcggagtgagcaaaggcatgttcagcagcttttatttcatagtcttgactctgtttggaaactacacgttattgaatgtgtttctcgccatagctgtggacaatctggccaacgcccaagagctcacaaaggacgaggaagagatggaggaagcagccaaccagaagctggcccttcaaaaggcaaaggaggtggcagaagtaagccccatgagcgctgctaatattagcatcgccgcgaggcagcagaacagcgcgaaggctcggagcgtttgggagcagagagcctctcagttacggcttcagaatctccgcgccagttgcgaggctctgtactctgaaatggatcccgaggagagactgaggttcgctacaacacggcatctgcgccctgacatgaaaacccacctcgaccggcctctcgtggttgagctcggcagagatggggcgcgaggaccagtcggaggcaaggcacgcccagaagctgccgaagctcccgagggtgtggacccaccccggcgccaccatagacatcgggataaagataagacccctgctgcgggggaccaagatagggctgaggcacctaaggctgagtctggtgaacctggcgcccgggaggaaagaccccggcctcaccgtagtcactccaaagaagccgctggcccacctgaggctaggagtgaacgcggcagaggtccagggccagagggcggtcgaaggcaccaccgaaggggatctcccgaagaggccgctgaacgcgaaccacggcgacacagggcccaccgccatcaggatccttctaaagagtgtgcaggggccaaaggcgaacgccgtgcccgccacaggggcggccctagagccggcccccgtgaagctgaatctggagaagaacccgcacgtagacaccgtgcccgacacaaggcgcagccggcccatgaagctgtagagaaggaaacaaccgagaaggaggccaccgaaaaagaagccgaaattgtggaggcagacaaagaaaaagaacttaggaatcaccaacctagagagccacattgtgatctcgagacgtctggtacagttacagtggggccaatgcacacacttccaagtacctgccttcagaaagttgaggaacagcccgaggacgcagataatcagagaaacgttaccagaatgggctctcagccacccgatcccaatacgattgttcacatccctgtgatgttaaccggaccactcggcgaggctactgtggtgccttcaggtaatgtggaccttgagtcacaagccgaaggtaagaaggaagtggaggcagacgacgtgatgaggtcaggcccccgacctatcgtcccatactcatcaatgttctgcctgtcccctactaacctgctcagacgcttctgtcactacatcgtgacaatgcgatactttgaggtagtgatactggtggtcatcgcattgtcctcaatcgccttagccgctgaagatcctgttcgtacggattcacccagaaacaacgccctcaagtacctggactacatctttacaggggtgttcacatttgaaatggtgataaaaatgatcgatctgggcttgctgctccatcctggggcctactttagggacttgtggaacatcctagatttcattgtggttagcggtgcactggtggcttttgcgttttcaggaagtaagggcaaggatataaacacaatcaagagcctccgagtgctaagagttcttcggccactgaagaccattaagcgcctgcccaagcttaaggcagtttttgactgcgtggtgaatagcctcaaaaatgtgctcaatattctaatagtctatatgctgttcatgtttatcttcgctgtcatcgcggttcaactcttcaagggtaaatttttttactgcacagatgagagtaaggagttggagagagattgtagggggcaataccttgattatgagaaagaggaggtcgaggctcaaccacgccagtggaagaagtacgactttcactacgataacgtcctttgggctctgctaactctattcactgtcagtaccggggaggggtggccaatggtgttgaaacattctgttgatgctacatatgaggaacagggaccaagcccagggtaccgcatggaactatctattttctatgtggtttactttgttgtcttccctttcttttttgtgaacatttttgtggcgctgatcatcattaccttccaggagcagggagataaagtgatgagtgagtgctcgcttgagaagaacgagagagcttgcatcgacttcgccattagtgcgaagcccctgacgcgctacatgcctcaaaacaggcagagctttcagtacaagacctggacctttgtggtttcccccccctttgaatactttattatggccatgatcgccctgaataccgtggtgttgatgatgaaattctatgacgcaccttacgaatacgaactgatgctaaagtgccttaacattgtcttcacttctatgtttagcatggagtgcgtgttgaaaataatcgcatttggtgtgctgaactactttcgcgatgcatggaacgtctttgacttcgtgaccgtcctcgggtcaattaccgacatcctagtcaccgaaatagctaacaacttcattaacctgagctttctaagactgtttcgagccgcaaggctgattaaactcctgagacagggctatactatcagaatcttgttgtggacatttgtccagtcattcaaagccctgccctatgtttgcttactgatcgcaatgctcttcttcatttacgccattatcgggatgcaggtgtttggcaacattgcactggacgatgacactagtatcaatagacataacaattttcgcacattcctccaagcactgatgctgcttttccgctccgccacaggggaggcttggcatgagatcatgttgagctgcctttctaaccaggcctgcgatgagcaagctaacgccactgaatgcggcagtgatttcgcgtacttctacttcgtgagttttatctttctttgtagcttcttaatgctgaatttgttcgtggcggtgatcatggataactttgagtacctgaccagggactcaagtattctcggacctcaccacctcgacgagttcatccgcgtatgggcagaatatgatccagccgcctgtggtcgcatatcttacaatgatatgtttgagatgctcaaacacatgtcacccccactgggcttaggaaagaaatgcccagcccgtgtcgcctataaacgactggtgcggatgaacatgcccatatcaaatgaggacatgactgtacatttcacttcaacgcttatggcactcatccgtaccgccctggagatcaaactcgcccctgccggcaccaagcagcatcaatgcgacgccgagctgagaaaagagatttccgtggtgtgggcaaatcttcctcaaaagacccttgatctgctggtgcctccacacaagccagacgagatgactgtcggcaaggtgtacgcagctctcatgatcttcgacttttataaacagaacaaaactactcgggaccaaatgcagcaggcacccggtggtctgtctcagatgggtcccgtatccctgttccatccccttaaagctacacttgagcagacacagccagccgtgctgagaggtgctcgcgtttttctgcggcagaaatcaagtacctctctgtcgaacgggggggcaattcaaaatcaggaatcaggcatcaaagagtctgtatcgtggggaacccagcgcacccaggatgccccacatgaggctcgccctcccctggagcgaggacactcaactgagatacccgtcgggcggtcaggagccctcgctgtcgacgtgcagatgcaaagcataaccagacgcggacccgatggggaaccccagccaggactggagtcacagggcagagctgcaagtatgccacggttggccgctgagacacagccagtcacagatgcaagccccatgaaacgatctatttccacgctcgcacagcgtcctcgggggactcatctgtgtagcacaacgccggaccggccacccccttctcaggcttcatctcaccaccatcaccacagatgtcataggagacgtgatcgaaagcagagatcactagaaaaaggaccctcactgtccgctgatatggacggtgctccttcgagcgcagtgggccctgggctcccaccaggagaaggccctacgggatgccgtcgcgagagggagcgcagacaggagaggggaaggagccaggagaggcggcagcctagctcgtcaagttcagagaagcagcgcttctacagctgtgacaggttcggggggagggagccccccaaacctaaaccatcactgtcaagtcaccccacgtcacccactgccggccaggaacctgggccgcatccccagggtagcggatctgtgaatggatccccgctgttaagtacctccggcgcttcaacaccgggccgcggcggtagacggcagctgccccaaacccccctcaccccccgtccatctatcacgtataaaaccgccaactcttcaccaatccattttgctggcgcccaaacatctctgcctgcattttccccgggacggctgagtaggggactctctgagcacaacgctctgttgcagcgagatccattatcgcagcccctggcacctgggagccgcattggatctgatccttatctcgggcagaggctagactccgaggcgagtgtgcatgccctcccggaggatacacttacttttgaagaggcagtggccactaattccggaaggagcagccggaccagttatgtgtctagccttacaagtcagtcacatccattgagacgcgttcctaacggataccactgcacacttggattgtcctcagggggtagggctcggcatagttaccatcatccagatcaggatcactggtgctag

SEQ ID NO: 110452 - DNA, 7014 bp, synthetic construct
  misc_feature 1..7014: note = Description of Artificial Sequence: Synthetic coding sequence
  source 1..7014: mol_type = other DNA
atggtccggttcggggatgagttgggcgggagatatggtggtccaggaggcggcgagagagccaggggcggcggggctgggggagccggcggaccaggcccaggcgggctgcagcctggacaacgggttctctacaaacagtcaatcgcgcagcgcgctagaaccatggcactctacaatcccatccctgttaagcagaattgttttactgttaatcggtctttgttcgtcttctcggaggataacgtggtgcgtaaatacgccaaaaggattactgagtggccccccttcgagtacatgattttggctaccatcatagcgaattgcattgtgctggctctggaacaacacctgccggacggagataagacgccaatgagtgagcgcctggacgacactgagccatacttcataggtatcttctgcttcgaggcaggcatcaaaattattgcccttgggttcgtgtttcacaagggttcataccttcgaaacgggtggaacgtgatggatttcgtggtggtcttgacgggtatcctggccaccgctggtacggacttcgacctccggaccctgagagctgttagagttcttcgccccctgaagctggtgtcaggtatccccagtctgcaggtggtgctgaaaagtattatgaaagctatggtgcccctgctgcaaatcggcctgcttctgttttttgctattttaatgtttgctattatagggttagaattttacatgggaaaatttcataaggcctgtttcccaaacagcactgacgcagaaccagtaggcgattttccatgtggtaaagaggcacctgcaaggttgtgcgaaggagatactgagtgcagagaatactggcccggtccgaattttgggattacgaattttgacaatattctattcgctatcctcactgtgtttcagtgtatcacaatggagggctggacagacatcctttataatacaaatgatgcagcaggcaatacgtggaactggctgtacttcatcccactcattattataggctctttcttcatgttaaatcttgtactgggcgtcctttccggcgaattcgcgaaggaaagggagagggtggagaatcgacgcgcgttcctgaagctccgtcgccagcagcagattgaacgggagctgaatgggtacctcgagtggattttcaaggcagaggaggtaatgctggcagaagaggaccgcaacgcagaggagaagtctcctctcgatgttctcaaaagagcagccacgaagaaatcccgcaatgatctgatccacgccgaggaaggggaggataggttcgccgacctctgtgctgttggatcacctttcgcccgagcatcgctaaagagtggtaagacagaatcatcatcttactttaggcggaaagagaagatgttccggtttttcatacgaaggatggtcaaggcccaaagcttttactgggttgtcctgtgtgtcgtagcacttaatacactttgtgtggcaatggttcactataatcaaccccgtaggttaaccacaacactgtactttgccgagttcgtgtttctgggcctgttcctcacagagatgtctttgaagatgtacgggctggggccaaggagctacttcagatcgagcttcaattgctttgattttggcgtgatcgttggaagtgtgttcgaagtggtctgggccgccattaagccaggctccagctttggcatctctgttctgagagcactacgcctgctccgcatcttcaaggtgacaaaatattggtcctcactgcggaatcttgtggttagtctcctgaacagcatgaagagcattatttcgctgctgtttctgctctttttattcattgttgtatttgcacttctgggtatgcagctgttcggcggacagttcaactttcaggatgaaacccctaccactaacttcgacaccttccctgctgctattctgacagtgttccagatcctaacaggagaagactggaacgccgtgatgtaccacggaatagagagtcagggcggtgtttctaaaggaatgttttcgagtttttatttcatcgtgcttactctcttcggcaattataccttgctcaacgtgtttctggccattgccgtggacaatttagccaatgcacaggagctgacgaaagacgaagaggaaatggaggaagccgcaaatcagaaactggcactgcaaaaagcaaaggaagtggcagaggtctcgccgatgtcagccgctaatatttctatagctgctcggcagcagaatagcgcaaaagccagatcagtgtgggaacagcgagcatcccagctgcgcctgcagaacctccgcgcctcttgtgaggcgctctatagcgaaatggatcctgaggagcggctgaggttcgcaactactcggcatttaaggccggatatgaaaactcatctcgatagacctctggtggttgagctgggcagagacggggcacgcggacccgtgggcggtaaggcccggcccgaggcagcggaggcgccagagggcgtggatccccccagacgccaccataggcacagggacaaagacaagacacctgcagcaggcgaccaggaccgggctgaagcccctaaagcagagagcggcgagcccggagcccgggaagagcggcccaggccgcacagatcccactccaaagaggctgcgggcccacccgaggcaagaagtgaacggggacggggtcctggacccgagggcgggcgaaggcaccacagacgtggttccccagaagaagccgcagagagagagcccagaaggcacagagcccaccggcaccaggaccctagcaaagagtgtgcaggagcgaaaggtgaacggagggctagacaccggggcggtccacgtgccggccctagggaagcagaatctggagaggagcccgctaggaggcatcgggcccgacacaaggctcaacccgctcacgaggccgtggagaaggagaccactgaaaaggaggctaccgaaaaggaggccgagattgttgaagctgacaaagagaaagaactgcgcaatcaccagcctcgggaaccacactgcgacctggaaacttctgggacagttactgttggccctatgcacaccttgccctccacttgcctccaaaaggtcgaggaacaacctgaggacgcagacaaccaacggaacgtgacccgcatgggcagccagccgcctgatcccaacacaattgtgcacatcccagtgatgctcacaggaccattgggcgaggccactgtggtcccctcgggcaatgtggatctcgaatcccaggccgaaggcaagaaggaagtggaagccgatgatgtgatgcgaagcgggccaaggcctatcgtgccctactccagcatgttttgtctgtcgccaactaaccttctgaggcgcttttgtcactacatcgtaaccatgaggtactttgaggtggtgatcttggtagtgattgctttatcatccattgctctggctgctgaggaccctgtgagaacagattcacccagaaataacgcgttaaaatatctggattacatcttcacgggagtctttactttcgaaatggtcatcaagatgattgatctggggttactgcttcatccaggcgcctactttagggacctatggaacattctggatttcatagttgtgtccggcgctctcgtggcatttgctttcagcgggagcaagggcaaggacattaacacaattaagtcccttcgcgtgttacgcgtactgcggcctctgaaaacgattaagcgcttgcctaagctgaaagccgtttttgactgcgtcgtgaatagtttgaaaaatgtgttaaacatattaatcgtatatatgttatttatgttcatttttgcagtaatcgccgtgcaactgttcaagggcaagtttttttactgtaccgatgaatcgaaagagctcgaacgggattgcaggggacagtacctcgattacgagaaggaggaagtagaagctcagccgcgacagtggaagaaatacgattttcactatgataacgtactctgggcactcctgacacttttcacggtgtccactggagaaggatggcctatggttctgaagcatagcgtcgatgccacctatgaggaacaggggccatcccctgggtataggatggaattgagtatcttctacgtggtatatttcgtggtgttcccttttttctttgtcaacatcttcgttgctctcatcattataacgttccaggagcaaggtgataaggtaatgtccgagtgctcactcgagaagaacgagagagcatgtatagacttcgccatctctgcaaaacctctgacccgctacatgcctcagaatcgacagtcattccagtataagacctggacctttgtggtttctccaccttttgagtattttattatggccatgatagccctgaacaccgtagtcctgatgatgaagttctatgacgctccttatgaatacgagttgatgctgaaatgtctaaacattgtgttcacatccatgttcagcatggaatgcgttctaaaaatcatcgctttcggagtgcttaattacttccgtgacgcgtggaacgtgtttgattttgtaacggttctcggctctataaccgacattttggttaccgaaatcgctaacaatttcatcaacctgtcatttctgcgcttgtttagagcggccaggctgatcaagctactacgccaggggtataccattcggatcctgctgtggacattcgtgcagagcttcaaggccctcccttatgtgtgcctgcttattgcaatgctcttcttcatctacgcgataatcggaatgcaagtgtttggtaatatagcgttagacgacgacaccagcatcaatagacacaacaacttccgcactttcctgcaagcccttatgctcctcttccgatctgcaaccggcgaggcctggcatgaaatcatgttgagctgtctgtcaaaccaggcctgtgacgaacaggcaaacgcaacagagtgcggtagcgactttgcttacttctatttcgtctcttttatcttcttgtgttctttccttatgctgaatctgttcgttgccgtcattatggataactttgagtatcttactagagactcctctattctggggccgcaccatctggacgagtttattcgggtgtgggccgagtacgaccccgcagcatgcggcaggatttcatataatgacatgtttgaaatgctgaagcacatgtccccccccctcggtttgggcaagaagtgtcccgcaagggtggcctacaagagactcgtgcgtatgaacatgcctatttcgaatgaggatatgaccgtgcattttaccagcaccctcatggcccttattcggacagccctcgaaatcaagctagcccccgcaggtaccaagcagcaccagtgcgacgcggagctgcggaaggagattagcgtcgtatgggccaatttgccccagaaaactcttgatttacttgtgcctccgcacaaacctgacgagatgaccgtggggaaggtgtatgccgccttaatgatcttcgacttctacaaacaaaataaaacaacaagggatcagatgcagcaggcgcccggaggcctatctcagatgggacccgtctctctgtttcaccctctaaaggcgactcttgagcagacgcagccagccgtgctccgcggggccagagtctttctgagacaaaaatcttctacctccctgtccaatggaggggcaatacagaatcaggagagcggaatcaaggagtcggtcagttgggggacacagagaacgcaggacgcccctcatgaagccagacccccactggaacggggacactcaacagaaattcccgttggaaggtctggcgctctcgcggtcgacgtgcagatgcaaagcattacaaggaggggccctgacggggaaccgcagcccggcctggagtctcaagggcgggctgccagtatgcccagattggccgctgagacccaacccgtcactgacgcaagccctatgaagcggagcatatctaccctggctcaaaggccgcgtgggacccacctgtgttcaacaacgccagaccggcctccaccaagccaggctagcagtcatcatcaccaccatagatgccataggcgacgagatagaaagcaacgaagcttggaaaaaggcccttctttaagcgcagacatggacggtgccccgtctagcgctgttgggcctggtctccctccgggtgaaggcccaaccgggtgcaggagagaaagagagcgtaggcaggaaagaggtcgcagccaggaacgacggcaaccttcaagtagctcctcagagaaacaacgtttttacagttgcgacaggttcggaggaagggagccccccaagcccaaaccgtcactgtcaagtcatcccacaagccctacagcaggccaggagccagggccacacccccaaggcagcggctcggtgaacggaagccccctgctatccacctccggggcttccaccccaggtaggggcggccgccgccaactaccacagaccccactgacgccccgtccatctatcacctataagacagctaactcttcccccattcattttgcaggggcccagacttcgctgccagctttttctcctgggagactgtctcgaggattatccgagcacaatgccttgcttcagcgcgatccactgagccagcctttggccccaggatccagaatcgggtctgatccatacctgggccagagactagattcagaagccagtgttcacgcactacccgaagatacattgacattcgaggaagcggtggcgactaacagcggtcgctcgagcagaacttcttacgtgtctagcctaactagccagtcccatccactaagacgcgtgcctaacggatatcattgcacgctgggattaagcagtggcggaagggctcgccactcctaccatcatcctgaccaagatcactggtgttag

SEQ ID NO: 110453 - DNA, 495 bp, synthetic construct
  misc_feature 1..495: note = Description of Artificial Sequence: Synthetic coding sequence
  source 1..495: mol_type = other DNA
aatttcagaacattcttgcaggcactgatgctgcttttcaggtcagctactggggaagcctggcacgaaatcatgcttagttgcctgtccaatcaggcttgtgatgagcaggccaatgcaactgaatgcggcagcgattttgcttatttttattttgtgtcttttatatttctgtgttcctttcttatgttgaatctgttcgttgctgtgattatggataactttgagtacctaactcgagatagcagtatccttggtccccaccatcttgatgagtttattagggtttgggccgaatacgaccccgctgcatgctgccggatccactacaaggatatgtactctctgctccggtgtatagctcctcccgtgggcctcggaaagaattgccctcgcagactagcctacaagaggttagttcggatgaatatgccgattagcaatgaagacatgaccgtgcattttacaagcacgctcatggctctgatcaggtag

SEQ ID NO: 110454 - DNA, 327 bp, synthetic construct
  misc_feature 1..327: note = Description of Artificial Sequence: Synthetic coding sequence
  source 1..327: mol_type = other DNA
ctgagaaatcatcagccccgtgaaccccattgtgatctggagacgtccggaacggtcacggtagggccaatgcacaccttacctagtacatgcctgcagaaagtggaggagcagcctgaggatgcagataatcaacgcaacgtgacgcgcatgggctcgcagccacctgatccaaataccatcgtgcacatcccggtcatgttaacaggtcccttaggagaagcaacagtggtcccaaccttggaaaagaatgtgtgcctattccttttaacaagtatggtgtcggacgagaaaagtacggtgattagaatagttttcttcttatag

SEQ ID NO: 110455 - DNA, 7020 bp, synthetic construct
  misc_feature 1..7020: note = Description of Artificial Sequence: Synthetic coding sequence
  source 1..7020: mol_type = other DNA
atggtccggttcggggacgaactcggaggacggtacggcgggccggggggtggcgagcgcgcgcgagggggtggcgccggcggagcaggaggaccagggcccggagggctgcaacccggccaacgggtcttgtacaaacagtcgatcgctcagagagcgcgcactatggctctatataaccctatacccgttaaacagaattgcttcactgttaaccgatctctgtttgtgttcagcgaagataatgtggtgcggaagtatgctaagcgcattaccgagtggccaccattcgagtatatgatcttggcaactatcattgccaactgcatcgttcttgccctcgaacagcatctccctgatggcgataagacccccatgtcggaacggctggatgatacagagccatatttcattgggatcttctgttttgaagccggcattaagattatcgcgttgggtttcgtgtttcataaggggagctatctgagaaatggctggaacgtcatggatttcgttgtggtcctgacgggaatattggccaccgcgggaaccgattttgatctgcgcacacttagggctgtgagggtacttcgcccactgaagctggtttcaggcatcccaagcctgcaggtggtgctcaagtccatcatgaaggccatggttccactcctgcagatcggtttgcttctgttcttcgctatcttgatgtttgcaataatcgggttagaattttatatggggaaattccacaaggcttgtttcccaaacagtacagatgcagagcctgttggcgactttccatgtggcaaggaagcccctgcccgcttatgcgagggagataccgagtgtagagaatattggcccggtccaaatttcggtatcacgaatttcgataatatcctctttgccatcctgaccgtgttccagtgcatcaccatggaggggtggacagacatactatacaacacgaacgacgcagccgggaatacctggaactggctctactttatccctcttattatcattgggtccttcttcatgttaaatctggtccttggcgtgttgtccggagagtttgccaaagagcgggaacgggtggaaaacagaagagcttttctgaagctccggaggcagcagcaaatagaaagggaattaaacggctacctagaatggatattcaaagccgaagaagtaatgctggcagaagaggaccgaaacgcagaggagaagtcacctctggacgtgcttaaaagagcagcgacaaagaaatctcggaatgaccttatccacgcagaggagggagaggatcgcttcgcagatctgtgtgctgttggaagtccgtttgcccgagccagcttaaaaagcggtaagaccgaatcctcctcctatttccgtcgcaaggagaagatgttcaggttctttatcaggcgcatggttaaagctcagagtttctattgggttgtgctgtgcgtggtggctcttaatactctctgcgtggcaatggtccactacaatcagcctcgtaggctgacaaccaccctgtatttcgccgaatttgtatttctcggcctcttcctgaccgagatgagccttaaaatgtacggtttgggcccccgaagctacttccgatctagtttcaattgtttcgactttggagtgattgtggggagtgtttttgaagtagtttgggccgctatcaagcccggctcatctttcggcatctcagtattgagggcactaagactgctgcggatctttaaagttactaaatactggtctagtctaaggaacctggtggtgagtctcttaaacagtatgaagagcatcatatccttattgtttttactgtttctgttcatcgttgtattcgctttattaggcatgcagcttttcggtggccaatttaactttcaggatgagacgccaaccacaaattttgatacctttccggcggcgattttgacagtattccagatcctcaccggcgaggactggaacgccgtgatgtaccatggtatcgagtcccagggaggagtgtctaaaggaatgttctccagcttttattttattgtgctgaccctgttcgggaattatactttgctgaatgtgttcctggccattgcagtcgataatcttgcgaatgcacaggaacttacaaaggacgaggaagaaatggaagaagccgcaaatcaaaagctagcgctgcagaaggcaaaagaggtggctgaggtttcgcctatgtccgccgccaatatctccattgcagcccggcagcaaaacagcgctaaagcgagatccgtgtgggagcagagggccagtcagctccgcctgcagaatctgcgcgcttcttgcgaagccctctactcagaaatggatcctgaagagcggctgcgattcgccacaacacgccacctgagaccggacatgaaaacccatctcgatcggcctttggtggtcgagcttgggcgggatggtgcgcgcggcccagtgggtggcaaagctaggcctgaagccgctgaggctcctgaaggtgtggaccctccacgcagacaccaccgccatagagacaaagataaaactccagccgcgggggaccaggaccgcgcggaggctcccaaggcagaaagtggagagccgggcgctcgtgaagaaagacccaggccgcatcgttctcactcgaaagaggcagccggtccgcccgaagctcgaagtgagcgcggcagaggccctggtcctgaaggcgggagacgacaccaccgccgggggtccccggaggaagcggcggagcgggagcctaggcgtcatcgggctcatcgccaccaggacccctccaaagagtgcgcgggagccaaaggcgagcgccgcgctcggcatcgcggaggtccgcgggctggcccgagagaggctgagagcggcgaggagcctgcccgccgccatagagctaggcacaaggcacagccagcccatgaagcggtggagaaagaaactaccgagaaagaagctacagagaaggaggccgagatagtagaagccgacaaagagaaagagttgcgcaaccatcagcctagggagccgcactgtgatctcgagacaagcgggactgtgacggtgggcccgatgcatactctcccttctacttgtctgcagaaagtggaggagcagcccgaagatgccgacaatcagcggaacgttacacgtatgggtagccagccacccgacccaaatactatcgtgcatatcccagtcatgctcaccggtccattaggtgaggccactgtcgttccgagcggaaacgtggatctggagtcacaagctgaaggaaaaaaagaagtcgaggcagacgatgtgatgagatcaggaccccgcccaattgtgccatattcttctatgttctgcttgtcccccactaacctgctgagacgcttctgccactacatcgttacaatgagatactttgaagtggtcattttagtcgtcatcgcactgtcctctattgctctggcagccgaggacccagtcagaaccgattcaccccgcaataacgccttgaagtatctggattatattttcaccggcgttttcacattcgagatggtgattaagatgattgatctgggcctgcttttgcaccctggagcttatttcagagatctgtggaatatactggatttcatcgtggtgtcaggagccttggttgcgtttgccttttccggcagtaaaggtaaagacattaacaccataaagagcctccgagttctaagggtcttgcggccacttaagaccattaaaaggctacctaaacttaaggccgttttcgactgcgtcgtcaattctcttaagaacgttctgaatatactcatcgtgtatatgctgttcatgtttatcttcgctgtgatagccgtacaattgtttaagggcaagttcttttactgcacagatgagagtaaagaactggagcgtgactgtcgcgggcagtatctggattacgagaaggaggaagtggaagcacagcccaggcagtggaagaagtatgacttccattacgacaacgtcctctgggctctgcttacactgtttacagtatcaactggcgaaggctggccaatggttctcaagcactccgtggatgccacatatgaggagcagggacccagcccaggatacagaatggagctgtccattttctacgtggtgtatttcgtggtttttcctttcttcttcgtcaatattttcgttgcattaatcattattacctttcaggagcagggcgacaaggtcatgagcgagtgctcactggagaaaaacgagcgggcctgcatcgactttgccatcagtgctaagccgctaacacgctacatgccgcagaaccgccaatcttttcagtataaaacgtggacctttgttgtttctcccccatttgagtattttatcatggcaatgatcgctctgaacaccgtggtgctcatgatgaagttttacgatgctccatacgaatacgagctgatgctcaagtgtctgaacatagtctttacatcaatgtttagcatggaatgtgttcttaagataatcgcgtttggggtgttaaactatttccgtgatgcctggaatgtgtttgatttcgttaccgttttgggctctatcaccgacattttagttacagaaatcgcagagaccaacaactttatcaatctaagcttcctgcgactctttagggccgcgcggctaatcaagctcctccgccaagggtacaccatcaggattctgttgtggacatttgttcagtcttttaaggccctgccatatgtttgcttgctcatcgcgatgctgtttttcatttacgctatcatcgggatgcaggtgtttggcaacatcgcgctcgacgatgatacctccattaaccggcacaacaacttcagaacttttctccaggccctcatgcttctatttagatctgctactggagaagcctggcatgagatcatgctgtcttgtttaagcaaccaagcatgcgacgaacaggccaatgccaccgagtgtggctcagactttgcttacttctattttgtgtcctttatattcctgtgcagctttttgatgctcaatctctttgtcgcagtgataatggataattttgagtatcttaccagggactcaagtatcctcggaccacaccatctggacgaattcataagggtgtgggctgagtacgatcccgctgcctgtgggagaataagctataacgacatgtttgaaatgctgaagcatatgtctccccccctaggtttaggcaaaaaatgtcccgccagagttgcctataagaggttggtcaggatgaatatgcctatctctaatgaggacatgaccgtgcactttaccagcacactcatggctctgatccggactgctcttgagatcaaactggctcctgcaggaacaaagcagcaccaatgcgacgctgagctgagaaaggaaatttcagtggtgtgggcaaatctccctcaaaaaaccttggacctgttagtgcctccgcataagcccgacgaaatgacagtggggaaggtgtacgctgctttaatgattttcgatttctacaaacaaaataaaacaactagagaccaaatgcagcaggctcctggtggtctcagtcagatgggtcccgtctctctgtttcatcctttaaaagcaaccctcgagcagacccagccggccgtgctcaggggcgcccgtgtctttctacggcaaaaatcctctacttccctgagcaacggtggggcaatccagaatcaggaatcagggatcaaggaatctgtttcatggggcactcagcggacacaggacgccccccatgaagcgcgccccccactggagcggggacacagtacggaaattccagtaggccgctcaggagctctggccgttgacgttcagatgcagtctatcactcgccgcggccccgacggtgagccgcagcccggcttggagagtcagggtagggccgcaagcatgccacgtctggccgccgaaacacagcctgtgacagacgcctcacctatgaaacggtccataagcaccctggcccaaaggccccgcggcacacatctgtgctccactacccccgacaggcccccgccaagccaggcatctagtcatcaccatcaccacagatgccaccgaagacgcgatcggaagcaacggagtctagaaaagggcccaagtctgagcgccgatatggacggcgcaccaagcagcgcagtgggaccaggattgccgcctggcgaagggccgaccgggtgtcgacgggaacgcgagaggcggcaggagagagggcgctcacaggagcgacgtcagccatcctcctcttcctctgaaaaacagcgcttttatagttgcgataggttcggcggcagagaacctcctaagcccaagccctcgctgtcatctcaccctactagccccacagccggacaggaaccggggccacatcctcagggatcaggctccgtgaatggctcgcccctgctaagcacaagcggcgcgagtacacctgggcgcggagggaggcgtcagttacctcagaccccattgaccccacggccaagcatcacatacaaaaccgcaaacagtagccctatccacttcgccggggcccagacctccctgcccgcattttcacctggccggctctcacgtggtctttccgaacacaacgccttacttcaaagagacccactgtctcagcccctagcaccgggatcaaggatcggatcagacccttacctgggccaaagactggacagcgaggccagcgtgcatgctctcccagaagacactttaacattcgaagaggcagtggccacaaatagcggccgctcgagtcggacttcttatgtgtcctccctgacgagccagtcccatcccctgcgccgtgtgcctaatggatatcattgcacactaggcctctcctctggcggtcgcgccagacactcctaccatcacccagaccaggaccactggtgttag

SEQ ID NO: 110456 - DNA, 498 bp, synthetic construct
  misc_feature 1..498: note = Description of Artificial Sequence: Synthetic coding sequence
  source 1..498: mol_type = other DNA
tgaaactttcgtacctttctgcaggcgctcatgctgctcttccgcagcgccacgggcgaggcgtggcacgagatcatgctctcctgcctcagcaatcaggcgtgcgatgagcaggcaaatgcaacagagtgcggttctgacttcgcctatttctacttcgtgtcgtttattttcctatgtagcttcttaatgctgaatctcttcgtcgctgtaatcatggacaacttcgaatatctcaccagggatagtagtatcctgggcccccaccacctggatgagtttatccgggtgtgggctgagtacgatcctgctgcttgttgccggatccactataaggacatgtactcactgctgagatgtatagcccccccggtgggactcgggaaaaattgcccgcgtagacttgcttacaagcggttagtgcggatgaatatgcctatctcaaatgaagacatgacggtgcatttcacttcaaccctgatggcactgatccgttag

SEQ ID NO: 110457 - DNA, 564 bp, synthetic construct
  misc_feature 1..564: note = Description of Artificial Sequence: Synthetic coding sequence
  source 1..564: mol_type = other DNA
ctaagaaatcaccagcccagagagccccactgcgatcttgagacgagtgggacggttaccgttggtcctatgcacacactgcccagcacctgtctgcagaaagttgaggaacagccggaggacgcagacaaccaaaggaacgtcacccgaatgggtagtcagcctcccgatccaaatactatagtccacatcccagtaatgctgaccggacctctgggagaggctactgttgtgcctagcccaacaattggcagactgcaggcggaagagcagggagagccggccagagttagtaagttgaatttagaatccgatgtccggggacaggaagcttcctcaacaggcgaacgatatagattgggcggcgggaacgtggacttggaatctcaggccgaaggaaagaaagaagtcgaagcagacgacgtgatgcggtccggccctcgcccaatcgttccatactctagcatgttttgtttaagccccaccaacctgctgcgccgtttctgccactacatcgtgacaatgcgttactttgaagttgtaatcctggttgtaatagcatag

SEQ ID NO: 110458 - DNA, 6786 bp, synthetic construct
  misc_feature 1..6786: note = Description of Artificial Sequence: Synthetic coding sequence
  source 1..6786: mol_type = other DNA
atggcacgctttggggatgagatgcctgcgcgttatggcggtgggggaagcggcgcggccgctggggtggtcgttgggtctggcggaggcaggggggccggagggtccagacagggggggcagcctggggcccagcggatgtataagcagtccatggcgcagagggccagaacaatggcgctgtataaccctataccagtcaggcagaactgtctgaccgtcaacagatcgcttttcttgttctctgaagataacgtggtccggaagtacgcaaaaaagatcaccgagtggcctccttttgagtacatgatattggcaaccataatcgcaaattgcattgtgcttgccttagaacagcacctgccagacgacgacaagaccccaatgtccgagcgcctcgacgataccgagccctattttatcggtatcttctgctttgaggctggtatcaaaatcatagccctggggttcgctttccacaaaggtagctatcttcgaaacggttggaatgttatggatttcgtggtggtgctaacaggcatactcgcgacggtagggacagagtttgacttgcgcaccctacgcgccgtgcgggtgttacgtccacttaagctggtgagtggcattccttccctccaggtcgttctgaagagcatcatgaaagccatgatcccactgctgcagattggcttgcttttatttttcgccatattgatcttcgctatcatcggcctggagttttacatgggcaagtttcacacaacatgctttgaagaaggaactgacgatattcagggggaaagtcctgcaccatgtggaacagaagagcctgcgcgcacatgtccgaatggtactaaatgccaaccatactgggaaggtcccaataacggtatcacccagtttgacaatatactgtttgccgttcttactgtctttcagtgtatcactatggagggatggactgatcttttatacaactccaacgatgcgtccggcaatacttggaactggctctactttattcccctgataataatcggatcctttttcatgctgaatctggtcctcggggttctctctggcgaattcgctaaagaaagagaacgtgtcgaaaacaggagagccttccttaagttaagaaggcagcagcagatcgagagagaacttaatggttacatggagtggatctctaaagcagaagaggtgatcctggcagaggatgagacggatggtgagcaaaggcaccctttcgatggagctcttagaaggacgacgatcaaaaagagcaaaacggacctgttaaaccccgaggaggccgaagaccagttagccgacatcgcctctgtgggatcccccttcgctcgcgccagtatcaagagtgctaagcttgagaattctacattttttcataaaaaagaaagacggatgcggttttacataaggaggatggtaaagacacaggctttttactggaccgttttgtcactcgtcgctcttaatacactgtgtgtcgctatagttcactataaccagccagaatggctgtcagatttcctgtactacgccgagttcatctttctggggttattcatgtcagaaatgttcatcaaaatgtatggcttgggtacaaggccttacttccactctagtttcaattgctttgactgcggcgtcatcatcggctctatctttgaagtgatttgggcggtgatcaagcccgggacttctttcggcataagcgtgctgcgggccctcagactgctccgtatctttaaagtgacaaagtattgggcatctcttcgcaatttggtggtgagcctgttgaattctatgaagtccattatttcattgttgttcctcttgtttctcttcattgtcgtgttcgcactgttgggcatgcagctttttggcggacagttcaactttgacgaaggtacaccccctaccaacttcgatacattccccgccgctattatgacagtgtttcagatcttaaccggtgaagactggaatgaggtcatgtatgacggcatcaagtcccaggggggagtgcagggaggaatggtattcagcatttacttcattgtattgactcttttcggtaactacactctcctaaatgtgttcctcgcaatagcagttgataatctcgctaatgcccaggagctgacaaaagatgagcaggaagaggaagaagccgctaaccaaaaattggctctccaaaaggccaaagaagtagcggaagtcagcccactgtccgctgccaacatgtctatcgcggttaaagagcagcagaagaaccagaagccagcgaaatcggtctgggagcagagaactagtgaaatgcgcaagcagaacctgctcgcatcaagagaagcgctgtacaatgaaatggatccagacgagaggtggaaagcagcctatacacggcacctgcgcccagatatgaagactcacctcgatcgaccacttgttgtggatccgcaagaaaatcggaacaataataccaacaaatcccgggctgcggaaccaactgtcgatcagaggctgggacagcaacgggctgaagacttcttgaggaagcaggccaggtaccacgatagagcccgggatcccagcgggtcagcaggcctggatgcaaggagaccttgggctgggtctcaagaagctgagttgtcgcgcgagggtccatacggcagggaaagtgatcaccacgcacgagaaggctcgttagaacaacccggcttttgggagggtgaagccgaacgcggtaaggcgggtgacccacaccggcgccatgtgcatagacagggcggcagtcgagagtctcgcagtggctcacctcgcaccggcgccgatggggaacacaggagacatagggcgcatagacgtccgggcgaggaggggcctgaagataaagcagaacgccgggcgcgtcatcgcgaggggtcaaggcccgcaagaggaggtgagggcgagggtgagggccctgatggtggagagagacgtcgccggcatcggcatggtgctcccgcaacatacgagggggacgcacggcgcgaggacaaggaacgacgtcacagacgacgaaaggagaatcagggatccggagttccagtgagtgggccaaacctttctaccacgcgtccgatccagcaggacctcggcagacaggacccacctctggctgaggacattgacaacatgaaaaataataaactggccactgctgagagcgcagctcctcacggctccctcggacatgccggccttccccagtcccccgctaaaatgggcaattcaaccgaccccggccctatgctcgctatccccgcaatggccacaaacccacaaaatgccgcttcacgacgcacaccaaacaaccccggaaacccttctaatcccggacctccaaagacgccagagaactcactcatcgtcacaaacccatccggtactcaaactaacagcgcgaagacggccaggaaaccggatcacacaacggttgatatcccacccgcctgccctccacccctaaatcacacagttgtgcaagtgaacaaaaacgcgaacccggatccactccctaaaaaagaagaagagaaaaaagaggaggaagaggacgatcgcggtgaagacggacctaagcctatgccaccctattcatccatgtttatactatcaacaactaaccctctccggaggctgtgtcactatatcctgaatcttcgctattttgagatgtgcattctgatggtcatcgccatgtcttccatcgctcttgccgccgaggaccccgtccagccaaatgctcctagaaataatgtgctgagatattttgactacgtgttcacaggtgtattcacatttgagatggttattaaaatgatcgatctgggcctggtcttgcaccagggagcctatttccgcgatttgtggaacatcctcgatttcatcgtggtgagcggagcactggtggctttcgcatttacgggcaatagcaaaggaaaggacataaacacaatcaagagcttgagggtcctgagggttctgcgcccactcaaaactatcaaacggctcccaaaactgaaggctgtgttcgattgcgtcgtgaattcactgaaaaacgtcttcaatatcctaattgtctatatgctcttcatgtttatcttcgctgtggttgcggtgcagctgtttaagggcaaatttttccattgcaccgacgagagtaaagaattcgaaaaggactgtagaggcaagtatctcctgtacgagaagaacgaagttaaagctcgggaccgggaatggaaaaaatacgaattccattacgataacgtgctgtgggccctgctgacgctctttaccgtctctaccggggagggctggccccaggtgctgaagcactcagtcgacgctacttttgaaaaccagggaccgagtcctggctaccgcatggagatgagtatcttctatgttgtgtatttcgtggtttttcccttcttctttgttaacattttcgtggctcttatcataatcacatttcaggagcaaggcgacaagatgatggaagaatattctctggagaagaacgaacgcgcgtgtatcgactttgctatttccgctaagccgctcacccggcacatgcctcagaacaaacagtccttccagtatcgaatgtggcagttcgtggtgagtccccctttcgaatacaccatcatggcaatgattgcactaaatacaatcgtgctgatgatgaagttttacggcgccagtgtggcctatgaaaacgccctgagagtcttcaacatcgtctttacctccctgttttccttagaatgcgtgctcaaggtgatggcgttcggcatccttaactactttcgcgacgcctggaatattttcgactttgtgaccgttctcggctccattactgacatcctggtgactgaattcgggaacaactttattaacctaagcttcttaagactgtttcgtgccgcgaggcttataaagctgctccggcagggatataccattaggattctactttggacttttgtgcagtcctttaaagcgctcccgtatgtgtgcctactgatcgccatgctcttttttatttacgccatcatcggcatgcaagtgtttggcaacattggcattgacgtggaggacgaggatagtgacgaggatgaattccagattacggagcacaataacttcagaaccttcttccaggcactaatgctcctctttcgtagtgcaaccggagaggcctggcacaatatcatgttgagctgcctgagcgggaagccctgtgataagaattcaggcatccttacccgggagtgcggtaatgagtttgcatatttttactttgtgtcctttatttttctttgcagcttcttgatgctgaacctgttcgttgctgtgatcatggacaatttcgaataccttacaagagactcaagcattctggggccacaccacctggatgaatacgtgagggtctgggcagaatacgacccagcggcttgtgggagaattcactacaaagatatgtattctttgctaagagtgataagtccccccctgggtctgggaaagaagtgcccgcatagggttgcctgtaaaagactgctgcgtatggatctccctgtagctgacgacaatacagtgcactttaattcaacacttatggctttgattcggaccgcactggatatcaagattgccaaggggggggcggataaacaacaaatggacgctgaactccggaaagaaatgatggcaatctggcccaacctgtcccaaaagacactggacctcctggtgacaccccacaaatcaactgacctcaccgtcgggaaaatttatgcagcaatgatgattatggaatattatcgacaatccaaagctaaaaaactccaggccatgcgggaagagcaagaccgcacacccttgatgtttcagaggatggaacctccaagccccacacaagaagggggcccgggacagaatgctttgcccagcacacagttggacccagggggggcccttatggcccacgaaagcggactgaaggaaagtccatcctgggttacccagagagcacaagagatgtttcagaaaaccgggacgtggagccccgagcaggggcctcccaccgacatgcccaactcccaacccaattctcaaagcgttgaaatgagagaaatgggacgcgacggctacagtgattcagagcactatcttcctatggaggggcaggggcgcgctgcctcaatgccacgcctgccagctgaaaaccagaggcgaagaggtcgacctagagggaacaacctctccactatcagcgataccagccccatgaagaggtccgccagcgtcctaggacccaaggccagacgcctggacgattattctctggagagggtcccccctgaggagaaccaaagacaccatcagcggcgccgagaccgatcgcatcgggcttccgagagatcgttgggccgctacaccgacgtagacaccgggctgggtacggatctttccatgacgacccaaagtggcgatctacctagtaaagaacgtgaccaagaacgggggcgcccaaaggatagaaaacataggcaacatcaccaccaccatcatcaccatcatcatccaccaccaccagataaagacaggtacgctcaggagcggccagaccatggtcgggcccgcgctcgagatcagagatggtcccgctccccctccgagggccgagagcacatggcccaccgccaatag

SEQ ID NO: 110459 - DNA, 7488 bp, synthetic construct
  misc_feature 1..7488: note = Description of Artificial Sequence: Synthetic coding sequence
  source 1..7488: mol_type = other DNA
atggcaaggtttggagacgagatgcccgctagatatggaggtggcggttccggcgccgcagccggggtagtggtggggtcaggaggcggcagaggcgcagggggatctcgtcagggagggcaacccggagcccaaagaatgtacaagcaatcaatggcccagcgagcccgtactatggccctgtacaatcccatccccgtgcgccagaactgcctgaccgtgaacagaagcctgtttctgttttccgaggataacgtggttcgaaaatatgctaagaagattaccgagtggccccctttcgagtatatgattttagcaaccattatagcaaactgtattgttctggccctcgagcagcacttacctgatgatgataaaacccctatgtccgagaggctggatgacacggagccttatttcatcggaattttttgctttgaagccgggataaagattattgcccttgggttcgccttccacaaagggtcttatctgcgcaacggctggaatgtcatggattttgtggtcgtgctgaccggaattctggcaacagtcggcaccgagttcgacctgagaactttgagagcggtcagggtactgaggcctctgaaactggtaagcggtataccttcactgcaggtcgttctgaaatcgatcatgaaggccatgattccgctgcttcagatcggccttcttctcttcttcgctatcttaatctttgctatcattggactggagttttacatgggtaagtttcataccacctgtttcgaagaagggaccgatgatattcagggcgagtctccagccccctgtggcaccgaggagcccgctagaacttgccctaatggaacgaagtgtcagccttactgggaggggcccaataacgggatcactcagttcgacaatatcctctttgcagtcctgacagttttccaatgcattactatggagggctggacagacttactgtacaattccaacgatgcctccggcaatacatggaattggctgtactttattccccttatcatcattggaagcttctttatgctgaatttagtcctgggcgtgttatccggagagtttgctaaggagagggagcgtgtcgagaacaggcgtgcctttcttaaattgcgcaggcagcagcagattgaacgagaactcaatggctatatggagtggattagcaaggccgaagaggtgatcctggcagaggacgagactgatggagagcagcggcaccccttcgatggggccctcaggcgcacaaccattaagaaatctaaaacagatctgctgaatccagaggaagccgaggatcagctcgcagacattgcatccgtggggtctccgtttgcacgcgcgtctatcaagagcgcaaaactggagaattctaccttttttcataaaaaagagagaaggatgcggttttacatacggagaatggttaaaacccaagcgttttactggacagttctaagtttggtcgcactgaacaccctctgcgtggctatcgttcattataatcaacccgaatggctatctgacttcttgtactacgcggagttcatttttcttggtctgttcatgagtgagatgttcatcaaaatgtacgggctgggcacaagaccctacttccacagctcatttaactgcttcgattgtggagtgatcatcggctctattttcgaagtcatttgggccgtaatcaaacccgggacatccttcggtatatcagttctacgagccctacggctgctccggattttcaaagtgaccaagtactgggcctccttgcgaaatttagtggtatccttgctgaacagcatgaaatctataatatctctgctattcctcctgttcttgtttattgtcgtgtttgccttactcggtatgcagttgtttggcggacagttcaactttgacgaaggaacgccccctacaaacttcgacacctttccagctgctattatgaccgtgtttcagattttgactggcgaggattggaatgaggtgatgtatgacggcattaagtctcagggcggagtacagggaggaatggtgtttagcatctactttattgtccttaccttgttcgggaactacaccctgctgaatgtttttctggccattgcagtcgacaaccttgctaacgcccaggaacttacaaaggacgagcaagaggaagaagaagcagccaaccagaagttggcgctccagaaggcaaaggaggtggccgaggtgagtccactgtcagcagccaacatgtctatcgctgttaaagaacaacagaagaaccaaaagcctgcgaagagcgtgtgggagcagcgcacaagtgaaatgcggaagcagaatctgctggcaagtagagaggctctttacaatgagatggatccagacgagaggtggaaggccgcgtacaccagacacctcaggccggatatgaaaactcatctggaccggcctctcgtggtggacccacaggaaaatagaaacaataacacaaacaagtcacgcgctgcggagccgactgtggaccagcggctcggccagcagcgcgccgaagatttccttagaaaacaggcccggtatcacgacagagcgcgcgatccatccggcagcgccggactcgacgcacggcggccttgggctggcagccaggaggctgaattgagtagagagggcccttatgggcgggagtctgaccatcacgcgcgtgaaggaagcctggaacagcctgggttttgggaaggggaagctgaacgcggcaaggccggtgaccctcatagacgccacgtacatcggcaaggcggatccagagagtcccggtctggtagccccaggacgggagccgacggtgagcacaggcgacatcgggcccaccgcaggcctggcgaagaaggtcctgaagataaagccgagcgccgcgctcgccaccgcgagggcagtcgacccgcccgggggggtgaaggggaaggcgagggccctgacgggggcgaacggagacgcagacaccgccacggagctccggccacctatgaaggggacgctaggcgagaagataaagagcgacgtcacagaaggcggaaagagaatcaagggagcggcgttccagtatccggcccaaacctttccacaacaagaccaatccagcaggacctaggaaggcaggatccgccgctggcagaggacattgataatatgaaaaataacaagctggctacagctgaatccgcagcgccccatggctcactcgggcatgcgggccttcctcagagtcccgccaagatgggcaacagcacggaccccgggcctatgctagcaattccggcaatggctaccaatccacagaacgccgcttcaagacgcacgccgaataaccccggcaatccctctaaccctggcccccccaaaactcccgaaaactccctgatagttacaaacccctctggtacacaaacaaattccgccaaaaccgctagaaagcccgaccatacgaccgtggatatcccccccgcttgtcctccacccctcaaccacaccgtggtgcaagtaaataaaaacgccaacccggaccccctgcctaaaaaggaagaagaaaagaaggaagaagaggaagatgacaggggagaagacggacccaagcctatgccaccttatagcagcatgttcatcctgtctaccactaaccctctgcggcggttgtgccactacatactgaatcttagatactttgagatgtgcatcctcatggtgattgcgatgtcttccatcgcactggccgccgaggatcccgtgcagccaaacgccccccggaacaatgtgctccggtattttgactatgttttcactggtgtgtttacattcgaaatggtaatcaagatgattgacctggggctggttctgcatcaaggggcctacttccgggacctgtggaatatcttagatttcatcgtcgtcagcggggcactggtggcttttgctttcaccgggaattctaaaggaaaggatattaacacaattaaaagtctgagagtgctgagagtcctgcgcccacttaagactatcaagagattgcctaagctgaaggcagtgtttgactgcgtagtcaactctctgaagaacgtctttaacattttaatagtatacatgcttttcatgtttatttttgcagttgtggccgtgcaattgtttaaaggtaaattctttcattgtaccgatgaatccaaggagttcgagaaggattgtagaggtaagtatctgctgtatgaaaagaatgaggttaaggctagagatagggaatggaagaaatacgaattccactatgataatgtgctgtgggccctgcttaccctgtttactgtaagtactggggagggatggcctcaggtgctgaaacatagtgtggatgccacgttcgagaaccaaggaccttcccccggatatagaatggaaatgtcgatcttctatgtagtgtatttcgtggtgttccccttcttcttcgtgaacatttttgtagcactgatcatcatcactttccaggaacaaggagacaagatgatggaggaatactctctggaaaagaacgaacgcgcctgtattgattttgctatatccgccaaacctctcacccgacacatgccacagaacaagcaatcatttcagtaccgcatgtggcagtttgtggtctccccgccgttcgagtacaccatcatggccatgattgcgctgaacactattgtgctaatgatgaagttttacggggcctcagtcgcttatgagaacgcccttcgagtatttaatatcgtgtttactagtttgttttctctggaatgcgtgctgaaggtaatggccttcgggatcttaaactattttcgtgatgcatggaatatttttgattttgtgactgtactggggtcaatcaccgacatacttgtcacagagttcgggaataacttcataaacttgagcttcctgcggctgttccgcgcagcaagactcatcaaattgcttcgtcagggctacaccatccggattcttctgtggacgtttgttcagagttttaaagccctcccctatgtgtgtctgctgatcgccatgctcttctttatttatgcgataatcggaatgcaagtgtttggcaacatcggcatcgatgttgaggacgaggattccgacgaagacgagtttcaaattaccgagcataacaacttccggacatttttccaggccctcatgttactgttccggagtgccactggtgaggcttggcataacatcatgctcagttgcctgtccggaaaaccatgcgacaaaaacagcgggatcctgacacgagaatgcgggaatgagtttgcctacttttatttcgtctctttcatctttctctgttccttcctaatgctcaacttgttcgtcgccgttatcatggataactttgaatacctcacccgcgactcaagcatacttggacctcaccatctggacgagtacgtccgggtgtgggccgagtacgacccggccgcctggggacgcatgccatacctggacatgtaccagatgctcagacatatgtccccccccctgggtctgggaaagaaatgccctgcccgagtcgcatataaacgtctgctgcggatggacctccctgttgccgacgacaacacagttcacttcaactctacattaatggctctgatcagaacagcactggacataaagattgcaaagggtggcgccgacaagcaacaaatggacgccgagcttagaaaagaaatgatggccatctggcctaacctctcacaaaaaacgctggatctactggtcacccctcataaaagcacagacctcacggtaggcaagatctatgccgctatgatgattatggaatactacagacagtccaaagctaagaagctgcaggccatgagagaggagcaggataggacgcctctcatgttccaaaggatggagccccccagccccactcaagaaggcggcccaggtcagaatgcacttccctccactcagttggacccggggggggcactcatggctcacgaaagtggtcttaaggagagcccttcttgggtcactcagagggcacaggaaatgtttcaaaaaaccgggacctggtcacccgagcagggtcctcctaccgatatgcctaactctcagcctaactcacagtctgtcgaaatgcgcgagatgggcagggacggttatagcgattctgagcattacctgccaatggaaggccaagggagggctgcttcgatgcccagactgcctgccgaaaaccaaactatctcggacacgagcccaatgaaacgatcggctagcgtacttggccccaaagcaaggcggttggatgactactctctggagagagttcctccagaggaaaaccagagacatcaccaaagaagacgggataggtctcatagggcctctgagcgctcactagggaggtatactgacgtggacactgggttgggtacagacctttccatgacgacccagagtggggatctaccatctaaagaaagggaccaggagcgtggccggcctaaggatcgaaaacacaggcagcatcatcatcatcatcatcatcaccaccacccccctcccccggacaaagataggtatgcacaggagaggcccgaccacgggcgcgccagggctcgcgatcaacgatggtcccgcagcccttccgagggtcgggagcacatggctcatcgtcagggctcatcaagtgtgagtggcagccctgcaccctcaacgagtggaacctcaactccaagaagggggcgccggcagcttcctcaaaccccgagtacaccacggccccacgtgagctattctccagtgatccggaaagccgggggttctggaccccctcagcaacagcagcagcagcagcagcagcagcagcagcaggctgtggccaggccagggagagccgctactagcggtccacggcgttaccccggccctactgctgaacccctcgccggagacaggccaccgacgggcggacattcttccgggcgatcacctagaatggagcggcgcgtgccaggccctgcaaggtctgaaagccccagggcctgccgacacgggggggcccgatggccagcttcaggacctcatgtcagtgagggtcctccagggccaaggcatcacggttactatcgcgggagtgactacgatgaggccgacggacctggttccggtggcggtgaagaggccatggctggagcatacgatgctccccctcctgtcagacatgcctcctccggcgccactgggcgctctccccgcacaccacgtgcgagcgggccggcatgcgcttcccccagtcgacatggtaggaggctgcccaatggctactaccccgctcatgggttggcacgcccacgcggccctggcagtcggaagggactgcacgaaccctacagcgagtccgatgacgactggtgctag

SEQ ID NO: 110460 - DNA, 7521 bp, synthetic construct
  misc_feature 1..7521: note = Description of Artificial Sequence: Synthetic coding sequence
  source 1..7521: mol_type = other DNA
atggcgagattcggtgatgagatgcctgccagatacggcgggggcggttccggcgctgctgccggagttgtagtgggatcagggggaggccggggcgcaggtggcagccggcaaggcgggcagcccggcgcacagagaatgtataagcagtccatggcacagagagctaggactatggccctgtacaaccctatacccgtgcgacaaaattgtctcacggtcaacagatccctctttttgttctctgaggataacgttgttagaaaatatgctaagaaaattacggagtggcccccattcgagtatatgatcctggcgaccatcatagccaactgtatcgtactggccttggagcaacatcttcctgatgacgataaaacccccatgtcggaaagactggatgatacagagccttactttatcggtattttttgcttcgaggctggaatcaaaatcatagccttagggtttgccttccacaaaggttcttaccttcggaatgggtggaacgtgatggatttcgtagtggtcctcacagggatattggctacagtcgggaccgagttcgacttacgcacactgcgggcagtgcgcgtgctccggccgctgaagctggtctcgggcataccctcactgcaggtggttctcaagtcaattatgaaggctatgataccactgcttcagatcgggctgttgctgttcttcgcaatcctgattttcgctattatcgggcttgagttttacatgggaaagtttcacacaacttgttttgaggagggtacagacgatatccagggggaatcgccggcaccctgtggaaccgaggaaccagcccgtacatgtcccaacgggaccaaatgtcagccttactgggagggtccaaataacggaatcacacaattcgataacattctctttgcagtgctcaccgtcttccagtgtatcactatggaaggttggacggacctgctgtacaattccaacgatgcctctgggaatacatggaattggctctacttcatcccactgattatcatcggctcctttttcatgttgaatttagtcctcggggtcttgagcggggagttcgctaaagagagggagcgcgtggaaaacaggagagcttttctcaaactcagaaggcagcaacagattgagagggagctgaatggttacatggagtggatttcaaaggccgaggaagttatccttgctgaggacgaaacagacggcgaacagagacaccccttcgatgccctgcggcgcaccactattaaaaagtcaaagaccgaccttttgaacccggaagaggcggaggatcaactggcagacatcgccagcgtgggatccccttttgcaagggcctctatcaagtcagcaaagctggagaattctacgttctttcacaagaaggaaaggaggatgcgattctacattagacgcatggtcaagactcaggctttctactggactgtgctgtccctggtggctttgaatacgctgtgtgtcgctatcgtgcattacaaccaacccgagtggctctccgacttcctgtactatgccgagtttatctttctgggtttattcatgtcagaaatgtttatcaagatgtatgggctgggcactcgtccctactttcactccagcttcaactgtttcgattgcggggttatcatcggttctatcttcgaggtgatttgggcagttatcaagccaggcacaagttttggcatctcagtcctccgggcgctgagactgctgcgaatcttcaaagtcacgaagtattgggcttcgctgaggaacctggttgtctccctgcttaacagtatgaaatccatcatatctctgttattcttgctctttctgtttatcgtggtgttcgccctgctgggcatgcagctctttggaggtcagttcaatttcgacgaaggcacccctcccactaatttcgacacctttcccgcggccatcatgacagtcttccagatcctgaccggcgaggattggaatgaagtgatgtatgacgggatcaaaagtcaggggggtgtacagggcggcatggtgttctcaatttattttatcgtgctaaccctgtttggtaattacactctgctaaacgtgtttttggcaattgccgtggataacctcgcaaatgcacaagagctgacaaaagatgagcaagaggaggaagaggcagctaaccagaagttagctttgcagaaagctaaagaagttgccgaagtctcacctctgtcggccgcgaatatgtcaatcgccgtcaaagagcagcagaagaatcagaagccagccaagtccgtgtgggaacaacggactagcgaaatgcggaagcagaacctcctggcatccagagaggccctgtacaacgagatggatcctgatgaaagatggaaggctgcctacacccgacatctacgtccggatatgaagacacatctcgatcgtcccctggttgtggatccacaagagaatcgcaataacaacaccaataagagccgcgcagcagagccaaccgtggatcagagactgggccagcagcgggctgaggattttctcaggaaacaagcacggtaccacgaccgtgctcgggatccgtctggaagtgccggtctcgatgctcgtcgtccttgggccggaagccaggaggctgagctgagcagggaaggtccctatgggcgggagtcagaccaccacgccagggaaggcagtctcgagcagcccggtttctgggagggtgaagcagaaagaggcaaggccggagatccacataggcgccacgttcatagacaggggggtagcagggaaagcaggtccgggagcccccgaacaggcgcagacggcgaacacaggagacacagggcccatcgacgacctggtgaggaagggcccgaagataaagccgagaggcgtgctaggcatcgcgaaggaagcagacctgcaagagggggcgaaggggagggtgagggacctgacggcggtgaaaggcggcgaaggcaccgacacggtgctcctgccacttatgagggtgacgcaaggagggaggataaggaacggagacatagacggcggaaggagaatcagggctcaggggtgccggtgtcaggcccaaacctctcaaccacacgccccatccaacaggacctaggacgccaagacccgccactcgccgaagatatcgacaacatgaagaacaataagctagcaactgccgagtctgctgcccctcacggaagccttgggcatgctggcctgccacagtcgcccgcaaaaatggggaattccacagacccgggccctatgctagccattccggccatggccacaaatccgcagaacgccgccagccggcggacccctaacaatcccggtaatccaagcaatcctggtcctcccaagacacccgaaaattcactgatcgtaacaaatccctctggtacacagacaaactccgccaagacagccagaaagcctgatcacaccacagtggatattcctcctgcctgccccccccccctgaaccacactgtagtgcaggttaacaaaaatgctaatccagatcccctgcctaaaaaggaggaggaaaaaaaggaggaggaggaggacgaccgcggcgaagacggaccgaaacctatgcccccttacagctctatgtttattctgagcactactaatccgctgcgcagactgtgtcactatatactcaacttgcgctacttcgagatgtgcatccttatggtgatcgccatgagctctatcgccctagccgcagaagatcccgtccagcccaacgccccccggaacaacgtcctgcggtacttcgactacgtctttaccggcgtgtttaccttcgaaatggtaattaaaatgatcgacctagggctggtgttgcaccaaggcgcttactttcgagatctatggaatatcctcgacttcatcgtggtttctggcgccctcgttgcattcgcatttacgggaaattctaagggaaaagatatcaacacaattaaatctcttcgggtgcttagggtgctacggccactgaaaaccatcaaaagacttccaaagctgaaagctgtgtttgattgcgttgtgaactctctgaaaaatgtgtttaatatccttattgtgtacatgttgtttatgttcatttttgcagtggttgccgtacagctgttcaagggaaaattttttcattgtactgatgaaagcaaggaattcgagaaggattgtagaggaaagtacttgctgtacgagaaaaatgaggtgaaggcccgagatagagagtggaagaagtacgaattccactacgataatgtgctctgggccctcttgaccctcttcaccgtgtcaacaggagaagggtggccacaagtgctgaagcactccgttgacgctacattcgaaaaccaaggaccttctccaggctaccgtatggagatgtctatcttttacgtggtgtatttcgtggtcttcccattcttttttgtgaacattttcgtagccctcatcattatcacgttccaggagcaaggcgataagatgatggaggagtattcattggagaagaacgaaagggcttgcatcgactttgcgatcagtgccaaaccgctaactcgacatatgcctcagaataagcagagttttcagtacaggatgtggcagttcgtcgtatctcctccgttcgaatacactatcatggctatgattgcattgaatacgatagtgctgatgatgaagttctatggtgccagcgttgcttacgagaatgcgttacgtgtgttcaacatcgtgttcaccagcctttttagccttgaatgcgtgctaaaagtgatggcctttggcattctcaactactttagggacgcatggaacatatttgactttgtgacagtgcttggctcaattacagacatcctcgtcaccgagttcggcaataatttcattaatctgtcctttttacgactctttcgggccgcccgtcttattaagctgctgaggcaggggtacaccatcaggattctcctgtggactttcgttcagtctttcaaggccctgccgtacgtgtgtctgctaatcgcgatgctttttttcatctacgctatcatcggaatgcaggtctttgggaatataggaattgatgtggaagacgaggattccgatgaggatgaatttcagataaccgagcacaataactttagaacattcttccaagcactgatgctcctgtttcggtctgccacgggagaggcgtggcacaacatcatgctctcatgcctgtcagggaaaccctgcgataagaattccggaatactcacgagggaatgcggaaatgaattcgcttacttctatttcgtgtccttcattttcctctgcagttttctcatgctgaacctttttgtggccgttattatggataactttgaatacctaactcgcgactccagtatattggggccccaccacctggacgagtacgtgagggtatgggcagagtacgacccagccgcttggggtcggatgccatacttggatatgtatcagatgctgcgccacatgtctccgcccctgggcctgggaaagaagtgcccggcgcgtgtcgcatacaagaggcttctgcgcatggacttgcctgtagcggatgacaacacagtccatttcaatagtacactgatggccctcatacgcaccgccctcgatattaagattgccaagggcggcgccgataaacagcagatggatgccgagctccggaaagagatgatggctatttggccaaatctgtcgcagaaaaccctggatctcctggtgactccacataagtccactgacttgacagtaggcaaaatctatgccgcaatgatgataatggaatattaccggcagtccaaggcaaaaaaacttcaagccatgcgcgaggagcaggatcgcaccccacttatgtttcagcggatggaacccccctcccctacacaggaggggggtcccggccagaacgccctgccttctacccagctcgacccagggggggcgctgatggctcacgaatccggcctgaaagaatctccttcttgggttacccagcgcgctcaagagatgttccagaagactggaacctggagccccgaacaggggccacctactgacatgcctaacagtcagccaaattcccagtcggtggagatgcgggagatgggccgggatgggtacagtgacagcgaacactacctgcccatggaaggacagggaagagccgcctcaatgcctcgcctgcctgcagaaaatcagcgtagacggggaaggcctagggggaacaacctctccacaatttcagatacatctccaatgaagcgcagcgctagcgtgctggggcctaaggcacgccgcctggacgattattctctcgagagggttccccccgaggagaatcaaaggcaccaccagaggcggagggatagatcgcatcgggcatctgagcggagcttaggacgatatacggatgttgatacgggcttgggaacagatctgagtatgaccacccaaagcggtgaccttccctctaaggaaagagaccaggagcggggccggccgaaagaccggaaacaccggcagcatcatcaccaccaccaccatcaccatcatccgcctcctcccgataaagatagatacgcccaggaacgcccggatcatggccgcgcacgcgcacgagatcagagatggtctaggagtccatccgaaggccgggagcacatggcgcatcgtcagggcagttcgagtgtctcgggctcgcctgcaccctctacttccggtacctccacaccaagacgcggcagaagacagctcccccagacaccctcaaccccccgccctcacgtttcatactcgcctgtgattcgaaaggccggcgggagtggaccccctcaacagcagcagcagcaacagcagcagcagcagcaacaagcggtggcaagaccaggcagagcagcgacaagtggccccaggagatatccaggacctaccgcagagccgctcgcaggcgatcgccctcccaccggcggtcacagcagtgggaggtcccctagaatggaaagacgagtacccggacctgcacggagcgagtctcctagggcctgtaggcatgggggagctaggtggcccgcctctgggccccatgtgtcagagggacctccaggcccccgtcaccatgggtactaccgggggagtgattacgacgaggccgacggtccgggttctggtggaggggaggaagcgatggcaggggcttatgatgccccacctccagtacgccacgctagctcaggagccaccggacggtcgccccggacacccagagcatcgggtcccgcctgtgcctccccctccaggcacggtaggaggcttccaaacggctattacccggcccatggactagctcgacccaggggcccaggctctcgcaaaggtctacacgaaccttatagtgagtctgatgatgactggtgctag

SEQ ID NO: 110461 - DNA, 7539 bp, synthetic construct
  misc_feature 1..7539: note = Description of Artificial Sequence: Synthetic coding sequence
  source 1..7539: mol_type = other DNA
atggctagattcggagacgagatgcccgcacgttatggaggtggaggttccggggccgcagctggcgtggtagtggggtctggcggcggacgcggggccggcggttccagacaaggagggcagcccggggcccagcgcatgtataagcagtcaatggcccagcgcgccaggactatggctctctacaatcctatacctgtgcgacaaaactgcctgactgtcaaccgctcactgttcctgttctccgaggacaacgtggtacgcaagtatgccaagaagatcactgagtggcccccgttcgaatatatgatcctggcgaccatcatagctaattgcattgtgctggccctggagcagcacctccctgacgatgacaaaactccgatgagcgaacggctggatgacaccgaaccgtactttatcggcattttctgcttcgaagctggtataaaaatcattgctcttggatttgcttttcataaggggtcctatcttaggaacggatggaacgtgatggatttcgttgtggttctgacgggcatattagccacagtgggcactgagttcgacttgcgcacactgcgagccgtcagagtccttcgaccattgaagctcgtgtctggcataccgtcgcttcaggtagtcctcaagtcgattatgaaggcaatgatcccactgctgcagatcggcttgttgctcttttttgctatactcatcttcgcaatcattggtcttgagttctatatgggaaagttccacacgacgtgcttcgaggagggtaccgatgacattcaaggggaatctcccgccccatgcggaacagaagagccagctagaacttgcccgaacgggaccaagtgccagccttactgggaagggcccaacaacggcataactcagtttgataatatcctgtttgccgttctgacagtcttccaatgcataacgatggagggctggactgacctcctgtataatagcaacgacgcctccggaaacacctggaattggttgtatttcatcccacttatcataatagggtccttttttatgctgaatctagtgctaggcgttctatccggcgagtttgcaaaagagcgggagagagtcgagaaccggcgggcgtttctcaaactccgccggcagcagcaaatagagcgagagctgaatggatatatggaatggatcagtaaggccgaggaggtgattctggctgaagatgagaccgacggcgaacagaggcatccattcgacggtgctcttaggcgcaccacaatcaaaaagtccaagaccgacctccttaaccctgaggaggcggaagatcagttagccgatatagcctccgtcggcagcccatttgcgcgcgccagcatcaaaagcgccaaactcgagaactctaccttcttccacaaaaaggagcggcgcatgcgcttctacattcgacgcatggtgaagacacaggctttttactggacggtcctctctctggtcgctctgaatacactctgcgtcgccatcgtgcactacaatcaacccgagtggctgagcgatttcctatactacgctgaatttatctttttgggcttattcatgagcgagatgttcatcaaaatgtacgggctgggcactcgaccttacttccactccagcttcaactgtttcgattgtggcgtgatcatcggtagtattttcgaggtgatttgggccgtgatcaagccaggcacctctttcggcatttccgtgttgcgcgctctgcgactgctgcgcatatttaaggtcaccaaatactgggccagcctgcgtaatcttgtggttagtctgttgaactctatgaagagcataatctccctccttttcctgctgttcctgtttatagtcgtgttcgctctattgggtatgcagttgtttggcggtcagttcaatttcgatgagggcaccccccctactaacttcgacacatttccagccgcaattatgactgtctttcagatactgaccggagaggactggaacgaagtcatgtacgacggcattaagtctcagggaggagttcagggcggaatggtcttcagtatctactttattgttctgaccttattcggtaactacacacttctcaacgtttttctggcaattgccgtggataacttggccaacgcccaggaactgacaaaggtggaagcagacgaacaagaagaagaggaggcagccaatcagaagctggcgttgcagaaagctaaagaggttgctgaggtttctcctctgagtgcagctaacatgagtatcgcagtcaaagaacagcagaagaaccagaagcccgctaaatcagtttgggagcagaggacttccgagatgcgcaaacagaatctgctggcatcacgggaagctttatataacgagatggacccagacgagcggtggaaggccgcctacactagacatctgaggccagacatgaagacccatctcgaccgtccactcgtcgtcgaccctcaggagaacaggaataacaacactaataaaagccgagccgccgagccaaccgtggatcaacgactgggacaacagcgcgctgaggatttcctgcgtaagcaggccagatatcacgatagagctcgggatccaagtgggtccgccggtctcgacgcacgcagaccttgggccggcagtcaagaagccgagctgtcaagggaggggccgtatggccgggaatcagatcaccacgccagggaagggtccttagaacagcccggcttctgggagggcgaagcagagaggggtaaggctggcgacccgcacaggcgccacgttcaccgacagggaggaagtagagagagcagatccggatcccctagaaccggagcagatggggaacacagaaggcatagggcccaccgcagaccaggggaggagggcccagaggacaaggccgaaaggcgagcaaggcatagagagggctcgcgcccagccaggggaggtgagggcgaaggggaagggcccgacggcggagaaaggagacgaagacatcgccacggtgcccctgccacatacgaaggggacgcgagacgagaagataaagaaaggcgccataggaggcgcaaggagaaccaggggagtggtgtgccagtctctggtcctaatctttctaccacacgaccgatccagcaggacctgggccgccaggatccccccttggcagaagatattgataacatgaagaataataaattggcgaccgccgagagtgcagcacctcacggcagtcttggtcatgcaggtctaccccagagccccgcgaaaatgggaaacagtaccgaccctgggcccatgcttgctatcccggccatggccaccaacccacagaacgccgcgagtcggcgcacccccaacaaccctggtaacccctcaaatccagggcccccgaaaacaccagagaactccctgatcgtcaccaatcccagcggcactcaaaccaatagcgcaaagacggccagaaagcctgaccacaccactgttgacatacctcctgcttgccccccaccgttgaaccacaccgtcgtgcaggttaacaaaaacgccaaccctgatcccctccccaagaaggaggaggaaaaaaaggaggaagaggaagacgacaggggcgaagacgggcctaaacctatgcctccgtattctagtatgttcatccttagcacaaccaatccgctgcgaaggctgtgccattacatcctgaacctacgctattttgagatgtgcatattgatggtgattgccatgagctccattgccctagcagcagaagatcctgtgcagcctaatgcccctagaaataacgtgcttcggtacttcgattacgtctttaccggggtgttcacatttgaaatggtaataaagatgattgacctcggccttgtcctgcatcagggcgcatactttcgcgatttgtggaatattcttgattttatcgtggttagcggtgccctagtggcttttgcatttaccgggaacagtaaagggaaagacatcaacactatcaaatcactaagagttttgcgtgtgctaagacccctgaagaccatcaagaggctccccaaacttaaggcagtctttgactgcgtggtcaatagcctcaagaatgtgttcaatatcctcatagtctacatgctgtttatgttcatctttgccgtggtagccgtgcagttattcaagggcaaattctttcactgcacggacgaatcaaaagagttcgaaaaggactgccgcgggaaatacctgctgtatgaaaaaaacgaagtgaaagcccgtgatagggagtggaagaaatatgagttccattatgacaacgtgctctgggcccttctaactctctttacagtctcaaccggagaaggctggccacaggttctcaagcacagcgtggacgctactttcgaaaaccaggggccatcacccggatacagaatggagatgtccattttttatgtggtttactttgtcgtcttcccctttttctttgtaaatatctttgtcgcgctgatcatcatcacttttcaagagcagggggacaaaatgatggaggagtactctttggagaagaacgaacgtgcttgcattgattttgcaatcagcgcaaagccactaacaagacatatgccacaaaacaaacagtcatttcagtaccgaatgtggcagtttgttgtgagccccccctttgagtacactatcatggctatgattgcattaaacactattgtattgatgatgaagttttatggtgctagtgtcgcatatgaaaacgccttgcgggtgtttaacatcgtctttacatcattattcagcttggagtgcgtcctgaaggttatggcgtttggcatactaaactatttcagggatgcctggaatatttttgattttgttaccgtgcttggctccatcacagacatcctggtgactgaattcgggaaccccaataatttcatcaatttgagttttcttcgcttgtttcgagcggcacggcttattaagctgctgcgtcaggggtatactattcgaatcctgctgtggacctttgttcagagtttcaaagccctgccttacgtctgcttgctgatcgctatgctgtttttcatctacgcaattatcggaatgcaggtcttcggcaacattggaattgacgtcgaagacgaggactccgacgaagacgaatttcaaatcaccgaacacaataatttccggaccttcttccaggctctgatgctgttgtttcgtagcgccacgggcgaggcatggcacaatataatgctgtcatgtctgagtgggaagccgtgcgacaaaaattcgggaatcctgacaagagaatgcggtaatgagtttgcctatttctacttcgtatccttcatctttttgtgctctttcctaatgctcaacctattcgtggctgtgatcatggataattttgaataccttactcgtgattctagtatcctcggaccacaccatctcgacgagtatgtgagagtatgggccgagtatgacccggcagcatggggacgtatgccgtacttggacatgtaccaaatgcttcggcatatgagtcccccactggggctgggtaagaagtgcccggccagggtggcctacaagagactactgcggatggaccttcctgtggcggatgataacacagtgcattttaacagtactcttatggcactcatacgtaccgctcttgatatcaagatcgctaaaggaggcgccgataagcaacagatggatgctgaactccgaaaagagatgatggccatctggccaaacctgagtcagaagacacttgacctcctggttacaccccataagtctaccgacctgacggtgggcaagatctacgcagctatgatgattatggaatactacaggcaatcaaaggccaagaaactccaggcaatgcgagaggaacaggaccggaccccgctgatgttccagagaatggagcctccaagccccacccaggaaggaggacctgggcagaatgctctccccagcactcagcttgatccaggaggcgcactcatggcccacgagtctgggctgaaagagtctccgagctgggtgacccagcgggcacaagaaatgttccagaagaccggcacatggagtccggaacaaggcccaccaaccgatatgcccaactcccaacccaacagtcagtctgtggaaatgagggaaatggggcgagacggctattccgatagtgaacattatctgcctatggagggccaggggcgcgcagcttcaatgcctcgcctccccgccgaaaatcagcggcggcggggacgtccgcgtggaaataatctcagcaccatttcagatacctccccaatgaagaggtcagccagcgtgctcggtcccaaagcacgccggttagacgactacagcctcgagcgcgttcccccggaggagaatcaacgccatcatcagcgacgcagagaccgtagtcacagagcatcagaacgatccctagggcggtacacggatgtggatactgggcttgggactgatctttccatgaccactcagtccggtgacctaccatcaaaagagcgagatcaggaacgaggacgaccaaaagaccggaagcatcgccaacaccaccatcatcatcaccaccatcatcacccaccaccacccgataaagatcggtacgctcaagagagaccagaccatgggcgggcccgggcacgtgatcagcggtggtctcgttctcctagcgaaggtagggaacacatggcccacagacaaggctcttcctcagtttctggctcacccgcccctagcacttcaggaacatcaacacctcggcgaggcaggcgccagctccctcagactccgtccaccccgcggccgcacgtcagctattccccagtaattcgtaaagcaggtggaagcggcccccctcagcaacagcagcagcagcagcaacaacaacagcaacaggctgtcgccagacccggcagagccgcaacttccggacccagacggtatcctggccccacagccgagccactcgctggcgaccgacccccaactggcgggcacagttctgggaggagtccaaggatggagcgccgggtaccaggccctgcccgatcagagtccccccgcgcatgcagacatggaggggcccgttggccagcaagtggaccgcacgtatcagagggccctccagggccgcggcaccatgggtactatcgaggttctgactacgacgaggctgatgggcccgggtcaggcggtggcgaagaggcaatggcgggtgcttacgacgctccccctcccgtgcggcacgcctcttccggagcaaccggtcgatccccacgcacccccagagcttccggacctgcatgcgcctcaccaagtagacatgggagaaggttaccaaacggatactacccagctcatggcctagcccggccccgcggccctgggtccaggaagggtctccacgagccgtactccgaatctgacgacgattggtgttag

SEQ ID NO: 110462 - DNA, 804 bp, synthetic construct
  misc_feature 1..804: note = Description of Artificial Sequence: Synthetic coding sequence
  source 1..804: mol_type = other DNA
atgttatttatgtttatctttgccgtggttgcggtccagctgttcaagggtaaattttttcactgtaccgatgagagtaaggagtttgagaaggactgcagagggaagtatttgctgtacgagaaaaacgaggtgaaagccagggacagggaatggaaaaaatacgaattccattacgataatgtgctctgggctctgcttacactgttcactgtttccacgggcgaggggtggccacaagttcttaagcactcggtggacgctacgtttgaaaaccagggccccagccctggttacagaatggagatgtctatcttttacgtcgtttatttcgtcgtatttcccttttttttcgtaaatatctttgtggccttgatcataattacatttcaagaacagggagataaaatgatggaagagtattcactggagaagaatgagagggcctgcatagactttgcaataagcgctaaacccctgacaagacacatgccgcaaaacaagcagtcctttcagtatagaatgtggcagtttgtggtgtcccccccttttgaatatactatcatggctatgatagcattgaatacgatcgtgctgatgatgaagttttatggtgcatctgttgcttacgagaacgcactgcgcgttttcaacattgtgtttacctctcttttcagcctggaatgcgttcttaaggtcatggcattcggcattttgaattattttagggatgcctggaacatatttgactttgtgactgttctggggtcaataaccgacatcttagtgaccgagtttggttag

SEQ ID NO: 110463 - DNA, 6795 bp, synthetic construct
  misc_feature 1..6795: note = Description of Artificial Sequence: Synthetic coding sequence
  source 1..6795: mol_type = other DNA
atggctctgtataaccccatacctgtgcggcagaattgctttaccgtgaacaggtcactttttatctttggcgaagataatatcgtgcggaagtatgccaagaagcttattgattggcctcccttcgaatacatgatcttggctacaatcatcgcaaattgcatcgtgctggcacttgaacagcacttgcccgaggacgataagactccaatgagcaggcgactggagaaaacagagccctattttataggtattttttgctttgaggcaggcattaagattgtagctctggggtttatcttccataaggggagctaccttagaaacgggtggaatgtgatggattttatcgtcgtcctgtccggaatcctcgctaccgccggaacacacttcaacacccacgttgatctccgcactctgcgagccgtgagggtgcttcggccccttaaacttgtgagcggcatcccctctctgcaaatcgtgctgaagtcaatcatgaaagctatggtgccactgttacagatcgggctgctcctgttctttgccatacttatgtttgcgataataggtctagagttttattcaggcaaacttcacagagcctgttttatgaacaactcaggcatattggaaggttttgatccaccccacccttgtggggtgcagggttgcccagcaggctacgaatgtaaggattggataggccccaatgacggcattactcagttcgataatatattattcgctgtcctgaccgtatttcagtgtattactatggagggctggacgacggtgctgtataacacgaatgacgctctcggcgccacttggaactggctctacttcattccgcttattattattggcagctttttcgtgctcaacctcgtgctcggcgtcctgtcaggggagttcgccaaggaacgggaaagggtggaaaatagacgggcctttatgaagttaagacggcaacaacaaatcgagagggaactgaatgggtacagagcctggatcgataaagcggaggaggtgatgctcgccgaagagaataaaaatgcaggcacgtcggctctggaggttcttcggcgcgcaaccatcaagagatcaagaacagaggcaatgacccgggattcgagcgacgaacactgtgtggacatttcttcagtgggcactccactcgctcgggcttctattaaaagcgccaaagtcgatggcgtaagttactttaggcacaaagaacggctgctgcgtatttctataaggcatatggttaagtctcaagtcttttattggattgtgttgagcctggtcgccctgaacacagcctgtgtagctattgtgcatcataaccagccccagtggttaacccatcttttgtactatgctgaattcctatttctgggactgttcctgctcgaaatgtctctaaaaatgtacggcatgggtcccagattatacttccactccagttttaattgcttcgactttggggtcaccgtaggatcaatttttgaggtcgtgtgggcaatctttcgtcctgggacatcgttcggcatttcagtgttaagggcgttgagattgcttaggatcttcaagattaccaagtattgggcctcacttcgcaacctggttgtctcattgatgtccagtatgaagtctatcatttcccttctcttcctactgtttctgtttatcgtggtcttcgctctcctcggaatgcagctgttcgggggaagattcaacttcaatgatggaaccccctcagcaaactttgacacatttcccgccgctattatgaccgtgtttcaaatactgaccggcgaggactggaacgaggtgatgtacaacgggattcgtagccagggcggcgtgagctcaggtatgtggtcggcaatctatttcatcgttctgaccctgttcggaaactacaccttactgaacgtgttcctcgcgattgccgttgacaatcttgcaaacgcccaggagctgactaaggatgaacaggaggaggaagaagcgtttaaccagaaacacgcattgcagaaggcaaaagaggtatcccccatgtcagctccaaacatgccgtctatcgaacgcgacaggcgaaggcggcatcacatgtctatgtgggaaccaagatcttcccatctgcgcgaaagaagaagacgacaccacatgtctgtttgggaacagaggactagtcagctgagaaagcacatgcagatgagctctcaggaggctcttaacagggaggaagcgccaaccatgaacccactcaaccccctcaatccactctctagcctaaacccgttgaatgcgcacccttccctgtaccgccgtccaagggccattgagggcctggccctcggcctcgcactcgagaagttcgaagaggagaggatctcgaggggcgggagtttgaaaggcgacggtggagatcgatcctctgctctggacaaccaacgtacccctctctcactgggccagcgcgaacccccctggttggcccgaccctgtcatgggaactgcgaccccacacaacaagaagcgggggggggggaagccgtggtgaccttcgaagatcgcgctcggcatcgtcaatcacagagacgcagtagacatagaagggtgcgcaccgagggcaaagagtccagcagcgcctccagaagcagaagtgccagccaggagcgttccctggacgaagccatgccgactgagggtgagaaggatcatgaactgcgaggaaaccatggggctaaggagccgacaattcaggaggagagagcgcaggaccttaggcgcacgaacagcctgatggtgagcagaggctctggcctcgcaggagggctcgacgaggctgataccccactggtgcttccgcatccagaattggaggtcggcaaacatgtggtgctaaccgagcaggagccagagggatcgagtgaacaggccttgcttggaaatgtgcagcttgatatgggtagggtgatatctcagtcagagcccgatctgtcctgtattactgcgaacaccgataaagctaccactgaaagcaccagcgtaaccgtggccatccctgatgtcgatccgctggtcgactcaacagttgtccacatctcaaacaagactgacggagaagcctcccccctcaaggaggccgagatcagggaagatgaggaagaagtcgagaagaagaaacagaagaaggaaaagcgggaaactgggaaagccatggtgccacatagttccatgttcatatttagtaccactaacccgatcagacgtgcctgccattacatcgtcaatttgcgttatttcgagatgtgtatcctcctggtcattgctgcttcttcaatcgcgttggcggcagaggacccagtgctcacgaactctgagagaaacaaagtgcttcgatacttcgattacgtctttacaggggtgtttaccttcgagatggtaataaaaatgattgaccagggactgattctccaggatgggtcttactttcgggacctctggaatatcctggacttcgtcgtcgtggtcggcgctcttgttgccttcgcgctagccaacagcatgaagacaaacaaggggcgcgacataaaaacaatcaagtctctcagagtgctgagagtgttgcgacccttgaaaaccatcaaaagactgccaaaactgaaggccgtttttgattgtgtggtcacgagtctgaaaaatgtgttcaacattcttatcgtctataagttgtttatgtttatcttcgccgtgattgccgtccaactctttaagggtaaattcttttattgcaccgattcctccaaggacacagaaaaggagtgtatcgggaactatgtagatcatgagaagaataaaatggaggtcaaggggcgagaatggaagcgacacgagttccactacgataacatcatctgggcgcttctgactctatttaccgtctcaactggcgagggctggccccaagttctgcagcacagcgtggacgtgactgaggaggatagaggaccctcacgtagtaacaggatggagatgtctattttttacgtggtgtactttgtggtgtttccctttttctttgtgaacatatttgttgcgttgattatcattacctttcaggagcagggagacaagatgatggaggagtgtagtttagagaagaatgagcgcgcttgcattgacttcgccatctccgccaaacccttgacccgatatatgcctcagaaccggcatacctttcagtatagggtctggcactttgtggtgagcccttctttcgagtacactatcatggcaatgatcgccctgaatactgtggttttaatgatgaagtattatagcgcaccttgcacctatgagctggccctgaagtatctcaatatcgcctttactatggtgttttcccttgagtgcgtgctaaaggtgatcgcattcggcttcctgaattattttcgtgacacctggaacatttttgatttcattaccgtgattggctctataacagagatcattctgacggacagtaagctggtgaacacttctggcttcaatatgtccttcctgaaactctttagggcagcccggctcatcaagctgctgaggcagggatacacaattcggatccttctctggaccttcgtgcagagttttaaggctctcccctacgtgtgtttattgattgccatgttgttcttcatttacgccatcatcgggatgcaggttttcggtaacataaaactagatgaggaaagccacattaatcgacataacaatttccggtcatttttcggctctctgatgttactcttccgaagcgctacaggggaggcatggcaggaaatcatgctttcatgcctgggcgaaaaaggctgtgagcctgacaccaccgccccttctggccagaatgagaatgaaaggtgcggcacagacttggcttacgtttactttgtcagtttcatctttttttgttcatttcttatgctcaacttgtttgtggcagtgataatggacaacttcgagtatctgaccagggacagcagcattctcggtccacatcacctggatgagtttgtcagggtttgggcagaatacgacagagctgcttgtggacgaattcattataccgagatgtacgaaatgttgaccctaatgagtccacctctgggcctaggaaagcggtgtccgagtaaagtggcttataaacgcctcgtgctgatgaacatgccagtagccgaggatatgacagtacattttacttcaaccttgatggccttaattcggactgccctggatatcaagatagcaaaggggggcgccgaccgtcagcaactggatagtgagctacagaaagagactcttgctatttggccccacctcagccagaagatgttagacctactggtcccaatgccaaaagctagtgacctaaccgtcggaaaaatatacgccgccatgatgattatggattactataaacagagcaaagtcaaaaaacaacggcagcagctcgaagagcaaaaaaacgcccccatgttccagcgcatggaaccatcctctctcccacaggagataatcgctaacgccaaggccctaccgtatctccagcaagatcctgtgagcggtctgtctggcaggtccggctacccatctatgtcacccctgtcccctcaagacattttccagttggcctgtatggatcctgccgatgatggccaatttcaggaacgccagtctctagaacctgaagtgagcgagctgaaaagcgtgcagccctccaaccacggcatttacctgccaagcgatacacaggagcacgctggctcaggcagagcatcctccatgccaaggcttactgtcgatccccaagtcgtcacagacccctcatccatgcgcagaagcttctccaccatcagggataagcggagtaacagttcctggttggaagaattctcgatggaaagatcttctgaaaatacctacaaatcgagacgtagaagttaccactcctctctgcgcctgtccgctcatcggcttaactctgattctggtcacaagagcgatacacacaggagtggaggaagggaacggggccgtagcaaagagaggaagcatctgctctcccctgatgtgagcaggtgcaactctgaagaacgtgggacccaggctgactgggaatctcctgagcgtcgccagagcaggtcaccatccgagggccggtcccagacaccaaaccggcaaggcaccggcagcttaagcgagagctctattccctctgtaagtgacacatcaacgcccagacggtctcgccgccagttgccccctgtgcccccgaagccgcggcccctcctttcctatagcagtctgataagacacgccggctctatatctccccccgctgacggctctgaagagggatcacccctgacatcacaggccctggaatccaacaacgcctgtttgacagagagcagcaatagtccccaccctcagcagtcacagcacgcctctccccaaagatacatcagtgagccttacctcgcccttcacgaggactcgcacgcctcggactgcggggaggaagagacgttaacatttgaagcagccgttgcaacatccctcggaagatctaacactatcggttctgccccacccctgcgccatagctggcaaatgcccaacggacattaccggaggcggagaaggggcggaccaggcccaggaatgatgtgtggcgcagtcaataatttgctgtcagacaccgaagaggatgacaaatgctag

SEQ ID NO: 110464 - DNA, 6609 bp, synthetic construct
  misc_feature 1..6609: note = Description of Artificial Sequence: Synthetic coding sequence
  source 1..6609: mol_type = other DNA
atggcactgtacaatcctataccagttcgccagaattgtttcaccgtgaaccggtccctgtttatcttcggcgaggataatatagtaaggaaatacgcaaaaaagctcatcgattggcctcctttcgaatatatgattttggctactataatagctaattgtatcgtgctggcactcgaacagcatctacccgaggacgataagacacctatgagcagaaggctggaaaagaccgaaccttattttatcgggattttttgctttgaggccggcattaagatcgtggccctcgggtttattttccacaaggggtcctacctccggaacgggtggaacgtaatggactttatagtggtgctgagcgggatcctcgccaccgctggaactcactttaatacccacgttgacctgcggacactgagggccgtcagggttctaagacctctgaagctggtttccggcatcccaagcctccagatcgtgttaaaatccatcatgaaagcaatggtccctctgctgcagattggactgctgctgttcttcgccattttgatgttcgctattattggccttgagttctactccggcaagctgcaccgtgcgtgttttatgaataatagtgggatcttggaaggcttcgacccaccccacccatgcggagtccaaggttgccctgctggatatgagtgcaaggactggattggacctaacgacggcatcacacagttcgataacattctgttcgctgttttaactgtgtttcagtgcatcacaatggagggttggaccacagtgctctacaacactaacgatgcactgggcgctacatggaactggctttactttattcccctaattataattggttctttctttgttctcaacctggtattgggagtcctcagtggggaattcgccaaggagagggagagggtcgagaacagacgagctttcatgaagttgcgaagacagcaacagattgaacgcgagctgaacggctaccgggcatggatcgataaggcagaggaagttatgctggccgaggagaataaaaatgccggcacttcggcactggaagtactccgcagggccaccattaaacggagccgaacggaagccatgacccgcgattcctccgatgagcactgcgtggatatctcttccgttggtactccactcgctcgtgcctccatcaaatcagctaaagttgatggggtgtcatacttccggcataaagaacgcctcttgcgcatctccatacgtcatatggtgaaatctcaggtcttctattggatcgtcttgagtctagtggcactgaacaccgcttgtgtagctattgtgcaccacaatcagccgcagtggctcacacacctgttgtattacgcagagtttttgttcctgggactgtttctgcttgagatgtcacttaaaatgtatggtatgggacctaggctgtacttccatagctcatttaattgctttgactttggggtaaccgtcggatcaatatttgaggtggtgtgggctatatttcggccaggcacttcattcgggatcagcgtgctccgggccctccgcttattaaggattttcaaaatcaccaaatactgggcttctctcaggaacctggtagtctctctgatgtccagtatgaagtctattattagcttgctttttttgctgtttttgtttatcgtggtcttcgcccttctgggcatgcaattgtttgggggcaggttcaattttaacgatggaacaccctccgccaattttgacactttccccgccgctatcatgacagtgtttcagatactaacaggtgaagactggaatgaggtcatgtataatgggatccgctcacaggggggtgtgagctctggcatgtggtctgccatatatttcatcgtcttgaccctttttggcaactacacccttttaaacgtttttctcgctattgcggttgacaatctggccaacgcgcaagagctgacgaaggatgaacaggaggaggaggaagctttcaaccaaaaacacgcccttcagaaggccaaagaggtatcccctatgagtgcacccaatatgccatctatcgagagagaaaggaggagacggcaccatatgtctgtttgggagcagcgaacttcccagctgcgaaagcatatgcagatgagcagtcaggaggcactgaaccgagaggaggcgcccactatgaatcccctgaatcccctcaacccattgagctctctgaatcccctcaatgctcaccccagtctgtacaggagaccaagagctatcgaaggactggccctgggtctggccctggaaaagttcgaggaggagcggatcagcaggggaggatcacttaagggtgacggtggggatagatcttccgcgctcgacaatcaacgcacccccttgagcctcggtcagagggagcctccgtggctggcacgcccttgtcatggtaactgtgacccaacccagcaagaagctggcggcggcgaggcagtcgtcacattcgaggaccgcgcaagacatcgtcagtcacagcgtaggtctagacatcgcagagtgagaacagagggcaaggagtctagttcagcttcccggtccagatccgctagtcaggagcgctcccttgatgaagcgatgcctacagagggcgaaaaggaccacgagctcagaggcaaccacggagctaaagaacctaccattcaggaagagcgagcccaggacctgcgcagaaccaatagccttatggtgtcccgcggaagtggtcttgccggagggttggacgaagctgatacgccattggtcctaccgcacccagaattggaggtgggaaaacacgtggtgttaacagaacaggagcccgaagggtcctcagagcaagccttgctaggcaatgtccaactggacatgggccgtgttatatcccagtccgagccagatctgtcgtgcattacagcaaataccgacaaagccactacagaatcgacatccgtgaccgtcgctatccccgacgtggaccccttggtcgacagcacagtcgtgcacataagcaacaagactgatggagaagcaagtcccctgaaggaagcggagatccgcgaggacgaagaagaagtagagaagaagaaacagaagaaagaaaaacgcgaaactggaaaagccatggtcccccacagttccatgttcatcttctccactaccaatccaatccggcgggcgtgccactacatcgtgaatctgcgatatttcgaaatgtgcatcctgctcgtgattgctgccagtagcatcgcattggcggccgaggacccggtgctcactaattcggagcgcaacaaggtcctgcgctatttcgactacgtgttcacgggcgtgtttactttcgagatggttatcaagatgatcgatcagggcctgattctgcaggacggtagctacttcagggacctgtggaacatcctcgattttgtggtggttgtgggcgccctggtcgcctttgccctcgccaactctatgaagactaataaagggagagatatcaagaccataaaatcgctccgcgtcctgcgagttttgagacctttgaagaccatcaaaagactcccaaaactcaaagcagtattcgattgcgttgtaacctccctcaagaacgtctttaatatcctgatcgtctacaaactctttatgtttattttcgcagtgattgccgtccagctcttcaagggaaagtttttttattgtactgatagcagcaaggacacagaaaaagagtgcattggtaactatgttgatcatgagaaaaacaagatggaggtgaagggccgtgaatggaagcgccacgaattccactacgacaacattatatgggctttactgactctgtttactgtgtccactggggagggatggccccaggtacttcagcattccgttgatgtaaccgaagaggatcgtggtccaagtcgctccaatcgtatggagatgagcatcttttacgttgtatacttcgtggtctttccattcttcttcgtcaatatatttgtcgctctgattatcattacttttcaggaacagggagataagatgatggaggagtgctcactcgagaaaaacgaacgggcgtgcattgactttgcaatatccgctaagcccctgacgcgttatatgccccagaatagacacacgttccagtatcgggtgtggcacttcgtcgtttccccaagttttgagtatactataatggcaatgattgcactgaacactgttgtactcatgatgaaatactactcggccccatgcacctacgagctggcgctgaaatacttgaacattgcctttactatggtcttcagcttagaatgcgtgcttaaggtgatcgcctttggcttcttgaactactttagggatacatggaacatctttgacttcattacagtgattggctctatcaccgagattatcctgactgattctaagttggtaaatacctctggcttcaatatgtcgtttctaaagctgtttcgcgccgccaggctcatcaagctccttcgtcagggctataccataagaattctcctgtggacatttgtccaatcctttaaggcattgccgtacgtgtgcctgttgattgccatgctgttcttcatctacgcaatcatcggcatgcaggtatttggtaacattaagctggacgaggaatcccatataaacagacataacaacttccggtcattcttcggaagcctgatgcttttgttccgcagcgccaccggtgaggcctggcaggaaattatgctctcatgtttgggcgagaagggctgtgagcccgacacgacggccccttctggtcagaatgaaaacgagagatgcggtacggatcttgcttatgtgtattttgtttcctttatattcttttgctcatttcttatgctgaatctgttcgtggctgtcattatggacaactttgaatacctgaccagagatagctccatcctgggaccccaccacctcgacgagtttgtgcgagtgtgggccgagtacgatcgagctgcttgtgggcgaatcccatacaaggacatgtacaaactggtcagggtgatcagtcctcccctgggcctaggggaaaactgcccatatcgcgtcgcttgtaaaaggcttgtcttaatgaacatgcccgtggccgaagacatgacagtacactttacatctacactcatggctctgatccggacagcgctggacatcaaaattgccaaggggggagccgacaggcaacagcttgactccgagctgcagaaagaaacattggcgatttggcctcacttatctcagaaaatgcttgacctgttagtccctatgcctaaggccagcgatctgaccgtcggcaaaatatacgctgccatgatgatcatggactactacaagcagtcgaaggttaaaaagcagcggcaacagttggaagagcagaaaaatgcacccatgttccaacgaatggagcccagcagtctacctcaggaaataattgctaatgcaaaagcacttccgtacttgcaacaggaccccgtgtctggactgagtggccggtcgggctacccgagcatgtccccactatctccacaggacatctttcagttggcttgcatggaccctgccgacgatggtcaattccaggaaaggcaaagcttggtggtcacagatccctcctccatgcgccggagcttctccactatcagagacaagcgctcgaattcatcatggctagaagagttctctatggagcgaagtagcgaaaatacatacaaatcgcgtcgcagatcctaccactcctccctccgcctatcagcccacagactgaattctgactcaggccacaaatctgatacccaccgcagcgggggacgggaaagaggtaggtccaaggagaggaaacatctgctcagtccagacgtgtccaggtgtaacagcgaggagagagggacacaggctgactgggagtctccggagaggcggcagtctagaagtccgtctgaaggcagaagccagacgccgaaccgtcagggaactggaagcctgtccgaaagctctattcccagtgtcagtgacaccagcaccccacggcggagcagacggcagcttccccccgttccccccaaaccccgcccgctcctgtcttacagctctctgatccggcatgcgggctccatctcccctcccgcggatggctctgaggaaggtagtccactgacgtcacaggctctcgaatctaacaacgcgtgtctgactgaaagctcaaactccccacatccccagcagtcacagcatgcctctccgcagagatatatttcggaaccgtatcttgctctgcacgaggatagccacgcatctgattgtggggaagaagaaacccttacgtttgaggcagccgtggcgacctccctgggtcggagcaataccattggtagtgcccctccgttgaggcattcatggcaaatgccgaatgggcactacaggagaagaaggagaggcggcccaggacctgggatgatgtgcggggccgtgaataacctgctctccgacacagaagaggatgataaatgttag

SEQ ID NO: 110465 - DNA, 6885 bp, synthetic construct
  misc_feature 1..6885: note = Description of Artificial Sequence: Synthetic coding sequence
  source 1..6885: mol_type = other DNA
atggctcgctttggagaagcagtggtggcccggccaggttctggagacggggactccgaccaatctcgaaacaggcaggggacccccgtccccgccagcggccaggcagcggcatacaagcagactaaagcccagagagctcggacgatggccctgtataaccccatccccgtgcgacagaactgcttcacagtcaaccgtagtctctttatctttggggaggacaatattgtgagaaaatatgccaaaaagctgattgattggccacccttcgaatatatgatacttgcgactataattgccaactgcatagtgctggctctcgaacagcacctaccagaggacgacaagacccccatgtcacgccggctggagaagacagagccgtacttcattggcattttctgtttcgaggctggaataaaaattgtcgctctcgggttcatattccataaaggcagctatctccgaaacggctggaacgttatggactttatcgtggttcttagcggaatactggcgacagcagggactcattttaatacccatgtagacctgaggactctgcgagccgtgcgagttctgcggccacttaagctggtctctggcataccatctcttcaaattgtgctgaaatctatcatgaaagcaatggtgcctttgctccagattggccttctgttgttcttcgccatactcatgtttgccatcattggactcgaattttactctggtaaactacacagggcctgttttatgaacaattccggtatcctggaaggctttgatcctccccatccttgcggtgtccagggctgcccagccggctatgagtgcaaagactggattggccccaacgacggcattacacagttcgataacatcttattcgccgttttgacggttttccagtgcattacgatggagggctggaccaccgtcctttacaacacaaatgacgcactgggcgccacatggaattggctttactttattccactaattattatcggttcgttttttgtgctgaacctggtgctcggtgtactgtccggagagtttgcgaaggaaagagagagggttgaaaataggcgcgcttttatgaagcttcgcagacagcagcagatagaaagggaactaaacggctatcgggcttggatcgacaaggctgaggaggtcatgctcgccgaagaaaataagaacgccgggacatccgctctggaggtcctgagaagggcgacaatcaaacgaagtcgaaccgaggccatgactagagactcaagcgacgaacactgcgtggacatcagctccgtcgggactccgctcgcgcgcgcgtctattaagtccgccaaggttgatggtgtaagctacttcagacacaaggagcgtttgcttaggatttctatcaggcacatggttaaatcccaggtcttctactggattgtgctgagtctggttgccctgaacacagcttgcgtggccatcgttcatcacaaccaaccccagtggctgactcatctcctgtactatgccgagttcctcttcctagggctgttcctcctggagatgagcctgaaaatgtacggcatggggccaagattgtacttccatagctctttcaattgctttgacttcggagttaccgtgggtagtatcttcgaggtcgtgtgggcaatctttcgacccggaacttccttcggaatcagtgttctgagggccttgcggcttttacggatctttaagattacgaaatactgggcttcactgcgcaatttggtagtgtctctcatgagctcgatgaagagcattatctccctgctgtttctcctgtttctgtttattgtggtttttgctctgctggggatgcagttgtttggagggcgattcaacttcaatgatggcacaccatcggcaaacttcgacacctttccagccgcaatcatgactgtcttccagatcttgacaggggaggattggaacgaagtgatgtataacggtatccggtctcaggggggagtctcctccgggatgtggtccgccatctactttatagtgttaacactctttggaaactacaccctcttgaacgtgttcttggccatcgcagtggataacctggctaacgcgcaggaactaaccaaggacgaacaagaagaagaggaggcgttcaatcagaagcatgccttgcagaaagcaaaggaggtttctccaatgtccgctcccaacatgcccagtatcgagcgggagcggcggcgccgccaccatatgagcgtgtgggaacagaggaccagccagctgagaaagcacatgcagatgtcttctcaggaggcactgaacagggaggaggcccctaccatgaacccactgaacccccttaatccgctgtctagcctgaatccactcaatgctcatccaagcctttaccgccggccacgcgcgatcgaaggtctggcactcggcttggccctggagaaattcgaggaggaacgaatttcccggggagggagcttgaaaggtgatggaggcgatcggtcctctgcactggacaatcagcggacacccctgagcctcggccagcgcgagccgccttggctagcgagaccatgtcacgggaattgtgaccctacccagcaggaagccgggggaggcgaggccgtcgtaacattcgaagaccgggcacgccataggcagtcacagagacgatcacgacataggcgggtgaggacggagggaaaggaatcatcttccgcgtcacgctcaagaagtgcaagtcaggagcgctcactggacgaggccatgccaacggagggggagaaggatcacgagctacgtgggaaccacggagcaaaggagccgacaatacaagaggagagagcacaagatctgcgccgcactaattcacttatggtttcacgcgggagcggcctggccggtgggctcgacgaggccgataccccactggtcctgccacaccctgaactggaagttggcaagcacgtggtgctgaccgaacaggagccagaaggttccagcgaacaggccctgctcgggaatgtccagctggatatgggtagagtaatctctcagagtgagcccgatctgagttgcataacagctaataccgataaggctaccacagaaagcacttctgtgaccgtcgctatacctgatgtcgatccccttgtagacagcactgtggtgcatatcagtaacaagacggacggagaagccagtccactgaaagaggccgaaatcagagaggacgaagaggaagtggagaaaaagaagcagaagaaggaaaagagagaaaccgggaaggccatggtgccacactcttccatgttcatcttcagcaccaccaaccccattcggcgtgcctgccactacatcgtgaacctgagatattttgaaatgtgcatccttctggtcatcgctgcatccagcattgcattggcggccgaggatcccgtgctgaccaatagtgagagaaacaaggtgctgcgctatttcgattatgtgttcacaggggtgtttacattcgaaatggtcatcaagatgattgaccagggcctgatcctgcaggacgggtcatatttcagggacctctggaacatcctggacttcgtggtagtggtgggagcactcgtcgcctttgcactggccaacgccctgggaactaacaaaggacgcgacataaagactatcaaatctctacgggtcctgcgcgtgctgcggccgctaaagaccattaagcggttaccaaaattgaaggccgtttttgattgcgtggtgacttctctgaaaaatgtgtttaatatccttatcgtttacaaactctttatgtttatctttgctgtcattgcggttcagctgttcaagggcaagttcttttactgcactgactcctctaaagacacagagaaggaatgcatcggcaactatgtcgatcatgagaaaaataaaatggaggtgaagggacgagagtggaagcgccatgaatttcactacgacaacattatctgggctctacttaccctattcacggtgtccaccggcgagggttggccccaagttctccagcattctgttgacgttacggaagaggatcggggccctagccggtccaaccgcatggagatgagcattttctacgttgtctattttgtggttttcccttttttcttcgtgaacatatttgtcgcactgattatcataacattccaggagcagggggacaaaatgatggaagagtgcagtctcgaaaaaaacgagagggcttgcattgactttgctatctccgccaaacctctcacgagatacatgccacagaatcgccatacatttcagtacagggtctggcattttgtggttagcccatcattcgaatataccatcatggcaatgattgcccttaacaccgtggtattgatgatgaagtactattccgccccgtgcacatacgagctggcactgaaatacctgaatatagctttcacgatggtgttctccctggagtgtgtactcaaggtcatcgccttcggcttcctgaactatttccgagatacgtggaatatttttgatttcattaccgtaatcggaagtatcactgaaatcatacttacggacagtaagctggtaaacacctcaggattcaatatgtctttcctcaaactgttccgagccgctagactgattaagttacttcggcagggttacaccattagaatcttgctgtggacctttgtgcagagctttaaggccctcccatacgtttgtttacttatagctatgctgttttttatttacgcaatcatcggtatgcaggtgtttggaaatataaagctggacgaggagtcacatatcaatcggcacaataattttcgctcattttttgggagtctgatgctgttgtttcgcagcgccaccggcgaggcctggcaggaaattatgttaagctgccttggggaaaaaggctgcgaacctgatacgaccgccccctctggtcagaatgagaatgagcgctgcgggacagacctggcctatgtctacttcgtgtcctttatatttttctgcagcttccttatgttgaacctgtttgtagccgtgattatggacaatttcgaatacctgactcgggactctagcatcctggggccccatcacctggatgaattcgtccgcgtttgggccgagtatgatcgtgcggcctgcggccgcattcactacaccgagatgtatgaaatgctcaccttgatgtccccccctctgggactcggtaagcgctgtcccagcaaggtggcgtacaaacgccttgttctgatgaacatgccagtggctgaggacatgacggtgcattttaccagcactttgatggccctcatcagaacagctctggacatcaaaattgccaaagggggcgcagaccgtcagcaactggattctgagctgcagaaggaaactctggcaatctggccccacctctctcagaaaatgctagatctgttagtccctatgccaaaggcctctgacctgacagtggggaagatttacgcggccatgatgattatggattattacaaacagtccaaggttaagaagcagagacagcaactcgaggaacagaaaaatgcccctatgttccagaggatggaaccctcttccctacctcaggagatcatcgccaatgccaaggccctcccctatttacagcaagaccccgtgtctggactgtcaggccgtagcgggtacccttccatgtctccactctcgccacaggatatctttcagttggcctgtatggaccccgcagacgacggccagtttcaggaacggcaaagccttgagcctgaggtgtctgagttgaagtcagtgcaaccttccaatcacggcatctatcttccgtccgacacacaagagcatgccggctcgggtcgagcctcctccatgccgaggctaaccgtggatccgcaggtcgtgaccgatccgagctcaatgaggagaagctttagcaccatccgggacaagcggagcaattcctcatggctagaagaattctctatggaacggtcaagcgagaatacctacaaaagcagaaggcgcagttatcactcttctttgcgtctctccgctcatcgtttgaatagtgacagcggccacaaatccgacactcaccgatctggtgggagggagcgtggacgcagcaaagagaggaagcacttgctgtcacctgatgtgagtcgatgcaattccgaagaacgcggtactcaggctgactgggagagcccagagcggcggcagagccggtctcccagcgagggtcgcagtcagacacccaaccgtcagggaacaggaagcctctccgaatcctcaattcctagtgtttccgataccagtaccccacgccggtcccgtcggcagttgccgccagttccaccgaaaccaaggcctcttctgtcttatagcagcctgattcgacacgcaggctctataagtccgcccgccgacggctccgaagaaggctctccgctgacatctcaggctctggagtcgaacaacgcctgtcttacagaatcctctaactccccacacccacagcaatcccagcacgcaagcccccagcgctatattagcgaaccatacctcgcactgcacgaagatagccatgcatcggactgtggtgaggaagagacactgacctttgaggctgccgtggccacatcactgggtcgcagcaacacaattggctccgcaccacctctgcgacatagctggcagatgccaaacgggcattacaggaggaggcgacgcggcgggccaggcccaggcatgatgtgtggcgccgtgaataaccttctgtccgacactgaagaggatgataagtgttag

SEQ ID NO: 110466 - DNA, 5634 bp, synthetic construct
  misc_feature 1..5634: note = Description of Artificial Sequence: Synthetic coding sequence
  source 1..5634: mol_type = other DNA
atgctcgctgaggagaataaaaacgcaggtactagcgcattagaggtcctgagacgcgctactataaagagatctcgcaccgaagctatgacccgagattcctctgatgaacactgtgtggacattagttcagtcgggacacccctggctcgggcgtctattaagagcgctaaggtagatggtgtgtcctacttcaggcataaggagcgtctactgcgcataagcatacgccatatggtcaagtcccaggtgttctattggatagtactgagcctggtggcgctcaataccgcctgtgtcgctatcgtccatcataaccagccacaatggcttacacatctcctgtactatgccgagttcctgttcctcggattgtttctactggagatgagcctaaaaatgtatgggatgggtcctcggctgtacttccattcaagctttaattgcttcgacttcggcgtcactgtaggatccatcttcgaggttgtgtgggctatattccggcccggtacatctttcgggattagtgtcttaagggctctgcggctgttgcggatctttaagattaccaagtactgggcctcactgcgaaatcttgtcgtcagtcttatgagttccatgaaaagcatcatctccttgttatttctgctgttcctgttcatcgtggttttcgcgctactgggaatgcagttgttcgggggtaggttcaacttcaatgatggcactccctctgccaatttcgacacctttccagctgccatcatgacggtctttcagattttaaccggagaagactggaacgaagtcatgtacaatggaattagaagccaggggggcgtgtctagcggtatgtggtccgctatctacttcatcgtactcacactgttcggtaactatacacttttgaacgtgttcctggctatcgcagtcgataatctggccaacgcacaggagcttacgaaggatgaacaggaagaagaggaggctttcaaccagaaacacgctttgcagaaggccaaagaggtctcaccaatgtccgctccaaacatgcccagcatcgagcgcgaccgacgtaggaggcatcacatgagtatgtgggagccccgatcctcccatttacgcgagcgaaggcggcgccatcatatgagcgtctgggagcagaggacttcccaactgagaaagcatatgcagatgtcctcccaggaagctctcaatcgcgaagaagctccgacaatgaaccctctcaaccccctcaaccctctctccagcttgaatcctctcaacgcacaccctagcctctataggagaccgagagccatcgaagggcttgccctgggcctcgcactcgaaaagtttgaagaagaacgtatttcaagaggaggatctctgaagggagacggcggggatcgttcctccgctctggataatcagcgaacacccctgtcgctggggcagagagaaccaccctggttggctcggccctgccatggtaactgtgaccccacacagcaggaggcggggggcggcgaggccgtagtaacgttcgaggaccgggcacgacaccgccagtctcagcgaaggagccggcatcgccgggtgaggaccgaaggtaaggagtcatcaagcgcatctcgatcccggtctgccagccaagaaaggagtttggacgaggctatgccgaccgagggggaaaaggaccatgagcttcgcggtaatcatggggctaaggagccaacaattcaagaggaacgcgctcaagacctgcgtaggacaaattccttaatggtgagccggggatcgggtctcgctggggggcttgacgaagccgatactcctctggtactccctcatccagaactggaggtaggcaagcacgttgttctaactgagcaagaacctgagggcagctctgagcaggcacttttagggaacgtccaactggacatgggaagagtgatttcgcagagcgaaccagacctgtcatgcatcaccgctaataccgataaggccactactgaatcgacctcagtcactgtggctatccctgatgtcgacccattggttgattctaccgtagtccacatttcaaataagaccgatggagaagccagccccctgaaggaggccgaaatacgcgaagacgaggaggaggtggagaagaagaaacaaaaaaaggaaaaacgggagacggggaaggccatggttccccacagctctatgtttattttcagcaccacaaaccctatcagacgggcgtgtcactacatcgttaacctgcgctactttgagatgtgtatactgcttgtgatcgccgccagctctatcgcattggctgctgaggaccccgtcctcactaactccgagcggaacaaagtcctacgatatttcgactacgtgtttaccggagtgttcacctttgaaatggtaatcaagatgatcgatcaaggtctcatattgcaagatggcagttacttcagagatctgtggaatatcctagattttgttgtggtcgttggcgcccttgtcgccttcgcgctggctatgtctctggagaccaataaaggcagggacatcaagaccataaaatcactgagagtgctgcgtgtcttaagacccctgaaaaccattaagagacttcccaagctaaaggctgtgttcgactgcgttgtcacatccctcaaaaacgtgtttaacattttaattgtgtacaagctctttatgtttatattcgctgtgattgcagtgcagctgtttaagggcaagtttttttactgcaccgactcttctaaagataccgaaaaagaatgcatagggaattatgttgaccacgagaaaaacaagatggaggtaaagggaagagaatggaagaggcatgaatttcactatgataacattatttgggctctcttaacactcttcactgtctccactggtgagggttggccacaggtgctgcaacactccgtagacgtaactgaagaggaccgggggccgtctcgctcaaaccggatggaaatgtctattttttatgtagtgtactttgtggtgttccctttctttttcgtaaacatctttgtcgccctcatcatcattacgtttcaggagcaaggcgacaagatgatggaagagtgctctctggaaaaaaacgagagggcctgcattgattttgccatctcagctaagcccttgacccggtatatgccacaaaacagacatacctttcagtaccgtgtgtggcacttcgtagtgtcgccaagttttgagtataccatcatggcaatgattgccctcaataccgtggtcttgatgatgaagtactattctgctccttgcacttacgaactggctctcaagtacttaaatatagcctttacaatggttttttcactagagtgcgttttaaaagtgatcgccttcggattcctcaattatttccgtgatacttggaatatttttgactttatcaccgtaatcggcagcattacagagataatcctgacggatagcaagctggtaaatacatcaggcttcaacatgagttttctaaaactcttccgtgccgcacgcctgatcaagttgctgcgccagggctataccatccgcatattgctgtggactttcgttcagagtttcaaggcccttccctatgtctgcctgttaatcgcaatgctattcttcatatacgctattatagggatgcaggttttcgggaacattaaactagatgaagagagtcatattaaccgccacaacaatttcagatcttttttcgggagcctgatgctcttgttccgaagtgcgactggcgaagcttggcaggagatcatgctgtcatgcctgggcgaaaagggttgcgaacctgacaccaccgcaccctctggacaaaatgagaacgagcggtgcggtaccgatttagcttatgtgtacttcgtctccttcatcttcttctgctccttcctgatgctgaacctgtttgtagccgtgattatggataactttgaatacctaactagagacagcagtatcctgggtccccatcatctcgatgagtttgtccgagtttgggccgagtacgacagagccgcatgcggtcgaatccactatactgaaatgtatgagatgctgaccttgatgtcccccccccttggcctcgggaagcggtgcccgtctaaggtggcctacaaaaggctggtcctgatgaacatgcccgtggcggaggatatgacagtgcatttcactagcacactgatggcactaattaggaccgctttagatattaaaatcgccaagggaggcgcagacaggcagcaactggacagcgagttgcagaaagagaccctggccatctggcctcatctctctcagaaaatgttggacctgctagtccctatgccaaaagcgtctgatctgaccgtgggcaagatctacgctgccatgatgatcatggactattacaaacagtccaaagttaagaaacagagacaacagctggaagagcagaagaatgcccccatgttccaaaggatggagccgtcctctctgccccaagaaattattgcaaatgccaaagcactgccatacctccagcaagatcccgtctctggcctttccgggcgttccggatatccttcaatgtcccctcttagccctcaagatatctttcagctcgcctgcatggatcccgctgacgacggacagttccaggaaaggcaatctctggtcgtgacagatccaagttcaatgagacgtagcttctctaccattagggacaagagatcgaatagtagctggctggaagagttttccatggagcgcagctcagagaacacttacaaatctcgccggagatcatatcactccagtctcaggctgtccgctcatagactcaacagcgatagcggccacaaatcggacacacaccggagcggaggcagagaacgggggaggtccaaggagaggaaacatctgctgtctcccgatgtcagccggtgtaattcagaggagcgggggactcaggccgactgggagtcccctgaaagacgccaatcccgctccccatccgagggacggtctcaaacacccaatcgccaggggactgggagtttgtcagagtcttcgatcccaagcgtgtccgatacttcaacaccgcggcggagccgccgtcagcttcctcccgtgcctccgaagccaaggccactgttgtcatactcatcgttaatccgccacgcaggcagcatctcgccacccgccgatggatccgaagagggaagtcccctcacgagtcaagccctggaatctaataacgcctgcctgacggaatcgtccaacagtccccatccccaacaatcccagcacgcctcgccacagagatacatctccgagccatatctcgcgctacatgaggatagccacgccagtgactgcggggaagaagagactctgacgttcgaggctgccgtggctacctccttaggaaggagcaacactatagggagcgcccctccacttaggcattcatggcaaatgcctaatggtcactataggcgcaggcgtcggggcggcccgggccccggaatgatgtgcggtgctgtgaataacctcctcagcgacacagaggaggacgataagtgttag

SEQ ID NO: 110467 - DNA, 6813 bp, synthetic construct
  misc_feature 1..6813: note = Description of Artificial Sequence: Synthetic coding sequence
  source 1..6813: mol_type = other DNA
atggcacgattcggggaggccgtcgtggcgaggccaggcagtggagatggagacagcgatcagtctcgcaaccgacaggggaccccagttccggccagcggacaagccgctgcatataagcagaccaaagctcagagagccagaacaatggccctttataaccccattcccgtcagacaaaattgcttcacggtcaaccggtctctcttcatattcggcgaggacaatatcgtgagaaaatacgcaaaaaagctgatcgactggccccctttcgagtatatgatcctggcaacaatcatagccaactgcatcgtcctggccttggaacagcatctgcccgaggatgacaaaaccccaatgagccggcggctggagaaaaccgaaccctatttcatcggcattttctgcttcgaggccggaattaaaatagtagcactgggatttatctttcataagggcagctacctgcgtaacggttggaacgtaatggactttatcgtggtgttaagcggaatactcgcaaccgctggtacacacttcaacacgcatgtagatctgaggactctgcgcgcagtgcgggtcttgagaccactgaagctcgtcagcggcatcccttctcttcagatcgtccttaaaagtatcatgaaagctatggtgccgctgctccagatcggtctgctactgttctttgccatattgatgttcgccattataggattggaattctactccggtaaactacaccgggcttgtttcatgaacaattcgggcatcctggagggatttgaccctccacatccatgcggagtacaggggtgtcccgcaggttacgagtgtaaggattggatcgggccaaatgacggtattactcagtttgacaatatcctctttgcagtccttactgtgtttcagtgtattaccatggaaggctggacaacagtactgtataacaccaacgacgcgcttggagcgacatggaattggctttactttatacccctgatcatcattgggtctttctttgtcctgaaccttgtgctgggtgtgttgtccggagaatttgctaaagagagggaacgcgtggagaatcggcgcgcctttatgaagctgagacggcagcagcagatagaacgggaactcaacggttaccgggcatggatagataaagcagaggaggtaatgcttgccgaagaaaataagaatgctggcacatccgctctcgaagtccttcggagagctactattaaacgatcacggaccgaagcaatgacacgagacagcagcgatgagcattgtgttgacatatcctccgttgggacacctcttgcacgagctagcataaaatccgcaaaagtggatggcgtttcttactttcgccacaaggaacgcctcttgcgcatcagcattagacatatggtcaagtcccaggtgttttattggatcgtgctgtcgctggtggcgctcaatacggcatgcgtcgccattgtacaccacaatcagccgcaatggctgacacacctgctgtattatgccgaattcctgtttcttggtctgtttctactggagatgtcgctgaaaatgtatggaatggggcctagactgtattttcatagtagctttaactgtttcgattttggggtgactgtcggctctatttttgaagtcgtttgggctatctttcgccccggcacctcctttggtattagcgtgctgagagctctgcgactcttgaggatctttaaaatcacgaagtattgggcatccctgcgcaatctagtggtgtccctgatgagcagtatgaaatccattataagcctgctgttcctattgttcctgttcatagtggtgttcgcacttcttggcatgcaattgttcggtggacgtttcaacttcaatgatggtaccccttccgcgaatttcgatacattcccggcagccattatgactgtatttcagatcctaacgggcgaagattggaacgaggtcatgtataatggcatcagatctcaaggaggcgttagcagtggcatgtggtccgccatctattttatcgtccttaccctctttggtaactatactttacttaatgtattcctggcaatcgccgtagacaatctggctaacgcacaggagttgacaaaggacgagcaggaggaagaagaggctttcaaccagaaacacgccctgcagaaggcaaaggaggtttcccctatgtctgcacctaatatgccttcaattgaaagggaccgacggcggagacatcacatgagtatgtgggaaccccggtcctcccacctcagagaaagacgtagacgccatcatatgagtgtctgggagcagagaacatctcagcttagaaagcatatgcagatgagttcacaagaggctttaaacagagaagaagcaccaacaatgaaccccctcaaccccctgaaccccttaagcagtctcaaccccctgaacgctcatccatccctttatcgaaggccgagggctatcgagggactcgccctgggcctagcactggagaaattcgaggaggagcgaatctcgcgtgggggctctctgaaaggcgacggcggagatcgatcatctgccttggacaaccagcgtacgccattgtccctcggacagagggagcccccatggcttgcacggccctgccatggcaactgtgacccaacacagcaggaggccgggggtggcgaagctgtagtgacttttgaggatagggccagacaccgccagagtcaaagaagatcgcgtcacagacgggtgcgcacggagggtaaagagtcatcatccgccagccggtcacgtagtgcgagccaggaaaggagcctggacgaggctatgcctacagagggggagaaagaccacgaactgagaggaaatcacggtgccaaagagccaacaatccaggaagagcgtgcccaggatctgcggagaactaattctttgatggtgtctcgaggatccgggctggccgggggattagacgaggccgacaccccgctcgtgctgccacaccctgagcttgaagtcggcaaacatgtagtgctgacagaacaggagcctgagggcagttctgagcaagccctcctgggcaacgtccagttggatatgggcagagtgattagccagtcagagcccgatctgtcatgtatcacggccaataccgacaaggccactaccgagtcaacttcagtcaccgttgccattcccgacgtggatcccctggtggactctactgtggttcacatctcgaacaaaacagacggagaggcgtcaccactcaaggaagctgaaattcgcgaggatgaggaggaggtggagaagaagaagcagaaaaaggaaaaaagagagacaggtaaagctatggtaccccactcatctatgttcattttttctactaccaatccaatcagacgggcctgtcattatatagtcaacttacgttatttcgagatgtgcattctgctcgtgattgctgctagcagtatcgccttggctgctgaggatccagtgctgactaactccgaacggaataaggtgttgaggtacttcgactatgtgtttaccggggtctttacctttgagatggttataaagatgattgatcaggggctcattttacaggatggaagctatttccgggatttatggaacattttggatttcgtggtggtcgtgggagctctggtcgcattcgctctggccaacgcgctaggaaccaacaaagggcgcgatattaaaactataaaatccttaagagtcctgcgcgtactgcgtccattgaaaacaattaaaaggcttccaaagctgaaggcagtatttgattgtgtggtcacttccctgaagaatgtattcaatattctgattgtatacaagctatttatgtttatctttgctgtcatagccgtacaacttttcaaaggcaagttcttctactgtaccgactcctcaaaagatactgaaaaggagtgcattgggaattacgtggaccatgagaagaacaaaatggaggtcaagggaagggagtggaaaaggcatgaattccattacgataatataatatgggcgctgttgactttgtttacggtctcaacaggggaagggtggccacaggtgttacagcacagcgttgacgtgaccgaggaggatagaggtccatcccgaagcaaccggatggagatgtctattttttacgtggtgtatttcgtggtttttccatttttttttgtgaacatctttgtggcgctgatcataatcacctttcaggagcagggcgataagatgatggaggagtgcagtctcgagaagaatgagagggcttgcatcgactttgccatctccgccaagcccctgactcgttacatgcctcagaaccggcacacgtttcagtaccgcgtgtggcactttgtcgtaagtccctcattcgaatacaccattatggccatgatcgccttgaataccgtggtactcatgatgaaatactacagtgccccctgtacttacgagctggccctgaagtacttgaacatcgcatttaccatggttttttcactagagtgtgttctgaaagtgatcgctttcggattcctcaactactttagggacacttggaatatctttgacttcattacagttataggatctataacagagattattctgacagatagcaagttggtaaacaccagcgggttcaacatgtctttcctcaagctatttcgggctgcgcgcctcatcaagttactgagacagggttatacaatcaggattttgctgtggacattcgtccagtccttcaaagcactcccctacgtatgtctgctgattgcaatgctgttctttatctatgctattatcggaatgcaggtcttcggaaacataaagcttgacgaggaaagtcacattaaccggcacaataattttcgtagttttttcgggagcctgatgttactttttcgctccgcaactggggaagcctggcaggaaattatgttaagttgtctgggcgagaaaggctgcgagccagacacaaccgctcccagtggccagaacgaaaacgaacgttgcggcacagatttagcatacgtgtacttcgtgtcttttatctttttttgtagtttcctcatgctgaatcttttcgtcgctgtgattatggataatttcgaatacttgactagagatagtagtatcctcggaccgcaccaccttgatgagtttgtgcgcgtgtgggccgagtacgatagggcagcttgtggcaggattcactatacggaaatgtacgagatgcttacgttgatgagcccaccgttggggctgggaaagaggtgccccagtaaagtggcttacaagcgcttagtcctgatgaatatgcctgtagcggaggatatgacagttcattttacttcgaccctgatggctctgatcaggaccgcgctcgacattaagatcgccaaagggggcgctgacaggcagcagctagatagtgagctgcagaaggagacactcgccatttggccccacctgtcccagaagatgctagatctgctcgtccctatgccgaaagcttctgacttaactgtgggtaagatctatgccgcaatgatgataatggactactataagcagtccaaagtcaaaaaacagcggcagcagctggaggagcagaaaaatgccccgatgtttcagcgcatggagccttctagcctaccacaagaaattattgctaacgccaaggccttgccctacttacagcaggaccccgtgagtggcctgagcggcaggtcaggttacccgagcatgtcccccctgtccccacaggatatcttccaactggcctgcatggatccagccgacgacgggcaatttcaggagcggcaaagtctggtcgtcacggatccttcctcaatgcgaagatccttttccaccattagagacaaacgaagcaactcgtcttggctggaggagttctcaatggaaagatcttctgaaaacacgtacaagagccgacggcgcagctaccattcctctctcagactgagtgctcatcggcttaactccgattccggccataaatccgacacacaccgcagtggcggcagggagaggggtagatcgaaggaaagaaagcatctcctcagcccagacgtttcacgctgtaactcagaagagcgcggaacccaggccgactgggaaagccctgagcgaaggcagtccagaagtccatcagaggggcgttcgcagacaccaaatcgccagggaaccgggagtttgagtgagagcagcatcccctctgtgagcgacaccagcacaccgcgcagaagtaggcggcaattacctcccgtccctcctaaacctcggccactattatcctattcaagcctcatcagacatgcaggaagtatttcaccaccggctgatggttccgaggagggcagtcctctgactagccaggccttggaatctaacaacgcctgtctgaccgagtcaagcaattctccccacccgcagcagtctcagcacgccagcccccagcggtatatttccgaaccctacttggcccttcacgaggactcacacgctagtgattgtggcgaggaagaaacgctgactttcgaggcagccgtcgcaacttctctggggaggtctaataccatcggctccgcaccgcccttgaggcattcttggcagatgccaaacggtcactatcgcaggcgccgccgcggtggcccaggtccgggcatgatgtgcggcgccgtgaataacctgttatcagacactgaagaggatgacaaatgctag

SEQ ID NO: 110468 - DNA, 6942 bp, synthetic construct
  misc_feature 1..6942: note = Description of Artificial Sequence: Synthetic coding sequence
  source 1..6942: mol_type = other DNA
atggcaagattcggggaggctgttgtggcccggcccggcagcggggacggggattcagaccagagccgcaatcggcagggcacgccagtgcccgctagcgggcaggccgccgcgtacaagcaaacaaaggcgcaacgggcccgaaccatggctctgtataatcctattccggtgcggcagaactgcttcacagtgaataggagtctgtttatcttcggcgaagacaatatcgtgaggaaatacgccaagaagctcatcgactggccacctttcgagtatatgatattggctacgattattgccaactgcatcgttctagctctggaacagcacttgcccgaagacgataagactccaatgtctcggaggttggagaagactgaaccctatttcatcggaattttctgctttgaggccggaatcaaaatagtggcgcttggatttatatttcacaagggttcttatcttaggaatggctggaacgttatggattttattgtggtgttaagtggcattctggccaccgcgggtacccactttaacacccatgtcgacctgaggacgttaagggctgttcgtgtgttaaggccattaaagttggtctctgggatcccaagtctacaaatcgtgctgaagtcgataatgaaagcgatggtgccgctcctgcagataggtctactcctattcttcgcgattctgatgttcgccatcatagggcttgagttttattccggcaagttgcaccgagcctgcttcatgaacaattcaggtattttggaaggttttgatccgcctcacccctgtggggttcaaggttgccccgctggatacgagtgcaaggattggatcggacctaacgacgggattacacagttcgacaacatcctgttcgccgtgctgactgtatttcagtgcattaccatggagggttggaccactgttctgtataacaccaatgacgcactgggagccacgtggaactggctatacttcattccactgattatcattggcagcttctttgtcctgaatttggtcctgggagtcctatccggagaattcgcgaaagagagagagcgcgtcgagaacagacgggcattcatgaagctgagacgtcaacagcagatcgaaagggagctgaatgggtaccgcgcctggatagataaggcagaagaggtgatgctggctgaggagaataaaaatgcaggaactagcgctttggaggtgctcaggcgtgcaaccataaagcgcagtcgtacagaggcaatgacaagagatagttccgatgaacactgtgtggacatctcctccgtgggcacccctttagcacgggcgtctataaagtcagctaaggtcgacggggtgtcttactttcgccataaagagagactcttgcgcatcagcatccgacatatggtcaaatctcaggtgttctattggattgtgctgagtctggtcgcactgaataccgcctgcgttgctattgtgcaccacaatcaaccccagtggctgacccacctgctctattacgcagagttcctcttcctgggcctgttcctattggagatgagtctaaagatgtatggaatggggcctcgactctatttccattcctcctttaactgcttcgatttcggggttaccgtcgggtctatctttgaagtggtgtgggctatctttcgacccgggacctctttcggcatttccgtcctccgcgcactccgcttactgagaatctttaagataactaagtactgggcgtccctgaggaacctagtagtgtcccttatgagctcaatgaaaagcataatatcactgctgttccttttatttctgttcatcgtggtgttcgcgctgcttggcatgcagttattcggaggccggtttaacttcaacgatggcacaccctccgcgaatttcgatacctttccagctgctatcatgactgtgtttcagatccttacaggtgaagactggaacgaggtgatgtataacggcattagaagccaaggcggcgtcagtagcggaatgtggagcgctatctacttcatagttttgactttattcgggaattataccctgcttaatgtctttttggccattgccgtcgataaccttgcgaacgcccaggaactgacaaaggacgaacaggaagaggaagaggcttttaaccagaaacatgcactacagaaggccaaggaggtctccccaatgtcagcccccaacatgccttctatcgaaagggataggcgccggcgccatcacatgtccatgtgggagcctaggagctctcatctccgtgagcggaggcgcaggcatcacatgtcggtctgggagcagcggacatcccaacttcggaagcatatgcaaatgtctagccaagaggctctgaatcgggaggaggctccaacaatgaaccccctgaaccccctgaaccccctttctagtctgaacccactgaacgctcacccatccctgtatcggagacctagggcaatcgaagggcttgccctgggactggctcttgagaaatttgaggaagaacggatcagtcgcgggggtagcctcaaaggcgatggcggcgatagatcttccgcactggacaaccagagaactcctctgagcctcgggcagagggagcccccctggctggctcgtccttgccacggcaactgtgaccctacccaacaagaggctggcggaggcgaggcggtggtgacctttgaagacagagcccgtcatcgacagtcacagcgcaggtctcggcaccgccgcgtgcgcaccgaggggaaggaaagcagctccgctagcaggagtcgctctgctagtcaagaacggtccttggacgaggcaatgcccaccgagggagaaaaggatcatgagctgcgagggaatcatggcgctaaagaacccaccatccaggaggaaagggcccaagatttgaggcgcaccaactccctcatggttagccgaggcagtggattagcagggggcctagatgaagcagacacccctctggtgcttccgcacccagaattggaggtggggaagcatgtcgtgcttacagagcaagagcccgaaggctcctctgagcaggcactgctgggaaacgtacagctggatatgggcagggtgatttctcagagcgagccagatctaagctgtatcacagcaaacacggacaaggcaactacagaaagcactagcgtgactgtagccatcccagacgtggatccgctcgtagactcaaccgtcgtgcacatctccaacaagactgacggggaggcgtctccgctaaaggaagccgaaataagggaagatgaggaggaagtcgagaaaaagaagcagaagaaggaaaagagagaaaccggtaaagctatggtccctcatagctccatgttcatcttttcgactacgaaccccatccgccgagcctgccattatatcgttaacctgcgttacttcgagatgtgcatccttctggtaattgccgcttcatctatcgcactggccgctgaggaccccgtgctcaccaattctgaacggaacaaagtgctgagatactttgattatgtgtttaccggcgtgtttacctttgaaatggtgatcaagatgatagatcagggactgatattgcaggacggatcctatttccgcgacctgtggaatattcttgacttcgtggtggtcgtgggggcccttgttgcctttgcactcgctaacgcccttggcactaacaagggtagggacatcaagactatcaagtcccttcgagtgcttcgtgtattgcggccattaaagaccattaaacgcctcccaaagctgaaggcggtcttcgattgcgtcgtaacctcgctgaagaatgtgtttaacattctgattgtctacaagctctttatgttcatctttgctgttatagctgtacaattgtttaaaggaaaattcttttattgtacggacagttcgaaggacactgagaaggagtgcattggaaattacgtggatcacgagaaaaacaagatggaagtgaaaggcagagaatggaagagacatgaattccactacgataacatcatctgggcccttttgaccctgttcaccgtgtccactggagaggggtggcctcaggtgctccagcattccgtggacgtaacagaagaagatcgagggccctcgagatccaaccgaatggagatgagcattttctatgtcgtgtattttgtcgtcttcccgttttttttcgttaacatatttgtggcacttatcattatcacctttcaggagcaaggcgataaaatgatggaggaatgctccctggagaaaaatgaaagggcctgcatcgatttcgccatctctgccaagcctctgaccaggtatatgccccagaacagacacacctttcagtatagggtatggcattttgtggttagcccaagcttcgagtataccattatggccatgatagccctgaataccgtggtgctgatgatgaaatattatagcgcgccatgtacatatgagctggccttgaagtacctcaacatcgcatttacaatggtgttttcattggaatgtgtgctcaaggtaatcgcttttgggttcctaaactattttagagatacttggaatatcttcgattttatcaccgtgattggttccattacagaaatcattttgactgactcaaagttggtgaatacttctggattcaatatgagctttttgaaactgttccgagcagcgcgactcataaagctgttgcggcaggggtacacaatccggatcctcctgtggacattcgtgcagagcttcaaggcactgccttacgtgtgtctactgatcgccatgctgttctttatttacgctattattggcatgcaggtgttcggtaatataaagctggacgaagagtcacacatcaatcgacacaataacttcagaagtttcttcggatccctcatgcttctcttccgcagcgcaactggcgaagcctggcaggagattatgttgagctgcttgggtgagaagggttgtgagcccgacaccaccgccccgagtggccagaatgagaacgagcggtgcggtacagatcttgcatacgtttattttgtgagcttcatttttttctgcagtttcttgatgttgaacctgttcgtcgcagttatcatggataacttcgagtatctgaccagggattctagtatcctgggcccacaccacctggacgagttcgtgcgggtttgggccgaatacgaccgggccgcctgtgggcgcattcactacactgagatgtatgaaatgcttaccctaatgtcgccccccctagggctgggcaaacgctgtccaagtaaggtggcttacaaacggctcgtcctcatgaacatgccagtggccgaagatatgaccgtacactttacatccacgttaatggctctgatccgaactgcattggacatcaagattgcgaagggtggggcggatcgccagcagctggattcagagttgcagaaggagaccttggcaatatggccccatctgagtcagaagatgttggaccttctcgtgcccatgccgaaggccagcgatctcactgtggggaaaatctacgcagctatgatgatcatggattattataagcaaagcaaggttaaaaagcagaggcagcagctagaagagcagaaaaatgctccgatgtttcagcgcatggagcctagttctttgccgcaggaaattatagccaatgcaaaggccctgccctatctacagcaggatccggtgtctgggctgtccggcaggtcaggctacccaagcatgagtccactctctccccaggacatcttccagctagcttgtatggacccagctgacgatggacaatttcaggaaagacagagtctggagccagaggtctctgagctcaagtccgtccagcctagcaaccatggaatttacctgccgagtgatacacaggaacatgctgggagtggaagggccagttcaatgccgcggctgacagtagacccccaggtcgtcactgacccaagcagcatgcgccgcagtttctccactatcagagacaaaaggtcaaactctagttggctggaggaattcagtatggagcgctcttccgagaacacgtataaaagccgacggagaagctatcacagctcccttcgcctgtctgcccataggttgaactccgattcagggcacaaatccgacactcatcgcagtgggggaagagagagggggcgtagcaaggaacgcaaacacctgctgtcacccgatgtgagtcgttgtaacagcgaagaacgtggcacgcaggccgattgggaatcacctgaacggcgtcagtcgagaagtccaagcgaaggccgctcccaaactcccaataggcaaggaacaggatccttgtctgagtcttcgattccttccgttagcgacacctctactcccaggcgctctcggagacagttacctcccgtccctccaaagcctcggccgctgctatcctattcaagcctgattcgtcacgcagggagtatttcccccccagcagatggaagcgaggaggggagcccactcactagccaagcacttgaaagcaacaatgcatgtttgaccgagtcttcaaactccccacaccctcagcagagccagcacgcctccccacaacgctacatttctgagccatatctggcccttcatgaggactcgcatgccagtgattgcggagaagaggaaaccctgaccttcgaggcagctgtggccacctctctcggtcgctccaatactataggctctgctcctccactgagacacagctggcagatgcctaacggacactaccgccggagacgtcgcggcgggccaggccctggcatgatgtgtggcgcagttaacaacttgttaagcgataccgaggaagacgataagtgttag

SEQ ID NO: 110469 - DNA, 1317 bp, synthetic construct
  misc_feature 1..1317: note = Description of Artificial Sequence: Synthetic coding sequence
  source 1..1317: mol_type = other DNA
atggcccggtttggggaagcagtagtggcccgtcccggcagtggggacggcgattcagatcagtcccgaaatagacagggcactccagtgcccgctagcgggcaggcagctgcatacaagcagaccaaagcccagagggccagaactatggctctctataatcctattccagtgagacagaattgctttactgttaacagatctctcttcattttcggcgaggataatatcgttcgtaaatatgctaaaaagctcatcgattggccaccttttgagtatatgattctcgctacaattattgctaactgcattgtgctagcactagagcagcacttgcctgaagacgataaaaccccgatgagccgacgacttgagaagactgagccctattttatcggaattttctgtttcgaggcaggaatcaaaattgtggcgctcggcttcatcttccacaaagggagttatttgaggaatggctggaacgtgatggacttcatcgttgttctgagcgggatcctagcgactgctggcacccacttcaatacacatgtagacttgcggacactgagagccgtgagagttctgcggcccctgaagctcgtgtcaggcattccgagtctgcagatagtgctgaaatcaattatgaaggccatggtccctctcctgcagattgggttactgttgttcttcgccattctcatgttcgcaataatcggtctggagttctactccgggaaattgcaccgggcctgctttatgaacaactctggtattcttgagggcttcgaccctccacatccctgcggagtgcaaggatgcccagctgggtacgaatgcaaggactggattggccccaatgatgggattacccagtttgacaacattctgttcgccgtgcttaccgtgttccaatgcattacaatggaaggatggaccacagtgctgtataatactaacgacgcgctgggtgccacttggaattggctgtacttcattccccttattataattggttccttttttgttctgaacctggtgctcggtgtgctaagcggcgaatttgccaaagaacgagagcgggtcgagaaccgtcgcgcctttatgaagctacgcagacaacaacagattgaacgagaactcaatggctatagggcttggatcgacaaggctgaagaggtcatgctcgccgaagaaaacaaaaacgctggtacgagtgccctcgaagtcctgcgcagggccactatcaaacgcagtaggacggaggccatgacccgtgacagttcagacgagcactgcgttgacatctcctccgtgtag

SEQ ID NO: 110470 - DNA, 6756 bp, synthetic construct
  misc_feature 1..6756: note = Description of Artificial Sequence: Synthetic coding sequence
  source 1..6756: mol_type = other DNA
atggctaggttcggcgaggcggtggtggcacggccagggtccggagatggagactctgaccagtctaggaatcgacagggcaccccggtgcccgctagtggccaggctgctgcctacaagcagactaaggcccaacgcgctaggacaatggctctatataaccctattcccgtgagacagaactgtttcaccgtgaacagaagtcttttcatttttggagaagataacattgtgcgcaaatacgctaagaagttaattgactggcctccgtttgagtacatgatcctggccacaattatagccaactgtatagtgttagctcttgagcagcaccttccagaagacgacaaaaccccaatgtctagacggctggaaaagactgagccctattttatagggatattctgttttgaggcaggcatcaagattgttgcgcttggttttattttccataagggcagttatctgcgtaatggttggaatgtcatggacttcatagtggtgcttagcggcatcctggcaacagcgggtacacactttaacacccacgttgatcttaggacccttcgtgcagtacgggtccttagacctctgaaattggtaagcggtatcccaagcctccagattgtcctcaaaagcattatgaaggccatggttcctttgttacagatcggtctcctcctttttttcgccatcctgatgttcgctataatcggcctcgagttttatagcgggaaattacacagggcatgttttatgaataatagcggcatacttgaaggttttgatccacctcacccttgcggtgtgcagggatgtccggccgggtacgaatgcaaggactggatcggccctaatgacggtataacccagttcgacaatatactgttcgctgttctgactgtattccagtgtataactatggagggatggaccaccgtgttgtacaacactaatgatgccctgggcgctacctggaactggctctactttattccgcttattattattggatcattcttcgtgctcaaccttgtcctgggcgtcctctcaggggaatttgcaaaggagcgcgagagagtcgagaaccgcagggccttcatgaaacttagaaggcagcagcagattgaacgcgaactcaatggctatagagcatggatcgataaagcagaggaggtaatgctggctgaggagaataaaaacgccgggacctccgcgctggaggtgttgaggagagcgaccattaagcggtctcgcaccgaagcgatgaccagggattcgtctgatgaacattgcgtggacatctcctccgtgggaacacccctggctcgcgcatccatcaaatccgccaaggtggacggagtgtcttactttagacacaaggaacggctgcttcggataagcattaggcatatggtgaagtctcaggtgttttattggatcgttctgagcttggtggccctgaacaccgcttgcgtagctattgtacaccacaatcagccgcagtggttaacccacttattgtactatgccgagtttctttttctcgggctttttctgctggaaatgagcttaaagatgtatggcatggggccgagactgtacttccattcatcatttaattgcttcgatttcggcgtgacggttggctccatatttgaggtggtgtgggctatcttcagaccaggcaccagcttcggaatcagtgttctgcgggctcttcggctactcaggatttttaagatcactaagtactgggcatccctgaggaacctcgtggtgtccctgatgtcatcaatgaaatcgatcatcagcctgttgttcctgttgtttctcttcatcgttgtgttcgctctgctgggaatgcagctcttcggaggaaggtttaatttcaacgacggtacgccaagtgctaacttcgacacctttcccgcagcaataatgaccgtgtttcagatattaaccggcgaggactggaacgaggtgatgtacaacgggattaggtctcagggtggagtatcatccggaatgtggtctgccatatacttcattgtactgaccctcttcggaaactacacactgctgaacgtttttctcgccatcgctgtggacaatctggcaaatgcgcaggagcttactaaagacgagcaagaggaagaggaagcttttaaccagaaacatgcactccaaaaggcgaaggaagtttctcccatgtcagccccgaacatgccttccattgaacgcgagcgaagaagaaggcaccacatgagcgtgtgggaacaaaggacatctcagcttcggaaacacatgcaaatgtcttcccaggaagcactgaaccgggaggaagctcctacaatgaatccactcaaccctctcaaccccttatccagcctgaatccccttaacgcccatccatctctctaccgccggcctcgagccattgagggcctggccttgggattggcgctggaaaagttcgaagaagaacgaattagcaggggtgggagccttaaaggagacggtggcgaccggagcagcgctctagacaaccaacggacacctctgtcactcgggcagcgggagcccccctggctcgcccgaccctgccatggcaactgcgatccaactcagcaggaggctggcggcggcgaagccgtggtgacatttgaagaccgtgctcgccatcgccaatcacagcgtcgaagccggcacagaagagtgcggaccgagggcaaggaatcttcgtccgctagtaggtctcggagtgcaagccaagagcgctcattggacgaggccatgcctacagagggggagaaagatcacgagctgagaggcaaccacggcgctaaggaacccaccatccaggaggaacgcgcccaggacctgcggcggacgaattctttaatggtgtcccggggcagcgggctggccggaggcctagatgaagccgacacccccttggttttaccccatcctgagttggaggttggcaagcacgtcgtgttgaccgagcaggagcctgagggttcgagcgaacaggctcttcttggcaatgtgcagcttgacatgggacgggtgatcagtcaatccgagcctgacctatcttgtatcactgctaacaccgacaaagccaccactgaatcgacctctgtgactgtcgcaatccctgacgtggaccccctcgttgatagcaccgtggtgcatatatccaacaagacagatggggaagcaagtcccctgaaggaagccgagattcgggaagacgaagaggaagtggagaagaagaaacagaaaaaagaaaaaagagaaaccggcaaggctatggtgccgcactcgtccatgttcatcttctccacaactaaccccattcgaagggcgtgtcactatattgtcaatctccgatatttcgaaatgtgcattctactggtcatcgccgcctcctccattgcgcttgctgccgaagacccggtgctgaccaacagcgagaggaacaaagtattacgttatttcgattacgtgttcaccggcgtcttcacgtttgaaatggtaataaaaatgattgatcaaggccttattctgcaggacggaagctactttagggacctttggaacattctggattttgtggtggttgtgggcgccctggtggcattcgccctggctaacgccctcggtacaaataaaggccgggacatcaaaaccattaagagtctccgtgtcttgcgcgtgctccgccccctgaagactattaagcgactccctaagctcaaggccgtatttgactgcgtggtgacatccctgaaaaacgtgtttaacatactcatagtatataagctgttcatgttcatcttcgctgtaattgccgtgcagctgttcaagggcaaattcttttattgcactgattcatctaaagacacagaaaaggagtgcattgggaattatgtagaccatgagaagaataaaatggaggtcaagggtcgagaatggaaacggcacgagtttcactatgacaatattatatgggcactgttgacgcttttcactgtgagcacgggcgagggatggccacaggtgcttcagcactccgtagatgtgactgaagaggatagaggaccgagcaggtcaaatcgaatggaaatgtccattttttacgtggtgtacttcgtggtgtttccattctttttcgtgaatatttttgtcgccctcatcattattacttttcaggaacagggtgacaagatgatggaggaatgttctctggagaagaacgagcgagcctgtatcgactttgctatctccgctaaacccctgacacgctatatgccacagaacaggcacaccttccaataccgggtttggcactttgttgtctccccctcctttgagtatactatcatggcaatgattgctttgaacaccgtggtccttatgatgaaatactacagtgcaccttgtacttacgagctcgcactgaaatatctcaacatagctttcactatggtcttttctttagaatgtgttcttaaagtgattgcctttgggttcctgaactattttagagatacatggaatattttcgactttattacggtgatagggagtattactgagattatcctaacggattccaaactggtaaacacttcgggattcaatatgtcatttctgaaactctttcgcgcagcccggcttatcaaactgctgcgtcagggatacactattagaatcctgctatggaccttcgtccaatcatttaaagcactgccctatgtgtgcctgctcattgcgatgctgttctttatctatgcgatcatcggcatgcaggtcttcggcaatatcaagctcgacgaagaatcgcacatcaatcggcacaacaatttcagatcattcttcggatctctgatgcttttattccgctctgctaccggggaagcatggcaggagattatgctaagctgcctgggggagaaaggttgcgagcctgacacaactgcaccgagcggacaaaacgagaatgagaggtgcggaacagacctggcctatgtgtactttgtgtccttcattttcttctgctcgtttcttatgctcaatctattcgtagccgtaatcatggataatttcgaatacctgaccagagattcatcgattcttggtccacatcaccttgatgagtttgtccgagtgtgggccgaatacgatcgggctgcctgcggaagaattcattatacagagatgtacgaaatgctcacactgatgtcccccccactaggccttggaaaacgctgtcctagcaaagtggcatacaaacgcttggtactgatgaatatgcccgtggctgaggatatgactgtccactttacgtcaaccctgatggccctaatccgcactgctctggatattaagatagccaagggtggagctgatcgccagcagttggacagcgagctacaaaaggagaccctggccatttggccccacctgagtcagaagatgctggacctcttagtcccaatgcccaaggcttcggatctcaccgtgggcaaaatttacgccgccatgatgattatggattactataagcagtccaaagtgaagaaacagaggcagcagctggaggagcagaagaacgcccctatgtttcagaggatggagccttcctctcttccccaagagataattgcgaatgccaaggcgctgccatacctgcagcaagaccctgtcagcgggcttagtgggcgcagcggctatccgtccatgagccctctttcacctcaggatattttccaactggcctgcatggatccggcagatgatggtcaattccaggagaggcagtcattagttgtcaccgatcccagttccatgaggcgatctttcagtacgatcagagataaacgttctaattccagctggctggaggaattctctatggagcggagttctgaaaacacatataaaagccgaagacggtcctaccacagttcgcttaggctctccgcgcacaggctaaactctgacagcggccataagtccgacacacatcggtccggaggtcgtgaaagaggacggtctaaggagcggaaacatctgttatctccagacgtcagccgctgcaattccgaagagagggggacccaggctgattgggaatcccctgaaagacggcagtccagaagtccgtccgaagggaggtcacagacaccaaacagacaagggacgggctccctgtctgagtcttctattccaagcgtgtccgacactagtacaccacgccgaagcaggagacagcttccgcctgtgccaccaaagccacgcccattgctgagctacagcagcctgatacgccatgcaggctcaataagcccaccagctgacgggtccgaagaaggctctccattaacatctcaggcactggagtccaacaacgcttgtctgaccgagagtagcaacagcccccacccccagcagtcccagcacgctagtccccaacgttatatctctgaaccttatctggccttacatgaggactcacacgccagtgactgcggtgaggaggagaccctgacctttgaggccgctgttgccacctctctggggcgctccaacacaatcggctcagcacctccattgaggcacagttggcaaatgccgaacggccactacaggcggcgtcggcgagggggcccgggtcccggaatgatgtgtggtgcggttaacaacctcttatcagatactgaagaggatgacaaatgctag

SEQ ID NO: 110471 - DNA, 7062 bp, synthetic construct
  misc_feature 1..7062: note = Description of Artificial Sequence: Synthetic coding sequence
  source 1..7062: mol_type = other DNA
atgaccgagggcgccagggccgctgatgaagtccgtgttcccttaggcgcaccaccgcccggacctgccgccctggtgggagcatctcccgaaagccccggtgccccaggcagagaggctgagagaggcagtgagctcggggtcagtccgagtgagagtcccgcagctgaaaggggagctgaactgggtgccgatgaagaacagcgggtgccctatccagcattggctgctaccgtatttttctgtctcggccagacaactcgaccccggtcatggtgcctacggcttgtgtgcaacccttggttcgagcatgtatctatgctggtgatcatgctcaactgcgtgaccttaggcatgttcaggccttgtgaggatgttgaatgcggcagcgagcggtgtaacatcctggaagcattcgacgctttcatttttgcgttctttgctgtggaaatggtgattaagatggtcgcccttggtttgttcggccagaagtgctatctcggtgatacctggaatagattagatttctttattgtggtagccgggatgatggaatatagcttagacgggcacaatgtatccctgagtgctatcagaacagtgcgcgttctgagacctctgagggccatcaatcgggtcccgtctatgcggattctggtaacacttctgttggacaccttgccaatgctgggtaatgttctactgctctgcttttttgtgttctttatctttgggatcgtgggagtgcagctctgggctggactgctgaggaatagatgctttctagatagcgctttcgtcagaaataacaaccttactttcctccgcccatactaccagacagaggagggggaggaaaatccatttatttgttccagtcggagggataatggtatgcaaaagtgtagccatatcccaggtcgaagggaactccggatgccatgtactctgggctgggaggcttacacacagcctcaggcggaaggggtcggtgctgctagaaatgcctgtataaactggaaccagtattacaatgtttgccggtctggggattctaatcctcacaatggcgcaatcaattttgataacattgggtacgcctggatagccattttccaggttatcactctcgaagggtgggtagacatcatgtactacgttatggacgcacactccttctacaattttatctatttcattcttctgatcattgttgggtcgtttttcatgatcaacttgtgcctggtagtaatagcaactcagttttccgagactaagcaacgcgaatcccagctgatgcgggagcagcgtgccagacacttgagcaacgattctactcttgcctccttttccgagcccggctcatgttacgaagaactgctcaaatatgtgggacacatctttaggaaggttaagcggcggtcgctgcgcctgtatgcaaggtggcagtctcggtggaggaagaaagtggaccccagtgcagttcagggacaggggcccggccacaggcagagacgcgcggggcgccacaccgcatcagtgcaccatctggtataccatcatcaccatcaccaccatcaccattaccattttagccacggaagcccgcgcagacctggaccagagcccggcgcatgcgacacaaggcttgtgcgtgccggagcgcctccctcccctccttcccccggacgcgggccacctgacgcagaatctgtgcattcaatctaccacgcggattgtcacatcgaggggccacaggaaagagccagagtggctcacgctgcagccaccgcagcagcctcccttagattggcaactggcctgggcactatgaactaccctaccatactcccttcgggggttgggtccgggaaaggcagtaccagcccaggccctaaaggcaagtgggccggtggcccgcctggtacaggcgggcacggacctctttcgcttaactctccggatccctatgagaaaattccccacgtggtcggagagcacgggctaggccaagcccctgggcacctgtcgggtctaagtgtgccatgcccactgcccagccctccagcaggtactttaacatgcgaattaaaatcttgtccttactgtacgcgtgcgcttgaggaccccgagggggaactgtccggatccgagtccggcgactcggatgggcggggcgtgtacgagttcactcaggacgttaggcatggtgatcggtgggaccctacccggccaccgagagccaccgacaccccgggtcccggccctgggtcacctcagaggagggctcaacagagagcggctcctggcgaacctggatggatgggtcgcttgtgggttaccttcagtggcaaactgagaaggatagtggactctaagtacttctctcgggggatcatgatggcgatccttgtcaacacactgtctatgggggtagagtaccacgagcagcctgaggaacttacaaatgccctcgaaataagtaacattgtttttacctctatgttcgctcttgagatgttattaaaactcctggcctgtggccctctgggctacatacgtaacccctataacatttttgacgggataatcgtagtcatcagcgtatgggaaattgtcggccaggcagacggcggtctgtctgtccttcgcacttttaggctgcttagggtgcttaagcttgtccgctttctgcccgccttacgacgccagctggtggtgctagtgaagaccatggacaatgtcgctacattctgcacacttctgatgctgttcatcttcatcttttcaattctgggcatgcatctatttggctgtaaattttctctcaagacagatacaggcgacactgttcccgacaggaagaatttcgattcacttctgtgggctatcgtaactgtattccaaatcctgacccaggaagattggaacgtggtgctgtataatggcatggcaagtacgtcaagctgggcagccctctatttcgtagccctcatgaccttcgggaattatgtgttatttaatctgctggtggcaatcctcgtggaaggattccaggcagagggggacgccaaccgctctgacacagacgaagataaaacaagtgttcattttgaggaagattttcataagctgagggaactgcaaacaactgagttgaagatgtgtagccttgccgtcactcccaatggccaccttgagggcagagggtccctgagtcctcctttaattatgtgcaccgccgccacccctatgcctacgccaaagtccagcccgttcttggacgccgccccttccctgcccgacagcagacgagggtcgagtagcagtggcgatccacccctgggggatcagaaaccacccgcttctctgcgctcttccccctgtgccccctggggcccctctggagcatggagctcccgtcgcagcagctggtcatccctgggaagggcgccttccttgaaaagaagaggccagtgcggggaacgggaatctttactgtccggggagggaaaaggatcaactgacgacgaggccgaagacggcagagccgctcccggccccagggccaccccactgcgcagagccgaatccctggacccacggccccttcgacctgcggcgctgccccctacaaagtgcagggacagggacggccaagtggtggccctgcctagcgacttttttctgaggatcgatagtcatcgagaggatgctgcagagctcgatgatgactctgaggatagctgctgcctcaggctccataaagtcctcgagccttataaaccccagtggtgtcggtcgcgggaggcctgggccctctacctgttttcgccccagaacaggttccgcgtctcatgtcaaaaggtgattacccacaaaatgtttgaccatgtcgtgttggtgtttatctttctgaattgtgttacaatcgcactcgaacgcccagacatcgaccccggctccaccgaacgagtatttctctccgtgtccaattatatttttactgccatttttgtggctgagatgatggtcaaggtcgttgctttaggactgttgtccggcgagcacgcttatctgcaatcatcctggaacttgctcgacggactgcttgtactggtcagcctggtggacattgtcgtggccatggcatctgctgggggagcaaaaatacttggcgtgttgcgggtattgcgattgctcaggacattgcgacccctgagagtcattagtcgggcccccggcttgaagcttgtggtggagaccctgatctctagcttgcggcctatcgggaatattgtcttgatctgctgtgccttttttatcatctttggaatactgggagtacagctgtttaaaggtaaattttattattgcgaaggaccagacactaggaatatatctactaaggcacagtgcagagcagcccattatcggtgggtgagaagaaaatacaactttgacaacctcggtcaagccctgatgagtctgttcgttctaagttctaaggatggctgggtgaacatcatgtatgatggcttggatgccgtcggcgttgaccagcagccagtacaaaatcacaacccgtggatgctgctgtatttcataagctttttgctgatagtctcattttttgtgcttaacatgtttgttggcgttgtggtggagaatttccacaagtgccggcaacaccaggaggccgaggaggccagacggcgggaggagaaacgtctgaggcgtctggaaaggcggagacgaagcaccttcccaagtccggaagcccagaggaggccctattacgcggactattcccctaccaggcgcagtatacattcactgtgcactagccactatctggacctctttatcactttcataatttgtgtgaacgtgattacaatgtccatggagcattacaaccagcctaaatccctggacgaggcccttaagtattgcaactatgtctttacaatcgtgtttgtttttgaggccgcactgaagttggttgcattcggattccgcaggtttttcaaggatcgatggaatcagctcgacctggcaatcgtgctcctgagcttgatgggcatcaccctggaggagatcgaaatgtctgccgctctgcctatcaaccccactataatccgaatcatgagagtcctgcggatcgctcgcgtcctgaaactgctgaagatggcaacaggaatgagggccctcctggacacagtggtgcaggcgttacctcaggtaggcaacctgggcttgctgttcatgctgctcttcttcatttacgctgctctaggagtggagctgttcggaagattagagtgctctgaagataacccctgtgaaggtctttctcgccacgcaaccttttctaactttggaatggccttcctgacacttttcagggtctcgactggagacaactggaatggcattatgaaggacacgctacgagaatgctccagagaagacaaacactgtctctcttatctgcctgccctctcgccggtgtactttgtgacattcgtgctggttgctcaattcgtgctggtgaatgtggtcgtggcggtcttaatgaaacacctcgaagagtcaaacaaggaagcgagggaggacgctgaactcgacgcagagatcgaactagagatggcccagggtccagggagcgcaagacgggtagatgccgatcgaccccctctcccgcaggaatctccgggggcgcgcgatgctcctaatcttgtggcgcgtaaagtgagcgtttctaggatgctgtctctgcccaatgattcatacatgtttagacccgtcgtgcctgctagcgcccctcatccaagacctttgcaggaagtggaaatggagacttatggtgcaggcactccactaggatcggtggcatctgtgcatagcccccccgccgaatcatgtgctagcctgcaaattcccctggccgtatctagtccggctagaagcggcgagccgctgcatgccctgtcccccagggggactgctcgaagccccagtctatcccggttgctgtgtagacaggaggctgtgcacacagactcattggaggggaagattgatagccccagagacaccctagaccccgctgaaccgggcgagaagacgcctgtaagaccggtaacccagggcgggtctttacagagtccaccccgaagcccccgccccgcttccgtccgcaccagaaagcatacttttggacagcgctgcgtttccagccgtcccgctgcacccggtggcgaagaggctgaggcttctgatccagctgacgaggaggtctctcatattacctcgtctgcttgcccctggcagcctacggccgagccgcacggtcccgaggcatcaccggttgccggcggagaaagggatcttagacggctttatagcgttgacgcccaaggtttcctggataagcccggccgggccgatgaacaatggaggcccagtgcggagttaggcagtggggagccgggagaagccaaagcgtgggggcccgaggcagaaccagctctgggagcgcgccgtaaaaaaaagatgagtccaccctgtataagcgtggaacccccagccgaagacgaaggatccgcacggccttcagctgccgagggaggctcaactacgctcagacgcaggacgccttcgtgtgaagcaactcctcacagagattccctcgagcctaccgagggtagtggcgctggcggtgaccctgccgccaagggtgaacgttggggacaggcctcctgcagggctgagcacctgaccgtcccctcatttgcatttgaacccttggatctcggcgtgcccagcggcgatccattcctcgatggcagccattctgtcacccccgagtcacgcgcaagctccagtggagccatcgtgccactggaaccccccgagagcgagcctcccatgcctgtaggtgatcctccagagaagaggagagggctttacctcaccgtccctcaatgcccgcttgagaaaccaggcagccctagcgccacaccagctccgggtggcggagctgacgacccggtgtag

SEQ ID NO: 110472 - DNA, 7044 bp, synthetic construct
  misc_feature 1..7044: note = Description of Artificial Sequence: Synthetic coding sequence
  source 1..7044: mol_type = other DNA
atgactgagggagctagagctgcagacgaggtccgggtcccccttggcgcccccccacccgggcccgcagccttagtcggggcctcccctgagtctccaggcgctccggggcgagaagctgaaagaggctctgagcttggagtgtcacctagtgaaagccctgccgctgagagaggcgctgagttgggtgccgatgaggagcagcgggtcccctatccagccctcgccgcaaccgtgttcttttgcctagggcaaaccactaggcccaggtcgtggtgcctacgattggtgtgcaatccttggtttgagcacgtaagtatgctggtaatcatgttgaactgcgtgactttagggatgttcaggccctgcgaagatgtcgagtgcggttccgagcgttgcaacatactggaggcctttgacgccttcatctttgcctttttcgccgttgagatggtcattaagatggtagccctggggttgttcggacagaagtgttacctgggcgacacgtggaataggttagatttttttattgttgtggccggcatgatggagtattccctcgatggccataatgtttcactgtccgccatccgaacagtgcgtgtgctgaggcctctccgggccataaaccgggttccatccatgaggatcctagttacactgttgctggacactcttccaatgctaggaaacgtgttactcctttgtttttttgtgtttttcattttcggcattgtaggagtgcaactttgggcggggctgctccgaaaccggtgtttcctagattctgcgtttgttcggaataataacctaacatttttgcgcccatactatcagacagaggagggggaagaaaacccctttatttgctcatccagacgcgacaacggcatgcagaagtgctcccacatcccaggacggcgagagttgcggatgccctgcacactcggctgggaggcatatacccagccgcaggccgagggtgtgggtgcggcccggaatgcctgcatcaattggaaccagtactacaatgtgtgccggtccggcgactctaaccctcataacggcgcgattaactttgacaatattggatacgcatggatagctattttccaggtgattactcttgagggatgggttgacattatgtactacgttatggacgctcacagcttttataatttcatctactttattttgctcatcattgttggctctttctttatgataaatctctgtttggtagtgatcgcgacccagtttagcgaaactaagcagagggagtcccaactgatgagggagcagcgcgcccgccacttgtccaacgattcgacgctagcatccttcagcgaacccggatcgtgttacgaggagctgctgaagtacgtcgggcacatcttccgcaaggtaaagagacgcagcctccgtctgtacgctagatggcagtcccgatggcggaaaaaagttgacccctcagccgtccagggccaaggccctgggcataggcaacggagggcaggccgacatactgcctccgtgcaccacttggtgtaccatcaccatcaccatcaccatcatcactaccacttcagtcacgggtcccctcgaagacccggcccagaacccggcgcgtgcgacactagactcgttcgggcaggcgcaccaccctctcccccctcccctggcagaggaccacccgacgctgaatccgtccactccatttatcatgctgattgccacatcgaaggccctcaggaacgagcacgggtcgcacatgctgcggctactgctgccgcctctttgaggctggccactggccttggcaccatgaattatcctactatcctgccctcaggtgtggggtccggtaagggttctactagcccagggcctaaggggaaatgggcagggggccctccaggcaccggtggccatggaccactcagcctgaacagccccgacccatatgagaagatccctcatgttgtaggcgaacacggcctggggcaggcccccgggcacctgagcggcctaagtgtgccttgtccacttccatccccgccggctggcacgctcacgtgcgaacttaaaagctgcccatactgtaccagagcactggaggatcctgagggagagctcagtggcagcgagtccggagacagcgatggcagaggggtctacgagttcacccaggatgtaaggcatggagaccggtgggatcccacccgcccacctagagcgacagatacccccggtccggggcctggatcccctcaacggcgcgcccagcagagggcggccccaggcgaacctggatggatgggtcgtctgtgggtcacttttagcggaaagctgaggcgcatcgtcgactctaagtatttctcccgcggaattatgatggcaattttggttaacacgctctccatgggcgtcgagtaccatgaacagcctgaagagctcaccaacgccctcgaaatctctaacattgtattcaccagtatgtttgctctagagatgttgttgaagctgctcgcatgcgggcccctggggtatatccgcaacccctacaatatcttcgacgggattatagtagtgatttcggtgtgggaaattgttgggcaggctgatggcggcttgagtgtactgcgaacctttaggctcttgcgagttctgaagctggtgaggttcctgccagcactgcgcaggcagctagttgtgctggttaagaccatggataatgtagccaccttctgcactttgttgatgctctttatattcatatttagtatcctcgggatgcacctcttcgggtgtaaattctccctaaagactgacacaggagataccgtccccgacagaaaaaactttgatagtctgctgtgggctatcgtgactgtcttccaaatcctcacgcaagaggattggaatgttgttctgtacaatggaatggcatctacgtcctcttgggccgcattatattttgttgcactcatgacttttggaaactacgtgctatttaacctcctggttgcgattctggtcgaaggctttcaggctgagggtgatgccaaccgcagtgataccgatgaagacaagacaagcgttcacttcgaagaggatttccataaactccgggaacttcagacaacagaactgaagatgtgttccctagcagttactcccaacgggcatctggaaggccgtggcagcttaagtcctccactgatcatgtgtactgcggctaccccgatgccaactcctaagtcaagcccctttctggatgctgccccaagccttcctgactcaaggagaggcagcagctcttccggggacccacccctcggtgaccagaaaccacccgcctcgcttaggtcctctccctgtgccccttggggccctagcggggcatggtcctcaaggcggagctcctggagctctcttgggcgggccccatcccttaaacgccgcggtcaatgcggggagagagaatctttgctgtctggagaaggaaagggctccacagacgacgaggccgaggatggtcgggcggcgcctggcccacgagcaacccctctgaggagggcggagagcctggacccacgtcctcttcgtcccgcggcactgccacctaccaagtgtcgcgatagggacggtcaggtggttgcactcccgtccgatttttttctacgcattgattcccatcgtgaggacgctgctgagctggacgacgattccgaggactcctgctgtttaaggctccacaaggtgcttgaaccctacaaaccacaatggtgcagatcgagggaagcttgggcactttacctctttagtccccaaaacaggtttcgtgtatcttgtcaaaaggtgattacgcataagatgtttgatcacgtggttctcgtcttcatctttttgaactgcgtcactatagcgcttgagcgacccgatattgatccgggatctaccgaaagagttttcctgtcggtgagtaactatatcttcacagccatctttgtggctgaaatgatggtcaaggtcgtggctcttggtctcctgtctggggaacatgcctacctgcagagcagctggaacttactggacggactgctggtgcttgtgtctctcgttgacatagtggtcgctatggcatctgctggaggagcgaagatacttggtgtgttacgggtgctccgactactgcggactctgcgaccgctgagagtaatcagccgagcacctggattgaagctggtcgtcgagacccttataagcagtctacgccctattggcaatatcgtgctcatctgctgcgccttttttattatcttcggcatcctcggcgtgcagttgtttaaaggaaagttttactactgtgagggcccagatactagaaatatctccacaaaggcacagtgtcgcgcggcccattatagatgggtgcgaagaaaatataactttgacaatctgggacaggctctgatgtctctgtttgtcctgtcttccaaggatggatgggtcaacatcatgtatgacggccttgacgccgtcggtgtagaccaacagccagtgcaaaatcacaacccctggatgttactctattttattagcttcctgctgattgtgtctttcttcgtcctcaacatgtttgtaggggtggtggtagagaattttcacaaatgtaggcagcatcaagaagccgaagaggcccgtagaagggaggaaaaacgtctccgaaggctggagcggcgcagaagaaaggcccagagacgtccatattatgcagattacagccccactaggagatccattcactctctgtgcactagccactacctcgatctcttcataacctttatcatctgcgtcaatgttatcactatgtcaatggagcattacaaccagcccaaatctttggacgaggccctaaagtactgtaactacgtttttaccattgtattcgttttcgaggctgcactcaaactcgtggccttcggcttccggcgcttcttcaaagacagatggaaccaactcgacctagccatcgttctcctttctctgatggggattactctggaagagatcgagatgtccgccgccctccctatcaaccccacaatcattaggataatgagagtgctaaggattgcacgggttctgaagctgctgaagatggccaccggcatgagggcgcttctagataccgtagtgcaggcactgccacaggtaggcaatttgggtttactgtttatgttgctcttctttatttatgcagccctaggggtggagctcttcggacgactggagtgcagcgaagacaacccttgcgaaggattatcccgacatgctaccttttctaattttggcatggccttccttaccctttttcgggtttctaccggagacaactggaatggcattatgaaggatacgctgcgggagtgctctcgtgaggacaaacattgtctgtcatatctgccagccctgtcgcctgtatatttcgtgacctttgtcctggtggctcagttcgttttggtaaatgtggtcgtcgcagtgctaatgaagcacttagaggaatctaacaaggaagcacgggaagacgcagagttggatgccgagatcgagctagagatggcacagggaccaggctcagccaggcgtgtggatgccgacaggccccccttgccacaggagtctcccggagcgagagacgctcccaacttggttgcacggaaagtcagcgtatcgagaatgctgagcctcccaaatgattcttatatgttcagaccggtggtaccggcttccgcaccacatccccgtcctttacaggaagtagagatggaaacctatggggcagggacccctctcggcagcgttgcctccgtgcatagtccgcctgctgagagttgcgcgtccttgcaaatccctttagccgtgtcaagcccagcccggtcaggggaacctttgcacgcactgagcccacgaggtaccgcccgatccccttcactgtcacgtctattatgccggcaggaggccgtccatacggactctctcgaaggtaaaattgatagcccgcgcgacacacttgatccggcagagcctggtgagaaaacccctgtgcgcccggtgacccagggaggctctctgcagtccccaccccgaagccctcgaccagcatcagttcgaacgaggaaacacacttttggacagaggtgtgtgtccagccgccccgctgcccccggaggagaggaggcggaagcttccgacccagccgacgaagaagtctctcacatcacaagctcggcctgtccttggcaacctactgctgagccccatgggcccgaagcaagtccagtggctgggggagaacgtgacctaaggcgtctctattccgttgatgcacagggattcttggacaagccgggcagggccgacgagcaatggcggccctccgccgagctcggctctggcgagcccggggaggccaaagcatggggacccgaggcagagcccgcactgggcgctcgccggaaaaaaaagatgtctcctccctgcatttctgtcgagccccctgccgaggatgaaggaagcgctcgaccgagtgcagctgaaggaggctctactactctccggcgtagaacgcccagctgcgaggcgaccccccaccgtgattctctcgaacctaccgagggttcaggtgctgggggagatcctgcagccaagggggagcgctgggggcaagctagttgccgggccgagcatttgacagttccgtcttttgctttcgaacccctcgatctgggcgttccatctggagacccattcctcgacggttcccacagcgttaccccggaatctcgggcgagcagtagtggcgccatcgtgccattagagccacccgaaagcgagccacctatgcccgtcggcgaccctccagagaagcgtagaggcctgtacttgacagtgccgcagtgcccgctggagaaaccaggcagcccctcagcaactcccgcaccaggaggcggagccgacgacccagtgtag

SEQ ID NO: 110473 - DNA, 6690 bp, synthetic construct
  misc_feature 1..6690: note = Description of Artificial Sequence: Synthetic coding sequence
  source 1..6690: mol_type = other DNA
atggcagagtcagctagcccacccagctcttccgccgcggccccagctgcggagccaggggtcaccacagaacagcctggtcctcgctctccaccatcctcaccacccggcctagaggaacccctagacggcgccgatccccacgtgccacaccctgatctggcacctatcgcatttttctgcttgcgccagaccacctctccacgtaattggtgtatcaagatggccactggcccttggtggtggtgtctgtgcatgctggtgatcctgctgaactgtgttactctcgggatgtatcaaccctgcgacgatatggattgtttatccgaccggtgcaaaattctgcaggtgtttgacgacttcatcttcatcttcttcgctatggagatggtcctgaagatggttgctctcggtatcttcggaaagaaatgctatctcggggatacatggaacagactggactttttcattgtaatggctggcatggtggagtattctctggatttgcagaacatcaatctctctgccatccggactgtgcgggtgctgagaccactcaaggcgatcaatcgggtgcctagcatgaggatcttagtgaatttgctactagacacgctcccaatgctgggaaacgtgctgttgttgtgcttcttcgtcttttttattttcggaattataggagtgcagctgtgggctggcctgctccgcaaccgatgttttttggaggagaactttacaatacagggagacgtggccctgccgccatattaccagcccgaagaggacgacgaaatgccattcatttgttcactctctggcgacaacggtataatgggatgccacgaaatacccccactgaaagagcagggcagggagtgctgtctcagcaaggacgacgtgtatgacttcggagcaggacggcaagacctgaatgcctctgggctgtgtgtaaattggaataggtactacaatgtctgccgaaccggaagtgcaaatcctcataaaggggccattaattttgataatatcgggtacgcatggattgtgatcttccaagtgattaccctggagggttgggtagagatcatgtactatgtgatggacgctcactccttctacaactttatttactttatcctactcatcatagtcgggagcttcttcatgataaatctttgcctcgtcgtcatcgccactcagtttagtgagaccaaacagcgggaacaccgattaatgcttgaacaacgccagcggtatctgtcttccagcacagtcgcctcttacgcagagcccggtgattgctacgaagagatttttcagtatgtgtgccatattcttaggaaagcaaaaagaagggctctcggcctgtatcaggccctgcagtctcggaggcaagcgctaggccccgaagctccagcccctgccaagcctggccctcatgctaaggagccccgtcactatcacggaaagaccaagggccagggtgatgagggccgccacctggggagtcgacattgtcagactttgcacgggcccgcctcaccgggaaatgaccattccggccggggaaaaccaggacccagagagctgtgtcctcaacatagccccctggacgccacaccccacaccctggttcaaccaataccagcgactctggcttcagatccggcttcatgcccgtgctgtcaacacgaggacgggcgcagacctagtggccttgggtccaccgatagcggacaggaagggtccggatccggaagtagtgcaggcggcgaggacgaggcggatggcgatggggcccgcagtagcgaggatggcgccagtagcgagctgggtaaagaagaggaagaggaggaacaagccgatggtgccgtgtggctgtgtggcgatgtgtggagagagaccagagcaaagctccggggtattgtggattccaaatatttcaacagagggattatgatggccattctggtcaatacggtctccatgggaatcgaacatcatgagcaagccaatgaattgactaatatcctcgagatctgcaatgtggtcttcaccagcatgtttgcacttgaaatgatcctaaagctggcagcctttggtttgttcgactatctacgtaacccatataatatcttcgacagcataattgtcattatttcaatctgggagatcgtgggtcaggccgatggcggactgagcgtactaagaacatttcgactcctccgggttctaaagttggttcgtttcatgccagccctgagacgccagctggttgttttaatgaagacaatggacaacgttgccacattttgtatgctgcttatgctattcatctttattttttctatcctcgggatgcatattttcggatgcaagttcagtctgcggaccgacacgggggatactgtacccgaccggaaaaattttgattcgttgctttgggctatcgtgacagtgttccagatcctgacccaagaggattggaacgtggtcttgtataacggtatggcaagtacttccccctgggcttctctgtacttcgtggcccttatgaccttcggaaactacgtgcttttcaatctgcttgtcgcaattttagtcgagggattccaggctgagggcgacgctaatcggtcctacagtgacgaggaccaatcgtctagtaacatcgaggagtttgacaagctgcaggagggccttgattcgagcggggacccaaagttatgccccattccaatgactcccaatggccatttggatccgtcgctgccgctcggcggccatttaggacccgccggcgctgctggacccgcccctagactgtcgctgcaacctgacccgatgctggtggcactgggctcccggaaatcctctgtgatgagcctgggtaggatgtcctacgatcagagatcgctgtcctcttctagatcgtcctactatggcccctggggcagatccgcagcctgggcgtctcgcaggtcctcctggaatagtcttaagcacaagccaccaagtgccgagcacgagtctcttctgtcagccgaaagaggagggggggcccgagtatgcgaagtggctgcagatgaggggccgcccagggccgcccctctgcacactccacatgcgcaccatattcaccacggcccacacctcgctcaccgacatcgtcaccatcgacggactctttcactggacaaccgcgactccgtagatctcgctgaacttgtgcccgccgtgggggcacaccctcgagccgcatggagagcagctgggccggctcccggccacgaggactgcaacggacgcatgcctagcatagctaaagacgtgttcactaagatgggcgacaggggagaccgcggcgaggatgaagaggaaatagactacacgttgtgtttccgcgtgaggaaaatgatcgatgtttacaaaccagactggtgtgaggtgagggaggattggtctgtgtacctgttttcccccgaaaaccgatttcgtgtgctgtgccagactatcattgcccacaagctcttcgattatgttgtactagcctttattttcctaaactgtattacgatagcgctggaacgaccgcagatcgaggccggcagcaccgaaagaatcttcctgaccgtcagtaactatattttcacagcaatcttcgttggcgagatgacgctgaaagtggtcagtctgggcctgtatttcggcgaacaggcctacctgagatcttcatggaacgtgctcgatggctttcttgtgtttgtttctattatcgatattgtcgttagcctggcctccgctggtggggcaaagatcctgggggtgctgcgggttctgcgcctcctccggactctgagacctcttcgggtgatcagccgtgctccagggctgaaacttgtggtcgagacgttgatcagttcactgaaaccaataggaaacatagtgcttatctgttgtgctttctttatcatttttggcatcctgggagtgcaactgttcaagggaaagttctaccattgtttgggggttgacactaggaacatcacgaaccgctcggattgtatggccgctaattaccgctgggtgcatcacaagtacaatttcgacaatttgggacaggccctgatgagcttgtttgtgctggcctccaaagatggctgggtgaacattatgtataacgggctggacgccgtggcagttgaccagcagccggtaaccaaccacaacccttggatgttgctctatttcatatccttcctgctaatagtaagctttttcgttctaaacatgtttgtgggagttgtggttgaaaacttccacaaatgcaggcagcaccaggaagctgaggaggcgcggcgtcgcgaagagaaaagactgcggcgcctggaaaagaagagacgcaaggctcagaggctcccctactatgccacctactgccacacccgtctgctcatccatagtatgtgtacatctcattatctggatattttcattacgtttatcatctgtctgaatgtggtgaccatgtcactcgagcattacaaccagccgactagccttgagactgccctgaagtattgtaattacatgtttactaccgtcttcgtgttggaggcagtcttgaagctggtggcgttcggattacgccgtttttttaaggaccgctggaaccagctggatctcgcaatcgtgctcctgagcgtgatgggcatcactctggaagagattgaaataaacgctgctttgcctattaatccaaccatcatccgcattatgcgggtgcttagaatcgcacgtgtgctgaaactgctgaagatggctaccggcatgcgggcattactggataccgtcgtgcaggcgcttccccaggtgggaaacctgggcctgctgtttatgctcctctttttcatctacgcagccctgggcgtggagctcttcggaaagttggtctgtaatgacgagaatccttgtgaaggcatgagccggcacgcaacttttgagaactttgggatggctttcctgaccttgtttcaggtctccacaggggataactggaatgggatcatgaaagatactctgcgggactgtacccacgacgaaagaagctgtttatctagcctgcaatttgtgtccccgctttactttgtcagctttgtattgaccgcacagttcgtgctaatcaacgtggttgttgccgtactgatgaagcacctcgacgattccaacaaggaggcccaagaggacgccgagatggacgcagaactggagctcgagatggctcacgggcttgggcccggtcccagactgccaacggggtctccaggtgcaccgggacgtggaccgggaggcgccggcgggggcggagatactgaaggtgggctgtgccggaggtgctattcgcccgctcaagagaatctttggttggatagtgtatccctaattatcaaggattcattagagggcgaactcacaataatcgacaatctgagcgggtccatcttccaccattattctagccccgctggatgcaaaaagtgccaccacgacaagcaggaagtgcagttagccgagaccgaagctttctcgctgaacagcgaccggagcagctcaatactccttggggacgacctaagtcttgaagatcccacagcttgcccaccaggccggaaagatagtaagggggaactcgaccccccagagcccatgagggtcggtgaccttggcgagtgtttcttccccttgagtagcaccgccgtttctcccgacccggagaatttcctctgcgagatggaagagatacccttcaatcccgttcgatcatggctgaaacatgactcatcacaggctccccccagccctttcagccctgacgcctcatcccctctgctccctatgcccgcggaatttttccacccagcagtctctgcttcccaaaaagggcctgagaaaggtacaggcactgggacacttcctaagatcgccctgcaggggtcttgggcttcacttagatctccccgggtgaattgtaccttattacgacaagctacagggtcagatacaagcctagatgcttctccctcgtcgtcagccggatccctgcagacgacactggaagattcgctaacgttatcagactcaccaagacgcgctctcggccctcccgctccggctcctgggcccagagctgggctgtctccagccgcaagaagacgattaagcttgcgaggcaggggcttgttttccctccgtggactcagggctcatcagcggagccatagcagcggagggtcaacttcaccgggctgcacccatcacgactccatggacccatctgatgaagaaggcagaggaggcgccggcgggggcggggcagggagcgagcacagtgaaacactgtcttccctgagcctcacttccctgttctgtccaccgcctcctccgccggcaccaggattgacccccgcaagaaagtttagttccaccagcagcctggctgcccccggtaggccccatgccgcagccctcgcccacggacttgcccgtagccccagctgggcagccgatcggtcaaaggaccctcctggacgcgctccactgcctatgggtctcggcccccttgccccccctcctcagcctctgcctggtgagctggagcccggcgatgctgcctccaaacgaaagagatag

SEQ ID NO: 110474 - DNA, 6567 bp, synthetic construct
  misc_feature 1..6567: note = Description of Artificial Sequence: Synthetic coding sequence
  source 1..6567: mol_type = other DNA
atggctgagtccgctagtcccccttcgtcttctgccgcagccccagccgctgaacctggggttaccacagaacagcctggcccacggtccccacctagttcccctccgggacttgaggaaccactggatggtgccgaccctcacgtgcctcatcccgatcttgcacccattgcattcttctgcctgcgacagacaacatctccccgcaactggtgtataaagatggcaacgggaccatggtggtggtgcttatgcatgttggtgattttgctgaattgcgtgaccttagggatgtaccagccatgcgatgatatggattgcctcagcgatagatgtaaaattctgcaagttttcgacgactttatttttatcttctttgctatggagatggtccttaagatggtcgctttagggatcttcggaaaaaaatgctatctgggagacacatggaatcgtctcgacttctttatcgtgatggctggaatggtggaatattcacttgatctccagaacattaatctgagcgcaatacggactgtgcgcgttctgagacccttaaaagcaataaatagggtgccctccatgaggatattggtgaatctattgctcgacacactccccatgctgggaaatgtcctattgctgtgcttctttgtgttcttcatttttggaatcattggagtgcaattatgggccggtctgctgagaaataggtgctttctcgaggaaaatttcactattcaaggcgacgtcgccttacctccttactaccaacccgaggaagatgacgaaatgccattcatctgtagtctaagcggggacaatgggattatgggatgtcatgagataccccctctcaaggaacagggcagggagtgctgtctgtctaaggacgatgtgtacgacttcggagccggacgccaagatctgaacgcttccggactctgcgtgaattggaacaggtattacaacgtttgtcggacggggtccgccaacccccacaaaggggcaatcaatttcgataatattgggtatgcctggatcgtgatcttccaggtaatcacccttgaggggtgggttgaaattatgtactacgttatggacgcccacagtttctataacttcatctatttcatcctgctgatcatcgtggggtcgttctttatgattaacctctgtttggtagtgattgcgacacaatttagcgagaccaaacagcgggaacaccgcttaatgctggaacagaggcagagatacctctctagttcaacagtggcatcttatgccgagcccggcgactgttacgaagagatcttccaatatgtgtgccatatcctgcggaaagcgaagcggcgtgcactcggtctgtaccaggcactgcagagccgcaggcaagccctgggacccgaagcccctgcccccgcaaagcctggaccccatgccaaggagccacggcactaccagctctgtccacagcactcgcctctcgatgcgaccccacacacactggtgcagccgattcccgccacgctggcttctgacccggcatcttgtccatgctgccagcacgaggatggtcggagaccatctgggctgggaagtaccgacagtgggcaggaaggttccggctcgggcagcagcgctgggggtgaagatgaggcagacggagacggagcacggtcctcagaggatggcgcctcttctgaacttggtaaggaggaagaggaagaggagcaggccgacggagccgtgtggctgtgtggcgacgtttggagggagactagggctaagttgagaggcattgtagactcaaagtacttcaaccgcggcataatgatggccattctggtgaacacagttagtatgggtatagagcaccacgagcaggctacagagctaaccaacatcctagaaatctgtaatgtggttttcacgtcaatgttcgccctggagatgattttaaagctggccgccttcggtctcttcgactatctgagaaatccatacaacatcttcgactctattattgttatcatttctatttgggaaatcgtgggacaagcagatggcggtctgtctgtgctccggacattcagattgctgagggtcctgaaactagtgcggtttatgcccgccctgcgacgccagcttgtggtgctgatgaaaaccatggacaatgtcgctaccttttgcatgctgctgatgctattcatcttcattttcagtatattggggatgcacatttttggctgtaaattctcattaaggactgacacgggagatacggtccctgaccggaagaactttgatagtttactttgggcaatcgtaactgtgtttcaaatcctgacccaagaagattggaatgtagtgctttataatggcatggctagtactagcccctgggccagtctctatttcgtggcccttatgacatttggcaactacgttctcttcaatctcctagtggcaatcctggtggaagggttccaggccgagggagacgctaacaggtcttacagcgacgaagaccagagctctagcaatatagaagaatttgacaagctgcaagaaggactcgacagctcaggggaccctaagctgtgcccaattcccatgacacctaacgggcacctggacccaagtctccctctgggaggacatctgggacctgcgggtgccgcgggcccagctcctcgactatcgttgcagccagatcctatgctggtggctttaggtagccggaagtcatcggtcatgtctctgggccgaatgtcctacgaccagcgtagcctaagctcttcccggtcctcttactacggtccctggggtagatccgcagcatgggccagcagacggtcctcttggaactccctcaaacacaagcctccttctgccgagcatgaatcactgctgtccgctgaaaggggcggtggcgcaagagtatgtgaggtagcagctgatgagggcccaccccgggctgctcctctgcacaccccacacgcgcaccatattcatcatggaccgcacttagctcatcggcaccgacatcaccgccgcaccctgagccttgacaacagggatagcgtcgacctggcagaattggttccggccgtaggagcccacccacgggcagcatggagagccgccggtcctgctccgggacacgaggattgtaatggacggatgccctccatcgccaaagatgtgttcactaagatgggggatcggggagaccgaggcgaggatgaagaagagatcgattatactttatgcttccgggtgagaaaaatgatcgatgtgtacaaacccgactggtgtgaggtccgagaagattggtccgtgtatctgttcagccctgagaacaggtttagagtcctctgccaaacgatcatagcacataagttatttgattatgttgtcctggccttcatttttttaaactgtattacgattgcactggaacggccccagatcgaagctgggtccacggaaagaatctttctgactgtgagtaattatattttcacagccattttcgtaggggagatgaccctgaaggtcgtgtctctcgggctatacttcggagagcaggcctacctccgatcttcatggaacgtcttggatggcttcctggtattcgttagcatcattgatatcgttgtgtcactggctagcgccggaggagccaaaatactgggagtgctgagagtgcttagactgctaagaactttgaggccgttaagggtgatctcccgggccccaggtctcaaactagtggtggagacactaatttccagtctcaaacccatcggaaatatcgtccttatctgttgcgcatttttcatcatttttggaatcctgggagttcaactattcaaagggaaattttaccactgccttggtgtggatacccgcaacattacaaaccggtctgactgcatggctgccaattatcgctgggtgcatcacaaatataattttgataatcttggccaggccctgatgtcacttttcgtgttggcatccaaggacggatgggttaacatcatgtacaatggcctcgacgccgtcgctgtcgaccaacagcctgtaacaaaccataatccgtggatgctcttatattttatcagcttccttctgattgtctctttcttcgtattaaatatgttcgtgggagtcgtggttgaaaatttccacaaatgcaggcagcaccaggaagccgaagaggcaagacgcagagaggaaaagcgcttgcggcgcctggagaagaagagaaggaaggcccagcgactgccatactatgccacatattgtcatacccgactgctgatacacagtatgtgcacgagccactacctggacatcttcatcacgttcataatttgtttaaatgtggtaactatgagcctggagcactataaccaacctactagtctagagacagccttgaaatactgtaactacatgttcaccaccgtgttcgtactggaggctgtactcaagctggtggccttcggcctgaggcgtttctttaaggaccgctggaatcaactagacctggctatcgtccttcttagcgtcatgggcatcacactggaggaaattgagattaacgcagccttaccaattaaccctacaatcatacgtatcatgagggtactcaggattgctagagtcttgaagctgttgaagatggcaacagggatgcgggcactgctagacaccgtcgttcaggccctcccgcaggtgggtaaccttggactactctttatgctgttgttcttcatttacgctgcattaggcgtggaactctttggcaagctggtttgtaacgacgaaaacccctgcgaaggcatgagccggcacgccacattcgagaactttggcatggccttcctgactctgtttcaggtgagcaccggagacaattggaatggcataatgaaggacaccctgcgcgattgcacacacgatgaaaggagttgcttgtccagcttgcagttcgtgagtccgctgtactttgtgtcctttgtcctcactgcccagtttgtactgattaacgttgtggttgccgtcctgatgaagcatttggacgacagcaataaagaggcccaagaggatgccgagatggatgcagaactcgagttagagatggctcatgggctcgggcctgggccacggctgcccacaggaagtcctggcgctccgggacgcggaccagggggcgcaggcggcggaggcgatacagaggggggtctgtgtaggcgatgctacagcccagcacaggagaatctgtggctcgattctgtgtcacttatcattaaggattctcttgaaggcgaattgacgattatcgataaccttagtggatccattttccatcattactctagcccagccggctgcaagaaatgtcaccatgataagcaggaagtgcagctggctgagacagaggccttctcactgaactctgaccggtcttcctcaattctgttgggggacgatctcagcctggaggatcccacagcttgtcccccgggtcggaaagattccaaaggcgaactagatcccccagaaccgatgcgtgtgggggacctcggcgaatgtttttttcccctaagtagcaccgccgtcagccctgatcctgaaaactttctgtgtgagatggaagagattccgttcaacccggtcagaagctggctgaagcatgactcctcccaggccccaccaagtccctttagccccgatgcaagctctccactgctgccaatgcctgctgagttctttcacccagctgtatctgcaagccagaagggaccagagaaaggcactgggaccggaacccttccaaagattgccttacagggcagttgggccagtctccgctcgccacgcgtgaactgtactctactgcggcaggctacggggtccgacacttccctggacgcttctccaagttccagtgctggctcactccagactaccctggaagacagcctgacccttagcgattcaccacggcgtgcgttgggcccaccggcacctgcccccggccctagagctggcctgtctccagcagcacggcgtcggttatccttgagggggcgcggcctgttctccctgagaggtctgcgcgcccatcagagatcccactcatccggcgggtcaacctctcccggttgtacccatcatgactctatggatccttccgatgaagagggaagagggggcgctggtggcggtggggctgggtctgaacatagcgagactttgtcaagtctctctctgacctctctcttctgcccaccaccaccccctcccgccccgggcttaacccctgcacgcaaatttagcagtacgtctagcttagcagcgcctgggcggccgcacgccgcagctctcgctcatggtctcgctagatctccaagctgggcagccgatcggagcaaggacccccctggacgggccccgctccccatgggcctagggcctctcgccccaccacctcagcctctccctggagagctcgagcccggcgatgcagcatcaaaacgcaaacggtag

SEQ ID NO: 110475 - DNA, 6051 bp, synthetic construct
  misc_feature 1..6051: note = Description of Artificial Sequence: Synthetic coding sequence
  source 1..6051: mol_type = other DNA
atggccgaaagcgctagtcctcctagtagctcagccgctgccccagctgcagaacctggcgttacaacagaacagcctggtcctcggtcccccccctccagcccccccggtctggaagagcctctggacggagctgatccccatgtcccacatccagacctagcccccatcgcgtttttttgtcttagacagactactagccccaggaattggtgtatcaagatggtctgcaatccctggttcgagtgcgtctcgatgctggtcatcctcctgaattgtgtgacactgggcatgtatcaaccgtgtgacgacatggattgtttgagcgaccgctgcaagatcttgcaagtcttcgatgactttatatttatctttttcgccatggaaatggtgttgaagatggtcgcgctcggcatctttggcaagaaatgttatctgggagacacctggaaccggttagatttttttatcgttatggcggggatggttgaatactcgcttgatttacagaatatcaatctgtccgcaatcaggacagtgcgtgtattgcgcccactgaaggccatcaatcgggtgccaagcatgcgcatcctcgtcaacctgctgttggacactttacccatgctcggaaacgttctgctactttgcttctttgtctttttcatttttggcatcattggagtgcagctgtgggcgggcctgttgcggaataggtgcttcctcgaggagaactttactatccagggggatgtggcattacccccctattaccagccagaagaggacgatgagatgccatttatctgctcattgagcggcgataacgggattatgggctgccacgaaattccccctctcaaggagcaggggagggagtgttgtctctctaaagacgatgtttacgacttcggcgccggacgccaggatttaaatgcgagtggtctgtgcgtaaattggaaccgctactataacgtgtgccgaactgggagcgcaaatccacacaagggggctatcaatttcgacaatattgggtacgcctggatcgtcatctttcaagtgatcacgctcgaaggctgggtggaaataatgtactacgtaatggacgcccacagtttctacaacttcatctacttcatcctcttaattattgttggttcattttttatgattaacctgtgcctagttgtgattgcgacccagttttccgaaaccaagcaaagggagcaccggctcatgttagaacaaagacagcgatacttatcctccagtactgtcgcatcctatgcagaacctggcgactgctacgaagagatctttcagtatgtctgccatattctgcggaaagcaaaacgccgcgctctcggcttgtatcaggcgctacagagccgaaggcaggccttaggccctgaggctcccgctccggcgaaacccgggccgcacgccaaggagccgcgtcactaccacggtaagacaaagggacaaggcgacgaggggcggcatctggggtcgaggcactgtcagactctacacggtcctgctagtcctggcaatgaccactcaggccgggagctttgcccccagcactcccctctcgacgcaacgccgcacacgttagttcaaccaatccccgctactctcgccagcgacccagctagctgcccgtgctgccagcacgaagacggtcgccggccaagtggcctcggcagcactgatagtggacaggagggcagcggaagcggcagcagtgctggtggcgaagacgaggcggatggagatggcgccaggagtagcgaggacggcgctagcagtgagcttgggaaagaggaggaggaggaagaacaggccgacggtgccgtgtggttatgcggtgacgtatggagggagacacgggccaagctgcgaggaatagtcgactccaagtatttcaatagaggaattatgatggccattcttgtcaatactgttagcatgggcatcgaacaccacgagcaacccgaagaactgaccaatatccttgaaatttgcaatgtcgtttttaccagcatgttcgcactagagatgattctcaaacttgccgcttttggtctgttcgactacttaagaaacccctacaacattttcgactccatcatcgtcattatctccatctgggagattgtgggccaggctgatggcggactatctgtgttgagaacttttaggctcctgcgagtcctcaaactagtaagattcatgccagcgctgaggcgccagctcgttgtactgatgaaaactatggataacgtggccactttctgcatgctgctgatgctgttcatattcattttcagtattctgggaatgcacattttcggatgcaagtttagcttgcgcactgacacaggagatactgtgccagatcggaaaaacttcgatagtcttctttgggctattgtgacagttttccagattctcacccaggaggactggaatgtggtcctgtacaacggaatggcaagtacctctccctgggcgagtctttattttgtggccttgatgacctttgggaattacgtgcttttcaacctcctggtggccattctcgtagaaggttttcaggccgagggagacgctaacaggtcctacagtgatgaggaccaaagtagtagcaatatcgaagagtttgacaaacttcaggaggggctcgattcttcaggggatccaaagttgtgtcctatccccatgacgcccaatggacacttggacccttctttacccctcggaggacatctggggcccgccggggctgcgggaccagccccaaggctgagcctgcagcctgaccctatgctcgtggccctcggatccagaaaatcatcggtcatgtctttgggccgaatgagctacgaccaaagaagcctgagttcaagccgatcgagttattacggtccttggggcagatctgccgcctgggcatcaaggcgcagcagctggaactctcttaagcataaacccccctctgccgaacatgaatccctgctcagcgcagagaggggcggtggcgcaagagtttgcgaagtcgcggccgacgagggaccgcctcgagccgccccgttacacacgcctcacgcccatcatatccatcacggacctcacttagcacatcgacataggcaccatagacggacactgtccctcgataaccgagactcagtggatcttgccgagctggtccccgctgttggagcccatcccagagcagcatggcgcgcagccggccccgcccccgggcatgaagattgcaacggacgtatgccatcaatagccaaggatgtcttcactaaaatgggagaccgaggagatagaggagaagacgaagaagaaatcgattacacactttgtttccgggttcgaaagatgattgacgtttacaaacccgactggtgtgaagtgagggaagattggtcagtgtatcttttctcaccagagaacagattccgggtcctgtgccagactattatagcccacaagctgttcgattatgtggtgctagcttttatttttctgaactgcattacgatcgccttagagcgccctcagattgaggctgggtccactgagcgcatatttctgactgtcagtaattacatttttactgccatcttcgtgggagagatgacccttaaggtggtgtccctcggtctttacttcggggagcaggcctacctgagatcttcatggaatgtgctcgacggattcctggtgttcgtgagtatcatcgatattgtcgtgagccttgcatccgcaggcggcgccaagatcctcggggtgctgcgggttctgcggctgcttcgcacgctgcgtcctttgagagtgatttcaagggcccctggtctgaagttggtggtggagaccttaatcagctcccttaagcccattggtaacatagtgctgatatgttgcgcctttttcattatcttcggcattctcggcgtgcagttatttaagggcaaattctatcattgcctcggagttgacacccgtaatatcacaaatcggagtgattgtatggctgctaattatcgctgggtgcaccataagtacaacttcgacaacctgggtcaggctcttatgtccctgttcgtgctggcctccaaggacgggtgggttaacatcatgtacaatgggctcgacgccgtggccgtggaccagcagcctgttacaaaccacaacccctggatgttgctatacttcatttcgtttctcctcatagtgtcttttttcgtgttgaatatgttcgtaggcgtggttgtagaaaacttccataaatgtcggcagcaccaagaagccgaagaggcccggcgcagggaggagaaacggcttaggcgactagaaaaaaagagacgtaaagcccagaggctgccctactacgccacctattgtcacactcgcctcctgattcacagcatgtgcaccagccactacttagatatattcattactttcatcatttgcctgaatgtggtgactatgagcctcgaacactataatcagcccactagcttggagaccgccctcaagtattgtaattatatgtttactacagtgttcgtgctggaagccgtgcttaagctagtagcttttgggcttcggaggttttttaaggacagatggaaccagttggacctcgctattgtgctgctctccgttatggggatcacactcgaagaaatcgagatcaatgctgccctgcccattaatccaacaatcataagaatcatgagagtgttgcggatagcacgcgtcctcaagctgctcaagatggccaccgggatgagagccctgctggacactgtggttcaagcgcttccccaggtcggcaacctgggtctgctgttcatgttgttattcttcatctacgccgccctaggagtggagttattcggaaagttggtttgcaatgacgaaaacccgtgcgaaggtatgagtcgacacgccaccttcgaaaatttcgggatggcatttttgaccctgtttcaggtctccaccggcgacaattggaatggcatcatgaaggacactctccgggattgtacccacgatgaaaggtcctgtctgtcgtcgttgcagtttgtatctccgttgtacttcgtgagctttgtgctgacagcacagtttgttctcattaacgtcgtggtcgccgtgttgatgaagcatctcgacgattcaaacaaagaggcccaggaagacgcagagatggacgctgaactggagctggagatggcgcacggacttgggccgggacctcgactgccaactgggtcacccggggcgccagggcgtggacctgggggagcaggaggcgggggcgatactgaaggcggcctgtgcagaagatgctatagtcccgcccaagaaaatctttggctggactccgtatctctgatcattaaagacagtctcgagggggagcttactatcattgacaatctgtccggtagcattttccatcattattcttcccccgcaggctgtaaaaaatgccatcacgacaagcaggaagtccagctcgcagaaacagaagccttctcactcaactcggatcgtagctccagcatcctgctcggagatgatttgtcactggaggaccctaccgcctgccctcccggacgaaaggactccaaaggcgaactggatcctcccgagcctatgcgcgtcggagacctgggcgagtgctttttcccactgagtagcacggcggtttccccagatcccgagaactttctctgtgagatggaagaaattccctttaatccagtgcgctcctggctgaaacacgacagcagtcaggcgcctccttcacctttcagcccagatgcttccagcccacttcttcctatgcctgctgagttctttcaccccgccgttagcgcatcgcaaaagggacctgaaaaaggcacagggaccgggaccttacccaagatcgcactccaggggtcctgggcatctctgcgcagtcctagggtcaattgtaccctcctgagacaggtgccaactcctcctcggccctag

SEQ ID NO: 110476 - DNA, 6672 bp, synthetic construct
  misc_feature 1..6672: note = Description of Artificial Sequence: Synthetic coding sequence
  source 1..6672: mol_type = other DNA
atggcagagagcgctagccctccctctagctccgctgcggctccggccgcagagccgggcgtcacaaccgagcagccagggccgagaagcccaccatccagtcctcccggcctcgaagaacccttggatggagccgatccccatgtaccgcatccggacctggccccgattgctttcttctgcctgcgacaaacaaccagtccccgcaactggtgtatcaaaatggtttgcaatccctggtttgagtgtgtaagcatgctggtaatcctcctcaactgtgtaaccctgggcatgtatcagccttgcgatgacatggattgcctctcagaccgctgcaagattctgcaggttttcgatgactttatctttatattctttgccatggaaatggtgctaaagatggtggccttagggatattcggcaaaaagtgctatctaggcgacacctggaacaggctcgacttctttatcgtaatggccggcatggttgaatactccctggacttgcagaacatcaacctgagcgcgatccggactgtgcgggtgcttaggcccctcaaggctattaatcgtgtccctagtatgcgaatattggtaaatctgctgcttgacacgttgcccatgttggggaacgtcctgctcttatgcttctttgttttctttatattcggaattataggggttcaattgtgggccggcttgctgaggaaccgctgctttctcgaagagaattttactatccaaggagatgtggcgctgccgccttattatcaaccagaggaggacgacgaaatgccatttatttgcagcttgagcggcgacaacggaataatgggttgtcacgaaatccccccgctgaaagagcagggcagagaatgttgcctgagtaaagatgacgtctatgacttcggggctggcaggcaggaccttaatgcgtctggcctctgcgttaattggaatcgatattacaacgtctgccgcactggaagtgctaatcctcataaaggggccataaacttcgacaatatagggtatgcctggattgtgatttttcaagtgatcactctcgaggggtgggtagaaataatgtactatgtcatggatgcacatagcttttacaatttcatctatttcatcctccttatcatcgtcggctcgttcttcatgataaacctgtgccttgtcgtcattgcgactcagttctcagagactaaacagcgcgagcaccgtctcatgcttgaacaaagacagcgttatcttagcagttcgactgtagccagctatgctgagccaggggattgttatgaagagatcttccagtacgtctgccacatcctacgaaaagctaagcgaagggctctgggtctgtaccaagcccttcagtcaagacggcaggctttgggcccagaggcacccgcgccagccaaacccgggccacacgctaaagagccacggcactaccacggaaaaaccaaggggcagggggatgaagggcgccatctggggagcagacattgtcagactttacatgggcccgcttcacccggcaatgatcatagcgggcgtgaactttgcccacaacacagccctctcgatgctaccccacacaccctcgtgcaaccaatccccgccaccctcgcctccgacccagcatcatgcccttgctgccaacacgaggacggcagacggccttcaggcttaggatcaacagactccgggcaggaagggtctggcagtggtagctctgcagggggagaggacgaagccgatggagatggtgcacggagcagcgaagacggcgcttcctctgagctgggcaaggaagaggaagaagaggaacaggccgacggggcagtctggttgtgcggggatgtatggcgggaaacccgagctaagcttcgaggcatcgtggactcaaaatactttaacagaggcattatgatggcaatccttgtgaatacagtgagcatggggatcgaacaccacgagcagcccgaagaactgacaaatattctagagatatgcaacgtggtctttacatcgatgtttgctctcgagatgatcttaaagctcgctgccttcggtctgtttgattacctgcggaacccttacaacattttcgatagcatcatcgtcatcatctcaatctgggagatcgttgggcaagcagatggaggactttctgtgctgcgcacgttcagactcctccgcgtactcaagctggtgcgctttatgccagcccttagaagacagctcgttgtgttgatgaagacgatggataacgtcgctaccttttgcatgctgttaatgctgttcatcttcatcttcagtattctgggtatgcatatttttggctgcaagttctccctccggaccgatacaggggataccgtgcctgacagaaagaacttcgattccctgctgtgggcgatagtgactgtgtttcagatcctaacccaggaggactggaatgtagtattatacaatggcatggcctcgacttccccctgggcttccctttattttgtcgccctaatgacctttgggaattatgtcctgtttaatctcttggtggcgattctagtggaagggtttcaggctgagggagatgctaatagatcctacagcgacgaggaccagtccagctcaaatatagaggagttcgacaagctgcaggaaggattggatagctcaggcgatcccaaactgtgtccaatcccaatgacccccaatgggcatctcgacccctctctgcccttgggtgggcatctgggtcctgcaggcgctgccggccccgcacctagattgtccctgcaacctgatcccatgctggtggcgttaggaagtaggaaatcgagcgtcatgagcctggggcgcatgtcatacgaccagcgcagcctaagctcctccaggtcctcctattacggcccctggggtcgaagcgccgcttgggcctcgcggagatcatcttggaactcacttaaacacaagccaccctcggccgagcacgagtcccttctgagcgccgagaggggcggaggagcacgcgtctgcgaagtggccgcagacgagggtcctccccgagccgcaccgctccataccccacacgcacaccatattcatcatggcccccaccttgcccaccggcatcgacaccatagacgaaccctttcactggataaccgagactctgtggatttagcggagcttgttccagctgtgggtgcacacccaagggccgcatggcgcgcagcagggcccgcccccggccacgaggactgtaacgggagaatgccaagtattgcaaaggatgtctttaccaaaatgggagatagaggagatagaggagaggatgaggaggaaatcgattacactctgtgtttcagggttcggaagatgattgatgtatacaagccagattggtgtgaggtgagagaggactggagtgtttacctgttcagcccggagaatcgatttagagtgctgtgtcaaacaataatcgcccataaactgttcgactacgttgttctggctttcatctttcttaactgtatcactatcgctctggagagaccccaaatcgaggccggatccacagagaggatcttcctcacagtgagcaactatatctttacggccatctttgttggtgagatgacgctgaaggtggtgagtttgggtctgtattttggcgaacaggcgtacctcaggagcagttggaatgtgttagacggcttcttagttttcgtgtccattatcgacattgtggtatctctggcctccgccggaggggcaaaaatactcggagtattgcgagtgctgcggcttcttcgcacactccggcctctgagagtaatcagccgcgcacccggactcaaattagtcgtcgagactcttatctccagcctgaagcccataggtaatatcgtactgatttgctgtgcattctttataatatttgggattctcggcgtccagctgtttaagggcaaattctatcattgcctgggcgtggatactcgcaatatcactaatcggtctgactgtatggcagctaattaccggtgggtgcatcataagtataacttcgataacttaggccaagcacttatgtcactcttcgttcttgcctccaaggatgggtgggttaatattatgtataatggactcgatgcggttgcagtcgaccagcagccagttactaaccataacccctggatgctgctgtacttcatctcttttttgctgattgtaagcttctttgtgttaaacatgtttgtgggagtggtggtagaaaactttcacaaatgtcggcaacatcaggaagctgaggaggcacggcgccgcgaggagaagcgactaaggaggctggaaaagaagaggcgtaaagcccaaaggcttccctattatgcgacatactgccacacccgcctccttattcattcaatgtgcaccagccactacttagatatcttcataactttcataatttgtttaaatgtagtcaccatgtctctggaacactacaaccagccaactagcctagaaactgccctcaagtactgtaactacatgttcacaacggtattcgtgctggaagccgtgctaaagctagtcgcttttggactgaggcgcttctttaaggatcgctggaatcagctggaccttgccatagtcttgctttcagtgatgggaatcactctcgaagaaatcgagataaatgccgctttgccaataaatcccacgatcatccgcatcatgagagtcctgcgtatcgcccgagtgttgaaattgctcaaaatggccaccgggatgcgggcactacttgacacggtcgtgcaggcactaccacaggttggcaatctaggcttgctctttatgctgctcttctttatttacgcagcattaggtgtggaacttttcggcaaacttgtctgtaatgatgaaaacccttgcgagggcatgtctagacacgcaacttttgagaacttcgggatggccttcctgaccttgttccaggtatcaacaggcgacaattggaacggaataatgaaagacaccttgagggattgtacacatgacgaacggtcgtgcctctcgtcgctacagtttgtttcccctctgtactttgtttccttcgtactgactgcccagttcgtgctgatcaatgtggtcgtggctgttcttatgaaacacttggatgactccaataaggaggctcaagaggatgccgaaatggacgctgaactagagctggagatggcccacggactaggacctggtcctcggctcccaacagggagcccgggagcacctggcaggggcccaggaggggcggggggcggcggtgacactgaaggcggactctgcaggcggtgttatagtcctgcacaggagaatctgtggctcgacagcgtctcgctgatcatcaaagactccctggagggggaattgactataattgacaacctcagcggctccatttttcaccattactccagtcccgctggttgcaagaagtgtcaccacgataaacaagaggtccagctagccgaaaccgaagcttttagtctgaattctgacagatcaagtagcatcctcttgggggacgatttgagcctagaggacccaactgcctgtccccccggtcgcaaggatagcaagggtgagttggatcctcctgaacctatgagggttggcgatctgggcgagtgctttttccccctgtccagcaccgccgtgtcacctgatcctgagaacttcctgtgcgagatggaggaaatacccttcaacccagtgcggtcctggctgaaacatgactcgtcccaggccccccccagcccattcagcccagacgcatcatccccactcctcccaatgccggcggagttttttcaccctgcagtctctgctagccagaagggaccagaaaagggaaccggcactgggacccttcctaagatcgccctgcaaggcagttgggcaagcctgcggtctcctcgggtaaattgcacgttattgagacaagccacaggctcagacacatccttggacgcttcaccttctagctctgctggttcactgcagacaactttggaggacagcttgaccctgtctgacagtcctagacgagccctgggccctccggcccctgccccaggcccacgcgctgggctctcaccggcagctcgtcggaggctatctctgagggggagagggctctttagcctgcgcgggcttcgtgcccatcagaggagtcactcgagcggaggctccacctcaccaggttgcacccaccacgactcaatggatccatccgatgaggaagggcgcgggggagcaggagggggtggagcggggtcagagcactcagaaaccttatcgtctctcagcctcacctcgctgttttgtccaccacccccacccccggctccaggccttactcccgctaggaagttctcaagcacatcatccctggccgcgccaggacgcccacacgccgcagccttggcccacgggctggctagaagccctagctgggccgccgaccgaagtaaagatcccccaggccgcgcccctctccccatgggactgggtccactggcccccccccctcagcccctaccaggcgagctggaacccggagacgcagcttctaaacgcaagaggtag

SEQ ID NO: 110477 - DNA, 6567 bp, synthetic construct
  misc_feature 1..6567: note = Description of Artificial Sequence: Synthetic coding sequence
  source 1..6567: mol_type = other DNA
atggctgaatcagctagccctccctcttcttcagccgctgccccggccgcagagcccggcgttaccacggaacaacccggtccacggtcacctcctagcagcccgccaggtctggaagaacccttggatggggccgatccgcatgttccacatccagatctcgctcccattgcctttttctgtctccgacagacaaccagccctcgaaactggtgtattaaaatggtttgcaatccttggttcgaatgtgtaagcatgctcgtgattctgctgaactgtgtgacgctgggaatgtaccagccgtgcgatgatatggattgtcttagcgatagatgtaagatccttcaagtttttgatgattttatttttatattctttgccatggagatggtactcaaaatggtagcattaggcattttcggcaaaaaatgctatctcggtgatacatggaacaggctggatttctttatcgtcatggccggaatggtggagtatagtctggacctacagaatataaacctctccgccatcagaaccgtcagggtgctgagacccctgaaggccataaaccgagttccttcgatgagaatactggtaaacctgctgcttgacaccttgcccatgcttggtaacgtgctgctactttgtttcttcgtgttcttcatctttggcattatcggggtgcaactttgggcgggcctcctccgcaatagatgcttcttggaggagaatttcactatacagggagatgtggctctccctccctactatcagcccgaagaggacgatgaaatgccatttatatgtagtctttcaggggataacgggattatggggtgtcatgagataccacctctgaaagaacaagggcgcgagtgctgtctgtcaaaagatgatgtctatgatttcggagccggtaggcaggacctgaatgcatcagggctctgcgtaaactggaaccggtactataatgtgtgtcgtactggttccgccaatccgcacaagggagccattaatttcgataatattgggtacgcctggatcgtcatattccaggtgataaccttagagggctgggtggaaattatgtattacgtcatggatgctcactcattttacaactttatctactttattctgttgattattgtcgggtccttcttcatgattaatctgtgccttgtggtcatcgcaacacagttctcagagacgaaacagagagaacaccggttgatgcttgagcagaggcagagatatttatcatcatccactgtggccagctacgccgagcccggggactgctatgaggagattttccagtacgtgtgccacatcttgcggaaagcgaaaaggagagccttgggtctttatcaggcattacagagcaggcggcaagccttaggtcctgaggctccggccccagccaaacccggccctcatgccaaagaacccagacactatcagctctgccctcaacactctccacttgacgcaacgccccacacgctggtgcagccaatccctgccaccctggcaagtgatccggcgagttgcccatgctgtcagcatgaagacggtaggaggcccagtggcctcgggtcaacagactctggacaggaggggtctggaagcggatcctccgctgggggcgaggatgaggcagacggggatggtgcacgatcctccgaagatggggccagttcggagcttggcaaggaggaggaggaggaagagcaggccgacggggccgtgtggctatgtggagatgtatggagagaaacacgagctaagctgaggggaattgtcgactcaaaatatttcaaccggggcatcatgatggccatcctggtgaacaccgtgtcgatgggaatcgaacatcacgaacagcctgaagagttgaccaacatactcgaaatctgcaatgtggtcttcacatccatgttcgccctggaaatgatcctaaaactggctgcgttcggactttttgattatctgcgaaacccttataacattttcgattcaattatcgtgataatctcgatttgggaaatagtggggcaagctgacggtggtctgtccgtgctgcgtacttttcgcttacttagggtgctgaaactcgtgagatttatgcccgctctgagaagacaactggttgtgctgatgaagacaatggacaatgttgccacattctgcatgctacttatgctgttcattttcatcttcagcattctcgggatgcatattttcgggtgtaagttttcactgcgaacggataccggcgacactgtgcctgaccgaaagaattttgactctcttctgtgggcaattgtcacagtgttccaaatccttacccaggaggattggaatgtggtgctgtacaatggcatggctagcacctcaccttgggcgagcctatacttcgtggccttaatgacttttggtaattatgtcctgtttaatctactggtagcaattctggtggagggattccaggcagagggagacgccaaccgcagttacagcgatgaggatcagtcgtccagtaatatagaagagtttgacaagctgcaggaaggcctggactccagcggagatccaaagctgtgtccaatacccatgactcctaatggccacctggacccttctttacccctgggtggccacttggggcccgcgggcgccgcaggacccgcacccaggctgtccctgcagcccgatcccatgctggtcgcgctcggttccagaaagtcatccgtgatgtccctgggtcgcatgagttacgatcaacggagcctgtcttcgagccggagctcgtattacggaccctggggaagaagcgctgcctgggctagcaggaggtccagttggaatagcctgaagcacaagccaccctccgccgagcacgagagcctactgtctgctgagaggggagggggcgcccgcgtgtgtgaggtagccgctgatgaggggcctccaagagccgcccccctacatactccacacgcgcatcacatccatcacgggccacatctggcacaccgacataggcatcacaggcgcactctgagcctggataatcgcgactccgtagatttggcagagttagtgccggccgtgggcgcccacccacgggctgcttggagagctgcgggccccgccccaggtcacgaggattgcaatggccgaatgccttccattgctaaagatgtgttcactaagatgggggacagaggcgatagaggggaggacgaggaggaaatagactacactttatgctttagagtgcgcaagatgatcgacgtttacaaaccagattggtgcgaagttagggaagattggtccgtttacctgttttcaccagagaatcgatttcgagttctgtgccagactatcattgctcataaactattcgactacgtagtattggcgttcatctttcttaactgtatcactatcgccctggagcgaccccagatcgaagctggtagcacagagcggatattcctgacagtgtcaaattatatcttcacagccatctttgtcggagagatgacactgaaagtggttagcctaggtctttactttggcgaacaagcttacttacggtcaagctggaacgtactggacgggtttctcgtttttgtcagcatcatagacattgttgtgagcctcgcctccgccggtggcgccaagattcttggagttctgagggtgctgcggctgctcaggaccttaaggccactgcgtgttatctccagggccccaggactcaaactagtggttgagactctgatctcttccctaaaacctattggaaacattgttctgatctgttgtgcctttttcattatcttcggaatcttgggcgtccagctatttaaaggtaagttctatcattgtctcggtgtggatacacgtaatatcacgaatagatctgactgcatggcagccaattaccggtgggtgcatcataagtacaacttcgacaaccttggacaggctctgatgtcgcttttcgttctagcatccaaagatggttgggtgaacatcatgtacaacggcttagacgcggtggccgtggatcaacagcctgtaaccaatcacaacccctggatgctactgtacttcattagctttctgctgattgtcagcttcttcgtgttgaatatgttcgtgggggtggttgttgagaacttccacaagtgtcgccaacatcaggaagctgaggaagctcgaaggcgggaggagaaacggctccggagattggagaaaaagcgccgcaaggcacagcgtctgccttattatgcaacctactgccacaccagacttctaatccatagtatgtgcacgtctcattacctcgacatattcattacgttcattatctgtcttaacgtagtaacaatgtccctggaacactacaaccaacctacgagcctagagaccgcgctgaaatattgtaattacatgttcactaccgtattcgtgctcgaagcagtgctgaagctagtggccttcgggctgaggcggtttttcaaagacagatggaatcagctcgacctggctatcgtgctcctgtccgtgatgggaattactttagaggagattgaaatcaacgcagccctccctatcaatcctactattatccgaattatgagggttctacggatagcccgggtcttaaaactgctcaagatggcgacaggcatgagagctttgttagatacggtggttcaggccctgcctcaggtgggcaatctggggctgctgttcatgttattgtttttcatctacgcagcattaggcgtagaactgtttggcaagctggtgtgtaatgatgaaaacccttgtgaaggcatgagcagacatgccacatttgaaaatttcggaatggcatttctgactctctttcaggtttctaccggcgataactggaatgggattatgaaagacacactgcgagactgcacccatgacgagcgcagttgtctgtcatcactgcagtttgtgtcccccctgtatttcgtttcattcgtcctcacagcccagttcgtcttgatcaatgttgtggttgcagttctgatgaagcacttggacgattcaaacaaggaggctcaggaagatgcagagatggatgcagagctcgaactggaaatggctcacggactcggtcctggcccacgcctgccgactgggtccccaggagctcctggacgcggccctgggggggcaggcggcggcggagacaccgagggcggattgtgtcgtcgatgttactctcctgcccaggagaacctctggctggattctgtatccctgatcattaaagattcactggagggcgagcttaccatcatcgacaacctgtccggctctatttttcatcactatagctctccagcaggttgcaagaagtgtcatcacgataaacaagaggtgcaacttgccgaaactgaggccttttccttgaattctgacaggagtagttctatcctcctgggcgacgacctttctctcgaagaccctaccgcctgcccccctggtcgaaaggactctaagggagagctggaccctcccgagcccatgagagtaggagaccttggcgagtgtttttttcctctcagctcaacagccgtgtctcctgatcctgaaaactttctatgcgagatggaggaaattccttttaacccagttaggtcatggctgaaacatgacagctctcaggctccccccagcccattctccccagacgcaagtagtccgttgctgcccatgccggctgagttcttccaccctgcagtttctgcctcacagaaaggacccgaaaaagggaccggcacaggcacactgcccaaaattgctctgcagggctcttgggctagcttgagatcaccaagggtgaattgtacattgttaagacaagcaacaggatccgacacttctctggatgccagtccatcctcatctgctggctctttgcagaccactctggaggactccctgacactcagcgatagcccgcgccgagccttaggaccgcccgctccagccccaggaccacgagccggcctgagccccgcagccagaaggaggctcagcctgaggggaaggggtctgttttcactacgcgggctcagggcccatcagagatcacattcatctggcggatccactagtccaggttgtacacatcatgacagcatggacccaagcgatgaggaaggtaggggtggcgccggcgggggtggagcagggtccgagcacagcgaaaccctgtcttccctatccttgacttcacttttctgtccccctcctcctccccccgcccctggcttaactcccgccagaaaatttagcagcacttcaagcctggctgctccaggccgtccacacgcagcagcactggcccatgggctcgcacgctctccgtcctgggctgccgataggtcaaaagacccacctggacgcgccccactgcctatggggctgggtcctctggcacccccccctcagcctctccctggcgagcttgagcctggtgacgccgccagcaaacggaagaggtag

SEQ ID NO: 110478 - DNA, 5946 bp, synthetic construct
  misc_feature 1..5946: note = Description of Artificial Sequence: Synthetic coding sequence
  source 1..5946: mol_type = other DNA
atggctgagtctgcttcaccccctagttcttctgccgctgccccagctgccgagcctggtgtgaccacagaacagcctgggccaaggtcgccaccttcctcaccaccaggactcgaggagccactggacggcgcagaccctcatgtgccacaccctgacctggcacccattgctttcttctgcttgagacaaacaacatctcccaggaattggtgcatcaaaatggtgtgcaacccttggtttgagtgcgtatcaatgctggttatcctgttgaattgcgttacacttggcatgtatcaaccctgtgatgatatggattgtttaagcgatcgctgtaaaatccttcaggtgttcgacgatttcatctttatcttcttcgcgatggagatggtgctgaaaatggtcgccttaggaatctttggaaaaaagtgttacctgggggacacttggaaccggttagatttctttattgtaatggccggaatggtggagtactctttagatctccagaacatcaatctcagtgcgatccgaaccgtacgggttctgagacctctgaaggctatcaatcgcgtccctagtatgcgaattctagttaacttattgctggacactctacctatgttaggtaatgtgctactcctgtgcttcttcgttttcttcatattcggtattattggagtgcagctgtgggctggtctcctccggaatcgctgctttttagaagaaaactttaccatccagggggatgtggctctccctccttactaccagccagaggaagatgacgagatgccctttatctgctctctctctggcgacaatggcatcatgggttgccacgaaattcctccacttaaggagcaaggtcgggagtgctgtctgtcgaaggatgacgtgtatgattttggcgccgggagacaagatctcaacgcgtcgggtctgtgtgtcaactggaaccgctactacaatgtgtgccgcaccggatcagccaacccccacaaaggcgccattaatttcgataacatcggttatgcctggatagtgatcttccaggtgatcactttagagggatgggtagaaattatgtattacgtcatggacgcccattctttttataattttatttactttattcttctaattatcgtcggctccttctttatgattaatctgtgtctggtagtgattgcgacccaattctccgagactaagcaaagggaacaccggcttatgctggaacagagacaaagatacttgagctccagcactgttgcgagttatgccgagccaggagattgttacgaggagattttccaatatgtgtgtcatatcctccgcaaggccaagcgccgggcgctcgggctgtaccaggctcttcaatcccgtcgacaagccctcgggccggaagcacccgctcccgctaagccgggcccccacgctaaggagccacgccattatcagctctgtcctcagcattccccactagacgccaccccacatacactggtccagccaatccccgcaaccctagccagtgaccctgcgtcctgtccctgttgccagcatgaggacggtcggaggccttctgggttgggttctactgattctggacaggagggatccggctcgggcagtagtgcagggggcgaagacgaggcagacggcgacggtgcccgatcctccgaagatggagccagctctgagctgggcaaggaagaggaagaggaagaacaggccgatggcgctgtgtggctgtgcggggacgtgtggagagaaacccgcgccaagctccgaggcatcgtagacagcaaatatttcaatagaggaataatgatggccattctggtgaacacagtatccatgggtatcgaacatcacgaacagcccgaggagctgaccaatattttggagatatgcaacgtcgtttttacctccatgtttgctctcgagatgattctgaagctcgccgctttcggtctttttgattacctacggaacccctataacatttttgattccataatcgtcatcatttcaatctgggaaatcgtgggccaggctgatggtgggctcagcgtattgagaacatttaggctgctacgggtcctcaaactggtgcggttcatgccggccttacgcaggcagctagttgtgctgatgaaaacaatggataatgtcgcaaccttctgtatgctgctaatgttgtttattttcatcttctcaatcctagggatgcacatattcggctgtaagttcagtctgcggaccgacaccggggacactgtccctgataggaagaattttgactcccttttgtgggctatcgtgacagtctttcagattctgacccaggaggactggaacgtggtcctgtataatggaatggccagtacctccccctgggcctcactgtacttcgtagcgctgatgaccttcggcaactatgtgctctttaacctgctggtcgccatcctggtagaggggtttcaggcagaaggggacgcaaatagaagctatagcgatgaagaccagtcatcctctaatatcgaggagttcgacaagctgcaggaagggctggattcaagtggcgaccctaagctctgccctattccgatgacgcccaatgggcacctggaccctagtttgcctctgggaggccatcttggtccggcaggagctgccggacccgcccccaggcttagtcttcaacctgatcccatgctggttgcactcggcagccggaagtcatcagtaatgagcctgggtcgcatgtcctacgatcagagaagtttaagctccagccgcagcagttattatggcccatggggccgctcagccgcctgggcaagtcgacggagctcctggaacagcctgaagcacaagccaccttcagccgagcacgaatccctcttgtccgccgagagaggtggaggtgccagggtttgcgaagtagccgccgacgaaggaccaccacgagccgccccgttacatacaccccacgcacaccatatccatcatgggcctcacttggcacacagacaccgtcatcaccgcagaaccctgagcctagacaaccgggacagcgtggatctggccgagctagtgcccgctgtcggggctcatccccgcgcagcatggcgggctgccggccccgcccccgggcacgaggactgcaatggtcgcatgccttctatagccaaggacgtcttcaccaaaatgggcgatcgcggcgaccgaggtgaggacgaggaagagatagattacaccttgtgtttccgggtgagaaagatgatcgacgtgtataagccagactggtgtgaagttcgggaggactggagcgtgtacctctttagtcctgagaatagatttagagtgctctgtcagactatcatcgcccacaaactgttcgattatgtggtgcttgcttttattttcctcaattgcattacaatcgcactggagcggccgcaaattgaagcgggcagcactgaaaggatcttcctgactgtgtcaaattacatattcactgcaattttcgtgggagagatgactctcaaggtggtgagcctgggcctgtacttcggtgaacaggcataccttagaagctcttggaatgtgcttgacggttttttggtgttcgtgagtataattgacatcgtcgtttcgctcgccagtgctgggggggccaagatcttaggggttctccgtgtgttacgcctcttaagaaccctgcgtcctctcagggtgattagcagggcgccaggcttgaagcttgtggtggagactctcattagtagtttaaaacccatcgggaatatcgtgctgatatgctgtgcctttttcattatctttggcatcttgggcgtccaactctttaaaggcaagttctaccactgtcttggggtggacactcggaacattaccaatagatctgactgcatggctgcaaattatcgctgggtccaccacaaatataactttgacaatcttggtcaggccttaatgtctctgttcgtgctagcaagtaaggacggatgggtgaatattatgtacaatgggctggacgcagtggccgtggaccagcaaccagtcaccaatcataacccctggatgctgctctacttcatttctttcctgctgatagtaagctttttcgtgctgaacatgttcgtaggggttgtggtggagaactttcacaaatgccgtcaacaccaggaggctgaagaggcccgaagacgcgaggagaaaagactccgacgcctagagaaaaagaggcggaaggctcagcgacttccttactatgctacctactgccacacccgtctcctgatccatagtatgtgcacaagccactatctcgacatttttattaccttcatcatctgccttaacgtggtgacaatgagtctggaacactacaaccaaccgacctcccttgaaacagccctgaaatactgcaattatatgtttaccaccgtctttgttctcgaggcagtcctgaagctggtggctttcggactgcggagatttttcaaagaccgctggaaccaactcgatctggcaatcgtgttattgagcgtgatggggatcacgctggaagaaatcgagatcaacgccgcccttcctatcaaccccaccatcatccgcataatgagagtcctcagaattgctcgcgtcctgaagctccttaaaatggctactgggatgagagccctcttggataccgtggttcaggccttaccccaggttggcaacctgggcttgttatttatgctgttgttttttatttatgctgctctgggcgttgaacttttcggaaaactggtgtgcaatgacgaaaatccatgtgaaggtatgtccagacatgccacattcgaaaattttgggatggccttcctaacactgttccaggtgtctacaggcgacaactggaatggcatcatgaaggacactctgcgggactgtacacacgacgaaagaagttgcttgtcttccctacaatttgtatcaccactgtattttgtgtccttcgtgctcacagcccagttcgttctcatcaatgtggttgtggccgtattgatgaagcacctggatgacagtaacaaggaggcacaggaggatgccgagatggatgcggagttggaattagaaatggcccacgggctcggccccggtcccagactgcctaccggctcgcccggcgcaccaggtcgtggccctggcggggcaggaggaggcggtgataccgagggtggcctctgcaggcggtgttatagcccagcacaggagaatctgtggctcgacagcgtctctcttatcattaaagattcactggaaggcgaactgaccataattgataacctctccggcagcatattccatcattattccagtccagcaggctgcaaaaaatgtcaccatgataaacaggaagtccagctggcagagactgaagccttctcccttaatagcgatcgatcttccagcatcctcctgggagatgatctgagccttgaagatcctacagcctgtccgccgggtcgaaaagattcaaaaggggagctggaccccccagaaccgatgcgagtaggagatcttggagagtgttttttccccctcagtagtaccgccgtgtcaccagaccccgagaacttcctatgcgaaatggaggaaatccccttcaatcccgtccgaagctggcttaagcacgactcatcccaggctccgccctcccccttctctcccgacgcatcttccccgctcttacccatgccagcggagttctttcaccctgcagtatctgcctcccaaaaggggcccgagaaaggaacagggaccggtaccctgccaaagatcgcccttcaagggagttgggccagcctccggagccctcgggtgaactgcaccctgctcagacaagtacctaccccccctcgtccttag

SEQ ID NO: 110479 - DNA, 1041 bp, synthetic construct
  misc_feature 1..1041: note = Description of Artificial Sequence: Synthetic coding sequence
  source 1..1041: mol_type = other DNA
atgatggataaattccggatgattttccaattcctccagtccaatcaagagtccttcatgaacgggatatgtggcatcatggcactggcgtcagcacagatgtactcggcattcgactttaattgcccctgcctgccggggtataacgcagcctattctgcgggcatcctattagcccctcctctggttctgttcctgctgggcctggtcatgaataacaacgtctctatgctcgccgaggaatggaaaaggccacttggccgcagggctaaagatcctgccgtgctacggtacatgttctgctccatggcacagcgcgcattgattgcccctgtcgtctgggtggcggtaacacttctcgatggcaaatgtttcctgtgcgctttctgcaccgcagtccccgtgagcgcccttgggaacggatccttggcccctggcttgcccgctcctgaattggctcgcctgctggctagagtgccatgtcctgaaatttacgatggcgactggctgctggccagggaggtggccgtacggtatttgagatgtatctcacaggctcttggttggtctttcgtcttactcactactttactggccttcgtggtacgttcagtgcgaccatgctttacccaagctgctttcctcaaatctaaatattggagtcactacatcgacatcgaacgaaagctgttcgacgaaacctgcactgaacacgctaaggccttcgctaaggtctgtatccagcagttttttgaagctatgaaccacgacctggagttaggccatactcatggaaccttggccactgctccggcttccgcagcagcaccaactacccccgacggggcggaagaagagcgggaaaagttgcgtgggataactgaccagggcactatgaataggctgctgacgagctggcacaaatgcaaacctcccctacggttgggacaggaggaaccgcctcttatggggaatgggtgggcgggtggtggaccacggcctcctaggaaagaggtcgcaacgtacttcagtaaggtgtag

SEQ ID NO: 110480 - DNA, 972 bp, synthetic construct
  misc_feature 1..972: note = Description of Artificial Sequence: Synthetic coding sequence
  source 1..972: mol_type = other DNA
atggccgcgttgatcgctgaaaatttcaggttcctgtcactattttttaaatctaaggatgtgatgattttcaatgggttggtggccttggggacagtaggctctcaggagctgttttcagtggtagctttccactgcccttgttcccctgcacggaactacctatatggactggcagccattggagtgcccgcactggtactgtttattattggaattatcctgaataaccacacgtggaatctggtcgctgaatgtcagcatcggcggacaaagaattgctccgccgccccaacattcttgctcctcagtagcatcctcggcagggccgctgtcgccccagtcacctggagcgtcatatctctgctaagaggtgaggcctatgtgtgcgctctgtctgagttcgtagacccgtcctcgcttaccgccagggaagaacattttccgtctgctcacgcgaccgagattcttgcccgcttcccgtgtaaagaaaaccccgacaacctgtccgactttagagaggaggtcagtagaaggctgcgctacgagagccagctgtttggatggctcctgataggcgttgtggcaatactggtattccttacgaaatgtctcaaacactactgtagccccttatcctaccggcaagaagcgtattgggcacagtatagggccaatgaagaccagctattccagcgcacagccgaggtgcattcccgagttctggctgcaaataacgtccgccgtttcttcggtttcgtcgctctgaacaaagatgatgaagaactcattgccaacttcccagtcgagggaactcaaccaaggcctcagtggaacgctattaccggagtgtatctatatagagaaaatcaaggacttcccttgtattcccgacttcacaaatgggcgcagggtctcgccggaaatggcgccgctccggataatgttgaaatggccctgttgccaagctag

SEQ ID NO: 110481 - DNA, 972 bp, synthetic construct
  misc_feature 1..972: note = Description of Artificial Sequence: Synthetic coding sequence
  source 1..972: mol_type = other DNA
atggccgctttgattgccgaaaatttcaggtttctatccctattttttaagtccaaagacgtgatgatcttcaatggtttagtcgctctcgggaccgttgggtcacaggaactcttttccgtggtggcattccattgcccctgtagtcccgctagaaactacctgtatgggttggcagccatcggagtgcctgccttggtgctcttcatcatcgggataatcctcaataaccatacgtggaatttggtggccgagtgccagcatagacgcaccaagaattgctcagccgctcctactttccttctgttgagcagtatactgggcagagcagccgtcgctccagtcacatggagtgtcatttctctcctaaggggagaagcttacgtgtgtgccctgtctgaatttgtggaccccagttcactgactgccagagaggagcacttccctagtgcccatgccaccgagatactagctaggttcccctgcaaagaaaacccggacaacctctctgatttcagggaggaggtgagccggcggctacgctacgaatctcaattgtttggctggctgctcataggcgtcgtagcaattcttgtgtttctgaccaaatgtctgaagcactactgtagcccactgtcatatagacaggaggcctattgggcccagtatagagcgaacgaggaccagcttttccaacggactgctgaagttcacagccgtgtcttagctgcgaacaacgtgaggcgtttctttggctttgtcgcattaaacaaggacgatgaagagctcatagccaactttccggtcgagggcacacagcccagaccgcagtggaacgcgatcactggcgtttacctgtaccgcgagaatcaggggctgcctctctatagccggctacataaatgggcgcaggggctggctggtaacggggccgcaccggacaatgtcgaaatggccctgctgccatcttag

SEQ ID NO: 110482 - DNA, 657 bp, synthetic construct
  misc_feature 1..657: note = Description of Artificial Sequence: Synthetic coding sequence
  source 1..657: mol_type = other DNA
atggcggcactgatagctgagaactttagatttctgtccctgtttttcaaatccaaggacgttatgatctttaacggcctcgtggccctgggaactgtggggagtcaagaactgttcagtgtggtcgcgttccactgtccttgttcacctgcacgaaattacctgtatggtcttgccgccataggtgttcctgctttggtgttattcataattggaatcattctgaacaaccacacctggaacctcgtggcagagtgtcagcatagaagaacgaagaactgcagcgcagcgccaacctttttgctgctgtcaagcatcttgggacgcgccgctgtggcccccgttacctggtctgtgataagccttctcaggggcgaagcctacgtttgtgcactgtccgagttcgtcgacccctcctcactgaccgcccgggaggaacatttccccagcgcgcacgctactgagattctggctcggtttccttgtaaggaaaatcccgacaatttgagcgactttcgtgaagaggtctccaggaggctaagatacgagtcccaggttcgaagctgtgccaaaggatcatccagcagtctcgtggtggccggtgaaaggtcgggagacggacttgtcctgaagctgggcctagtcctgaggggctag

SEQ ID NO: 110483 - DNA, 891 bp, synthetic construct
  misc_feature 1..891: note = Description of Artificial Sequence: Synthetic coding sequence
  source 1..891: mol_type = other DNA
atggaatctatggctgtggccacagacggcggtgagcggccgggggtccccgctggctctggcctgtccgctagccaaagacgagctgagctgaggcgcaggaagttgctcatgaattccgaacagagaataaatcggattatgggctttcaccgccctgggtcgggggcggaagaagaatctcagacaaagagcaagcagcaagattccgacaagctgaattctctgtcggtaccaagtgtgagcaagcgggtcgtcctaggcgacagcgtctccactggcacaacagaccagcagggaggcgtggccgaggtgaaaggcactcaattgggcgacaaactagattcctttattaaaccgcccgagtgctccagtgacgtgaacctcgaattgcggcagcgcaatcggggggatttgactgccgattccgtacagagaggcagtcgccacggactggagcaatacctaagtaggttcgaagaggctatgaaactcaggaagcagctgatctcagagaagccctctcaggaagatgggaatactacagaagaatttgattctttccggatcttccggttggtgggttgtgctctccttgcactaggggttagggccttcgtttgtaagtaccttagtatattcgctccgtttctgaccctccagctggcttatatggggctgtataagtattttccaaagtctgagaaaaagatcaagacaactgtccttacagccgcactcttactgagtggcatccccgccgaagttatcaatcggtcgatggacacctactccaagatgggcgaggtcttcactgacctttgtgtctacttcttcacctttatattctgtcacgagctgcttgattattggggttccgaagtgccttag

SEQ ID NO: 110484 - DNA, 1113 bp, synthetic construct
  misc_feature 1..1113: note = Description of Artificial Sequence: Synthetic coding sequence
  source 1..1113: mol_type = other DNA
atgcttggggctgtggagggcccgcgatggaagcaggccgaggacatccgcgacatctacgatttccgtgatgtgctgggtaccggtgcctttagcgaagtcatactggcagaagataagaggactcagaagctggtggcaatcaagtgcatcgcgaaagaagcattagagggcaaggagggaagtatggagaacgagatcgctgtgctccacaaaattaagcatccaaatattgttgcgctggatgatatctacgaaagcggcggtcatctgtaccttatcatgcagctagtatctgggggagaactctttgaccggattgtggagaagggattttacaccgagagagacgccagtcggttgatttttcaagtgttagatgcagttaaataccttcacgacctcggcatagtccatcgagacctgaagcccgagaaccttctttactattcattagacgaggatagtaaaatcatgatctccgacttcggtttgtccaagatggaagatccgggctctgtgttaagcacggcttgtgggacaccaggctacgtcgctcccgaggtgttggctcagaaaccgtacagcaaggcggtggactgttggtccattggcgtgatcgcatacatattgctgtgtggttatcccccattttacgacgaaaatgatgcgaagttgttcgaacagatcttgaaggccgagtatgagttcgactccccctactgggacgatatctccgatagcgccaaagattttatcagacacttgatggaaaaagaccctgaaaagagatttacatgtgagcaggccctgcagcacccgtggattgctggagataccgcactggacaaaaatatccaccagagcgtgtcagagcaaataaagaagaacttcgctaaaagcaagtggaaacaggccttcaacgccaccgctgtggtccggcatatgcggaagcttcagctgggtacgtctcaggagggtcagggccagaccgcctcacatggcgaactgctgactccagttgccggcggacccgccgctggttgttgctgccgagactgttgtgtggagcccggaacggaactgtcccctacactgccccaccagctgtag

SEQ ID NO: 110485 - DNA, 1437 bp, synthetic construct
  misc_feature 1..1437: note = Description of Artificial Sequence: Synthetic coding sequence
  source 1..1437: mol_type = other DNA
atggccaccattacgtgcacaagattcacagaggaataccagctctttgaagagctgggcaaaggagccttcagcgtcgtgcgaagatgcgtgaaggtcctcgcgggccaggagtacgccgccaagattattaatactaagaagctgtcagctagagatcatcagaagctggagagagaggcacgcatctgcagattgctgaaacaccccaacattgttcggctccacgatagtatatccgaggaaggtcatcactacttgatcttcgaccttgttacaggaggagaactcttcgaggatatagtggccagagagtactatagtgaagccgatgcctcacattgcattcagcagatcctcgaggctgtgctgcactgtcatcagatgggcgtagttcatcgggacctgaaaccggagaacctcttgctggctagcaagctgaagggggctgctgtgaaactggctgatttcggcctggcgattgaagtcgagggcgaacagcaagcttggtttggcttcgccggaactcctggatacttaagtcctgaggttctccgaaaagatccttatggcaagccggtggacctgtgggcatgtggcgtgatcttatatatacttcttgttggctaccctccgttttgggacgaggaccaacaccgtttataccaacagatcaaagccggggcatacgactttccatcccctgaatgggatacagtgacccctgaagcgaaggatctaattaataaaatgttgacaattaacccttccaagagaatcaccgcagctgaagcacttaaacacccttggatctcccaccgctccaccgtggcctcttgtatgcacaggcaggagaccgtcgattgtctgaagaagtttaacgcccgccgaaagctgaaaggtgcaatactcacaacaatgctcgccacccgtaatttcagcggaggcaagagcggggggaataagaaatcggacggcgtaaaggagtcctcggagtccactaacaccaccatcgaagatgaggacacaaaggtgcgcaagcaggagatcatcaaggtgaccgagcaactgattgaggcaatttctaatggagacttcgaatcctataccaagatgtgcgaccccggcatgaccgcgttcgagcccgaagccctgggcaacctggtagagggcttagactttcacagattctactttgagaacctttggtctaggaattccaaaccagttcacaccacgattctcaatccacacatccacctcatgggtgatgagagcgcgtgtatcgcctacatacgcatcacccagtatctcgatgctggcgggatacctcgcacggcccagagcgaagagacacgtgtgtggcacagacgggatggcaaatggcagatcgtccacttccaccgctccggggccccttctgttctgccccattag

SEQ ID NO: 110486 - DNA, 1470 bp, synthetic construct
  misc_feature 1..1470: note = Description of Artificial Sequence: Synthetic coding sequence
  source 1..1470: mol_type = other DNA
atggcaacaatcacctgcacacggtttaccgaggaataccaattgttcgaggaattgggaaagggcgccttctccgtggtgcggagatgcgtgaaagtgcttgctggacaggaatacgcagcaaaaattatcaacacaaaaaaattgtcagcacgagatcatcagaaattagaaagagaggcccgcatttgcagattgttaaaacaccctaacatcgtccggctgcatgactcaatttccgaagaagggcaccactacctgattttcgacttagttaccggaggcgaacttttcgaagacattgtcgcccgagagtactactcggaggcagatgcaagtcattgcatacagcagatcttggaagcagtccttcactgtcaccagatgggggttgtccacagagatctgaaacctgagaatcttttgttggcgagcaagcttaagggggctgctgtgaagctggcagactttggtttggcgatagaggtggaaggcgagcagcaagcgtggtttgggtttgccggcacgcccggatacctctctcccgaggtcttgagaaaagacccatacggcaagcctgtggatctgtgggcctgcggggtgattttgtatatcttgctggtggggtatccaccattttgggatgaagatcagcaccgcctttaccagcagatcaaggcaggcgcatatgactttccctctccggagtgggataccgtgacacccgaggccaaagatctgatcaataagatgctgaccatcaatccaagcaagcggattaccgccgccgaggctcttaaacatccctggatcagccaccgctccactgtcgcgtcctgtatgcaccggcaggagacagtggactgtctcaagaaatttaatgcacggagaaagcttaaaggcgctattcttactaccatgctagccaccagaaactttagcggaggcaagagcggaggtaacaagaagtctgatggggtaaaaaagagaaaaagcagctccagcgttcagcttatggagtcaagcgagtctaccaacaccactatcgaagatgaggataccaaagttcgcaagcaagagatcataaaggttacagagcagctgatagaagctatcagcaacggcgatttcgaaagctatactaaaatgtgtgaccctggaatgacggcctttgaacccgaggcgctgggtaatctggtggagggcctggatttccataggttttactttgaaaatctgtggagcaggaactcaaaacccgtccatacaacaatattgaatcctcatatccacctcatgggagatgaaagcgcatgcatcgcttatattaggatcacacagtacctggatgccggtggaattccgcggacagcccagtccgaggagacgcgggtgtggcaccgaagagatggcaaatggcagattgtgcactttcaccgctccggagcaccctcagtgctgcctcactag

SEQ ID NO: 110487 - DNA, 276 bp, synthetic construct
  misc_feature 1..276: note = Description of Artificial Sequence: Synthetic coding sequence
  source 1..276: mol_type = other DNA
atggccacaatcacctgtacaaggttcaccgaggagtatcagctgtttgaggaactgggtaagggggcattctcggtcgtcaggagatgtgtgaaggtgctcgccggacaggaatacgcagccaagattatcaataccaagaaactctctgcgcgagatcaccagaaactcgagcgggaagctaggatctgccggctcttaaaacaccctaacatagttcgactccacgacagcatttcagaggagggacaccactaccttatttttgacctgtag

SEQ ID NO: 110488 - DNA, 1554 bp, synthetic construct
  misc_feature 1..1554: note = Description of Artificial Sequence: Synthetic coding sequence
  source 1..1554: mol_type = other DNA
atggccacgaccgttacatgcacccgatttaccgacgaataccagctctatgaggatattgggaagggcgcgtttagtgttgtacgcaggtgtgtaaagctctgcacgggccacgaatacgcggcaaagatcataaataccaagaagttgtcggcacgagaccatcagaaattggagcgtgaagcaaggatctgtagactgctgaaacactctaatatcgttcgcctccacgactcaataagcgaggagggctttcactacctggtgttcgatctcgtgacagggggcgagctctttgaggatatcgtggccagggagtactacagtgaggctgacgcgtcccattgcatccaacaaatactggaagcagtgttacactgccaccagatgggagtggtacacagagatctaaagcccgagaatctcctgctcgcatctaagtgtaagggcgccgctgtcaagctcgctgacttcggtctggccatcgaagtccagggagatcagcaagcatggtttggcttcgccggtacccctggctatctttctcctgaggtcctcagaaaagaggcgtacggtaagcctgtggacatctgggcctgtggagtgattctgtacattctgttggtcggatacccaccgttctgggacgaagaccagcacaagctgtatcaacagattaaggctggagcctatgatttcccttctcccgagtgggatacagtgactccggaggctaaaaatctgatcaatcagatgctcacaatcaatcctgcaaaaaggattaccgctcacgaggcactgaaacacccgtgggtgtgtcagaggagcacggtcgcctcgatgatgcatagacaggagaccgtggagtgtctgaagaaatttaacgcaaggcggaagttaaagggcgcaatcctgactaccatgttagctacccgcaatttcagcgcgaaaagcttgcttaacaaaaaggctgacggtgttaaacctcagacaaatagcacaaaaaattccgccgcagcgacctctcccaagggaacgctgcctcccgcagctctagagccacagacgaccgtgatacataacccggtggacggcatcaaagagtcttccgatagtgccaacacgaccatcgaagatgaggacgccaaggcacgaaaacaggagataattaagactaccgagcagctcattgaggcagtgaataatggcgattttgaggcctatgcaaagatctgcgatccaggcctcacaagttttgaaccagaggctctgggcaatctcgtggagggaatggacttccaccgtttttactttgagaacttgctggccaagaactccaaaccgatccataccaccatcctcaatccacacgtacacgtcatcggcgaggatgcagcctgcattgcctatatccgtctcacacagtacattgacggccagggcagaccacggacgtcccagtcggaggagactagagtgtggcaccggagagatgggaagtggcagaacgtccatttccattgttccggcgccccggtggcccctcttcagtag

SEQ ID NO: 110489 - DNA, 1350 bp, synthetic construct
  misc_feature 1..1350: note = Description of Artificial Sequence: Synthetic coding sequence
  source 1..1350: mol_type = other DNA
atggctaccacagtgacgtgtactcgtttcacagatgagtaccagctctacgaagacattggaaaaggagcattctccgtcgttcggagatgcgtgaagctgtgtacagggcacgagtacgccgctaagatcattaacaccaagaaactgagcgcgcgggatcatcagaaactagagcgcgaggcccggatttgtagattgcttaagcattcaaatatcgttaggctccacgactctatttcagaggagggttttcattatctggtttttgacctagtcacaggcggcgagctctttgaggacatcgtggctcgcgaatactactccgaagccgacgcgtctcactgcatccaacaaatactggaggctgtactccactgccaccaaatgggagtggtgcatcgcgacttgaagcctgagaacctcctgctcgcgtcgaaatgtaaaggcgccgctgtgaagctggccgatttcggcctggcaattgaagtccagggagaccaacaggcctggtttggctttgcagggacacctggctatctgtctccagaggtcttgaggaaagaggcctatggcaagccagtcgatatatgggcctgtggtgtgatcttgtacatattgttggttgggtacccccctttctgggatgaagatcagcataaactgtatcagcagatcaaggcaggggcttatgacttcccctcacccgagtgggatactgttacgccggaggccaaaaaccttatcaaccagatgctcaccattaacccagctaaaagaataactgcacacgaagctttgaaacacccatgggtgtgccagagatctaccgtggcatcaatgatgcaccgacaggagacagtcgagtgtctcaagaagttcaatgcacgccggaaactgaagggcgctatacttactaccatgctcgccacgcggaacttcagcgctcgcaagcaggagattattaaaacgactgagcagctcattgaagcagtgaataatggggactttgaagcctacgccaagatctgcgatccagggctgacgtctttcgagcccgaagctctcggtaatctggtggaggggatggactttcacaggttctatttcgaaaatcttctggcaaaaaacagcaagcctatccacaccacgatcctaaacccccacgtgcatgtgataggagaagacgccgcttgtatcgcatatatccgtctgactcagtacattgatggtcagggacgtcctaggaccagccagtccgaagaaacgagggtttggcacaggagagatggtaagtggcaaaatgttcatttccactgctccggggccccagtggcgccgttacagtag

SEQ ID NO: 110490 - DNA, 1479 bp, synthetic construct
  misc_feature 1..1479: note = Description of Artificial Sequence: Synthetic coding sequence
  source 1..1479: mol_type = other DNA
atggccaccactgtgacctgcacccggtttacggatgagtaccaactctatgaggatatcggcaaaggggcgttcagtgttgtccgacgttgtgtcaagctctgtaccggccacgaatacgccgctaaaattattaataccaagaagttatctgcgagagaccatcagaagctcgagagagaggcgagaatatgtagacttctgaaacattccaatatcgtacgactgcatgattccatttctgaggagggttttcactacctggttttcgacctggtaaccggcggggagcttttcgaggatatcgttgccagagaatactactccgaggccgatgcctctcattgtattcagcagatcctggaggccgtgctgcattgccatcagatgggggttgtgcaccgggacttaaagcctgaaaacctgctgctggccagtaaatgcaaaggggcagccgtgaaacttgcggattttgggctcgccatcgaggtgcaaggtgatcagcaagcatggttcggctttgccggaactcccggctacctctctccagaagtgctgaggaaggaggcttacggcaaacccgtcgacatttgggcctgtggagtgatcctctatattctgctggtaggttatccacctttttgggacgaggaccagcacaaattataccaacaaataaaggccggggcctacgacttcccctcccctgaatgggataccgtgacgcctgaggctaaaaacttaatcaaccaaatgctgacaatcaaccctgccaagaggattacagcccacgaggccttaaaacacccctgggtgtgtcagaggtctacagtggccagcatgatgcaccggcaggagacagtcgagtgcctgaaaaaatttaacgcccgccgaaagcttaagggtgccatccttactaccatgttagccacccgcaactttagcgtcgggagacagactactgctccggccacaatgtctaccgcagcatctggaaccactatgggcttagtggaacaggctaagtctctgctcaataagaaagctgatggcgtcaaagagccccagaccaccgtcatccataacccagttgatggtatcaaagaatcatccgattcggccaatacaacaattgaggacgaagacgccaaagcacggaagcaagagatcatcaagaccacagaacagctgatagaggccgtcaacaacggcgattttgaagcatatgcattctactttgagaacctgttggccaaaaattctaaaccaattcatacgacaatcctcaacccccatgtgcacgtcattggggaggacgcagcatgtatcgcctatattcgactgacccagtacatagatggccagggccgcccccgcacctcacagagtgaagagacacgggtctggcaccgcagagacgggaagtggcagaatgttcactttcattgcagcggtgcacccgtcgctccacttcagtag

SEQ ID NO: 110491 - DNA, 1629 bp, synthetic construct
  misc_feature 1..1629: note = Description of Artificial Sequence: Synthetic coding sequence
  source 1..1629: mol_type = other DNA
atggctactacagtgacatgtacacgtttcacagacgagtaccagttgtatgaggatattggaaaaggggctttttccgtcgtgcggcgatgtgtgaagttgtgtacaggtcatgagtatgctgccaaaattatcaacacaaaaaagctgtccgccagagaccaccagaagctggagcgcgaagctaggatctgccgcctcctgaagcatagtaacatcgtgcgcctacatgacagcatctctgaagagggctttcattacctcgtattcgatctagtgacaggcggtgagctctttgaggatatagtcgcaagagagtactattcagaagccgatgcttctcattgcatccagcagatccttgaagctgtgcttcattgccaccagatgggtgttgtgcaccgggacctgaagccagagaacttgctgctcgcctccaagtgcaagggagccgcagtaaagctggctgacttcgggttggccattgaagtgcaaggtgaccagcaggcttggttcggcttcgcaggaactcctggctacctctctcccgaggttctgaggaaagaagcatacgggaaaccggtagacatctgggcctgcggagtgatattgtacatactgcttgtgggctatccccccttctgggacgaagaccagcacaaactctaccaacagatcaaagctggagcctacgactttccctcacctgagtgggataccgtaaccccagaagccaagaacctcatcaaccagatgttgactatcaaccccgccaaaagaattaccgcacacgaagctttaaaacatccatgggtgtgccaacgctcaaccgttgccagcatgatgcataggcaggaaactgtggaatgcctcaaaaagttcaacgcgcggcggaagcttaagggagctatcctgaccaccatgctcgccacgcgcaactttagtgtggggcgccaaaccacagctcccgccactatgtctaccgccgcaagtgggaccactatggggctcgttgagcaggccaaatctttgctcaataagaaggccgatggggtgaagccccagaccaactcaacaaagaactctgcggctgccactagcccaaaagggaccctgcctccagctgctcttgagccccagaccacagtgatccacaaccctgtcgatggcatcaaggaaagcagtgactccgccaatactactatcgaagacgaagatgccaaagcccgcaaacaggagatcattaaaactactgaacagctcatcgaggccgtgaataatggtgactttgaggcttacgctaaaatttgcgatcctggcctgacctcgttcgagcccgaagcactcggtaaccttgtggagggcatggacttccatcgtttttacttcgagaatctgctggctaaaaattcaaagcccattcatacgaccatcctgaatccccacgtacacgtgatcggggaagatgccgcctgcatagcctatattcgccttacccagtacatagacgggcaaggaaggccacgcacctcacaatctgaagaaacaagggtttggcaccgccgcgacggcaaatggcagaacgttcattttcactgctccggggcccccgtggcacctctgcagtag

SEQ ID NO: 110492 - DNA, 1440 bp, synthetic construct
  misc_feature 1..1440: note = Description of Artificial Sequence: Synthetic coding sequence
  source 1..1440: mol_type = other DNA
atggcgactactgtaacctgcacgcgcttcacagatgagtaccagctgtatgaagatatcgggaaaggggcattctctgttgtacgccggtgcgtcaagctctgcacaggacatgagtacgctgcgaagattataaacacaaaaaagctatcagcccgcgaccaccaaaaacttgagagagaggcccgcatttgtaggcttctgaaacactccaatattgtccggctccacgattccatctctgaggaagggtttcactatctcgtgtttgacctcgtgacaggcggcgagctattcgaggacatcgtggcgagggagtactactcggaggccgacgcaagccattgcatccagcagatccttgaggccgtacttcattgtcatcagatgggggtggtgcatcgggatttgaaacctgagaatctcctgctggcatctaagtgcaagggcgctgcggtcaagcttgccgactttggtctggcgattgaggtccagggcgatcagcaggcatggttcggcttcgccggtacccctggatacctttccccagaggtgcttagaaaggaggcttacggcaaacctgtggacatttgggcttgtggagttattctttatatcctacttgtaggatatccacctttttgggacgaagatcagcataagctatatcaacagatcaaggccggtgcttacgattttccctctccagagtgggacaccgtgacaccagaggcaaaaaacctgattaatcagatgctcacgattaatcctgcaaagcgaattaccgcccacgaggccctcaagcatccgtgggtgtgccagcggtctactgttgcttctatgatgcaccgccaggaaacagtggaatgtttaaagaaattcaacgcgagaagaaaactgaagggagccattctgacaaccatgctcgccacgcgaaacttcagtgctgcaaaatcccttctgaacaaaaaggccgacggcgttaaagagagctcagattccgcgaacacaacaatcgaggatgaggacgccaaagctaggaaacaggagattataaaaacaaccgagcagctgatcgaagctgtcaacaacggtgatttcgaggcgtatgcaaagatctgcgatcctggtctgacaagctttgagcccgaggccctcggcaatttggtagaaggcatggactttcacagattctacttcgaaaacctgctggcaaaaaattccaaaccgattcacacaacaatcctcaatcctcatgtgcacgtgataggcgaagacgccgcttgcattgcctatataaggctgacacagtacatcgatgggcaaggccggccaaggacctcgcagtcagaggaaaccagggtttggcacaggagagacggaaaatggcaaaacgtacatttccactgtagcggggctcctgttgcccctctccaatag

SEQ ID NO: 110493 - DNA, 1512 bp, synthetic construct
  misc_feature 1..1512: note = Description of Artificial Sequence: Synthetic coding sequence
  source 1..1512: mol_type = other DNA
atggccacaactgtcacttgtactcgattcactgatgaatatcaactgtatgaagacattggcaaaggtgctttctccgtggtgcgaagatgcgtgaaattgtgcactggacacgaatatgctgctaaaattattaacacaaaaaagctcagcgcccgagatcaccagaaactggagagagaagcacgcatctgccggttgctgaagcattctaacatagtgaggctgcacgacagcatctccgaagaagggttccactatttggtattcgacttggtcaccggaggagagctgtttgaagatatcgtcgctagggagtactactctgaagcagacgcatcccattgtatccagcaaattttagaggccgtgctgcattgccaccaaatgggagtcgtgcacagagacctgaagccagagaacctgctgctggcttctaaatgtaaaggggctgccgtgaagctagcagacttcgggttggccattgaggttcagggcgaccaacaggcttggttcggctttgctggaacccccggatatctatcccccgaagttctgcggaaggaggcatatggcaaaccagtagatatctgggcttgtggggtaatactgtatatcctgctggtaggctaccccccattctgggacgaggaccagcacaaactctaccaacaaataaaggccggtgcgtatgatttcccaagccctgaatgggatactgtgacccctgaggcgaagaatcttataaatcagatgttgactatcaaccctgctaaaagaataaccgcccacgaggccctcaaacatccctgggtctgtcagaggtcaacagtggcttctatgatgcaccggcaggagaccgttgaatgcctgaaaaagtttaacgccagaagaaaacttaaaggtgcaatactcactacaatgctggccactcggaatttctctgctgcgaaatctttacttaataaaaaggcggatggagtcaaaccacagacaaattctactaaaaatagcgccgcggcgacctcacccaaaggcaccttgccacctgcggcacttgagagtagcgactcagccaatacaactatagaggacgaagacgctaaagcacgaaaacaggagattattaagactacagagcagctgatcgaagccgtgaacaacggcgactttgaggcttatgccaagatctgcgatccgggtctgacctcatttgagcctgaggcgcttggtaacctcgtggaagggatggatttccatagattctacttcgagaaccttctggccaagaattctaaacccattcatactactattctcaaccctcacgtacacgtgataggagaggatgccgcctgtatcgcttacattcgactaacacagtacatcgacgggcaggggcgcccaaggaccagccagagcgaagagacccgcgtatggcaccgccgcgatgggaagtggcagaatgtgcacttccattgttctggcgctcctgtagcaccgctccagtag

SEQ ID NO: 110494 - DNA, 1557 bp, synthetic construct
  misc_feature 1..1557: note = Description of Artificial Sequence: Synthetic coding sequence
  source 1..1557: mol_type = other DNA
atggcgacgaccgtcacatgcaccaggttcactgacgaataccagttgtatgaagacataggtaagggcgccttttctgtggttagaaggtgcgtgaaactttgtactggtcacgaatacgcagcaaaaataatcaatacgaaaaagttaagtgcccgtgaccatcagaagttagagcgagaggccagaatctgtcgacttctaaagcattccaatatagtacgcctgcatgattcaatctctgaggaaggatttcactacctggtgttcgatttagtcactggaggcgagctgttcgaggatatagtcgcgcgcgagtattacagtgaggccgacgcctcgcattgcattcagcagatccttgaggcagttctgcattgccatcagatgggtgttgtgcacagggatctgaaacccgagaatctcctgctggcctcaaaatgtaagggggctgccgtgaagttggccgactttggactcgctatcgaggtgcagggagatcaacaggcgtggtttggttttgcaggaacgcccgggtatctgtctccagaggtcctgcgcaaggaagcctacggcaaacctgtggatatatgggcctgcggagttatcctgtacattttgctagttgggtacccacctttctgggatgaggaccagcataagctgtatcaacagatcaaggcaggcgcatacgacttcccctcaccagagtgggacacagtcacaccagaagccaaaaacctcatcaaccagatgctcacaatcaaccccgccaagcgcataacagcgcacgaagcccttaagcacccctgggtttgccaaaggtcgacagttgcttcaatgatgcataggcaggagaccgtggaatgtctgaaaaaattcaatgcgcgccggaagttaaagggcgccatcctgactactatgctggctacccgtaactttagcgcggccaagtctctattgaacaagaaggcagacggggtgaaaccacagactaatagcactaagaatagcgcagccgcgacatctcccaaaggcactctgccacctgccgccctggagccgcagactacggtgatacacaatccagtggatggaatcaaggaaagctccgactccgcaaacacgactattgaggatgaagatgctaaagcaagaaagcaggagattattaagactactgaacaactgatagaggccgtcaataatggcgatttcgaagcatatgccaaaatctgcgatcccggactgacatcatttgagcctgaggccctgggaaatctcgtggaggggatggattttcatcgcttctatttcgaaaatctcttggcgaagaacagcaaacccatccatacaacaattttgaacccccacgttcacgtgataggagaagatgcggcctgcatcgcatacattagacttactcaatacatagacggacagggcagacccagaacctcacaatccgaggaaacacgtgtatggcaccggcgcgatggtaaatggcagaatgtgcatttccactgttctggagcaccagtggccccgttgcagtag

SEQ ID NO: 110495 - DNA, 2001 bp, synthetic construct
  misc_feature 1..2001: note = Description of Artificial Sequence: Synthetic coding sequence
  source 1..2001: mol_type = other DNA
atggcaacaaccgtcacttgcacaaggttcacggacgaataccagctgtacgaagacattggtaagggggcattcagtgtagtgaggcggtgcgtcaagctttgcaccggacatgagtatgctgctaaaatcatcaacactaagaagttgtccgccagagaccatcagaaattagaacgggaagcacgcatctgcaggctcttgaagcacagtaatattgttcgtctccacgacagcatttccgaggagggctttcattatctggtgtttgatctcgtcaccggaggcgagcttttcgaagacattgtcgcccgggagtactatagtgaggctgatgcctcccactgtatccaacagatcctggaggctgtgctccattgccaccagatgggggtcgtccacagagacctgaaacctgaaaatcttctcctggcaagcaagtgtaaaggcgcagccgtcaagttagctgactttggacttgctatcgaagtgcaaggggaccagcaggcctggttcgggttcgccggcactcccggctacttgtccccagaagtgttgcggaaggaggcgtatgggaagccggttgatatctgggcctgcggggtgatcctgtatatcttgttggtcggttatcctcccttctgggatgaagatcagcataaactctaccagcaaatcaaggcgggcgcctacgactttcccagccctgagtgggatacggttaccccggaggcaaagaacctgatcaatcagatgctcaccatcaaccccgcaaagcgcatcactgcacacgaagccttaaagcatccgtgggtctgccagcgcagtacggtcgcatctatgatgcaccgtcaggaaaccgtggagtgtctgaaaaagtttaatgcacgtcgcaaactcaaaggagcaatcctcactacaatgttagcaaccagaaatttctccgtgggacgtcagacgactgcacctgccactatgtcgactgccgcctccggcaccactatgggactcgttgaacaggccaagtctctattgaataaaaaggctgatggtgtgaagcctcagaccaattcgaccaaaaactctgcagccgcaacctctcctaaggggactctgcctcccgccgctctggaacctcagacgacggtcattcacaatcccgtggatggcatcaaagagtctagcgactccgctaatacgaccattgaagatgaagacgcaaaggcgccacgcgtgcccgacatcttgtcatctgtcagacgaggaagcggggcgcccgaagcagaggggcccttgccttgcccttcccccgcccccttttccccgctgcccgcacccagtccgcgcatatcagacatccttaattcagttaggcgcggcagcgggacccccgaggctgagggcccgctgagtgcggggccacccccctgcttgtcccccgccctgctggggcccctgagttcgccatccccccgaattagcgacatcctcaacagtgtcagacgtggaagtgggactccagaggcggaaggacccagccctgtaggaccacctccctgcccaagccccaccatacctggtcctctgcctactccgtctagaaagcaggaaatcatcaagaccaccgagcagcttatcgaagcggtgaataacggggattttgaggcctatgcaaaaatttgcgatcccggtctaacctctttcgagccagaagctctgggcaaccttgtggaggggatggatttccatcgtttctactttgaaaatctgctggcgaagaactctaaacctattcatactacgatacttaacccgcatgtccatgtgatcggcgaagatgctgcttgtattgcctacatccgccttacccagtacatagatgggcagggcagaccaagaacatcccagagcgaagaaacccgcgtttggcacagacgcgatgggaagtggcagaacgtacacttccattgcagtggcgctccagtagctccccttcagtag

SEQ ID NO: 110496 - DNA, 1629 bp, synthetic construct
  misc_feature 1..1629: note = Description of Artificial Sequence: Synthetic coding sequence
  source 1..1629: mol_type = other DNA
atggccaccactgtgacgtgcactcgattcacggatgagtaccagctgtacgaggacataggcaaaggcgctttcagcgtggttcgcagatgcgtaaaactgtgcacaggccacgaatacgccgctaaaattattaatactaaaaaactgtccgctcgagatcaccaaaaactggagcgagaagcaagaatctgccggctcttaaaacatagcaatatcgtccgccttcacgatagtatatctgaagaaggattccactacctggtgtttgatctagttaccggaggtgagctgttcgaggacattgtcgcccgagagtactactccgaggcagacgcatcacactgtatccaacaaattctggaagcagtgttacactgccaccagatgggcgtggtccatcgcgatctcaagcccgagaatcttctgcttgcctcgaagtgcaaaggggccgcagttaaattggcagatttcgggctagcaattgaagtgcagggcgaccagcaggcctggtttggctttgccgggacacccggatacttaagtccagaagtcctgagaaaggaagcatacggaaagcctgtggacatctgggcctgcggcgtcatcctttacatcctgttagtcggctacccgccattctgggatgaggaccagcataaactgtaccaacaaataaaagcaggtgcatatgactttccaagcccagagtgggataccgttacaccagaggctaagaacttgatcaatcagatgcttactataaaccccgctaaacggattaccgcccatgaggccttgaaacacccctgggtctgtcaaaggtctacggttgcgtctatgatgcatcggcaggagacggtggaatgcctgaagaagttcaatgcacgccgcaaactaaagggcgcaatcctcacgacgatgctggccacaaggaactttagcgtcgggcgacagactactgctccagctactatgagcaccgccgcatcggggacgaccatgggacttgtagaacaggctaaatctctactgaataaaaaagccgatggcgtcaagcctcagactaactccactaaaaatagcgctgcagctacatccccgaagggcacattacccccagctgctcttgaaccccagactactgtgatccacaaccctgtggatgggataaaggagtctagtgattcggctaataccacgatcgaagatgaagacgcaaaagcccggaagcaggagattatcaagaccacagagcagctaatcgaggccgtcaacaatggcgattttgaggcttatgccaagatttgtgatcctgggctaacatctttcgagccagaggcactgggaaatctggtcgagggaatggacttccatcgcttctactttgaaaatctgctcgcaaaaaattcgaaacccattcatactacgattctgaacccccacgtgcacgtcataggtgaggatgccgcgtgcatcgcctatattaggctcacacagtacatcgacgggcaaggaaggccccgtactagccagtccgaggagacacgagtttggcatcgcagggatggcaaatggcagaatgttcacttccactgtagcggcgcacctgtggcccctctgcagtag

SEQ ID NO: 110497 - DNA, 1557 bp, synthetic construct
  misc_feature 1..1557: note = Description of Artificial Sequence: Synthetic coding sequence
  source 1..1557: mol_type = other DNA
atggctactacagttacctgtacaaggtttacggatgaatatcagctatacgaggatattggtaagggcgcctttagtgttgtgcggaggtgtgtcaagctctgtacaggacacgagtatgccgccaaaatcatcaacaccaagaaactgtcagcccgtgaccaccaaaagctggagagggaggctcgaatctgtagattgctgaaacactcaaacattgtccgtctacacgattcaatctcagaggagggctttcactacctcgtttttgacttggtcaccggcggagagctttttgaagacattgtcgctcgggagtactacagtgaagccgacgccagccattgcattcagcagattctcgaggcagtacttcactgccatcagatgggcgttgtgcacagagacctgaaaccagagaatcttcttctggcgagtaaatgcaaaggggcagcggtgaagctggccgatttcggactggcaattgaggtgcagggcgaccagcaggcatggttcgggtttgctggaacccctggatatttatccccagaggttctgcgaaaggaggcctacggcaaacccgtagatatttgggcctgtggcgttatcctatatatattgctggttggctaccctccattttgggatgaggaccagcacaagttgtatcagcagatcaaagccggcgcctatgacttcccctctcccgaatgggatacagtcactccggaagccaagaatctgatcaaccagatgttaaccatcaatccggctaagcgaattaccgcacatgaagcgttgaagcacccttgggtttgccagcgtagcaccgtcgcatcaatgatgcaccggcaggagacagtggagtgcctgaagaagttcaatgcccgccggaaactgaaaggagccatactcaccaccatgctggcaaccagaaattttagtgcggccaaatccttactgaacaaaaaagcagatggcgtgaaaccgcagaccaatagcacaaagaatagcgcagccgcgacatcgcctaaaggcaccttgccacccgctgccctggaaccacagactacagtcatccacaaccccgtggacgggatcaaggagagcagcgattctgctaatacaaccatcgaggatgaagatgcaaaggcccgaaaacaggaaatcataaaaacaacagaacagctcattgaggccgtcaacaatggcgatttcgaagcatacgcaaagatctgcgatccagggctcacgtcttttgagccagaagctctcggcaacctggtggaaggaatggattttcaccggttttattttgaaaacctcctggcaaaaaattcaaagcctatccacaccaccatcctcaacccccatgtgcacgtcattggtgaagacgccgcctgtatcgcctatatccggctcactcagtacattgacggacaggggagaccaaggacatcccaaagcgaggaaacccgtgtctggcacagacgcgacgggaaatggcaaaacgttcactttcactgctctggcgcaccagtggctccactgcagtag

SEQ ID NO: 110498 - DNA, 918 bp, synthetic construct
  misc_feature 1..918: note = Description of Artificial Sequence: Synthetic coding sequence
  source 1..918: mol_type = other DNA
atgggcgtcgtgcacagggacttgaagcccgaaaatctcttgctcgcctccaaatgtaaaggagccgccgtcaaactcgcggattttggtctggccatcgaggtccaaggagatcagcaagcttggttcggcttcgccgggacaccgggttacctctctcccgaagtcctgcgcaaggaggcttacggaaagcctgtggatatctgggcttgtggagttatcctgtatattttactggtcgggtatccacccttctgggatgaggatcagcacaaactttaccagcagattaaggccggcgcttatgactttccgtccccagagtgggataccgttacacctgaagccaagaatctgatcaaccagatgctaaccataaatccagccaaacggatcaccgcacatgaggccctcaaacatccctgggtgtgccagcgttccactgtagcatccatgatgcacaggcaggagacagtggagtgtctgaaaaagtttaatgctagaaggaaactcaaaggcgcgatactgactacaatgctggccaccagaaacttctccgtaggccgacagaccacagccccggccacaatgagcaccgccgcctcaggtaccaccatgggcttggtggaacaagcgaaaagtctgctgaataaaaaggccgacggcgtgaaaccacaaaccaacagcaccaaaaactccgccgccgctacctcacccaaggggacactcccacccgccgctctcgagccccaaactacagtgatccacaaccccgtcgatggaattaaggagagtagcgattccgcaaataccactatcgaggacgaggatgcaaaagcccggaaacaggaaataattaagactactgagcaactgattgaggcggtcaacaacggcgactttgaggcctatgcctag

SEQ ID NO: 110499 - DNA, 1437 bp, synthetic construct
  misc_feature 1..1437: note = Description of Artificial Sequence: Synthetic coding sequence
  source 1..1437: mol_type = other DNA
atggcgtctacaactacctgcacgcgctttactgatgagtatcaattgttcgaggaattgggtaagggagcattctcagtggttcgccgatgcatgaagatacccactgggcaggaatacgcggctaagattataaatacaaagaagctttctgctagggaccaccagaagctcgagagagaagcccgtatctgtagactgttgaagcatcccaatatcgttagattacatgattctatctcagaagaaggattccattacctagtctttgacctggtcactggcggggagctctttgaggatatcgtggcccgcgagtattacagtgaggccgatgccagccactgtatccagcagatactcgagagcgtcaatcattgtcacctgaacggcatagtgcacagggacctgaaacctgagaatcttttactggcgagtaagagtaagggcgctgctgtcaagcttgctgacttcgggctcgccattgaagtgcaaggagatcagcaggcatggttcggtttcgctggaactccaggatatttatcccctgaggtacttaggaaggacccctacggcaaacctgtggacatgtgggcatgtggcgtgatcctgtacattcttctggtgggttatcccccattttgggacgaggaccagcacaggctgtatcagcagataaaggcaggcgcctacgacttcccaagcccggagtgggacacagttacacctgaggcaaaagatctgataaataaaatgctcaccataaaccccgccaaacgtattaccgcttccgaggccctgaaacacccttggatctgtcagcgcagcacggtcgcctccatgatgcatcgacaggagacagtggactgtctcaaaaaatttaatgcccggcgtaagcttaaaggcgcgatcctcaccacaatgctggccacgcggaatttcagtgccgcaaaatctcttctaaagaaaccagatggcgtcaaggaatctaccgagagtagtaacacaactatcgaagacgaggacgtgaaggctaggaagcaggaaattatcaaggttaccgagcagctgatcgaagccataaacaacggagacttcgaagcttatacgaagatatgcgatccaggacttaccgcatttgagcctgaggctctcggtaatttggtggaagggatggattttcatagattctatttcgagaacgctctcagcaaatctaataaacctatccacaccataatcctcaatccccacgttcacctcgtgggggatgacgccgcctgtatcgcctacatacgtctgacccagtatatggacggaagcgggatgcctaagactatgcagtccgaagaaacaagagtttggcatcgcagagatgggaagtggcagaatgtccatttccatagatctggttctcccacggttcctatcaaatag

SEQ ID NO: 110500 - DNA, 1500 bp, synthetic construct
  misc_feature 1..1500: note = Description of Artificial Sequence: Synthetic coding sequence
  source 1..1500: mol_type = other DNA
atggctagcaccactacatgtaccaggttcaccgatgagtatcagttatttgaggagcttggtaagggtgccttctccgtggttcggagatgcatgaaaattcctaccggacaggagtatgccgctaaaatcatcaataccaaaaaactgtccgccagggaccaccaaaaactggagcgtgaagcccggatctgccgcctgctgaaacaccccaatatcgtgagactgcacgattctatttccgaggagggctttcactatttagttttcgatctggtcacagggggcgaactgttcgaggacatcgtcgcgagagagtattactctgaagccgacgcatcccattgtatccagcagatcctcgagtcggtgaaccactgccatttaaatggaatcgtccaccgtgacctcaagcctgagaacctgctattagcctccaaatccaaaggggccgccgtcaaactcgccgacttcggactggcaattgaagttcagggagaccagcaggcgtggttcggcttcgcaggtaccccaggctacctgagccctgaggtcctcaggaaggacccctacggaaaaccggtggacatgtgggcctgtggcgtcatactctacatactgctcgttgggtatccgcccttctgggatgaggaccaacatcgcctgtatcaacaaattaaggctggagcttacgattttcccagccctgaatgggacaccgtcacaccagaggctaaggacctcatcaacaaaatgctcactatcaaccctgctaaacgtataactgccagcgaggcactaaaacatccgtggatttgccaacggagcacagtggcttctatgatgcatagacaagaaactgtggattgtctcaagaagttcaacgcccggaggaagctcaaaggggcaatccttacaaccatgctggctaccagaaactttagcgccgctaagagccttctcaagaaaccagacggtgtaaaggaatcaaccgaatcaagcaacacaacaattgaagacgaagatgtaaaggcccgcaaacaggagattatcaaggtgacggagcaactgattgaggcaattaacaacggcgacttcgaagcttataccaagatttgcgaccccggacttactgctttcgagccagaggctttgggcaatctggtggaaggcatggattttcatcgcttctactttgagaatgcgctgtcaaaatctaataagccaattcacactattatattaaatccccacgttcacctcgtgggcgacgatgctgcatgtatcgcctatattagactgacacagtatatggacggctctggaatgccaaaaactatgcagtctgaggagaccagagtgtggcaccggagagacgggaaatggcagaacgtgcatttccatcggagtgggagcccgacggtgccgattaagccaccatgcattcccaacgggaaggagaatttcagcggcggcacctcgctgtggcagaatatatag

SEQ ID NO: 110501 - DNA, 1437 bp, synthetic construct
  misc_feature 1..1437: note = Description of Artificial Sequence: Synthetic coding sequence
  source 1..1437: mol_type = other DNA
atggcatccacaactacttgcactcgctttaccgacgaataccaactgtttgaggagctgggaaagggagcattttcggtggttaggaggtgtatgaagatacccaccggtcaggaatatgctgccaaaatcatcaacacaaaaaagttgtccgcgcgagaccatcagaaattagagcgcgaggcccggatctgtcgactgcttaagcaccccaatattgtcagactccacgattcaatttcagaagaggggttccactatctggttttcgatttagtgacgggaggcgaactgtttgaggacatcgtggcgcgggagtactacagcgaggcggacgccagccactgtatccagcaaattctagagtccgtgaaccattgccatcttaatggaattgtgcacagggacttgaaacctgaaaatttgttactggcttcaaagagtaagggcgctgccgtgaaactagcagattttggcctcgccattgaggtacagggtgatcaacaggcctggtttgggttcgcgggcacccccggatacttgtcaccagaagttctgaggaaagatccatatggcaaaccagtggacatgtgggcctgtggcgtcattctgtacatcctgctggtaggatacccaccattctgggatgaagatcagcacaggctataccaacaaattaaagcaggagcctacgactttccttctcccgagtgggatacagttactccagaggcgaaggacctgatcaataagatgctgactattaaccctgccaagaggattactgcaagtgaggccctgaagcatccatggatctgccagagatccactgtggccagcatgatgcaccgtcaggaaactgtggactgcctgaagaagttcaacgcccgacggaagttgaagggagctattctgacaaccatgctggccacccgcaatttctcagcagcaaagagtttactgaagaagccagatggagtcaaggagtccacagaatcttctaataccactattgaagacgaagatgtcaaagcccgcaaacaggagataatcaaggtcactgagcagttaatcgaggctattaataacggagacttcgaggcttacacaaaaatctgcgatcccggcctaactgctttcgaacctgaggcgctcggcaacttagttgaaggaatggatttccacaggttttattttgagaatgcactctccaaatccaacaagccgatccatacaatcattttaaacccacatgttcatcttgtaggggacgacgccgcttgtatcgcctacatccggctcacccagtatatggatggttccggaatgccaaaaacaatgcaatccgaggaaacgcgagtgtggcacagacgcgacggtaagtggcagaatgtacactttcatagatctgggagccccacggtgcctatcaagtag

SEQ ID NO: 110502 - DNA, 1479 bp, synthetic construct
  misc_feature 1..1479: note = Description of Artificial Sequence: Synthetic coding sequence
  source 1..1479: mol_type = other DNA
atggcctctaccaccacttgtacacgcttcaccgatgaataccagttgtttgaggaactcggtaagggagccttcagcgttgtacgtcgctgcatgaagattcccacgggtcaggaatatgccgctaaaatcatcaacaccaagaagctgtctgccagggatcaccagaagctcgaacgggaagcccggatatgtcgtttactgaagcaccctaacatcgtccgactgcatgacagtatctctgaagagggcttccactacttagtttttgacctggttaccggaggagagctttttgaggacatagtcgcgagagagtattacagcgaggctgatgcctcccattgtatccagcagattctggagtccgtgaaccattgccatcttaacggcatagttcaccgggacctaaagcctgaaaacctgcttctggcctccaagagtaagggcgcagcagtgaaactggcagactttgggcttgcaatcgaggttcagggtgatcagcaggcctggtttggtttcgccggtactcccggttacttgagtcccgaagtattaaggaaagatccatatggcaagcccgtggacatgtgggcgtgcggggtgatactgtacatcctgctggttggctatccgccattttgggacgaggaccagcacaggctgtaccagcagatcaaagctggcgcttatgattttccaagcccggaatgggacacggtcacacctgaagctaaagatctgataaacaaaatgcttactatcaacccggcaaaaaggatcactgcctctgaggccttgaagcacccatggatctgccagcgctctactgttgcgtcgatgatgcacaggcaggagacagtggattgcttgaaaaaatttaacgcccgccgaaagttaaagggtgcgattctcaccaccatgctggcaaccagaaacttcagtgctgcaaaaagccttctgaaaaaacccgatggtgtgaaggagcctcaaacgactgtgattcacaaccctgatggcaataaagagtctactgaatcatcaaacaccacaatcgaagatgaggatgtgaaggcaagaaagcaagagattataaaagtcacggagcaactaatcgaagccatcaataacggggattttgaggcctacacgaaaatttgcgatccgggcctgactgcattcgagccagaggccctcggtaatctggtcgagggaatggacttccatcggttttactttgaaaacgcgctgagtaaaagtaataagccaattcacaccattatcttgaatccacacgtccacctcgtgggcgacgacgctgcgtgcatcgcctacattcggctcacacaatacatggatggcagcggaatgcccaagaccatgcagtctgaggagacacgggtatggcataggcgcgatggaaagtggcaaaatgtccacttccacaggtcagggagtcctactgtacccatcaagtag

SEQ ID NO: 110503 - DNA, 1533 bp, synthetic construct
  misc_feature 1..1533: note = Description of Artificial Sequence: Synthetic coding sequence
  source 1..1533: mol_type = other DNA
atggcctcgacaactacctgtaccagatttacagacgagtaccagctctttgaggagctgggtaagggcgcgttctcggtagtacgtaggtgtatgaagattcccaccggtcaggaatacgccgccaagatcattaatactaagaagctgtcagcaagagatcatcagaaactcgagcgggaagctcgcatctgccgactgttgaagcaccctaatatagtccgcctccatgattcgatcagtgaagaaggcttccattacttggtgttcgacctggtgaccggtggggaattgtttgaggatatcgtcgcacgcgaatactattccgaagctgacgcgtctcactgcatccagcaaattttggaaagcgtaaaccactgtcacctcaatggtattgtccatagggatctgaaacctgaaaacctattgctcgcctctaaatctaagggggcggccgttaagctggccgacttcggtctggcgatcgaagtccagggcgatcagcaggcttggttcgggttcgctggtactcccggatacttgagccccgaggtcctgcgtaaggatccctatgggaagcccgtggacatgtgggcgtgcggtgtgattttgtatattctgctcgttgggtatcctccattctgggatgaagatcagcatcgcctctatcaacagattaaagcgggagcctacgacttccctagccccgagtgggacacggtcactccggaagcgaaggacctgataaacaaaatgctgaccatcaatccggcaaaaaggatcactgccagtgaagcactgaagcacccttggatttgccagcgctccaccgtggcgtctatgatgcatcggcaggaaactgtggactgtcttaagaaatttaacgctaggaggaagctcaagggcgccattctcacaaccatgttggctacccgtaacttttcagcagccaagtccttgctgaagaaacctgatggagtgaaaaaaaggaaatcttccagctcagtccagatgatggaatccaccgagagtagtaatactactatagaagatgaagatgtcaaagcacgcaagcaggagatcattaaagtgaccgaacagcttattgaagccatcaataatggagatttcgaagcctataccaagatctgcgacccaggcttaaccgcctttgagccagaggccctgggcaatctcgtggagggcatggacttccatcgcttctactttgaaaacgcgctctccaagtccaacaaacctatccataccattattttaaaccctcacgtgcacctcgtgggggatgacgctgcctgtattgcgtacatccgactcacacaatatatggacgggtcgggtatgcctaaaactatgcagtccgaggaaacccgggtgtggcaccgacgtgatgggaagtggcagaacgtccacttccatcgctctggctcccccactgtgccgatcaagccaccttgcattccgaacgggaaagaaaattttagcggaggcacaagcttatggcagaacatatag

SEQ ID NO: 110504 - DNA, 1542 bp, synthetic construct
  misc_feature 1..1542: note = Description of Artificial Sequence: Synthetic coding sequence
  source 1..1542: mol_type = other DNA
atggcttctactaccacctgcacacgtttcactgacgagtaccaactctttgaggagctcgggaagggtgctttcagcgtcgttagaagatgtatgaagattcctactggccaggagtatgccgccaaaatcataaataccaaaaagctatcggctagagatcaccagaaactggaacgcgaggccaggatttgcagattgctaaagcaccccaatatcgttcgcctccatgactccataagcgaggaaggattccattacctggtgtttgatctggtaaccgggggagagctgtttgaggacatcgtcgcacgtgagtattattccgaagcggatgcatcacattgtattcagcaaattttggagtccgtcaaccactgccaccttaatggcattgttcatagggacctaaaaccagaaaatttgttgttggcttccaagtctaagggggcagctgtgaaactggcagattttggtttggctatagaggtgcagggggaccagcaggcctggttcgggtttgccgggaccccgggatacctcagccctgaggtcctgcgaaaagacccttatggtaagcccgtggacatgtgggcctgcggcgttatcctgtacatactgctggtcggctaccctcccttttgggacgaagaccagcatcggctctaccagcaaattaaggctggagcctatgatttcccctccccagagtgggacaccgtcactcctgaagctaaggatctcatcaataagatgctcacgatcaacccggcaaagcggataaccgcctctgaagccctgaaacacccttggatttgccagagatctaccgtggcaagcatgatgcacaggcaagagactgtggattgcctcaagaagtttaacgcccggaggaaactgaagggagccattctgaccaccatgctggcaacccgaaactttagcgccgcaaagtccctgcttaaaaagccagacggcgtaaaggagcctcagaccacagttatccacaatccagacggcaacaaggagagcactgagagtagcaacaccacaattgaggacgaagacgttaaagcccgcaagcaggagatcatcaaggtaaccgaacaactgatcgaggccatcaacaatggagacttcgaggcctacacaaaaatctgcgatcccgggctgacagcttttgaaccagaagccctaggaaacctggtagagggcatggacttccacaggttttatttcgagaatgccctatccaaatccaacaagcctattcatacaataatccttaacccacatgtacatcttgtgggagatgacgccgcctgcatagcttacatccggctgacacagtacatggacggaagcggcatgccgaagactatgcagtctgaggagacccgggtatggcaccgaagggacggcaaatggcaaaatgtccacttccatcgctccggcagccctaccgtgccgatcaagcccccctgtatccctaacggaaaagagaatttctctgggggcaccagcctctggcagaacatttag

SEQ ID NO: 110505 - DNA, 1560 bp, synthetic construct
  misc_feature 1..1560: note = Description of Artificial Sequence: Synthetic coding sequence
  source 1..1560: mol_type = other DNA
atggcaagcacgactacctgtactcgattcaccgacgagtaccagctcttcgaggagttgggtaagggagccttctctgtggtccgtcgctgcatgaagatccctaccggacaggaatacgctgccaaaataatcaacaccaaaaaactttccgcccgagaccaccagaagttggagagggaagcgaggatctgtcgactcctgaagcaccccaacatcgttcgcctccatgacagtatttcagaagaggggttccattatctggtattcgatttggttacgggcggtgagctgttcgaggatatcgtcgccagggagtactactctgaggccgacgcttcccactgtattcaacaaatcctcgagagcgtgaatcattgccacctgaatggaatcgtgcaccgggacttaaaacccgagaatctactgttggcgtcaaagagtaaaggagccgccgtgaagttggcagattttggactggcaattgaagtccaaggggaccagcaggcttggttcgggttcgccggcacccccggttacctctccccagaagtcttgagaaaggacccgtacggtaagccagtggatatgtgggcatgtggagtgatactgtatatcctgcttgtggggtacccgcctttctgggatgaggaccagcataggctctaccagcagataaaggccggcgcctatgattttccctctcccgagtgggatacagtgacgccggaggctaaggatcttatcaacaagatgctgacaatcaatcccgctaagcggattacagccagcgaggcccttaagcacccctggatttgccagcggtccacagtagcatctatgatgcatcgacaagagaccgtggactgcctgaagaaattcaatgcccggaggaaactcaagggcgctattctcacaaccatgttggctacacgtaactttagtgctgcaaaatcgctcctgaagaaacccgatggcgtgaagataaacaataaggcaaacgtggtgacctcccccaaagagaacatccctacgcctgctctcgaaagcacagagtcctcaaacaccactattgaagatgaggatgtcaaggccagaaagcaagaaatcatcaaagttacagaacagctgattgaggcgattaacaatggtgattttgaggcctataccaagatctgtgaccctgggctgacggcattcgagcccgaggccctggggaacctcgtcgaaggaatggatttccatcgattctactttgaaaatgcattgtctaagagcaataagcccatccacacgatcatcctgaacccccacgtccacctggtgggggacgatgccgcttgtatcgcctacatccggctgacccagtatatggacggcagcggaatgcctaagacgatgcagtcggaggagacacgtgtttggcatcgacgggacgggaaatggcagaacgtacacttccatcgctcggggagtcctacagtgcccatcaaacctccatgtattcctaatggcaaggagaatttctctggaggcacatcactctggcaaaacatctag

SEQ ID NO: 110506 - DNA, 1575 bp, synthetic construct
  misc_feature 1..1575: note = Description of Artificial Sequence: Synthetic coding sequence
  source 1..1575: mol_type = other DNA
atggccagcacaacaacctgtactaggttcacagatgaatatcaattatttgaagagctgggcaaaggtgctttcagcgttgtcagacgctgtatgaaaataccaacgggccaagagtacgccgccaagatcattaatacgaaaaaactttcagctagagatcaccaaaagttggagcgggaagcgcgaatttgtcgtctcttgaagcatccaaacattgtaaggctgcatgattcaattagcgaagaaggctttcattacctcgtattcgacttagttacaggcggagagctgtttgaggacatcgttgcccgggaatactactctgaagcggatgccagccattgtatccagcaaatcttggagtcggtgaatcactgccacttaaatgggatcgtgcacagagatctcaaaccagagaacctgttgctagcctcaaaatcaaaaggggctgccgtgaagctggcagacttcggcctcgccatcgaggtacagggagaccagcaagcctggtttggctttgccggcacgcccggctacctatcccctgaagtactgcgtaaggacccctacgggaagcctgtggatatgtgggcttgtggagttatcctgtacattttgttggtcggataccctcccttctgggacgaggatcagcatcggctctatcaacagatcaaggctggagcatacgattttccctcacccgagtgggacaccgtgaccccagaagccaaggatctcattaacaaaatgctgactattaatcccgctaaaaggataaccgcctctgaggccctgaagcatccttggatctgtcaacgctccacagttgcctcaatgatgcaccgccaggagactgtggattgcttgaagaagtttaatgcccgccgaaaactcaagggcgccattctgacgactatgttggccacccgtaattttagcgccgcaaaatctctgctgaagaagccggacggagtgaagaagcgtaagtcctcttcctctgtgcagatgatggaaccgcaaaccactgttatccacaaccccgatggaaacaaggagagcacggagagcagcaacactaccatagaggatgaggacgtgaaagcacgtaagcaggaaatcatcaaggtcacagagcaattgatcgaggcaatcaacaacggcgactttgaagcttatacaaaaatatgcgaccccggccttactgcttttgagccagaggctctcggcaaccttgtggaaggcatggacttccacaggttttactttgagaacgcgctctcaaaatcaaataagccgattcacacaattatattgaacccacacgtacacctggttggtgatgacgccgcatgcattgcctacattcgcctaacacagtacatggacggctccgggatgccgaaaaccatgcagtcagaggaaacaagggtctggcacaggagagatggaaaatggcagaatgtgcatttccatcgctcagggtccccgactgtgcctatcaagcctccttgtatccccaatggtaaggagaacttttcgggtggtactagcctgtggcagaacatttag

SEQ ID NO: 110507 - DNA, 1470 bp, synthetic construct
  misc_feature 1..1470: note = Description of Artificial Sequence: Synthetic coding sequence
  source 1..1470: mol_type = other DNA
atggccagcactacgacctgcactcgtttcactgacgagtatcagttatttgaagagctcgggaagggagccttctctgttgtgcggcgttgtatgaaaatcccaacaggtcaagaatacgccgccaaaatcatcaatactaagaaactctctgccagggatcatcagaagctcgaacgagaagcaagaatctgcaggctgctgaagcatccaaatattgtgagattgcacgactccatcagcgaagagggatttcattatctcgtttttgacttagtcacaggcggggagctattcgaagatatagtagcccgtgagtattactccgaggctgacgccagtcattgtattcagcagatcctcgagagcgtgaatcattgtcatcttaacggaatcgtccaccgcgacctcaaacccgagaatttgctcttggcctccaagtctaagggggccgccgtcaagctggccgatttcggcttggccatcgaggttcagggcgatcaacaggcctggttcggtttcgcagggactcctggttatctaagccccgaagtgttgcgtaaagatccctacggcaaacctgtggacatgtgggcctgtggagtcatcctgtatatcctgctcgtcggatacccaccgttttgggatgaagatcagcatagactttaccagcagataaaggcaggcgcctacgactttccttctcccgagtgggacactgtgacccctgaggctaaagacttgataaacaagatgctgacaattaatcccgcaaaaagaattaccgcgagcgaggctctgaaacatccatggatctgccaacggagcactgtggcaagtatgatgcacagacaggaaaccgtggactgccttaaaaagttcaatgctaggcgcaaacttaagggtgctatcctgactactatgctggccacaagaaactttagtgcggccaaatccctgctcaagaagccagacggcgtcaagaaaagaaaaagctctagcagcgtgcaaatgatggagtccaccgaatcctctaacactacaattgaggacgaggatgtgaaagctagaaagcaggagatcattaaggtgaccgagcagttaatagaagccataaacaacggcgacttcgaagcctatacaaagatatgtgacccggggctgactgcattcgagcctgaggccctgggtaacctcgtcgaaggcatggattttcatcgattctactttgagaatgctctgagtaaatctaataagcccatccacacaattatcctgaaccctcacgtgcacctggtcggggatgatgccgcttgcattgcttacattagactaacccagtatatggatggcagtggcatgccgaaaaccatgcagtcagaagaaacaagggtttggcatcggagggatggtaagtggcaaaacgtccacttccacaggtccgggtcccccaccgttcccatcaaatag

SEQ ID NO: 110508 - DNA, 549 bp, synthetic construct
  misc_feature 1..549: note = Description of Artificial Sequence: Synthetic coding sequence
  source 1..549: mol_type = other DNA
tgacgtaaactgaaaggtgcaatcctcaccacgatgcttgcaacaagaaactttagcgctgctaaatcgctgctcaagaagcccgacggagtgaaggagagtaccgaaagcagtaacactacaatagaagatgaggacgtgaaagctaggaagcaggagatcattaaggtcaccgagcagctaattgaagctataaataacggcgactttgaggcttacaccaagatttgcgatcctgggctgaccgcgtttgagcctgaagctttgggaaacctggtggaaggcatggacttccacagattctactttgagaacgctctgtctaagtccaataaaccaatccacacgataatcctgaacccccacgtccacctggtcggggatgatgccgcctgtatcgcatacatccgcctgacccagtacatggacggctcagggatgccgaagacaatgcagtctgaagaaacacgggtttggcaccgtagggatggcaaatggcaaaatgtgcattttcatagaagcggctcacccaccgtgccaatcaagtag

SEQ ID NO: 110509 - DNA, 1437 bp, synthetic construct
  misc_feature 1..1437: note = Description of Artificial Sequence: Synthetic coding sequence
  source 1..1437: mol_type = other DNA
atggcctcaaccactacctgcacaagatttacggatgaataccaattgttcgaggagttgggaaaaggcgccttctccgtcgtcagaaggtgtatgaaaatacccacagggcaagaatacgccgctaagataatcaatacaaaaaaattatccgctcgggatcatcaaaagcttgaacgggaggccagaatatgccgcctcctaaaacatccaaacatagttcgtctacacgattctatcagcgaggagggctttcactacctcgtgtttgacctggtgaccggaggcgaattgttcgaggatattgtcgcccgagagtattacagcgaggcagatgcctctcattgcatccagcagatccttgaaagcgtgaaccattgtcatctgaatgggatcgtacaccgggatcttaagcctgagaatttacttctcgcatcaaagtcaaaaggcgcagccgtcaagctggctgactttggcctcgcgatcgaggttcagggagatcagcaggcctggtttggatttgccgggacccctgggtacttaagccccgaggtgttgaggaaggacccttatggaaagccagtggacatgtgggcttgtggcgtcatcctgtacatactgcttgttgggtatccacccttctgggacgaggatcagcatcggctctatcagcagataaaggctggcgcatacgatttcccttccccagaatgggacacggttaccccagaagccaaggacctcataaacaaaatgctgactatcaacccggccaaacgtatcaccgcatccgaggcccttaagcacccatggatttgccagagatccaccgttgcgtcgatgatgcacagacaggaaaccgttgattgtcttaaaaaattcaacgctcgcaggaaactgaagggggctatactgaccacaatgctggccacgcgaaatttctcagctgccaaatccctactgaagaaacccgacggcgtaaaagagagtactgagtccagtaatacaactatagaggacgaagacgtgaaagctcgcaagcaagaaattatcaaggtgacagagcagctgatcgaggcaatcaacaacggcgatttcgaagcctacactaagatctgcgaccccgggctgaccgcattcgagccagaagccttaggaaacttagttgagggcatggatttccaccgtttctatttcgaaaatgccctgagcaaaagcaataaaccgattcatactattattctgaatccacatgtacaccttgtgggcgacgacgctgcctgcatcgcatacattcggctgacacaatatatggacggaagcggcatgccaaagacaatgcagagcgaagagacgcgcgtttggcataggagagacggaaaatggcagaatgtgcatttccataggtcaggctcccccaccgtgcctataaattag

SEQ ID NO: 110510 - DNA, 1590 bp, synthetic construct
  misc_feature 1..1590: note = Description of Artificial Sequence: Synthetic coding sequence
  source 1..1590: mol_type = other DNA
atggccactacagccacatgtacaagatttactgatgactaccagctgttcgaagaactgggcaagggcgctttttctgttgttcgccgatgcgtcaaaaagacatctacccaagaatatgctgccaagattattaacacgaagaaactctccgctagagaccatcagaagctggagcgcgaggctcggatatgccggctcttgaagcacccaaacattgtacgtctgcacgattctatctccgaagagggatttcattacctggtgttcgacctcgtcacaggcggcgaactcttcgaagatatcgttgctcgggagtattattcagaggcggacgcatcccactgtattcaccagatccttgaatctgtgaaccacatccaccagcacgacattgttcatcgcgatctgaagccagagaacctgctgctagccagtaaatgtaagggcgccgccgtcaaacttgctgacttcggcctggcaatcgaagtgcaaggggagcaacaggcttggttcggcttcgcaggaacaccaggatacttgagtccagaagtgcttcgcaaagacccctatggcaagccagtcgatatatgggcttgcggtgttattctgtacattctgctggtcgggtaccccccattttgggatgaggaccagcacaaactgtaccaacaaatcaaggctggcgcgtatgactttcccagtcctgagtgggacactgtaaccccagaagcgaagaacttaataaaccagatgctgactattaaccccgccaagcggattacggccgaccaggccctgaagcacccatgggtgtgtcagcgaagcacagtcgctagcatgatgcatcggcaagagacagtcgaatgcctacgcaagttcaatgcgcgcaggaagctgaaaggagccatcctgacaacaatgctagttagtagaaacttctctgctgccaagtctttgctgaataaaaaaagtgatggtggagtcaaaaagaggaaatcaagtagttctgttcatctgatgccacagagcaacaataaaaacagcctagtcagccccgcccaggagcctgctcctctgcagactgcaatggaaccacagaccacagtcgtgcacaatgccacggatgggatcaagggaagtacagaatcgtgcaatactactactgaagacgaggatttaaaagttcggaaacaagagattattaagattacggagcaactcatcgaagcaataaataatggagacttcgaggcctatacaaagatctgtgatccaggactgacatcatttgagccagaggctctgggcaatctggtggaggggatggacttccataaattttattttgagaatttattatctaaaaacagtaaacccatccataccacgatcctgaatccccacgttcacgtgatcggtgaggatgctgcttgtattgcctacattaggttgactcaatatatcgacggccaaggaagacccagaacaagccaaagtgaagagacgcgcgtgtggcacaggcgagatgggaaatggcttaacgtgcactaccattgttccggcgctccagccgcacccctgcaatag

SEQ ID NO: 110511 - DNA, 1584 bp, synthetic construct
  misc_feature 1..1584: note = Description of Artificial Sequence: Synthetic coding sequence
  source 1..1584: mol_type = other DNA
atggctaccactgcaacatgtacgcgcttcactgacgattatcaattattcgaggaattaggaaagggggccttcagtgtggttcggcggtgcgtgaagaagactagcacccaggagtatgcagctaagattattaatacaaagaagctctcggccagagatcaccagaagctggaaagggaggcccgaatatgtcgactgctgaagcacccaaacatagttaggctgcacgacagtatatccgaggagggatttcactacctggtgttcgacctcgtaaccggcggggagctatttgaggacattgtcgctagggaatactattccgaggccgatgctagccactgtattcaccagatcctagagtccgtgaatcatatccaccaacatgacatagtgcatagagacctcaaaccagagaacctgctactggcaagcaagtgcaaaggcgctgctgtgaagctggcagattttgggctggctattgaggtgcagggcgagcagcaggcctggtttggatttgctgggactccaggttatcttagtcccgaggttctgcggaaggacccctacggtaagcccgtggatatttgggcttgcggcgtcatactgtacatcctcttagttggatatcctcccttctgggacgaggaccagcataaactgtaccagcagattaaggctggcgcgtacgatttcccatctccagagtgggacacagttacaccagaggccaagaatctcattaatcagatgctcacaattaatcccgccaagcggatcacagccgatcaagccttgaaacatccctgggtgtgccagaggtcaactgtggcaagcatgatgcatagacaggagactgttgaatgcctccggaaatttaatgcccgcaggaaacttaagggggcaatactgacaacaatgctcgtatccagaaacttctcggtgggacggcaatccagcgctccagccagtcccgcagcttcagccgctgggctggccggacaagctgctaagtccctgttgaacaaaaaaagcgatgggggcgtgaagaaacgcaaaagttcaagctcggtgcacttaatggaacctcaaaccactgtcgtgcataatgccaccgacggcatcaagggatccactgagtcttgcaacacgaccaccgaagatgaagatttaaaagtgagaaaacaggagattataaaaatcacagagcagctcatcgaggcaataaataacggagatttcgaggcttatactaagatctgcgaccccggcttgacaagcttcgagccagaggcactggggaatctcgtggaagggatggacttccataaattttactttgagaacctcttgtccaagaatagtaagcccattcatacgactattttgaacccgcacgtgcacgtgattggggaagacgccgcgtgcatcgcctatattcggctgacccagtatattgacggccaaggacggccaaggactagtcagagcgaggaaacgagagtgtggcacaggagggatggcaagtggctgaatgtccattatcactgttccggagctcccgctgcacctttgcagtag

SEQ ID NO: 110512 - DNA, 1671 bp, synthetic construct
  misc_feature 1..1671: note = Description of Artificial Sequence: Synthetic coding sequence
  source 1..1671: mol_type = other DNA
atggcaaccaccgccacctgcacacggtttacagacgattaccagctgtttgaagagctaggcaaaggcgctttttccgtggtgcgcaggtgcgtcaagaagacttccacacaggagtatgctgcaaaaatcatcaacactaaaaaactctctgcaagagatcaccagaagctggagagagaggcacggatttgcaggctgctcaaacaccctaacatcgttaggttgcacgatagcatcagcgaggaagggttccactacttggtctttgacctggtcaccggcggtgagctattcgaagatatcgtagcaagggaatattacagcgaagcggatgcatcccattgtatccatcaaatcttggagagtgttaatcacatacatcagcacgacatcgtgcacagagacttgaagccagagaacctcctcctggcctccaaatgtaagggcgctgctgtgaagctggccgacttcggcctagccattgaagttcagggagagcaacaggcttggttcgggtttgcgggaacccccggctacttgagccccgaggtgctcagaaaagacccctacggtaagcccgttgacatttgggcatgcggcgttatcctatatatcctgttggtaggctacccccctttctgggacgaagatcagcacaaactgtatcaacagatcaaggctggcgcctatgacttcccttcgcctgaatgggacactgtgacccctgaagcaaagaatttaatcaatcaaatgctgacaatcaacccagctaagcggatcactgctgatcaggccctgaaacacccatgggtgtgtcagcggtcaacagtggcctctatgatgcaccgccaggagacagtggagtgtctgcgcaaattcaacgcaaggcgcaagcttaaaggagcaattctcaccactatgctagtgtcccgcaacttctcagcggccaagtccttgctgaacaaaaaatctgatggcggtgtcaagccacagtcgaataacaagaatagtctggtgagcccagcccaggagcccgcccccttgcagacggctatggagcctcagacaactgtggtgcataatgcgaccgacggtattaagggttctaccgagagttgcaacactactaccgaagacgaagacctgaaggcggcgcccctgcggacgggaaatggcagcagcgtgcctgagggccgaagttctcgagacagaacagcaccttccgcaggaatgcagcctcaacctagcctgtgtagcagtgcgatgcggaaacaggaaatcattaagattactgagcagctcattgaggccattaataacggagattttgaagcatacaccaagatttgcgaccccggacttacgtcattcgagccagaggctctggggaacctagttgaggggatggattttcacaaattttatttcgaaaacctcctgagtaagaactccaaaccaatccacactacgatcttgaacccccacgtgcatgtgatcggtgaagacgccgcttgcatcgcgtacatccgtttgacccaatatatcgacggccagggacggcccagaacctcgcagtccgaggagacaagagtatggcacaggagggacggcaagtggcttaacgttcattaccactgcagcggagcacccgcagctcctctccagtag

SEQ ID NO: 110513 - DNA, 1488 bp, synthetic construct
  misc_feature 1..1488: note = Description of Artificial Sequence: Synthetic coding sequence
  source 1..1488: mol_type = other DNA
atggctacgaccgccacgtgcacgcgcttcaccgatgattatcaactctttgaagagcttggtaagggtgctttctctgtcgtgcggaggtgcgtgaagaagacaagtacccaagagtatgcagccaagataatcaatactaaaaaattgagtgcaagagaccaccagaaactggagcgcgaggctaggatttgccgcctgctcaagcacccgaatatcgttcggctgcatgatagcatcagtgaggaagggttccactatctggtgtttgaccttgttactggcggtgagctgttcgaagatattgtcgcacgggagtattactccgaagctgacgcatcgcactgcattcaccagattcttgaaagcgtgaatcatatccatcagcatgacatcgtgcatagggatctaaagcccgaaaacctccttttagcttctaaatgcaagggggccgctgtgaagctggcagacttcggactggctatagaggtgcaaggtgagcaacaagcttggttcggatttgcaggcactcctggctacctgagtccagaggtcctacgcaaagacccctacggtaagccggtggacatctgggcctgcggtgtgatactctacatcctgttggttggctatccccctttttgggatgaggaccagcataagctgtatcagcagatcaaagctggagcttatgatttcccctcccctgagtgggacacggtcactccagaagctaagaatctgatcaaccagatgctgacaattaatccagctaaacgtattactgccgatcaggcactcaaacatccctgggtatgccaacgatcaacagtagcctctatgatgcaccggcaggagactgtcgagtgcttaagaaagttcaatgctaggcggaagctcaaaggcgccatactgacaacaatgctggtatcgcgcaacttcagcgctgctaaatcgctcctgaacaaaaagtcagatggaggcgtgaaagagccccagacaacagtagtacacaacgctactgacggcatcaagggttccaccgaatcttgtaacactacgacagaagatgaagaccttaaagtgcgtaaacaagagattattaaaattacagaacagttaattgaggctatcaataatggagactttgaagcttacactaagatctgtgacccagggctgacatcttttgaaccagaagccctagggaacctcgtggaaggcatggacttccataagttctacttcgaaaacctactgtcaaaaaacagtaagccaatccacaccacgatactgaaccctcatgtacatgtgataggtgaagacgcagcctgcatcgcttacatcagactcacacaatatatagacggccagggccgacctcggacctcccaatctgaagaaactagagtgtggcatcggcgggacggtaaatggttgaatgtgcattatcactgcagtggagcaccagccgccccactgcagtag

SEQ ID NO: 110514 - DNA, 1551 bp, synthetic construct
  misc_feature 1..1551: note = Description of Artificial Sequence: Synthetic coding sequence
  source 1..1551: mol_type = other DNA
atggcaacaaccgctacctgcacccgctttactgacgactatcaactcttcgaagaactggggaaaggggcctttagcgttgtgagacggtgtgtcaaaaagacatctactcaggagtacgctgcaaagatcataaacactaagaaactttcggcgcgggaccatcaaaagttagagcgtgaggcccgaatctgcagacttcttaagcaccctaacatagtcaggttgcacgactccattagcgaagagggtttccattatctggtgttcgaccttgtcacagggggagaattatttgaggacatcgtggcccgcgaatattactctgaggcagacgccagccactgcatacaccagatcctagagagcgtcaatcatatacatcagcacgacatcgtccatcgcgatctgaaaccagaaaacctcctcctggcttcgaagtgcaagggtgctgccgtcaagttagctgatttcggactagctatcgaggtccagggagagcaacaggcgtggttcggatttgccggaaccccagggtatctgagccccgaagtgcttcgtaaagacccctacgggaaacccgtcgacatttgggcctgtggcgtgatcttgtacatcctcctggttggttatccacctttttgggacgaggatcagcataaactctatcagcagataaaggctggggcttacgacttccctagtcccgaatgggataccgtcactcctgaggccaaaaatctcattaaccaaatgctcacaataaatccagcaaagcggatcactgccgaccaggctcttaagcatccttgggtttgtcaaagaagcacggtggcatctatgatgcaccgccaggaaacggtggagtgcctgcgaaagttcaacgcccgaaggaagctcaaaggcgctatactgactacaatgttggtcagccggaatttctcagtggggaggcaatcatcggccccagccagcccagctgcttccgccgccggtcttgctggccaggctgccaagagtctactgaataagaagtccgatggcggtgtgaaggaaccacagaccacagtggtgcacaatgccaccgacggcattaagggcagcacagagtcttgtaacaccacaaccgaagacgaggacttgaaagtacggaaacaagaaatcattaaaataaccgagcagctcattgaagccataaataatggagattttgaggcttacactaagatttgtgacccgggattgacatcgttcgaacctgaagccctcgggaacctcgttgagggtatggacttccacaaattctactttgaaaacttgctctctaaaaacagtaagcctatccacacaacaatcctgaacccccatgtacacgtaatcggagaggacgccgcctgtattgcctatataaggctgacacaatatattgatgggcagggcaggccacggacctcacaaagcgaggaaacaagagtatggcacaggcgagatggcaagtggcttaacgtgcactatcactgttccggcgcccccgccgccccattgcagtag

SEQ ID NO: 110515 - DNA, 1602 bp, synthetic construct
  misc_feature 1..1602: note = Description of Artificial Sequence: Synthetic coding sequence
  source 1..1602: mol_type = other DNA
atggccacgacggcaacatgtacacgcttcactgacgactatcagctttttgaagaactaggaaaaggtgcattttctgtggtgcgcagatgtgtgaagaaaacgagtactcaagaatacgcggccaagatcattaatacgaagaagctgtccgcccgggaccatcagaagctggagcgggaggctagaatttgtaggctgctcaaacaccctaacatagtgcgcctacacgatagtattagcgaagagggattccactacctggtttttgacctcgtcaccggcggtgagctgttcgaagacattgtggctcgcgaatattactcagaggcggatgcttcgcattgcatccaccagatcctggaatctgttaaccacatacatcagcacgatattgttcaccgagacctgaaaccggagaacctcctgttggctagcaagtgcaaaggagccgccgttaagctggctgatttcggtttggcaatcgaggtgcagggagagcaacaagcatggtttggattcgccggtactccaggttacctcagtccagaggtgctgcgcaaagacccctacggtaaacccgtggacatttgggcctgcggggtcatcctatacattttactcgtggggtaccctcctttctgggatgaagatcagcataaactgtatcagcagataaaggccggagcctatgactttccatctccagagtgggacaccgttacgccagaagcgaaaaatttgatcaatcagatgctcaccataaatcccgccaagcgaataactgccgatcaggcgttgaagcacccgtgggtatgccagagatcgactgtggcctccatgatgcacagacaggagacggtagagtgcctgagaaaattcaatgccagaaggaagctgaaaggggctattctcaccacaatgctggtgtcccgtaatttctcagcagccaaatcactgctgaataagaagtcagatggcggagttaaagagccgcagaccaccgtggtacataatgccacggatgggattaagggatccacagaaagctgcaacaccactaccgaagacgaagatctaaaggcagcccctctgaggacaggaaacgggtcgagtgtgcccgaaggtaggtcctccagagataggacggcaccctcagcagggatgcagcctcaaccttcattatgcagctctgcgatgaggaaacaggaaataatcaaaatcaccgaacagctgattgaggccattaacaacggcgatttcgaagcttataccaaaatctgcgatcctgggctgacctctttcgagccagaagcgttggggaatcttgtggagggaatggatttccacaagttctatttcgaaaatctcttatctaagaattccaagcccatccacaccaccatcctcaacccacacgtacacgtaattggtgaagatgctgcttgcatagcctatatacggctcacccagtatatcgacggacagggccggcctaggacctctcagagcgaagaaactcgggtgtggcatcgacgagatggcaagtggctgaatgtgcactaccactgctctggtgcgccggccgcacctctgcaatag

SEQ ID NO: 110516 - DNA, 1677 bp, synthetic construct
  misc_feature 1..1677: note = Description of Artificial Sequence: Synthetic coding sequence
  source 1..1677: mol_type = other DNA
atggccaccacggctacgtgcacaagattcaccgacgattaccaacttttcgaggagctgggaaaaggagccttctcagtggtgaggcgatgcgtgaagaagacatccacacaagagtacgctgctaaaatcatcaacacaaagaaacttagcgcgcgcgaccaccaaaagctcgagcgcgaagcccgaatctgtcgcttattgaagcaccccaatatcgttcggctgcatgactccatttccgaggagggattccactacctggtcttcgacttggtcactggcggcgaactctttgaggatatagttgctagggaatattactctgaagctgatgcgtcacattgtattcatcagatcctcgagtctgtcaaccatatccatcagcacgatattgtgcatcgggatctgaaaccagaaaatctgttgttggcttccaagtgtaagggcgccgcagttaagctggccgatttcgggttggccatagaagtccagggcgagcagcaagcatggttcgggttcgctgggacccctgggtatctcagtcccgaagtgttaagaaaggatccgtatggcaagcccgtagacatctgggcatgcggggtgatcctgtacatactcctcgtgggttatcccccgttctgggatgaggaccagcacaagctttatcagcagattaaggcaggcgcatacgatttcccatcccccgaatgggacacagtaaccccagaggcaaaaaacctgatcaaccaaatgctgacaatcaaccccgccaagagaataacagccgatcaggcccttaaacacccatgggtctgtcagcgaagtactgttgcctcaatgatgcatcggcaagagactgtggaatgcttgcgcaagtttaatgcgcggcgcaaactcaagggtgccatcctgaccacgatgctcgtgtctaggaacttttcggctgctaagtcattgttaaataagaaaagcgacggaggggtgaaaaagcgcaagtctagcagctccgtgcatctgatgccacagagcaacaacaaaaattctcttgttagccctgctcaagaacccgcccctctccagaccgctatggagccccagacaactgtcgtgcacaatgcgactgatgggataaaggggtcaacagaatcatgtaacacgacaaccgaggacgaagacctcaaaggctccgtgcctgagggtcggagctcccgggaccgtaccgcccccagcgcagggatgcagccgcaaccttctttatgtagtagcgcaatgaggaagcaagagatcatcaagattacagagcaactgattgaggcaattaataacggggacttcgaagcctatactaaaatttgcgatccaggtttaacttcttttgaaccagaggcattagggaatcttgtcgaaggaatggactttcacaaattttatttcgagaacctgcttagcaagaactccaagcccatccataccaccatcttgaacccacacgtgcatgttattggagaggacgccgcatgcattgcatatatccgacttacccagtatatcgacggacagggccgaccccggacctctcagtctgaagagacaagagtgtggcacaggcgcgacgggaagtggttgaacgtgcactatcactgttctggtgcaccagccgccccactccagtag

SEQ ID NO: 110517 - DNA, 1767 bp, synthetic construct
  misc_feature 1..1767: note = Description of Artificial Sequence: Synthetic coding sequence
  source 1..1767: mol_type = other DNA
atggctaccactgcaacatgcactcgatttacagacgattatcagctctttgaagagcttggaaagggcgctttctctgtcgtgagacgatgtgttaaaaagacatccacccaggaatatgccgctaagatcatcaatactaaaaaactatctgcaagggaccaccaaaagctcgaaagagaagcaaggatttgtagattactcaagcacccgaacatagtacggttgcacgactcgatttctgaggaaggctttcactacttagtctttgacttggtgacaggcggggagctgttcgaggatatcgtggcccgcgaatattattccgaagcagacgcttcacattgcatccatcaaatactggagtctgtgaaccacatccatcagcacgacattgtgcacagagaccttaagcctgaaaatttgctgctcgcatctaaatgcaagggagctgctgtgaagttggctgacttcggcctggccatagaagttcagggagaacaacaggcctggtttggatttgctgggacaccgggttacctgtcacccgaagtgctgcggaaagacccttacggaaagccagtggacatatgggcttgcggggttatcttgtacattctgttagttggttacccacccttttgggatgaggaccagcacaagctctatcaacagattaaagctggtgcttatgacttcccttcacctgaatgggacacagttaccccagaggccaagaatctaatcaaccagatgttgacaataaaccctgcaaagcggattactgccgatcaggcgctgaagcacccatgggtgtgccagcggtccaccgtcgcttccatgatgcataggcaagaaactgtggagtgccttcgaaagttcaacgctagacgaaagttgaaaggagcaatccttacaacgatgctggtgtcacgtaacttcagtgtgggaagacagtcctcagctcccgccagtcccgcagcctccgccgctggtcttgctggacaggctgcaaagagtctgctgaataaaaagagcgacggcggggtgaagaagcgcaaatctagcagtagtgtccacctcatgccacagtctaataataagaacagtctggtctccccagcgcaggaacctgccccccttcagacagccatggaacctcagaccacagtggtccataacgccactgacggtattaagggctccacagaatcctgcaacaccaccacggaggatgaggatctaaaggctgcccctctgcggacaggtaatggaagctcagttcccgagggacgctcatctcgagacaggactgctccatccgctggaatgcagccccaaccttccctgtgttcatcggctatgagaaagcaggagataataaagattacagagcagctcatagaggccattaacaatggtgactttgaggcctacacgaaaatatgcgaccccgggttgacaagttttgaaccggaggccctgggtaatcttgtggagggtatggacttccacaagttttatttcgagaatctgctctccaaaaacagtaaacccattcatacgacgatcctgaatccacatgtccatgtgatcggcgaggacgcggcgtgtatcgcctatatcaggttgacacagtacatagatgggcagggcagaccccggacctcccagtctgaagagaccagggtgtggcatagacgcgatgggaaatggctcaacgtgcactaccattgttcaggggccccggcagctccactccagtag

SEQ ID NO: 110518 - DNA, 1362 bp, synthetic construct
  misc_feature 1..1362: note = Description of Artificial Sequence: Synthetic coding sequence
  source 1..1362: mol_type = other DNA
cgtctcctcaagcaccctaacatcgtcagattgcatgacagtatatccgaggaaggcttccactacttagtgttcgacctggtgacaggcggcgaactttttgaggatatcgtggctagggagtactactcagaggcggatgctagccattgtattcatcagattctcgagagcgtaaatcacattcaccagcatgacatagtgcacagggacctgaaaccagagaacctcctgctcgccagcaagtgtaaaggcgccgcggtaaaactcgctgatttcggattagcgatcgaagtgcaaggcgaacaacaggcttggttcggctttgctggaactccaggctacctaagtccagaggtccttcgcaaggacccatacggtaagcctgtagacatctgggcttgcggcgtcattctctacatccttctcgtcggctacccccctttctgggatgaagaccaacacaagctgtaccagcagatcaaagctggcgcttacgactttcctagccctgaatgggacaccgttaccccggaggcaaagaacctaataaaccaaatgcttacgattaacccggcaaagcggattaccgccgatcaggccctgaaacacccttgggtctgccagcggagtaccgtggctagtatgatgcatcgacaggagacagtcgaatgcctgagaaaattcaacgctcggcggaaattgaagggtgcgattctcaccaccatgttggtgtccagaaacttctcggccgcaaagtccctgcttaataaaaaatcggatgggggggtgaagccccaatccaacaataaaaactctctcgtatcacctgctcaagagccagccccccttcaaactgccatggagccacagacaacagtggtacataacgccactgacggcatcaaaggcagcacagagtcctgcaacacaacaacagaggatgaggacctcaaggtgagaaaacaggagatcatcaagatcacggagcagctgattgaagcgatcaacaatggtgacttcgaggcatacacgaagatctgtgatccaggtctgacaagctttgagccagaggccctaggaaacctggtggaaggtatggatttccataaattttacttcgagaacctcctgtccaagaatagcaagcctattcataccacgattttgaacccgcacgtgcatgtcatcggtgaagatgctgcctgcatcgcatacatccgcctgactcagtatatcgacgggcaggggaggccccgaacgtcccaatcagaagagacccgcgtctggcatcgccgcgacggcaagtggctgaacgtgcactaccattgcagtggtgctccagccgccccactgcagtag

SEQ ID NO: 110519 - DNA, 1008 bp, synthetic construct
  misc_feature 1..1008: note = Description of Artificial Sequence: Synthetic coding sequence
  source 1..1008: mol_type = other DNA
tagtatcagcagatcaaggctggggcttacgacttcccatccccggagtgggataccgtcaccccagaagccaaaaatctcattaatcagatgttgacaatcaacccagccaaaagaataaccgccgaccaggcgctcaaacacccctgggtctgccagcgttcaaccgttgcatccatgatgcaccggcaagaaactgtggagtgccttcgaaaattcaatgcccgacgcaagctgaagggcgctatcctcaccacaatgttggtcagccggaattttagcgccgcaaagtcactgttgaataagaagtccgacggtggggtaaaacctcaaagcaataacaagaatagtctggtgtccccggctcaggagcccgctccgttacagacggctatggagccacagacgacagtggtgcacaatgctacagacggcatcaaaggcagtaccgagtcttgcaatacaacgaccgaagatgaagatctcaaagccgctccccttagaacagggaatggctcctcagtacccgagggtcgttcctcccgagaccggaccgccccatccgccggaatgcagccacagcccagcctgtgttcctcagccatgaggaagcaagagatcattaagattaccgagcagttgatcgaggctatcaacaatggcgacttcgaagcctacaccaaaatttgtgatcccggcttgaccagctttgagcctgaagccctgggcaacctggtggagggaatggacttccacaagttctactttgaaaatctgcttagtaaaaatagcaagcctatccataccacgatcttgaatccccacgtgcacgtgatcggcgaggatgctgcttgcatagcttatattaggctgacccaatatatcgatggccagggacgaccccgcacgagccagagtgaagaaacacgagtatggcaccggcgagatggaaaatggctgaatgtgcactatcattgctcaggagcccccgcggctcccctgcagtag

SEQ ID NO: 110520 - DNA, 543 bp, synthetic construct
  misc_feature 1..543: note = Description of Artificial Sequence: Synthetic coding sequence
  source 1..543: mol_type = other DNA
atggctactaccgccacatgcaccagattcactgacgactaccaactgttcgaggagctagggaaaggcgccttttccgtcgttcgcagatgcgtgaaaaagactagcactcaggagtacgctgccaagatcataaatactaagaaactgtcagcacgggatcatcagaagctggagcgggaagctcgcatttgcaggctgcttaaacaccccaacatcgcaacgatccacggtggcattcacgatgcaagcagtggcgattgcggggtgtttgcgcaagtccagtgccccgaaaaaactgaggggtgccacccgcacgaccacgcatgcctgcaggagctccttagctgtcagaagcccatagagcaagaggtggggtggcgatgccaggcgactgagcagcagcagaaacagtctcgcaagccaagccctcgcgcccgggctctggctgacggacacggagcgacaaatcattgtgggacccagagatatcgatgggaccagggcctgcatcgagagctccagcatcatcacaggcgctag

SEQ ID NO: 110521 - DNA, 240 bp, synthetic construct
  misc_feature 1..240: note = Description of Artificial Sequence: Synthetic coding sequence
  source 1..240: mol_type = other DNA
atgagcgagatactgccatacagtgaggacaagatggggcgattcggggccgatcccgagggaagcgatctctctttctcatgtcggttgcaggatacaaactcattcttcgccggtaaccaagccaagcgacctccaaagctcggccagattggaagggcaaaaagagtggtgattgaggacgaccgtattgatgacgtgttgaagggcatgggagagaagccaccaagcggtgtgtag

SEQ ID NO: 110522 - DNA, 1422 bp, synthetic construct
  misc_feature 1..1422: note = Description of Artificial Sequence: Synthetic coding sequence
  source 1..1422: mol_type = other DNA
atgctcaaggtcacagtaccctcctgttccgcatcctcatgtagttcggtgaccgccagtgcggcaccaggcacagccagcttagttccggattactggattgacggctccaaccgggacgcgctctctgacttttttgaagtggagtctgaactgggacggggagccacctccatcgtgtaccgctgcaagcagaaggggacgcagaaaccctacgccctaaaggtcttaaagaagaccgtcgacaaaaagatcgtgcgcactgagatcggcgttttactgaggctctcacacccgaacatcattaaactaaaggagattttcgaaactccgacagagattagccttgtactcgagttggtcacaggtggcgagctctttgacaggatcgtcgagaaaggctattactctgagagggatgccgcagatgcagttaaacagatcctcgaggccgtcgcatacctgcatgaaaatggcattgtccaccgggacctgaaacctgaaaaccttctttatgccaccccggcccccgatgcacccttaaagattgccgatttcggtctgagcaagatcgtggaacaccaagtgctgatgaagactgtctgcggcacgcctggttactgcgcccccgaaatactcagaggatgtgcttatggcccagaagtggacatgtggagcgtgggaattatcacatacattctcctgtgcggcttcgagcctttctacgatgagcgaggcgatcagtttatgtttaggaggattttgaattgcgagtactacttcatctctccttggtgggacgaagtgagcttaaacgcaaaagatctggtgcgcaagcttatcgtcttggatcctaaaaaaaggttgaccacgtttcaggcattgcagcatccctgggtgacagggaaggcggccaacttcgtccacatggatacagcccaaaagaagctgcaggaatttaacgctagacggaaactaaaggctgcagtgaaggccgttgttgccagctctaggcttggctctgcaagcagcagccacggctctattcaggagtctcacaaagctagtagagatccgtcgccgattcaggacggcaacgaagacatgaaagcaatccccgagggtgaaaaaattcagggcgacggggcgcaggccgcagtgaaaggagcacaggcagagctgatgaaagtgcaggctctggaaaaagttaagggcgcagatatcaacgcagaagaggcccctaagatggtgccgaaggccgtcgaagatgggattaaggttgccgatcttgaactagaggaagggctagctgaggaaaaactcaagacagtcgaagaggcagccgcaccccgtgagggccaggggtcttccgctgtcggctttgaagtcccccagcaggatgtaatcctgcctgaatactag

SEQ ID NO: 110523 - DNA, 429 bp, synthetic construct
  misc_feature 1..429: note = Description of Artificial Sequence: Synthetic coding sequence
  source 1..429: mol_type = other DNA
atgttgaaggtaactgtgccaagttgctcggcttcctcatgtagttctgtcacagcatcggccgcccctggtacagcaagcctcgttcccgattattggattgatggatctaacagggacgcacttagcgatttctttgaggtggagagcgaactgggccgtggcgcaacatccattgtctatcgttgcaagcagaaaggcacacagaagccctatgcattaaaagtactcaaaaagaccgtcgacaaaaaaatcgtcagaacagagattggcgtcttgctccgcctgagccacccaaatatcatcaagctgaaggagatctttgagacacccactgagatatcactggtcctggagctcgtgacaggtggggagctgttcgaccgcattgtagaaaaaggttactattctgagcgcgacgccgcgtag

SEQ ID NO: 110524 - DNA, 1422 bp, synthetic construct
  misc_feature 1..1422: note = Description of Artificial Sequence: Synthetic coding sequence
  source 1..1422: mol_type = other DNA
atgctcaaagtcaccgtcccctcctgcagtgcatctagctgtagctccgtgacggcctccgccgctccagggaccgcctccctcgttccggactattggattgacggatccaatcgggatgctctgtcagacttcttcgaggtagagagcgaactgggtaggggcgcaaccagcattgtgtacaggtgcaaacagaagggtacgcagaagccttatgctctcaaggtgctgaaaaagaccgttgacaaaaagattgtccgcactgagataggagtgttgctgcggctgagtcaccccaatataattaagcttaaagagatctttgaaacacccacggagatctctctagtactggagttggtcaccggaggggagctgttcgaccgcatcgttgagaaaggctactacagtgaaagggacgccgccgacgctgtcaaacaaatcctggaggctgtcgcttatctgcatgaaaatggcattgtgcatagagacctgaaaccagagaatttactttatgccactcctgcccccgatgcccctctcaagatcgctgacttcggacttagcaagatcgtggagcaccaggttctaatgaagaccgtgtgcggaacacccggttattgcgccccagagatcctgcggggctgcgcttacgggcccgaggtggacatgtggtctgttgggatcataacctacatactcctgtgtggattcgagcccttttacgatgagaggggagaccagttcatgtttcggcgcatcctcaattgcgagtactatttcatttccccctggtgggatgaggtgtctctgaacgctaaggacctggttagaaagttaatcgtcctcgacccaaaaaagagactgaccactttccaagcactgcaacatccgtgggtgactgggaaggccgccaatttcgtgcacatggacacagcccagaagaaactacaggaatttaatgcgaggcgcaaactgaaggctgccgtgaaggccgtggtggctagttcaaggctcggaagcgccagctcgtcccacggcagtattcaagaatcacacaaggcttcgagagatccatcccctatccaggacggcaatgaggacatgaaggctatcccggaaggcgaaaagatccagggcgatggtgcccaggccgctgtgaagggagctcaggcagagcttatgaaagtccaagccctggagaaggtgaagggggccgacatcaacgccgaggaggcacctaagatggtacccaaggccgtcgaggatggaatcaaggtggccgacttagaactcgaagaggggttggctgaggaaaaattgaaaaccgtagaggaagcggccgctccacgcgaaggacagggctccagcgctgtgggcttcgaagttccccagcaagatgtgatactgccagagtactag

SEQ ID NO: 110525 - DNA, 2766 bp, synthetic construct
  misc_feature 1..2766: note = Description of Artificial Sequence: Synthetic coding sequence
  source 1..2766: mol_type = other DNA
atggcagatgacgacgtccttttcgaagacgtgtatgagctgtgtgaagtgatcggtaaagggccattcagcgttgtgcgaaggtgtattaaccgagagacaggacagcagtttgccgttaaaatcgttgacgtcgccaagttcaccagctcccctggtttatcaacggaagacctaaagagggaggcgtcgatttgccatatgctgaagcacccacacatcgttgagctcctggagacttatagtagcgacggtatgctgtatatggtgtttgaatttatggacggagccgatttgtgtttcgaaatcgtgaagcgcgcggatgcgggatttgtgtattcagaggccgtagcaagtcattatatgcggcagattcttgaagcattgagatactgccacgataataacataatccatcgcgatgtcaaaccacactgtgtccttttggcgtctaaagaaaactctgctccggtgaagttgggtggcttcggagtagctatccagctgggagagagtgggctggtggcaggaggccgtgtaggaacaccccatttcatggccccggaggtggtgaagcgagagccatatggcaaaccagtggacgtgtggggctgcggagtcattctctttatcctgctctccggttgcctacctttttatggaaccaaggagaggctgtttgaagggatcatcaaaggcaagtacaagatgaatccgagacagtggtcccatatttccgaaagcgccaaggatctggtacgtagaatgctgatgctcgacccagcggaacgcattaccgtctacgaagccttgaaccacccgtggctcaaagaacgggacagatatgcttataaaattcaccttccagagacagtcgagcagctaagaaaatttaacgctcgccggaagcttaagggtgctgtgcttgcagccgtgagttctcataaattcaatagcttttacggagatccaccagaggaactcccagacttctcagaggatcccacatcttctgttttgttgatagtgtctcgggctgtcagccaggtactcgactccctggaggaaatccatgccctcactgattgttctgagaaagatctcgatttcttgcatagcgtgtttcaagaccagcatcttcacactctcttggatctgtacgacaaaatcaacacaaagagttccccccagatcagaaatcctccatctgacgccgtccagcgcgcaaaggaggtcctggaagagatctcgtgctacccagagaacaacgacgctaaagagttgaaaaggattctcacacagccccactttatggcactgctccaaacccacgacgtggtggcccacgaagtgtatagcgacgaggccctgcgggtcacacctccacccacctctccttatctgaacggggattccccagaatctgccaacggcgatatggatatggaaaacgtcacaagagtgaggctggtacagtttcagaagaataccgatgaacctatgggcattaccctgaagatgaacgagttaaaccattgcattgttgcccgtatcatgcacggcggcatgatccaccgccagggaacactccacgtcggcgatgaaatcagagagatcaacggaatctcggtggccaatcagactgtggagcaactgcagaagatgcttagggagatgcgggggtctattaccttcaaaatcgtgccttcgtaccgtacacaatcatcatcatgtgagagggattcccccagtacatctagacagtctcccgcaaatggacatagctccacaaataactcagtgtccgatctgccctcgacaacccagccaaaaggaaggcagatttacgtgagggcacagtttgaatatgatccagcaaaggacgacctgattccatgcaaggaggctggaataagattcagagtcggggacatcatccaaataattagcaaagacgaccacaactggtggcagggaaaacttgagaactctaaaaatggaactgcaggcttgatccccagccctgaactgcaagagtggagagtagcctgcattgcaatggagaaaaccaagcaggagcaacaggccagctgcacttggtttggcaaaaagaagaagcaatacaaagataaatacctggctaaacacaatgctgacttggtgacatatgaggaggtcgtcaagcttccggcgtttaagcggaagactctggtcctgcttggggcccacggggtcggcagacgtcacatcaaaaatactctcatcacgaaacaccctgaccgcttcgcataccccatccctcacactacccgtcctccaaaaaaggacgaagaaaatggaaagaattactactttgtttcccacgaccagatgatgcaggacatctccaacaatgaatacttggagtatggcagtcacgaagatgcgatgtatggcactaagctggagacaattcgcaagatccacgaacaggggttgatcgcaatcctcgatgtggagccacaggccttgaaggtgctgaggacggcagagttcgccccgtttgttgtgttcatcgcggcccccaccataacccctgggttaaacgaagatgagagcctacaaagactccagaaggagtccgatattcttcagaggacatacgcacactactttgacctcacgatcatcaacaacgaaatcgacgagaccattcgacacctcgaagaagccgtggaattggtgtgcaccgccccacaatgggttccggtgtcttgggtgtattag

SEQ ID NO: 110526 - DNA, 2730 bp, synthetic construct
  misc_feature 1..2730: note = Description of Artificial Sequence: Synthetic coding sequence
  source 1..2730: mol_type = other DNA
atggccgacgatgacgtcttatttgaagatgtgtatgaattatgtgaggttatcggaaagggaccattctcagtggtgcggcggtgtataaacagagaaacggggcaacagtttgctgtgaaaatcgtggacgtagcaaaattcacaagctcacctgggctcagtactgaggatctgaagcgtgaagctagcatatgtcatatgttaaaacatccgcatatcgttgaacttctggaaacttactcttccgacgggatgctgtacatggtgtttgagttcatggatggtgcggatctctgttttgagatcgtaaaacgcgctgatgccggctttgtgtattccgaagccgtcgctagccactatatgaggcagatcctggaggccctgcggtattgtcacgataataacattattcatcgcgatgtgaaaccccattgtgtcttgctggcctcgaaagaaaactcagcccccgtcaaactgggtggattcggagtcgctatccagcttggggaatcagggctggtcgctggaggaagagtgggaactcctcactttatggcccccgaagtagtaaagagagagccttacggcaagcccgtggacgtgtggggatgcggagtcattctttttatacttctgtccggatgtctgcccttttacggaaccaaggagcggctgtttgagggaatcattaagggcaagtacaagatgaacccacgacagtggagccacatctctgaatccgccaaggacctcgtccgcaggatgttgatgctggaccctgctgagcggatcacagtttatgaggccctaaatcacccctggcttaaagagcgggaccgatacgcatataagattcatctgcctgaaactgtggagcaactgcgcaagtttaacgcacgcaggaagctgaagggagctgtgctcgcagcagtgtctagccacaagttcaactcattttacggggaccccccagaagaacttccggatttcagcgaggatcctacttctagcgtcttgctcatcgtaagtagagccgtttcacaggtgctggatagcttggaggagatccatgcactcaccgattgcagcgagaaggatctagacttcctccactctgttttccaggaccagcacctgcataccctgctggatctgtacgacaaaattaacacaaaaagctctccacagatcagaaatcctccttctgacgctgtgcagagagctaaggaagtcctggaagagatctcatgttatcccgagaacaacgatgccaaagagttaaagcgcattctgacccagcctcatttcatggcactgttacagacccatgacgtcgtggctcacgaagtctatagcgacgaagctctgcgtgtgaccccaccccctaccagtccttaccttaacggggatagtcctgagtcagcaaacggagatatggatatggagaacgtcacaagagtcaggcttgtccaatttcagaagaataccgatgaaccaatgggaatcaccctgaaaatgaatgaactgaaccactgtatagtggctcgcataatgcacgggggaatgattcacagacaaggcaccctgcacgttggagatgagatacgcgagatcaatggtatctccgtggctaatcagaccgtggagcagctgcagaaaatgctgcgggagatgagaggcagcataacattcaaaattgtaccctcctaccgcacccagtcctcctcgtgcgagcgcgatagtcctagcacaagtaggcaaagcccggcaaacggtcacagctccaccaataattccgtctccatctatgtaagagcgcagttcgaatatgaccctgccaaagacgatctgataccttgcaaagaggcaggaattcgcttccgagtgggcgacatcatccaaatcatctccaaagacgatcacaattggtggcagggtaagctggagaactccaaaaacggcacagccgggttgattcctagccctgaattgcaggagtggcgagtagcctgcatcgcgatggaaaagactaaacaggagcagcaagcatcctgcacatggtttgggaagaagaaaaaacaatataaagacaagtacttagccaagcacaatgccgatctggtaacctacgaggaggtggtgaagcttccggcctttaaaagaaagaccctggtgctgctgggtgcacacggcgttgggaggaggcatattaaaaatactcttatcaccaagcacccagatcgtttcgcctatccaatcccacatactacccgcccaccaaaaaaagacgaagagaacggaaagaactattactttgtgtcccacgaccaaatgatgcaggacatcagtaacaacgaatatttggagtacgggagccacgaagacgccatgtacgggacaaaactcgaaactattcgaaaaatacacgaacagggattgatcgccattcttgacgttgaacctcaggcactgaaagtcctgagaacggcagaatttgcacccttcgtcgtctttatcgccgcccctacaataacacctggcctgaatgaagacgaatctctacaacggctgcaaaaggagagcgatatcctgcagagaacttatgcgcactacttcgacctgaccattattaacaatgaaatcgatgagactatccgccatctggaagaagctgtggaactggtttgcactgcccctcagtgggttcccgtctcctgggtctattag

SEQ ID NO: 110527 - DNA, 1773 bp, synthetic construct
  misc_feature 1..1773: note = Description of Artificial Sequence: Synthetic coding sequence
  source 1..1773: mol_type = other DNA
atggccgacgatgatgtcttatttgaagacgtctatgagctctgcgaagttatcggaaaaggcccattttctgtcgtgcgtcgctgtatcaaccgcgaaacaggtcagcagttcgccgtaaagatagtagacgttgccaagtttaccagttcaccggggttatccactgaggacctgaagcgggaggcaagcatctgccatatgcttaagcaccctcacattgttgaattgctggagacctattcaagcgatggcatgttgtatatggtgtttgagtttatggatggggcggatctgtgcttcgagatagttaaaagagcggacgctggttttgtgtactcagaagcagttgcttcccactatatgagacagatactcgaagctttgcgctactgccatgataacaatataattcatagagacgtgaagccacattgcgtgcttctggcttccaaggagaattccgcacctgtgaagctgggcgggttcggggtagctattcagctcggtgaaagtgggctggtggccggtggccgcgtcgggacaccccacttcatggcgccagaagtagtcaaaagggagccgtatggtaagccagtggacgtgtggggctgtggtgtcattctgtttatactgctcagtgggtgtctcccattctacggcacgaaagagcgcctgtttgaaggaatcatcaaggggaaatacaagatgaacccgaggcaatggagccacatctccgaatcggctaaggatctggtgcgacggatgttgatgctggatccagcggaacgcatcacagtgtacgaggcactgaatcacccatggcttaaggagcgggacagatatgcctataagatccacctcccggagacagtagaacagctccgcaaatttaacgcacgacgcaagttaaagggcgctgtactggccgctgtttcttctcacaagtttaattctttttatggtgacccgccggaagagttacctgatttttccgaagatcccacgtcatcaggactgctcgccgccgagagagccgtctcccaggttttggatagcttggaggagattcacgccctgacggattgcagcgagaaagacctggacttcctgcactctgttttccaagaccagcatctgcacaccctgttggatctgtacgataaaattaacacaaagagcagcccccaaatcagaaacccacccagtgatgctgtgcagcgagctaaagaagtgttggaggaaattagctgctaccccgaaaataatgacgccaaagagcttaagaggatcttgactcaaccacattttatggccctgcttcagacacacgacgtcgtcgctcacgaggtctacagcgatgaagcactccgggtgacaccacccccaacttccccatacctgaatggggacagccccgagtctgctaacggcgatatggatatggaaaacgtgacccgggtcaggctggtacagttccagaagaatacggatgaacctatgggaatcacgctcaagatgaacgaactgaaccactgtattgtcgccaggataatgcacggcgggatgattcatcggcagggcactttgcatgtaggagatgagatccgcgagattaacggaatttccgtcgccaaccagacagttgaacagctccagaaaatgctgcgcgaaatgcgaggctcaattaccttcaaaatcgtcccgtcatatcgcacgcaatccagttcatgcgaagtcatgacccttactaatcatccacacctgttgtag

SEQ ID NO: 110528 - DNA, 2730 bp, synthetic construct
  misc_feature 1..2730: note = Description of Artificial Sequence: Synthetic coding sequence
  source 1..2730: mol_type = other DNA
atggccgatgacgacgtcctcttcgaagacgtgtacgaactgtgtgaagtcatcggaaagggcccgttctctgttgtgaggcggtgtatcaacagagaaactggccagcaatttgcagtcaaaatcgtagatgtggccaagttcactagctcccccggcttgagcacagaagatctgaagagggaggcctccatctgtcacatgctgaagcatccccatatagtggaattgctggaaacatattcgagcgatggcatgctatatatggtgttcgagttcatggatggggcggacttgtgtttcgagatcgtgaaacgagccgacgccggttttgtgtactctgaagctgttgcctctcactacatgagacagatcctcgaggctcttagatattgccatgataacaacataatccaccgggacgtgaaacctcattgcgtgctgcttgccagcaaggagaattctgctcctgtcaagctaggggggttcggagtggccattcaactgggggagtccgggctagtggctggggggcgagtgggcacaccacatttcatggctcctgaagtggtaaagagggagccctatggcaaacctgtcgatgtttggggttgtggagtgattctattcatactcctcagtggttgtctgcccttctatggcactaaagagcggctcttcgagggcattataaagggaaaatacaaaatgaacccccgccagtggtcgcacatctccgagtcagccaaagatctagtgcggcgaatgctgatgttggaccctgcagagaggatcaccgtctatgaagcgctaaaccatccatggctcaaggagcgggatcggtatgcttacaaaatccacctaccagagaccgttgaacagctccgtaaattcaatgcacgacgcaagttgaagggcgcagtgttggccgctgtttcatcccacaaattcaactcattttatggggaccctcctgaggaactaccggatttctctgaggacccaacatcgagcggtcttttggccgcagagagagccgtgagccaggtgcttgactccctggaagaaatacatgctctgacggactgctctgaaaaggacttggactttctgcatagcgtatttcaggaccaacacctgcacaccctgcttgacctgtacgacaagattaacacaaagtcctctccccagattaggaatcccccctccgatgccgtccaaagggctaaggaggtcttggaagagattagttgttaccctgaaaacaatgacgccaaggaactgaaacgtatactcactcagccccatttcatggccctcctgcaaacccatgacgttgtggcacatgaggtgtatagtgacgaagccctgcgagtcaccccccctcccacgtccccctacctgaacggagattcccctgaatctgccaatggcgatatggatatggagaacgttacgcgggtacgcctggtgcagtttcagaaaaataccgatgaacccatgggcatcacgctaaagatgaatgaactgaaccattgtattgtggctaggataatgcatggcggcatgatacatcgccagggcaccctgcatgtcggagacgagatccgcgagattaatggaatttcggtggcaaaccagacagtggagcagctgcagaagatgcttagagagatgaggggaagcattacgttcaagatcgtcccaagctaccggacgcaatctagcagctgcgaacgcgacagcccaagtacttcaagacagagtcctgcgaacgggcactcttctaccaataactccgtctcaatttacgtcagggcgcagtttgagtacgaccctgccaaggacgacctgatcccatgcaaggaggctggcatcagattcagagttggtgacatcatacagatcattagtaaggatgaccataattggtggcagggtaagttggaaaattccaagaacgggactgcaggcttgattccgtcccccgagctgcaggaatggcgcgtcgcctgcattgccatggagaagactaaacaggagcaacaggctagttgcacttggtttgggaaaaaaaaaaagcaatacaaagacaagtaccttgcaaaacataatgccgacctggtgacgtacgaggaggtagtgaagttacctgcctttaagcgaaaaactctggtgctgctcggtgcccacggcgtaggccgccgccatatcaaaaacactcttatcacaaagcacccagatcgattcgcatacccgatcccacataccacacggcctcctaaaaaggacgaggagaatggcaagaattattatttcgtaagccatgatcaaatgatgcaggatatcagcaataacgagtatcttgagtatggcagccacgaagacgccatgtacgggaccaagctcgaaaccatccggaaaatccacgagcagggcctaattgcaatcttggatgtggaacctcaggcactgaaagtgttgaggaccgctgagttcgcgccttttgttgtgtttattgcagctcctactattacacctgggctcaatgaagacgagtctcttcagcgacttcagaaagagagtgatattttgcaacgaacctacgcacactatttcgacctcacaattataaacaatgagatcgatgagacaattcgccacctagaggaagccgttgagcttgtgtgtacagcacctcaatgggttcccgtgtcatgggtctactag

SEQ ID NO: 110529 - DNA, 2781 bp, synthetic construct
  misc_feature 1..2781: note = Description of Artificial Sequence: Synthetic coding sequence
  source 1..2781: mol_type = other DNA
atggcagatgacgacgttctattcgaagacgtctacgagctttgtgaggtcatcggaaaaggccctttttcggtggtgagacgctgcattaaccgagaaaccgggcaacagtttgcggtgaaaatcgtggatgtggccaaattcacaagcagccctggattatcgaccgaagacctcaagcgagaggcctcgatctgtcacatgctgaaacacccacacatagtagagctcctcgaaacctattcaagcgacggaatgttgtacatggtgttcgagttcatggacggagccgatctgtgttttgaaatagtcaaaagagccgatgccggcttcgtttattccgaggccgtagcaagccactacatgcggcagatactggaggccttgcgctattgtcatgataataacatcattcacagagacgtcaaaccccactgtgtactgctcgctagtaaagagaattcagcccctgttaagctcggggggtttggggttgccatacaattgggcgagagcggcctcgtagctggcgggcgtgtgggaactccacattttatggctcccgaggtagtgaaacgcgagccttatgggaaacccgtggatgtttggggatgtggtgtcatactgtttatcctgctgagcggctgcctccccttctacggcacgaaggagagactgttcgaaggcattataaaaggaaagtataagatgaatcctagacagtggtcacacatctccgaatcagcgaaggatctggtgcgacgtatgctgatgttggatcctgcggagcgcattactgtctatgaagcacttaaccatccgtggctgaaggagagagacagatatgcttataagatacacttgccagaaacagtggagcaactcagaaagttcaatgcccgacggaagttgaagggcgctgtgctggcagcggtgagcagccataaattcaattccttctatggagatccccctgaagaactccccgatttctcagaagatcccacgtcaagtggccttttagcagccgagagggctgtgtcacaggtgctcgactcactggaggaaatccacgccctgaccgattgttctgagaaggatttggatttcctgcattcagttttccaggatcaacatctgcacactctgctggacctctacgataagatcaatacgaaatcctcgccccagatccggaaccctccgagtgacgctgtgcagagagccaaagaggtgctcgaggaaatatcatgttaccctgagaataacgatgccaaagagctcaaaagaattctcacacagccccattttatggcccttttgcaaacccatgatgtggtcgctcatgaggtgtattccgacgaggcacttagggtgacgcccccacctacatcgccatatctaaacggtgattctcccgagtccgctaatggggacatggatatggaaaacgttacccgagtgcgtctggtgcagttccagaagaacacagacgagcccatgggcataaccttgaagatgaacgaacttaatcactgcatagtggcgcgcattatgcatgggggaatgatccacaggcaagggaccctgcatgttggcgacgagattcgagagatcaacggcatctccgtggctaatcagaccgtggaacagctccagaaaatgctaagagaaatgagaggctctatcacttttaagatcgtgccttcttatagaacacagagttcaagctgtgagagagacagccctagtacaagcagacagagtcccgcaaatggacactcaagcaccaacaattctgtgagtgacctgcccagtacaacccagcctaaagggaggcagatttacgtgagggcgcagtttgagtacgatcctgcaaaagatgatcttatcccgtgcaaggaggccggcattagattcagagtgggtgacattatacagattattagtaaggatgatcacaactggtggcagggaaagttggaaaacagcaagaacggcacggctggtctcattcccagtcctgaactgcaagaatggcgggtagcttgcatagcaatggagaaaacaaaacaagagcagcaggctagttgcacatggtttggcaagaaaaaaaagcagtataaagataagtacctggctaaacacaacgctgttttcgatcagcttgatctggttacatacgaagaagtggtcaagttgcccgcattcaaacgcaagacattggtgctgctcggtgcacatggagtcggacgcaggcatattaaaaataccttgattacgaagcaccccgatcgctttgcatatcctataccccatacgactagaccccctaaaaaggacgaggaaaacggcaagaattactatttcgtgtcccatgaccagatgatgcaggacatcagcaataacgagtatttagagtatggttcccacgaagatgctatgtacggcactaaactggagacaatcaggaaaatccatgaacaggggctgatcgctatactggacgtagagcctcaggcattgaaggttttgcgcacagcagagtttgcgccttttgtcgtgttcattgccgctcctacaatcaccccagggctgaatgaagacgagtcccttcaaaggttacagaaagaatctgacatactgcaacgaacctacgcgcattattttgatctgacaattataaataacgagatcgatgagactattagacacctggaggaagcagtcgagttggtgtgcactgcaccacagtgggtcccggtgtcctgggtgtattag

SEQ ID NO: 110530 - DNA, 2766 bp, synthetic construct
  misc_feature 1..2766: note = Description of Artificial Sequence: Synthetic coding sequence
  source 1..2766: mol_type = other DNA
atggccgacgacgatgtgctgtttgaagacgtgtacgagctgtgtgaggtgatagggaagggtccattctctgttgtgcggagatgcataaacagggagacaggacagcagtttgcagtcaagatcgtcgatgtagccaaatttacctcctcgcctggcctgagcaccgaggacctaaaacgtgaagcatccatatgccacatgcttaagcatccgcacatcgtggagttgttggagacctactcatctgatggcatgctctatatggtgttcgagtttatggacggcgcagatttatgctttgagattgtgaaacgcgcagatgccggatttgtctacagcgaagcggtcgccagccattacatgcgccagattctcgaggctctgaggtattgtcacgataacaacatcatccaccgcgacgtcaagccacactgtgtcttactagccagcaaagagaactctgctccggtaaagctgggtggtttcggtgtggcaatacagttgggcgagtctggcctggtggctggtggccgcgtgggtacacctcattttatggctccagaggttgtgaagcgcgaaccttacggaaagcctgtggatgtgtgggggtgcggggtcattctattcatcctgctgagtggctgtcttcctttctatgggactaaagagaggttattcgagggtattattaaggggaagtacaaaatgaacccgcggcagtggagccacatctccgagtccgccaaagacctagtccgtagaatgctgatgctcgaccccgccgagcggatcacagtgtacgaagctctgaatcatccatggctcaaggaaagggatcgctacgcctacaagatccacctgcccgaaacagtcgaacagttacgcaaattcaacgcacggcgcaaactgaaaggcgctgtgctggctgctgtctccagccataagtttaactcattttacggcgaccctcctgaggaactgccagatttcagtgaagacccgacctcatccggactgctagctgccgaaagagcagtctcccaggtgctagactcactagaggagatccatgctctgaccgattgcagtgagaaggacctcgattttctgcacagcgtgttccaggatcaacatctgcacacgctcttagacctatacgacaagattaacaccaagtcctcaccacagatcaggaatcccccttccgacgccgtacagcgtgctaaagaagtgctcgaggagatctcatgctacccagagaacaacgacgcaaaggagctgaaaagaatcttaactcaaccccacttcatggcgctgctccagacccacgacgtggtggcacacgaagtgtactcagacgaggccttacgggttacccccccgccgacctctccttatctgaacggcgactcgccggaaagcgccaatggggatatggacatggaaaatgttacaagggttcgtctcgtccagtttcagaaaaataccgacgagcccatggggatcacattgaagatgaatgaacttaaccattgtattgtcgcccggataatgcatggcggcatgatccatagacagggaaccctacacgtgggagatgaaatccgcgagatcaatggaatctctgtggctaatcaaacagtggagcagctgcagaagatgctgcgtgaaatgagagggtccattacctttaaaattgtgccttcataccgcacgcagtcctcgtcttgcgagagagattcaccgtcgacgtcaagacagagccctgccaatggacatagttctacaaataacagtgtcagcgatctccctagcaccacccagccaaagggacggcagatctacgtccgggctcagtttgaatacgatccagcaaaggacgatcttatcccgtgcaaggaggcagggatcagatttcgggtgggggacatcatccagattatttccaaagacgaccacaactggtggcaaggtaagctggaaaactccaaaaacggtaccgctggcttgatcccaagccccgagctgcaggagtggagggtagcctgtatcgccatggagaagaccaaacaggagcagcaggcatcatgcacatggtttgggaaaaagaagaagcaatataaggataaatacttagcaaaacataacgccgacctcgtgacctacgaagaggtggttaagctgccggcattcaaacggaaaaccttagtcctgctaggggcccacggggtcggccgcaggcacattaaaaatactctgatcaccaagcaccccgatcggtttgcttacccaatcccccatacaaccaggccccccaaaaaggatgaagaaaatggcaaaaactattacttcgtgtcccacgaccagatgatgcaagatatttcaaataacgaatatctcgaatatgggtcacacgaagatgcaatgtacggaacaaaactggaaacgatcaggaagatccacgagcaggggctcatcgcgatcttagatgtggagcctcaggcactaaaagtcctacgcacagcagaattcgcccccttcgtggtgtttatagcggcccctacaatcacaccgggtctgaacgaggatgagtctctgcagaggctgcagaaagaatcagacatcctgcagaggacttatgctcattacttcgacttaacgattattaacaatgagattgatgaaactataaggcatctggaagaggccgttgaactggtttgtaccgcccctcaatgggtcccagtgtcttgggtgtactag

SEQ ID NO: 110531 - DNA, 1146 bp, synthetic construct
  misc_feature 1..1146: note = Description of Artificial Sequence: Synthetic coding sequence
  source 1..1146: mol_type = other DNA
gacgagatccgcgaaattaatgggatctctgttgccaaccagaccgtcgaacaactccagaagatgctgagggaaatgagaggctctattacattcaagattgtgccatcttacagaactcaatcctctagttgtgagcgcgattcacccagtaccagcaggcaaagcccagctaatggtcactccagcaccaacaattctgtgtctatctatgtgcgtgctcagttcgaatacgaccctgcaaaagacgaccttataccttgcaaggaagccggcatcaggtttagagtcggcgacatcatccagatcatctccaaagacgatcacaactggtggcagggcaaactcgagaacagtaaaaacggcacagcaggtctgataccatcccccgagctgcaggaatggcgggtggcgtgtattgctatggaaaaaaccaaacaggagcagcaggcgtcttgtacttggtttgggaaaaaaaagaaacaatacaaagacaagtatcttgcaaaacacaacgctgtgtttgaccagttggatctagtcacgtacgaagaagtcgtcaagctgccagcctttaaaagaaaaactctggtgctgttaggagcacacggggtaggaagaagacacatcaaaaacacgctgatcactaagcatcctgataggttcgcctacccaattccccacactacaagaccgcccaaaaaagacgaagagaacggaaagaattattattttgtgtcccacgatcagatgatgcaggacatctcaaataatgagtatctcgagtacggatctcatgaagacgccatgtatgggaccaagctcgagaccatacggaagatccacgagcaggggttgattgctatcctggacgttgagccacaggcgctgaaagtgttgcgaacagcagagtttgcaccgttcgtggtgtttattgctgcccctaccataacgcctggcctcaatgaagacgaaagcctgcagcggctccagaaagagtcggacatcttacagaggacctacgctcactactttgacctcacaatcattaataacgagattgatgaaacaatccgccatctggaggaagctgttgagcttgtctgtaccgccccccaatgggtacccgttagctgggtgtattag

SEQ ID NO: 110532 - DNA, 1557 bp, synthetic construct
  misc_feature 1..1557: note = Description of Artificial Sequence: Synthetic coding sequence
  source 1..1557: mol_type = other DNA
ttatacgataaaataaacacgaaatcttccccccagatcaggaatccccccagtgacgctgtgcagcgggccaaggaagtccttgaggagatatcatgctatcctgagaacaacgatgcaaaagagttgaaacgcatcctaacacagccacatttcatggcgctgctccagacacatgacgttgtcgctcatgaggtctattccgacgaggccctgagggtgacgccacctcccacgtctccctatctgaatggagattctccagaaagcgcaaacggggatatggatatggagaatgtaactagggtcagacttgtacagtttcagaaaaataccgacgagccaatgggaattacactgaagatgaatgagctgaatcactgcatcgtagccaggataatgcacggagggatgatccaccgacagggcaccctgcacgtgggagacgagatccgggagattaatggtatctcggttgcgaaccaaaccgtcgaacagctccaaaaaatgctgcgggagatgcggggttcgatcacctttaagatcgtcccaagctaccggacacaatcatcatcctgcgaagatctgccgagtacaacacagccaaaggggcgacagatttatgtgcgcgctcagttcgagtatgaccccgcaaaagatgatctcatcccttgcaaagaagcaggtattcggtttagggtgggggacatcatccaaattatatcaaaggacgatcataattggtggcagggaaagcttgaaaatagtaagaacggcacagctggactgattccatcccccgaactgcaggaatggagagttgcctgtatcgccatggagaagactaaacaggaacagcaggcctcatgtacatggtttggcaaaaagaaaaaacagtacaaggataaatatcttgccaaacacaacgccgtcttcgaccagctcgatctggttacttacgaagaggtagtgaaactgccagctttcaagaggaagacactggtgttgctgggcgcccacggcgtgggtcgacgccacatcaaaaatacactgattaccaagcaccccgacagattcgcctacccaattccccatacaacccgtccaccaaagaaagatgaggagaatggaaaaaactattattttgtcagccatgaccagatgatgcaggatatctctaacaacgagtacctagagtatggctcacacgaagacgcgatgtacgggactaagctagagacaatcaggaagatccacgaacagggtttgatcgctatcctggacgttgagccacaagccctgaaagtcctccggactgcagaattcgcccctttcgtagtctttatcgccgcacctaccattactcccggtctgaatgaagatgaatccttacaaaggctgcaaaaagagtcggacattttacagaggacgtacgcgcactacttcgatcttactatcattaacaatgagattgacgagacaattagacacttagaagaagcggtagagttggtctgcaccgcgcctcagtgggtgcccgtgagttgggtctattag

SEQ ID NO: 110533 - DNA, 2694 bp, synthetic construct
  misc_feature 1..2694: note = Description of Artificial Sequence: Synthetic coding sequence
  source 1..2694: mol_type = other DNA
atggctgatgacgatgtactcttcgaggatgtttacgagctctgtgaagtgattggtaaaggtccgttcagtgtcgtgcgacgatgtatcaacagggaaacaggtcagcagttcgctgtaaagatcgtggatgtggccaaatttacaagtagtcctggcctgagtaccgaggacctgaaaagggaagcctcaatctgccatatgcttaaacacccccatattgtagaactcctggagacctacagttctgacgggatgctgtacatggtatttgagttcatggacggggcagatctgtgcttcgagatagtaaagcgggccgatgccgggtttgtctacagtgaagccgtggcctcccattacatgcggcagattctcgaagccctcagatactgccacgataacaatattatccatcgcgacgtaaagccccactgcgttctgttggccagcaaagagaacagtgctcctgtgaaattgggaggatttggggtggcgatccagctcggtgaatcagggttggtggctggggggagggttggaacgccccattttatggcccccgaggtggttaaacgagagccctacggcaagccggtcgacgtgtgggggtgcggtgttatcctgttcattcttcttagcgggtgtctgcctttctacgggacaaaggagcggctgttcgaggggattataaaggggaaatataaaatgaacccccgacagtggtcccatattagtgaatctgccaaagacctggtcaggagaatgctgatgctcgaccctgcggagcgaataaccgtgtatgaggccctgaaccatccttggctgaaggaacgggatagatatgcctacaaaatccatctgccagagaccgttgagcagttgagaaagttcaatgcaagaagaaaattgaaaggggccgtgctagccgccgtcagctctcacaaatttaacagcttttatggtgatcctcctgaggaacttccggacttcagcgaggacccgaccagctctggcgccgtgagtcaggttctcgattccctcgaggagatccatgccctgacagattgctcagagaaagatcttgactttttgcacagtgtgttccaggaccagcacttacatacactcctggatctgtacgataagattaataccaagtcttctcctcaaatcaggaacccgccatccgacgccgtccagcgcgccaaagaagtcctggaggagatttcctgctatcccgaaaataatgatgcaaaagaactgaaacggattctgacacagccgcacttcatggcccttttgcagactcatgacgtcgtagcacacgaggtgtactcggatgaagcgctgagggtcacgccgccccccacatcgccttatctgaacggggactcccctgaaagcgccaatggcgacatggacatggaaaatgtaaccagggtgcgcctggtgcaatttcaaaagaatacagatgagcctatgggcatcaccttaaaaatgaatgaactcaatcattgcattgtggccaggatcatgcacggcggaatgattcaccgccagggaacactgcacgtgggtgacgaaattagagagatcaacggcatcagtgtcgcaaaccagacagttgagcagctgcagaagatgctgcgcgagatgagggggtccatcaccttcaaaatcgtgccaagctatcgcacgcagtcctcctcctgcgaagatctgcctagcaccacccagccaaaggggcgccagatttacgtccgtgcacagtttgaatacgatccggccaaggacgatctaatcccgtgcaaagaggcaggcattaggttccgcgtgggggacatcattcagatcatttccaaagatgatcacaattggtggcaggggaaactggagaatagcaagaacgggacggccggcctcattccatcacctgaattgcaagagtggagagtcgcatgcatagcgatggaaaagaccaaacaagagcagcaagccagttgtacgtggttcgggaagaaaaaaaagcaatataaggataagtacctcgccaagcataatgccgtgttcgatcagctggaccttgtgacgtatgaagaggttgtcaagttaccagcatttaaacggaaaaccctagtcctccttggtgcccacggagtggggagacgacatattaagaacactctgatcaccaagcaccctgatcgttttgcttaccccatcccacacacaacaaggcctccgaaaaaagacgaagaaaacggaaaaaactactattttgtgtcacacgaccagatgatgcaggacatatccaacaatgagtatctcgagtacggctctcacgaggacgccatgtacggaacaaaacttgagactataagaaagatccacgagcagggtttgattgccatattggatgtggagccgcaggccctcaaggtgctaagaacagccgagttcgccccttttgtcgttttcatcgcggccccaactataacgccgggactcaatgaggacgagtctcttcagagactgcagaaagaaagtgacatcctgcagagaacatacgctcactatttcgatctcacaatcattaacaacgaaatcgacgagaccatccgacacctggaagaggccgtcgagctcgtttgcaccgcaccgcagtgggtcccagtgagctgggtgtactag

SEQ ID NO: 110534 - DNA, 2697 bp, synthetic construct
  misc_feature 1..2697: note = Description of Artificial Sequence: Synthetic coding sequence
  source 1..2697: mol_type = other DNA
atggctgacgatgacgtcctgttcgaggacgtgtacgagctgtgtgaagtgattggtaaagggcctttctcagttgttcggcgctgcataaatcgggagactggtcagcagtttgccgtcaaaatcgttgacgtagccaaattcacatcctcgcctggcttgtccacagaagacctgaagagagaggcgagcatttgccacatgctaaagcatcctcacatcgtcgagctattggagacctactcctccgacggtatgctgtatatggtgtttgaatttatggatggggctgatctatgcttcgaaatcgtcaagagggccgacgccgggttcgtttacagcgaagccgttgcatctcactacatgaggcagatcctggaggcccttcggtattgccacgacaataacatcatacatcgagacgtgaagcctcattgtgtcctactggcatccaaggagaactccgctccagtcaagctagggggattcggggtggcaatacagctgggggagtctgggttagttgctggcggcagggtggggactcctcatttcatggcaccggaagtggtgaaacgagagccgtacggcaaacccgtggatgtttggggatgtggcgtgattctcttcatccttctgtcaggttgtctcccattctatggcactaaggagcggcttttcgagggcatcattaagggaaagtacaaaatgaaccctaggcaatggagccatatatcagagtcagctaaagatctggtcaggcggatgctgatgctggaccccgctgagcgcattaccgtgtacgaggcactcaaccacccatggctgaaagagcgggatagatatgcctataagatacacctgccagaaacagtagagcagctgaggaaatttaacgcgcggcgcaaactgaaaggcgcagtcctggcggctgtgagtagccataagtttaattccttctatggcgaccctccagaagagctccccgacttttctgaggatccgacaagcagcggactgctggctgctgaaagagctgtgagtcaggtcctggattccctggaagaaattcatgccctgacagattgttcagaaaaagacctggacttcctccacagcgtcttccaggaccaacatcttcacacgctgttagatttgtatgataaaattaatacaaagagcagcccccaaattcgaaaccctcccagcgacgcagtgcagcgcgcaaaggaggtcctcgaggagatttcttgttaccctgagaataacgatgcaaaagagctgaaaaggatactgacacaacctcatttcatggccctgcttcagacccacgacgtggtagcccacgaggtttactccgacgaggccttaagagttacacctccccctacatccccttacttaaacggtgactcaccagagtccgctaatggggacatggacatggagaatgtaactcgagtcaggctcgttcagttccagaagaacactgatgaacctatgggtattacgttaaaaatgaacgaacttaatcactgcatcgtggccagaatcatgcatgggggaatgatccaccgccaggggaccctgcacgtaggcgacgaaattagagaaataaacggaatcagtgtggctaaccagaccgtggagcagttgcaaaagatgttgagagagatgcgggggagtatcacttttaagatcgtcccttcctaccgcactcagagtagctcttgcgaagatttgccaagcactactcaacctaaggggaggcaaatctacgtgagggctcagtttgagtatgaccctgcgaaggacgatctcatcccttgcaaggaggcggggattcgatttcgggtgggggatatcatacaaataatatcgaaggatgaccataactggtggcagggcaaactggaaaacagcaagaatggaaccgccggacttatcccatcaccagaactgcaggaatggcgcgtggcttgcatcgctatggagaagactaagcaagaacagcaagcttcctgcacttggttcgggaaaaagaaaaaacagtataaggacaaatatctagccaaacacaatgccgatcttgtgacttacgaagaggtggttaaactccccgccttcaagcggaagacactagtgttgctgggtgcgcatggtgttggcagaaggcacattaagaacactctgattaccaagcaccccgaccggttcgcttatccaattccacatacaacccgtcccccaaagaaagacgaggagaatggcaagaattactacttcgtctcccacgatcagatgatgcaggacattagcaacaatgagtacttggagtatgggtcccatgaagacgctatgtacggaacaaagctggaaaccatccggaagattcacgagcagggactgattgctattttagacgtggagcctcaggcactcaaagtgctgaggactgccgagtttgcaccctttgtggttttcattgccgcacctacaattaccccaggcctgaacgaggacgaatcacttcagaggctgcagaaagagagcgacatcctgcaacgcacctacgctcactactttgatctcacaataatcaacaatgaaattgatgagacgatacgacacctggaggaggccgttgaattggtgtgtaccgcaccccagtgggtgcccgtgtcatgggtgtactag

SEQ ID NO: 110535 - DNA, 3237 bp, synthetic construct
  misc_feature 1..3237: note = Description of Artificial Sequence: Synthetic coding sequence
  source 1..3237: mol_type = other DNA
atggctttttacagttgttgctgggtactgctggcactgacatggcatacgtcagcttacgggccagatcaacgagcgcaaaaaaagggagatatcatccttggtggcctgtttcctatccatttcggggtggccgctaaagatcaggatctgaagtcacgacctgaaagcgtggagtgcatccgctataacttccggggcttcagatggttgcaggctatgatttttgccatcgaggagatcaactccagtcctgcgttgttgcctaatttgaccttaggatatcgtattttcgatacctgtaacactgtatcgaaggctttggaggccaccctgtcttttgtggcgcagaacaagatagatagcctgaatctagacgaattctgtaattgttctgaacacatcccctccaccatcgccgtagtaggggccaccggttctggtgtatcaaccgccgtagcaaatctcttaggcctcttttacatcccacaggttagttatgcctcaagttcccggctgctgtctaataaaaaccagtttaagtcatttctgcgcacaattcccaatgacgaacatcaggcaaccgccatggctgacatcatagaatacttccggtggaactgggtgggcacaatcgctgccgacgatgattatgggagaccaggcattgaaaaatttcgcgaagaagcggaagagcgagacatctgtattgacttcagcgaactcatctcccaatactccgatgaagaggaaatacaacacgtcgttgaggtgattcaaaatagcacagctaaagtgatagtcgtgttttcatctggcccagacctggaacctttgattaaggagatagttagacggaatattactggtaagatttggcttgccagcgaagcctgggcaagtagttccctgattgcaatgcctcaatacttccacgtggtcggaggaactattggattcgctctgaaagctgggcagattccagggttccgcgaattccttaagaaagtgcacccacggaagagcgtacataacggatttgctaaggagttttgggaggaaactttcaactgccacctgcaggagggtgctaaagggcctctgccagtggatacgtttctcagagggcatgaagagtccggcgatcgtttcagtaacagttcaaccgcttttaggcctttatgcacaggggatgaaaacattagttctgtagagaccccatacatcgattacacccacctgagaattagttacaacgtctatcttgctgtgtatagcatcgcgcacgccctccaggatatctacacatgtcttcccggaagaggtctgttcaccaacggcagctgtgcagacatcaagaaagtggaggcttggcaggttctgaaacatttgcgccatctaaattttacaaataatatgggggaacaagttacttttgatgaatgcggcgaccttgttggcaattatagtatcatcaattggcacctgtccccggaagatggttcaatcgtgttcaaagaagtgggttattacaacgtctacgccaagaagggggagcgcttgtttattaacgaagagaaaattctatggtccggattttctcgtgaagtccccttcagcaactgcagcagagactgcctggcaggcactcggaagggaattatcgagggtgagcctacatgttgcttcgaatgtgtggaatgtcccgacggtgagtactcagatgagaccgacgccagtgcctgcaataagtgtccggacgacttctggtctaacgaaaatcatacctcttgtatcgccaaggagatcgagtttctgtcctggactgagccatttggaatcgccttgactctattcgctgtcctgggtatctttcttactgcctttgtgttaggagtatttattaagtttcgcaacacccccattgtgaaagccactaatcgagagctcagttatctattacttttttccctgctctgctgcttttcctctagtcttttctttattggagagccccaagactggacatgtagactgagacaaccagcattcggaatcagctttgttctttgcatatcctgcatcctcgtgaaaaccaacagagttctcctggtgttcgaggccaagatacctacatcgttccaccggaagtggtggggactgaacttgcaattcttactcgttttcctatgcaccttcatgcagatcgttatctgcgttatctggctgtacacagctccacctagttcctaccggaatcaggaactggaggatgaaatcatatttattacttgccatgaaggcagcctgatggccctcggctttttgatcggctacacctgtcttctcgccgctatatgctttttctttgccttcaagtcgcgcaaactgccagagaattttaacgaagccaaatttattacattctccatgctcatattcttcatcgtgtggatcagtttcatacctgcttacgcctcaacctacggaaagtttgtgagcgcagtggaggtgatcgcgattcttgctgctagtttcggcctgctggcttgcatattcttcaacaaaatctacatcatcttattcaaacccagccggaatactattgaggaagtaagatgcagtacggctgctcatgcattcaaggttgcggcaagagcgactctccggagatccaatgtcagtcgtaagcgttcaagctcattgggaggatctaccggaagtacgccgagcagctccatctcaagtaagagcaatagcgaggatccctttccacagccggaaagacagaaacaacagcagcctctggccctcacccagcaagagcagcagcaacagcctttgactctcccccagcagcagaggtctcaacaacaaccgaggtgtaagcaaaaggtcattttcggatccggaacggtgaccttttcactttcatttgatgagccacagaaaaacgcaatggcacaccgcaattcaacacaccagaacagtctagaggctcagaagagctctgacaccctgacccggcacgaacccctgctgcctcttcaatgcggcgaaacagacctggacctgaccgtgcaggaaacgggacttcaaggacctgtaggcggagatcaaaggccggaggttgaagaccctgaggaactgtctccagcgctggtggtcagcagtagccagtcatttgttatctccggcggcggcagtaccgtaaccgaaaacgtcgtgaactcatag

SEQ ID NO: 110536 - DNA, 3237 bp, synthetic construct
  misc_feature 1..3237: note = Description of Artificial Sequence: Synthetic coding sequence
  source 1..3237: mol_type = other DNA
atggctttttacagctgctgctgggttctcctcgcactgacttggcacactagcgcatacggtcctgatcagagagcacagaaaaaaggggacattatacttggggggctcttccctatccattttggggtcgctgcaaaggaccaggacctcaagagccgtccagagagtgtggagtgcatacgatacaatttcaggggcttcagatggctgcaggcaatgatcttcgcgatagaggagatcaattcttcacccgctcttttgcctaatctaactctcggctaccggattttcgatacttgtaataccgtgtcaaaagcactggaggctaccttgtctttcgtggcacagaacaagatcgatagtctgaacctggacgaattctgtaactgctctgaacacatccctagtacaatcgccgtggtaggagctacggggagcggcgtgagtaccgcagtggccaatctcttaggcctgttctatatcccacaggtttcttacgcatcttctagcaggctgttatccaacaaaaaccagttcaaaagtttcttaagaaccattcccaacgacgagcaccaggcgactgcaatggcagacatcatagagtacttccgctggaactgggtcggtaccattgctgccgatgacgactacgggcgtcccggcatcgagaaatttcgcgaagaggccgaagagagagacatctgcatcgatttctcagaacttattagccagtattctgatgaggaggagattcagcatgtggtcgaagtcattcaaaactccactgcaaaagtgatcgtggtcttttcatccggtcctgatcttgaacccctgatcaaggagatcgttaggagaaacatcaccggtaagatatggttggccagtgaggcatgggcttctagcagtctgatcgcaatgccccagtactttcacgtggtcgggggcaccatcggattcgctctcaaggcagggcaaatccctggctttcgtgaattccttaagaaggtacaccctaggaagagcgtgcacaacggcttcgctaaagaattctgggaggaaacctttaactgccacctgcaggagggcgcaaaaggacctctcccggtggacacatttctgagagggcacgaagagtcaggcgaccgattctccaattcgtctactgcttttaggcctttatgcaccggcgatgagaatatctcttcggtcgagaccccttacatcgattacactcatttgcgcatttcatacaacgtgtatttagctgtatatagcatcgcccacgccttgcaagatatttacacctgtctgcccgggaggggactgtttacaaacgggagctgtgcagatattaagaaggtggaggcgtggcaggtgctcaaacacctgagacaccttaattttacaaataatatgggtgagcaggtcaccttcgatgagtgcggggacttggtcggcaattacagcatcattaactggcacctgagcccggaagacgggtctatcgttttcaaggaggtggggtattacaatgtctacgctaagaaaggtgagaggctgttcatcaatgaggaaaagattctttggtcaggcttcagcagggaagtgcctttcagtaactgctctcgcgactgtctggctggcaccaggaagggtatcattgaaggtgagccaacttgctgcttcgaatgcgtagaatgtccggacggcgagtacagcgatgagacagatgcgtcagcctgtaataagtgccccgatgatttttggagcaatgaaaatcatacttcttgtattgccaaagagatcgagttcctgtcatggaccgaacctttcggcatcgccctcacgctcttcgccgtgctgggaattttccttactgctttcgtgctcggtgtattcattaaattccgtaacacaccgatcgtaaaggctacaaaccgcgaacttagctatctgctgcttttctccttgctctgctgtttcagcagcagcctgttcttcatcggggagcctcaagactggacctgtcgcttgaggcagccggcatttggcatttcatttgtgttgtgcatttcgtgtatcctggtgaagaccaatagagtgctacttgtgttcgaggcgaagattcctacatctttccatagaaagtggtggggcctgaacttacagttcctgctggtcttcctgtgcactttcatgcaaatcgtgatctgtgtaatctggctgtacacagcccctccaagctcgtatagaaaccaagagttagaggatgagataatatttatcacgtgccatgagggatctctgatggcactcggcttcctcattggatacacctgcttgctggctgcaatttgttttttctttgctttcaaatcaaggaagctgcccgagaactttaacgaagccaagttcattactttttccatgcttattttctttattgtgtggatttcctttatccctgcttacgcatcaacctacggtaaattcgtgtcagccgtggaggtgatcgctatactggccgcaagttttggtctactggcttgtatatttttcaataagatttacataatcctgtttaagccttcacggaacaccattgaggaagttcgttgtagtactgccgcgcatgctttcaaagtcgctgcgcgcgccactctgcgtcgctccaatgtgtcgaggaagcgctctagctccttgggtggcagtacaggatccaccccctcctcttctataagtagtaagtctaacagtgaagacccctttcctcagcccgagaggcaaaagcagcaacagcctcttgccctgacccagcaagagcagcaacaacagccactcaccctcccgcagcaacagcgttcacagcagcaacctcggtgtaagcagaaggtaatcttcggtagcggaaccgtgaccttctcactgtcctttgacgagccgcagaaaaacgccatggctcacagaaattctacacatcaaaactcactggaggctcagaaatccagcgatactctgacacgccatgaacccttgctcccactgcaatgtggcgaaacagacctcgatcttaccgttcaggaaacaggcctgcagggacctgtcggaggtgatcagagaccggaagtggaagaccctgaggagttaagcccagccctagttgtgtcttcgagccagtcatttgttattagcggcggcggtagcacagtgaccgagaacgtggtgaatagctag

SEQ ID NO: 110537 - DNA, 3267 bp, synthetic construct
  misc_feature 1..3267: note = Description of Artificial Sequence: Synthetic coding sequence
  source 1..3267: mol_type = other DNA
atggcattctactcctgttgttgggtccttctggccctgacatggcatacgtcagcgtatgggcctgatcaacgtgcgcagaaaaagggagacattattctcgggggcctgttcccaatccacttcggcgtggccgccaaagaccaggacctcaaatcgcgccctgagagcgttgagtgtatcagatacaattttcgcgggtttcgatggctgcaagccatgatcttcgctatcgaggagataaatagttctcctgcgttactcccgaacttaaccctgggatataggatcttcgatacgtgcaatacagtttccaaggctttggaggcaacgctgagtttcgttgcccaaaacaaaatagacagcctgaacctggatgaattttgcaactgttctgaacacatcccaagtacaatcgctgtcgttggcgcaaccgggtcaggtgttagcaccgcagtggctaatttgctggggcttttctatatcccgcaggttagttacgcaagtagctccagactcttgagcaacaagaatcagtttaaaagctttttacgcaccatcccaaacgacgaacaccaggccacggcgatggcagatataattgagtatttccgatggaactgggttgggaccatagcggcggacgatgattatggaaggcctggcatagaaaagtttcgagaggaagccgaggagcgcgatatttgcattgatttctcggaactgattagtcagtattccgatgaagaagagatccagcacgttgtcgaggtgatccaaaattccacagccaaggtgatcgtcgtcttttctagcgggcctgaccttgagcccctaattaaagagatcgtcaggcggaatattacagggaaaatatggctggcctccgaagcgtgggcttccagttctctgatcgccatgccccagtatttccatgttgtgggaggtacaatcggtttcgctctcaaagctggccagatccctggcttcagagaatttctgaagaaggttcacccaaggaagtcggttcataatggattcgctaaagaattctgggaagaaacatttaattgtcacctccaggagggagcgaagggccccctcccagtcgatacgtttctgcgcgggcacgaggaaagcggggatcggttctccaacagctcaacggctttcagacccctgtgtacaggcgatgaaaacatcagttccgtcgaaactccttatatagactatacccacctgagaatttcatacaacgtgtacttggccgtgtactcgattgcccacgcccttcaggacatttacacctgcctccctggtcgggggctgttcaccaacggcagctgtgcagacatcaagaaggtcgaagcatggcaggtattaaaacatctccggcacctaaatttcaccaataacatgggagaacaggtgacctttgacgaatgcggagacctggtgggtaattattctatcatcaactggcatctctccccagaagacggatcaattgtcttcaaggaggtcggctactacaatgtatatgcaaagaagggggagagactcttcatcaacgaggagaaaatcctatggagtggattcagtcgcgaacctctgacctttgtcctgtcagtcctgcaagtccctttctccaactgtagccgggactgcttagcgggtaccagaaaagggatcattgaaggggaaccaacttgctgcttcgaatgtgtggaatgcccagatggagagtactcagacgaaacagatgcttccgcctgtaacaaatgccctgacgacttctggagcaacgagaaccacacttcctgtatcgcaaaagagattgagttcctgagctggactgaaccattcggaattgcccttactctcttcgcagttttaggcattttcctgactgcatttgtattgggggtgtttattaagttccgcaatactcccatcgtgaaggctacaaatcgcgaactgtcttatctcctgttgttctccctcctgtgctgtttcagcagctctttgttttttataggggagccccaggactggacttgcaggctaagacagccagcttttgggattagtttcgtcctgtgcatctcctgtattctagtgaaaaccaaccgggtactgctggtgttcgaggcaaagattccaacctcattccatcgtaaatggtggggactgaatctgcaatttttgctggtctttctatgtacgtttatgcaaatagtaatctgcgttatctggctatatactgctccccccagcagttacagaaaccaggagctggaagacgagatcatctttattacatgccacgaggggagcctcatggcgcttggattcctaatcgggtacacatgccttcttgccgcaatctgctttttctttgcatttaagtcccggaaattgcccgagaactttaatgaggccaagttcataacattttccatgctcattttctttatcgtgtggatctcttttatcccagcctacgcgtccacctacggaaaatttgtgagtgccgtcgaggtcattgcaattctggccgcatcttttggtctcctggcatgcatttttttcaacaagatatatatcatattatttaagccctcacgtaataccattgaagaggtgcgttgctccaccgccgcccatgctttcaaagttgctgccagggccacgctccggagatcaaacgtctcacggaaacgcagcagctccctcggcggaagtaccggcagtacacctagctccagcatctcttcgaaatctaacagcgaagatccgttccctcaacccgagagacaaaagcaacaacagccccttgccctgacacaacaggagcaacagcagcagcccctgactctgcctcagcaacagcgctcccagcagcagccgcgctgcaagcagaaggtcattttcggctcgggaacggtgaccttttcccttagcttcgatgagccccagaaaaacgctatggcccatcgcaacagtactcatcaaaactcactggaagcccagaaatcctccgataccctgacacggcacgaacccctactgccactgcagtgcggtgagacggacctcgacctcacagtccaagagactggcttgcagggaccggtgggcggggatcagaggcctgaggtggaagaccctgaagagctgtcccctgctttagtagtgtcttccagccagtcttttgttatttccggaggcgggtccaccgtcaccgaaaatgtggtgaattcctag

SEQ ID NO: 110538 - DNA, 978 bp, synthetic construct
  misc_feature 1..978: note = Description of Artificial Sequence: Synthetic coding sequence
  source 1..978: mol_type = other DNA
atggccaggcctgtgagcgaccggacccctgccccgcttctgcttgggggcccagcgggaacaccccctggaggcggggccctgttaggtctgcgcagtctcctgcagggtaccagtaagcctaaagagcctgcaagctgcttgcttaaggagaaagagcggaaagccgccctacctgccgccaccacgcccggaccagggcttgagacggcaggtcccgctgacgcgccagccggtgccgtggtcggtggcggttctcctcgcgggaggcccggaccagtgcccgcaccagggctcctggcacccctcttgtgggagcggacactccccttcggggacgttgaatatgtcgacctcgacgctttcttgttggagcatgggctcccgcccagtccccctccacccggaggcccaagtcctgaaccctctcccgcacggacccctgcgccaagcccgggtcccggctcctgcggttctgcgagcccccgctcctccccagggcacgctccggccagagcagccctggggactgcgagcggtcaccgggccggcctgacctcacgtgatacgccgagcccagtagaccctgacaccgtggaggttctcatgacatttgaacctgatccagcggacctcgcgctgtccagcattccaggccacgagacattcgacccccggcggcatcgattctcggaggaggaactgaagccccagccaattatgaagaaagcccgcaaaatccaggtacctgaagagcagaaggatgaaaagtattggtctagaagatacaaaaataacgaagccgccaagaggagcagggatgctcggaggcttaaagagaatcagattagcgtcagggctgccttcttagagaaggagaacgcactgttacgccaagaggtggtggccgtcaggcaagaactcagccactatcgcgccgtgctaagccggtaccaggcacaacatggcgcgctctag

SEQ ID NO: 110539 - DNA, 969 bp, synthetic construct
  misc_feature 1..969: note = Description of Artificial Sequence: Synthetic coding sequence
  source 1..969: mol_type = other DNA
tctcaaaggggtaaagggacctgtcccggtagccatcgtaaccacgcctcttccctgccctcccatggcctggtaagtattcagggcattagcgcccctgccggccagtggcccgcccctcctccatggtcccaggagggaatgcagtgccatagggacctggctctgagccaggccttatggggctggcaattgagcaagcagtccgggtgggcgcatccctctttgccacactcgcctttgccatccactgtgcactcttgtagttgggcaccgccacacctgcagcgacatctgcccctggccactgtctctccaggtaccacccagttaacccaggggcccgctgggcgaacgctgggtcagacccaggctagctgcccagagcccagaccttctatggacgccgtggatgccaccatggagaaactgagggctcaatgcctctctcgaggggcaagcgggatccagggcctcgcaagattctttaggcagctcgaccgcgacggttcccggtctcttgacgctgatgagttcaggcaaggactggctaagcttggactggtcctggaccaagcagaggcagagggagtgtgccgcaaatgggatcggaatggaagcggaactcttgatctagaagaattccttcgcgccttacggccacctatgtctcaagctagagaggctgttatcgctgccgctttcgctaagctagacagatccggtgacggggtcgtgacggttgacgatctgcgcggcgtgtattccggtagggctcacccaaaggtgcgctctggggagtggaccgaagacgaagtattgcggagatttctcgataattttgactcaagcgagaaggacggacaggtgacgttagctgagtttcaagactattatagcggcgtatccgcttccatgaataccgatgaggagtttgtagctatgatgacttccgcttggcaattatag

SEQ ID NO: 110540 - DNA, 489 bp, synthetic construct
  misc_feature 1..489: note = Description of Artificial Sequence: Synthetic coding sequence
  source 1..489: mol_type = other DNA
atggatgccgttgacgccaccatggagaaactcagggcccagtgtcttagtaggggagcgtcaggtatccaaggcctggcccggtttttccggcagctggaccgtgatggcagtcgatccctggacgctgacgaattcagacaaggacttgccaagctgggtcttgtgctggatcaggcagaggcagaaggggtctgccgcaaatgggaccggaatggtagcggtacgctcgacttagaggagtttctccgagcactcagacctccaatgagtcaggcccgtgaggctgtaatagccgcagcctttgcgaagcttgaccgctccggtgatggcgtcgtcacggtcgacgacttaaggggagtgtactccgggagggcccacccgaaagtcactttagccgagttccaagactattacagcggggtgagcgctagcatgaacacggacgaagaattcgtcgccatgatgacaagcgcttggcaactttag

SEQ ID NO: 110541 - DNA, 882 bp, synthetic construct
  misc_feature 1..882: note = Description of Artificial Sequence: Synthetic coding sequence
  source 1..882: mol_type = other DNA
ctcattaatatactgtatagagctgtgatctctgaccctgagcagaaccttgccattgaacagaaggagagcgatcacatcctgccagacagcaaaatgacacccttacgattccgaaaacggacgcttcacgagacaaaaattaggactcactctactctaaccgagaatgtgcttagtcacaaactgcaatttgacggtcggattgtaagccggaccaacgttttgccttttatccagaaaagtatttatagccaccagtgcgggcgaagaaaagggaagcagtacaggctcggcgatttttatgtgggggcaactctcacttttttgtcatcagaccatttgagtctgccagagagcattaaagagaataccctccttaagctgcggatcacaaacatagaccagatcgccctggattctctcaagacagcatccatggaacaagaagacgacatcattattcaggagaccaacgataggctggtattcaaggctatacaggatgttctcaaggaaaaacttcacaagcgaggagtccggattctgactggtctgggcaagtatttccaacagttggataaggaaggtaatgggctgttagacaaggctgacttcaagcaggccctcaaggtctttcacctggaggtctccgaaaaagattttgagtccgcatggctaattttgaacgataatggcaacggaaaagttgactatggtgagttcaagcgggggatcatcggtgagatgaatgaataccggaaatcctatgtgcggaaggcttttatgaagctggacttcaataaaagcggcagtgtgccgatcatcaatatacgaaaatgttattgtgccaagaagcactcccaggtcatctctgggtag

SEQ ID NO: 110542 - DNA, 1149 bp, synthetic construct
  misc_feature 1..1149: note = Description of Artificial Sequence: Synthetic coding sequence
  source 1..1149: mol_type = other DNA
atgatcgaccacctgtcgagagccgtgatttcagacccggaacagaacctcgccatcgaacagaaggagtccgatcacattctgcctgacagcaagatgacccctctgaggtttagaaagagaacactccatgagactaaaattagaacacactcaacacttactgaaaacgtcctgtctcataagctacaatttgacgggagaattgtgtctcgcaacggtagggatgcctgccgggagttgatcggtttctttttcacacacgatcagagcctgactatctacgaatatcgccagttcggcaaaaacagaactaacgtcttgcccttcattcagaaatctatttattcccaccagtgtggcagacgcaagggaaaacaatataggctcggtgatttttacgtcggcgcgacactgacttttctgtcctccgatcatttgagtttgcctgagtctattaaggagaacacattgctgaaattacggattaccaatatcgatcagattgccctcgatagcctgaaaactgcttctatggaacaggaagacgacattattatacaggaaacaaacgatagactcgtgtttaaggctatccaagatgttctgaaggagaagctgcataaacgaggggtaaggattctgaccggtctgggtaagtactttcagcagcttgataaagagggcaacgggttactggacaaggctgacttcaagcaggccctgaaagtgtttcatctggaggtgtctgaaaaagacttcgagtctgcctggctgatccttaacgataacggcaatggtaaagtggactacggagagttcaagcgaggcattatcggggagatgaacgaatacaggaagtcctacgtgcgtaaggcctttatgaagctggacttcaacaaatctgggagtgtgccgatcatcaatattagaaaatgttattgcgccaaaaaacacagccaggtgatctccggccactctacggaagaggagatcaagagctcttttttggaaactttgaaggtagcctgtagtaagtctgatgaggtgagttatggcgagtttgaggactactacgagggattgagtattgggatagttgatgatgaggactttgtcaatatcctacggacaccttggggcatctag

SEQ ID NO: 110543 - DNA, 1674 bp, synthetic construct
  misc_feature 1..1674: note = Description of Artificial Sequence: Synthetic coding sequence
  source 1..1674: mol_type = other DNA
atgggtaatagtttttgctatactgcagtctactgtatgattaacactggcacccagatggaccttgaggttaagggtgtggccgcaacatcccggtcccagattcagcccttttttggtcgcaaaaagcctcttcaacagaggtggactagcgaatcctggactaatcagaacagttgtcctccagtggtgccaagactcgatctgggcagcctcgttgactccgatgatgaagataacttcagttacatcccgctgagcaccgccaacctgcctaacagctccagcacgctgggttgggtcactccgtgccagactccatatactcaatatcacctgaacaagctggaccagaacatcatccccgagaatctgccagccccaaccgacaaatgtaaactgaaatatcagcagtgtaagactgaaatcaaggaagggtacaaacaatactcccagagaaacgcagaaaacactaagtctaatgtgacccacaaacagagcccaagaaacaagatcgatgaaaagtgcgtgcaggatgaggaagccaatacagacgacttaaccacccttgataggaaggctatcctacaacagggttacgcagataactcatgtgacaagcagcagagagcccgcaagcttgacgcagagatcgtggcagcagagaaaaaaaagcagattgtcgctgagcaggtaatgattgatcacctctcccgagctgttatctccgaccctgaacagaacctggccatagaacaaaaagagtccgatcatatcttgcctgacagtaaaatgacccccttgcggtttaggaagagaactctacatgaaaccaaaatccggacccattctacactgactgagaacgtgctgtctcataaacttcagttcgatggtaggatagtatctcgcaatggcagagacgcctgtagagagttgatcgggttctttttcactcacgatcagtctctgacgatctacgagtaccgccagttcggtaagaacagaaccaatgtgttacccttcattcagaagtcgatttactctcatcagtgcgggaggcgcaaaggcaaacagtaccggctcggagatttctatgtcggggccacactgacatttctgtcaagcgatcacctgtcattgccagaatccataaaggagaatacactccttaagctgagaatcaccaatatcgaccagattgcattggatagtctcaagaccgccagtatggaacaggaggacgacatcattatccaggagactaatgatagactggtgttcaaagccattcaggacgtgctgaaggaaaagctccacaagcggggtgtccggattctcacagggctaggcaagtactttcagcagctggataaagagggcaatggactgctggacaaggctgatttcaagcaggcactgaaggtgtttcacctcgaggtgagtgagaaggacttcgagtccgcctggctcatattgaacgataatgggaatggaaaggttgactatggggaatttaagcgtggtattattggcgaaatgaacgagtatagaaagtcttatgtaaggaaggcctttatgaaactcgactttaataagtccggatccgtcccgataatcaatatccgcaaatgttactgtgccaagaaacatagccaagtcatctccggatag

SEQ ID NO: 110544 - DNA, 615 bp, synthetic construct
  misc_feature 1..615: note = Description of Artificial Sequence: Synthetic coding sequence
  source 1..615: mol_type = other DNA
atggaacaggaagatgatattatcattcaggagacaaacgacagactggtgttcaaggccattcaggatgtcctgaaagaaaagctccacaaaaggggggttcgaatcctgactggactcggaaaatattttcagcagcttgacaaggaggggaatggtttactggacaaggccgactttaaacaggccctgaaggtcttccacctggaggtgtcagaaaaggatttcgagtcagcatggttgattctcaacgataatggaaacggcaaggtggattacggtgaattcaaacgcggaatcatcggagaaatgaacgagtacagaaagagttacgtcagaaaagcttttatgaagctggactttaacaagtctggttccgttcctatcatcaatatacggaagtgctattgcgctaaaaaacattcacaggtaatctccggtcactctaccgaggaggaaattaaaagctcattcctcgagacactcaaggtcgcttgcagcaagagcgacgaagtgtcttacggcgagttcgaggattattatgagggactcagcattggcatcgtcgacgacgaggatttcgtcaatatcctgagaaccccttgggggatttag

SEQ ID NO: 110545 - DNA, 3009 bp, synthetic construct
  misc_feature 1..3009: note = Description of Artificial Sequence: Synthetic coding sequence
  source 1..3009: mol_type = other DNA
atggctgctcatgagtgggactggtttcagagagaagaactaatcggccagatcagcgatatcagagtgcagaacttgcaggtggagagggagaatgtgcaaaagcggacgtttactaggtggataaatttgcacctggaaaagtgcaaccctccactggaggtaaaagacctgtttgtggatatccaggacggaaagatactgatggccctgctggaggttttatctggccggaacctgctgcacgagtataagagctccagccatagaatcttccgcctgaacaacattgccaaagcgctcaaatttctggaggatagcaatgtgaagctggtgtcaattgatgccgctgaaattgccgacggcaatccctcgctggtactcggcctgatctggaacatcattctgtttttccagattaaggaattaacaggcaatctgagtcggaactctccgtcaagcagcttgtcaccaggatcaggggggactgacagtgacagtagttttccccccactccaactgccgagagatctgtggctattagcgtaaaagatcagaggaaagcaatcaaagccctgctcgcatgggtccaacggaaaaccagaaagtatggagtggccgtgcaggattttgctggcagttggaggtctggacttgcatttctcgccgtcataaaggcgatcgacccgtcccttgtagatatgaagcaggctcttgagaacagtacccgcgagaacctcgagaaagcattttctatcgcacaggacgccctgcacataccccggctgctggaacccgaggacattatggtcgatacgcctgatgaacagtccatcatgacctacgtggcacagtttctggagcgcttcccagagctggaagctgaggacattttcgacagcgacaaagaagtcccaatcgaatccaccttcgtcaggataaaggaaactccctccgagcaagagagtaaggtgtttgtgctaacagagaacggcgagcgcacctacaccgtcaatcacgaaaccagtcatccgccaccttcgaaagtgtttgtgtgcgataagccggaatcaatgaaagaatttcggttggacggtgtgagctcccatgccctcagcgacagtagcacagagttcatgcaccagatcattgatcaggtcctccagggtgggcccggaaagaccagcgatatatcggagccatctcccgagtcctccattctctcgagtcgcaaggagaacggacgttctaactcactcccgattaagaagactgtgcattttgaggccgatacatataaggatccattctgctcgaaaaacttgtctctgtgcttcgaaggttcccctagagtcgctaaggaatcccttagacaggacggccatgtgttggccgtagaagttgccgaggagaaagagcagaagcaggagagctccaagattcccgagagtagctcagacaaagtggccggcgatatcttccttgtggaaggcactaacaataactcccagagctccagctgtaatggcgccttggagagtaccgcgcgccacgatgaggaatcccactccctcagccctcctggggaaaacacagttatggccgatagcttccagattaaagtgaacctcatgaccgtcgaggcactagaggaaggcgattacttcgaggcaattccccttaaagcatccaagtttaatagtgatttgatcgactttgccagcacttcccaggcgttcaataaagtgccttctccccatgagacaaagcccgatgaggacgccgaagcgttcgagaaccacgcagagaagctgggaaagcgctccatcaagagtgcacacaagaaaaaagactcacccgagccacaggtcaaaatggataagcacgagcctcaccaggactcaggtgaggaggctgagggatgcccaagtgcccccgaagagacaccggtggataaaaaacccgaagttcacgagaaagccaaaaggaagagtacgagaccccactatgaggaagagggcgaggatgacgaccttcagggtgttggcgaggaactttccagctctccccctagttcttgcgtcagtctggaaacgctggggagccattcggaggaagggctggactttaaaccttcacccccgctttctaaggtatcagtgatccctcacgatctgttctattttccccactacgaggtccccctggcagccgtgctggaggcttatgtagaagaccctgaggacttaaagaacgaggaaatggatctagaagaacctgaagggtatatgcccgacctggatagtcgagaggaggaggcagacggctcccagagctctagctctagctccgtgcccggcgagtccctccccagcgcctccgatcaggtgctatatttaagccgggggggagttggtaccactcccgcgtcggagcctgcaccacttgctccccatgaggaccatcagcaaagggagacaaaggagaacgacccgatggatagccatcagtcacaagagtcgccaaacttggaaaacatcgctaacccactagaagagaacgttacgaaggaaagtatctcgtcgaagaaaaaggaaaagaggaagcacgtcgatcatgtggagtccagtctgttcgtggccccggggtctgtgcagagttcagatgacctagaagaagattcctctgactactcaattccatcccggacaagccactccgacagtagtatttacttacgcaggcacacgcatcgctcaagtgaaagtgaccacttctcttatgtacagctcaggaatgcagccgacttagatgataggcgcaacaggattttaacgcggaaggcaaactcctccggtgaggcaatgagtctcggtagtcacagcccgcagtcagattctctcacccagctagtccagcaacccgatatgatgtattttatcctgtttctctggctcctcgtgtactgtctgctcctgtttccccagctcgacgtgtctcggctatag

SEQ ID NO: 110546 - DNA, 450 bp, synthetic construct
  misc_feature 1..450: note = Description of Artificial Sequence: Synthetic coding sequence
  source 1..450: mol_type = other DNA
atggcagaccagctcaccgaggagcagattgctgagttcaaggaagccttcagtctgttcgataaggacggcgacggaacgatcactaccaaggagttggggaccgttatgcgcagtctggggcagaaccctactgaggccgagcttcaagacatgattaatgaagtcgacgccgacgggaatggaacgatcgactttccagagtttctgaccatgatggctcgcaaaatgaaagatacagacagtgaggaagagattcgcgaggcatttagggtcttcgataaggatggcaacggctacattagcgctgctgaattgagacatgtcatgaccaacctgggcgagaagctcactgatgaggaggtggacgagatgatcagggaggctgacatcgacggcgacggccaggtgaattatgaggagtttgtccagatgatgactgcaaagtag

SEQ ID NO: 110547 - DNA, 450 bp, synthetic construct
  misc_feature 1..450: note = Description of Artificial Sequence: Synthetic coding sequence
  source 1..450: mol_type = other DNA
atggccgaccagctgaccgaggagcaaatagccgaatttaaagaggccttcagtctgtttgataaggacggtgatggtacaataaccactaaagaactcggaacagtgatgcggtccctggggcagaatcccaccgaagctgaattacaggacatgattaacgaggtggatgcagacggcaacggtacaatagacttccccgaatttctgacaatgatggcccggaagatgaaagatactgactccgaggaggaaattcgggaggccttccgggtattcgataaagacggaaatggttatatcagtgccgctgaactcaggcacgttatgactaatttgggcgagaagctcacggacgaagaggtggacgagatgattcgcgaggccgatatcgatggcgacggacaggtaaactacgaggagttcgtgcagatgatgactgcgaaatag

SEQ ID NO: 110548 - DNA, 450 bp, synthetic construct
  misc_feature 1..450: note = Description of Artificial Sequence: Synthetic coding sequence
  source 1..450: mol_type = other DNA
atggccgaccaactaaccgaggagcagatcgctgagtttaaagaagcattcagtctgtttgataaggatggggatggcaccatcacaaccaaagaactcggaacggtgatgaggagtttaggccagaatccaacagaagctgagttgcaagacatgattaatgaggttgatgccgatggaaatggaacgattgattttcctgagttccttaccatgatggctcggaaaatgaaggatactgactccgaggaagaaatccgtgaggctttccgggtctttgacaaggacggcaacggatatattagcgccgctgagttacgtcacgtgatgacaaatctgggagagaagttaaccgatgaggaagtggatgaaatgattcgagaggcagatatcgacggcgatggtcaagttaactacgaggaattcgtccagatgatgaccgccaaatag

SEQ ID NO: 110549 - DNA, 450 bp, synthetic construct
  misc_feature 1..450: note = Description of Artificial Sequence: Synthetic coding sequence
  source 1..450: mol_type = other DNA
atggccgaccagctgacagaggagcagatagccgaatttaaggaggctttcagcctatttgacaaagacggcgatggtacaatcaccaccaaggaattgggaactgtaatgcgcagcctgggacagaaccctacagaggccgagctgcaagatatgattaacgaagtagacgcggatgggaatggtaccatagacttccccgaatttctgacaatgatggcccggaagatgaaggatacagactctgaggaggagattagggaggcctttagggtctttgacaaggatggcaatgggtatatctctgccgccgagctgcgccatgtcatgaccaaccttggggagaagctaactgatgaggaggttgatgagatgatcagagaggctgacatcgatggagacggacaggtcaattacgaagagtttgtgcagatgatgacagctaagtag

SEQ ID NO: 110550 - DNA, 5022 bp, synthetic construct
  misc_feature 1..5022: note = Description of Artificial Sequence: Synthetic coding sequence
  source 1..5022: mol_type = other DNA
atgtggcgcgctgagggcaagtggctacctaaaacatcaaggaaatccgttagccagtcagtcttttgcggcactagtacctactgcgtcctgaataccgtcccccctatagaggacgaccacggaaattccaacagttctcacgttaagattttcttgcccaagaaattactcgaatgcttgccaaaatgttcaagtttgccgaaggaaagacaccgatggaacaccaacgaggaaatcgccgcctatctgatcacatttgaaaaacatgaggaatggctcacgacttccccaaagactagaccgcaaaatgggagcatgatcttgtacaatcgcaagaaggtaaagtaccggaaagacgggtactgctggaaaaagagaaaggatggaaagacaacccgcgaggaccatatgaagctcaaagtgcagggggtcgagtgtttatacggatgctacgttcactcctctatcatccccaccttccaccgcaggtgctattggctgctgcaaaaccccgacatcgtcctggtgcactacctcaatgtgcctgccatagaggactgtggcaagccctgcggtccaattctatgctcgatcaatactgataaaaaggagtgggccaaatggacaaaggaggaactgattggtcaactgaagcctatgttccatggtatcaagtggacttgctcaaacggcaactcgagttctggtttcagtgtggaacagctggtgcagcagattctggactctcatcaaacgaagccgcagccgaggactcacaactgtctctgcactggatccctgggagctggtggcagcgtgcaccacaagtgtaacagtgcgaagcatcggattatctctcctaaggtggaacccagaacagggggatacggctcccacagcgaggttcagcacaacgacgtgtcagagggtaagcacgagcactcccactcgaaaggttcttcccgtgagaagcgaaacgggaaggttgctaagccggtgctcctccaccagagtagtactgaggtgagttcaaccaaccaggtggaggtgcctgacactacacagtcgagcccagtctccatcagcagcgggctcaatagcgacccagatatggtggattcccctgtcgtcacgggagtgtcaggcatggctgtcgcttccgtgatggggtctctttcccaatcagctactgtgttcatgtctgaggtgaccaatgaggccgtctacactatgtctccaaccgccgggcctaaccaccatctcctctccccagacgcaagccagggcttagttctggccgtttcctcagacgggcataaattcgcgtttcccacaactggcagcagcgaaagcctaagtatgctgcccacaaatgtgtctgaagagttggtgctgagtaccacacttgacgggggcaggaagatacctgaaacaaccatgaattttgaccctgactgcttcttgaataaccccaagcagggccagacttatggcggcggagggctgaaagccgagatggttagctccaatattcgccacagtccacccggggagcgaagcttcagcttcacgactgtcctgacaaaagagattaagactgaagatacatcctttgagcagcagatggccaaggaggcttatagctccagcgcagcggctgtagcggcatcttccctcacgttgaccgccggcagctcccttctgccttcaggcggagggctgtccccctctaccacgctggaacagatggatttttctgccattgactctaataaggactacacttcatccttcagtcagacaggacacagccctcacattcatcaaacgcccagtcctagcttcttcctccaagacgctagtaagccactgccagttgagcagaacacccactcttcccttagcgattcaggagggacatttgtcatgcctactgtgaagaccgaggcttcttcccagacaagctcctgtagcgggcacgtcgaaaccaggattgagtccacttcatcactgcatctaatgcaattccaggctaactttcaggccatgaccgcagaaggtgaggtcactatggaaacgtcacaggcagccgaaggctcagaggttctgctgaaatcaggggagctccaggcttgtagttctgagcattatctacagcctgaaactaatggcgtcatacggtctgcgggcggcgtgcctatccttcccggaaacgtggtgcagggcctctaccccgtggcacagccgtctctcggcaatgcttcgaacatggagctgagtctggatcacttcgatataagcttttcgaatcagttctctgatcttatcaacgacttcatcagtgtagaaggaggcagcagcaccatttacggacaccagctggtgagcggcgactctaccgcactgtctcaaagcgaggacggcgctagagcaccgttcactcaggcagaaatgtgcttgccttgttgctccccccagcagggatcactgcaactgtctagcagcgagggcggcgcgtccacaatggcctatatgcacgtcgcggaagttgtatcggcagccagcgcccagggcacacttggaatgcttcaacaaagtggcagggtgttcatggtgaccgactactccccggagtggtcatatccagaaggtggggtcaaggtactgattacgggaccctggcaggaggcctcaaacaactatagctgcttatttgatcaaatctcagtgccagcatcgctcatccaaccaggcgtacttagatgctattgccccgctcatgatacaggcctggttacactgcaagtggcctttaacaatcagatcatctcaaactcggttgtgtttgagtacaaagccagagcactgcctactctcccgtctagccaacatgactggctgtccctggacgataaccagttccggatgagcatcctggagaggctcgaacagatggaaaggcgcatggctgagatgacaggctcccaacaacacaaacaagcgtccggtggaggttcttcaggaggcggatcaggcagtggaaacggagggtcccaagctcagtgtgcctctggaacaggcgctctaggtagctgctttgaatctcgtgtggtggttgtttgtgaaaagatgatgagccgagcatgttgggcaaagagcaagcacctgatccacagtaaaacatttcggggcatgacccttctccacctggcagccgcacagggctatgctacattaatccagacgcttattaagtggcggaccaagcacgcagacagtatagatctcgaactggaggttgacccgctcaacgtggaccactttagctgcacacccttaatgtgggcatgtgccctgggacacctggaagccgctgttgtgctgtataaatgggatcggcgggccattagcataccggactctctcgggagactacctttgggaatcgccaggtcccgcgggcatgtgaaactggccgaatgtctcgaacacctgcaacgagacgaacaggcacagcttgggcaaaatccaaggatccactgtcctgcctcggaagagccatccactgaaagctggatggcacagtggcatagtgaggcgattagctcgcctgagatccccaagggggtcactgttatcgctagcacgaaccctgaactgcggcgacctcgatctgagccatcaaactactattcatcagagtcccataaagactatcccgcgccgaaaaaacataaactcaaccccgagtatttccagacccgtcaggaaaagcttttgccaacggcattgagtttagaggagcctaatattcggaaacagtcaccctccagcaagcaatcagtgccggaaacgctcagcccttccgaaggcgtcagggattttagccgggagctgtctcctcccacacctgagactgccgcattccaggcaagcggatcccaacctgttggcaaatggaattcgaaagatctgtacataggcgtgagtaccgtgcaggttacaggtaatcccaagggaacgtccgtcgggaaagaggcagcccctagtcaggtccgccctagggagccgatgagtgtgctcatgatggctaatcgggaagttgtgaacacagagttaggcagctaccgggatagtgctgagaacgaagaatgcggtcagccaatggatgacatacaggtgaacatgatgacactggcagaacatattattgaggccacccccgatagaatcaaacaggaaaattttgtcccgatggaatcatctggcctggagcgcactgacccagcgacaatctcctctaccatgagctggctggcttcatacctcgctgatgcagattgtctgccgagcgccgcacagattaggtccgcatataatgagccactgacaccatccagcaatacttccctgagtcccgtcggtagccctgtttccgagatagcattcgaaaagcccaatcttccatcagccgctgactggtctgagttcctgtctgccagcaccagcgagaaggttgagaacgaattcgcgcaactaactctaagtgatcatgaacagagagagctgtacgaagccgcccggctggtgcagacggcattccggaagtacaagggccgtcccctacgcgaacagcaggaggtcgctgcggcggtgattcaaaggtgctatcgcaagtataagcagtacgccctctacaagaagatgacccaagcggcgatcctcattcaatcgaagttcagatcgtattatgagcagaaaaaattccaacagtccaggcgcgccgcggtcctgatccagaaatactatcggagctacaaaaagtgcggcaaaagacgtcaggcaaggcgcacagccgtgatcgtgcagcagaagttgcgctcatctctgctgaccaagaaacaggaccaggcggctagaaagatcatgcggttcctgagaaggtgtcgtcattctccgttggtggatcacaggctgtacaaaaggagtgaacgcatagaaaaaggtcaggggacctag

SEQ ID NO: 110551 - DNA, 1911 bp, synthetic construct
  misc_feature 1..1911: note = Description of Artificial Sequence: Synthetic coding sequence
  source 1..1911: mol_type = other DNA
atgatgagccgcgcttgttgggccaagtctaagcatctgatacacagcaagacattcaggggcatgactcttctgcacctggccgctgcccagggatacgcaacccttatccagaccctcatcaagtggcggaccaaacatgctgattctatcgaccttgagctcgaggtcgacccactgaatgttgaccacttttcgtgcactccgctcatgtgggcttgcgcattagggcacctagaagccgctgtggttctctataaatgggacagacgggccataagcattccagattctctggggagactcccactgggtatcgccaggtcccgggggcacgtgaagctggccgagtgtctggaacatcttcaaagggacgagcaggcgcaactcgggcagaacccacggattcactgccccgcgtcggaggaaccttctaccgaatcctggatggcccagtggcatagcgaagcaatcagcagccctgagatcccaaagggggttaccgtgatcgcctcaacaaacccagaactgcgtagaccgaggtccgagcccagcaattactactcatcggagtctcacaaggactaccccgcccccaaaaaacataagcttaaccctgagtacttccaaacgcgccaggagaaattgctgccaacagcgctcagccttgaagagcccaatattaggaagcagtctccaagcagcaaacagagcgtgccagaaactctgtcaccctcagaaggggttcgcgatttctcccgcgagctgtcaccacccacacctgagaccgcggccttccaggcctctggaagccagcccgttggcaagtggaactcaaaggatctctacatcggcgtgtccactgtgcaggtgacaggtaaccctaaagggacaagcgtgggaaaagaagcagccccgtcccaggtccgcccgagagagccaatgtcagttctgatgatggccaacagagaagtggtcaacactgagctgggcagttaccgtgatagcgccgaaaacgaggagtgtggtcagcccatggatgatatccaggtgaatatgatgaccttagcagaacacataatcgaagcaacccccgacagaattaagcaagagaatttcgtgccaatggaatcctccggactggaacgcacagaccctgcaacaatttccagcaccatgagctggctcgcatcatacctagctgatgctgattgtctccccagcgcagctcaaatccggagcgcctacaacgaacctctgaccccctcatccaacacatcacttagccctgttgggtctccagtgtccgagatcgccttcgagaagcccaacctgcctagcgctgccgactggtccgagttcctgagtgcttcgacgtctgaaaaagtcgaaaatgagtttgcccagctgactcttagtgaccacgagcaacgcgagctctacgaagccgcccgtctggtccagacagccttcaggaaatataaaggccgtcccctgagagagcagcaggaagtggcagcagctgtgatccaaaggtgctatcggaagtacaaacaaggcaagaacatctgtctgaagtacgcgttgtataagaagatgactcaggcagcaatccttatccaaagcaagttcaggtcctactatgaacagaaaaaattccagcagagccggagggccgcggtgttaatccagaagtattacagatcctacaaaaaatgtggtaaacggaggcaagctcggaggactgccgtcatcgtgcagcagaaattgcgcagtagtctgcttaccaaaaagcaggaccaagctgctcggaaaattatgcgatttctgcgtaggtgtaggcaccgggtgaaggagctcaaaaaggccaaagagcttgaggatatccaacagcaccccctggccatgtag

SEQ ID NO: 110552 - DNA, 2151 bp, synthetic construct
  misc_feature 1..2151: note = Description of Artificial Sequence: Synthetic coding sequence
  source 1..2151: mol_type = other DNA
atggcctgtccggtaagccctgaccataaacaagagggcgcacacgataccggcttagtgaccttacaggtggcttttaataatcagatcatttccaactctgtggtgttcgagtataaagctcgtgccctccccacactaccttcctcccagcacgattggttgtcattagatgacaatcagttcagaatgtcaatcctcgagcgccttgagcaaatggaacggaggatggccgagatgaccggctctcagcagcacaaacaggcatctggaggaggcagtagtggaggaggctccggctctggcaacggcgggtctcaggctcagtgcgcgtccggtacaggcgccctggggtcttgtttcgagagccgcgtggtcgtggtgtgcgaaaagatgatgagtagagcctgttgggccaagagcaagcacttaattcatagcaagacctttaggggcatgaccctgctgcatcttgccgccgcgcagggctacgcgaccctgatccagactctgatcaagtggcgcacgaagcacgccgattctattgacttagagctcgaggtcgatccgctcaatgtggaccattttagttgcacaccgttaatgtgggcctgtgctctcggccatttggaggcagcagtggtgttgtataaatgggataggagagctatcagcatcccagacagcctcggtaggctgcccctcggaatcgcccggtccaggggccatgtgaaactcgctgagtgtctagagcacctccagcgggatgaacaagcccaactgggacagaacccccgaattcattgtcccgcctctgaggaaccttccacagagagctggatggcccagtggcatagtgaagccatcagttcccccgaaatcccaaaaggcgtcactgtgatcgccagcacaaatcccgagttgcggcgccccaggagtgaacccagcaactactactctagcgagtcgcataaagactacccagctccgaagaagcataaactgaatccggagtacttccaaacacgacaggagaaactgttacctacggcactgagcctcgaggagccgaacatccgcaaacagtcaccctcaagcaagcagtccgtgcctgaaacactatcgccaagcgagggagtcagggatttctctagagaactgagccctcccactcccgaaacagccgccttccaggcttctggatcccagccagtgggcaagtggaatagcaaggacctctatattggcgtgtcaaccgttcaggtaactggcaatccaaagggcacgtctgttgggaaggaagcagctccctcacaagtccgcccccgggaacctatgagcgttcttatgatggccaaccgcgaggttgtgaatactgaacttggaagctatcgcgactcggctgagaacgaggagtgcggacagcccatggacgatatccaggtcaatatgatgacgctcgcagagcacattattgaggccaccctctccagtactatgtcatggctggcctcatatctggcagacgccgactgcctgccctccgctgcccaaatacggtctgcatacaacgagccattgactccctcttctaacacgtctttaagtcctgttggctcacccgtgagtgaaattgctttcgagaaggtggagaacgagttcgcccagctaaccctctccgaccacgaacagagagagctgtatgaggcggccagattagtccaaactgcgttccggaaatataagggacgccccctgcgggagcagcaggaagtggccgcagcggtcatccaacgctgctataggaagtataagcagtatgccctctataagaagatgacacaggctgcaattttaattcaaagcaaattcagaagctattacgaacagaagaaatttcagcaaagtcggcgcgctgcagtgcttatccagaagtactatcgctcttacaaaaagtgtggtaagaggaggcaggccaggcgaaccgctgtgatcgtgcagcagaaacttcgttcatctctgctgacaaagaaacaggaccaggccgcacggaagattatgcgtttcctgcggagatgccggcacagagtcaaggagctgaaaaaagcgaaggagctggaggacatccagcagcatcccctcgccatgtag

SEQ ID NO: 110553 - DNA, 4980 bp, synthetic construct
  misc_feature 1..4980: note = Description of Artificial Sequence: Synthetic coding sequence
  source 1..4980: mol_type = other DNA
atgtggcgcgccgagggcaagtggctccctaaaactagcagaaagtcagtgtcgcagtctgtgttttgcggtacttccacttactgtgtgctcaacactgtgcctcccattgaggacgaccacggtaacagtaatagcagtcacgtaaagatcttcctgccaaaaaaactcctagagtgcctgcccaagtgctccagcctaccaaaggagcggcacagatggaacacgaatgaggagatcgcagcgtacctgatcacgttcgagaagcacgaggagtggctcacaaccagccccaagacccgtccgcagaatggctctatgatactatataacagaaagaaagttaaatatcgaaaagacggctattgttggaaaaaacggaaggacgggaagacaacacgcgaggaccacatgaagctgaaggttcagggtgtggaatgcctctatggttgctacgttcactcatcaattatacccacgttccaccgccgctgttactggctcctgcaaaatccggatatagttctggtccactacctgaatgtccctgcaatagaagattgtggaaaaccctgtggcccaattctgtgcagcatcaacacggataagaaggagtgggcgaaatggaccaaggaggaactcatcgggcaattgaagccgatgttccacgggattaagtggacttgctcaaatggcaactcctcttctggttttagcgtggagcaactggtgcaacagatactggattctcaccaaacgaagccccagccccgcacacataactgcttgtgtaccgggtctctcggagctggaggtagcgttcatcacaagtgcaattccgctaagcatcgtattatttctcctaaagtcgagccacgaaccggcggatatggttcacattctgaagtgcagcataatgatgtgtctgagggcaaacacgagcactcccattccaagggctctagtcgcgaaaaacggaacggaaaggttgcaaaaccggtactgctgcaccagagcagcactgaagtttcctccacgaatcaggttgaggtgccggatacaacacagagtagccccgtgtctatatccagcggccttaattctgacccagacatggtggattccccggtcgtgacgggcgtttctggtatggccgtcgctagcgtgatgggctctctgtcacagtcagcaacagtgttcatgagcgaagtgaccaacgaggctgtgtataccatgagccccactgctggaccaaatcaccacctcctgagcccagacgcttctcagggcctggtcttagctgtgagtagtgacggtcacaaatttgcctttcccactacgggatcgagcgaatcgctttctatgctgcccacaaatgtatccgaggaacttgtcctctctaccacactggacggtggtcgcaaaatccctgaaacgacaatgaatttcgaccccgactgtttcctcaacaatcctaaacagggccaaacatatggaggcggcggtctgaaggcagagatggtgtctagcaatattcgtcactcgccaccaggagagaggtcttttagcttcactacagtcctgactaaagaaattaagacagaggacacaagctttgagcagcagatggcgaaggaagcatattctagtagtgctgctgccgttgccgcaagttccctgaccctgaccgcaggtagctcattgcttccaagcggcgggggcctgtcaccatcaacaacactggagcagatggacttctcggccatcgattctaataaagattatacatcctctttctcccagacaggacattctccccacatccaccagaccccctcaccctcattcttcctgcaggacgcatctaagccacttcccgtggagcagaacacacattcctccttgtccgactcggggggcactttcgtgatgcctacggtgaagacagaggcctcctcacagacaagctcatgctccggacatgtggaaacccgcatcgagagcaccagtagtctgcacctgatgcaatttcaagccaacttccaggcgatgaccgccgagggcgaggtgacgatggagactagtcaggcggcagaaggaagcgaggtgctgctgaaatcaggcgaattacaggcatgctctagcgagcactaccttcagcccgagacgaatggggtgatacgttccgccggcggggtcccaatccttccaggtaacgttgtgcagggcctgtatcccgtggcgcagccatctctgggcaatgccagtaacatggaactctcactggatcatttcgacataagtttctcaaaccaattttctgatttgattaacgacttcatctctgtggagggtggatcctctaccatctacggacatcagctagtgtcgggcgattccaccgcactctcccagtccgaggacggggcacgagccccctttacacaggccgaaatgtgcttgccgtgttgctcaccccaacaaggaagcctgcagctaagttccagcgaaggcggtgcctcaaccatggcatacatgcacgtggccgaggtagtaagcgcggcttccgcccagggcacactgggaatgctgcagcagagcgggagggtcttcatggttaccgattactcccctgaatggtcttatcctgaaggcggggtgaaagtcctcatcactggaccttggcaggaagcttccaacaactactcgtgcctattcgatcagattagtgtgcccgcctcactcattcagcccggcgtactgcggtgctattgccccgcccatgataccggactggtaaccctgcaggtcgccttcaacaaccagatcatatccaactcggtcgtgttcgagtacaaggcgagggcactacctactctgccatcttctcagcacgactggctgagtctggacgacaatcaattccgcatgagtattctcgagagacttgagcaaatggagagaagaatggctgagatgaccgggtcccagcagcacaagcaggccagcgggggtggctccagcggcggaggcagcggcagtggcaatggaggcagccaggcccagtgcgcttctggaactggggccctcggaagctgcttcgaaagccgggtggtcgtcgtctgcgagaagatgatgagccgtgcttgctgggcaaaatctaaacacctgatccatagtaagacatttagggggatgaccctcctgcacttagcagccgcccaggggtacgctaccctgattcaaacattgataaagtggcggaccaagcacgcagatagcatcgacctagagctcgaggtcgacccactcaacgtcgatcacttctcatgtaccccactgatgtgggcctgtgctctgggccacctcgaagccgcggtcgtgctctataaatgggaccggcgagcgatttcaatcccagactcactgggcagactgcctctaggaatcgccagatcacgaggccatgtgaagctagcagaatgcctggagcacctccaacgcgacgagcaggcccagctgggacagaaccctagaatccattgtcctgccagtgaagagccgagcaccgaaagttggatggcacagtggcactctgaggccatctcaagtccggagattcctaaaggagtgactgtcatagcgtctaccaatcctgagcttaggcggccccgtagtgaaccttccaactattattcatccgaatcccataaggattaccccgccccgaaaaagcacaaattaaatcccgagtatttccaaacaagacaggaaaaactcctgcctactgcgctctcgctagaggaacctaacatacgtaagcagtctcccagtagtaagcaaagcgtccccgagaccctgtcccctagcgaaggggtacgggatttttctagagagctaagcccacctactcctgaaacggcagcgtttcaagctagcgggtcacagcctgtgggaaaatggaattcaaaagacttgtacatcggcgtctccactgtgcaagtgaccggcaaccctaaaggcacatccgttgggaaggaagcagccccttcacaggtcagacctcgggaacccatgagtgtactaatgatggccaatcgggaggtagttaatacagaactgggatcatatagggactctgccgagaatgaggagtgcgggcagccgatggacgatatacaggtgaacatgatgactctggcagagcacataatcgaagcgaccccagacaggatcaaacaagaaaactttgtgccgatggaatccagcggtctcgagaggaccgatcctgccacaatcagctctactatgagttggctggcctcttacctggcagatgcagattgcctcccaagcgccgcccagattcgcctgtcacctgtgggatcccctgtgtcagaaatagcctttgagaaacctaacctgccttcggccgcagattggtcagaattcctctcggcctctacatctgagaaagtcgagaacgaattcgcacagctaactctatccgatcacgagcagagggaactctatgaggccgcccggctggtgcaaaccgcattccgcaaatacaaggggcgtcctctgagagaacagcaggaggtagcagctgcagtgatccaacggtgttaccggaagtataagcaatacgctctgtataaaaagatgacccaagccgctatcctgattcagtcaaagtttcggagttactatgaacagaagaaatttcagcaatcccgaagagcggccgtgcttatacagaaatactacagaagctacaagaagtgcggcaagagacgacaagctagacgcacagccgtaattgtgcagcagaagctgcgctcatctttgttgacgaaaaaacaagatcaggccgctaggaaaatcatgcgctttctccggcgctgcagacacagggttaaagagctgaagaaggccaaagagctggaggatattcagcagcatccactggccatgtag

SEQ ID NO: 110554 - DNA, 243 bp, synthetic construct
  misc_feature 1..243: note = Description of Artificial Sequence: Synthetic coding sequence
  source 1..243: mol_type = other DNA
atgtggagagctgaagggaagtggttacccaagaccagtcgtaaatcggtgagtcagtctgtgttttgcggaacatctacctattgtgttttgaataccgttcctcctatcgaagacgatcacggcaacagtaactccagccatgtgaaaatattcctgcctaaaaaacttcttgaatgcctgcccaaatgcagcagtctgcccaaagagaggcatcgttggaacaccaacgagcggtcatag

SEQ ID NO: 110555 - DNA, 306 bp, synthetic construct
  misc_feature 1..306: note = Description of Artificial Sequence: Synthetic coding sequence
  source 1..306: mol_type = other DNA
atgtggcgtgccgagggaaagtggctacccaagaccagccgtaagagtgtctctcagtccgtattttgcggcacatcgacatattgcgttttgaacaccgtgcctcctatcgaggacgaccacggaaattccaactcaagtcatgtaaagatcttccttccaaaaaaactgctggagtgtcttccaaagtgcagctctctcccaaaggaacgacataggtggaatactaacgaggccctaacaacgcacctgtttatgggagcagcgaagaagagagatccccagagttggagtcacgaaggatag

SEQ ID NO: 110556 - DNA, 3609 bp, synthetic construct
  misc_feature 1..3609: note = Description of Artificial Sequence: Synthetic coding sequence
  source 1..3609: mol_type = other DNA
atgaacactaaggatacaaccgaagttgctgagaatagccatcatctgaagatcttcctgcccaagaagctcctggagtgcctccctcgctgtcctctgcttccaccggaacgacttcgctggaatacaaatgaggaaatcgcctcatatctgatcacttttgagaagcacgacgaatggctgtcctgcgctccaaagactaggccgcagaatggatccatcattctctataaccgaaagaaggtgaagtaccggaaggacggatacctgtggaagaaaaggaaggacgggaaaacgacaagggaagaccatatgaaacttaaagtgcaggggatggaatgcctgtatggctgttatgtgcattcctctatcgttcccacatttcatcggagatgttactggttgcttcagaatccagatatcgtgctcgtccattaccttaatgtccccgccttagaagattgtggtaagggctgctcaccaatcttctgcagtattagttctgacaggagagaatggctgaagtggtcacgggaggagcttttaggacagctgaaacccatgttccacggcattaaatggagctgcgggaatgggacagaagagttctctgtggagcacctagttcaacagattttggacactcatcccactaagcccgctcctagaactcatgcatgcctttgcagtggaggactgggctcaggatctcttactcacaaatgctctagcactaaacacaggatcatctcccccaaggtcgaacctcgtgctttaaccttaacttccattccacacgcgcaccccccagagccccctccccttatcgcacctctgccacccgagctgcccaaagcccatacgtcaccgtcttcttcatcgagctccagctctagcgggtttgcagaacccctcgaaatccgaccaagcccccccacctctcgcgggggaagcagtagggggggaactgccattcttctgctgaccggccttgaacagcgcgctggagggctcactccaacccgccacctggcacctcaagcagacccgagacccagtatgtccctggcggttgtagtgggcaccgagccctccgctccccccgccccacctagtcctgctttcgatccggaccgatttctgaacagcccccagagaggacaaacttacggaggcggccagggcgtctctcccgatttccctgaggctgaggctgcccataccccctgttctgcacttgagccggctgcagccctggagccgcaagccgcggcccgcggccctccacctcagtctgtagcaggcggtcgcagaggtaactgcttttttatacaggacgatgattccggcgaggagttaaagggccacggcgctgcaccccccataccatccccaccaccaagcccaccaccatcccccgcccccctggaacctagctcaagagtagggaggggggaggctttgttcggcggccccgtaggtgccagcgagctggaaccatttagcctaagctctttcccagacctgatgggcgaactgatatcagacgaagctccatcaataccagctccgactccccaactgtctccagcattgagcaccataaccgattttagtcccgagtggtcttacccggagggcggagtgaaggtgctgataaccggcccgtggaccgaggcagccgagcactacagctgcgttttcgaccacattgcggtgcccgcctccctggtccaacccggggttttgcgttgttattgcccggcacatgaagtcgggctggtgagcctgcaggtcgccggcagggaaggtccgctgagcgcctccgtgttatttgagtatcgtgcccgcagattcctatccctgcccagtactcaactggattggctgtcattagacgataatcagtttcggatgagtatcctggagcggctcgagcagatggaaaagcgtatggccgaaatcgccgctgcaggccaggttccatgccaggggcctgatgccccccctgtccaggatgaagggcaaggccctggcttcgaggctagggtggttgtgctcgtggagagcatgatcccacgctctacgtggaagggccctgagcgcctcgcccacggcagtccgttcaggggaatgtctctcctgcatctcgcagcagcccagggctatgcccgcctgattgaaacattaagtcagtggagaagtgtggagactggctcactggatctagaacaggaagtggaccctctgaatgttgaccatttctcgtgcactccgctgatgtgggcatgtgccctgggccatttagaagccgccgttctcctattccgatggaaccggcaagcactcagcatccccgatagcttggggcgactgcccctcagtgtcgcccactcgagaggacacgtaaggcttgctcggtgcctggaagagctacagagacaggagccaagcgtggaaccgcctttcgcactgtcccccccaagtagttcgcccgacaccggtctgtcatccgtttctagtccatcagaactatcagacggtacgttctctgtcacttccgcttacagcagcgccccagatggttctccccccccagccccattaccggccagtgagatgacaatggaagacatggcccccggccagctgtctagtggggtgcctgaagctccgctgctactgatggattatgaagccaccaacagtaagggacctttatcatctctcccagcactcccccctgccagtgacgatggcgcggccccagaagacgcggacagtccacaggcagtggacgtcatccctgttgacatgatctcactcgccaagcagattatcgaggctacccctgagagaattaagcgggaagattttgtgggtctgccagaggcaggggcatctatgagagagcgcaccggggccgtaggactgtcagagacaatgagctggctcgctagctatttggagaacgttgaccacttccctagcagcactcccccgtctgaattgccattcgaaagagggaggcttgcggttccttcagcaccttcctgggctgagtttctgagtgcgtccacgagcggaaaaatggaatccgacttcgccctgctgacgctgtccgaccacgaacagagagagctgtatgaagccgcccgggtgattcagacggcattccgcaaatataaaggaagaagactgaaggagcagcaggaggttgcggctgctgtgatccaacgatgctacagaaaatataagcaattgacttggattgcattaaagtttgctctgtacaaaaagatgacacaggcagccatcctgattcagagcaaatttcgctcgtactacgaacagaagagatttcagcagagccggagggcggcagtactcatccaacagcattatcggagctaccgccgtaggcccggacccccccatcggaccagcgcaaccctgccagctcgcaacaagggctctttcctaacaaaaaagcaggaccaggcggcgcggaaaattatgaggttcctgcgaaggtgtagacaccggatgagggaacttaaacagaaccaggagttggagggtctgcctcagcctggactggcaacttag

SEQ ID NO: 110557 - DNA, 3588 bp, synthetic construct
  misc_feature 1..3588: note = Description of Artificial Sequence: Synthetic coding sequence
  source 1..3588: mol_type = other DNA
atgaacacaaaggatactacagaagtagctgagaattcacatcatctgaaaatcttcctgccgaagaaattactggagtgcctcccccgttgtcctctgcttccgccggaaagattgcgctggaatacaaacgaggagatcgccagttacctaataacgttcgaaaaacatgacgaatggctgtcatgtgcccctaaaacaaggccccagaacggcagtatcattttatacaatcgaaaaaaagtcaagtatcgtaaggacggatacttatggaagaaaaggaaggacggtaaaaccactcgcgaagaccatatgaagctgaaggtgcaggggatggagtgtttgtatgggtgttacgttcattcatctatcgtccccacttttcacagaaggtgttactggctcctgcaaaaccccgatatagtgctagttcactaccttaacgtgcccgcacttgaggattgcgggaagggatgttctcccattttctgctctatttcctcagatcgccgggaatggctcaagtggagccgcgaggagcttctcggtcagctgaaacccatgttccacggcatcaagtggtcatgtgggaacggaaccgaggagttttccgtcgagcacctcgtccagcagattctagacacccaccctacaaaaccagcgccccgaactcacgcgtgcctgtgttccggcgggctgggcagcggttcattgacccataaatgttcttctaccaagcatcggattatcagccctaaggtggagcccagggctctgactttgacttccattccccatgcccaccctccagaaccacctcctctcatcgctcctcttccccccgagttgccaaaggcccacacctcaccgtcctcctcctcctcttcgagttctagcggctttgcggagccattggagattcgaccgtcacctcctacatccagaggtggctctagtagggggggtacagctatactgcttctaacaggcctggagcagcgagctggggggctgacccctacacgacacctggctccgcaggcagatcctcggccatcaatgtctttagccgtggtcgtgggcactgaacccagtgcaccccctgcacctcctagcccagccttcgatcctgatagatttctgaactctccccagcggggccaaacctacggcggcgggcaaggggtgagccctgacttccccgaagcagaagccgcccacacaccgtgcagtgcactggagccagccgccgctctggaaccccaggctgccgcccgaggaccgcccccacagtccgtggcgggaggccggagaggtaactgttttttcatccaggatgatgatagcggtgaggagctgaaagggcatggagcagccccccctatccccagtccaccaccatcacctcctccttccccggctcccctcgaaccaagctctcgggttggccgcggcgaggctctgtttggcggtccggtcggagcaagtgagttggagccgttctctctctcttccttcccagacctgatgggggagctcatatccgatgaggcacccagcataccggcccctaccccgcagctgagtccagcactttctaccatcaccgatttctccccagagtggagttatcccgagggcggcgttaaagttctgatcaccggtccatggaccgaggccgccgaacactattcctgcgtctttgatcatatagcagtaccagccagcctggtgcagcccggcgtgctgagatgttactgccccgcgcatgaggttggtctggttagcttgcaggtagctgggagggaagggccactgtctgcatctgtgctgtttgaataccgggctcgcaggtttctaagcctgccctccactcagctcgactggctctctctggatgataaccagtttaggatgtcaatcttagagcgcctcgagcaaatggagaagagaatggcagagatagctgccgcgggccaggtgccatgccagggtcctgatgcccccccagtgcaagatgaagggcagggcccagggttcgaagccagagtcgtggtgctcgtcgaatcgatgatcccaaggagcacatggaagggcccagaacgtctcgcccacggttcgcctttcagagggatgagtcttctgcacctggccgccgcacagggatacgcacgactcatcgaaacattatcacaatggcgctcagtggagactggcagtttagatcttgaacaagaggttgaccccctgaatgtcgatcatttctcgtgcaccccattaatgtgggcatgtgctcttggccatcttgaagctgccgtgctgctgtttaggtggaaccgacaggccctctcaatccctgattcactgggacggcttcccctgtctgttgcccatagccgaggccacgttcggctggcccgatgcctcgaagagctgcagagacaggaacctagtgtagagccaccattcgcactgtcacctccaagctcctcccctgacaccggcctgagttccgtctcctcaccttcagagctttcagacggcacctttagcgtgacaagtgcttatagctccgcacccgacggatctccgccccccgcccctcttccagccagtgaaatgaccatggaagacatggcccctggccagttgtcaagcggcgtacctgaagcaccattgttgctgatggactatgaggccacaaatagcaaaggcccgctgtcctccctccccgctttgccccctgcttctgatgacggcgccgccccagaggatgctgattctccacaagcggtggatgtgatccccgtcgacatgatatccctggctaaacagataatcgaagccactcccgaacggattaaaagagaggatttcgttggacttcctgaggctggagcttccatgagagaacgaaccggcgccgtggggctttcagagaccatgtcatggttagcctcctatttagaaaatgtggaccacttcccttccagcacgcccccttcggaactcccattcgagcgagggagacttgccgttccaagcgcccctagctgggccgagtttctgagcgctagcacttcgggcaagatggaaagtgactttgccctattgaccctgtctgaccacgagcagagagaactgtatgaggccgctagggtaatccagactgcctttcggaaatacaagggccggcggcttaaggaacagcaggaagtagccgcagccgtgatacagagatgttacagaaaatacaagcagtttgcgctatataaaaagatgacccaggccgcaatcctgatccagtcaaaattccgtagctactacgagcagaagcggtttcagcagtccaggcgcgctgccgtcctgatccagcagcactatcggtcttatcgcagacggcctgggccaccccaccgaactagcgccacactgcccgctcgtaacaagggtagtttcctgacaaaaaagcaggatcaagctgcacgaaaaattatgcgcttccttcgcagatgtaggcacagaatgcgggagttgaagcagaaccaagagctggaaggactaccgcagcctggcctggctacgtag

SEQ ID NO: 110558 - DNA, 3606 bp, synthetic construct
  misc_feature 1..3606: note = Description of Artificial Sequence: Synthetic coding sequence
  source 1..3606: mol_type = other DNA
atgggcacagactccccctcaccgcgtccactgcgccctggtgttacactgccacctggagccttgacgatgaacaccaaggacaccacagaagtcgcagaaaatagccaccacctgaaaattttcctgccaaagaaacttctcgagtgcttacctagatgccccctgcttccacctgagcgcctcagatggaacaccaatgaggaaattgcctcttatctaattacattcgaaaagcacgacgagtggctgagctgtgctccaaaaactagaccacagaacgggagcattattctctataatcggaagaaggtgaagtaccggaaagatgggtatctctggaaaaagaggaaggatgggaagaccacccgggaagaccatatgaagctcaaggtgcagggtatggagaacccagacatcgtcctcgtccattacctgaatgttccagctttggaggactgcggtaaaggatgctctccaattttttgcagcatctcatctgacaggcgcgagtggctgaagtggtccagagaggagctcttgggccagttgaagcccatgttccatgggatcaagtggtcctgtgggaacggcaccgaagagttctcggtagaacacctggtgcagcagattttggacacccatcctacgaaaccagcacctcggactcacgcatgcctgtgtagtggcggcctaggcagtggatctttaacccacaagtgttccagtacaaaacatcggatcatctcccccaaggtcgaaccacgggcgctcacattgacatcaatcccccacgctcacccacccgagccacccccattgatcgcccctttaccaccagagctccccaaagcccacacctcgcccagtagttcgagctcttcatcatcctctgggtttgctgagcctcttgaaattcggcccagtccccccactagccgcgggggatctagtcgtggtggtaccgctatcctgctgttaacggggcttgagcaaagggccggcggactgactcccacccggcatctggcaccacaagccgaccccagaccttccatgtcactggctgtggtcgtgggaactgaaccttctgctccgcccgcccccccctcacccgcctttgaccccgacaggtttcttaattcgccgcagcgagggcagacctacggagggggccagggcgtgagtcctgatttccccgaagccgaagctgcgcatactccctgtagcgcccttgagccggcggccgccttggagccccaggcagctgctcgcgggccccccccacagagtgttgcaggcggtaggagaggcaactgcttttttatccaggacgatgacagtggagaggagctgaaaggccatggcgccgccccccctattccgtcccccccaccatcacctcctcctagcccagccccactagaacccagcagcagagtaggccgcggggaggcgctgttcgggggtcctgtcggcgcttctgaacttgaaccgttcagcttgagtagtttcccggatctcatgggagaattgatcagcgacgaggctccttctatcccagcaccaacgcctcagctgagtccagccctgtctaccattaccgatttcagccctgagtggtcctatccagaaggaggcgtcaaggttctgatcaccggtccatggaccgaggcagctgagcactactcctgtgtgtttgaccatattgcagtgccagcgtccctcgtccagcctggtgtgcttaggtgttactgtccagcacacgaagtgggactggttagtctgcaggtagctggcagagagggcccgctcagtgcttccgtgttgttcgaataccgagcacggcggttcctgtctctgccaagtacccaacttgactggctgtcactcgacgacaatcaatttcgaatgtcaatcctggaacgccttgagcagatggaaaaacggatggccgagatcgccgctgccggacaggtgccctgccagggtcctgatgccccgccagtccaggatgaggggcaggggccaggattcgaggctagagtcgtcgtgctcgtggaatctatgatacctcgcagcacatggaaaggccctgagaggcttgcccatggaagtccattcagggggatgagcctgctacacctggctgcagcccagggctacgcaagactcatcgagacgctctctcagtggagaagcgtggagaccggcagcttagatcttgaacaggaggtggaccccctgaacgtcgatcatttttcatgtacccccctgatgtgggcatgcgctctggggcatcttgaggctgccgtgcttctttttcgatggaacagacaagcactgtccattcctgactcacttgggaggctgccattgagcgtcgcgcactcccggggacatgtccgattagcccgctgcctggaggagctgcaaagacaggaaccttcagtagagccacccttcgccttaagcccgccatcttcttccccagacaccggcttgtccagcgtgagcagcccctcagagctctctgacggtactttctcagtgacgtcagcgtacagctccgcccctgacggaagtccacctcccgccccattacctgctagtgaaatgactatggaggatatggctccagggcagctctcatctggcgtgcctgaagcaccactgttgttaatggattatgaagctacaaattcgaaaggacccctatccagcttgcccgccctgccgccagcatctgacgatggagctgctccagaagacgctgacagccctcaagccgtggacgtcatccccgtggatatgatcagcctcgccaagcagatcatcgaagctacaccagagcgcatcaaacgcgaagattttgtgggtcttcccgaggccggggcatcaatgagggagcggacaggagcagtcggtttaagcgaaacaatgtcttggttggcatcctatcttgaaaacgtagatcatttcccatcctcaacacctcctagcgaattaccctttgaacgcggaagactcgcagtaccatcagctcccagttgggctgaatttttgagcgcttctacctcgggcaaaatggagtcggactttgctctgctgactctgtcagatcacgaacagagggaactgtatgaagcagcacgggtgatccagacggccttccggaaatataagggtagaagactgaaagaacagcaggaagtggcggctgccgtgattcagcgctgctaccggaaatataagcagctgacctggatagctcttaagttcgccttgtacaagaaaatgacgcaagccgcaatcttgattcaatctaaattcagaagctattatgaacagaaaaggtttcagcagtcccgccgtgcagcagttctgatacagcagcattaccggtcctaccgcagacgacccggtcccccgcaccgtacctccgctaccctccccgccagaaataaaggttcattcttaaccaagaagcaggatcaggctgcccggaaaatcatgagattcctgcgccgatgtagacaccgcatgagagaactcaaacagaaccaagagctggagggcctcccccaacctggattggcaacttag

SEQ ID NO: 110559 - DNA, 3594 bp, synthetic construct
  misc_feature 1..3594: note = Description of Artificial Sequence: Synthetic coding sequence
  source 1..3594: mol_type = other DNA
atggcagcagccgctgtcacacgcggcacccccggggaaaactcccaccatttgaaaatctttttgccaaaaaagttgcttgaatgcctccctcgctgccctttgctgccccccgagcggctgaggtggaataccaacgaggaaatagcctcctatttaatcaccttcgagaagcacgatgaatggttgagctgcgctcctaagaccaggccccagaatggctcaattatcctgtacaaccgtaaaaaggtcaagtaccgtaaggatggatacctctggaaaaagaggaaggacgggaagaccacccgtgaggaccacatgaagctgaaagtgcagggaatggagtgcctctacggctgctacgtgcattcctctattgtgccaacctttcaccgtaggtgctactggttgttacagaacccagacatagtgctggtacattacctgaatgtgcctgccctggaggactgcggaaagggctgttcacccattttttgtagcatttccagtgatagaagagaatggctgaagtggtctcgagaagaacttttaggtcaactgaagcccatgtttcatggcattaaatggtcatgtggaaatggcaccgaagaatttagtgtggagcatttggtgcagcaaattctggatacccaccccaccaaacccgcccccagaacacacgcctgcctgtgcagcggcggtctgggatccggcagcctgacacacaagtgttcctcgaccaaacaccgaatcataagccctaaggtcgaaccgagggcattgactctgacctctatcccacatgcgcatcctcccgaaccaccgcctttgatcgccccactgcctcctgaactgccaaaagcacacacatcccccagctcctcatcctcatcgtcttcctcaggattcgcagagccactggagattaggccttcaccccctactagtagggggggtagcagcagaggcgggaccgccatcctgctcctgaccggactggaacaacgggccgggggactaacgccaactcgccatctcgccccccaggccgacccccgccctagtatgagccttgccgtagtggttgggactgagccatccgctccccccgccccacccagtcccgcatttgacccagatcggtttcttaattccccccagcgcggtcagacctacggagggggacagggcgtttcacctgattttcccgaggctgaggccgcccatactccttgctccgctctagaaccagcggcggccctagaaccacaggcagctgctcgcggtccacccccccagtctgtcgccggaggccggaggggaaattgtttcttcattcaggacgacgactccggtgaggagctgaagggacacggggctgctcccccaatccctagccccccaccaagtccccctccctccccagcaccactagagcctagttcgagagtcggacgaggcgaagctcttttcggaggaccggtgggagctagtgaacttgagcctttctccctcagctcctttcctgatctgatgggggagctcatttctgatgaggccccctcgatcccagcccccacccctcagcttagtccggctctgtcaacaatcaccgatttttctcctgaatggtcctatcctgagggcggagtcaaggtgctgatcacagggccttggaccgaggcagctgagcactatagctgtgtctttgaccacatcgctgtccccgcctctctagtccagccaggggtcttgagatgctactgtcccgcccatgaggtgggcctggtctccctccaggtcgccggccgagaaggccctctgtctgcctccgtcctgtttgaatatcgtgctagacgatttttgagcttaccatcaacacagctcgattggctctccttggatgacaatcagtttcgcatgagcattttggaacggttagaacagatggagaaacgcatggctgaaatcgcagcagctgggcaggtgccatgccagggaccagacgcccctcctgtgcaggacgaaggacagggacctggtttcgaggcgcgcgtagttgtacttgtagagtctatgattcccaggtcaacatggaagggtccagaaaggcttgcccacggcagcccgttcagaggcatgtcactgttgcacctggccgccgcgcaggggtacgcccgcctcatcgagacgctgagccagtggcggtctgttgagaccggcagcctcgatctggagcaggaggttgatccactgaatgtcgaccacttctcttgtacacccttgatgtgggcatgtgcactcggccatttggaggcggctgttctcctcttccgatggaatcgccaggcgctttcaatccctgacagcctcggccgcctgcctctgtctgtcgcgcattcacggggacatgtgcgactggctagatgcctcgaggagctccagaggcaggaaccttctgtggagcccccgttcgccctttcccctccaagctctagccctgataccggactctctagcgtgtcttccccctccgaactgagtgatggcaccttctcggtgacttcagcttactccagcgctcccgacggcagcccacctcctgcaccactgcctgcctcagaaatgacaatggaggatatggccccaggccagctcagcagtggcgtgccagaggcacctttgctgctgatggactacgaggcgaccaacagtaagggcccactgagtagcctccccgctttgccgcccgccagcgatgatggagctgctcctgaggacgccgactccccccaagcagtagacgtgatcccagtcgacatgatcagtcttgcaaaacaaatcatcgaggcaacacccgagcggattaagcgggaagatttcgtcggtctcccggaggctggagcatcaatgcgcgagaggactggggctgtcggattgtctgagaccatgagttggctggcctcctacctcgagaatgtcgatcattttccttcttctacccctccatccgaactgccttttgaacgtggccgcctcgctgtcccctcagcaccttcctgggcggagttcttgtccgcttccaccagcggaaaaatggagtcagactttgcactcctaaccctttcagatcacgaacagcgtgagctctacgaagctgcccgggtcatccaaaccgcattcagaaaatataaaggtcgcagactcaaagagcagcaagaggttgctgccgcagtgatccaacgctgctaccgaaagtacaagcaattcgccttgtataagaaaatgacgcaagcggcaatcttgatccagagcaaatttagatcctactatgagcagaaacgattccagcagtccaggcgagcagccgtgttaatccaacagcattaccggtcataccgaaggagaccgggcccccctcatcgaacctccgctaccctgccggctcgaaataagggaagttttctgaccaaaaaacaggatcaagccgcacgaaaaatcatgcgattcctccgcagatgcagacatcgcatgcgagaactcaagcagaatcaggagctggagggactcccacagcccggcctggctacctag

SEQ ID NO: 110560 - DNA, 3726 bp, synthetic construct
  misc_feature 1..3726: note = Description of Artificial Sequence: Synthetic coding sequence
  source 1..3726: mol_type = other DNA
atggggaccgactccccctcacccagaccactaagaccgggagtcaccctacctccaggcgccctcacgatgaacacaaaagatacgaccgaggtggcggagaattcccaccatttgaagattttcttgccaaaaaagttactagagtgccttccccgctgtccccttcttccgccagagcgcctccggtggaacactaacgaagagatcgcctcctatttgatcacatttgagaaacatgatgagtggctgtcatgtgctcctaaaacacgcccgcagaacggcagcataatcctgtataaccgcaagaaggtcaaataccggaaggatgggtacctttggaagaaacgaaaggatggcaagacaactagagaggaccatatgaaattgaaagtgcagggtatggagtgtttgtacgggtgctacgtgcactcttccatcgttcctacatttcaccgccggtgctactggctgctgcagaacccagacatcgtcctggtacattacctgaacgtgcctgcactggaagattgtggtaagggatgctcgcctatcttctgctcgattagctcagaccggagagagtggcttaaatggagtagagaggagctattaggccagcttaagccaatgttccacggaatcaagtggtcttgtggcaacggtaccgaagagtttagtgtagagcatttggtacaacagatcctcgatactcaccccaccaagcctgcccctagaacacacgcttgcctctgctccggtggcttgggctcaggcagcctcacacacaaatgcagcagtacaaaacataggatcatatcaccaaaagttgaacccagagccctgacacttacctccattccacacgctcatccacctgagccccctccactaattgcaccactgcctcccgagttgcctaaggcacatacaagcccatcttcaagttcttcttccagctctagtggatttgcagaaccactcgaaatccgccctagtcctcccacgtcacggggtgggtcttcgcgaggcggaacagctatcctccttctgacaggcctggaacaacgggccggcggccttactcctactcgccatctcgccccacaggcagaccctaggccaagcatgagtttggctgtggtggtgggaaccgagcccagcgccccacctgccccgccctcacctgctttcgaccctgaccgatttcttaattcccctcaacgcgggcaaacgtacggcggtggccagggggtgtcccctgactttccagaagctgaagccgcccatacaccttgtagcgctctcgagccagccgcggctttggaaccccaagccgccgcccggggaccccccccacagtcagtggccggagggaggcgcggaaattgtttctttatccaggacgatgactcaggggaggaactgaaaggccatggtgcggcgcctcctatccctagcccaccaccgtctccacctcccagcccggcccccctggagccgagcagccgggtcggccggggggaggcactctttggggggcccgtgggtgccagcgaattagagccattttctttgagtagcttccccgatttgatgggcgagctaatttccgatgaggcaccgtccattcccgctccgactccacagctctctcccgctctgagcactattaccgatttctcgccagaatggtcatacccagagggcggcgtaaaggtgctgatcacaggaccctggacggaggccgctgagcactatagttgtgtatttgatcatattgctgttcccgcgtcacttgtccagcctggcgtgctgcggtgttattgcccagctcacgaggtcggcctggttagtctgcaggtcgccgggagagagggtccactgtcagcatccgtcctgttcgaatacagggcacgaaggttcttaagcttgccatcgacccagcttgattggctgagcctggacgataatcagttccgcatgagcatactagagagattagagcagatggaaaagaggatggctgaaatcgccgccgctggccaggtaccctgccaaggacccgacgctcccccagtccaggatgagggccaaggacccgggttcgaggcaagggtggttgtcctggtcgagagtatgattccaaggagcacctggaaaggaccagagagattggcacacgggtcacctttccggggcatgagcctgttgcacttggccgctgcccaaggctatgctagactgatcgagaccttgagccaatggagaagtgtggagacagggtccctagacctggagcaggaggttgatcctctcaacgtggatcacttttcatgcacacctcttatgtgggcttgcgcactgggccacctggaggctgccgtcctcctcttccgctggaatcggcaggccctttcaatccccgattcgctggggagactgcctctgagcgtggcacactccagagggcacgtgagattagccaggtgtctcgaggaacttcaaagacaggagccttcggtggaaccccccttcgcattgtcgcctccctcttcgagccctgatacaggactgagtagcgtctcgtccccatctgagctctccgatggcaccttttctgtgacctcggcttactcatccgcccctgacgggagcccacccccagctcctctccctgctagcgagatgaccatggaggatatggcacctggtcagctgagtagcggggtccccgaagccccactgctgctcatggattacgaagcaactaatagcaaagggcccctctcctctctgcctgccctgcctcctgcaagcgacgatggcgccgctcccgaggacgcagattccccccaggcggttgacgtaatccctgtggacatgatcagcctcgcaaaacaaattatcgaggccacccccgagcgcatcaaacgggaggatttcgtggggctgcccgaggccggcgcttccatgcgtgagcgcaccggcgcagtggggctctccgaaacaatgtcatggctggcgagctaccttgagaacgtggaccatttcccaagcagtactcctccctcagagctaccattcgagcgcggcagactggcagtgcctagcgccccaagctgggccgaatttctgagtgcaagcacctcaggaaaaatggagtctgacttcgcattgttgacactttcagatcacgagcagagggaactgtacgaggcggctagagtgatccagacagcatttagaaaatacaaaggccgccgcctgaaggaacagcaagaggtggcagccgcagtaatccagaggtgctatcgaaagtataagcaactgacctggattgcgctcaagtttgccctgtataaaaagatgacccaggcagccattcttatccagtctaaattcaggagttattacgagcagaaacgttttcagcagtccagaagagcggcagtgctaatccaacaacactaccgtagctacagacggaggcccggcccccctcatagaaccagtgcgaccctacccgcccggaacaagctgttgagccaccaagaagctggtcctgggtcccccgaggatcacgagattccagcagcccttcccacacaggacgaggggaccgaagccgagccaggcgctggtcgggctagtcccgcgggcacagggcatatgacctggcccccacccttcagccccccctggggaagacttgtgcagtcctag

SEQ ID NO: 110561 - DNA, 4470 bp, synthetic construct
  misc_feature 1..4470: note = Description of Artificial Sequence: Synthetic coding sequence
  source 1..4470: mol_type = other DNA
atgggagacgctgccgatcctcgcgaaatgcggaagactttcattgtccccgccatcaaaccgttcgaccactacgacttcagccgggcaaagatcgcctgcaatctggcctggcttgtggcaaaagctttcgggacagagaatgttccagaagagctccaggagcctttctatacagaccaatacgaccaagagcacattaaacctcccgtggtgaacttactactctccgccgagttatactgtcgtgctggtagcctgattctcaagagtgatgccgccaagccacttttagggcatgacgccgttatacaggcattagcccagaagggcctgtacgtgacagaccaagagaaactcgttaccgaaagagacctgcataaaaagccgattcaaatgtccgcacacctggcaatgatcgataccctgatgatggcctacactgttgagatggtgtctatagaaaaagtcattgcctgtgctcagcaatacagcgcatttttccaggctacagatctgccttacgatatcgaagacgcggttatgtattggataaacaaggttaacgagcatctgaaggatattatggagcaggagcaaaagcttaaggagcaccacactgtcgaggctccgggcggccaaaaaagcccaagcaagtggttttggaagctggtccccgcccgctacagaaaggagcagaccctgctgaaacaactgccatgtatcccgctggtggagaatctgctcaaagacgggacagacggatgcgccctggctgctctgatccacttttattgtcctgatgttgtgcggcttgaagatatctgcctcaaggaaactatgtctctcgccgactctttgtataatctgcagttaatccaggaattttgccaggaatatctcaaccaatgctgtcactttacactggaagacatgttatatgcggcctcttcaattaaatcaaactaccttgtgttcatggccgaattgttttggtggtttgaggtggtcaagccatcttttgttcaacctcgcgtggttcgccctcaaggtgccgaaccagtgaaagacatgccttcaatccccgtgttaaatgccgccaaacggaatgtcctggacagcagtagcgatttcccgtcaagcggcgaaggtgcaacctttacccagagccaccatcacttgccttcacgctactcccgcccccaagcgcattcaagtgctagtggcggtataagacgaagctcaagcatgtcctacgttgatggctttatcggcacttggcccaaggaaaagcgctcctctgtgcacggcgtgagcttcgatatcagttttgacaaggaggactctgtgcagagatcaacacctaatcgtggtattacaaggtccatttctaatgaggggctgacattgaacaattctcacgtatctaaacacatacgcaaaaacctatcctttaagcccatcaatggagaggaggaggcagagtctatcgaggaagaactaaacatcgacagccattccgatctgaaaagttgtgtccccctgaataccaatgaattgaatagtaacgagaacatacactataaattacctaacggagccttacaaaatcgcattctactcgacgaatttggcaatcagattgagacaccctccattgaagaagccctgcagataattcatgacaccgagaagtcacctcatactccgcagcccgatcagattgctaatggcttctttctccattcacaggagatgagtattctgaacagcaacataaaactgaatcagtcatcccccgacaatgtaaccgatactaagggcgctctgtcccctatcacagacaacacggaggtggacacaggaattcacgtcccgtctgaggacatccctgaaaccatggatgaggactcgtccctgcgtgactataccgtgagtctggattctgacatggatgatgcatccaaattcttgcaggactatgatattcgcactgggaacaccagagaggccctttcaccatgtccctcaacggtgagcaccaaaagccagcctggctccagcgccagctcatcctccggggtgaaaatgacctcgtttgctgaacagaagttccgaaagttaaaccacactgacggcaaatcctccggatcctcctctcagaaaaccacgccagaaggctctgaactcaacattccccacgtcgtagcttgggcacagatacccgaggaaaccgggctaccccagggccgcgacactactcaattactcgcaagcgagatggtccacctgaggatgaagctggaagagaaacgtcgggctatagaggcacaaaagaaaaaaatggaggctgcctttactaagcaaaggcagaaaatgggtaggactgcatttctgactgtagtcaaaaaaaagggcgacggaatcagtccgctgagggaggaagccgctggtgccgaggatgagaaagtttataccgaccgagcaaaggaaaaggaaagccagaagacagacggccagcggtccaaaagtttggccgatatcaaggaaagtatggaaaatccacaagctaaatggctgaagtccccgaccacaccaatagacccagaaaaacaatggaatctggcctctccatctgaagaaacgctgaacgaaggagagattttggaatatacgaaaagcatagaaaagctgaattcttccctccatttcctgcagcaggagatgcagaggttgagccttcaacaggaaatgctgatgcagatgagagaacaacagtcgtgggtcatttctcctccccaaccctctccacagaagcagatccgcgatttcaaaccatctaagcaggcaggcttatcctccgcgattgcaccgttcagttctgactctccaaggcccacacatccatcccctcagtcctccaaccggaagagcgctagcttttccgtcaaatcccagcggaccccgcgcccgaatgaactgaagataactcctctcaaccggaccctgacacctcccaggagtgtggattccttaccccggctaagaagattttcacctagccaggttccaatccagacccggtcatttgtgtgcttcggagatgacggcgaaccacaactaaaggagagtaagccaaaagaggaagtcaagaaggaggaactcgaaagcaaaggtaccctggaacagcgtggccacaacccagaggagaaagaaatcaagcctttcgagagtacggtctctgaggtcctcagtcttccggttaccgagactgtctgtctgacaccgaacgaggatcagctgaaccagcccaccgaaccaccccctaaacctgtcttcccccccactgcaccaaaaaacgtaaatctcatcgaagtgagtctctccgatttaaaaccacccgagaaggctgacgttcctgttgagaaatatgatggagagtctgataaggagcagtttgatgatgaccagaaagtttgttgcggcttttttttcaaggacgaccagaaagccgagaacgatatggccatgaaacgggctgcacttctggaaaagcgcttgaggcgggaaaaggaaactcagttaagaaagcaacagctggaagccgagatggagcacaaaaaagaagaaacaaggcgcaagacggaggaggaaaggcagaagaaagaggatgagcgcgcccggcgcgaattcatcagacaagagtatatgcgtcgcaaacagctgaagctgatggaggacatggacaccgtcatcaagcctcgtccacaagtggtgaagcagaagaagcagaggcctaagtcgatccatcgagatcacattgagtccccaaaaacgccgattaagggcccacccgtttcctcattaagcctggcgtccctgaacacaggcgacaacgaatctgtccactcaggtaagcgaaccccacgttcagagagcgtggaaggcttcctgtctcctagccgctgtgggtcccgtaatggggagaaggactgggaaaatgcgtctaccacctcctccgtcgcctcaggaactgagtatactggccctaaactgtataaggaaccctctgctaagagcaataagcatattattcaaaacgccctcgctcactgctgtctggcaggaaaagtaaatgagggccagaagaaaaaaatcttggaggagatggagaaatcggacgcaaacaactttctgattctctttcgcgattcaggctgtcagttcagaagtctgtatacttactgccccgagaccgaggaaatcaacaagctcacagggatagggcctaagagtataaccaaaaaaatgattgaaggcctctataagtataattcagatcgcaaacaattctcgcatatccctgccaagacactgtctgcatccgtggatgctatcaccatccattcccatctgtggcaaactaagagacccgtaacccccaaaaagctgttgccaaccaaagcctag

SEQ ID NO: 110562 - DNA, 4437 bp, synthetic construct
  misc_feature 1..4437: note = Description of Artificial Sequence: Synthetic coding sequence
  source 1..4437: mol_type = other DNA
atgggggacgcggctgatcccagggagatgcgtaaaacctttattgtgcctgcaatcaaacctttcgaccactacgatttttcaagggccaagattgcatgtaacttagcctggttagttgcaaaagcgttcgggacagagaacgtacctgaagaattgcaggagccattttacacggaccagtacgatcaggagcacattaagcctcccgttgtcaacctgctcctgagcgccgagctgtattgccgggcaggcagtctgatcctgaagtctgacgcggctaagcctctgctgggacacgatgccgtgatccaagcgctcgcgcagaaaggcctgtacgtgactgatcaggagaagctcgttaccgagcgtgatctgcataaaaagcccattcagatgtccgcccacttagcaatgatcgatactctcatgatggcctacaccgtggagatggtctcaatcgagaaggttatcgcctgtgcccagcagtattcggcatttttccaagcgaccgatctaccgtacgatattgaagacgctgtaatgtattggattaataaggtgaacgagcacctaaaggatattatggagcaggaacagaagctcaaggaacatcacaccgtggaggctcccgggggtcagaaagctagatatcggaaggaacagaccttgctcaaacagttgccgtgcataccacttgtggagaatctgcttaaagacggtaccgacgggtgcgcccttgctgccctaatccatttctactgtccggatgtggttcggttagaggatatctgtctgaaggaaacaatgtccctcgcggacagcttgtacaatctgcagttgatacaggagttttgtcaggagtatctaaatcaatgttgtcacttcacactggaggacatgctctacgcagcaagttctataaagagtaattacttggtgttcatggccgaactgttctggtggtttgaggtagtgaaaccatcttttgttcaaccccgggtagtgaggccgcagggtgctgagccagtgaaagacatgccaagtattccagtcctgaatgctgccaagcgtaatgtcctggatagcagtagtgacttcccatcgtccggcgaaggcgccactttcacccaatcccatcaccacctgccctcacgctatagccgcccccaagctcactcttctgcgagtggcggcattcggagaagctcatcaatgagctacgttgatggctttataggaacttggccgaaagagaagaggtcttccgtacacggtgtgtcatttgatatttcatttgataaggaagacagtgtgcaaaggagcacccccaatagggggatcaccagatcaatttccaacgagggactgactctgaacaactctcacgtctccaaacacatccgaaagaatctatccttcaagcccatcaatggcgaggaggaagccgaatctattgaagaagagctgaacatagatagccactccgatcttaagtcctgcgtaccactgaataccaacgagctgaacagcaacgagaacattcattataagctgccgaatggggctcttcaaaacaggatactgctcgacgagtttggtaaccaaattgagactccatcaatagaggaggccctccagatcatccatgacaccgagaaatcaccccacactccccagcctgaccaaatagcaaatggcttcttcctgcacagccaggagatgagcatacttaactccaacatcaaacttaaccaaagtagcccagacaacgtcacagatacaaagggcgcgttgtcccctatcacagataataccgaggtagacactggtatacacgtgccttcggaggatatccctgaaaccatggatgaggactctagcttgcgcgactacaccgtgtccctcgattctgatatggacgatgcttccaagttcttgcaggactacgatatccgcactggcaacactagggaggcactgtcaccttgtccttccacagtatcaaccaagtcacagccaggctcctccgcttcatctagttcaggcgtgaaaatgacctcgttcgccgaacagaaatttcgcaagctgaaccacaccgacggtaaatcatccgggtccagctcgcagaaaactaccccggaagggtctgagctgaacattccacacgtggtggcctgggcccagatccctgaagaaacaggacttccccaaggaagggatacaacacaactgctggctagcgagatggtccatctccggatgaagctcgaggaaaagcggagggctatcgaagcccagaaaaaaaaaatggaggctgcctttaccaagcaacgccagaagatgggaagaacagccttcctgacagtggtcaagaagaaaggagatggaatctctccactccgagaggaagccgcaggcgctgaggatgaaaaagtctacaccgacagggcaaaggagaaagaatcgcagaagaccgatggccagagatcaaagagccttgccgatatcaaggagtcaatggaaaacccccaagccaaatggttgaagagccctaccacaccaatcgacccagagaagcagtggaacttagcctcgccttccgaagagacactgaacgaaggcgaaattctggagtataccaagtcgatcgaaaagttaaattctagcttacactttctgcaacaggagatgcagagattgtctttgcagcaggaaatgttgatgcaaatgcgagagcagcaatcttgggttatctctccaccccaacccagtccccagaagcagataagagactttaagccgtccaaacaagccggactgagtagtgctattgcccccttttcctccgattctcctagacccacccacccttcgccccaaagcagcaaccggaagtctgcctccttctctgtaaaatcccaacgtacaccacgaccaaatgaactgaagattactccactcaacagaacccttactccacccagaagcgttgacagtcttcctcgcctgcgtcgcttcagtcccagtcaggtcccgatccaaacccgcagcttcgtttgcttcggcgatgatggggagccacaactcaaggaatcaaaaccgaaggaggaagtgaaaaaagaggagcttgaatccaagggtacgcttgaacagcgtggacataatccggaggagaaagagataaagccattcgaaagtacggtctcagaggtgctgtctttaccggtgaccgagacagtgtgtctaacccccaatgaagaccagctgaatcagccgaccgagccgccacctaagccagtttttcctccaactgcgcccaaaaatgttaatcttattgaagtgagcctgagcgatctgaagccacccgagaaagctgacgtccccgtcgagaaatatgacggggaatcggataaggagcaattcgacgacgaccaaaaagtctgctgtggcttcttcttcaaagacgaccaaaaggccgagaatgacatggccatgaagagagcagccctcctggagaagcggctccgccgtgaaaaggagactcagctgagaaagcagcagctggaagcagagatggaacataagaaagaggagactcgccgaaagaccgaggaggaaaggcagaaaaaggaggatgaaagagcaaggagagaattcataagacaggagtacatgagacggaagcaattaaagctgatggaggacatggatacagtgatcaagccaagaccccaggtggtgaagcagaaaaagcagagacctaaatccatacatagagaccatattgagtccccgaaaacacccattaagggccctcctgtgtccagcctgtcacttgcaagtctcaatactggagataacgaatcagtacactccggaaagagaacacctcgttcggagtcagtcgaaggattcctgagtcccagtcggtgtggaagtcggaacggggagaaggactgggagaatgcatcaacgacttcatctgtcgccagtggaacggagtacaccggacctaaactgtacaaggagccttctgccaaatcgaataagcacatcattcagaatgccttggctcattgctgcttggcgggaaaagttaacgagggccagaagaagaagatcttggaggaaatggaaaagtctgatgccaataatttcctgatcttatttcgcgactcgggctgccaattccggtctctatacacctactgtcccgaaaccgaggaaatcaacaagctgaccgggatcggcccaaaatccatcacaaagaaaatgatagaaggactgtacaagtataattctgatcggaagcagttttcgcacatccccgccaagaccctcagtgccagtgtggatgccatcaccatacattctcacctttggcagacaaaacggccagtaacaccaaaaaagttacttcccacaaaagcctag

SEQ ID NO: 110563 - DNA, 4389 bp, synthetic construct
  misc_feature 1..4389: note = Description of Artificial Sequence: Synthetic coding sequence
  source 1..4389: mol_type = other DNA
atgggagatgcagcagatccccgtgaaatgagaaaaacatttatcgtcccagcaatcaagccttttgatcattatgacttctcgagagccaagatagcatgcaacctggcctggctggtcgctaaggcatttggaaccgaaaacgtccctgaggaactgcaggaacccttttataccgaccagtatgaccaagagcatataaagccgccagttgtgaacttactgctgtccgccgagctatattgcagagccggatccctaatcctgaaatccgacgctgccaagccactgcttggccatgacgctgtgattcaggcgcttgcgcagaagggcctgtatgtgactgaccaggaaaaacttgtcactgagagggatcttcacaaaaaacccatccagatgagtgctcatctagccatgatcgacacactcatgatggcctacactgtggagatggtgtcaattgaaaaggtgatcgcatgcgcccagcagtacagcgcatttttccaggctacggacctcccctatgacattgaggatgctgtaatgtattggatcaataaggtgaacgagcatcttaaagacatcatggagcaagagcagaaattgaaggaacatcataccgtagaggctcccggaggccagaaggcaaggtaccgtaaagagcaaaccctgctgaaacaactgccttgcatccccctggttgaaaatctgctgaaggatgggacagatggctgtgccctggccgccctgatccatttctactgtcctgacgtagtaaggctcgaagatatctgcctaaaggaaactatgagcctcgccgactccctctacaacctgcagctgattcaagagttttgccaggaatatctgaaccagtgttgtcatttcaccctggaagatatgctttatgctgcctcctccattaaatcaaactacctggtcttcatggcagagttattttggtggtttgaggttgtgaaacctagcttcgtacaaccgagagttgttcggccacagggcgccgaacccgttaaagatatgccctctatccctgttctcaacgctgctaagagaaatgtgttggactcgtcttctgactttccctcccggtactcccggccacaggcacatagctccgcctccggcggaataagacgctcgtcttccatgtcttacgtcgacgggtttatcggtacatggccaaaggaaaagagatctagcgttcatggtgtgtctttcgacatctcctttgacaaggaagattcagtccaaagatcaacaccaaaccgaggaatcaccagatccattagcaacgaggggctaaccttgaacaactcccatgtgagcaagcacatcagaaagaacctcagcttcaagccaatcaacggcgaggaggaggccgagtctattgaagaggaactgaatattgattctcatagcgatctgaagagttgcgtgccgctgaataccaatgaattgaattcaaatgagaacattcactataaattgccaaatggtgcgttacagaatagaatcctcctagacgagttcggtaaccaaatcgaaaccccgtctattgaggaggccctgcagattatccacgacactgagaagtcaccccatactccacagccggatcagatcgccaacggctttttcttgcactcccaggaaatgtctattctcaactctaatatcaagcttaaccagagctcccccgataatgtaactgatacgaagggcgctctgagcccaatcacggacaacaccgaggtggacactggtatccatgttccctctgaagacattcctgaaacaatggatgaagactctagtttacgggattacacggtgtctctcgactcagatatggatgatgcctctaagttcttgcaggactatgacattagaacaggtaataccagagaagctttgagtccttgtcctagtaccgtgagcacaaaaagccaacccggtagctcagcttcttcttcttcaggagtcaagatgacttctttcgcagagcagaagttccggaagctcaatcatacggatggcaagagtagcgggagcagcagccagaagacaaccccagagggcagcgagctgaatattccccacgtcgtggcgtgggcgcagattccggaagagactggacttccccaagggagagacacgacccagcttctggcctccgagatggtgcacctccgaatgaaacttgaagagaaaagacgggccattgaggctcaaaaaaaaaaaatggaggctgcttttacaaagcagagacagaagatggggcggactgccttcctgacggtcgtgaaaaagaagggcgacgggatcagccctctaagagaggaggccgcaggagcagaagacgaaaaagtgtacaccgacagagccaaagagaaagagtcccaaaagacagacgggcagcgcagtaagagcctagctgacatcaaggagtccatggaaaatcctcaggccaaatggctgaagtcgcccactactcctattgatcctgaaaagcagtggaatctagcatcccccagtgaagagactctgaacgaaggcgagattcttgagtacactaaaagcattgagaagttaaatagcagtcttcatttcctgcagcaggagatgcagagattaagtttgcagcaggaaatgttaatgcagatgcgggagcagcagtcatgggtaattagtcctcctcaaccctcacctcagaagcagattagggacttcaaacccagtaagcaagccgggctgtccagtgcaatcgcaccgtttagttccgactccccacgacccacccatccttcaccccagtcatccaatcggaaatcagccagtttcagcgtgaagtcccaacgcaccccccgccccaacgagttaaaaattaccccactcaaccgcactctcactccgccaagatccgtggacagcttgcctagacttaggcggttcagcccctctcaagtgcctatccagactagatcctttgtatgctttggcgacgatggagagccccaacttaaggaatccaagccaaaagaagaagtcaaaaaggaggagctcgagtctaaaggaaccttagaacagcgcggccacaacccagaggagaaggaaataaaaccttttgaatcaacagtgagcgaggttctaagcctcccagtgaccgaaacagtgtgtttaacaccgaatgaggatcagctgaatcagcccacggaacctccaccaaagcctgtattcccacctactgcacctaaaaatgtgaatctaatcgaagttagcctctccgacctgaaacctccggagaaggctgatgttcccgtggaaaaatacgatggcgagagcgataaagaacaattcgatgacgaccagaaggtctgctgcggatttttctttaaggacgaccagaaagctgagaatgatatggccatgaaacgcgccgctttgctagagaagcggctgaggagggagaaggaaactcagttacggaagcagcagctggaagcagagatggaacacaaaaaggaggaaacaaggcgaaagacggaggaagaacgacaaaaaaaggaggacgagagagctcgacgcgaattcattcggcaggaatacatgcggcggaaacagcttaagctcatggaggacatggatactgtgataaaacctagacctcaggtcgtcaaacagaagaagcagcgacctaagagtatccaccgggatcacatcgaaagccccaaaacccctatcaaaggcccaccagtgagttcattatctctggcctcacttaataccggtgataatgagtccgtccattctggtaagaggacaccaaggtcggagtctgttgagggcttcctctctccatctcgctgtgggtcaaggaatggtgagaaggattgggagaacgcgtctacaacatcatcagtagcctccggcactgagtacacgggccccaaactttataaggagccctccgccaaatcgaataaacacatcattcagaacgccctagcccactgttgtctcgctggcaaggtcaacgaggggcagaagaagaagattctggaggagatggaaaaatcggacgccaataacttcctgattcttttccgcgactccggctgtcagttcagaagcttgtacacttactgcccagaaaccgaggagataaacaaactaacaggaattggcccaaagtcaatcacaaagaaaatgatcgagggcctgtataaatacaatagtgatcggaaacagttttcacacatccccgccaaaaccctgtccgctagtgtcgacgcgataacgatccatagccacctctggcagacaaaaaggccggtcacaccgaagaagctgctgccgaccaaggcttag

SEQ ID NO: 110564 - DNA, 450 bp, synthetic construct
  misc_feature 1..450: note = Description of Artificial Sequence: Synthetic coding sequence
  source 1..450: mol_type = other DNA
atggctgaccagctcactgaggagcaggtcactgagtttaaagaggccttttccctttttgataaggacggcgacggatgtatcaccacacgagagctggggacagtcatgagaagtctgggacagaatccaaccgaagccgagctgagagacatgatgtccgagattgacagagatggaaacggaacagtggatttccctgagttcctgggtatgatggcgcgtaagatgaaggacaccgataatgaagaggagatcagagaggcctttcgggtctttgacaaagatggcaacggcttcgtgtccgcagccgaattgcggcacgtgatgactcgtctgggggagaagttgtccgatgaagaagtggatgagatgattcgggccgcagataccgatggcgatggtcaggtgaattatgaagaattcgtgcgtgtgctggttagcaagtag

SEQ ID NO: 110565 - DNA, 546 bp, synthetic construct
  misc_feature 1..546: note = Description of Artificial Sequence: Synthetic coding sequence
  source 1..546: mol_type = other DNA
atgggcctccagcaggagatttctctccagccatggtgccaccaccctgcggagtcctgtcagaccactacagatatgacagaacgcctgagcgccgaacaaataaaagagtataagggcgtttttgaaatgtttgatgaggagggaaacggtgaggtcaaaaccggcgagctagagtggcttatgagtctattgggcatcaacccgaccaaaagcgagttggcatccatggcaaaggacgttgatagggacaataaaggctttttcaattgcgacggctttttggctctcatgggcgtgtatcacgagaaggcacagaatcaagaaagtgagctgcgcgccgccttccgggtattcgacaaagaagggaagggttacattgattggaacactttgaagtacgttttaatgaatgccggcgagccactgaacgaggtggaggcagagcaaatgatgaaggaggctgataaagatggagacaggacaatcgattacgaagaatttgttgcaatgatgaccggagaaagcttcaagctgattcagtag

SEQ ID NO: 110566 - DNA, 495 bp, synthetic construct
  misc_feature 1..495: note = Description of Artificial Sequence: Synthetic coding sequence
  source 1..495: mol_type = other DNA
atggggcttcagcaagagataagtctgaccgagcggttatcagcagaacaaattaaggagtataaaggtgtttttgagatgttcgatgaagaggggaacggagaggtcaaaactggagaactggagtggctgatgtccctgctgggaattaaccccacaaaatccgaattggccagcatggctaaggacgtggatcgagacaacaaggggttttttaactgtgatggatttctggctctgatgggcgtctaccatgaaaaggctcagaaccaagagtcagaactgagggcggcctttagagttttcgataaggaggggaaaggatatattgattggaatacactcaaatacgtgctgatgaatgcaggcgagcccttaaacgaagttgaggccgaacagatgatgaaagaggcagataaagacggcgacagaactatagattatgaggaattcgtggcaatgatgacaggagagagctttaaattgatacagtag

SEQ ID NO: 110567 - DNA, 1779 bp, synthetic construct
  misc_feature 1..1779: note = Description of Artificial Sequence: Synthetic coding sequence
  source 1..1779: mol_type = other DNA
atggagggtaaatggctcctatgcatgttactggtgctgggtacggccatcgttgaggctcacgacggacacgacgatgatgtgatagatattgaggacgatctggatgacgttatagaggaagtggaagattccaaaccagacactactgcacccccgagcagtcctaaagtcacttacaaggcccctgtgccgacaggcgaagtctattttgccgatagcttcgatagaggcacccttagcggttggatactgtcaaaagcgaaaaaggacgacaccgacgacgaaatcgcaaagtatgatggtaaatgggaggtggaggaaatgaaagagagtaaattgcccggtgacaaaggcctcgttctcatgagcagagctaagcaccatgctatctcggctaaactcaacaagcctttcctgttcgacacaaagccacttatcgtacaatatgaggtaaactttcaaaatggaatcgagtgcggtggcgcctatgtcaagctcctaagtaagaccccggagttgaacctggaccagttccatgataaaaccccgtacaccattatgttcggccctgataaatgtggggaggattataaattgcattttattttccgccacaaaaacccaaagacagggatttatgaggagaagcacgcgaaaagacccgacgctgatttgaagacatattttactgacaagaaaacccacctctatacactcatcttgaaccccgataattccttcgagatccttgtggaccagtccgtggtcaatagcggtaacctattgaacgacatgaccccaccagtaaacccctccagggaaattgaagacccagaggatcgaaaaccggaggattgggacgagaggcccaagatacccgatccggaagccgtcaaacccgatgattgggacgaggacgcacccgccaaaatcccagacgaggaggccaccaagccagagggctggctggacgacgagcccgagtatgtgcccgatccagacgccgagaaacctgaggactgggacgaggacatggacggggagtgggaagctcctcaaatagccaaccctcgatgcgaaagtgcaccaggatgcggagtttggcagcggccagtgatagacaatcctaactataaggggaagtggaaacctcccatgatagacaaccctagttatcaggggatttggaagcccagaaaaatacctaacccagacttttttgaagacctcgagccttttcgtatgacaccgttctccgccattgggctcgaactgtggtcaatgacatccgatattttcttcgacaatttcatcatttgtgcagaccgccgcattgtggatgattgggccaacgatggttggggactgaagaaggcggccgatggtgctgccgaaccaggtgttgtcggacaaatgatcgaagccgcggaagagcgcccctggctgtgggtggtgtatatcctgaccgtggctctgcccgtgttcttggtaattctcttctgttgctctgggaaaaagcagacatccggaatggaatataagaaaactgacgcccctcagccggatgtcaaagaggaagaggaggagaaggaggaagagaaagacaagggggatgaagaggaggagggggaggagaagttggaggagaaacaaaaaagcgacgcggaagaggacggagggactgtgtcccaggaggaagaagaccgcaagccgaaagctgaagaggatgagatcctgaataggagtccgagaaatcgaaagccaaggagggagtag

SEQ ID NO: 110568 - DNA, 852 bp, synthetic construct
  misc_feature 1..852: note = Description of Artificial Sequence: Synthetic coding sequence
  source 1..852: mol_type = other DNA
atgctgctagttctaggaacagcaatcgtcgaagctcacgatggccacgatgacgatgtgatcgacattgaagacgaccttgacgacgtgattgaggaagttgaggattccaagccggataccaccgcaccaccaagtagtccaaaagtaacctacaaagcaccagtgccaacaggagaagtctattttgcggactcgttcgaccggggaacgctgagtggctggatcctctccaaggcaaaaaaggatgacacagatgacgaaatcgctaagtatgatgggaagtgggaagtcgaagaaatgaaggagtctaaactgccaggggataaaggactggtcttgatgagccgcgccaagcaccatgctatctccgccaaactaaacaagccgttcctgtttgataccaagcccctgatagttcagtacgaggtcaactttcagaatgggatagagtgtggaggcgcatataactgcttcctgaagcatcagaactctacctgggatcagtttcatgacaaaactccatacacaatcatgttcgggccagataaatgtggagaggactacaagctgcacttcatctttcgacacaagaatcccaagaccggtatctatgaagaaaagcatgcaaagcgacccgacgccgatctaaagacctatttcaccgacaaaaagacccatctgtatactttaatcctcaaccctgacaactccttcgaaattcttgtggatcagagcgtcccacctgtaaacccatccagggagatagaagacccggaggaccggaaaccagaggactgggacgaaagacccaaaattcctgaccctgaggcagtgaagcccgacgattag

SEQ ID NO: 110569 - DNA, 984 bp, synthetic construct
  misc_feature 1..984: note = Description of Artificial Sequence: Synthetic coding sequence
  source 1..984: mol_type = other DNA
atggaaggcaagtggctcctttgcatgcttttggtgcttggaacagccattgtagaagcacatgacggtcacgatgacgatgtcatcgacattgaggatgaccttgacgacgtaatcgaagaagtagaggaaatgaaggagagtaagttgccaggtgacaagggcttagtgctgatgtcccgagccaagcaccacgctataagtgcaaagctaaacaagcccttcttgtttgacacaaagccgctgatcgtgcagtacgaggtgaactttcagaacggcatcgaatgcggcggagcctacgtgaagttgctaagcaagactccagagctgaatctggatcagtttcacgacaagaccccgtacactataatgttcgggcccgataagtgtggcgaggactacaaattgcatttcattttcaggcataagaatcctaagacaggaatctacgaggaaaaacacgccaagcggcctgacgcagatttaaagacgtactttacagataaaaagacgcacttatataccctcatcttaaatccggataatagctttgagatcctagtcgatcaatctgttgtgaatagtggcaacctcctgaacgacatgaccccacccgtaaatccatcaagggaaatagaagacccagaggatcggaagcctgaggactgggatgaaagaccaaagatccctgaccctgaagctgtgaaaccagacgattgggacgaagacgcaccggcaaaaatcccagatgaggaagccacaaaacctgaaggatggttggatgacgagccggagtatgtgcccgaccctgacgctgaaaaacctgaagattgggatgaggatatggatggagagtgggaagcccctcagattgctaacccaagatgcgagtcagcaccaggttgtggggtttggcagcgtccggtagtagacatacaaaaaacctctagacatcaccatcagcaggcaccagtggaacactag

SEQ ID NO: 110570 - DNA, 1884 bp, synthetic construct
  misc_feature 1..1884: note = Description of Artificial Sequence: Synthetic coding sequence
  source 1..1884: mol_type = other DNA
atggcagatagaaggactccaaccccattcgctggttgcaggctgccgcgccagcgcagagcccgcgacgccagccaggtttccgcccctgggaccaggcggatcatggagggcaaatggttattatgcatgttactggtgctcggcacagcaatagtggaagcgcatgatggtcacgatgatgatgtaatcgatattgaggatgaccttgacgacgtgatagaggaggtggaggactccaaaccagatacaaccgcccctccttccagtccgaaagtcacctacaaggcacccgtccctactggcgaggtgtacttcgccgactcttttgacagagggacactgtcaggctggatcctgtctaaagccaaaaaggatgataccgacgatgaaattgcgaaatatgatgggaaatgggaggtggaagagatgaaggagagcaaactgccgggcgataagggactcgtcctaatgtctcgggctaaacatcatgctatcagtgcaaagctcaataagccctttctgtttgacaccaaaccgctgatcgtacaatacgaggtgaatttccagaacggtatcgagtgcggaggtgcctacgtgaagctgctcagcaagacgcctgaattgaacctggatcagttccacgacaaaacaccttacactattatgtttggtcctgacaagtgcggcgaagattacaagctgcacttcatcttcagacataagaatcccaaaactggtatctacgaggaaaaacatgcaaaaaggccagacgccgatttgaagacctacttcacagataagaaaactcacctgtataccctgattctcaaccctgacaattccttcgagatcctcgtggaccagtccgtggttaattctggcaacctcctaaacgacatgacaccacccgtcaacccttcacgcgagatcgaggaccctgaggaccgtaaaccagaggattgggacgagcggcccaaaatcccagatcccgaggccgtaaagcccgatgactgggacgaagatgcaccggctaagatcccggatgaggaagccacaaaaccagagggctggctagacgatgaaccggagtacgttccagatcctgacgctgagaagcctgaggactgggacgaggatatggacggcgaatgggaagcaccacaaatcgccaatccacgttgtgagtccgcccctggatgtggcgtttggcagagaccagtgatagacaaccctaattacaaagggaagtggaaacctccaatgatagataatcccagttaccagggtatctggaagccacgcaaaattcccaatcccgattttttcgaggacttggagccattccggatgaccccatttagcgctattggactggaactgtggtccatgaccagtgacatttttttcgacaattttataatctgtgcagacaggagaattgtggacgattgggccaacgacggttggggcctcaagaaggctgccgacggtgccgctgagccaggagtggtcggccagatgatagaggctgcggaagagcggccttggctctgggtggtgtacatccttaccgtagcacttcccgtgtttcttgttattctcttttgttgcagcgggaagaagcagacatcgggtatggagtacaagaaaactgacgccccccaacccgacgtgaaggaggaagaggaagagaaggaagaagagaaagacaagggtgacgaggaggaggaaggggaggaaaaactggaagagaaacaaaagagcgacgcagaggaggatggcgggacagtgagccaggaagaagaggatcgcaagccgaaagcggaggaagatgaaatcttgaacaggtcacccagaaaccgaaagccccgtagagaatag

SEQ ID NO: 110571 - DNA, 1779 bp, synthetic construct
  misc_feature 1..1779: note = Description of Artificial Sequence: Synthetic coding sequence
  source 1..1779: mol_type = other DNA
atggaaggaaaatggctgctgtgtatgttattggttctcggcactgcgatagtagaggcccacgatggtcacgacgacgatgtcatcgacattgaagacgacctcgatgacgtgattgaggaagttgaagattccaagcctgatacaacagctcctccgagttccccaaaagtcacgtataaggctcccgtgcccactggagaagtctattttgcggactctttcgacagggggacactgtcaggctggattctgagtaaggctaaaaaagatgacaccgatgacgaaattgccaagtacgatggtaagtgggaagtagaggaaatgaaggaaagcaagctgccaggggataagggtctggttctgatgagcagagcaaagcaccatgctatatctgccaagctaaataagccctttttgttcgataccaaaccccttattgtgcagtatgaagtgaactttcagaacggtatagagtgcggcggagcctacgtgaagctactcagtaagacccctgagctgaatctagatcagttccacgacaaaacaccctacacgatcatgtttgggcccgacaaatgtggcgaggattacaagctccacttcattttccggcataagaaccccaagactgggatatatgaagaaaagcacgcaaagagaccggacgctgacctgaaaacttattttacagacaaaaagacccacctctacactcttatcttaaaccctgacaattccttcgagattctggttgaccaaagtgtggtaaatagcggcaacctgctcaatgatatgaccccgcccgttaatccttctcgcgaaattgaggacccagaagatcggaagcccgaagactgggacgagcgaccaaaaattcccgatccagaagcagtgaagccagacgactgggacgaagacgcccctgcaaagattcctgatgaagaggctaccaagccagaggggtggcttgatgacgagcctgagtacgtgcccgaccccgatgctgaaaaacccgaagattgggatgaggacatggacggagagtgggaagctcctcaaatcgctaacccccggtgtgaatctgcccccggttgtggtgtttggcaacggcccgtcatcgacaaccccaattacaagggcaagtggaagccccctatgatcgataacccctcgtatcaggggatttggaagccccggaagatccccaaccctgacttctttgaagatcttgaacccttccggatgacccccttctcggccataggactggaactgtggtcaatgacatctgatatattttttgacaatttcattatctgcgctgacagacgcattgtcgacgactgggcaaatgacggatggggtctgaagaaagccgcagacggtgcggccgaacccggagtggtgggacagatgattgaggcagctgaggagcggccgtggttatgggtggtgtatatcctgactgtagccttgccagtgtttctggtgattttattctgctgcagcggcaaaaagcagacttccggcatggagtacaagaaaactgacgctccacagccagacgtgaaggaagaggaggaggagaaagaggaggaaaaagacaaaggggatgaggaagaggaaggagaggaaaagctggaagagaaacagaaaagcgatgcagaggaagacggcggcacggtatctcaggaagaggaagaccgaaagccgaaagccgaggaggacgaaatccttaacaggtctccaaggaatcgcaaacctcgccgcgagtag

SEQ ID NO: 110572 - DNA, 405 bp, synthetic construct
  misc_feature 1..405: note = Description of Artificial Sequence: Synthetic coding sequence
  source 1..405: mol_type = other DNA
atggagggaaagtggttgctgtgcatgctcttggttttgggaaccgcgatagtcgaggcgcatgatggacatgacgacgatgtgatagacatagaggacgacctggatgacgttattgaagaagtggaggatagtaaaccagacacaaccgcgccccctagctcgccgaaagtcacatataaggcgcccgtgcccacgggagaagtgtattttgctgacagcttcgacagaggaaccctgtctggttggatactgtccaaggccaagaaggatgacacagacgatgagattgccaagtacgacggtaagtgggaagttgaggagatgaaagaatctaaacttcctggagacaaaggcctcgtcctgatgtcccgtgccaaacaccatgccatcagtgctaagtag

SEQ ID NO: 110573 - DNA, 507 bp, synthetic construct
  misc_feature 1..507: note = Description of Artificial Sequence: Synthetic coding sequence
  source 1..507: mol_type = other DNA
atggaaggcaagtggttgctttgcatgttgcttgtgttgggtacagcaatagtggaagcacacgatggccatgatgatgatgtgatcgatatcgaggacgacctcgacgatgtgatagaggaggttgaagattctaagccagatactactgcgcctcctagttcccctaaggtcacatacaaagctccagtgcccaccggggaggtgtacttcgctgactcattcgatcgcggaactcttagcgggtggatactgagcaaggccaaaaaggatgatacagatgacgagatagcaaagtatgacggaaagtgggaagttgaagagatgaaggagagcaagctcccaggcgacaaggggctcgtactgatgagtagggccaagcatcatgctatatccgctaagctaaataaacccttcttgttcgatactaaacccctgattgtccagtacgaggttaattttcagaacggcatagagtgtggcggcgcttatgtgaagcttttatag

SEQ ID NO: 110574 - DNA, 1779 bp, synthetic construct
  misc_feature 1..1779: note = Description of Artificial Sequence: Synthetic coding sequence
  source 1..1779: mol_type = other DNA
atggagggaaaatggcttttatgcatgttattggtgcttggaaccgccattgtagaagctcacgatgggcacgacgacgatgttatcgatatcgaggacgacttggacgacgtgatagaggaggtagaagattccaaacccgacacgacggccccaccttctagtccaaaggtgacttataaggctccggtgcctaccggagaggtttacttcgcggatagcttcgatcgggggacactgtctggttggattctctcaaaagccaaaaaagatgacaccgacgacgagatagcaaagtatgacggaaaatgggaagtggaagaaatgaaagagtccaagctgcctggcgataaagggttggtgctgatgtctagggccaagcatcacgcgatttcagccaagctaaacaagcccttcctgttcgacactaagccacttatagttcagtacgaagtgaacttccagaatggaatcgaatgcggcggagcctatgtgaagcttctcagcaagactcctgaattaaatctcgaccaattccacgacaagacaccatacaccatcatgttcggtccggataaatgtggcgaggactacaaactccacttcattttccgccacaaaaatccaaaaacaggtatctatgaagagaaacatgccaagagacccgatgccgaccttaagacatacttcacagacaaaaagactcatctgtacactctcatactgaacccagacaactcgtttgagatcctggtggatcagagcgtagtgaacagtggtaacctgctcaacgacatgacaccccccgtaaacccgtcaagagaaattgaagacccggaggaccgcaagcccgaggactgggacgagcgccctaaaattccagatcccgaggcagttaagccagacgattgggatgaggatgctcccgccaagatccccgacgaggaggccaccaagcccgaagggtggttagacgacgaaccagaatacgttcctgatcctgacgccgagaaacccgaggactgggatgaggacatggatggagagtgggaagcaccacaaatcgccaatccccgctgcgagagtgctccaggatgcggtgtgtggcaacgcccagtcatcgacaatcccaactacaagggaaaatggaagcctcccatgatcgataatcctagctaccaagggatctggaaacctcgaaagattcctaaccctgacttcttcgaggatctggagccatttcgaatgacgccattcagtgcgatcgggctggagctgtggagtatgaccagtgatatttttttcgacaattttattatttgcgcagacagaaggattgtagatgactgggccaacgatggctgggggctgaagaaggcggctgatggtgcagcggagcccggtgtggtcggccagatgattgaggctgccgaggagcggccatggctgtgggtggtgtatattctcactgtagctctccctgtgtttctggtgatcctgttttgctgctctggcaagaaacagacctctggaatggagtacaaaaaaacggacgctcctcagcccgacgtgaaggaagaggaagaagagaaagaggaggaaaaggataaaggcgacgaagaggaggagggcgaggaaaaattggaggagaagcaaaaatctgatgccgaggaggacgggggcacagtttcccaggaggaggaagaccgaaagcctaaagctgaagaggatgagattttgaaccgcagccctcgcaaccgaaagcctcgacgcgaatag

SEQ ID NO: 110575 - DNA, 240 bp, synthetic construct
  misc_feature 1..240: note = Description of Artificial Sequence: Synthetic coding sequence
  source 1..240: mol_type = other DNA
atggagggaaagtggctgctgtgcatgctgctggtgcttggcacagcaatcgtcgaagcgcacgatggtcacgacgacgatgtcatagacatcgaggatgacctggacgatgttatcgaggaggtagaggatagcaagcccgatacaactgctcctccgagctcgcctaaagtgacgtataaggccccagttccaactggtgaagtgtattttgccgactcattcgacaggggcacatag

SEQ ID NO: 110576 - DNA, 99 bp, synthetic construct
  misc_feature 1..99: note = Description of Artificial Sequence: Synthetic coding sequence
  source 1..99: mol_type = other DNA
atggaaggcaagtggctgctatgtatgctactagtcttagggaccgccatcgtggaggctcacgatggacatgacgacgatgttatagacatagagtag

SEQ ID NO: 110577 - DNA, 1455 bp, synthetic construct
  misc_feature 1..1455: note = Description of Artificial Sequence: Synthetic coding sequence
  source 1..1455: mol_type = other DNA
atgaaagagtccaaactgcccggggataaggggctggtccttatgtcgcgagctaagcaccatgccattagcgcgaagctcaacaagccttttttgttcgataccaaaccactgattgtccagtatgaagtcaatttccaaaatggtatcgagtgtggaggagcctacgtcaagcttttgagtaagacacccgagctgaatcttgaccagtttcatgacaagaccccttatactatcatgtttggacctgataaatgtggtgaggattataagctgcatttcatcttcagacacaaaaacccaaaaactggaatttatgaggaaaaacacgccaaacgcccggatgctgacctcaaaacatactttaccgacaaaaagacccacttatatacactgattctgaaccccgacaactcgtttgaaattctcgtagatcagtccgtggtgaactcaggaaatttactgaatgatatgactcctcccgtgaatccgtccagagagatcgaagacccagaggataggaaacctgaggattgggatgaacggcctaagattcctgaccccgaagccgttaaacccgatgactgggacgaagatgccccagccaagattcccgatgaggaagcaaccaagcccgaaggctggcttgacgatgagcctgagtacgtgcctgatccagacgccgagaagcccgaagattgggatgaagacatggacggggagtgggaagccccacagatcgccaacccaaggtgtgagtcagcaccgggttgtggggtgtggcagagaccagtaatcgacaaccctaactacaagggcaaatggaaacctcctatgattgataatccatcttatcagggtatttggaagcccaggaaaattcctaatccagatttttttgaggacctcgagccattcaggatgactcccttttcggccatagggctggaactttggagcatgactagcgatatcttcttcgacaattttattatctgcgctgacagaagaatcgtggatgattgggctaacgatggttggggcctgaaaaaggctgcagatggcgccgctgaaccaggcgtggtgggacagatgattgaggcagccgaagagcgaccgtggctgtgggtggtgtatatcctgacggtggcgctgcctgtgttcctggtgattctattttgttgttcagggaaaaaacagacatcaggaatggagtataagaagacagatgcgccccagccagacgtcaaggaagaggaagaggaaaaagaagaagaaaaggataagggtgatgaagaagaggaaggcgaggagaaattagaagagaagcagaaatctgacgcagaggaggacggaggcacggtgtcacaggaagaggaagacagaaagccaaaagcggaagaagacgagatactgaatcgcagtccacggaatagaaaacctcgacgggagtag

SEQ ID NO: 110578 - DNA, 324 bp, synthetic construct
  misc_feature 1..324: note = Description of Artificial Sequence: Synthetic coding sequence
  source 1..324: mol_type = other DNA
atggaaggaaagtggctgctatgcatgctgctcgttctcggcacagccatcgttgaagcccatgacggccatgatgatgacgtcatcgatatcgaggatgatctggacgacgtaatcgaagaagtcgaagatagcaagccagatactactgcgccgccaagctctcctaaggtgacatacaaggcccctgtcccaacaggcgaagtctacttcgcagattcctttgatagaggaaccctcagcggctggatcttgtcaaaggcgaagaaggatgacacagacgacgagatagctaagtatgatggcaagtgggaagtggaatag

SEQ ID NO: 110579 - DNA, 435 bp, synthetic construct
  misc_feature 1..435: note = Description of Artificial Sequence: Synthetic coding sequence
  source 1..435: mol_type = other DNA
atggaaggaaaatggctgctgtgtatgttacttgtgttggggactgcaatcgtggaggctcacgatggccacgacgacgacgtgatagacatcgaagatgacctggacgacgtcattgaagaagtggaagattctaaaccagacaccacagctcctccctcatccccaaaagtcacatataaggccccggtccctaccggggaggtctactttgccgattcctttgatcgggggacgctttctggttggatcctctccaaagctaaaaaggacgataccgacgatgagatcgctaagtatgatgggaagtgggaagttgaagaaatgaaagagagcaaactccctggggacaagggactcgtgctgatgtcacgcgccaagcatcacgccatctccgctaagttgaacaagcctttcctgttcgacacaaaatag

SEQ ID NO: 110580 - DNA, 420 bp, synthetic construct
  misc_feature 1..420: note = Description of Artificial Sequence: Synthetic coding sequence
  source 1..420: mol_type = other DNA
atgagggcgggacggggcgcaacgccagctagagaactgtttcgcgacgcagccttccccgcggcagactcatcgctattctgcgatctaagcacacccctggcgcagttcagggaggacattacatggaggaggccccaagaaatctgtgccacgcctaggctgttccccgacgatcctcgagaaggtcaggtaaagcagggactgctaggcgattgttggttcttatgtgcatgcgcagccctccagaagagtcggcacctgttggatcaggtctcatgtccagtgcagctccccgcagattggacgtgtaaggtccaaccagtttggctagagttcccctgcttacccatcagctgtaggttgcgcgtctcttcagatacaagcccggattctgccacctggggaagttggaaatag

SEQ ID NO: 110581 - DNA, 417 bp, synthetic construct
  misc_feature 1..417: note = Description of Artificial Sequence: Synthetic coding sequence
  source 1..417: mol_type = other DNA
atgcgcgcgggccgcggagcaactccagcccgcgagctgtttcgcgatgctgcctttccagccgcagattcaagcctattttgtgatctcagcacccctttagcacaatttcgcgaagatataacttggagaagaccgcaggtgcctgaaggcgggaggtcgcaggatgcgcctcctctactgctacaggagcctctgctctcttgcgtccctcatcggtatgcccaggaagtcagccgtctgtgcttgctcccagctggtacctacaaggtcgtcccctccacatacttgcctgacaccgagggcgcctttactgtaaccatcgccacccgcattgaccgacccagtatccattcacaagagatgcttggacagtttcttcaagaggtctccattatggccgtcatgaaaacctag

SEQ ID NO: 110582 - DNA, 1554 bp, synthetic construct
  misc_feature 1..1554: note = Description of Artificial Sequence: Synthetic coding sequence
  source 1..1554: mol_type = other DNA
atgcgcgcaggtaggggggcaactccagctagagagctgtttagggatgctgctttcccagccgccgattccagtcttttctgtgacctatccacgcctttggcccagttccgggaagacattacttggagacgcccacaagaaatttgcgctacgcctcggctatttcccgatgatccaagagaggggcaggtaaagcagggattgctcggggactgttggtttctatgcgcttgcgcagcgctgcagaaaagccgccacctgctggaccaagttatcccccccggccagccaagttgggcagaccaggaataccgcgggtcttttacttgtaggatctggcaattcggtaggtgggttgaagtgacaacagatgaccggctgccgtgtttggctggacgactgtgttttagcaggtgccagcgagaggacgtgttctggcttcctcttctggaaaaagtatacgcaaaggtgcatggaagttacgaacatttgtgggctgggcaagttgctgacgctctcgtggatcttaccggaggtctggctgaacggtggaaccttaagggcgtcgccggctctgggggacagcaggacaggccaggtcggtgggagcaccggacatgccgccagctccttcaccttaaggaccaatgcctcatcagctgttgcgtgctgtcaccccgcgctggtgcaagagaattgggtgagttccacgcttttattgtaagtgacttgcgcgagctccaaggtcaagccggacaatgcattcttctcctgcgcatccaaaatccgtggggccgccggtgctggcaaggactgtggcgagaagggggagaagggtggtctcaggtcgacgctgctgtagctagcgagctcctcagccaattgcaggagggagaattctgggtggaagaagaagaattcctgcgagagttcgacgagctcactgttgggtacccagtaaccgaggcaggacacctgcagagcctctatacagagcggcttctctgccacacccgcgcgctccctggagcctgggtcaaggggcagagcgcaggaggatgtcgtaataatagcgggtttcctagtaatcctaagttttggcttcgggtgtcagaaccatccgaagtgtacatcgccgtcctgcagaggtctcgcctacacgccgccgattgggcaggacgtgcgcgggcccttgtcggggattcacacacctcctggtctccggcatccataccgggtaagcactatcaggcagtgggtctgcatctctggaaggtccccgaagggggtagaagccaagacgccccacccctcctgctgcaggaacccctgctgagctgtgtgccacatcgctacgctcaggaggtttcgcggctgtgtctgttgcccgccggaacatacaaagtggtgcccagtacctacctcccagatacagaaggggctttcactgtgacaattgccacaagaatagatcgacctagtatacattcccaggagatgttggggcagtttctgcaagaagtgtcgatcatggccgtcatgaagacgtag

SEQ ID NO: 110583 - DNA, 1335 bp, synthetic construct
  misc_feature 1..1335: note = Description of Artificial Sequence: Synthetic coding sequence
  source 1..1335: mol_type = other DNA
atgagagccggcaggggagccactccagcaagagagctcttccgcgacgccgcatttccagcggcggacagctcccttttctgtgatctgtccacaccgttagcacagttccgggaggatatcacttggaggaggcctcaggaaatctgtgcgacccctcgcttgtttcctgatgacccccgtgaggggcaggtgaagcagggcctgctgggggattgttggtttttgtgcgcctgcgccgctcttcagaaaagtcgccacctcttagaccaagtcatcccgcctggacaacctagttgggctgaccaggagtatcggggttccttcacatgtcgcatctggcagtttgggcggtgggtggaggttaccactgatgaccgtctaccttgtttggccggccgcctgtgtttcagcagatgtcagagggaagatgttttttggctgcccctgcttgaaaaagtctacgcaaaggtacatggttcctacgagcacctgtgggcaggccaggtggctgatgcattggtagacttaacgggaggcctcgctgaacgatggaatctgaagggcgtggccggaagcggcggccaacaggacaggcccggtcgttgggaacaccgaacatgtcggcagctgctgcatctgaaggatcagtgccttatctcgtgctgtgttttgtcacctagggccggcgccagagagctcggggaatttcatgcattcatcgtctcggatttgcgggaactgcaaggacaagcagggcaatgcattctcctgcttaggattcagaatccttggggtaggcgttgctggcagggattgtggcgagaaggtggcgaaggctggtcacaggtggatgccgccgtggcttccgagctgctgtcccagctgcaagaaggagagttctgggtcgaggaagaagagtttttgagggaattcgacgagctgaccgtgggctatccagttaccgaagctggccacctacagtccctgtacactgagcggctgctgtgccatacgcgtgctctccctggagcatgggtgaagggtcagtctgccgggggatgtagaaataactcagggttcccttctaatcctaagttctggttgcgagtgtcagaaccgtccgaggtgtatatcgctgtgttgcaacgctcaagactgcacgccgcagactgggctgggagggcccgcgccctagtaggcgatagtcacacctcatggtcccctgctagcatccccggcaagcattatcaagccgtggggctgcacctgtggaagggcgtgaccctggggactaccttgttccctgtgccgagctggatgtggcctacctag

SEQ ID NO: 110584 - DNA, 2019 bp, synthetic construct
  misc_feature 1..2019: note = Description of Artificial Sequence: Synthetic coding sequence
  source 1..2019: mol_type = other DNA
atgcgcgctggacggggcgccacccctgcgagagaactgttcagagatgctgccttcccagcggcagattcaagtctcttttgtgacctgtctactcctctcgctcagtttcgggaagacatcacatggaggcggccccaggaaatttgtgccacccctaggttattcccagacgaccctagagagggccaggttaagcaagggctgctcggcgactgttggttcctgtgcgcctgcgccgccctgcaaaaatctcgtcatctgctggaccaagttatacctcccggccagccttcttgggcagatcaggaatacagggggtcatttacctgcagaatatggcaatttggccgctgggtcgaggtgacaacagacgaccgccttccttgtttagctgggaggctgtgcttctccaggtgtcaaagggaagatgttttctggctacccttgctagaaaaagtgtacgctaaggtgcatggctcctacgagcatctgtgggctggacaagtcgctgacgctcttgtggacctgacaggagggctggccgagaggtggaacttaaaaggagtggctggctctggcggacagcaggaccgcccgggtaggtgggagcaccggacctgtcgtcagctgttgcacctaaaggaccagtgtctgatttcttgttgtgtcttgagccctcgcgcgggggcccgcgagctgggcgaatttcacgcttttatcgtctcggatctacgggaactccaaggacaggcaggccagtgtatacttctcctccgaatccagaatccatgggggcgcaggtgctggcaagggttgtggcgtgaaggaggagagggttggtcacaggttgatgcagccgtcgcttcagagctcctttcacagctccaggaaggcgagttttgggtcgaggaagaggaattcctccgggagttcgatgaactgaccgtgggttaccccgtcacggaagccggtcatctgcagagcttgtatacagaacggttgctgtgccatacaagagcgctgcccggagcgtgggtgaaagggcagtctgctggagggtgtcggaacaactccggcttccctagtaaccccaaattttggttacgggtcagcgagccatctgaagtgtacattgcagttttgcagcgcagcagactgcatgccgccgactgggcaggaagagcaagggccctggtgggcgatagccacacgtcctggtctcctgcttctattcctggcaaacattaccaggcagttggcttgcatctatggaaagtcgagaagcggcgcgttaacctgcctcgagtactcagtatgccgccggtggccggaacagcttgccacgcatacgaccgcgaggttcatcttcggtgtgagttgagcccaggttactatctcgctgtcccctcaaccttcttaaaagatgccccaggggagtttctgttgcgggtgtttagcacaggcagggtgagcttgtcagctatacgggccgtggcaaagaacaccactccaggagccgccctgccggccggcgagtggggtactgtacagctaaggggatcttggagagttggacagactgcaggaggctcgcgtaattttgcgtcctaccccactaacccatgctttcccttctccgtacctgagggaccaggccctcggtgtgtcagaattaccttgcatcagcactgccgcccaagtgacaccgaatttcatcccattggcttccatatcttccaggtacccgaaggcgggagatcccaggacgccccccccctgctccttcaggagccactgctttcctgtgtaccacatcgatacgcccaagaggtgtctcgcctatgcctgttgccagccggcacctacaaggtggtaccctccacatatttacccgacaccgagggcgccttcaccgttaccattgctaccaggattgacaggcccagtatacactctcaggagatgctgggccagtttttgcaggaagtctctataatggctgtaatgaaaacatag

SEQ ID NO: 110585 - DNA, 2220 bp, synthetic construct
  misc_feature 1..2220: note = Description of Artificial Sequence: Synthetic coding sequence
  source 1..2220: mol_type = other DNA
atgctttattcacctgggccgagcctccccgaaagtgccgagagcctcgacggaagtcaggaggataagcctcggggtagctgcgccgaacctacttttactgataccggtatggtagcacatatcaacaactcaaggctgaaggccaaaggtgttggccagcatgacaacgcacaaaacttcggaaaccagtccttcgaagaactcagggccgcctgcctccgcaagggcgagttatttgaagacccactattccccgcggagcctagctctttgggcttcaaggatctcggcccaaacagcaagaacgttcagaacataagctggcagcgcccaaaggatattattaataaccctctgtttatcatggatggcatctcaccgacggacatctgccaggggatcctcggcgactgctggttgctagcagccattggatcactgactacctgccccaaactgctctaccgagtcgtgccaagaggtcagtccttcaagaagaactatgctggaatattccatttccagatttggcagttcggacagtgggttaacgtcgtcgtcgatgataggctcccaactaagaatgacaagctcgtgttcgttcatagcaccgagcggagcgagttttggtcagccttactcgaaaaggcatacgccaaactgagcggctcatatgaggctctctccggaggctccactatggagggcctcgaggacttcaccggaggtgttgctcagtctttccaactacagaggccaccacagaacctgctccggctccttcggaaagctgtggagagaagctctcttatgggttgctctatcgaagtaacatccgactctgagctagaaagcatgaccgataagatgctggtgaggggccacgcttatagtgtgacgggactccaagatgtgcactaccgaggcaagatggagacccttattcgggtgaggaacccatggggacggatcgagtggaacggcgcttggtctgactccgcccgcgaatgggaggaagtcgcctccgacattcagatgcaactgctccacaagaccgaagatggggaattctggatgtcctatcaagatttcctcaacaattttacgctgttggagatttgtaatctgacaccagataccttgagtggggactataagagctattggcataccaccttctacgagggaagctggcgccgcgggagcagtgccgggggctgcagaaatcaccccggaactttctggaccaatccccagttcaagatctccttgcccgaaggcgacgatcctgaggacgatgccgaaggaaacgtggtcgtttgtacatgcctggtggctctcatgcagaagaactggaggcatgccaggcagcagggggcccagctccagaccatcggttttgtgttgtatgccgtgccaaaagagtttcagaatatccaggatgttcatctcaaaaaagaatttttcaccaaatatcaggaccatggtttctccgaaatcttcacaaactcacgggaggtaagcagtcaactacggttaccaccaggagagtatatcatcattccttctacatttgagccacatcgtgatgctgattttttactgcgcgtttttacagaaaaacactcagaaagctgggaactggacgaagtgaattacgcagaacagctgcaagaggagaaggtgagcgaggatgatatggaccaggactttcttcacctttttaagatcgtggctggcgaaggcaaggagattggagtttatgagctgcagaggctgctgaacaggatggctattaaatttaaatcattcaagacaaagggattcgggctggacgcttgtcgatgcatgatcaatctgatggataaggatggcagcggtaagcttggcctcctggagttcaagatcctgtggaagaagctgaagaagtggatggatatattccgggaatgcgaccaggatcattcagggacgctgaattcgtacgagatgaggctggtgatcgagaaagccgggattaaactgaacaataaggtgatgcaggtgttggtcgctcgttacgcagacgatgatctgattattgacttcgactcctttatctcctgcttcttgaggcttaagaccatgtttaccttcttcctcaccatggacccaaagaacaccgggcacatctgcctgtcgctggagcagtggctgcaaatgaccatgtggggttag

SEQ ID NO: 110586 - DNA, 2220 bp, synthetic construct
  misc_feature 1..2220: note = Description of Artificial Sequence: Synthetic coding sequence
  source 1..2220: mol_type = other DNA
atgctgtattcaccagggcccagtctccccgaatcagcagagagtcttgatggctctcaagaggataaacctcgcgggtcttgcgccgagccaactttcaccgataccggcatggtcgctcacatcaataacagtcgactcaaggctaaaggggtcggccagcacgacaacgctcagaattttggcaaccaatcattcgaagaactaagggccgcctgcctcaggaagggcgagctgtttgaggaccccttattcccagcagaaccctcatcgctcggcttcaaggacttgggccccaacagcaagaatgtacagaatatctcgtggcagcgccctaaggatatcattaataaccctcttttcatcatggacggtataagccccacagatatttgtcaggggatcctgggagactgctggttgcttgccgccattggcagcttgaccacttgtcctaagctgttgtaccgcgtggtgcctaggggacaatcttttaagaagaattatgcaggaattttccattttcaaatctggcagttcggacagtgggttaacgtagtcgtggacgaccgcctccccaccaaaaatgataaactggtcttcgtccattccactgagagatcagagttttggtcagcactgttggagaaagcctacgcgaagctgtctgggtcttatgaagcattgtcaggaggaagtaccatggagggtcttgaagacttcaccggaggtgtggcccagagtttccaactacagagaccaccacagaacttgctcaggctgttacgcaaggccgtagaacgcagctccctcatgggatgcagcattgaggtcacctcggattctgagctggagagcatgaccgataaaatgctggtacgcggacacgcttacagcgtcaccggactgcaggatgtgcactataggggcaaaatggaaacactcatccgggtgcggaatccttggggaaggattgagtggaacggcgcatggtccgattccgcccgggagtgggaagaagtcgctagtgatattcagatgcagctgctgcataagactgaagacggcgagttctggatgtcgtaccaggatttcctgaataatttcacactgctggagatttgcaacctgacacccgacaccttatctggggactataagagctactggcataccaccttctatgaagggtcgtggcgccgagggtcaagtgccggtgggtgtcgcaatcacccaggtaccttctggacaaacccgcaattcaaaatttccctaccagaaggtgacgatcctgaggatgatgccgaaggtaatgtcgtggtttgcacgtgtctggtagccctgatgcagaagaattggagacacgctcggcaacagggagctcaactgcagacgattggcttcgtgctgtatgcagtcgccagtcccttccagaatatccaagacgtgcatttgaaaaaggaattttttaccaaataccaggatcatggcttcagtgaaattttcactaattctcgcgaagtgtccagtcagctacgacttcctcctggtgagtacatcatcattccttcaacgtttgagcctcatagagacgctgactttctgctgcgagtgtttactgagaagcattctgagtcatgggaactggatgaagtcaattacgctgagcagttgcaggaagagaaagtgtcagaagacgacatggaccaggactttttacacctcttcaagattgtcgcgggggagggtaaggaaatcggagtgtatgaacttcagagactcctgaacagaatggcaattaagtttaaatcttttaagacaaaagggttcggccttgatgcttgtcgttgcatgatcaatctgatggataaggacggttctggaaagctgggtctgctcgaattcaagattctttggaagaaacttaagaagtggatggacatctttcgagaatgcgatcaggatcacagcggaacacttaattcgtacgaaatgcgtttggtgattgaaaaggccggaatcaagctgaacaataaagttatgcaggtgttggtggctaggtacgcagacgacgatctgatcatcgatttcgatagcttcatttcctgtttcctccggctgaaaactatgttcacttttttcctcactatggatcctaagaatacaggccacatttgtctcagcctggagcagtggctccagatgacgatgtggggctag

SEQ ID NO: 110587 - DNA, 2160 bp, synthetic construct
  misc_feature 1..2160: note = Description of Artificial Sequence: Synthetic coding sequence
  source 1..2160: mol_type = other DNA
atggcgagcagcagcggacgagtaactatacagctggtcgacgaagaagccggagtcggtgccggcagactccagttatttagaggccagagttacgaagcaattagagcggcctgcttggactcaggaatcctctttagggacccgtattttcccgccgggccggatgctctgggatacgatcagcttggacccgacagcgagaaggccaagggtgttaagtggatgcgcccacacgagttttgcgcagaacccaagttcatctgcgaggacatgtctagaaccgacgtctgtcaggggagtcttggaaattgttggttccttgcagcagcagcttctcttactctctatccacgcctgcttaggagagtcgtgccccccggccaagattttcagcacggatacgccggagtgtttcactttcagctctggcagtttggccgatggatggatgtagtggttgatgaccgcttgcccgtccgagagggaaagctgatgttcgtaagatctgaacagaggaatgaattctgggcaccccttttggagaaggcatacgcaaaactgcacggttcctacgaggtgatgcgcggaggtcacatgaacgaggcttttgtggattttacgggaggtgtcggggaggtcctctacctcaggcagaactccatgggactgttcagcgccctgaggcacgccttagccaaagagagccttgtgggagcaacagcactgagtgatcgtggtgaatatcgcacggaggaggggctcgtgaaaggccacgcttatagcatcaccgggacacacaaggtctttcttggttttaccaaagtcagactgcttcggctgcgaaatccatggggctgcgtcgaatggacaggagcctggtcagattcctgccccagatgggacacacttccaactgagtgtcgcgatgcgctgctcgtgaagaaagaggatggagagttctggatggagctgcgggacttccttctgcatttcgacactgttcagatttgcagtctgtctccggaggtgcttggtccttcacccgaggggggcggatggcacgtgcatacctttcagggccgctgggtcagagggttcaactctggaggcagtcagcctaatgcagagacgttttggactaaccctcagtttcggctcaccctgttggagcccgatgaggaggacgacgaggatgaggaggggccctggggcgggtggggcgccgctggggctcgagggcccgcccgaggggggcgcacccctaaatgcacggtgctcttaagcctgatccagcggaaccgacgcaggttacgagcaaaggggcttacgtatctgactgttgggttccatgtgtttcaaatccctgaggagctcctgggcttgtgggatagcccccggagccatgcgttgctgccccgcttgctgcgggccgatcgtagtccgctgagcgcaaggagagacgtgaccaggcgctgttgtctcagaccaggacactatctcgtcgtgccctccactgctcacgctggtgatgaagcggatttcacactacgtgtgttcagcgaacggcggcatacggccgtggagatcgacgatgtcatcagcgctgatctgcaatccctacaaggaccttacctccccctggaactggggctagagcagctctttcaggagctagcgggagaggaagaggagctgaacgcctcacagttgcaggctctgcttagcatcgcgttagaaccagcccgcgcccacacctctaccccccgagagatcggattgaggacctgtgaacagctcctacagtgttttggccacggacagagtctcgcgctgcatcacttccaacaactctggggctacttactagagtggcaggccatctttaataagtttgacgaagacacgtcaggcactatgaactcgtacgagctgcgcttagccctcaatgcagccggtttccatctgaacaatcagttaacccagacactcacctctagatatcgcgattcacgacttcgggttgacttcgaacgctttgtcagttgcgtggcccatttaacatgcatcttttgtcattgctcccagcacctcgatggcggggagggggtgatatgccttacacacagacagtggatggaggttgcgacctttagctag

SEQ ID NO: 110588 - DNA, 2448 bp, synthetic construct
  misc_feature 1..2448: note = Description of Artificial Sequence: Synthetic coding sequence
  source 1..2448: mol_type = other DNA
atgcccaccgtaatctccgcgtccgtggctccacgaactgccgccgagccaagatccccagggcctgtccctcatccagctcagagcaaggccactgaggccgggggagggaatcctagtggtatctacagtgcaatcatatctagaaatttcccaataatcggcgtgaaggagaagacgtttgagcagttacacaagaaatgtctggagaagaaagtgctgtacgtggatcccgagttcccaccagatgagacgtccctgttctattctcagaagttccctatccaattcgtttggaaaaggccaccggagatctgtgaaaatccccgcttcattatcgacggagctaacaggacggacatctgccagggggaacttggtgactgttggttcctggccgccatagcatgtctgacgctgaatcagcacctcctgtttcgtgtcatacctcacgatcaatccttcattgaaaactacgcaggcatttttcacttccaattttggcgttacggggagtgggttgacgtcgtgatcgacgactgcctccccacttacaacaatcagctcgtctttaccaaatcaaaccatagaaacgagttttggtccgcgctgctcgaaaaggcttatgccaagctccatggtagctatgaagccttgaaggggggaaatacaactgaggccatggaagattttaccggcggcgttgcagagttttttgagattcgtgatgcaccgtcagacatgtacaaaataatgaagaaagctattgagcggggaagccttatggggtgctccattgatgacggaactaatatgacctacggaacatctccatccgggctgaatatgggcgaattaatcgcacggatggtgaggaacatggataactccctgctccaggatagtgatctggacccccggggcagtgatgaacgcccgactcgcacgatcattccggtgcagtacgagacccggatggcctgtggattggtgagggggcatgcgtatagtgtcaccggactggatgaggtccctttcaaaggtgaaaaggtcaaactcgtcaggttgcgtaatccatgggggcaggtggaatggaacggatcatggagtgataggtggaaagattggagttttgtggacaaggatgagaaggccagacttcagcaccaggtgacggaggacggcgaattctggatgtcttatgaagacttcatataccacttcacgaaattggagatctgtaatctgacagccgatgccctgcagagcgataagcttcagacgtggacagtctcagtaaatgagggcagatgggtgcgcgggtgttcggctggggggtgtcggaatttccccgacacattctggaccaaccctcaatataggctgaaactgctggaggaagacgatgaccctgatgattccgaggtaatctgcagctttcttgtcgctctgatgcagaagaaccggcgtaaggatcggaagctgggagcctccctcttcaccattgggttcgcgatctacgaggttccccaccagatgcacggcaataaacaacacctccagaaggactttttcttgtacaatgcaagcaaggcacggtctaaaacgtacattaacatgcgggaagtatctcagcgtttcaggctgccccctagcgagtacgtgattgtgccctctacttacgagcctcatcaggaaggcgagtttattctgagggtcttttccgagaagcgaaacctgtctgaggaagtggaaaataccatctccgtggatcgccctgtaccgatcatcttcgtgtcagatagggccaactccaataaggagcttggtgtggatcaggagtctgaggaggggaagggtaagacttcccccgacaagcagaagcaaagcccccagcctcagcctggctcctctgaccaggagagtgaggaacagcagcagttcagaaacatttttaagcaaatcgccggagatgacatggagatttgtgcagacgagcttaaaaaggttttgaacactgtcgttaataagcacaaggacctgaaaacccacggatttacactggagtcatgccgcagtatgatcgccctcatggatacggacggctccgggaaactgaacctacaggagttccatcacctgtggaacaagattaaggcctggcaaaaaatctttaagcactatgatactgatcaaagtggcaccatcaattcctacgaaatgaggaacgctgtgaacgatgcagggttccatcttaataaccagctgtacgatatcatcacgatgagatatgctgacaaacatatgaacatagattttgactcattcatatgctgcttcgtccggctggaggggatgtttagggcgtttcatgccttcgataaggacggcgatgggatcatcaagctaaatgtgcttgaatggctgcagcttacgatgtacgcatag

SEQ ID NO: 110589 - DNA, 930 bp, synthetic construct
  misc_feature 1..930: note = Description of Artificial Sequence: Synthetic coding sequence
  source 1..930: mol_type = other DNA
atgcatggaaataaacagcacttacaaaaagattttttcctgtataacgcctctaaagccaggtcgaaaacctacattaatatgcgggaagtcagtcagaggttccggcttcctccctccgaatatgtgatcgtcccctccacttatgaaccgcaccaggaaggagagttcatcttgcgggtcttctccgaaaagcgaaacctgagtgaggaggtcgagaacactatatccgtcgatcgacccgtccggaaggagacttataagcccattatttttgtcagcgatcgagcgaactcaaacaaggagctgggcgtcgatcaggaaagcgaagagggcaaaggaaagacgagtccagacaagcagaagcagagcccgcagccccagcctggcagctcagatcaggagagcgaggagcagcaacagtttaggaatattttcaagcagatcgcgggcgatgatatggagatttgtgccgatgagctcaagaaagttctgaataccgttgtaaataagcacaaggatctgaagacccacggctttaccctggagtcttgtcggtccatgatcgctctgatggacactgatggttctgggaaattgaacctgcaggaattccatcatctatggaataaaattaaagcctggcagaaaattttcaagcattacgatacggaccagtccgggaccattaacagttacgaaatgagaaacgctgtaaatgacgccggctttcacctaaataaccagttgtacgacatcatcactatgcgctatgcggacaaacatatgaatattgacttcgattctttcatctgctgctttgtgagactggaaggaatgtttcgggcgttccatgcattcgataaggatggcgatgggattattaagctcaacgtcctggagtggttgcaattgaccatgtacgcttag

SEQ ID NO: 110590 - DNA, 471 bp, synthetic construct
  misc_feature 1..471: note = Description of Artificial Sequence: Synthetic coding sequence
  source 1..471: mol_type = other DNA
atggagatttgtgccgatgagctgaagaaagttctcaatacagtcgtaaacaaacataaagacctcaaaacacatgggttcacgctggagtcatgccggagcatgatagcgctaatggacacagacggctctggaaagcttaacttacaagagttccatcacctgtggaataaaatcaaagcttggcagaaaatttttaagcactacgataccgaccagtccggcacgatcaattcttatgaaatgcggaacgctgtaaacgacgccgggtttcatctcaacaatcagttatacgacatcattacaatgagatatgcagataagcatatgaacatcgacttcgactccttcatttgttgctttgtgcggctcgaaggaatgtttcgcgcatttcatgccttcgataaggatggagatggaatcatcaagctgaatgttttggagtggttgcagctgacgatgtatgcgtag

SEQ ID NO: 110591 - DNA, 2190 bp, synthetic construct
  misc_feature 1..2190: note = Description of Artificial Sequence: Synthetic coding sequence
  source 1..2190: mol_type = other DNA
atgccgacagttatcagtgccagcgtggccccacggactgctgcagagccacgcagccccggtccagtcccgcatcccgcacagtccaaggccacagaagcagggggcggcaaccctagcgggatctacagtgccatcattagtcgcaacttccccattatcggtgtcaaggagaaaaccttcgagcagcttcataaaaaatgtctcgagaaaaaagtcctgtacgtggatccagagtttccacctgacgaaacttcccttttctattctcagaaatttcccatccagttcgtatggaagcgcccccctgagatctgtgagaatcctagattcataattgacggcgcaaataggactgatatatgccaaggagaactgggagactgttggttcctggctgccatcgcatgcttgactctgaaccagcacttacttttccgtgtgatccctcacgatcaatccttcattgagaactatgctgggatctttcacttccagttttggaggtacggggaatgggtggacgtggtaatcgatgactgtctccctacttataataaccagctggtgtttacaaaaagtaaccaccggaacgagttctggagcgccctgctggagaaggcctacgccaaactgcatggatcctacgaggctctgaagggcggaaacaccaccgaggccatggaagactttacaggaggagtggctgagttttttgaaattcgtgacgcccctagcgatatgtataaaatcatgaaaaaggcgatcgagcgaggttctctcatggggtgtagtatcgacacaatcatcccagttcagtatgaaactagaatggcatgcggactggtgaggggccatgcctattcggtcaccggcctggatgaagtgccttttaaaggcgaaaaagttaaactggtgaggttgcgtaacccctgggggcaagtggaatggaatggttcctggtccgaccggtggaaggactggagctttgtggataaggacgagaaggcccggctgcagcaccaggtcactgaggacggagaattctggatgagttacgaggatttcatctaccactttaccaagctcgaaatttgtaatctcactgccgacgctctgcagagcgataaactgcaaacatggactgtcagcgtgaacgagggaaggtgggttagaggttgttctgccggaggatgtcgaaacttccccgataccttctggactaatccccagtacaggctgaagctgctagaggaagacgacgacccagatgacagcgaggtcatatgtagttttctggtggccttgatgcagaagaaccgtaggaaggatcggaaattaggggcctcactctttacaattggtttcgccatctacgaggtccccaaggagatgcacgggaataagcagcacttgcagaaagatttcttcctctacaatgcttccaaagcacggtctaaaacttacatcaatatgcgggaggtgtcccagcgcttccgactgcctccatctgagtatgttatcgtgccatctacatatgaaccccaccaggaaggcgaatttatcctccgggttttttctgagaaacgaaacctgtctgaggaggtggagaatactataagcgtcgacagacctgttccacagccggggtcatccgaccaagagtcagaagaacagcagcagttcaggaatatctttaaacagatcgccggagacgacatggagatctgtgctgatgaactcaaaaaggttctgaacaccgtggtaaacaaacataaggatctgaagacacacggatttactcttgaatcctgccggtctatgattgcactgatggataccgatggaagtggcaagttgaacctacaggagttccaccatctgtggaacaagatcaaagcatggcagaaaattttcaaacattacgacacagatcaatcgggcactattaattcctacgaaatgcgtaatgccgtgaatgacgctggcttccacctgaacaaccagctgtacgatatcataaccatgcggtacgcggacaagcatatgaatattgattttgactctttcatttgttgttttgtcaggctcgagggtatgttccgggcatttcacgcctttgacaaagatggcgacggcatcatcaaactcaatgttctggaatggctgcaactgacaatgtacgcctag

SEQ ID NO: 110592 - DNA, 2187 bp, synthetic construct
  misc_feature 1..2187: note = Description of Artificial Sequence: Synthetic coding sequence
  source 1..2187: mol_type = other DNA
atgtcctggcaaatatcactgaagacgcagactacacaacagaaaaatgaaatttgcgaaaacccaaggttcatcattgatggggcaaatcgaactgacatttgtcagggagagttaggtgactgctggtttcttgcagccattgcctgcctaacacttaaccagcatctgctgttcagagtgattccgcacgaccaaagctttatagaaaactatgcgggcatttttcatttccagttctggagatatggcgagtgggtggacgtagtgattgatgattgcctgcctacatacaacaatcagctggttttcactaagagcaaccaccgaaacgaattttggtcagcgcttcttgaaaaggcgtatgccaagctgcatggctcttacgaagcgctcaaaggaggcaacacaacagaagcaatggaagattttaccggtggtgtcgccgaattcttcgagattcgcgatgctccctccgacatgtacaaaataatgaagaaggccatcgagaggggatccctgatggggtgctcaattgatgacggaactaacatgacgtatggtacaagcccctccggcttgaatatgggcgagctgatcgcccggatggttcgcaatatggataacagtctgcttcaggacagcgacctagacccccggggcagtgacgagcggccaacaagaactattatccctgtgcaatacgagacgagaatggcatgcggattagtccgggggcacgcctactccgtcaccgggctggacgaggttccgttcaaaggcgaaaaggtaaaactggtcagactcagaaatccttgggggcaggtggagtggaatggcagctggtcggaccgatggaaggactggtctttcgtggataaggatgagaaagcccgtctacagcaccaggtgacggaggatggcgagttttggatgtcctatgaggatttcatatatcactttacaaagttggagatctgcaacttaacagctgacgctttgcagtctgacaagcttcagacgtggaccgtgtccgtgaatgagggtagatgggttcgtggctgctcagcaggagggtgtaggaacttccccgatacattctggacaaacccacagtacagactgaagttactcgaggaggacgacgaccccgatgattccgaggtcatatgcagcttcttagtggccctcatgcaaaagaacaggcggaaagaccgcaagctcggagccagcctgttcacaattggattcgccatttacgaggtacccaaagaaatgcatgggaataagcagcatctacagaaggatttttttctgtacaacgcctcgaaggcgcggagcaagacctatattaatatgagggaggtgagtcagagattcaggctgcctccatcagagtacgtcattgttccttcaacatacgagccacatcaggaaggagaattcatcctgcgagttttttctgaaaagcgcaacctttccgaggaagtggagaacactatctccgtggatcggcccgtccctattatctttgtctctgatagagcgaactctaacaaggagctcggcgtggatcaagagagcgaggagggtaagggaaagacatctccagataagcagaaacagtccccacagcctcagccaggaagctccgaccaggaaagcgaagagcagcaacagttccgcaacatatttaaacagatagctggcgatgacatggaaatttgcgctgatgagctgaagaaagtcctaaacaccgttgtaaacaaacacaaggatctaaagacgcacggcttcaccctggaaagctgtagaagtatgatcgctttgatggatacagacggttcagggaaactgaaccttcaggagttccaccacctgtggaataagataaaagcttggcagaagatctttaagcactacgacactgatcaatctgggacaataaatagctacgaaatgaggaatgctgtgaacgacgcaggatttcacttgaacaaccaactctacgacattattactatgcggtatgctgataagcacatgaatattgattttgacagcttcatctgttgcttcgtccggctcgaaggtatgtttcgggctttccatgcattcgataaagacggcgacgggattataaaactcaacgtgcttgaatggctgcaactgaccatgtatgcttag

SEQ ID NO: 110593 - DNA, 2448 bp, synthetic construct
  misc_feature 1..2448: note = Description of Artificial Sequence: Synthetic coding sequence
  source 1..2448: mol_type = other DNA
atgccaactgtaatcagcgcaagcgtggcccctagaacagctgccgaacccaggagtcctggtccagtaccccacccagcccagagcaaagccactgaggcgggcggtggcaatcctagcgggatttacagtgctataatatctcgcaatttcccaatcatcggagtgaaggagaagacatttgagcaactccataaaaagtgccttgagaaaaaagtgctttatgttgaccccgaattccctccagacgagacgtcactgttttactcccagaaattccctatccagttcgtctggaagcgacctcccgagatctgcgagaaccctcgatttatcatcgacggcgccaacagaactgatatttgtcagggagaactgggagactgttggtttttggccgccattgcttgcctcacattaaatcagcacttattgttcagggtgatccctcatgaccagtcgttcattgagaattacgcagggatctttcattttcagttttggaggtatggagaatgggtcgatgttgtgatagatgattgtcttccaacatataacaaccagttggtctttacaaagtctaaccatcggaatgaattctggagcgctctcctagaaaaagcatatgccaagcttcatggctcgtatgaagctttaaaggggggcaatacaactgaggccatggaggactttaccggcggtgtggcagaattcttcgaaattcgagatgcaccttccgacatgtataagataatgaagaaggcgattgaacgtggctctctgatgggatgtagcatcgacgacggaaccaacatgacgtatgggacatctccgagcggactcaatatgggagaacttattgcccggatggttcgaaatatggacaatagcctgctccaggacagcgacctcgacccaaggggtagcgacgaacggccaactcggactatcatacccgtgcaatatgagacacggatggcttgtgggcttgtgcgtgggcacgcctactctgtaacaggcctggatgaagttccattcaaaggcgaaaaggtcaagcttgtgcggctcagaaacccttggggtcaagttgaatggaacggctcttggagtgacaggtggaaagactggtcattcgtggataaagacgaaaaggccaggctgcagcaccaagtgactgaagatggtgaattctggatgagctatgaggattttatttaccattttaccaaactcgaaatctgtaacttaactgcagacgcgcttcagtccgacaagctgcagacctggacagtttccgttaacgaaggccggtgggtgcgtgggtgttctgccggtggttgcagaaacttcccagacactttctggaccaaccctcaataccgcctgaagttgttggaggaggacgatgacccagatgactctgaagtgatttgttcattcctggtggcattaatgcaaaaaaatagaagaaaggatcgaaaactcggagcttccctgtttaccataggattcgccatttatgaagtcccgaaggagatgcatggcaataagcagcatttacagaaagatttttttttatacaatgcgtccaaggcccggtccaaaacgtacattaatatgcgcgaggtcagccagaggttccgactaccaccttctgagtacgtaatagtgccctcaacttacgagccacaccaggagggtgaattcatcctgagggtcttcagcgagaaaagaaaccttagtgaggaagtggagaacaccataagcgtggatcgacctgtaccaattatctttgtgagtgatcgcgccaacagcaacaaagaactcggcgtggaccaggagtccgaagagggcaaagggaagacaagccccgacaagcaaaaacagtccccccagccacaacctgggagttctgaccaggagtctgaggaacagcagcagtttcggaacatatttaagcagatcgcaggagacgatatggagatctgcgctgacgagcttaagaaggtcctcaacaccgtggtaaacaaacacaaggacttaaagactcacggatttactctcgaaagctgtagatccatgatcgcactgatggacaccgatgggtccgggaaactgaacttgcaggagtttcatcacctgtggaataaaatcaaagcatggcagaaaatctttaaacattacgacactgatcagagtgggacgattaattcctacgagatgaggaacgccgttaacgatgccgggtttcacttgaataaccagctgtacgacataatcactatgcgatatgctgataaacatatgaacattgatttcgattcctttatatgctgctttgttcggttagaaggtatgtttcgcgcctttcatgctttcgacaaggatggcgacggaatcatcaaactgaacgttctcgagtggctccagctcacaatgtacgcctag

SEQ ID NO: 110594 - DNA, 2466 bp, synthetic construct
  misc_feature 1..2466: note = Description of Artificial Sequence: Synthetic coding sequence
  source 1..2466: mol_type = other DNA
atgcccacggtgatctcagcgagtgtggcccctcggacggccgcagaacctagatcacctggcccagtgccgcatccagcacaatccaaggcgacagaagcaggcggcggcaacccttccggaatatatagtgccatcatcagccggaatttccccattatcggggtaaaggagaaaacctttgagcagttgcacaaaaagtgcttagaaaagaaagtgctgtatgtcgacccagaatttccaccagacgagacctcactgttctatagccaaaaatttcccatccagtttgtgtggaagcggcccccggagatctgtgaaaatcctcggttcattatcgacggggccaataggactgacatctgtcaaggcgaactgggcgattgctggttcctggccgctatagcgtgcctgacgctgaatcagcacctactgttcagagtcatcccacacgaccagtcgtttatcgaaaactacgcgggtatcttccacttccaattctggcgctacggagaatgggttgacgtcgtgattgacgactgtctgcccacttataacaatcagctcgtttttaccaaaagcaaccatagaaacgagttctggtccgctctcttagagaaggcttatgctaaactgcatggaagctatgaggccctcaaaggcggcaataccaccgaggcgatggaagattttactggtggcgttgctgagttcttcgagattcgggacgccccctctgatatgtataagattatgaagaaggccatcgagaggggaagcttaatgggttgttccatcgacgatgggacaaacatgacatacggcactagtccctctggtctgaatatgggagagctgatcgctcgtatggttcgcaatatggataactcactactacaggactccgacctcgacccacgtgggagcgatgagcggcccacacggaccatcatccctgtgcaatacgaaacgcgaatggcttgtgggctggtccgcggccatgcttactcagtcaccgggcttgacgaagtgccttttaaaggagaaaaggtgaaattggttaggttacgcaatccctggggccaagtggaatggaacggttcatggtctgaccgttggaaggattggagttttgtggacaaggatgagaaggctaggctgcagcaccaagtcacagaggatggcgagttctggatgtcttacgaggatttcatttatcacttcacaaagctcgaaatctgtaacctgactgcagacgcgctgcagtcggacaaactccagacttggacagtcagtgtgaatgaaggtagatgggtgagaggctgctctgccggcgggtgtaggaacttcccagatactttttggaccaacccccagtatagacttaaattgctggaggaggacgacgatcccgacgatagtgaagtcatctgttcattcttggtggctttgatgcagaagaacaggcgcaaagatcggaaactgggtgctagcttgttcaccatcggattcgccatttacgaggttcccaaggagatgcacggtaataaacagcacttgcagaaggacttcttcctttacaatgcatcaaaggcgcgcagcaagacttacattaatatgcgtgaggtgtcacagcgatttcggttgcctccatctgagtatgtgatcgttcccagcacatatgagcctcatcaggagggagagttcatccttcgggtttttagcgagaagcgcaacctctcggaggaagtggagaacactatcagtgtggatagacctgttaaaaagaaaaagaccaaaccaattatcttcgtgagcgatcgtgcaaacagcaacaaagaactcggcgtggaccaggagtctgaggagggcaaaggcaagacatcccccgataagcagaagcagtcaccacagccacaacctggaagctctgaccaagagagtgaagagcagcagcagtttaggaatatctttaaacagattgccggcgatgatatggagatatgtgctgacgagcttaagaaagttctaaatacggtcgtgaataaacacaaagacctcaaaacacatggtttcactctcgagagttgtcgtagcatgatcgcattaatggacaccgacgggagcggtaaacttaacctccaggagtttcaccacctgtggaataaaattaaagcgtggcagaagatctttaaacactacgacacagaccagtccgggaccatcaattcctacgagatgcggaacgccgtcaacgatgccggctttcacttgaataatcagctctacgacatcatcacaatgcggtacgccgacaaacacatgaacattgactttgactcattcatttgctgttttgtcaggctagagggcatgtttagagctttccacgcctttgacaaggacggtgacgggattatcaaactgaatgtgctggagtggcttcagcttaccatgtacgcatag

SEQ ID NO: 110595 - DNA, 930 bp, synthetic construct
  misc_feature 1..930: note = Description of Artificial Sequence: Synthetic coding sequence
  source 1..930: mol_type = other DNA
atgcacggcaataagcaacacctccagaaagacttcttcctttataacgcctctaaagcccgtagtaaaacctatattaacatgagggaagtgagtcagcggtttcggttgcccccttcagagtatgtcatcgtccccagcacttacgagcctcaccaggagggagaatttatactgcgcgtgttttcagaaaaaagaaacctgtcagaagaagtggagaacacaatatcagtcgatcgccctgtcaaaaaaaagaaaaccaagccaatcatctttgtgagcgatcgagccaattccaacaaagaactcggcgttgaccaagagtcagaggagggaaaggggaagacgtccccggacaaacagaagcaaagccctcagcctcagcccggctccagcgaccaagaatcagaggaacaacagcaattccgcaacatctttaagcaaattgccggggatgatatggaaatctgcgcggatgagttgaaaaaagtgctaaatacagtggtgaacaaacataaagatctcaagacccacggatttaccctggagagttgccgctccatgattgcgctgatggatacagacggctcgggtaagttgaacctccaggaattccatcacttgtggaataaaataaaagcatggcaaaagatcttcaaacattatgataccgatcagtctggtactattaactcttatgaaatgcgaaacgccgtgaatgacgccggctttcacctgaacaatcagttatacgatataattaccatgaggtacgctgacaagcacatgaatatagacttcgattcttttatttgctgttttgtccggctagaaggcatgtttagagctttccacgcatttgataaggatggtgatgggattattaagctgaacgtcctggaatggctgcagctgactatgtatgcctag

SEQ ID NO: 110596 - DNA, 471 bp, synthetic construct
  misc_feature 1..471: note = Description of Artificial Sequence: Synthetic coding sequence
  source 1..471: mol_type = other DNA
atggagatatgtgccgacgaacttaagaaagtgctgaacacagtagtgaacaagcacaaagacctcaagacacacgggtttacccttgaaagttgccggtcaatgatagctctgatggatacagatgggagtggcaagctgaatctccaggagttccaccacctgtggaacaaaatcaaagcatggcagaaaattttcaagcattacgacacggatcagagtggcactataaattcttatgaaatgaggaatgcggtgaatgatgcaggcttccatctcaataaccaactctacgatataatcaccatgagatatgctgacaaacatatgaacatagatttcgactccttcatttgttgtttcgtgaggctcgaagggatgtttagggccttccacgcctttgataaggacggggacggaattattaaactgaacgtcctggagtggctccagttgacaatgtacgcctag

SEQ ID NO: 110597 - DNA, 1923 bp, synthetic construct
  misc_feature 1..1923: note = Description of Artificial Sequence: Synthetic coding sequence
  source 1..1923: mol_type = other DNA
atgtttagttgcgtgaaaccctacgaggatcagaattactcagcgctgaggcgcgattgtcggcgccgtaaggtactgtttgaagatcctctgttccccgcaactgatgacagcctatattacaaggggacaccaggtcccgccgtgcggtggaagagaccgaagggaatttgcgaggatccccggctctttgtggacggaatttcctcccatgacctccatcaggggcaggtcgggaattgctggtttgttgcagcctgttctagcctcgctagtcgggaatctctctggcagaaggtgatccccgactggaaagaacaggaatgggacccagagaagcccaacgcctatgccgggattttccatttccacttctggagattcggggagtgggtcgacgtggttatcgacgacaggcttcccacagtcaataatcagctcatctactgccactctaattctcggaatgagttttggtgcgctctggttgagaaggcttacgccaaactggctgggtgctatcaggcacttgacggaggcaacactgccgatgccctggtcgacttcacggggggagtatcagagcccatcgacctgaccgaaggcgacttcgcaaatgatgagaccaaaaggaatcaactatttgaacgcatgcttaaggtccacagtagagggggacttatctccgcctccatcaaggctgtcactgcagccgacatggaagcacgtctggcctgcggactggtgaagggccatgcttacgccgttacagatgtgcgtaaagttagactgggacacggcctcctcgctttcttcaagagcgagaagctggacatgatccgactacggaatccctggggtgagcgtgaatggaacgggccatggtccgatacttctgaggagtggcagaaagtcagcaagagcgagagagagaagatgggcgttactgtgcaagacgatggcgagttttggatgacttttgaagatgtgtgtcgctactttaccgacataattaagtgcagagtgatcaacacgtcacatctttccatccacaaaacatgggaggaggcaagattacatggagcctggacacttcacgaggacccacggcagaatagaggcggggggtgtataaatcataaggacacattttttcagaatccccagtacatctttgaagtgaagaagcctgaggacgaagtccttatctgtatccagcagcgtccgaaaagaagcacccgacgcgagggcaagggggagaacctggcaatcggtttcgatatatacaaggttgaggagaacagacagtaccggatgcactctttgcagcacaaggccgcctcctccatctacatcaacagtcggagtgtgtttctaaggactgatcagccggaggggaggtatgtgatcatacctacaacctttgagcccggtcataccggggaattcctgctgagagtgttcactgacgtcccctccaactgccgtgaactaagactggatgaaccccctcatacgtgttggagctctttgtgcgggtatccccagctcgtcactcaggtccacgtgctgggggcagctggtcttaaagattcaccaactggcgcaaacagttacgtaatcatcaagtgcgaaggcgacaaagttcgatccgccgtccaaaagggtacttctacccccgagtataatgtgaaagggattttttatcgaaagaagctgagtcaacctataacggttcaagtgtggaatcaccgggtgctcaaagacgagttcctcggccaggtccacctgaaagccgaccccgacaatctgcaggcgctccacaccctacacctgagggacagaaacagccgccaaccctctaatcttccaggcactgtcgccgtgcacatcctgagttccacttcgttgatggctgtctag

SEQ ID NO: 110598 - DNA, 2043 bp, synthetic construct
  misc_feature 1..2043: note = Description of Artificial Sequence: Synthetic coding sequence
  source 1..2043: mol_type = other DNA
atgtcctgcacaggcaccccgagctgcatctatttactatctgccctgtccttacaagatctagtgctggactgggagcctcgtggtgtgcccccccctcttccaggagcagcagcaactatgttttcttgtgtcaaaccatatgaagaccagaactactcagcgctgcggcgggattgtcgtaggcgtaaagtcctgttcgaagacccactgtttccggccactgatgactccctatactataaaggcacgcccggaccagcggtgaggtggaagagaccaaagggtatctgcgaggatcctcgactgtttgtggacggaatttcatctcacgacctgcaccagggacaagtgggcaactgctggtttgtggcggcctgctcctctctcgcatctagggagagtttgtggcagaaggtaatccctgactggaaggagcaggagtgggaccctgaaaagcctaacgcgtacgcaggaatttttcacttccacttctggcgcttcggcgagtgggtggacgtagtcatcgatgaccgactcccaactgtgaataaccaactgatctactgtcactccaattctcgcaacgaattctggtgcgccctcgtggaaaaggcctatgcaaaactggctggttgctaccaggcactggatggaggtaacactgccgatgccctcgtagatttcacaggaggtgtgagcgagccaatcgacctaactgagggagactttgcaaacgacgagactaagagaaatcagctgtttgaacgaatgctgaaggtgcatagtagggggggcctcataagtgcttcgattaaagctgtgacggccgcagacatggaggcaaggctggcgtgtgggcttgttaagggccacgcatacgctgtgacagatgtcagaaaggttcgcttgggtcacggcctgctcgctttttttaaaagtgagaagttagacatgattagattacggaatccctggggagagcgcgagtggaacgggccctggagcgatacttctgaggagtggcaaaaagtctcaaaatccgagcgagagaagatgggcgttactgtccaggacgacggtgaattctggatgacattcgaggacgtctgccgctactttaccgacatcattaaatgcagggtcattaataccagccatctgtccattcacaaaacgtgggaagaagcgcgcttacatggggcatggactcttcatgaggatccgcggcagaacagaggcggaggctgcatcaatcataaagatacttttttccaaaatccccagtatatttttgaggtaaagaagcctgaggatgaagtgctcatttgtatccaacagcggcccaagagaagcacacgaagagaggggaaaggcgagaacctggctatcggatttgacatctataaggtggaagagaacagacaatataggatgcacagcttgcaacacaaggctgcctcctcgatctatattaacagccgctcggtcttcctcaggaccgatcagccagagggacgctacgtgataattcctacaacattcgaacctggccacactggcgagtttctgctgagggtcttcaccgatgtgccatctaactgccgggaattgcggttagacgaacctccacatacctgctggtctagcctttgtggatacccgcagctcgtgacccaggtacacgttttgggggccgccggcctgaaggactctcccaccggtgcaaacagctacgtgattattaagtgcgagggagacaaagttagatctgccgttcagaaaggaacgagtacccctgagtataacgtgaaaggaatcttctataggaaaaagctaagccagcctattacagtccaggtgtggaatcatagggtcttaaaggatgagtttctcggtcaggtgcacctgaaggcggaccccgataacttgcaggcccttcatacactgcatttgagggaccgaaactccagacaaccgtccaacctccccggcacggtggccgtgcacatcttgagctccacaagccttatggcagtttag

SEQ ID NO: 110599 - DNA, 294 bp, synthetic construct
  misc_feature 1..294: note = Description of Artificial Sequence: Synthetic coding sequence
  source 1..294: mol_type = other DNA
atgttttcctgcgttaagccatacgaagaccagaactatagcgcgctgagaagggattgcaggagacggaaagtcctgttcgaggaccccctatttcctgctacagatgacagcctgtactacaaagggacaccgggtcccgcagtgcgctggaaaaggccgaagggtatctgtgaagatcctaggctgttcgtggatggaatctcctcccacgatttgcaccaagggcaggtaggaaactgctggtttgtggccgcatgtagctctctagcctcccgggagtccttatggtag

SEQ ID NO: 110600 - DNA, 1923 bp, synthetic construct
  misc_feature 1..1923: note = Description of Artificial Sequence: Synthetic coding sequence
  source 1..1923: mol_type = other DNA
atgttttcatgcgtgaagccatatgaggatcagaactattctgccctgcggcgcgactgtcgccggagaaaggtcttgttcgaagacccactgttcccagcaactgatgacagcctctattataaaggtacccctggcccagctgtgagatggaagcgaccaaagggcatctgtgaggatcctaggctgttcgtggacggcatcagttctcatgacctacaccaaggacaagttggcaactgctggtttgtggctgcctgcagtagcctcgctagcagagagagcctgtggcagaaagtgatccccgactggaaggagcaggaatgggaccccgagaagcccaacgcctatgccgggatattccacttccatttttggcgttttggggagtgggtcgacgtggtgattgacgacaggcttccaacagtgaacaaccagctgatttactgtcactcaaactccaggaatgagttttggtgtgcactggttgagaaagcgtatgccaagctcgcaggatgttaccaagctttagatgggggaaacaccgctgatgctctcgtggactttactggtggtgtctcagagccaatcgacctaacagaaggggatttcgctaatgacgagacaaagcgcaaccagctgtttgagcgaatgttgaaagtccattcccggggcggcctgatctctgcttcaataaaggccgtcacagctgcagacatggaagcacgcctcgcctgcggtctggtgaagggacacgcatatgcagtgaccgatgtgcgcaaggtgaggctgggccatggcctgctggcattctttaagtccgaaaaactggacatgatccgcttgcgaaatccttggggcgagcgagaatggaatggcccatggtcagacacgagtgaggaatggcagaaagtgtccaagagcgagagagaaaagatgggcgttaccgtgcaagatgatggagagttctggatgactttcgaggatgtgtgtagatacttcaccgatatcattaagtgccgcgtgatcaataccagccacttgtctatacacaaaacctgggaggaggcaaggctccacggagcctggacactgcacgaagacccacgacagaataggggcggaggctgcattaaccacaaggatacatttttccagaacccacaatatatttttgaggttaagaaaccagaagatgaagttttaatctgcatccagcagagacctaagcgtagcacccggagggaggggaaaggcgaaaacctggccatcggctttgatatttataaggtcgaggaaaacagacaatacaggatgcatagccttcagcataaggcagctagctcgatatacattaactctcgaagcgtgttcctaaggacagaccaaccagaggggcgctacgttatcatccctactaccttcgagcctgggcacacaggagagttcctgctccgagtctttaccgatgtcccctcaaactgccgcgagcttcgccttgatgagccaccacatacatgttggtccagtctgtgtggttaccctcagctcgtcactcaggtgcatgtgctgggtgcggccggactcaaggattctccgaccggggctaactcctacgtgatcataaagtgtgaaggcgacaaggttcggtccgcggttcaaaaggggacctccacgcccgaatacaacgtcaaaggaatcttctaccgtaagaagttaagccagcctatcacggtacaggtctggaatcaccgggttttgaaggacgaattcttggggcaggtacacctgaaggccgatcccgacaatctccaggccttgcacacactgcatctacgggatcgaaacagcaggcaacctagtaacctccctggcacagtcgctgtgcatattctttcgtcaacctctctcatggctgtgtag

SEQ ID NO: 110601 - DNA, 1674 bp, synthetic construct
  misc_feature 1..1674: note = Description of Artificial Sequence: Synthetic coding sequence
  source 1..1674: mol_type = other DNA
atgttttcttgtgtgaaaccctatgaggatcaaaattattccgcactccgacgcgactgcagacggagaaaagtcctcttcgaggatccgctttttccagcgaccgatgactcactgtactataaaggcacccctggcccagcagtcaggtggaagcggccaaagtacagcggacattccttggcccctcacagacccggctggggtgacgcaagaaggatggagaatgtgcctcgacctggcagtagtgggtgcccctcctccagtttgcgggcacgagatctcggtatctgcgaagatccacgtctgttcgttgatggaattagttcccatgacttgcaccaaggccaggtgggtaactgctggttcgtagctgcatgttcctcattggcgagtcgtgagtcattatggcaaaaggtcatacccgattggaaagagcaagagtgggaccccgaaaaacctaacgcatacgctggaatatttcattttcatttttggcggtttggagagtgggttgacgtggtcatagacgatcgtctgccgaccgtgaataaccaactgatttactgccattcaaacagtcgaaacgaattctggtgcgcgcttgtggagaaggcctatgccaagctggcgggttgttatcaagccctggacgggggcaacactgccgatgcactggttgactttaccgggggcgtgagcgaacctatcgatctgaccgagggagacttcgccaatgacgaaaccaaacgcaatcaactgttcgagcgcatgctcaaggtccactctcgaggtggcctgatctcagcctcaataaaggcagtgaccgctgcggatatggaagctagactcgcttgtggactagtgaaaggccacgcatacgcagtcactgacgtacgaaaggtccggctcggtcacggcttgcttgccttttttaagtcagagaagctggacatgataagattaaggaacccgtggggtgaaagagaatggaatgggccttggtctgacacgtctgaggagtggcaaaaggtaagtaagtccgagcgggagaagatgggtgtcacagttcaggatgatggcgagttctggatgacgtttgaggatgtctgtaggtattttaccgatattatcaagtgccgtgtgatcaacaccagtcacctgagtatccataagacctgggaggaggcacgtctccatggagcctggaccctgcatgaggatcctcggcagaaccgcggagggggttgcattaaccacaaagatacttttttccagaatccgcagtatatctttgaggttaagaagcccgaagatgaagtcctcatttgtattcagcagaggccaaagcgaagcacgcgtagagaaggcaagggggaaaacctcgccattgggttcgacatttataaggtggaggagaacaggcagtatcgaatgcactccttgcagcacaaagcggcaagctcaatctatatcaactcaaggagtgtgttcctgcgcactgaccagcctgaaggacggtacgtcataattccgaccacttttgaaccaggccacacgggggagtttctgcttcgagtctttacagacgtccctagcaattgtcgcgagctccgcttggatgaaccccctcacacatgctggagctctctctgcggctatccacagtggtag

SEQ ID NO: 110602 - DNA, 2442 bp, synthetic construct
  misc_feature 1..2442: note = Description of Artificial Sequence: Synthetic coding sequence
  source 1..2442: mol_type = other DNA
atggacgccacagctctggagagggacgcggtccagtttgcccggctcgccgttcagagggatcacgagggacgatattctgaagccgttttttactataaggaggccgcacaggctttgatctatgccgagatggctggaagttcacttgagaatatccaagagaagattaccgagtatctggagcgggtgcaggccctccacagcgccgtccagtctaagagtgcggacccattaaagagtaaacaccagttagacctcgaaagggctcatttcctggtgacacaagcctttgacgaggatgaaaaggaaaatgtcgaggatgccatcgaactctacaccgaggccgtggacctctgcttgaaaacctcatatgaaaccgccgataaggtgctgcagaacaagttgaagcagcttgctcggcaagccctcgacagagctgaagccctgagcgagccgctaacgaaacctgttgggaagatttccagcacctcagtgaaacccaagccccccccagtacgagcccattttcccctgggggcaaacccgttcttagagaggccacagtcatttattagcccccaatcctgtgatgcgcagggacagcgttacaccgccgaggaaatcgaggtgctgagaaccacctcaaagattaacgggatagagtacgttccgttcatgaatgtggacctgcgcgagcggtttgcttaccccatgccgttctgcgaccgatgggggaagttacctctgtcacccaaacagaaaaccacattcagcaaatgggttcggccagaagatttgacgaacaaccccacaatgatttacaccgtgtccagtttctccattaagcagactatagtatcggattgtagttttgtagcttcccttgcaatctcagcggcctacgagcgcaggttcaataagaaactaatcactggtatcatctacccacaaaacaaggacggagagccagagtataacccttgcggtaagtacatggtcaagctacacctgaatggtgtacccaggaaggttattatcgacgaccaattgccagtcgaccacaagggcgagctgctgtgttcctatagcaacaataagagtgaactctgggtgagtctgatcgagaaagcgtacatgaaggtgatgggcgggtatgatttccccggcagcaactcgaatattgatttacacgcgctcaccggatggatccctgaaagaatagctatgcactcagattcacagacattcagcaaagacaactcctttcgtatgctctatcaacgcttccataagggcgacgtgctgatcaccgcgtcgaccgggatgatgaccgaggcggaaggggagaaatgggggcttgtccccactcatgcatatgccgtcctagacattcgtgagtttaagggcctgcgattcattcagctgaagaacccctggtcccacttacggtggaaaggtaggtatagtgaaaacgatgttaaaaattggactcctgagctccaaaagtatctgaactttgacccacgcacagcgcagaaaattgacaacggcattttttggatttcttgggacgacttatgtcagtattacgacgtaatctacctctcctggaaccctggactgtttaaagaatcaacctgcattcactccacgtgggacgccaagcagggcccggttaaggatgcgtattctctggcaaataacccacagtataagctcgaagtgcaatgcccccagggaggcgcggctgtgtgggttctgctgtcgagacacataactgataaggacgacttcgctaataaccgagagtttattacgatggtcgtatacaagactgacggtaagaaggtgtactaccccgcagacccacccccgtatattgatgggattcgcatcaacagcccacattatctcactaagatcaagctgacaaccccaggaactcacacatttaccctcgttgtcagccaatatgaaaaacaaaatactatccattataccgttcgggtgtacagtgcctgcagtttcacattttccaaaattccctctccttacacactgagcaagcgcataaacggcaaatggtctggccagagtgcgggaggatgtggaaatttccaagaaacccacaaaaacaatccaatatatcagtttcacattgaaaaaacaggcccacttctgattgagcttcgaggtccacggcaatattcagttggtttcgaggtggtgacagtgagtactttgggcgatccagggccccatggctttctgaggaagtcaagcggcgactatcgatgtgggttctgctaccttgagttagaaaacataccctcaggaatcttcaacattattccctctaccttcctgcctaaacaagaaggcccctttttcttggacttcaacagcatcatccccatcaagataacacagctgcagtag

SEQ ID NO: 110603 - DNA, 2073 bp, synthetic construct
  misc_feature 1..2073: note = Description of Artificial Sequence: Synthetic coding sequence
  source 1..2073: mol_type = other DNA
atgccttatctctaccgagcgcctggacctcaggcccacccagtacccaaggacgcacgtattacccactcaagcgggcagtcattcgagcagatgcgccaagagtgcctgcagcgtggcacactttttgaggacgcggatttcccggcgagcaatagttcactattttattcagagcggccccaaatcccattcgtttggaaacgcccaggcgagatcgtgaaaaatcccgaatttatcttggggggtgccactcggactgacatttgccaaggagagcttggcgactgctggctgctggccgcaatcgcaagcctgaccctcaatcagaaggcgctggctagggttatcccccaggaccagtcatttggaccaggctacgctggcatcttccattttcagttttggcagcactctgaatggctggacgtcgtgattgacgacagactgcccaccttccgcgataggcttgttttcttacactctgctgatcacaatgaattctggagcgcactcctggagaaggcgtacgctaaactgaacggtagctatgaggcactgaagggagggtccgccattgaggccatggaggactttacagggggcgtggcagaaactttccagactaaggaggcgccagaaaacttctatgagatcctggaaaaggcgcttaaaagagggtctctcctggggtgctttattgacactaggtcggccgcagagtcggaggcgagaaccccatttggcctaatcaaaggacatgcctactccgttacaggtattgaccaagtgagttttcgaggccaaagaatcgaactgattaggatacggaatccctggggacaggtggaatggaacggcagttggtccgactcctccccagagtggcggtcggtgggtcctgcggaacagaagaggctgtgtcacacagcattagatgatggagaattttggatggcctttaaagacttcaaggcccatttcgacaaggttgagatctgtaatttaacacctgacgcccttgaagaggatgcaattcacaaatgggaggtcaccgtacaccaaggctcttgggtgagaggctctaccgccgggggctgtaggaattttctcgatacattttggaccaacccacagattaagctttcactcactgaaaaggatgagggacaagaggagtgctcttttctggtagcactcatgcaaaaagataggagaaaactaaagcggtttggagccaacgtcctcacaatcgggtacgcaatatacgagtgtcctgataaggatgagcacctgaacaaagatttttttcgataccatgcttctcgtgcaaggtcgaagacttttattaatttaagggaggttagcgatcgcttcaagttaccacccggagaatacatcctgattccatctacattcgaacctcaccaggaggctgacttctgccttcgaatcttttctgaaaaaaaggccattacaagggacatggacggaaacgtagacatagacctccccgaacccccgaagcctaccccccccgaccaggagacagaggaggagcagcggtttcgagccttgttcgaacaggttgccggagaggacatggaggtcacagctgaggagctggaatacgtgttgaatgcagttcttcagaaaaaaaaagacattaaatttaagaagcttagcctgataagctgcaagaacattatatctctgatggacaccagtgggaacggcaagcttgaatttgatgaatttaaggtgttctgggacaaattgaaacagtggatcaatcttttcctcaggtttgatgcagataaatcaggcaccatgagcacttacgagctccgaactgctctcaaggcggccggtttccagctctcctcacacttgctacagctcatagttctcagatatgcagacgaagagttacaactggacttcgacgatttcctcaactgcttggttaggctagagaacgcctctagggtatttcaggctctgagcacaaaaaataaagaattcattcatctgaacataaatgagttcatccacctgacaatgaatatttag

SEQ ID NO: 110604 - DNA, 1995 bp, synthetic construct
  misc_feature 1..1995: note = Description of Artificial Sequence: Synthetic coding sequence
  source 1..1995: mol_type = other DNA
atgccttatctctacagagctcctggccctcaggctcatccagtcccaaaggatgcccggataactcacagcagcggccaatcgttcgagcagatgagacaggagtgcctgcagcgcggtactttatttgaggatgctgattttccggcctccaactcttcattattttactcagagaggccacagatcccgttcgtatggaagcgccccggcgagattgtgaaaaaccccgagtttatcctcggaggcgctacaaggacagatatttgtcagggagagctgggtgactgttggctgctggcagccattgcaagcctcaccctcaatcagaaagccctggcacgtgtgatcccacaggaccagagttttggtcccggctacgctgggatctttcactttcaattctggcagcactcagagtggttggatgtagtgatcgacgatcgcctcccaactttcagggaccgactggtctttctgcatagtgccgaccacaacgagttttggagtgcccttctggagaaggcttatgccaaactgaatgggtcttatgaggctcttaagggcggatcggcaatcgaggcgatggaagatttcacaggcggcgtggccgagacatttcagactaaagaggcgcccgagaatttctacgaaattctggaaaaagcccttaagagaggttcactgctagggtgtttcattgatacgcgctcagcagccgaatctgaggccaggacaccgtttggtctgattaaaggccacgcttactccgtcactggaatcgaccaagtgtcatttagaggacaacggatagagttgatcagaatcagaaatccttggggccaggtggaatggaacgggtcgtggtctgatcgtatggcatttaaggatttcaaagcccacttcgacaaagttgagatctgcaacctgaccccagatgcgctggaagaggatgcaattcacaagtgggaggtgacagtgcaccagggttcttgggtcagagggagtactgcaggtgggtgtaggaacttcctggacactttttggacaaacccccaaattaaattatcgctgaccgagaaagatgaagggcaggaagagtgcagttttttggtcgcgctgatgcagaaggaccgccgcaaactaaaaagattcggggctaatgtgctgacgatcggatacgccatttatgagtgccccgacaaggatgaacacttgaataaggacttcttccgctaccatgcttccagggcccgcagcaaaacattcatcaacctcagagaagtgagcgaccggtttaagctgccacccggagagtacatcctcatcccaagcacctttgaaccccatcaggaagctgacttctgtttgcgaatcttcagcgagaagaaggccataacccgcgatatggacggcaatgtagacatcgaccttccggagccccctaagccgacaccacccgaccaggagaccgaagaggaacagcggttcagagctctttttgagcaggtggctggagaagatatggaggtgaccgccgaagaactcgaatacgtccttaacgctgtcctccagaaaaagaaagatattaaatttaaaaaactctccctgatttcatgcaaaaatataattagcctgatggacacatctggtaacgggaaactcgaattcgatgagttcaaagtgttttgggacaagcttaaacagtggatcaacttgttcttgagattcgacgctgataaatccggcactatgtccacttatgagttgaggacagcactgaaggctgccggcttccagctgtctagccatcttctgcagctgatcgtcctaaggtatgctgatgaggagctccagctggactttgatgactttctcaactgtctggtgcgcctggagaacgcttcccgggtgttccaagcactttctacgaagaacaaagagtttatccacttgaatatcaatgaatttatccatctgaccatgaacatttag

SEQ ID NO: 110605 - DNA, 1884 bp, synthetic construct
  misc_feature 1..1884: note = Description of Artificial Sequence: Synthetic coding sequence
  source 1..1884: mol_type = other DNA
atgccctacttgtaccgtgcacccggaccacaagcacatccggtcccaaaggacgcaaggattacgcactctagcggccagagtttcgagcagatgcgccaggagtgcctgcaacgtggcactctctttgaagacgcagattttcccgcctcaaattcaagcctattctacagcgagcgacctcaaataccgtttgtgtggaaacggccgggcttttggcagcactctgagtggctggacgttgtgatcgatgatcgacttcctacattccgcgatcggttggtgttcctccactcagcggatcataacgaattttggtcagcgctgctggagaaggcgtacgcaaaactgaatggttcttatgaggctctgaagggcggctccgctattgaagcaatggaagacttcaccggcggcgtggccgaaacatttcagaccaaggaggcacctgagaatttttacgaaatactggagaaagcattgaagagaggctcactgctgggctgctttattgacactcgcagtgccgccgagtcggaagccaggactcccttcggtctgatcaaaggccatgcctattccgtcaccgggatagaccaggtcagttttaggggtcagcggatcgagcttatacggattagaaacccatgggggcaggtggagtggaacgggagctggagcgattctagccccgagtggaggtcggtagggccagctgaacagaaacgtctttgccatactgccctcgacgatggcgaattttggatggctttcaaggacttcaaggcacacttcgacaaggttgaaatctgcaacctgactccagatgctctggaggaagacgcgattcataaatgggaagtcaccgtccaccagggcagttgggtgcggggatccaccgctggcggctgcagaaacttcctggatactttctggacgaaccctcagattaagctcagtctgacggagaaagatgagggacaggaggaatgttcctttttggtggctctaatgcagaaggacaggagaaaactgaagcggttcggagcaaacgtactgacaattggatacgcgatctacgaatgcccggacaaggacgaacacctgaacaaggatttctttaggtaccatgccagtcgtgccaggtctaagacttttatcaacctgagggaggtatccgatcggtttaagcttccacctggagagtatattcttatcccctcaacatttgagcctcaccaggaagcagatttctgcctccggatcttctcagaaaaaaaagctattacccgtgatatggatggaaacgtggacatagatctccccgagcccccaaagcctacgcctcccgatcaggaaactgaagaggagcaacgattccgggcactgttcgagcaagtagcaggcgaggatatggaagtcacagctgaggaactggagtacgtgcttaacgccgtgttgcaaaagaagaaggacattaagtttaaaaagttgtctctcatctcctgtaaaaacatcatttcattgatggatacaagtggtaacggcaagcttgaatttgatgagttcaaagtattttgggacaagctgaagcagtggattaacctctttctgaggttcgatgcagataagtcaggcacaatgtctacatatgagcttcgcacagcactgaaagccgctggtttccaattatctagccatttgctgcagttaatcgtattgcggtacgccgacgaggagcttcagctcgatttcgatgatttcctgaactgtcttgtgcgacttgaaaacgcaagtagagtgtttcaggctttgtcgacaaagaacaaggaattcattcacctgaatatcaacgaatttattcatctgactatgaatatctag

SEQ ID NO: 110606 - DNA, 807 bp, synthetic construct
  misc_feature 1..807: note = Description of Artificial Sequence: Synthetic coding sequence
  source 1..807: mol_type = other DNA
atgtttctagtgaattcctttctgaaggggggaggtggcggcggaggcggcgggggaggactcggcggtgggttggggaacgtcctgggcggactgatttcaggagccggcggcggaggcggaggtgggggcgggggcggcggcgggggcggcggcggcggcggcggcaccgccatgagaatcctcgggggagtgatatcagctatttctgaggctgcagcccagtataatcccgagcctcctccacctcggacccattatagcaatattgaggccaacgagtcagaagaagtccgccaatttagacgactgtttgcccagctcgccggcgatgatatggaagtgtcagcaaccgagctcatgaatattttgaacaaggtggttacaagacaccccgatctgaagaccgacggttttggtattgacacctgccgcagcatggtggctgtgatggattccgacacaacgggcaaactcggtttcgaggaatttaaatacctgtggaacaatattaagagatggcaggcaatttacaagcaattcgacacagatcggagtggaaccatctgcagctcggaactgcccggggcctttgaggcagctggcttccatttaaacgaacatctgtacaacatgatcattagaaggtatagcgacgagagcggaaacatggactttgacaacttcatcagctgtttggttaggttggacgctatgttccgggcattcaagtcactggataaagacggaaccggacaaatacaggtcaatattcaggagtggctgcagttgaccatgtactcctag

SEQ ID NO: 110607 - DNA, 2061 bp, synthetic construct
  misc_feature 1..2061: note = Description of Artificial Sequence: Synthetic coding sequence
  source 1..2061: mol_type = other DNA
atgaaccccaccgagaccaaggccgtcaagacagagcctgaaaagaaaagccagtctactaagctcagcgtggtccatgaaaaaaagtcacaggaggggaagcctaaggaacacactgagcctaaatcgctcccaaaacaggcctctgatacagggagcaatgacgcccacaacaaaaaggctgtgtcccgctccgccgagcagcagcctagcgagaagtccaccgagcccaagaccaaaccacaggacatgatctccgccggcggagaaagtgtggccggaattacagcgatatcaggtaagccaggcgacaagaagaaagagaagaaaagcctaaccccagccgtccctgtggaaagcaaacctgacaaaccatccggcaaaagcggaatggatgctgccctggatgatctcatcgacacactcggcggtccagaggaaacggaagaggagaatacaacatacaccgggccagaggtgagcgacccaatgagcagtacttatattgaggaactcgggaagcgcgaggtgactatccctcctaagtacagagaacttctggcgaagaaggaaggcatcacggggccaccggcagacagtagcaagcctattggacctgacgacgccatcgatgccctcagcagcgacttcacatgcggaagccctacagctgccggcaagaagaccgaaaaagaggaaagcactgaggtccttaaggcacaatctgctgggacagttcgcagcgctgcacctcctcaggagaaaaagaggaaggtcgaaaaggacaccatgagcgatcaagcccttgaggccttatccgctagcctcggcaccaggcaagcagagccagaactcgatctgcgcagcatcaaagaggtggacgaagcaaaagccaaagaagaaaaactcgaaaaatgcggcgaagatgacgagactataccaagcgagtaccggctgaaacctgctactgataaagacggcaagcctttgcttcccgaacccgaagagaagcccaaacccagaagtgaaagcgagctcatcgacgaattatcagaagatttcgatcgcagtgagtgcaaggaaaaaccttctaagccgaccgaaaagacagaagaaagcaaagcagctgcgcctgcaccggtcagcgaagccgtctgtagaacatccatgtgtagtatccagtctgctccccccgagcctgctactctgaaggggaccgtccctgacgacgccgtagaggccttagcagactctctaggcaaaaaagaagcagacccagaggatggtaaacctgtcatggacaaagtaaaggaaaaggccaaagaggaggaccgcgaaaagctgggggaaaaagaagagacaatccctccagattacagattagaggaggtgaaggataaagatgggaagccgctgttacctaaagaatcaaaggaacaactcccccccatgtccgaagacttcctcctagatgcccttagcgaggatttctcaggtcctcagaacgcttcgagtctgaagttcgaagatgccaaattagctgccgctattagcgaggtggtcagccagacaccagcctctacaacacaggctggcgctcctcctcgtgatacctcacagtccgataaggacctggacgatgctcttgacaaattgagtgattcactgggtcagagacaacccgacccagacgaaaataagcctatggaggataaggtcaaggagaaggcaaaggccgagcatcgggataagttgggggagagagacgacactattccaccggaataccggcaccttctggatgataacgggcaagacaaacctgttaaacccccaaccaagaaatccgaagacagcaaaaagccagcagacgaccaagacccgatagatgctctctccggtgatttggacagttgtccttctacgacagagacaagtcagaacaccgccaaagacaagtgcaaaaaagctgcatcttccagtaaggctcccaaaaatgggggtaaagccaaagattccgcaaagaccaccgaggaaactagcaagccaaaggatgactag

SEQ ID NO: 110608 - DNA, 2271 bp, synthetic construct
  misc_feature 1..2271: note = Description of Artificial Sequence: Synthetic coding sequence
  source 1..2271: mol_type = other DNA
atgtctcagcctggccagaaaccagcagccagcccacgcccccgccgggctgctgcagctaggaggacccatgaacacgtgagcgagaagactagcgagtccccaagcaaacccggcgagaagaagggcagtgacgagaaaaaagctgcctcactgggatctagtcaatcatcccggacatatgctggtgggaccgctagtgccacgaaggttagcgcaagctcgggcgctacaagtaagtcctcttctatgaacccaacagaaactaaggccgtgaaaaccgagccagagaaaaaatctcaatctacaaagctcagcgtcgtgcatgagaagaaaagccaggagggaaaacctaaagagcacaccgagcctaagtccttgcctaagcaggccagtgacaccggtagcaacgatgctcataataaaaaggcagtctcaagatcggctgaacagcagccgagtgagaagagcacagaacccaaaactaagccacaagacatgatttccgctgggggcgagtccgttgcagggatcacggccatctccggaaagcctggagataagaaaaaagagaaaaagtctctgacaccggcggtgcccgtggaaagtaagcccgataaaccatctggtaaatcaggcatggacgcagccttagacgatctgatcgacacacttggcggtccagaagaaactgaagaagagaacacaacatacacaggcccagaggtgagtgaccctatgtccagtacctacattgaagagcttggaaagagggaagtcaccattcctcccaagtatagagaattgcttgcaaaacccatcggtccggacgatgctatcgatgcactctcgtcagattttacatgtggatctccgacagctgcaggcaaaaaaaccgaaaaagaagagagtacagaggtgctgaaagcccaatctgccgggacggtgaggtccgcagcaccacctcaggagaagaaaagaaaggtggagaaggataccatgagcgaccaagcactggaagccctgtctgctagcttggggacaaggcaggccgagccagaacttgatctgagatcaatcaaagaggttgacgaagccaaagccaaggaagaaaagctggaaaagtgtggggaggacgacgagaccatcccctctgagtataggctgaagcccgcgaccgacaaagacggaaagcccctgctccccgagcctgaagagaagccaaagccccgctctgaaagcgagttgatagatgagctaagcgaagacttcgatcggtcagagtgcaaggagaaaccttcgaagcccactgagaaaacggaagagtccaaggctgctgcgcctgcacctgtgagcgaagctgtttgcaggacgagcatgtgcagcattcagtccgcacctcctgagcccgccaccctcaagggcaccgtgcccgacgacgcagtggaggcactcgctgatagccttggaaaaaaggaggccgacccagaagacggaaaaccggtgatggataaagtgaaggagaaggccaaggaggaagacagagagaaactaggcgaaaaggaggagacaataccacccgactataggctagaggaagtcaaagataaggatggcaaaccgctgctgcccaaagagagcaaggagcagctccctcccatgagtgaggactttctgctggatgctctatccgaagatttttcaggcccccagaatgcgagctctctgaagtttgaggacgcgaaactcgcagctgccatctccgaggtagttagccagaccccggccagcactacccaggcaggagcccctccccgagacacttcacagagtgataaagacctggacgacgcacttgataagctctcagattccttgggccagaggcagcccgaccctgatgagaacaagcctatggaagataaagtgaaggagaaggccaaagcagaacatagagacaagcttggggagagggatgacacaattccccccgaataccgccatttgctggacgataacggtcaggataagcctgtcaagccacctaccaagaagagcgaagatagcaagaagcccgccgatgaccaagacccgattgacgcactgtccggtgatttggattcttgtcccagcacaacagagaccagccagaatactgcaaaggataaatgcaagaaagccgcttcatcttcaaaggcgccaaagaatggtggcaaggcaaaagattctgcaaaaaccaccgaagaaacgtcgaaacctaaggacgactag

SEQ ID NO: 110609 - DNA, 2088 bp, synthetic construct
  misc_feature 1..2088: note = Description of Artificial Sequence: Synthetic coding sequence
  source 1..2088: mol_type = other DNA
atgaacccaaccgaaactaaggccatccctgtgtcccaacagatggaagggccacatctacccaataaaaaaaaacacaagaagcaggccgtcaaaacggagcccgaaaagaaaagccagtccaccaaactgtccgttgtacacgaaaagaaatctcaggaaggcaagcctaaggagcatacagagcctaagtccctgcccaagcaggcctccgatacgggatccaatgacgctcataacaaaaaggcagtgtcccgatctgctgaacagcagcctagcgaaaaatctacagaacccaaaacaaagccccaggacatgattagtgctggaggggagtctgtggcaggcattacggcaatttccggtaagcctggggataaaaagaaagagaaaaagagcctgacccccgccgttccggtggagtccaagcccgacaagccttctggtaagagcggcatggatgccgcgctcgatgacctaatcgacacactgggtggccctgaggagacagaagaagagaacacaacatatactggccccgaagtgtccgaccccatgtccagcacctacatcgaggagttaggcaaaagggaggtgacaatccctccaaagtatcgcgagctgctggcgaaaccaattgggcccgacgacgcaatcgacgctctctcaagcgatttcacatgtggaagccccaccgccgcaggcaagaagactgagaaggaggaatctactgaagtcctgaaagcccagagtgccggaacagtaagatcagcagctccaccccaggagaaaaaacgaaaggttgagaaggacacaatgtccgatcaggccttggaagccttatctgcgagtctcgggactcggcaggcggagcccgagctcgatttgcgctccataaaggaagtggatgaggccaaggccaaggaagaaaagctggaaaagtgtggcgaggacgatgaaaccattccttccgagtatcgcttaaaacccgccaccgacaaagacggcaaaccgctgctcccggaacctgaggaaaagccaaagccacgcagtgagagcgagctcatcgatgaactgagtgaagacttcgaccgcagtgagtgcaaggagaagcctagtaagcccaccgagaagactgaggaatccaaggccgctgctcctgccccggttagcgaagccgtgtgccggacttctatgtgtagcatccaaagcgctccaccggagcctgctacattgaaaggaaccgtgccggacgacgctgtcgaagccctcgctgattcactggggaagaaggaagctgatcctgaggacgggaagccagtgatggataaagtgaaggagaaggccaaagaagaggaccgcgaaaagttgggggaaaaggaggaaaccatcccacctgattatcgtttagaggaagttaaagataaggatggtaaacccctcttgcctaaggaatcaaaggaacagcttcccccgatgtcggaggatttccttctcgacgcgctgtctgaagacttttctggaccccagaatgcctccagcctaaagttcgaggatgccaagttggctgccgctatctctgaggttgtgtcacagactcccgcttccactactcaagccggagcaccacctcgagacacctcgcagagcgacaaggatctggatgatgccttagataagctctctgatagcctcggccagcgacagccagaccctgacgaaaataaacctatggaagataaggtgaaggaaaaagccaaagcggagcatagagacaagttaggcgaacgtgacgatactattccaccagaataccgccatctgcttgatgacaatggacaggacaagcctgttaaacccccaactaaaaagtccgaggattccaagaagcccgccgatgatcaagatcctattgacgcactcagcggtgacttagactcctgccccagcaccaccgagacctctcagaatactgcaaaagataagtgtaagaaagccgcttcgtcatctaaggccccaaagaacgggggcaaggccaaagacagtgcaaagaccactgaagagactagcaagcccaaagacgattag

SEQ ID NO: 110610 - DNA, 2127 bp, synthetic construct
  misc_feature 1..2127: note = Description of Artificial Sequence: Synthetic coding sequence
  source 1..2127: mol_type = other DNA
atgaatcccactgagactaaagccatccccgtgtcacagcagatggagggaccgcacctgcccaataaaaaaaaacataaaaaacaggccgtaaagaccgaaccagaaaagaagtcacagtctacgaagctgagcgtggtgcacgagaagaaaagccaggagggcaaaccaaaagagcacaccgaaccaaagagtctacccaagcaggccagcgatactgggagcaacgacgcgcataacaaaaaggcagtgtccagatctgcggagcagcaaccctcggaaaaatccaccgagccaaagaccaagccccaggatatgatttccgctggaggggagtcagtcgccggcatcaccgccatttcgggaaagccaggggataagaagaaagagaaaaaatccttaacgcccgcagtgcccgtggagagcaagcctgacaagccgagcgggaagtcaggaatggatgcagctctggacgacctcattgacacactaggagggcccgaagaaactgaggaagaaaacactacctacactggaccggaggtaagcgaccccatgagttctacctatatagaggaacttggcaagagggaagtgacaataccacctaaatacagggagctgctggcaaagaaagaaggtattactggaccccccgccgatagttcaaagccgattggacccgatgatgctatcgacgcgctttctagtgatttcacctgcggatctcccactgctgcaggcaaaaagacagagaaagaggaatctaccgaagtgctgaaggcacagtccgcggggacagtgcggtctgccgctccaccccaggagaagaaacgcaaggtcgagaaggacacaatgagcgaccaagccctcgaggccttatcagctagcctcgggaccaggcaagcagagcccgagctggacctgcgctctatcaaagaagtggacgaagcaaaagccaaagaggagaaactcgagaagtgtggggaggacgatgaaacaattccttctgaatatagacttaagccagctaccgacaaggatggaaagcccttactgcctgaacccgaagagaaacctaaaccaaggtcagaaagcgagctcatcgacgaactatccgaagacttcgataggagtgagtgcaaggagaagcccagcaaaccaaccgaaaaaactgaggagtccaaggcagccgcccccgctcctgtgtcagaggccgtatgtcggacatctatgtgtagtatccagtctgcccctccagagcccgctaccctcaagggaacagtgcccgacgatgcagtcgaagctctggcggatagcctcggaaagaaggaggccgaccccgaagacggcaagcctgtcatggataaggttaaggaaaaggccaaggaggaggaccgcgagaaattgggagagaaagaggagacaattccaccagactacaggttggaagaagtcaaggataaagatggcaaacccctccttccaaaagagagtaaggaacagctgccaccaatgtctgaagacttccttctcgacgcactatccgaggacttcagcggaccacagaacgcaagctccctgaaatttgaggacgccaaattggcggccgctatcagtgaggtggtgtcccaaacgccggcttccactacccaggcaggggcccccccacgagatacctctcagagcgataaagatcttgacgacgctcttgacaagctctcagattccctgggccaaaggcagcccgaccctgacgagaacaagcccatggaggataaagtgaaagagaaagccaaggccgaacaccgggacaagttgggagaacgcgacgacactattccaccagagtacaggcatctgctcgatgacaacgggcaggacaaaccggttaaaccacctaccaaaaaaagtgaagatagcaagaagcccgctgatgatcaggaccctatagatgccctctcgggcgacctggactcgtgtccaagcaccactgaaacctcccaaaacaccgctaaggacaaatgtaaaaaagcggcatccagtagcaaggctcccaagaatggtggcaaagctaaggatagcgcgaagaccaccgaagagacctccaaaccgaaagacgactag

SEQ ID NO: 110611 - DNA, 2319 bp, synthetic construct
  misc_feature 1..2319: note = Description of Artificial Sequence: Synthetic coding sequence
  source 1..2319: mol_type = other DNA
atgtcgcagccaggccagaaaccagcagcctctcccaggcccagacgtgcggcggccgcacgccggacccacgagcacgtgagcgagaagacaagcgagtctccctccaaacccggcgaaaagaagggcagtgatgaaaaaaaagcagccagccttgggtccagtcagtcaagccggacatatgccggaggaacagcatccgccacgaaagtgtcagcatcttccggagccacttccaagagtagcagtatgaacccaactgagaccaaggcaatccccgtgtcccagcagatggagggaccacacttgccaaataaaaagaagcacaaaaagcaggcggtgaagacagaaccagagaagaagtcccagtccaccaagcccaagagtctaccaaagcaggcctccgatacaggttccaacgacgcccataataaaaaagccgtttcgaggtctgccgaacaacagccctccgaaaaatctacagagcccaagaccaagccccaagacatgatctccgctggcggcgagagcgtcgcgggaatcacagcaatctcagggaagccaggggataagaagaaggagaaaaagtcactcactcccgccgtgccagtggaaagcaagcctgataagcccagcggcaagagtggaatggacgccgcactcgacgatctcatcgataccctgggaggcccagaggaaaccgaagaggagaacaccacttatactggcccagaggtgtctgatcctatgtcaagcacatacatcgaggaactcggcaagcgcgaggtcacaatccccccaaagtaccgggaactccttgcgaaaaaagaagggatcacaggcccacctgctgattcttccaagcctattggaccggatgacgcgattgacgctctgagttccgatttcacctgcggaagtcccacggccgcagggaagaagacagagaaagaagagtccacagaagtactgaaggctcaatccgctgggaccgtgcggtccgcagccccaccacaggagaagaagaggaaagttgaaaaagacactatgtcagaccaggccctggaggcattgagtgctagcctggggacgaggcaggccgagccagaactggatctcaggtcgatcaaagaggtcgatgaggcgaaggcaaaagaggagaaactggagaagtgtggggaggatgatgaaacaatccccagcgaatatcgacttaaaccagcaaccgataaagacgggaagcccctgctgcctgagcccgaagagaagcctaagccccgcagtgagtctgaattaatcgatgagctgagtgaggattttgacaggagcgaatgtaaagaaaaaccctcgaagcccaccgagaaaaccgaggaatccaaagctgctgctcccgcccccgtcagcgaagcggtatgccgaactagcatgtgttccattcagagcgcccccccagaacccgcaacgctgaagggaacagtcccggatgacgccgtggaagcactggcagactctttggggaaaaaggaggctgatcccgaggatggtaagcctgtcatggataaagtcaaggaaaaagcaaaggaagaggatagggagaagctgggcgaaaaggaagagacgattccccccgattatcgactggaggaagttaaagacaaggacggaaagccccttcttccgaaagagagtaaagaacaactgcctcccatgagcgaagatttcttgctcgatgcgttgagcgaggatttttccggacctcagaacgcatccagcttgaagttcgaggacgcaaaactggccgccgccatctccgaagtggtgtcccagacgcctgcctccactacacaggccggcgctcctccgagggacactagtcagtccgataaagacctcgacgacgccctcgataagttgtctgactctcttgggcagcgacaaccagacccagatgagaataaaccaatggaagacaaggtcaaagaaaaagcgaaagctgagcatcgggacaagctgggcgaaagggatgacacgattccacctgagtatcgccacctgctagatgacaatggacaggataagccagtcaagccccccacaaaaaagagcgaagattcaaagaaaccagctgacgatcaggatcccatagatgcgctgagcggcgatctggattcctgtccaagcactaccgagacatcccagaacacagcaaaggacaaatgtaaaaaagcagcctcttcatcgaaagccccaaaaaatggaggtaaagcaaaggacagcgcaaagaccacagaagagacatctaagccaaaagatgattag

SEQ ID NO: 110612 - DNA, 2376 bp, synthetic construct
  misc_feature 1..2376: note = Description of Artificial Sequence: Synthetic coding sequence
  source 1..2376: mol_type = other DNA
atgtcccagcccggtcagaagcctgctgcatctcctaggccccgacgagctgcagctgccagacgcactcacgaacacgttagtgagaagacaagtgaatctcctagtaagcctggggagaagaaaggaagcgatgaaaagaaagctgcctctctgggctctagtcagtcctcccgcacttacgctggtgggactgcctccgcaaccaaagtgtccgcatcttcaggtgccacatctaagagttccagtatgaacccaactgaaacaaaagccatacccgtgtcccaacagatggaagggcctcatttgcctaacaaaaagaagcacaagaagcaggccgtcaagaccgaaccagagaagaagagtcagagcacaaaattatcggtagttcacgaaaaaaaaagccaggaaggaaaacctaaggagcacaccgaacctaagtccctccctaagcaggctagtgatactggttcaaatgatgcacacaacaaaaaagctgtaagtcgtagcgcggagcaacagccttctgagaaatcaactgaacccaaaaccaagcctcaggatatgatttctgctggaggtgagtctgtggccgggatcactgctatttcaggaaaaccgggggacaagaaaaaagaaaagaagagtttgactccagccgtgccagtcgaatcgaaacccgataagccttctggaaagagtgggatggacgccgcactagatgaccttatcgataccctggggggccccgaagagacagaagaagaaaatacgacatacacgggtcctgaagtctcggaccccatgagcagcacttacatcgaggagttgggtaaaagagaagtgactataccacccaagtaccgtgaactactggccaagaaggagggcatcacaggcccacctgctgacagttcgaaacctattggtcccgacgacgccatcgacgccctgagcagcgatttcacatgtggctctccaactgctgcaggtaaaaaaaccgaaaaggaggaatccaccgaggttctcaaggcgcagagcgctggcaccgtccggtccgctgccccccctcaagagaagaagagaaaggtcgagaaggacacaatgtcagatcaagctctggaagcactgtccgccagcctgggcactcggcaggccgaacccgagcttgacctcaggtcaatcaaggaggtggatgaagcaaaagctaaagaagagaagctggaaaagtgtggggaggacgacgagaccatccccagcgaataccgcttaaagcccgccacagataaagacggcaagcccctgttacccgaacctgaagaaaagcccaagccgaggagcgagtccgaattaatcgatgaactgtcagaggattttgatcggagcgagtgcaaagagaagccgtccaaaccaacggaaaaaacagaagagagcaaggcagccgcccctgcaccagtgagcgaagcagtgtgccgtacaagcatgtgctcaatacagtctgctccacccgagcctgcgactctgaagggaactgtgcctgatgatgccgtagaggccctagccgacagtttgggaaaaaaggaggccgatccggaagatggaaaacccgtcatggacaaggtgaaagagaaagctaaagaggaagatagagagaagctcggagagaaggaagaaaccataccccctgactatagattagaagaagtgaaagacaaggacgggaagcccctgctccctaaggagagcaaggagcagcttcccccaatgtcagaagacttcttattggacgctctctctgaggactttagtgggccgcagaacgcaagctccctgaagttcgaagatgccaaactcgccgccgctattagtgaggtcgtaagccagacccctgcttctacgacccaggccggtgctccaccgagagatacgtcccagtccgacaaagatctagatgacgcacttgacaaactgagcgactccctcggtcagaggcagccggatcccgatgagaataaaccaatggaagataaggtgaaagagaaggccaaggcagagcacagagataagctgggggaacgggatgacacaatcccccctgaataccgccatctgctcgacgacaacggccaggataagccagtcaagcccccaacaaaaaagtccgaagactcaaaaaaacccgcggacgatcaggacccaatcgacgcactttccggcgatctagattcttgccctagtacgaccgagacgagccagaacactgctaaggacaagtgcaagaaagcagcatcttccagcaaggccccgaaaaatgggggcaaagcgaaggactcagccaaaacaaccgaggagaccagcaaaccaaaggatgattag

SEQ ID NO: 110613 - DNA, 2265 bp, synthetic construct
  misc_feature 1..2265: note = Description of Artificial Sequence: Synthetic coding sequence
  source 1..2265: mol_type = other DNA
atggcattcgccagctggtggtacaagacccacgtgagcgagaaaacgtccgaatccccctctaaacccggtgagaagaaaggctccgacgagaagaaggctgccagcctcgggtcctctcagagctccaggacctatgctggcggaaccgcctcggctaccaaggtgtctgcctctagtggggccacatcgaagagcagttccatgaatccaactgagactaaagccgtgaagacggaaccagagaagaaaagtcagtccaccaagctcagcgtcgtacacgaaaagaagagccaggaagggaagcccaaagagcacactgagccaaagtcccttcctaagcaggccagcgacactggaagtaacgatgctcataataaaaaggctgtttcccggagcgccgaacagcagccatccgagaagtcaacagagcctaagaccaaaccccaggacatgataagcgctgggggcgagtcagtggctggcattaccgctattagcggaaagccaggcgataaaaaaaaggaaaagaagtcactgacacccgccgtacccgttgagagcaagccagataaaccctctgggaagtcagggatggatgccgctctggatgacctgatagacaccctgggaggccccgaagagacagaggaagaaaatacaacttacaccggacccgaggttagtgacccaatgtcctccacctatattgaggagctcggcaagcgggaagtgacaatcccgccgaagtatcgcgagctgttagcaaagaaggaaggcataaccgggccccctgccgatagctctaagcctattggtcctgatgacgccatagacgccctgtcatccgatttcacctgcggttcccccactgccgcaggaaaaaagactgaaaaagaagaaagtaccgaggtgctgaaagcccagtcagccggtactgtgaggtccgccgctcccccccaggagaaaaagcgcaaggttgagaaagataccatgagcgaccaggccctggaggcgctttcagctagcctgggtacccgccaggccgaacctgagctggatctgcgatcaatcaaagaggtggatgaagctaaggctaaagaggagaaactagagaagtgcggcgaggacgacgagactatccccagcgagtatcggttgaagcccgcgaccgacaaagacgggaaaccgctgttacccgaacctgaagagaagccaaaaccacgttccgagtcagagctgattgacgagctgtctgaggacttcgataggtcagagtgcaaggagaagccttccaagccaaccgagaaaaccgaggaatcaaaggccgccgcgcctgcccccgtgtcagaggccgtctgccgtaccagcatgtgtagcatccagtctgcccctcccgaaccagcaacccttaagggaactgtgcctgacgacgcagttgaggccctagctgacagcctggggaagaaagaggctgaccccgaggatggcaagccagtgatggataaggtgaaagagaaggccaaggaagaggaccgagaaaagctcggtgagaaagaggagaccattccacccgactacaggcttgaggaggtcaaggacaaggacgggaaaccacttcttccaaaggagagcaaggagcaactcccaccgatgagtgaagatttccttctcgacgcactgagtgaagacttctctggtccacagaatgcaagctcactgaaattcgaggatgcaaagctggcagcggccatttctgaagtggtctcacaaacccccgcatctaccacacaggccggcgccccacccagagacacctcccagagtgacaaagacctcgatgatgcattggataagctgagcgactcattaggacagcggcagcccgatcctgacgagaacaaacctatggaagataaggtaaaggagaaggccaaggcagaacatcgcgataaactcggcgagcgcgacgacaccataccccccgagtaccgccatctcttagatgacaatgggcaagataaaccggtcaagcctccaactaagaagtctgaggactcaaaaaagcccgccgacgaccaggatcccattgacgccctgtctggagacctcgatagttgtccttccactacggagacctcccagaatactgcaaaggacaaatgcaaaaaggcagcaagtagttctaaagcacccaaaaatggaggtaaggctaaagatagcgcgaagaccaccgaagaaacttctaaaccaaaggacgattag

SEQ ID NO: 110614 - DNA, 2376 bp, synthetic construct
  misc_feature 1..2376: note = Description of Artificial Sequence: Synthetic coding sequence
  source 1..2376: mol_type = other DNA
atgtcacaacccggacagaaacccgctgctagccctagaccccgtagagccgccgcagcaagacgaactcatgagcacgtttccgagaaaacttcagaatcccctagcaaacccggcgagaaaaagggatcagacgaaaagaaggccgcatccctgggatcctcacagagttctcgaacttatgctggcggaactgccagcgcaaccaaagtgtccgcttcatcaggggcaacctccaagtcctcgagcatgaaccccaccgagaccaaggcgatccctgtctcccagcaaatggaaggaccacacctgcccaataagaagaaacacaagaaacaggctgtgaagacagaacctgagaaaaagtctcaatccacaaagctttctgttgtgcatgaaaagaagagccaggaagggaagcccaaggagcatactgagccgaaatccctgcctaagcaggcctctgacacgggctcaaatgacgcacacaataagaaggctgtgagtagatccgccgagcagcaaccttcagaaaagagcaccgagcctaagaccaagccccaggatatgatttctgccggtggtgaaagtgtcgcggggattacagctatctcgggaaaacccggggataagaagaaagaaaaaaagagccttacacccgccgtacccgtggagagcaaaccagataagccaagcggtaaaagtggtatggatgccgccctcgacgacctaattgataccctgggtggccctgaggagaccgaggaggagaataccacatacaccgggccagaggtcagcgatccgatgagcagtacctacattgaagaactcgggaaaagagaggtcaccattccacctaaatatagggagcttctggctaaaaaagaggggatcactggtccaccagctgacagttccaagccgatagggcctgacgatgccatagatgccctcagttctgatttcacttgcggcagccccaccgccgcagggaaaaagactgaaaaggaagagagcacagaagttctgaaggctcaaagtgcaggtactgtgcggtccgcagccccccctcaagagaaaaagcgcaaggttgagaaagatacaatgtcagaccaagcattggaagctctcagtgcatctctaggaactcgccaggccgaacccgaactggatctaaggtccatcaaggaagttgacgaagccaaggcaaaggaagaaaagctggagaagtgcggcgaagatgatgaaacaatccccagcgagtaccgtctaaagccagccacagataaggacggcaagccactcctaccagagccggaagagaagcccaagcccagatctgagtctgaattaatcgatgaactctccgaggatttcgaccgcagcgaatgcaaagaaaagcccagcaagccaaccgagaaaacagaagaaagcaaggccgcagctcctgcacccgtttccgaagctgtttgccgtacaagtatgtgctctatacagtctgcaccgcctgagccagcgaccctgaaaggaaccgtgccagacgacgcagtcgaggcgctggccgattccctggggaagaaggaggcagatcctgaggatggaaagcccgttatggacaaggtgaaagaaaaggctaaagaggaggatcgtgaaaaactgggagagaaggaggagaccatccctccagactacagacttgaggaggtaaaggataaggacggcaaaccgctccttcctaaagaatcgaaagagcagctgccgcccatgtctgaggatttcttgctggatgcactgtccgaggatttctctggtccccagaacgcctcctctctgaaattcgaggacgcgaaactggctgctgcaatctcagaggttgtctcccagactccggcatcgaccacgcaagcaggcgctcccccgagggacactagccaatcggataaagacctcgacgacgccttggataaactgtctgacagtttgggtcagagacaaccagatccggacgaaaataagcctatggaagacaaagttaaagaaaaggccaaggccgaacaccgcgataaacttggcgagagggatgataccattcctcccgagtatcgccacctgctcgacgataatggccaggacaaacctgttaaaccaccaactaagaagtccgaggacagcaagaagccggctgacgatcaggatcctattgacgctctcagtggtgacctcgactcttgccccagcacaacggagacatctcagaacaccgcaaaagacaagtgcaagaaagccgcttcttcgtcaaaagcaccgaagaacggcggcaaagctaaagactcagctaagaccactgaggagacatccaaacccaaggatgactag

SEQ ID NO: 110615 - DNA, 1929 bp, synthetic construct
  misc_feature 1..1929: note = Description of Artificial Sequence: Synthetic coding sequence
  source 1..1929: mol_type = other DNA
atgaacccaactgagaccaaggccatcccagtgagccagcagatggaggggccccacttgccaaacaaaaaaaagcacaagaaacaagccgtgaaaacagaacccgagaaaaaatctcagtcaacaaagctctctgtcgttcatgagaagaagtcacaggaaggcaagcccaaagagcatactgaacctaagtcgttaccgaaacaggcttcagacactggtagcaacgacgctcataacaagaaggctgtcagccggagtgcggagcagcagcctagcgagaagagtactgagcccaaaacaaagccgcaggacatgatttcagcgggtggagagtccgtggccggaattaccgctatctccggcaagccaggcgacaagaagaaagagaagaagtccttgaccccggccgtcccagtggagtcaaaaccagacaagccctcaggaaagtccggaatggacgctgctctcgatgatctcatagatactctgggagggcccgaggagacggaagaagagaacacaacttataccgggcccgaggtctccgatcccatgagttctacatatattgaagagctggggaaacgggaggttaccatccccccaaagtaccgcgagcttctggcaaaaaaggaggggattacaggtcctccagctgactcttcaaagccaattggccctgacgacgccatcgacgcattgagcagtgactttacctgcgggtctcccaccgctgccgggaagaagaccgaaaaagaagaatccacagaagtgcttaaggctcagagtgcaggaacggtgcgctcagccgctccaccacaagaaaaaaagagaaaagtcgagaaagacacaatgagcgatcaggcactggaggccctctccgcctcccttggcacaaggcaggccgaaccggaactggacctgcgatcaatcaaagaagtcgatgaggcaaaggcaaaggaagaaaagctcgaaaagtgcggggaggacgacgagactatcccaagcgagtaccgactcaagcccgccacagataaagacggtaagcctctgctccctgaacctgaggaaaaacctaaacctaggtcagagtcggaactgatcgatgagttatcagaagacttcgacagatctgagtgcaaggagaagccgtccaagccaacagaaaagacagaggagtcaaaagccgccgcccccgctccagtgtctgaagccgtctgtcgcacgtctatgtgctccattcagagcgctccccctgaacctgctaccttaaaaggaacagtgccggatgacgctgttgaggcgttagccgacagcctggggaagaaagaggccgatccggaggacggtaagcccgtgatggataaggtgaaggaaaaggcaaaggaagaggatcgtgaaaaactgggtgaaaaagaggagactattccacctgactaccgtctagaagaagttaaggataaggatggaaagcccctgctccctaaagagagtaaagagcagctgccaccgatgagtgaggacttcctcctagacgctttgagtgaggacttttcaggacctcaaaatgccagctcgttgaagttcgaggatgccaaactggcagccgccatctcagaggttgtttcccagaccccagcgtctacaacccaggcaggggcgcctccacgggatacttcgcagtctgataaagatttggatgatgcgctggacaaattaagtgactcactggggcaacggcaaccagaccctgatgaaaataagccgatggaggataaggtcaaggagaaagcaaaagctgagcacagagacaagctaggagaacgcgacgatacaattccgccggagtataggcacttgctggatgacaatggccaggataagcctgtgaagcctcctaccaagaaatctgaggattccaaatag

SEQ ID NO: 110616 - DNA, 2085 bp, synthetic construct
  misc_feature 1..2085: note = Description of Artificial Sequence: Synthetic coding sequence
  source 1..2085: mol_type = other DNA
atggaaggaccccatctacccaataagaaaaagcacaaaaaacaggctgtgaagacagagccagaaaaaaaatctcaatccaccaaactgtcagtggttcatgagaaaaagagccaggaaggcaaacccaaggaacacacggaacctaagagtctgcctaaacaggccagcgataccggatcaaacgacgcccataacaaaaaagccgtttctcgatccgctgagcagcaacctagtgagaagtccacggagcccaagacaaaaccccaggacatgatttctgcaggcggggaatcagtcgcaggcatcacagctatcagtgggaaacctggggataaaaaaaaggaaaaaaagagcctcactcctgctgtgcccgtggagtctaagccggacaagccgtcggggaagtctggaatggacgccgctctcgatgatttgatcgataccctggggggccctgaagaaactgaggaagagaataccacttatacagggccagaagtgtccgaccccatgtcgagcacatatatcgaggagctcggcaagagagaggttacgatcccccctaagtaccgcgaactcctcgcaaagaaagagggtataacggggccccccgctgattcttctaaacccatcggacctgacgatgctatcgacgccctgtcctctgacttcacatgcggatcaccaacagcagcaggaaaaaagaccgagaaggaggaaagcactgaagttcttaaggcccaatctgcaggcaccgtgaggtccgctgccccacctcaggaaaagaagcgcaaagtggaaaaagacacaatgtctgaccaggctctggaggcgctctccgcgagtctggggactcgacaggccgaacctgaactggatttgaggtcaataaaagaggtggacgaggcgaaggcaaaagaagagaagcttgagaagtgtggtgaagacgacgagaccatcccttctgaatacagactgaaaccagctacagacaaggatgggaagccactgctgccagagcctgaagaaaaacctaagccccgatctgaatcagagttaatcgatgagttgtcagaagactttgaccggtctgagtgtaaggagaaaccatcaaagccaaccgaaaaaacagaggaaagcaaggcagcagctcctgcccctgtttccgaggcagtctgccggacatctatgtgtagcattcaaagcgccccccccgagccagcgactctgaagggcacagtgcccgacgacgccgttgaggcattagcagatagcctcgggaagaaggaggccgatccagaggacggtaaacccgtcatggacaaggtcaaggagaaggccaaggaggaggacagggagaagctgggcgaaaaagaagagaccatccctccagattatcggctggaggaggtaaaagacaaagacgggaagccccttctcccaaaggagagcaaagagcaactcccacccatgtctgaagattttttgctcgacgctctgtccgaggatttcagcggacctcagaatgcttcatccctgaaattcgaggacgctaagctcgcagcagccatttctgaggtcgtcagccagacacctgcctctacgactcaggctggggcacccccacgcgacacctcgcagagtgacaaggaccttgatgacgccttagacaagttaagcgacagtctgggccagcgtcagccagaccccgatgaaaataagccgatggaggataaggttaaggaaaaggccaaagctgaacaccgcgacaaactgggagagcgcgatgacaccattcccccagaatatagacacttgcttgatgataacggacaagataaacccgtcaagccccctaccaaaaaatcagaggactctaaaaagccagcggatgaccaggatcctatcgacgcactcagcggcgacctggacagctgccctagcacaaccgagacgagccagaacaccgcgaaagacaaatgtaagaaagctgcctccagcagcaaagccccaaaaaacgggggaaaggctaaggacagtgctaagaccacagaggagacctccaaacctaaggacgactag

SEQ ID NO: 110617 - DNA, 2253 bp, synthetic construct
  misc_feature 1..2253: note = Description of Artificial Sequence: Synthetic coding sequence
  source 1..2253: mol_type = other DNA
atgagtcagcctggacagaagcctgcagccagccctaggccccggcgcgctgccgccgccaggcggactcacgaacacgttagtgaaaagacctcagagtctccgtctaagcctggtgaaaaaaagggcagcgacgagaagaaggcggcttcgctcggatccagtcagtctagtaggacctacgcaggcggaaccgcgtcagcgactaaggtgagcgccagctccggggctaccagcaaatcgtcctccatgaatccaactgagaccaaagctgtgaagaccgaacctgaaaaaaaatcccagtctactaagcctaaatctctacccaagcaggccagtgatactggatccaacgacgcccacaacaaaaaagccgtcagcagatcagcagagcagcagccatcggaaaagtcaactgagccaaaaacaaagcctcaggatatgatcagcgctggtggagagtctgtggctgggattacagccatcagtggcaaaccgggagataagaagaaagaaaagaagtcccttacccctgctgtgcccgttgagagcaagcccgataaacctagcgggaaaagcgggatggacgctgccttggacgatctaatcgacacacttgggggccctgaggaaacagaggaggaaaacactacgtacaccggccccgaggtatctgatccaatgtcttcaacttatatcgaggaactcggcaaaagagaggttacgataccccctaagtaccgcgaattgttagccaaaaaggagggcattactggtcctcccgccgattcctccaagcccataggccccgacgatgccatcgacgctctgagctccgacttcacctgtggaagccctaccgctgctggtaagaaaacagagaaagaggaaagtactgaggtgctcaaagcccagtccgctgggactgtcaggagcgcagcccctccacaagagaaaaagcggaaggtcgaaaaggatacaatgtccgaccaagcgctggaggccctctcggcttccctgggaaccaggcaggctgagcccgagctggaccttcgaagcatcaaagaggtggacgaggctaaagcaaaggaagagaagttagagaaatgcggggaggacgacgagacgattccatcggagtatcgccttaagccggccactgacaaagatggcaagccgttgcttccggagcctgaagagaaacccaagccgagaagcgagtccgagctcatcgacgaactgtccgaagatttcgatagatccgagtgcaaggaaaaacccagcaagcccaccgagaagacagaagagagtaaagccgctgccccagccccagtcagcgaggccgtatgtaggacgagtatgtgctcaatccaaagcgccccgcctgagccagctaccttaaaaggcactgtacccgacgatgccgtggaagcattggccgactccctcgggaagaaagaggcagatcccgaagacggcaaacccgttatggacaaagtaaaagagaaagccaaagaagaagatagagaaaaactgggagagaaggaagagacaattccacccgactaccgtctggaggaagtgaaggacaaagatggtaaacccttactgcctaaggagagtaaagaacagctacctccaatgagcgaggatttcctcctggacgcattatcagaggacttttctggtccacagaacgcttcatcactcaaatttgaggatgctaagctagctgctgcaatctctgaagtcgtgtcccaaacacccgcctctacaacacaggccggggcacctccccgggatacctcccaaagcgataaagatctggacgatgccctggacaagttgtccgacagcttaggtcagcggcagcctgacccagacgagaataaaccaatggaggacaaggtgaaagaaaaagccaaagccgagcatagagacaagctgggagagcgggatgataccattccaccagagtacaggcaccttcttgacgacaacggccaggacaaacccgttaaacctccaacaaaaaaatcagaggattctaagaaaccggccgatgatcaggaccccatcgatgccttgtccggtgacctggactcctgcccttcaaccaccgagacctcccagaacaccgcgaaagataagtgcaagaaagcggcttcatcatctaaggcacctaagaatggcggcaaggctaaagacagcgccaaaactacagaggagacttctaaacccaaggatgactag

SEQ ID NO: 110618 - DNA, 1254 bp, synthetic construct
  misc_feature 1..1254: note = Description of Artificial Sequence: Synthetic coding sequence
  source 1..1254: mol_type = other DNA
atgctattgtctgttccattgctcctggggctgcttggcctggccgttgcggaacctgccgtgtatttcaaagaacagttcctggatggtgacgggtggacgtctagatggatagagtccaagcacaagagtgactttggaaaattcgtgctctcctccgggaaattctacggagatgaggaaaaagacaaggggcttcagacatcccaggatgcacgattctacgccctgtctgctagtttcgaacccttctcaaacaaaggccagaccctggtggttcagttcacggtgaagcacgaacagaacatcgattgcggtggaggatacgtaaaattattcccgaattctttagaccagacggacatgcatggggatagtgaatataacattatgttcggacctgacatttgtggccccggtacaaagaaggttcatgttatcttcaactataaaggaaagaacgttctcataaataaagacatacgctgtaaggatgatgagtttactcatctgtataccctaattgtgcggccagacaacacatacgaggtcaaaatcgataattcccaagtagagtcagggtccttggaagacgattgggacttcctgcctccaaaaaagatcaaagacccggatgctagcaagcccgaggactgggacgaaagagccaaaattgacgacccaactgacagcaaacccgaggactgggataaacccgaacatatccctgatcctgatgcaaagaaacccgaggactgggacgaggagatggacggagagtgggagccacctgtcattcaaaaccccgaatataaaggtgagtggaaacctagacagattgataaccccgattacaaaggcacatggatccatcccgagattgacaatcccgaatactctcctgacccatccatctacgcttacgacaactttggtgtgctggggctcgacctttggcaggtgaagtcgggcaccatctttgataattttctgattacaaatgacgaggcttatgccgaggaatttggtaatgagacctggggagttacaaaggcagccgaaaagcagatgaaggacaagcaggacgaagaacagcggttaaaagaggaggaagaggataagaaacgaaaggaggaagaggaggcggaagataaggaggacgacgaagacaaggatgaggatgaagaagatgaggaggacaaggaggaggatgaggaggaggatgttcccggacaggcgaaagatgagctgtag

SEQ ID NO: 110619 - DNA, 891 bp, synthetic construct
  misc_feature 1..891: note = Description of Artificial Sequence: Synthetic coding sequence
  source 1..891: mol_type = other DNA
atgcatggtgacagtgagtacaacatcatgttcggccctgacatatgcggcccagggactaaaaaggtgcatgtgatctttaactacaagggcaagaacgttttgataaacaaggacatccgttgcaaagacgatgagttcacccacctgtacactctcattgtgcgccctgacaacacttatgaggtaaagatcgataattctcaagtggaatcaggctcactagaagatgactgggatttccttccgccaaaaaaaattaaggaccccgacgcctcaaaacccgaggattgggatgaaagggccaaaatagacgacccgaccgactcgaaacccgaggactgggacaaacccgagcatattccggatcctgatgctaaaaaaccagaggactgggacgaagagatggatggtgagtgggagccccccgtcatccaaaatcctgaatataaaggggagtggaaacccaggcaaatcgacaacccagactacaagggaacctggatccaccctgagattgataatccagagtattctcctgacccttcaatctatgcttacgataacttcggggtcctggggctggacttgtggcaggtgaaatccggaaccatctttgataactttttaataactaatgacgaagcctacgcagaggagtttggcaacgaaacatggggcgtcacaaaggccgctgagaaacaaatgaaagacaagcaggatgaggaacaacggctcaaggaggaggaagaggacaaaaagagaaaggaagaagaggaggccgaagacaaggaggacgatgaagataaggatgaggatgaggaagacgaagaagacaaagaagaagatgaggaggaagacgtaccaggccaagctaaagatgagctgtag

SEQ ID NO: 110620 - DNA, 1155 bp, synthetic construct
  misc_feature 1..1155: note = Description of Artificial Sequence: Synthetic coding sequence
  source 1..1155: mol_type = other DNA
atggccagagccctcgtgcagttgtgggccatctgcatgctccgggttgcgcttgctacagtctactttcaggaagagttcctcgacggcgagcattggcgcaaccgctggctacagtccaccaacgactcgcggtttggtcactttagattaagcagtggcaagttttacggacacaaggaaaaagataaaggtctccagacaacccagaatggacgtttctacgcaataagtgctcgcttcaagccgtttagcaataaaggcaagaccctggtcatccagtataccgtcaaacacgaacagaaaatggattgcgggggcggatatattaaggtgttcccggccgatattgatcaaaagaacctgaatggtaagagccagtactatatcatgttcggtcctgatatctgcggctttgatatcaagaaagtgcacgtcatcctgcactttaagaacaaataccatgaaaacaaaaaattgatcaggtgtaaagtggatggctttactcacctatacactctcattttgagacctgacctttcttacgatgtcaaaattgacggccaaagtatcgaatcaggttctattgagtatgattggaatttgaccagtctgaaaaaggaaacatctcccgcagagtccaaggattgggaacagaccaaagacaacaaagcccaggactgggagaagcactttttagatgcctcaactagcaaacagtcggattggaatggggacttagacggagactggcctgcccccatgttgcagaaacccccttatcaagatggactgaaacccgaaggaattcataaggacgtgtggcttcacagaaagatgaagaatacagactacctcactcagtacgatctgtcagaattcgaaaacattggggccattggccttgagttgtggcaggtgcgtagcggaacaatatttgataactttctcattaccgacgacgaggaatatgctgataattttgggaaggcaacatggggtgaaaccaagggaccagagcgcgagatggatgcgattcaagccaaagaggagatgaagaaggcccgagaggaggaagaagaggagttgctttccgggaagatcaatcgccatgaacactacttcaaccagttccaccggcgaaacgagctgtag

SEQ ID NO: 110621 - DNA, 1191 bp, synthetic construct
  misc_feature 1..1191: note = Description of Artificial Sequence: Synthetic coding sequence
  source 1..1191: mol_type = other DNA
atgtccgctaccgataggatggggcccagggccgttcccgggcttcggttggcactcctgctgttactcgtgcttggaactcccaaaagcggcgtgcagggacaagagggcctcgacttccctgaatacgacggtgtcgatagggtaatcaacgtgaatgccaagaactataaaaacgtgttcaaaaagtacgaggtgttggcgttactatatcacgagccacctgaagatgacaaagccagccagcggcagttcgaaatggaggagttgatccttgagctcgcagcgcaagttctcgaagataagggcgtgggatttggacttgtggattcagaaaaggacgccgcagttgccaaaaaactcggactgacagaagtcgatagcatgtacgtctttaagggggacgaggtcatcgagtatgatggggagttctctgctgataccattgtggaatttcttctggacgtcctggaagatccggtagagctgatagaaggtgagcgtgagctccaagccttcgagaatatagaagacgaaattaaattgatcggttattttaaaagtaaagacagtgaacactacaaggctttcgaggacgccgctgaagaatttcacccatacataccatttttcgccaccttcgatagcaaagtggcaaaaaagctcaccttgaagctgaatgaaattgatttctatgaagcattcatggaagagcctgtgacgatccccgacaagcctaactcagaagaggaaatcgttaacttcgtggaggaacaccgacgcagcaccctgcgaaaactcaaacccgaatctatgtatgaaacctgggaagacgacatggacggaatacatattgtggcattcgctgaagaagctgatcccgatggattcgaattcctcgagacccttaaggccgtggcccaggacaacaccgagaaccccgatttatccatcatctggatagatcctgatgatttccctctattagtcccatactgggaaaagacgtttgacatagacctctcagctcctcaaattggggtcgttaatgtgacggacgctgattccgtctggatggagatggatgatgaagaggatctgcccagcgcagaagaactggaggactggctggaggatgtgctggagggggaaataaacacagaggacgatgatgatgacgacgacgattag

SEQ ID NO: 110622 - DNA, 1173 bp, synthetic construct
  misc_feature 1..1173: note = Description of Artificial Sequence: Synthetic coding sequence
  source 1..1173: mol_type = other DNA
atgggtccccgggcggtccccgggctccgcttggcgctcctactgctgctagtcctgggtacgccgaaatcaggagttcagggacaagaaggcctggacttccctgagtacgacggtgtggatagggtgataaatgttaacgctaagaattacaagaacgtctttaagaaatacgaagttttagctcttctctatcacgagccaccggaagacgacaaagccagccaacgacagtttgaaatggaagagttaatactggagctcgccgcccaagtgttagaagataagggagttggttttggtctggttgacagcgagaaagacgcggcggtcgctaagaaacttggcctcactgaggtcgatagtatgtacgtattcaagggagatgaggtcatcgaatatgacggtgagttctcagcagataccatcgtcgaattcctgctggatgttttagaagatcccgttgagctgatagagggcgagcgagaactgcaggcattcgagaatattgaggacgaaatcaaactcatcgggtatttcaagtccaaagatagcgagcactacaaagcctttgaggacgcagccgaggagtttcacccctatatccctttctttgcgacattcgactccaaggttgcaaagaagctgactctgaaactgaacgagatcgatttctacgaagcctttatggaagagcctgtcaccatacccgataagcccaacagtgaagaagagatcgtcaactttgtcgaggagcatagacgctctaccctacggaagttgaagccagagtcaatgtatgaaacttgggaggacgatatggatggtatccatatcgtggcctttgctgaggaagctgaccccgacggattcgagttcctagaaactctgaaggccgtggctcaggacaacaccgaaaatcctgacctttccattatctggattgatccagatgatttccctctactggtaccatattgggagaagacctttgatatcgatctctcagcaccccagattggagtggttaacgtgactgatgcagactctgtctggatggagatggacgatgaagaggatcttcctagcgctgaggagcttgaggattggctggaggacgtcctcgaaggtgagattaacaccgaggacgacgacgacgacgatgacgattag

SEQ ID NO: 110623 - DNA, 936 bp, synthetic construct
  misc_feature 1..936: note = Description of Artificial Sequence: Synthetic coding sequence
  source 1..936: mol_type = other DNA
atgtctatgcagcgtacgacacggatgtgttcacgatccatgaggtgttggcatagtagcaccatgaatccgccaaggatgactcgaccccataaagataactccctgggactgaccgaagtggacagcatgtatgtgtttaagggggacgaggtgatagaatacgacggcgaattttcagccgatacaattgtggagtttctgctggatgtgcttgaggaccctgtggagttgatcgaaggggaaagagagctgcaggctttcgagaacatcgaagacgagatcaagcttatcggttacttcaagtctaaagattcggaacactacaaagctttcgaggatgcggcagaagagtttcacccttatataccattctttgccacttttgatagcaaagtagcgaaaaagctgactctaaaactgaatgagatcgacttttatgaagccttcatggaggaaccggtgactattccagataagcccaactcagaagaggagatagtcaacttcgttgaggaacatagacgtagcactctcagaaagctaaagcccgagagcatgtatgagacctgggaagatgacatggacggcatccatatagtggcattcgctgaagaagccgaccccgatggattcgaatttttggagactctgaaggccgtagcacaggacaacaccgaaaaccctgatctgtcaatcatctggatcgaccctgacgactttcccttattggtgccttactgggagaaaacctttgatattgatttatctgcaccacagatcggtgtggtgaacgtgaccgatgccgattcagtttggatggaaatggatgatgaggaggatctgccttccgccgaagagctggaagactggcttgaagacgtgctggagggcgaaataaacactgaggacgatgatgatgatgacgatgattag

SEQ ID NO: 110624 - DNA, 1200 bp, synthetic construct
  misc_feature 1..1200: note = Description of Artificial Sequence: Synthetic coding sequence
  source 1..1200: mol_type = other DNA
atgaaacgaactcacctgtttatagtcggcatttacttcctgagttcatgccgtgctgaggaagggctgaatttccccacctacgatggaaaggatagggtcgtctccctctccgagaaaaacttcaagcaagtattgaagaaatatgacctcttgtgtctttattaccacgagccagtgtcatctgataaagtaactcagaagcagtttcagctcaaggaaattgtgctagagcttgtcgcacaggttcttgaacacaaagccatcgggtttgtgatggtggacgcaaaaaaagaagccaaactcgccaagaaactaggtttcgacgaggagggcagcctttacatcctcaagggggacaggacgattgaattcgacggcgagtttgccgctgacgtgctcgtggaattcctcctcgacctaatcgaggatccggtggagatcatcagctccaagcttgaagtgcaggcctttgagaggatagaggattacattaaactgattggcttttttaagtctgaagacagcgagtattacaaggcgtttgaggaggcagcagaacactttcagccatacatcaagtttttcgcgacttttgacaagggggtggccaaaaagctgtccttgaaaatgaacgaagtcgacttctacgagccctttatggacgagcccatcgctatacccaacaagccatatactgaagaggaactggtagaattcgttaaagaacatcagcgacccactttgcgccgactgcgccccgaggagatgtttgagacttgggaggatgacctgaacggtatacacatcgtggctttcgccgagaagagcgaccctgacgggtacgaatttttagagattttaaaacaggtggcacgggacaacaccgataatcctgatctgtcaatcctgtggatcgatcccgatgatttccccctcttggtggcttattgggagaagacatttaagattgacctgttcagaccacagattggcgtggtgaacgtgacggatgcggatagcgtctggatggagatccccgatgatgatgatttgcctacggccgaggagctggaagattggatcgaggatgtcttatctggaaagatcaacactgaggacgacgacgaggacgatgatgacgatgacaatagcgacgaagaagataacgacgattctgacgacgatgacgatgaatag

SEQ ID NO: 110625 - DNA, 1062 bp, synthetic construct
  misc_feature 1..1062: note = Description of Artificial Sequence: Synthetic coding sequence
  source 1..1062: mol_type = other DNA
atgaaacgcacacatttatttattgtgggaatatactttctgagctcttgcagagctgaggagggcctgaatttccccacttatgatggcaaagatcgcgtcgtcagcctgagcgaaaaaaactttaagcaggtgctaaagaagtatgatctcctctgcctatattatcacgaaccggtatccagtgataaggtgacacagaaacaattccagctgaaggaaatcgttctggaactcgtcgcgcaggtgcttgaacataaggcgattgggttcgtgatggtggatgccaagaaagaagccaagctggctaagaagttgggcttcgacgaggaaggaagcctgtatatcctcaagggcgatagaactattgaattcgacggtgagttcgctgcagacgtccttgtcgagttcctgctggacctgattgaggaccctgttgagatcatctcgagcaagctcgaagtgcaagccttcgagaggattgaagactatatcaagctcataggattctttaaaagcgaggactctgaatactataaggcctttgaggaagcagcagaacactttcagccctacataaaattcttcgcaacatttgataagggggtggccaaaaagttgtctctgaagatgaacgaggtggatttctacgagccctttatggatgaaccaatcgctatcccgaataaaccttatacagatggatacgagttcctggagatcctcaagcaagtggcaagggacaacaccgacaacccagacctgagtattttatggatcgacccagacgactttcccctgctagtggcctactgggaaaaaacttttaagatcgatctttttagacctcagattggcgtagttaacgtaactgacgccgatagtgtttggatggaaattcccgacgacgatgacctgccaactgcagaagaactggaggattggattgaagatgtcctgtcagggaaaataaatactgaagatgatgacgaagacgacgatgatgacgataacagcgacgaagaggataacgatgacagcgatgatgacgacgacgaatag

SEQ ID NO: 110626 - DNA, 987 bp, synthetic construct
  misc_feature 1..987: note = Description of Artificial Sequence: Synthetic coding sequence
  source 1..987: mol_type = other DNA
atgaagaggacgcatctatttatcgtcggtatctacttccttagctcctgtagagcggaggaaggcctaaacttcccaacatacgacggcaaggatcgcgtggtatcattgtccgagaaaaactttaagcaagtcttgaagaaatatgatttattgtgtctatactaccatgagcctgtttctagtgataaggtgacccagaaacagtttcaactcaaagaaatcgtgctggagctggtcgcccaagtgcttgagcataaagcgatcggctttgtgatggttgacgcaaaaaaagaagctaaactggcaaaaaagctggactataaggcttttgaggaggcagctgaacatttccagccgtacattaaattttttgcaactttcgacaagggagtggctaagaaactgtcattaaagatgaacgaggttgacttttacgaaccattcatggacgagcccatcgccatccccaacaagccttacacggaggaagaactggtggagttcgtcaaggagcaccagcgcccaactctaaggcgcctcagacctgaagagatgtttgagacgtgggaagatgatttgaacggcatacacatcgtggcctttgcagaaaagtccgatccagacggatatgagttcctggaaatcttgaaacaggttgcccgggataacacggataatccagacctgagcattctctggatcgatcctgatgactttcctctgctcgtggcatattgggagaaaacctttaaaatagatctgttccgaccgcagattggagtggtgaacgtgaccgacgccgacagcgtgtggatggaaatcccagatgacgatgaccttccaacagccgaggagctggaggactggatcgaggacgtgctttccggcaaaattaatacagaggacgacgacgaagacgatgatgatgacgacaactccgatgaagaagataatgacgatagtgacgacgacgacgatgaatag

SEQ ID NO: 110627 - DNA, 948 bp, synthetic construct
  misc_feature 1..948: note = Description of Artificial Sequence: Synthetic coding sequence
  source 1..948: mol_type = other DNA
atggacctgcgccaatttctgatgtgtttgagcttgtgtaccgcatttgccttgtctaagcccacagaaaagaaggatcgggtgcaccatgaacctcagttgagtgacaaagttcacaatgatgctcagagtttcgattacgaccacgacgcgttcctcggggccgaagaggccaagacttttgatcagcttacaccagaagaatccaaggagaggttgggaaagatagtgtccaagatagatggggataaggacggattcgtaaccgtggacgaactcaaagactggatcaaattcgcccagaaacgatggatttacgaagatgtcgaaagacagtggaaaggacatgatctgaacgaagatggactagtctcttgggaggaatacaaaaatgctacatacggatatgttctagacgaccccgaccctgatgatggattcaattacaaacagatgatggtgcgtgacgagcggcgttttaagatggcagacaaggatggcgatcttatcgctaccaaagaagagttcacagccttcttgcatcctgaggaatacgactacatgaaagacatagtggtccaggagactatggaggatattgataagaatgccgatggatttatcgatctggaagaatacatcggcgatatgtatagccatgatggtaataccgatgagcccgaatgggttaagaccgagagagagcagtttgttgaattccgggacaagaatagagacggcaaaatggacaaggaggagacaaaggattggatcctccctagcgattacgatcacgctgaggccgaggctcgccacctggtctatgaaagcgaccagaataaggacggaaagctgaccaaagaggaaattgtcgacaaatatgatctcttcgtgggatctcaagcaacagactttggggaggccctcgtaagacacgacgaattctag

SEQ ID NO: 110628 - DNA, 465 bp, synthetic construct
  misc_feature 1..465: note = Description of Artificial Sequence: Synthetic coding sequence
  source 1..465: mol_type = other DNA
atggatctgcgacagttccttatgtgtctcagtctttgcacagcgttcgctctgtctaaacccactgagaaaaaagaccgggtgcatcacgagccacagctttcagataaggtgcacaacgacgctcagtccttcgactacgatcacgatgcgtttcttggagcggaagaagcaaagacattcgatcaattaacaccagaggaatccaaagagaggctcggaaagatcgtttctaagatcgacggcgataaagatggttttgtcactgtagatgagctcaaagactggatcctgccaagcgactacgaccacgccgaagccgaggccagacacctcgtctacgagagtgatcagaataaggatggaaagttaacgaaggaagagattgtggacaagtatgatctgtttgttggctcacaagcaaccgacttcggcgaggcgctggtgaggcacgacgagttctag

SEQ ID NO: 110629 - DNA, 948 bp, synthetic construct
  misc_feature 1..948: note = Description of Artificial Sequence: Synthetic coding sequence
  source 1..948: mol_type = other DNA
atggacctaagacagtttctgatgtgcctgtcgctctgcactgcctttgctttgtctaaacccaccgagaagaaggacagagtacatcacgaacctcagctgagcgacaaggtgcataatgacgcccagagcttcgactacgaccatgatgccttcctgggcgctgaggaagccaaaacatttgaccagctgacacccgaggaatcgaaggagcgtttgggaatgattgtggacaagatcgacgccgataaggatggtttcgtgactgaaggggagcttaagtcctggataaagcacgcacagaaaaaatatatctatgacaacgtcgaaaaccagtggcaggaatttgacatgaaccaggacggattaatttcttgggacgaatacaggaacgtgacctacggaacatacttagacgacccagatccagatgatggcttcaactataaacagatgatggtccgtgatgaacgacgattcaagatggccgataaggatggcgatctgatcgctactaaggaggaattcacagcctttttgcacccagaggagtacgactacatgaaggacattgtagtgcaagagacaatggaggatatcgataagaatgctgacgggtttattgacctagaggaatacatcggcgacatgtacagccacgatggaaatacagacgaacctgagtgggtgaaaaccgaaagagagcagttcgtcgagttccgagacaagaaccgggacggcaagatggacaaggaggaaacaaaggactggattttaccatctgactacgaccacgcagaggccgaagcacgtcacctagtgtatgagagtgatcagaacaaagacggaaagctgaccaaagaagaaattgttgataaatacgacttgtttgtgggaagccaggccacggattttggcgaggctcttgtaagacacgacgagttctag

SEQ ID NO: 110630 - DNA, 972 bp, synthetic construct
  misc_feature 1..972: note = Description of Artificial Sequence: Synthetic coding sequence
  source 1..972: mol_type = other DNA
atgaaagagaccgacctgatcataatggacctgcgtcagttcttgatgtgtctttcattgtgcacggcgttcgctctatctaaacctacagagaagaaagatagggtgcaccatgaaccccagctgagcgacaaagtgcacaacgacgctcagtctttcgattacgaccacgatgcgtttctgggggctgaggaagcaaagacatttgatcagctgacacccgaagagagcaaggaaaggttgggaaaaatcgttagtaagatcgacggcgacaaggatggattcgttacagtggacgagctcaaagattggatcaagttcgcccagaagagatggatctatgaggatgtggaaaggcagtggaagggccacgacttgaatgaagatggcctcgtgagctgggaagaatacaagaacgctacatacggctatgtgctggacgatcctgacccagatgacggcttcaattacaagcagatgatggtgagggacgagcgacgtttcaagatggctgataaggacggagacctgatagccaccaaggaagaattcacagcttttctgcatccagaagagtatgattatatgaaagacattgtggtccaggagacaatggaggacattgacaaaaatgccgacgggttcattgatctcgaagaatacataggtgacatgtatagtcacgatgggaataccgacgagccagagtgggtaaagaccgagagggagcagttcgtcgaatttagggataagaatagggacggcaagatggacaaggaggagactaaagattggattctcccatctgactacgatcacgctgaagccgaggctagacacctagtgtacgaatccgaccaaaataaggacggaaagctgactaaggaagagatagtggacaaatacgacctgttcgtgggctctcaagccacagatttcggcgaagctcttgtgcgtcatgatgagttctag

SEQ ID NO: 110631 - DNA, 444 bp, synthetic construct
  misc_feature 1..444: note = Description of Artificial Sequence: Synthetic coding sequence
  source 1..444: mol_type = other DNA
tgaattgcgactaaagaggagtttacagcattcctccacccagaagaatatgactatatgaaggacatcgtggtccaagagaccatggaagacattgacaagaacgccgatggcttcatagatttagaagaatacattggggatatgtactcccacgacggtaacaccgacgagccagaatgggtcaagacagagcgcgagcaattcgtggagttccgcgacaagaatagagatggcaaaatggataaagaagaaacaaaggattggatcctgccctcagactacgaccatgcagaagctgaggcccgccatctggtttatgaatccgaccagaataaggatggaaagctaaccaaggaggagatagtagataaatacgatcttttcgttggttcccaagccacagactttggcgaggccttagtcaggcacgacgaattctag

SEQ ID NO: 110632 - DNA, 675 bp, synthetic construct
  misc_feature 1..675: note = Description of Artificial Sequence: Synthetic coding sequence
  source 1..675: mol_type = other DNA
atggacctaaggcagtttctgatgtgtctgtccctttgcacagcattcgcactgtccaagccaacagagaagaaggaccgggtccaccacgaaccacagctgtcggacaaagtccataacgacgcgcaaagctttgactatgatcacgacgccttccttggtgcagaggaggctaagaccttcgatcagctgactcccgaggagtcaaaagagcggcttggaaaaatcgttagcaaaatcgatggcgacaaggacgggttcgtgactgtagacgaattgaaagattggatcaagtttgcacagaagagatggatctatgaggatgtagaacgtcaatggaaagggcacgacctaaacgaggatggcctggtaagctgggaggagtataagaatgctacgtacggctatgtgctagacgatccagatcctgacgatggtttcaactataagcagatgatggttcgagatgaacgtcgctttaagatggccgacaaggatggggacctgatcgcgacaaaagaagagtttaccgccttccttcaccccgaggaatatgactatatgaaggacattgtagtgcaggaaaccatggaagacatagacaagaatgcagacggctttatcgatttggaggaatacattgggtggcaagcctatcagggaggtgaccgctag

SEQ ID NO: 110633 - DNA, 444 bp, synthetic construct
  misc_feature 1..444: note = Description of Artificial Sequence: Synthetic coding sequence
  source 1..444: mol_type = other DNA
atgaaagagacagatctcattattatggacctccgtcaatttcttatgtgcctgtccttatgcacagccttcgcactatccaagccaactgagaaaaaagatcgggttcatcatgaaccacagctgtccgacaaggtccataacgacgctcagagctttgactacgatcacgatgcatttctgggtgccgaggaagcaaaaaccttcgatcagctgacccctgaagaatccaaggaacgcctgggcaaaatagtctcgaaaatcgacggcgacaaagacggatttgtgaccgtggatgagctgaaagattggattaaattcgctcagaaacggtggatatacgaggacgtggaaaggcagtggaagggacatgacctcaacgaggatgggctggttagctgggaggagtataagaacgcaacctacggttatgtccttgaatag

SEQ ID NO: 110634 - DNA, 513 bp, synthetic construct
  misc_feature 1..513: note = Description of Artificial Sequence: Synthetic coding sequence
  source 1..513: mol_type = other DNA
atggatctcagacagtttcttatgtgtctttcactctgcaccgcattcgctctgtcaaagcccactgaaaagaaggatagggtgcaccacgagcctcaactgagcgacaaggttcataacgacgctcagtcttttgattacgaccacgacgcctttctcggggccgaagaggccaaaaccttcgaccagctcactcccgaggagtctaaagagcggctgggaatgattgtggataaaatcgacgcggacaaggacggtttcgtcacagagggtgagcttaaatcatggattaaacacgcccagaaaaaatatatttacgataacgtggagaaccagtggcaagaattcgacatgaaccaggacgggctgatctcatgggacgagtaccgcaatgtgacctatgggacttacctggacgatccagatccagacgacggattcaactataaacaaatgatggtgagagatgagcggcgatttaagatggctgatcgggcccgcgccgtgtgctag

SEQ ID NO: 110635 - DNA, 606 bp, synthetic construct
  misc_feature 1..606: note = Description of Artificial Sequence: Synthetic coding sequence
  source 1..606: mol_type = other DNA
atggatctacgacaattcttaatgtgtctttccctatgtacagcttttgcactgtctaagcctaccgagaaaaaggaccgtgttcaccacgaaccgcagttatctgataaagtgcataacgacgcacaatcctttgactatgaccacgacgcctttctgggcgccgaggaagccaagacttttgaccagctcactcccgaggagagcaaggaaagactcggcatgatagtcgataaaatcgacgctgacaaggatgggtttgtaaccgagggcgaattgaaaagttggataaaacacgcccagaaaaagtatatctatgacaacgtggaaaatcaatggcaggaattcgacatgaaccaggatggactgatctcgtgggatgagtaccgcaacgtaacttacggcacttaccttgatgatccagacccagacgacggattcaactacaagcagatgatggttagggatgaaagacgcttcaaaatggctgacaaagacggggacctgattgccactaaagaggaaattgttgacaaatacgacctgtttgtggggtctcaggctacagacttcggtgaagccctggtacgacacgacgaattctag

SEQ ID NO: 110636 - DNA, 798 bp, synthetic construct
  misc_feature 1..798: note = Description of Artificial Sequence: Synthetic coding sequence
  source 1..798: mol_type = other DNA
atggacttgagacagttccttatgtgtctcagtttgtgcacggccttcgcactcagcaaacccactgagaaaaaggacagggtgcaccatgagcctcaattgagcgacaaagttcacaacgatgcccaaagcttcgactacgatcacgatgctttcttgggggccgaagaagcaaagacctttgaccagttgacacctgaggaatccaaggaacgtctgggcaaaattgtgtctaagatcgacggcgataaggacgggtttgtaaccgtggatgagctcaaagactggatcaagttcgcacagaaacgctggatctacgaagacgtggagcggcagtggaagggccacgatcttaatgaggacggcctggtctcttgggaagagtacaagaatgcaacgtacggttatgtgctcgatgacccagaccctgatgacggcttcaactataagcagatgatggtgcgtgacgagagaagattcaagatggccgacaaagatggagatcttattgcgacaaaagaggagtttaccgcttttctccatccagaggaatatgattatatgaaagacattgtggtacaagagactatggaagatattgacaagaatgccgacggctttatcgacctggaagagtacatcggtgatatgtattctcacgatggcaataccgacgagtctgaccagaacaaagacggaaaactgaccaaggaggagattgtcgataaatacgacctgttcgttggttcgcaggccaccgactttggggaggcgttggtccgccacgacgagttttag

SEQ ID NO: 110637 - DNA, 495 bp, synthetic construct
  misc_feature 1..495: note = Description of Artificial Sequence: Synthetic coding sequence
  source 1..495: mol_type = other DNA
atgatggtgagggatgaaaggcgttttaaaatggccgataaagatggggatctgatcgccaccaaggaggagttcactgctttcttacaccccgaagaatatgattacatgaaagacattgtggtgcaggaaactatggaggatattgacaaaaatgcagacggattcatcgatctcgaagagtatattggtgacatgtattcgcacgatggcaacacagatgaacctgagtgggttaaaacggagagagaacagttcgttgaatttagggacaaaaacagagacggaaagatggataaggaagagactaaagactggattttacctagtgattacgatcacgcagaagcagaagcaagacaccttgtgtacgagtccgaccagaacaaggacggaaagctgactaaagaggagattgtggacaaatacgacttgtttgttgggagtcaggcaaccgactttggtgaggccttagtgaggcacgatgagttctag

SEQ ID NO: 110638 - DNA, 972 bp, synthetic construct
  misc_feature 1..972: note = Description of Artificial Sequence: Synthetic coding sequence
  source 1..972: mol_type = other DNA
atgaaggagacagatctaatcattatggacctgagacagtttctcatgtgcctgtcactatgcacggcctttgcattatccaaacctactgagaagaaagacagagtccaccacgagccacagctgagcgacaaggtacacaacgatgcccaaagctttgattacgatcacgacgccttcctcggagccgaggaagcaaaaacgtttgatcagttgactcctgaagaaagtaaagagcgcctgggcatgatcgtcgataaaatcgatgcagacaaggatggctttgttaccgaaggggagctcaagtcgtggatcaagcatgcacagaagaaatatatttatgataatgtggagaaccaatggcaagagttcgatatgaaccaggatggtctgatctcctgggacgagtacaggaacgtgacatacggcacctatttggacgacccagacccagatgatggctttaactataagcaaatgatggtacgagacgagaggagattcaagatggctgataaagacggcgacctcattgctactaaggaggagttcacagccttcctccaccccgaagagtatgactatatgaaagacattgtggtgcaggagacaatggaggacatcgacaagaatgcagacggctttattgatttggaggagtatatcggagacatgtattcccacgatgggaatactgacgagccggaatgggttaaaacagaacgggagcagtttgttgagttcagagataagaaccgcgacggaaagatggacaaagaggaaacaaaagactggattttaccaagcgattatgatcacgccgaagccgaagctagacacctggtatacgagtctgatcagaataaggacggcaaacttactaaggaagaaatcgtcgacaaatacgacctctttgtcggttcccaggcaacagacttcggcgaagctttggtaaggcacgacgagttttag

SEQ ID NO: 110639 - DNA, 1116 bp, synthetic construct
  misc_feature 1..1116: note = Description of Artificial Sequence: Synthetic coding sequence
  source 1..1116: mol_type = other DNA
atggaactggagttggacgcaggcgaccaggacctgctcgccttcttgttggaagagagcggcgatctggggactgcaccggatgaagccgtcagagcacctctggattgggcactccccctcagtgaggtaccttctgattgggaggtcgatgatctgctgtgctccttactatctcctcctgcttcattgaacattctgagctcttcaaatccctgcctcgtgcatcatgaccatacctattcccttcctcgagaaactgtgtccatggacctcgaatcagaatcgtgtaggaaggagggcacgcagatgacaccgcagcatatggaggaattagccgagcaggaaatagcgagactcgtgctgaccgacgaggagaaaagcctgctggagaaagagggcctaattctgccggaaacattgccactgaccaaaaccgaagagcagattttgaagagagtgaggcgcaaaataaggaacaagcgatctgcacaggagtcccgccgaaagaagaaggtttacgttggaggcctagaaagcagagtcttgaaatacaccgcgcagaacatggagctccagaacaaggtccagctactggaagaacagaacctgtccctcctggatcagctccggaagttacaagcaatggtgatcgagatttcaaataagacaagtagcagctcgacgtgcattctggtgctgctggtctcattctgtctcttactcgtccctgctatgtactcaagcgacacacgaggttccctgcctgcggagcacggcgtgttgtcacgacagctacgcgccttgccctccgaagacccataccagctcgaattgcccgccctgcagtccgaggtgcctaaagactctacccaccagtggctagatgggtccgactgcgtgcttcaggcccctggcaacacatcctgtctcttgcactatatgccacaagccccatctgctgaaccccccctagagtggcctttcccggacctgttctctgagcctctgtgcaggggtccaatcctgcctctgcaagctaacctgacacgaaaaggcgggtggctgccaactgggagtccaagtgtaattctgcaggaccgctatagcggctag

SEQ ID NO: 110640 - DNA, 1386 bp, synthetic construct
  misc_feature 1..1386: note = Description of Artificial Sequence: Synthetic coding sequence
  source 1..1386: mol_type = other DNA
atgaacacagatctggccgccggaaagatggcatctgcggcctgtagcatggatcctatagacagctttgagctcctagacctgctgttcgatcgccaggacggcatcctgcgccatgtggagttgggcgaagggtgggggcacgtaaaggatcagcaggtgctgccgaatccagattctgacgatttcctctccagtatcctgggttccggcgactcactaccttcgtcccccctttggtcccccgaaggaagcgactctggtataagtgaggatctgccttccgatccacaggatacacctccacgaagcggaccagcgacatctccagccggttgccaccctgcacaaccagggaaggggccctgcttgagttatcatccagggaattcttgtagcaccaccacaccaggcccagtgatccaggtgcctgaggccagtgttacaatcgacctggagatgtggtcccccggggggcgcatatgtgctgagaaacccgcggatcctgttgacctcagtccgcgctgtaatcttacggttaaggatctgctgctctctggttcatcaggggacttgcaacagcatcacctgggggccagctatctgctacgccccggagccggtcattgtcaggaactagtcctaaccgaagacgagaaaaagttgttggcaaaagagggaattactctaccaactcagctacccttgacaaagtacgaggagcgcgtacttaaaaagattcggaggaaaatccgtaataagcaatccgcccaagaatctcggaaaaagaagaaggagtatatcgatgggctggagacacgaatgagcgcctgcactgcacaaaaccaggagctgcagagaaaggtccttcaccttgaaaaacaaaacctgtcgctgctggagcaactgaagaagctgcaggcaattgttgttcagagtacgtccaaatcagcccagactgggacttgcgtcgcagtgctcctcctttctttcgctctgattatcctgccgagcatttctccctttggccctaataagaccgaatcccccggtgattttgctcccgtgcgggtgttcagccggaccctccacaacgatgcggcgagtcgcgtcgctgctgacgctgtccctggctcagaggcccccgggccccgtccggaggccgacaccactagagaggaatctccagggtcaccgggagccgattggggttttcaggacacggctaatctcaccaacagtaccgaggagctggacaatgccactctagtactgcgaaatgctacagagggcctgggacaggttgccctcctcgattgggtcgcaccggggccatcgactggctctggccgggccggcctagaagcggccggcgacgaattgtag

SEQ ID NO: 110641 - DNA, 900 bp, synthetic construct
  misc_feature 1..900: note = Description of Artificial Sequence: Synthetic coding sequence
  source 1..900: mol_type = other DNA
atggcgtctgcagcgtgcagtatggatcccatcgatagcttcgagctgttagatttgctgtttgatagacaagatgggattttgcgacatgtcgagcttggtgagggatggggccatgtgaaggaccaggtccttcccaacccagactccgacgactttctgtcttcaattctgggctctggggatagccttccctcttctcctctatggtcacccgaaggatctgacagcgggatttcagaggatctgcctagtgatccccaagatacccctccgcggagtggtccagcgacttcaccagctggctgtcacccagcccagccaggtaagggaccctgtttaagttatcatcccggaaattcctgtagcacaactacacccggccctgtaattcagcagcagcaccacctcggcgcaagttatctcctgagacccggtgcaggccactgccaggaactggtcctgacagaagacgaaaaaaaacttctggcaaaagaaggcattacactcccaacgcagcttccactgacaaaatacgaagaacgtgtgctgaaaaaaatacgacggaagatcaggaacaaacagagtgcccaggagtctcggaaaaagaaaaaagagtacatcgatggactggagactcgctcttgttgttgccctctcccctcttcttcaagtccaccctcagccctgttagcccctacaaaacctcgagcactcggaaccctccgactgtacgagtgcagccccgagctgtgtacaacaatgcttccaccagcctggttgctgatgttgtgccaggccccccgaccgcaggatccagacccccgtctgacccagcctgaaaagagcctgcaggaagcgcccggtcagaccggcgcaagtcggactccccgtacctag

SEQ ID NO: 110642 - DNA, 1260 bp, synthetic construct
  misc_feature 1..1260: note = Description of Artificial Sequence: Synthetic coding sequence
  source 1..1260: mol_type = other DNA
atgaacactgacttagcggctggtaaaatggcgtcggctgcctgctccatggaccccatcgactcctttgaactcctggacctcctgtttgaccggcaggatgggatcctgagacatgtcgagctgggtgagggctggggacacgttaaagaccagcaggtgctccccaaccctgatagtgatgattttttaagctctattctgggttccggagatagcttacccagttcacccttgtggagccccgaaggcagtgattccggaatttcagaagatctccctagtgacccccaagatacccctccaaggtccggccccgctaccagcccagccggctgccatcccgcccagcccggcaaggggccttgtttatcttatcatccaggcaattcttgcagcacaaccaccccaggccctgtgatccaggtgcccgaagcaagcgttactattgacctggagatgtggtcccccggaggaaggatttgtgctgagaagccagctgatcctgttgatctgtccccgcggtgcaacctgaccgtgaaggaccttctgctgagcgggtcgagcggcgacctgcagcagcaccacctgggcgccagctatctgcttaggccgggcgcaggtcattgtcaggagttggtgctcacagaagacgaaaagaagttactggctaaggagggtatcaccctgcctacgcagctgcctctcacaaaatacgaggagcgggtgctcaagaaaatccgccgcaagataaggaacaagcagagtgcccaagagtcccggaaaaagaaaaaagcaattgtggtgcaaagcacgtctaaatccgcacagaccggcacgtgcgttgcagtactgctgctttcttttgccttaatcatcctgccttctatctcccccttcggacctaataagacggaatccccaggggattttgcacccgttagggtatttagtcgcacactgcacaatgacgccgcctcccgcgtcgcagcagatgctgttcctggaagtgaagcccccggtcctcgtcctgaagcagacacgacaagagaagaaagccccggctcaccaggagctgattggggctttcaggataccgcaaacctgactaactcgactgaagagctggacaacgcaacacttgtgctcagaaacgcaactgagggcctcgggcaggtggcactcttggactgggtcgcgcccggaccaagtacagggagtggtcgggctggcttagaagccgcgggagacgagctctag

SEQ ID NO: 110643 - DNA, 1188 bp, synthetic construct
  misc_feature 1..1188: note = Description of Artificial Sequence: Synthetic coding sequence
  source 1..1188: mol_type = other DNA
atggatttggggatccccgatctgctggacgcatggctcgaaccaccggaggacatcttctccaccggaagcgtgctggagctcggcttacattgcccaccacccgaggttccggtgaccaggcttcaggaacagggactgcagggatggaagtctggaggggacaggggctgcggcttgcaggaatccgaacccgaagactttctgaaactcttcatcgatcccaacgaggtttattgtagcgaggctagtcccggctcagactctgggatctcggaggacccttgccatcctgattcaccacccgcccctcgggcaacatcaagccccatgttgtacgaggtcgtctatgaggccggggccttggaaagaatgcagggagaaaccgggcccaacgtgggcctaatcagcatccagctcgatcagtggagtccagcatttatggttccagactcctgcatggtatccgagctccctttcgacgcccacgcgcatattctgccaagagcggggaccgtggctcctgtcccctgtacaacgctgctcccctgtcaaactctgttcctcacggacgaggagaagcggcttcttggacaggaaggggtaagcctaccctctcacttaccccttacaaaagccgaagaaagggttctgaaaaaagtgagaaggaaaatcagaaataaacagtccgcacaagactcaaggcgccgcaaaaaagagtacattgacgggctggaatcccgcgtggctgcctgcagcgcacagaatcaagagcttcagaagaaggtgcaagaactggagcggcacaacattagtttagtggcccaacttagacagttgcagacacttattgcccagaccagtaacaaggccgcgcagacatctacctgcgttctcatcctgctgttctccctggctctcattatcctgccatctttttccccttttcagtccagaccagaagccggctcggaggattatcagccccatggtgtaacaagccgtaacatcctcacccacaaagatgtcaccgaaaaccttgaaacccaggttgtagaatctagactacgagagccccccggagcaaaagatgcaaacggttcgaccaggacactgcttgaaaaaatgggaggcaagcccagaccctccggacgtatccgtagtgtcctgcatgccgatgagatgtag

SEQ ID NO: 110644 - DNA, 1128 bp, synthetic construct
  misc_feature 1..1128: note = Description of Artificial Sequence: Synthetic coding sequence
  source 1..1128: mol_type = other DNA
atggacctgggtatccccgacttactggatgcctggttggagcccccggaggacatattctctacaggctcggtgctcgagctgggactgcactgcccccccccagaggtgcccggccttcaagaaagcgaacccgaggattttctgaagttgtttattgaccccaatgaggtgtactgttctgaggctagccctggctccgatagcggtatatcggaggatccctgtcaccctgatagtccccctgccccgagagccacatcctctccgatgctgtatgaggtggtgtatgaagctggggctcttgagcgaatgcagggagagaccggtcccaatgtgggcttaatatctatccaactcgaccagtggtcacctgcctttatggttcctgattcctgcatggtttctgagctgcccttcgatgcccacgctcacattctgcccagggcaggcacggtggccccagtgccctgcactaccctgctcccttgccagaccctctttctgacagacgaagagaagaggcttcttggacaggagggagttagtctcccatcccatctgccactcaccaaggccgaggagagagtgctgaagaaggtccgaaggaagattagaaacaaacagagcgcccaagacagcagaaggcggaagaaagaatacatcgatggccttgaatcccgcgtcgccgcctgctctgcacaaaaccaagagctgcaaaagaaggttcaggagttagaacggcataacattagcctcgttgctcaactgagacagttgcagacactcattgcacagacctcaaacaaggcggcacagacaagtacctgcgtactgatccttttgttctcactcgccctgatcattttgccatcattttcacctttccagtcgcgcccggaagccggaagtgaagactatcaaccacacggtgtcacttcaaggaacatactgacacacaaggatgtcacggagaacttagagacacaagtggtcgagtctcgactgcgtgaacccccaggcgctaaagatgctaatggctcaactcgaactttgctcgaaaagatgggaggaaagccaagaccttccggtaggatccgctcggtgcttcacgcagatgaaatgtag

SEQ ID NO: 110645 - DNA, 654 bp, synthetic construct
  misc_feature 1..654: note = Description of Artificial Sequence: Synthetic coding sequence
  source 1..654: mol_type = other DNA
atggacctgggtattccagacctgttagatgcatggctggaaccacccgaagatatcttttcgaccggatctgtgctggagctaggccttcattgcccgcctcctgaagtgcctgttacacggctccaggagcagggattgcaggggtggaagagcggtggtgatcggggttgtggcctacaggagagtgaacccgaagattttctcaagctgttcattgatccaaatgaggtgtactgcagtgaagcttctcctggaagcgatagcggaatcagcgaagatccctgccaccccgactcgcctcctgcgccccgggccacatcatctcctatgctgtatgaggtagtttacgaagccggcgccctggagcgcatgcaaggggagacgggcccaaacgtcggactgatcagcatacagctcgatcagtggtcaccagccttcatggtccctgattcttgcatggtgtccgagcttcctttcgatgcacatgcacacatactgccccgggccggaaccgtggcccctgtgccatgcaccacccttttgccatgtcagaccttgtttctgactgatgaagagaagcggctgctcggacaagagggagtaagcctcccttctcatctgcctcttactaaggtcacttgcttcccctag

SEQ ID NO: 110646 - DNA, 1188 bp, synthetic construct
  misc_feature 1..1188: note = Description of Artificial Sequence: Synthetic coding sequence
  source 1..1188: mol_type = other DNA
atggacctgggcattcccgaccttctggatgcttggctcgagccgccagaagatatattctcaacgggctctgtgctggagctagggctgcactgcccacctcctgaagtgcctgttaccagactgcaggagcaaggacttcagggttggaagagcggtggcgataggggctgcgggctgcaggagtccgagccagaagacttcttgaaactgtttatagaccccaacgaggtgtattgttcagaagcttccccaggctcagactctggtatttccgaggatccttgtcatcccgattccccacccgcgccacgtgccacctcgtccccaatgctgtacgaagtggtgtatgaggcgggtgcgctggagcgcatgcagggcgagacagggcctaacgtgggtctcatatccatccagctggatcaatggtctcccgccttcatggtacccgattcttgcatggtgagtgagctgcccttcgacgcacacgcccacattcttccaagggccggaactgtcgcaccggtcccttgcactaccctcctgccttgccagactctattcttgactgacgaggagaagcgcctccttggacaggagggcgtttcactgccaagtcacctgccacttactaaagccgaagagcgcgtcctgaagaaggtgagaagaaaaatcagaaacaagcaaagcgcccaggactctcgcaggcgtaagaaagagtatattgacggactggagtccagggtcgcggcatgttctgcgcagaaccaggaactgcagaagaaagtgcaggagttagagcggcacaacatatccttggtggcacagctgcgacagctgcagaccttgatcgcacagactagcaataaagccgcacagacatctacctgtgtgctaatattgttattctcgctagctctcattatccttccttctttttcgcctttccagagcagacctgaggccggctccgaagactaccagcctcacggagtaactagtcgaaatatactcacacacaaagacgtgactgaaaatctggagacccaggtggtggagagtagactgagagaaccgcccggagccaaggatgccaatggatcaacaaggacactcctggagaagatgggcggcaaacctagaccgtccggccggatacgcagcgtgcttcacgccgatgaaatgtag

SEQ ID NO: 110647 - DNA, 1188 bp, synthetic construct
  misc_feature 1..1188: note = Description of Artificial Sequence: Synthetic coding sequence
  source 1..1188: mol_type = other DNA
atggacttaggcatacctgatcttttagacgcctggttagagccgcctgaggatatttttagcacagggagcgtcctggaacttgggcttcactgcccccctcccgaggtgcctgtgaccaggctgcaggaacaggggctgcaaggatggaaatctggaggggatcggggctgcgggcttcaggaaagcgagccagaagatttcttaaagttgttcatcgaccccaacgaagtatattgttctgaagcctcacccgggtcggacagcggcatttcagaggatccttgtcatcccgacagcccgcccgcccctagagccacgagctctcccatgctgtatgaggtggtatatgaggcaggcgcgctcgagagaatgcagggtgaaactggcccaaacgtggggctgataagcatacagttagaccaatggagccccgctttcatggtaccggacagctgtatggtttcagaactccctttcgatgcccatgcccatattctcccccgggccgggactgtggcccccgtgccttgtacaacactcctgccctgccaaaccttgttcctcactgatgaagaaaagagactgctaggccaggagggggtatccctcccatcccatctgccgctgaccaaagcggaggagcgtgtgctcaagaaggtgcgcaggaagattcgcaataagcaaagtgcccaggactctaggcggcggaaaaaggagtacattgatggtctggaaagcagggtcgccgcctgttccgcgcagaaccaggagttgcaaaagaaagtgcaggagctcgaacggcataacatatcgctggttgcccagctgaggcagctacagacacttattgcccagacctcaaataaggctgcacagaccagcacctgtgtgctgatccttttgttttcgctggccctgatcattcttcccagcttttctcctttccaatcaaggccagaggccggatctgaggattaccagccacatggggtaacctcccgcaatatattgacacacaaagacgtgactgagaatctggaaacccaggtggtggagtctcggctgcgtgaacctccaggcgccaaggatgcaaatggcagcaccaggactcttctggagaagatgggaggcaaacctcgaccctcaggcaggataaggtctgtcctgcatgctgatgaaatgtag

SEQ ID NO: 110648 - DNA, 747 bp, synthetic construct
  misc_feature 1..747: note = Description of Artificial Sequence: Synthetic coding sequence
  source 1..747: mol_type = other DNA
atggttcctgacagctgtatggtgtcagagctgccttttgatgcacacgcccatattctgccgagagccggtactgttgcacctgtgccttgcacaacactcctgccttgccagaccctcttcctgaccgatgaggagaagaggctgctcggtcaggagggcgtctctctcccctctcacttgcctttgaccaaggctgaggagagggtgttaaagaaggttcgtagaaaaattcgcaacaaacagtcagctcaagactcaagacgccggaagaaggaatacatagacgggctggaaagtcgcgtggccgcctgctctgcacagaaccaggaattgcagaaaaaggtgcaggaactggagcgccacaacatcagtctggtggcacaactgagacagctccagacactaattgcacagacctctaataaggcagcacagacttcaacatgcgtgctgattcttctctttagtttagccctgatcatcctgccgtctttttccccctttcagagccggcccgaagctggctctgaggattatcagcctcacggcgttacctcgaggaacatcttaacacacaaggatgtcaccgaaaacctggagactcaggtggtggagtccagattgagagaaccacctggtgcgaaggacgctaatggcagcactagaacacttctggagaagatgggaggtaaaccaaggcccagtgggaggatccggagtgtgttacacgctgatgagatgtag

SEQ ID NO: 110649 - DNA, 549 bp, synthetic construct
  misc_feature 1..549: note = Description of Artificial Sequence: Synthetic coding sequence
  source 1..549: mol_type = other DNA
atggacctgggcattcctgatcttctcgatgcatggttggagccgccggaggacatcttcagtacaggctccgttctggagctgggcctgcattgtcccccgccggaagtccctgtgacgagattgcaggagcagggcctgcaaggatggaagagcggcggagaccgcggatgtggcctgcaggaaagtgaaccggaagacttcctaaagttgttcattgatccaaacgaggtctactgtagcgaggcatcccctggtagtgatagcggtatttctgaagacccctgtcatccggacagccccccagctccccgcgctacttccagccctatgctttacgaagtggtgtatgaggcaggtgccctggaacgcatgcagggggaaacgggccctaacgttgggctgataagcatacagctcgaccagtggtcaccagcattcatggtaccagactcctgcatggtgagtgaactcccatttgacgctcacgcgcatattttaccccgtgctggaacagtcgcacccgtgccctgtacaaccttagtttag

SEQ ID NO: 110650 - DNA, 687 bp, synthetic construct
  misc_feature 1..687: note = Description of Artificial Sequence: Synthetic coding sequence
  source 1..687: mol_type = other DNA
atggatctgggaattcctgatttgctagacgcctggctggaacccccagaagatatattctccacaggatcggtcctggagctgggcctgcactgcccaccccccgaagtgcctggattgcaggagtccgagccagaagactttctgaaattgttcattgacccgaatgaagtgtattgctcagaagcaagccctggctccgacagcggcatatctgaagatccctgtcatccggattcccctcctgctccaagagccacatcctctcctatgctgtacgaggttgtgtacgaggcgggtgccttggaaagaatgcaaggggaaacagggcctaacgtgggattgatttcaattcagctggatcagtggagtcccgccttcatggtgccagatagctgtatggtatccgaactacctttcgatgcccatgcacacattctccccagggccggtacagttgcccccgtcccatgtacaactctgctcccatgccagacactcttccttaccgacgaagagaaacggcttctgggtcaggaaggggtcagtcttccaagccatctccctctcacgaaagcagaagagcgggtgctaaaaaaagtgcgccggaaaattcggaataagcaatctgcacaggactctcgacgacgcaagaaagaatacattgatggcctggagtcaagatag

SEQ ID NO: 110651 - DNA, 1047 bp, synthetic construct
  misc_feature 1..1047: note = Description of Artificial Sequence: Synthetic coding sequence
  source 1..1047: mol_type = other DNA
atgtcaaagtgtgcccggaagaagtacattaagaccaacccccgccaaatgactatggagacagtcgaatcccagcatgacggctctatcaccgcttcgttaacagagtcaaaaagcgcgcatgttcagacccagaccggtcaaaactctatccctgcactggctcaggtctctgtcgctggtagtgggactcgcagaggctcccccgctgtgacactggttcagctcccctccgggcagactatacacgtgcagggtgtcattcagacccctcaaccctgggtgatccaaagcagtgagattcacacagtgcaggtggctgcaatcgcagagacagacgagtccgcggaatccgagggagtcatcgattcccacaaacggcgggagatcttgagcagacgacccagttaccggaagatcctcaacgagctgtcttcagacgttccaggcgtgcctaaaatagaggaggaaagatcagaagaagagggcacacccccctctatcgctaccatggcagtgcctacaagtatttaccagactagcactggacagtacatcgccatcgcccaaggcgggacaatccagatcagcaatcctgggagcgacggcgtgcaaggacttcaagcacttactatgacaaattccggcgcccccccacccggtgcgaccatcgtgcagtacgccgctcaaagcgctgatgggacccagcagtttttcgtacctggtagtcaagtggtagtgcaggccgccactggagacatgcccacctaccagattcgtgcaccaacggccgctctgcctcagggcgtggtgatggctgcatctcctggaagtctccattccccccagcagctggcagaagaagcgacccggaagcgcgagctacggctaatgaagaatcgcgaggccgccagagaatgcagacgcaagaagaaggagtatgtgaaatgcctcgagaatagagtagcagtgctggagaaccagaacaagaccctgattgaggaacttaaagctctgaaagatttatactgccacaaggtagaatag

SEQ ID NO: 110652 - DNA, 900 bp, synthetic construct
  misc_feature 1..900: note = Description of Artificial Sequence: Synthetic coding sequence
  source 1..900: mol_type = other DNA
atgtccaagtgcgctaggaagaaatatatcaaaaccaacccacgacagatgaccatggaaacggtagaaagtcagcacgacggttctattaccgcaagcctcactgaatctaaaagcgcgcacgtacagacccagaccgggcaaaactcgattcccgcactggcgcaggttgccgccatcgcagaaaccgacgaatctgccgaatcagaaggggtcattgactcccataagaggcgcgaaatcctctcaaggcggccttcttaccggaagatcctaaatgaactgtcaagcgacgtgcctggagtccccaaaatcgaagaggagcgatccgaggaggaggggacccccccatcaatagctactatggcagtgcctacctccatctaccagaccagcacaggacagtacatcgcaatcgctcagggtgggaccatacaaattagcaatccggggagtgacggggtgcaaggactgcaggccttgacaatgacaaacagtggagctccacctccaggcgccaccatcgtgcagtatgctgctcagagtgccgatggaacccaacagttctttgtccctggctcccaggtcgtggtgcaggctgcaaccggtgacatgcccacctatcaaatacgtgctcccactgctgctctaccacagggcgtggtgatggccgcatctccgggatctctgcacagtccccagcagctggcagaggaggcgactaggaagagggaactcaggcttatgaagaatagggaagcggcccgcgagtgtcgtcgcaagaagaaggagtatgtcaagtgtctcgagaaccgcgtggctgtgctggagaatcagaacaagacactcatcgaagagttaaaggccctgaaagatttgtattgccacaaggtagagtag

SEQ ID NO: 110653 - DNA, 738 bp, synthetic construct
  misc_feature 1..738: note = Description of Artificial Sequence: Synthetic coding sequence
  source 1..738: mol_type = other DNA
atggtggcagccattgcggagacagacgaaagcgcagaatctgaaggtgtgatcgatagccacaagcggcgcgagatcctgtctaggcgacccagctaccgcaagatattgaatgagctttctagtgacgttccgggtgtgccaaaaattgaagaagagcggtcagaggaggaagggactcctccgagcatcgccactatggccgttccaacgagtatttaccagactagtaccggtcagtacattgccatcgcgcagggcgggacgatccagatcagtaatccaggaagtgacggagtccaggggctgcaggctcttacaatgactaacagcggcgccccccctcccggtgctaccattgtgcaatacgccgcccagagcgcagacgggacacaacagtttttcgtgccaggatctcaggtggtcgtgcaggccgcaaccggtgacatgcctacctaccagatccgcgctcccaccgctgcgctgccgcaaggggtggtgatggctgcttcgcctggctctttacattcaccacaacagctagctgaagaagcaactcggaagagggagctgagactgatgaagaaccgggaagccgctaaggagtgcagaaggagaaaaaaggaatatgtgaaatgtctagagtcaagggtggcagtgctggaggtgcagaataaaaagctcattgaagaactggagaccctgaaggacatttgctcacctaagaccgactactag

SEQ ID NO: 110654 - DNA, 288 bp, synthetic construct
  misc_feature 1..288: note = Description of Artificial Sequence: Synthetic coding sequence
  source 1..288: mol_type = other DNA
atgcccacataccaaatccgcgcgccaacggcagccttgccccagggtgtggtgatggcggcatctcccggatctctgcactctccgcagcaactggccgaggaagccaccaggaaaagagagctcaggttaatgaagaatcgtgaggccgcaagagagtgccgacgaaagaaaaaagagtacgtcaaatgcttagaaaaccgagtagcagtgttggaaaaccaaaataagactctgatcgaggagcttaaagcactgaaagacctgtattgtcacaaagttgaatag

SEQ ID NO: 110655 - DNA, 903 bp, synthetic construct
  misc_feature 1..903: note = Description of Artificial Sequence: Synthetic coding sequence
  source 1..903: mol_type = other DNA
atgtcaaaatgtgctaggaaaaaatatattaaaaccaatcctcgccaaatgactatggagaccgtggagtcacagcacgacggaagcattaccgcctccctaaccgaatccaagtcggctcacgttcagacccaaaccggtcagaactctattcccgccctagctcaggtcgctgctattgctgagacggatgaatccgccgagtcagaaggagttatcgattcgcataagaggcgagaaatactcagcagaagaccttcctatcgaaagattctgaatgagctctcatctgatgttcctggcgtcccaaaaattgaggaggagcggagtgaggaggaagggacgcctccgtccatcgccaccatggctgtcccaacctccatctaccagaccagcaccggtcagtatattgccatcgcccaaggaggaaccatacagattagcaacccagggagcgacggcgtgcaggggctacaagcccttactatgactaattccggggcccctccacccggtgccactatagttcagtatgccgcccagtcagcagatggtactcaacaattttttgtgcctggatcacaggtggtcgtgcaagcggcgacaggcgacatgccaacctatcagattagagcccctaccgctgcgctccctcagggcgtggtgatggcagcctcacccgggtccctccattcaccacagcaactggctgaggaggccaccagaaaacgcgagctgaggctaatgaagaatcgagaagcagccaaagaatgtcggaggcgaaagaaagagtacgtcaaatgtcttgagtctcgagttgctgtcttagaggtgcagaacaaaaagctgatcgaagagctggagaccctaaaggacatctgctccccaaagactgattattag

SEQ ID NO: 110656 - DNA, 666 bp, synthetic construct
  misc_feature 1..666: note = Description of Artificial Sequence: Synthetic coding sequence
  source 1..666: mol_type = other DNA
atgacaatggagactgtggagtcgcaacatgatggtagcataacagcctcactgaccgagtctaaatccgcacacgtgcagacacaaaccggccagaatagcatacccgccctcgcccaggtcgcagcgatagctgagactgacgagtccgctgaatccgaaggtgtcatcgattcccataagcggagggaaattctttcccgcaggccatcataccgaaaaatattaaatgagctgagcagtgatgtcccaggagtgcccaaaattgaggaggaacggtcagaagaggaaggtacccctccgtcaattgccaccatggcagtaccaacatctatttaccagacttccacagggcagtatactgcaacaggggacatgccgacataccagatccgagcccccacagcagccttaccgcaaggggttgttatggctgcctcacccggaagccttcatagcccccagcagctagccgaggaggcaacccgcaaaagggaactgcggttgatgaaaaatcgcgaagccgccaaagagtgccgtcgccggaaaaaagagtacgttaagtgtctggagtcacgcgtagcagtcctcgaggttcaaaacaaaaaattgattgaggagctagagacgctcaaggatatatgcagccccaaaacagactactag

SEQ ID NO: 110657 - DNA, 747 bp, synthetic construct
  misc_feature 1..747: note = Description of Artificial Sequence: Synthetic coding sequence
  source 1..747: mol_type = other DNA
atgagcaaatgtgctcggaaaaagtatatcaagaccaatcccagacagatgaccatggaaacagtcgagagccagcatgacggttcaattacagccagcctgaccgagtccaagtctgcccacgtccagacgcagactggtcagaattccataccggccttagcccaggtggctgccatagctgagacagatgagtccgccgagtcggaaggcgttattgactctcataaaaggcgcgagatcctctcccgcaggccgagctaccggaagatcttaaacgaactctcttctgatgtacccggcgtacccaaaatcgaggaagaacgtagtgaggaagaagggaccccgccctccatagctacgatggcagtccctacttccatctatcagaccagtactggccagtacaatgaagaaactgagctagctccttcccatatggcggccgcgaccggagatatgccaacttaccagattcgcgctccgacagccgcattgcctcagggggtggtgatggctgcctctccggggtccttgcactcaccccaacagctggccgaggaagctactagaaagagggaattgagacttatgaagaacagggaagctgcacgagaatgccgacggaagaagaaggaatacgtgaagtgcctggagaacagagtcgccgtccttgagaaccaaaacaaaacgctgatcgaagaactgaaggcactgaaagacctctattgccacaaagtggaatag

SEQ ID NO: 110658 - DNA, 327 bp, synthetic construct
  misc_feature 1..327: note = Description of Artificial Sequence: Synthetic coding sequence
  source 1..327: mol_type = other DNA
atggcagtgacgggagacgatacagcagccactggagatatgcctacgtaccaaatccgcgctcctacagccgccttgccacaaggtgtagttatggctgccagccctggttccctgcacagcccccagcagctggccgaggaggctactcggaaacgggaattgcgactcatgaagaacagggaagccgcaagggagtgcagaaggaaaaagaaagagtatgttaaatgccttgagaatagagtggctgttctagaaaatcagaataaaacgttaatcgaagaactcaaggctctgaaggacttgtactgccataaggtagagtag

SEQ ID NO: 110659 - DNA, 813 bp, synthetic construct
  misc_feature 1..813: note = Description of Artificial Sequence: Synthetic coding sequence
  source 1..813: mol_type = other DNA
atgtggtggcaccagcacaacttgtgctttcgccgacctattgaggaagattacagcagcggcgatgttgaggaaaaagtggctgccattgctgagactgatgagtctgcagagagtgaaggggttatcgactcacacaagagaagggagatactcagtagaaggccctcttatcgcaagattctaaatgagctatcgtcagacgttccgggggtacctaagatcgaggaggagcggagcgaagaggaaggaaccccacctagcatcgccacgatggctgtccccacctccatttatcagactagcacgggacagtatattgccatcgcccagggtggtacaattcaaatttctaacccgggaagtgacggagttcagggtttgcaggcattgacaatgactaacagcggcgcaccgccaccaggtgcaaccatcgtgcagtatgctgcccagtccgcggatgggacacagcagtttttcgtccctggctcacaggtggtcgtgcaggcagctacaggcgacatgcccacctaccagattagagcgcccactgccgccttacctcagggagttgtaatggctgcatctcctggcagtctacacagtcctcagcagctcgcggaggaggccacacgtaaacgcgaactcaggctcatgaagaaccgcgaggcagccaaggaatgccgccgccgaaagaaggagtatgttaaatgcctcgaatctcgcgtggctgtcctggaggtgcaaaacaagaagttgatcgaggaactggagactctgaaggatatctgttcccctaaaaccgactactag

SEQ ID NO: 110660 - DNA, 999 bp, synthetic construct
  misc_feature 1..999: note = Description of Artificial Sequence: Synthetic coding sequence
  source 1..999: mol_type = other DNA
atgaccatggagacagtggaatctcagcacgacggcagtatcactgcatctttaactgaaagcaaatccgcgcacgtgcaaacccagactggccagaatagcattcccgccctggcacaggtgtcagtggcgggcagtggcaccagacgaggatcaccggccgttacacttgtgcaactgccctctgggcagacaattcacgttcaaggggtcattcagaccccccaaccttgggtgattcagtcctcagagatccatacagttcaggtggcagctattgccgaaaccgatgagtctgccgaaagtgaaggggtgattgatagccacaagaggcgtgagattctgtctcggcgccccagctatcgcaagatactgaatgagctgagctccgatgtgccaggggtgcctaaaatcgaagaggagcggtctgaggaggagggaacacctccttccatcgccacgatggctgtgcctactagtatctaccagacaagtaccggacagtacattgctatcgcgcaagggggcaccattcagatctcaaatccgggtagcgacggggttcagggcctgcaggctcttactatgaccaactccggggcgcctcctcccggggcaactattgtacagtacgcggcacagtcagccgacggaacccagcagttcttcgtccccggttcccaagtggtggtccaagccgccaccggggacatgccaacctatcagatccgagctccaactgccgccttaccccagggtgtggtgatggccgcctcacccgggagcctacatagtccacaacagctcgctgaggaagccacccgcaagcgcgagctccgcctgatgaagaacagggaggccgcacgcgagtgccgccggaaaaaaaaagagtacgtcaaatgcttggagaatagagtggcagtactggagaatcaaaacaagacactgattgaagagttgaaagctctgaaggacctgtactgccacaaggtggagtag

SEQ ID NO: 110661 - DNA, 1002 bp, synthetic construct
  misc_feature 1..1002: note = Description of Artificial Sequence: Synthetic coding sequence
  source 1..1002: mol_type = other DNA
atgaccatggaaacggtagaatcccagcacgacggtagcatcaccgcatccctgacagagagcaaaagtgctcatgtacagactcagacagggcaaaacagcattccagcacttgcgcaagtgagcgtagccgggtccggcacccgcaggggcagccccgctgttacactggtccaactcccttccggccagacaatccacgtgcagggtgtaatacagaccccccagccgtgggtgattcagtctagcgaaatccacaccgtacaggtcgcggccatcgccgagacggacgagtctgccgagtctgaaggcgtcatcgacagccataagcggcgggagatcctgtcacgccggccgtcttaccggaagatccttaatgagctctcttcagatgtccctggtgtgccaaagattgaggaggaacgctcagaggaagaagggactccaccgagtattgccacaatggccgtgcccacatccatctaccaaaccagcaccgggcagtatatagctatcgcgcaaggcggcaccatacaaatttcaaaccccggatctgacggggttcaaggactacaagccctgacgatgacgaattccggcgctccccctcccggggccaccatagtccagtacgccgctcaaagcgctgacggcacacaacagttcttcgttccaggtagccaagtcgtagtgcaggcagccaccggtgacatgcccacttatcagattcgggctccgaccgcagctctgccgcagggggtcgtgatggccgcttccccgggatccctccattcccctcaacagttggcagaggaggccactcggaagcgggagctgcgcctgatgaaaaacagagaggcagccaaggaatgcaggcggaggaagaaggaatacgtcaagtgtctggagtccagagtggctgtgctggaggtccagaacaaaaagcttattgaggagttagagacgctgaaggacatctgttctccgaagaccgactattag

SEQ ID NO: 110662 - DNA, 414 bp, synthetic construct
  misc_feature 1..414: note = Description of Artificial Sequence: Synthetic coding sequence
  source 1..414: mol_type = other DNA
atgactatggagacagtggagtcgcaacacgatggatcaatcaccgcctccctgactgaaagcaagtccgctcacgtgcagactcagacagggcagaactccattcccgcactcgcacaggtggctgccatagcagaaactgacgaaagcgctgagtccgagggagtcatagatagccataagagaagggagatccttagtcgacgcccttcttatcgaaaaatcctgaatgaactgtcatcagacgtgcccggtgttcccaagatcgaagaagagcgaagcgaggaggagggaacacccccgtccattgctactatggcagtgccaacctctatttaccagaccagcaccgggcaatattcaatgtacgccgcaattagatacgacactgtactggcattgtctttgctatag

SEQ ID NO: 110663 - DNA, 666 bp, synthetic construct
  misc_feature 1..666: note = Description of Artificial Sequence: Synthetic coding sequence
  source 1..666: mol_type = other DNA
atgactatggaaacagtggagtctcagcatgacggctccataactgctagcttgactgagtctaaatctgcacatgtccagacccagacagggcaaaacagtatcccagcactggcacaggtggctgcaatagccgaaacagacgagtctgccgaatccgagggtgtcatcgatagccacaagcgtagggaaattctgtcaaggcgacccagttatagaaaaattctcaacgaactttcgagtgacgtgcccggagtgcccaaaatcgaggaagagcgctctgaagaggaaggtacgcccccatctatagcaaccatggcagtcccgacatctatctaccagactagtacaggtcagtataccgccacaggtgatatgccaacatatcagatcagagcaccaaccgcagctctcccacaaggtgtggtgatggccgcaagtccaggatctctgcactccccgcaacagctggccgaagaggcaacacgcaagcgtgagttgcggcttatgaagaatagagaggctgcaaaagagtgtcgaaggcgaaagaaggaatatgtgaaatgcctggagagtcgcgtggctgtcctagaagtgcagaataaaaaactgatagaggaactggagacactgaaagatatctgtagtcctaaaactgactattag

SEQ ID NO: 110664 - DNA, 711 bp, synthetic construct
  misc_feature 1..711: note = Description of Artificial Sequence: Synthetic coding sequence
  source 1..711: mol_type = other DNA
atgtcaaagtgcgcaaggaaaaaatacatcaagactaacccaaggcaaatgactatggaaacggtcgagtcacaacacgacggaagtatcacggcctccttgacagagtccaagagcgctcatgtgcaaacacagacaggacagaacagcatacccgcgcttgcccaggtggccgccattgcagagaccgatgagtcagcagagtccgaaggtgtcattgattcccacaaacgaagggagattctgtcacggagaccctcatatagaaagatccttaacgaactgtctagcgacgtcccaggcgtcccaaaaatcgaggaagagaggtctgaggaagaaggtacaccacccagcattgcaacgatggccgtgcccacttcgatctaccagacctcaacagggcagtacaccgctacaggtgacatgcctacctatcagattagggcccctacggcggcgctgccgcaaggcgttgtcatggcagccagccccggttctcttcacagtccccagcagctggccgaggaagcaaccagaaagagagaactccgcttgatgaaaaatcgtgaggccgcccgggaatgccgtagaaaaaaaaaggagtatgtcaaatgcctcgaaaatcgggtggcagtgctggagaatcaaaacaaaaccctgatagaagagttgaaagcactaaaggatctttactgtcacaaggtagaatag

SEQ ID NO: 110665 - DNA, 849 bp, synthetic construct
  misc_feature 1..849: note = Description of Artificial Sequence: Synthetic coding sequence
  source 1..849: mol_type = other DNA
atgtggtggcaccagcataacttgtgttttcggcgccctatagaggaagattatagtagtggcgacgtggaagagaaagtggccgctatcgcggagacggacgagagcgcagaatccgagggcgttatcgatagtcataaaagaagagaaatcctttccagaaggccatcttatcgtaaaatcttaaacgaactgtcctctgacgtgcctggagttccgaaaatagaagaggaaagaagcgaggaggagggcacgcctcccagcatcgcaactatggcagtgcctactagcatctatcagacgagcactggccagtacattgccattgcccagggcgggaccattcagatctccaaccctggctctgacggtgtccagggacttcaggcgctcacaatgacaaatagcggtgcccccccacccggtgccactatcgtgcagtatgccgcacagtctgctgatgggacgcaacagttcttcgtgccaggctcccaggtcgtagtccaagacgaggagactgaactggccccgagtcatatggcagccgccactggagacatgccgacctaccagataagggcacctacagccgcactgccacagggagtagtgatggccgcctctccggggtctctccacagtccgcagcaactggccgaggaggccacacgaaagcgcgagctgcgactgatgaaaaaccgggaggccgctaaggaatgccgtcggcgcaagaaagagtacgtgaagtgtttagaaagccgagttgcagtgctcgaggtccagaacaaaaagctgatagaggagctggaaaccctgaaagacatctgctcacctaagaccgattactag

SEQ ID NO: 110666 - DNA, 1086 bp, synthetic construct
  misc_feature 1..1086: note = Description of Artificial Sequence: Synthetic coding sequence
  source 1..1086: mol_type = other DNA
atgtccaagtgcgcccgaaagaagtatatcaaaaccaacccgagacagatgaccatggagactgtggaatctcaacacgacggatcaatcaccgcatccctcacagaatccaaatcagctcacgtgcagactcaaaccggccaaaatagtatcccagctcttgcacaggtgtctgtcgcaggatcagggaccagacgcggttcccctgccgtgactctcgtccaacttccatcgggtcagacaattcacgttcaaggggtcatccaaactcctcagccatgggtgatccagtccagcgaaatccacactgtacaggtggcggccattgctgagaccgacgagagcgcagagtctgagggcgttattgactcccacaagagaagggagatcctcagccggcggcccagttacaggaagatcctcaatgaattgtcctctgacgtacctggggtgcccaaaatcgaggaggaaagatccgaggaagagggcactccgccctccattgccaccatggctgtgccaacttcgatctaccagacgtctacgggacagtatattgccatcgcacagggaggcactatccagatcagcaatccaggcagcgatggcgtgcaaggcttgcaagcgttgaccatgacgaattccggtgcccctccgcctggggccacgatcgtgcagtatgcagcccaatcagccgacggcacccagcagtttttcgtgcctgggtcacaggtggtagtgcaggacgaagagaccgaacttgctccctctcacatggcggccgcgacaggtgacatgcccacgtaccaaatccgagcccccactgcggcactgccccagggagtggttatggcggcatctccaggaagcctacactcccctcaacagctggccgaggaggccacacggaagagagagctccgccttatgaaaaatcgcgaagccgcaaaagagtgcagaaggcgaaaaaaggaatacgtgaaatgcctggaatcccgggtggccgtgctggaggtacagaacaagaaattgatagaggaacttgaaaccctcaaggatatctgctctcctaagacagattattag

SEQ ID NO: 110667 - DNA, 474 bp, synthetic construct
  misc_feature 1..474: note = Description of Artificial Sequence: Synthetic coding sequence
  source 1..474: mol_type = other DNA
atgtccaagtgcgcccgtaagaaatacatcaaaactaacccccgtcagatgactatggagacggtagagtctcaacacgatggttccataacagcctcactgacagagtcaaaatcagctcacgtccagactcagaccgggcaaaactctattccggccctggcgcaggttgcagccattgctgaaactgacgaatccgcagagtctgagggggtgattgatagccacaaacgcagagaaattctgagtaggaggcccagctatagaaaaattcttaatgaactatcctccgacgtgccgggtgtgcccaaaatcgaagaggagcgttcggaagaagagggaacccctccaagcatagcaacaatggccgtccctacaagtatataccaaacctcaacgggacaatacatcgccattgcacagggcggtactattcaaatttccaaccctggctcggacggggtccagggttag

SEQ ID NO: 110668 - DNA, 1038 bp, synthetic construct
  misc_feature 1..1038: note = Description of Artificial Sequence: Synthetic coding sequence
  source 1..1038: mol_type = other DNA
atgactatggagacagtggagagccagcatgacggatcaattaccgcttcgctgaccgagagcaaatccgcccacgttcaaacacaaactggccaaaattcgatacctgctctggcacaagtgagcgtcgccggaagtgggacgaggcggggctcacctgctgtgaccctagtgcaactgccttccgggcagacaatacatgtgcagggggtgatccagactccccagccatgggtaatccagtcctccgaaatacacacggtccaagttgcagctattgcggagacagacgagagcgccgagtccgagggggtgattgattcccacaaaagaagagagattctatccagaagaccgagctatagaaaaatactaaatgaactgtcatctgacgttcctggcgtgccaaaaattgaagaagaaaggtccgaggaggaagggacgcccccctcaattgctacgatggcggtgccaaccagtatctaccagacaagcacagggcagtatatcgccatcgcccagggcgggacaattcagatatccaaccccggaagtgacggagttcagggtctccaggcactgacgatgacaaacagtggggcaccccctccaggtgctacaatcgtccaatatgcagcccagagtgctgatggcacgcagcagttcttcgtgcccggctcccaagtagttgtgcaggatgaggagactgagcttgcgccttcacacatggcagcagccactggcgacatgccgacgtaccaaattagggcccctaccgctgcccttcctcagggtgtcgtgatggctgccagccctggttcactgcactctccccagcagcttgcagaggaggccacaaggaagcgggagttgaggctgatgaagaatagagaagctgctaaagagtgcagacgccggaaaaaagaatacgtgaaatgcctggaatcacgagtggcagtcctggaagtgcagaataagaaactgatagaggagctcgaaacactgaaggacatctgctcacctaagaccgattactag

SEQ ID NO: 110669 - DNA, 858 bp, synthetic construct
  misc_feature 1..858: note = Description of Artificial Sequence: Synthetic coding sequence
  source 1..858: mol_type = other DNA
atgtcaaaatgtgcacgtaagaaatatataaaaacaaacccacggcagatgactatggaaacggtagaatcccaacatgatggatcgattaccgcaagcttaaccgagagtaaaagcgcccacgtgcagacacagacgggacaaaactctatccccgcactcgcgcaggtttcagttgccggttctggaactcgaaggggatctccagctgtcaccctcgtgcagctgccaagcggacagacaatccacgtgcaaggtgtgatccagactccacagccatgggtgattcagagcagcgagatccataccgtgcaggtggccgctatagctgaaactgatgagtcagcagagtccgagggcgtgattgacagccacaaaaggcgcgagattctctcacgacgcccatcgtatcggaaaatcctgaatgaattgagctctgacgtgcccggtgtgcctaaaattgaggaagagagaagtgaggaggagggaactcccccctctatcgccactatggccgttccaacaagtatctatcagacttccacaggtcagtatactgcaaccggcgatatgcccacataccagatccgcgcacccactgctgccctgcctcagggcgtggttatggcagcgagccctggctctctgcacagtccccagcaactagcagaagaagcaacccggaagcgggagctcaggcttatgaaaaacagggaagcggccagggagtgccgaaggaagaagaaagagtatgtaaaatgcctcgaaaatcgggtcgcagtgctggagaaccagaataagacactgatcgaggaactgaaggcacttaaggatctgtattgccataaggtggaatag

SEQ ID NO: 110670 - DNA, 288 bp, synthetic construct
  misc_feature 1..288: note = Description of Artificial Sequence: Synthetic coding sequence
  source 1..288: mol_type = other DNA
atgcccacctatcaaatcagggcacccaccgctgcccttccccaaggtgttgtcatggccgcgagtcctggcagcctgcatagcccacagcaactggcagaggaagctaccaggaagcgggagcttagactgatgaaaaatagggaagcggctagggaatgtagacggaagaagaaggagtacgtgaaatgcctggaaaatagagtggccgtcctcgagaaccaaaacaagacacttattgaggagctgaaggctctcaaggatctctattgccacaaagtcgaatag

SEQ ID NO: 110671 - DNA, 810 bp, synthetic construct
  misc_feature 1..810: note = Description of Artificial Sequence: Synthetic coding sequence
  source 1..810: mol_type = other DNA
atgactatggagaccgtcgaatctcagcatgatggatcaattacagccagcctgactgagagcaagtctgcccacgtgcagacccagaccggccaaaactccataccagcgttggcacaggttagcgtggcggggagtggtaccaggcggggaagcccagctgtgacactggtgcagcttcccagcggccagacgatacatgttcaaggcgtcatccagacaccacaaccatgggtcattcaatccagtgagatccatacagtccaggttgccgctatcgctgaaacagatgaaagtgccgagtccgagggcgtcattgattcccataaacggagagagatcctgagtcgccgtccttcttaccgaaagattctcaatgagctttcaagcgacgtccctggcgtgcctaaaatcgaggaggagaggtcagaggaagagggcactccaccaagcattgcaaccatggcagtgcctaccagcatttaccaaacatctactgggcagtacaccgccaccggcgatatgcccacctaccagatccgggctcctacggccgcgcttccccaaggggtggtgatggccgcatcccccggaagcctccactccccccagcagttagcagaggaggcaacaaggaagcgcgagctccggctcatgaagaatcgggaggccgcacgggaatgtcgccggaaaaagaaagagtacgtgaagtgcctcgagaaccgagtggccgtgctggaaaatcagaacaaaacactaatcgaggagctgaaagcccttaaggatctctactgccacaaagtggagtag

SEQ ID NO: 110672 - DNA, 585 bp, synthetic construct
  misc_feature 1..585: note = Description of Artificial Sequence: Synthetic coding sequence
  source 1..585: mol_type = other DNA
atggtggcagccatcgctgagaccgacgagagtgccgagtctgaaggtgtcattgattcacacaaacggcgggagatcctctctcgccgcccctcatatcgcaagatattaaatgaactgagctccgatgtgcctggagttccaaagattgaggaggagagaagcgaagaggaaggcactccgccctctatagccactatggccgtccctacatccatttatcagacctctacgggccagtacaatgaggaaacagaactcgccccttcccatatggcagctgccacaggagatatgccgacctatcagatccgggcccccaccgctgccctcccacaaggggtggtaatggcagcatccccaggaagtctgcattctcctcagcagctggctgaggaagccaccagaaaacgagaactgcgtttaatgaaaaaccgggaagccgcaaaagagtgtcgacgacgaaagaaagaatacgtgaaatgtctggagtcacgagtagccgttctggaggtccagaataaaaagttaatagaagagttagagactctgaaagatatctgctccccaaagacagactattag

SEQ ID NO: 110673 - DNA, 363 bp, synthetic construct
  misc_feature 1..363: note = Description of Artificial Sequence: Synthetic coding sequence
  source 1..363: mol_type = other DNA
atggcagtgaccggcgacgacacggatgaagaaacagagctcgcccccagtcacatggctgcagctacaggggacatgccgacataccagatccgcgcgcccaccgccgcactgcctcagggcgtggtgatggcagcttctcctgggtcccttcatagtccacagcagttagccgaagaagcaacccgaaagcgggaattacggcttatgaaaaatagagaggctgccagagagtgccggcggaagaagaaagagtacgtgaagtgcttagagaaccgcgttgctgtactcgaaaaccagaacaaaaccctgatagaagaactgaaggcgctgaaggatttatattgccacaaagttgagtag

SEQ ID NO: 110674 - DNA, 291 bp, synthetic construct
  misc_feature 1..291: note = Description of Artificial Sequence: Synthetic coding sequence
  source 1..291: mol_type = other DNA
atgcccacctatcagattcgggcacccactgcggccttgccccagggagttgtgatggctgcctcccccggatctttacattcaccgcagcagctcgccgaagaggcaacacgaaagcgggagctgcgcctaatgaaaaatcgcgaggccgcaaaggagtgcagaagaagaaaaaaagaatatgtcaaatgtctggaatccagggtggcagtcctcgaagtccagaataaaaaactcatagaggagctggaaacccttaaagacatttgttctcccaagacggattattag

SEQ ID NO: 110675 - DNA, 339 bp, synthetic construct
  misc_feature 1..339: note = Description of Artificial Sequence: Synthetic coding sequence
  source 1..339: mol_type = other DNA
atgaacagaacccaagagctgtccgggcagctgagcgctgcaactggcgacatgcccacctaccagattagagctccaactgctgccctcccacaaggggtggtaatggccgcgtctcctggctcgctccactcacctcaacagctggcggaggaggccaccaggaaaagggaactccgcctcatgaaaaaccgcgaggcagcaagggaatgtaggagaaaaaagaaggagtacgtaaaatgcctggagaaccgtgttgctgttcttgagaaccaaaacaaaacacttatcgaggagctgaaagctctcaaagatctgtactgtcacaaagtagaatag

SEQ ID NO: 110676 - DNA, 939 bp, synthetic construct
  misc_feature 1..939: note = Description of Artificial Sequence: Synthetic coding sequence
  source 1..939: mol_type = other DNA
atgtcgaagtgtgctaggaagaaatatatcaaaacgaatccacggcaaatgactatggagaccgttgaatctcagcacgacggaagtattaccgcttccttaaccgaaagtaagtcggctcacgtgcagactcagacaggtcagaactcaattcccgccttagctcaagtggcagccatcgcagagactgacgagagcgccgagtccgaaggtgtgattgactcccacaaaaggcgggaaattctgtctcggcgcccaagctataggaaaattcttaacgagctgagtagtgatgtgccaggggtgccaaagatcgaagaggaaagaagtgaggaggagggcacccctccttctatagctaccatggcagtgccgacatcgatctaccagacatccactgggcagtatatcgccatcgcccagggcggcactatccagatttctaaccccggctcagatggtgtgcagggcctgcaggctctcaccatgacaaacagtggagcccccccccctggggccaccattgtccagtacgcagcacagtctgctgacggtacccagcagtttttcgtgccaggatcccaggttgtagtgcaagatgaggagaccgagcttgctccatcacacatggccgccgccaccggtgacatgcctacctaccagataagggccccaacggccgctctgccccaaggggtggtaatggctgcaagtccagggagccttcacagcccccagcagcttgctgaagaagcgacgcgcaagcgggagctcaggctgatgaaaaaccgcgaagccgccaaggaatgcagacggcggaaaaaagaatatgtgaagtgtctggaatcccgggtggcggtactagaggtccaaaataagaaacttatcgaagagcttgagactctcaaagatatctgctcaccaaagacagactattag

SEQ ID NO: 110677 - DNA, 660 bp, synthetic construct
  misc_feature 1..660: note = Description of Artificial Sequence: Synthetic coding sequence
  source 1..660: mol_type = other DNA
atgtggtggcatcagcacaacctatgttttagaaggcctatcgaggaggattattcgagcggtgacgtcgaggagaaggtagctgccatcgccgaaactgatgagagcgccgagagtgaaggcgtaatagattcacacaagcgtcgtgagattctcagtaggagaccaagctatcgcaagatcctgaacgagcttagtagcgatgttcctggggtccctaagatcgaagaggaacgatccgaggaggaagggaccccccctagcatcgctacaatggcggtgcccacctcaatttatcagacttccacaggtcagtacaacgaggaaaccgaactggccccgtctcacatggcagccgccacgggggatatgccaacttaccagatccgggcccccaccgccgcgttgccgcagggtgtcgtcatggcagcatccccagggtctctccactcacctcagcagctcgccgaggaggctaccaggaagcgagaactacgtctgatgaaaaatcgggaggctgccaaggaatgtcgccgcaggaagaaggagtacgtcaagtgtcttgagtcaagagtcgccgtactcgaggtgcagaacaagaagttaattgaggagctggagacgttgaaggatatatgttctccgaaaacggactactag

SEQ ID NO: 110678 - DNA, 366 bp, synthetic construct
  misc_feature 1..366: note = Description of Artificial Sequence: Synthetic coding sequence
  source 1..366: mol_type = other DNA
atggcggtgaccggcgacgacaccgatgaagaaacagagctggctcctagccatatggcggctgcaacaggggacatgcccacataccagatccgcgctccaacagctgcactcccccagggagtagtgatggccgcttctcccgggtcccttcatagtcctcagcagctcgcagaagaagcgacccgtaagagagagttacgcttgatgaagaatcgcgaggcagctaaggagtgtagacgacgcaaaaaagagtatgtgaagtgtctggagtcacgcgtggcagtattagaggtgcagaataagaaactcattgaggagctggaaaccctcaaggacatatgttccccaaagactgattattag

SEQ ID NO: 110679 - DNA, 330 bp, synthetic construct
  misc_feature 1..330: note = Description of Artificial Sequence: Synthetic coding sequence
  source 1..330: mol_type = other DNA
atggccgtaaccggcgatgacacagcggcaaccggggatatgccaacttaccagattagggcccctacggcagccttaccgcagggcgtggttatggccgcttcccccggctccttgcatagcccccaacagttggccgaagaggctacgcgtaaacgggagctgcgcttaatgaagaatagagaagccgctaaggagtgccgacgcagaaagaaagagtacgtgaagtgcctggagtcacgcgttgccgttcttgaggtgcagaacaaaaaactcatcgaggagctcgaaaccctaaaggacatttgctctcccaaaacagactattag

SEQ ID NO: 110680 - DNA, 309 bp, synthetic construct
  misc_feature 1..309: note = Description of Artificial Sequence: Synthetic coding sequence
  source 1..309: mol_type = other DNA
atggctgcagccacgggcgacatgcccacataccaaatcagagccccaactgcggccctacctcagggagtggtcatggccgcctctcccggttccctgcactctcctcagcagctcgccgaggaagcaactcggaagcgcgagctccggctaatgaagaaccgggaagctgctcgcgagtgcagacgaaagaagaaggagtatgtaaagtgtttggagaatcgcgtggccgtgttggaaaatcagaataaaaccctgatcgaggaattaaaggccctcaaggacttgtattgccataaggttgagtag

SEQ ID NO: 110681 - DNA, 414 bp, synthetic construct
  misc_feature 1..414: note = Description of Artificial Sequence: Synthetic coding sequence
  source 1..414: mol_type = other DNA
atgacaatggaaaccgttgagtcacaacacgacggatcaatcaccgcctctctcacggaatccaagtctgcacatgtccaaacccagaccggacagaacagtatcccagccctggcccaggtggccgccattgctgaaactgatgaatcagcagaaagtgaaggtgttatcgattctcataagaggagggagatcctgtccaggaggccctcctatcgcaagattctcaatgaattgtctagtgatgtcccaggcgtaccaaaaattgaggaagagcgctccgaggaagaaggaacgcccccatccatcgccactatggctgtgcccacatctatttaccagacaagcacaggacagtattccatgtatgccgcgattcgctatgataccgtccttgccttgtctctgctgtag

SEQ ID NO: 110682 - DNA, 618 bp, synthetic construct
  misc_feature 1..618: note = Description of Artificial Sequence: Synthetic coding sequence
  source 1..618: mol_type = other DNA
atgaccatggaaacggttgagtcacagcatgatgggtctatcaccgcctccttgactgagagtaagtccgctcacgtgcaaacccagacaggacagaattccatacctgcccttgcccaagtggtggctattgcccagggaggcactattcagatttccaatcccggctctgatggtgtgcaggggctccaagctttaactatgacaaacagcggggctccgccgccaggggcaaccattgtacaatacgccgctcagtccgccgacggcacccagcagttctttgtgcccgggagccaagtagtcgtgcaggccgccacaggagacatgcccacctatcagatccgtgctcctacagctgctctcccccaaggggtggtaatggccgcctctccaggatccctccactccccccaacagctggcagaggaagccaccaggaagagagagttgcggttaatgaagaatcgggaagcggcgaaagagtgcagaagacggaagaaagagtatgttaagtgcctggaatccagagttgctgtgttggaggtgcaaaataagaagcttattgaggagcttgagactcttaaggacatctgttcacctaagaccgactactag

SEQ ID NO: 110683 - DNA, 813 bp, synthetic construct
  misc_feature 1..813: note = Description of Artificial Sequence: Synthetic coding sequence
  source 1..813: mol_type = other DNA
atgaccatggaaaccgtcgagagtcagcacgacggatctatcacagcgagcctcacagagagcaaatccgctcacgtgcagacccaaacaggtcagaacagtatccctgccctcgcacaggtgagcgtagcgggttcaggaacaagaaggggatcacccgctgtaacgctggtccagctgccatcagggcagaccatccacgtccagggggtgatccaaacaccgcagccgtgggtcattcagtcgtccgagatacacacagttcaggtggccgctattgccgaaaccgacgaaagtgctgagtcggaaggcgtgatcgatagccataagcggagggagatcctgtcgcgtaggccttcctaccgaaaaatcctcaacgaattgagctctgatgtgcccggggttcctaaaatcgaagaagagagaagtgaagaagagggaacccctccctcaatcgccacaatggcggttcccacctccatttaccagacaagcaccggccagtatactgctacaggtgacatgccgacataccagatacgagccccaactgcagcgttgccgcagggagtggtgatggccgcatccccgggtagtctgcattcaccacagcagcttgccgaagaggccacgcgcaaacgggaattgagactgatgaagaacagagaagccgctaaggagtgccggcgtagaaagaaggagtatgtgaagtgcttggaatcgcgggtggctgtgctcgaagtccaaaacaaaaagctaatcgaggagctcgagaccctcaaagatatttgtagccccaaaaccgattattag

SEQ ID NO: 110684 - DNA, 342 bp, synthetic construct
  misc_feature 1..342: note = Description of Artificial Sequence: Synthetic coding sequence
  source 1..342: mol_type = other DNA
atgaaccggacacaggaactgtctggccagttatctgccgccactggagacatgcctacttaccaaatacgtgcacccaccgctgccctgcctcagggtgtagtcatggccgcctcgccgggttcactgcatagtcctcagcaactcgcagaggaagccacacgcaaacgggaactgcgacttatgaagaatcgggaggccgctaaggagtgcaggaggcggaaaaaggaatacgtgaagtgtttggaaagccgggtggccgtcctggaagtgcagaacaaaaagctcattgaggagttggagacactcaaagatatctgctcgcccaaaaccgattactag

SEQ ID NO: 110685 - DNA, 465 bp, synthetic construct
  misc_feature 1..465: note = Description of Artificial Sequence: Synthetic coding sequence
  source 1..465: mol_type = other DNA
atgacaatggaaaccgtcgagtcccaacacgacggttccatcaccgccagcctaacagagagcaaatccgctcatgtccagactcaaacaggccagaacagcattcccgccctggcacaggttgatgaggaaaccgagctcgctccctcgcacatggcagctgcaaccggcgacatgccaacataccagattagggccccaacagcagccttgccacaaggcgttgtgatggccgctagcccagggtccttgcactccccacagcaactggccgaggaggccaccaggaaacgagagctgaggctgatgaagaatcgggaggcagccaaagagtgtcgcaggcggaaaaaggagtacgtgaagtgcctggagtcccgggtggcagtgctcgaggtccagaacaaaaaactgattgaagagctcgaaactttgaaggatatttgcagtcctaagacagactactag

SEQ ID NO: 110686 - DNA, 339 bp, synthetic construct
  misc_feature 1..339: note = Description of Artificial Sequence: Synthetic coding sequence
  source 1..339: mol_type = other DNA
atgtcggcagaagttcctgaggccgctagtgccgaggaacagaaagagatggaggataaagtgacaagcccggagaaggcggaggaggctaagctaaaagcgagatacccccatctcgggcagaaacccggcgggagcgatttcctgcggaagcgactccagaaggggcagaagtacttcgacagtggggattataatatggctaaggctaagatgaaaaacaaacagctgccaacagccgccccagataaaacagaggtcaccggagatcacattcctacaccacaggacctgccacagcgaaaaccatccctggtggcttccaaacttgctgggtag

SEQ ID NO: 110687 - DNA, 1926 bp, synthetic construct
  misc_feature 1..1926: note = Description of Artificial Sequence: Synthetic coding sequence
  source 1..1926: mol_type = other DNA
atgactgaaaagcctgaatttcagagtcaggtgtacaactacgcaaaagacaacaacatcaagcaggattctttcaaggaagagaacccaatggaaacttctgtgagcgcgaataccgaccagcttgggaacgaatactttagacagcctcctccgcgaagcccccctctcatccattgcagtggcgaaatgctcaagtttactgagaagagcctggctaaaagtatcgcgaaggagtcggcgctgaacccctctcagccgcccagttttctctgtaaaacagcagtacctagcaaggaaattcaaaactacggggagatacctgaaatgagcgtctcatatgagaaagaggtgaccgctgagggagtagagaggccagagatcgtgtccacctggagttccgctggtataagctggcggagcgaggcgtgccgggaaaattgcgagatgcccgactgggaacagtcagcagagtccttgcaacccgttcaagaggacatggctctcaacgaagtgttgcagaagctgaagcacaccaaccggaagcaagaagtcaggattcaagaattgcaatgcagcaacctatatttggagaaacgcgtcaaggaactccagatgaagatcactaagcagcaagtgtttattgacgtcattaacaaactaaaggagaacgttgaggagctgattgaggataagtacaagatcatccttgagaagaatgacactaagaagaccctgcagaacctggaggaggtcttggctaatacccagaaacatctgcaagagagtaggaatgacaaagagatgttgcagctgcagttcaaaaagatcaaggccaattatgtctgcctgcaggagcgttacatgaccgagatgcagcaaaagaacaagtccgtatcccagtatctcgagatggacaagactctgtccaagaaggaagaagaggtggagcgattgcagcagctgaaaaaagagctagaaaaagctaccgcctccgccctggatttattaaagagagagaaagaggcccaggagcaggagtttttaagccttcaggaggaattccaaaaactcgaaaaggaaaatttggaagagagacagaagctgaaatccagattggagaagcttctaacccaggtgagaaaccttcagttcatgtcagagaacgagagaacaaagaacattaaattgcaacagcagataaatgaagtgaagaacgagaacgccaagctgaagcaacaggtggccagaagcgaagaacaaaattacgtccctaagtttgaaactgcccagctcaaagatcagctggaagaggttctcaagagcgatattacgaaggacactaagacaacgcatagcaacttgctgcctgactgcagcccatgtgaagagcgcctgaacccggccgatatcaaacgggcttcacagctggcaagcaagatgcatagcttgttggccctgatggtcggcttactaacctgccaggatattattaacagcgacgcggaacactttaaagagagcgagaaagtgagcgacattatgctgcagaagctcaaatcactgcacctcaaaaaaaagaccctcgataaggaggtcatagactgcgatagtgacgaggctaagtctattcgggacgtcccgactcttctgggagcaaaactcgacaaatatcatagcctgaacgaagagctggactttctcgtgacatcctatgaggaaatcatcgaatgtgccgaccagaggttagctatcagccactcacaaattgcccatctcgaagaaaggaacaaacatcttgaggacctgatccggaaacctcgcgagaaagcccggaagccccggtcaaaatcactcgagaatcatcccaaaagcatgaccatgatgccagcactgttcaaggaaaatagaaacgatcttgattag

SEQ ID NO: 110688 - DNA, 2475 bp, synthetic construct
  misc_feature 1..2475: note = Description of Artificial Sequence: Synthetic coding sequence
  source 1..2475: mol_type = other DNA
atgaataaggattaccagaagttctggtcttctccgtcagacccagtccactttgaagtggacacgagtcacgagaaagtggagagcatgtccgagagcgatacaatgaatgtgtccaatctatctcagggagtgatgctttctcacagtcccatctgcatggaaaccactgggacaacttgtgatctaccgcagaatgagattaaaaacttcgaaagagaaaatgaatacgagagtacattatgtgaagacgcctatggaactctggataatctgctcaacgacaataacatcgaaaactacagcactaacgctctgattcagccagtagataccatctcaatttctagtttgagacagtttgaaactgtgtgtaagtttcattgggtggaagccttcgacgacgaaatgaccgaaaagcccgagtttcaatcccaggtctacaactacgcgaaagacaacaatattaagcaggactcatttaaggaggagaatccaatggagacgtccgtctcagctaacacagaccaattaggaaatgagtacttcagacaaccgcctcctcggtcacctcccctaatccactgctcgggagagatgcttaagtttaccgagaagagcttggctaagagtatcgccaaggaatctgccttaaaccccagccagcccccctccttcctgtgcaagactgcagtgcccagtaaagagattcagaactatggagaaatcccagagatgagtgttagctatgaaaaagaagtcaccgcagaaggtgtggagcgccccgagattgtatccacatggtcgtctgccggaatatcttggcggtcagaagcctgccgtgagaattgcgaaatgcccgactgggagcaaagcgccgagagtctgcagcccgttcaggaggacatggcgctgaatgaggtgctgcagaaacttaagcacaccaatagaaaacaagaggttaggattcaggagttacagtgttcaaatctgtatctggagaagcgagtgaaagaactgcagatgaagattacaaagcaacaggtgtttatcgacgtaattaacaaactgaaagaaaatgtggaggaattaattgaggataagtacaaaatcattctggagaaaaacgatactaagaaaactttacaaaatcttgaggaggtccttgccaacacccagaagcatttacaggaatctaggaacgacaaagagatgcttcagttgcagtttaagaagatcaaagccaactacgtttgtcttcaggagaggtatatgactgagatgcagcaaaagaataaatccgtatcccagtatctggagatggataagacattatcaaagaaagaagaggaagtggaacgacttcagcagctcaagaaagagctggagaaagccaccgcctccgcattggatctcctgaagagggagaaagaagctcaggaacaggaatttttgtccctgcaggaggagttccaaaaacttgaaaaagaaaacctcgaggagagacagaagctgaagtctagactcgaaaagctactgacccaggtgaggaaccttcaatttatgtccgagaacgagcggacaaagaatataaagctgcagcagcagattaatgaggttaagaatgaaaatgccaaactgaaacagcaggtggctcggtctgaggaacagaattatgtgcccaaattcgagactgcccagctgaaggaccaactcgaagaggtgctgaaatcagatataacaaaggacaccaagactacgcacagcaacctcctcccagattgtagtccatgcgaagagcgccttaatccagcagatattaaacgcgcaagccagctagcctccaagatgcattctttacttgctctgatggttggactcctcacatgtcaggacatcatcaactctgatgctgagcatttcaaggagtcagagaaagtttcggatataatgctgcagaaactgaaaagcctgcatttgaagaagaagactctggataaggaactactgaaacacaaagaccggataaccacttttcgggagctgatagccaaagagaaagctttccaggatcatgccattaaggtgatcgattgtgactccgacgaggctaagtctatcagagacgtgccgacactcctcggggctaaactcgataagtatcattccctaaatgaggaactggactttctcgtgacttcctatgaagaaatcattgagtgcgccgaccagagattagcaatcagtcattcccagatagcacatctggaagagaggaacaagcacctggaggatctgatccggaagccccgagagaaggcgcggaaaccgcgtagtaagagccttgagaaccacccaaagtctatgacgatgctcgcctacaatctctatatatttattgggtatagattgggcgccgtggcagacgcatgcaacccaagtaccctcggcgggcgcggtggctggataacctag

SEQ ID NO: 110689 - DNA, 2334 bp, synthetic construct
  misc_feature 1..2334: note = Description of Artificial Sequence: Synthetic coding sequence
  source 1..2334: mol_type = other DNA
atgaataaggattaccagaagttctggtcttctcccagcgatcccgtgcatttcgaggtggatacaagccatgaaaaagtggagtctatgagcgaaagcgacaccatgaatgtttctaacctctcacagggcgtcatgctgtcccacagccccatctgcatggagacaacagggaccacatgcgaccttccccagaacgagattaaaaacttcgagcgtgaaaatgagtatgagtccaccctctgcgaagacgcttacggaacgctggataatctgctgaacgacaacaatattgagaattatagcaccaatgcactgattcagcccgtggatacaatcagcatctcttccctgaggcagtttgagacagtctgtaagtttcattgggtcgaagcatttgacgacgagatgaccgaaaaaccggaattccagtcccaggtgtataattacgccaaagataataatataaagcaggactcattcaaggaagagaaccccatggagactagcgtgtccgccaacacagaccagctcggcaatgagtattttcggcaacctccccctcgttcaccacctctgattcattgtagtggggagatgctcaagttcacagagaagagcctcgccaagtccatcgccaaagagtccgcactaaacccaagccaaccaccttcctttctgtgcaagaccgccgttcctagtaaggaaatccagaattacggggaaattccagagatgagcgtctcctacgagaaggaagtaaccgccgagggggtggaaagacctgaaattgtctcaacttggagctcggctggaatcagctggagatcagaggcttgtagagagaattgtgagatgcctgactgggagcagagcgctgagtctctgcaaccagttcaggaagacatggccctcaatgaagttttacaaaaactcaagcatacaaatcggaagcaggaggtgcggatccaagaactccaatgttccaatttgtatttagagaagagggtcaaggaactgcagatgaagattaccaaacagcaggtgtttatcgacgtgatcaacaaactcaaggagaacgttgaagaactcatcgaggataaatacaaaataatcctggaaaagaacgacaccaaaaaaaccctccagaatctcgaagaggttctggccaatacacagaaacatttgcaggagtctagaaacgacaaagagatgctacaattacagttcaagaagatcaaggccaactatgtgtgtctacaggagcggtacatgaccgaaatgcagcagaaaaataaaagcgtaagccagtatctggagatggataagactctgtctaagaaagaggaggaagtcgagcgactacagcagttgaagaaggagctggagaaagccaccgcatctgccctggatctgctaaagcgggagaaagaggcccaggagcaggaattcctgtcactccaggaggagttccaaaagcttgaaaaggagaacctcgaagagcggcagaagctgaagagccgcctggaaaaacttctgactcaagtccggaacctgcagtttatgtccgagaatgagcggaccaaaaacataaagctacagcagcagataaatgaggtcaaaaatgaaaacgcaaagctgaagcaacaagtcgcacgcagcgaggaacaaaactatgtgccaaagtttgaaacggcccagcttaaagaccagcttgaagaggttctgaaaagtgacattactaaggatacaaagactacccactctaatctgttacccgactgctctccctgcgaagagagactgaaccccgccgatatcaaaagggccagtcagctagccagtaaaatgcattccctcctggctcttatggttgggttgctaacttgccaggatatcattaactccgatgccgagcattttaaagaaagcgagaaggtgagcgacatcatgctgcagaagttaaagtcactccatctcaaaaaaaaaaccctagacaaggaggtcatcgactgcgattcagacgaagctaaatccataagagatgtaccaactttgctcggggccaagttagacaaataccacagcctgaacgaggaactcgatttcctcgtaaccagctacgaggaaatcatagagtgcgccgaccagcgactggccattagtcacagccagattgcccatttggaggagagaaataagcacctggaggacctgatccggaagccccgcgaaaaggccagaaagccaaggtcaaagagcctggaaaatcaccccaagagcatgacaatgatgcccgcactgttcaaagagaaccgcaatgatctcgactag

SEQ ID NO: 110690 - DNA, 2103 bp, synthetic construct
  misc_feature 1..2103: note = Description of Artificial Sequence: Synthetic coding sequence
  source 1..2103: mol_type = other DNA
atgaataaggactaccagaagttttggtcaagcccgagtgatccagtgcacttcgaagtggacaccagccacgaaaaggttgagtctatgtcagagtcagataccatgaatgtaagcaatttatcacagggagtgatgctttcgcacagtcctatttgtatggaaacaactggcacaacttgtgatctgccacagaacgagatcaagaattttgaacgcgaaaatgaatacgaaagtacactttgtgaagacgcttatggcacgctggataacctcctgaacgacaacaatattgagaattactctacaaacgccctaatacagccagtcgacactatctcaatttcttcattgcgccaattcgagactgtgtgcaaattccactgggtggaagcctttgacgatgaaatgactgaaaagcccgaatttcagtcgcaggtgtataattacgctaaagacaacaacatcaagcaggactctttcaaggaggagaaccctatggaaacttccgtctctgccaataccgatcagctgggcaacgagtactttaggcagccccccccgcgcagtcctccactgattcactgctcaggcgagatgctcaagtttacagaaaagtctctggcaaagtctattgccaaggagagcgctttaaaccctagccagcccccgtcgttcctgtgtaaaacggctgtgcctagtaaagaaattcaaaattacggagagataccagaaatgtccgtgtcctatgagaaggaagtgaccgcggaaggcgtcgagaggcccgagatcgttagcacttggagcagcgccggcataagttggcgttccgaagcttgtcgagaaaactgtgaaatgccagattgggagcaatccgccgagtccctgcagccagtccaagaggacatggccttaaatgaggtgctgcaaaagctcaaacacaccaacagaaaacaagaagtcaggatacaggaactgcaatgctccaacctctatttggaaaaaagggtgaaagagcttcagatgaaaatcactaaacaacaggtcttcattgacgtgataaacaagctgaaggagaatgtggaagagctgattgaggacaaatacaagatcatcttggagaaaaatgatactaagaagacattacagaatctggaagaagtgctggcaaacacccaaaagcacctgcaggaaagccggaacgacaaggaaatgcttcagctgcagtttaaaaagatcaaggcgaactacgtttgcctccaggaaaggtacatgacggaaatgcagcagaaaaacaagtcggtgtcacagtacttggagatggacaaaacactcagcaaaaaggaggaggaggtggagcggctccagcagctgaaaaaggaactggaaaaggcaaccgcaagtgcattggacctgctgaaacgggagaaagaagcccaagagcaagagtttctatctctccaagaggaatttcagaagctagagaaagagaatctggaggaacggcagaagctgaagagccgcttagaaaagcttctgacccaagttcggaacttacagtttatgtctgagaatgaacgtacaaagaatattaaattgcagcagcagatcaacgaggtcaaaaatgaaaatgctaaactgaagcagcaggtggcaaggtcggaagagcagaattacgtgcccaaattcgagacggctcagctcaaggatcaactcgaagaggtcctgaagagcgacatcaccaaggatacaaaaaccacacatagcaatctgctgccagactgttccccttgcgaggagcgactaaatcctgccgacatcaaaagagcctcgcaactagcctcaaagatgcactctctgctggcgctgatggtggggctcctgacttgccaggacattattaactccgacgctgagcatttcaaagaatccgagaaggtgagcgacataatgttgcagaagttaaagagcttgcacctgaagaaaaagaccttggataaagaattgctcaaacacaaagatcggattacaacgtttagggaactgatcgcaaaggaaaaggcgtttcaggaccatgcaattaaggtctttcagggagtttag

SEQ ID NO: 110691 - DNA, 2520 bp, synthetic construct
  misc_feature 1..2520: note = Description of Artificial Sequence: Synthetic coding sequence
  source 1..2520: mol_type = other DNA
atgaacaaggactatcagaagttctggtcgtcgccatcagacccagtgcatttcgaggtcgacacctctcatgaaaaggtcgaaagcatgtccgagagtgatactatgaacgtgtctaatttgagccaaggagtgatgctctcccatagtcccatttgtatggagaccaccggcaccacatgtgacttgccccagaatgagatcaagaatttcgaaagagagaacgaatatgaatccaccttatgcgaggacgcgtacggtacgctggacaacttgctgaacgacaataacatcgagaactactctaccaatgcactaatccagcctgttgatactatttcaatctcgagcctgcgccaatttgaaactgtatgcaagtttcattgggtggaagcatttgatgacgagatgactgaaaagccggaatttcaaagccaagtctacaactacgccaaggacaacaatataaagcaggactcttttaaagaggaaaacccaatggaaacatcggtttcggctaataccgatcagctgggcaatgaatactttcgtcagcctcccccccggtctcctcccttgattcattgttctggagagatgctgaagttcacagaaaaatccctagctaagtcaatcgcaaaagagagcgcattgaacccgtctcagcccccatctttcttgtgcaagacggccgtgccctcaaaggaaatccagaattatggggagattccagaaatgagcgtgagctatgagaaggaagttacggccgaaggcgtggagcgtcccgagatcgttagtacctggtcctctgccggaatctcatggcgaagcgaagcatgtcgggaaaattgcgagatgcccgactgggagcaatctgcggagtctttgcagccagtccaggaagacatggccctgaatgaagtgctgcaaaagcttaagcatacaaaccgaaaacaggaggtccgcatacaggagttgcagtgtagcaatctttatctggaaaagcgcgtaaaggaactccaaatgaagatcaccaaacagcaagtgttcattgatgtgatcaacaaactgaaggagaatgtggaagaattgatcgaggataagtacaaaatcatcttggaaaaaaatgacaccaagaaaaccctgcagaatctcgaagaggtgctggccaacacacagaagcaccttcaggaatctagaaacgacaaagagatgctgcagttgcaatttaaaaaaattaaagctaattacgtttgtctgcaggagcgatatatgactgagatgcagcagaagaataagtccgtctcacaatacctcgaaatggacaaaacgctgagcaagaaagaggaggaggtggagcgcctacagcagctcaaaaaggagctcgaaaaggctacagcgtcagccctggacctgctaaagcgggagaaagaagcacaggaacaagaattcctctcattacaggaagagttccagaagctcgagaaggagaacctggaagagcgccagaagctgaaaagtaggttggaaaaactgttaacacaagtgcggaacttgcagttcatgtcagagaatgaacgaaccaaaaacatcaagctgcagcagcagattaatgaggtgaaaaacgaaaatgccaaactgaaacagcaagtcgccagatctgaggaacaaaactacgtccctaaatttgaaactgcacagcttaaagaccagctcgaggaagtcctgaagtccgatattaccaaagacaccaagacgactcacagcaaccttctgccagactgctcgccctgtgaggagcgactgaaccccgccgacattaaacgagcgtcccagctggcatcgaagatgcatagcctgctggccctgatggttggcttacttacttgccaggacataataaacagtgacgcggagcatttcaaagaatccgaaaaggtgagtgatatcatgctccaaaaactcaagtctcttcacctgaagaaaaagacgctagataaagagctgctgaagcacaaggatagaatcactaccttccgagagctgatagccaaagaaaaggccttccaagaccacgcaatcaaggtgatcgactgcgacagcgatgaggccaagtcaatacgagatgttccgactttgctcggggctaagctagacaagtaccactctcttaacgaagagttggacttcttgataacaaagctcggacaccttctagagtcaaaagagaaccactgcaacagactgatcgaagaaaacgataaatatcagagacacctcgggaatctgattaaaaaagtcacctcctacgaggagatcatcgaatgtgccgaccagcgactggccatctcccatagtcaaatcgcacatttggaggaacgaaataagcacctggaagacttgatcaggaagccaagggagaaagcaaggaagcctcgatcaaagtccctggagaaccacccaaagagtatgacaatgatgcctgctctgtttaaagagaataggaatgatttggactag

SEQ ID NO: 110692 - DNA, 2112 bp, synthetic construct
  misc_feature 1..2112: note = Description of Artificial Sequence: Synthetic coding sequence
  source 1..2112: mol_type = other DNA
atggcggatcgaagaagacagcgagctagccaggacacagaagacgaggagtctggcgcatcaggctctgattccggtggcagcccactgagggggggggggagttgctccggctccgcgggtggaggtgggtcagggagcctgccatctcagcggggggggagaaccggcgcactccacctccggagagtggagtcggggggggctaagagtgctgaagaatctgagtgcgagtctgaggatgggattgaaggagatgcggtcctttcggattatgagtccgctgaagacagtgagggagaggaaggcgaatattcagaggaagagaactctaaggtcgagctgaaatctgaggctaacgacgcggttaacagcagcactaaggaagagaagggcgaagaaaagccagacactaaatcaacagtgaccggggaacgccagtcgggcgatggccaggagagcacagagccggttgaaaacaaggtcgggaagaagggaccgaaacatttggacgatgatgaggaccggaaaaaccccgcttatattcctaggaaaggcctgtttttcgagcatgacctcagaggacagacccaggaagaggaagtgagacccaaaggacgtcagcgaaagctgtggaaggacgaaggcaggtgggagcacgacaaattcagggaggatgaacaagccccaaaaagtagacaggagctcatcgctctgtatggctacgatatacggtccgcacataatcctgatgatatcaagccgcgccgtattcgcaaaccccgttacgggtcaccgccgcagcgggatcccaactggaacggtgagaggttgaataaatctcacaggcaccaggggctgggtggcactctccccccacgcacctttatcaataggaatgccgctggcacaggtcgaatgtccgcccctcgcaactactcaaggtctggaggatttaaggaggggagagccggattccggcccgtggaagccgggggccaacacggggggagatctggagagacagttaaacacgagatctcctaccgctcacgacgactcgagcagaccagtgtccgggatccatctccagaggcagacgcacctgtattggggagcccagagaaagaagaggccgcttctgaacccccagctgccgctccagacgccgctcctcctccccccgacagaccaatcgagaaaaagtcttactccagagcccgccgcacaaggacgaaagtgggagatgccgtgaagttggccgaggaagttccacctccccctgaggggctgatcccagctccacccgtgcccgaaacaactcctacgcctcccactaaaaccggtacttgggaagctcccgtcgattcgagcacttctggcctggaacaggacgttgctcagcttaatattgcagagcagaactggtccccaggccagccaagcttcttgcagcccagagagctgaggggcatgcccaaccacatacacatgggtgccggccctcctccacaattcaaccggatggaggaaatgggagtgcagggcgggcgagccaagagatacagcagtcagcggcaaaggccggtgccagagccacccgctccccccgtccatatctcgattatggaaggccattactatgatcccctgcagtttcaggggcccatctacacacacggcgattcacctgccccccttccgccccaggggatgctggttcagcctgggatgaacctacctcatcctggcctgcacccacaccagaccccggcacccctccctaacccaggactctatccccccccggtgtcaatgtcgcctggtcagccccctcctcaacagttgctggctccaacatacttttcagcccccggggtgatgaatttcggaaatccttcctacccttacgcaccaggagctctgccccccccacccccacctcatctatacccaaacacccaggccccgagtcaggtctatggcggcgtcacttactataaccccgcccagcagcaagtgcagcctaagcctagccctccacggcgcactccgcagccggtgacaatcaagccgcctccgccagaggtggtcagcaggggaagtagctag

SEQ ID NO: 110693 - DNA, 2112 bp, synthetic construct
  misc_feature 1..2112: note = Description of Artificial Sequence: Synthetic coding sequence
  source 1..2112: mol_type = other DNA
atggcagacaggaggagacagagggcatcgcaggacaccgaggatgaagagagcggggcatccgggtcagacagcggtggatccccactcaggggcggcggctcatgctcaggttccgcgggtggcggggggtcgggaagtctgccaagccaaagaggagggcgaaccggtgccttgcaccttcgaagggtggaaagtggtggtgcgaaatctgcggaagagagcgaatgcgaatctgaggacggcattgagggtgatgcggtgctgtcagactatgaaagtgccgaagactctgaaggagaggagggagagtacagcgaggaggaaaattctaaggtggaactcaagtccgaagcaaatgacgctgtgaatagctcgactaaggaggaaaagggagaggaaaagcccgacactaaatctaccgtgaccggcgaacggcagagcggagacggccaggaatcgaccgagcctgtcgaaaacaaagtgggcaagaaagggcctaagcacttagatgatgacgaggatcgtaaaaatcctgcctacattccacggaaagggttgtttttcgaacacgatctgcgcggccaaacacaggaagaagaagtccggcccaagggccgacagcgcaagttgtggaaggacgagggtcggtgggagcacgacaagtttagagaggatgagcaagctcctaagtctaggcaggagttgatagcactctatgggtatgatatacgaagcgcccataatccagacgatattaaaccacgtaggatacggaaacctagatatgggtctcccccgcagagagatccaaactggaatggtgagcgcctaaacaagtcacaccgccaccagggcctcggtggaactctcccgccacgaactttcatcaaccgtaacgctgccggaacagggagaatgtcagcgccccgaaattattctaggtccggtggtttcaaggaaggacgcgctggttttagaccagttgaggctggtggtcagcacggtggacgaagtggcgaaaccgtgaagcacgaaatcagttatcgctctcgacggctagagcaaacatccgtgcgggaccccagtccggaggccgacgccccggtcctgggctcgccggaaaaggaagaggctgcttcagaaccccctgctgctgctcctgacgcagctcccccaccaccagacaggcccatcgagaagaagtcgtacagtcgggccagacgtaccagaactaaagtcggcgacgcggtgaagcttgccgaggaggtgccaccacccccagagggtctcatccccgcccctcctgtcccagagacaacaccgactcctcctacaaagacgggtacctgggaggcccctgttgatagcagcactagcgggctggagcaggatgtggcccagctgaacattgctgagcaaaactggtcacccggacagccgtcatttttgcaaccacgggaactgcggggaatgcccaaccatatccacatgggcgccgggccgccaccccaattcaaccgcatggaagaaatgggagttcagggcggccgggccaaacgctacagcagccagcgtcagcggcctgtcccagaaccccctgccccacccgtgcatatttcaatcatggagggccactactacgatcctttacagttccaggggcccatttatacccacggagatagccctgctccgctaccccctcaggggatgctcgttcagcctgggatgaatctgcctcaccccggactgcacccccatcagactcccgcgccgttaccaaaccccgggttatatccccctccggtaagtatgtctccaggccaaccgccacctcagcagctgctcgcccctacatacttttcggctccgggggtgatgaattttgggaaccccagctacccttatgctcctggggccctgcctccgcctccacccccacacctgtatccgaatacgcaggctccgagccaggtgtatgggggtgtcacgtactacaacccagcccagcagcaggtgcaacccaaacctagtccccctaggagaactccacagcccgttactataaagccccccccgccggaggtcgtgagccgtgggtcgagctag

SEQ ID NO: 110694 - DNA, 1926 bp, synthetic construct
  misc_feature 1..1926: note = Description of Artificial Sequence: Synthetic coding sequence
  source 1..1926: mol_type = other DNA
atggcggataggcgaaggcagcgggcttctcaggataccgaagatgaggagagtggtgcaagtgggtcggactccgggggcagtcccctgcgcggagggggctcttgcagtggctcagctggagggggcggatccggctccctgccaagccagcgcgggggacgtaccggggcgctgcatctgcgccgggttgaatccggaggcgctaagtccgcagaggaaagcgagtgtgagtccgaggacgggattgagggcgacgctgtgctgagcgattatgagtccgcggaggactccgagggcgaagaaggtgagtattccgaagaagagaactcaaaggtggaactaaagtctgaagccaacgacgccgttaatagtagtaccaaggaagagaagggagaagagaagcccgacacaaagtccaccgtgactggtgagaggcagtctggcgacggtcaggaatcgacagaaccagtggaaaataaagttggcaaaaaagggcccaagcatctagatgatgacgaggaccgcaagaatccagcctatatccctcgcaaaggcctgtttttcgagcacgacttgcggggccagacacaggaggaggaagtgagaccaaaaggcaggcaaaggaaactctggaaggacgagggccgctgggaacacgacaagtttcgggaagacgagcaagcccctaaatctcgacaggaactgattgcattgtatgggtatgacatccgaagtgcgcataaccccgacgacattaagcccaggcggattagaaagcctcgctatggttcaccacctcagagggatcctaattggaatggggagcgactcaacaaatcccaccggcaccagggcctgggaggtactctgcccccgcggacgttcattaaccgaaatgccgccggtaccggtcgcatgtcagcccccagaaactacagtcgatccggagggtttaaagaaggccgtgctggattcagacccgtcgaagctggaggccaacacgggggaagaagcggagagaccgttaaacacgagatctcttaccggtcaaggaggctggaacagactagtgtgagagaccccagccccgaggccgacgcgcccgtgctgggctctcctgaaaaggaagaggcggcctccgagcctccagcagccgcaccagacgccgcaccccccccaccggatcgcccaatcgagaaaaaatcgtattctcgtgcccgtagaaccaggacaaaggtgggcgacgccgtaaagctggccgaggaagtccctccccctcccgaggggttaattcccgcacctccagtgcccgaaaccactccgaccccaccaacaaaaaccgggacgtgggaggctcccgtcgattcctccactagcggactggagcaggacgtagcccaactgaacattgcagaacagaattggtctccgggccaaccatcattcctccagccccgtgaactgcgggggatgcctaatcacatccatatgggggcaggcccaccgccccagttcaacaggatggaagagatgggcgtgcaagggggcagggccaagcgctattccagccaacgacaacgccctgtccctgagcctcccgcccccccggtgcacatctccattatggaggggcattactatgatcccctgcagtttcagggaccaatctatactcacggcgattcccctgcgcctttgccgccccaaggaatgctggtgcagcctggaatgaacttgccacaccctggcctgcacccacaccagactcctgcatgtccagactcccagacactgaggcactgtgagtcttgcctgtgttggtctacagtcttctcctgcaaagatttctcgatgtgcggaggtgtgttttgctattgttttaaaggatgcccattcgtgataagcattgtgacatggagatag

SEQ ID NO: 110695 - DNA, 543 bp, synthetic construct
  misc_feature 1..543: note = Description of Artificial Sequence: Synthetic coding sequence
  source 1..543: mol_type = other DNA
atgcaggccgaagggcgaggcactggcggttcaaccggggacgcagatggtcctggtggccctggaattcccgatggcccgggaggcaacgccggcggaccgggggaagccggcgctacaggggggcgaggccccaggggcgctggagctgcgcgagccagcggacctggtggcggagccccacgaggccctcacggaggggcggctagtggtctgaatgggtgttgtcgctgtggtgcaaggggaccggagagcagacttctcgagttttatttggccatgccttttgcaacccctatggaggccgagctcgctagacgctcgctggcgcaggatgcaccgccactgcccgtgccaggcgtgcttttgaaggagtttaccgtgtccggtaacatactcacaatcagattaaccgccgccgaccacagacagttgcagctttctatcagttcatgtctgcagcaactgagccttctcatgtggattacgcagtgtttcctgccagtgtttttggctcagccaccatccggccaacgcagatag

SEQ ID NO: 110696 - DNA, 570 bp, synthetic construct
  misc_feature 1..570: note = Description of Artificial Sequence: Synthetic coding sequence
  source 1..570: mol_type = other DNA
atgaccgacaaaaccgagaaagtggcagtcgacccagaaaccgtgttcaagagaccccgtgagtgcgatagtcctagttatcagaaacggcaacgtatggcattgctggcacgtaaacagggggccggggattcgttaatcgccggttccgccatgtctaaggcaaagaaactcatgaccggtcacgcgatacctccatcacagctcgactcccagatcgatgacttcactggatttagcaaagatagaatgatgcagaagcctggatcaaacgcgcctgtaggtggaaacgttactagcagcttctctggagatgacctagaatgtcgcgagacagctagtagcccaaagtcacaaagggaaatcaacgcggacatcaagcggaaactggtgaaggagctgagatgcgtggggcaaaagtatgagaagatctttgaaatgctggagggcgtacagggccctaccgctgtgcgtaaaagatttttcgaatcaattatcaaggaggcggcacgctgcatgcggcgggattttgtgaaacaccttaagaagaagctaaaaaggatgatttag

SEQ ID NO: 110697 - DNA, 570 bp, synthetic construct
  misc_feature 1..570: note = Description of Artificial Sequence: Synthetic coding sequence
  source 1..570: mol_type = other DNA
atgactgacaaaactgaaaaagttgcagtggacccagagaccgtcttcaaacgaccaagggagtgtgattcaccctcctaccagaagcgccaacgcatggcacttctcgcacgaaaacaaggggccggcgatagtttgatcgcaggttcagcgatgagcaaagagaaaaagttaatgactgggcacgctatccccccctcccaacttgattctcagattgatgactttaccgggttctcgaaggaccgcatgatgcagaagcctgggtccaacgcccccgtaggggggaacgtaacatctagtttctcaggtgacgatctggaatgccgggagaccgcatcatctcctaagtcacaacaggagatcaatgctgatataaaacgaaagctagtaaaagagctaagatgtgtgggccagaaatacgagaaaatcttcgagatgctcgagggagtgcagggaccaacagccgtgcgcaaaaggttctttgagtctataatcaaagaggctgccaggtgcatgaggagggactttgtgaagcacttgaaaaagaagttgaagcgaatgatatag

SEQ ID NO: 110698 - DNA, 570 bp, synthetic construct
  misc_feature 1..570: note = Description of Artificial Sequence: Synthetic coding sequence
  source 1..570: mol_type = other DNA
atgactgacaagaccgagaaagtcgccgtcgatcctgaaaccgtgttcaaacggcctcgagagtgtgactcaccctcctatcaaaagcgccaacgaatggctttgctggcaaggaaacagggtgcgggcgactccttgattgcaggaagtgcgatgtcgaaagaaaaaaagctcatgaccggccatgctatccccccgtcacagctggacagtcagatcgatgacttcaccgggttcagcaaggatcggatgatgcagaagccaggtagtaatgcccctgtgggaggaaacgttacatcctcattttctggagatgacctagagtgtcgggagaccgcttcatcacccaaatcccagcaagaaattaatgccgacattaagaggaaactcgttaaagaattacgttgtgtgggccagaagtatgaaaaaattttcgagatgttagagggagttcagggccctaccgcggtcaggaaaaggttctttgagtctattataaaagaggctgctcgctgtatgagaagagatttcgtgaagcacctgaaaaaaaaacttaaacgcatgatctag

SEQ ID NO: 110699 - DNA, 570 bp, synthetic construct
  misc_feature 1..570: note = Description of Artificial Sequence: Synthetic coding sequence
  source 1..570: mol_type = other DNA
atgactgataagaccgaaaaagtggccgttgatccagaaaccgtattcaagcggccgcgggagtgcgactcgccatcatatcagaaaagacagcggatggcgctcctggcccgtaagcagggcgcgggagactcactgattgcaggatctgcaatgtcaaaagagaagaagttgatgactggacatgccataccaccaagccagctggacagtcagatcgacgacttcaccggtttttctaaggatcgcatgatgcagaagcccggctctaatgcacccgtgggggggaacgttacctcatcatttagcggtgacgacctagagtgtcgcgagacagctagctcccctaaatcccagcgcgagatcaacgccgacataaagcgcaagctggtcaaggagctgcgatgcgttggccagaaatatgagaagattttcgaaatgctggagggagtgcagggacctaccgccgttcgaaagcggttcttcgaaagcataatcaaagaggccgcccggtgtatgcgcagagattttgttaagcaccttaagaagaaactaaaacgtatgatttag

SEQ ID NO: 110700 - DNA, 570 bp, synthetic construct
  misc_feature 1..570: note = Description of Artificial Sequence: Synthetic coding sequence
  source 1..570: mol_type = other DNA
atgaccgataagactgagaaagtggctgtcgacccagaaacagtcttcaaaagacccagagagtgtgactccccgtcctatcagaaacgccagaggatggccctgctggcccgaaagcagggcgccggcgattctcttattgccggatccgccatgagcaaagagaagaaactcatgacaggtcatgctatacctccatcccagttggattcccaaatcgatgacttcacaggtttttcaaaggacagaatgatgcagaagccagggtctaacgcgcctgtggggggcaatgtcactagctcatttagcggtgacgacctggagtgccgcgagactgcttcctctccaaagtcccagcgggagattaatgccgatataaagcgaaaactggtcaaagagctaaggtgtgtgggacagaaatatgagaaaatcttcgaaatgctggagggggtccagggccctacagcagtacggaagaggtttttcgagtcaattattaaagaggcggcccgctgcatgagacgcgactttgtgaaacaccttaagaagaagctcaaaaggatgatttag

SEQ ID NO: 110701 - DNA, 570 bp, synthetic construct
  misc_feature 1..570: note = Description of Artificial Sequence: Synthetic coding sequence
  source 1..570: mol_type = other DNA
atgacagataaaactgagaaggttgctgtagaccccgagaccgtgtttaaacgccctcgcgagtgcgacagcccctcttaccagaaacgccaacggatggccctcctggcccgaaagcagggagccggtgactcgctgatcgcggggtccgcgatgagtaaggaaaagaagcttatgaccggacacgctatccctccatctcagttggactctcagattgatgactttacaggattcagcaaggaccgaatgatgcagaagccaggctccaacgccccagtcggcggcaatgtgacatcatcctttagcggggacgacttggagtgtcgcgagacagcaagtagcccaaagagtcagcaggaaattaacgcagatataaagagaaaactggtgaaagagctgcgctgcgttggacagaagtatgagaagatcttcgaaatgctggaaggcgtgcagggcccaaccgctgtccgaaaacgcttcttcgagagtatcatcaaagaagctgctcgctgtatgcgaagagatttcgttaaacaccttaagaaaaagcttaagagaatgatttag

SEQ ID NO: 110702 - DNA, 570 bp, synthetic construct
  misc_feature 1..570: note = Description of Artificial Sequence: Synthetic coding sequence
  source 1..570: mol_type = other DNA
atgaccgataagaccgaaaaggtagccgtagatccagagaccgtattcaagagaccccgcgagtgcgatagcccatcttaccaaaaaagacagaggatggctcttctggccaggaaacagggcgctggtgactcgctgatcgctggaagcgcaatgtccaaagctaagaagctgatgacaggccacgccatcccccctagccaactggacagtcagatagacgacttcacaggtttcagcaaggatcgcatgatgcagaagccaggaagtaacgcccccgtcggtggtaacgtcaccagctcattctccggcgatgacttagagtgcagggagacagcttcgagcccaaagtctcagcaggagatcaacgccgatataaaacggaagctcgtaaaggaactaaggtgtgtcggtcaaaaatacgaaaagattttcgagatgctagaaggagtccagggccctaccgccgtgcgtaaacgattcttcgaatctataattaaggaagccgctagatgcatgcgtagagatttcgtgaaacatctgaaaaagaagctgaagcgcatgatttag

SEQ ID NO: 110703 - DNA, 570 bp, synthetic construct
  misc_feature 1..570: note = Description of Artificial Sequence: Synthetic coding sequence
  source 1..570: mol_type = other DNA
atgactgataaaaccgaaaaggttgctgtcgacccagagacagtgtttaagcggcctagagagtgcgactcaccaagctatcagaagagacaacgaatggccctgcttgcacggaaacagggcgctggggattccctaattgcaggtagcgctatgagtaaggccaaaaaactaatgactgggcacgccataccccctagccaattggattctcagatcgatgacttcacaggcttctcgaaagatagaatgatgcaaaaacccggttccaacgcccctgtgggaggcaacgttacctcctcattctctggagacgaccttgagtgccgggaaacggccagttcaccaaagtctcagcaagagattaacgcagacattaaacgaaaactcgtaaaggagctgcggtgcgttggccagaagtatgaaaagatctttgagatgctagaaggagtccagggacctacggctgtccgtaaacgcttctttgaatccatcatcaaagaagccgctcgctgcatgagacgtgattttgtgaagcacctgaagaagaaattgaaaaggatgatatag

SEQ ID NO: 110704 - DNA, 570 bp, synthetic construct
  misc_feature 1..570: note = Description of Artificial Sequence: Synthetic coding sequence
  source 1..570: mol_type = other DNA
atgaccgataagacagagaaagtcgccgtcgatccagagaccgttttcaagaggccaagagagtgcgactccccgtcatatcagaaacggcagagaatggccctgctggcccgcaagcagggcgccggagattccctgattgcaggttcagctatgagcaaagaaaagaagctgatgaccgggcacgccattccaccatcccagcttgattcgcagattgatgacttcactggcttctcaaaggatgggatgatgcagaagcctggaagtaacgctcccgtgggtggtaacgtcacgagtaacttctccggtgatgatctggaatgccggggcattgcatcatcacctaagagtcaacaggagatcaacgccgacataaaatgtcaggttgtgaaagaaatccgatgcttgggaaggaaatacgagaaaattttcgaaatgctggaaggcgtccaggggcctacagcagtgaggaaacggtttttcgagtcgatcattaaggaggcggcccggtgcatgaggcgcgatttcgtaaagcatctgaagaagaagcttaagcgcatgatatag

SEQ ID NO: 110705 - DNA, 570 bp, synthetic construct
  misc_feature 1..570: note = Description of Artificial Sequence: Synthetic coding sequence
  source 1..570: mol_type = other DNA
atgaccgacaagacagagaaagtggcagtagaccctgaaactgttttcaaacgcccgagggaatgtgacagcccttcctatcaaaagaggcaacggatggcccttcttgcaaggaaacagggcgcaggtgatagtttgattgctggaagtgctatgtcaaaagagaagaagctgatgacagggcatgctatccctccctcacaactcgattctcagatcgacgattttaccgggttcagcaaggatggcatgatgcaaaagcctggtagtaacgctcccgtcggaggcaacgttacctcgaatttttccggtgatgacctggagtgccgggggatcgcttctagtcccaaatcccaacaggaaataaatgcggacatcaagtgccaggttgtgaaggagatccggtgcctagggcgaaaatacgaaaagatattcgaaatgctcgagggcgtgcaggggcccaccgctgtgaggaaaaggttcttcgagtctatcatcaaagaggcagcccgttgcatgaggagggactttgtaaaacatttgaaaaagaagctcaagcgaatgatctag

SEQ ID NO: 110706 - DNA, 570 bp, synthetic construct
  misc_feature 1..570: note = Description of Artificial Sequence: Synthetic coding sequence
  source 1..570: mol_type = other DNA
atgactgacaagacagagaaagtggcagtcgatcccgagacagttttcaaacgtccccgagaatgtgacagtccgtcataccagaaaagacagcgcatggccttactggcccgcaaacagggcgccggtgacagcttaatcgctggaagcgcaatgtctaaggcgaaaaaacttatgaccgggcacgctatccctccatcccagctcgattcccagattgacgacttcacgggtttctctaaggacagaatgatgcagaagccaggttccaatgctcccgtggggggcaatgtcactagctctttcagcggagacgacttagagtgccgcgaaacagcctcttctcctaaatcacagcaggaaatcaatgccgacataaaacgcaaactcgttaaagagctacgctgtgtgggtcagaaatatgaaaagatctttgaaatgctagagggtgtgcagggaccaacggccgtacgaaaaagattttttgaaagcatcataaaagaagctgcacgttgcatgaggcgggacttcgtcaagcacctgaagaagaagctgaaaaggatgatttag

SEQ ID NO: 110707 - DNA, 570 bp, synthetic construct
  misc_feature 1..570: note = Description of Artificial Sequence: Synthetic coding sequence
  source 1..570: mol_type = other DNA
atgactgataaaactgagaaggtagcggtcgatcccgaaactgtgttcaaacgtccgcgggagtgtgattcaccatcttatcagaaacgccagaggatggcccttcttgctcgtaaacaaggtgctggcgatagcctcatagcaggcagcgcgatgagtaaagctaagaagctgatgaccggacatgccattcctccgagtcagctagacagccagatcgatgacttcaccggcttctcgaaagacagaatgatgcagaagcccggctctaatgctcctgtgggaggaaacgtgaccagtagcttctctggcgatgacttagaatgtcgcgaaacagcctcaagccctaagtcacagcaggagatcaatgcagatattaaacgcaaattggtcaaggagctcagatgtgtgggccagaagtacgagaagatattcgagatgttagagggagtgcaaggacccactgcagtcagaaaaaggttcttcgaatctattattaaggaagccgctcgatgtatgcgcagagacttcgttaaacatttaaagaaaaagctgaagcgtatgatttag

SEQ ID NO: 110708 - DNA, 867 bp, synthetic construct
  misc_feature 1..867: note = Description of Artificial Sequence: Synthetic coding sequence
  source 1..867: mol_type = other DNA
atgtccgctaccggagatcgccaccctacccagggcgaccaggaggctcccgtgtcccaagaaggcgcgcaggctgaggcagccggggctgggaatcaagagggtggggactctgggcccgattccagcgacgtggttccagccgccgaagtagtcggcgtcgccggtccggtggaagggctgggagaggaggagggggagcaggcagctggacttgcagccgtgcccaggggggggtcggcagaagaggactccgacattggacctgcaacagaggaagaggaggaggaggaaggtaatgaggcggctaatttcgacctagccgttgtagcccggcgctaccctgcttccggcatccactttgtgctcctggatatggtacattccctgttgcacaggttgtctcataatgatcacatcctcatcgagaaccggcagctgtctaggctgatggtgggtccccacgcggcggcaaggaatctttggggaaatctgcctccactgctcctgccacaaaggctgggagccggtgctgcggcaagagccggcgagggactagggttgattcaggaagccgctagcgtgcccgaacctgctgttccggcagatttggctgagatggcccgggaaccggccgaagaagcagcggaagagaaactcagcgaggaagccaccgaagagccggacgcagaggagccagctaccgaggagccaactgcgcaggaggccaccgcacccgaggaagtcaccaagtcccagcctgagaagtgggatgaggaagcccaggacgccgcgggggaagaggagaaagagcaagagaaggagaaggacgccgagaacaaagtaaagaatagcaagggaacatag

SEQ ID NO: 110709 - DNA, 867 bp, synthetic construct
  misc_feature 1..867: note = Description of Artificial Sequence: Synthetic coding sequence
  source 1..867: mol_type = other DNA
atgtctgcgaccggggacagacacccaacgcagggtgaccaggaagctcctgtgtctcaggagggcgcacaagccgaggccgctggagccggaaatcaggagggaggcgatagcgggcccgattcttctgatgtggtgcccgcagccgaagtcgttggtgtggccggtcctgttgagggcctaggtgaagaggagggtgaacaggcggcaggactggcggctgtgccgaggggaggtagtgcagaagaagattccgacattggtccggcaacggaggaagaagaggaggaggaaggtaacgaagccgccaattttgacctggcggttgttgctcggagataccccgcatcggggatacactttgtcctactcgatatggtccattcactccttcatcgactgagccataacgaccacattctcatcgagaataggcagctgtcacggctgatggtgggcccgcacgcagccgcccgaaacctgtggggaaacttaccccccctccttctgcctcagcgtctcggggcaggggcagcagctcgggcgggcgagggactgggtttaattcaagaggccgcgagcgttcccgaacctgcggtccccgccgatctagccgaaatggcacgagagcctgcagaggaagccgcagaggagaaactgagcgaggaagctactgaagaacctgacgcagaggagccagcgactgaggagcccaccgctcaggaagccactgcccctgaagaagtgaccaaaagtcaacccgaaaaatgggacgaagaggctcaggacgctgccggtgaggaagaaaaggaacaggagaaggagaaggatgccgaaaacaaggtgaaaaactccaagggcacatag

SEQ ID NO: 110710 - DNA, 867 bp, synthetic construct
  misc_feature 1..867: note = Description of Artificial Sequence: Synthetic coding sequence
  source 1..867: mol_type = other DNA
atgtctgccactggggaccgtcatcccacccagggggatcaagaggctcccgtgtcgcaagagggcgctcaggccgaggctgctggtgcaggaaaccaggagggcggggactccggtcccgactcgtctgatgttgtgcccgctgctgaagtagtcggcgtggctggccctgtagaggggctaggggaggaggaaggagagcaggcagccgggctcgccgcggttccccgcggaggctccgctgaggaggactcggatattgggcccgcaactgaggaagaggaggaagaagagggaaacgaggcggcgaactttgatctggccgtcgtcgccaggcggtacccggcttccgggatccacttcgtgctcctggacatggtgcattccctcctgcacagactgtcacataacgaccatatcttaatcgagaaccggcagctctcccgattaatggtagggccacatgcggcagcccggaatctgtggggaaacctccctcccttgctcctaccccagagactcggggccggagcagcagcccgagctggagagggtttaggacttattcaggaggccgcgtccgtgccagaacccgctgtgcccgccgacctggccgaaatggccagagaacccgctgaagaggcggcagaagagaagctctcggaggaggccacggaagagcccgacgccgaggagccagccactgaggaacccactgctcaagaggcaacggcgccagaggaggtgacaaaatcgcaaccagagaaatgggacgaagaggcccaggacgcagccggcgaagaggagaaagagcaggaaaaagagaaggatgctgagaacaaggtgaaaaacagcaagggcacttag

SEQ ID NO: 110711 - DNA, 867 bp, synthetic construct
  misc_feature 1..867: note = Description of Artificial Sequence: Synthetic coding sequence
  source 1..867: mol_type = other DNA
atgtccgctactggagatcgacatcccactcagggagatcaagaagccccagtcagtcaagaaggggctcaggcggaggcggcaggagctgggaaccaggaaggcggagattctggccccgactccagcgacgtcgtgcccgctgccgaagtggtgggcgttgccggcccggtggagggtctcggcgaggaagagggcgagcaggcggcaggtctggctgcggttccacggggagggagcgccgaggaggacagcgatatcggtccagccactgaagaagaagaggaagaggagggaaatgaagcggccaacttcgatctggccgtagtcgcacgtcgttaccctgcttccggcattcactttgtgttgttagacatggtccacagtctcctccaccgcttgtctcacaacgaccacatccttatcgaaaatcgtcagttgtctcgcctgatggtaggcccgcatgcagcggccaggaacctttggggtaacttgcccccgctcctgcttccacagagactgggagccggcgcagccgcccgtgcaggggagggcctgggactaatccaggaagcagcctctgtgccggaacccgccgtaccagctgacttggctgagatggcacgggagcccgctgaggaagctgccgaggaaaagctcagcgaggaggccaccgaggagccagatgccgaagagcctgctaccgaggaacccacagctcaggaggcgactgctcctgaagaggtgaccaaatcacaaccagagaaatgggatgaagaagcccaggatgcggccggagaagaagagaaagaacaggagaaggagaaggacgccgagaacaaagtcaagaatagcaagggaacttag

SEQ ID NO: 110712 - DNA, 867 bp, synthetic construct
  misc_feature 1..867: note = Description of Artificial Sequence: Synthetic coding sequence
  source 1..867: mol_type = other DNA
atgtctgcaaccggcgatagacaccccactcagggagaccaggaggctccagtgagccaggaaggagcccaggctgaggcagcgggggcaggtaatcaggagggcggggacagcggcccagattcgagcgacgtggtacctgcagctgaagtagtcggggtagcagggcctgtcgagggcctgggtgaggaggagggagagcaagctgcaggactcgcagccgttccacgcggcggttctgctgaagaggactcggatatcggtcccgccaccgaggaagaagaggaagaggaaggcaatgaagccgcaaacttcgatctggcagttgttgcgcgcaggtaccccgcatccggaattcactttgtgctccttgatatggttcatagcctcctacacaggttgagccacaatgaccacatcctgatcgagaatcgccagcttagtagattgatggtgggccctcatgccgctgcgcgcaatttatgggggaatttgccgcctcttctcctccctcagcggctgggcgccggagccgcagcaagagcaggtgaggggctcgggctgatccaggaagccgcgtctgtccctgaaccagccgtccctgctgacctggccgagatggctcgagagcccgccgaggaggcagccgaggaaaaactcagcgaggaagccaccgaggagcccgacgcagaagagcctgcaacagaagagccaacggctcaagaggctactgctcccgaagaggtgacgaaatcccaacctgaaaagtgggacgaggaggcacaggatgccgcaggggaagaggaaaaagagcaggagaaagagaaggacgcggagaacaaagtcaagaactcaaagggcacttag

SEQ ID NO: 110713 - DNA, 867 bp, synthetic construct
  misc_feature 1..867: note = Description of Artificial Sequence: Synthetic coding sequence
  source 1..867: mol_type = other DNA
atgagcgcaacaggggaccggcaccctacgcagggtgaccaggaggcgcccgtgtcgcaggagggcgcgcaggccgaggcagctggtgctggcaaccaggaagggggggattctggccctgactcaagtgatgtggtgccagccgctgaggtggtaggagtggccgggcctgtggaagggcttggcgaagaggagggcgaacaggctgctggcttggcagcagtgccaaggggcggcagcgctgaagaggacagcgacataggcccagccaccgaggaggaagaggaggaggagggcaacgaggccgcaaattttgaccttgccgtagtggcacggcgctatcccgcgagtggcattcacttcgtgctgttggacatggttcactccctcctccaccgactgagccacaatgaccacatactgatcgagaatcgccaactgagccgactgatggtgggcccccatgccgctgcgcgcaacctgtggggaaacttgcccccactgttgcttcctcaaagattaggggccggggctgcagccagagcgggcgaaggcctcggtctcattcaggaagctgcatccgtccccgagcctgcggtgccggcagacctggccgaaatggccagggaacccgcagaggaggcagcggaggaaaaactttctgaggaggccacagaggaacctgatgctgaggagcccgcgaccgaggagcctactgcccaggaagctaccgccccggaagaggtcactaagagccagcccgagaaatgggatgaggaggcccaagacgcggcaggcgaagaagagaaagaacaggagaaggagaaagatgccgagaacaaggtgaagaactctaaaggcacatag

SEQ ID NO: 110714 - DNA, 867 bp, synthetic construct
  misc_feature 1..867: note = Description of Artificial Sequence: Synthetic coding sequence
  source 1..867: mol_type = other DNA
atgagtgccacgggtgatagacacccgacacagggagaccaggaggctccagtttcacaagaaggagcacaagcggaggctgccggtgctgggaatcaggaggggggagattcggggcccgacagttccgacgtcgtgccagctgccgaggtcgtaggagtagccggcccagtggagggattgggcgaggaagagggcgaacaagccgctggactggctgccgtgcctcgtggaggctctgccgaagaggattccgacatcggaccggctaccgaagaggaggaggaggaagaaggtaatgaggctgcaaattttgacctggctgtcgtggcgagacgatatcctgccagcggcattcatttcgtcctgctcgatatggtacactccctcctgcaccgactgagccacaacgatcacatcctgatcgagaatagacagttatctcgccttatggtaggcccccatgctgctgccagaaatctatggggcaacctgccccctctgctgctgccacaacggctcggtgctggagctgctgcccgcgcgggcgagggcctgggattgatccaagaggccgcatccgtgccagaacccgcggtgccagccgacctagcagagatggccagggaacccgcggaagaggccgccgaggagaaacttagtgaggaagcaacggaagaacctgacgcagaggagccggccacggaggagccaactgcacaagaggcaaccgcgccagaggaagtgacaaagagccagccagagaagtgggacgaggaggcccaggatgcagcaggagaggaggagaaggaacaggagaaggagaaagacgctgagaataaagtgaagaatagcaaaggaacctag

SEQ ID NO: 110715 - DNA, 867 bp, synthetic construct
  misc_feature 1..867: note = Description of Artificial Sequence: Synthetic coding sequence
  source 1..867: mol_type = other DNA
atgagcgctacgggcgaccgccatccaacacagggcgatcaggaagcacccgtcagccaggagggagcacaagccgaggccgctggggccggcaaccaggaaggcggtgatagcggacctgattctagtgatgttgtccccgccgcggaggtggtgggagttgccgggcccgttgaaggattaggagaggaggagggggagcaggctgccggactggctgctgtgcccagggggggatccgctgaggaagacagcgacatcggaccagccaccgaagaagaggaagaagaagaaggaaacgaagcagccaactttgatcttgccgtggttgctcggagataccccgcctcagggatccacttcgtcctgttggatatggtacactccctcctgcatcgcttgtcccacaacgaccatattctcattgagaacaggcagctctccaggctcatggtcggcccccacgccgcggcccgcaacctttggggcaacctcccaccactcttgctgcctcagagactgggggccggagcagcagcgagggctggcgaaggactcgggttgatccaggaagcggcctctgttccagaacccgcggtgccagctgacctagcggagatggcaagggaaccagcagaggaggccgctgaagagaagttatcagaagaggccacagaagaaccggatgcagaggaacctgccactgaggagcccactgcccaggaagccacagcaccagaggaagtgactaaatcacagcctgagaaatgggacgaggaggcacaggacgccgcaggagaggaggagaaggagcaggagaaagaaaaggatgcggagaataaagtgaagaatagcaaggggacatag

SEQ ID NO: 110716 - DNA, 867 bp, synthetic construct
  misc_feature 1..867: note = Description of Artificial Sequence: Synthetic coding sequence
  source 1..867: mol_type = other DNA
atgtcagccactggagacagacacccaactcagggcgaccaggaggcgccagtgagccaagagggcgctcaagccgaggccgcaggcgccggtaatcaagagggtggagactcagggccagatagcagtgatgtagttcccgccgcagaggtggtcggagtggctggtcccgtagagggcttgggtgaagaagagggggagcaggctgcagggctggccgctgtgccaagaggcggctccgcggaggaagacagtgacataggaccagccactgaagaggaggaggaggaagaaggcaacgaagcagctaattttgacctggcagtggtcgcccggcgctatcccgcatcaggtatccatttcgtgttgctcgacatggtacactctctgctacatagactttcacacaacgaccacatattaatcgagaacaggcagctgtctcgactgatggtggggccgcatgccgcggcacgtaacctgtggggcaatctgccgcctttgctgcttccacagagactgggggcaggagctgctgccagagcgggggagggtttaggtctgatccaggaggccgctagcgtgccagaaccagctgtgccggccgatctggctgagatggccagggaacccgccgaggaggccgctgaagaaaagctaagtgaggaggcgaccgaggaaccagacgcagaggaaccagctaccgaagaaccgactgctcaggaggccacagccccagaggaggtgactaagagtcagccagaaaaatgggacgaggaggcacaggatgccgccggcgaggaggagaaggaacaggagaaagaaaaggacgcggagaacaaggtaaagaatagtaagggtacctag

SEQ ID NO: 110717 - DNA, 867 bp, synthetic construct
  misc_feature 1..867: note = Description of Artificial Sequence: Synthetic coding sequence
  source 1..867: mol_type = other DNA
atgtcggctacgggagaccgccatcctactcaaggtgaccaggaagccccagtctcccaagagggagcacaggccgaggcagccggcgccggaaatcaggaggggggcgactcagggccggatagttcagacgtagtgccggccgctgaggtcgtgggggtggcaggtcctgttgagggcctgggtgaagaagaaggggagcaggccgctggtctggctgctgttcccagaggtgggtctgccgaggaggacagtgatattggccccgcgacggaagaggaggaagaggaagaagggaacgaggccgctaatttcgacctcgcagtcgtggctcggagatatcctgcttcaggtattcacttcgttttgcttgatatggtgcacagcctgctccatagactcagtcataacgatcacatccttatcgagaatagacagttgagtcgattgatggtgggaccccacgcagccgcccgaaatctttggggcaacctccctcccctcttactgccacagaggcttggtgctggggcagctgctcgcgccggagaagggctgggcctgatccaagaagccgcctcagtccctgagcctgccgtgcctgcagatttagcggagatggcaagggagcccgccgaggaggctgctgaggagaaattatccgaggaggccacggaagagccagatgcagaggagcctgcaactgaggagcctaccgctcaggaggcaactgcccccgaagaagtaacaaagagccagcctgagaagtgggatgaggaagctcaggatgcggcgggagaggaggaaaaggagcaagagaaagagaaagatgcagagaacaaagtgaaaaactccaagggcacgtag

SEQ ID NO: 110718 - DNA, 867 bp, synthetic construct
  misc_feature 1..867: note = Description of Artificial Sequence: Synthetic coding sequence
  source 1..867: mol_type = other DNA
atgtcagcgaccggggataggcaccccacacagggagaccaagaggcaccggtcagccaggagggtgcccaggctgaggccgctggagctgggaaccaagaaggcggagacagtgggccggactcctccgacgtggtcccagccgctgaagttgtaggcgttgcaggtcctgtggagggactcggggaggaggagggcgagcaagcggccgggctcgccgccgtgcctaggggcggctcagcagaagaagactcagacatcggtccagctacagaggaagaggaggaggaagaaggtaatgaggcggctaacttcgatctcgctgtggtggctcgccgatatcctgcttcaggaatccattttgtgctactggacatggtgcattctctcttacaccggctctcccacaatgatcacattttgatcgagaaccgtcaactgagcagactgatggtggggccccacgccgctgcacgcaatctgtgggggaacctacctcctcttctcctccctcagagactgggagcgggcgcagctgcgagagccggagaggggcttggactcatacaggaggcggcctccgtcccggagccagctgtgccggcagatctcgcagaaatggcccgcgaaccagcggaagaggcagctgaagagaagctgtcagaggaggctaccgaggagcctgatgcagaggaacccgcaacagaagagcctaccgctcaggaggcgaccgcaccagaagaggtaactaaaagccagcccgagaagtgggacgaggaggcgcaggacgctgccggagaggaagaaaaggagcaagaaaaagagaaagacgccgagaacaaggtcaagaactcaaaaggaacttag

SEQ ID NO: 110719 - DNA, 867 bp, synthetic construct
  misc_feature 1..867: note = Description of Artificial Sequence: Synthetic coding sequence
  source 1..867: mol_type = other DNA
atgtctgccacaggggatcgccatcctacgcagggtgatcaggaagccccagtttcccaagagggcgcccaggccgaggccgctggcgctggcaatcaagagggcggcgactctgggcctgactctagcgatgtggtcccagcagctgaggtggtgggcgtggctgggccagttgaaggcctgggagaggaagagggcgagcaggcagcaggcctcgccgctgtacccagaggagggtccgctgaagaagactcagacatcggaccggctactgaggaagaggaagaagaggaagggaatgaggcagcgaacttcgatctggccgttgtggcccggaggtatccagcgagtgggatacactttgtgttactggacatggttcactcccttttgcaccggctcagtcacaatgatcatattcttattgaaaacagacagttgtcacggctgatggtgggcccgcacgcagcagcaagaaatctttgggggaacttgcctccactgctgcttccccaacggctcggcgctggcgcagcagctagggccggagagggactgggacttatccaagaagccgcatctgtacccgaacctgcagtgccagcagaccttgctgaaatggctagagaacctgccgaagaggccgccgaggaaaaactctcagaagaggcgaccgaagaacctgacgccgaggagcccgcaacggaggagccgaccgctcaggaggccacggcccctgaagaggtaaccaaatcccagccagaaaaatgggatgaagaggcccaggacgccgccggtgaagaagagaaagagcaggagaaagagaaggacgctgaaaacaaagtgaaaaattccaagggaacatag

SEQ ID NO: 110720 - DNA, 867 bp, synthetic construct
  misc_feature 1..867: note = Description of Artificial Sequence: Synthetic coding sequence
  source 1..867: mol_type = other DNA
atgagcgccacaggcgatcgacacccgactcagggagatcaagaggcccctgtgagtcaagaaggcgcacaggctgaagcagccggggcaggcaatcaggaagggggggacagtgggccggactcatctgatgtagtgccagcggccgaggtggtgggggtggctggacctgtggaaggcctcggggaggaagagggtgagcaagccgccgggctggccgcagtgcccagaggtggaagtgccgaggaagactccgatattggtccagccaccgaggaggaagaggaagaggaaggcaacgaggctgccaactttgacttggccgtagtcgctcgtaggtatcccgccagcggcattcacttcgttctgctggacatggtacactccctactccatcggttgtcccataatgaccacatcctgattgagaacagacaactttcccgattgatggtcggaccccatgcagccgcccggaacctttgggggaacttgcctcctcttcttctaccccagcgtttgggtgccggagctgcggcgcgcgctggggagggtctggggctgattcaggaagccgctagcgtacctgagccagccgtcccagctgatctggcagaaatggcccgagagccagctgaggaagccgccgaagagaaactgtccgaggaggccacggaagagcccgatgccgaggagcccgcgaccgaggaaccaactgctcaagaggcaaccgcccctgaggaggtgacaaaatctcagcctgaaaaatgggatgaagaagctcaggatgccgctggcgaggaggaaaaggaacaggagaaagagaaggacgccgagaataaagtgaagaactctaaaggcacatag

SEQ ID NO: 110721 - DNA, 867 bp, synthetic construct
  misc_feature 1..867: note = Description of Artificial Sequence: Synthetic coding sequence
  source 1..867: mol_type = other DNA
atgtccgccactggtgacagacaccccacccagggggaccaggaggcaccagtgagtcaggagggagcacaggccgaagcagccggagccggaaatcaagaaggcggggacagcggtcctgactcatcagatgtggtgcctgctgcagaagtcgtgggggtggccggtccagtggagggcctcggggaggaagagggtgaacaggccgcaggcttagcagctgtgcccaggggagggtcagccgaggaagactcggatataggacctgccaccgaggaggaggaggaggaggagggcaatgaggcagccaacttcgatctggccgtcgtggcccgccgatatcccgcctctggcatacacttcgttcttctcgatatggtccatagcttgttacatcgcctgagccacaacgaccacatcctgattgaaaatcgccagctgtccagacttatggtaggccctcatgcggcagcccgaaacttgtggggaaacctgcctcctttactcctcccgcagagacttggagccggcgccgctgcacgggcaggcgaggggcttggtctcatccaagaggcggctagcgtgccagagcccgctgtgcccgccgacctggctgagatggcaagagagcctgctgaggaagccgctgaggagaagctgtcggaggaagccaccgaagaacccgatgctgaggagcccgccacggaggaacctaccgcccaggaggctacagctccagaggaagtgaccaagtcgcagccagaaaagtgggacgaagaagcgcaggacgccgcaggggaggaagaaaaggagcaggaaaaggagaaggatgctgagaataaggtgaaaaattccaaaggcacatag

SEQ ID NO: 110722 - DNA, 900 bp, synthetic construct
  misc_feature 1..900: note = Description of Artificial Sequence: Synthetic coding sequence
  source 1..900: mol_type = other DNA
atgtcagcgacaggcgacaggcacccaactcaaggagaccaagaggctccagtaagtcaggaaggggcgcaagctgaggctgctggtgccgggaatcaggaaggcggggacagcggtcccgattcatccgacatggtccccgccgctgaggtggtcggggtggctggccctgttgaaggactaggggaagaagagggtgagcaggccgcagggctcgctgcagtaccacaggggggcagtgcagaagaagattccgatatcggcccagctacggaggaagaggaggaggaagaggagggcaacgaagctgctaactttgacttagcggtggcaacacggcgataccccgctgctggtattggctttgtatttttatacctcgtgcacagcctgctcagaagactctaccataacgatcatatccagatagccaaccgccatctgagtagactcatggtcggcccccacgctgctgtcccaaacctgtgggataatccccctctgctgctcttaagccaacgcttaggtgcaggcgccgccgcacctgagggcgagggccttggactaatccaggaggccgcatcagtacaggaagctgccagcgtgccggaaccggccgtgcccgctgacctggccgagatggccagagagcccgcagaagaggccgccgacgagaagcctcccgaagaggctgccgaggaaaaattgacggaggaggcaacagaggagccggctgctgaggagcccacctctgaggaggccgtcgcccctgaggaggtgactaagtcccagccggagaagtgggacgaagaggcccaggacgcagccggcgaggaggagaaggaacaggagaaggagaaggacgtcgagaacaaggtgaaaaacagcaagggaacctag

SEQ ID NO: 110723 - DNA, 1419 bp, synthetic construct
  misc_feature 1..1419: note = Description of Artificial Sequence: Synthetic coding sequence
  source 1..1419: mol_type = other DNA
atgaagtctatcctcgatggcctggccgatactacctttaggactataacaaccgacttgctgtacgtcggatctaatgatatccaatatgaagacatcaagggggatatggcaagcaaactaggatacttcccccagaaatttccactgacatcctttagaggatctccgttccaggaaaagatgactgctggcgataaccctcagctcgtgcctgctgaccaggtgaatatcaccgaattttataataagagcctgtcctcttttaaagagaacgaagagaatattcaatgcggggagaattttatggacattgagtgcttcatggtgctaaacccctcacaacagctcgctatcgccgtgctaagtctgacactgggtacattcacagtgctggagaacctgctggtgttgtgcgtgatccttcactctcgaagtctgcggtgccgaccgtcttatcacttcatcggctccttggcggttgcggatttattggggtcggtaatttttgtctattcctttatcgatttccatgtcttccaccgcaaggactcccggaatgtgttcctcttcaaactgggaggcgtgaccgcctctttcacagcctcagtaggcagcctttttcttacggctatcgaccgctatatttcaatccaccggccgcttgcctataagaggatcgtgacccggccaaaagctgtggtagcattttgcctcatgtggaccattgctatcgtgattgccgtcttacccctgctggggtggaattgcgaaaaactacagtcagtctgctcagacatctttcctcacattgatgagacatacctgatgttctggattggcgtgacctctgtgttgctactgtttattgtttacgcttatatgtatatcttgtggaaggctcacagccatgcagtgaggatgattcagcgtggaacccagaagtccatcatcattcatacgagcgaagatggaaaggtccaggtgactaggccggaccaggcaaggatggatatccgactcgccaaaacactagtactgattctggtcgtgctaatcatatgttggggaccactgctggcgatcatggtctatgatgtgtttggtaaaatgaataagttgatcaagaccgtctttgccttctgtagcatgctgtgcctgctgaacagcacagtcaatcccatcatctatgcccttaggtcaaaagacctgagacacgcatttcgctctatgtttccatcatgcgaagggactgctcagccgcttgacaattctatgggcgactccgattgtctgcacaagcatgctaataatgccgcatctgtgcatagggctgcggagagctgcatcaagagcaccgtcaagatcgcaaaggtgaccatgtccgttagcaccgacacctccgctgaagctctgtag

SEQ ID NO: 110724 - DNA, 1419 bp, synthetic construct
  misc_feature 1..1419: note = Description of Artificial Sequence: Synthetic coding sequence
  source 1..1419: mol_type = other DNA
atgaaatcaattctggacggccttgctgatacaacttttcgcacaattaccaccgacctgttgtacgtgggcagtaacgatattcaatacgaggatatcaaaggcgatatggctagcaagctgggctatttccctcaaaagtttcctctgacctcctttcgcggatcaccatttcaagaaaagatgactgctggtgacaacccacagctggtgccagctgaccaagtgaatatcacggaattctataataagtcgctgtctagtttcaaggagaatgaggaaaacattcagtgtggagagaactttatggatattgaatgctttatggttctgaaccccagccagcagctagccatcgctgtcctgtctcttacgctggggacctttactgtactggagaatctcttggtcctctgtgtgatcctccattcacgctcactccggtgcagaccttcataccactttattgggagcctggctgtggctgacttattgggaagcgtaatcttcgtgtactcatttatagattttcacgtgtttcacaggaaagactccagaaatgtgtttctgttcaaactgggtggtgttacggcgtcattcaccgcaagtgtgggtagcctgtttctcacggccatcgaccgctatatctctatacacaggcccctcgcatataaacggatagttaccagaccaaaggccgttgtagcgttttgcctgatgtggacaatcgcaatagtgattgcggtgctgcctttgctcggctggaactgcgagaagctccaatccgtgtgtagcgatatcttcccccatatagatgagacttacctcatgttttggataggcgtgaccagtgtgcttctcttatttattgtctacgcttacatgtacatactatggaaggctcattcccatgccgtgagaatgatccaacggggaacacaaaagtcaatcatcattcacacctctgaggatggcaaagtgcaagtcacccggcctgaccaggccaggatggacatcaggctcgccaagacgctcgtgctgatcctcgttgtcctgattatttgttggggacctcttctggccatcatggtgtatgacgtcttcgggaaaatgaataaactgatcaagacggtgttcgccttttgctcaatgctgtgcctgttaaactcgacggtcaaccccatcatatatgccttgagatctaaagacctacgccacgcatttcggagcatgtttccctcttgtgaaggcaccgcccaacctctcgataattccatgggggactccgactgtctgcacaaacacgccaacaatgctgctagcgtgcatcgcgcggcagaatcatgcataaagagcaccgtcaagatcgcaaaggtgaccatgtcagtgagcaccgacacatctgcagaagctttatag

SEQ ID NO: 110725 - DNA, 1419 bp, synthetic construct
  misc_feature 1..1419: note = Description of Artificial Sequence: Synthetic coding sequence
  source 1..1419: mol_type = other DNA
atgaagagcatccttgatggcctagcagacactactttcagaacaatcacaactgatcttctctacgttggttctaatgatattcagtacgaggacattaagggggacatggcctcaaagcttggctatttcccccaaaagttccccctgacgtctttccgcgggtctcctttccaggaaaagatgacagcaggggacaacccacaactcgtcccggcagaccaagttaatatcactgagttctacaataagagcctctcttcattcaaagagaacgaagaaaatattcagtgcggagagaactttatggacatagagtgtttcatggtcctcaatccttcacagcaattggctattgccgtgctttcattgactctgggtacgtttacagtgttagagaatttgctggtgctgtgtgttatactacactccagaagtttgcgatgtcgaccctcttatcactttattggctctctcgctgtggccgacttattgggcagtgttatttttgtatattcattcattgatttccacgtgttccacaggaaggattcccgaaacgtgtttctgtttaagctgggaggagtgacggcatccttcacagctagcgtgggctctttgttcctaaccgccatcgaccggtatattagcatacaccggcctctggcctataagaggatcgttacacggcccaaggcagttgtcgccttctgtttgatgtggaccatagcgattgtgattgccgtgctgcctcttctggggtggaattgcgaaaaactacagagcgtgtgcagcgatatcttcccccacatcgatgaaacttatctaatgttttggatcggcgtgacatccgtgttgctgctgttcattgtgtacgcgtacatgtatattttgtggaaggctcatagccacgctgtacggatgatccagcgcgggactcagaaatctatcatcattcatacttctgaagacgggaaagtgcaggttacgagacctgatcaggctcggatggatatacgcctggccaagactcttgtcttgattcttgttgtgctgatcatctgctggggacccctgttggctatcatggtctacgatgtgttcgggaagatgaacaagctcattaagaccgtttttgcattctgtagtatgctatgcctgctgaattcaacagtcaatccaattatctacgctctacgaagcaaggatctgaggcacgccttccgatctatgtttcccagctgcgagggcacggcacagcccctcgacaacagtatgggtgactcagattgcctgcataaacacgcaaataatgccgcaagcgtgcatagagcagccgagtcatgcattaagtccaccgtcaagatcgctaaagtcactatgagcgtgagcacagacacatcagcagaggcgttgtag

SEQ ID NO: 110726 - DNA, 1320 bp, synthetic construct
  misc_feature 1..1320: note = Description of Artificial Sequence: Synthetic coding sequence
  source 1..1320: mol_type = other DNA
atgaagtccatcttggacggcctcgctgacacaaccttccgtaccattaccacagacctgcttggaagtccttttcaagagaagatgaccgccggtgacaatccccagctggtcccagctgaccaggtgaatatcactgagttctataacaagagtctgagttcctttaaggagaacgaggagaacatccagtgtggggaaaacttcatggatatcgaatgctttatggtactcaatccctctcagcagttggccatagccgtcctttccctgaccctgggaacattcacagtgctggaaaacctgctggtactgtgtgtgatactgcacagccgcagcttgaggtgcagacccagctaccacttcattggcagcctggccgtagctgatctgctgggcagtgtaattttcgtgtatagcttcatcgatttccacgttttccacagaaaggactcccggaatgtgttcctgttcaaactcgggggcgtgacagcgtcttttacagccagcgtgggtagcctcttcctcacagccattgatagatacatcagcatccatcggccactggcatacaagcgcattgtgacccgtccaaaggcggtggtggccttctgtctgatgtggacaattgccattgttattgccgtgctgccactgctcggctggaattgcgaaaagttgcaatcagtttgctcagacatcttcccccatatcgacgaaacatatcttatgttctggatcggggtgaccagcgtgctcctcttgttcatcgtctatgcctatatgtatattctctggaaggctcacagccatgctgtccgcatgattcaacgcgggacccaaaaaagcataatcatccacaccagtgaggatggcaaagtgcaggttacccggcctgatcaggcccgcatggatatccggttagccaagactctggtccttatcctggtggttctgattatttgctggggacccctgctggccatcatggtgtacgacgtctttggaaagatgaacaagctcattaaaaccgtgttcgccttctgctccatgctgtgcttgctcaattcaactgttaacccgatcatctacgccttaagatcaaaagatctgcgtcatgcctttaggagcatgtttccctcgtgtgagggtaccgcccagcccctggacaactctatgggagacagtgattgtctccataagcacgcgaacaatgccgccagtgtgcatagagccgccgagtcatgcatcaagagcacggtcaagatagctaaggtaactatgagtgtctccactgatactagtgccgaggccctgtag

SEQ ID NO: 110727 - DNA, 1419 bp, synthetic construct
  misc_feature 1..1419: note = Description of Artificial Sequence: Synthetic coding sequence
  source 1..1419: mol_type = other DNA
atgaagtccattctggatggcctcgctgacaccacgtttcggacaattactacggaccttctctatgtgggctccaacgatatccagtatgaggatattaagggcgacatggctagcaagctgggctactttcctcagaaattcccactgaccagttttcggggtagcccatttcaggagaagatgacggctggcgataatcctcaactagtaccagctgaccaagtgaatatcactgaattttacaataaatctcttagcagctttaaggagaatgaagaaaacatacagtgcggggaaaattttatggacattgagtgtttcatggttttgaacccttcacagcagcttgcaatcgcagtgttgagcctgaccctcggaactttcacagtgctggagaacttactagtgctatgcgttattctgcattcaaggtccctgcgctgcagaccctcctaccatttcattggcagcctggcagttgcagatctcctgggtagcgtaatttttgtgtactcttttatcgatttccatgtctttcacaggaaagattccaggaatgtattcctgtttaagctgggtggagtaaccgcttcttttaccgcttccgttggttctctatttctaactgccatagacagatacatatctatccaccgcccgctagcctacaagagaattgtcacacggcccaaggctgtcgtggcattttgtcttatgtggacgattgccattgtgatagccgtcctccctctgctgggctggaactgtgaaaagctccagtctgtctgctctgatatctttccacacatagacgagacttatctcatgttctggattggagtgacctccgtcctgctcttgtttattgtgtatgcttatatgtatattctgtggaaggctcactcacacgctgttaggatgattcagagaggcactcagaagtccatcattatacatactagcgaggacggaaaagtccaagtgactaggcctgatcaggcccgcatggacattcggctggcgaagacgctggtccttatcctggtagtattgataatctgctgggggccccttttggcgatcatggtctatgatgtgtttgggaaaatgaacaaactaatcaagacagtgtttgctttctgtagtatgctatgtctgcttaactccacagtcaatcccatcatttacgctctgcgcagcaaagatttgagacacgctttccgttcaatgttcccgtcgtgtgagggcacggcccagcctttagacaattcaatgggggacagtgactgtttgcataaacatgccaataacgcagcgtcagtgcatagagcggccgaatcctgtatcaagagcactgtgaagatcgctaaggtgacaatgtctgttagtaccgatacctcggctgaagccctgtag

SEQ ID NO: 110728 - DNA, 1419 bp, synthetic construct
  misc_feature 1..1419: note = Description of Artificial Sequence: Synthetic coding sequence
  source 1..1419: mol_type = other DNA
atgaaatccatcttggatggccttgctgatacaaccttcaggaccatcacaaccgacctgctatatgtgggatctaacgatatccagtatgaagatattaagggggacatggcctctaaactaggatattttccccaaaaattcccgcttacctccttccgcgggagtccatttcaagaaaaaatgactgctggcgacaaccctcagctggtgccggctgatcaggtcaacatcacagagttttataataaaagcctgtccagctttaaggagaacgaggaaaacatccagtgcggcgagaacttcatggatatcgaatgcttcatggtgttgaacccatcacaacagctggcaatcgccgttctttcccttacgctgggcaccttcactgtgttggagaacttgctggtcctctgtgtgatcctgcacagtcgtagccttcgctgtcgaccttcctatcattttatcggcagcctagcagtagcagatctgctgggctccgtgatattcgtctactcatttatcgacttccatgtattccatcggaaggacagccgaaacgtgttcctctttaaactgggaggagtgactgcctctttcacagcaagcgtcggctcactctttctcaccgcgatagacagatatatcagcatccaccggcctctggcttacaagcgtattgtgaccagacccaaggctgtggtcgctttttgccttatgtggactatcgctattgtgattgccgtactaccactcctgggatggaattgtgagaagctgcaaagcgtttgcagtgatatatttccccatattgatgaaacttatctcatgttctggatcggagtgacctccgttctgctgctgttcatcgtttatgcctacatgtacattctctggaaggcccattcccacgccgtacggatgatccaacggggtacccagaagtccattattatccacactagcgaagatggaaaagtccaggtgacacgccctgaccaggcgcgaatggatatccgtctggcaaagactcttgtgcttatcctagtggtgcttattatttgttgggggcctttgttggccataatggtgtacgatgtcttcgggaagatgaataagctgatcaagacagtgttcgctttctgttcaatgctctgtctcctgaatagcacggtgaatcccataatttatgcgctcagaagcaaggatctgcggcacgcttttaggtcaatgtttccaagctgcgagggcaccgcccagccactcgataatagcatgggcgactccgactgcctccacaaacatgcaaataatgccgccagcgttcaccgagcagctgagagttgtattaagtcgactgtgaagattgcaaaggtcacaatgtctgtgagtacggacacctccgcagaagcgctgtag

SEQ ID NO: 110729 - DNA, 1236 bp, synthetic construct
  misc_feature 1..1236: note = Description of Artificial Sequence: Synthetic coding sequence
  source 1..1236: mol_type = other DNA
atggcactgcagattccgccgtccgcaccgagcccgctgacaagctgtacatgggcccagatgaccttcagcactaagacttcaaaggaaaatgaagagaacatccagtgtggcgagaattttatggacatcgaatgcttcatggtcctgaacccttctcaacagctcgccatcgccgtcttgtccctgactctgggaacatttacggtcctagaaaatctgctggtgctttgtgtaattctacacagcaggtcattgaggtgtaggcccagctatcacttcatcgggagcctggccgtcgctgatctcctcggctcggtaatcttcgtctatagtttcatagacttccatgttttccaccgcaaggattcacgcaatgtgtttttatttaaattaggcggcgttacagcttcattcactgcaagtgtcgggtccctgtttctaacagccattgatcgctatattagtattcaccggccactggcatataaacgtatcgtgacccgccccaaggcagtggtggcattctgtttgatgtggaccatagccatcgtcatcgctgttctgccattgctcggatggaactgcgaaaagcttcagagcgtttgcagtgatatcttcccccatattgacgagacctatctcatgttctggatcggggtgacatcagttctgctgctgttcatcgtatacgcttatatgtacatcctgtggaaggcccactctcatgctgttcggatgatccaaagaggcactcagaagtccatcataatacatacttccgaggacgggaaggtccaggtcacccgaccagaccaagctaggatggatatcagactggctaaaaccctggttctgatcctggtggtgctgatcatttgctgggggcctttactggcaatcatggtctacgatgtgttcggaaagatgaacaagctgatcaagactgtcttcgccttctgttccatgctatgtctgcttaactctaccgtcaatcctatcatttatgcactgcgctcaaaagatctccggcatgctttccgatcgatgttcccctcctgtgaagggaccgcacagccactggacaattctatgggagatagcgactgcctccacaaacatgccaacaacgctgcctcggtgcatagggctgcggagtcttgcataaaaagtaccgtgaagattgcgaaagtgacgatgtctgtcagcacagacacgtctgctgaagcattgtag

SEQ ID NO: 110730 - DNA, 1419 bp, synthetic construct
  misc_feature 1..1419: note = Description of Artificial Sequence: Synthetic coding sequence
  source 1..1419: mol_type = other DNA
atgaagagcatcctggacgggctcgcggatacaacctttagaactatcaccacagatcttctctatgtcggatcaaacgacattcaatacgaagacatcaagggtgacatggcaagcaaactgggctacttcccccagaaattcccgctcacctctttccgcgggtccccatttcaggagaaaatgaccgccggcgacaacccacagctggttcccgcagatcaggtgaatattactgagttttacaataaatccctcagttcctttaaagagaatgaggaaaatatccagtgcggtgaaaactttatggacattgaatgttttatggtgcttaatccatcacaacagctggctatagctgtgctttcactaaccctcggcactttcacggtgctggaaaacctcctagttctctgtgtcatcttacactcacggagtctgaggtgcagaccctcttaccattttattggctccctcgcagttgctgatctgctaggatctgtgatctttgtttactcattcatcgatttccacgtctttcatagaaaggactcacgaaacgtgtttctgttcaagctaggcggcgtgacggcttcgttcaccgcaagtgttggctcactcttcctgaccgcaatagaccggtatattagtatccacaggccccttgcatacaaacgcattgtgactcggccaaaggcggtggttgcattttgccttatgtggaccatagctattgttattgccgtattgcccttgttgggttggaattgtgagaagcttcaatccgtttgcagcgacatattcccgcacatcgacgaaacatatcttatgttctggatcggcgtcacctctgttcttttactatttattgtgtatgcatacatgtatattctgtggaaggcacatagtcacgccgtgcgaatgattcaacgaggtacccagaaatcaatcatcatacatacttcggaggacggaaaggttcaagtgactaggccagatcaagcgcggatggacatacgattggcgaaaacactggtgctcattttggtggtcctcataatatgttgggggccattactcgccatcatggtgtatgacgtcttcggtaagatgaacaaactgataaagactgtgttcgctttctgctccatgctgtgcctgctcaattccacagtgaatccgattatatacgccctgaggtcaaaggatctacgccacgcttttcgttctatgttcccttcttgtgaaggaacggcgcagcccctggacaattcaatgggcgattctgattgtctacataagcacgccaataatgcagcttcagtccatagagccgctgagagttgtatcaagtccacggtcaagattgccaaggtcaccatgagcgtaagcacggacacaagtgcagaggccttgtag

SEQ ID NO: 110731 - DNA, 237 bp, synthetic construct
  misc_feature 1..237: note = Description of Artificial Sequence: Synthetic coding sequence
  source 1..237: mol_type = other DNA
atgaagtcgatcctcgatggactggctgacacaaccttccgtaccatcaccactgatctgctgtacgtgggcagcaacgacatccaatacgaggacattaagggcgatatggccagcaagctgggttactttcctcagaaatttcctttaacaagcttccggggaagtccttttcaggagaaaatgacagctggcgacaacccacagttagtcccagctgatcaggtgaacatctag

SEQ ID NO: 110732 - DNA, 1083 bp, synthetic construct
  misc_feature 1..1083: note = Description of Artificial Sequence: Synthetic coding sequence
  source 1..1083: mol_type = other DNA
atggaggaatgttgggtgacagagattgccaatggtagcaaagacggcttagatagtaatccaatgaaagactacatgatactcagcggtcctcaaaagactgccgtggctgtgctttgcacattgttaggactactctctgctcttgagaacgtggctgtcctttacctcattctctcttcgcaccaacttcggcggaaaccatcctacctcttcatcggaagtctagcaggcgccgacttcctggcctccgtcgtctttgcttgttcttttgtcaactttcacgtcttccacggagtcgactccaaagccgttttcctactgaagatcggctctgtcaccatgaccttcaccgcttctgtggggagcttgttgctcaccgctattgataggtatttgtgcctgagatatccgccttcctataaggctctgcttactcggggcagggcattagtgaccctgggaatcatgtgggtactgagtgccctcgtgtcatatcttcctctgatggggtggacgtgctgtccacggccctgctctgagctgttcccccttatacctaatgattacctgctgtcttggctgctctttattgccttcctgtttagcggaatcatttacacttacgggcatgttctttggaaggcccaccagcacgttgcatcattatccggacaccaggatagacaggtacccgggatggcacgtatgcgcctggatgtgagattagccaagacacttggtttggttttggcagtgctgcttatttgctggtttcccgtcctcgcattgatggcccactccttggccactacacttagtgatcaagtgaaaaaagcctttgccttctgctccatgctgtgtctcattaattcaatggtaaatcccgtcatatatgcactgagaagcggagagatcaggtcttccgcacaccactgccttgcccactggaagaagtgcgtgcgcggtctgggtagtgaagccaaggaagaggccccgcgttcgtccgtaacagagactgaggctgacggcaaaatcactccctggcccgacagtcgggacctggacctgagcgattgttag

SEQ ID NO: 110733 - DNA, 1083 bp, synthetic construct
  misc_feature 1..1083: note = Description of Artificial Sequence: Synthetic coding sequence
  source 1..1083: mol_type = other DNA
atggaggaatgttgggtcaccgagattgccaacggatcgaaggatgggctcgacagtaaccctatgaaagactacatgattttgtccggtccccagaaaacagctgttgccgtcctctgtaccctgctaggcttgctctccgcccttgaaaatgtagccgtactgtacctgatcttgtcgagtcatcaactcaggcggaaacctagttatctgttcatcgggtctttggcaggggccgattttttagcctccgtagtatttgcatgcagcttcgttaacttccatgtctttcatggcgtggacagcaaggctgtctttctgctgaagatcggatccgtgactatgacattcactgcctctgtgggctccctgctgctgaccgcgattgacagatatttatgtcttaggtaccctccaagctataaagctctgttaactagaggccgggcgctagttacgctcggcatcatgtgggtcctttcggccctggtgagttatctccctcttatgggatggacttgttgcccgcggccgtgctcagaactcttcccgcttataccaaacgattatctgctctcctggctactatttatcgcattcctattcagcggcatcatctatacttatggacacgtcctctggaaggcacatcaacacgtggctagcctgagcggccatcaggacagacaagtgcctgggatggcccgcatgcgcttagacgtccgcttagccaagaccctgggactggtgttggctgtcttactgatatgctggttccctgtgctcgccctcatggcacacagcctggccacgactttgagtgatcaggtcaagaaggcctttgctttctgctctatgctatgcctgatcaactcaatggtcaacccagtcatatatgctctccgcagcggcgagattcgcagctccgcccatcactgtctggctcattggaagaaatgcgtgcggggccttggcagcgaagcaaaggaggaagcacctcgctctagcgtcacagagacagaagcagacggaaagatcacaccctggcccgattcccgggatctggacctcagtgattgttag

SEQ ID NO: 110734 - DNA, 837 bp, synthetic construct
  misc_feature 1..837: note = Description of Artificial Sequence: Synthetic coding sequence
  source 1..837: mol_type = other DNA
atggatagcatgcctgagccggccagtcggtgccttctcttactgccactgctgctactcttactcctcctgctgcctgccccagaactcggtccaagccaggccggcgctgaggaaaatgactgggtgcgtctcccaagtaagtgtgaagtctgcaagtacgtggcggtggagctgaagagcgccttcgaagaaactgggaagacaaaggaggtgatcggcacaggctacggcattctggatcagaaggctagtggtgtgaagtacaccaaaagcgaccttcgattgatcgaggttacagagacgatatgtaagagactgctagactactcgctgcacaaagagcggaccggttcgaacagatttgctaaaggcatgtcagagacgttcgagacgctacacaatttggtgcacaaaggcgtgaaagttgtgatggacattccatacgagctgtggaacgagacatctgctgaggttgcagaccttaagaagcaatgcgatgttctcgtagaggaattcgaggaggtcatcgaggactggtaccgaaatcatcaagaggaggacctcactgaattcctgtgcgccaaccacgtcctcaaagggaaggacactagctgcttagctgagcagtggagcgggaagaagggggataccgccgccctgggagggaagaaatccaaaaaaaaatcctctagggccaaggccgctggggggagatcttcttcatccaaacagagaaaggaactcggaggcctggaaggagacccctccccagaagaggatgaaggcattcagaaagcaagccctctgacccattcacctcctgacgaattgtag

SEQ ID NO: 110735 - DNA, 165 bp, synthetic construct
  misc_feature 1..165: note = Description of Artificial Sequence: Synthetic coding sequence
  source 1..165: mol_type = other DNA
atggactccatgccagagccagcctctcgctgtctactgcttcttccactgctcctgttgttactgctgctgttacccgcccccgagctgggcccatcccaggccggagctgaggagaacgactgggtacggctaccctcgaagtgcgaaggcacttgtggctag

SEQ ID NO: 110736 - DNA, 747 bp, synthetic construct
  misc_feature 1..747: note = Description of Artificial Sequence: Synthetic coding sequence
  source 1..747: mol_type = other DNA
atggggccagtcagattgggtatcctgttattcctgttcttggccgttcacgaggcttgggcaggaatgctgaaggaagaggatgatgataccgaacggctgccgtccaagtgcgaggtttgcaaactgctaagcaccgaactgcaggccgagctgagtaggacaggccgctctagggaggttctggagttaggtcaggtgttggataccggtaaaagaaaaaggcacgtgccttacagtgtttccgaaaccaggctggaggaggctctcgagaatttatgcgagcgcatactcgattactctgtgcacgccgagcgaaagggatctctgcggtatgctaagggccaaagtcaaactatggctacactaaaagggctggtccagaagggtgtcaaagtggaccttggcatccctttagagctctgggacgagcccagtgttgaagtgacttatcttaagaaacagtgcgagaccatgctggaggaattcgaagatattgtcggcgactggtactttcatcaccaggagcagccccttcagaactttctatgcgagggccacgtcctccctgcagccgagaccgcctgtctgcaggagacctggacgggcaaagagattacagatggtgaggaaaagactgagggagaggaggagcaagaggaagaagaagaggaagaagaggaagaggggggcgataaaatgacaaagaccggatcacatcccaaacttgaccgggaggacctgtag

SEQ ID NO: 110737 - DNA, 798 bp, synthetic construct
  misc_feature 1..798: note = Description of Artificial Sequence: Synthetic coding sequence
  source 1..798: mol_type = other DNA
atgagggaggagatgtccctagggtgtcaggaggcattcgagatattcaagcgggaccacgctgatagcgtaaccattgatgacaacaagcagatcctgaagcaaaggttctccgaggccaaagcactgggagagtctatcaatgaagcgcgttctaagatcggccatttaaaggaggaaataacccaacgtcacatacagcaggtcgccctgggtatctcggaaaatatggccgtccccctgatgcctgaccagcaggaggaaaaacttagatcccaactagaagaggaaaagcggcgctacaaaactatgtttacaaggctgaaggccttgaaggtcgagattgaacaccttcagctgttgatggacaaagctaaggttaaacttcagaaggagtttgaggtgtggtgggccgaggaagcgaccaacttacaagttaacagtcctgcagtgaatagtctggaccataccaagccatttctacagacaagcgattctcagcacgagtggtctcagcttctgagcaataagtccagcggcggatgggaggtgcaagaccagggtacaggacgtttcgatgtttgtgatgtgaatgcacgaaagatcttgcctagtccttgcccgtccccccatagccagaagcagtcctccacctctacgcccttagaggattctatccctaaacggcccgttagcagtattcctttgacaggggattctcaaacagattctgatatcatcgcctttatcaaggctagacagagcatcctgcagaagcaatgcctgggttccaactag

SEQ ID NO: 110738 - DNA, 1185 bp, synthetic construct
  misc_feature 1..1185: note = Description of Artificial Sequence: Synthetic coding sequence
  source 1..1185: mol_type = other DNA
atggcaaatatgcagggactcgtggagaggttagaaagagcggttagccgcttggagagtctgtccgcagaatcacaccgacctcccggcaactgtggagaagtgaatggcgtgattgccggtgtggccccttctgtggaagccttcgataaactgatggactcaatggttgctgagttcctcaagaatagccgaatcctggcaggcgatgtggagacccatgccgaaatggtgcactctgcctttcaggcccaaagggccttcctcctgatggccagtcagtatcaacagcctcatgaaaatgatgtagctgccctgttgaagcccatttctgaaaaaatacaggagatccagaccttcagggagaggaacaggggaagcaacatgtttaatcacctgtcggcggtgtcagaaagtatacccgcgctgggttggatcgctgttagtcccaaaccacccccactgcctccaccaggaccgcctcccctattcgagaacgagggaaagaaggaggagtcatccccttcgaggagcgcactgttcgcccagcttaaccagggtgaggctattacaaaagggctccggcacgtgacggatgatcaaaagacatataagaatcccagtttgagagcccaaggcggccagacccagtcacccacaaagtctcacacaccatcgcccactagtcctaaaagctacccatcacagaagcatgcaccagtcttggagttggaaggaaagaagtggcgcgtggagtatcaagaggacagaaacgatctagttataagcgagacagaactgaagcaggtggcatatatcttcaaatgcgagaagagtacaatccagattaaaggaaaagtgaattccattatcatcgacaactgcaagaaactgggactcgtctttgataatgtggtgggaatcgtagaggtcataaatagccaggacatccagatccaagtcatggggcgggttccaaccatttccatcaacaagaccgaggggtgtcacatttacctatctgaggacgctcttgactgcgagatcgtgtccgcaaaaagctctgagatgaatattctcattcctcaagatggtgactacagggaatttcctatccctgaacagttcaagacggcctgggatggttcaaagctcattaccgagccggcggagatcatggcctag

SEQ ID NO: 110739 - DNA, 597 bp, synthetic construct
  misc_feature 1..597: note = Description of Artificial Sequence: Synthetic coding sequence
  source 1..597: mol_type = other DNA
atgaagctgtatagcttatccgttctgtacaagggggaggcaaaagttgtactcctgaaagcagcttacgatgtcagctccttctctttttttcaacgctcgagcgtgcaggagtttatgacgtttacctctcaactgatcgtggaacggtcctccaagggtacaagagcttccgttaaagaacaggactacctatgccacgtgtacgttcgcaacgacagtctcgcaggcgttgtgatcgccgacaatgaatacccttctagggtggcctttaccctgctggaaaaggtccttgacgaattcagcaagcaggtggacagaatcgactggcctgtcggcagccctgctactattcattatcccgctttggacggacacctgtcaaggtaccagaacccacgcgaagccgatcctatgactaaggtgcaagcggagttggatgagaccaagataatactacacaacaccatggaatctctgctggagcggggtgaaaaactggacgatctagtgtcaaaatctgaagtgctggggacccagagcaaggccttttataagaccgctcgcaagcagaattcatgttgtgctattatgtag

SEQ ID NO: 110740 - DNA, 3036 bp, synthetic construct
  misc_feature 1..3036: note = Description of Artificial Sequence: Synthetic coding sequence
  source 1..3036: mol_type = other DNA
atgcagaagccaagtgggctgaagcctccgggccgagggggtaagcatagtagcccaatgggcaggacatccaccggttccgcgtcaagctccgccgccgtggccgctagctcgaaagaaggctctcctctgcacaaacagtcctccgggccgagctcctctcctgcagccgctgctgccccagaaaagcctggtcctaaagcagccgaggttggagatgatttcttaggtgacttcgtcgttggtgagcgtgtgtgggtaaacggggtgaagccaggagtggtgcaatacctgggggagacccagttcgcgcccggccagtgggccggcgtcgtgctggatgaccccgtggggaagaatgacggtgctgtaggcggggtgagatactttgagtgcccggccctccagggaatcttcaccaggcccagcaagttaacgagacaacctaccgccgagggttccggctctgacgcacactctgtcgaaagtctgacagcacagaatctttctctgcattcagggaccgccacaccacccttgactagcagagtcattcccctcagggagtcagtattgaacagttccgtgaagacaggaaacgaatcagggtcaaatctgtccgactcggggtccgtgaaaaggggtgagaaagatctccgccttggagatagggtgctcgtgggggggaccaaaactggtgttgttcgttacgttggcgaaaccgactttgctaaaggcgagtggtgcggcgtggagctggatgaaccacttggtaagaacgatggtgccgtcgcaggaacgcgatacttccagtgtccacccaagttcggcttgtttgctcccatccataaagtgatccggatcggattcccttcaacgagcccagcaaaagctaagaaaacaaaacgcatggctatgggtgtctccgccctgactcattccccttcatcctcatctatctcctcagtctccagcgttgcgtcttctgtcggtggtcgcccttcccgcagcggtctgctaaccgagacgagctccagatacgctaggaagatcagtggaactaccgcactgcaggaagccttaaaggaaaaacagcaacacattgaacagctgctagccgaaagagaccttgaacgcgccgaagtcgctaaggcgacttctcacatctgcgaggtggagaaggaaatcgcactactgaaagcccagcatgagcagtacgtggcagaggctgaagagaagcttcaacgggctaggctgctcgttgaatctgttagaaaagaaaaagtggacttatctaaccagctagaggaagagcgcaggaaagtggaggacttacagtttcgcgtggaagaggagtccattacaaaaggcgatctcgaactgacgacggtcgcggaaaagtcgagagtcctgcagcttgaggaggagctgactttacgccgcggggaaattgaagagttacagcagtgtctgttgcatagcggaccgcccccccccgaccatccagatgctgctgaaattctgcggctgcgggagaggctcctgtcagcaagcaaagaacaccagcgggaatccggggtcctcagagacaagtacgaaaaagctttgaaggcataccaggctgaggtggataagttgcgtgcggctaacgaaaaatacgcacaggaggtagccggtctcaaggataaagtgcaacaggccaccagcgagaacatgggtctcatggataattggaaaagcaagctggattccttggctagtgaccatcagaaatccctagaggacctcaaagcaaccctcaattcagggccaggcgcacagcagaaagaaattggcgagctgaaagccgtcatggaaggaatcaaaatggagcaccagctggagcttgggaacctgcaggccaagcatgatctggagactgcaatgcacgtgaaggaaaaggaagctctgcgcgagaaattacaggaagcacaagaagagctggccggacttcagcgacactggcgggcccagctcgaggtgcaggcttcacagcatagattggaactgcaggaagcacaggatcagcgcagagatgccgaattgcgggtccacgagctggaaaagctggatgtcgagtaccgagggcaggcccaggcgatcgaattcttgaaggagcagatctcactagcagagaaaaaaatgttggactatgaaaggctgcagagagctgaagcgcaggggaagcaagaagtggaatctctccgggagaaactcctggtggccgaaaatagattgcaggctgttgaggcgctctgttcttcccaacacacccacatgattgagagtaacgatatctcagaggagactattcgaactaaggagaccgttgaaggtctgcaggataagctaaacaagcgtgacaaagaagtgacagcactgacgtctcagactgagatgttgcgggcccaggtaagcgcactggaatctaagtgcaaaagcggcgagaagaaagtggatgccctgctgaaagagaaacggaggcttgaggccgagctggagacagtcagcaggaagacacatgacgcatctggccagcttgtattgataagtcaggagttactaagaaaagagcgttcactcaatgaactgcgagtgttgctactggaagccaataggcattctcctggaccggagcgggacttgtctagggaggtccacaaagctgagtggcgcattaaagaacagaagctcaaagacgatatccgtggactccgggagaagctaactggactcgataaggagaaatccctgtctgatcagagacgttactcattgattgacaggtccagcgcacctgagctcctcaggctgcagcatcaattgatgtccactgaggacgcgctacgtgatgccctggatcaggcccagcaggttgaaaagctgatggaggccatgagatcctgtcccgacaaggcccaaactatcggtaactccggaagcgccaacggcatccatcagcaggacaaggcacagaaacaggaggacaaacactag

SEQ ID NO: 110741 - DNA, 3141 bp, synthetic construct
  misc_feature 1..3141: note = Description of Artificial Sequence: Synthetic coding sequence
  source 1..3141: mol_type = other DNA
atgcagaaacccagtggcctcaagccccctgggaggggtggcaaacacagctccccaatggggaggaccagcacaggatcagcatccagcagcgccgccgttgcagcctctagcaaggaaggcagtcctctccacaaacagtcttctggtccctcctcatctccggccgcagctgcggctcccgaaaagccagggccaaaggcggcagaggtcggtgatgatttcctcggggacttcgtggtgggcgaaagagtttgggtgaatggagtgaaacccggcgtagtgcagtacctgggcgagacccagtttgcccccggccagtgggccggcgttgtgctggacgacccagttgggaagaatgatggagctgtgggcggggtccggtattttgagtgtcccgccctgcaggggatttttactaggccaagcaaactgaccagacagcctaccgccgaaggaagcggaagtgatgcccacagtgtcgagagcttgaccgctcaaaacctcagcttacactctgggaccgctacacccccgttgacatccagagtgattcctctgcgcgaaagtgtcctcaattcatcggtgaagactggaaatgaaagcggaagtaatctgagcgattcgggctctgtgaaacggggggaaaaggatctgcggctcggagatcgcgtgctagtcggagggactaaaactggggtggtccgatatgtcggcgagaccgattttgccaagggggagtggtgcggggtggaacttgacgaacccctgggcaagaatgacggcgccgtggcagggacgcgatacttccagtgcccgcccaagttcggcctcttcgccccaattcataaggtcattaggattggcttcccctcaacgtctccggcaaaggccaagaaaaccaaaaggatggccatgggcgtttcggccttaacccactccccaagttcttcttctattagcagcgtatcctctgttgcgagttctgtaggcggcagaccctcaaggtctggcctcctcaccgagacaagctctaggtatgccaggaagatttcggggaccactgccctccaggaagctctgaaggagaaacagcagcatattgagcagctgctcgcagaacgtgatctggaaagggcggaggtggcaaaagccacttcccacatctgcgaagttgagaaggaaatcgcactcctgaaggctcagcatgagcaatacgtcgcagaagccgaagaaaaactgcagcgtgctaggctgttagtcgaatccgtcaggaaagaaaaagtggacctgtctaatcagctagaggaggaaagacgcaaagttgaggacctgcaatttcgggtcgaggaggagtccataacaaagggcgatctggaaacccagacacagctggagcatgctaggatcggtgagttagagcagtccctccttctggagaaagcacaggctgagagacttctgagggagctcgccgataatcggctcacaactgtcgctgagaagtcaagagtcctgcagctcgaggaagaattgactctgcgacggggcgaaatcgaagagctgcaacagtgcctgctccacagtgggccacccccccccgatcaccctgacgcagccgagatattaagactgcgtgagcgactgttaagtgcaagcaaggagcaccagcgtgagagcggcgtgctgagggacaaatacgagaaagctttaaaagcttaccaggcagaagtagacaagctgcgggccgctaacgaaaagtatgcccaagaagtggcaggtctgaaggataaagttcagcaagctaccagcgaaaatatgggtctaatggacaattggaagtccaagttagactccctcgcgtcggatcaccagaaaagcctggaggatctgaaggcgactttaaacagcggccctggtgcccagcagaaggagatcggcgaattaaaagccgtcatggaagggatcaaaatggagcaccaactcgagttaggaaacctccaggctaaacacgacctggagactgccatgcatgtaaaggagaaggaagcattaagagagaaactgcaggaagcccaagaggagcttgccgggcttcagaggcattggagagctcagctagaagtccaggcaagccagcaccgactggagctgcaagaagcacaggaccaaagaagagacgccgaactgagggtccacgagttagagaaactcgatgtggagtatcgtggccaagcccaagctatcgagttcttaaaagagcagatctctctggccgaaaaaaaaatgttggactacgaacgtttacagagggccgaagcacaggggaagcaggaggtggaatcattacgcgaaaagctcctcgtggccgagaaccgcctgcaggccgtggaggccctgtgctcttctcaacacactcatatgatagagtcaaatgacatcagcgaggaaacgattcgtacaaaggaaacagttgaggggctgcaagataagctgaacaaacgcgacaaggaggttacggcactgactagccagaccgagatgctgagggcccaggtgtcagccttggaatccaaatgcaagagtggcgaaaaaaaagttgacgctctgctcaaagagaagcgtcggctcgaggccgaattggaaactgtctctcgtaaaacccacgatgcatccggacaactcgtgctgatcagccaagagcttctgcggaaggaaagatcacttaatgaactgcgcgtgttattgttggaggcgaatagacattcacctgggcctgaacgagacctgagcagggaagtgcataaagccgagtggcggatcaaggagcaaaagctgaaggacgatattcgcggtttgcgggaaaagcttactggactggacaaagagaaaagcctgtctgatcaacggcgctattccctgatagatcgctcaagtgcaccagaactgctacggttgcagcaccagctgatgagcacagaagacgcgctgcgggacgcccttgatcaggcccagcaagttgagaagttgatggaagccatgagaagttgcccagataaagcacaaaccattggcaattctggatcagccaacggtatccaccaacaggacaaggctcaaaagcaggaagacaaacattag

SEQ ID NO: 110742 - DNA, 153 bp, synthetic construct
  misc_feature 1..153: note = Description of Artificial Sequence: Synthetic coding sequence
  source 1..153: mol_type = other DNA
ctggaagaggaaaggagaaaggtggaggacctgcagtttagggtggaagaggagagcattactaaaggcgatctcgaggccgaggatcacctttctcccgagccctcgatgctgacaaccgtggccgagaaatctcgcgtccttcaactgtag

SEQ ID NO: 110743 - DNA, 3141 bp, synthetic construct
  misc_feature 1..3141: note = Description of Artificial Sequence: Synthetic coding sequence
  source 1..3141: mol_type = other DNA
atgcagaagccttcagggctgaaaccacccggtcgcgggggcaaacactccagtccgatggggagaaccagtacaggctccgcctcctcttcagccgccgtagcagcctcaagtaaggagggcagtcctctgcacaagcagtcctccggaccttcgtctagtccagccgctgctgctgcccctgagaaaccaggcccaaaagctgccgaagtgggagacgatttcctgggcgattttgtggtcggggaacgggtctgggtgaacggggtaaagccaggcgttgttcagtatctgggcgagacccagttcgctcccggccaatgggcaggcgtggttttagacgatcctgttgggaagaatgacggggccgtgggcggggtacgatatttcgagtgccccgctcttcagggaatttttactcggccaagcaagctgactcgtcaaccaactgctgaaggaagtggctctgacgctcactctgtggagtcgcttactgcacagaatctttctctgcactctggaacagcaactcccccactcacttccagagtcatccctctcagggagtccgtactcaactcttctgtcaagactggcaatgagagtggttccaacctgagcgattccggctccgtgaagagaggtgagaaagacctcagactaggcgacagagtacttgtggggggtactaaaactggagtggtgagatatgtcggcgaaactgacttcgcaaagggagaatggtgcggagtcgaattggatgaaccactgggcaaaaatgacggggctgtcgccggcacgagatattttcagtgtcctcccaagtttgggctgtttgcaccaattcataaagttattcggatcgggttcccttcaaccagccccgctaaggccaagaaaacaaagcggatggcaatgggagtttcagctctgacgcactccccctctagctcaagtatctcatcagttagctccgtcgctagctccgtgggaggccgtcccagtagatcgggtcttctgacagaaacctctagccgctatgctcgaaagatcagtggaactactgcgctccaagaagcccttaaagaaaaacaacagcacattgagcagctgctagccgagcgcgacttggagagggctgaggtcgcgaaagctactagccatatttgtgaggtagaaaaagaaattgcgctcttgaaggcgcagcatgagcagtatgttgccgaggctgaggagaaactgcagagagccaggcttttggtcgagtcagtgagaaaagagaaggtggatctctcaaaccagctcgaagaagagaggaggaaggttgaggacctgcagtttcgagtcgaagaggaatcgatcactaagggggacctggagactcagactcagctggaacacgcaaggatcggcgagctggagcagtccctgctgttggagaaagcccaagccgagcggttattgcgggagctcgccgataatagactgactaccgtggctgaaaagagccgagtccttcagctcgaggaggagcttactctacgtcggggggagatcgaagaactgcagcaatgtctgctgcatagcggccccccgcccccagatcatccagatgccgccgagatcctgcgactccgcgagagactgttgagcgcatcaaaagagcatcagcgagagtccggcgtcctgcgtgacaagtatgaaaaagctttaaaggcctaccaagcagaggtcgataaattgagggccgctaacgagaaatatgcgcaagaggtagcaggccttaaagataaagttcagcaagctacttctgagaatatgggactgatggacaactggaaaagcaaactggatagcctcgcttctgatcatcagaaatctctcgaagatttgaaggcaaccctgaattccggaccaggagcacaacagaaggagatcggcgagctgaaagctgtgatggagggcatcaaaatggaacaccagttggaactgggcaacctgcaggccaagcacgacctggagacggccatgcatgtgaaggagaaggaggccctacgagagaaactgcaagaggcgcaagaggaacttgctggtctgcagagacattggcgagcccagcttgaggttcaagctagtcagcacaggctcgaactgcaggaggcgcaggaccagagacgcgacgctgagcttcgagtccacgagctcgaaaagcttgacgtggagtacagaggccaagcgcaggcaattgagttcttaaaggaacagatctccctggctgaaaaaaagatgctggattacgaaaggctgcagcgcgccgaagcccagggcaagcaagaggtggaatctcttcgcgaaaagttacttgttgccgagaataggctccaggctgtagaggccctgtgctctagtcagcatacgcacatgatcgaaagcaatgatatctctgaagagactatccgaacaaaggagacagtggaagggcttcaggacaagctgaataaaagagataaagaggtcactgctttaaccagtcagactgagatgctgcgcgcccaggtgtcggctttagagagtaagtgtaagtccggcgaaaagaaagttgatgcccttctcaaagagaagagaagacttgaagccgaactcgagacagtctccagaaaaactcatgatgcaagcggccagctggttctcatatcccaggaactcctgagaaaagagcgttcactcaacgagctaagagtgctgttacttgaagccaacaggcattcacctggacccgaacgcgatttgtccagagaggtgcacaaagccgagtggaggatcaaggagcagaagttgaaagatgatatccgcggtttacgggagaaattgaccggtctggataaggagaaatctctctctgatcagcgtagatactccctgatcgatagatcatctgcacccgagttgttgagactgcagcatcagctgatgagcacggaggacgcgctacgggacgccctggaccaggcccaacaggtcgagaagctgatggaagccatgcggagttgtccggataaggctcagacgatcggcaatagcggaagcgctaacgggatccatcagcaggacaaggcacagaaacaagagaacactcactag

SEQ ID NO: 110744 - DNA, 4827 bp, synthetic construct
  misc_feature 1..4827: note = Description of Artificial Sequence: Synthetic coding sequence
  source 1..4827: mol_type = other DNA
atgtatagtgcacaccggccactcatgcctgcaagcagcgcagcctcacgtgggctgggtatgttcgtgtggactaacgtggagccacggtctgtcgccgtttttccatggcacagcctggttcctttcctggccccgtctcagcccgatccttctgtgcagccctcagaggctcagcagccagcctcccaccctgtggccagcaaccagagcaaagagcctgctgaaagcgccgccgttgcacatgagagaccgccaggcgggaccggtagtgcagaccctgagcgcccacctggggcgacgtgccctgagtccccaggccccggacctccacaccccctgggagtagtagagagtggcaagggtccgccgcctactaccgaggaggaagcctccgggcccccaggcgagcccaggctggactcagagaccgagtccgatcacgatgacgcgttcctaagcataatgtctcccgaaattcaactgccgttaccccccgggaaaaggaggacccagtccctctctgccctgccgaaggagcgagattccagttccgaaaaggatggacgctctcctaataagagagagaaagaccacatcagaagaccgatgaatgcctttatgatcttctcgaaacggcatcgcgccctcgtccaccaaaggcacccaaatcaagacaatcggacagttagtaaaatcttgggcgagtggtggtacgctttgggccctaaggagaagcagaagtatcatgacctagcgtttcaggttaaggaagctcacttcaaggcacatcctgactggaaatggtgtaataaggataggaagaaatcttcttccgaggcaaagcctacaagcctggggctggccggagggcataaggagacccgggagcgctcaatgagcgagacagggaccgctgccgcccccggcgtctcttcggagctcctatccgtcgctgctcagactctgttgtcatcggacacaaaagctccgggctcctcctcctgtggggctgaacggctgcacactgtcggtggaccaggatctgccagaccaagagcttttagccatagcggagtccattccctggatggcggtgaagttgattcgcaggctctccaggagctgacccagatggtctctggtcccgcctcttactctggacctaagccttccacgcaatatggagcccccggacctttcgctgctcccggcgagggtggcgccctggccgccactggcaggccacccctgctccccactagagctagtagaagccagagagccgcatctgaagatatgactagcgacgaagagaggatggtgatttgtgaagaagaaggcgacgatgatgtgatcgctgacgacgggttcggaacaaccgacatcgatctgaaatgcaaggaacgggtaactgattctgagtcgggggatagcagcggggaagatcccgagggaaataagggctttgggcgcaaggtgttttcaccagtgattaggtcatcgttcactcactgtaggcctccattggatcccgagccccccggtcctcctgaccctcccgttgccttcgggaaggggtatggctccgccccctctagcagcgcgagcagtcccgcctcttcgtctgcgagtgcagctactagtttttccctcgggagtggtacctttaaagctcaggaaagcgggcaggggagtaccgccggcccactccggcctccgcctcccggggcagggggcccagccaccccttccaaggctacccgcttcttgcccatggacccggccacgtttcgccgtaagaggccggagtccgtgggggggttagagccacccggcccaagtgtcatcgctgctcccccttccggaggcggcaacatcctgcagaccttagtactgccacctaataaggaagagcaggaagggggcggcgcgcgggtgccaagcgcgcccgctccctcattggcatacggcgcccccgccgctccactctctcgccccgccgccactatggttactaacgtggttcgccccgtcagttctacacctgtgcccattgcgagcaaaccatttccaaccagtggcagggccgaagcgagtcctaatgataccgccggggccaggaccgagatgggaactggcagtagagtgcctggcggttcccccctaggcgtgagcctcgtgtactcagacaaaaaaagcgcggctgccacatctcccgcacctcacttggtggctgggcccttgttaggtaccgttggcaaagccccagccaccgtgacaaatttgctcgtgggcacccctggctatggcgctccggctccgcccgcagtgcagtttattgcccagggcgctccaggcggcggaaccacagccgggtctggggctggagccggctcagggcccaacggccccgttccactggggatattacaaccaggggccctcggtaaagcaggtgggataacccaggtgcagtacattttgccaaccttaccccaacagttacaagtggccccagctcctgccccggccccggggacaaaagcagctgcacccagtggtccggctcctactaccagcatcagattcaccctgcctcctggcacctctactaatggcaaagtcttagctgcaacggctcccacaccgggtatcccaattcttcagtccgtcccatccgccccaccaccaaaggctcagtccgtatctcctgtgcaggccccaccaccgggcggatctgcacagctcctcccagggaaagtattggtccccctggcagccccatccatgtctgtgcggggagggggcgcgggccagccgctgcctctagtatccccccccttcagtgtgcctgtacagaacggagctcaaccacccagcaaaattattcagcttaccccagtgcctgtatcaactcccagcgggcttgtaccgccactgtctcccgccaccctgcccggccctaccagtcagccccaaaaagtcttgctgccctccagcactcggatcacctatgtgcagtctgctggaggacatgcactgcctctaggtaccagtccagcaagttcccaggcaggcactgtcacttcatacggtcccacgagctcagttgcgcttggtttcacatcactcggtccctccggtcccgcctttgtgcagcctctactgtccgcaggccaggccccacttctcgcccccgggcaggttggtgtgtccccagttccgagcccacaactccctcctgcatgtgcggctcctggaggacctgtgattactgctttctattccgggtcccctgcccctacttcctccgcgccactagctcaaccaagccaggcgccgccatccctagtatatactgtagctaccagtaccacaccccccgccgcaacaatccttcccaaggggccaccggcccccgctaccgcaacgcccgcacccactagcccattccctagtgctaccgctggtagtatgacatattctctggtcgctccaaaagcccagaggccttcgccgaaagcccctcagaaggtgaaggccgccatagcctccatccccgtgggctctttcgaggccggagcttcaggacgacctggaccggcccctagacagcctctcgagcctgggcctgtgcgagagcctaccgcccccgaatcagaattggaaggacagccaactcccccagcaccgccccctctgccagaaacttggacccccaccgccagatccagtcctccgctgcccccccctgcagaggagcgcacctcagcgaaagggcccgagacaatggcatcgaagttcccatcctcgtcctctgactggcgcgtgcctggacagggtttggagaataggggagagccacccacaccaccatcccccgctcctgctcctgcagttgcccctggcggttctagcgagtcatctagcggacgtgctgccggcgacacccctgaacgcaaagaggcagccggcactggcaagaaggttaaagttcggcctccaccccttaagaagacctttgactctgtggacaatcgggtattgtctgaggttgattttgaggagagatttgcggagctgcccgagttcaggccagaggaggttctgcctagccccacactccagtctctagccacaagcccacgtgcgatcctgggatcttaccgtaaaaagaggaaaaacagcaccgacctcgactctgccccagaagatccaactagcccaaagcgcaaaatgagacgcagatcaagttgtagttctgaacctaacacacccaagtcagctaagtgcgaaggggatattttcacgttcgacaggaccgggacggaagccgaagacgtgctgggagagttagaatacgacaaagttccctattcatctctcagacgaactctggaccagagaagggccctcgtaatgcaactttttcaggaccatgggtttttccccagtgcccaggccaccgccgcatttcaggctcgctacgcagatatttttcccagtaaggtgtgtttgcagctcaagataagggaggtgaggcagaaaatcatgcaggctgctacgccaaccgagcagcctcccggagccgaggcaccacttcccgtgccccctcctactggaacggctgccgcaccggctcctactccatctcctgcaggaggccctgaccctacttctccttcttcagacagcggcactgctcaggccgccccccctcttccccctccgccggagagcgggccgggacaaccgggctgggagggcgctccccaaccgtcgccaccacctcctggcccctccacagccgcgacgggacgctag

SEQ ID NO: 110745 - DNA, 1002 bp, synthetic construct
  misc_feature 1..1002: note = Description of Artificial Sequence: Synthetic coding sequence
  source 1..1002: mol_type = other DNA
atgtatacagccatcccacaatcaggtagtccttttcccgggtctgtgcaggaccctgggctgcacgtctggagagtcgagaaactaaaaccagtcccagtggctcaagagaaccagggtgtgttcttttccggagactcctacctggtcctccacaatggacccgaagaggtttctcatctgcatctgtggatcggccagcagtcgagtagagatgagcagggtgcgtgcgccgtgctggccgtgcatctgaatacactgctgggcgaaaggcccgtgcagcaccgagaagtacaagggaatgaatcagatttatttatgagttacttccccagaggattgaaataccaggagggaggcgtggagtcggccttccataaaaccagcaccggggcgccggctgctatcaagaagttgtatcaggtgaagggaaagaagaatatccgagctactgagcgggccttgaattgggatagttttaacaccggggactgcttcatacttgacctcggacagaacatattcgcctggtgtggaggtaaatctaacatactggaacgaaataaggcgcgtgacctagcattggccatcagggactctgagagacaggggaaggctcaggtcctcggaccaaaaccggctctcaaggagggcaatcccgaggaagacctcactgctgataaagccaatgcccaggcagccgccttatacaaagtgagcgacgccacaggccagatgaatttgactaaagtcgcggattcctctcccttcgctctcgagttgctgatttcagatgattgcttcgtactagacaacgggctctgcggaaagatctatatttggaagggtagaaaggccaatgagaaggaaagacaggctgctcttcaggttgccgaggggttcatctctagaatgcaatacgcgcctaatacacaggtcgaaatcttaccccagggccacgagagtcctatctttaaacagttcttcaaggattggaagtag

SEQ ID NO: 110746 - DNA, 861 bp, synthetic construct
  misc_feature 1..861: note = Description of Artificial Sequence: Synthetic coding sequence
  source 1..861: mol_type = other DNA
atggctgactttgacgaccgggtgagcgacgaagagaaggtgcgtattgctgcaaagtttataactcacgccccgcctggcgagttcaacgaggtatttaatgacgttcgcctgctcctgaataatgacaacctactgcgcgagggcgccgcccatgcctttgcccagtacaacatggaccagttcactcccgtaaagattgaaggatacgaggaccaggtactcattaccgagcatggtgacctgggcaactcacggttcttggaccccaggaacaaaatcagtttcaagtttgaccacctcaggaaggaggcctcagatccacagccagaggaggctgatgggggactcaaatcatggagagagtcgtgcgatagcgccttacgggcctacgttaaggatcattactccaatggattctgtactgtgtacgcaaaaacaattgatggtcagcagactatcattgcctgcatagaaagtcaccaattccagcctaagaacttttggaacggcaggtggagatccgaatggaaatttaccattactcctcccactgctcaggtcgtgggagtgttgaaaatacaagtccattactacgaagacggaaatgtacagctcgtctctcacaaggacgtgcaggattccctgactgtatctaatgaagctcaaaccgctaaagaattcatcaaaataattgaaaacgctgagaatgagtatcagacagcaattagcgagaactatcagactatgtcagataccacattcaaagctctacgaagacagctcccagtgacaagaacgaaaatagactggaacaaaatcctgtcatacaagatcggcaaagagatgcagaatgcatag

SEQ ID NO: 110747 - DNA, 861 bp, synthetic construct
  misc_feature 1..861: note = Description of Artificial Sequence: Synthetic coding sequence
  source 1..861: mol_type = other DNA
atggctgatcttgaggaacaactgtcggatgaggaaaaagtccggatagcagcaaagtttatcattcacgctcctcctggagaattcaatgaagtgtttaacgacgtgcgactgctgcttaataatgacaatctgttgcgggagggggcagctcacgcctttgcgcagtacaatttggatcagttcaccccagtgaaaatcgaaggctatgaggaccaggtcctgattaccgaacacggagatctaggtaacgggaagttccttgatccaaaaaatcggatctgtttcaagttcgaccatctccgcaaagaagcaaccgatccacgtccatgcgaagtagagaacgccgtggaatcatggcgcaccagtgtggagactgctttgcgggcatacgtgaaagagcattaccctaacggagtctgcacagtttacggaaaaaagatcgacggccagcaaactattatagcttgcatagaatcccatcagttccaggcaaagaatttctggaatggaagatggcgtagcgaatggaagtttactattaccccatccacgactcaggtcgtgggcatactgaaaatacaggtccattactatgaagatggaaacgttcagctggtttcccataaagatattcaggacagcctgacagtatccaacgaagtgcagaccgccaaggaatttatcaaaatcgttgaagccgctgagaacgaataccagactgctatcagcgaaaactaccagacaatgtctgatacaactttcaaagcactgagaaggcaactgccagtgacaaggactaaaatagattggaacaaaattctgtcttacaagatcgggaaggagatgcagaatgcctag

SEQ ID NO: 110748 - DNA, 519 bp, synthetic construct
  misc_feature 1..519: note = Description of Artificial Sequence: Synthetic coding sequence
  source 1..519: mol_type = other DNA
atggccgatttggaggagcagctctccgatgaggaaaaagtgaggattgccgccaagttcatcatccacgcaccacctggtgaattcaatgaggtgtttaacgatgtccgtctactgctgaataatgataacctattgcgcgagggggcagcccatgcctttgcccaatacaatctagaccagtttacgccagtgaaaattgaagggtacgaggaccaagtgttgatcacagaacacggggacttgggaaatgggaaattcctcgaccctaagaaccgcatatgctttaaattcgatcatctacgcaaagaggccactgatcctagaccatgtgaagtcgagaacgcggtagaaagctggcgaacttccgtggagaccgccctccgcgcgtatgtgaaggaacattatccaaatggcgtctgcactgagtggagtctggaggtgcgtatggaggtctacaaccatagttttaaccacagctctggttggcacctggagaactctggctccctgctgtag

SEQ ID NO: 110749 - DNA, 900 bp, synthetic construct
  misc_feature 1..900: note = Description of Artificial Sequence: Synthetic coding sequence
  source 1..900: mol_type = other DNA
atgacactatccgtactgtcacggaaggacaaggaacgcgtgattagacgcctgctgctccaggcaccccctggcgagtttgtgaatgcgtttgacgatttgtgcttgctaatcagggatgagaagcttatgcatcatcagggggaatgcgcaggccaccaacattgtcagaagtactctgtgcccctctgcatcgacgggaaccctgtcctcctcagccaccacaacgttatgggagactaccgattttttgatcatcagtctaagttgagttttaaatatgatctcctgcagaaccagcttaaagatattcaaagtcacgggatcatccagaatgaggctgagtacctgcgggtagttcttctttgtgccctgaagctctatgtcaatgaccactacccaaaaggaaactgcaatatgctacggaagactgtaaagagtaaggagtatctgatcgcatgcatcgaagatcacaattacgagacaggagagtgctggaatggactgtggaaaagcaagtggatctttcaggtaaacccctttctcacccaggtgacgggccggatatttgttcaagctcatttttttcgctgcgtgaatctccatattgaaatatccaaggacctgaaagaatcccttgagattgtgaatcaagcccagctcgctctgtcctttgcccgccttgtagaagaacaagaaaacaagttccaggctgcggttctggaagagctgcaggagcttagcaatgaagcgctacgtaaaattttgcggcgcgatctgcctgtgaccagaaccttgattgattggcacaggatcctttcagacttgaacttggttatgtatcctaagctggggtacgtaatttacagtcgctccgtcctgtgtaactggatcatctag

SEQ ID NO: 110750 - DNA, 834 bp, synthetic construct
  misc_feature 1..834: note = Description of Artificial Sequence: Synthetic coding sequence
  source 1..834: mol_type = other DNA
atgtccgatcagcagctggattgcgccctggatctgatgaggcggctacctcctcaacagatcgaaaagaatctctcagacctcattgacttggtccctagcctgtgtgaggaccttctgtcctcagtggaccagcccctcaagattgccagggacaaggtcgtcgggaaagactatttgctgtgtgattacaatagagacggtgatagctatagaagcccttggagcaataaatacgatccccctctggaagatggcgccatgccctccgcgagacttaggaagttggaggtggaggcaaataacgcgttcgaccagtatagggatttgtactttgagggcggcgttagctcagtttacttgtgggaccttgaccacgggttcgctggcgtcatcttaatcaagaaggctggcgatgggagcaagaagataaaggggtgttgggattccatacatgtggtggaggttcaggaaaagtccagcgggagaactgcgcactataaactgacatctacggtaatgttgtggctgcagactaataaatctgggtctggcacaatgaatctgggggggagtctcactcgccagatggagaaggatgagactgtgtctgattgttcaccgcatatcgccaatatcggtcggctcgttgaggacatggaaaataagatccgcagcacactgaatgagatatattttggtaaaaccaaagacatagtgaacggcttgcgcagtatcgacgcgatcccagacaaccagaagtttaaacaactgcagagggaacttagccaggtgcttacccagaggcagatctacatccagcccgacaattag

SEQ ID NO: 110751 - DNA, 783 bp, synthetic construct
  misc_feature 1..783: note = Description of Artificial Sequence: Synthetic coding sequence
  source 1..783: mol_type = other DNA
atgccaagacagttccaggacaccgggttctctcgaccaggccttgggcagccaaggcgctgcgatccagagccccgtaagtcggatcagcagctggattgcgctctcgatttgatgcgccgtctgcctccccagcagatagaaaagaacctgagcgatcttatcgatctcgtgccgtccctgtgtgaagacttgctttcatccgtggatcagcctttgaagattgccagggacaaagtggtcggcaaggattacctgctctgcgattataatagggacggagactcatatcggagcccttggtctaataagtatgaccctccgttggaagacggagcaatgccaagtgccaggttaaggaagctggaagtggaggccaataatgcgttcgaccagtatcgcgacctgtatttcgagggcggcgtctcaagcgtctacttatgggacctagaccatggttttgccggggttatcctgattaagaaggcgggcgatgggtccaagaagatcaaggggtgttgggactcgatccacgtggtggaagttcaagagaagtcgtctggaagaacggctcactacaaactcacatcaacagtgatgctttggcttcagactaacaagagcggttcgggcactatgaacctgggcgggtccctgacacgacagatggagaaggacgaaaccgtctcggactgttctccacatatagctaacattggaaggcttgtggaagtgtgtgccgatttctgtcggcaaattaagacccggtcgtctgaagagtag

SEQ ID NO: 110752 - DNA, 834 bp, synthetic construct
  misc_feature 1..834: note = Description of Artificial Sequence: Synthetic coding sequence
  source 1..834: mol_type = other DNA
atgtctgatcagcagcttgattgcgccctggacttgatgcggagattacctccacagcagatcgagaaaaacctgtccgatttgatcgatctcgtccctagtctttgcgaggacctgctttctagcgtggaccaaccactcaagatagcccgcgacaaggtagtgggaaaggattatttgctgtgcgattacaacagggacggcgacagttatagaagtccttggtctaacaagtacgatccccctctggaagatggagccatgccatctgcacgactcaggaaactcgaggtggaagctaacaatgcttttgatcagtatagggatctgtattttgaaggcggcgtcagttccgtgtatctgtgggacctggatcatggctttgccggcgtcatcctgataaagaaagctggagacgggtctaagaagatcaaggggtgttgggattcaatacacgtggtcgaagttcaggagaagagctcagggcgtactgctcactataagctgacctccacggtgatgctgtggcttcaaactaacaaaagtggaagcggcaccatgaacctgggcggaagccttaccaggcagatggaaaaggatgagacggttagcgattgctcaccacacatcgcgaacataggaagactggtggaagatatggagaataaaattcgttctacacttaacgagatatacttcgggaaaaccaaggatatagtcaacggactgagaagcattgatgccatccccgataatcagaagtttaagcagttacaacgtgagctttcacaggtcctgacacagaggcaaatttacatacagcctgacaactag

SEQ ID NO: 110753 - DNA, 783 bp, synthetic construct
  misc_feature 1..783: note = Description of Artificial Sequence: Synthetic coding sequence
  source 1..783: mol_type = other DNA
atgcgcaggctacccccccagcagattgaaaagaacttatccgatttgatagacctagtgcctagtctctgtgaggacttactatcttcggtagaccagcctctgaagattgcaagagacaaggtggtcggcaaggactacttgttgtgtgattacaacagggacggtgacagttacaggtccccctggtccaacaaatatgaccccccactggaggacggcgccatgccttcagctaggctgcggaagctagaagtcgaagcgaataatgcttttgatcagtaccgggacttatatttcgagggcggagtgagttctgtttatctttgggatctggatcacggctttgcgggagtgatcctgattaagaaagctggcgatggcagcaagaaaatcaaggggtgttgggacagtatacatgtcgttgaggtacaggaaaagagttctgggagaacagcccattataaactcacaagtactgttatgttgtggctccaaacaaacaaatccggctccggcacgatgaatctaggcgggagccttacccgacagatggagaaggatgagacagtgtcggattgttcgccccatatcgcaaacatcggccggctcgtagaggatatggagaataagatcagatctaccctgaatgagatctactttggcaaaacaaaggatatcgtcaacggactgcggtcagtgcaaacatttgccgacaagtcgaagcaggaggctctgaagaacgatctcgtggaggctctgaaacgcaagcagcagtgctag

SEQ ID NO: 110754 - DNA, 1005 bp, synthetic construct
  misc_feature 1..1005: note = Description of Artificial Sequence: Synthetic coding sequence
  source 1..1005: mol_type = other DNA
atgggcgggccacaggataaggatgaacgtacgatcgctctggtccgaccttggccgtgggggcaccaagcactagatccggcatatggacttgacacaatgcatcctagtcgcagaagcctgcccttccctttaaactgccagcttgcccgcgtgggcactgcagattacggatctccatcggatcagagcgatcagcaactggattgtgctttggatctaatgcgcagattgcctccccagcaaatcgaaaagaatctgagcgaccttatagatctggttccttctctgtgtgaggacctgctttcgtccgtcgatcagccactcaaaatcgcacgggacaaggtggtcgggaaggactatctgctgtgcgactataatagggacggtgactcataccgcagtccctggagcaataaatacgatcctcccctggaggatggcgctatgccatccgctagacttcgaaaattggaagtggaagcgaataacgccttcgatcagtatagagacctgtactttgaaggcggtgtgagctcggtttacttgtgggatttagaccatggattcgctggagtgattctgatcaaaaaagcaggcgatggctccaaaaaaatcaaagggtgttgggatagcatccacgtggtcgaggtgcaggagaaatcttctggccggaccgcccactacaagctgacatccacagtgatgctctggctgcaaactaataaatccgggtcagggaccatgaacttgggaggctcactgactcggcagatggagaaggatgaaacggtaagcgattgctcccctcatattgcaaacattgggagactggttgaggatatggaaaacaagattcggtccaccctcaatgaaatctatttcggaaaaaccaaggacattgtgaatggcttgcgttcggtgcaaacattcgcagataaatctaagcaggaagcattgaagaacgaccttgtggaggcgcttaagagaaagcagcagtgctag

SEQ ID NO: 110755 - DNA, 819 bp, synthetic construct
  misc_feature 1..819: note = Description of Artificial Sequence: Synthetic coding sequence
  source 1..819: mol_type = other DNA
atgtccgatcagcaactggactgcgcactggatctgatgcgacggctgccaccccagcagattgaaaagaacctgagtgacctgatcgatcttgtgccgagcctctgtgaggatctccttagctcggttgaccagcctctcaagatcgctcgtgacaaggttgtgggtaaagattacctcctgtgcgactataacagagatggggattcctacagaagtccctggagcaataaatatgaccctcccctcgaagacggagcaatgccatctgcccgcctgagaaagctcgaggtagaggcaaataatgcctttgaccaatacagggatctctactttgaggggggcgtctcttccgtttatctttgggatctggaccacgggttcgccggggtgattcttattaagaaggccggtgacggctccaaaaagattaaaggatgctgggattcaatccatgtagtagaagtacaagaaaagtcttcagggcgtacagcacactataaactcacctctaccgtgatgctatggctgcagaccaacaagtccggcagtggaacgatgaacctagggggttctctgaccaggcaaatggagaaggatgagactgtgtctgattgcagccctcacatcgcaaatattggaagactggtggaggatatggaaaataaaatcaggagtaccctcaatgagatctatttcgggaagactaaagacatcgtcaatggtctcagatcagtacagaccttcgccgacaagtccaaacaagaagccctgaagaatgacttagttgaggccctgaaaaggaagcagcaatgctag

SEQ ID NO: 110756 - DNA, 621 bp, synthetic construct
  misc_feature 1..621: note = Description of Artificial Sequence: Synthetic coding sequence
  source 1..621: mol_type = other DNA
atgcgcaggctccccccacagcagatcgagaagaatctgtcagatctcattgacttggtgccaagtctctgtgaggacctcttgagctcggtggatcagccactcaaaattgcaagagacaaggtggttggtaaggactacctcctgtgcgattacaatagagatggcgattcttatcgtagcccttggagcaataagtacgatcccccgctggaagatggggccatgccctctgcaaggctaaggaaactcgaggttgaggctaacaacgccttcgatcagtatagagacttgtatttcgaaggcggagtctcttcagtctatctttgggatctggaccatggcttcgccggggttattctgattaaaaaggcgggtgatggcagcaagaaaattaagggatgctgggatagcattcatgtggtggaagtgcaggagaagtccagcggccgcacagcacattataagctcaccagcactgtgatgctgtggctgcaaacaaataaaagtggcagcggtacaatgaatctgggagggagcctgactaggcagatggaaaaggatgaaacagtttcagattgtagtccacacattgccaacataggacggctggtcgaatag

SEQ ID NO: 110757 - DNA, 906 bp, synthetic construct
  misc_feature 1..906: note = Description of Artificial Sequence: Synthetic coding sequence
  source 1..906: mol_type = other DNA
atgcatcccagtaggagatctttaccatttcccctcaactgccagctcgcccgcgtgggtacagccgactacggatcaccgagtgatcagagtgaccaacagttggactgcgctctagacctcatgaggcgcctcccgccccagcagatcgaaaagaatctgtctgatctgatagatctcgtcccctctctgtgcgaggacctcctttcttcagtggatcagcctctcaaaatagctcgggataaggtagtcggaaaggactacctgctctgtgattataaccgggacggggattcttaccgctcgccttggagcaataagtatgaccccccacttgaagacggagccatgccctcagcccgactgcgaaagctggaagtggaagctaacaacgccttcgaccaatacagagacctgtattttgagggcggtgtgtcatcagtatatttatgggacctcgatcacggcttcgccggtgtcattctcatcaagaaagctggggacggtagtaagaagattaaaggatgctgggactctatccacgtagtggaggtgcaggagaaatcctctggcagaaccgctcactataagcttacaagcacagtgatgctgtggttgcagacaaataagagcggctccggtacgatgaacctgggtggctccctgacgcgccagatggagaaggacgagaccgtgagcgattgctctccacatatcgccaatatcggtcgactggtggaagacatggaaaataagattcgctcaacactgaacgagatttactttgggaagacaaaggatatagtcaacgggttgagatcagtacaaacatttgccgacaagtctaagcaggaagctctcaaaaatgacctcgtcgaagctttgaaacgcaaacagcaatgctag

SEQ ID NO: 110758 - DNA, 366 bp, synthetic construct
  misc_feature 1..366: note = Description of Artificial Sequence: Synthetic coding sequence
  source 1..366: mol_type = other DNA
atgctaaaggttccctccttatgcgaagatctgctctcaagcgttgaccagcctctgaagatcgccagagacaaagtcgtggggaaggactaccttctttgcgactacaatcgcgacggcgacagctatcgatctccctggtctaacaagtacgaccctcctctcgaggatggcgctatgccctctgcaagactgaggaagctcgaggtggaagcaaacaatgcgttcgaccagtatcgcgacttatacttcgaagggggggtatcatcagtctacctttgggatctggatcacggattcgctggtgtgatcctcatcaagaaggctggggacggatcaaagaagatcaaagggtgctgggactag

SEQ ID NO: 110759 - DNA, 1047 bp, synthetic construct
  misc_feature 1..1047: note = Description of Artificial Sequence: Synthetic coding sequence
  source 1..1047: mol_type = other DNA
atgtacacagctattccgcagagtggatcaccgtttcccgggtccgtgcaggaccccgggcttcatgtttggcgggtcgagaaactgaaacccgtgcctgttgcacaagaaaatcaaggagtgttttttagcggagattcctacctcgtcctccataatgggcccgaagaggtaagtcatcttcatctgtggatcggccagcaaagctctagagacgaacagggcgcctgtgctgtgttggcagtgcacctgaatacactgttgggggagcggcctgtacagcatagggaggttcaggggaacgagtcagatctgttcatgagctactttccaagagggctgaagtatcaggagggaggggttgagtccgcttttcacaaaacttcaacaggagccccagctgccattaaaaagttatatcaggttaagggaaaaaaaaatatccgagctacagagagggccctaaactgggattctttcaatactggggattgcttcattctggacttgggccagaacatctttgcatggtgtggaggcaaaagtaacatcctggaacgcaataaggccagagatctcgccttggccatcagggacagcgagagacagggcaaggcacaagttgagatcgtgactgacggcgaagaacctgccgaaatgatccaggttctcggccccaagccagccctgaaggaaggcaacccggaggaggatctcacagcggacaaagccaacgctcaggcggccgcactctataaggtgtccgatgcaaccggccagatgaacctcacaaaagtggccgattcttcccctttcgccctggagcttctgattagtgacgactgttttgtgttggacaatggactctgcgggaaaatctacatctggaaggggcggaaggctaatgaaaaagaacgccaggccgccctccaggttgctgagggattcatttctcggatgcagtatgcacctaacactcaggtcgagatcctgcctcagggacacgaatcccccatatttaagcagttctttaaagattggaaatag

SEQ ID NO: 110760 - DNA, 657 bp, synthetic construct
  misc_feature 1..657: note = Description of Artificial Sequence: Synthetic coding sequence
  source 1..657: mol_type = other DNA
atgtacacagcgattccccagtccggctcgccctttccaggatccgtgcaggatccaggcctccacgtgtggagagtggagaagttaaagccagtacccgtggcccaggagaaccagggagtgttttttagtggagactcttatctggtgttacataatggccccgaggaggtgtcacatctgcacctgtggatagggcaacaatcatccagggacgagcagggcgcttgcgccgtgctcgctgtgcatctgaatactcttctcggcgagcggcctgtgcaacaccgggaagtgcaggggaatgaatccgacctgtttatgtcctactttccaagagggctcaaatatcaggaaggtggagttgaatccgccttccacaagaccagcactggagctccagctgcaatcaagaagctgtatcaggttaaaggaaaaaaaaatatccgcgccactgaacgggccctgaactgggactcttttaataccggcgactgcttcatactcgacctcgggcagaatatcttcgcctggtgtggaggcaagagcaacatcttggaacgcaacaaagcaagggatttagcacttgctatacgcgattcggaaagacagggtaaggctcaagtagaaatagtaactgacggcgaagagcctgcttag

SEQ ID NO: 110761 - DNA, 1047 bp, synthetic construct
  misc_feature 1..1047: note = Description of Artificial Sequence: Synthetic coding sequence
  source 1..1047: mol_type = other DNA
atgtacaccgccattccccaaagcggctcaccctttcccggctcagtgcaggatccaggcctccatgtgtggagagtggaaaagctgaagccagtgcctgtggcccaggaaaaccagggggtgtttttttcaggagactcttacctggtactccacaacggaccagaagaagtctcacacttgcacctctggattggacaacagagttctagggacgaacagggggcctgcgccgtgctggctgttcacctgaacacattactcggcgaacgtcctgtgcaacaccgcgaggtgcagggcaatgagagcgatctcttcatgagctacttcccgcggggcttgaagtaccaggagggcggagtggaaagtgcgttccataaaacgtccaccggcgctcctgccgctataaaaaagttatatcaggtaaaagggaagaaaaatatcagggccaccgagcgcgcactgaactgggactcgtttaatactggagattgcttcatcctggaccttggtcaaaatatctttgcttggtgtggaggaaaatcaaatattctggagcgaaacaaggcccgggatttggctctcgccatacgcgatagcgaacgtcaaggcaaggcccaagtagagatcgtgactgacggtgaggagcctgcagagatgatacaggtcctcggtccaaagccggcgcttaaggaagggaacccggaagaggacctaactgccgacaaagctaatgcccaagccgccgctctgtataaagtttcggatgctactggccagatgaaccttaccaaagtggccgacagctcacctttcgccctggaactgctcattagtgatgactgcttcgtcctcgataatggcctctgtgggaagatatacatctggaagggtcgcaaagcgaacgaaaaagagcggcaggctgctctgcaggttgctgagggattcatttcgcgcatgcagtatgctccaaatacacaagtggaaatcctccctcaggggcatgagtctcctatcttcaaacaattcttcaaagattggaagtag

SEQ ID NO: 110762 - DNA, 1047 bp, synthetic construct
  misc_feature 1..1047: note = Description of Artificial Sequence: Synthetic coding sequence
  source 1..1047: mol_type = other DNA
atgtatacagccatcccgcagtcgggatctccatttcccgggagtgtgcaagaccctggcctccatgtgtggcgggtcgagaagctcaagcctgtacccgtggcacaggagaatcagggcgtgttcttttctggggactcttacctggtcctccacaacggccctgaagaagtcagtcatctgcatctgtggattggacagcagtcttcacgggacgaacaaggagcatgcgcagttctggctgtgcacttaaatacactgttaggggagaggcccgtgcaacatcgggaggttcagggcaacgagtccgatctcttcatgtcttatttccctagggggctgaagtaccaagaaggtggcgtggaatccgcattccacaaaactagcacaggcgcacctgccgcaatcaaaaagttgtatcaggtgaaaggcaaaaagaacattcgggccacagaacgggccctcaactgggactcttttaatactggggactgctttatcctggatctgggacagaatatctttgcttggtgtggcggaaagagtaatatcctcgagcgaaacaaggccagggacctcgccctggctattcgggactcagaaagacagggtaaggcccaggtggagatcgtgactgacggagaagaacctgcagaaatgattcaggtgctggggccgaaacctgcccttaaagagggaaatcctgaagaggatctgacagcagacaaagccaatgcccaggccgcagccctctataaagtgagtgacgctacagggcagatgaacctgacaaaagttgccgattcatcaccctttgcactggaactcctaatcagcgacgattgtttcgtgctagacaacggcctgtgtggcaaaatttacatttggaagggaaggaaagctaacgaaaaggagcggcaggccgctttgcaagtagccgagggctttattagccgaatgcagtatgcgcccaacacgcaggtggagatcctgccccagggacacgaaagccccatttttaaacagttctttaaggactggaagtag

SEQ ID NO: 110763 - DNA, 762 bp, synthetic construct
  misc_feature 1..762: note = Description of Artificial Sequence: Synthetic coding sequence
  source 1..762: mol_type = other DNA
atgtatactgcaatcccacagtccggttctccttttcccgggtccgtgcaggatccaggtcttcacgtgtggcgggtggagaagctgaaacccgttcccgtggctcaggaaaatcagggggtctttttctcgggcgatagttaccttgtattacacaacggtccagaggaggttagccatctgcatctttggatagggcagcagagttcgagagatgagcaaggtgcctgcgccgttctcgccgtgcacctcaatacacttttgggagagaggccagttcagcaccgcgaagtgcaaggtaacgagagcgacctgttcatgagttattttccccggggcttaaaataccaggaggggggcgttgaaagtgcttttcacaaaaccagcaccggcgctcctgcagcgataaaaaagctctatcaggtgaaaggaaagaagaacattagagctacagaaagggcactcaattgggactcctttaacaccggtgactgcttcatcttagaccttggccaaaatatttttgcgtggtgtggcggaaagtcaaacattctggaaagaaacaaggccagagacctggcactggccatcagagatagcgaaagacagggaaaagctcaggtggaaatcgtaacagatggtgaagaaccagctgaaatgatccaagtccttggacccaaacccgctctcaaagagggaaacccagaagaggatcttactgcggacaaggcaaacgcccaagccgccgcgctgtataagtag

SEQ ID NO: 110764 - DNA, 762 bp, synthetic construct
  misc_feature 1..762: note = Description of Artificial Sequence: Synthetic coding sequence
  source 1..762: mol_type = other DNA
atgtacaccgccattcctcagagtgggtctcccttccctggatctgtgcaggaccctgggcttcatgtgtggcgtgtagagaagctgaagcctgtgccggttgctcaggagaaccagggagtgtttttcagcggagatagctacctcgtgctgcacaacggtccagaagaggtttctcacctgcacctatggatagggcagcagtcctcacgggacgaacagggggcctgcgcggtcctcgccgtccatcttaataccctgttgggtgaacggccagtccaacaccgggaagtgcagggcaatgaatcagacctgtttatgagctatttccccaggggcctaaagtaccaagagggcggtgtagaatctgcattccataagacctctaccggagctcctgcggcaattaaaaaactgtatcaagtgaagggtaagaagaacataagggcaaccgagcgcgctctgaactgggactccttcaacacgggtgattgctttatcttagatttaggacagaacatatttgcctggtgtggtggaaagagcaatatcttggaacggaataaggcacgggatctggcccttgccattcgtgacagtgagcgtcagggtaaagcgcaagtggaaatcgtcacagatggcgaagagcccgctgagatgatccaggtgctgggcccgaagcctgcacttaaggagggtaatccagaagaggatttaaccgctgacaaggccaatgcgcaagcagccgcactgtacaaatag

SEQ ID NO: 110765 - DNA, 762 bp, synthetic construct
  misc_feature 1..762: note = Description of Artificial Sequence: Synthetic coding sequence
  source 1..762: mol_type = other DNA
atgtacactgccatcccccaatccgggtccccttttccaggcagcgtccaggatcctggcctgcacgtgtggcgtgtggaaaaactcaaacccgtgcctgtggcacaggaaaatcagggggtgttttttagtggcgacagctacctcgtgctccacaacggtccagaagaggtgagccacctccacctatggatagggcagcaaagtagtagagacgagcagggcgcctgtgcagtcttagctgtccacctgaataccctcctaggggagcgtcccgtgcagcatcgggaggtccagggcaacgaaagtgacctgtttatgtcctatttcccccggggtctgaagtaccaggaggggggagtcgaatccgcatttcacaagacatcaaccggcgccccagcggctattaaaaagctgtaccaggtaaaaggcaagaagaacatcagagctactgagcgcgctttgaactgggattccttcaataccggtgattgtttcatcttagatcttggccagaatattttcgcctggtgcggtggaaagtctaatattctggagcgcaacaaagctagagatctcgctctcgccattcgggactcggagagacagggaaaagcccaggttgagatcgttactgatggagaagagcccgcagaaatgattcaggtgctcggcccaaagcctgcattgaaagaaggaaaccccgaagaagatctgactgcagacaaggctaatgcacaggctgcagcactgtacaaatag

SEQ ID NO: 110766 - DNA, 984 bp, synthetic construct
  misc_feature 1..984: note = Description of Artificial Sequence: Synthetic coding sequence
  source 1..984: mol_type = other DNA
atgtacaccgcaatcccccagtctggttccccgtttcctggaagcgtgcaagatccagggctccatgtttggagggtggagaagctgaagccagtgcccgtcgctcaagaaaaccagggcgtttttttctcgggggactcatacctcgtgctacacaatgggcccgaagaggtgtcccatcttcacctgaacacactgctgggagagagacccgtccagcacagagaggttcaaggcaacgagtctgacttgttcatgtcctacttccccagagggctcaaataccaggagggaggcgttgaatcagcgttccacaagactagtacgggagcaccagccgctattaaaaagttataccaggtcaaaggtaaaaaaaacattagagctacagaaagggctctaaattgggacagtttcaacactggcgattgctttattttagacttagggcagaatatcttcgcatggtgtggcggcaaatccaacattctggagcgcaataaggcaagagacctcgcacttgctatccgggatagcgaaaggcaggggaaggcccaggtcgaaatagtgaccgatggtgaagaaccagccgagatgatccaggttctgggaccaaagcccgcgctgaaagagggaaaccctgaagaagacttgacagcggacaaggctaatgcccaggccgcagccctttacaaggtgagtgacgcaacagggcaaatgaatctgaccaaggtggcagactcttcccccttcgctctggagttattgatttccgatgactgctttgtgctcgacaatgggctgtgcggaaaaatctacatctggaagggacggaaggcgaatgaaaaggaacggcaagcagccctccaggtcgccgaagggtttatctccagaatgcagtatgcacctaacacccaagtggagatactcccccagggacatgagagcccaatcttcaagcaattcttcaaagattggaagtag

SEQ ID NO: 110767 - DNA, 654 bp, synthetic construct
  misc_feature 1..654: note = Description of Artificial Sequence: Synthetic coding sequence
  source 1..654: mol_type = other DNA
atggagggtagcttcagcgatgggggcgcactgcccgaaggcctggcggaagaggccgaaccacaaggtgccgcttggagcggagatagtggcaccgtgtctcagtctcattctagcgcatctggcccgtgggaggatgagggggccgaggatggggcaccagggcgggacttgcctcttctgaggagggccgcggccggttatgcagcgtgcctgctgcccggagccggagccagacccgaggttgaggcgcttgacgcctctctggaagatctgctgacccgggtggatgagttcgtgggcatgctggatatgttgcggggcgattctagtcatgttgtgtccgagggggtgcctaggattcatgcaaaggcggctgaaatgcggcgtatctacagccgaatcgaccggctcgaggcctttgtccgcatggtgggagggcgcgtggccagaatggaggagcaggtcacaaaggccgaagcagagctgggcacgttcccccgtgccttcaagaagctgctgcatacgatgaatgtcccatctctctttagcaagagcgcgccaagccgcccgcagcaggcaggttacgaggcacctgtgctgtttaggacggaagattacttcccatgctgcagtgaacggccacagctgtag

SEQ ID NO: 110768 - DNA, 6678 bp, synthetic construct
  misc_feature 1..6678: note = Description of Artificial Sequence: Synthetic coding sequence
  source 1..6678: mol_type = other DNA
atggctgccctggtgctggaggacggttcggttttaaggggccagccctttggcgccgccgtctcaacagccggcgaagtggtgtttcagaccgggatggtgggctaccccgaggctctgaccgatccgtcttacaaggcccagatcctagtgttgacctacccactgataggtaactacgggatcccacctgacgagatggacgagttcggcctgtgtaagtggttcgaatcttcgggcatacacgtagccgcactcgtggttggcgaatgttgtccgaccccctctcattggagtgccactcgcaccttgcacgagtggctacagcagcacgggatccccggtttgcagggtgtggatactcgggaacttaccaagaagttgcgcgaacaaggcagcctcttgggcaagctggttcagaatggcactgagccatctagcctacccttcctagatccgaatgctcgacccctggtgccggaagtgagcatcaagacacccagagtcttcaatacaggcggagcccccaggattctggccctggattgtggactgaagtataatcagatacgctgcctgtgccaacgcggcgcggaggtgactgtggtgccgtgggaccacgccctcgattctcaagagtacgaaggccttttcttgagtaacggcccaggcgacccagcaagctatccatcagtggtgtccactctctcaagagtgttaagtgagccaaacccgaggcccgtcttcggtatttgcctcggccaccaactcctcgcactcgccatcggagccaaaacttacaagatgcgctatggtaacagggggcataaccagccatgcctgctggtcggtagtggccgttgctttcttaccagccaaaaccacgggttcgccgtggagacagactcactcccagccgattgggcaccgttatttacgaacgcaaatgacggttccaatgaagggattgtgcacaattcccttccatttttttcagtgcagtttcatcccgagcaccaagccggcccgtctgacatggagctgctcttcgacatatttctagagacagtaaaggaagctactgccgggaatccaggtggacagacggtgagggagcggctgactgagagactttgtcccccaggcattcctaccccaggctccggcctcccccctccccgcaaggtgttgatccttggcagtggaggactaagcataggccaggctggcgaatttgattactcgggtagccaggcaatcaaagctctgaaggaggaaaatatacagacgctgctcatcaacccaaatatagctactgtgcagacctcacagggtctcgccgataaggtttatttcctgcctataaccccccactacgtgactcaagttatccggaatgaaaggcccgatggggtgctcctgactttcggggggcagacggctctgaactgcggagttgagttgaccaaagctggagtgctggccaggtatggggtgcgggtgctgggaacccctgtggagaccattgagctgaccgaagatcgacgggcattcgccgccagaatggctgagataggagagcacgttgctcctagtgaggccgccaactccctggagcaggcccaggccgccgccgagaggctgggatacccagtgctggtgagggccgccttcgcccttggaggcctgggcagtggatttgcaagcaaccgggaagaactgagtgcattagtggcgccagcctttgcacatacgtcccaagtacttgtggataagagccttaaaggatggaaggagattgaatacgaagtggtgcgtgacgcatacgggaattgtgttacagtctgcaacatggagaatttggatcctctaggaatacataccggcgaaagtatcgtagtggcaccttcccagaccctgaatgacagagagtaccagctgttgcggcagactgccataaaagttacccagcacctgggaatcgtgggggagtgtaatgtccagtacgcactgaatccagagtccgaacagtactacatcattgaagtcaacgcacggcttagtagaagtagtgccttggcctccaaagccacaggctatccactggcttacgtcgctgcgaaactggcattgggcatacccctgccagagctgcgaaattctgtgactggtggcacagctgcgtttgagccttccgtggattactgcgtcgtgaaaatccctcggtgggatctcagcaaatttctgagggtctccaccaaaatcgggtcatgcatgaagtccgtgggcgaagttatgggtattgggcgtagttttgaagaagctttccagaaagctctcaggatggttgatgagaactgtgtcggctttgaccacaccgtgaagccagtctctgatatggagctcgagacacccaccgacaaaagaatcttcgtggtggctgccgcactctgggccggctacagcgtggatcggctctatgaacttacaaggatagaccggtggtttttgcaccgtatgaagcggatcattgcccatgcccagctcctcgagcagcatcgagggcaaccactgccccctgatctcctccagcaggcaaagtgtctcgggttctccgataaacagatcgcactggctgtccttagcacagaactggctgtccgaaaactgcgccaggaattagggatttgtcctgcagtcaagcagatagataccgttgccgccgagtggcctgctcagacaaattatttgtatctcacatattggggcacaactcacgacctaacctttcggacaccgcacgtcctcgtcctggggtctggagtctacagaattggctcctcggtggagttcgactggtgcgctgtgggctgcatacaacagctccgaaaaatgggctacaaaacaatcatggtgaattacaatccagaaaccgtcagtactgactacgacatgtgcgaccgtctctactttgatgaaatatcttttgaggttgtcatggatatttatgaactggagaatcctgagggggtgatcctgtccatgggtgggcagctgcctaataacatggcaatggctctgcataggcaacagtgcagggtcctcggtacgtcccctgaagccatagactccgccgagaataggtttaaattctcaaggctgctcgacactatcgggatttcccaaccacagtggcgagaactctccgatctggagtctgcccggcagttctgccagaccgtgggatacccctgcgttgttcgcccctcttacgtactgtcaggtgctgccatgaatgtggcctatactgatggagacctggagcgattcctttcttctgctgccgccgtgtccaaagagcacccggtggtcattagtaagtttatccaggaagccaaggagatagatgtagatgctgtggcatcggatggagttgtggcagcaatagctatctctgagcacgttgagaacgcaggggtacattcaggcgatgcgacgttggttaccccaccgcaagatatcactgccaaaactctggagcgcatcaaagcaattgtccatgcagtgggtcaggagctgcaggtgacagggccgtttaatctgcaacttatcgcaaaggacgatcagctgaaggtgattgagtgtaatgtaagggtttctcgaagtttcccttttgtgtctaaaacactgggggtggatctggtggccctcgcgacccgggtaattatgggtgaagaagtggagcctgttggcctgatgactggatcaggagtcgtcggggtgaaggtaccacagttctctttctcacggttagccggggccgacgtagtccttggagtggaaatgacatccactggcgaggtggcagggttcggcgagagcaggtgcgaggcctacctcaaagcgatgttatcaacaggttttaagatccctaagaagaatatcctgttaacaatcggctcttataagaacaagagtgagttgcttccgacagtcagacttcttgaatccttgggctactcactgtatgcttcactgggcactgccgacttctacacagagcatggagtgaaagtaacagctgtggactggcacttcgaggaggcagtggatggagagtgcccacctcaaaggtcaattctcgaacagctggccgagaagaatttcgagctagtaattaacctcagtatgcggggggcagggggtcgtcgcctgtccagcttcgtgacaaagggttataggacacgcaggttggccgccgacttttcggtgccactgataatcgacatcaagtgcaccaagttattcgtggaagctctggggcagattggacccgctccccctctgaaggtacacgtggactgtatgacaagccagaagttggttcgcctccccgggctcatcgacgtgcatgtgcacctgcgcgagccaggtggaacacataaggaggattttgctagcgggaccgcagctgctttggctggaggaatcaccatggtgtgcgcgatgccaaataccagaccccctatcattgatgcccctgccctcgcacttgcccagaaacttgctgaggccggcgcaaggtgtgattttgccttgtttctgggtgcgtcttccgaaaacgcaggcactctcggtactgttgccggtagtgcggcggggctgaaactgtacctaaatgaaacattttctgaactgaggctcgatagtgtggtgcaatggatggaacattttgaaacttggcccagtcacctgcccatcgtggctcacgcagagcagcagaccgtggcagctgttctcatggtggcccaattgacccagcgaagtgtacacatctgccacgtggccaggaaagaagagattctcctgattaaagccgccaaggcccgaggtctcccggtgacctgtgaagtggcgccacaccacctctttctgtcgcacgacgacctggaaaggttagggcctggcaagggcgaggtgagaccagagctggggagccgtcaggacgtcgaggccctgtgggagaatatggctgtgattgattgtttcgcttctgaccatgccccacacacgcttgaggagaagtgcggctctcgcccccctcccgggtttcctggtctggagacaatgcttcctctgttgctgaccgccgttagcgaaggccgactgtctctggacgatcttctgcagcgcctgcaccataatccaaggagaattttccacctccctccccaggaagatacttacgtggaggtggacctggagcacgaatggactattccgtctcatatgcctttttccaaagcccactggaccccttttgagggccagaaagtgaaaggcaccgtcagaagagtagttctgcgcggtgaggtcgcctacatcgacggacaggtccttgtgcccccaggatatggccaggatgtgaggaagtggccacagggcgcagttccacagcttcctccgtcagccccagccacgtctgagatgaccaccactcccgaacgaccaagacgcggaattccagggctccctgatggacgattccatctgccccccaggatccatagagcgtccgacccggggctccctgcagaagagcccaaagaaaaatcttctaggaaagtcgccgaaccagagctgatgggcaccccggacggaacctgttacccacctccccccgtgccgagacaagcaagcccacaaaacctaggtacacctgggctgctccatccccagaccagccccctgcttcatagcttagttggccagcatatcctgtcagtccaacagttcacaaaagaccagatgagccatctgtttaacgtggctcatactctgaggatgatggtccagaaagaaagaagcctagacattctgaaaggtaaagtaatggcctccatgttttacgaagtcagtactcggacatcaagcagctttgccgcagcaatggctaggttggggggcgcagtcctcagcttttcagaggctacttcctctgtgcaaaaaggcgaaagcttagcagattccgtccaaaccatgtcttgttacgccgacgtagtggtgctgcgccatccccagcccggggctgtagaactagccgcaaagcactgcaggaggccagtcattaatgccggtgacggtgtgggagaacacccaacccaagccctcctcgatattttcaccatacgcgaagagctgggcaccgtgaatggcatgacaatcactatggtcggagacttaaagcatggccggaccgtccacagcctcgcctgcctccttactcagtacagagtgagtttgcgctatgtggcacctcccagtcttaggatgcccccaaccgtccgggcctttgtggccagcagaggcactaaacaggaggaattcgaatccatagaggaggccttacctgatacagacgtcctgtatatgacccggatacagaaggaacgatttggctctactcaggaatacgaagcttgttttggacaattcatattaactccacacatcatgacccgggctaagaaaaagatggtagtgatgcaccccatgcctcgagttaatgaaataagcgtagaggttgacagtgatccccgggcagcttacttccggcaggccgaaaacggaatgtacattaggatggcgttgttggcgaccgtgctgggacgattttag

SEQ ID NO: 110769 - DNA, 1440 bp, synthetic construct
  misc_feature 1..1440: note = Description of Artificial Sequence: Synthetic coding sequence
  source 1..1440: mol_type = other DNA
atggaaaaggggcttactctaccccaggactgccgagactttgttcacagcctgaaaatgagatccaaatatgcgctgttccttgtcttcgtggtcattgtatttgtcttcatcgaaaaggagaacaaaattatttctagagtttcggataaactgaaacaaatcccacaggccctcgctgacgctaacagcactgaccctgctctgatcctcgccgaaaacgctagccttctttccctatcagagctggattctgccttttcccagttacaaagtcgcctgagaaatctgagcttgcagctgggagtggagcccgccatggaggccgccggagaagaggaggaggaacagcggaaggaggaagagcctccacggccagctgtggctggacccagacgtcatgttctcctaatggccactaccaggacgggctcatctttcgtcggggagtttttcaatcaacagggcaatatcttctacctcttcgagccactatggcatatcgagcgtaccgttagcttcgagccggggggagcaaacgcagccggctcggccttggtctacagagacgtgctcaaacagctgttcttatgcgatctatacgtgctcgagcactttattaccccactcccagaggatcatctgactcagttcatgttcagaagaggtagctctaggtctctctgcgaggatccggtttgcactcctttcgtaaagaaggtcttcgaaaagtaccattgtaaaaatcgcaggtgtggtcccttgaacgtcaccctcgccgcagaggcgtgccgcaggaaggagcacatggccctgaaagctgtcaggattcgccagctcgagtttctgcagcctctggcggaggatcctcggcttgatctgcgtgtcatccagctggtgcgcgaccccagagcagttctcgcaagcagaatggtcgccttcgctggaaaatacaagacatggaagaaatggctcgacgatgaaggccaggacggattacgggaggaagaagtacagaggcttcgaggcaattgcgagtccattcgattatcagcagagctcggactcaggcagccggcttggctccgtgggaggtatatgctcgtaaggtatgaagatgtcgcccgtggccccctacagaaagcgcgtgaaatgtacaggtttgccggaattcccctgaccccacaggttgaggactggattcagaaaaatacccaggccgcccatgatggttccggtatttacagcacgcagaaaaattcgtctgagcaatttgaaaagtggcgcttcagcatgccatttaagctggcccaggtggttcaggctgcatgcggacctgccatgcgacttttcggctacaagttggcccgggatgctgcggctttaacgaatagaagcgtgtcgctccttgaggaacgggggacgttctgggtaacttag

SEQ ID NO: 110770 - DNA, 1236 bp, synthetic construct
  misc_feature 1..1236: note = Description of Artificial Sequence: Synthetic coding sequence
  source 1..1236: mol_type = other DNA
atgcagtgttcctggaaagcagtacttctcctggctctggccagcatcgccattcagtatacagccataagaactttcacagcaaagagctttcatacttgccccgggctggccgaggctgggctggccgagaggctgtgcgaagagtcccccacattcgcctataatctcagccggaagacccacatcctcatcctagcaacaacccgctcgggatctagtttcgtgggccagctgttcaaccaacacttagatgtgttctatttatttgagccattgtatcacgtgcaaaacaccctcattccccggtttactcagggcaagtcccccgccgatcgacgggttatgctcggtgccagcagagatcttctccgctcgctctatgattgtgatctgtacttcttggaaaattacatcaagcccccacctgtgaatcacaccaccgaccgcatcttccggcgcggcgcgtcgagagtgctatgttcaagaccggtctgtgaccctcccgggcccgccgacctggtccttgaagagggtgactgcgtgagaaagtgcggacttcttaacctcacggtcgcagctgaggcgtgtagagagaggagtcatgttgcgatcaagactgttagagtccctgaagtcaacgacctgagggcgttggtcgaggacccccgactaaaccttaaagtcattcagctggtgagagacccaagggggatattagctagccgtagcgagacgttcagggacacatatcgactctggcggctgtggtatgggacaggtcggaaaccctacaacttggatgtcactcagctgaccacggtgtgtgaggactttagtaatagcgtgtccaccggcctaatgcgaccaccatggctgaagggtaaatatatgctggtgcggtacgaggatcttgccaggaatcccatgaagaaaacggaagagatatacggttttctgggcatcccccttgacagccatgtggcccgctggattcagaacaataccagaggtgacccaacactcggaaagcacaaatatggcacggtgcgtaacagcgccgccaccgcagagaaatggagattccgcctgagttatgatattgttgccttcgcgcaaaacgcttgccaacaggtattggctcaactcggatacaagattgccgcctccgaggaggagctgaagaatccttccgtgtctcttgtcgaagagcgggacttcaggccattttcgtag

SEQ ID NO: 110771 - DNA, 1131 bp, synthetic construct
  misc_feature 1..1131: note = Description of Artificial Sequence: Synthetic coding sequence
  source 1..1131: mol_type = other DNA
atgttccccaggccactgacgcccctggctgccccaaacggagccgaaccactgggtagagccctgagaagagccccactgggacgggcacgagccggactaggtggccccccactgctcttgccaagtatgctgatgtttgccgtgattgtggcttcctccggcctgctgctgatgatcgagaggggcattttagctgagatgaaacctctgcccctccaccctcctggaagagagggcacggcctggagggggaaggctcccaagccagggggactctctttgagagctggcgacgcagacctgcaggttcggcaggacgttaggaacagaacgctgcgggccgtttgcggtcagcccggaatgccgagagacccttgggacctccccgtggggcagcggcgcaccttactgaggcacatccttgtgagcgatcgttacaggtttttatattgctacgtgcccaaggttgcatgctcaaactggaaaagagttatgaaggttctggcaggcgtgctcgactcagtggacgtgcgactgaagatggaccacagaagcgacctggtgtttttagccgacctgcgacccgaagaaataagatatcgactgcagcattattttaaatttctcttcgtcagggaacctctggagcgcctgctcagcgcatatagaaataaatttggggaaattcgcgagtatcagcagcggtatggggcagaaattgtccggagatacagggccggcgcaggcccttccccggcaggcgacgatgtgacttttcctgagtttcttagatatctcgttgacgaggatcctgagagaatgaacgagcattggatgcctgtctatcacctgtgtcaaccttgcgcggtacattacgacttcgtcgggagctacgagcgcctggaggccgatgcaaatcaagtgctggagtgggtgcgcgccccccctcacgtgcgctttccagctcgtcaggcctggtatcggccggccagtcctgaaagccttcattaccacttgtgcagtgcacccagggctctcctccaagacgtactgcctaagtatatccttgacttctctctcttcgcttaccccttacccaacgtgaccaaagaggcctgtcagcagtag

SEQ ID NO: 110772 - DNA, 1275 bp, synthetic construct
  misc_feature 1..1275: note = Description of Artificial Sequence: Synthetic coding sequence
  source 1..1275: mol_type = other DNA
atgacgcttcgccctgggacaatgcgactggcctgcatgttttctagcattctgctctttggagctgcggggctcctcttatttatttctctccaggatccaaccgaactggccccacagcaggtgcctggtattaaattcaatatcagacctcggcagcctcaccatgacctcccccccggcggatcgcaggacggggacctgaaggagcccactgagagagtaacccgtgaccttagttccggggccccacgcggccgaaaccttccagccccagatcaaccacaacctccgctgcagagaggaacccggctgcggctgagacagcgtcgcaggagacttctgattaagaagatgccagcggctgccacaatccctgctaatagctccgatgccccttttatccgtcctggacccggcacgctggatggacggtgggtgtccctccatcgctcccagcaggaaagaaagcgcgtgatgcaggaagcatgtgcaaagtaccgggccagcagcagtaggcgagcagtgaccccaagacacgtgtctcggatttttgtcgaagatcgccaccgggtgctctattgcgaggtgcccaaagcagggtgtagcaactggaagagagtgctgatggtcctcgccggccttgcgtcatctacggcagatattcaacacaatacggtgcactacgggtctgctcttaagagactggacacttttgaccgccagggcatattgcacaggctatctacttacaccaagatgctctttgttagagaaccattcgaacggttagttagtgccttcagagataagtttgaacatcctaacagttactaccaccccgtctttggcaaggccatcctggctcgttatagggctaatgcgtcacgcgaggcactgaggactggatccggggtgagattcccagagttcgtgcagtacttactagatgtccacaggcctgtgggcatggacatccactgggatcatgtcagtcgattatgttctccctgcctgattgattatgatttcgtcggcaaatttgaatcgatggaggacgatgcaaacttttttctgtcgcttatccgtgctccccgaaatctgacatttccgaggttcaaagacaggcactctcaagaagctcgcacaaccgcgagaattgcccaccaatacttcgcccaactgtccgcccttcagcgacagagaacatacgacttctactatatggactatttgatgtttaattactcgaagccatttgccgacctgtactag

SEQ ID NO: 110773 - DNA, 1275 bp, synthetic construct
  misc_feature 1..1275: note = Description of Artificial Sequence: Synthetic coding sequence
  source 1..1275: mol_type = other DNA
atgaccttgaggccaggaacaatgagacttgcttgcatgtttagctctattctactgtttggagccgctggcctgttgctgttcatcagtctgcaggatcccactgagctggctcctcagcaggttccgggaataaaatttaatatccgtccccgccagccccaccatgatttaccgcccggtggaagtcaggacggagacctgaaagagccaaccgagcgggtgaccagagatctctcatcaggagctcccagaggccgaaatttgcccgcccccgaccagccacagcctccgctacagagaggaactcgtcttcgcctgcgacagagaaggcggcggctgctaatcaaaaaaatgcctgctgctgcaaccatccctgccaactcgtccgacgccccttttatcagacccggtcctgggacactcgacggcaggtgggtttcactgcaccgctcccaacaagagaggaaacgagtcatgcaggaggcgtgtgccaagtatagagccagcagctctcgacgtgcagtgaccccccggcatgtgagtaggatcttcgtggaagacagacaccgggtactgtactgcgaagttcccaaagctgggtgctcaaactggaagcgtgtacttatggtgctcgccgggctggccagtagtaccgcagatatccagcataatacagtccattatggtagcgccttgaaacggctggacacattcgatagacagggtatcctgcacaggctctctacatacaccaaaatgctctttgttagggaaccatttgaaagattagtttctgcgttccgggacaaattcgaacacccaaattcctactaccatccagtgtttggtaaagccatccttgcacgctatcgcgccaacgcaagtagagaggctcttaggacaggctcaggggtacgatttcccgagtttgttcagtacctgttagacgtgcatcggccagtcggcatggacatacactgggatcatgtcagtcggctgtgtagtccatgcctgattgattatgattttgtggggaagttcgagagtatggaggacgatgccaacttcttcctaagcctcatcagagctccacgtaaccttaccttccctaggttcaaggataggcactcacaggaggcgagaaccaccgcccggatagcccatcagtactttgcgcagctcagtgccctacagcgacagcggacctacgatttttattatatggactacctgatgtttaattacagcaaacccttcgccgatctttactag

SEQ ID NO: 110774 - DNA, 1275 bp, synthetic construct
  misc_feature 1..1275: note = Description of Artificial Sequence: Synthetic coding sequence
  source 1..1275: mol_type = other DNA
atgaccctgcggccaggtaccatgaggctcgcctgtatgttcagttcaatacttctcttcggcgctgcgggactactgctgttcatatctctgcaggaccccactgaactggccccacaacaggtgcccggaattaagtttaatattaggcctcgccaaccccatcatgatctacctcctgggggttcccaggacggcgacctgaaagaaccaacagagcgcgtgactcgcgacctgtcttctggagcccctcgaggccggaacttgcccgcgcccgaccagccacagccgcctttacagcgaggtacgcggctccggctccgtcagaggaggcgcaggttgttgattaaaaaaatgcccgcagctgctaccattcctgcaaacagctcagacgctcccttcatcaggccgggaccgggaaccctcgatggccgttgggtatccttacaccggagccagcaggagcgcaagagagtaatgcaggaggcttgtgccaagtatcgcgccagctcctctagaagggcagtgaccccccgccacgtgtccaggatcttcgtagaagacagacacagggtcttatactgtgaagtgcctaaagcggggtgtagcaattggaagcgcgtcctcatggtgttggcgggcctggcaagttcaaccgctgacatacagcacaacaccgtccactatgggagtgctctaaaacgtctcgacactttcgaccgccagggaatcttacatagactgtccacctacacgaaaatgttatttgttagggaaccatttgaacggttagtgtctgccttcagggacaagttcgagcacccaaactcctattatcatccagttttcggtaaggcgatactggcaagataccgagcaaatgcctcccgggaggcactaagaactggaagtggggtaaggtttcctgagttcgtgcagtacctgctagatgtgcaccgtccagttgggatggatattcactgggaccacgtctctagactctgtagtccgtgcctgatcgattacgactttgtgggcaagtttgagagtatggaggatgatgctaatttctttttgagcctgatccgcgcacctcgcaaccttacatttccaagattcaaagacagacacagccaggaagcaaggactacggccagaatagcacatcagtactttgcgcagctctcagctctccaaagacaacggacctacgacttttattacatggactaccttatgttcaactactctaagccattcgccgacctctattag

SEQ ID NO: 110775 - DNA, 1686 bp, synthetic construct
  misc_feature 1..1686: note = Description of Artificial Sequence: Synthetic coding sequence
  source 1..1686: mol_type = other DNA
atgaggcactgcattaactgctgcatccagctgctgccagacggtgcacacaagcagcaggtcaactgtcagggcggacctcaccatggccaccaggcctgtccaacgtgcaaaggcgaaaacaaaattctgttccgagtcgatagtaagcaaatgaatctgttagcagtcctggaggtgcgcaccgaagggaacgaaaattggggcgggtttctccggttcaagaagggcaaacggtgctctctcgttttcggcttgattattatgacacttgtgatggcctcctacattcttagtggcgcccaccaggagctgcttattagcagccccttccactacggcgggtttccgtccaatcctagcctgatggactctgaaaaccctagcgacaccaaagagcaccatcatcaatcctcggttaataatatctcctatatgaaagattatccgtctattaaacttatcatcaattccatcacgaccaggatcgagttcactactaggcagttgcccgaccttgaagacctgaagaagcaggagctgcatatgttcagcgtgattcccaacaagttcctacctaactctaagagcccctgctggtatgaggagttcagcggccagaataccacagatccatacttgaccaacagttacgtgctgtactccaaaagatttcggtctacctttgatgccctcagaaaagctttttggggtcacttagctcacgcccacggaaagcacttccgcctgcgttgcctgcctcatttttacattattggacagcccaagtgcggaaccactgatctgtacgaccgtctgaggcttcaccccgaggtgaaattcagcgccatcaaagaacctcactggtggacaagaaagcgctttggaatagtacgtttgcgggatggcctaagggacaggtatcccgtggaagattacctggatctgttcgacctcgccgcccatcagattcatcagggactgcaggcaagcagcgccaaagaacagtcaaagatgaacaccatcattatcggtgaagcatccgcttcaactatgtgggacaataatgcttggacctttttttacgacaacagcaccgatggcgaaccgccattcctaacccaagatttcatccacgcgtttcaacccaatgcacgcctgatcgtcatgctgagagatcctgtcgaaaggttatactccgattatctatactttgcttcctcaaacaaaagcgctgatgacttccacgaaaaggtcactgaggcacttcagctgtttgaaaattgtatgctcgattattctcttagggcctgcgtttacaacaacacactgaacaacgctatgcctgttcgactgcaggttggtctgtatgcagtctatctcctggactggctttctgtttttgataaacagcagttcctgattctgagactcgaggaccacgccagcaatgtcaaatatacgatgcataaagtgtttcagttcctgaatttaggacccctttcagagaaacaagaagcacttatgactaagtctccagcaagcaatgccaggagacccgaagatagaaacctgggacctatgtggcccatcacacagaaaattttgcgggacttctatcgtccgttcaatgcccgcctggctcaggtgctcgcggatgaggcatttgcttggaaaactacatag

SEQ ID NO: 110776 - DNA, 1521 bp, synthetic construct
  misc_feature 1..1521: note = Description of Artificial Sequence: Synthetic coding sequence
  source 1..1521: mol_type = other DNA
atgaggcattgtattaactgctgcatacagctgttgccagacggggcccacaaacagcaagtaaattgccagggtggaccacaccatggacaccaggcttgcccaacctgcaagggcgaaaataaaatcctattccgagttgacagtaagcagatgaatctgttagctgtgctggaagtgcgaaccgaggggaatgagaattggggaggatttcttcgcttcaaaaaaggtaagagatgtagtttggtctttggactcattattatgacattagtgatggcttcatacatcctgagcggggcgcatcaggaactccttatttcgagtccatttcactatggtggtttcccttctaatccttctctcatggactctgagaatccctccgacacaaaagagcatcaccatcagtcctcagtgaacaacatctcttacatgaaggactaccccagtatcaaactgatcattaattcaatcacaacgcgaatagagttcacgacccgacagctgccggatctggaggacctcaagaagcaagagctgcacatgtttagtgtcatacctaacaagtttttgcctaattcaaagagcccctgttggtacgaggagttctccggacagaatactacagatccctacctaacaaattcttacgttctttattcgaagcgttttcggtcgaccttcgacgctttgcgcaaagcattttgggggcaccttgctcatgctcacggaaagcatttcaggctgagatgcctgccacatttttacatcataggccaacccaagtgcggcactactgacctgtatgacagattacggctccaccccgaggtgaaattcagtgccattaaggaaccgcattggtggaccagaaagaggtttggtatcgtgagactacgcgacgggctcagagataggtacccagttgaagattatcttgatctctttgaccttgcggcacaccagattcatcagggactgcaggcatccagtgctaaagagcagtcaaagatgaataccattataataggcgaggcttccgccagcactatgtgggacaacaacgcatggacattcttttatgataacagcaccgacggtgaacctccttttctgactcaggatttcattcacgcctttcagcctaacgcacgattgatagtaatgctacgagaccctgtcgagaggctctactctgattatctgtacttcgcatcaagcaataagagcgccgatgactttcatgagaaggtcaccgaggcgctgcagcttttcgaaaattgtatgcttgactacagcctcagagcatgcgtgtacaataacaccttgaacaatgctatgcccgtttgcaccccgccacctcgcacacctcgagcagggccctggcagaaagagctcgtgtgctgttactatgcttccggcattgtggggctgagattttctatcggtaccgaacgctccgtgctgatgtgcaagtgttgcagtccactgtttatggacgtgaaggctgagaattag

SEQ ID NO: 110777 - DNA, 624 bp, synthetic construct
  misc_feature 1..624: note = Description of Artificial Sequence: Synthetic coding sequence
  source 1..624: mol_type = other DNA
atgcgccactgcattaattgttgtattcaactcttgcctgacggcgcccacaaacagcaagtcaactgccagggtggccctcatcacggccaccaggcgtgtcccacatgcaaaggagaaaacaaaatcctctttagggtggactcaaagcaaatgaacctcctcgccgtgctggaagtgcggaccgaaggtaacgagaactggggaggcttcctgagatttaagaaggggaagcgctgttccttggtattcggcctgataatcatgacgctggtgatggcctcctatattctgtctggagctcatcaggagttattgatcagttcgccctttcactacggcgggtttccatctaatccaagtctgatggattctgaaaatcccagcgacaccaaggagcatcaccatcagtcaagtgtaaacaatatctcctatatgaaagactacccttccattaaactcatcattaacagtatcacaaccaggatcgagttcaccacaaggcaactcccagacttagaagacttgaagaaacaagagcttcacatgttctctgtgattccgaataaattcctcccgaaacacaacgcccaagctgaactgggcttgaatgtggcctgctag

SEQ ID NO: 110778 - DNA, 1686 bp, synthetic construct
  misc_feature 1..1686: note = Description of Artificial Sequence: Synthetic coding sequence
  source 1..1686: mol_type = other DNA
atgcggcactgcataaactgttgtattcagttacttcccgatggagctcacaagcagcaggtcaattgccagggtgggcctcatcatggtcatcaggcctgcccaacctgcaaaggggagaataagattctctttagggtcgacagcaaacagatgaaccttttggcagtgctggaggtcagaaccgaagggaacgagaactggggtggttttttaaggtttaaaaaagggaagagatgttcattagtgttcggccttattataatgaccctggtcatggcctcctacattctaagcggagcccaccaggaattgcttattagctcccccttccactacggtgggtttccgtcgaaccccagccttatggactcagagaatcctagcgacacaaaggaacatcatcatcagagctcagtaaacaacatttcgtacatgaaggattatccctccataaaactgattatcaacagcatcactacacggatcgagttcaccactagacagctaccagacctcgaggatctcaagaagcaggagttgcatatgtttagcgttattccaaacaaatttctccctaactccaagtcaccttgctggtacgaagagttctctggacagaatactaccgatccatacctgactaactcgtacgttctttacagtaaaagatttcgatctacctttgatgcgctaaggaaagccttctggggacacttggctcacgctcacggaaagcattttcgtctgaggtgcttgcctcatttctatatcattggccagccgaaatgtggcaccaccgatttgtacgataggctccgcctgcatcctgaggtaaaattcagcgcaatcaaagaaccccattggtggacaaggaagaggttcggtattgttaggttacgagatggcctcagggacaggtatcctgttgaagattatttggatctcttcgatctcgcggctcatcagatccatcaagggctacaggccagtagtgcaaaggagcagagtaagatgaatacaattataattggtgaggctagcgctagcaccatgtgggataacaatgcgtggaccttcttctatgacaactctaccgatggagaacccccctttctaacgcaggattttatacatgctttccagcctaatgcccgtctaatagtaatgctaagagatcccgtggagcggctgtactccgattacctctactttgcctccagtaacaagagtgctgacgacttccatgagaaagtaacagaggcactacaattgttcgaaaactgtatgctggattactcactgcgggcctgcgtttacaataataccctgaacaacgctatgccagtgaggctgcaggtggggttgtacgccgtgtatctgctggactggttaagcgttttcgacaaacaacagtttctgattctgcgcctggaggatcatgcctccaacgttaagtacacgatgcacaaagttttccaatttttgaaccttggcccgttgtcagaaaagcaggaggccttgatgactaagtcacccgcctcaaacgcgcgccgtccagaggaccgcaatttgggaccaatgtggcccattacacagaaaattctgcgcgacttttaccgtccattcaatgcacgcttggcccaagttctggcggacgaagcattcgcatggaagaccacctag

SEQ ID NO: 110779 - DNA, 1449 bp, synthetic construct
  misc_feature 1..1449: note = Description of Artificial Sequence: Synthetic coding sequence
  source 1..1449: mol_type = other DNA
atgaggcactgcatcaactgttgcatacaactgctgcccgatggagcccataaacagcaggtcaattgccagggtggaccccatcatggtcatcaggcatgccccacctgcaagggagaaaacaagattctgttccgcgtggactcgaaacagatgaacttgctggctgtgctggaagtccgcacagaggggaatgaaaactggggtggattcttgcgcttcaagaaaggtaagcggtgcagcctcgtgtttggcctgatcattatgactttagttatggcttcttatatcttgagcggagctcatcaggaattgcttatcagctctcctttccattacggaggctttcccagcaacccttctctgatggactcggagaacccttccgacaccaaagaacatcaccatcagagctctgttaataacatttcctatatgaaagactatccatctatcaaactgattataaacagtataacaacccggattgaatttacaaccaggcagctaccggaccttgaggatctaaagaagcaagagctgcacatgttcagcgttattccaaataaatttttgcccaacagcaaaagcccttgctggtacgaagaattttcaggccagaacaccacagatccctatctcactaatagttacgtgctgtactccaaacggttcaggagtacatttgatgccctcaggaaagctttctgggggcacctggcccacgcccatggtaagcactttaggctgagatgccttccacacttttacatcatcggacagcccaaatgcggcaccacagatctttatgaccgcctgcggttgcaccccgaagtgaaatttagtgccattaaggaaccccattggtggactcgcaagcgctttggtattgtcagactccgggacggccttcgtgacaggtaccccgtcgaggattatctcgacttgttcgacctggccgcgcaccagattcatcaaggtttacaggcaagtagtgcgaaggagcagtccaaaatgaacaccatcatcattggggaggcgtccgccagtaccatgtgggataacaacgcgtggacattcttttacgacaactccacagacggcgaaccaccattcctgacccaggactttattcatgcatttcagccgaatgctagacttatcgttatgctgcgcgatcccgtggaacgcctgtacagcgactacctgtatttcgccagtagcaacaagtccgcagacgattttcatgaaaaagtgacagaggcgttgcagctgttcgagaactgtatgctagactattctctccgggcttgtgtgtataacaatacccttaacaacgcaatgccagtgtgcacgcctcccccagtaccacccgaattggcgcctgggaggcggagctggttcgttgtgatcatgcaggctgcgctttgggtttgcgtcagcgcctag

SEQ ID NO: 110780 - DNA, 1236 bp, synthetic construct
  misc_feature 1..1236: note = Description of Artificial Sequence: Synthetic coding sequence
  source 1..1236: mol_type = other DNA
atgggaatgagagcaagagtgccaaaggtggcacattcgactcgacgcccgccagcagccagaatgtggttgccgcgcttctcctctaaaacggttaccgtgctgcttcttgctcaaacaacttgcctgcttctcttcattatctctaggccagggccatcaagccctgctggcggggaagatagagtacacgtactggtgttaagctcttggagaagcggctcatccttcctaggccagttattctctcagcatcccgatgtgttctatctgatggagccggcatggcacgtatggactaccctatctcagggctctgcggcaacgctccacatggctgtccgagatctgatgaggtctatattcctgtgcgacatggacgtctttgatgcctacatgcctcagtctcgcaacctctccgcgttttttaactgggccacttccagggccctgtgttcaccaccggcttgcagcgcctttccaaggggcacaataagtaaacaggatgtctgcaagacactctgtactcggcagccattctcgcttgccagggaagcgtgccggagctatagccacgttgtcttgaaggaggtccggttttttaacctgcaggtgttgtacccactcctttcagatcctgcgctcaatttaagaatcgtacatctggtccgagaccctagagcagtccttagaagcagagaggctgcaggacccatactggctcgtgacaacggcatagtcctagggacgaacggaaaatgggttgaggctgaccctcacttacggttgattcgcgaagtctgtcgcagccatgttcgcatcgctgaggccgcaaccctgaagcccccaccatttcttcgggggaggtatagactcgtgcgcttcgaggacctggcaagggagccactagccgagataagggctttgtatgcttttactggcttgactctgactccacagctagaggcgtggattcataacatcactcatggctctgggattgggaaacctatcgaggcatttcacacttccagccgaaacgccaggaatgtgagccaagcgtggagacatgctctgccgtttaccaaaattcttagggtgcaagaggtgtgtgctggagccttacaattactggggtatcggcctgtgtattctgctgaccaacagcgagacctgacactcgacctggttcttcctcgtggacccgaccacttttcatgggcctctccagattag

SEQ ID NO: 110781 - DNA, 1254 bp, synthetic construct
  misc_feature 1..1254: note = Description of Artificial Sequence: Synthetic coding sequence
  source 1..1254: mol_type = other DNA
atgtcccggcacttgccgtggatctgcgatcagcggtgttcatccccaagttctccaggtagatggcctccggcagctaggatgtggctgcctcgattctctagtaaaaccgtcactgtcctgctgctggcgcagacgacatgcctcctgctcttcatcatctccaggccgggaccgtcttcacctgccgggggcgaggatcgcgtgcacgtgctggtccttagttcttggaggagcggctctagttttctgggtcagttattttcacagcaccccgacgtgttctacttgatggagccagcttggcatgtgtggacgacgctgtcacagggatctgcggccacactgcacatggctgtgcgcgatttgatgaggtccatattcctctgtgacatggacgtgttcgatgcgtacatgcctcagagtcgaaatttgtccgcttttttcaactgggccacctctcgcgccctctgcagtccgccggcttgctcagccttcccaaggggcactatctcaaaacaggacgtgtgtaagactctatgcactagacagccattctcactggctcgcgaagcttgccgttcatactctcacgtcgtcttgaaggaggtgcgtttttttaatctccaggtcctctaccctctgctgagtgaccccgcactgaatctccgaatcgtccatctagttagagacccccgtgcagttctgcgctcacgcgaggccgctggccccattctggcccgagataatggcattgttttaggaactaatgggaagtgggtcgaggccgacccgcatctgcggctcatcagggaagtgtgtagaagccatgtgagaattgcagaggctgccaccctaaagccgccaccgtttctaagggggagatatcgcctcgttcgcttcgaggatctggccagggaacccctggccgaaatacgggcactctacgcgttcacagggcttactctgaccccgcagttggaagcctggatccataatatcacacatgggtccggcatcgggaaacccattgaagccttccacacctcttctaggaacgcacgaaacgtttcccaagcctggagacacgctttaccattcacaaagatactgcgggtgcaggaagtttgtgcaggcgctctccagctcctgggatacagaccagtgtacagtgctgaccagcagagggatttaacactagacttggttcttccgagaggcccggaccatttttcttgggcgagtcccgactag

SEQ ID NO: 110782 - DNA, 1188 bp, synthetic construct
  misc_feature 1..1188: note = Description of Artificial Sequence: Synthetic coding sequence
  source 1..1188: mol_type = other DNA
atgtggcttcccagagtgagctcaacggctgtgactgcactgctactggctcaaacattcctgcttttgtttctggtgagtcgtccaggcccgagctctccagccggaggagaggcccgggtgcacgtgctggtgttgtcatcatggcggagtgggtctagttttgtaggacagctttttaatcagcatcctgatgtgttctatcttatggaacctgcctggcacgtatggacgactctttctcagggtagcgccgccactctgcacatggcggtcagagatctggtgaggtccgtttttctttgcgacatggacgtgttcgatgcttacctaccttggcggcggaaccttagtgaccttttccaatgggctgtgtccagggctctatgttcccctccggcatgttctgcttttccgcgcggtgcgatatcctccgaggcagtttgtaagcctttatgtgcaagacagtctttcaccctggcacgggaagcctgtagatcctatagtcacgtggtgctgaaggaagtgaggttcttcaatctgcaggtgctgtatcccctgctgtctgaccctgcattgaaccttcgcatcgtgcatctcgtacgtgatccacgggccgtgctccgatcacgcgagcaaacagccaaggctttggctcgagataacggtatcgtgcttggcactaatgggacctgggtcgaagcagatcctggcttgagagtggtgcgggaagtttgccggagccacgtgaggatcgcagaggccgcaaccctgaagccccctccattcttgcggggtcgctaccggcttgtgagatttgaggatttggcacgcgagcctttagctgaaatcagagccttgtacgccttcacgggcctctccctgactcctcagttggaggcctggatacacaacatcacccatgggtctgggccaggcgccaggcgggaggcgtttaaaacatcgagcagaaatgccctgaatgtctcccaggcctggagacacgcgctgccttttgcaaaaattcgccgcgtgcaggaattgtgtgccggggccttacaacttctcgggtaccggccggtctacagcgaagacgagcagcggaacctcgccctggatcttgttttgccacgcggactaaatggattcacttgggcctcttccacagctagccatccaagaaattag

SEQ ID NO: 110783 - DNA, 1188 bp, synthetic construct
  misc_feature 1..1188: note = Description of Artificial Sequence: Synthetic coding sequence
  source 1..1188: mol_type = other DNA
atgtggcttccccgcgtctcatcaaccgccgtcactgccctgcttctggcccagacatttctgctgctctttctggtttcgcgccccggcccttcctcacctgctggaggagaggctcgtgtccatgtcctggtactgtcatcctggagatctggatcctcatttgtgggccagctcttcaatcagcatccggacgtattttatcttatggagccagcatggcacgtttggaccaccctgtcccaggggtccgcagccaccctgcacatggccgttcgggaccttgtgcggtccgtgttcttatgtgatatggacgtctttgacgcttacttgccctggaggcggaatctcagtgacctgttccaatgggccgtgagtcgagctctgtgttcccctcctgcttgttcagccttcccccgaggagccatatcctccgaggccgtttgcaaacccctctgcgcaaggcaaagttttacactggctcgcgaagcctgtcggtcgtatagtcacgtcgtgcttaaggaagttcggtttttcaacttgcaggtactgtacccgctgctgtctgacccagccttgaatctgcgtatcgttcacctcgtccgcgacccaagagccgtgttacgctcccgggagcagaccgcaaaagccttggccagagataatggcatcgtgctggggacaaatggcacctgggtggaggctgaccctgggttgcgcgttgtcagggaagtatgtaggtcccatgtgagaattgccgaggcagccacattaaaacccccaccattcttgaggggcaggtataggttggtgcgtttcgaagatttggcgagggagccactagccgagatccgcgctctctatgcctttacggggctaagcttaaccccgcaactggaggcatggattcacaacatcacacacggttccgggccaggggcccggagggaggcctttaagaccagttcaaggaacgcactcaatgtctctcaagcttggcgccacgccctgccttttgcaaaaatccggcgggttcaggagttgtgcgccggtgcgctgcagctgttgggatataggcctgtctattctgaggatgagcaacgaaacctggcgttagacctggtgctgccgcgaggtctcaacggttttacatgggccagctccactgccagtcatcccaggaattag

SEQ ID NO: 110784 - DNA, 1461 bp, synthetic construct
  misc_feature 1..1461: note = Description of Artificial Sequence: Synthetic coding sequence
  source 1..1461: mol_type = other DNA
atgaagggccgccgccgacgccgccgcgaatactgcaagtttgccctcctcctggtactgtacacgctcgtcctgttgctcgtgccctcagtactggatggaggacgcgatggcgacaaaggtgccgagcactgtcctggcttacagcggtccctgggggtgtggagcttggaggctgcggccgctggggaacgcgaacagggagctgaagcgcgcgctgccgaggagggcggggctaaccagagccctcggtttccatcgaatctgtctggtgcagtaggtgaagctgtgtcgcgcgaaaagcagcacatttacgtgcacgctacttggagaactggaagcagctttcttggcgagctgtttaaccagcatcccgatgtgttctatttgtatgagcctatgtggcacctgtggcaggcactgtaccccggcgacgctgagtctttacagggcgcccttagggacatgctgcgaagtctgttcagatgtgatttcagtgtccttcggctctacgccccacctggagatcccgcagcaagagcccctgacacagcgaatctaacaacagcagctctgtttaggtggcgcaccaacaaagtcatatgcagccctccactctgccctggcgccccccgagcacgggccgaggtgggccttgtggaggacacggcttgcgagagatcttgtccgcccgtggcaattcgggcccttgaggccgagtgcagaaagtaccccgtcgtggtcattaaggacgtgcgcctgctggacctcggggtcctggtgcctctgctgcgcgatcctggacttaacttgaaggttgtccagctttttcgggacccccgagcggttcacaatagccggcttaagagtcggcaggggttgctgagagagtctatccaggtgttgagaacgcgccagcggggcgatcggttccaccgggttctccttgcccacggagtgggtgcacgtcctggcgggcagtcccgggcattgcctgccgccccacgcgccgatttcttcctcactggggccctcgaggtgatttgcgaggcctggcttagggacctgctctttgcacggggcgcaccagcctggcttcggcgccgttatctgcgtctgcggtatgaggacttagttcgacaaccgcgggcccagctacggaggctgttgcgctttagtgggctaagggccttagcggccctggacgcctttgccctgaatatgacccggggggccgcttacggcgcagatcgcccgttccatctctcagcccgtgacgctagggaggcagtgcacgcctggcgggaaagactgagcagggagcaggtccgacaggtagaagcggcatgtgctcctgctatgaggctgctggcctacccaagaagcggcgaggagggagatgccgagcagcctagagaaggcgagacacccctggaaatggacgctgacggcgctacttag

SEQ ID NO: 110785 - DNA, 1593 bp, synthetic construct
  misc_feature 1..1593: note = Description of Artificial Sequence: Synthetic coding sequence
  source 1..1593: mol_type = other DNA
atgtctcgaagcccccaaagagctctgcctccgggggcactaccgagactgttgcaggctgctcccgccgccgccccccgtgccctgctgccccagtggccacggaggcccggacgacgctggccagcctccccactgggcatgaaggttttcaggcggaaggccctggtgttatgcgccgggtatgctctgctcttagttcttaccatgctgaacctgttggactacaaatggcataaagagcccttgcagcagtgtaaccccgacggtccactgggcgcagctgccggtgcagcagggggctcatggggccggcccggccctcctccagccggcccccctagagcccatgcgagactggatctacgtacaccttaccgaccccccgccgcggccgtgggagccgctcccgctgccgctgccggaatggcaggggtagctgctccccctggaaacggaacgcgggggaccggaggggtgggagacaaaagacagttggtgtatgtgtttactacctggcgcagcggctcctccttcttcggagaactatttaatcagaatccggaagtgttcttcctgtatgagccagtatggcacgtatggcaaaaactatacccgggcgatgctgtctcacttcagggggctgccagagacatgctgagcgcgctgtatagatgcgacctgtctgtgttccaattatactcaccagccgggtccggaggcaggaacctgactaccctgggaatatttggagctgccacgaataaagtggtctgtagcagtccactgtgccctgcttataggaaggaggtggtcggcctggtcgacgaccgcgtttgcaaaaagtgtcctccccagcgtctggcaaggtttgaggaagaatgcagaaagtatcgcacacttgtgatcaagggcgtcagggtcttcgatgtggccgtgttggccccgctgttgagagatcctgctctcgacctgaaagtgatccacttagtgagagatccccgggccgtggcttcgtctagaattcgcagcaggcatggccttataagagagtccctccaggtggtcagaagtagggatccccgggctcaccgaatgccttttctggaagctgcagggcacaagttgggcgctaaaaaagagggcgtaggtggccctgcggactatcacgcactgggcgcgatggaggtgatctgcaatagcatggccaaaactctacaaaccgccttgcagcctcccgattggctgcaaggacactacctggtggttcgctatgaggacctggtaggcgatccggtgaaaaccttgaggcgggtttatgattttgtggggctgctcgtttcccctgagatggaacagtttgcgctcaatatgacttccggttctggctcttcctctaagcctttcgtagtctccgctagaaacgctacacaggctgccaatgcttggagaaccgccctgacatttcaacagatcaaacaagtggaggagttctgttaccagccaatggctgtgctcggttatgagcgagttaattcacctgaagaggtgaaagacctcagtaagaccctgcttcggaagcctaggttgtag

SEQ ID NO: 110786 - DNA, 1071 bp, synthetic construct
  misc_feature 1..1071: note = Description of Artificial Sequence: Synthetic coding sequence
  source 1..1071: mol_type = other DNA
atgcatcatcaatggttgctgctggcagcttgcttttgggtgatatttatgttcatggtagcaagcaagtttatcaccctgacgtttaaggaccccgacgtgtactccgcaaaacaagagtttctgttcttgacaacgatgcctgaggttagaaagttacccgaggaaaagcacatacctgaagaactgaaacccacaggcaaggaactgccagatagtcagctcgttcagcctctggtgtatatggaacgactggagttgatccggaacgtgtgccgcgacgacgccttaaaaaacctgagtcatacccctgtcagcaaattcgtgctggaccgtatcttcgtgtgtgataaacataaaatcttgttttgtcagactcccaaggtgggtaacactcaatggaaaaaggtgctcatcgtgctcaacggggccttcagttcaatagaggaaatccctgagaatgtggtgcatgatcatgagaaaaacggcctgccaagactcagttcctttagcgatgctgagatccaaaagcggctgaagacttacttcaagttctttatagtacgtgacccctttgaacggctgatatcggcattcaaggacaagtttgttcataatccccggttcgagccctggtacagacacgagatagccccagggattattcgcaagtatcgccggaacaggacggaaacacggggaatacagtttgaagactttgttcgctatttgggggacccgaatcatcgctggttggatcttcagttcggcgatcatatcatccactgggtaacctatgtagaactgtgtgcaccatgtgagatcatgtattccgtaataggacatcacgagaccctcgaagatgacgctccatacatcctgaaggaggccggcatagaccatctggttagttaccccacaatccctcccggcatcactgtttacaatcgcaccaaagttgagcattacttccttggcatctccaaacgggatatccggagattgtacgcgcggttcgaaggggatttcaagctcttcggctatcagaagccggatttccttctgaattag

SEQ ID NO: 110787 - DNA, 426 bp, synthetic construct
  misc_feature 1..426: note = Description of Artificial Sequence: Synthetic coding sequence
  source 1..426: mol_type = other DNA
atgcatcaccagtggctcctgctggcagcatgtttctgggttatctttatgtttatggtagcctctaaatttatcactttgacctttaaagatcccgacgtctattcagcgaaacaggaattccttttcctgactacaatgcccgaggtccggaagttgccagaggaaaaacacataccagaagaattaaaacccaccgggaaagagctccctgatagccagctggtgcaacccctggtttatatggaacggcttgagctcatccgaaacgtttgcagagacgatgctctcaagaacctgtcacacacacctgtgtcaaagtttgtcctggatcgaatcttcgtctgcgacaaacataaaatcctgttctgccagacgcccaaagtcggtaacacacagtggaaaaaagtgctaattgtgctctag

SEQ ID NO: 110788 - DNA, 1071 bp, synthetic construct
  misc_feature 1..1071: note = Description of Artificial Sequence: Synthetic coding sequence
  source 1..1071: mol_type = other DNA
atgcatcaccagtggctgctgctggctgcgtgtttctgggtgatcttcatgttcatggtagctagcaagtttatcaccctcactttcaaggacccagatgtgtactccgcaaaacaagaatttctgtttctgacaactatgccagaggttcggaagctgcctgaagagaagcacatacccgaagagctaaagcctacgggcaaggagctccctgacagtcaactagttcagcctctcgtttatatggaaaggctcgaactgatcagaaatgtgtgtcgggacgatgccctgaagaatctgagccacacacctgtgtccaagtttgtgctggacaggatatttgtgtgtgacaagcataagatcctattttgtcagacacccaaggtgggcaacacgcagtggaagaaggtcttaattgtcctgaacggagctttttcgtcaatcgaggagattcctgagaacgttgtgcatgaccacgagaagaatggacttcctcgcctatcttcattctcagacgccgaaattcagaagagactgaagacgtactttaagtttttcatcgtgcgggaccccttcgagcgacttattagtgctttcaaagacaagtttgttcacaatccacgattcgagccatggtatagacatgagatcgcccctggcattattcggaaatatcggaggaaccgaacagagaccaggggcattcagttcgaggatttcgttagataccttggcgaccctaatcacagatggctggatctgcaattcggcgatcacatcatccactgggtcacatacgtggaactctgtgccccatgcgagattatgtatagtgttattggccatcacgagactctagaggacgacgcaccatatatcttgaaggaggccggtatcgatcatctcgtctcttatccaaccatccctccaggtattacagtctacaaccggactaaagtggaacactattttctgggcatttcaaagcgggacatcagacgactatacgcaaggtttgaaggagacttcaagctgtttggatatcagaagcccgattttcttttaaattag

SEQ ID NO: 110789 - DNA, 195 bp, synthetic construct
  misc_feature 1..195: note = Description of Artificial Sequence: Synthetic coding sequence
  source 1..195: mol_type = other DNA
atgcatcaccagtggttgttgctggctgcttgtttttgggttatattcatgttcatggtggcctcaaaattcattacacttacattcaaagaccctgatgtctattctgctaaacaggagtttctgtttttgaccacaatgccagaggttcgcaaactgcctgaggagaagcatatccctgaagagctgaagtag

SEQ ID NO: 110790 - DNA, 402 bp, synthetic construct
  misc_feature 1..402: note = Description of Artificial Sequence: Synthetic coding sequence
  source 1..402: mol_type = other DNA
atgcatcaccaatggttgctcctcgccgcatgtttctgggtgattttcatgtttatggtggcatccaagtttatcactctgacattcaaagatccagacgtctactccgctaagcaggagttcctttttctgaccactatgcctgaggtgaggaaactacccgaggagaaacacataccagaggagctgaaacctacaggcaaagagcttccagatagtcaattggtccaacccctcgtctatatggagaggctcgagctaatccgaaatgtctgtcgcgacgacgctctcaaaaacctgtcgcatacacccgtttctaagtttgtccttgatcgaatctttgtctgcgataagcacaaaatcctgttctgccagacacctaaagtgggtaacacccagtag

SEQ ID NO: 110791 - DNA, 258 bp, synthetic construct
  misc_feature 1..258: note = Description of Artificial Sequence: Synthetic coding sequence
  source 1..258: mol_type = other DNA
atgcaccaccagtggctgttattggctgcctgtttctgggttatctttatgttcatggttgcctctaagttcatcactctgaccttcaaagaccccgacgtctacagtgccaaacaggaattcctgtttctcacgacaatgccggaggttcgaaagcttcctgaggaaaaacatatcccggaggaacttaagcccaccggaaaggagctgcccgattcccaactcgtgcagcctctcgtttacatggaacggctatag

SEQ ID NO: 110792 - DNA, 102 bp, synthetic construct
  misc_feature 1..102: note = Description of Artificial Sequence: Synthetic coding sequence
  source 1..102: mol_type = other DNA
atgcaccaccagtggctgctactggcagcgtgtttctgggtcatcttcatgttcatggtagcctcaaagtttattaccctcacttttaaggaccccgactag

SEQ ID NO: 110793 - DNA, 1215 bp, synthetic construct
  misc_feature 1..1215: note = Description of Artificial Sequence: Synthetic coding sequence
  source 1..1215: mol_type = other DNA
atgcagagaaaagcaggcaaaaaagagcatgtgcagctacgagataagcggaaccaggaaccacagttcagaggcaacactgcccgaaagtgtgagccacaggccgcagagggtcgcgtgtccgagtggttacgctgcgataatatgcaccatcagtggttgctccttgccgcctgcttttgggtcatctttatgtttatggtggctagtaagttcataaccttgacttttaaggaccccgatgtctactcagctaagcaggaattcctattcctgacaacaatgcccgaggtgaggaaactcccagaggaaaagcacatcccagaggagttaaaacccacaggaaaggaactgcctgattcccagctcgtgcaaccattagtctatatggagcgcctggagttaattcgaaacgtgtgcagagatgatgccctgaagaacctaagccacactccagtgagcaagttcgttcttgatagaatctttgtgtgcgacaagcacaaaattcttttttgccagacaccaaaggttggcaacacacaatggaagaaggtactgatcgtactgaacggagcgttctcctcaattgaggagatccccgagaatgtggtgcacgaccatgagaaaaacggtctgcctcgcctctctagtttcagtgacgcggaaatccagaagcgtctgaaaacctactttaaatttttcatagtgagggacccctttgaacgactgataagcgcatttaaggataagtttgtccacaaccccaggttcgaaccgtggtatcggcacgagattgcacctggtattatcaggaaatacagaaggaacagaacggagaccaggggcatacagttcgaggactttgtcaggtatttaggtgaccccaaccaccggtggctcgacctccagtttggagatcacatcattcattgggtcacatacgtagagttatgcgcaccctgtgaaatcatgtacagcgtcatcgggcaccatgagaccctggaagacgacgcaccatacatccttaaagaagcaggaatcgaccacctcgtgtcttatccaacaatcccacccggaatcacagtttacaataggactaaggttgaacactatttcctgggcatcagtaagcgcgatattagacggttgtacgcacgctttgagggagacttcaagctttttggctatcagaagcctgacttcctcctgaactag

SEQ ID NO: 110794 - DNA, 786 bp, synthetic construct
  misc_feature 1..786: note = Description of Artificial Sequence: Synthetic coding sequence
  source 1..786: mol_type = other DNA
atggcgagcccagattggggatatgacgacaagaatggtcctgagcagtggtctaagctgtatcccatagccaacgggaacaatcagtctcccgtagacattaagacgtccgagacaaaacacgacacaagcctgaagccaatcagtgtgtcctataatcccgctaccgctaaggagattatcaacgtgggtcactcatttcacgtgaactttgaggataacgacaacagatcggttttgaaggggggtcctttctccgactcttaccgtctgttccagtttcactttcattgggggtctactaatgagcacggctccgaacacacggtcgatggcgtcaagtactccgcggagcttcatgttgcccattggaacagtgctaagtattcaagcttggctgaagcggcctcaaaagcagatggactggcagtgattggtgtcctgatgaaggttggtgaagctaaccccaagttgcagaaggtactcgatgcactacaagcaatcaagacgaagggaaaacgcgccccttttactaatttcgacccgtccacacttctgccatcttctctagacttctggacgtacccaggtagtctgacccatccacctctgtacgagtcggtgacatggatcatctgtaaggaaagcatttccgtgagttccgaacagctggctcagtttcgttctctactcagtaatgtcgaaggagacaatgccgtcccaatgcagcataataaccgccccacccagccactcaaaggaagaaccgtaagggcttctttttag

SEQ ID NO: 110795 - DNA, 786 bp, synthetic construct
  misc_feature 1..786: note = Description of Artificial Sequence: Synthetic coding sequence
  source 1..786: mol_type = other DNA
atggcttcgcctgactgggggtacgacgacaaaaatgggcctgagcagtggagtaagctctatcctatcgctaatggcaacaaccaatctccagtcgacattaagactagcgagacgaagcacgacacaagcctgaagcccatctctgtcagttacaatccagccaccgcaaaggaaattatcaatgtgggacattcctttcatgtgaactttgaagacaacgataatcggtcggtgctcaagggtggccctttcagtgattcttaccgcttattccagtttcacttccattggggaagcactaatgaacatggcagcgagcacacagtcgacggcgttaaatactccgcagagctccacgttgctcactggaatagcgccaagtattcaagcttagctgaggcagcgagcaaggcagacggcctcgccgtgatcggagtcctgatgaaggttggggaagcgaaccctaaacttcaaaaggtgctcgatgcgcttcaagcaattaagaccaaggggaaaagggcacccttcaccaacttcgaccccagcaccttgttaccatcaagcctggacttttggacgtatcccggatcgcttacacatcctcccctgtacgagtcagtgacgtggatcatttgtaaggaaagcatcagtgtttcaagcgagcagcttgcccagttccgcagcctgctgtctaatgtggagggcgataacgccgtgccaatgcagcacaacaatcgacctacacagcccctgaaagggcggacagttagagcttccttctag

SEQ ID NO: 110796 - DNA, 786 bp, synthetic construct
  misc_feature 1..786: note = Description of Artificial Sequence: Synthetic coding sequence
  source 1..786: mol_type = other DNA
atggcctctcctgattggggatacgatgacaagaatggccctgaacagtggtctaaattgtaccctatcgcaaatggcaacaatcagtcccccgttgacatcaagacatccgagaccaagcacgacaccagcctgaagcctatttccgtgtcgtacaatcccgccacggccaaggagatcatcaacgtgggccattcgttccatgtcaatttcgaagacaatgacaataggagtgtgcttaagggtgggcctttcagtgatagctaccggctgtttcaatttcacttccattgggggtcaaccaacgagcatggatctgagcacaccgttgatggcgtgaaatattcagctgagttacatgtggcacactggaactccgccaagtacagcagtctggctgaagctgcatcaaaagccgatggtctcgctgtaattggagtgctcatgaaggtcggcgaggcaaatcctaaactgcaaaaagtcctcgatgctctgcaggctattaagaccaaaggaaagagagcaccattcaccaatttcgacccatccacgctcctgccaagttctctggacttctggacataccctggttctctcacgcatcctcctttgtacgaatccgtcacatggatcatatgcaaagagtctatctctgtctcatcggagcaattagcccaattccggtcactgctgtctaacgtcgagggtgacaacgcggtgcctatgcagcataataataggcctacccagcctcttaagggccgcaccgtgagagcatccttctag

SEQ ID NO: 110797 - DNA, 531 bp, synthetic construct
  misc_feature 1..531: note = Description of Artificial Sequence: Synthetic coding sequence
  source 1..531: mol_type = other DNA
atggcgagcccagattggggctacgatgacaaaaacgggccagagcagtggtccaagctgtatccaattgccaacggtaataatcagagccctgtcgacattaaaacctcggaaacaaagcatgatacttctttaaagccaatctcagtgagctataaccctgcaacggcaaaagagattattaacgtgggccactccttccacgttaatttcgaagacaatgacaatcgaagcgtcctgaagggcggaccattcagcgacagttaccgcctcttccagtttcatttccactggggcagcaccaacgaacacggcagtgaacatacggtggatggagtgaaatattcagccgagctgcatgtggctcactggaacagcgccaagtatagctccctggcggaggctgcttcgaaagcggacggcctggcggtaataggggtgctgatgaaagtgggcgaagcaaatcctaaattgcagaaggtgctggatgctctgcaggcaatcaaaacaaaggggaagcgggccccatag

SEQ ID NO: 110798 - DNA, 756 bp, synthetic construct
  misc_feature 1..756: note = Description of Artificial Sequence: Synthetic coding sequence
  source 1..756: mol_type = other DNA
atggcatccccagattggggatatgacgacaagaacggtcccgaacagtggtccaaactttatccgatcgcaaacgggaacaaccagtcgcccgtcgacattaaaacctcagagaccaagcatgacacatctctcaagccaataagcgtgtcttacaatcccgcgactgccaaggaaataattaatgtgggccattctttccacgtcaacttcgaagacaacgacaaccgctcagtgctgaagggtgggccatttagcgacagctacagactgtttcagtttcattttcattggggtagtaccaatgaacatgggtctgagcatacagtcgatggagtaaaatatagtgccgagctgcatgtcgcccattggaactcagcgaagtattcttctttggcagaagccgcatcaaaagctgatggtttggccgtgataggagtcctgatgaaagtaggtgaggcaaacccaaagctgcagaaagtgctcgacgctctgcaggctatcaagaccaagggtaaaagggcgcccttcaccaatttcgaccccagcaccctgttgcctagctccttagacttctggacgtaccctggcagtttgacccaccccccgttgtatgaaagtgtgacctggattatctgcaaggaatctatatcagtttcgagtgagcagctggcacagtttagatctttgctgtccaacgtcgagggcgacaatgcggtacctatgcagcacaacaaccgccctacacagccttag

SEQ ID NO: 110799 - DNA, 69 bp, synthetic construct
  misc_feature 1..69: note = Description of Artificial Sequence: Synthetic coding sequence
  source 1..69: mol_type = other DNA
atggcaagccctgactggggctatgacgataagaatggtcccgaacagtggtcaaaactctatccatag

SEQ ID NO: 110800 - DNA, 450 bp, synthetic construct
  misc_feature 1..450: note = Description of Artificial Sequence: Synthetic coding sequence
  source 1..450: mol_type = other DNA
atggcatctcctgactgggggtacgacgataaaaacggccctgagcaatggtccaagctctaccctattgccaacggaaacaaccagagccccgtcgatatcaagacctctgagactaagcacgatacatccctcaaaccaatctccgtttcatacaatccagccacagctaaagagataatcaatgtcggccatagcttccatgtgaatttcgaggacaacgacaaccgctccgtcttaaagggtggaccgttttccgatagttataggctcttccagttccactttcattggggaagtaccaacgaacacggctcagagcacacagtggacggcgtgaagtattctgcggagttgcatgtggcacactggaactctgccaagtacagctctctggccgaggcagcctcgaaggcagatggattagccgttattggagtgctcatgtag

SEQ ID NO: 110801 - DNA, 450 bp, synthetic construct
  misc_feature 1..450: note = Description of Artificial Sequence: Synthetic coding sequence
  source 1..450: mol_type = other DNA
atggcgtctccagattggggctacgacgacaaaaatggccctgaacaatggagtaagctgtaccctatcgccaacggaaataatcagagtcccgtagacatcaaaacgagcgagacaaagcatgacaccagtctcaagccaatttctgttagctacaaccccgccaccgccaaagagatcataaatgtagggcacagctttcatgtcaacttcgaggataacgataaccggtctgtcttaaaaggcggacctttctccgacagctatcggctatttcagttccacttccactggggtagtactaacgaacacggaagtgagcacacagtcgacggggtcaaatacagcgccgagctgcacgttgcccactggaactctgctaaatatagcagtcttgcagaagctgcatcaaaggcggacgggctggcagtcatcggggtgctgatgtag

SEQ ID NO: 110802 - DNA, 357 bp, synthetic construct
  misc_feature 1..357: note = Description of Artificial Sequence: Synthetic coding sequence
  source 1..357: mol_type = other DNA
atggcatcacctgattggggttacgatgacaaaaacggtccagagcaatggagcaaactttaccccatagctaatggcaacaaccaaagccctgtggatatcaaaaccagtgaaaccaagcacgatacttcactcaaaccaatttcagtgtcttacaaccccgccacagctaaagaaattatcaatgttgggcactcattccacgttaacttcgaagataatgataaccgtagtgtcttgaagggaggccccttcagcgactcttacaggctgttccagttccatttccactggggatccacaaatgagcacgggtctgagcataccgtcgatggagtcaaatactctgctgaatag

SEQ ID NO: 110803 - DNA, 447 bp, synthetic construct
  misc_feature 1..447: note = Description of Artificial Sequence: Synthetic coding sequence
  source 1..447: mol_type = other DNA
atggctagccccgattgggggtatgatgataaaaacggccccgaacaatggtctaagttgtaccccattgccaacggcaacaatcaaagccctgtagacatcaagacctctgagacgaagcacgacacatccctgaaaccaattagtgtttcgtacaatcccgctaccgcgaaggagattattaatgtgggacattcgttccatgtaaactttgaagacaatgataatagatccgtgctgaagggcggacctttttccgattcatacaggctgttccaatttcattttcactggggatctaccaatgagcacgggtccgagcacaccgttgatggagtgaagtactcagcagagctacacgtagctcattggaacagtgctaaatacagcagcttggcagaagcagcaagcaaggccgatgggctggctgttatcggagtcctttag

SEQ ID NO: 110804 - DNA, 786 bp, synthetic construct
  misc_feature 1..786: note = Description of Artificial Sequence: Synthetic coding sequence
  source 1..786: mol_type = other DNA
atggcatcaccggattggggctacgacgataaaaacggtcctgagcagtggtctaaactctatcctatcgctaatggcaacaaccaatcccccgtagatattaagacatccgagaccaagcatgacacttctttgaaacccatttccgtaagctataatcccgcaaccgcaaaggagattataaatgtcgggcattcctttcacgttaattttgaagataatgacaaccgctctgttttgaaagggggccccttttccgattcttatcgactgtttcagttccactttcactggggaagcaccaacgagcacggttccgagcatacagttgacggcgtgaagtactccgccgagctgcacgttgcccattggaattctgcaaaatacagttctctcgctgaggctgcaagcaaggctgatgggctggccgtgataggggtgctaatgaaggtgggagaggctaacccaaagttgcagaaagtgctggatgccctgcaggccattaaaactaaagggaaaagagctccctttaccaattttgacccctcgacacttctgccttcctctttggacttttggacctatcctggctctttgacacaccctcccctctatgaatcagtgacctggattatctgcaaggagtccatttctgtgtcatctgagcagctcgctcaatttcgctcattgctgagcaatgtagagggtgacaatgctgtccctatgcagcataacaacaggcctacgcagccactcaagggaagaacagttagggccagcttctag

SEQ ID NO: 110805 - DNA, 300 bp, synthetic construct
  misc_feature 1..300: note = Description of Artificial Sequence: Synthetic coding sequence
  source 1..300: mol_type = other DNA
atggcatccccagattggggatatgatgataaaaatggccccgagcaatggagtaagctctatcccatcgcaaatggtaataaccaaagcccagtggatatcaaaacctcagaaacaaaacatgacaccagcctaaagcccataagcgtgagctacaacccagccactgccaaagaaatcataaatgtgggacactcctttcacgttaacttcgaggacaacgacaacaggtccgtcctcaaaggaggtcctttttctgatagctatagactgttccaattccacttccattgggggtag

SEQ ID NO: 110806 - DNA, 786 bp, synthetic construct
  misc_feature 1..786: note = Description of Artificial Sequence: Synthetic coding sequence
  source 1..786: mol_type = other DNA
atggctagcccagactggggctatgatgataaaaacgggcctgagcagtggagcaaactctaccccatcgccaatgggaataaccagtcacctgtcgatatcaaaacgtctgaaacaaagcatgatactagtctgaagcccatctctgtcagttacaaccccgctaccgctaaggagatcatcaatgtgggtcacagttttcatgttaactttgaagataatgataatagaagtgtgctcaagggcggccccttctcggattcctataggctatttcagttccactttcactggggaagtactaacgaacacgggtccgagcacaccgttgacggcgttaagtactccgccgagcttcacgtggcgcattggaattcagccaaatattcctctttagccgaggcggctagcaaggccgatgggctggcggtgatcggcgtactgatgaaggttggtgaagccaaccccaaactccaaaaggtgctggacgcactccaggccatcaaaactaaaggcaaaagagcaccttttactaattttgatccctccaccctgctgcctagctctttggatttctggacctaccccggctccctcacccacccccctctgtacgaatcagtgacttggattatctgtaaagaatctatttccgtgtcctctgagcagctggcacagtttcggagccttctgtctaatgtagaaggtgacaacgctgtacccatgcagcacaataaccggcctacccaacctctgaaaggcaggaccgtcagggcttcattctag

SEQ ID NO: 110807 - DNA, 786 bp, synthetic construct
  misc_feature 1..786: note = Description of Artificial Sequence: Synthetic coding sequence
  source 1..786: mol_type = other DNA
atggcttccccggattggggctacgacgacaagaacggaccagaacagtggagtaagctctaccctatagcaaacggaaacaatcagtcccccgtcgacattaaaacaagtgaaaccaagcatgacacaagtctcaaaccaatctctgtgtcttacaaccccgcaacagccaaggaaatcatcaacgtgggacattctttccacgtaaattttgaggacaatgacaaccgcagcgtcctgaaggggggacccttttctgacagttatcggctcttccagtttcactttcactggggcagtacaaacgagcacgggagcgaacacaccgtggacggggtgaagtactccgctgaactccacgtcgcacactggaactccgcaaagtactcttccctggctgaagccgcctccaaagcagacggtctggcagtaattggtgtactgatgaaggtgggagaagccaaccctaagctgcagaaggtactggacgcactacaagcaattaaaactaaggggaaaagggccccgtttactaacttcgatcccagcacactcctgccatcttctctggacttctggacataccccggttcccttacacacccccccctgtatgaaagtgtcacatggatcatttgcaaggagagcatatctgttagctcggaacagctcgcccagttccgctcactgctctccaacgttgaaggcgataacgctgtcccaatgcagcataacaacagacccacacagccgctgaagggtagaactgtaagggctagcttttag

SEQ ID NO: 110808 - DNA, 783 bp, synthetic construct
  misc_feature 1..783: note = Description of Artificial Sequence: Synthetic coding sequence
  source 1..783: mol_type = other DNA
atgtctcaccactgggggtatgggaagcacaatggccctgagcactggcataaagatttcccgattgcaaaaggcgagcggcagagcccggtcgatattgacacccatacagccaagtacgaccctagcctgaagccgctctctgtgtcgtacgatcaggcaacttctttacgcatcctaaataatggacacgcatttaacgtggagtttgatgattcccaggataaggccgtgctgaagggcgggcctctagacggtacctatcgactcattcaatttcattttcattggggcagcttagacgggcagggttccgaacacacagtggacaaaaaaaagtacgccgctgaattgcatctggttcattggaacacgaagtacggtgacttcggcaaagctgtgcagcagccagatggactggcagtgctgggcatcttcttaaaagtcggctctgccaagccaggcctacagaaagtggttgatgttctcgattctattaagaccaagggtaaaagcgccgactttaccaacttcgatcctaggggtctactccctgaatccctggactactggacgtacccaggatctctgactactcccccactgctcgaatgcgtgacctggattgtcctgaaggagcctatttcagtgtcatctgaacaggtgctgaagttcaggaaactgaattttaatggcgaaggcgagcctgaggagttgatggtggataattggaggcccgcacagccgctgaagaatcgacagataaaggcttctttcaagtag

SEQ ID NO: 110809 - DNA, 783 bp, synthetic construct
  misc_feature 1..783: note = Description of Artificial Sequence: Synthetic coding sequence
  source 1..783: mol_type = other DNA
atggccaaggaatggggctacgcatcccataacggtcctgaccactggcacgaactctttccgaatgcgaaaggggaaaatcagagccctgttgaattacacaccaaggacattaggcatgatccaagtctgcaaccctggagtgtttcctatgacggcgggtctgcaaagacgatcctcaacaatggcaagacttgccgggtggtgttcgatgacacatacgaccggagcatgctgcgggggggacccctacctggaccatatcgactgagacagtttcatttgcactggggctcctcagacgatcacggaagtgaacacaccgtcgatggggtaaagtatgctgcagaactgcacttagtgcactggaacccaaagtacaacaccttcaaagaggccctcaaacaacgagatgggatagcagtcattggcattttcctgaaaattggacatgagaatggggaattccagatcttcctcgacgctctagataaaattaaaacaaaggggaaagaggctccctttacaaagtttgacccatcctgcctcttccctgcctgtagggattattggacataccaaggctctttcaccacccccccatgcgaggagtgtatcgtctggttgctgttgaaggagccaatgaccgtatccagcgatcagatggccaaactgcgcagcctgttgagtagcgcagagaacgagcctcccgtacctttggttagtaactggcgacctccacagccaattaataatagggtcgtccgggcctccttcaaatag

SEQ ID NO: 110810 - DNA, 735 bp, synthetic construct
  misc_feature 1..735: note = Description of Artificial Sequence: Synthetic coding sequence
  source 1..735: mol_type = other DNA
atggctaaagagtggggctacgcatcacacaacggcccggaccactggcatgaacttttccctaatgctaagggggagaatcaatcaccatggagcgtgtcatatgacggcggcagcgcaaagactatactaaacaatgggaagacttgtagggtcgtgtttgatgatacatatgatagatctatgctgagaggcggtcctctccctggtccgtaccgactgaggcaattccatttgcattggggcagctccgacgatcacggtagcgaacacactgtggacggcgttaagtatgccgctgagctccatcttgtgcactggaatcctaaatacaacaccttcaaggaagccttgaaacagagggacggaatcgctgttattggaatatttctcaaaatcgggcacgaaaatggcgagtttcaaattttcctcgacgctctggacaaaatcaagaccaaaggtaaagaagctccttttacaaagttcgatccatcttgcctctttccagcttgtcgtgattactggacatatcaaggcagttttaccacccctccctgtgaggagtgtattgtttggctactccttaaggaacccatgaccgtatcttccgaccaaatggctaaacttcgtagcttgctttcaagcgccgagaacgagccacctgtgcccttagtatccaactggcgaccgccacagcccattaacaatagagtggtgagagcatccttcaaatag

SEQ ID NO: 110811 - DNA, 954 bp, synthetic construct
  misc_feature 1..954: note = Description of Artificial Sequence: Synthetic coding sequence
  source 1..954: mol_type = other DNA
atggtggtgatgaattccctgcgcgtgattctccaagcgtcacctggaaaactgctgtggcgtaagtttcagatccctcgcttcatgcccgctagaccttgctcattatatacgtgcacctataagactcgaaaccgggcgttgcacccattgtgggagtcagtagatttagtccccggaggagatagacagtcaccaataaacatacggtggcgcgacagtgtgtacgatcccggtctgaagcctctcacaattagttacgaccctgctacctgccttcacgtctggaacaatgggtactcgttcctcgtggaatttgaggactcaactgataaaagtgttattaagggcggcccactcgagcacaactatcgcctgaagcagtttcatttccactggggagcaatcgacgcatgggggtccgagcacacggtcgactcaaagtgcttcccagccgaattacatttagtgcactggaatgctgtaagattcgaaaactttgaagacgccgccctcgaagaaaatgggctggctgtgatcggagtgtttttaaagttgggaaagcaccacaaggagctgcaaaagcttgtggataccctcccctccataaaacacaaagacgccctcgtggaattcggcagtttcgaccctagctgtctcatgccaacttgccctgactactggacatatagcgggagcctgaccactcccccgctgtcagaatccgtaacctggatcataaaaaagcagcctgtagaggtcgatcacgaccagcttgagcagtttagaaccctgctctttacaagcgaaggcgagaaggaaaaacgaatggtcgataactttagacccctgcagccacttatgaatcgcactgtgcggagttccttcaggcatgattacgttctgaatgtgcaggccaaacctaaacccgccacaagccaggctacaccatag

SEQ ID NO: 110812 - DNA, 954 bp, synthetic construct
  misc_feature 1..954: note = Description of Artificial Sequence: Synthetic coding sequence
  source 1..954: mol_type = other DNA
atggtggtaatgaactctctcagggtgatcttacaggcctctcctggtaagctactgtggaggaaatttcagattccacggttcatgcctgccaggccatgttccttatacacctgtacgtataaaaccaggaaccgggcactacacccgctctgggagtccgtagacctggtacccggaggagaccgccagtcacccattaacatcaggtggagagattcagtgtatgatcccggcctgaagccactgacaatctcatatgaccccgctacatgtctgcacgtctggaataacgggtacagcttcctggtcgaatttgaggattctactgacaaatccgtgataaagggtggtcctctggaacataactaccgcctaaagcaattccattttcactggggcgctatagatgcttgggggtccgagcatacagtggacagcaagtgctttccagcggagctccacctggtccattggaacgccgtaagattcgaaaactttgaagatgcggcactggaagaaaatggcttagccgtaatcggagtctttctaaaactggggaaacaccataaggagctccagaagttagtggatacacttccatctatcaagcataaagacgcccttgttgagtttggatctttcgaccctagttgccttatgcctacttgccctgactactggacctactctggtagcctgaccacaccaccactttctgaaagcgtaacatggatcatcaagaagcagccggtggaggtggatcatgatcagctcgagcaatttaggaccctgttgtttaccagtgagggggagaaggaaaagaggatggtggacaattttagacctctgcagcccctaatgaaccggaccgtgaggagcagctttaggcacgactatgtgctaaacgtccaagcgaaaccgaagcccgcgactagccaggccacgccctag

SEQ ID NO: 110813 - DNA, 411 bp, synthetic construct
  misc_feature 1..411: note = Description of Artificial Sequence: Synthetic coding sequence
  source 1..411: mol_type = other DNA
atggtggttatgaatagcctgcgggtgattctgcaagcgtcacctgggaagctgctatggagaaagttccagattccacgatttatgccagctagaccttgctccttatatacatgcacgtataagactcgcaaccgagccctccaccctctctgggagtctgtggacctcgtcccggggggcgatcggcaatctcctattaacatacgatggagagactcagtctatgatcctggtctgaagcctctgacaatctcttacgatcctgccacatgcctgcacgtgtggaataatggatattcgtttctcgttgaatttgaggactcaaccgacaaaagcgtgatcaagggaggtccattggagcacaattatcgactgaaacagtttcactttcattggggagccatctag

SEQ ID NO: 110814 - DNA, 231 bp, synthetic construct
  misc_feature 1..231: note = Description of Artificial Sequence: Synthetic coding sequence
  source 1..231: mol_type = other DNA
atggtcgtcatgaattcactcagagtaatcttgcaggcctcccctggtaagctgctttggcgcaaattccagattccacggttcatgccagcccggccatgcagtctctacacatgcacatacaagacgcgaaacagggcactgcacccactctgggagagcgtagacctcgtgcctgggggggatagacagtcccccatcaacattcgctggagagatagcgtatactag

SEQ ID NO: 110815 - DNA, 540 bp, synthetic construct
  misc_feature 1..540: note = Description of Artificial Sequence: Synthetic coding sequence
  source 1..540: mol_type = other DNA
atgagggcactggttctcctgctatccctgtttctgctgggcggccaggcccagcatgtgagtgattggacctatagcgagggagccctggatgaggctcactggccgcaacattaccctgcatgcggaggtcagcgccagtcccctataaaccttcagcgcaccaaagttagatacaatccctccctgaaaggtctgaacatgacagggtatgagactcaggccggtgaatttcctatggtaaataatgggcacacggactggcaggcagaactctttttaccctctctatcctctccttgtggcgagggggctaagcacaagggccagcgacagtggctttgtagccccagtcttgatagttggtgggaggcaatcatagatggcgggagcttgtgggctacactggctgagtgcggcctgcgagctgaaggcccagaagaggggcgccatatggaagagaagtcccccgcttcacagggtgcttgttcgggaagccgcctgccaatcagccgcgggccttgtacattttttctctag

SEQ ID NO: 110816 - DNA, 942 bp, synthetic construct
  misc_feature 1..942: note = Description of Artificial Sequence: Synthetic coding sequence
  source 1..942: mol_type = other DNA
atgagagcactggttctgctactgagtctgtttctcttgggcgggcaggctcagcatgtgtcagactggacctatagcgagggcgcccttgatgaagctcactggcctcagcactatccagcctgcggcgggcaaaggcagtctcctatcaatttacagaggaccaaagtcaggtataatccttcactgaaaggccttaacatgaccgggtatgagacccaggccggcgaattcccaatggttaataatgggcacaccgtgcagatatcccttccctctactatgcgaatgactgtggccgacggaacggtgtacattgcccagcagatgcactttcattggggcggcgcctcctcagaaatctccggcagcgagcacactgtcgatggtatcaggcacgtgattgagattcatattgtgcattacaattctaagtataaatcctatgatattgctcaggatgccccagacggtctggccgtgctcgcggcttttgtggaggttaaaaactaccccgaaaatacctattatagtaacttcatttcacacttggccaatattaaatatcctggccaacggacaactctgactggcctcgatgtgcaggacatgctccctagaaatctgcagcactattatacttaccacgggagtctgactacccctccttgtaccgagaacgtgcactggtttgtgttggcagactttgtgaaacttagcagaacccaggtttggaaactcgaaaattccctactggatcaccggaataaaaccatccacaatgattatcggaggacccaaccactgaaccacagagtggtggaatcgaactttccaaatcagggcaaaggtcatggcggtcatagagggagatcccagaacccgcgggtccagccaaccagcactaggcatcccctcgcacttgggtcactcgaagcgtag

SEQ ID NO: 110817 - DNA, 927 bp, synthetic construct
  misc_feature 1..927: note = Description of Artificial Sequence: Synthetic coding sequence
  source 1..927: mol_type = other DNA
atgcgcgcactggtgctcttactctcgctattcttgctaggtgggcaagcacagcacgttagcgactggacctattctgaaggtgctctggatgaagcccactggccacagcactatccggcctgtggcgggcagcggcagtcccccattaatctccagcggacgaaggtgagatataaccctagcctgaaggggctgaatatgaccgggtacgagactcaggctggagaatttccaatggtcaataacggacacactgtgcagatcagccttcccagcacgatgcggatgactgtcgctgacgggaccgtgtacatcgcccagcagatgcatttccattggggtggagcttctagcgaaatttccggcagcgaacatacagtggacgggatccgacatgtgatcgaaatacatatcgttcattacaacagtaagtacaaatcttacgacatcgcccaggatgccccagatgggttggccgtgttggcagcattcgtggaagtcaagaactacccagaaaacacatattattctaatttcattagccacttagccaatatcaagtatccgggtcagcgtactaccttgaccgggctcgatgttcaagacatgttgcccagaaacctgcagcattactacacttatcatggctctcttacaactccaccatgtactgagaatgttcactggttcgtgctggctgatttcgtcaagctgtctcggacgcaggtgtggaagctggaaaattctttgcttgatcaccggaacaaaaccatccacaatgactacaggcggacccagccactgaatcatcgagtcgttgaatccaattttccaaaccaggaatacactctcggttccgaatttcaattctatctgcacaagatcgaagagatcttagactacctgcgacgcgcactcaattag

SEQ ID NO: 110818 - DNA, 795 bp, synthetic construct
  misc_feature 1..795: note = Description of Artificial Sequence: Synthetic coding sequence
  source 1..795: mol_type = other DNA
atgaccggccaccatgggtggggttacggtcaagacgacggaccttctcattggcataagctctatccaatcgcccaaggcgatcggcagtcacccattaatattatttctagtcaggctgtatactccccttctcttcagccactggagctgtcttacgaggcttgtatgtctctgtctattactaacaacgggcatagcgtacaagtagactttaatgacagcgacgatcggacagtcgtaacgggaggcccccttgagggcccctacaggctcaagcagtttcacttccattggggcaagaaacatgacgtgggaagtgaacatactgtggatggaaagagcttcccgagtgaattacacttggtccactggaacgccaagaaatatagcacattcggcgaagctgcctccgcccccgatggcttagcagtggtgggcgtgttcctggagacgggagacgaacatccctccatgaatcggctgaccgacgccctgtacatggtgcgttttaagggtaccaaagcacagtttagttgctttaaccccaaatgtctgcttccagcttccagacactattggacctatcctgggtctctgactacaccaccgctgtctgagtctgtgacttggatcgtgttgcgcgagcctatctgtatcagcgaacggcagatgggaaaatttcgtagcctacttttcacaagcgaggacgatgagaggatccatatggtgaacaatttccgccccccacaaccactgaaaggaagagtagtcaaggcaagctttcgagcttag

SEQ ID NO: 110819 - DNA, 627 bp, synthetic construct
  misc_feature 1..627: note = Description of Artificial Sequence: Synthetic coding sequence
  source 1..627: mol_type = other DNA
atgagcctcagcatcactaacaatggccactcagtgcaggtcgacttcaacgattcggatgacagaaccgttgtgaccggggggccgctggaaggcccttaccgactcaagcagttccacttccattggggtaagaaacacgacgtgggaagcgaacacaccgtggatgggaaaagctttccttcagaattgcacttagtgcactggaacgccaaaaagtacagcacattcggcgaggccgcctccgcacctgacggactagctgtagtcggtgtcttcctggaaaccggtgacgaacatccatcaatgaatagactgacagacgctctgtacatggtgcgttttaagggaacgaaggcccagttcagttgctttaatccaaagtgcctgctgccagccagtagacactactggacatatcctgggtctctgactacaccacctctgagcgagagcgttacttggatcgttttgcgggagcctatttgtatttcagagaggcagatgggaaagtttcggtccctgttgttcacaagtgaggacgatgagagaatccacatggttaacaactttcgaccccctcagccattaaaaggacgcgttgtcaaggcttcttttagggcctag

SEQ ID NO: 110820 - DNA, 873 bp, synthetic construct
  misc_feature 1..873: note = Description of Artificial Sequence: Synthetic coding sequence
  source 1..873: mol_type = other DNA
atggccgacttaagcttcatcgaggacacagtggcttttccagaaaaggaagaagacgaagaagaagaggaggaaggcgtggagtggggctatgaggagggggtggagtggggacttgtgtttcccgacgccaatggggagtaccagtcacccattaacctaaattcacgcgaagctcgttacgatccatccctgctggatgtcaggctgagtcctaattatgtggtctgccgggactgtgaagtaaccaatgatggccacactatacaggtgattctgaaaagcaagtctgtgctatcaggcgggccacttcctcaaggccacgagtttgaattgtatgaggtgcggttccactgggggcgtgagaatcagcggggttcagaacacacggttaattttaaggcctttccaatggagcttcacctcattcattggaactcaacactttttggttccatcgacgaggcagtaggaaagcctcatggaatcgccatcatcgcactgtttgtccagataggcaaagagcacgttggcttgaaggctgtgaccgaaatattgcaagatatccagtataaagggaaatccaagactatcccctgcttcaaccctaacacgctgctccctgaccccctgctgcgtgactattgggtatatgagggcagcctgacaattcccccgtgcagtgaaggtgtaacttggattctgttcagatatcctttgaccatctcccaacttcaaattgaagagtttaggaggctgcgtacccacgtaaagggcgccgagttggtagagggttgcgacggaattttgggggataacttcaggcctacccagcccttgagcgaccgggtgattcgtgcagcctttcagtag

SEQ ID NO: 110821 - DNA, 987 bp, synthetic construct
  misc_feature 1..987: note = Description of Artificial Sequence: Synthetic coding sequence
  source 1..987: mol_type = other DNA
atggaaatcgtatgggaggtcttattccttttacaggcgaacttcatcgtctgcatttccgctcaacagaatagccccaagatccacgaagggtggtgggcgtataaggaagtggttcagggctcctttgtgccagtgcctagtttctggggactggtgaatagcgcctggaacctgtgctcagtcggtaaaagacagagcccagtgaacatcgagacatcacatatgatatttgaccctttcctgactcccttgagaatcaatacgggaggaagaaaagttagcggcaccatgtataacacagggcgccatgtcagtctgcggcttgacaaggaacacctcgtgaacataagcgggggaccgatgacttactctcaccgcctcgaggagatcaggctgcacttcggaagtgaagattcccaggggtcagagcacctcctgaatggccaagctttctctggcgaagtgcaattgattcactacaaccacgaactttacactaacgtcacagaggcggcaaagtctcctaatgggttggtggtggtgtcaatcttcattaaagtgagtgattccagcaatccctttctgaatcgcatgcttaatcgcgacactatcactaggataacatataagaatgatgcatatctgttgcagggactgaatattgaagaactctatcctgagaccagctccttcattacctacgacggctccatgaccattcccccatgctatgagactgcctcatggattatcatgaacaaaccggtgtatatcacaaggatgcagatgcacagcctgaggctgctatctcagaaccagccctctcagattttcctctcgatgtccgacaattttcgccccgtgcagccgttaaataaccgctgcattagaactaatatcaatttctccctgcaggggaaagattgccccaacaacagggctcagaagctgcaataccgtgtcaacgagtggctgctgaaatag

SEQ ID NO: 110822 - DNA, 1005 bp, synthetic construct
  misc_feature 1..1005: note = Description of Artificial Sequence: Synthetic coding sequence
  source 1..1005: mol_type = other DNA
atggccagtattcggagtcgttctggctgtggatttaccgagcctgatgaactgtgcatggtcggcgtgcgggaaaacgcccaacagaatagccccaagatccatgaaggctggtgggcctacaaggaggtcgtgcaaggatcctttgtccctgtcccctccttctggggtctcgttaattctgcctggaacctgtgttccgtcggcaagcgccaatcgcctgtgaacatcgagacatcacacatgatctttgatccatttctgactccacttagaataaacacaggcggtcgaaaagttagcgggactatgtacaacacaggccgtcatgtgagcctgcgtctggacaaagagcatctggtgaacatctcaggggggccaatgacctatagccaccgcctcgaggaaattaggctccactttggatctgaagattcccagggttccgagcacctgttgaatggtcaggctttctccggggaggtccaacttatacattacaaccatgagctgtacaccaatgttactgaggccgccaagagtccaaatgggctcgtcgttgtgagtatctttatcaaagtgtccgactcaagtaatccctttcttaatcgcatgctcaacagggatactattacacgcatcacatacaagaacgatgcttacctcctccaaggtctgaatatagaggaattgtaccccgagacgtcctccttcatcacttacgatgggtctatgaccattcctccatgttacgaaacagcctcttggatcataatgaacaagcccgtgtacattacaagaatgcaaatgcattctcttcggctgttgtctcagaaccagccctctcagatcttcctttccatgtccgataatttccgcccagtgcaaccattgaacaatcggtgcattaggaccaacattaatttcagcctccagggcaaggattgccccaataaccgcgcccagaaactccagtatcgcgtgaacgagtggctgttgaagtag

SEQ ID NO: 110823 - DNA, 987 bp, synthetic construct
  misc_feature 1..987: note = Description of Artificial Sequence: Synthetic coding sequence
  source 1..987: mol_type = other DNA
atggagatcgtgtgggaggttctgtttctccttcaagcaaacttcatagtctgcatcagtgcccagcagaattcacctaagattcacgagggctggtgggcttataaagaggtggtgcagggatcgttcgttccggtcccgagcttttgggggcttgtcaactctgcctggaacctgtgcagcgtgggtaaacggcagtcgcctgttaacattgagacaagtcacatgatctttgacccttttctgaccccattaagaataaacaccggcggccgtaaagtatctgggacaatgtacaacacaggacgacatgtctctctgcggctggataaagaacacctggtgaatataagtggcgggcccatgacatacagtcacaggctagaagaaatccggctgcactttgggtcagaagattcccagggcagcgaacacttactcaacggacaggccttctccggtgaagtgcagttgattcactacaatcatgagctgtacacaaacgtgacagaggcagccaagagcccaaatggactggttgtggtgagcatttttataaaggtgagcgatagcagtaacccattcctaaacaggatgttaaatcgtgatacgatcactcgcatcacatacaaaaatgatgcttatctgctccaggggcttaatatcgaggagttgtatccagagaccagcagttttatcacttatgacggctcgatgaccattcctccctgctacgaaactgcaagctggattatcatgaacaagccggtatatatcacgcgaatgcagatgcacagcctgagattgctctcccagaatcagcccagccaaatctttctatctatgtcagataactttagaccagttcagccactgaataaccggtgtatcagaaccaatatcaacttcagcctccaaggcaaggactgcccgaataatcgcgcgcagaaactgcagtatcgtgtgaacgagtggctattgaagtag

SEQ ID NO: 110824 - DNA, 987 bp, synthetic construct
  misc_feature 1..987: note = Description of Artificial Sequence: Synthetic coding sequence
  source 1..987: mol_type = other DNA
atggaaatcgtgtgggaggtgctgtttctgcttcaggcaaatttcatagtttgtattagcgcccagcagaactcaccaaaaattcatgagggctggtgggcctacaaagaggtggtgcaggggtcttttgtgcccgttccctctttctggggcctggtcaacagcgcttggaatctgtgctctgtgggaaagcgtcagtctcccgtaaacatcgagacttcgcacatgattttcgacccgtttctgaccccgctgaggataaacactggcggaagaaaggtgagtggcacaatgtataatacagggaggcatgtctccctgaggttggataaagagcatctggttaacatcagcgggggtccgatgacttatagtcaccgattagaggagattaggttgcacttcggcagcgaagattcccagggatctgaacacctgcttaatggccaggcctttagcggcgaagtgcagctgatccattacaaccacgaactgtataccaatgttacagaggccgccaaaagcccgaacggtctggtcgttgtgtcgatctttatcaaagtgtctgattccagcaatccctttttgaaccggatgctgaacagagataccattactaggatcacttacaaaaacgatgcataccttttgcaaggtttgaacatcgaagagctctatcctgagacatccagctttatcacgtacgatggaagcatgacaatccctccatgctacgaaactgccagttggatcattatgaacaagccagtgtatattactcgtatgcaaatgcactcactgcgactgctgtcccagaatcagccgagtcagatctttctgtccatgtccgacaatttccgccccgtacaaccacttaataatcgctgtataaggaccaacatcaatttctcattgcaggggaaagactgcccaaataatagagcacagaagttacagtatcgcgtgaatgagtggctcctgaagtag

SEQ ID NO: 110825 - DNA, 987 bp, synthetic construct
  misc_feature 1..987: note = Description of Artificial Sequence: Synthetic coding sequence
  source 1..987: mol_type = other DNA
atgggggctgctgcccgattaagcgccccccgagctctagtgctctgggccgccctgggggcggcagcgcacatcggccctgcgcccgaccccgaagattggtggtcatacaaggacaacctgcagggcaatttcgtgccaggacctccgttttggggcctggtgaacgcggcgtggagtctctgtgccgtcggaaagaggcagagccctgtggacgtggaactcaagagggtgttgtatgacccattcctgccgccccttagactgagcactggcggtgagaaactgagaggcactctgtacaacaccgggcggcatgtgagcttcctacccgctccaagaccagtcgtgaacgtgtctggcgggccattactttactctcacaggctgtccgagctccgcctgttattcggtgccagggacggagctggctccgagcaccaaattaaccatcagggattctctgccgaggttcagttgatacatttcaaccaagaactgtatggcaacttctccgccgcaagccgtggcccaaatgggctggccatactgagtcttttcgtgaacgtcgcctcaaccagcaatcctttcctcagtcgtcttcttaatagggacactatcacccgcatctcatataaaaacgacgcatatttcctgcaggatctcagcctagaactcctgtttccagagtccttcggcttcattacctatcagggcagtctgtctacccctccatgctccgagacagtgacctggatcctcatcgatagggccctcaatattaccagtttgcagatgcacagcttgagactgctgtcacagaaccccccaagccaaatctttcagtctctctccggcaactctcgccccctccagcctctagcccacagagccctgcgcggtaacagagatccccggcaccccgaacggaggtgtagagggcctaattacagactgcacgtcgacggggtcccccatggtcgctag

SEQ ID NO: 110826 - DNA, 1065 bp, synthetic construct
  misc_feature 1..1065: note = Description of Artificial Sequence: Synthetic coding sequence
  source 1..1065: mol_type = other DNA
atgccacggcgcagtctccacgccgccgcggtcttgctgctggtgattctaaaagagcagccctcctccccagcccccgtcaacggatccaaatggacctatttcgggcccgacggtgagaatagctggtcaaagaaatacccatcatgcggaggcttactgcagagtcccatcgatcttcattctgacatcttgcagtatgatgcttcgctgactcccctggagttccaggggtacaatctcagtgccaacaaacagtttctgctgaccaacaacggccactctgttaaacttaatctgcctagcgatatgcatattcagggcctgcagagcagatacagtgctacccagttgcacttgcactgggggaacccaaacgatccccatggctcggaacacacagttagcggccagcacttcgctgccgaactccacattgtgcactacaactctgatctctaccccgacgctagcacagcgtccaacaaatcagagggcctggcagtgctggccgtgctcattgaaatgggcagctttaatccctcatatgataagatcttcagccacctgcagcatgtgaagtataagggtcaagaggcctttgttcctggctttaacatcgaagagttgttgcctgaacggactgctgagtactaccggtacagaggcagcttgaccacccctccgtgcaaccctacagtgttgtggacagtctttagaaacccagttcaaatttctcaggaacagctgctggccctcgagaccgcgctgtactgcacccacatggacgatcctagtccaagggaaatgatcaataatttcagacaggttcagaagttcgatgaacggctggtgtataccagtttttctcaagttcaagtttgcactgctgccggcctttccctcggtattattttgtctcttgccttggccggtatcctgggtatatgtattgttgttgtggtgagcatctggttgtttaggaggaagtcaattaagaagggtgataacaaaggggtgatctacaagcctgccacgaagatggagaccgaggcccacgcctag

SEQ ID NO: 110827 - DNA, 1032 bp, synthetic construct
  misc_feature 1..1032: note = Description of Artificial Sequence: Synthetic coding sequence
  source 1..1032: mol_type = other DNA
atgccaagaagaagccttcacgccgcggcggttctcctgttggtgatcttaaaagagcaaccttcctcgcccgcaccagtgaatggatcaaagtggacctacttcgggccagacggagagaattcttggtccaagaaatatccgtcctgtggaggtcttctacagtcccctattgatctgcactcggacatcctgcagtatgacgcaagcctcacgccgctggaatttcagggctacaacctgtcagcaaataagcaattcctcttaacaaacaacggtcatagtgtgaagctgaatttgcctagcgacatgcatattcagggcttacagagccggtattccgctacccaactgcacctgcactgggggaaccctaatgacccgcatgggagcgaacacactgtcagtggacaacacttcgccgccgaactgcacattgttcactacaatagcgacctttaccctgatgcgagcacagcttccaacaaatcggaaggactggccgttcttgccgtcctgatcgagatgggaagttttaacccctcctacgataagattttttcacacttgcagcatgttaagtacaagggacaggaggctttcgtgccggggtttaacatcgaagagttgttgcccgagaggactgctgaatattaccgctacagaggctccttgactacacctccttgtaacccaactgtattgtggacagtgttccgcaaccctgtccaaatctctcaggaacagctgctcgccctggaaaccgccctgtattgtacccacatggacgacccttcaccccgcgagatgatcaacaactttcggcaggttcaaaagttcgacgagaggctcgtgtatacctccttctcgcagggcattatcctatctcttgctctggccggaatattaggaatctgtattgttgtggtggtaagtatatggctcttccggaggaagagcatcaaaaagggtgataacaagggcgtcatctacaagcctgcaacaaagatggaaaccgaagctcacgcctag

SEQ ID NO: 110828 - DNA, 852 bp, synthetic construct
  misc_feature 1..852: note = Description of Artificial Sequence: Synthetic coding sequence
  source 1..852: mol_type = other DNA
atgccacgtagatctctccatgctgccgctgtgctgctgctcgttatcctcaaggagcagccatcaagtcccgccccagttaatgggtctaagtggacctatttcgtcaagctgaacctccctagcgatatgcacattcaggggttacagtctaggtattcagctacacagctccatctgcactgggggaaccccaatgacccccacggctctgagcacactgtaagcgggcagcactttgccgcggagttgcatatcgttcactacaactctgatctgtatcctgatgcctccactgcctccaacaagagtgagggcctagccgtgcttgcggtcctcattgaaatgggatctttcaacccaagctatgacaaaattttctctcatctgcagcatgttaagtacaaaggccaggaggccttcgtgccaggtttcaatatcgaagagctgctgccagagcgcacagctgagtattataggtatcgcggaagcttgacaactccaccctgcaaccctactgtgttgtggactgtgttcaggaatcccgtgcagatctcccaagaacagcttcttgcgctagagaccgctctgtattgcacacacatggacgatccaagcccgcgagagatgataaacaacttcagacaggtgcagaagtttgacgagaggctggtatatactagtttctctcagggaatcatcctgagtctagccctggcaggaattctgggaatctgcatcgtggttgtggtgagtatctggctctttaggagaaagagtatcaaaaagggggacaataagggggtcatctataagccggcgactaaaatggagacagaggctcatgcttag

SEQ ID NO: 110829 - DNA, 1014 bp, synthetic construct
  misc_feature 1..1014: note = Description of Artificial Sequence: Synthetic coding sequence
  source 1..1014: mol_type = other DNA
atgctcttttccgcccttctcttagaagtcatctggatcttggccgctgatgggggacaacattggacatacgaagggccccatggacaggatcactggcccgcaagctatcctgagtgcggtaataacgcccagtctccaattgacatccagaccgactcagtcacattcgacccggacctgcctgcactgcagccccatgggtacgaccagcctgggacagagcccctagacctgcacaacaatggacacacagttcagctgagcctgcctagcacactgtaccttgggggactgccaagaaaatacgtggcggcccagctgcatctgcactggggacagaaaggttctcctggcggcagcgagcatcagatcaattccgaggccacatttgcagagctacatattgtgcactatgatagcgactcctacgatagtctttcggaggcggcagaaagacctcagggattagccgtcctagggatccttattgaagtaggcgaaaccaagaacatcgcctatgaacacatattatctcacctacacgaggtgaggcacaaggaccaaaaaacatccgtcccccctttcaacttgcgcgagcttctacctaaacagctaggccaatacttccgctataacggcagcttaacaacacctccttgctatcagtccgtgctttggacagttttttataggcgctcacaaatctccatggagcagcttgagaagctgcaaggcactctgtttagcaccgaggaagagccctccaagctgctggtccagaattatagggcgctgcagcccctgaatcagcggatggttttcgcgtccttcatccaagctggcagcagttacacaacaggtgagatgctcagtctcggggtggggattctggtgggctgcctgtgcctgcttctagcagtgtattttatcgctcgcaagatacggaagaagaggctggagaatcgcaaatcagtcgtttttacttcagctcaagcgacaaccgaagcatag

SEQ ID NO: 110830 - DNA, 834 bp, synthetic construct
  misc_feature 1..834: note = Description of Artificial Sequence: Synthetic coding sequence
  source 1..834: mol_type = other DNA
atgtcctccggtatccacgtggccctggtgacaggtggcaacaagggcattgggcttgccattgtcagagacctgtgtaggctgttctcaggagatgtggttttgaccgctcgtgacgtcacacgggggcaggcggctgtgcagcaattgcaggccgaaggcctcagccccaggttccaccagctggacatcgatgatctgcagtcaataagagctttaagagacttccttcgaaaggaatacggcgggctagacgtactggttaataatgccggcatcgcattcaaggtggccgatccaacccctttccatatacaggccgaggtgacaatgaaaacaaacttctttggaacccgggacgtttgtaccgagcttctgccgctgatcaaaccgcagggtcgtgttgtaaacgtgtcatccattatgagtgtgagagcattaaagtcttgttcaccagagctgcaacagaaattcagatcagaaactatcaccgaagaggagttggtgggcctgatgaacaagtttgtggaggataccaagaagggtgttcatcagaaggaagggtggccaagttctgcctacggcgtgactaaaattggcgtaaccgtgctctcccggatccacgccaggaagctctccgagcagaggaaaggtgacaagattctactgaacgcatgttgccctggatgggtgcgcacggatatggctgggccaaaggcgactaagtcaccggaggagggcgccgagacgcccgtctatctcgcactgcttccacccgatgcagaaggtccgcatggtcagttcgttagcgaaaagcgcgtagaacagtggtag

SEQ ID NO: 110831 - DNA, 834 bp, synthetic construct
  misc_feature 1..834: note = Description of Artificial Sequence: Synthetic coding sequence
  source 1..834: mol_type = other DNA
atgagttcttgctcccgcgtcgccctcgtcacaggcgccaatagaggcattggcctggccatcgccagggagctgtgcagacagttttcaggagacgtggtgctgaccgctcgggatgtcgcccgcggccaggcggctgtccagcaactgcaggcagaaggcttgagcccacgatttcatcagcttgatattgacgatctgcagtctatccgggctctgcgcgactttctgagaaaagagtatggcggcctgaatgtgcttgtgaataacgcagcagtggcctttaaatccgatgatcccatgccgtttgatataaaggctgagatgaccctgaagaccaacttcttcgccacgagaaatatgtgtaacgaacttcttcccatcatgaaacctcatggacgtgttgttaatatctccagcctgcagtgcttgcgggcctttgaaaactgcagcgaggacctccaagagcggtttcacagtgagaccctgacggagggggatctggtcgatctgatgaagaagtttgttgaggacacgaaaaatgaagtgcatgagcgagaaggctggcccaattcaccatatggcgtgtctaagttaggagtgaccgttctctctcggatcctcgcccgacgcctggatgaaaagagaaaggctgataggatcttggtgaacgcctgctgtcccggacccgtcaaaaccgacatggatggcaaagacagcattaggactgtagaggagggggccgagactcctgtctacctggctctgctcccacctgatgcaactgagcctcaggggcaactggtccatgataaagtcgtgcagaattggtag

SEQ ID NO: 110832 - DNA, 2169 bp, synthetic construct
  misc_feature 1..2169: note = Description of Artificial Sequence: Synthetic coding sequence
  source 1..2169: mol_type = other DNA
atgctgacaatgggccggctccagctggtggtgctggggctcacatgttgctgggccgtggctagtgccgcaaagcttggagccgtgtacaccgaaggcggctttgttgagggagtaaataagaaactcggactgttgggagactccgtggacatctttaagggcataccctttgccgctcctaccaaagcccttgagaacccgcagccacacccagggtggcaaggcaccctgaaggctaaaaacttcaagaagcgatgtctgcaggcaactataacgcaggatagtacatatggagacgaggactgtctttaccttaacatctgggttccccagggccgtaagcaggtcagcagagatctaccggtgatgatctggatctatggtggcgcattcctgatgggatccggacacggagctaacttcctgaataactatctgtacgatggggaggaaattgccacgcggggcaacgttattgtggtgacttttaattatcgggtgggtccgctaggatttctgtccaccggcgacgcgaaccttccaggcaactatggccttcgagaccagcacatggccattgcttgggtgaagcgtaatatcgctgctttcggcggtgaccccaataacattacgctcttcggggagtccgccggcggtgcttccgtgtctctgcagactcttagcccatacaataagggtctcatccgcagagcgatcagtcagtctggggtggcgttgtcaccttgggtgatccagaaaaatccgctgttctgggccaagaaagtggcggaaaaagtcggatgtcccgttggcgacgccgccagaatggcccagtgtctgaaggtgaccgaccctcgcgcactgacactggcttacaaagtccccctcgctggtctcgagtatccgatgctccactatgtgggattcgtgcctgtcatcgacggcgactttataccagcagatcctatcaacctctacgccaacgcggctgacattgattatattgctgggacaaataacatggacggccacattttcgctagtattgacatgcccgccatcaacaagggaaataagaaggtgacagaagacttctacaagcttgtttccgaattcacaataactaaggggttgagaggggcgaagacaactttcgacgtgtatactgaaagctgggcccaggacccctctcaggagaataagaaaaagacggtggtggattttgagaccgacgtgttgtttttagttcccaccgagatcgctctggctcaacaccgcgctaacgcaaaaagcgcaaaaacgtatgcctacttattctctcacccatctagaatgcctgtgtatccgaaatgggtgggcgccgatcatgctgatgatattcagtatgtgtttgggaaaccgttcgcaacccctaccggatatcggcctcaagatagaactgtcagcaaggccatgatcgcatactggaccaactttgccaagactggagatcctaacatgggtgatagcgcggtgcccacgcattgggagccctacactacagaaaactctggctatctggaaattaccaagaagatggggtcctcgtccatgaaaaggtcgttgcggaccaacttcctccggtactggacactgacttatcttgccctgcccactgttactgaccaagaggccacgcctgtccccccgaccggcgactccgaggccacccctgtgccccccacgggcgattcagaaactgcccctgtccctcctactggagatagcggcgcgccgccggtaccacccacaggcgacagcggcgcccccccggtgccgcccaccggcgactcaggagctccacccgtgcctcccaccggcgatagtggagcaccccccgtgccaccaaccggcgatagcggcgctcctccagtgcctcccacaggggatgcgggacctcctcccgttccaccgaccggggattccggagcgccccctgtgccaccgacgggtgattccggcgcaccacctgtgactcctactggggattctgagaccgccccagtgccccctacgggggacagcggagcccctcctgtgcccccaacaggagatagtgaggctgcccctgtccccccaacagacgactcaaaagaggctcagatgcccgcggtgatcagattttag

SEQ ID NO: 110833 - DNA, 2064 bp, synthetic construct
  misc_feature 1..2064: note = Description of Artificial Sequence: Synthetic coding sequence
  source 1..2064: mol_type = other DNA
atgggcaggttacagcttgtcgttctagggttgacttgctgctgggcagtggcctcagcagctaagttgggggcagtgtataccgaaggaggatttgtcgagggcgtcaataagaagctgggcctactaggtgattcagttgatattttcaaaggcatccccttcgctgcacccaccaaggccttagaaaacccacagccacatccgggctggcagggtaccctgaaagctaagaatttcaaaaaaagatgcctccaagccactattacccaggatagcacctatggagacgaggattgtctgtatctgaatatctgggtaccgcagggacgaaagcaggtgtcacgagacctacccgtcatgatttggatttacggcggggcgttccttatggggtccggccacggtgcaaattttctgaacaattacctttatgacggcgaggaaatcgccacccgcggcaatgtgatcgtcgttacctttaactacagggttggtccactcggctttctgtcaacaggcgacgccaatctccctggaaactatggactgcgagaccaacacatggctatcgcctgggttaagaggaatattgcagcattcgggggtgatccaaataatatcacgctattcggggaaagtgccggaggcgctagcgtgtccctccagactctgtcaccttataacaaagggcttatcaggagagctatttcacagtcaggcgttgctctctccccatgggtcattcagaagaaccccctgttctgggccaagaaggttgcggaaaaggtgggatgccctgtgggtgacgcagctcgcatggcccagtgcctgaaggtaacagatcccagagccttaaccttggcctacaaagtgcccctcgccggcttggagtatcctatgctacattatgtgggattcgtccctgtcatcgatggcgatttcatcccagctgatccgatcaatctatacgcgaatgccgccgacatcgattacatagccggtaccaacaacatggacggtcatattttcgcgagcatcgacatgccagctataaacaagggcaataagaaagtgacggaggaggacttctacaaactggtgtctgaatttaccatcacaaaaggccttaggggtgccaagacaactttcgatgtttatactgagagttgggcccaagacccaagtcaggagaacaagaaaaagaccgtcgtggactttgagactgatgtcctatttctcgttcccactgagatcgcactggcccagcacagagctaacgcgaaagaccctaacatgggcgactccgccgtccccacccattgggagccatatacaaccgagaactctgggtacctggagatcactaaaaagatgggctcttcctccatgaaaaggagcctgcgaacaaacttccttcgatactggaccttaacatacctggcactgccaaccgttactgaccaagaagccactcctgttcccccaacaggggatagcgaagctactcctgtgcctcccaccggggatagcgaaaccgcacctgtgccccccaccggagacagtggcgcaccccccgtcccacccaccggagatagcggggctccccccgtgccccccaccggagatagcggcgcaccacctgtccccccaaccggggacagcggcgctccgccggtgccgcctaccggtgacagcggcgccccaccagtccctcctaccggcgacagcggtgcgcccccagtgccacctacaggagattccggcgctccccccgtcccaccaacaggcgatagcggggcaccgcccgtgcctcccactggcgatgccgggcccccacccgtgccccccacaggcgacagcggcgctccgcccgtcccccctacgggtgattcaggggcaccaccggtgacccctactggtgattcggaaaccgcacccgtgccccctactggtgactcgggcgctccgccggttccaccgacaggagactccgaagccgctccagtccccccaacggacgattccaaagaagctcagatgccggcagtgatacgcttttag

SEQ ID NO: 110834 - DNA, 2271 bp, synthetic construct
  misc_feature 1..2271: note = Description of Artificial Sequence: Synthetic coding sequence
  source 1..2271: mol_type = other DNA
atgttgactatgggccgcctgcagttggtggtgttgggcctgacgtgttgctgggcggtagcctctgcagcaaaattgggcgctgtgtacactgaaggtggattcgtcgagggcgtaaacaagaaactagggctcctgggcgactctgttgatattttcaagggcattcccttcgccgccccaaccaaagcgctagagaaccctcaaccccacccgggctggcagggcacactcaaagccaagaacttcaagaaacgatgtctccaggcaactatcactcaggattccacgtacggcgatgaagactgtctgtacctcaacatttgggtgcctcagggccgcaagcaggtctctcgagacctgccagtgatgatttggatatacgggggcgcattcctgatgggatcaggacacggagccaacttccttaacaactatttgtatgatggagaggagatagcaacccgtggcaatgttatcgtcgtgactttcaactacagggttggacctctgggcttcctgtcaactggggatgccaacctcccgggtaactatggcttgagggaccagcatatggcaatcgcctgggtgaaacggaatatcgctgccttcgggggtgaccccaacaacattactctgtttggcgaatctgccggaggcgcgagcgttagtctacagactctgtcaccctacaacaaaggcctgattaggcgggctatcagccagtccggagtcgcactcagcccttgggtgattcagaagaaccctctattctgggccaagaaggtggctgaaaaagtcgggtgtccagttggcgatgcagccaggatggcgcaatgcctaaaagtaactgatcctagagccctcaccttagcatacaaggtgcctctagctggcctggaatatcccatgctgcattacgtcggctttgtgcctgtgattgacggcgactttatcccagccgaccctatcaatctgtacgcgaacgccgctgatatagactacatagcagggacaaataatatggatgggcacatctttgcaagtatcgacatgcccgcaattaataagggcaataagaaggttaccgaagaggatttttacaagctcgtgtctgagttcactattaccaaagggctccggggcgctaagacaacatttgacgtgtatacagaaagctgggcccaagatccttcacaggagaataagaagaaaacagtcgttgatttcgagacagatgttcttttcctggttccgaccgaaatagccctggcccaacatagggccaacgccaaatcagccaagacctacgcctacctgttctcccacccttcaagaatgcctgtataccctaaatgggtcggggctgatcacgctgacgacatccaatatgtgttcggtaaaccgttcgctactccaaccggctaccgccctcaggatcgtactgtgagtaaggcaatgattgcgtattggacgaacttcgcgaagaccggcgaccccaatatgggcgattccgcagtcccaacacactgggaaccgtacacaaccgagaattctggctacctagagatcactaagaaaatgggcagcagcagcatgaagcgatctcttaggaccaactttttaaggtactggaccttgacttatctcgccttgccaacagtcacagaccaggaagcaaccccagtgccccccacaggcgactctgaagcaaccccagtccctcctaccggggattccgagaccgccccagtgccacccaccggagattccggcgctccgccagtgccacctacaggggatagcggagccccacccgtgccacccacaggagatagcggggctcctcccgtgccgccgactggcgatagtggcgcccctccagttccgcccacaggggacagtggagccccccccgttcctccaactggagactcaggagcccctcccgtcccgccgaccggcgacagcggggcccccccagtgccaccaacgggcgatagcggtgcccctccagtgcccccaaccggggatgccggccctcctcctgtgccgcccacaggcgatagcggagcacctcccgtgcccccaacgggggactcgggcgctccaccggtaactccaacgggcgattcagaaaccgcacccgtcccacctacaggagattccggtgcccccccagtgccccccacgggcgattctgaagcagcccccgtgccccctactgatgactctaaagaagcacagatgcccgctgtgatccggttctag

SEQ ID NO: 110835 - DNA, 1707 bp, synthetic construct
  misc_feature 1..1707: note = Description of Artificial Sequence: Synthetic coding sequence
  source 1..1707: mol_type = other DNA
atgtggttaagagcattcattctggccacgctgagcgcatccgcagcttgggccggtcacccctcatcacctcctgtggtagatactgttcacggcaaggtcctgggaaaatttgtgtccctcgaaggttttgctcaacccgtggccattttcctcggtatcccctttgcaaaaccgccattgggaccactgcgctttaccccacctcaacctgctgagccttggtcgtttgttaagaacgccacctcttatccacccatgtgtactcaggaccctaaagcaggacagctcctcagtgagctgtttacaaaccgcaaggagaatattccgttaaagttgtcggaggattgtctgtatcttaatatctacacacctgccgaccttactaagaaaaaccgccttcctgtgatggtgtggattcacggtggaggtctgatggtgggagctgcctctacgtatgacggcctagctttggcagcccatgagaatgtggtcgtggttaccatacagtacagactggggatttggggctttttctctactggggacgagcactcgcggggcaattggggccacctcgatcaagtggccgcactgagatgggtgcaagataatatcgccagctttgggggcaatccaggctcggtgaccatttttggggagtctgctggcggggagtccgtgagcgtcctggtgttgagccctttagcgaaaaatctctttcatcgcgccattagcgaaagtggcgtagctttgacatctgtactggtgaaaaaaggcgacgttaagcccctcgcagagcagatcgctatcaccgccggatgtaaaaccactacttccgccgtgatggtccactgcctgaggcagaagaccgaagaggaattattggaaacaaccttaaaaatgaagttcctgtctctggatctgcagggagacccacgggagagccagcctctactgggcactgtaatcgatggaatgctcttgttaaagaccccagaggaactgcaagctgagagaaatttccacacagttccttatatggtaggtataaacaaacaggagttcggatggcttatcccaatgcagctgatgagttatcccctcagtgagggccagctcgatcaaaaaaccgctatgtcactactgtggaagtcctaccccctcgtctgtatcgccaaggagcttattcctgaagcaacagaaaagtatcttggcgggaccgatgacaccgttaagaagaaggatttatttctggatctcatcgcagacgtcatgtttggcgtgccatccgtgatcgtcgccaggaatcatagagacgccggcgcccccacctatatgtacgagttccagtatcgccctagcttctctagcgatatgaaaccaaaaaccgtgataggagatcacggtgacgagttgttctcagtgttcggcgctccatttctgaaggagggcgcctctgaggaagagattcgcctctctaaaatggtgatgaagttctgggccaactttgctcggaacggcaacccaaacggtgagggccttcctcactggcccgaatataatcagaaggagggatatctgcagattggcgccaacacgcaggcagctcagaaacttaaagacaaggaggtagctttctggactaatttatttgccaagaaggctgtggaaaagcccccacagaccgagcacatcgaactatag

SEQ ID NO: 110836 - DNA, 1704 bp, synthetic construct
  misc_feature 1..1704: note = Description of Artificial Sequence: Synthetic coding sequence
  source 1..1704: mol_type = other DNA
atgtggctcagggccttcatcctggctacattgtctgcttccgctgcttggggccacccaagttctccaccggttgtcgataccgtacacggcaaagtgctgggtaagttcgtcagcctggagggatttgcccagcctgtggcaatatttctcggcattccattcgcaaagccccctttgggtcctctacggtttacacctccccaacccgccgaaccctggtccttcgttaaaaacgcgacgagctaccctccaatgtgtacccaggatcctaaggcaggccagctgctttctgagctgttcacgaaccgtaaagagaatatccccctcaaactgagtgaagattgtttgtaccttaacatctacacacctgccgatcttactaagaaaaatcgtctgccggtcatggtgtggatccacgggggaggcttaatggtgggagctgccagtacttacgacggcctggctcttgccgctcacgaaaatgtggtggtagtcacaattcagtatagactgggaatatggggatttttctctacaggagatgaacattccagggggaactgggggcacctggaccaggttgccgctctgcggtgggtgcaggataacatcgcatcctttgggggaaatcccggatccgtgacaatctttggcgaaagcgccgggggggagtccgtctcagttctagtactgtccccactggccaaaaatctgttccaccgagctatatccgaaagtggagtggccctgacaagtgtgctcgtaaagaagggtgatgtgaagcccctcgcagagcagatcgcaatcaccgcaggatgcaagacaactactagcgccgtcatggtgcactgtcttcgacagaagactgaggaagagctgctcgagaccacgctaaagatgaagtttctgtccctggatctgcagggcgaccctcgcgagtcacagcctctgctgggaacagtgattgacgggatgttgctgctgaaaactcccgaagagctgcaggctgaacgcaatttccatacagtcccgtacatggtcggtatcaataagcaggaattcgggtggcttataccgatgcagcttatgtcatacccattgtccgagggccagctggaccaaaaaacagccatgtccctcttgtggaaatcctatcctctagtgtgcatcgccaaggagttaatacccgaggccaccgaaaagtacctggggggcaccgacgacacagtaaaaaagaaggacctcttcttggacttaattgctgatgtgatgttcggggtgccttcagttatcgtcgcgcggaatcacagagatgccggggcacctacctacatgtatgagttccagtatcgccctagtttttccagcgatatgaaacccaaaaccgtgatcggggatcacggtgatgaactgttttcggtgtttggggcaccttttctaaaggagggcgccagtgaggaagaaattcgcctaagtaagatggtgatgaagttctgggctaatttcgctaggaacggtaaccccaatggtgaagggcttccacactggccggagtataatcagaaagagggctatttacaaatcggggctaacacacaagcagctcagaagctaaaggataaggaggtcgccttttggaccaatctctttgccaaaaaagcagtcgaaaagcctccccagaccgagcatatcgaattatag

SEQ ID NO: 110837 - DNA, 1701 bp, synthetic construct
  misc_feature 1..1701: note = Description of Artificial Sequence: Synthetic coding sequence
  source 1..1701: mol_type = other DNA
atgtggttgcgcgccttcatactggccactttaagtgcgagcgccgcttgggggcatccatcttcacccccagtagtggacactgttcatggaaaagtgcttgggaaatttgtatcactggagggttttgcacagcctgttgctatttttctgggcattccttttgctaaacctccgctcggaccattgagatttaccccgccgcagcccgccgagccgtggagtttcgtgaaaaacgcgacctcatatccacccatgtgcacccaggatcccaaagccgggcagctgttatctgaactgttcacaaatcgaaaagagaacattcccctgaaactatccgaagactgcctgtacctgaacatctacacacctgctgatcttacaaagaaaaatcgactgccagtaatggtttggattcacgggggtggcttaatggtgggagccgcttccacttacgatggcctagctctcgccgcccatgagaatgtcgtggtggtgaccatccaatacaggctgggaatttggggctttttctccacaggagacgagcattcccggggaaattggggtcacctagatcaagtggcagctctcaggtgggtacaggacaacattgcatcattcgggggcaacccaggttcagtaaccatctttggagagtccgctggcggagagagcgtctccgtcttagtcctgtccccactggctaagaatctatttcatcgggccatatccgaatccggagtcgctctgacaagcgtgttggtgaaaaagggcgatgtcaaacccttggctgaacagatcgccatcacagcgggatgtaagacgactactagcgccgtaatggtgcactgcctgcggcaaaaaaccgaagaggagctgctcgagactaccttgaagatgaaattcctgtctctagatctccaaggggaccccagagagtctcagcccctcctgggcacagttatcgacggcatgctcctactgaagacccccgaggaactgcaggcagagcgcaacttccacacagtcccctatatggtgggtatcaacaagcaggagttcggctggctgattcccatgctgatgagctaccccctttcagaaggccagctggaccagaagacagcgatgagcctcctgtggaaatcttaccccctcgtctgtattgctaaggagttgattcccgaagctactgagaaatatctcggaggaacggacgacacagtgaagaaaaaggacctttttctggatctcattgccgatgtaatgtttggagtcccgagtgtaatagttgctagaaaccacagggacgcgggtgctcccacgtatatgtatgagtttcagtatagaccgagttttagcagtgacatgaagcccaaaaccgtgattggtgaccatggcgatgaattattctctgtgtttggtgcgccctttctcaaggagggcgcctccgaggaggagatccggctgtcgaaaatggtgatgaaattttgggccaactttgctcgaaacggtaatcccaatggagaggggttaccccactggcctgaatacaaccagaaggaaggctatcttcaaatcggagcaaacacacaggctgcccagaagctgaaggataaggaggtcgccttctggacaaatctctttgctaagaaagctgttgagaagcccccacagacggaacatatagaactttag

SEQ ID NO: 110838 - DNA, 1299 bp, synthetic construct
  misc_feature 1..1299: note = Description of Artificial Sequence: Synthetic coding sequence
  source 1..1299: mol_type = other DNA
atggtgtggatccatggcggcggtcttatggtcggggcggcaagcacttacgacggactggccctcgctgcccacgaaaatgtcgtagtcgtcacaattcagtatcgcttaggcatttggggctttttctccactggcgatgagcattctcgcggaaactgggggcaccttgaccaggtcgccgcacttcgatgggtgcaggataacattgcaagtttcggagggaatccagggtcggtgaccatttttggcgagtctgccggcggcgaatccgttagcgtattggtcctgtcccctctggccaagaatctgttccaccgcgcaatcagcgagtccggggtggccctgacatccgttctggtgaaaaagggggatgtgaaaccgcttgccgaacaaattgctatcacggcgggatgcaagacaacaacttccgcagttatggtgcattgccttcgccagaaaacagaggaagagctgctcgagaccaccctcaaaatgaagtttttatcgctggatcttcagggagatccacgggaaagccagcctctgctgggcactgtcatcgatggcatgctgctactgaaaacccccgaggagctacaggccgaaagaaactttcacactgtgccctacatggtgggcattaataagcaggaattcggatggttaattcctatgcagcttatgtcttatccattgtctgaaggacagctcgatcaaaaaacagcaatgtctctgctctggaagtcctacccgcttgtgtgtatcgccaaagaacttatacctgaggctaccgagaaatacctcggcgggacagacgataccgtgaagaagaaggacctgttcttggatctcattgccgatgtaatgttcggcgtcccttcagtgattgtagcgaggaatcacagagatgctggagccccaacctatatgtacgagtttcagtatagaccatctttttccagtgacatgaagcccaaaactgttatcggcgatcacggagatgagctgttctccgtcttcggtgccccattcttgaaggaaggggccagtgaagaggaaattagactctccaagatggtgatgaagttttgggccaacttcgcccgtaacggcaacccaaatggcgaaggcctgcctcactggcctgaatataatcagaaggagggttatctgcagatcggagcgaacacgcaggcagcccaaaagcttaaggacaaggaggttgccttttggacgaatctcttcgccaaaaaggccgtcgaaaaaccccctcagactgagcacattgagctctag

SEQ ID NO: 110839 - DNA, 1716 bp, synthetic construct
  misc_feature 1..1716: note = Description of Artificial Sequence: Synthetic coding sequence
  source 1..1716: mol_type = other DNA
atggagcgagcagtgcgcgtggagtctggagtgctcgtcggggtcgtttgtctgctcctggcatgccctgctacggcaaccggtcctgaggtggcacagccagaggtagacactaccctgggccgggttagaggcagacaggtcggcgttaaaggcactgatagactggtgaatgtctttttggggatacctttcgcacagccgccgctaggacctgatcgattcagcgcacctcaccctgcccagccatgggagggcgtgcgcgatgccagtaccgcaccgcccatgtgtctgcaggatgtcgaatctatgaacagtagccgtttcgtgttgaacggcaaacagcaaatcttttccgtgtccgaggattgcctagtccttaacgtctatagtcccgccgaggtccctgcaggcagcggcaggccagtgatggtgtgggtgcatggcggtgctctgatcacaggggctgctacgtcatatgacggtagcgctcttgccgcctacggggatgttgtggtggtaacagtccaatacagactgggagtgctcggctttttctccacaggtgatgaacacgccccaggaaaccaggggtttttagatgtggtagctgctctcagatgggtgcaggagaacatcgcccctttcgggggcgatctgaattgtgtcaccgtgtttggagggtcggcaggagggagcataatctccggattggtcctgtccccagtggccgcaggtttatttcaccgcgctatcactcaatccggggtaataacgacacccggtattatcgactcccacccatggcctttggcccaaaagatcgctaacaccctggcttgctcctccagcagccctgctgaaatggttcagtgtctgcagcagaaggaaggagaggaactcgtactgagtaaaaagctgaaaaacactatttatcccttgaccgttgatggcaccgtgtttcccaaatctcctaaggagctattgaaggaaaaacccttccactctgtgcccttcttaatgggggtcaacaaccacgaattcagctggctgataccccgcggctggggattattggatacaatggagcagatgagcagagaggacatgcttgctatttctacccccgtccttaccagtctagacgttccaccggaaatgatgccaacagttattgatgagtacctcggatccaactccgatgcccaggctaagtgtcaagcttttcaggaatttatgggagacgtcttcataaacgtgcccaccgtgtcattttcacggtacctgcgggacagtggatcccccgtgtttttttacgagttccagcatcgcccgtcttctttcgccaaaataaaacctgcttgggtgaaggcggaccacggtgctgagggcgccttcgtgttcggtgggccattcttgatggacgaaagtagccgtttggcattccctgaggcaacagaggaagagaagcagttgtccttgactatgatggcccagtggactcatttcgctcggaccggagacccgaactcgaaagccctgcccccttggccccagttcaatcaagctgagcaatatttggagattaacccagtaccccgggcggggcagaaatttcgagaagcatggatgcagttctggtccgaaactttaccgagcaagattcagcagtggcatcaaaagcaaaaaaacaggaaggctcaagaagacctgtag

SEQ ID NO: 110840 - DNA, 633 bp, synthetic construct
  misc_feature 1..633: note = Description of Artificial Sequence: Synthetic coding sequence
  source 1..633: mol_type = other DNA
atggagcagatgtctagggaagatatgctggccataagcacacctgtgttaactagcctggatgtacctcctgaaatgatgcctacggttatcgacgagtatttggggagcaattcagacgcccaagcgaagtgccaggcgtttcaagagtttatgggagatgtgttcattaacgtgccaaccgtgtcattttcccggtatctccgcgatagtggaagccctgtcttcttttacgaatttcaacaccgcccgagttccttcgccaaaataaagccagcatgggtgaaggcagaccacggcgccgaaggtgcctttgtattcggtggaccgtttctaatggacgaatcttccaggctggctttccccgaagcgacggaggaagagaaacagctgagcctaactatgatggcacagtggacgcatttcgcccgcactggggatcccaacagcaaagctctacctccatggcctcagtttaatcaggccgagcaatacctcgagatcaatcctgtgccacgcgccggtcagaaatttagggaggcctggatgcagttttggagtgagaccttacctagcaaaattcagcagtggcaccagaagcagaaaaatcgtaaagcacaagaggatttgtag

SEQ ID NO: 110841 - DNA, 1707 bp, synthetic construct
  misc_feature 1..1707: note = Description of Artificial Sequence: Synthetic coding sequence
  source 1..1707: mol_type = other DNA
atggagagagctgtgagagtcgagtctggggtactcgtcggggtggtatgccttctgctcgcttgccctgctactgccaccggcccagaggttgctcaacccgaagttgatactacgctcggccgtgtgcgagggcggcaagtgggcgtgaagggtaccgatcgcctggtgaatgtgttccttggcattccctttgcccagccccccctcggcccggacaggttttcagcaccgcacccggcccagccatgggaaggagtcagggatgcgtcaacagctcctccgatgtgccttcaggatgtggaatccatgaattcctccaggttcgtcctgaacggcaaacagcagatttttagcgtcagcgaagactgtttggttctgaatgtctattcccccgccgaagtgcccgctggttcagggcggccagtgatggtgtgggtgcacgggggtgcccttataacgggagccgccacttcctacgatggtagcgccttagcagcctatggggacgttgtcgtggtgaccgtccagtatagattgggcgtgctgggattcttttctacaggcgatgagcacgcaccaggcaatcaaggattcttagatgtcgtagctgcattgcgttgggttcaggaaaatattgccccatttggcggggacttgaactgcgtcaccgtgttcggcggcagcgcaggcggttccattattagcggactcgtgttaagcccggtcgcagcaggcctgttccatagagctatcacccagagcggggttatcactaccccagggattattgatagtcacccctggccactcgcccagaagatcgcgaacacactggcttgcagctcctcttcacccgccgaaatggtacagtgccttcagcagaaagaaggggaggagctcgtgctatccaaaaagctcaagaacactatctatcctcttactgtagacggaactgtattcccgaagtcaccaaaggagctgctgaaagaaaaaccctttcacagcgttccttttctgatgggagttaacaatcacgaattcagctggttgattcctagagggtggggactcttggacaccatggaacaaatgtctagagaagacatgctggccattagcacacccgtactgacatcactcgacgtaccgcctgaaatgatgccaactgtgatcgacgagtatctcggctccaactcagacgcccaggcaaaatgtcaggcgtttcaggagtttatgggggatgtgtttatcaatgtgcctactgtaagctttagcaggtacctgagggattcaggatccccagtcttcttttacgagttccagcaccgtccatctagctttgctaagataaagcccgcatgggtcaaagccgaccacggagccgaaggcgctttcgtgttcggagggccgttcctgatggacgaatcatcaagactcgaagcaaccgaggaggagaagcaactgagtctcacaatgatggcccagtggacccactttgcccgcacaggcgaccctaactcaaaggcactacctccttggccccagtttaaccaagcagagcaatatctagagatcaatcctgtgcccagggctgggcagaagtttcgagaggcgtggatgcagttctggtccgagaccctgccatctaagattcagcagtggcatcaaaaacagaaaaaccgtaaggcgcaggaagatctctag

SEQ ID NO: 110842 - DNA, 738 bp, synthetic construct
  misc_feature 1..738: note = Description of Artificial Sequence: Synthetic coding sequence
  source 1..738: mol_type = other DNA
atggcaaatgaagcttacccttgcccctgcgacatcggccatagattagagtacggcggactggggcgagaagtgcaagtcgaacacattaaggcttatgtaactaagagtccggtcgatgcaggcaaggcagtgattgtgattcaagacatcttcggctggcagctgcccaatactcgatatatagctgatatgattagcggcaacgggtatacaacaattgtgcctgacttcttcgtgggccaggaaccctgggacccaagtggggactggagcatctttcccgagtggcttaagacacgcaatgcacagaagattgatcgggagatttccgccatcctcaagtacctgaagcagcaatgccacgcacagaaaatcggcatcgtcggcttttgctggggagggacagctgtccatcatttgatgatgaaatactcggaattcagagcaggagtgtccgtgtacgggattgtcaaggactcagaagatatatacaatttaaagaatcccactctgttcatttttgcggaaaatgacgtcgtgataccactcaaggatgtgtccctcctgacccagaagctgaaggagcattgtaaggtggagtatcagatcaagactttttccggacagacacacggattcgtgcaccgcaagcgagaagactgttcacctgctgacaaaccttatatcgacgaggcacgccggaatctgatcgagtggctgaacaaatatatgtag

SEQ ID NO: 110843 - DNA, 1260 bp, synthetic construct
  misc_feature 1..1260: note = Description of Artificial Sequence: Synthetic coding sequence
  source 1..1260: mol_type = other DNA
atgagggggctgctcgtactctctgtcctgctgggcgcggttttcgggaaggaggactttgtgggtcaccaggtcctcaggatctctgttgcggatgaagctcaggtccaaaaagtgaaagaactagaggacctggaacacttacagctggacttctggcggggacctgcccaccccggatcccctatcgacgtcagagttcccttccctagcattcaagcggtgaagatttttttagaaagccacggcatttcttacgagaccatgattgaggatgtccaatcactgcttgatgaagagcaggagcagatgttcgctttccgaagtcgggcccggtccacagataccttcaattatgcaacctatcacacactcgaagagatatacgactttctggacctgctcgttgctgaaaatcctcacctggtgtctaagatccagatcgggaacacctatgagggtcggccaatctacgtgttgaagttctcaaccggtggcagcaaacgaccagcaatttggatcgacacaggaatccactcccgcgagtgggtgacccaggcaagcggcgtatggtttgccaagaaaattacgcaggactacgggcaagatgctgccttcaccgccattctggataccttggacatctttcttgagatcgtgaccaatccagacggttttgctttcacccattctactaaccgaatgtggcggaagacccgaagccatacagcggggtcactgtgcatcggggttgacccaaataggaattgggacgccggattcggactcagcggagcttcaagcaatccgtgttccgaaacttaccatggcaagttcgcgaacagcgaggttgaagtaaagagcatcgtggattttgtgaaagatcacggcaatataaaggcttttatctctattcattcttacagccagctcctcatgtatccttatggttataagactgagccagtccctgaccaagacgaactagatcagctgtcgaaggctgcagtgaccgcactcgcttctctgtacggcacaaaattcaactatggctcaattatcaaggccatctaccaggctagtggtagtactattgactggacgtatagtcaggggatcaagtactcattcacctttgaactcagggatacggggcggtatggctttctgttacctgcatcgcagatcatccccaccgccaaggagacctggttggccctcttgaccatcatggagcacaccctcaatcacccatattag

SEQ ID NO: 110844 - DNA, 1098 bp, synthetic construct
  misc_feature 1..1098: note = Description of Artificial Sequence: Synthetic coding sequence
  source 1..1098: mol_type = other DNA
atggatcgcgctgccctcctaggtctcgctcgactctgtgcactgtgggcagccctactggtgcttttcccttacggagcacaaggaaattggatgtggctgggcattgcctcatttggcgtacctgagaagctggggtgcgccaacctgccactgaatagccgccaaaaggagctgtgcaagagaaagccttacctgcttccctctatacgggaaggcgccaggcttggaattcaggaatgtggcagccaattccgccacgaacggtggaactgcatgatcacagcagccgctacgactgctccaatgggggcgtccccgctgttcgggtacgagctgtcctccggcaccaaggagacagcctttatatacgcagtgatggctgctgggctcgtgcattccgttactcgctcctgtagtgccggtaatatgactgaatgcagctgcgatacaacattgcagaacggtggatccgcttctgagggatggcactggggggggtgcagcgacgacgtccagtacggcatgtggttcagcagaaagtttcttgattttcccattggaaataccaccggtaaggagaataaggttctgctcgctatgaatcttcacaacaatgaagctggacgccaagcagtggccaagctgatgagcgtggactgtagatgccacggagtgtcgggaagttgtgcagtgaaaacttgctggaaaacgatgtcgagcttcgagaaaataggccacttgctcaaggataaatatgagaatagcatacagattagcgacaaaacaaaacggaaaatgcgtaggcgcgagaaagaccagcgtaagattcccatccacaaagacgacctgctttatgttaacaaaagtcccaattattgtgttgaggacaagaagttggggataccgggaacacaaggcagagagtgcaatcggacgagtgaaggggcagatggttgtaacttgctttgctgcggaagaggttacaatacacacgtggtgcggcacgtggaacggtgtgagtgtaagttcatttggtgctgctacgttcgttgcagaagatgcgaatcaatgaccgacgtgcacacctgcaaatag

SEQ ID NO: 110845 - DNA, 1254 bp, synthetic construct
  misc_feature 1..1254: note = Description of Artificial Sequence: Synthetic coding sequence
  source 1..1254: mol_type = other DNA
atgcgccttatcctgcccgtaggccttatagccacaactctggcaattgcccccgtgcggtttgatagagaaaaggtgtttagggtgaagccacaagacgaaaagcaggcagacatcattaaggacctcgccaaaacgaacgagctggacttctggtaccctggtgccacacatcacgtggccgctaatatgatggttgacttccgagtgagcgaaaaagagtcacaggccatccagtctgccctggatcagaacaaaatgcattatgagatactcattcacgatctgcaggaagagattgagaagcagtttgacgtcaaggaagatattcctggtcgccactcatacgcaaagtataataattgggagaaaatcgtcgcgtggactgagaagatgatggataaataccccgagatggtgtctcggatcaagatcgggtctacagtcgaagataacccactctacgtgttaaaaatcggcgaaaaaaatgagcgccgcaaggcaatcttcaccgattgtgggattcatgctcgtgaatgggtaagccccgccttttgccagtggttcgtgtatcaagctacaaaaacatatggccggaacaagatcatgaccaagttgctggataggatgaacttttacatccttcctgtatttaacgtggatggttatatttggtcctggactaaaaatcgcatgtggaggaaaaaccgatccaaaaatcagaattccaaatgcatagggacagacctcaatcgcaactttaatgcctcttggaatagcattcccaacactaatgatccgtgtgctgacaactacagaggctctgcgccggagagtgaaaaggaaaccaaggccgtgactaacttcatcaggtctcacctgaatgagatcaaagtgtatattacattccacagctactcgcaaatgctgctcttcccgtacggatatactagcaagctgccacccaatcacgaagatcttgcaaaagtggctaaaatcgggacggatgtactgtcgacccggtacgagacaagatacatatatggtcctatcgagtcaacaatctatcccattagcgggagcagtctcgactgggcttacgatctcgggatcaagcatactttcgcttttgaactgagagacaagggcaaattcggcttcctgcttcccgagagcagaatcaagcctacatgtcgcgaaacgatgcttgctgtgaagttcattgccaagtacatactgaagcacacctcatag

SEQ ID NO: 110846 - DNA, 1260 bp, synthetic construct
  misc_feature 1..1260: note = Description of Artificial Sequence: Synthetic coding sequence
  source 1..1260: mol_type = other DNA
atggctatgaggctgattctattctttggcgcactgttcggccatatttattgtttggaaaccttcgtgggcgaccaagtgctggagatcgtaccctctaacgaagagcagattaagaacttactccagctcgaagcccaggaacaccttcagcttgacttctggaagagccctaccacaccaggagaaactgcacatgtacgcgtgccatttgtcaacgtacaggccgtgaaagtgtttctggagtcacaggggattgcctacagcatcatgattgaagatgtccaggttctcttggacaaggagaatgaagagatgctgtttaatcgccgtagggagcggagcggtaatttcaattttggtgcataccacacattggaggagatctctcaggagatggacaatctcgtggcggagcaccctgggctcgtgagcaaggtgaacatcgggagctcattcgaaaaccggcccatgaacgttctaaagtttagcacgggcggggataaaccggccatctggttagacgccggaatacatgcacgggaatgggtgacccaggctaccgccttgtggacagccaataaaattgtatcagattacggcaaggacccaagcataaccagcatcttggatgcacttgatatatttctcctgcctgtgaccaatccagacggctatgtttttagtcagacaaaaaatcgaatgtggcggaagacgcgcagcaaggtatctggctctctgtgcgtaggtgttgaccccaacagaaactgggatgcagggtttggcggccccggagcatcctctaatccatgtagcgacagctaccatgggccttcagccaactctgaagtggaagtcaaatctatagtcgacttcatcaaatctcatggtaaggtgaaggcttttatcactttacacagttattcccagctcctcatgttcccatatggttataaatgtaccaaactggatgattttgacgagctgtccgaagtggcccagaaggcagcacagagcctgcgttcgcttcacggcactaagtataaagtgggacctatctgtagcgtcatttatcaggcctccgggggctctatagattggagttacgactatggcattaagtatagcttcgccttcgagctgcgagacacaggacgatacggtttccttctccctgctcgccagattctgcccaccgctgaggagacctggctggggctgaaggctattatggaacatgtcagagaccacccttactag

SEQ ID NO: 110847 - DNA, 1167 bp, synthetic construct
  misc_feature 1..1167: note = Description of Artificial Sequence: Synthetic coding sequence
  source 1..1167: mol_type = other DNA
atgaggtggattttgttcatcggagcccttattggatcttccatttgcggccaggagaagtttttcggcgaccaggttcttaggatcaatgtccgtaatggagatgaaatttccaaactttctcaactcgtgaattccaataatctcaagctgaatttctggaaatccccctcatcttttaaccgccccgttgacgttttagttccgtcagtttccttgcaggcattcaaatcctttctgaggtcccaagggctcgaatacgctgtcaccatcgaggacctccaaatttaccacgagatggataatatcgccgccgacttccccgatctggcccgccgcgtgaagattggccattcctttgagaatagaccaatgtacgtcctgaaattttccacagggaaaggtgtaagacgcccagccgtgtggctgaatgccgggatccattccagggagtggatctctcaagcgacagcaatctggacggctaggaagatagtcagtgattatcagagggatcctgcaataactagtattcttgagaagatggacatctttctccttcctgtcgctaaccctgacggatacgtctacacacagacccaaaatcgtctgtggcgcaagactaggtctcggaaccccggttcttcttgtataggtgccgacccaaaccgcaactggaatgcctccttcgccggcaagggcgcctcagacaacccatgcagcgaagtataccacggcccccatgcaaacagcgaggtcgaggtcaaatctgtggtggacttcattcagaagcacggcaacttcaagggtttcatagacctccactcctatagccagctgttgatgtatccgtacggttatagtgtgaagaaagcgccagatgccgaagaattggataaggtcgccaggcttgccgccaaggctctcgcatcggtcagtgggacagagtaccaggtgggtccaacttgtaccactgtatacccggccagtggaagctccatcgactgggcgtatgataatggtattaaattcgcattcactttcgagctgagagacaccggcacttacggctttctcctgccggcaaatcagatcattcccaccgcagaggaaacatggctcgggcttaaaacaatcatggagcatgttagggacaacttatactag

SEQ ID NO: 110848 - DNA, 681 bp, synthetic construct
  misc_feature 1..681: note = Description of Artificial Sequence: Synthetic coding sequence
  source 1..681: mol_type = other DNA
atgaagatcgtgtccgattaccagcgggaccctgcaattactagtattcttgagaaaatggacatcttcttactcccagtggcaaaccccgatggctatgtttacacccagacacaaaaccgcctctggagaaaaacacggtctcgaaatcctggctcctcctgcatcggtgccgacccaaatcggaactggaatgcctcttttgccggaaagggagcaagtgacaacccctgtagtgaggtgtaccacggtcctcacgcaaatagtgaagtggaagtcaagtcagttgttgatttcattcagaaacacggtaactttaaagggtttatagacttgcatagttatagccaactgctgatgtatccctacggatatagcgttaagaaggccccagatgccgaggagctcgataaggttgcgcgcctcgccgcaaaggcactcgcttcagtttctgggaccgagtatcaggtaggaccaacatgtactaccgtataccccgcctcaggtagctctatagattgggcatacgacaacggcatcaagttcgcttttactttcgaacttagggatacagggacctacggattccttctccccgctaaccaaattatccctacagccgaggaaacttggcttggtctcaaaactattatggaacatgtgcgggataatctatactag

SEQ ID NO: 110849 - DNA, 582 bp, synthetic construct
  misc_feature 1..582: note = Description of Artificial Sequence: Synthetic coding sequence
  source 1..582: mol_type = other DNA
atgcatcacctaaacaaaacgcactccggccttatccacatgttttcaatcgggcgcagttacgaaggcagaagcttgtttatcctcaagctgggccgccgtagccgtttaaaaagagccgtgtggatcgactgtggtatccacgcccgcgagtggatcggccccgccttctgccagtggtttgtgaaggaggcactgctaacatataaaagtgatccagcaatgcgcaaaatgctgaatcacctctacttctatattatgccagtgtttaatgtcgacgggtatcatttttcctggacaaacgatcgattctggcggaagacccgttcccgcaattcacggttccgctgtagaggggtggatgcgaatagaaactggaaagtcaaatggtgtgatgttagctctggcagttctatggattgggcctacaaaaatgggatcccatacgctttcgcctttgaattacgcgacaccggctacttcgggtttcttctgcctgagatgcttatcaagccaacatgcaccgagacaatgctggccgtgaagaacattaccatgcacctgttgaagaagtgcccctag

SEQ ID NO: 110850 - DNA, 1314 bp, synthetic construct
  misc_feature 1..1314: note = Description of Artificial Sequence: Synthetic coding sequence
  source 1..1314: mol_type = other DNA
atgaagtgcttagggaagagacggggacaagctgcggcgtttctcccactgtgttggctgtttctcaagattctgcagccaggccactcacatctgtacaacaacagatacgcaggtgataaggttattcgctttatcccaaaaaccgaagaggaggcctatgctctgaaaaaaatcagctatcaacttaaggttgacttgtggcaaccctctagcatctcttatgtgtccgagggcacggtcactgacgtgcatatcccacagaacggctccagggcactgctggcctttttacaggaggccaatattcaatataaagttctgatcgaagatctccagaagactttggagaagggaagcagtctccatacacagagaaatcggcggagcttgtccggttacaattacgaggtttaccactcactcgaagaaatccaaaactggatgcatcacctaaacaagacacacagcgggctgattcacatgttttctatcggccgcagctacgagggaaggagcttatttattctgaagctcggacgccgtagtcgtctgaagcgcgcagtttggatcgattgcgggattcatgcacgcgagtggatcggtcccgcgttctgccaatggtttgtcaaggaagccttgctgacctataagtcggacccagctatgcgaaaaatgttgaatcatctctacttttatattatgcccgtgtttaatgtggatgggtaccatttttcctggaccaacgacagattctggcggaaaactcgatcaaggaactctcgctttcgctgtcggggtgtggatgccaatcgcaactggaaggtaaaatggtgtgatgagggcgcatccatgcacccctgcgacgacacgtactgcgggcctttccctgagtctgagccggaggtgaaggctgtggccaacttcctgcgcaaacatagaaaacacatcagggcttacctgagtttccacgcatacgctcagatgctgctctatccctactcgtacaagtatgccactattccgaactttcgatgtgtggagtccgcagcctataaggccgtgaacgcccttcagtcagtttatggagtgaggtacaggtacgggccagcctccacgaccctctatgtgtctagtggcagttcaatggactgggcctacaaaaatgggatcccgtatgcctttgcctttgagctgcgggataccggatattttgggttcctgctacctgaaatgctcatcaaacctacatgtacagaaactatgttggctgtgaagaatatcactatgcacctgctgaagaagtgtccctag

SEQ ID NO: 110851 - DNA, 948 bp, synthetic construct
  misc_feature 1..948: note = Description of Artificial Sequence: Synthetic coding sequence
  source 1..948: mol_type = other DNA
atgaagtgcctaggtaagaggagaggtcaagccgccgcctttttaccactgtgctggctttttctgaaaattttacaacctgggcactcccatctgtacaacaatcgctacgctggggataaggtgatcagattcattcccaagacagaggaagaagcatatgcattaaaaaagatctcctaccagctcaaagttgacctgtggcagcctagcagtatctcatacgtgtctgaagggaccgttaccgatgtgcacatcccacagaacggaagtagggctctgttagcgtttctgcaggaagctaacatccaatacaaggtactcattgaggatctgcaaaagacactggagaaagggagttcactccatacgcagcggaacagacggagcttgagcggatacaattatgaggtgtaccatagcctagaggagattcaaaattggatgcaccatctcaataagacgcatagcgggctcattcatatgttttcgattggcagatcctacgagggccgcagcctcttcattctcaagctgggcaggaggtctcgattgaagcgcgccgtgtggatcgattgcggcatacatgctagagagtggatcgggccagccttttgtcagtggttcgtcaaagaagccctcctgacatacaagagcgaccccgccatgcgtaaaatgttaaatcatttgtacttctatatcatgccagtgtttaacgtcgacgggtatcatttctcatggacaaatgatcgtttctggcgcaagactcggtcacgaaatagtcggttccgttgtcggggcgtcgacgccaaccgcaattggaaagtcaagtggtgtggcaaatttgggaccaattgggacccagaccccaaggtgtctgccgggtttacacttcaaaacatgtctcctgaagactctcacggcaggctgatgttcttctgcatgtag

SEQ ID NO: 110852 - DNA, 1272 bp, synthetic construct
  misc_feature 1..1272: note = Description of Artificial Sequence: Synthetic coding sequence
  source 1..1272: mol_type = other DNA
atgaagctttgttccctcgctgtgctggtaccaattgtactgttttgcgagcaacatgtattcgccttccagtcaggccaggtgctcgctgctctgccacgaacatctcgacaggtgcaagttctccaaaatctcactacgacttacgagatcgtactttggcaacctgtgacggccgatttaatcgtcaagaagaagcaagtgcactttttcgtaaatgcctcggacgtggacaacgtgaaagcccacctgaatgtgtctggaatcccttgttccgtactgcttgcagatgtagaagatcttatccagcagcaaattagcaatgatacagtcagccctcgagcctccgcaagctactatgagcagtaccatagcttgaacgaaatatatagctggattgaattcattacagagaggcatcccgatatgcttacaaaaatacatattgggtcatcattcgagaaatatcccttgtacgtcttgaaggtgagcggcaaggagcaggctgcaaagaatgctatttggatcgattgtggaattcacgcacgcgaatggatcagtccagccttctgtctttggttcatcggccacattacccagttctatggaattattgggcaatacaccaacctgctcagactggtggacttttacgtgatgccagtggtgaacgtagatggatatgactatagctggaaaaagaatcgcatgtggagaaaaaatcggtctttctacgccaataatcattgcattggaacagacttgaacagaaattttgcatcaaaacactggtgtgaagagggagcaagttcttcctcttgcagcgaaacatactgtggcctgtaccccgaatcggagcctgaagttaaggctgtagcgagtttcctgcggcggaatatcaatcagatcaaggcgtacatctcaatgcactcttacagccagcatatcgtcttcccctattcctacacccggtctaaaagtaaagatcatgaagagctgagtctggtggcgtcggaggctgtgcgagcaattgaaaaaatttctaaaaacacccgctacacccacggtcatggctctgagactctgtacttggcaccaggcggcggagatgattggatctatgacctgggcatcaagtactcattcactatcgaactacgggacaccgggacctatgggtttttgctacctgaacggtatatcaaaccgacttgccgtgaggccttcgccgcggtttccaaaattgcgtggcatgtgattaggaacgtatag

SEQ ID NO: 110853 - DNA, 1083 bp, synthetic construct
  misc_feature 1..1083: note = Description of Artificial Sequence: Synthetic coding sequence
  source 1..1083: mol_type = other DNA
atgaagctctgttcactcgcggtgctggtgcccattgtactcttttgtgagcagcatgtcttcgcttttcaaagcgggcaggttcttgcggcacttccaagaacttccaggcaggtacaggtgctccagaacttaactacaacgtacgaaatcgtattgtggcaaccagtcaccgcagatttgatcgtgaagaagaaacaggtccacttttttgtgaatgcatctgatgttgacaacgtaaaggcacacctgaacgtttccggtatcccctgttccgtgctgctagcagatgtagaagatttgatccagcagcagatcagtaatgatactgtctctccacgagcaagcgcaagctactacgagcagtaccacagcttgaatgaaatatattcctggattgaattcatcactgaaagacaccccgacatgctcacgaagattcacattgggtcatcctttgaaaaatatcccctgtacgttctcaaggtgagcgggaaagaacaggcggcaaaaaatgccatctggattgattgtggcattcacgccagagaatggattagcccggccttctgcctatggtttatcggacacaatcgtatgtggagaaagaatagaagcttttacgctaataaccactgtattggtacggacctcaacaggaacttcgcctccaagcactggtgtgaggagggcgctagtagcagctcctgtagtgaaacctactgcggactatatcctgagagcgagcctgaagtcaaggccgtggcaagctttttacgtcggaatatcaaccaaatcaaggcctatatctctatgcactcctatagtcagcatatagttttcccttacagttacacgagaagcaaaagcaaagatcacgaggagcttagcttagtcgccagcgaggccgttagggccattgagaagatatccaagaacacccgttacacccatggacacggctctgaaactctttacttggcaccaggtggtggtgacgactggatatatgatctggggataaaatatagcgtaacatctaacccgccggtggagaaactgctgcccctctctctgaaatag

SEQ ID NO: 110854 - DNA, 849 bp, synthetic construct
  misc_feature 1..849: note = Description of Artificial Sequence: Synthetic coding sequence
  source 1..849: mol_type = other DNA
atgttgcctctgttacggtgcgtgcctcgagtgctcggttcaagcgtggccgggttgagagctgccgcccccgcctcaccatttcgccagctgttgcagcccgctccccgactgtgcacacgccctttcggtttgttgtcagtccgcgccggtagcgaacgcagacccgggctgctaagaccgcgcgggccctgcgcttgtgggtgtggatgtggcagcctccacacggacggggataaggcctttgtggattttctgagcgacgaaatcaaggaggaacgcaagattcagaaacacaagacactaccaaaaatgagtgggggatgggagttggaactaaacggcaccgaggctaaactggtgcgcaaagtggcaggagagaaaattaccgtgacctttaacatcaacaatagcatacctcccacattcgatggagaggaagagcccagccagggccagaaagtcgaagagcaggaacctgaactgacctccaccccaaatttcgtggtagaggtcattaagaatgacgatggcaagaaagctctggttttggactgccattacccagaggatgaagtcgggcaagaggatgaggcggaatctgacatcttttcgatccgggaagtgagcttccaatctacaggcgaatccgagtggaaggacactaactacacattgaataccgatagtctcgactgggctttgtatgaccacctgatggattttctggctgaccgaggcgtggataacacgtttgctgatgaactagtggaattgtccaccgctctcgaacaccaagaatatatcaccttcctggaagatctgaagagcttcgttaaaagtcagtag

SEQ ID NO: 110855 - DNA, 3402 bp, synthetic construct
  misc_feature 1..3402: note = Description of Artificial Sequence: Synthetic coding sequence
  source 1..3402: mol_type = other DNA
atgcgctttgtgctttccggtaatctgcatggtggtagcgtcgtagcttcttaccctttcgacgattctccggaacataaggccactggcatctactctaagacaagtgacgatgaggtgtttaagtacctcgctaaggcatatgcgagtaatcatcctatcatgaaaaccggcgaaccccactgtccgggcgacgaagatgagacgtttaaggatggcatcaccaacggcgcgcattggtatgatgtggagggtgggatgcaggattacaactatgtgtgggcgaactgcttcgagatcaccttggagctttcctgctgcaaatacccccctgcctcacagctccgacaggaatgggaaaataatagggagtctctcattactcttattgaaaaagtacatataggcgtgaaagggttcgtcaaggattctataaccggctcgggcctggaaaacgctactatatctgtggcagggatcaatcacaatataacaacaggtcggtttggtgatttctaccggttactcgttccaggaacatacaatttaaccgtggttctgacaggctatatgcctctcacagttaccaacgtcgttgtcaaggagggaccagcgactgaggtggatttctctctccggcctacggtaacaagcgtgattcccgacacaactgaggccgtgtccactgcgagcacagtggccatcccgaacatcttgagcggcacaagtagcagttatcagcctatacaacccaaagacttccatcaccaccattttcccgacatggagatcttcctcagaaggtttgctaatgaataccctaacattacccggctctactctctgggtaagagtgtagaaagtagggaactgtacgtgatggagatcagcgacaatcccggggttcacgaaccaggcgagccagaatttaaatacatcggcaacatgcatggcaacgaagtcgtaggaagagagttactgttgaaccttattgagtacttgtgtaagaattttgggactgatcctgaggtgactgatctggttcacaacactaggattcaccttatgccctccatgaacccagatggttatgagaaaagtcaggaaggtgattccatcagcgtcatcggacgaaacaactccaataatttcgacttgaataggaattttccagatcaattcgtccagataaccgacccaacccagcccgaaacaattgctgtgatgagctggatgaaaagttatccatttgtgctcagcgccaacctgcacggcggctccctggttgtgaactaccccttcgacgacgatgagcagggcttggccacttattctaaatctcctgatgacgccgtttttcagcagatagcacttagttacagtaaagaaaattcccagatgttccagggacgcccttgtaaaaatatgtatcccaatgagtattttcctcatgggatcaccaacggcgcctcttggtataatgtccccggaggcatgcaggattggaactacctccagacaaactgctttgaggttacaattgagttgggatgcgtgaaatatccgctggaaaaggaacttcccaatttctgggagcaaaaccgccgttccttgatccaatttatgaaacaggttcatcagggagtcaggggattcgtactcgatgcaacagacggtcgtggcattctgaacgctactatctcagtcgccgaaataaaccatcccgtgaccacctataagaccggggactattggcggttgctggtgccggggacatataaaattacagcatctgcacggggttacaatcccgttacaaaaaatgtcaccgtgaagtccgaaggcgcaatccaagttaacttcaccctggtgagatcatccaccgattcaaacaacgaaagcaagaaaggaaagggggcttcgagctccacaaatgatgcatcagacccgactacaaaagagttcgagactctgatcaaggatttgtcagccgagaacggtttggaatccctcatgcttagatcaagctccaatctcgcattggctttgtataggtaccactcttacaaagacttaagcgagttcctgaggggccttgttatgaactatcctcatatcacaaacctcacgaacctgggacagagtacagagtatcgccacatttggtctttggagatctcaaacaagcccaatgtttcagaacccgaagaacccaaaatcaggtttgtggccggcatccacggcaacgcccctgtcggtaccgaactgctgttggctctggccgaattcctgtgcctgaattacaagaaaaaccctgcagttacacagcttgtggataggactcgtattgtcatcgtcccatcacttaatcccgacggtcgtgagcgtgcacaggagaaggactgtacttcaaaaatcggccagactaatgcaagaggcaaggacttggacaccgattttacaaataacgcctcccagcccgaaacgaaggccattatcgagaacctgatccagaaacaagattttagtctttccgtcgctcttgacggtggctccatgctggttacttacccgtacgataagcccgtgcagactgtcgagaataaggaaacactgaagcatctggccagcctgtatgccaataaccacccgtccatgcatatgggccagccatcttgtcccaacaagtctgacgagaacatcccaggaggggtgatgcggggtgccgagtggcacagccaccttggttccatgaaggattactccgtgacatacggccattgcccagaaatcaccgtttatacgtcctgctgttacttcccatctgccgccaggctgccatctctgtgggccgacaataagaggagtctgctctcaatgttagttgaagtgcacaagggcgtccatgggttcgtaaaggacaagacggggaaacccatctcaaaagcagtcatagttctgaatgaggggatcaaagtgcaaacaaaagaagggggatacttccacgtgcttctggcgccgggcgttcacaacattatcgccatagctgacggataccagcagcagcattcccaggtgtttgtgcatcatgacgcagcctcttccgtggtgattgtgttcgacaccgacaacagaatattcggcctcccccgagaactggtcgtcaccgtttcaggtgcgactatgtccgctctgatcctgacagcgtgcattatttggtgcatctgctctattaagagcaaccgtcacaaggacgggtttcaccgcttgagacagcaccacgatgagtacgaagatgagataaggatgatgtcaaccgggtctaaaaagtcgctgctgtcccacgagttccaggatgagaccgatactgaggaggagactctttattcctccaaacactag

SEQ ID NO: 110856 - DNA, 1149 bp, synthetic construct
  misc_feature 1..1149: note = Description of Artificial Sequence: Synthetic coding sequence
  source 1..1149: mol_type = other DNA
atgcgacgtagaaggcgcctgcagcaggaggacggaatttcctttgagtatcacagatatcctgaattgcgagaggcgctggtgtccgtgtggctacagtgtactgcaatctctcgcatctatacagtggggcggagctttgaaggtcgtgaacttctagtgatagagttgtctgacaatccgggcgtgcatgagccaggggaacctgagttcaaatacataggaaacatgcatggaaatgaggcagtaggccgcgaactgctgattttccttgcgcagtatctttgcaatgagtaccaaaagggcaacgaaaccatcgtcaacttgatccactctacccgaatccacataatgcccagccttaacccggacggatttgaaaaggcagccagccagcctggagagcttaaggattggttcgtagggagatccaacgcccagggcatcgatctgaatcgcaatttcccagacctggatagaatcgtttacgtgaacgagaaggaggggggtccgaacaaccacctgcttaaaaatatgaagaagattgtggatcaaaacacgaagttggcacctgagactaaggctgtgatccattggattatggacattccctttgtattgtctgcgaatctgcacggtggcgatctggtggctaattatccttatgacgaaaccagaagtggaagcgcccacgaatattcaagttccccagacgatgccatctttcaaagtttagccagagcatattccagcttcaatcccgccatgtccgatcccaaccgtccaccttgccgcaaaaacgacgatgactcttccttcgtcgatggcacaaccaatggcggtgcctggtatagcgttcccggcggtatgcaagacttcaactacctgtccagcaattgctttgagatcactgttgaactctcatgtgagaagtttccaccagaggagaccttgaagacttattgggaagataacaagaactcgctgatcagctatctggagcaaatccataggggtgtcaaaggctttgttcgggatcttcagggtaaccccatcgccaacgctaccatcagcgtggagggaattgaccacgatgtaacctcagccaaagatggtgactattggcggcttttgacatggaagctttag

SEQ ID NO: 110857 - DNA, 1431 bp, synthetic construct
  misc_feature 1..1431: note = Description of Artificial Sequence: Synthetic coding sequence
  source 1..1431: mol_type = other DNA
atggccggcagggggggatccgctctcctcgccctgtgtggagctcttgcagcatgcggctggctgctaggggccgaagcacaggaacccggggctccagctgcgggcatgcgccggagacggcgactacagcaggaggatggcattagcttcgagtaccatcgctatccagaattacgtgaggccctggtgtctgtgtggctgcagtgcaccgcaatatcacgtatttacaccgtgggtagaagtttcgaggggcgggagttactggttatcgaattgagcgataatcctggagtgcacgagccaggcgagcctgaattcaaatacattggaaacatgcacgggaatgaggccgtgggtagagagctccttatctttttagcacagtatctatgcaatgaataccaaaaggggaatgagactatcgtcaacttgattcactccactagaattcatattatgccaagtctcaacccggacggcttcgaaaaggcggcatcacagccaggagagctgaaggactggtttgtgggccggtcgaacgcgcaaggtattgacctgaatagaaacttccctgacctagaccgcatagtgtacgtgaacgagaaagaaggggggcctaacaaccacctgttgaagaatatgaaaaaaattgtcgatcagaatacaaagcttgccccggaaaccaaggccgtcatacactggataatggacattccttttgtgctgtcggccaacttacacggcggtgacctagtcgctaattacccttacgacgaaacgagaagcggaagcgctcacgagtatagctcaagtcctgacgatgccatattccaaagtctagcacgggcctatagctcttttaaccccgccatgtctgaccctaaccggcctccctgtcggaagaacgacgacgattcaagtttcgttgacggcaccactaacggtggcgcctggtactctgtaccaggtggcatgcaggacttcaattacctatcaagcaattgcttcgaaattacagtcgaactgtcctgcgaaaagttcccgcctgaggaaacactgaaaacctactgggaagataacaaaaactctttaatttcttatttggagcagatacaccgtggtgtaaaaggattcgttcgggatctgcagggaaatcccatcgctaacgcaaccatttccgtcgagggtatagaccacgatgtgacatccgcgaaagacggtgactattggcgactcctgatacccggaaattacaaactcactgcctccgcccctggatatctggctatcactaaaaaagtggctgttccctactctccagctgcgggtgtagactttgaactcgagtccttttcagagagaaaggaggaagagaaagaagagctcatggagtggtggaaaatgatgtcagagacccttaacttttag

SEQ ID NO: 110858 - DNA, 1332 bp, synthetic construct
  misc_feature 1..1332: note = Description of Artificial Sequence: Synthetic coding sequence
  source 1..1332: mol_type = other DNA
atggattttccttgcctatggctgggcctcctcctgccgttggtggccgctctagattttaactaccacagacaagagggcatggaagcgttcctgaagaccgttgcccagaattactccagcgtgacccacctgcatagtattgggaagagtgttaaagggcgcaacctgtgggtgttggtggttggcaggttccccaaagagcatcgcatcggcattcccgagttcaagtacgttgctaacatgcacggggatgagacagtcgggcgcgagttgctactacatctcatcgattaccttgtaacctctgacgggaaggacccagaaattaccaatctgattaatagtaccaggattcatattatgccatctatgaaccctgatgggtttgaggcagtcaagaagcccgattgctattatagcatcggacgggagaactacaaccaatacgatcttaatcgaaacttccccgacgctttcgagtataacaatgtgtcgcgccagcccgaaacagtggcagtgatgaaatggttaaagaccgaaacattcgttctgagcgcgaatctgcatggaggggctcttgtggcctcctaccctttcgacaacggagtgcaggcgacaggggctctctactcacgatctctgacccctgatgatgacgtgttccaatacttggcacacacgtatgcatcccgcaatcccaatatgaagaagggcgacgagtgcaagaacaagatgaattttcctaacggagtaaccaacggctatagctggtacccactgcagggcgggatgcaagattataattatatttgggcccagtgttttgagattaccttggagctttcttgttgcaaataccctcgagaggaaaagttgccaagtttttggaacaacaacaaagcttctcttatagaatatataaagcaggtgcatctgggcgtgaagggccaggtgttcgatcagaacggtaaccctctcccgaacgtgatcgtggaggtccaagacagaaagcacatttgcccgtacaggacgaataagtacggagaatattatcttcttctgctgcctggctcctatatcatcaacgtcactgtgcctgggcatgacccccatattactaaggtgataatccccgagaaatcccagaatttcagtgctctcaaaaaggacatattgctccctttccagggccaattagacagtatcccagtaagtaatcccagttgtcccatgatccccctgtatcgcaacctgcctgatcactccgcagcaactaaaccttccctgtttctatttcttgtgagtcttctccatatattctttaagtag

SEQ ID NO: 110859 - DNA, 1332 bp, synthetic construct
  misc_feature 1..1332: note = Description of Artificial Sequence: Synthetic coding sequence
  source 1..1332: mol_type = other DNA
atggacttcccatgcctgtggctgggcctgttgcttcctctcgtggccgccctggacttcaattatcacaggcaggagggaatggaggccttcctgaaaaccgtcgcacagaactacagcagtgtaactcacctacactcgattggtaagagcgtcaagggtcggaacctgtgggttctggtcgtgggcaggtttccaaaagaacacagaatcggcatacccgagtttaagtatgtagctaacatgcatggggatgaaacggtgggcagagagctcctgctacatcttattgattacctggtgacgtcagacgggaaggacccagaaattaccaatctcataaacagcacgagaatccatattatgccctcaatgaatccggacggatttgaggccgtcaagaaacctgactgttactactccatcggccgcgaaaactataaccaatacgacttgaacaggaatttccccgacgcgtttgagtacaacaacgtatctcgccagcctgaaactgttgccgtaatgaaatggctgaaaactgaaacatttgttctgagtgcaaatctccacggcggtgcacttgttgcaagctatccctttgataacggcgtgcaggcaacaggggcactctatagcaggtccctgacaccagacgatgacgtgtttcagtatttggcacatacctacgcttcaagaaacccaaacatgaagaagggggatgaatgtaagaataaaatgaactttcccaatggtgtgaccaatggatacagttggtatcccctccaagggggaatgcaagactataattacatctgggctcaatgtttcgaaattacattagaattaagttgctgtaagtatcccagggaagagaagctgccttctttctggaacaataacaaggcttctctgatcgaatatatcaaacaggtgcaccttggcgtaaaagggcaggttttcgatcagaatggcaacccacttccaaacgttattgtggaagtacaggacaggaaacatatctgcccgtacagaacaaataaatacggagaatattatctgttactgctccctgggagttacatcatcaatgtgactgtgccaggccacgaccctcatatcactaaggtgatcatcccggagaagtctcaaaacttttcagccctgaagaaggacatattactacctttccaaggccagctcgactcaatccccgtatccaacccttcatgtcccatgattccattgtatagaaatctccccgaccattctgccgcgaccaaaccatcactgtttctatttctcgtgagcctgctgcacatcttcttcaagtag

SEQ ID NO: 110860 - DNA, 1332 bp, synthetic construct
  misc_feature 1..1332: note = Description of Artificial Sequence: Synthetic coding sequence
  source 1..1332: mol_type = other DNA
atggactttccatgcctgtggctaggtctcctcctgcctctcgtggcagccctggacttcaattatcatcgccaagaggggatggaggccttcctaaagacggtggcacagaactatagtagtgtcacccacttacactctatcgggaagtcagtgaaaggaaggaatctgtgggtgcttgtggtcggaaggttccctaaggaacacaggatcggaattcctgagttcaaatatgtcgctaacatgcacggagatgagacggtgggtcgagaactgctattgcacttgatagactatctcgtcactagtgacggcaaggaccccgaaatcacgaatctaatcaattcgacaagaattcacatcatgccgagcatgaaccctgacggattcgaagccgtgaaaaagcccgattgttattattcgatcggaagagaaaactacaaccaatacgatctgaacagaaatttcccagatgcctttgagtataataacgtgtcacgtcaacccgagaccgtagccgtcatgaaatggctgaaaactgagacgtttgtgctctctgcaaacctgcacggaggcgcccttgtagcatcatacccatttgataacggggtccaggcaacaggtgccctgtactcacgcagcctgactcccgacgacgacgtcttccagtacttagctcatacctacgccagcagaaatccaaacatgaagaagggtgatgaatgcaaaaacaagatgaactttcccaatggagtgacaaacggatactcctggtatcctctgcaggggggcatgcaagattataactacatatgggcccagtgcttcgaaattactctcgagctgagctgctgcaaataccctcgagaggagaaactgccctctttctggaacaacaataaggcatctcttatcgagtacatcaaacaagtccatcttggcgtgaaaggacaggtgttcgatcaaaatggcaatccgctccctaacgtgatcgttgaggtgcaggacaggaaacatatttgtccatatcgcactaacaagtatggggaatactatctgctgctcttgcccggctcatatatcattaatgttaccgtgcctggccacgatccccatattacaaaagtcattatccccgagaagagccaaaacttttccgccctcaagaaagatatcctgctcccatttcaaggacagctggattcaatccctgtttcgaacccttcctgtcccatgattcccctgtaccgcaacttgcctgaccacagtgccgcaacaaaaccctcattatttttgtttctggtcagtttactgcacatttttttcaagtag

SEQ ID NO: 110861 - DNA, 411 bp, synthetic construct
  misc_feature 1..411: note = Description of Artificial Sequence: Synthetic coding sequence
  source 1..411: mol_type = other DNA
atggatttcccctgcctgtggttgggtttgttactcccccttgtggccgccctcgactttaactaccaccgtcaagaaggcatggaggcattcttgaagaccgtggctcagaactattcctcagttacgcacctccatagcatcggcaagtccgtgaagggaagaaatctctgggtgttagttgttgggaggtttcctaaggaacaccggatcggcattcccgaattcaaatatgtggctaacatgcatggcgatgaaacagtcggaagggaactgttgctgcatttgatcgactacctggtgacgagcgacgggaaagatcctgagattactaacctgattaactctactcgcatccatataatgccctccatgaacccagacggatttgaagctgtgaagaaaccatag

SEQ ID NO: 110862 - DNA, 750 bp, synthetic construct
  misc_feature 1..750: note = Description of Artificial Sequence: Synthetic coding sequence
  source 1..750: mol_type = other DNA
atggacttcccctgcctgtggctcgggctgctcttaccactcgtagctgccctggatttcaactaccacagacaggaaggcatggaagcgtttctcaaaacagtggcccagaattattcttccgttacacatctacactccatcgggaagtcagtgaaggggcgaaacctgtgggtgctggttgtcggaagatttccgaaagagcacagaatcggtattccagaatttaagtatgtggcaaatatgcacggagatgaaacagtcgggcgagagctcctgctacacctgattgactacctcgtcacgtcggatggaaaagatccggagattacgaacctcattaactcaacacgcattcatatcatgccatctatgaatcctgatggctttgaagctgtcaagaaaccagattgctattactctatcggcagagaaaattacaaccagtacgatctcaacagaaactttcctgacgccttcgagtataataatgtttcaaggcagccagaaacggtagctgtgatgaagtggctgaagacagagacattcgtactgtcagcgaatctccacggtggggcgttggtggcttcttatcctttcgacaacggtgtccaggccacgggagcgctttactccaggtcgctcaccccagacgatgatgttttccagtatctcgcacacacatacgcctcacggaaccccaacatgaaaaagggcgacgaatgtaaaaacaagatgaactttccatag

SEQ ID NO: 110863 - DNA, 1332 bp, synthetic construct
  misc_feature 1..1332: note = Description of Artificial Sequence: Synthetic coding sequence
  source 1..1332: mol_type = other DNA
atggactttccatgtctttggctaggtctcctcctgcctctggtcgccgccctcgacttcaattaccaccgacaagagggcatggaagcattcctgaaaacggtggctcagaactatagttccgtgacccacctacacagcatcggtaaaagcgtcaaggggcgcaacctgtgggtcctcgtcgtgggccgtttccctaaagaacacagaatcgggatacccgagtttaagtatgtcgctaacatgcatggcgatgaaactgtagggagagaactgttgttacacctcatcgactatcttgtaacttctgacggtaaggatccagagatcaccaatctgattaattcaacgcgaatccatattatgccatctatgaaccccgacggctttgaagcagtcaaaaagcctgactgctactattcgataggacgcgaaaactacaatcaatatgaccttaatcgcaactttccggacgctttcgaatacaacaatgtgagcagacagccagagactgtggccgtcatgaagtggctgaagaccgagaccttcgtcctctccgccaatctccatggtggggccttggtagcaagttatccatttgacaacggggtacaggccactggggctctttactcccgatcattgactcctgacgacgacgtattccaatatctcgctcacacttatgccagcaggaaccccaatatgaaaaagggcgatgagtgtaaaaataagatgaacttccctaacggagtcacaaacgggtacagctggtacccactgcaggggggaatgcaggattacaattacatctgggcacaatgtttcgagattaccctggagctgtcatgctgtaagtatccccgagaagaaaagcttcctagcttctggaacaataataaagccagcttgatagaatacattaagcaggtccatttgggagtcaaaggacaagtgttcgatcaaaatgggaaccctctgcctaacgtgatcgttgaagttcaggatcgcaagcacatctgcccgtacagaacaaacaagtatggggagtactacttgctgttgctgccaggcagttatatcatcaatgtcactgttccaggacacgaccctcacattacaaaggtcatcatacctgagaaatctcagaacttcagcgccctcaagaaggatattttactacctttccagggtcagctggattcgatccctgtatccaatccttcatgtccgatgatccccctgtacagaaacctgccagatcatagtgcagccacaaaacccagcctttttctcttcctggtgtccctactgcatatcttttttaagtag

SEQ ID NO: 110864 - DNA, 1377 bp, synthetic construct
  misc_feature 1..1377: note = Description of Artificial Sequence: Synthetic coding sequence
  source 1..1377: mol_type = other DNA
atgagcgatctccttagtgttttcttgcatctgcttcttctgttcaaactggtcgctcctgtgaccttcagacatcatcgatatgacgatttggtgcgaactctgtataaagtccagaatgagtgtccagggattacacgggtctacagcatcggtcgatccgtggaaggtcgacacctatacgtcctcgaattctcagaccatccaggaatacacgagccactggagccagaagtgaagtacgtaggcaacatgcacgggaatgaggcactgggtcgcgagttaatgttgcagctctccgaatttctgtgtgaagagttccggaatcgtaaccagaggatcgttcagctgattcaagacacccgaatacatatcctcccatccatgaatcccgacggctacgaggttgccgcagcgcaaggaccaaacaaaccgggatacttagtgggtagaaacaacgctaacggcgtagatcttaataggaactttcctgatctgaacacctatatttattacaacgagaagtatggcggccctaatcaccacttgcccctgccagataattggaaatcacaggtggagcctgagacaagggcagtgatccgctggatgcactcttttaacttcgtgctgtctgccaatctgcacgggggtgctgtagtggccaactacccatacgacaaatcttttgagcacagggttaggggtgtccgaaggaccgctagcacccccaccccggacgacaaactgttccagaaactagcgaaagtgtattcctacgcccacggttggatgttccagggttggaattgtggagactatttccctgatggaatcacgaacggcgctagctggtattcactttccaaaggtatgcaagattttaactacttgcatacgaattgtttcgagatcacgctggaactgtcgtgcgataagtttccacccgaagaggagctgcaacgcgagtggctcggcaatcgcgaggccttgattcaattcctggaacaggtgcatcagggaatcaagggcatggttttagacgagaattacaataatttggcaaatgccgttattagcgtgagtggtataaaccacgatgtcacctctggcgatcacggcgactatttccgtttactgttgccgggtatctacaccgtgtccgccactgcacctggttatgatcccgagacagtgacagtgactgtggggccggccgaacctactttggtgaattttcatctgaagaggagcatcccccaagttagccccgtaaggagggctccatcgagacgccatggggtacgggctaaggtgcagccacaggccagaaagaaagagatggagatgcgccagctgcagaggggacccgcttag

SEQ ID NO: 110865 - DNA, 615 bp, synthetic construct
  misc_feature 1..615: note = Description of Artificial Sequence: Synthetic coding sequence
  source 1..615: mol_type = other DNA
atgcactccttcaatttcgtcctgtcagccaaccttcatgggggagccgttgtggctaactacccgtacgacaaaagctttgagcacagagtgaggggcgtgcgcaggactgcaagtacacctacacccgatgacaagctgttccagaagcttgctaaggtatatagctacgcccatggatggatgttccagggctggaattgcggcgactacttccctgatggtatcacgaacggagcatcttggtactcacttagcaagggcatgcaggacttcaactatctccatactaattgctttgagatcactctggaattatcttgtgacaagtttccacctgaggaagagctccagcgcgaatggctgggaaatcgggaagcattaatccagtttctggagcaggtgcaccagggaatcaagggaatggtgctagatgaaaattataataatctcgcaaacgcagtgattagcgtgagcgggatcaatcacgatgtgacttcaggcgatcacggtgactatttccgactcctgttacctggaatttacaccgtttctgcgaccgccccgggctacgacccggagactgtgaccgttacagtgggcccagctgaatag

SEQ ID NO: 110866 - DNA, 1638 bp, synthetic construct
  misc_feature 1..1638: note = Description of Artificial Sequence: Synthetic coding sequence
  source 1..1638: mol_type = other DNA
atgctgccaggtgcctggctgctgtggaccagcttactgctcctcgcacgacccgcgcaaccctgcccgatgggctgtgactgctttgtacaggaagtcttctgctccgatgaggagttagccactgtgccactggacatccctccatataccaaaaatatcattttcgtcgaaaccagctttaccacgctcgagactagggctttcggtagtaacccaaatctgactaaagtggtgttccttaatactcaactctgtcagtttagaccagacgctttcggaggtctccccagattagaggacctcgaagttaccggcagcagttttctgaatttatccactaatatcttcagtaacctgacaagtttgggaaagctgaccttgaattttaacatgctggaggctttaccagaaggacttttccaacatttagcagccctggagtctttgcacctgcagggtaaccaactacaggcattgccaagacggctgtttcagcccctaacacacctgaagactctcaatctagctcagaacttgcttgcacagctaccagaggaactgtttcaccctttaactagcctgcagacccttaaactctccaacaacgcgctctcaggcctgccacagggagttttcggcaaactgggtagtttacaggagttgtttttagactctaacaacatcagcgaactgcctccacaggtgttttcccagctgttctgtctggagcgtctctggctgcagcgaaacgcaataacgcatctccccttatctatatttgctagtctcggcaacctgactttcttgagcctgcagtggaatatgctccgggtcctccctgcaggcctcttcgcccacacaccttgcctggttggattaagcctcacccacaatcagcttgaaacggtggcagaaggtacttttgcgcacttgagcaacctgagaagtttaatgctgagctataacgcaattacacatctgccggcgggcatattcagagacctggaggagctggtgaaactctaccttggatcaaacaatctcaccgcccttcatccagccttgttccaaaacctgtccaagctcgagttgctgtccctgtctaaaaaccaattgacaactctaccagagggcatcttcgacactaattataatcttttcaacctcgccctccacggtaacccttggcagtgtgattgccatcttgcgtatctgtttaattggctgcagcagtacactgacaggcttctcaacattcagacatactgcgccggccctgcttacctaaaaggacaggtcgtccccgccctcaacgagaaacagttggtgtgcccagtgacccgcgatcacctgggatttcaagtgacttggcctgatgaatcaaaggccggaggaagctgggacctcgccgtgcaggaaagagctgccagaagccaatgtacctattctaaccccgagggcacagttgttctggcttgtgatcaggcacaatgtcgctggctgaacgtgcagcttagccctcaacagggatctcttggtctgcagtataatgcaagccaggagtgggacctccgttcgagctgtggttcacttcgcctaacagtcagtattgaggcccgggcagccgggccctag

SEQ ID NO: 110867 - DNA, 1638 bp, synthetic construct
  misc_feature 1..1638: note = Description of Artificial Sequence: Synthetic coding sequence
  source 1..1638: mol_type = other DNA
atgctcccaggtgcctggctcctctggactagtttgctcctcctcgctaggccggcacagccttgccctatgggttgcgattgcttcgtgcaggaggtattctgctcagatgaagagcttgccacagttcccctcgatatcccaccgtacacaaaaaatatcatcttcgtggaaacgtctttcacgacactggagactagggcattcggctccaaccctaacttaactaaggtagtattcttaaatacccagttgtgtcagtttagaccagacgccttcgggggtcttccacgattggaagatctggaagtcaccggtagcagcttcttaaacctcagcacaaatatattcagcaatctgacatctctgggcaagttgacactgaattttaacatgctggaagcccttccggagggactgttccagcacctcgctgcactagagtccctgcatctgcagggaaaccagttacaggcactaccacgcaggttgttccaacctttgacacacctcaagacacttaatctggctcaaaatctgctggcgcagctgcccgaggagctgtttcaccctctcacttctcttcaaacccttaaactgtcaaacaacgccctgtcaggcctgccccagggggtgttcgggaagctgggatctttacaggaactcttccttgattctaacaatatttctgaactgccgccacaggtcttttcccagctcttttgtctcgagagactgtggctgcaaagaaacgccattactcacctgccgttatccatattcgccagcctggggaatttgaccttcctcagcctgcaatggaacatgttacgagtgttgcctgcaggccttttcgcccataccccctgtctggtgggattgagtttaacacataatcagcttgagaccgtggccgagggtacttttgcacacctaagcaacctccggagcctcatgttgtcatacaatgctattacacaccttccagcaggaattttccgcgatttggaagagctggttaagctgtatctgggcagcaacaatctgacggccctccatcctgcgctgttccagaatctgagtaagctggaacttctttccctttctaaaaaccagttgaccacacttccagaaggaatctttgacactaattacaatttgttcaacctggctctgcatggcaatccatggcagtgtgactgccaccttgcttacttgttcaactggctgcagcagtacaccgaccgcctacttaatatccagacttactgcgcaggccccgcttacctaaaaggccaggtggttccagctctgaacgagaaacagctggtttgtccggtcacccgtgatcaccttggctttcaggttacctggccagacgaatcaaaagccggaggctcttgggatctagccgtgcaggaacgggctgcgcgctcccagtgcacttactcgaaccctgaaggcactgtggtactggcttgcgaccaagcacagtgtcgatggctgaatgtgcaactgtctccccaacagggatccctaggcctgcaatacaacgcatctcaggagtgggatctgcgttcatcctgtgggtcacttcgcttgacagtgtccatcgaagcccgggcggctggaccctag

SEQ ID NO: 110868 - DNA, 1431 bp, synthetic construct
  misc_feature 1..1431: note = Description of Artificial Sequence: Synthetic coding sequence
  source 1..1431: mol_type = other DNA
atggtgggcgccatgtggaaggtgattgtgtcactggtcctgttgatgcccggaccatgcgacgggctcttcaggagtctgtaccgttctgtgtctatgcctccaaaaggcgactctggacaaccactgttcttaaccccatacatcgaggccggcaagattcaaaaaggacgcgaactgtctttagtcggtccgtttcctggccttaatatgaaatcgtatgcaggttttcttactgtgaacaagacctacaactccaatctgtttttctggttttttccggcccagatacaacccgaagacgctccagtagtgctctggcttcagggaggccccgggggatcttctatgttcgggctcttcgtagaacatggaccttacgtcgtgaccagcaacatgactctccgcgacagggattttccttggaccaccaccctgagcatgctgtacatcgacaatccagtgggcacagggttcagcttcactgacgacactcacggatatgcggtgaacgaagacgacgttgcacgggacttgtactcagccctgatccagttctttcagatcttcccagaatataagaataatgatttttatgttacgggagagagctacgcagggaaatatgttcctgctattgcccacctgatacactcgcttaaccctgtgcgagaggtaaaaataaatttgaatggtatcgccatcggggatggctactccgatcctgagtctatcattggcggatatgctgaatttctttaccagatcgggctgctagacgagaaacaaaaaaaatatttccaaaagcagtgtcatgagtgtatcgaacacatcagaaagcagaattggttcgaagcttttgaaatcctggataagcttcttgacggggatctgactagtgatccttcctatttccagaatgtgaccggctgtagcaattattataattttttaaggtgtactgaaccagaggatcaattgtattatgtcaagttcctgtccctgccagaggtaagacaggccatccacgtgggaaatcagactttcaacgacggcacaatcgtcgagaaatacctcagagaagacaccgtccagtcggtgaagccatggctgactgaaatcatgaacaactataaagtgttaatctacaatggacaacttgatatcatcgtggcggctgctctgaccgaacgtagtctcatggggatggattggaagggctcgcaggaatataagaaggccgaaaagaaagtgtggaagatcttcaaaagcgactccgaggtcgcagggtacattcggcaggcaggcgatttccatcaagtgatcattcgaggcggaggtcacattctgccatacgaccagccactgagggcattcgacatgatcaatcggtttatctacggaaaaggatgggatccttatgtgggctag

SEQ ID NO: 110869 - DNA, 1431 bp, synthetic construct
  misc_feature 1..1431: note = Description of Artificial Sequence: Synthetic coding sequence
  source 1..1431: mol_type = other DNA
atggtgggtgcaatgtggaaggtcatagttagcctggtcctgctaatgcccggtccatgtgatggtttattccggagcctgtatcgctcagtatcaatgcctccaaaaggtgactcggggcaacccttgttcttgacaccctacattgaagctggtaaaatccagaaaggtagggagctgtctctcgtcggcccttttcccgggctgaacatgaaaagttacgccggcttccttaccgtcaataagacgtataatagcaacctgttcttctggttcttcccagcccagattcagccagaagatgcacccgtggttctgtggctgcaaggcggaccaggtgggtcttctatgttcggtctgtttgtagagcacggaccctacgtggtcacgtccaatatgactctccgagaccgtgattttccttggacaacaacactcagtatgctctacatcgacaatcccgtcggaacaggtttctcattcacagatgatacccacgggtacgccgtcaacgaagacgatgtggcccgagacctctattccgctctcatacagttcttccagatcttcccggagtataagaacaatgatttttacgtcaccggtgagtcttacgccggcaaatacgtgccagctattgcgcacttaatccactctctcaaccccgttcgcgaggtgaagatcaacctgaatggcatcgctatcggtgacggatattccgacccagaatccatcataggagggtatgccgaatttctctatcaaatcggactgctcgacgagaaacagaaaaagtactttcagaagcagtgtcacgagtgcatcgaacacattcgtaagcaaaattggttcgaagcattcgagatcttagacaagttgctcgacggagatttgacgagtgacccgtcatacttccaaaatgtcacgggttgtagcaactattataattttttacggtgtaccgagcccgaggaccagctctactacgtaaagtttctcagccttcctgaggtccgacaagccattcacgtggggaatcagacctttaatgatggcacaattgtggagaagtatctgagagaggatactgtgcaaagcgtgaagccatggcttacggaaatcatgaataattataaagtcttgatttacaacggacagctcgacataatcgtcgcggccgcgttgacggaacgttccctcatgggtatggactggaagggcagccaggaatacaagaaagctgagaagaaggtgtggaagatattcaaaagtgatagcgaggtggctggttacatcagacaggctggcgatttccatcaggtcattatccgcgggggcgggcacattttgccctacgatcagcccttacgcgccttcgacatgattaacagattcatctacggcaagggctgggatccatatgtgggttag

SEQ ID NO: 110870 - DNA, 1431 bp, synthetic construct
  misc_feature 1..1431: note = Description of Artificial Sequence: Synthetic coding sequence
  source 1..1431: mol_type = other DNA
atggttggcgcaatgtggaaagtaattgtttccctcgtgctactcatgcccggcccgtgcgacgggctcttcagatccctgtaccggagcgtttcaatgccacccaagggagactccggtcagcccctgtttttgaccccgtacatcgaagccggtaaaattcagaaaggtagggagctgagcctagttggacccttccccggcctgaacatgaagagttacgctggcttcctgacagtgaacaagacctacaactccaatttgttcttctggtttttccccgctcagatccaacccgaggacgctcctgtcgtgttatggcttcaaggtggacctggcgggtcatctatgtttgggctttttgtagagcatggtccgtatgtcgtgacctccaacatgaccctgagagacagagactttccttggactactaccctcagtatgctttacatcgacaaccccgtgggaaccggttttagttttactgatgacacacatggctatgcggtgaatgaagatgatgtcgcgagggatttgtactccgctctgattcaattttttcagatatttcctgaatataagaataacgatttctatgtaactggggaatcgtacgccggcaagtatgtgcctgccatcgcgcacctaattcactcactgaatccagtaagggaggtaaaaataaacctcaatggcatcgccattggggacggttattctgacccagagagtatcattggaggatacgccgaatttctctaccagatcggactgctcgatgaaaaacagaaaaaatactttcaaaagcagtgtcacgaatgcatcgaacacatccggaagcaaaactggttcgaagccttcgagatattggacaagctcctagacggtgatttaacatccgaccctagctactttcagaatgtcaccggctgctccaattattataacttcttgcgctgcacagaaccggaggaccagctctactatgtgaaattcctttccctgcccgaggtgcgacaagctatccacgttggtaaccagacttttaacgacggaacaatagtcgaaaagtatttgcgtgaggacactgtgcagtccgtcaagccctggttaaccgaaattatgaacaattacaaggtgttgatttacaatgggcagctcgatatcatagtcgctgccgccctcaccgaacgctccttgatgggaatggactggaagggtagtcaggagtacaagaaggcagagaaaaaggtatggaaaatctttaagagcgattccgaagtagcaggctacataaggcaggccggagacttccatcaagtgatcattcgcggtggcgggcatatcttgccctatgaccagccgcttcgggccttcgatatgatcaaccggtttatctacgggaagggatgggatccttacgtgggctag

SEQ ID NO: 110871 - DNA, 21 bp, synthetic construct
  misc_feature 1..21: note = Description of Artificial Sequence: Synthetic coding sequence
  source 1..21: mol_type = other DNA
atggtaggtgccatgtggtag

SEQ ID NO: 110872 - DNA, 159 bp, synthetic construct
  misc_feature 1..159: note = Description of Artificial Sequence: Synthetic coding sequence
  source 1..159: mol_type = other DNA
atggttggtgcaatgtggaaggtgatcgtctctctcgtgctgttaatgcctggcccctgcgatggcctgtttcgaagcctgtaccgcagcgtgagtatgcctcccaaaggtgattctggccagcctctcttcttgactccatacatagaggctggttag

SEQ ID NO: 110873 - DNA, 132 bp, synthetic construct
  misc_feature 1..132: note = Description of Artificial Sequence: Synthetic coding sequence
  source 1..132: mol_type = other DNA
atggttggcgcaatgtggaaggtgattgtgtctctggtgctattaatgcccgggccctgcgatggtttgttccggtcactctatcggtctgtgtctatgccacctaagggagactcggggcagcccctgtag

SEQ ID NO: 110874 - DNA, 699 bp, synthetic construct
  misc_feature 1..699: note = Description of Artificial Sequence: Synthetic coding sequence
  source 1..699: mol_type = other DNA
atgtttgggctgtttgtcgagcacggcccctacgtggtgacctctaacatgaccttacgcgacagagatttcccatggacaacaactctcagcatgctttacatcgacaatccggtgggtactggattcagctttacagacgatacccatggatatgccgtgaatgaggacgatgtcgcaagagatctgtacagcgctctgattcagttcttccaaatttttcctgagtacaagaataatgacttttacgttaccggagaaagttacgcggggaagtacgtccccgccatagctcaccttatccactctctcaatcctgtcagggaggttaaaattaatttgaatggcatcgccatcggcgatggatattccgatccagaatcaatcatcggagggtacgccgagtttttataccaaattggacttttggacgaaaagcaaaagaagtacttccagaaacagtgtcatgagtgcattgaacatattcggaaacagaactggttcgaagcctttgaaatattagataaactgctcgacggagacctgacatctgatccatcttacttccagaatgttacgggatgttctaactactataatttcctccgctgcaccgagccagaagatcaactctactatgttaaatttctgtctctgcctgaggttcgccaggccccaagaggcgagtctgatttctag

SEQ ID NO: 110875 - DNA, 1581 bp, synthetic construct
  misc_feature 1..1581: note = Description of Artificial Sequence: Synthetic coding sequence
  source 1..1581: mol_type = other DNA
atgggccatctctctgcgcctttgcatcgcgtcagagtcccttggcagggactgctcctcacagcttccctcctgaccttctggaatcccccaacgaccgcccagcttactaccgaatccatgcccttcaatgtggcagagggaaaagaggtccttcttctggttcacaatctgccacagcagttgtttggatatagctggtataaaggagagagggtggatggcaatcgtcagatagtcggctacgcgatcggtacacaacaggctacaccgggcccagctaatagcggcagggagaccatctatccgaatgccagcctgctaattcaaaacgtgacccagaacgatacaggtttttacaccctccaagtgatcaaatccgacctggtcaatgaggaagccactggccaatttcatgtttaccctgaacttccgaagcccagtatatccagcaataactctaatcctgtggaggacaaagatgctgtggctttcacttgtgagccagagacacaagatactacctacctgtggtggatcaataatcaatcgctgccggtctcaccgcggttgcaactgagcaacgggaacaggactctgaccctcttatcagtaactagaaacgataccggaccatatgagtgcgagattcagaatcccgtgtctgccaatagaagcgatcctgtaacgctgaacgtgacctacgggcccgacactcctacgatatccccttccgatacatactataggcctggagcaaatttgagcttatcatgttatgcggcttcaaatccacctgcccaatacagttggctgattaacgggacgtttcagcagagcacccaggagttattcattccgaacatcacagttaacaactcagggagctacacgtgtcacgctaataacagtgtgaccgggtgtaacagaacgacagtgaagaccatcatcgttacagagttaagcccagtggtagctaaacctcagattaaagcatccaaaacaaccgttactggcgataaggattccgtgaatctcacctgttccaccaatgacactgggataagcattagatggtttttcaaaaaccagtccctgccgtcgtctgagcggatgaagctctctcagggcaacacaacactgtccattaaccctgtgaagcgggaggacgcaggtacctactggtgcgaagtctttaatccaatctcaaagaatcagagcgaccccataatgttgaatgtgaattacaatgctctccctcaggagaacggtctcagcccaggggctattgccggtatagtgatcggcgtggtagccctggtggccctgattgccgtagcactggcatgttttctccatttcgggaagacaggcagggcttcagatcaacgagatctgactgagcacaagccctctgtatccaatcacacacaggatcattccaatgatccccctaataagatgaacgaagttacctactcaaccctgaacttcgaggcgcagcagccaacccagccaactagcgccagtccctcattgaccgccacggaaatcatttatagtgaggtgaagaagcagtag

SEQ ID NO: 110876 - DNA, 1080 bp, synthetic construct
  misc_feature 1..1080: note = Description of Artificial Sequence: Synthetic coding sequence
  source 1..1080: mol_type = other DNA
atgccattcaacgtggccgaaggaaaagaggtgctattactggtgcataacctgccccagcagctgttcggatattcctggtataaaggtgaacgggttgatgggaacaggcagattgtgggatatgcaatcggtacacagcaagccactcctggacctgccaacagcgggagggaaactatttaccccaacgcgtcactgctgattcagaacgtcacacagaatgacacaggattttacacgctgcaggtgattaagtctgacctggtgaacgaagaagccacgggccagttccatgtgtatccagaattacctaaaccgtctatcagttccaataacagcaatcccgtcgaggataaagacgcagttgcgttcacttgtgaacccgagactcaggacacaacctatctgtggtggattaacaatcaatcactgccagtgagccctcgacttcaactcagtaatgggaaccgcacactgacactcctcagcgttacaagaaatgacacaggcccttacgagtgcgagatccagaatccagtgagcgccaatagatctgaccccgtgactctcaacgtcacctatggacctgacactccgacaatttctccttcggatacctactatagaccaggcgccaacttatcgctctcctgctacgctgccagcaaccctcctgcccagtatagctggcttattaatggcacttttcagcagagcacgcaggagttgttcatccccaacatcacggtcaataatagtggatcctatacatgtcacgctaacaattcagtcaccgggtgcaataggactactgtaaagactatcatagtgaccgagatggccttccaccatgtggccaaggccgggctcaaactgctttcctcgtctaatccacctgctagtacgagtcagtcagcaaagatcaccgataatgccttgccccaggaaaatggccttagccctggagccatcgcaggcattgtaattggagtggtagcgctggtagcccttattgcagtcgccctcgcctgcttcttacattttggaaagactgggagtagcggccccctacaatag

SEQ ID NO: 110877 - DNA, 1056 bp, synthetic construct
  misc_feature 1..1056: note = Description of Artificial Sequence: Synthetic coding sequence
  source 1..1056: mol_type = other DNA
atgggtcatctgtcggcacctctccacagggttcgtgtgccttggcagggcctgctcctcacggcatcactactgacattctggaatccacccactacagctcaactgaccacagagtccatgcctttcaatgtggcggaaggcaaggaggtactcctcttagtccacaatcttccacagcaattatttgggtacagctggtacaagggggaaagagtggatggaaatcggcagatagtgggatatgccatcggaactcagcaggctacgcctggtccagcgaattccggtcgtgaaacgatataccccaacgcttctctcctgatccagaacgtcactcagaacgataccggattctataccttgcaggttatcaagtctgatttggtaaacgaggaggctacaggccagtttcacgtgtaccccgaattgccaaaaccatccataagtagcaataattccaaccctgtcgaggacaaggacgccgtggcctttacttgcgaacccgaaactcaggacaccacctatttatggtggatcaataatcagagtctgcccgtcagcccgcggctgcagttgtcaaatggtaatcggaccctcactctgctgtctgtgaccagaaatgacaccggaccttatgaatgcgaaatccagaacccagtatccgcgaacagaagcgatcctgtcactcttaacgtcacctacggtcccgacacccccacaattagcccttcagatacatactatcgaccaggcgctaacctttccctgagttgttacgcagcttctaacccgccagcccagtactcctggttaattaacggcacatttcagcagtctactcaggaactctttatcccaaatatcaccgtgaataatagtggctcctatacttgccacgccaacaattctgtgacgggctgtaacaggacaacagtaaagacgatcatcgtcaccgagtcacctgttttgggagaggatgaggccgtgcccggacagcatcatccacagcacaagccatgccaggaaggcgggtgctgggacgtgctcgtttag

SEQ ID NO: 110878 - DNA, 759 bp, synthetic construct
  misc_feature 1..759: note = Description of Artificial Sequence: Synthetic coding sequence
  source 1..759: mol_type = other DNA
atgggacacctgagcgcaccattacacagagtaagggtaccctggcagggtttgctgcttaccgcctctctcctcaccttctggaatccgcccaccacagcccagctgacaaccgaatcgatgcctttcaatgtcgccgaaggcaaggaagtgttgctcctggtgcacaacttgccacagcagttgtttggatactcctggtacaagggagagagagtggatgggaaccgacagatcgttggctatgcaattggaacacagcaggccacccccggtccagcaaactcagggcgtgaaacaatctatccgaacgcatcactcctgattcagaatgtcacgcaaaatgatacaggtttttatacactccaggtaatcaagtcagacctggtgaatgaggaagcgaccgggcagtttcacgtgtaccacaacgcactgccccaggagaacgggctgtctcccggcgctatagcaggcattgtgattggtgtcgtcgctttggtggccttgattgccgtggctctggcttgtttcctgcacttcggcaagactgggagggcatctgaccaacgggaccttacagaacacaagccaagcgtttctaatcacacccaggatcactccaatgaccctccaaacaaaatgaatgaggtgacttattccaccttaaattttgaggcgcaacagcccacccagccaactagtgcgagcccctctcttactgctaccgagatcatctattccgaggtcaaaaagcagtag

SEQ ID NO: 110879 - DNA, 1293 bp, synthetic construct
  misc_feature 1..1293: note = Description of Artificial Sequence: Synthetic coding sequence
  source 1..1293: mol_type = other DNA
atgggtcatttatcagcacccctccatcgggtacgggtaccatggcagggactcctgttgaccgcttccttgttgaccttctggaaccctccgaccaccgcccagctcacaacagagagcatgccttttaacgtcgctgaagggaaagaggtgctgcttctcgtacacaacctgccacagcaactgtttggatactcttggtacaaaggcgagcgggttgacggaaatagacagattgttggttacgctataggaacccagcaggccacgccagggccagccaacagtggacgcgaaaccatctatcctaatgccagcctgctgatccagaacgtgactcagaacgatactggcttctataccctgcaggtgatcaagtccgacctggtgaatgaggaggccaccggacagtttcacgtgtatcctgaattgccgaagccttctatttcatccaataacagtaatcccgtggaagacaaagatgctgttgccttcacatgtgagcctgagacacaggacactacttacctgtggtggattaataaccaaagtctgcccgttagcccaaggcttcaactaagtaacgggaatcggacactcactctgttgtctgtgacacggaacgatactgggccgtatgaatgcgaaatccagaaccccgtgtcagctaaccggagcgacccagtgactctaaatgtcacttatggacctgatactccaaccatctccccttcagatacctattaccgccccggagctaacctgagtctaagttgctacgctgcatccaatcctcctgcccagtactcatggctgattaacggaaccttccagcagagcacgcaggagctgtttattcctaacatcaccgtcaataattcggggagctacacctgtcatgcaaacaactctgtcacgggctgtaataggaccacagtaaaaaccataattgtcaccgacaatgcattaccccaggagaatgggctctcaccgggggctatcgccgggattgtgataggcgtggtcgccctggtggcccttattgctgtggcgctggcttgttttcttcattttggcaaaaccggccgcgcctctgatcagcgtgatcttaccgagcataagcctagtgtctccaaccacacccaggaccactctaatgatccaccaaacaagatgaacgaagtgacatactcaactcttaacttcgaggcccaacagccaacacagcctacatccgcatctccaagcctgacggcaactgaaatcatctatagtgaagtaaaaaaacaatag

SEQ ID NO: 110880 - DNA, 1386 bp, synthetic construct
  misc_feature 1..1386: note = Description of Artificial Sequence: Synthetic coding sequence
  source 1..1386: mol_type = other DNA
atgggacacctatccgctccccttcacagggtgcgggtcccctggcagggcctgctactgacagcctctcttttaaccttttggaatccacctacaacggcccagctgactaccgagtccatgcccttcaacgtggctgaagggaaggaggtattactgttggtccataacctccctcagcagttgtttggttattcctggtacaaaggcgaacgggtagatggcaaccgacaaatagtcggctacgctattggaactcagcaggctacgccaggacctgcgaacagcggtcgggaaactatctacccgaatgcctcacttctgatccagaacgttacacagaacgacacgggcttctataccctacaggttattaagtcagatctggtcaacgaggaggccaccggccagtttcacgtctaccccgagttgccgaagcccagcatctcctcaaacaactcaaaccccgtggaggacaaagacgccgtggcattcacctgtgaacctgagacgcaagacacaacctacctgtggtggataaacaaccagagtctgccggtaagccccagactgcaactgtcaaatggaaatcgaaccctcacactgcttagtgtcacgcgcaatgacaccggcccgtatgaatgcgagattcagaatccagtttctgcaaacagatcagacccagtgacactgaatgtgacgtatggtcccgacacacccaccataagtccaagcgatacctattacaggccaggcgccaacttgagcctgagctgttacgccgcctccaatccgcccgcccagtatagttggctcataaacggaacctttcagcagagcacccaggaattgttcatccctaatattaccgtgaataattctggcagctacacatgccacgcaaacaattcagttacgggttgcaatagaaccaccgtgaaaactataatcgtgactgaaagacagaatctgacaatgttgccccggctggatagcaactcttgggcccaagctattctgcccagcgtgagccagtcagccgaaataacggataatgccctcccacaagagaatggtttatctcccggtgcaatcgccggaatcgtgatcggtgtcgtggccctcgtggctctcatcgctgtggcgttggcctgcttcctgcattttgggaaaactggccgcgcatctgatcagcgcgacctcacggagcataagccatcagtgagcaatcacactcaggaccactccaacgacccacctaataaaatgaatgaagtgacttattccactttgaactttgaggcacagcagcccacgcaacccacgtctgcgtctccatccctcaccgccaccgagataatttacagcgaggtaaagaaacaatag

SEQ ID NO: 110881 - DNA, 1254 bp, synthetic construct
  misc_feature 1..1254: note = Description of Artificial Sequence: Synthetic coding sequence
  source 1..1254: mol_type = other DNA
atgggtcatctatcagcacctctgcatagagtcagagtgccatggcagggcctgcttctgacagcctcacttttgaccttttggaatccgcccaccaccgctcagctgacaactgaatcaatgccttttaatgtagctgaaggaaaggaggtcctgctcctcgtgcacaatttgccacagcagctgtttggttatagctggtacaagggagaacgagtggacgggaacaggcaaattgtgggctatgctatcggcacccaacaagctacccccggtcctgctaactcgggacgtgagaccatttacccaaacgctagtctcctgattcagaacgtcacgcagaatgacaccgggttctatacccttcaggtgataaagtcagaccttgtgaacgaggaggccacggggcagttccacgtttaccctgagctgcccaagccaagcattagcagcaataactccaatcccgtcgaagataaagacgctgtggcattcacctgtgaaccagagacgcaggataccacgtatctctggtggataaataaccagagcctgccagtgagcccccgtctacaactctccaatggcaacagaacgctaactctgctctcagtcacgcgcaatgacacaggtccttacgagtgtgagatacagaacccagtgagtgctaatcgtagcgaccctgtcacacttaatgtcacttatggcccagacacaccaacgatttccccaagcgacacatattacagacctggtgccaatctgtcactttcttgttatgcagcctccaacccccccgcccagtactcctggttgattaatggaacttttcagcagagtactcaggaactgtttatccctaatatcactgttaacaatagcggctcttatacatgccatgcaaacaacagtgtgacaggttgcaataggactaccgtgaaaacgatcattgtgacggagctcagtccagttgtggcgaagccccagatcaaggcaagcaagaccaccgttaccggagacaaagacagcgtcaatctgacatgcagtaccaatgatacaggcatcagcattagatggttcttcaagaatcagtcgttgccttcctcagagagaatgaaactgagccagggaaacaccaccttatccattaatcccgttaagagggaagacgcagggacttattggtgtgaggtcttcaaccccatttcaaaaaatcagagcgatcccattatgctcaatgtgaattgcaagtag

SEQ ID NO: 110882 - DNA, 1437 bp, synthetic construct
  misc_feature 1..1437: note = Description of Artificial Sequence: Synthetic coding sequence
  source 1..1437: mol_type = other DNA
atgccttttaatgtcgcagagggtaaggaggtccttcttttggtgcacaacctgccacagcagctgtttggatattcatggtataagggcgagcgagtagatggcaatagacagatcgtcggatacgccatcgggacgcagcaagccacacctggaccagctaactcaggaagagagaccatttaccctaatgcctccctgctcatccagaacgtcacacagaatgatacgggcttctatactctccaggtcatcaagagcgatttagtgaatgaggaagccaccggtcagttccacgtctaccccgaactgcctaagcccagcatttcttcaaataactcaaaccccgtggaagataaggacgctgtggcgttcacttgcgaaccggaaacacaagatactacttacctgtggtggattaataaccagtccctgcccgtcagtccccggctgcaactttcaaatggaaatcggactttaaccttactttctgttactaggaacgacactggtccctatgagtgtgaaatccagaatcctgtgtctgctaatagatctgatcccgtcacactgaacgtgacctacggtccagacacgcctacaattagccccagcgatacctactatagacccggggccaatctaagtttaagctgctacgccgcctcaaatcccccagcgcagtattcatggcttatcaatggaaccttccagcagtcaacacaagagctgtttatcccaaacatcaccgtgaacaactccggtagctacacttgccatgccaacaactccgtcactggatgcaataggacaactgtgaagaccattattgtgaccgagctttccccagtcgtggctaagccacagatcaaggctagtaaaaccactgtaaccggtgacaaagactccgtgaatttaacctgcagcactaacgataccggtatctcgataaggtggtttttcaaaaatcaaagcctcccatctagtgagcggatgaagctctcccagggtaatacaaccttgagcattaacccagtgaaaagagaagatgccggaacttactggtgtgaagtgtttaatccaattagcaagaatcagagcgatcctattatgctgaatgaaatggcattccaccacgtagctaaagccggcctcaagctgctctcaagctccaatccacctgcaagcacaagccagagcgctaaaatcactgaacgccaaaacctgaccatgctgccccgtctcgactctaattcctgggctcaggctatccttcctagcgtttcgcagtctgcagaaattacagataacgccctaccccaggaaaacggtttgagtcctggagcgattgctgggatcgtgatcggagtggtcgcattagtggctttaattgccgtcgccctcgcctgttttctgcatttcggtaagactgggtag

SEQ ID NO: 110883 - DNA, 966 bp, synthetic construct
  misc_feature 1..966: note = Description of Artificial Sequence: Synthetic coding sequence
  source 1..966: mol_type = other DNA
atgggccacctgagcgccccactgcaccgcgtaagagttccctggcaggggttgttactgaccgcgtcactcctgaccttctggaacccacccacaaccgctcagctgacgaccgagagcatgccattcaacgtagccgaggggaaggaggtccttctactcgtacacaaccttcctcagcagctgtttgggtactcttggtacaaaggcgaaagagttgacgggaacaggcagattgtgggctatgcgattggaactcaacaagccaccccagggccagccaactctggacgggagaccatctatcctaacgcgtccttattgatccagaatgtcactcagaacgacaccggattttacacgctgcaggtcataaaaagtgatctggtaaacgaggaggcaactggacagtttcatgtgtaccccgagcttcccaaaccctcgatttctagcaataattcgaacccagtggaagacaaggatgccgtggcgttcacgtgtgagcctgagacacaggataccacatacctgtggtggataaacaatcagagcctgcccgtgagtcctaggctacaattgtccaacggtaaccgaaccctaacgctgctaagcgtgacgcggaatgatacaggcccctatgaatgcgagatccagaacccagtgtccgctaatcggtccgaccctgtgacgctgaacgtgacatatggaccagacaccccaactatatccccatcagacacttactatcgtcctggagccaacctcagcctgtcttgctatgctgcctccaaccccccagctcaatacagttggttgatcaacggcacattccagcagtctacccaggagctcttcatcccaaatatcaccgtgaacaatagcggtagctacacatgccacgcaaacaactcagtgacaggttgtaaccggaccaccgtcaaaacaattatcgttactgggaagtag

SEQ ID NO: 110884 - DNA, 1458 bp, synthetic construct
  misc_feature 1..1458: note = Description of Artificial Sequence: Synthetic coding sequence
  source 1..1458: mol_type = other DNA
cgtggcgatcgagctgcagtgcttgaggctttcctcgagccaaagctgagctccaccggtgaggatagagcctctcggaggcaccacggcgcgccacttagccctacctcacaatccgcttgcactctcgggctgcttctaacagcatctctgctgacattctggaaccctcccactacagcccagttgaccacggaaagcatgcccttcaacgttgccgagggaaaggaagtgctacttttagttcacaacctccctcaacagttgtttggctattcctggtataaaggcgagagagtggatggcaaccggcaaattgtgggctacgccattgggactcagcaagcaactcccggccccgccaatagcgggagggagaccatctatcctaacgcaagtctgcttattcagaacgtaactcagaatgatacaggtttttatactctgcaagtgattaaatcagacttagtgaacgaggaagcaaccggccagttccatgtctatcccgagttgcccaaaccgagtatctcatccaataattctaatcccgtggaagataaagacgccgtcgcgtttacttgtgaaccagaaacccaggacactacatacctgtggtggatcaataaccaatccttgccagttagcccgagactccaattatcaaacggcaacaggacactgacccttcttagcgtaactagaaatgataccgggccttacgaatgcgagatccagaaccccgtcagcgcgaatagatccgaccctgtcaccctgaatgtgacatatggacctgacacgccaacgatttccccttcggacacgtattatcggcctggggccaacctgtcgctttcttgttatgcagcctccaatccacctgcacagtactcctggctgattaatggaaccttccaacaatccacgcaggaactgttcatacccaatatcactgtcaacaacagcgggtcatatacatgccacgcgaacaacagcgtaacgggctgcaatcggacaaccgtcaaaacgatcatcgtcacggaactgagccccgttgttgccaagccgcagatcaaagcctctaagactacagtcaccggtgataaagatagtgtgaacctcacctgttcaacaaatgacaccgggataagtatcagatggttcttcaagaatcagagtttgccaagcagcgagcgcatgaaactgagccaaggcaataccacactgagcataaatcctgtaaagcgggaggacgctggcacctactggtgtgaagtgtttaaccctatcagtaaaaaccagagtgaccctatcatgcttaacgtgaactataatgccctgccccaggaaaacggcctctccccgggcgccattgccggcatcgtgattggtgtggttgccttggtggcactgatagccgttgccctggcctgttttctgcatttcggaaaaaccggttag

SEQ ID NO: 110885 - DNA, 1395 bp, synthetic construct
  misc_feature 1..1395: note = Description of Artificial Sequence: Synthetic coding sequence
  source 1..1395: mol_type = other DNA
atggggcatctctcagcaccattacatcgagtacgcgtgccatggcagggacttttgttgaccgccagcctcctgacattttggaaccctcctaccactgcgcagctgacaacggagagtatgccgttcaacgtagcagagggcaaggaagtgttgcttttggtgcacaatctcccccagcaactgttcggctactcatggtataaaggagaaagagtggatggaaacaggcagattgtgggttacgccataggtactcagcaagctaccccaggacccgcgaatagcggccgggagaccatttaccccaatgcctccctgcttatccagaacgtgacacaaaacgataccggattttatactctgcaggtgatcaaatcagacctggtcaacgaggaagctaccggccagtttcacgtctatccggaactgcctaagcccagtatctcttcgaataacagcaatcctgtcgaggataaagatgccgttgcatttacatgcgaacccgagacccaagacaccacatacctgtggtggatcaataatcaatcactgcccgtgtccccccgcctccagctcagtaacggcaacaggactctcaccttgttatccgtaacccggaacgatactggaccctacgaatgcgaaattcagaaccctgtgagtgcgaaccggtctgaccccgttactctcaacgtgacctatgggccagatactcccaccataagccccagtgacacttactatcgccccggggctaacttgtcattgtcttgttacgcagctagcaaccctcctgctcagtattcctggctgattaacgggaccttccagcagagcactcaggagctgttcattccgaacataactgtcaataattcaggctcctatacatgccatgcgaataatagcgtcaccgggtgtaacagaaccactgtgaaaaccatcatagtcactgagctctcgccggtcgtagcaaagccacaaattaaggcgtcaaagaccactgtaacaggcgacaaagacagcgtgaatctcacctgcagcacaaacgatacaggcatctcaatacggtggtttttcaagaatcagtccctgccttcgtcagagagaatgaaactgtcccagggcaacacgaccctctccattaatcccgtgaaacgtgaggacgccggcacctactggtgcgaagtctttaacccaatcagcaagaatcagtcagatcccataatgctcaacgttaactacaacgccctgccccaggagaacggcctgagccccggcgcgattgctggtatagttatcggggtggtggcactcgtggcgctgattgccgtggctctcgcctgcttcctgcactttggcaagacgggttccagcggaccactgcaatag

SEQ ID NO: 110886 - DNA, 1107 bp, synthetic construct
  misc_feature 1..1107: note = Description of Artificial Sequence: Synthetic coding sequence
  source 1..1107: mol_type = other DNA
atgggacatctctccgcaccgctccaccgagttcgtgtgccctggcagggcctcctactgacagcatctctgctgaccttttggaatccgccgactactgcgcagctgaccaccgagtcgatgccctttaatgtcgctgagggtaaagaggtgctgctcctggtgcataatctaccccagcagctgttcggctacagctggtataagggagagcgggtcgacgggaaccgtcaaatagtaggatacgctattgggacccagcaggcaacacccggccctgcaaattcagggcgcgaaaccatctatcccaacgcttcccttctgatccaaaacgttactcagaatgacaccggcttctataccctgcaggtgataaagtctgacctcgtgaatgaggaagccacagggcagttccacgtgtatcctgaacttcccaaacccagtatcagctctaataatagcaatccagttgaggataaggatgccgttgcctttacatgcgagcctgagactcaggacacgacttatctctggtggattaacaaccagtcactgcctgtgtcccctcgtctgcagctctccaacggaaatcggacactcaccctgctctcggtcactcgaaacgatactgggccttacgaatgcgagatacagaaccccgtttcagcaaaccggtctgatccagtaacactgaatgtcacctatggtccagatacccctaccatctctccttctgatacatactaccggcccggggcaaatttgagccttagctgttacgctgcgagcaatccccctgcccaatattcctggctaattaatggtacctttcagcagtcaacccaggagctctttattcctaacatcaccgtcaataatagcggctcctacacctgtcatgctaataatagtgtaacagggtgtaataggacaacagtcaagactataattgtcacggacaacgctctgccccaggagaacggattaagtcctggcgcgatagccgggattgtgataggagtggtcgccctggtggccctgattgcggtggctttggcatgctttcttcatttcggaaagacaggatcgagtgggcccctgcagtag

SEQ ID NO: 110887 - DNA, 906 bp, synthetic construct
  misc_feature 1..906: note = Description of Artificial Sequence: Synthetic coding sequence
  source 1..906: mol_type = other DNA
atgttagctctcagagtggctcgcggttcttggggagccctcaggggcgctgcttgggctccaggcacacggccgagtaagagaagggcttgctgggctctgctgccaccggttccctgctgtcttggatgcctagcggagaggtggcgtctacgcccggcggcgctggggcttagacttcccggcatcggccagaggaaccattgctccggcgctggcaaagctgcccctaggccagctgctggtgccggagccgcagctgaggccccaggaggacagtggggtcccgcaagcacaccttccttgtatgagaacccttggactattccgaacatgctgtccatgacccggattggactcgctcctgtgctaggctatctaatcatagaggaggattttaacatcgctctcggcgtcttcgcactagcaggattaactgacctgctggatggctttatagctcgtaactgggccaatcagcgctcagccctcggatcggctcttgacccactcgcagataagatattgataagtatcctgtacgtgagcctcacctatgcagacctgattcccgtacccctgacgtacatgatcatctcccgtgatgttatgctgatagcggccgtgttctatgttcgttaccggaccttacctacacccagaacgcttgccaagtacttcaacccgtgttacgcaaccgcacgcctcaagccaaccttcattagcaaggtcaacactgcagtccagcttattttggtggccgctagcctggcagcccccgtgttcaattatgctgattcgatctatctccagatcttgtggtgcttcacagctttcaccactgccgcttcagcttactcttattaccactatggaaggaagactgtacaggtcatcaaggactag

SEQ ID NO: 110888 - DNA, 609 bp, synthetic construct
  misc_feature 1..609: note = Description of Artificial Sequence: Synthetic coding sequence
  source 1..609: mol_type = other DNA
atgccccaatatgagaatccatggacgattccgaatatgctctcaatgacgaggattggcctcgctcctgtacttggatatttgatcatcgaagaggactttaacattgccctgggcgtctttgcgctagccggactaacagaccttctggatgggtttatcgctcggaattgggccaatcagcgatctgctcttggctccgcacttgaccccctggccgataaaatactgatctctatcctctacgtgtccctgacgtacgccgatctgatccccgtgcccctaacttacatgattatttcgcgggatgtcatgctgatcgccgcagttttctatgtgcgctacaggaccttaccgacacctagaacgctggcaaagtatttcaatccatgctacgccaccgcgcggctgaaacctacattcatcagcaaggtgaatacagccgtccagctgatcctagtagcggcctccctggctgcacccgtgtttaattacgcagattccatctatctccagatcctgtggtgcttcaccgcctttacaactgccgcgtctgcctactcctactatcattacggacggaagacggttcaggtcattaaggactag

SEQ ID NO: 110889 - DNA, 618 bp, synthetic construct
  misc_feature 1..618: note = Description of Artificial Sequence: Synthetic coding sequence
  source 1..618: mol_type = other DNA
atgctggctcttcgcgtggcaagaggatcatggggcgcactgcggggggccgcctgggcaccgggcactcggcctagcaagcggagagcatgctgggctctgctgccacctgtgccatgttgcctgggctgtctcgccgaaagatggcgcctccggcccgccgccctgggtctcaggctccccggtatcggccaacgcaatcattgtagcggcgccggaaaggctgctcctcggcctgctgcgggggccggtgccgctgccgaggcaccagggggccagtggggacctgcaagcaccccctcactgtatgaaaatccttggactattcctaacatgttaagtatgacacgtataggcctggctcctgtactgggctacctgataatcgaagaagacttcaatattgcactcggtgtgtttgctttggccggcctgacagacctgttggatggtttcatagccagaaattgggccaaccagcgcagcgcgctgggttcagctttggatccgctcgcagacaaaatactgatttcaattctatacgtttccctaacctacgccgatctcattccagctaacacgtgtcaggtatttcagtctctattatgccattgttag

SEQ ID NO: 110890 - DNA, 12210 bp, synthetic construct
  misc_feature 1..12210: note = Description of Artificial Sequence: Synthetic coding sequence
  source 1..12210: mol_type = other DNA
atggccagccgcgatagcaaccacgccggtgagtcgttcctggggtctgatggggatgaagaggccacaagagaactggagactgaggaagagagcgagggggaggaagatgagacggcagcggagtctgaggaggagccagattccagactttcagatcaggacgaagagggcaagattaaacaggagtatatcatttcagacccatctttcagcatggtgaccgtccagcgggaagattcggggatcacctgggaaactaactctagccgttcatccactccctgggcctcggaggaaagtcagacaagcggcgtgtgctccagggaaggcagcaccgtgaatagtccgcccggcaatgtatctttcatcgtcgacgaggtgaaaaaagtcagaaaaaggacccataagagtaagcatggttctccatctttgcggcgaaaaggaaacaggaagaggaactccttcgaaagccaggatgtgcctacgaacaagaaaggtagtccgctgacctccgcgtctcaggtgttgacaacggagaaagagaaaagctacaccggtatctacgataaggccaggaaaaagaaaaccaccagtaacacccctccaatcacgggagctatttacaaggagcacaaacctctagtcctacgacccgtgtacattggaactgttcaatataagatcaagatgttcaactcggtaaaggaagaactaatccctttgcagttctatggaaccttgcctaagggctatgtgatcaaagagatacactatcgtaaaggcaaggacgccagcatctccctggagccagacctggacaactccggctcaaacaccgttagcaagacccgtaaactagttgcccagtcaatcgaagataaggtgaaggaggtgtttcctccctggcgaggagccttatctaaaggatccgaatcactgacattgatgttttcacatgaagatcagaaaaagatttacgcagactcccccctaaacgccacctcagcgctcgagcacacagtgccgtcctatagcagtagcggccgagctgagcagggcatacaactgcggcatagtcagtcagtcccacagcaacctgaggacgaagccaagcctcacgaggtggagcctcctagcgtaactccagacacccctgctaccatgttccttcggaccactaaggaagaatgtgagctcgcctctcctggcactgctgccagcgaaaatgacagttcagtctcaccgtcgtttgctaatgaggtgaaaaaagaggacgtatactccgctcatcactccataagcctcgaggccgcttcccctggtctggcagcttctacccaagatggacttgaccctgaccaggaacagcctgaccttacctcaatcgaaagagccgagccggtgtccgccaagctgactccgacacatcctagcgtcaagggtgaaaaggaggagaacatgcttgagccaagcataagcctctctgagccactgatgttggaggagccagaaaaagaggagattgagacatcccttcctatcgctattactcctgagccggaggatagtaatttggtcgaggaagaaatagtggaactggactaccctgagagccctcttgtttcggaaaagccatttccaccgcacatgagccctgaagtcgaacacaaagaggaagaactcattctgcccctgctggctgcatcttcccctgaacacgtggctctttccgaggaagaaagagaggagatcgccagcgtaagcacagggtccgccttcgttagcgagtactccgtccctcaagacctgaatcatgagttgcaggagcaagaaggagagccagttccaccgagcaacgtggaggctatcgccgagcatgcagtgctgtctgaggaggagaatgaggagttcgaggcctatagtcccgcagccgctcccacatcggagagttctctgagtccttccacaaccgagaagacctctgagaaccagagcccactctttagtaccgtgacccctgagtacatggtcctgtctggcgatgaagcctccgaaagtggttgttataccccagattctactagcgcgtctgagtactctgtgccctccctcgccacaaaggagtccctgaagaaaaccatcgaccggaagagcccactgatcttgaagggggtgtctgagtacatgatcccatctgaggaaaaggaagacaccggcagctttacccctgctgtggcccccgctagtgaaccatctctgtctccatctacgacagagaagacgtccgagtgtcagtcacctttgcccagcacagcaacctccgagcatgtggtgccaagtgagggcgaggatcttggcagcgaaaggttcacccccgacagcaagttgataagcaagtacgctgctccacttaacgccactcaggagagtcagaagaagatcatcaatgaggcctctcagtttaagcccaagggcatcagcgagcatacagtgctcagcgtggatggtaaggaagtgatcggcccttcttcgcccgaccttgtggtcgcctctgagcacagttttcctccacatactacagaaatgacaagcgagtgtcaggctcctcctctgtctgccacaccttcggagtatgtggttcttagcgacgaggaagccgttgaattagagcgctacactccgagctcaacgagtgccagcgagttctccgtccctccatacgccactcctgaggcccaggaggaggaaatcgtgcatcggtccttgaacttgaagggagcctcttcaccaatgaatctgtccgaggaagaccaagaggatattggccctttttcccccgactccgcctttgtgtcagagttcagcttccccccttatgctacccaagaggcggagaaaagagagttcgagtgcgactctccgatctgtctgacctccccttccgagcatactattctgtctgacgaggacaccgaggaagccgagctgttttctcctgacagtgctagccaggtgtccatccctccctttagaattagcgaaaccgagaagaatgaactagaaccagacagtcttctgactgccgttagcgcatccggatatagctgcttctccgaggccgatgaagaggatattggctccacagccgcgacacccgtaagcgaacaattcagttctagtcagaaacagaaagccgagacgttccctctgatgtcacccctagaagacctttctctgccccccagcactgacaagagtgagaaagcagaaatcaagcctgaaattccaacaacaagcacgagtgtgtccgagtatttgatacttgctcagaaacagaagacacaggcttatctcgagccagaatccgaagacctaattccctcccatctgacatcagaagtggaaaaaggcgagcgcgaggcttcttcctccgtggccgctattccggcggcactgcctgctcaaagttctatcgtaaaggaagagacaaagccagcttctccacactccgttctgcctgatagtgttcccgcaatcaaaaaggaacaggagccaaccgccgctctgaccctcaaggcggctgacgaacagatggccttgtctaaagtcagaaaggaagaaattgtgccagactcccaagaggcaacggcccatgtgtcccaggaccaaaagatggagcctcaaccccccaacgtgcctgagagcgagatgaaatactccgttctacccgatatggtggacgaacctaagaagggcgtgaaaccaaagctggtgctgaacgtgacttccgaactagaacagcggaagttgtccaagaacgagcctgaggtgatcaagccatatagtcccctgaaagaaacttccctcagcggtccagaggcactttccgccgtgaaaatggaaatgaagcatgacagcaaaatcactactacacccatcgttctgcattcggcttcatccggggtggaaaagcaggtggagcatggcccgccagcgctggccttttcagccctgtccgaagagattaaaaaggaaatagagccgagctctagcacgacgaccgcttctgtcaccaagttagacagtaaccttactcgggcggtaaaagaggagattcctacagattcaagcctcatcacaccagttgaccgccccgtcctgaccaaggttggcaaaggcgagctgggctccggtctcccccccctggtgacctctgccgacgaacattcagtacttgctgaggaagataaagtggcgattaagggggcttctcccatcgaaacatccagtaaacatttggcgtggtccgaagccgaaaaagagatcaaattcgatagcctgccctcagtcagctcaatcgccgaacactctgtgttgtctgaagtggaggcgaaagaagtgaaagctggtcttcctgtgattaagacctcctctagccaacactctgataaatccgaggaagccagggtagaggacaaacaagatctcctgttttccaccgtctgtgacagcgagcgcttagtttcttcacagaaaaagtccctgatgagcacctcagaagtgcttgagcccgagcacgaactgccgctaagcttatggggcgaaattaaaaagaaagagacagagctgccatcgtctcagaatgtgtctccagcttcaaagcatatcattcccaaggggaaggatgaggaaacggcctcgtcatctccagagctggaaaatctggccagcggcctggctcccaccctattattactgtctgacgacaagaacaagcccgctgtggaagtgagctccacagcccagggagattttccaagcgagaagcaggatgtggctcttgccgaactttcccttgagcccgaaaagaaagacaagccccaccaaccccttgagctccccaacgccggcagcgaattttcgagcgacttgggtcgtcagtcaggatccattggtactaagcaggctaagtcacccatcacggagaccgaggactcagttctggagaaggggcctgccgagctccgctctcgcgaaggtaaggaggagaaccgcgagctgtgcgcttcgtctactatgccagccataagcgagttgagtagcctgctccgagaggaatctcagaatgaagaaattaagccatttagtcctaagatcatcagtctcgaaagtaaagagccccctgccagtgtcgctgagggaggaaatccggaggaattccaaccctttaccttttcgctgaagggcctgtctgaggaggtctcccatcccgccgattttaagaagggagggaatcaggaaatcggtcctctgcccccaacaggcaatttgaaggcccaggtcatgggcgacattctcgacaaactttccgaagagacgggccatcctaactcctcacaggtcttgcagtcaataaccgaaccgtccaaaattgctccttcagacctgctggtggagcagaaaaagacagagaaagcacttcatagtgaccagacggtgaagctccctgatgtgagcacgagctccgaggataaacaggacttggggataaagcaattttccctgatgcgagagaatctgccccttgagcaatcaaaatcttttatgacaaccaagcccgccgacgtgaaagagacaaaaatggaggagttctttatatctcccaaagacgaaaactggatgcttgggaaacccgagaatgttgcctctcaacatgaacaaagaatcgctggcagcgtacagttagacagttcctcaagcaacgaactgagaccaggtcagctaaaggctgctgtgtcttctaaggaccatacctgcgaggtaaggaagcaggtgctcccacatagtgccgaggaaagtcacctgagcagccaggaggccgtcagcgcgctagatacatcctccgggaatactgaaacactgtcctcaaaaagctattcatccgaggaggtgaagctcgccgaggaacctaaatcactggtgctcgctgggaatgtggagcgcaatatagcggagggaaaggagatccactctcttatggagagcgaaagtcttctcctcgaaaaagcaaataccgagttgtcgtggccctcaaaagaagatagccaggagaaaataaaattgccacccgaacgattcttccagaagcctgtcagcggcctctccgtagaacaggtaaagagtgagacaatctccagtagtgtgaagacggcccacttcccagccgaaggagtagagccagctttgggcaatgaaaaggaagcccatcgcagcaccccgccattccctgaggagaaacccctggaggagtccaagatggtgcagtccaaggtaatcgatgacgcagacgaagggaaaaaaccttctcctgaagtgaagattcctacgcaacgaaaacccatcagctctatacacgctcgggagcctcagagtccggaatcgcctgaggtgactcagaaccctcccactcaacccaaagtagctaagcccgatctgccggaggagaagggcaagaagggcatcagcagctttaagagctggatgtctagcctcttctttggctctagtactccagataataaggttgctgagcaggaggatctcgagacccagcctagtcccagcgtggagaaagctgtcactgtcatcgaccccgagggaaccattcctacaaatttcaacgtagcagaaaaaccagcagaccactcactgagcgaggtgaaactgaaaactgccgacgagcctagggggaccctggtaaaatcaggagatggacagaacgttaaagagaagtcgatgattcttagtaatgtagaggatttgcagcaacctaagtttatttctgaggtctcccgagaggattacgggaaaaaagagatatccggcgactctgaagagatgaacattaatagtgtggtgacttcagccgacggcgaaaacttagagatccagtcatactctctgatcggagaaaaactggtgatggaggaggccaaaacaattgtgcccccacatgtgaccgattccaaacgggtgcagaaacctgctatcgctcccccgtccaaatggaacatctcaatttttaaggaagaaccccgcagcgaccagaagcagaaatctctcctgagcttcgacgttgtcgataaggtgccacagcagccgaagtccgcttcctctaattttgcgtcaaaaaacatcactaaagagtctgaaaagccagagtcgatcatccttcccgttgaggaatctaagggatcactgatcgattttagcgaagatcggctgaaaaaggagatgcagaaccccacaagcctgaaaatttccgaggaggagaccaaattgcgttctgtttcacctacagagaagaaggataatcttgaaaaccggtcttatacactcgccgagaaaaaggttcttgctgagaaacagaattctgtcgctccgctggagctccgcgacagcaatgagatcggaaagacacagataaccctcgggtccaggtcaacagagctgaaagaaagtaaggcagacgccatgccacagcacttttaccaaaacgaggattacaatgagcgccccaagatcatcgtcggttcggagaaagagaagggcgaagagaaagaaaaccaggtgtacgtccttagcgaaggaaagaagcaacaagaacaccagccgtactccgtcaatgtggctgagtccatgagtcgggagagcgacattagtctgggccattccctgggtgagacgcagagtttctcactagtcaaagccacctctgttaccgagaaaagtgaagcaatgttagccgaggcacatccggagatccgcgaggctaaggccgtgggcacgcagcctcatcccctggaggagtccaaagtgctagtagaaaagaccaaaaccttcttgcccgttgctctgagctgccgggatgagattgagaatcactctctatctcaggagggtaacctggtgctggagaagagctctagggatatgcccgatcatagcgaggagaaggagcaatttagggagagtgaactcagcaaagggggatccgtggatataaccaaagaaactgtcaagcaaggctttcaagaaaaagctgttggtacgcagcctagacctctcgaggaaagcaaagtactcgtcgaaaaaaccaaaacttttctgcccgtggtgctctcttgtcacgacgaaatcgaaaaccacagcttaagccaggaaggaaacctggtattggagaaatcttccagggacatgccagatcactccgaggaaaaagagcagttcaaagaaagcgagctgtggaaggggggaagcgttgatataaccaaggagtcaatgaaggaagggttcccaagcaaagagtcagaacgaaccctcgcgcggcccttcgacgaaaccaaatcctccgagacaccaccctatctgctgtctccagtgaaacctcaaaccctggcctccggggccagtcccgagattaacgctgttaagaaaaaagaaatgccccgttcagagctgaccccggagcggcatacggtacacactatccagacaagtaaagatgatactagcgacgttcccaaacagtcggtcttagtttctaaacatcatttagaagccgcagaggatacacgtgtcaaagagccgttgtcttccgccaagagcaattatgctcagtttattagtaacaccagcgccagcaacgcggataagatggtgtcaaacaaggagatgcccaaagaacctgaggatacttacgctaagggtgaggatttcacagtgactagcaagcccgcaggattgagcgaggaccaaaagactgccttctcaataatctctgagggttgtgaaatacttaatatccatgcacccgcatttatttcctccatcgaccaggaagaaagtgagcagatgcaggacaaactcgagtacttggaagaaaaagcatctttcaagactattcccttgccagatgacagcgagacagtcgcttgccataaaaccctaaagagtcgcctggaggacgagaaagtcacaccgcttaaagaaaacaaacaaaaggagactcacaagacaaaggaagaaattagtacagattcagagactgacctgtcgttcatccagcccactatccccagtgaagaggactattttgagaaatacactctaatcgattacaatataagccctgaccccgaaaaacaaaaagcaccccagaaactgaatgtggaggagaaattgagcaaggaggtgacggaagaaacaattagctttcccgttagctcggtggagagcgcactggagcacgaatatgatctagtgaagctggatgagtcgttctacgggccggaaaagggccacaatatcctgagtcacccagagacacagtctcaaaactctgcggaccgcaacgtatctaaggatacaaagagagacgtggactctaagagccctggtatgcctctattcgaggcggaggagggcgtcctctcccggactcagatatttccaaccactattaaagtgatcgatcccgagtttttggaggaaccccccgccttggcgtttctgtataaagatttgtatgaggaggcagtgggcgagaaaaaaaaggaggaggagaccgctagcgaaggtgatagcgttaatagcgaggcaagctttccttcaagaaactccgacactgatgatggcactgggatttatttcgagaagtatatactcaaggatgatatactccacgacacatctctgacacagaaagaccagggacagggcttggaggagaaacgagtcgggaaagatgactcatatcagccaattgcggcagaaggcgagatctgggggaaatttgggaccatatgcagagaaaagtccttagaagagcaaaaaggagtatatggtgagggggagtccgtcgatcacgtcgagacggtcggcaacgtggccatgcaaaagaaagccccaataacagaggacgtccgggtcgccacccaaaaaatcagctatgccgtgccctttgaggatacacatcatgtccttgagagagctgatgaggccggctcccacggaaacgaagttggcaatgcaagccctgaagtgaacctgaacgtgcccgttcaggtaagtttccccgaagaagagttcgccagcggcgccacgcatgtgcaggaaacttccttggaagagcccaagatcctggtgccaccagagcccagcgaggagcggctaaggaacagtccagtccaggacgagtatgaatttactgagagtctgcacaacgaagtggtgccgcaggacatcctgtcagaggagttatcgtcagagtcgacccctgaagacgttctgtcccagggtaaagagtcttttgaacatataagcgagaacgagttcgcaagtgaagctgaacagtccacaccagccgagcagaaagagttgggttctgaacggaaagaagaagatcagcttagctctgaagttgttacggagaaggcccagaaagagctcaaaaagagtcagatcgatacctattgctatacatgcaagtgcccaatcagcgccacagacaaagtgtttggaactcacaaggatcacgaggtgtccactctggacacggctatctcggcggtcaaagtgcagctcgcggagttcctggagaatctccaggagaaatctctcaggattgaggccttcgtgtctgaaatcgaaagtttcttcaatacaattgaggaaaattgctctaaaaatgagaaaaggctcgaagagcagaatgaggaaatgatgaagaaggtgctggcccagtacgacgagaaagcccaatcattcgaggaggtgaaaaagaagaaaatggaattcctccatgagcagatggtgcattttctgcagtcaatggatacagcaaaagacaccctggagactattgtgcgcgaagcggaggagctcgacgaggctgtgtttctgacatcctttgaggagattaacgagagacttctgagcgcaatggaaagcacggcatcattggaaaagatgccggcagcctttagcctgtttgaacattatgatgatagtagtgcacggtcagaccaaatgctgaaacaagttgccgtccctcagccccctagattagaacctcaggaacctaatagcgcaacatctaccaccattgctgtgtactggtccatgaataaggaggacgtcatcgactcctttcaggtgtactgtatggaggaaccccaggatgaccaggaggtgaatgagctggtagaagagtaccggctgacggtgaaggaatcctattgcatctttgaagatcttgagccagacagatgctaccaagtctgggttatggcggtcaactttaccggttgctcattaccgagcgagcgagctatttttaggaccgcgccgagcacacccgtgatccgggcggaagactgtaccgtgtgctggaataccgccaccattagatggagaccaaccacacctgaggctacagagacttatacactggaatactgtaggcagcactctcccgaaggcgaaggcctcagatcatttagtgggatcaaagggctgcaactgaaggtgaacctccagccaaatgacaactacttcttttacgtgcgtgctatcaacgcttttggaacatcggagcaatccgaggccgctctgattagcactcgcggcacgagatttctactcttgagggagaccgcccatcccgcacttcatatcagctcaagtggcacggtcatcagttttggggagcgcaggagattgaccgaaatccctagtgttctaggcgaggagcttccctcgtgcgggcagcactattgggagacaactgttactgactgtccagcgtatcgcctggggatttgcagttcctctgctgtgcaagcaggagcactggggcaaggtgaaacgtcatggtatatgcactgctctgagccacagcgctacacattcttctattccggtattgtttccgatgttcatgttacggaacgaccagctcgcgttggtatcctgctagactataacaatcaacgtctgatattcatcaacgccgagagcgagcaactgctgttcattattcgccataggttcaatgagggcgtgcaccctgccttcgccctggagaaaccggggaagtgtacactccatctaggaatcgaaccaccggacagcgtaagacataagtag

SEQ ID NO: 110891 - DNA, 678 bp, synthetic construct
  misc_feature 1..678: note = Description of Artificial Sequence: Synthetic coding sequence
  source 1..678: mol_type = other DNA
atggacctccgggccggagactcatgggggatgcttgcctgcctatgcaccgtcctatggcatctgcccgcggtgcctgcccttaacaggactggagatcctgggccagggccttctattcaaaagacttacgatctcaccaggtatctggaacaccagttgagatctctcgcaggcacctatttgaattacctcgggccgcccttcaacgagcccgatttcaaccctcctcgcttgggcgccgaaaccttaccaagggctactgtcgaccttgaagtttggcgttcactgaatgacaagctccgcttgacacagaactacgaagcttacagccatctgctatgttatctcagaggcctgaacagacaggccgcaactgccgaactcaggcgctctctggcccacttctgcacatcccttcagggactcctcggcagcatcgcaggcgtcatggccgcgttaggataccctttgcctcagcctctgcctggtacggaaccaacctggacacccggtcccgcgcacagtgactttttgcagaagatggatgacttttggctactgaaagaactgcaaacttggctttggcggtccgctaaagattttaatcgtctgaaaaagaaaatgcagcccccggcggcagcggtgacactgcatttaggggcccatggcttctag

SEQ ID NO: 110892 - DNA, 648 bp, synthetic construct
  misc_feature 1..648: note = Description of Artificial Sequence: Synthetic coding sequence
  source 1..648: mol_type = other DNA
atgctggcctgtctgtgcacggtcctctggcacctccctgccgtgccggcactcaatcggactggtgatccagggccaggaccctctattcagaaaacgtacgaccttacacggtatctcgaacatcagttgaggtcccttgctgggacttatttgaactatctagggcctcccttcaacgagccggacttcaatccaccaaggctcggcgccgagaccttacctcgcgctaccgtcgacctggaggtctggcgctccttgaatgataaactcagacttacgcagaactacgaggcttactcgcacctcctatgctatctcagagggttgaatcgacaagcagcgaccgccgagctgagacgaagtctcgctcatttctgtaccagcctacaggggcttctgggttcgatcgcaggtgtaatggcagccctggggtatccccttccgcagccactgcctggaacagaacctacgtggactcccgggcctgcccatagcgatttccttcaaaagatggatgatttctggttgttgaaagaattgcagacatggctgtggaggtccgccaaagattttaacagactgaaaaaaaaaatgcaaccaccagctgccgccgttacattgcacctaggcgctcatggcttttag

SEQ ID NO: 110893 - DNA, 648 bp, synthetic construct
  misc_feature 1..648: note = Description of Artificial Sequence: Synthetic coding sequence
  source 1..648: mol_type = other DNA
atgcttgcgtgcctgtgcaccgtgttgtggcatctgcctgcagttcctgcactgaatcgaacgggagaccctggccctggcccctcaattcagaaaacctacgatctcacgcggtacttggaacaccagctcaggtcactggcggggacctatttgaactacctgggacccccctttaacgagcccgactttaacccaccgcggctgggagcagaaaccctgcctcgagcaaccgtggatctggaggtctggcgctccctaaacgataagctacggcttacccagaattacgaggcctattcacatctgctgtgttacctccgaggcctgaaccgccaggccgcaactgcagagctccgccgatcactcgctcacttttgcacttcactgcaaggcctcttaggcagtatcgcgggggtgatggccgcactgggctacccactcccacaacctctgcccggcacagagcctacttggacgcccggccctgcccactccgattttctccagaagatggatgatttctggctgctcaaggaattacagacatggctgtggcgttcagccaaggactttaatcggctgaaaaaaaagatgcagccccctgctgccgccgtgactttacatttgggggcccatggcttttag

SEQ ID NO: 110894 - DNA, 1881 bp, synthetic construct
  misc_feature 1..1881: note = Description of Artificial Sequence: Synthetic coding sequence
  source 1..1881: mol_type = other DNA
atgctggccttcgccgctcgtactgtggtaaaaccgctgggattcttaaaacccttctctctcatgaaggcaagctccagatttaaagcccaccaagacgccttgcctcggctgcccgtgcctcccctgcagcagagtctcgaccactatctgaaagctctacagcccattgtctcggaggaggagtgggcgcataccaagcaactagtggatgagttccaggctagtgggggagtgggcgagagactgcagaaagggctagaacgtcgcgcccggaagaccgagaattggcttagcgagtggtggttaaaaacagcctatctacagtataggcagcctgtcgtgatttatagctctccgggagtgatgcttcccaaacaggatttcgtagatctccagggccaactgaggttcgccgctaaacttatcgagggggttctcgatttcaaagttatgatcgacaatgaaaccctgcccgtggaatacctcggcggcaaacctctctgcatgaatcagtattatcagattctctctagttgcagggtgccaggtcccaagcaggacactgtttccaattttagcaagaccaagaaaccacccacgcacattaccgtggtgcacaactaccagttctttgagctggacgtctaccacagtgacggaacaccattaactgccgaccagatttttgtacagctagaaaagatttggaacagttctttgcagacgaacaaggaacctgttgggattcttacatctaaccatagaaattcgtgggctaaggcatataacacgctaatcaaggacaaggtgaacagagactccgtgcgctctatccagaagtccatcttcacagtgtgcctggacgcaactatgcctcgggtctcagaagatgtgtaccggagccatgtggcaggtcagatgctgcatggaggcggaagtagactgaacagcggcaatcgttggttcgacaagacactacagttcatagtcgctgaagacggctcttgcgggctagtgtacgaacacgccgccgctgaaggacctccaattgtgacactgcttgactatgtgattgaatacactaaaaagcctgagctcgtacgatcacccttagtaccccttcccatgccgaaaaagttgaggtttaacataacacctgaaatcaaatcagatatcgaaaaggcgaagcaaaaccttagtatcatgattcaagatcttgacataactgttatggtgtttcaccactttgggaaggatttccctaaatcagaaaagctgagtccagatgcctttatccaaatggcccttcagctggcatactacaggatctacggacaggcctgtgctacttacgaaagcgctagcttgaggatgtttcacctcggccgaacggacaccatccgcagcgccagcatggactccctaacattcgttaaagccatggatgactcctccgttaccgagcaccagaaggtcgagttactccgcaaggcagtgcaggctcatcgcggttacacggaccgagcaatccgcggagaagctttcgacaggcacctgctgggcctcaagctgcaagccatcgaagacctcgtcagcatgccggacatcttcatggatacctcctatgctatcgcaatgcactttcacctgtcaacctcccaagtacccgccaaaaccgattgcgttatgttttttgggcctgtagtccctgacggctacggggtttgttacaatccaatggaggcccatatcaatttcagcctgagcgcctataattcatgcgctgaaactaatgcagcaagactggcacactacttggagaaagcactgctggatatgcgggctttactgcaatcccatccacgcgctaagctgtag

SEQ ID NO: 110895 - DNA, 1638 bp, synthetic construct
  misc_feature 1..1638: note = Description of Artificial Sequence: Synthetic coding sequence
  source 1..1638: mol_type = other DNA
atgctagctttcgccgcaagaacagtcgtgaagccactgggcttcctcaaaccattttctctgatgaaggctagtagtcgctttaaggcccaccaggatgctctaccccgactccccgttccacccctgcagcagtccttggatcattatctgaaggccctgcagccaatagtgtcagaagaagagtgggcacatacaaaacaactggtggatgagtttcaggcctctgggggtgtgggggagcgactgcaaaagggactggagagacgtgctcggaagaccgaaaattggctaagtgaatggtggttgaaaactgcttatttgcagtatcgtcagcccgtggtgatctatagttctcctggggtgatgctccccaaacaggatttcgtagatctgcagggacaattacggtttgccgccaaactgatcgaaggtgtcttggacttcaaggtaatgatagacaatgagacgttgcccgtggaatatctgggaggcaagccactgtgcatgaaccagtattatcagatactgagttcctgtcgcgttcccggcccaaagcaagacacggtgtctaacttcagcaagaccaagaaaccaccaacccatatcaccgttgttcacaactatcagtttttcgagctcgatgtttatcacagcgatggtactccgcttaccgccgaccagatcttcgtgcagctcgagaagatctggaactcaagcctgcagaccaataaggaaccagttggcatcttaacttcgaaccaccgtaatagttgggcaaaggcttacaacactttgattaaggacaaggtgaatcgcgactccgtgcggtcaattcagaagaagaagcctgagctggtccgctccccacttgtcccactaccaatgcccaagaagctgcgattcaatatcactcctgaaatcaaaagcgatatagagaaagctaagcaaaatctgtccatcatgatccaggatctggacattaccgtaatggtgttccatcactttgggaaagactttccaaagtctgaaaagctgtctcccgatgcatttattcagatggcgctgcagctcgcctactaccgaatctacgggcaagcctgcgccacctacgaaagcgcctcgctgcgtatgtttcatctggggaggacagacactatccggtccgcttctatggactctctcacattcgtcaaggcgatggacgactcctccgttactgaacatcaaaaagtggagctgttgaggaaagccgttcaggcacacagaggctatacggatcgggcaatccggggtgaagctttcgataggcatcttctggggctgaaattgcaggcaatcgaggacctagttagtatgccggatattttcatggatactagctacgctatcgctatgcactttcatttgagtacctcacaggtacctgctaaaacagactgcgtgatgttttttggaccagtcgttcctgatgggtacggggtctgctataacccgatggaggcacacataaactttagtctgtcagcttacaacagttgcgcggagacgaacgccgctcggctggctcattacctcgaaaaagcccttctcgatatgagagccctattgcagtcccatccacgggccaaactgtag

SEQ ID NO: 110896 - DNA, 2322 bp, synthetic construct
  misc_feature 1..2322: note = Description of Artificial Sequence: Synthetic coding sequence
  source 1..2322: mol_type = other DNA
atggcagaagctcaccaggccgtggccttccagttcactgtaaccccagacggcatcgacctgcgactgtctcatgaggcactgcggcagatctacttgagcgggcttcacagctggaagaaaaagtttataaggttcaagaacggcatcattacaggcgtgtaccctgcctccccgtcaagctggctcattgtagtagttggcgttatgaccaccatgtatgcaaagatagacccttcattgggcatcatcgctaagattaaccggaccctcgagactgccaactgtatgtccagccagaccaaaaatgtggtgtccggcgtccttttcggaacaggcttatgggttgccttgattgtgaccatgcgttatagtttgaaggtgttgctgtcctatcacggctggatgttcacagaacacggaaaaatgagtcgcgcaaccaagatctggatggggatggtcaagatcttctccggtagaaaacctatgttgtattctttccagacctccctccctcggctgccagttcctgctgtgaaagacaccgtaaaccgctacttgcagtccgttcgcccgctcatgaaggaagaggactttaaacgaatgactgcacttgcccaggattttgcagttggattgggacctcggctgcagtggtatctgaaactcaaatcctggtgggcaacaaactacgtgtctgattggtgggaagaatacatttacctgagagggcggggccccctaatggtgaactccaactattacgccatggacctgctttacattctccccactcatattcaggctgccagggccgggaacgctattcacgcaatcttattgtaccgcagaaagctggaccgcgaggaaatcaagccaatccgtctgctcgggtctactatccccctctgttctgctcaatgggagcgaatgtttaacacatctcgcatccccggtgaagagaccgatacaatccagcatatgcgggactcgaagcacattgtggtgtatcaccgcggccggtattttaaggtgtggctctaccatgatggacggctgttgaagcccagagagatggagcagcagatgcaacgcatcctggacaacacttccgagccgcagcctggggaagcaagactggccgccctgactgcaggtgaccgtgtgccttgggcacgctgtcggcaggcttacttcggaagggggaaaaacaagcaatcattggacgcagtcgaaaaggcggccttcttcgtgactctggatgagacagaggagggatatcggtctgaggatcccgatactagcatggattcttacgccaaaagcctgcttcacggtcgctgttacgatcgctggttcgataagtcattcaccttcgtggtttttaagaacgggaagatgggactgaacgcagagcattcctgggctgatgccccaatcgtcgcccatttgtgggaatacgtgatgagcatcgacagcctacagcttgggtatgcagaagatggccactgtaagggtgatatcaacccgaatatcccataccccacacgcctgcagtgggacatccccggagaatgtcaagaagtaattgagacatctctgaatactgccaatctactggctaacgacgtcgattttcattccttcccttttgtggcttttggcaagggcatcattaaaaaatgcagaacttccccagatgcgttcgtccagctggcactccagctggctcactataaggatatgggaaaattctgcctcacctacgaggcatccatgacccggcttttccgggagggacgcacagaaaccgtgagatcttgcactaccgagagctgcgattttgtccgagccatggttgaccctgcacaaactgtggagcagcgcctgaaactgttcaagctagcctcggagaaacaccaacacatgtacagactcgcgatgaccggcagcggtatcgataggcacctattctgcctgtacgtagtcagtaagtacctggcagtcgaatcaccatttcttaaggaggtgctcagcgagccctggaggttgtcgaccagccagacgccgcagcagcaagtggaactgttcgacctggagaataatcctgagtacgtcagctctgggggagggttcggcccagtggcagacgatggatacggagtgtcatacattctggtgggggagaatctgatcaactttcacattagcagcaagttctcctgtcccgaaactgattctcacagatttggtcgccacctgaaggaagccatgacggatataattaccttattcggcctgtcatccaattcaaagaaatag

SEQ ID NO: 110897 - DNA, 2271 bp, synthetic construct
  misc_feature 1..2271: note = Description of Artificial Sequence: Synthetic coding sequence
  source 1..2271: mol_type = other DNA
atggccgaagcccaccaagctgtcgcctttcaattcacagtgacgccagacggcatcgaccttaggttgagccacgaagcacttaggcagatttacctgtcagggcttcacagttggaagaagaagtttataaggttcaaaaatggcattattaccggcgtgtacccagccagccccagttcttggcttatcgtggtggttggtgtcatgacaacaatgtatgctaagatcgatccatccctcggtattatagccaagatcaatcgcacacttgagactgctaactgtatgtcgtcccagaccaagaacgtggtctcaggggtactattcggcaccggcctgtgggtcgcccttatcgtcaccatgcgctactctctgaaggtcctgcttagctatcatggatggatgtttacggaacacggaaaaatgagccgcgctacaaagatatggatggggatggttaagatcttttccggtcgcaaacccatgctgtacagtttccaaacatccttgcctaggttacctgttccagcagtaaaagatacagtcaaccgatatttacagagcgtgagacctcttatgaaggaggaagatttcaaaaggatgactgcactggctcaggacttcgcagttggactcggaccgaggctgcagtggtatcttaagctgaagagttggtgggcaactaattacgtgagcgactggtgggaggaatatatttacctgcgcggtaggggcccgctgatggtgaactccaattattatgctatggacctattgtatatcctgcctactcacatccaggcggcgcgggcaggcaatgcgatccatgcaattctgctgtaccggagaaaattagatcgtgaggaaatcaagcccatcagactgctaggctccactattcccctttgtagtgctcagtgggagcggatgtttaatacctcaagaattcccggagaggagacggatacaattcagcatatgcgggactcaaagcatatcgtggtctatcaccgaggtcgctattttaaggtttggctgtaccacgacgggagactgctcaagccccgtgagatggaacagcagatgcaaaggatcctggacaatacgtctgagccccagcccggggaagcaaggttggccgcattaacagccggcgaccgtgttccatgggctcgctgtagacaggcttactttggccggggaaagaacaagcagtctttggatgccgtagagaaggcagcattttttgtgaccctggacgaaaccgaggaaggatatcgatccgaggatcccgacacctctatggacagctatgcgaagtctctgttgcacggtcgctgttacgaccggtggtttgataaatcattcactttcgttgtgttcaaaaacggtaagatgggtctgaatgcagaacattcatgggctgacgccccaatcgtcgcacatttgtgggaatacgtgatgtctatcgatagtttgcaactcggctatgcagaggatgggcattgtaaaggggatatcaaccctaatatcccttaccctacacgcctccaatgggacatccccggggaatgtcaagaggtgatcgagacaagcctgaacacggccaacctcctcgccaatgatgtggattttcatagttttccattcgttgcattcggtaagggtattatcaagaagtgtcggacctccccagatgccttcgtccagcttgccctgcagctggcacactacaaagacatgggcaaattttgtctgacctatgaagcgagcatgacgaggctttttcgggagggacgcaccgagaccgtcaggtcttgcaccacagagtcttgcgacttcgtccgggctatggttgatcctgcacaaactgtggagcagcgcctcaaactttttaagctcgcctccgaaaagcatcagcatatgtaccggttggcaatgactggttccggcatcgaccggcatcttttttgcctgtacgtcgtgtcaaagtatctggccgttgaaagcccgttcctcaaggaagtgctgtccgaaccatggagactatcaacttcccagacaccacaacaacaggtggagcttttcgacctggagaacaatcctgagtatgtgtcctccggcggagggttcggccccgtagcagatgatggttatggagtctcttacatcctggtgggcgaaaacctgatcaattttcatatttcttcgaagttctcatgccctgagaccggaattatcagtcagggcccgtcctcggacacctag

SEQ ID NO: 110898 - DNA, 2322 bp, synthetic construct
  misc_feature 1..2322: note = Description of Artificial Sequence: Synthetic coding sequence
  source 1..2322: mol_type = other DNA
atggccgaagctcaccaggcggtggctttccagtttacggtgactcctgatggaatcgacctgcggttgtctcacgaagctctgagacagatttatctgtccggtctccacagctggaagaaaaagtttatccgctttaaaaacgggattattacaggagtataccccgcatctccaagctcttggcttatagtggtagtgggagtgatgacgaccatgtatgccaagatcgacccttctctcggtatcatcgctaagattaatagaaccctggaaaccgctaattgcatgtctagtcagactaaaaatgtagtgagcggcgtgctgttcggcacgggactctgggtcgcgctgatcgtgaccatgaggtacagtttgaaggtcttactttcgtaccatggttggatgttcacagagcacgggaaaatgagtagagctactaagatttggatggggatggtgaagattttttccgggaggaagccgatgctgtactcgttccagacgtctctcccaagacttcctgtccctgcggtcaaggatactgtaaacaggtacctccagtccgtaagaccacttatgaaagaggaggactttaaacgaatgactgctctcgcccaggacttcgccgtgggcttgggacctcgcctccagtggtacctcaagctcaagagttggtgggccaccaattatgtgagcgattggtgggaagagtatatttatctccggggcagggggccactaatggtgaactctaactactatgccatggatttgctttacatcttgcccacacatatccaagctgctcgtgcaggaaacgccattcatgcaattcttctgtacagacggaagctggaccgagaagagattaaaccaatcagactgcttggatccaccattcccctttgtagtgcacagtgggagagaatgtttaacacatcgcgcataccgggcgaggaaacagacacaatccaacacatgcgtgatagcaagcacatcgtggtctaccatcgaggaaggtactttaaggtgtggctttaccatgacggtaggttgctgaagccccgggaaatggaacagcagatgcagcggatattggataacacaagcgagcctcagcccggcgaggcaaggctggctgcactgactgcaggcgacagggtgccttgggctaggtgtcgtcaggcttactttgggcggggcaagaataagcaaagtctggatgctgtggaaaaagcagcatttttcgtaacgctggacgaaactgaagagggttacaggagtgaagaccctgacacatcaatggatagctacgctaagtcactactccacggcagatgttatgatagatggtttgataagagcttcacttttgtggtcttcaagaacggtaaaatgggactcaatgccgagcactcctgggccgatgctcctatcgtagcccacttgtgggagtacgtgatgtctatcgactctctgcaactcggatacgccgaggacggtcactgcaagggcgacataaaccccaacatcccatacccaacgcgacttcagtgggacatacctggggagtgtcaggaagtcatagaaacttctctgaatacggcgaatctgctggctaacgacgtcgactttcattcgttcccatttgtggccttcgggaagggcataatcaaaaaatgcagaacaagtcctgatgcattcgtccaactcgcactccagctggcgcactacaaagacatgggcaagttctgcctcacttacgaggcctccatgacccgccttttccgcgaaggacgcaccgagactgtccggtcttgcacgactgagtcctgtgatttcgttcgcgccatggttgacccagctcagacggtcgagcaaagactgaagctgtttaagctcgcctccgaaaagcatcagcacatgtacagactggcaatgaccggctcgggaattgatcgtcatctgttctgtctgtacgtcgtaagcaagtatctggcagtggaatctcctttcctgaaggaggtgctgagtgaaccatggcggctgtccactagccagactccacagcagcaggtggagctttttgacctggaaaacaaccctgagtacgtttcatcaggcggagggtttgggcctgtggcggatgacggatatggggtttcctatattttagtgggggaaaacctgatcaacttccacatttcctcaaaatttagctgccccgagaccgactcccaccggttcggaaggcacctgaaagaagctatgacagacataatcacactgttcggtctgtctagtaactcaaagaagtag

SEQ ID NO: 110899 - DNA, 2322 bp, synthetic construct
  misc_feature 1..2322: note = Description of Artificial Sequence: Synthetic coding sequence
  source 1..2322: mol_type = other DNA
atggccgaagcccaccaggcagtggcctttcagtttaccgtgactccggacggtatagatctccgactgtcccatgaggcactgcgtcagatttacctcagtgggctccactcttggaaaaagaagtttattcgctttaagaatgggatcatcaccggagtatacccagccagccctagcagttggcttattgtcgttgtcggcgtcatgaccaccatgtatgccaagattgatccaagcttgggtattatcgccaaaatcaatagaactttagagactgcaaattgtatgtcgtcacagacaaaaaatgtcgtctctggcgtgttgtttggcaccggtttgtgggtggcactcattgtgacaatgcggtactcacttaaggttctcctgagctatcacggctggatgttcactgagcacgggaaaatgtcacgggccacaaaaatatggatgggtatggtgaagattttctccggacgtaagccgatgctttactcattccagacctccctcccccgcctcccagtcccagctgtcaaggatacagtgaatcgctatctgcagtcggtgagacccctcatgaaggaggaggacttcaagagaatgacggcactggctcaggactttgccgtgggactgggacccagattacaatggtatcttaaactgaagtcctggtgggctaccaattacgtgagtgattggtgggaagagtatatctatctgagaggccgagggccgcttatggtcaatagcaattactacgcaatggatctactctacattctacctacacatattcaggcagcccgggccgggaacgctatccatgcaattctgctttaccgacgtaaactggaccgggaggagatcaaacctatccggctgctgggctcaaccattccactgtgttccgcgcagtgggaacgaatgttcaacactagccgcattcctggcgaagagaccgataccattcagcatatgagagatagtaagcacattgttgtctatcaccgggggcgctattttaaggtgtggctgtaccatgatggacggctgctgaagccgcgggaaatggaacagcagatgcagagaattctggataacacctccgaaccgcagccaggtgaagcgagactggcagccctgactgccggcgatagagttccttgggctagatgccgtcaggcttacttcggaaggggcaaaaacaagcagagcctggacgccgtcgagaaagccgcctttttcgtgaccctcgacgaaacagaagaaggctatcggtctgaagaccccgacacgagtatggatagttacgcaaaaagcttactgcatggcaggtgctacgaccgttggtttgacaaatctttcactttcgtggtgttcaaaaacggcaagatgggtctgaatgcggagcactcctgggctgatgcccccattgtcgcccatctgtgggaatatgtgatgtcaatcgactctctccagctgggatacgccgaagatggccattgcaaaggggatattaatcctaatatcccttacccaaccaggctccagtgggatatccccggcgagtgtcaggaagtaattgagacaagtctgaacaccgcaaatctcctggcgaacgacgtggactttcacagctttcctttcgtggcttttggaaagggtatcattaagaagtgtcgcacctcacctgatgcgtttgtccaattagcactccagctcgcacattacaaagacatgggcaaattctgcctgacctacgaggcaagcatgacccgcttgttcagagaaggaagaacagagacagtacggtcttgcaccaccgaaagctgcgacttcgtccgagctatggtggatcccgcccagaccgtagaacagagattaaaactgttcaaattggcgagcgagaaacatcagcacatgtacagacttgctatgactgggagcggtattgaccgacacctcttctgcctgtacgtggtctctaaatatctggccgtggaatcacctttccttaaggaagtgttgtcagaaccttggcgcctcagcacttcccagacacctcagcagcaggtggaattatttgatcttgaaaataaccccgaatacgtgtcttctggagggggatttggccctgttgccgatgacgggtacggtgtgtcttacatactagtcggcgagaatctgataaacttccacatttcctccaaatttagctgtcccgagacagactcacacaggttcggccggcatctgaaggaggccatgactgacattatcactctctttgggttatcctcaaattcaaaaaaatag

SEQ ID NO: 110900 - DNA, 2271 bp, synthetic construct
  misc_feature 1..2271: note = Description of Artificial Sequence: Synthetic coding sequence
  source 1..2271: mol_type = other DNA
atggctgaggcccatcaggcagtggctttccagttcactgtcacccccgacgggatagatctgaggttgtctcacgaggctctgagacagatctacctaagcggccttcattcatggaaaaaaaagttcattcgcttcaagaacgggattatcaccggagtgtaccctgcgtctccgagcagctggttgatcgtagtcgtgggcgtcatgacaacaatgtatgccaagatcgatccttctctagggatcattgccaagattaaccgcacattggaaacagccaactgcatgagttcccagaccaagaatgtggtctccggtgttctgttcggcacaggcctttgggtggcactgatcgtcaccatgcgatactccctaaaagtgttactgtcgtaccatggatggatgttcacggaacacggcaagatgagcagggctactaaaatttggatgggcatggtgaaaatattcagtggaagaaagcctatgctgtatagttttcagacttcactcccacgcctgcccgttccggcagtgaaggataccgtgaacagatacctccagagtgtgcgtcctcttatgaaggaagaagatttcaaacgcatgaccgcgctggcccaggacttcgcggtaggactcggtcctaggttacaatggtacctcaaattgaaatcatggtgggcaacaaactatgtcagcgattggtgggaggagtatatctacctgcgcgggcgaggcccactgatggtgaattcaaattattatgccatggatctattatatatactccccacacacatacaggcggccagggctggcaacgccattcatgcaatcctcttatacagacggaagctcgatagggaagaaataaagcctatccgattgttgggcagcacaatccccctgtgcagcgcgcagtgggagcgtatgtttaatacctcacgaatccctggtgaggagacagatacaatacaacacatgcgcgacagtaagcatatcgttgtgtaccaccggggaaggtactttaaggtctggctttaccacgacggtcgccttctgaagcctcgggaaatggaacaacaaatgcaaaggattctggacaatactagcgagccacagcctggtgaagccaggctggcagcactgactgccggagacagagtgccttgggcccgctgtaggcaagcctactttggaaggggcaagaataaacaaagcctggacgctgtagagaaggctgcgtttttcgtgaccctggacgaaaccgaagagggttatcgtagcgaggaccccgatactagtatggactcatatgccaagtctctgttgcatggccggtgctacgatagatggttcgataagtccttcaccttcgtggtgtttaaaaatggcaaaatgggactgaatgccgagcattcctgggctgacgctccaattgtggctcacttgtgggaatatgtaatgtccatcgattcccttcaattagggtatgccgaagacgggcattgtaagggcgacataaatccaaatattccttacccaacccggctccagtgggatattcctggagagtgtcaggaggtgatcgagacgtctctaaatacagccaatctcctcgctaatgacgtggactttcatagctttccttttgtcgcctttggcaagggtatcatcaaaaaatgcagaacatcgcccgacgccttcgtacagcttgcacttcagctggctcactacaaggacatggggaagttttgcctgacatacgaggccagtatgactaggctatttcgcgaaggaaggacagagaccgtgcgatcgtgcaccactgaaagttgcgatttcgtgcgcgccatggttgatccagcccagaccgtggagcagagattaaagctcttcaagcttgctagtgagaagcaccagcatatgtaccgactcgctatgactggatctggcatcgataggcatctgttctgcctctacgtggttagtaaatatctggctgttgagtctccatttttaaaagaggtgctgtctgaaccttggcgactgtccactagccagactccgcagcagcaggtggaactttttgatcttgagaataatcctgaatacgtcagctccggtggaggttttgggcccgtagccgatgacggctacggggtaagctatattctggtgggagagaacttgatcaattttcatataagctctaagttcagttgcccagagacgggcatcatcagtcaaggtccaagctctgatacatag

SEQ ID NO: 110901 - DNA, 2319 bp, synthetic construct
  misc_feature 1..2319: note = Description of Artificial Sequence: Synthetic coding sequence
  source 1..2319: mol_type = other DNA
atggctgaagcccaccaggcagtggcttttcaattcaccgtcacacctgacggcgtcgacttccgtctatcaagggaggcactgaagcatgtgtatctgtctggcattaattcctggaaaaaacgtctcatccggatcaagaacggaatcctacgtggagtttatcctggaagtcctacttcatggctcgttgtgattatggcaactgtggggtctagcttctgtaacgttgacattagcctcggactggtgagttgcatacagaggtgtctgccccagggatgcggcccctatcagaccccgcagactagagcgctgctgagtatggcgatcttttccactggcgtatgggtgactggtattttcttttttcgacagacccttaagttactactctgttaccatggctggatgttcgagatgcacggaaagacctccaatctcactcgcatctgggctatgtgtatacggcttctgtcttcccggcaccccatgctgtatagctttcagacttctctccccaagctcccagtgcctagggtgagcgccacaattcagagatatctagagtctgtcagaccacttcttgatgacgaggaatactacagaatggagctgctggcaaaagagtttcaggacaaaaccgcgcctagacttcagaagtacctggttctgaaatcctggtgggcctccaactatgttagcgattggtgggaagagtacatatacttgcggggtagaagtcccctcatggtgaacagcaattattacgtgatggatttggtgctgataaagaacactgatgtccaggccgctcgactgggaaacattatccacgccatgatcatgtatagaagaaaactggaccgggaggagatcaagcccgtgatggctttagggattgtcccaatgtgttcataccagatggagagaatgttcaataccacccgcattccaggcaaggatactgatgtgctccagcacctgagcgactctcgacatgttgcagtgtaccataaaggaagattcttcaagctgtggctgtacgagggcgctcgtctcctgaagccccaagatttagaaatgcaatttcaacgcatactggacgatcccagccctccacagcccggcgaggaaaaactcgctgccctgaccgccggtggacgtgtagagtgggcacaggctagacaggctttttttagtagcggaaaaaataaggctgcactcgaagccatcgaacgggcagctttctttgttgcactcgacgaagaatcctacagctacgatcccgaggatgaagcttctctatccttgtacggcaaagcacttctccacggcaattgttacaatcgctggttcgataagtcttttacactgataagcttcaagaatggccagctgggcctgaatgccgagcacgcgtgggccgatgcccctatcatcggccacctttgggaatttgtgctgggtaccgactcatttcaccttggatacacagaaacgggacattgcttggggaagcctaaccctgccctggcaccaccaactcgtctgcaatgggacatcccaaagcagtgtcaggccgtgatcgagtctagctaccaggtggccaaggctttggcagatgatgtggagttgtactgttttcaattcttgccgtttgggaagggcttgatcaagaaatgccgaactagccccgatgcgtttgtgcagattgctctacagcttgcacattttcgagatagggggaagttttgcctgacttatgaggcctccatgaccaggatgttccgcgaaggaaggaccgaaactgtgaggagctgcacgtctgagtcgaccgcctttgtccaagccatgatggagggaagtcacaccaaagcagatttgcgcgacttgtttcagaaggcagctaaaaaacaccagaatatgtaccgcctggctatgactggggccggaatagatagacacctgttctgcctgtatctggtgtctaagtacctgggagtgagttctcccttcctggccgaggttctctccgagccatggaggctctccacatctcagatcccacagtcacagattcggatgtttgatcccgaacagcaccccaaccatctgggcgcaggtggcggctttggccccgtcgccgacgacgggtatggcgttagctacatgattgcaggagagaatactatctttttccacatttccagtaagttctccagttccgagacaaacgcacaaagatttggtaatcacatacgcaaagcactcctggatattgcagacctctttcaagtccccaaagcctacagttag

SEQ ID NO: 110902 - DNA, 2319 bp, synthetic construct
  misc_feature 1..2319: note = Description of Artificial Sequence: Synthetic coding sequence
  source 1..2319: mol_type = other DNA
atggccgaggctcatcaggcagtggccttccaattcacagttacccctgatggggttgatttccgcctgagtcgggaggcactcaaacatgtctacctgagcggcatcaactcatggaagaaacgtttaataaggattaagaacggaatattgagaggtgtatatcccgggtcacccaccagctggttggtggttattatggctaccgttggctcgtctttttgcaacgtcgacatctccctcggtctggtgtcatgcattcagcgctgtctgcctcagggttgtggaccctaccagacccctcagacaagagcgctgctctctatggcgatcttcagcaccggcgtgtgggtaaccggcatcttcttcttcagacaaacgctgaagctgctattgtgttatcacggttggatgttcgagatgcatggaaagaccagtaatctaacgagaatttgggccatgtgtatcagactgctgagtagcaggcatcccatgctgtattcttttcagacatctcttcctaaactaccggtgccaagagtgtctgcaactatacagcggtacctagagtccgtcaggcccttgttagatgatgaagagtactaccgcatggaactgcttgcgaaagaatttcaggataagactgcacctcgtctccagaaatacctcgtcctgaagtcctggtgggcatctaactatgtctcagactggtgggaggaatatatctacttgcggggccggtccccattgatggttaactctaactactatgtcatggaccttgtcctaattaagaacaccgacgtgcaggccgcacggctcggtaatatcattcacgccatgatcatgtacagaaggaagctggaccgtgaagagataaagcccgtgatggccctggggattgtgcccatgtgctcatatcagatggagaggatgttcaacacaacaagaattcccggcaaggatacggacgtgctgcagcatctctccgactcaaggcatgtggctgtctaccataaggggcgcttttttaagttgtggctttacgaaggtgccagactcctgaagccacaggatctggagatgcagttccagaggatacttgacgatccctctcctcctcaacctggcgaagagaaattagcagccttaacagccggaggacgggttgaatgggcccaggcccgccaggctttcttttcctctggcaaaaataaggccgcacttgaggcaatagagagagctgcatttttcgtggctttggacgaggagtcctactcctacgatccggaagatgaggcctccctatctctgtatggcaaggccctccttcacggcaactgttacaacagatggttcgacaagtcctttactctcatctccttcaagaacgggcagctcggtcttaacgctgaacacgcctgggctgacgcccccattattgggcatctctgggagtttgtccttggtactgatagcttccacctggggtacacggaaaccggccattgcctgggcaaaccaaatccagctctagcccctccaacaagactgcagtgggacattccgaagcagtgccaagcggtgattgaatccagctaccaagtggctaaggctcttgctgatgatgttgaactgtactgcttccagttcctgccatttgggaagggtctgatcaagaaatgccggaccagccccgatgcctttgtccaaattgccctgcagctggctcacttccgcgacagggggaagttttgtctgacttatgaggcatccatgacacgaatgttccgtgagggtagaactgaaaccgtcagatcatgtacctctgagagtactgcttttgttcaggcaatgatggagggaagtcacacaaaggctgatttacgcgaccttttccagaaagcagcaaagaaacaccagaacatgtaccggttagctatgacgggtgctggtatcgacagacacctgttctgtttatacctagtctccaagtacctgggggtctcttccccctttcttgcagaggtgctatccgaaccatggcgcttaagcacaagtcagatcccacagagtcaaattcggatgttcgacccagaacaacaccctaatcacttgggcgccggtggcggcttcggcccagtggctgacgatggatatggtgtgtcttacatgatagccggcgagaacacaatcttcttccacattagcagcaagttttccagctcagaaaccaacgctcagcgctttggcaaccatatccgtaaagctctactggacatcgcggacctgttccaagtgcctaaagcctattcatag

SEQ ID NO: 110903 - DNA, 2319 bp, synthetic construct
  misc_feature 1..2319: note = Description of Artificial Sequence: Synthetic coding sequence
  source 1..2319: mol_type = other DNA
atggcagaagcacaccaggccgtggcctttcaatttaccgtcacccctgacggagtggatttcagattgagccgagaggcactgaagcacgtttatcttagcggaatcaacagctggaaaaaaagactcataagaataaagaacggcatcctgcgcggggtgtatccgggctcacctaccagttggctggtggtgattatggccacagtgggatcaagcttctgtaacgtggacatatccctggggctcgtctcatgtatccagcgttgcctcccgcaaggatgcggtccctaccaaacaccccagacaagagcactgctgagtatggccatattttcgactggggtatgggtgaccggtattttctttttcagacaaaccctgaagctgctgttgtgttatcacggatggatgttcgaaatgcatgggaaaactagcaatctgactaggatatgggcaatgtgcatacgcctcctgagcagtcgccacccgatgctgtactctttccagaccagcctccccaagctgccagttccaagagtgagcgcaaccatccagaggtacctggagtcagttagacccctccttgatgatgaggagtactatagaatggaattgcttgctaaggagttccaagacaagaccgccccgcgactgcaaaaatatctcgtgctaaaatcctggtgggcatctaattatgtgtctgattggtgggaagagtacatctatctccgcgggagaagtcccctcatggtgaatagcaattattacgttatggatctggtgctcattaagaatacagatgtacaggctgcccgattgggcaatataatccatgccatgataatgtatcgcaggaagctggatagagaagaaattaagccagttatggctctggggatcgtgccaatgtgcagctaccagatggagcgtatgtttaacactacaagaattcccggtaaagacacagacgtattacagcatttgtctgacagtcgccacgtggcggtgtatcacaagggacggttcttcaaattgtggctgtatgaaggggcgagactcctcaagccccaagatctggaaatgcagtttcagcgcattctcgacgacccctccccacctcaacctggagaagagaagctggcggccctcactgctggaggccgagtcgagtgggcgcaggcgcgacaggcctttttttcgagtggtaagaacaaagctgcactggaggctatagagagagcagccttctttgtcgcccttgatgaggagtcctactcttacgatccagaagacgaggcttccctgtcactttacggcaaggccctactgcatgggaattgctacaacagatggtttgataagtcattcactctgatctccttcaagaacgggcagctcggactgaacgctgaacacgcctgggcagacgccccgatcatcgggcatttatgggaattcgtacttggaaccgacagtttccacttgggatataccgagacgggccattgcctcggcaaacccaatccagcgcttgcaccaccaacacggcttcaatgggacattcccaaacagtgtcaggcagttatcgaaagtagctatcaggtcgccaaagcgctcgcagatgatgtggaactttactgtttccagttccttccattcggtaagggactgattaagaaatgcagaacgtctcctgatgcctttgtgcagatcgccttgcagctagcacattttagagatagagggaaattttgcctgacgtacgaggcttccatgacccggatgtttcgggaaggcaggacggagacggtccgaagttgcaccagtgaatctactgcttttgtccaagccatgatggagggttcacacaccaaggcagacctaagagacctcttccaaaaggccgcaaaaaaacatcaaaatatgtatcgcctggctatgacaggcgcaggaatcgataggcatctattctgtctgtacttagtgtctaagtatctgggcgtctcctccccctttctcgcggaggtcctgtcggaaccatggcgcctttccacctctcaaattccccagtcgcagatcaggatgtttgatccagagcaacatccgaaccatctcggagcggggggtggttttgggcccgtggccgacgacgggtacggggtatcttacatgatcgcaggggagaataccatcttttttcacatctcctccaagttctccagctccgaaaccaatgcgcagcggtttggaaaccatattagaaaggccctgttagacatcgctgatctgttccaggtacccaaagcgtactcgtag

SEQ ID NO: 110904 - DNA, 2319 bp, synthetic construct
  misc_feature 1..2319: note = Description of Artificial Sequence: Synthetic coding sequence
  source 1..2319: mol_type = other DNA
atggctgaagcccatcaggcggtcgcctttcagttcaccgttactcccgatggggtggatttcaggctttcccgggaggcactcaaacacgtgtaccttagtggaattaattcctggaaaaagcgtctcattaggattaagaatggtatcctacgtggcgtgtacccgggaagtccaacctcatggctggtagtcatcatggccacggtgggctcatctttctgtaacgtggacatttccctcggcctggtgtcgtgcatccagcggtgcttgccacaaggctgtggaccgtatcaaacccctcagaccagggccctgctgagtatggccattttctcgacgggagtctgggtcactggaattttctttttccgtcaaaccttaaagcttctgctgtgttatcacgggtggatgttcgagatgcacggcaagaccagcaatttgaccagaatctgggccatgtgcataagattattgagctcaagacaccccatgctctactcctttcagactagcctgccaaagctgcctgtgcctcgtgtatctgccaccatccaaagatatcttgagtccgtaaggccacttctcgacgatgaagagtactaccgcatggaactgctcgctaaagaatttcaggataaaactgctccaagactgcagaagtatctagtgctcaaatcctggtgggcctcaaattacgtgtccgattggtgggaagaatatatttacctgagaggccggagccctctgatggtcaacagcaattactacgtcatggacctggtgttaatcaagaacacagacgtgcaggctgcccgcctgggcaacattattcacgctatgataatgtatcgcaggaagctcgatagagaggagattaaacccgtaatggcattgggcattgtgccgatgtgctcctatcagatggaacgcatgttcaatacaaccagaattccaggaaaggatacagacgttttacagcacctgagcgactcccgccacgttgccgtatatcacaaaggtcgtttttttaagctgtggctgtatgaaggtgcacggctgctgaagcctcaagatctggagatgcagtttcaaagaattctggacgacccaagccccccccagccaggagaagagaaacttgcggcactgaccgcgggcggacgcgtagaatgggctcaggctaggcaggcattctttagcagtggaaaaaataaggctgccctggaggccatagagagagccgcctttttcgtggcactggatgaggaatcttattcatacgaccccgaagatgaggcttcccttagcctctacggcaaggccctactgcatggaaactgctataatcgatggtttgacaagtctttcaccctgatttcgtttaagaatggtcagctggggctgaacgctgaacacgcctgggctgatgccccaataattgggcatctgtgggagtttgtgctaggaacagattcctttcacctgggttacacagagacaggacactgtttgggcaaacccaaccccgcccttgcacctccgactcggctccagtgggatattccaaagcagtgccaggccgttattgagtctagttaccaggtggccaaggcgctcgccgatgacgtggaactgtactgtttccagtttctgccttttgggaaggggctgataaaaaaatgcaggacatcccccgatgcctttgtgcagatcgccctgcagctggcccactttagagaccgcggcaaattttgcctaacctatgaggcaagcatgaccagaatgtttagagaaggaagaacagaaaccgtgcggtcttgcacatcagagtctacagcgttcgtccaggccatgatggaaggctcacataccaaggctgacctgagagatctattccagaaggcagctaagaaacatcagaatatgtaccggctcgctatgaccggcgctggaatcgacagacaccttttctgtctctacctggtgtcaaaatatctcggcgtctccagtccatttctggctgaggtgcttagcgagccatggcgcctgtcaaccagtcagatccctcagagtcagatccggatgttcgatccagagcagcatccaaaccatttgggcgcaggtggcggctttggcccagtcgccgatgacggttacggagtgtcttacatgattgctggtgagaataccatattctttcacatcagcagtaagtttagttcatccgaaacaaacgctcagaggttcggaaaccacatacggaaagctctactggacatagccgatctctttcaggtgcccaaggcatacagttag

SEQ ID NO: 110905 - DNA, 378 bp, synthetic construct
  misc_feature 1..378: note = Description of Artificial Sequence: Synthetic coding sequence
  source 1..378: mol_type = other DNA
atggccgaggcacaccaggccgtggcattccagttcaccgtgacccccgacggcgtggatttcagactctccagggaagccctaaaacacgtctatctgagtggcatcaactcctggaagaagagactgatcaggattaagaatggcattctccgtggtgtgtacccaggatctccaacgtcttggttagtcgtaattatggctaccgttggtagctccttttgcaacgtggacatatctttaggcttggtttcttgcattcaacgctgcctgccccagggttgcgggccctatcaaacacctcagacgagagctttactttcaatggcaatcttctccacaggggtttgggttaccggaatcttttttttcaggtag

SEQ ID NO: 110906 - DNA, 1704 bp, synthetic construct
  misc_feature 1..1704: note = Description of Artificial Sequence: Synthetic coding sequence
  source 1..1704: mol_type = other DNA
atggagcttcttgccaaagagtttcaggataaaaccgccccaagattgcaaaagtacctggtcctgaagagttggtgggcaagtaattatgtatctgattggtgggaggagtatatctatttgcgggggagatctcctctgatggtcaacagcaattattatgtgatggatctcgttctgatcaaaaatactgatgtgcaggccgcccggctgggcaatatcattcatgcaatgatcatgtacagacgcaagttggacagggaagagattaaaccagtgatggctctgggaattgtgccgatgtgtagttaccaaatggaaaggatgttcaacacaacccggataccagggaaggatactgacgtactccagcatctttccgattcccgccacgtggccgtgtaccataagggtcgctttttcaaactgtggctgtatgagggggcgaggcttctgaagcctcaggatctggaaatgcagttccagagaattctggacgatccttcaccaccccagcccggggaagagaaactcgcggcgctgacggctggcggacgagtggaatgggcccaggcaaggcaagctttcttctcttcgggcaagaacaaagcagccttggaggctattgaaagagccgcattcttcgtggccctggacgaggagtcctactcctacgacccagaagatgaagccagtctttcattgtatggcaaggctttactccatggtaattgttacaacaggtggttcgacaaatcgttcaccctgattagttttaagaatggacagctgggattgaatgccgagcatgcctgggccgacgcacccattatcggacacctgtgggagttcgtactaggtactgacagctttcaccttgggtacaccgaaacagggcactgtctagggaaacccaaccccgctttggcaccaccaaccagactccaatgggatattcctaagcaggccgtgatcgaaagctcgtaccaggtagccaaggctctggccgatgacgtggagctttactgttttcagttcctgcccttcggaaaaggccttataaagaaatgccggacaagcccagacgcatttgttcagatcgcactccaacttgcacactttagagaccgtgggaaattctgtttgacctacgaagccagtatgacccggatgtttcgcgagggccgaaccgaaaccgtccggtcatgcacctccgagagcaccgcctttgtgcaagctatgatggaggggagtcatactaaggccgacctccgagacctcttccagaaagccgcgaaaaaacaccaaaatatgtaccgtctggctatgaccggggcggggatcgaccgccacctcttctgcctgtacctggtgagcaaatacctcggagtttcgagtccgttcctggcagaagtgctttccgagccctggcggctatccacatctcagataccacaaagccagatcagaatgttcgatcccgagcagcatcccaatcatcttggagccggtggcgggttcggcccagttgcagatgacggttacggcgtgtcatatatgatagctggggaaaacactatttttttccatatttctagcaagtttagtagctctgaaactaacgctcagcggttcggcaatcacattcgcaaagccttgctcgacatcgctgatctgttccaggtgcccaaagcttattcgtag

SEQ ID NO: 110907 - DNA, 2076 bp, synthetic construct
  misc_feature 1..2076: note = Description of Artificial Sequence: Synthetic coding sequence
  source 1..2076: mol_type = other DNA
atggcagaggcgcatcaggcggtggccttccagttcacggtcactcctgatggcgtggactttcggcttagcagggaggcactcaagcatgtctacctgagtggaataaattcctggaaaaagaggctcataaggattaagaatggcatccttcgaggagtctaccccggaagtcccacctcctggctggtcgttataatggcaaccgtgggaagctcattttgtaatgtggacatcagtctcgggctcgtatcctgcatccagcggtgtctgccccagggctgcggcccttaccaaactcctcaaaccagagcactgctatccatggctatattctccaccggcgtgtgggtgaccggaatattttttttccggcagaccctgaaactgttactgtgctatcacggatggatgtttgaaatgcacggaaagacaagcaacctgactcgcatttgggcaatgtgtatcaggctcttgagcagccgccatcccatgctgtactcatttcaaacctctctgcccaaactgcccgtacctcgggtgtccgccacaattcagaggtacctcgagtctgtgaggccgctgctggatgatgaggagtactacagaatggagctcctggccaaagagttccaggacaaaactgctccccgtctgcaaaagtacctggtgctgaagtcttggtgggcctcaaattacgttagcgactggtgggaggagtatatttacttacgcggaagaagtccactgatggttaactctaactattacgttatggatctcgtgctgattaaaaacactgatgtgcaggctgccagactggggaatataattcacgcaatgatcatgtacaggagaaagttagaccgcgaggagatcaaaccagtcatggccttaggaattgtccctatgtgttcctatcagatggagcgtatgttcaacaccacccgtataccgggaaaagataccgacgtgctgcagcacctatccgattctcggcacgtggccgtataccataaaggcaggtttttcaagctgtggctgtacgagggcgcccggctccttagtctctacggaaaggcactgctgcatgggaattgctataatcgctggttcgataaatccttcactcttatttcttttaaaaacgggcagcttggcctaaatgctgaacatgcctgggcggacgctccaattatcgggcacctgtgggagttcgtgcttggaaccgattccttccacctgggctacaccgagactggtcactgtcttggaaagcccaacccagctttggcaccccccacgagactgcaatgggacatccctaagcagtgtcaagctgtgatcgagtcctcataccaggtggctaaagccttggccgatgatgtggaactgtattgtttccagttcctgccctttggaaaagggctgatcaaaaaatgtagaaccagtccagacgcgttcgttcagatcgctctccagctggctcatttccgggaccgtggcaaattctgcctcacatacgaggcttccatgacaagaatgttcagggaagggaggaccgagacagtgcgttcctgcacaagtgagtctacggctttcgtccaagcgatgatggaggggtcccacaccaaggctgatttgagagatctctttcaaaaagcagcgaagaaacatcagaatatgtacaggctggccatgaccggggccggtatcgataggcacttgttttgcctgtatctggtctctaagtacctgggggtgtcttcccccttccttgcggaagttctgtcggaaccctggcgactgtcaacatcacagataccacaaagccagatcaggatgtttgatcccgaacaacatcctaaccaccttggagccggcgggggctttggtcctgtcgcagacgacggctacggggtgtcttatatgatcgccggagaaaacaccatctttttccacatcagttcaaaattctcctcctctgaaaccaacgcccagaggtttggcaaccacattaggaaggccctgctcgacattgccgatctttttcaggtaccaaaagcttattcttag

SEQ ID NO: 110908 - DNA, 2217 bp, synthetic construct
  misc_feature 1..2217: note = Description of Artificial Sequence: Synthetic coding sequence
  source 1..2217: mol_type = other DNA
atggcagaagcgcatcaggctgtagcatttcagtttacagtgactccagatggagtggatttccggctaagccgggaggcgctgaaacacgtttacctgagcgggataaactcctggaagaaaaggctaattagaataaagaatggtatcctgcggggcgtgtaccccggctcccccactagctggcttgtggtaatcatggctaccgttggcagttccttttgcaacgtggacatctctctgggcctggtgtcctgcatccagaggtgcctgccccaaggctgcggcccatatcagacacctcaaaccagggcgctgttgagtatggccatattctctacaggcgtttgggtgaccggaatcttttttttcagacaaaccttaaaactgctgctgtgctaccacggatggatgttcgagatgcacggcaaaacaagcaacctcacgcggatttgggcctatcttgaatctgtccgacctctccttgacgacgaggagtactacaggatggagcttctggcaaaagaatttcaggataagaccgcgcctcggctgcaaaaatacttggtcctaaaatcatggtgggcgtcaaactacgtttctgactggtgggaggagtatatctacttgcgaggcagatccccactgatggttaacagtaattattacgttatggacctcgtgctcatcaagaatactgatgttcaggctgctcgcctcggcaatataattcacgccatgatcatgtaccgtagaaaactagacagggaagagataaaacctgtcatggccctcggtattgtacccatgtgttcctatcaaatggaaagaatgttcaacactaccagaattcctggtaaggataccgacgtcttgcagcacctctctgactctagacacgtcgcagtatatcataaaggccgtttcttcaaactctggctgtatgagggtgccagactgctcaaacctcaggatctggagatgcaatttcagcgtatccttgatgatccttcaccccctcagcccggggaagagaaactcgctgccctgactgccggaggccgtgtggaatgggcacaggcacgacaagctttcttctccagcgggaaaaataaggctgctctggaggctattgagcgcgccgccttctttgtggccctggatgaagagtcctatagttatgatccagaggatgaggccagcttgagtctgtatggcaaagccctgctgcacggcaactgttacaacagatggttcgataaaagtttcacactgatcagcttcaaaaacggacagctcgggctgaacgcagagcatgcttgggccgatgccccgattatcgggcatctgtgggaatttgtactgggcacagactctttccacttaggttatactgagacggggcattgtttaggcaagcccaatcctgcccttgcacccccgaccaggctgcagtgggacatccccaaacagtgccaggctgttattgagagcagctaccaggtggctaaggccctggccgatgatgtggagctgtattgctttcagttcctgccttttggcaagggcttaattaagaagtgtcggacaagtccggatgcattcgtgcaaattgccctccagttagcccatttcagggaccggggtaaattttgcctgacctatgaagcgagcatgaccagaatgtttcgagagggtagaaccgagacagtcaggtcctgtacatcagagagcactgcctttgttcaagcaatgatggagggctcacatacaaaagccgacttgagggatctatttcaaaaagccgctaagaagcaccagaacatgtacaggctggccatgacaggggcaggaatcgatagacacttgttctgtctgtatttggtgagtaaatatctgggcgtcagttccccatttctggcagaggttcttagcgagccgtggaggttgtcaaccagtcagatcccacagtctcagatcaggatgtttgaccccgagcagcaccctaaccacttgggtgccggcggaggtttcggcccagtggctgatgacggatatggagtgagttatatgatcgctggtgagaacacaatcttttttcacatttcatctaagttttcatctagcgagacaaacgcacagcggtttggtaatcacattagaaaggccttgctagacatcgctgacctattccaggtcccaaaggcctacagctag

SEQ ID NO: 110909 - DNA, 1458 bp, synthetic construct
  misc_feature 1..1458: note = Description of Artificial Sequence: Synthetic coding sequence
  source 1..1458: mol_type = other DNA
atgttatttagctaccagcgatcgctgccaagacaacccgtaccgagcgtgcaggataccgtgcggaaataccttgaatctgtacgccccattctgtccgacgaggacttcgattggacagctgttcttgcccaagaatttctgagattgcaggcaagtctgctgcaatggtatcttcggctgaaatcttggtgggctagcaactatgtgtccgattggtgggaggagtttgtttatctccgatccagaaatcctctgatggtcaactcgaactactacatgatggactttttgtacgtgaccccaacccctctccaggccgcgcgcgcgggtaatgccgtccacgccctcttactctatcgtcacaggcttaatcgccaggaaatcccaccagtgagaggaccccaatgggtacgggacggcggagttgtcttatggccattaggccatgtgggtccgggaaggcagctgacagctcatggcttcctccagacacttctcatgggcatgcgacctctctgttccgcacagtatgagaaaatttttaatactacaaggattcctggcgttcagaaggactatatccgccacttgcatgattcacagcatgtggctgtcttccacaggggccgcttttttagaatgggaactcattcaaggaactctttgttgtccccccgcgccctcgaacagcagtttcagagaattttagatgatccaagccctgcttgcccacacgaagagcatttggctgctctcaccgcagcccctcggggcacctgggcccaagtgcgcacatcactgaaaacccaggccgcagaggccttagaggcagtggaaggagccgcgttttttgtcagcttggacgcagagcctgccggtcttacccgggaggacccagccgcctcattggacgcatacgctcatgcactcctggccggccgcggccacgacagatggtttgataaaagcttcactctcatcgtcttcagtaatgggaaattgggcttatctgtggaacatagctgggccgattgccccatttctgggcacatgtgggaatttacgcttgcgaccgaatgcttccagctcggctatagtactgatggacactgtaaaggacatcctgacccaaccctgccgcaacctcaaagacttcagtgggaccttccggatcagatccacagctccatctcgctggcccttcgaggggctaaaatcctttccgaaaacgtggattgtcacgtggtgcccttctccttgttcggtaagtccttcatccggcggtgccatcttagctccgacagctttatacagatcgcacttcagctggcccatttcagagtgagctgggtgccccatcctcaacctccccagggtctcagcccacctgaaccccctcgacccgccccgccacgcttcctggtggtggcagccatagtagggcgcccctcttag

SEQ ID NO: 110910 - DNA, 2412 bp, synthetic construct
  misc_feature 1..2412: note = Description of Artificial Sequence: Synthetic coding sequence
  source 1..2412: mol_type = other DNA
atggccgaagctcatcaggcagtcggcttccgcccgagccttacctccgacggcgctgaagttgaactgtctgctccagtgttgcaggagatctatttgtctggcttgcgtagctggaagaggcatcttagccggttttggaatgacttcctgacaggcgtctttcctgcctctcctcttagctggttgtttctcttctccgcgattcagctggcatggttcttgcagctggatccatcgttgggactcatggaaaagatcaaggaacttctgcccgattggggcggccaacaccatgggcttcggggagtgctggcagccgctctgttcgcctcgtgcctgtggggcgccctgatattcacactccacgtggcactaaggctcttgctgtcttaccatggctggctcttagagccccacggagccatgtccagtcctaccaagacctggctggctttagtccggatttttagcgggagacatccgatgctgtttagttatcagcgttccctgccaagacagccagtcccaagtgtgcaggatacagttagaaagtatctggaatccgtcaggcctatcttatccgacgaagacttcgattggactgctgtcctcgcacaggagttcctccgtttacaggcttccctgctgcagtggtacttgagactgaaatcatggtgggcctccaattatgtatccgattggtgggaagagttcgtatacctgcgctcccggaaccctctgatggtcaatagtaattactatatgatggacttcctgtacgttacgccaacccccctgcaggcagccagagcagggaacgccgtacacgcgctcctgctgtatcggcatcgcttgaaccgccaggaaattccacctactctgctcatgggaatgcgacctctgtgttctgcccagtatgaaaaaatcttcaataccacacggatcccaggagtgcagaaggactatatacggcacctgcatgattcacaacacgtggcggtctttcatcggggccgcttttttagaatgggaacacattctagaaactcgctgctcagccctagggccctggaacaacaattccagagaattcttgacgatccatccccagcatgcccccatgaggaacacctcgccgccctgacagccgcacccaggggtacctgggcacaggttagaacgtccctgaaaacgcaagctgccgaggcactcgaggcagtcgagggtgccgcctttttcgttagcctggatgcggagcctgccgggcttacacgcgaggatcctgccgcatccctggatgcctatgcccatgcattgctcgcgggtcgaggccacgatcgctggtttgacaagtcctttacactcattgtgttcagtaacggcaagctgggtctgtccgtggagcactcttgggccgattgtccgatttccggtcacatgtgggaatttacgctcgccaccgagtgctttcaactgggatactcaactgacgggcactgtaagggtcatcctgatccaacactcccccagccccaacggctccagtgggatctcccagaccagattcatagctcaatttcattggcgttgcgtggcgctaagatcctgtcagagaacgttgattgtcacgtggttcctttctctcttttcggcaagtccttcatccggcggtgccatctgtcaagcgattcttttattcaaatcgccctgcagctcgctcacttcagggatcgcggacagttctgcctgacatatgagtccgccatgacccgcctgttccttgaggggaggacagaaaccgtccggagctgtactcgcgaggcctgcaacttcgtgagggcgatggaggacaaggagaagactgacccccagtgtttagccctgttcagggtcgcagtggataagcatcaggccttgttaaaagccgctatgagcggccagggcgtcgaccggcacctgttcgcactgtatatcgtgtcccggttccttcatttacagtcacccttcttaacgcaggtgcactctgaacagtggcagttatcaacctcgcagattcctgttcagcaaatgcatttgtttgacgtgcataattatccggactatgtctcctctggcggggggttcgggcctgcagatgaccacgggtacggcgtgtcctatatattcatgggagacggaatgatcaccttccatatatcgtctaaaaagagctctaccaaaaccgactcacaccggctcggacagcacatcgaggatgccctcctggacgtggcctcactctttcaggccgggcagcacttcaagcgcaggttcagaggcagtggcaaggagaactccaggcaccgctgcggctttctgagtcggcaaaccggagccagcaaggcctcgatgacctctactgacttctag

SEQ ID NO: 110911 - DNA, 2145 bp, synthetic construct
  misc_feature 1..2145: note = Description of Artificial Sequence: Synthetic coding sequence
  source 1..2145: mol_type = other DNA
atggccgaggcccatcaagccgtgggctttagaccatccctgacgagtgacggagctgaggtagagctaagcgcacccgtcctgcaagaaatatacttaagcggactgaggtcttggaagaggcatttaagccgattttggaatgacttccttactggagtttttccagccagcccactgtcctggctttttctgtttagtgccatccagctcgcttggtttttgcagctggacccaagcctcgggctgatggagaagataaaggagctgcttccagattgggggggacagcatcatggattgagaggggtgctggcggccgccctgttcgcctcgtgtttgtggggggccctgatctttactcttcacgttgcactgagactcttgctttcgtaccacggctggcttctggaaccccacggcgcaatgtcaagtcctactaagacctggttggctcttgtgcggatctttagcggcaggcacccaatgttgttctcttaccagcggagtctgcccagacagcccgttcccagtgtacaggacacagtccggaagtatctggagtccgtacgacccatcctgtctgacgaggattttgactggaccgctgtcctcgcacaggaattcctcaggctgcaagccagtttgctgcaatggtaccttaggctgaagtcgtggtgggctagcaactacgtcagcgactggtgggaggaatttgtgtatctgaggagcaggaaccccctcatggtcaacagtaactactacatgatggattttctatatgtcaccccaacaccattgcaggccgctagagctggcaatgctgtgcacgcccttcttctctacagacatcgcctgaaccgccaggaaatccctcctaccctgctcatgggtatgaggccgctttgctctgcccagtacgagaaaatcttcaataccacaagaattccgggcgtccagaaggattatataaggcaccttcatgattctcagcacgtagccgtattccatcgggggaggttttttagaatgggaacacattctcggaattcattgctgtccccaagagctctggagcagcagttccagaggatcctggatgacccttcaccagcctgccctcacgaagagcacctggcagcattaactgccgcccccagaggcacatgggcccaggtgcgtacaagtctgaagacacaggccgctgaggcactggaagccgtcgagggcgccgccttctttgtctcattagacgctgagcctgcagggctgacccgcgaggatccggccgcctctctggacgcgtacgcccatgcactacttgccgggagaggacacgatcggtggtttgataaatcttttacgctgatcgtattcagcaatggaaaacttggactgtctgtggaacacagttgggccgactgccccatctcaggccacatgtgggaattcacacttgccactgaatgcttccagctgggatacagtaccgacgggcactgtaaggggcatccagatcctacacttccacagccccaacggctgcagtgggatcttcccgaccagattcactcttctattagtctcgcactgagaggcgctaaaatactgtcggaaaacgtagattgccatgtcgtgccgttctcattatttggcaaatccttcatcagacgctgccatctctcatctgattccttcattcagattgccttgcagctggctcatttccgcgatcgcgggcaattctgcctcacctacgaatctgcaatgacgaggctatttttagaaggcaggaccgaaaccgtgaggtcctgcacacgcgaagcctgtaatttcgttcgcgctatggaagacaaggagaagaccgccgacgaccatggatatggagtaagctacatcttcatgggcgatgggatgatcacctttcatatctcctcaaaaaagagctctaccaaaacagactcccaccgactcgggcagcatatcgaagacgcacttctggatgtggctagcctgttccaagcaggccagcacttcaagagacgattcagaggatccgggaaggaaaattctcggcaccgctgcggcttcctgagccggcagacgggtgcctcgaaagctagcatgacatctacagatttctag

SEQ ID NO: 110912 - DNA, 2412 bp, synthetic construct
  misc_feature 1..2412: note = Description of Artificial Sequence: Synthetic coding sequence
  source 1..2412: mol_type = other DNA
atggccgaggctcaccaagcggtcggcttccgccctagtctgacctcagacggcgccgaggttgaactctcggcacccgtgctccaagagatatatttaagcggcctgagatcttggaaaaggcacctctcccggttctggaacgactttctcactggagtctttcccgctagtcctctcagctggctatttttgtttagtgctatccagttggcctggttcctccagctagacccatccctgggtctgatggaaaagattaaggagctccttcccgactgggggggacagcaccatggcctcaggggagtgttagcagccgccctattcgcatcctgcttatggggtgcactcatctttacgctgcacgtggcactccgactacttctttcctaccatggctggctgctggagccacatggtgcgatgtctagccccacaaaaacttggctggccctagtgagaattttctctggccggcaccccatgctcttctcctaccagaggtccttgcccaggcagcccgttccatccgtccaggacacagtgcggaagtacctggaatcggtcagacccattttgagcgatgaagatttcgactggaccgcagtgctggcccaagaatttctcaggctccaggccagtctgttgcagtggtatctgcggttaaagtcttggtgggcaagcaattatgtatccgattggtgggaggagttcgtgtatcttcggagcaggaaccccctgatggtcaatagcaattactatatgatggacttcctgtacgttacccccacccccctccaagcagccagggctggcaatgcagtccacgccctgctgctttacaggcacaggttgaatcgacaggaaatcccacccacgctgctcatgggaatgcgcccgttgtgctctgcacaatatgagaaaatcttcaacaccacgcggataccgggtgtgcagaaagactacatcaggcatctgcacgacagtcaacatgtcgcagtgtttcaccgtggtagatttttcagaatgggcactcactcacgtaacagcctgctctcgccccgcgcccttgagcagcagtttcagagaattcttgacgatccctccccagcctgtccccacgaggaacacttggctgcccttactgcggcccccagaggcacgtgggcccaggtccggactagcttgaaaactcaggccgcagaggccttagaggcagtcgaaggggctgcgttcttcgtttcgctcgacgcggagcctgctggcctgacaagggaggacccggccgcctctctagacgcatacgcccatgcattgctggccgggcgtggccatgatcgctggtttgataagtcttttacattaatagtcttttccaatggtaagcttgggctgtctgtggagcactcttgggccgattgtcccatctccgggcatatgtgggagtttacgttagcaaccgaatgctttcagctgggatactcaacagacggccactgcaagggccaccccgatccaacactgccgcaaccgcagaggctgcaatgggatttacccgatcagatccacagctcaatctcactggccctgaggggagctaaaatactgtcggaaaatgttgactgtcatgtggttcccttttccctgttcgggaagtcattcatccgacgttgccacctgagcagcgatagcttcattcagattgcacttcagctggctcactttcgcgaccgtggtcaattctgcttgacatatgagagtgctatgacacgcctcttcctggagggcagaactgagaccgtgcgaagttgtacaagagaagcatgtaacttcgtgcgcgccatggaggacaaggagaagaccgatccacagtgcctggctctgttcagagtggctgtcgataaacatcaggccctgctgaaagccgcgatgagtggacaaggggtcgacaggcatctgttcgcactgtacatcgttagccgctttctgcacttgcagtcaccctttctgactcaggtgcacagcgaacaatggcagctttccacctcccaaatacctgtgcaacagatgcacctgtttgacgttcataattatcctgactacgtcagctcagggggaggattcggtcccgccgatgaccatgggtacggcgtgtcatatattttcatgggcgatggcatgataacttttcacatttcctccaagaagtccagcactaaaaccgattcccaccggctcgggcagcacattgaagacgcccttttggacgtggcaagcttgttccaggctgggcaacatttcaagaggaggttccggggtagcggcaaagagaacagtaggcaccggtgcggatttctttctaggcagaccggtgccagtaaggctagtatgaccagcaccgatttttag

SEQ ID NO: 110913 - DNA, 2379 bp, synthetic construct
  misc_feature 1..2379: note = Description of Artificial Sequence: Synthetic coding sequence
  source 1..2379: mol_type = other DNA
atggccgaagcccaccaagctgtaggctttcgcccttcccttacatctgacggggccgaagtggaattgagtgcaccagttctccaggagatttatctgtctggtcttaggtcctggaagcgccatctctcaaggttctggaatgacttcctgactggagtctttcctgcttctccgctctcatggctgttcctgttttccgccatccagttggcatggttcttgcagcttgacccatcgctgggcctcatggaaaaaatcaaagaactgctccccgactggggggggcagcaccacggcctccgcggcgttctcgcagctgcactattcgcctcctgcctgtggggcgccctcatttttacccttcacgttgccctgcgtttactccttagctaccatggctggttgttagaacctcatggagccatgtcctcaccgaccaagacctggctggcattggtccgaattttctctgggcgccatcctatgcttttttcctatcagcgctccctaccccgtcaaccagtgccttcagttcaggatactgtccgtaaatatctggagtctgtgcggccaatactgagcgatgaggatttcgattggacggccgtcttggctcaagagttccttcgactgcaggcatccctgctccagtggtacctcagacttaagtcctggtgggcctcgaattatgtttcggattggtgggaggaatttgtctacctccgctcccgcaaccctctgatggtaaatagtaattattatatgatggctgcccgggcgggtaacgccgttcatgccctgctgctgtaccgccatagattaaaccgtcaggagatccctccaacgctgcttatgggaatgcgcccactgtgcagtgcccaatacgaaaagatatttaacactaccaggatcccgggagtacagaaggattacatacgacacctccatgatagtcagcatgtagccgtctttcacagaggcagattctttcggatggggacccactctaggaactccctcttgagtcccagagccttggagcagcagttccagcggattcttgacgatccgtcaccagcatgtcctcacgaggagcatctagccgcgttaacggccgctcccaggggcacctgggcgcaagtgcgaacgagcctgaagacccaggccgccgaagcgctggaggccgtcgagggggctgccttctttgtatctttggatgccgagcccgctggacttacaagagaagaccccgccgccagccttgacgcgtacgcccatgccctgctcgcaggtcgggggcacgaccggtggtttgataaatcttttaccttaatcgtgttcagcaacggaaaactgggactctccgtggaacacagttgggccgactgccccatcagtgggcacatgtgggaattcactctggctaccgagtgctttcaattaggatacagcacagacgggcactgtaaagggcacccggacccaacgttgcctcaacctcagagactccaatgggacctgcctgaccagatccatagcagtatttctctcgccctcaggggtgcaaaaattctgtcggagaacgttgattgtcacgtggtcccgttttccctgtttggcaagagcttcataaggcgctgccatttatcgtccgatagctttatccagattgccctacagctcgctcactttagggatcgcggtcaattctgtttgacttacgaaagcgccatgacaaggctctttctcgagggcaggacagagactgtccggagctgcacacgggaggcttgcaacttcgtgagagctatggaggataaggagaagacagaccctcagtgcctcgcactctttagggtggccgtcgataagcaccaggcactcttgaaggccgcaatgtccggccagggtgtggatcgacatttgttcgccctctacatcgtgtcccggtttttgcatctgcaatccccatttctgactcaagttcactccgagcagtggcagctctcaactagccaaatcccagtacagcaaatgcacctctttgacgtgcataattacccagactatgtttcttctgggggaggctttggtcccgcagatgaccatggctatggagtgagctacatcttcatgggtgatggaatgatcacattccacatatccagcaaaaaatcatctactaaaaccgatagccatagactgggccagcacatcgaagatgcactgctagatgtggctagtttatttcaggccggacaacacttcaagaggcggtttcggggatctgggaaggaaaactccaggcacaggtgtgggtttctgtctagacaaacaggggctagcaaagctagcatgacctccaccgatttttag

SEQ ID NO: 110914 - DNA, 2412 bp, synthetic construct
  misc_feature 1..2412: note = Description of Artificial Sequence: Synthetic coding sequence
  source 1..2412: mol_type = other DNA
atggctgaagcccatcaggctgttggctttcgtccctccttaacaagcgatggtgccgaggtggaattgtctgcgccagttctacaggagatctacctgtctggcctgagatcatggaagagacacttgagcaggttctggaacgactttctcactggcgtgttccccgcctcccctttgagctggctgttcttattctccgccattcagctggcttggtttcttcagcttgacccgagtctgggactcatggagaaaatcaaggagctgttgccagattggggcggacaacaccacggattgagaggcgtgcttgctgccgccctctttgcctcgtgtctgtggggtgcgctcatttttacactgcacgtcgccctgagactgctgctatcttatcacggctggctcttagagccacacggggccatgagctcccctactaaaacttggctggccctggttagaattttttctggccgccatcccatgttattcagctaccaacgctccctgcctcgccaaccagtacctagcgtccaggacacggtgagaaagtatctagaaagtgtgaggccgatcttatctgacgaggactttgactggacagcagtgctggcccaagaatttttaaggttgcaggcctccctgttgcagtggtacctgagactgaaatcctggtgggcaagcaattatgtcagtgactggtgggaagagttcgtctatctgcgaagtagaaacccactgatggttaacagcaattattatatgatggatttcctgtacgtgacccctacacccctgcaggctgcaagggccggcaatgccgtgcacgctttgctcctttacaggcaccgcctgaaccgccaggaaattcctcccaccttgctgatgggaatgaggccactgtgttcggcccagtatgaaaagattttcaatactacaaggatccccggagtgcagaaggactacattagacatcttcacgactcccagcatgttgcggtcttccacagagggagattttttagaatgggaacacactctaggaacagcttgctaagccccagagcactcgaacaacagttccagagaatcctcgacgacccatcaccagcctgtccccacgaagagcacctggccgccctgaccgctgctccaagaggtacgtgggcacaggtgagaactagcctgaaaacccaggctgctgaggcgcttgaagccgtcgaaggcgctgccttttttgtatccctggacgctgaacctgcgggactgacacgcgaggaccccgcagctagcttagatgcttacgctcacgctctcctcgccggcagggggcacgaccgctggttcgataagtcatttacattgattgtgtttagcaatggcaagctggggctgtcagtggaacattcctgggctgattgtccaatcagcggtcacatgtgggagttcacattggcaacagaatgctttcagttagggtattccactgatggtcactgcaagggccacccagatccaacgctcccccagcctcagcggctgcagtgggatctacccgatcagattcactccagtatttcattagccttgaggggcgctaagatcctgtccgaaaatgtcgactgccatgtcgtccctttctctctcttcggaaaaagcttcatcagacgctgccatcttagcagtgactctttcatccagattgcccttcagttagctcatttcagggatcgcggacagttttgtctgacctacgagtccgctatgacacggctgtttctggaggggaggaccgagactgtcagatcttgcactagagaggcttgtaactttgtgcgcgcaatggaagacaaggagaagaccgatccgcagtgcttagcactgtttcgtgttgcagtggataagcaccaggcactgctgaaagccgccatgtccggacagggcgtcgataggcatctgtttgccctgtacatcgttagtcggtttttacacctccagagtccttttctgactcaggtgcacagtgagcagtggcagctttcgaccagccagatccccgtgcaacaaatgcatctgtttgatgtgcataactatccagattatgtcagcagtggaggtggatttggtcccgcagatgatcatggctatggcgtgagttatatcttcatgggagatggtatgatcactttccacatcagcagcaagaagagttccactaaaacagactctcaccggttgggccaacacatcgaggacgccttactggatgtggcctctctgttccaggccgggcagcatttcaagcggcgattccggggctccggaaaagagaattccaggcacaggtgcggcttcctttctcgccaaacaggtgccagtaaagcctcaatgacgtcgacagatttttag

SEQ ID NO: 110915 - DNA, 1524 bp, synthetic construct
  misc_feature 1..1524: note = Description of Artificial Sequence: Synthetic coding sequence
  source 1..1524: mol_type = other DNA
atggaccccaaactggggcgcatggcggcgtccctcctggcagtgctgttattattgctagagcgtggcatgttctcatctccatcacctccacctgcactgttagagaaagtattccagtatatagatctccatcaggatgagtttgtccagactttaaaggaatgggtagccatagagagcgattcagtgcagcctgttccccgatttcgccaagagctgtttcggatgatggcggtcgcagccgacacactacagcggctcggcgctagagtagcatccgtcgatatgggtcctcagcaactgcccgatggtcagtcactgcccattccacccataattctggccgaactggggtccgacccaactaaggggaccgtctgcttttacggccacctggatgtgcagcccgccgatagaggtgacggatggctgaccgacccttatgtgctgacagaagtggacggcaagctgtacggcaggggtgctacagacaacaaggggccagtgctcgcctggatcaacgcggtgtctgcctttcgggccctggagcaggacctgccagtgaatattaagttcattatcgaggggatggaggaggcagggagcgtggccctggaagagctcgtggaaaaggagaaggaccggtttttctctggcgtcgattacattgtgatctctgataatttatggataagtcaaaggaagcctgctataacctacggaacacggggtaattcatatttcatggtggaagtcaaatgccgagatcaggattttcattcaggaacgttcggcggtatcctgcacgaacccatggccgatttggtggctctgctcggtagcctcgtcgactcatcaggacatattttagttcccggaatttatgacgaagtggtccctttgaccgaagaggagatcaacacttataaagcaatccatctcgatctcgaggaatacaggaattcttcccgcgttgagaagttcttatttgacactaaagaagaaattcttatgcatttgtggagatacccttcactcagtatccacgggatagaaggcgccttcgacgagcctggaacgaagacagttattcctgggagagttatcgggaaattctccatccgcctggtgccgcacatgaacgtgtcagctgttgagaaacaggtcacccggcacctggaagatgttttctccaagcgaaactcctccaataaaatggtcgtgtcaatgaccttggggttacacccgtggatcgccaatattgacgacacccagtaccttgcggcaaagagagccattcgcacagtcttcggcactgagccggatatgattagggatggttcaactattcccatcgccaagatgtttcaggagatcgtgcataaatctgtggttctgattcctctgggcgcggtggatgacggagaacatagccagaacgagaaaatcaatcggtggaattacatcgaggggacaaaactgttcgctgcattcttcctggagatggcccagctccactag

SEQ ID NO: 110916 - DNA, 2484 bp, synthetic construct
  misc_feature 1..2484: note = Description of Artificial Sequence: Synthetic coding sequence
  source 1..2484: mol_type = other DNA
atgctcctttgtctgtctccagcatggcttatgaaagtcccagcacctggtcagccgggggaagccgccctgcttgtttcaaaggctgtgtcctttcatccaggtggcctgactttcctcgacgacttcgtgcctccgcgaagagcaacatatttccttgcagggttaggactgggacctggacgcggacgcgaggccgctgagctggctcgggaccttacatgcccaacaggggcctcagcagagttggctcggctcttagaagaccgcctcctgactagacagctgctcgcacagcaagggggagtagcagttccagccaccctggccttcacctataaaccacctggactgctccgaggcggggacgccagtcttgggctgcgcttggtcgaactgagcggaaaggaggggcaggagacactggtgaaagaagaggtagaggctttccttcgctcagaggccttaggcgacatcttgcaggtggccgtcaaactcagtggatggcgctggaggggacgacaggcctggcggcttcatccgcgagcagagctgggcgcagtggtggacacagtgctcgcattattagaaaagttggaggaggaggagagcgtcctggtcgaagcagtatatccccctgctcagttgccttgctctgacggtccgtctccaggccccggacttgccgtcaggatctgtgccgtggtatgtcgaacacagggggatcgtcctctactgagtaaggtagtgtgcggcgtgggccggggggatcggcctctgagacatcataacagtctcccacggactctcgaggtcgcactagcccaatgcggtctcggcgaggaggctcaggttgctgccgttcgccagcgtgtaaaggccgcagcagaggccgccttggcagccgtgctggccctcgaggctggactgagcgctgagcagcgcggaggaagacgtgcacacacagacttcctgggcgtggacttcgcccttaccgctgctggcggcgtgctaacccccgtggctctcgagctgaacggtggactctgcctggaggcatgtggtgccctggaaggcctgtgggctgccccaagactcggcccggcagcggacgaggccgtggcggcccctctcgtagaaaccatgttgagacgttctgcgagatgtctcatggaaggcaagcagttacttgtggtgggagccggaggcgtatccaaaaagtttgtttgggaagcggctcgggactatggtcttcagttacatctggtcgaatctgatcctaatcactttgccagccaactggtccagactttcatacattttgacatgaccgagcataggcgggatgaagaaaacgccaggctcctggctgaactcgtgcgggctagaggcctcaagctcgacggttgtttctcctattgggacgactgcctggtactgacagcgctgctctgtcaggaactcggactaccatgttcaagtccagcagctatgaggctggctaaacagaagtccctcacacagctgcaccttctgcaccatcatggccctccttggcccgcaccttcactgcatgctgttccctgttgtccactcgaaagtgaagcagatgttgaacgagctgtgcaccaggtgcccctacccggcgtaatgaagctagaattcggcgccggggctgttggggtcagactggtcgaagacgccccgcagtgccacgaacattttagtcgcataaccagagacctgcagggggaggcagatcaccccggcattggtttaggatgggggaatgccatgctgcttatggaattcgtggaaggtaccgagcacgacgtggaccttgttctctttggcggtagactcctggcagcttttgtgtcagacaacggtccgactagactccccggcttcacggagactgccgcctgcatgcccaccggactggcacctgagcaggaggcgcagatggtgcaggccgcctttcggtgttgtctggggtgcggacttctcgatggtgtgtttaatgtggagctgaagctgacaggggctggtcctcgccttattgagattaacccccggatgggcggcttttacctccgagactggatcctggaactctacggtgtcgatttgctgttagcagcggtcatggtcgcatgtggcctgaggcccgcactgccaacaaggccccgggcacggggacacttagtcggagtcatgtgccttgtgtcccagcacctacaggcactcagtagcacagcctctagagagaccttacaggcactgcacgacagagggctgctaagactcaacctacttgaggaagcccttgtgcccggcgaatacgaagaaccttactgtagtgtggcgtgcgcaggcccatctcccactgaggcccggttgagactactggggctgtgccagggacttggaatcgacggcccttcttacccagtagcccactttctgtcacacttcaagtag

SEQ ID NO: 110917 - DNA, 2484 bp, synthetic construct
  misc_feature 1..2484: note = Description of Artificial Sequence: Synthetic coding sequence
  source 1..2484: mol_type = other DNA
atgctgctctgcctcagcccagcctggcttatgaaggtgccagctccggggcaaccaggagaagccgctctgttggtgagcaaagcagtaagttttcaccccggtggtctcactttccttgacgatttcgtccccccaaggcgcgcaacttacttcctagcaggtctcggcctggggcctgggagagggagagaggcggcagaactcgcgcgcgacctgacctgtcccactggagctagcgctgagctggcgagattgctagaggatcgacttctgacccgccagttgctggcccagcagggtggggtagccgtgcctgccacactggcatttacctacaagcctcctggcttactgagaggcggggatgcatccctcggactgaggttggttgaactgtcggggaaagaagggcaggaaacactagtgaaagaagaagttgaggcattcctgcggtcagaggccctgggcgatatcctccaggtcgccgtgaaattaagcggatggcgttggcggggacgtcaggcttggaggctccaccctagggccgaactgggcgccgttgtggacactgtgctggccttgctggaaaaacttgaagaagaagagtccgtgctcgtcgaagctgtatatccccccgcacagctgccatgcagtgacggtccttctccaggcccggggctggccgtgaggatctgcgctgtcgtttgtagaacgcaaggcgatcgtcctcttctttcaaaagtggtgtgtggagtcgggcgaggagatcggccactgcgccaccacaatagtttgccacggactcttgaggtcgccctggcgcagtgcggacttggcgaagaggctcaagttgcggccgtgagacagcgcgtgaaggctgcggcagaggcggcgctcgccgccgtcttagcactggaggcaggcctcagcgcggagcagcggggtgggcggcgagcacatactgacttcctcggagtggactttgccctcactgcagcaggaggagtgctcacccccgttgccctggagctcaatggaggcttgtgtctggaggcgtgcggagccctcgaaggcctctgggccgcacctcggctcggccctgcggccgatgaggcagtggctgcgcctttggtggagaccatgctgaggcgctccgccagatgtctgatggagggaaagcagctgctcgtggtgggagcgggcggggtatcaaagaagtttgtgtgggaggctgcacgcgactatgggctgcagttgcacctggttgagagcgaccccaaccatttcgcctcacagctggtgcagacatttattcactttgatatgaccgaacacagaagggacgaggagaacgcaaggctgctagccgagctcgtaagagccaggggcctcaaactcgacggctgtttttcatattgggatgattgtctggtgctcacagcactgctctgccaggagctcgggctgccttgttctagcccagccgctatgagactcgcgaagcagaagtccctgacccagctgcacttgttgcaccaccatggtcctccatggcctgcaccctccctgcatgcggtcccctgctgtccccttgagtccgaagctgatgtggagagagctgtgcatcaggtcccgctgcctggagtgatgaaacttgagtttggcgcaggcgccgttggtgttcgattggtggaagacgctcctcagtgtcatgaacacttcagccgcatcaccagggacttgcagggggaggcagaccatccagggatcggcttgggctggggcaatgcgatgctgctgatggagttcgtggagggcacagagcacgatgttgatctcgttttattcggggggcgtctcttggccgccttcgtttctgacaacggtcctactaggctgccagggttcaccgagacagccgcatgcatgcccaccgggttagcaccagaacaggaggctcagatggttcaagccgcatttcgatgctgcctggggtgcggcctgctggatggagtctttaacgtggagctaaagctgactggggcaggaccaagactcatcgagatcaaccctaggatgggggggttctaccttcgggactggatacttgagctctacggcgtcgacctgctgctggccgctgtcatggtggcctgtggcttaaggcccgcattacctaccagaccccgcgcccgtggtcacctggtgggcgtgatgtgcttggtgagccagcacctccaggcactgtcctccacagcaagcagagaaactttgcaggcacttcatgaccggggactcctgcggcttaatctgcttgaggaggcccttgtgccgggggaatatgaggaaccatactgcagcgtggcttgtgccggtccttcacctaccgaggcccggctcaggttgctagggctgtgtcaaggtttaggtatcgacggcccctcttacccggtcgcacacttcctctcccattttaagtag

SEQ ID NO: 110918 - DNA, 2853 bp, synthetic construct
  misc_feature 1..2853: note = Description of Artificial Sequence: Synthetic coding sequence
  source 1..2853: mol_type = other DNA
atgctttccctcgacccctcaggccccgagtgggactgcccactgggatccaaggacctcgaagaagaggggccgtggggcggggggagtgggctgccacctactgggtgcttcccagggtcatggcgtcaggacgtcggcctggattgcaaagggagtcctgagggtgccgaggctcgcgcctggacggtgtactactacagtctgctccaatcttgccttcagcaggctgggctcccagaaactcaagaccgcggacaggtgccacggacgggctgccccggggccgaggttaccctctgtgttttgggttcaccatcgaccttcttacctgtccttcttgaggggggcgtgcagagtccgggaaacatgctgctgtgtctctccccagcatggctgatgaaggttcccgctcccgggcaaccaggtgaagcagctctgctcgtttctaaggctgtgtcgttccacccgggcggtctcacttttctcgatgactttgtcccaccgcggagagcaacttattttttagccggactgggactggggcccggccggggcagggaagctgccgagttggctcgcgacctcacatgtccgactggggccagcgcggagttggcaagactcctcgaagatcggctgctgacgcgtcagcttctggcacagcagggtggggtcgctgttcccgcaacacttgccttcacatacaagcctcctggtctcttgcggggaggtgacgcctccctgggtctcagattggtggagctgtccggaaaggaaggtcaagagacactcgtgaaagaagaggtggaagcctttttgagaagcgaggcactaggcgatattctgcaggtggccgtaaagttgagcgggtggcgctggcgtgggagacaggcgtggcgtctgcaccctcgggcggagctgggcgccgtagtggataccgtactagcactgctggaaaaattagaagaggaggaaagcgtcctggtggaagcggtgtaccctccagcacagttaccatgcagcgatggtccaagtcccggcccaggcctcgctgtccggatatgtgccgtcgtgtgtcgtacccagggagaccgccctctattgtctaaggtggtgtgcggagtcgggaggggggatagacctctgcgacatcataatagcctgcctagaaccctggaagtagcactcgcccagtgcggactcggggaggaggcacaagtggctgcggtgcggcagcgggtgaaggcagccgccgaagctgccctcgctgcagtgctagctctagaggccgggctttccgcagagcagaggggcgggcgcagagcccacaccgactttttgggagttgatttcgccctcaccgccgctggcggcgtgctgacaccagtagcccttgaattaaacggaggactgtgccttgaggcatgtggggccctggaaggtttgtgggctgccccgagactcgggcccgctgccgatgaggcagtggctgcgcctctggtcgaaactatgctccgcaggagtgcacggtgtcttatggagggtaagcagctcctggttgtgggagccggaggtgtgtcaaaaaagtttgtctgggaagcagccagagactacgggctgcagctgcatttggttgagagcgatccaaatcactttgcatctcagcttgtgcagacattcatacattttgacatgacagaacatcgcagggatgaggaaaacgcaagattgctggcagagttggtgcgggccagggggctgaagctggacggatgttttagttactgggacgactgtttagtgctgactgccctcctgtgtcaggagctcggtctgccatgcagctcacctgctgctatgagattagccaagcaaaagtccctgacgcaattgcatctcttgcatcatcatggaccgccatggccagccccctctcttcacgctgtcccctgctgcccattggagtctgaggcggatgtggagagggccgttcatcaagtgcccctccctggcgtcatgaagctagaattcggtgccggggcggtcggtgttagattagtcgaggatgccccccagtgtcatgagcactttagcaggattacaagagatctccagggcgaggctgatcatcccggcatcgggttggggtggggcaatgcaatgctgctgatggagtttgtggaaggcactgaacacgacgtagatctggtgctgttcggcggccgtttgttggccgccttcgtctccgacaatggccctacacgcttacctggcttcaccgaaaccgcagcttgcatgcccaccggactcgcccccgagcaggaagcgcaaatggtccaagctgctttcaggtgctgcctgggctgtggacttctggatggcgtgttcaacgtggaactgaagcttacaggggccggccccaggctgatcgaaattaatccacggatgggcggtttctatttaagagactggattctggagctatatggtgtggatctgctgctggctgctgtgatggtcgcatgcggtttacggcccgccctgccgacccgcccaagggcgcgcggccacttggtgggtgtaatgtgtctcgtgtcccaacatttgcaagccctcagcagcacagccagtcgggaaactctgcaggccctccacgatagggggctcctccgccttaatctgctcgaggaagctctcgtacccggcgagtacgaagaaccctactgctcagtcgcttgcgcgggaccttcacccacagaagccagactgcgtttgttgggcttgtgtcagggattgggcatcgatggaccatcctacccagttgcacatttcctatcccactttaaatag

SEQ ID NO: 110919 - DNA, 2775 bp, synthetic construct
  misc_feature 1..2775: note = Description of Artificial Sequence: Synthetic coding sequence
  source 1..2775: mol_type = other DNA
atgttgagtctagacccatcaggcccagaatgggactgccctctcggcagtaaggatcttgaggaagaaggtccctggggtggagggtctggattgcctccaactggctgctttcccggttcctggcgtcaggacgtggggttggactgcaagggatctcccgagggagccgaagcgagagcttggaccgtctattattactccctattgcagtcgtgcctccagcaagcaggcctgcccgagactcaggataggggccaggtccctcggacaggttgtccaggtgcagaggtgaccctctgcgtgcttgggtcgccctccacattcctaccagtgctactggaaggcggcgtacagtcccccggaaacatgctactgtgtttgtctccagcctggctaatgaaggtgcccgcccccggacagcctggggaggcggcccttttagtcagcaaagccgtgtcctttcaccccggagggttgactttcctggatgactttgtgccacctcgaagggctacttatttcctagccggccttggcctagggcctggtaggggccgcgaggcagccgaactagcgagggacctgacctgtcccaccggtgcctcagcagaactggcccgcctcctggaggatagattgctgacacggcagttactggcacagcagggtggcgtggcagtgcccgcaaccttagcgtttacatataagccacctgggctccttcgggggggagacgccagcttgggcctccggctagtcgagctgagtgggaaagagggccaagaaaccctcgtgaaagaagaagtggaggccttcctgcgttctgaggccctcggcgatatcctgcaggtcgcagtgaagctctccggatggagatggcgaggaaggcaggcttggcgccttcaccctcgcgcagaacttggcgcagttgttgacactgtcctcgcactcttggaaaagctggaagaagaagaaagcgtgctggtcgaggcagtgtatccacctgcgcaattgccttgctctgatggacctagtccgggccctggtttagccgtgaggatctgcgcggtggtgtgccgcactcagggggatcggcctttgctgtcaaaagtggtgtgtggtgttggacggggagaccgacccctgagacaccacaattctcttcccaggacacttgaagcggctctagctgcagtccttgccctcgaagccggcttgagcgcagaacagagaggaggaaggcgcgcacatacagactttttgggagtagatttcgccctaacagcggccgggggggtcctgacccccgtggccctggagcttaacggcggcttgtgccttgaggcttgcggagctttggagggtctttgggctgcaccccgcttgggacctgcagccgacgaggccgtggccgctccgctagtcgaaacgatgttgagacggtccgcgcgttgcctgatggaaggaaagcagttgcttgtggtgggggccggaggcgtgagtaaaaaattcgtgtgggaagccgcccgtgactacgggttgcaactgcacctcgtggagagcgaccctaaccactttgcctcccagctggtgcagacatttattcatttcgacatgacggaacatagaagggatgaagagaacgcaaggctcctggccgagctggtgcgtgctcggggcttaaagctagacggatgtttttcgtactgggacgattgtttggtcctgaccgctctcctgtgtcaggaactgggactcccttgctctagccctgctgccatgagactcgctaaacagaagagcctaacccagctgcacctcctgcaccatcatggccccccctggccggcacccagtctacatgccgttccctgttgccccctggagagcgaagccgatgtcgaacgcgcggtgcaccaggtcccactgccgggggtcatgaaactggaattcggggccggcgctgttggagtaaggctggttgaggatgccccccagtgccacgagcacttttcacgtattacccgggacctgcagggtgaggcggatcaccctggaatcggcctggggtggggaaatgcgatgttactgatggagttcgttgagggaactgaacacgatgttgacctggttctattcggcgggagacttctggcggcctttgtgtcagacaacggacccaccagactgccagggtttaccgaaaccgctgcttgcatgcctacaggcctcgcccctgagcaagaggctcagatggtgcaggctgcttttcgatgctgcctggggtgtgggctattagatggcgtatttaatgtggagttgaagctgacaggcgcgggacctcgactgatcgaaattaaccccaggatgggtgggttttatcttagggactggatcctcgagctctacggggtggatcttcttctggccgccgtcatggtcgcgtgtgggctgcgccctgcactgcctactcgacccagagccaggggccatctcgtcggcgtcatgtgtctagtgtctcagcacctgcaggctttgtcatctacggcttccagagagacgctgcaagcactgcatgatcgaggcctcctacggctgaaccttttagaggaggctctcgttccaggagagtacgaggagccttactgctctgtggcctgcgccggcccctccccaactgaggcaaggctgcgactattagggctctgccagggccttggcatagacggccctagctatccggtggcgcattttctcagccactttaagtag

SEQ ID NO: 110920 - DNA, 903 bp, synthetic construct
  misc_feature 1..903: note = Description of Artificial Sequence: Synthetic coding sequence
  source 1..903: mol_type = other DNA
atgtgtcctctcgcccacccggcccaggaccttcctttactgcccagccagctcagtctagatcccagcgggcccgagtgggattgtcctctgggcagcaaagacctggaggaagaggggccctggggcgggggcagcggactccctccgaccggatgtttccctggcagttggaggcaggacgttggacttgactgcaaaggctcccctgagggggccgaagcgcgggcttggacagtatactactactctctcctgcagagctgcttgcaacaagccgggctgcctgaaacacaagataggggacaagtgcctaggaccggatgtcccggtgccgaagtgaccttgtgcgttctggggagcccgtccacatttttgcctgtgctgctggagggaggagtgcagtcccctggcaatatgttgctatgcttgagtccggcttggcttatgaaagtcccagccccaggccagcctggagaggctgccttgctcgtttcaaaagcagtgtccttccacccaggcggcctgacctttctagacgactttgtccctccacgtagagccacttacttcctagctgggctcggactgggccctgggcgcggaagggaagccgcagagctcgctcgggacctcacctgtcctacaggcgcctccgccgaactggccagactgctggaggaccggctcctgacccggcagttgttagcacaacaaggcggggtcgccgttcctgcaacacttgccttcacttataaacccccagggcttttgcggggcggcgacgcttccttgggattgcgcctagtggaactgtctggaaaggaggggcaggagacgttggtaaaggaggagcgaacctggctcggtccaaaaccatggacgaatcccggaaagacgtag

SEQ ID NO: 110921 - DNA, 2775 bp, synthetic construct
  misc_feature 1..2775: note = Description of Artificial Sequence: Synthetic coding sequence
  source 1..2775: mol_type = other DNA
atgctaagtctggatccatcgggccccgaatgggattgccccctgggcagcaaagacttggaggaggaaggaccctggggaggtgggtcaggccttccgccaactggctgtttccctgggtcctggcggcaggatgtggggctggattgtaaggggtctccagagggcgctgaagcccgtgcctggactgtctattactactctctgctgcagtcatgtttacagcaagccggactccccgagactcaggaccggggccaagtgcctcggactgggtgcccaggagctgaagttaccctttgtgttctgggttctccatctacatttctgcccgtccttctggaaggcggggtccaatcccctggaaatatgctcctgtgcctatcaccagcatggctcatgaaggttcctgcccctggccaaccaggagaagcagctttgctggtcagcaaagccgtgtccttccacccgggggggctgaccttcttggacgacttcgtccccccccggcgcgcaacttattttttagccggtctaggactcggccccgggagggggcgggaagccgccgagctggcccgggatttgacctgccccactggggcctcagccgagctggccaggctgctggaagacagactgctgactaggcagctgctggctcagcagggcggtgtagctgtgccggccacattggcatttacctacaagcctcctggactgttacgcggcggcgacgcctctctgggcctccgtctcgtagaactgtctggcaaagaaggtcaggaaacgttagtcaaggaggaggtggaagcctttcttcggtcggaggcactgggggatattttacaggtggccgtgaaattgagcggatggcgctggcgcggaaggcaggcctggaggctgcacccccgggcggagctgggagcggtggttgacacagtgctagccttactggagaaactcgaggaggaggaatcagtccttgtggaagccgtgtatccccccgcacaattaccctgctctgacggacctagccctggccccgggttggcggttcgaatctgcgccgtagtatgtcgcacacagggagaccgaccactattgtctaaggtcgtgtgtggagtgggccgcggcgacagacctctgagacatcacaatagcttaccacgcaccctagaggtcgcccttgccgcagtgctggcacttgaagccgggctaagcgccgagcagagaggtggtaggagggcacacactgacttccttggtgtagacttcgccctaacagccgccgggggggttttgacccccgtagccctcgaactcaatggcggcctgtgtctcgaagcctgtggagccctcgaaggtctctgggcagcccccaggcttggacctgccgccgacgaggccgtggccgcccccctcgtcgagaccatgctgcgcaggtcagcaagatgcctgatggagggaaagcagctgttagtggtgggagccgggggagtatcgaagaaattcgtgtgggaggccgccagagactacggtctgcagctgcacctggtggagagcgatcctaaccatttcgcatctcaattagtgcagactttcatacatttcgatatgaccgagcatcggagagacgaggaaaacgctagacttctcgccgagcttgtgagggccagaggccttaagcttgatggatgtttttcttactgggatgactgtctcgtccttaccgccctactctgtcaggagcttggactgccatgtagttcccctgctgccatgagactggcgaagcaaaaatccctcacacagctccaccttctgcatcaccatggaccaccttggccagctccatctctacatgcagttccctgctgtccccttgagtccgaagcagatgtcgagcgtgccgtgcaccaggtgccccttcccggtgtcatgaagctggagtttggcgccggtgccgtgggtgtcagactcgtggaagacgcacctcagtgtcacgaacatttctctaggatcaccagagacctgcagggggaggctgatcacccaggcattggtttgggatggggtaacgctatgcttctgatggaattcgtggaaggcacagagcatgacgtggaccttgtactttttgggggaaggttactggcagccttcgtctctgataatggacctacgcgtttacctggcttcactgaaacagcagcctgcatgcctactggtctcgcgccagaacaagaggcgcaaatggtgcaggccgccttccggtgttgtctcggctgcgggctgcttgatggcgtgttcaatgtcgaattgaaattaacaggagcaggccctcggctgattgaaatcaatcctagaatgggtggattttatctccgcgactggattctggaactgtacggggtagatctgctgcttgccgctgtgatggtagcctgtggtttgaggcccgcccttccgactcgaccgcgggccaggggacacttggttggagttatgtgcctggtgtctcagcatctacaggccctgtcgtcgactgcatctcgcgagaccttgcaggccctgcacgatcgtggcctgctgagactcaatcttctcgaggaggccttggtgccgggggaatatgaagaaccctattgctccgtggcttgtgccggaccctcccctacagaagcacgactgcgactactgggcctctgtcaggggctgggcattgatggtccttcgtaccccgttgcacactttctgagtcatttcaagtag

SEQ ID NO: 110922 - DNA, 1206 bp, synthetic construct
  misc_feature 1..1206: note = Description of Artificial Sequence: Synthetic coding sequence
  source 1..1206: mol_type = other DNA
atggagcctgggaggcgtggtgccgcagctctattggccctgctctgtgtggcctgtgctctgagagcagggagggcccagtacgagaggtattctttcagaagttttccccgcgatgaactcatgccgctggaatccgcctatcgccatgccctggacaaatattcaggagagcactgggcagagtcagtggggtacctagagatttctctgcggctgcaccgcttgctccgtgatagtgaagcattctgtcatagaaactgctccgcagccccccagccggagcctgcggcagggctcgcttcctaccctgagctccgcctatttgggggcctcttgaggagggcccattgcctgaagcggtgtaagcaaggactgccagctttccgtcagtctcagccaagtagagaagtcctagctgacttccagcggcgcgaaccgtataagttcctgcagttcgcctatttcaaggctaataacctgcctaaagccatcgccgccgctcacacctttttgttgaaacaccctgacgacgagatgatgaagcgtaatatggcgtactataaaagcttgcctggggcagaagactatattaaggatctcgagaccaagtcttacgagagtttgttcatcagggcggtgagggcctacaacggggagaattggagaacctccatcacggacatggagctggccctgccagacttcttcaaggcgttttacgagtgcctagctgcctgtgagggaagtcgggaaataaaagactttaaggatttttacctgagcatcgccgaccattatgtggaagtactggaatgcaaaattcaatgcgaagaaaatctgacccctgtgatcggcggctaccccgttgagaaatttgtggctaccatgtaccactacctccagtttgcatattacaaattaaatgatttgaagaacgcagctccatgcgctgtgtcttacttattgttcgaccagaatgacaaggtcatgcagcagaacctagtgtattatcagtatcatcgggatacatgggggctttcagatgaacacttccagccaagaccagaggccgtgcagttctttaacgtaaccacactccagaaagaactttatgactttgctaaagagaatatcatggacgacgatgagggcgaggtagtggagtatgtggatgacctgctcgagctggaagaaactagctag

SEQ ID NO: 110923 - DNA, 789 bp, synthetic construct
  misc_feature 1..789: note = Description of Artificial Sequence: Synthetic coding sequence
  source 1..789: mol_type = other DNA
atggagcccggacggagaggagcagctgcactactggccctgttgtgtgtcgcctgcgctctgagggctggtcgggctcagtacgagcggtattcttttcgctccttcccccgcgatgaactcatgccccttgagtcagcatatagacacgccctcgacaaatattctggtgagcattgggccgaaagcgtcgggtacttagaaattagtctgcgtctccatcgactactgcgggactccgaggcattttgtcatcgcaactgtagtgcggccccccagcccgagcccgcagccggcctcgccagctatcccgaactgagactgttcggcggattgctgcgtcgcgcccattgcctaaaaagatgcaaacagggcctgccggccttccgacagagtcagccttcacgcgaagtgttggcagacttccaacggcgggaaccctacaaatttcttcagtttgcttactttaaagccaataatctgccaaaggccatcgcggcggcccatacattcctcctcaaacaccccgacgacgagatgatgaagcggaatatggcgtactacaagtccctgcctggcgcagaggactatctgaagacatggaagccctctcacatgaaagcctgtagctctgaacaatgcggacacaccacggtgaggacaggtgagcatccttctcagacatggagctggccgttccccacaagctctaagcctttcacctctgtgagccagcctgccagagtgcccggacgtagcagaacgtcacgaataagtacctttccctag

SEQ ID NO: 110924 - DNA, 789 bp, synthetic construct
  misc_feature 1..789: note = Description of Artificial Sequence: Synthetic coding sequence
  source 1..789: mol_type = other DNA
atggagcctggacggaggggggccgccgcgttgctcgcacttctgtgcgtggcttgcgctctccgcgctggcagggcacagtatgagcggtattcatttcgctcctttcctcgggacgagctgatgccattggaaagtgcctatcggcacgccctggacaagtacagtggcgagcattgggctgagtccgtaggctacctcgaaatcagcctcaggttgcacaggttgttgagggacagcgaggcattctgtcacaggaattgctccgccgccccacaacccgagcctgcagcagggctggccagttatccagaactgaggctgttcgggggtctactcaggagagcgcattgtcttaagcggtgtaagcaaggcttgcccgcatttcgacaatcccagccatctcgggaagtcctggcagacttccagcggcgcgaaccttacaagttcttgcagtttgcttacttcaaggccaacaatttgcctaaggccatcgccgccgcccacacgttcttgctgaagcaccctgatgatgagatgatgaaacgcaatatggcatattataagtcactgcccggggctgaagactacattaaggacctcgagactaagtcatacgaaagtttgtttatcgaacagtgtgggcacaccacggtacgcacgggagaacatccatctcagacttggtcctggccttttccaactagtagcaaaccattcacctccgttagccagcccgcccgcgtccctggccggtccagaacatcccgtatctcaacctttccgtag

SEQ ID NO: 110925 - DNA, 1167 bp, synthetic construct
  misc_feature 1..1167: note = Description of Artificial Sequence: Synthetic coding sequence
  source 1..1167: mol_type = other DNA
atggagcccggcaggcgcggcgctgctgcgctccttgcactgctctgcgtagcttgcgctctccgagcaggcagagcgcaatacgagcggtacagcttccggagctttccacgcgacgaactgatgcccctcgaatctgcttatagacacgctctggacaagtatagtggggaacattgggcagaaagcgtgcgggacagcgaggctttctgtcatcgaaattgctccgccgctccccaaccggagcccgccgccggtctggcctcttaccccgagctccggttgtttggcggactcctgcgccgagcccactgcctgaagcggtgcaagcaaggtctacccgcctttcgacaaagtcaacctagcagggaggtcctcgccgacttccagaggcgtgaaccttataagtttcttcagttcgcgtacttcaaagccaacaacctgccaaaggccattgcagctgcacataccttcttactgaaacatcctgacgatgaaatgatgaagcggaacatggcgtactacaagtccctgcccggggcggaagactacataaaggatctggagactaaatcttacgagtccttgtttatccgggccgttagggcttacaatggagaaaattggcgcacaagcatcaccgacatggagctcgctctgcccgacttcttcaaagctttttacgaatgcctagctgcctgcgaaggaagtcgcgagattaaggattttaaggacttctatctgtccatagccgaccactacgttgaagttttggagtgcaagatccagtgtgaggaaaaccttacaccggtcataggtggatacccagtggaaaaattcgtggccactatgtaccattaccttcagttcgcatactacaagctgaatgatctcaaaaatgcagctccgtgcgccgtgtcctacctgctgttcgaccagaatgacaaggtcatgcagcagaacttagtctattaccagtatcatagggatacatggggtctgagcgacgaacatttccagccccggccggaggccgtccaattctttaacgttactaccctccagaaagaattatatgactttgccaaagaaaacatcatggatgacgacgaaggggaggtcgttgaatatgtggatgatcttctcgagctggaggaaacaagctag

SEQ ID NO: 110926 - DNA, 3471 bp, synthetic construct
  misc_feature 1..3471: note = Description of Artificial Sequence: Synthetic coding sequence
  source 1..3471: mol_type = other DNA
atggcctcactgctaccattgctgtgtctatgtgtggtagccgcccatctcgccggcgccagggatgctacccctacagaggagccaatggcaaccgcgctagggcttgaacgccgttccgtctacacaggccaaccaagccccgctctggaggattgggaagaggcaagcgaatggaccagctggttcaacgtcgatcatccgggtggggatggagatttcgaatccctggctgcaatccgtttttactatggcccagctagggtctgcccgagacccttggcattggaagcacgcactacggactgggcactgccctccgccgtaggtgaacgtgtgcatctgaatcccacgcgagggttttggtgtcttaatagagaacagcctaggggaaggaggtgtagcaactatcacgtcagattcagatgcccgctggaggcatcttggggcgcttggggaccttggggtccctgtagtggtagttgtggcccgggcagacggctgcggcgaagacactgcccatcccctgcgggcgacgcctgtcccggtcggcccctggaggcccagaaatgcgtgagacctaggtgcccgggctgcagtctcgatacgtgtgagtgccctgaccacatcctgctggggtctgtcgtcaccccttccggccagccactgctgggtgccagggtatcccttcgggaccagcccgggacagtggctacctctgacgctcacggcacgttccgagtgcctggtgtttgtgctgactcgcgcgccaacatccgggcccaaatggacggcttttccgccggtgaggcccaagcacaggcgaacgggtcaatctccgtagtcactatcattcttgataaactggagaagccctatttggtgaagcatcccgagagtcgggtccgcgaggctgggcagaatgtgacgttttgctgcaaagcaagtggcacaccaatgccaaaaaagtacagctggtttcataacggaactttactggatcggcgcgcacatgggtatggcgctcacttggagctgcgcggtcttcggcccgatcaggccggaatctatcactgtaaggcttggaacgaggcaggcgccgtacggagcggtacggccagactgacggtgctcgcgcctggacagccagcgtgcgatccgcgaccccgggagtatcttatcaagctgccagaggattgcgggcagcccgggagtggccccgcctatctagacgtcggtctgtgtcccgataccaggtgcccctcactcgcaggatcgagtccgcgttgcggtgacgcctcaagcagatgctgcagcgtccggagacttgaacggagggagatccattgcccaggttatgtgttgcccgtgaaagtggtcgccgagtgtgggtgccaaaaatgcctacctccgcgtgggctcgtccggggacgggtggtggccgccgactccggagagcccctccgattcgcacgaattttgttgggtcaggaaccgattggatttaccgcttatcaaggcgacttcactatcgaagtgccgccttcaactcaaaggttggtcgtgaccttcgtggacccctccggcgagtttatggatgctgtgagagttttgccctttgatccccggggcgctggtgtgtatcatgaagtcaaagccatgcggaaaaaggcacctgtgatcctgcataccagtcaaagcaacaccataccacttggagagctagaagatgaggccccactgggggagcttgtcctgccctctggggcatttaggcgtgcggacggaaagccttactctggtcccgtggaggcccgtgtcaccttcgtagatcctagggatctgacctcagccgccagtgccccttctgacctgaggttcgttgatagcgacggcgagcttgcaccccttcgcacctatgggatgttttcagtggacctgagagctcccggctccgctgaacaactgcaggtggggcccgtggccgtgcgggtggccgcctctcagatccatatgcctggtcacgtcgaggccctcaagctctggagtctgaacccggagacagggctgtgggaagaggagagtggttttcgtcgggagggttcgagtgggcctagagtgagaagggaggagcgtgtattcctggtgggaaatgtcgaaatccgggaaaggcgcttgtttaatttggatgtgcccgaaaggcgccggtgcttcgtgaaggtgcgcgcttacgcaaacgacaagttcacgccatctgagcaagtggagggcgtcgtggtgacgctggttaacctggaacctgctcctgggttctcagctaatcctcgcgcctgggggaggtttgactccgcagtaactggtcccaatggagcctgccttccagccttctgcgacgctgaccgaccagacgcctataccgcgctggtgaccgccacgttggggggcgaagagctcgagccagccccatccctcccacgaccactccccgcgacagttggggtgacgcagccgtatctggacagactgggttatagacgaacagaccatgatgaccctgcgtttaagaggaatggattccggatcaacttggcaaaacctaggcccggcgatcccgcagaagctaatgggcctgtgtatccatggaggtcactcagggagtgccagggggccccagtgactgcttcgcacttccggtttgcgagggtcgaagcggacaagtatgagtacaatgtcgtgcctttccgggagggtacaccggcctcctggactggcgatctcctggcttggtggcctaatccacaggaattcagggcatgcttccttaaggtgaagatacaaggccctcaggaatacatggttcgctcacataatgctggggggtctcatcctagaacccgcggacagctttacggactgagagatgcccggagcgtgcgcgatccagagaggccagggacttccgccgcctgcgtggaattcaaatgtagtggcatgctgttcgaccagaggcaggtggacaggacgctggtcactatcatgccacagggaagctgtaggcgagtggccgtcaacggtttactgcgagactatctaacacgacaccccccacctgttcctgccgaggaccccgcagctttctccatgctcgcaccactcgatcccctgggccataattacggcgtgtacacagtcacagaccagagtcctcgcctggccaaggagatcgccataggaaggtgcttcgatggatcctccgatgggttctcccgggagatgaaagccgacgcgggcaccgctgtgacatttcagtgccgcgaaccccctgctggacgaccttcactcttccagcggttgctggagtcacccgcaactgcactgggggatatcaggcgtgagatgtcagaagccgcgcaggctcaggcccgagcaagcgggcccctccgcacgcggcgcggcagagtgaggcagtag

SEQ ID NO: 110927 - DNA, 3555 bp, synthetic construct
  misc_feature 1..3555: note = Description of Artificial Sequence: Synthetic coding sequence
  source 1..3555: mol_type = other DNA
atggtgggcacaaaagcttgggtgttttcattcttggtgcttgaggtaacttcggtgttggggcgccagaccatgcttacccaaagtgtgcgcagagtgcagcctggcaagaagaacccctccatcttcgccaaacccgctgatactctagaatccccaggcgagtggaccacatggttcaatattgattaccccggcgggaaaggagactacgagcggctggatgctatcaggttttattacggcgaccgggtttgcgctcggccactgcgactggaggcccgtactacagactggacacccgctggatccacaggccaagtggtgcatggctcaccacgcgaaggattttggtgcctgaatcgagagcaacggcccgggcagaattgttccaactacacagtgaggtttctatgccctcccggaagcctgaggagggacacagagcggatttggagtccgtggtccccttggtctaagtgtagcgcggcttgtggacagacaggcgtgcagaccagaactcgcatatgtcttgctgagatggtgagcctctgctccgaagcgtccgaagaaggacaacactgtatggggcaagactgtactgcatgtgacctgacgtgccctatgggacaagtgaacgcagattgtgatgcttgtatgtgccaggactttatgctgcatggcgccgtttcactcccaggtggagcccctgctagcggagcggccatttatctactgactaagactccaaagcttctaactcagactgattcagacggacggtttcgcatccctggactatgtccagacgggaagtctatactgaagataacgaaggttaagtttgcgcccattgttctgacaatgcccaaaacctccttaaaggcagccacaatcaaggccgagtttgtcagagctgagacaccatatatggtgatgaatccggaaacaaaggcgagacgtgccggtcaatctgtctcgttatgttgcaaagccacggggaaacctcgtcctgataagtacttctggtaccataatgacaccctgttggatccgagcctttacaaacatgagagtaagctcgtacttaggaagctgcagcagcaccaggctggggagtatttctgcaaagcgcagagtgatgctggtgccgtcaaaagcaaagtggcccaactcatagtaatagcctccgatgagactccttgtaatccggtacccgagtcgtacttgattcgcctgccacatgactgcttccagaatgctacaaactccttttactacgacgtcggccggtgccccgtgaaaacttgtgccggacagcaggataacgggatcaggtgtcgagatgctgtccagaactgctgtggaataagcaaaaccgaggagagagagatccagtgtagtgggtatactctcccaacaaaggtggcaaaagagtgtagctgccagcggtgtactgaaacccggagtatagtgaggggtcgggtaagcgccgctgataacggcgagccaatgcggttcgggcacgtgtacatggggaacagcagggtaagtatgaccgggtacaaaggtacttttacgctacacgtcccgcaggatacggagcgccttgtgcttaccttcgtggatagattgcagaaattcgtgaacaccacaaaggtgctaccatttaataagaaagggtctgctgtgtttcatgagatcaagatgctcagacggaaaaagcctataaccttggaggctatggagacaaatattatccctctgggggaggttgtgggagaggacccaatggctgaactggagatcccgagtagaagcttctatcgccaaaatggcgagccgtacatcggcaaagtaaaagcttcggtgacttttctggatcccagaaatatttccaccgccactgcagcccaaacagacctgaattttattaacgacgaaggtgacacttttcctctgagaacatacggcatgttctccgtagatttccgggatgaagtgacatccgaacctctcaacgccggtaaagtgaaagtgcatctggacagcactcaggtaaagatgcctgagcacatctctacagtgaagctttggtccctgaaccccgataccggattatgggaggaagagggggactttaagttcgagaaccaacgtcgcaataaacgcgaagatcgcacatttctggtcggaaaccttgagatcagggagagaaggctattcaacctggatgtgcccgagtcccgccgctgcttcgtaaaggtccgggcttacagaagtgagcggtttctgccaagcgagcaaattcaaggtgtcgttatttcagtgatcaacctcgaaccgcgaaccggcttcctgtcgaacccccgtgcctggggacgatttgactccgtgatcacaggccccaacggtgcctgtgtacccgcgttctgtgacgaccagagtcctgatgcttattctgcgtatgttctggcaagcttggcaggggaggagttgcaggccgtggaaagttcccccaaattcaatccgaatgccattggggtccctcagccttaccttaataagctgaactaccgcaggaccgatcacgaagatcccagggttaaaaaaacagcctttcagattagcatggccaaaccgagaccaaattcagctgaggagagcaatggaccaatttacgccttcgaaaatctgagagcatgtgaagaggctccgccttcagctgcacacttccggttctatcaaatagaaggggacagatacgactacaacacagtgccctttaacgaggacgatcctatgtcctggacagaagattatctggcatggtggcctaaacctatggagttccgagcatgctacattaaagtgaaaatcgtcggaccattagaagttaacgtgagatctagaaacatgggggggacccatcgacagacagtggggaagctgtatggcattagagatgtccggtcaacacgggacagagaccagcccaatgtgagcgctgcctgcctagagttcaaatgttccgggatgctgtacgaccaagatagggtagacagaacactggtgaaggtgatccctcaaggtagttgtaggcgcgccagcgtgaaccccatgctgcatgagtatctcgtgaaccatctacctctggccgtgaacaatgatacaagtgaatacactatgctagcaccgctggaccctcttggacataactacgggatctacactgttactgatcaggatccgcggaccgctaaggagatcgccctgggacgctgtttcgatggtactagtgacggctcaagtaggataatgaaatctaatgtgggagtcgctctgaccttcaactgtgttgagaggcaggtgggcagacagagcgccttccagtacctgcagtctacccccgcccaatctccagccgcgggaaccgtacaggggagagtgccttcccggcgccagcagcgcgcgagccgaggcggccagcgccagggcggcgtggtggcctccttgagattcccgagagtcgcacaacaacctctgatcaactag

SEQ ID NO: 110928 - DNA, 8148 bp, synthetic construct
  misc_feature 1..8148: note = Description of Artificial Sequence: Synthetic coding sequence
  source 1..8148: mol_type = other DNA
atggccgccgccgctggcggaggcagttgtccgggtcccggatctgctcgaggacggtttccgggtcggccaaggggagctggtggcggggggggccggggtggtcggggaaatggggccgaacgggtgcgtgtcgccctgcgcaggggcggaggcgccaccggacccggcggagccgagccgggcgaggacaccgcgctgctccggctccttggactcaggaggggactgagaagactgcgcagactgtgggcagggcccagagtccagagaggccggggtagagggagggggagaggatggggtccctcccgcgggtgcgttccagaagaggagtcttctgatggagaaagcgacgaggaggaatttcagggctttcacagcgatgaggacgtggcgccgtcgagtctccgctctgctttgcggagtcaaagaggccgggcacctagagggcgaggcaggaaacacaagaccactcccctgccccctccacgcttggccgatgtcgcgcctacacctccgaaaacccctgcccgcaagcgaggcgaggaggggacggaaagaatggtgcaagccctgactgaactgctgaggagagctcaggcaccacaggctccacgtagtcgggcttgcgaacctagtactccacgccgcagccgggggcgacctcctggaaggcctgctggaccctgtaggagaaaacaacaggccgtggtggtggcagaagccgcagttactattccgaaacctgaacctccgccacccgtagtccctgtgaagcaccagaccggctcctggaaatgcaaggagggtccaggcccaggccctggcacaccacgccgtggaggccaaagctcacgcggaggaaggggaggtaggggtcggggccgggggggcggactgccctttgtcatcaagtttgtgagtagggccaaaaaggtcaaaatgggccagttgtctctggggctggaaagtggacaggggcagggccaacatgaggagagttggcaggatgtgcctcaaaggagggttggtagcggccaggggggctcaccctgctggaaaaaacaggaacagaagttggacgacgaggaagaagaaaaaaaggaggaggaggaaaaggataaagaaggcgaagagaaggaagaaagagctgttgcagaagagatgatgcccgccgcagagaaggaggaagctaagcttccacctcctcccctgacaccgcccgctcctagccctccgccacccctgcctccacctagtacgagcccacccccacctttgtgccccccaccccctccccctgtcagcccaccccccttgccctcacctccacccccaccggcacaggaggaacaggaagagtctcccccccccgtggtgccggccacttgtagcagaaaaaggggaaggccccctctgacaccttcacagcgcgctgaaagggaagctgcccgggcgggacctgagggaactagcccaccaaccccgaccccctctacagcgacgggcggacctcctgaggattctcccaccgtggctcctaaatcaactactttcctaaaaaacataagacagttcataatgccagtggtgagtgctcgtagttcaagagtgatcaaaactcccaggagattcatggacgaggacccacctaagccacccaaagtcgaagtgagtccagtgctacgacctccaataaccacttcaccaccagtgcctcaggaaccagctcctgttccgagcccaccccgtgccccaacaccgcctagcaccccagtgcctctccccgaaaagaggcgctctattctccgagaacctactttccgctggactagtttgacaagggaacttcctccgccacctcctgcccctccacccccaccagccccatccccaccccctgcccccgccacctcctcgagacggccactacttcttagggctccgcagttcactcctagtgaagcccatttgaaaatctatgaaagtgtgttaaccccacctcccctcggagcccctgaagctcctgagcccgaacctcccccggctgacgactcacctgctgagcccgagcccagggctgtcggcagaaccaaccatctctctctgccacgatttgcaccggtggtcacaacccccgtaaaggctgaggtgtccccacacggagcaccagccttgtccaacggtccacagactcaggctcaacttctgcagcccctgcaggcacttcagacacagctgctcccccaggctctgcctcccccacagcctcagttacagcctccgccctctccacagcagatgcctcctttggaaaaggcccggattgcgggggtgggatcactgccgctgagtggtgtggaagagaagatgttcagcctgcttaagcgtgcaaaggtgcagcttttcaagatcgaccaacagcagcagcagaaagtggcagcctcgatgccattatctcccgggggccagatggaagaagttgcgggcgctgtgaagcagatctccgatagggggcctgtacggtcggaagacgagtcagttgaggctaaaagggagaggccatcgggcccagagtctccagtccaagggcctcggattaaacacgtctgtcgccacgccgctgtggccctagggcaggcacgcgctatggtccctgaagatgttccgcgattatcagccctcccgctccgcgaccgacaggatctggctaccgaagatactagtagcgccagcgagacagagtcagtgcctagcaggtcgaggcgtgggaaggtcgaagctgctggacccggcggggagtcagaacccaccggatcgggagggactctagcccatactcctcgcagatcactcccttcccaccatggcaagaaaatgcggatggcccggtgcggacactgccggggttgcctgagagtccaggattgtggcagctgcgtgaattgcctggacaaacccaagtttggaggccccaacacaaaaaaacagtgttgcgtttatcggaaatgtgacaagattgaggcccgcaaaatggaacgtttggccaagaagggccggacgattgtcaagactctgttgccatgggactcggatgagtcacctgaagccagtcccggcccccctggcccaaggcgaggtgcgggagccggcggcccaagagaagaagtggtggcgcatcctggaccagaagaacaagattccctactccagaggaaatctgcaaggcgctgtgttaaacagcgtccctcatacgacattttcgaggattccgatgatagtgagccgggcgggcccccagctcccagaaggaggacacctagagaaaatgagctgccactgccagagccagaagagcagagtcgtccgaggaaacccaccctccagcctgtcctgcagctgaaggccagaaggcggctggataaggatgccctggccccaggcccattcgcaagtttcccaaacggctggacggggaaacaaaagtcccctgacggagtgcatagggttcgcgtcgactttaaggaagactgcgacttggagaacgtgtggctcatgggtggattgtcggtactcaccagcgtcccaggcgggcctcctatggtgtgcctgctgtgtgcctcgaaaggacttcatgagctggtgttctgccaggtatgttgcgacccttttcatcctttctgtctagaggaggccgaaaggcctctcccccaacatcatgacacgtggtgttgccggagatgtaagttttgtcacgtctgcggacgaaaagggcggggatctaagcatctactggagtgtgaacgatgcaggcatgcataccatcccgcgtgcctcggcccatcctaccccaccagggctacaagaaagaggcgccattggatctgctccgcatgtgttcgctgtaaaagctgcggggcaactcctggaaagaactgggacgtggaatggagcggcgactacagcctctgccctcggtgtactcagctctacgagaagggaaactattgtcctatctgcaccaggtgttacgaggacaacgattacgaatcaaaaatgatgcagtgtgctcagtgcgatcactgggtgcacgctaagtgcgaggggctctccgacgaggactatgagatcctctctggtctccctgattccgtgttgtatacctgtgggccttgtgctggcgcggcccaacccaggtggcgggaggctctgagcggagctctgcagggcgggttaagacaggtcctccagggcctccttagttctaaagtcgtgggacccttgcttctgtgcacacagtgtgggccagacggaaaacagctgcaccctggaccatgtggactgcaggcggtttcccagcgattcgaggacggccattataagagtgttcactcttttatggaagatatggtcgggatactgatgaggcacagtgaggagggtgaaactcccgatcggagagcagggggccagatgaaagggctgctgttgaagctccttgagagcgcatttggttggttcgacgcgcacgatcccaaatactggcggagatctacgcggctgccaaacggcgtactgccgaatgccgtgctgcctccttctctggaccatgtgtatgcccaatggcggcaacaagaaccggagacccctgaatccggccagcccccaggggacccctccgctgcctttcaggggaaagatcccgctgcgttttcgcacctcgaagatccgagacagtgtgctctgtgcctgaaatatggcgatgccgactcaaaagaagccggccgcctgctgtacattggacagaatgaatggacacacgtgaactgtgctatttggtcagccgaagtttttgaggaaaacgacggctctctcaaaaatgttcacgctgctgtcgctcgtgggcggcaaatgcgttgtgaactgtgccttaagcctggggccacagtcggatgctgtctctctagctgcctgtcaaacttccattttatgtgtgcccgagcttcctattgtattttccaggacgataagaaggtgttttgccagaaacatactgatctgctggacgggaaagaaatcgtcaatccagatgggttcgatgttctgcgaagggtgtacgtggacttcgaagggattaacttcaaaagaaagtttctaacaggactggagcccgacgctattaatgtgctgatcggatccatcaggattgactccctgggtacactctctgacctgagcgattgcgagggccgcctgtttcccattgggtatcagtgctcccgcctttattggagcacagtagacgcgcggcgccggtgctggtaccgttgtcgcattctggagtaccgaccatgggggccaagggaagagcccgcccaccttgaggccgctgaggaaaaccaaacaatcgtccactcccccgcgcccagcagtgagccccccgggggtgaggatcccccactggacacagacgtgttggtgccaggagcccccgagagacacagtcctattcagaatctcgacccaccccttcggccagactccggatcggctcctccgcccgccccccgctctttttctggagctcgcattaaggtgcccaattactctccctcccggcggccccttggcggggtgagcttcggacccctgccaagtcctggaagcccttcttctctcacccatcacattcccactgtgggcgatccggatttcccggctccaccacggagatcacggcggccaagtcccctggctcccagacccccaccatctcgctgggcctcacccccacttaaaacatcacctcaactgagagtaccaccaccgacaagtgtggtcacggcgctgacaccgacctctggcgagctggcacctcctggacctgctccttctcccccgcctccggaagacctcgggccagactttgaggacatggaggttgtaagtggactttctgcagccgacctggactttgctgcctcgttgctaggcacagaaccctttcaggaagaaattgtcgccgcaggggctatgggatccagtcatggcggccctggtgattctagcgaagaggagtccagtccaacgtcacgttacattcactttccggtgaccgtcgtgtcagcccctggattggcgccaagtgcaacaccaggcgctccacgaattgagcaattggacggtgtcgatgacggtacggattccgaggcagaggcggttcagcaaccacggggccaaggcacacccccatctggccctggagttgttcgggcgggagtcctaggcgcggctggggatagagcccggcccccagaagatctgccaagtgagattgtagacttcgtgctcaagaatctgggaggccctggcgacggaggggctggccctagagaggagagtctcccccccgctccaccccttgccaatggtagccagccaagccagggactaaccgccagccccgccgatcctacgcggacattcgcttggttacccggggcccctggtgtcagggtgttgagtctgggacccgcacccgaaccccccaagcctgctacttccaaaattatcctcgttaataaactgggccaggtttttgtgaagatggccggagaaggcgagcctgtgcctcctccggtgaagcaacccccactcccacctacaattagcccaacagcccccacttcttggactctgcctccaggacctctgttgggagttctgcccgtcgtaggcgtagtaaggccggctcccccaccacctcccccccctctgactttggtactgagcagcggcccagccagtccccccagacaggccattagggtaaagagagtgtccaccttttccggccggtcgcctcccgcccctccaccttataaggcccctaggctggacgaggacggagaagcttccgaggacacaccccaggtgcctggcctgggttccggaggctttagcagagtacgcatgaaaaccccgacggtgaggggcgttcttgatctggatagacccggcgagcccgccggtgaggaatcaccgggccccctgcaggagagatcacccctcctgcctctccctgaagacggacctcctcaggttcccgacggcccccctgatctgctcctcgagtcacagtggcatcattattctggggaagcatctagttcggaggaggagcctccaagccccgacgacaaagagaatcaggcaccaaaaagaaccggaccccacctgagattcgaaatcagctctgaagatgggttctccgtggaggcagagtcactagagggcgcctggcgtactctgattgagaaggtccaggaagcccgtgggcatgctcgactgagacacctaagctttagcggcatgtcaggggcccggttactggggatacatcacgatgctgtgatttttctggccgaacagcttcccggggctcagcgatgtcagcactataagtttcgatatcaccagcagggagaggggcaggaggagccaccgctgaacccccacggggcagcaagagcagaggtgtatcttagaaaatgcaccttcgacatgttcaactttctggctagccagcaccgcgtgcttcctgaaggtgcaacgtgtgatgaagaagaagatgaggtgcagctgcgctccacccggcgggctacaagcttagagctacccatggctatgcgcttccggcatctgaaaaaaactagcaaagaagctgtgggtgtctatagaagcgcaattcacgggaggggactgttctgcaagcgcaacatagacgcgggagagatggtgattgaatatagcggcatcgtgattcgatcagtactgacagacaaaagagagaagttctatgatggtaaggggattggctgttacatgttccggatggatgatttcgacgtggtcgacgcgacgatgcacggtaacgctgctcggttcatcaatcatagctgcgagccaaactgttttagcagagtcattcatgtcgagggccaaaaacacatagttatttttgcgctgaggcgcattctgaggggcgaggaactaacatatgattataagttcccaattgaggacgcgagcaataagctgccctgtaactgcggggccaagagatgtcggcgattcctgaactag

SEQ ID NO: 110929 - DNA, 2115 bp, synthetic construct
  misc_feature 1..2115: note = Description of Artificial Sequence: Synthetic coding sequence
  source 1..2115: mol_type = other DNA
atggtgcccgatacagcttgcgttctgctgttgactctggccgcgctcggagcgtctggccagggccagagccctctgggatctgaccttggacctcaaatgttgcgagagctgcaggaaactaatgcagctctgcaggacgtgcgcgaactcttgaggcagcaggttagagaaattactttcctgaagaacaccgttatggaatgcgatgcttgtggtatgcagcagtcagtccgaaccggtctgccgagtgtccgcccgctcttgcactgtgcccccggcttttgctttccaggggtggcatgtattcagaccgagagcggcgccaggtgtggaccctgtccggcaggattcactggcaacggatctcactgcactgatgtaaacgagtgcgaaacagggcagcataactgcgtgcccaattcagtgtgtatcaacacgcggggatccttccagtgcgggccctgccagccaggctttgtcggggaccaggcctcgggttgccagcgacgcgcacaacgattctgcccagacggtagcccatctgaatgtcatgagcacgccgattgtgtgctggagagggatgggagtaggagctgtgtctgcgccgttggctgggctggcaatggcatcctttgtggtagggacacggatctcgatggtttccctgacgaaaaacttaggtgcccagagcgccagtgtcggaaagataattgcgtgacagttccgaactccggacaggaggatgtagatcgggatggtattggcgatgcttgcgaccccgatgcggacggtgacggggtgccaaatgaaaaagataattgcccgcttgtcagaaacccggaccaaagaaatactgatgaggataaatggggtgatgcttgcgataattgcaggtcgcagaagaatgacgaccaaaaagatacagatcaagacgggcggggcgacgcttgcgacgacgatatagatggtgatcgtatccgcaaccaggcagataattgcccaagggtgccaaactctgatcagaaagactccgacggggatgggatcggggatgcctgcgataactgtcctcagaagtctaaccctgaccaggctgacgtggaccacgatttcgtcggtgatgcctgcgacagcgatcaggatcaggatggtgacggacaccaagattcacgggataattgccctacggtacccaattcggctcaagaggattccgaccacgacggtcagggtgacgcatgtgacgacgacgacgataacgatggcgtgcctgacagcagggataattgccggttggtgcccaacccgggtcaggaggacgcggaccgcgacggagtcggggatgtttgccaggacgactttgacgctgacaaggtcgtggacaagatcgacgtttgtccggaaaacgcagaggtgacactcaccgattttagagcatttcaaacagtggttctcgaccctgaaggtgatgctcagatcgatcctaattgggttgttttaaaccagggccgggaaatagtgcagactatgaatagtgatcctggcctggccgtaggctatactgcattcaacggcgttgattttgaagggacgtttcacgtgaacaccgtgaccgacgacgactatgctggtttcatttttggctatcaggatagctcgagtttctatgtagttatgtggaagcagatggagcagacgtactggcaggccaacccatttagagccgtcgccgaacctggtatacaactgaaagctgtaaagtcgtcaaccggccctggagaacagttgagaaatgctctgtggcatacaggagacacagaatcacaggtccggctgctctggaaggatccacggaacgtcggctggaaggacaagaagtcctacagatggttcttgcagcatcgcccccaagtcggctatatacgtgtgagattctacgaggggcctgaattagtcgccgatagtaacgtcgtcctcgacaccactatgcgtgggggccggctcggtgtgttttgtttctcacaggagaacatcatttgggccaatctgaggtaccgctgcaacgacactatcccagaggactacgaaacccatcagttacgtcaggcatag

SEQ ID NO: 110930 - DNA, 2235 bp, synthetic construct
  misc_feature 1..2235: note = Description of Artificial Sequence: Synthetic coding sequence
  source 1..2235: mol_type = other DNA
atggtcccagatacggcatgcgtcctgctccttaccttagccgcactgggagcttcgggccaagggcagtctcctctcggatccgacctggggcctcagatgcttagagagctccaggagacgaacgcagcgctgcaagatgtcagggagctgctgaggcagcaagttcgcgagataaccttcttaaaaaacacggtgatggagtgcgacgcctgtgggatgcagcagtcagtaagaaccggcctaccaagtgtgcggcctctgctccactgcgcacccggattctgtttccccggtccctgtcccgccggattcactgggaatggctcacattgcaccgacgtcaatgagtgtaatgcccacccttgcttcccacgagttcggtgcataaacacctctcccgggttccgctgtgaagcctgccctcccggctattccggccccacccaccagggagtgggactcgcctttgctaaggccaacaagcaggtatgtaccgatataaatgagtgtgaaacaggacaacataactgcgtcccgaatagtgtgtgtatcaacactcggggaagcttccagtgtggaccatgccagccagggttcgtcggagatcaggcctcggggtgtcagaggcgtgcccagaggttctgccctgatgggagtccctcggagtgtcatgaacacgcagactgcgtcctcgagagagatgggtcaaggtcttgtgtctgtgccgtaggctgggctgggaatggtattctctgtgggagggacaccgatctcgatggtttccctgacgagaaacttaggtgcccagaacggcaatgtagaaaggataactgtgtaactgtgcccaattccgggcaggaggacgttgatagagacggtatcggggacgcctgtgatcctgatgctgacggggacggggttccgaacgagaaagacaactgcccgcttgtgcgaaacccggaccaacggaatactgacgaggacaagtggggggacgcctgcgacaactgtagaagtcagaagaatgatgatcagaaggatactgaccaggacggcaggggtgacgcctgcgacgatgacatcgacggggacaggatccggaaccaggccgacaactgtcctagggttccgaatagcgaccagaaggactctgatggggacggtattggcgatgcatgcgacaactgtccacaaaaatccaaccctgaccaggccgacgttgatcacgattttgtgggtgacgcatgtgactctgatcaagaccaggacggggacggccaccaggactcccgggataactgtccaaccgtcccaaactctgcccaagaagattcagaccacgatgggcagggagacgcgtgcgacgatgacgatgacaacgacggtgtacctgacagcagggataactgcagattggtccctaacccggggcaagaggatgcggatcgcgacggcgtgggcgatgtgtgccaggacgattttgatgccgataaggtggttgacaaaattgatgtgtgtcccgagaatgccgaagttactctcaccgactttagggcgttccagacagtggtgctggatcctgagggggacgcccagattgacccaaactgggtcgttctgaatcagggaagggaaattgtccaaacaatgaactctgatccgggcttagctgtgggttacacagcctttaacggcgtggacttcgaggggactttccacgtgaatacagtgacggatgatgactacgccgggttcatattcgggtaccaggattcaagcagcttctacgtcgttatgtggaaacagatggagcagacttattggcaggcaaacccctttcgagctgtggccgagcccggcatacagttgaaggctgttaagtcctctaccggtccaggtgaacagctgcgtaatgccctgtggcacactggagatacagagtctcaggtcaggcttctgtggaaagatccaaggaacgtcggttggaaggacaagaaaagctacaggtggttccttcagcatcgcccacaggtaggttacattcgagttaggttctatgagggacccgagttggtcgcggattctaacgtcgtactggatacaacgatgcgcgggggacgtctcggggtgttttgcttctcccaagaaaacatcatctgggccaatctgaggtatcgttgcaacgataccattcctgaggactacgaaacccaccagcttcgccaggcatag

SEQ ID NO: 110931 - DNA, 2394 bp, synthetic construct
  misc_feature 1..2394: note = Description of Artificial Sequence: Synthetic coding sequence
  source 1..2394: mol_type = other DNA
atggcagcgctggcctataacctgggaaagcgggaaattaatcactacttttccgtaagaagcgccaaggtgcttgcactggtggccgtgcttcttctcgcagcctgccacttggcaagccgccggtatcgcggaaatgatagttgcgaatacttgctgagctccggaaggttcctcggagaaaaggtctggcaaccgcactcctgcatgatgcacaaatacaagatctccgaagccaaaaactgtctcgtggataagcacattgcgttcattggtgattcacgaattaggcagctcttttacagtttcgtgaagatcatcaaccctcagttcaaagaggagggaaataagcacgaaaacattcccttcgaagataaaacagcatccgtaaaagttgattttctgtggcatccagaggtgaacggatccatgaaacaatgcatcaaggtctggaccgaggacagcattgccaaaccacacgtcattgtggcgggagccgcaacgtggtccatcaagattcacaacggttctagcgaggcactgtctcagtacaagatgaacatcacgagcattgccccactccttgagaaactggctaaaaccagcgacgtatactgggttctgcaggatccagtatacgaagatctcttaagtgagaaccgaaagatgattaccaacgagaagatcgacgcgtataatgaggccgctgtctcgattctgaacagctccacccggaatagcaaatccaatgttaaaatgttttcagtgagcaaactgatcgcccaggaaacaatcatggagagtttggacggtctgcacttacccgaaagcagccgggagactacagcaatgatcctaatgaatgtatattgcaataagatcctgaaaccggtcgatgggtcatgttgccagccgcgaccgcccgtgaccctcattcagaaattggctgcttgtttcttcacactaagcattataggatatcttatcttctacataatccatcgcaacgctcataggaagaataaaccatgcactgacctggagtcaggtgaagaaaaaaaaaatatcattaatacccccgtgagctccctggaaatcctgttgcagtcattctgtaagctgggacttatcatggcctacttctatatgtgcgatcgcgccaacctcttcatgaaagagaataagttttatacacattcttctttcttcatccccataatttacattttagtgctgggcgtgttctacaatgaaaacaccaaggaaactaaagtcctcaaccgtgaacagactgatgaatggaagggctggatgcaattggtcatcctgatctaccatatcagcggggcttcaaccttcctgcctgtgtatatgcacattcgcgttctggttgcagcatacctatttcagacaggctatggacatttcagctatttttggatcaaaggcgactttggaatatacagggtgtgccaggtattgttcaggctcaattttttggtcgtggttctgtgcatcgtgatggacagaccataccagttttattatttcgtgcctcttgtaaccgtctggttcatggtgatctacgtaaccctagctctgtggccacaaattatccagaaaaaagcgaacggcaactgtttctggcacttcggattgttactaaagttaggcttccttctgctgtttatctgttttctggcctactctcaaggtgcatttgaaaagatcttctccctttggcctttatctaaatgtttcgagctgaaagggaacgtgtacgaatggtggtttagatggagactagatcgttatgtggtgttccacgggatgctgtttgctttcatttatctagcactgcagaaacggcaaatcctgtcggaggggaagggggaacctctgttctctaacaaaatctccaatttcttgctttttattagcgtagtcagctttcttacgtactcaatttgggcttcatcttgcaagaataaggctgaatgcaatgaactgcacccgagcgtgagcgtggtccaaattctggcttttatcctgatcaggaacatccccggctatgcccgctcagtgtattcctcattctttgcttggttcgggaagattagcctagagctgtttatttgccagtaccacatttggctagctgccgacaccagagggatattagtgcttatcccaggtaacccgatgttaaatatcatcgtcagcactttcatcttcgtctgtgtggcgcacgagatcagtcaaataacaaatgacctagcgcaaataatcatcccaaaggataacagttccctgctgaaacgtttagcttgtatcgccgcatttttttgtgggctgctcatactttctagcatacaggacaaatccaagcactag

SEQ ID NO: 110932 - DNA, 2721 bp, synthetic construct
  misc_feature 1..2721: note = Description of Artificial Sequence: Synthetic coding sequence
  source 1..2721: mol_type = other DNA
atggccgggaacgtgaagaaaagcagtggagctggcgggggatcgggctctggggggtccggaagtggcggcctcattggattaatgaaggatgcattccagccacaccaccatcaccaccatcatctgtcgccccatccccccgggactgtggacaaaaagatggtggagaagtgctggaagctgatggataaagtggtgcgcctttgtcagaaccccaagctggccctaaaaaattctccaccttatatactggacctgctgccagatacctaccaacacctgcgcacaattctttctcgatatgagggtaagatggagactctgggtgaaaatgagtactttcgagtctttatggaaaacctgatgaagaagactaaacagacaatttctctattcaaggaaggcaaggaacgcatgtacgaagagaactctcagccgcgaagaaacttgactaaactcagcctgatcttcagccacatgcttgctgagctgaagggaattttcccatcagggctgttccagggcgacacctttagaatcacaaaggcagacgcagccgaattttggcggaaagcattcggggaaaagactatagtaccttggaaatcatttcgtcaagcattgcatgaggtccatcccatttcctccggactagaggcgatggcccttaaatcaactatcgatctgacatgtaatgactacattagtgtttttgagttcgacatatttacaagactgtttcagccatggagtagtcttctccggaactggaatagcttagcagtgacacaccccggatacatggcttttttgacctatgatgaagttaaggcaagacttcaaaaattcatacacaaaccggggtcttacattttccgattatcctgcaccagactcgggcagtgggccatcggctatgtcacagccgacggaaatatccttcaaactatcccccataacaagccgttgtttcaggccctgatcgacggattcagagaaggattttatctgtttcccgacggcaggaaccagaatcccgacttaactgggctctgcgagcctacaccacaggatcacatcaaagtgacgcaggaacagtacgagctgtactgtgaaatggggtcaaccttccagttgtgtaagatatgcgctgagaacgacaaggacgtcaaaattgagccatgcgggcacttaatgtgtacatcatgccttacaagttggcaggaatctgagggtcagggctgccccttttgcagatgcgaaattaaagggaccgagcctattgtggtcgacccctttgatcccagaggctctggtagcttgctacgacaaggggcagagggggctccttcaccaaactacgatgatgatgacgatgaacgggccgacgacactctttttatgatgaaagagctcgccggagcgaaagtcgagcgtccaccgtcgccttttagcatggcgccacaggcctccctgcctccagtcccccctaggctggacctgctgccacagcgcgtgtgcgtaccatccagtgcatccgccctcggaaccgccagcaaagctgctagtggcagcctgcacaaggacaaaccactgcctgtcccacccacactgcgcgatctgcctcccccaccaccccctgaccgcccctactctgtgggagccgagagtcgaccacagcgacggccattgccctgcactccaggggattgccctagccgagacaaactgcctcccgtgccaagcagccggctcggagactcttggctcccccggccaattccaaaggtgcccgtgagcgcaccttcctctagcgacccctggactgggcgtgaactgaccaaccgacactccctgcctttcagcttgcccagtcagatggagcctcggccagatgtgcctaggctgggttcaacctttagcctagatacttccatgagtatgaactcttcaccactcgtggggccagaatgcgatcacccgaaaataaaacctagtagttctgccaatgcaatctactctctggccgctagacctctgccggtccccaaactgcctcccggagaacagtgtgagggcgaagaggacactgagtacatgaccccttcaagccgaccgcttaggcccctggacacatctcagtcctcccgggcctgcgattgtgaccagcaaattgacagctgcacctacgaggcaatgtacaacatccagagtcaagccccaagcatcaccgaaagcagtacctttggagagggtaaccttgctgcagctcatgcaaatactggacccgaagagagcgagaacgaagacgatggctatgatgtgcctaaaccccccgttcccgcggtcttggccagaagaaccctcagcgatattagcaatgcttccagctcctttggctggctctccctggacggtgaccccaccaccaatgtcaccgaagggtcccaggttcccgagaggccgcctaagccgttcccccgccgaataaatagtgagagaaaagcggggagctgtcagcagggatccggacccgccgcaagtgcagctacggcttctcctcaactgtctagcgagattgagaatctgatgagtcagggttatagctatcaggatattcagaaggcccttgtgattgcccagaacaacatcgaaatggctaagaatatccttcgggagtttgtctccatttcttcccctgcacatgtggccacttag

SEQ ID NO: 110933 - DNA, 2949 bp, synthetic construct
  misc_feature 1..2949: note = Description of Artificial Sequence: Synthetic coding sequence
  source 1..2949: mol_type = other DNA
atggcgaattccatgaacggcaggaaccccggcgggcgcggagggaatcccaggaagggccgcatcctcggcattattgatgcaatccaagatgcagtgggaccgcccaagcaggctgctgccgaccgacgaaccgtggaaaagacatggaaactgatggataaagttgtacgcctttgccagaatccaaagctccagctgaagaacagtccgccatacatcttagatatcctgccggatacataccaacacctgcgcctaatcttgtccaaatacgatgacaaccagaagctggctcagctttctgaaaacgagtactttaaaatatatattgactctctgatgaaaaagtctaagcgcgcaattaggctgttcaaggaaggtaaagaacgcatgtacgaggaacaaagtcaggaccggaggaacctcaccaagctgtcgctgattttctcccacatgcttgcggaaataaaggcgatttttccaaatggacaattccagggtgacaactttcggattactaaggctgacgccgcagagttttggcgcaaattttttggagataaaacaatcgtaccctggaaagtgttcaggcaatgcctccatgaggtccaccagatcagctccggcctggaggccatggcgctaaaaagtactattgacctcacctgtaatgattatatctcagtttttgagttcgatatttttacaaggctgttccagccctggggctcaattctgcgtaattggaactttcttgccgtcacccaccccggctatatggctttcctgacgtacgacgaggtgaaagctcgcctccagaaatactctaccaaacccgggtcttacattttccggctgtcctgtactagactggggcagtgggctatcggttatgtcacaggtgacggcaatatcctccagaccatcccccacaacaagcctttatttcaagctctcatcgacggctcccgcgaggggttctacttataccccgatgggcgctcatataatcccgacctcactgggttgtgtgaaccgacaccccatgaccacatcaaggtgacccaagagcagtatgagctgtattgcgaaatggggagtaccttccagctgtgcaaaatctgcgcagaaaacgacaaggatgttaagatcgagccttgcggtcatctaatgtgtacttcctgcctgacagcatggcaagagagcgacggccagggctgccccttctgtaggtgcgagatcaagggcaccgagcctatcatcgtagacccttttgatcctcgggacgagggctctagatgctgctccatcatcgatccatttgggatgcccatgctggacctcgatgacgatgatgatcgagaggaatcgcttatgatgaatagattagccaatgtccgaaaatgcaccgatagacagaatagccctgtgaccagcccaggctcttcgcctttggcccaacgtcggaagccccagcccgatcctctgcagatccctcacctcagtttacctcctgtacccccaagactggacttgattcagaaaggcatagttcgaagtccttgtggctctcctaccgggtcaccgaagtcctccccctgcatggtcaggaagcaagacaaaccactcccagccccacccccccccctccgcgacccaccccccccccccccggaacgccctccgccgatccctcccgacaatcggctctcccggcatattcatcacgtcgagtccgtcccgtcacgtgacccaccaatgccgttagaggcctggtgcccccgcgacgtcttcggcacgaaccagcttgtgggatgtcggctcctaggagagggtagtccgaagcccggaatcacagccagcagcaatgtgaatgggcgccactcacgggtaggctccgatcctgtattgatgaggaagcacagaagacacgacctaccactggagggggcgaaagtctttagcaacggccatctggggtctgaggaatacgatgtgccgccgcgtctgtcgcccccacctccagtaacaaccctgctgccaagtatcaagtgtactggaccgctcgcaaactcactgtcagagaagactcgtgacccggttgaggaggacgacgacgagtacaagatcccttcatcacaccccgtttcgctcaacagtcagccgagtcactgccataatgtgaagcctccggtacgttcctgtgacaacggacactgcatgctcaacgggacccatggaccaagcagcgagaaaaagtcaaatatccccgacctaagcatttaccttaagggcgacgtgtttgactctgccagcgaccccgtgccgcttccacccgctagacccccaactcgtgacaacccgaagcatggctccagcctgaaccgaaccccatcagattatgatcttctgattccacccctgggcgaggatgccttcgacgccctgccgccctctctgcccccgcccccgcctccagctcggcactccttgatcgagcactctaagcccccaggatcatcttccaggcctagtagtggtcaagacttattcctgctgccaagcgaccctttcgtggatcttgcttccggtcaagtgcctctgcctccagcacggagactgcctggggagaacgttaagaccaacaggacttcacaggactatgatcagcttcctagttgctctgacggttcacaggcaccagctaggcccccgaagcctaggccaaggagaacggctcccgaaatacatcaccgcaaaccccatgggcctgaagcagccttagagaatgtggatgccaagattgccaaactcatgggggagggctatgcattcgaagaggtgaaaagagcccttgagatagcccagaacaacgtagaggtggcaagaagcatcctgagagaattcgcttttccccctcctgtgtcaccccggctgaatctgtag

SEQ ID NO: 110934 - DNA, 2883 bp, synthetic construct
  misc_feature 1..2883: note = Description of Artificial Sequence: Synthetic coding sequence
  source 1..2883: mol_type = other DNA
atggctctcgcccctggccccgatgctcacgcgcatttgccgcctttaattgagttgaaattccagatggcaaatagcatgaatggcagaaacccaggcggcaggggtgggaaccctcgcaagggaaggattcttggcataatcgatgccatccaggacgcagtgggtccacccaagcaggccgcagccgatcggcggacagtagaaaagacttggaagttaatggacaaagtggtgcgcctgtgccaaaatccaaaactgcagttaaagaattctcccccatacatcctggacattctccctgacacgtaccagcatttgagactgattttatctaaatacgacgacaatcagaaactcgcccaacttagcgagaatgagtactttaaaatttatattgatagcttgatgaaaaagagcaagagggccattcgtttgttcaaggagggaaaagaaagaatgtacgaagagcagagccaggatcgaagaaatctgaccaagctcagcctgattttctcacacatgttggctgagatcaaggccatttttccaaatggccaattccagggcgacaattttcggatcacaaaagctgacgctgccgagttttggaggaaattctttggcgacaagaccattgtgccatggaaggtcttcaggcagtgccttcatgaagtccaccagatctcctccggtctcgaggcaatggccttaaagtcgaccatcgaccttacctgcaacgactacataagcgtattcgaattcgacatctttacgcgcctctttcaaccgtggggatctatcctacgtaactggaacttcttagccgtcacgcatcctggttacatggccttcctaacatacgatgaagtgaaagcacgactgcagaagtactccacgaagccaggttcctacatcttcagattaagctgcacaaggctggggcagtgggccatcggctacgtgacgggcgatggcaacatcttgcaaaccattcctcataataagcctttgttccaagctctgattgacgggtcaagggagggcttttacctttatcccgatggccgctcgtataatcccgatctcacaggtctctgtgaaccaacacctcacgaccacatcaaagttacccaggagcagtacgaactctattgtgagatgggaagcaccttccaactgtgtaagatatgtgccgaaaatgataaggacgtgaaaattgaaccttgtggccaccttatgtgtacctcttgtttaactgcctggcaggaaagtgacggacagggatgcccgttttgtcgctgtgagattaagggcactgaacccatcattgtggaccctttcgacccacgcgacgaagggagtcggtgttgcagtataatcgaccctttcgggatgcccatgctagatcttgatgacgacgacgatcgtgaggaatcccttatgatgaatcgcttagctaacgtgcgcaaatgcacagacagacaaaactcgcctgtcacttcacccggttccagtcctctagcccagcggcggaaacctcagcctgaccccctgcagattccccacctgtcgttaccgcctgtaccacctcggttggatctgatccaaaaagggattgtgcgatcaccgtgtggatctcctaccggctctccgaaatcaagcccatgcatggttcgaaaacaggataagccgcttccggctcccccaccccccttgagggaccctccacccccccccccagagcggccaccccctattccccccgacaatcgcttgagtcgacacatccatcatgtcgaaagcgttccatccagggaccctcctatgcctctggaggcttggtgtcctcgtgacgtgttcgggaccaaccagcttgtcggttgtcgcctcctcggcgaagggtcccctaaacctggaatcaccgcctcaagcaatgtgaacggcaggcattctagagtaggctcagacccggtgctcatgaggaaacatcgtcggcacgacttgccgctggaaggggctaaagtcttctccaatgggcatctcgggtctgaagagtatgacgtgcctccacggttgtcacctccaccgcctgtgactacgctgttgccaagtattaaatgcactggacccttggcaaattcactgtccgaaaagacaagagatcccgttgaggaagacgacgacgaatacaagatccctagcagtcacccagtatccctgaattcacagccaagtcattgccacaacgtgaagccccccgttagatcttgtgacaatggccactgcatgttgaacggaactcacgggccaagtagtgaaaagaaatctaatatacccgatctttctatttacctgaaaggggaggatgccttcgacgccctgcctccttcacttcctcctccccctcctcccgcaaggcacagcctgattgaacacagcaagcctcctggatcatcatccaggccctccagcggacaagatttatttcttctaccaagcgatccctttgtagacttggccagcggacaagtacccctgccaccagctcgaagactccccggggaaaacgtcaagacgaatagaacaagtcaggactacgatcagctgcccagctgttccgacgggtctcaggcgcccgctcggccacctaagccacgtcctagaagaaccgctcccgaaatccaccaccgaaagcctcatggcccagaggctgcactcgaaaacgtggatgctaagatcgccaaactcatgggtgagggatatgcttttgaagaggtgaaaagggctttggagatcgctcagaataacgtagaagtagcccggtctatcctccgagagttcgcttttccccctcccgtctctccccggctgaacttatag

SEQ ID NO: 110935 - DNA, 2313 bp, synthetic construct
  misc_feature 1..2313: note = Description of Artificial Sequence: Synthetic coding sequence
  source 1..2313: mol_type = other DNA
atggccaattcaatgaatggcaggaacccaggaggtcgcggcgggaaccccaggaaaggcagaattctggggataatcgacgcgatccaggacgctgtcggacctcctaagcaggctgccgccgaccggcgaaccgtcgaaaagacctggaagcttatggacaaagtcgtgaggttgtgtcaaaatcccaaactacaactgaagaactcaccgccatacattctcgatattttgcccgatacatatcagcatctgcggcttatcttgtctaagtacgacgataaccagaaactggcacaactttccgaaaatgaatattttaaaatttacattgattctctcatgaaaaaaagtaaaagagcaatcagacttttcaaagaggggaaggaaaggatgtatgaagagcagtctcaggaccgcaggaacttgaccaagctgtccttgatctttagtcatatgctggccgaaattaaagcaatttttcctaacggacaattccagggggataactttcgaatcaccaaggccgatgccgcggagttctggcgtaagttcttcggggataaaactatcgtgccatggaaggtgtttcgccagtgcttgcatgaggtgcaccagatttcctcagggcttgaggccatggctctcaaaagcactatagatctgacgtgtaacgactacattagcgtatttgagttcgatatctttacgaggctgttccagccatggggaagcattctccgaaactggaacttcctggccgtgacgcacccagggtatatggcctttctcacatacgacgaagtgaaagcccgattgcagaagtactcaaccaaacccggcagttacattttcagactgtcctgtactcggctcggacaatgggctatagggtacgtgactggggatgggaatatcctccagaccattccccacaataagcccctgtttcaagcactgatcgacggcagtcgggagggcttctatctgtaccccgacggacgctcttacaacccagatctgacggggctgtgtgaaccaacaccccacgaccacataaaagttactcaggagcagtacgaactctactgtgagatgggctcaacttttcagttgtgcaaaatatgtgctgagaatgacaaggatgttaagatagaaccctgcggccatcttatgtgcacctcctgcttaactgcgtggcaggagagtgatggacaggggtgccccttctgtagatgtgagattaaggggaccgaaccgattatcgtagacccttttgaccctcgtgatgaagggagtaggtgctgctcgataatcgatccctttggtatgcccatgctagacctagatgatgatgacgaccgggaggagtccctaatgatgaacagattagcgaacgtgagaaagtgtaccgaccggcagaatagcccagtcacctccccagggtcgtctccactggcgcaacgcagaaaacctcagcctgacccactgcaaatcccacacctgtcactgcctcccgtgcccccacgactggacctgatacagaagggcattgtgcggagtccatgcggctcacccacgggcagccctaagagttcaccatgcatggtgaggaagcaggacaaacccttgcctgcccccccaccccctctgcgtgacccaccccctcccccacccgaacggccccctcccatccctcctgataaccgtctaagccggcatattcatcatgtcgagagcgtgccaagtagagatccccctatgcccctggaggcttggtgccccagagatgtatttggaacaaatcagctggtggggtgcagactactcggggaagggtcaccaaagcctgggatcaccgcctccagcaatgtcaacggcagacactcaagggtcggttcagaccccgttctaatgcgcaaacaccggcgccatgacctgcccctggagggtgctaaagtgttttccaatggccatttgggatccgaggaatatgatgtgcctccccgtttaagccctcctcccccggtgaccaccttgttgccatctatcaagtgtaccggcccactggcaaatagcctgtcggaaaagacccgagatcccgtcgaggaggacgacgatgaatacaaaattccttctagccacccagtcagcttgaactcccagcccagccactgtcataatgtgaaaccgccagtcagatcatgcgacaacggtcactgtatgctcaatggaacacatgggccaagttctgaaaaaaaaagcaacattcccgatctgtccatttacctaaagggcacctaccgaatctag

SEQ ID NO: 110936 - DNA, 2433 bp, synthetic construct
  misc_feature 1..2433: note = Description of Artificial Sequence: Synthetic coding sequence
  source 1..2433: mol_type = other DNA
atggctaactccatgaacggtcggaatcctggcgggaggggaggcaatccgcgtaagggccggattctgggaattatcgacgccattcaagacgccgtggggcctcccaaacaggccgccgctgataggcgtacagtggaaaagacttggaaactgatggacaaggttgtgcgcttgtgccagaatcctaaacttcagctgaaaaattcaccaccatatattctggatatacttcccgacacatatcaacatctgaggctcatcctgtctaagtatgacgacaatcagaaattggcccagctgtccgagaacgagtactttaaaatctacatcgattcgctcatgaagaaaagcaaaagggccatacggctgttcaaggaaggaaaggaaaggatgtatgaggagcagagccaggataggcggaatctgacgaagctgtctctgattttctcacatatgctggctgagatcaaggcaatctttcccaatggtcagtttcagggcgacaacttccggattaccaaagcagacgctgccgaattttggagaaagttcttcggggacaagaccatagtgccttggaaggtgttcaggcagtgcctccatgaggtccatcaaattagttccgggctcgaggccatggctctgaaatcaactatcgatcttacctgcaacgattatatatcagtcttcgagtttgacatctttacacgcctatttcagccatggggctcaatcctaaggaattggaactttctggccgttactcacccagggtatatggctttcttgacctacgatgaagtgaaggcaagactacagaagtactctacaaaaccaggttcctatatctttcgcctgagttgtacccgcttaggacaatgggcaatcgggtatgtgaccggagacggcaatatactgcaaacgattcctcacaacaagccattgtttcaggccttgattgacggcagtagagaaggcttttatttgtaccccgacggacgctcctacaatcccgatctaaccggactatgcgagcctacaccgcatgatcacatcaaggtcacgcaagagcaatacgagctgtattgcgagatgggatccactttccagctgtgcaagatctgcgccgagaacgacaaggacgtcaaaattgagccctgcgggcacctgatgtgcacgtcctgcttgaccgcgtggcaggagagtgatggccagggatgccccttttgtaggtgtgaaattaagggcacggaacctattattgttgatcctttcgatcctagggatgaggggtctagatgttgctcaattattgatccttttggaatgccgatgctggacctggacgacgatgacgatagagaagaaagtcttatgatgaataggctcgctaacgttaggaagtgtaccgaccggcagaatagtccagtgacgagcccgggcagctcccccctggcccagaggagaaagccacaacccgacccgttgcagataccacacctttccctgccccctgtacccccaaggctagatctgatccagaagggcatagtgagatcaccatgcggcagtcctaccggaagcccaaagtcttccccgtgcatggtgaggaagcaggacaaacctctacccgctcctccaccgccccttcgcgaccctcctcctcctccacccgagcgcccaccgccaatcccccccgataatagactttctcggcacattcatcacgtagagtcagtgcccagccgcgacccaccaatgccattggaagcctggtgccctcgcgatgtgttcggaactaaccagctggtggggtgtcggctgctgggagagggttcgcctaagcccggaatcactgcttcttctaacgtgaatggcagacacagccgcgtgggctcagaccctgtactcatgagaaaacataggcggcacgacttacctctcgaaggagcaaaggtgttcagtaacggccacttaggaagcgaggaatacgacgtgccgcctcgcttatccccaccgccgcccgtgaccacccttttacccagcatcaaatgcacaggtccactggccaattcactgtctgagaagacccgggatcccgtggaggaggatgacgacgaatacaagattccaagcagccatccggtcagcttgaattcacagcccagtcattgccataatgtgaagcctcctgtgcgctcttgtgataacggtcattgtatgctaaacgggacccacggcccctcatccgaaaagaagagcaacatacccgatctcagcatctatcttaaaggcgacgtgttcgactcagcctcggatcccgttcctctgcctcccgcccggccaccaactagagacaatcccaagcatggaagttcactcaaccggaccccatctgattacgaccttctgatcccacctctgggctag

SEQ ID NO: 110937 - DNA, 420 bp, synthetic construct
  misc_feature 1..420: note = Description of Artificial Sequence: Synthetic coding sequence
  source 1..420: mol_type = other DNA
atggccaactcaatgaacgggagaaacccgggaggtcggggtggaaatccgagaaagggaagaatactcggcataatagacgcgatacaagacgctgtcgggccccccaaacaggccgctgctgatcgtcgtaccgtagaaaagacatggaaactcatggataaggtagttaggctctgccagaatccgaagttacagttaaagaattcaccaccatacattctggacatcctcccggacacttatcagcatctccggttgattcttagtaagtacgatgacaaccagaagctggcacagttaagcgagaacgaatactttaagatctatattgactctcttatgaaaaagtcaaagcgcgccatccgtttgttcaaggagggtaaggagaggatgtatgaggaacagtcccaggactag

SEQ ID NO: 110938 - DNA, 684 bp, synthetic construct
  misc_feature 1..684: note = Description of Artificial Sequence: Synthetic coding sequence
  source 1..684: mol_type = other DNA
atggcactcgcccccggacctgacgcccatgcacatttgccacccctgatcgaactaaagtttcagatggccaactcaatgaatggtcggaacccaggggggcgtggaggtaaccctcggaagggcagaatcctgggcattatcgatgccattcaggacgctgtcggccctccaaaacaggccgcagccgacagacgcaccgtggaaaaaacctggaagctaatggataaggtagttaggctctgtcagaaccctaaactgcaattaaaaaattctcccccctacattttggatatactgcccgatacgtatcagcacttgcgtctcatcctgtcaaaatatgatgataaccagaaactggcgcagctgagcgaaaacgagtactttaagatctacatcgactctctaatgaagaagtccaagcgcgccattcggcttttcaaggagggcaaggaaagaatgtacgaggaacagtcccaagacaggaccatcgtgccatggaaggtgttccggcaatgtctacatgaagtacaccagattagcagcggtttggaagccatggcacttaagtctaccatagacctgacttgtaacgattatatcagcgtgtttgaattcgatatcttcacacgcctctttcaggttagtgataacttcactgaatatctgatatatcttacctag

SEQ ID NO: 110939 - DNA, 1425 bp, synthetic construct
  misc_feature 1..1425: note = Description of Artificial Sequence: Synthetic coding sequence
  source 1..1425: mol_type = other DNA
atggccttggctgttgcaccatggggccgccagtgggaggaggcacgagccctgggtagggccgtcagaatgctacaaaggctggaggaacagtgcgtcgacccaaggctttcagtgtcaccacccagcttgcgggatctgctgccaaggacagcgcagctgctgcgggaggtagcccactcacgcagggctgcaggaggaggaggaccgggtggccctggtggctccggtgacttcctcctgatttatctggcaaacctggaggcaaagagcaggcaggtagccgctctgctgcctccccgcggaagacgtagcgcgaatgatgagctgtttcgcgccggctcaaggttgaggagacagcttgcaaagctggcaatcatcttctctcatatgcatgccgagctacatgcgctatttccgggcgggaaatactgcgggcatatgtatcagttgacaaaggcgcccgcccacactttctggcgggaatcatgcggagcaaggtgcgtgcttccatgggctgaattcgaatctctgcttgggacttgtcaccctgttgagcccggctgtacagccctggctctgcggaccaccatcgatctgacatgtagcggtcacgtgtcaatctttgaatttgacgtcttcactcggctctttcagccctggccaacccttttgaagaactggcaactcctggccgttaaccatccgggttacatggcctttctcacctatgacgaggttcaggaacgcctgcaggcctgcagggataagccaggtagctatatattccgcccatcttgcacgagattgggtcagtgggcgatcggatatgtgagcagtgacgggtcaatcctgcaaactatcccggcaaataagcctctgtcacaggttctgctggaagggcagaaggacggattctacctatacccggacggaaaaacccataaccctgacctgacagagttgggacaggcagagccacaacagaggatccatgtatctgaggaacagctacagctctactgggccatggactctacattcgaactgtgcaaaatctgtgcggaatcaaacaaagacgttaaaattgagccttgcggccatctgctgtgctcatgttgtctagcagcttggcaacattctgactcacaaacttgtccattctgtaggtgtgaaatcaaaggctgggaggcagtctcaatttaccagttccacggacaggccacagctgaagatagtggcaactcttctgaccaagagggtagagagctggaacttgggcaagtgccattatcggccccgcccttgcccccgagacctgatctgccgccaagaaagccgaggaacgcccagcccaaggtgagactgctgaaagggaattcccctcccgccgctctaggtcctcaggatcctgcacccgcatag

SEQ ID NO: 110940 - DNA, 1287 bp, synthetic construct
  misc_feature 1..1287: note = Description of Artificial Sequence: Synthetic coding sequence
  source 1..1287: mol_type = other DNA
atggctctcgccgtagctccctgggggagacaatgggaggaagccagggctctggggcgtgccgttcggatgttgcagcgcttggaagagcagtgcgtcgatcctagactgagcgtgtccccgccctctttacgcgatcttctccctaggaccgctcagctgctaagagaagtggctcactcaagacgggctgccggaggcggaggacccgggggaccgggcggctccggcgattttctgttgatatacctcgcgaatctggaagcgaagtcccgccaggtggctgcgcttttgcctcctcggggaaggaggtccgccaatgatgagctgtttagggccggctctaggctaagaagacaattggccaaactagcaataatcttttcccatatgcacgcagagctgcacgcattattccccggtgggaaatactgtgggcacatgtaccaactgaccaaggcacctgcacataccttctggagggaaagttgcggcgctcggtgcgtgctgccctgggcggaattcgaaagcctactgggaacttgccatccagtggaacctggttgcaccgctctggccctccggacaaccattgatctgacgtgctctggccatgtttcaatatttgagtttgacgtgtttaccagactctttcaaccatggcccaccttattgaagaactggcagctgctggctgttaatcatcctgggtacatggcttttcttacgtacgacgaggtccaggaacggctgcaagcttgtagagataagcctggaagctacctttatcctgatgggaagacacacaatccggacttaactgaacttggtcaggccgagccccagcaacggatccacgttagtgaggaacaactccagttgtactgggcgatggactctacatttgagttatgcaagatctgtgctgagtccaataaggacgtgaagatagagccttgtgggcatttgctgtgctcctgttgcctggccgcttggcagcacagcgacagtcaaacgtgtcctttttgtcgctgtgaaattaaagggtgggaagcagtttctatctaccagtttcacggccaggctacagccgaagatagtggcaatagttccgaccaggagggccgggaactggagctcggccaggtgcctttgagcgcaccacctctcccaccacgtccggatctgcccccacggaaaccccggaatgcccagcctaaggtgcggctgctgaaaggaaacagtccccctgcagctctgggccctcaggaccccgctcctgcatag

SEQ ID NO: 110941 - DNA, 2355 bp, synthetic construct
  misc_feature 1..2355: note = Description of Artificial Sequence: Synthetic coding sequence
  source 1..2355: mol_type = other DNA
atgtcagatcaaaagaaagaggaagaggaggaagccgctgccgccgccgcgatggcgacggaggggggaaagacgtccgagcctgagaataataacaagaaacccaagacaagcggctctcaggattcacagccctcacccttagctcttctcgccgctacctgcagcaagattggtactcccggcgagaatcaggccaccgggcagcagcaaattatcatagaccctagccaggggcttgtgcagctgcaaaaccagccccagcagctggagttagttactactcagttggccggtaatgcctggcaactggtcgctagcacaccacctgccagtaaggagaataatgtgagccagcctgcaagttcttcctcttcatcgtcatctagcaataacgggagcgcctcacccaccaaaacaaaaagcggcaactcttcgaccccaggtcaattccaggttatccaggttcagaatcccagcggatccgtacagtatcaggttatccctcagctgcaaacagtggaaggacaacagatccaaattaaccccacaagctcatccagcttacaggacctacaaggccaaatccagctgatcagcgctggtaacaaccaagctatccttacagccgctaaccggacagctagcggaaacattttggcacagaacctggctaaccaaaccgtccccgtccagattaggcccggcgtgtcaattcccctccaattgcagactctccctggtactcaggcccaagttgtaacgactctccccattaatattgggggtgttaccctggcgctgccagtgattaacaacgtggccgctggtggcggaacaggtcaggtgggccagcccgcggccactgcggactcgggcacttccaacggtaatcaattagtctctacccctactaatactacaacatccgcttccaccatgcctgaatcccctagttcaagcaccacatgtacaacaacagcaagtaccagcttaaccagctcagacactttggtttcttccgccgacactggccagtacgcgtcaacatccgccagtagctcggagaggactatcgaggagtctcagacccctgctgcaacagaaagtgaagctcagtcctcctctcagttgcagcctaacggtatgcagaacgctcaggatcagtccaacagcctgcagcaggtgcagatagttggacagccaattctccaacagattcagattcagcagccccagcagcagataatccaagccatccctccccaaagctttcaattacagtcaggccagacaattcagaccattcagcagcagccgttgcaaaatgtgcagttgcaggctgtgaaccctacccaggtattaatacgcgcgcccactctgactccctcagggcagatttcatggcaaaccgtgcaagtgcagaacatacagtcgttgtccaatcttcaggtccagaatgccggtctgagtcagcaactgacaattacacccgtctccagtagtggcgggacgaccttagcccagatcgcacctgtagccgtggccggggcgccaattactctgaataccgcccaactggcctccgttccaaacctccaaacagtgagtgttgctaatctgggagcggcaggagtgcaggttcagggagttcccgtgactattacgtctgtggccgggcagcagcaagggcaggacggcgtgaaagtgcagcaggctacaattgcccccgtgacggtggctgttgggggaatcgccaacgctactatcggggcagtcagtccagaccagctgacacaggttcacttgcagcagggccagcaaacatcggaccaagaagttcagccaggtaaaagactgaggcgagtcgcctgctcttgccccaactgcagggagggcgaaggacgaggctccaatgagcccggcaaaaagaagcagcatatttgccacattgagggctgtggaaaggtgtatggcaaaaccagtcacttgagggcccatctgcgatggcatactggagagcgtcctttcatttgtaactggatgttctgcggcaaacggtttaccaggtctgatgagctgcagagacacagaaggacccataccggagagaaaaggtttgaatgtccagagtgctccaagcggttcatgcggtccgaccacctttctaagcatgttaaaactcatcagaacaagaagggtggaggtactgcactggctatcgtcaccagcggcgagctggactcctccgtgacagaggtgctgggcagtcccaggatcgtcactgtagccgctatcagccaagactccaacccagcgactccaaatgtgagcactaatatggaggaattctag

SEQ ID NO: 110942 - DNA, 1476 bp, synthetic construct
  misc_feature 1..1476: note = Description of Artificial Sequence: Synthetic coding sequence
  source 1..1476: mol_type = other DNA
atggatcacactgacaacgagttacagggaacgaacagttccggaagcctgggcggactggacgtgcggaggcgcattccgatcaaacttatttccaagcaagccaataaggccaaacctgcgcccaggactcagagaacgattaacaggatgcccgcgaaggcgccgccaggcgacgaagagggattcgattacaatgaagaagaaaggtacgattgtaagggaggagagttgttcgccaatcagcgccggtttcccgggcatttgttttgggactttcaaatcaatatactgggcgaaaaagatgatactcccgttcacttctgtgacaaatgcgggcttcctattaaaatttacgggcgcatgatcccctgcaagcatgtattctgctacgactgcgcaatactgcacgagaagaaaggcgacaagatgtgcccagggtgctccgacccggtccagagaatcgagcagtgcacccgcggttctttatttatgtgcagtatcgttcagggttgcaagcgtacctatttgagtcagcgagacctgcaagcacacataaatcaccggcacatgcgcgctggcaaacccgtgacgcgtgccagtctggagaatgtgcatccccccatcgcgccaccacctactgagattcccgagcgatttatcatgcctccagataaacaccatatgtctcacatcccgccaaagcagcatatcatgatgccccccccccctcttcagcatgtgccccacgaacattacaatcagccccacgaggatatccgcgccccgcccgctgaactgagcatggcaccccctccacccagatctgtttctcaagagaccttcagaatctctacccgcaagcacagcaatcttatcacggtccccatccaggatgattcgaactctggcgctcgggaaccccctccgcccgcaccagctcccgctcaccatcacccagagtaccagggccaacctgtcgtgagccatcctcaccacatcatgccacctcagcaacactacgctcccccccctcctcctccacctcctatttctcatcccatgcctcaccccccacaggctgccggaacaccacaccttgtgtacagtcaggcaccaccgcctcccatgacctcggctccaccaccaattacaccccctcctggtcatattattgcacagatgcctccctatatgaatcacccaccccctggaccccccccacctcaacacggcggtccccccgtcacggccccgcctcctcaccactataatcccaatagcctgcctcagttcaccgaggatcagggtactctctcgccaccattcacccaacctggcggaatgtcccccgggatctggcccgccccccgaggcccaccacctccccccagactgcagggcccacctagccagacacccctgccggggccccaccacccagatcagacccggtacagaccctattatcagtag

SEQ ID NO: 110943 - DNA, 1113 bp, synthetic construct
  misc_feature 1..1113: note = Description of Artificial Sequence: Synthetic coding sequence
  source 1..1113: mol_type = other DNA
atgatcccctgcaagcacgtgttttgctatgactgtgccatcctgcatgaaaagaaaggagataaaatgtgtccaggttgcagtgacccagtgcagaggatcgaacagtgcacgcgaggcagtttgtttatgtgttcaattgttcagggttgcaaaagaacttatctctcacaacgcgacctgcaggcgcacatcaatcacagacatatgcgcgctgggaagcccgtcacccgggcttctctagagaacgtacatcctcctattgcccctccacctaccgagatccctgagagatttatcatgccaccagacaaacaccatatgagccacatccccccgaagcagcacatcatgatgccaccgcctcctctgcaacatgtgccacacgagcactacaatcagccacacgaggacataagggccccccctgcagagctgagcatggcacccccgccaccaaggagtgtaagtcaagagacttttcgaatttcaactcgcaagcacagcaatctgatcacagtgccgattcaggacgattcaaattccggcgccagggagccacctcctccagcacctgctcctgcgcatcaccacccagagtatcagggtcagcccgtggtatctcatccccatcacattatgccgcctcagcagcactatgctccaccgccccctccacccccccccatctcacatccaatgccccatccaccacaggcagcgggaaccccacacttagtctattcacaggcacccccaccacccatgacatcagctccacctcccatcactcctcccccaggtcacatcatcgcccagatgcccccctatatgaaccatccgcctcccggccccccacctccacagcatgggggtccgcctgtgaccgccccccccccccaccattacaatcctaattcccttccacagtttactgaagatcagggaacgctctctcctccctttacgcaacctgggggtatgagccctggcatctggcctgcgccacgcggcccacctccgcctcctaggttgcaagggcctcctagtcagacacctctgcctggcccacaccatccagatcaaacacgctaccgcccctactatcagtag

SEQ ID NO: 110944 - DNA, 681 bp, synthetic construct
  misc_feature 1..681: note = Description of Artificial Sequence: Synthetic coding sequence
  source 1..681: mol_type = other DNA
atgaaagttttaatcctggcgtgtctggtcgccctcgcacttgcacgcgaaactatcgaatctttgtccagcagcgaagaaagcatcacagagtacaagcagaaggtggaaaaagtcaagcacgaggaccagcaacagggtgaggacgaacatcaagataagatttatccttcatttcagccccagcctctcatttatccttttgtcgagccgattccttacggctttcttccacagaatattttgccgttggcccagcctgcggtagtcttgccagtccctcagccagaaattatggaagttcctaaggctaaggatacagtctacaccaagggcagggtcatgcctgtcctgaaatcccctaccatccctttctttgatccccagatacccaaactgaccgatttagaaaatctgcatctgcccctcccactcctgcagcccctgatgcagcaggtgccccagcctattccacagaccctagctctgcctcctcagccgctatggtcagtgccccaaccaaaagttttacctatacctcagcaggtcgttccatatccacagcgcgcggtacctgtccaggcattgttgctgaaccaggaactcctcctaaatccaactcatcagatttaccctgtgacccagcctcttgctccagtgcacaatcctatcagtgtgtag

SEQ ID NO: 110945 - DNA, 549 bp, synthetic construct
  misc_feature 1..549: note = Description of Artificial Sequence: Synthetic coding sequence
  source 1..549: mol_type = other DNA
atgaagtccttccttttggtggtgaacgcactggcgcttaccctaccctttcttgctgtggaggttcagaatcagaagcaaccagcctgtcatgaaaacgacgagcggcctttttaccagaaaacagcgccctatgtcccaatgtactacgttccaaacagttatccatactatggcacaaacctgtatcagagaagacctgccatcgctatcaacaatccttatgttcctcggacttattatgctaacccagccgtggtccgccctcacgcacagatcccgcagcgccagtacctgccaaatagccatccgcctaccgtcgtgcgtagacctaacctgcatccatcgttcatcgcgatacctcccaaaaaaattcaagataaaattattattccaaccatcaacactattgccacagtcgagcctactcccgcccccgcgactgagcctactgtcgacagcgtggttacccccgaggcctttagcgagtctataatcacatcaactcccgaaactacgaccgtggctgtgacacctccaactgcatag

SEQ ID NO: 110946 - DNA, 978 bp, synthetic construct
  misc_feature 1..978: note = Description of Artificial Sequence: Synthetic coding sequence
  source 1..978: mol_type = other DNA
atggcttcttcctcaggctccaaagctgagttcattgtgggcggcaagtataagttggtccggaaaattggctctggctcctttggagacatctatctggcaattaacatcaccaacggggaagaagtggccgtgaaactagaaagtcagaaggcgagacatcctcagcttctgtacgaatccaaactgtataagatcctccagggcggggtgggcattcctcatattagatggtacggccaggaaaaggactataatgtcctggtcatggacttgctggggccatcgctcgaggatttgttcaatttctgcagtcggcgatttacaatgaagacagtgctgatgctcgcagatcagatgatttcacgaatcgagtatgtgcatacaaagaattttatccacagagacattaagccagacaattttttaatgggcataggacgacattgcaacaaacttttcctaatcgattttggtctggccaaaaagtatagagacaacaggaccaggcagcacattccttacagagaggataaaaacctgaccggtactgctaggtatgccagcatcaacgcacatctgggcattgagcagagtagacgggatgacatggaatctctcggctacgtactgatgtactttaatcgcacatctctcccatggcaaggcctgaaagccgcgacaaaaaaacagaaatacgagaaaatttccgagaagaagatgtcaacccccgttgaggtactctgcaagggctttcctgccgagtttgctatgtatttgaactattgccgcgggctgaggtttgaggaggctccagactatatgtacttacgccagctgttcaggatcctttttcggaccctgaatcaccagtatgactatacatttgactggaccatgctgaagcaaaaggccgcccagcaggccgcgtcgtcttccggccagggccaacaggctcagaccccaactggtttctag

SEQ ID NO: 110947 - DNA, 978 bp, synthetic construct
  misc_feature 1..978: note = Description of Artificial Sequence: Synthetic coding sequence
  source 1..978: mol_type = other DNA
atggcctcttcctccggtagcaaagccgaatttatagtaggcggcaagtataagctcgtccggaagattggatctggttcatttggggatatttatctcgccatcaacattacaaacggcgaggaggtggccgtcaaactcgagtcccagaaggctcgccatcctcagctgttatatgaatccaagttatacaaaattttgcagggcggcgtggggattcctcacataaggtggtacggtcaggagaaggattacaatgtgttggtaatggatctgctcggaccaagtttagaagatctattcaatttttgcagcaggagattcacaatgaagaccgtacttatgttggcagatcagatgatatcacggattgagtacgtgcacacaaagaacttcatacatagagacatcaagcctgacaattttctgatggggataggccgtcactgcaataagctcttcctaatcgatttcggcctcgctaaaaaataccgggataatcgaaccaggcagcacatcccctaccgggaagacaagaacttgacagggaccgcacgctacgccagtatcaacgcccatctgggcatcgaacagagtcgacgtgatgacatggagtctttgggctatgtcttgatgtacttcaatcgcacttccctgccatggcagggcctcaaggccgctacaaagaagcagaagtatgagaagatttcagaaaaaaagatgtctactccagttgaagtgctctgcaaaggcttccctgccgagttcgcgatgtacctgaactattgtcgggggctgcgattcgaggaggcccccgactacatgtatcttagacagctcttccgtattctttttcggactctcaatcaccagtacgactacacttttgactggactatgctcaaacagaaggccgctcagcaggcggcatcctcctctggacaaggtcagcaggcccaaaccccaactgggttttag

SEQ ID NO: 110948 - DNA, 1014 bp, synthetic construct
  misc_feature 1..1014: note = Description of Artificial Sequence: Synthetic coding sequence
  source 1..1014: mol_type = other DNA
atggctagctcctccggctccaaagcagaatttatcgttggcggcaaatataagctggtccggaaaattggcagcggatcctttggcgatatatatctggccatcaacattacgaatggtgaggaggtcgcggtgaagcttgaatctcagaaggcgcgccaccctcagctgctgtatgagtcgaagctgtacaaaattttgcagggaggtgtggggattccccatattagatggtatggccaggagaaggattacaacgtgctggtcatggacctcttgggaccttctctggaggatctcttcaatttttgtagtagaagatttacgatgaagaccgtgttgatgctcgcagatcagatgatttcaaggatcgagtatgtgcataccaagaatttcatccaccgcgacattaagcccgataactttctcatgggcatcggcaggcattgtaataagctgtttcttatcgacttcggactcgcaaagaaatacagggataatagaactagacagcatatcccctatcgcgaagacaagaatttaacgggcaccgcgcgctacgctagtatcaacgcacaccttgggatagagcagtctcgccgagatgacatggaaagtcttggttacgtgctgatgtactttaacagaaccagtcttccatggcaaggcctgaaggcagcaaccaagaaacagaagtatgaaaagattagtgagaaaaagatgagtacccccgtcgaggttctgtgtaagggttttccggccgaattcgccatgtacttaaattactgcaggggcctgcgctttgaggaggccccggactatatgtatttacggcagttgtttcgaatccttttcaggacattgaatcaccagtatgactacaccttcgactggaccatgctcaagcaaaaagccgctcagcaggctgcctccagttcggggcaggggcagcaggctcagacaccaacaggaaagcagactgacaaaactaagagcaatatgaagggattctag

SEQ ID NO: 110949 - DNA, 1098 bp, synthetic construct
  misc_feature 1..1098: note = Description of Artificial Sequence: Synthetic coding sequence
  source 1..1098: mol_type = other DNA
atggcaagtagcagtggttcaaaggcagagtttatagtcggtggcaaatataagctggtgagaaagatcggcagtggatcgttcggcgacatatatctggccatcaatatcactaatggggaggaagtcgcagttaagctggaatctcaaaaggcgcggcacccccaattgttgtatgaatccaagctgtataaaattctccagggcggcgtgggtatcccacacatccgctggtacggacaagaaaaagactataatgtactggttatggacctcttgggaccaagcctggaggacctgttcaatttctgttcccgccgcttcaccatgaagaccgttctcatgctggcagatcaaatgattagccgaattgagtatgtccacacgaaaaactttattcatagggatattaaacctgataacttcttgatgggaatcggccggcattgcaacaaatgtctggagtcacctgttggcaagcgaaagaggtcaatgacggtgagcacaagtcaggacccttcattcagtgggctcaaccagctcttcctaattgacttcggtcttgcaaaaaaatatcgggacaatagaacacgccaacacattccttaccgagaggacaaaaacttaacaggcaccgccagatacgcttccatcaacgcacacctgggcatcgaacagtcacggcgcgacgatatggaatctttaggctacgtgctcatgtactttaaccggacatcactgccctggcaaggactgaaggccgctactaagaagcagaagtacgagaagatctcagaaaaaaaaatgagtacgcctgtggaagtgttatgcaaaggatttccggcagagtttgctatgtatttaaactactgcagaggcctgaggtttgaggaagcccctgattatatgtatctgaggcaactttttcgtatcctgttcagaactttgaaccaccagtacgactataccttcgactggaccatgcttaagcagaaggcggctcagcaggcagcctcatcctcgggacaaggccaacaagctcagacacctaccggaaagcaaactgataagactaaatcgaatatgaagggattctag

SEQ ID NO: 110950 - DNA, 1029 bp, synthetic construct
  misc_feature 1..1029: note = Description of Artificial Sequence: Synthetic coding sequence
  source 1..1029: mol_type = other DNA
tgtagagaggagatatctaggatcgagtacatacattccaagaattttatccatagggacgttaaacccgacaatttcctgatggggctaggcaaaaaggggaacctggtatatatcatagactttgggctcgccaaaaagtatagggacgctcggacccatcagcacatcccttacagagagaataagaatttgaccgggacagcacgctatgcatccatcaacacccatttaggtatagaacagagtaggcgtgatgacctggaatcattagggtacgttctgatgtacttcaacctgggatccttgccctggcaagggctcaaggctgccacaaagcgacaaaagtacgaacggattagcgaaaaaaaaatgtccactcctatagaggtcttatgtaaagggtatccatccgagtttgctacctacctgaacttctgccggtcattaaggttcgatgacaagcccgattactcctatctgagacagctgttcaggaacctgtttcaccgccaggggttcagttatgattatgttttcgactggaacatgctcaagttcggggcaagtagggcagccgatgacgctgagagggaaaggagggatcgcgaagagcgcctccggcactctcggaatccggccacacgtggcctcccctccacagccagcggccggctccggggcacccaagaggtcgctccgcccactccactcacgcccacatcgcatacggccaacacaagtcccagacccgtgagtgggatggagagagagaggaaagtgtccatgaggctacatcggggggctcccgtgaacattagctcatccgacctgaccgggcgacaggacacatcgagaatgagtacctcccaagtaggggctgagctgcctggcggtagatgggcctccggatatcccgttcgggtgaagtctgggctttggtttctgcagggatttttcttcccctttttcccgcctttcctgcgcgtgttcaacctggctagagtgtggcgccttggctgtaggtag

SEQ ID NO: 110951 - DNA, 1248 bp, synthetic construct
  misc_feature 1..1248: note = Description of Artificial Sequence: Synthetic coding sequence
  source 1..1248: mol_type = other DNA
atggagttgcgagttgggaaccgatatagacttgggaggaagattgggtccggcagctttggagacatctatttaggtaccgacatcgcagccggcgaagaggttgcaataaaactggagtgcgttaaaacgaagcacccacagctgcatatcgagagcaaaatttacaaaatgatgcagggtggagtgggcattcctaccatcaggtggtgtggcgcggagggcgactacaatgtgatggtcatggaactcttggggccaagtctagaagacctatttaacttttgctcccgcaagttttcactcaagaccgttctgttgctggctgaccaaatgattagcaggatagagtatattcacagcaaaaattttattcaccgggatgtcaagcccgataatttccttatgggactggggaaaaagggtaacctagtatatatcattgatttcggacttgccaaaaaatatagggacgcccgcacccaccaacatattccataccgtgagaacaagaatctgacgggaactgcccggtacgcttccatcaatacccacctgggcattgagcagtcgcggagagacgacctggaaagtctgggctacgtcctgatgtatttcaacctgggcagcttaccatggcaaggccttaaggccgcgaccaaaaggcagaagtacgagagaatttccgagaagaaaatgtctacgcctattgaggtgctctgcaaaggctatccgtctgagttcgctacctacctgaacttctgcaggagcttgcgttttgatgataagccagattacagttatcttcgccagcttttccggaatctgtttcatagacagggtttctcttacgactatgtattcgactggaacatgctgaaatttggagcttcacgagctgccgacgacgccgagagagaacgcagagaccgtgaggaaagactgagacacagtcgcaatcctgccacgcgggggctgccatccacagcaagtggccgcctgcgcggtacccaggaagtggccccgcctactcctctgacgccaacatcccacactgccaacacgtcaccaagaccagtcagcggaatggagcgggagcgcaaggtctcaatgaggctgcaccggggagctcccgtaaacatctcctcgagtgacctcacaggccggcaggacacctcccgaatgtccacttctcagatacctgggcgtgtagccagtagcgggcttcaaagtgttgtgcaccggtag

SEQ ID NO: 110952 - DNA, 1230 bp, synthetic construct
  misc_feature 1..1230: note = Description of Artificial Sequence: Synthetic coding sequence
  source 1..1230: mol_type = other DNA
atggaactgagggtgggcaaccggtatcgtcttggccggaaaatcgggagtggctcattcggtgatatttacttaggcaccgacatcgccgctggagaggaagttgctatcaagctcgagtgtgtaaaaactaagcacccacaactgcacattgagtctaaaatatacaagatgatgcaagggggcgtgggcatccctacaataaggtggtgcggggcagagggggattacaacgtgatggtgatggagttgctgggaccaagcttggaagatctgttcaatttctgttctaggaagttctctctgaagacagttctgctgctggcagaccagatgatcagtagaattgaatatatccattctaagaactttattcaccgcgacgtgaagcccgacaactttttgatgggcctggggaaaaaagggaatttagtgtatatcattgactttggcctcgctaaaaagtatagggacgcgcgcacacaccaacacattccctatagagaaaacaaaaacctgacagggacggcccggtatgcttccattaacactcacctcggcatcgagcagtctagacgtgacgacttggaatccctaggttatgtgctaatgtacttcaacttgggcagtctgccttggcaaggtctgaaggctgccaccaaacggcagaagtatgagcggatctctgaaaaaaagatgtcaacccctatcgaagtgctttgcaagggataccccagtgaatttgcaacgtatctgaacttctgccgcagtctccgcttcgacgacaaacccgactatagttacctccggcagcttttccggaatctgttccatcggcaggggttctcctacgattatgtgttcgactggaacatgttgaaatttggggccagtagagcagcagatgacgccgagcgcgagagacgtgaccgggaagagcgccttagacactcacgcaacccggccacccgggggttgcctagcacagctagtggacgcctgcgaggaactcaagaagttgcaccccctactcctctgacgcctacgtcccacacagctaatacatccccaaggcccgtgtccgggatggaaagagagagaaaagtgtccatgagattgcaccggggggccccagttaatatctcatcgtcggatttgactggtcgtcaggataccagtcgaatgagcacttctcagaactctatccccttcgagcaccatggtaaatag

SEQ ID NO: 110953 - DNA, 1077 bp, synthetic construct
  misc_feature 1..1077: note = Description of Artificial Sequence: Synthetic coding sequence
  source 1..1077: mol_type = other DNA
atgatgcagggcggcgtgggcatccctaccatcaggtggtgtggggccgagggcgattacaacgtgatggtgatggagctgctcggcccttctttggaagacctgttcaatttttgctctagaaagttctcactcaaaactgtactgttgctggccgatcaaatgataagtagaattgagtacatccacagcaagaacttcatccaccgcgatgttaagcccgacaactttctcatggggctcggcaagaagggaaaccttgtctatatcattgatttcggcctcgcaaagaagtatcgtgacgccagaacacatcaacacatcccctatagggagaataagaatttgactggcacagctagatatgccagtatcaatacacacctgggtatcgagcagtcccggcgggacgatctggaatcccttggctatgttttaatgtattttaacctaggttctctgccatggcagggactaaaagctgctaccaagaggcagaagtacgagagaatcagcgagaaaaagatgtctaccccaattgaggtactctgcaagggctaccctagtgagtttgcgacctatttaaacttctgccgctcattgaggttcgacgataagccagactatagctacctgaggcagttatttcgtaatctctttcacaggcaggggttttcctatgactatgtgttcgattggaatatgctgaagttcggcgcgtcccgtgcggcggatgacgctgaacgggaaaggcgggacagggaggaacggcttcgccattcccgcaatcctgctacaagagggctcccgtcaaccgcttctggtcgattgcgggggacacaggaggtggcgcccccaacgccactcacccctaccagtcacacagccaacaccagccctcgccccgtttcggggatggagcgagagcgcaaggtctctatgcgactgcaccggggcgcccccgtcaatatcagctcttccgacttgactggacgacaagatacctcccggatgtccacatctcagatcccgggcagggtcgcaagctccgggctacagtccgtcgtccaccgatag

SEQ ID NO: 110954 - DNA, 381 bp, synthetic construct
  misc_feature 1..381: note = Description of Artificial Sequence: Synthetic coding sequence
  source 1..381: mol_type = other DNA
atggagctacgcgtaggaaatcgctatcgactgggcaggaagattgggagcggcagttttggtgacatctatttaggaaccgacatcgctgccggcgaagaagtcgccattaagctcgagtgcgtgaaaacaaaacacccccaactgcacatagagtcgaaaatttataagatgatgcagggtggggtcggtattcccacaataaggtggtgtggggccgagggggattacaatgtcatggttatggagctcttaggaccttcacttgaggacctctttaacttctgttcacgcaagttctctctgaaaaccgtgctgctgttagcagatcaaatgaacaacccggaggaaatgacatggtcattgtgggcaacgtgttag

SEQ ID NO: 110955 - DNA, 1251 bp, synthetic construct
  misc_feature 1..1251: note = Description of Artificial Sequence: Synthetic coding sequence
  source 1..1251: mol_type = other DNA
atggaactacgggtagggaacaagtatagactgggtagaaagattggttctggctccttcggcgatatatatctgggcgctaacatcgccagcggcgaggaggtggccattaaactggagtgcgtgaagacgaaacacccgcagctccatatcgagagtaaattttacaaaatgatgcaaggcggggtgggaatccctagcatcaagtggtgtggggccgaaggtgattataacgtcatggttatggagctgttgggcccctctctagaggatctgttcaatttctgctctcggaagttctctctgaagaccgttctgctgctagctgatcagatgatttctagaatcgagtacatacacagcaaaaacttcatccacagagacgtgaagcccgataacttcttgatggggctcgggaaaaagggcaacctcgtctacattattgatttcggcttagcgaaaaaataccgcgacgccaggactcatcaacacattccatatcgcgaaaataaaaaccttacaggaactgccaggtatgcctcaataaacactcaccttggcatagaacaaagtaggagggacgatttggagtccctgggctatgttctgatgtacttcaatcttggctcactgccctggcaaggcctcaaagcagccaccaagagacagaaatacgagaggatttccgaaaaaaagatgtcaactcccatcgaagtgctgtgcaagggttacccctccgagttttccacctacctgaatttctgcagatccctgcgtttcgatgacaagcccgactactcatacctccggcagttattccgaaacctgttccaccgtcagggatttagttacgattacgtgttcgactggaacatgctaaagttcggtgctgcgagaaatcctgaggacgtggaccgggagagacgcgaacatgagagagaggagagaatggggcaactcagaggcagcgctactcgtgcgttacccccaggccctcctactggcgccaccgcaaatcgccttaggtctgcagctgagccggttgcatccacccctgctagtcggatccagcctgctgggaacacatccccacgagcaattagccgggttgaccgcgagcgaaaggtgtcgatgcgattacataggggtgcccccgctaacgtgtcatccagcgatttaacaggccggcaagaggtgagcaggataccggctagccagaccagcgtcccctttgaccacctaggtaagtag

SEQ ID NO: 110956 - DNA, 360 bp, synthetic construct
  misc_feature 1..360: note = Description of Artificial Sequence: Synthetic coding sequence
  source 1..360: mol_type = other DNA
taacgcaatcccgaggatgtagatcgcgaaaggcgggagcacgagagggaggaacgcatgggccagctgcgaggatccgcaactagggctctcccaccagggccaccgaccggggctaccgcaaatcgactgcgttctgcggcggaaccagtcgcatcaactcctgccagccggatccagcccgccggcaatacttctccccgggctatttcacgagtagatagggaaaggaaggtgagcatgaggctccacagaggtgccccagcaaatgtatcgtccagtgacctgacaggccgtcaggaagtgtcgcgaattccagctagccaaaccagtgtccccttcgaccacctaggcaagtag

SEQ ID NO: 110957 - DNA, 1251 bp, synthetic construct
  misc_feature 1..1251: note = Description of Artificial Sequence: Synthetic coding sequence
  source 1..1251: mol_type = other DNA
atggagttgagagtggggaacaagtatcgactagggcggaagattggtagcggttctttcggcgatatatacctcggtgctaatatcgcatctggcgaggaagtggcaattaaactagagtgtgttaaaacaaagcacccccagcttcacatcgagagtaagttttataagatgatgcagggtggggtgggcataccttccattaagtggtgcggggctgaaggcgactataatgtgatggtgatggagctgctaggacccagcttggaggatttgttcaatttttgttctaggaagttctccctcaagaccgttttattattggcagaccagatgatttcaaggatcgagtatatccacagcaaaaacttcatacacagagacgtgaaacctgacaacttcctaatggggctcggcaaaaagggcaatcttgtgtacattatcgatttcggcctcgcgaagaagtaccgggacgcacggacacaccagcatatcccctatcgcgagaacaagaatcttacaggcaccgccagatacgcgagtattaacacacacctggggatcgaacagtcccgaagagacgacttggagagcctgggatatgtcctaatgtattttaatcttggatcattgccttggcaggggctgaaggctgctaccaagaggcagaagtacgagcggattagtgagaagaagatgagcacacctatcgaggtcttatgtaaggggtacccgtccgagttctcaacctatctcaacttctgcagaagtcttcgtttcgatgataaacccgattatagctacttacgccaactgttccggaatctcttccaccggcagggattcagctacgattacgtgttcgattggaacatgctgaaattcggtgccgcaaggaatcccgaggatgtagatcgtgagcgtcgcgagcatgaacgcgaggaaaggatgggacagctgagaggctcagcaacccgtgccctacctcctggtcctcctaccggggctactgcaaacaggttgaggtctgcagccgagccggtcgcttccacccctgcctccaggatacagccagccggcaacacttcacccagagcaatctcccgagtggatagggaacgtaaggtttctatgaggctgcaccggggggcaccagccaacgtttccagcagcgacctgaccggtaggcaggaagtgtcccgtatccctgctagccagacaagtgtgccttttgaccacctaggtaagtag

SEQ ID NO: 110958 - DNA, 1251 bp, synthetic construct
  misc_feature 1..1251: note = Description of Artificial Sequence: Synthetic coding sequence
  source 1..1251: mol_type = other DNA
atggagctgagggttgggaacaaataccgcttagggcggaaaattggatcgggaagctttggggacatatatctaggagccaacattgcttcaggtgaagaggttgccatcaaactggagtgtgttaagactaagcatccccagctacatattgagtcaaagttttataaaatgatgcagggcggcgtgggtatcccttctatcaaatggtgcggcgctgagggggattacaatgttatggtcatggagcttttgggtccttctctggaagatctattcaatttttgttctagaaagtttagtctgaagaccgtcctgttgctggccgaccagatgattagtcggattgagtatattcatagcaagaactttattcatcgggacgtgaaaccagataactttttgatgggactgggaaagaagggtaacttagtttatattatcgatttcggcttagcgaagaagtatcgggacgctcgaacccaccaacacattccttatcgggagaacaagaatttgacgggcacagctaggtacgcttcaattaacacccacctcggcatagagcagagccggagagatgatctggagtccctaggttacgtactcatgtacttcaatttgggctccctaccttggcagggcctaaaggctgccaccaaaagacagaagtacgaaagaatcagcgaaaaaaagatgagtacccctattgaggttttgtgcaaaggatacccctcggagttctctacgtacctcaatttttgtcgttccctcaggtttgatgacaaacccgactactcataccttcgccagctgttcaggaatctgtttcaccgccagggattttcatacgattatgtgttcgactggaatatgctgaaatttggggctgcacggaacccggaagacgtagaccgagaaaggcgcgaacacgagcgagaggagagaatgggtcagctccgcggaagcgccacaagagcactgcccccaggccctcccacgggagcgacggcaaaccggctgcgcagtgctgctgagcccgtggcctcaaccccagccagcaggatacagccagctggaaacacaagtccacgcgctattagtagagtggatagagagcggaaggtgtccatgagacttcatcgcggcgcaccagcaaacgtgagcagcagcgatctgactggccgccaggaggtatctcgaatcccggcatcccagacctcggtaccttttgatcatctgggcaagtag

SEQ ID NO: 110959 - DNA, 1251 bp, synthetic construct
  misc_feature 1..1251: note = Description of Artificial Sequence: Synthetic coding sequence
  source 1..1251: mol_type = other DNA
atggaactcagggtcggaaataagtatagattgggacggaagatcgggagcgggtcattcggcgatatctatctgggtgctaatatagcatctggcgaagaggtcgcaattaagctggagtgcgtgaagaccaagcatccgcaactacatattgagtcaaagttttataagatgatgcagggtggggtcggcataccttcaattaagtggtgcggcgccgagggcgattacaacgtgatggtgatggagctgttaggacccagtctcgaagatctcttcaatttttgcagcagaaagttctcactcaagaccgtcctgctcttggccgaccaaatgatttctagaatcgagtacattcattcaaagaactttatccaccgggatgtaaagcctgataatttcctgatgggtctcggcaaaaaagggaacttggtatacatcatcgattttggcctggccaagaaatatcgcgacgctagaacccaccagcacataccatacagggagaacaagaatctcaccggcaccgccagatacgcatccattaacacgcaccttggtatagagcagtcccgacgcgatgatctggagtcactcggctacgtactgatgtattttaacctcgggagcctgccatggcagggactgaaggccgctacgaaacgccagaaatatgagcgtatttctgagaagaagatgtccaccccaattgaggtgttgtgcaaaggatacccttctgagttcagcacttaccttaacttctgccggagcctgcggttcgatgataaacccgactacagctatctgcgccaactattccggaatctttttcatcgtcagggcttctcatacgattatgtctttgactggaatatgctcaagttcggcgccgccagaaatcctgaagatgttgaccgagagagacgggagcatgagagggaggaacggatgggtcaattgaggggttctgccacgcgggcacttcctcctggtcctccaactggggcgactgccaatcggctgagaagcgcagctgaacctgttgcctcaactccagcctctcgtattcaaccggcgggcaatacctccccccgcgctatctctcgtgtggaccgcgaaagaaaagtatctatgaggctgcatcgaggggccccagccaacgtgtcttcttctgaccttacaggcagacaggaagtttcaaggatccctgcttcacagacttcagtgccttttgaccatcttggaaaatag

SEQ ID NO: 110960 - DNA, 1251 bp, synthetic construct
  misc_feature 1..1251: note = Description of Artificial Sequence: Synthetic coding sequence
  source 1..1251: mol_type = other DNA
atggagttgcgggtgggtaataaataccgtctcgggcgcaagataggtagtgggtcgtttggggatatttatctgggagcaaatatagctagtggcgaagaagttgctattaagctggagtgtgtgaaaaccaagcacccgcaactgcacattgagagtaaattctacaaaatgatgcaaggaggagtcgggattcctagcattaagtggtgtggcgccgaaggagactataatgtgatggttatggagctgctcggtcctagcctagaagacctctttaacttttgtagccgtaagttttctttaaaaaccgtcctcctgctcgccgatcaaatgatttcccggattgaatatattcatagtaaaaactttatccatcgtgacgtcaagccagataattttcttatgggactgggtaagaagggaaacctggtgtatattatcgatttcggccttgctaagaagtatagagacgccaggacacaccagcacatcccctatcgggaaaacaaaaatctgaccggtacagcgcggtacgcttcaatcaatacacacttggggatcgagcagtcgcgaagggatgatttggaaagcctcggatacgtgctgatgtattttaatttggggagtttaccctggcaggggcttaaggctgctaccaagaggcagaagtacgagcgaataagtgagaaaaagatgtctacacccatagaggtgctttgcaaggggtatcccagcgagttcagcacttatctcaatttctgtagaagtctgcggttcgacgacaaacccgattattcatacctacggcagctgttccggaatctgttccaccgtcaggggttctcgtacgattacgtgtttgactggaatatgctaaaatttggagccgcaagaaacccggaagatgttgacagagagaggagggagcatgaacgcgaagaaagaatgggccaattgcggggaagtgctactcgggccctcccgcctggaccgcctactggtgccaccgctaatcgcttgaggagcgcagcagaaccagtcgcttctacccctgcctcacggatacagccagctggcaacacgtctcctcgcgcaatatctcgcgtggatcgggagcgaaaagtatccatgcggctacacaggggtgcacccgccaatgttagcagcagcgatctaaccggacggcaggaggtttcacgtatccccgccagccagaccagcgtgccgtttgaccaccttggaaaatag

SEQ ID NO: 110961 - DNA, 678 bp, synthetic construct
  misc_feature 1..678: note = Description of Artificial Sequence: Synthetic coding sequence
  source 1..678: mol_type = other DNA
atggagctgcgtgtgggcaataaatatcgactaggcagaaagattggaagcggctcctttggtgacatataccttggcgcaaatattgcgtccggtgaagaggtcgccataaagttggaatgcgtgaaaacaaaacatcctcagctccatattgagtctaaattctacaagatgatgcaggggggcgtggggattcctagtataaagtggtgtggggccgagggcgactacaacgtgatggtgatggagctgctaggccccagtttagaggacctgttcaacttttgttctcgcaagttttccctcaagaccgttttgctgctcgccgaccagatgattagccgaatcgagtacatacacagtaaaaactttatccacagagacgttaagcctgacaatttcctgatgggccttgggaaaaaagggaatctggtctatatcatcgatttcggactggcgaagaagtacagagacgccagaacacatcagcacataccatacagggagaacaaaaacctgactggaacagcacgttacgccagcatcaacacccatctaggcatcgagcaatccagaagagacgatttggagagcttaggctacgtccttatgtacttcaacttggggtccctaccttggcaaggactaaaagccgccaccaagcgacagaaatattag

SEQ ID NO: 110962 - DNA, 435 bp, synthetic construct
  misc_feature 1..435: note = Description of Artificial Sequence: Synthetic coding sequence
  source 1..435: mol_type = other DNA
tgaagaaatctcttccacaggcaggggttcagctatgactacgtgttcgattggaatatgctcaagttcggagccgccaggaacccagaagatgtggatcgagagcgacgagagcatgagcgagaggagagaatgggtcaacttcgcggcagtgccacccgggccctaccacccggcccccctacaggggctaccgcgaatcggctgcgtagcgccgccgagcctgttgcgtccacacctgcatcacgcatccaacctgccggaaacactagtccaagggctattagtcgcgtggacagggaaagaaaagttagtatgcggcttcaccgcggcgctcctgctaacgtaagctcctccgacctgactggccgccaggaagtgtcccgcatccccgctagtcagacaagcgtgccttttgatcacctcggcaagtag

SEQ ID NO: 110963 - DNA, 1182 bp, synthetic construct
  misc_feature 1..1182: note = Description of Artificial Sequence: Synthetic coding sequence
  source 1..1182: mol_type = other DNA
atggatcatcctagtcgcgaaaaggacgagaggcagcgtacaactaaacctatggcacagcgaagcgcccattgctcacggccgagcggatcctcctcttccagtggggtgctgatggttggtccaaattttcgcgtgggaaagaaaattgggtgcgggaactttggggagctccgcttgggtaaaaacctgtatacaaacgagtatgttgcgatcaagctggaaccaattaagtccagggccccgcagctacatctggagtatcgcttctataaacagctgggctccgcgggggagggcctgccccaagtttactatttcggaccttgtgggaagtataacgccatggtcctggaactcctcggtcccagcctggaagaccttttcgacctgtgcgaccggacattcacgctgaagaccgtcctgatgatagcaatccagcttctgtctcgcatggagtatgtccactccaagaatcttatatacagggacgttaaacccgagaatttcctgattgggcgccagggtaataagaaggagcacgtaattcatatcattgacttcggactcgcgaaagagtatatcgaccctgagacgaagaaacatatcccgtacagagagcacaagtcgctcacagggacagcacgctacatgtccattaatacgcatctggggaaggagcagtcccgaagggatgacctggaagctctcggacacatgtttatgtactttcttagaggctcgctgccttggcagggcctgaaggcggatacacttaaggagcgatatcaaaagataggcgacaccaagcgcaatactcccattgaagccctgtgcgagaacttccctgaggagatggctacataccttcgatatgtgcgccggctcgatttctttgagaagccagactacgagtacctacgtacactgtttaccgatttattcgagaagaaagggtacaccttcgattacgcatacgactgggttggtaggcccataccgaccccagtgggcagcgtccatgtggacagcggggcctccgccataacaagagagtctcatacccaccgggatcggcccagtcagcagcagcctttgagaaatcagtccctcagaactgtcactgctgagcactacgatgtcaacaacagcgccatctggcacagaggacgaggaacctag

SEQ ID NO: 110964 - DNA, 1269 bp, synthetic construct
  misc_feature 1..1269: note = Description of Artificial Sequence: Synthetic coding sequence
  source 1..1269: mol_type = other DNA
atggatcatcccagtagggagaaggacgaaaggcaaagaaccacgaagccaatggctcagcggtctgctcactgctctcgccccagcgggtcatccagctccagtggtgtgctgatggtgggtcctaactttcgcgtgggcaaaaaaattggatgcggcaatttcggagaactgcgtcttggtaagaatttgtacacaaatgaatacgtggctattaagcttgaacccataaagtcaagagctccacagctgcatttggaatataggttttataaacagcttgggtccgccggtgagggtctgccacaagtctactatttcgggccctgcggaaaatataacgctatggtccttgagctcctggggccctcacttgaagacttgttcgatctctgcgacaggaccttcaccctgaagactgttctaatgatagccattcagctgctttcgaggatggaatatgtgcacagtaaaaacttgatctatagggacgtgaagccagagaatttcctgatcggccgccagggaaacaagaaggaacatgtcatccatatcatagatttcggcctcgccaaagagtatattgatcccgagacaaaaaaacatatcccgtaccgcgaacacaaatccctcactggcaccgctcgctacatgtccatcaacacacacctgggaaaagaacagagcaggagggacgatctcgaggcgctaggacacatgttcatgtatttcctgaggggtagtctcccttggcaaggcttgaaggcagacacactgaaggaaagatatcaaaaaattggcgacaccaagcggaacacaccaatagaagccttgtgcgaaaactttcccgaggagatggctacatatttgcgatatgttcggagactggattttttcgagaaacctgattatgaatatctgagaaccttgtttaccgacctgttcgaaaagaaagggtatacctttgactacgcctacgattgggtgggcaggccaataccaacgcccgtaggttcagtccacgtcgactccggcgccagcgctatcactcgcgagagccacacgcaccgcgacagaccatcgcagcagcagccgttaagaaatcaggtggtctccagcaccaacggggaacttaacgttgacgatcccacaggcgcacattcaaatgcccccataacagctcacgccgaagtggaagtagtcgaggaggcaaagtgctgttgtttctttaaacgcaagcgcaagaaaaccgcccaaaggcataagtag

SEQ ID NO: 110965 - DNA, 1137 bp, synthetic construct
  misc_feature 1..1137: note = Description of Artificial Sequence: Synthetic coding sequence
  source 1..1137: mol_type = other DNA
atggatcatccatctcgcgaaaaagacgagagacagaggacaaccaagcctatggcccagaggtccgcgcattgctctagaccttcgggttccagtagcagcagcggggtacttatggttggcccaaactttcgagtaggaaaaaaaatcggatgtggtaattttggggagctgcgcttagggaagaatttatacaccaacgagtatgtggccatcaagctggagctgcttggaccgagtctcgaggacctattcgatctgtgcgatcggacatttactctcaaaactgtcctgatgattgctatccagcttctttctaggatggagtacgtacactccaagaacctgatatatagagacgtcaaacctgaaaactttttgatcggtcgtcagggtaacaaaaaggagcacgttattcacatcatcgattttgggctggccaaggaatatattgaccccgagaccaagaagcatataccataccgcgaacacaagtcacttaccgggacagctcggtacatgtcaatcaacacccatcttggcaaggaacaaagtcgtcgtgacgacttggaagccctgggccacatgtttatgtactttctccgcgggtccctgccttggcagggactgaaagctgataccctcaaggagagataccagaagatcggcgacaccaagcgcaacacgcctatcgaggcactctgtgaaaattttccagaggagatggcaacatacctcaggtacgttaggaggctcgacttctttgaaaaaccagattacgagtatttacgcacattatttacggacctcttcgaaaaaaaaggatacacgtttgactatgcctacgactgggtggggcgcccgatccctaccccagtcggatctgttcacgtggatagcggcgcttcagcaatcactagagagtcccacacgcacagagaccggccctcccagcagcagccactgcgcaaccaggtggtaagcagtactaatggagagctgaacgttgacgaccctacaggggcgcactccaatgcccctatcactgcccacgccgaagttgaggtcgttgaagaggccaaatgttgctgtttctttaagagaaagcgtaaaaagacagcacagcggcacaagtag

SEQ ID NO: 110966 - DNA, 1248 bp, synthetic construct
  misc_feature 1..1248: note = Description of Artificial Sequence: Synthetic coding sequence
  source 1..1248: mol_type = other DNA
atggatttcgataagaaaggcggaaagggggagaccgaagagggaaggcgtatgtctaaggctggcggcgggaggtcttctcacggaatcaggtctagcgggaccagttcaggggtcctgatggtaggtcctaatttccgggtcggaaaaaagatcggctgcggcaacttcggagagctgcgattaggcaaaaacctgtacacaaacgaatatgtggccattaagctggagcctattaaatccagagctccccaactgcacctggagtatcggttctataagcagctgtcggctactgaaggagttcctcaagtgtattactttggaccttgtgggaagtacaatgctatggttttggagttgctcggccctagcctcgaagatctgtttgatctttgtgataggacattcactctgaaaaccgtcctcatgattgcaattcaactgataacacggatggagtacgtacatactaaaagtctcatttaccgagacgtcaaacccgagaatttcttagtgggccgaccgggtacaaaacggcagcatgcaatccatattattgattttggcctggccaaggaatatatcgaccccgaaaccaagaaacacattccataccgcgaacataagtctctcacgggtactgcccgatacatgtccattaatacacacttggggaaggaacagagtcgacgagatgatctggaagctctgggccacatgtttatgtacttcctgcggggatccctgccctggcaggggttaaaagcggacacactcaaagaacgctatcagaaaatcggcgatactaagcgggctactcctatcgaggtactctgcgagaatttccctgaggaaatggcaacttaccttcggtacgtgagacgtctggatttcttcgaaaagcccgattatgactacctgcggaagctcttcaccgatctgttcgataggtctggctttgtatttgattacgaatacgactgggccggtaaacccctgccaacaccaatcggaacggtgcacaccgatttgccctctcaacctcaactcagagataagactcagccgcattctaaaaaccaggccctgaacagcaccaatggggaactaaatgcggacgatcctactgcgggccactccaacgctcccattactgcccccgccgaagtggaggttgccgacgaaaccaagtgctgttgctttttcaagagacgcaagaggaaaagtctccagcgtcacaaatag

SEQ ID NO: 110967 - DNA, 645 bp, synthetic construct
  misc_feature 1..645: note = Description of Artificial Sequence: Synthetic coding sequence
  source 1..645: mol_type = other DNA
atgtctatcaacacccatcttggcaaagagcaaagccgccgagacgatctcgaggcactcggccacatgtttatgtattttctacggggatcacttccctggcagggactgaaggctgatactctgaaggagaggtatcagaaaattggcgatacgaagagggccaccccgattgaggtcctgtgcgaaaacttccccgaagagatggcaacctacctcaggtacgtgaggcggttagatttttttgaaaagcccgactacgactacttgcgaaaactctttactgacttgttcgatcggtcgggtttcgtctttgattacgaatatgattgggccggcaagccgctgcccactcctatcggaaccgtgcacaccgacttaccaagtcagccgcagctaagggacaagactcaaccacccgagtcaagtccttgttctcccctgggccgggacttagtgcggggtccccgtggcccccctacagctgcacaaggccagacactggccgggtctcagaatgccgactgcaggggacgagcttggctgcggagaccgcaccctcgggatgtgggaagtctgccaagctgcaaaacactcgctgagatttccaccccggtgtcatcgccacccctgcaggagcattag

SEQ ID NO: 110968 - DNA, 1272 bp, synthetic construct
  misc_feature 1..1272: note = Description of Artificial Sequence: Synthetic coding sequence
  source 1..1272: mol_type = other DNA
atggaaaataagaagaaagacaaggataagtcagatgataggatggcacgcccaagcggccgaagcgggcacaatacccgcgggactggatctagctcctcaggcgtgctaatggtcgggccgaactttagggtcggaaaaaagataggttgcggcaatttcggggaactccggctgggcaaaaatctgtatacaaatgagtatgtggctatcaaactcgaacccatgaagtcacgcgcgccacagctgcacctggaatacaggttctataagcagctgggcagtggagatggaattcctcaggtctactacttcgggccctgtgggaaatacaacgcaatggtcttagaattactcggtccctctctggaggatctgttcgatctttgcgaccgaaccttttctctgaagacagtcctgatgatagcaatacagctgatatcaagaatggagtacgtccatagcaaaaacctgatttatagggacgtcaaaccagagaactttctaattggccgccccggcaataaaacccagcaggtcatccacatcatagactttggactggcaaaggagtatatcgaccctgaaacaaaaaaacacatcccatacagggaacacaagtcactcactggaaccgcccgctatatgagtattaatacccacctaggcaaagaacagtccagaagagatgatctggaggccttaggacacatgttcatgtatttcttaagaggctccttgccatggcaaggcctgaaagcagatacactgaaggagagataccagaagatcggtgataccaagcgcgccacaccaatagaggtactgtgcgagaatttcccagaaatggccacctacctccggtacgtcaggcggcttgatttctttgagaaacccgattatgattatctgagaaaactgttcactgacttgtttgacaggaagggatacatgttcgactatgaatacgactggattggaaagcagcttcctacccctgttggggccgtgcagcaagatcctgccctgtcctcgaatagggaagcccaccagcatagagacaaaatgcagcagagcaaaaaccaagtcgtcagttccactaatggcgaactgaataccgacgaccctaccgccggccggagcaacgctccaataacagcaccgactgaagtggaggtgatggacgaaacaaattgccagaaagtgctcaacatgtggtgttgttgtttcttcaagagacgcaaaagaaaaactatacaacgacataaatag

SEQ ID NO: 110969 - DNA, 1368 bp, synthetic construct
  misc_feature 1..1368: note = Description of Artificial Sequence: Synthetic coding sequence
  source 1..1368: mol_type = other DNA
atggaaaacaagaagaaggacaaagataaaagtgatgacagaatggcaagaccatccggacggtccggtcacaatacacgtgggaccggatccagcagctcaggtgttctgatggtggggcccaatttcagggttgggaagaaaattggttgtggtaacttcggggaactaagactcggcaaaaatctttacaccaacgagtatgtcgccattaaactcgagccaatgaaaagcagggcccctcagcttcacttggaatacaggttctacaaacagctcggcagcggggatggcatcccgcaggtgtactattttggcccctgcggtaagtacaatgccatggtgttggagcttcttggcccgtccttggaagatctgtttgacctttgtgatcgaaccttctctctgaagactgtgcttatgatcgctatacagctgattagcaggatggaatacgtgcattccaaaaacctaatttatagggacgtcaaacccgagaacttcttgatcgggagacctggcaacaagacacagcaggttatccatattatagattttggccttgccaaggagtatattgatcctgagaccaagaagcatatcccataccgggagcataagtccctcacagggacagctcggtatatgtctataaacacacatttgggcaaagagcaatcaagaagggatgacctggaggctctgggacatatgttcatgtacttcttgagaggctcactgccttggcagggactcaaagccgatactctgaaagagaggtatcagaagataggagatactaagcgtgctactcctatcgaggtcctctgcgaaaacttccccgagatggcaacctatttacggtacgttagacgcttggatttttttgagaagcctgactatgactacctgagaaagttgttcaccgatctgtttgataggaaaggttacatgttcgactacgagtacgactggatcggtaaacagctgccaacgcccgttggtgctgtgcagcaggatccagcgttgagctcaaaccgggaggctcatcagcaccgggataaaatgcagcagtctaagaaccagtctgcagaccaccgtgccgcatgggattcccaacaggctaatcctcaccacttgcgggcacatctggccgctgatcgccacggaggttcagtgcaggtggtcagctccactaacggtgaactcaataccgatgatcccaccgccggacggagcaacgctcccatcacggcacccactgaagtggaggttatggacgaaaccaactgtcagaaagtgctgaacatgtggtgttgctgtttctttaagagacgtaaacggaagactattcagcgccataagtag

SEQ ID NO: 110970 - DNA, 1344 bp, synthetic construct
  misc_feature 1..1344: note = Description of Artificial Sequence: Synthetic coding sequence
  source 1..1344: mol_type = other DNA
atggagaataagaaaaaggataaagataaaagcgacgatcggatggctagacctagtggtcggtcgggccacaacacacgcggcaccgggtcctcatcaagcggcgtgctgatggtcggccccaactttcgagtgggaaagaagatcggctgtggcaatttcggggagctgcgattgggaaagaacctctatacaaacgagtacgtagccatcaagctggagcctatgaagagccgcgcgccacagctccatttggaataccgtttttataaacagctggggtcaggtgacggaattccgcaggtttattattttggcccatgtggtaaatacaacgctatggtattggaactcctgggcccgtccctagaggacctttttgatttgtgtgaccggaccttctcactgaagaccgtgttaatgatagctattcagttgattagcagaatggagtatgtgcattccaagaacctgatctatcgagacgtcaagcccgaaaactttctgatcggacgacccgggaacaagactcagcaggttatccacattatcgacttcggcctcgctaaggaatacatcgatcctgagactaagaagcatattccttacagggaacataagtcactgaccgggactgctcgctacatgtctatcaacacccatcttgggaaagagcaatcccgccgtgacgacctcgaagctctcggtcacatgttcatgtatttccttcgcgggtcacttccctggcaaggcttaaaagctgacaccctcaaagagcgataccagaagattggtgatacaaaacgcgcaactccaatcgaagtgctctgtgagaacttcccggaaatggctacatatttaaggtacgtgcgaagacttgacttctttgaaaagcccgattatgactatctccgaaaactgtttacagatcttttcgaccggaagggttacatgttcgactatgaatacgactggatcgggaaacagctgccaactccggtcggcgccgttcaacaggaccctgcccttagttctaaccgtgaagcgcaccagcacagggacaaaatgcaacagtccaagaatcagagcgctgatcatcgggccgcatgggactctcagcaagccaatcctcaccatttacgagcacatctagcggcggaccggcatggggggtcagtccaggttgtgagttctaccaacggagaactgaatacagatgacccaaccgccggcaggagcaatgcccccatcactgcgcctactgaggtagaggtaatggacgaaaccaagtgctgctgtttcttcaaaagaagaaaaaggaagaccattcagaggcataaatag

SEQ ID NO: 110971 - DNA, 1344 bp, synthetic construct
  misc_feature 1..1344: note = Description of Artificial Sequence: Synthetic coding sequence
  source 1..1344: mol_type = other DNA
atggagaataaaaaaaaggacaaagacaagtccgatgatcgaatggcaagaccttctggccgctctggtcataatactaggggcaccgggagcagctcctctggcgttcttatggttggccccaattttagagttgggaagaagatcggctgtggtaacttcggcgagctaaggttgggaaagaacttgtacaccaacgagtacgtggctatcaagctcgagccaatgaagagccgggctccccaactgcatttagagtatcggttttacaagcagctcggctccggtgacgggattccccaggtctactattttggcccttgcggtaagtacaacgctatggtcttggagttacttggcccatctcttgaagacttgttcgatctctgcgatcgcacattttcactgaaaacagtcctgatgattgcgatccagcttattagcagaatggaatatgtgcatagtaaaaacctcatttatcgggacgtgaaacctgagaatttcctcattgggcggcccgggaacaaaacccaacaggtgattcatatcatcgactttgggctggctaaggaatatatcgacccagagaccaagaagcacataccatatcgcgaacacaaaagccttacaggcaccgcccgctatatgagtattaatacacatctgggaaaagagcagtccaggagagacgaccttgaggccttgggccatatgtttatgtattttctcagaggctctctcccgtggcaggggctcaaagcagacacactgaaggagagatatcagaagatcggagacaccaagcgcgctactcctatcgaagtgctctgtgagaattttcctgagatggccacatacctgagatatgttcgccgcctggacttttttgagaaaccggactatgactacctcaggaagctttttacagaccttttcgatcgcaaaggatacatgtttgactacgagtacgattggatcggtaagcagctgcccactccggttggggcagtacagcaggatccagcccttagtagtaatcgagaagctcatcaacaccgggataagatgcagcagagcaaaaatcaatcggccgatcacagggcagcctgggattctcaacaggccaacccacatcacctgcgggcccacctcgcagcagatcggcacggcgggagtgtgcaggtggtgagctcaacaaatggggaactcaacaccgatgacccaactgccgggcggagtaacgcccctattactgcccccaccgaggtggaggtgatggacgaaacgaaatgttgctgcttctttaagcggagaaaaaggaaaactattcagcggcataaatag

SEQ ID NO: 110972 - DNA, 1368 bp, synthetic construct
  misc_feature 1..1368: note = Description of Artificial Sequence: Synthetic coding sequence
  source 1..1368: mol_type = other DNA
atggagaataagaagaaagacaaggataaaagtgatgatagaatggcccgtccgtctggtaggtctgggcataatacaagaggtactggatctagtagtagcggcgtgctaatggtgggccctaattttcgagtagggaagaagatcggctgtggcaattttggcgaactgcgcctgggtaagaatttatacactaatgagtacgtggcaattaaacttgagccaatgaaatctcgggccccacaactgcacctggagtatagattttacaaacagctcgggtccggagatggcatccctcaggtttactactttggcccttgtggaaagtacaacgctatggtgctggaactattgggtccaagccttgaggacctgttcgatctgtgtgaccggacattttccctgaagacagtgctgatgatcgccattcagctgatctctaggatggagtatgtgcattcgaagaacctgatctacagggatgtgaagcccgaaaattttctgatcggtcgtccaggcaacaagacccagcaggtgatccacattattgatttcggactggccaaagagtacatagatcctgagaccaagaagcatattccatacagagaacacaaatctctgaccggaaccgcgcgctacatgtctataaacactcatcttggcaaggagcagtcccgccgggacgatttggaagctcttggccacatgttcatgtatttcttaaggggcagcttaccgtggcaggggctgaaagcagataccctaaaggagcggtaccagaagattggagacaccaagcgggcaactcccatcgaagtcctttgcgaaaacttcccagagatggctacatatctccgttacgttaggcggctagacttctttgagaagccggattatgattacctgagaaagctattcacagacctcttcgatcgaaaagggtatatgttcgactacgagtatgactggataggtaaacaattgcctacccctgtaggcgccgttcagcaagaccccgctttgtcaagcaaccgagaagcccaccagcacagagacaagatgcagcagtcaaagaaccagagtgcggaccatcgagctgcttgggatagccagcaggcaaacccacaccacctccgcgcccacctcgcagcagaccggcacgggggctccgtgcaggtcgtgtcctcaactaacggagaacttaacaccgatgacccaaccgctgggcggagcaatgcacctataacagcacctacagaggtggaagtgatggacgagaccaattgccagaaggtgctgaacatgtggtgctgttgttttttcaagagacgtaaacgcaaaacgattcagcggcataagtag

SEQ ID NO: 110973 - DNA, 1275 bp, synthetic construct
  misc_feature 1..1275: note = Description of Artificial Sequence: Synthetic coding sequence
  source 1..1275: mol_type = other DNA
atggagaataagaaaaaagataaggataagtccgacgaccgcatggcgaggccctccggacggtccgggcacaatactcgaggaacgggcagctcctcctcaggagtgcttatggttgggccaaattttagggttggcaagaaaatcggctgtggcaactttggtgaactacgtcttggaaaaaacttatatacgaatgaatacgtggccattaagctggagcctatgaaaagcagggcacctcagctgcacctagaatataggttttacaagcagctggggagcggagacgggatacctcaagtgtattacttcggtccatgcggcaaatacaatgcaatggtgctggagctgctgggcccatctcttgaagatctgttcgatctctgcgaccgtactttctctctgaaaacagttctgatgattgcgatccagttaatatcacgcatggagtacgtccatagcaaaaacttaatctatcgcgacgtgaagcctgaaaattttctcataggacgtccaggcaacaaaacacaacaggtgatccacatcatcgactttggactggcgaaagagtacatagatcccgagacgaagaagcacattccctacagggagcacaagtctttgacaggaaccgccaggtacatgagcattaacacccatcttggtaaggaacagtcacggcgcgacgacctcgaagcgctcggtcacatgttcatgtatttcctgcgcggtagtctaccctggcagggacttaaggccgatactttgaaagagaggtaccaaaagattggtgatactaagcgcgctacccccatcgaggttctgtgcgagaattttcctgaggaaatggcgacttatctcagatatgtaagaaggctcgatttttttgagaaaccagactacgattacctgcgtaagctgtttaccgaccttttcgacagaaaaggatacatgttcgattatgaatacgactggatcggcaagcagctgccaacgcccgtcggagccgtacaacaggacccagctctgagcagcaatcgggaagcccatcagcatcgcgataagatgcagcaaagcaaaaatcaagtagtgtcttcaaccaacggagagctcaacacggatgaccccacagcaggaagatcaaacgccccgatcacagcacccactgaagtggaggtgatggacgagactaactgccagaaggtgctcaacatgtggtgttgctgcttctttaagcgcagaaagcgcaaaactattcaaaggcataagtag

SEQ ID NO: 110974 - DNA, 1272 bp, synthetic construct
  misc_feature 1..1272: note = Description of Artificial Sequence: Synthetic coding sequence
  source 1..1272: mol_type = other DNA
atggaaaataagaaaaaagataaagacaaaagcgacgatcgcatggcacggccatcaggccgcagcggccacaatacccgcggcactggaagcagtagcagtggcgtgctaatggtgggaccgaactttcgcgtaggaaagaaaatcggctgtggaaattttggcgagttacgattgggaaaaaacctgtacacaaacgaatacgtggctatcaaattagaacccatgaaaagtcgggcgccacagctgcacctagagtaccggttctataaacagctgggatctggcgacggaatcccccaagtttattactttggtccctgcggcaaatacaatgccatggtgctggagctgctcgggccctcgctggaagatttgtttgacttgtgtgatcgaacttttagcctcaaaactgttctaatgatagctatccagttgatcagccgaatggagtatgtgcatagcaagaatctgatctaccgggatgtgaaacctgaaaactttctgatcggcagacctggtaacaagacacaacaggtgattcatataattgattttggcctggctaaagaatacatcgatccggagaccaagaagcacatcccctatcgcgaacacaagtctcttaccgggaccgctcgatacatgagtattaacacccacttggggaaagagcagtcccggcgtgacgatctcgaagcgctgggccacatgtttatgtacttcctgagagggtccctgccctggcaaggcctcaaggccgacacactgaaggagaggtaccagaaaatcggggataccaagagggccacgcctatagaggttctttgcgaaaattttcccgagatggccacctacctgaggtacgtgaggcggcttgatttctttgaaaaacctgactacgactacctccgaaaactatttaccgatctgttcgataggaagggttatatgtttgattacgaatacgactggataggtaagcaactcccaacacctgtgggagccgtgcagcaggaccctgctctctcttctaaccgagaggctcaccaacatagagacaaaatgcagcaatcaaagaatcaggttgtgagcagcactaatggcgagttgaatactgatgatcccactgcaggcagatctaatgcgccgattactgctccaactgaggtggaggtgatggacgagaccaactgtcaaaaagtcctcaatatgtggtgctgctgtttctttaagcgcaggaagcgaaagaccattcagcggcataagtag

SEQ ID NO: 110975 - DNA, 648 bp, synthetic construct
  misc_feature 1..648: note = Description of Artificial Sequence: Synthetic coding sequence
  source 1..648: mol_type = other DNA
atgtcatcgtccgaagaagtgagttggatcagttggttttgtggcctgagaggtaacgagtttttctgtgaagtggacgaggactatatacaagacaagtttaatctgacaggactgaacgagcaggtgcctcactaccgccaggcgctcgatatgattctggatttggagccggacgaagagctagaagacaatcccaaccagtcagacctgatcgaacaggcagcagagatgctgtacgggctgattcatgcccggtacatcctgactaatagaggcatcgctcagatgctagaaaaatatcaacagggagatttcggatattgcccaagagtttactgtgagaatcagccaatgcttcccatcggattgagtgacattcccggtgaagccatggtgaagttatattgcccaaagtgcatggatgtgtatacccctaagtcctcccggcaccaccacacggatggcgcttactttggaactggattcccacacatgctgttcatggtgcacccagagtaccgccccaagagacctgcgaaccagttcgtccctcggctctatggctttaagatccaccctatggcttatcagctgcagttgcaggccgcaagcaattttaaatctccggtgaaaactatcaggtag

SEQ ID NO: 110976 - DNA, 648 bp, synthetic construct
  misc_feature 1..648: note = Description of Artificial Sequence: Synthetic coding sequence
  source 1..648: mol_type = other DNA
atgtccagctccgaggaggttagttggatttcttggttctgtggtctacgcgggaatgagtttttttgtgaagttgacgaggactatattcaggataaattcaatttaactggattaaacgagcaagttccgcattatagacaggcactggatatgatactcgacttagagcccgacgaggaattagaggacaatccgaaccaatcagatctgattgaacaggccgctgagatgctctacgggctaatccacgcccggtatatcctgacaaatcgcggcatagctcagatgcttgagaagtaccagcagggcgactttgggtattgcccccgcgtgtactgcgaaaatcagcccatgttgccgatcggcctctcagacatccccggagaagccatggtcaagttgtactgtccaaagtgtatggatgtctacacacccaaatcctcgcggcaccatcacaccgacggggcatactttggaaccggtttcccacacatgttattcatggtgcaccccgaataccggccaaagcggcccgcgaatcagttcgtgccccgattatacggctttaagatccatccaatggcataccagctccaactccaggctgctagcaacttcaagtctccagtgaagaccatcagatag

SEQ ID NO: 110977 - DNA, 648 bp, synthetic construct
  misc_feature 1..648: note = Description of Artificial Sequence: Synthetic coding sequence
  source 1..648: mol_type = other DNA
atgtcctcaagcgaggaggtgtcgtggatctcttggttttgtgggctgcggggcaatgaattcttctgcgaagtggacgaggactacatccaggataaattcaacctgactggattgaatgaacaggtgccccactatcggcaggcgctggatatgatcttggatctggagcccgacgaggagcttgaggataaccccaatcaatccgatttaatcgagcaagccgctgagatgctgtacggtctgatacatgctcggtatatccttactaatcggggcatcgcgcagatgctggagaagtaccagcagggcgactttggttactgtcctcgggtgtattgtgagaaccagccaatgctaccaattgggctttctgacatcccaggggaggccatggtaaagctgtactgcccaaagtgcatggacgtgtacacgcctaagtcctccaggcaccaccatactgacggtgcctatttcgggaccggattcccgcacatgctgttcatggtgcaccctgagtacagacccaagaggcctgctaaccagttcgtgccacgtctctatggattcaagatacaccccatggcctaccagctgcaattacaggccgcgagcaatttcaaaagccccgtgaagaccataagatag

SEQ ID NO: 110978 - DNA, 648 bp, synthetic construct
  misc_feature 1..648: note = Description of Artificial Sequence: Synthetic coding sequence
  source 1..648: mol_type = other DNA
atgtctagctctgaggaggtctcctggatcagctggttctgcggtctgagaggcaacgagttcttctgtgaggtagacgaggactacattcaggacaagtttaacctcacagggctcaacgagcaggtgcctcactatagacaagcattggacatgattctagatctggagcccgatgaagagcttgaagataatcccaaccagtctgacctcatcgagcaagcagctgagatgctttacggacttatccacgctcggtatatccttaccaatcgcgggatcgctcagatgttggagaaatatcagcagggggactttggatactgccctcgcgtgtactgcgaaaatcagcctatgttacctataggactgtctgatatcccaggggaagcaatggtgaagctctattgccccaaatgcatggacgtgtacactcccaagagctcccgccatcaccacacggatggcgcatacttcggcacaggtttccctcacatgctgttcatggtgcaccctgagtaccgtccaaagcgtcccgcaaatcaattcgtccctagactatacggcttcaagatccatcctatggcctaccagctacaattgcaggccgctagcaatttcaagtcaccagtcaagaccatacgctag

SEQ ID NO: 110979 - DNA, 687 bp, synthetic construct
  misc_feature 1..687: note = Description of Artificial Sequence: Synthetic coding sequence
  source 1..687: mol_type = other DNA
atgtcatcatctgaggaggtgtcctggatttcatggttttgcgggttgcgtgggaacgaatttttctgcgaggtggacgaggactatatacaggacaagtttaacctcactggactgaatgaacaggtccctcattatcggcaggccctcgacatgattttggatctcgagcccgatgaagaactggaggataacccaaatcaaagcgatctcatcgaacaggccgccgagatgttgtacggtttgattcatgcccggtacatcctgactaatagagggatagcccaaatgcttgagaagtaccaacagggtgacttcggctactgccctcgagtctattgcgagaatcaacctatgctgccaattgggctctccgacattcccggtgaagccatggtcaaactgtattgtcctaaatgtatggacgtctatacccccaagtccagccgccatcaccataccgacggggcttactttggcacggggtttccgcacatgctgttcatggtgcatccagagtaccgaccaaaaaggccagccaaccaattcgtaccatctagttgttcgcggcacccagacgtgcctctcttgcccagaaggagacccttctgtaggatgcactttcggcttagagaagtttaccaccaacagttgattcctgtccatggggatcaccatttgctatag

SEQ ID NO: 110980 - DNA, 648 bp, synthetic construct
  misc_feature 1..648: note = Description of Artificial Sequence: Synthetic coding sequence
  source 1..648: mol_type = other DNA
atgtcatcgagcgaggaggtcagctggattagctggttctgtggcctacgaggcaacgaattcttttgtgaggttgacgaggactatattcaggacaagtttaatctgacgggattaaatgaacaagtaccgcattacaggcaagctttagacatgatcttggatctcgagccagacgaggagctcgaagataatcccaaccagagtgacctgatagagcaggcagctgagatgttgtatggcctgatccatgcgcggtacatcctgacaaatagaggaattgcccagatgctggagaagtaccagcagggcgatttcggctactgcccacgagtttattgcgaaaatcagccgatgctaccaatcgggctgtccgatatccctggggaagctatggtgaaactctactgccccaagtgtatggatgtatatacgcctaaaagttcacggcatcaccatactgacggagcatactttgggactggctttcctcacatgttgtttatggtacatcccgagtataggccaaagcggcctgcaaaccagtttgtacccaggctgtacgggttcaagatccatcccatggcctatcagttacaactacaggcggcttctaatttcaagagtccggtgaaaacaattaggtag

SEQ ID NO: 110981 - DNA, 648 bp, synthetic construct
  misc_feature 1..648: note = Description of Artificial Sequence: Synthetic coding sequence
  source 1..648: mol_type = other DNA
atgagctccagtgaggaagtcagctggatttcgtggttctgtggactgagaggcaatgagttcttctgcgaggtggacgaagactacattcaggataagtttaacctaactggcctcaatgagcaggtgccccactacagacaagcactggatatgatcctcgacctagagccagatgaagagctcgaggacaaccccaatcagagtgacctgattgagcaggcagcagagatgctctacggcttgattcatgctcgttacattctaaccaatcgggggattgcacagatgctggaaaaatatcagcagggggacttcggctattgccctcgggtgtattgtgagaaccaaccaatgctgcccatcggtctgagcgatattccgggagaggcaatggttaaactttattgcccaaaatgtatggacgtctacactcccaagagcagccggcaccaccacacagatggagcctactttgggacaggttttcctcatatgttattcatggtgcacccagaataccggccaaagagacccgccaaccaatttgtaccccgcctttacgggtttaagattcatcccatggcataccagctgcagcttcaagccgcaagcaacttcaagtcaccagtcaaaacaattcgatag

SEQ ID NO: 110982 - DNA, 705 bp, synthetic construct
  misc_feature 1..705: note = Description of Artificial Sequence: Synthetic coding sequence
  source 1..705: mol_type = other DNA
atggagaaatgcaagggcaccagtaggatggccggcaccactagcgccgatgtcaaaatgagtagctccgaggaggttagctggatcagctggttctgcggtttgagggggaacgagttcttttgtgaggtggatgaggattatattcaggacaagttcaatcttactggcttaaatgaacaggtccctcattacagacaggccttagacatgatactcgatttggagcctgacgaggagctggaggacaacccaaaccagagcgatctgatcgagcaagccgccgaaatgctttatggtctcatccatgctcgctacatactgacaaatagaggtatcgctcaaatgttagaaaaataccaacagggtgatttcggctattgccctcgcgtctattgtgagaaccaacccatgcttccgatcgggctatccgatatccctggtgaggcgatggtgaagctctactgtccgaaatgcatggatgtgtacactcctaaatcatctaggcaccatcacaccgacggggcgtacttcgggactgggttcccacatatgctgttcatggtgcatcccgagtaccggcctaagcgccccgccaaccaattcgtgcccagactttatggcttcaaaatccatcccatggcttaccaattacagctgcaggcagcttcaaacttcaaaagtcctgtcaagaccatccgctag

SEQ ID NO: 110983 - DNA, 648 bp, synthetic construct
  misc_feature 1..648: note = Description of Artificial Sequence: Synthetic coding sequence
  source 1..648: mol_type = other DNA
atgtcctcttctgaagaggtgtcctggatttcctggttctgcggccttagaggcaacgaattcttttgtgaggtggatgaggattacatccaggacaagttcaatctgacagggctcaacgagcaagtgcctcattaccggcaggcattagacatgattctggacctcgagcccgacgaggaattggaagacaatccgaatcagtcggacctcatcgagcaggctgccgaaatgctgtacggactaatccatgcgaggtacattctgacaaatagaggtattgcacaaatgttggaaaagtaccagcaaggtgactttggatactgccctcgcgtttactgcgaaaatcaaccaatgctacctataggcttatctgatatccctggtgaagccatggtgaagctatactgccctaaatgcatggacgtatatacaccaaagagctcacggcatcaccatacagacggtgcttattttgggactggatttccccacatgttgtttatggtccacccagagtatcgaccaaagcggccggcgaatcaatttgttcctagactgtacggttttaaaattcatccaatggcatatcagctccagcttcaagccgcctccaatttcaagtcacccgtgaagaccattaggtag

SEQ ID NO: 110984 - DNA, 687 bp, synthetic construct
  misc_feature 1..687: note = Description of Artificial Sequence: Synthetic coding sequence
  source 1..687: mol_type = other DNA
atgtcatcaagcgaagaggtcagttggatctcctggttttgcggcctacgggggaatgagttcttttgcgaagttgacgaggactacattcaggacaaattcaatcttaccggattgaacgaacaggtgccgcattaccgacaggctctagacatgatactggaccttgaaccagatgaagaattagaagacaacccgaatcagagtgatctcatagagcaagccgccgagatgctgtacggcctgattcacgccagatacatcctcaccaacaggggcatagctcaaatgttggaaaaataccagcagggtgacttcggatactgtccaagagtgtattgtgagaaccagccgatgttaccaatcggtctcagcgatattcctggtgaggctatggtgaagctgtattgccctaagtgcatggatgtttacactccgaaatctagtcgccaccaccacaccgatggagcgtacttcgggactggctttccccatatgctcttcatggtgcatccagaataccggccaaaacgaccggccaaccagttcgtgccttccagctgctcgagacatcccgatgtgcccctgctgccccgaagaagaccgttctgccgtatgcacttccgccttagggaagtctatcatcagcaacttattccagtgcatggtgaccaccacctgctgtag

SEQ ID NO: 110985 - DNA, 687 bp, synthetic construct
  misc_feature 1..687: note = Description of Artificial Sequence: Synthetic coding sequence
  source 1..687: mol_type = other DNA
atgagctcttccgaggaggtgtcttggatcagttggttttgtgggttgaggggcaacgaatttttttgcgaggtggacgaagattatattcaggacaaatttaacctcactggactgaacgagcaggtgccccattaccggcaggctctggacatgattcttgatttggaacctgatgaggagctagaagacaaccccaatcagagcgatttgatcgagcaggcagctgagatgctttacgggcttattcacgcccgatacatcctcactaatagggggattgctcagatgctggagaagtatcagcagggtgacttcggctattgccctagggtctactgcgaaaaccaacctatgctgcccatcgggctgtctgatatacctggggaagcaatggtaaagttatattgccccaagtgtatggatgtctacaccccaaagagcagccgccaccaccacacggacggcgcttattttggaaccggcttcccgcatatgttattcatggtgcaccctgaatacaggcccaagcgtcccgcaaaccagttcgttccatcatcatgcagcagacatccagacgttccgctgctgcctcggagacgacccttctgcagaatgcatttccgacttcgtgaggtctaccatcagcaactcattcctgtccacggtgatcatcacctgctatag

SEQ ID NO: 110986 - DNA, 648 bp, synthetic construct
  misc_feature 1..648: note = Description of Artificial Sequence: Synthetic coding sequence
  source 1..648: mol_type = other DNA
atgagcagctcggaggaagtctcttggatttcctggttttgtggcctgcgcggcaacgagtttttttgcgaggtggatgaagactatattcaggataaattcaacctaacaggtctcaatgagcaggtgccgcactaccgccaggccctggatatgatcctggatctggaaccggacgaggaattggaagataaccccaatcagtccgacttgattgagcaggccgcagaaatgctctacggactgatacacgcaagatatattctgacaaacaggggaatcgcccagatgttggagaagtatcaacaaggggactttggctattgccctagagtgtactgcgaaaatcagcccatgctgccaatcggcctcagcgacatcccgggggaagccatggttaagctgtattgtcccaagtgtatggacgtttatacacccaaatcctcccggcaccatcacacggacggagcttacttcggaaccggatttccgcacatgctcttcatggtgcatcctgagtacaggcccaaacggcccgcaaatcagtttgtacctcggttgtacggcttcaaaattcatccgatggcgtatcagctccagttgcaggcagcgagcaacttcaagagtcctgttaagacgattcgatag

SEQ ID NO: 110987 - DNA, 705 bp, synthetic construct
  misc_feature 1..705: note = Description of Artificial Sequence: Synthetic coding sequence
  source 1..705: mol_type = other DNA
atggagaaatgtaagggtaccagtcgcatggccggaactacttctgccgatgtaaaaatgtctagtagcgaagaggttagctggataagctggttctgcggcctcagagggaatgagttcttttgtgaagttgatgaggattatatccaggataaatttaacttgactggtctgaatgagcaggtaccacactataggcaggctctggacatgatcctggacctagagccggatgaagagctggaagataaccctaaccagtcagatttgattgagcaggccgcagagatgttgtacggtctgatccatgcgcgttacatcctcaccaatcgaggtatagcccaaatgctggagaagtaccagcagggcgacttcggctactgtcccagagtctactgtgagaatcagcctatgctgccaatcggattgtccgatattccgggagaggccatggtcaagttatattgtccaaaatgcatggatgtgtacaccccaaaaagttctcggcatcatcatacagacggagcctacttcgggaccggcttcccgcacatgctgtttatggtccatcctgagtaccgcccaaaacggcccgcgaaccagtttgtgcctcgcctctatggctttaaaattcacccgatggcctaccagctgcaactgcaggcggcctctaatttcaagagcccagtgaagactatacgctag

SEQ ID NO: 110988 - DNA, 648 bp, synthetic construct
  misc_feature 1..648: note = Description of Artificial Sequence: Synthetic coding sequence
  source 1..648: mol_type = other DNA
atgtcatcatcagaagaggtcagttggatttcttggttttgcggtctcaggggaaacgaattcttttgcgaagtggatgaggattacattcaggacaagtttaacttgaccggactgaacgagcaggttccgcactatcggcaggccctcgacatgatactcgacctagaacctgatgaggagctcgaggataatccgaatcagtcggatcttatagaacaggctgctgagatgctctacggcctgatccacgctagatacatcttaacaaatcggggtatagcccagatgctggaaaagtaccagcagggcgattttggctattgcccacgggtatattgtgaaaatcagcctatgttgcctattgggctctcggatatcccaggagaggcaatggtgaagctctactgcccaaagtgtatggacgtctatacgcctaaaagttctagacatcaccacaccgatggtgcctattttgggaccgggttccctcacatgttgttcatggtacatcccgaataccgccccaagaggccggctaaccagtttgtcccacggctctacggtttcaaaatccatcccatggcttaccaacttcagctccaggctgccagcaatttcaagtctcctgtgaagacaatacgttag

SEQ ID NO: 110989 - DNA, 705 bp, synthetic construct
  misc_feature 1..705: note = Description of Artificial Sequence: Synthetic coding sequence
  source 1..705: mol_type = other DNA
atggagaagtgcaagggcacatctcgcatggctggaacgactagcgcagatgtcaagatgtccagcagcgaggaggtatcttggattagctggttttgtggcctgcgtggtaatgaattcttctgtgaggtcgatgaggattatattcaagacaaattcaatctaactgggctcaatgagcaagttccacattatcgccaagccctagacatgatcttggatctggagcccgacgaggagcttgaagacaatcctaatcagagtgatctgatcgaacaggccgcagaaatgttatacggactgatccacgctagatatatcttaactaacagagggattgcccagatgctcgaaaagtatcagcagggcgattttggctactgcccgagggtgtattgcgagaaccagccaatgctgccaatcggcctctcagatatccccggtgaagctatggtcaagctgtattgccctaagtgcatggatgtttacacacctaaatcaagcaggcatcaccacactgatggcgcatacttcggaacaggttttccccacatgctctttatggtgcacccagagtatcggccaaaaagacctgcaaaccagttcgttcctcgcctttacggttttaagatccaccccatggcctaccagcttcagcttcaggccgcatcaaactttaaatcccctgttaagacaataaggtag

SEQ ID NO: 110990 - DNA, 705 bp, synthetic construct
  misc_feature 1..705: note = Description of Artificial Sequence: Synthetic coding sequence
  source 1..705: mol_type = other DNA
atggaaaaatgcaaaggcacttctcggatggcaggtacaaccagcgcggacgttaaaatgagttctagcgaggaggtatcctggattagttggttttgcggtctacggggcaatgaattcttctgcgaggtagacgaggattacatccaggataaatttaacctgacaggcctcaacgagcaagtcccccattaccggcaggctctcgacatgatcctggacctggaacccgatgaagagcttgaagacaatccgaatcaaagtgatctgatagagcaggccgctgagatgctgtatggtttgatccatgctaggtacatccttaccaacagaggcatcgcccagatgctggaaaagtaccagcagggcgactttgggtactgtccaagagtctactgcgagaaccagcccatgttgcccatcggcttgtcagatattccaggcgaagctatggtcaagctgtattgtcctaagtgcatggacgtgtatacccccaaatcttcccggcatcaccataccgatggggcttattttggcaccgggtttccccacatgctttttatggtacaccctgaataccgccccaaacgccccgctaatcagttcgtccctcgtttatatggctttaagatccatccaatggcatatcagttgcagctccaggctgcttccaattttaaatcacctgtgaagacgattcgttag

SEQ ID NO: 110991 - DNA, 648 bp, synthetic construct
  misc_feature 1..648: note = Description of Artificial Sequence: Synthetic coding sequence
  source 1..648: mol_type = other DNA
atgagcagctctgaggaagtctcctggatatcctggttttgcggcctgagaggaaacgaattcttttgtgaggtcgacgaggactacatccaggataaatttaatctgacaggcctcaacgagcaagtacctcattacagacaggctcttgatatgatcctggacctggagcccgatgaggaactagaggacaacccgaatcagtcagacctcatcgaacaagccgccgagatgctgtacggccttatacatgcgcgctacatcctgacgaatcggggcatcgcgcagatgctggagaaataccagcaaggggacttcgggtactgtcctagggtgtattgtgagaatcagcccatgctgcccattggtttaagcgacattcctggagaggctatggtaaaactatactgtcccaagtgtatggatgtatatacaccaaaatcctcacgccaccatcatacagacggcgcttactttgggacgggtttcccccatatgctattcatggttcacccggaatatcggcctaagcggcctgccaatcagttcgtacctcggctgtacggcttcaagattcaccctatggcttatcagctacagctccaggcggcttcaaattttaaatctcccgtgaaaaccatccgatag

SEQ ID NO: 110992 - DNA, 648 bp, synthetic construct
  misc_feature 1..648: note = Description of Artificial Sequence: Synthetic coding sequence
  source 1..648: mol_type = other DNA
atgtccagcagcgaagaggtgtcgtggatctcctggttttgcggtctccgtggtaacgaattcttctgtgaagttgacgaggattacatacaagataaatttaacctgaccggtcttaatgagcaagtgcctcactaccgccaggccctcgacatgatcctcgacttggaacccgatgaagagctggaagataatccaaatcagtctgacctcatcgagcaggcagccgaaatgctctatggcctgattcacgctcgctacatactgaccaaccgcgggatcgctcagatgctggagaagtatcaacaaggcgacttcggatattgcccacgcgtctattgcgagaaccagccaatgctgcccatcggactttctgatatccctggagaggccatggtgaagctgtactgcccaaaatgcatggacgtatacacgccaaaatcctccagacaccaccatacagacggggcttactttggtaccggatttccacatatgttgttcatggtgcaccctgaatacaggcccaagcgccccgcaaatcaatttgtgcccagactgtacggttttaagatacaccccatggcctaccaattgcagctgcaggcagcctcgaacttcaagagtcctgtcaaaacgattcgatag

SEQ ID NO: 110993 - DNA, 705 bp, synthetic construct
  misc_feature 1..705: note = Description of Artificial Sequence: Synthetic coding sequence
  source 1..705: mol_type = other DNA
atggaaaaatgcaagggcacaagcagaatggctggtaccacctccgctgatgtcaaaatgagctcaagcgaggaggtctcctggattagctggttctgcggtctccgaggaaacgagtttttttgcgaggtggatgaagactacatccaggataagtttaacctgaccggcctcaatgagcaggtcccccactatagacaggctcttgacatgattctggaccttgaaccggatgaagaacttgaggataatccaaaccagtcggatctgatagaacaagccgcggagatgctttacggactgatccacgctcggtatatcttaaccaacaggggaatcgctcagatgctggagaagtatcaacagggcgatttcggctactgtcctcgcgtctattgtgaaaatcagcccatgctgcccatcggcttatcagacatcccgggtgaggcaatggttaagctgtactgtccgaaatgcatggacgtttatacacctaagtcgagtcggcaccaccatacggacggtgcgtactttggtacaggatttcctcacatgctgttcatggtgcatcccgaatatcgaccgaagcgcccggccaatcagttcgtacctcgattgtacggctttaagattcatcctatggcatatcagctacagctccaggccgcctctaatttcaagagtcctgttaaaacaatcagatag

SEQ ID NO: 110994 - DNA, 648 bp, synthetic construct
  misc_feature 1..648: note = Description of Artificial Sequence: Synthetic coding sequence
  source 1..648: mol_type = other DNA
atgagctctagcgaagaagtctcatggataagctggttctgcggactcagaggtaacgaatttttttgcgaagtggatgaggattatatacaggacaagtttaatctgactggtctcaacgagcaggtgccgcattacaggcaagccctcgacatgatcctcgatctagaaccagacgaggagctggaagataacccaaaccagtcggacctaatcgagcaggccgctgagatgctttacggtctgatccacgcccgttatattttgacgaacagagggattgctcagatgttggagaagtatcagcagggggactttggttattgtccgagagtgtactgcgaaaaccagcctatgctgcctatcggactatctgatatcccaggcgaggctatggtgaaactgtactgtcctaaatgcatggatgtgtacacccccaaatctagcagacaccatcacacagacggtgcctactttggaacgggcttccctcatatgctgtttatggtgcaccctgaatacagacccaaacgaccggccaaccagttcgtgccccgactttatgggtttaaaattcatccaatggcctatcaattacaactgcaggccgcctccaattttaagagccccgtgaagacgatccgctag

SEQ ID NO: 110995 - DNA, 687 bp, synthetic construct
  misc_feature 1..687: note = Description of Artificial Sequence: Synthetic coding sequence
  source 1..687: mol_type = other DNA
atgagctctagcgaggaggtcagttggattagctggttctgtggactccgcggaaacgagtttttttgtgaagtcgatgaagactacatccaggacaagtttaatttaaccggcctcaatgaacaggttcctcattatcgacaggctctggacatgatcctggatctcgagcccgatgaggagttagaagacaatcccaaccagtccgacctgattgaacaggctgccgaaatgctttacggcctcatccacgccaggtatattctgacgaacaggggcatcgctcaaatgcttgaaaaatatcagcagggggattttggctactgccctcgggtttactgcgagaatcaacccatgctccccattgggctgagcgatattcccggagaagccatggttaagctttactgccctaaatgcatggatgtgtacactcccaaatcctcgaggcaccaccataccgacggagcttacttcggaacaggcttccctcatatgttatttatggtccacccagagtataggcccaagcgccccgcgaatcaattcgtcccgagctcttgctcccgccaccctgacgtacccctgcttccacgccgtaggccattttgccgcatgcactttcgattgcgcgaggtatatcatcagcaactgattcccgtacatggcgatcaccatctactttag

SEQ ID NO: 110996 - DNA, 705 bp, synthetic construct
  misc_feature 1..705: note = Description of Artificial Sequence: Synthetic coding sequence
  source 1..705: mol_type = other DNA
atggaaaagtgcaagggaaccagccggatggcaggcactactagcgcagacgtcaagatgtcatcttccgaggaggtgtcttggatttcatggttttgcggcctgagggggaacgagtttttctgtgaagtggatgaggactatatccaggataagttcaacttaaccgggttaaatgaacaagtcccacactataggcaagccctcgacatgatactggatctggaaccggacgaggagttggaggataatccaaaccaatcggacctcattgagcaggccgctgagatgctgtacgggctgatccacgcacggtatatcttgaccaatcgcggcatcgcccagatgctcgaaaagtaccaacagggggatttcggctactgcccgcgagtgtactgtgagaaccagcccatgttgcctatcggcctttccgacatcccaggggaagccatggtcaagctctactgccctaagtgcatggatgtgtatactcctaagagctccaggcatcatcacactgacggtgcctacttcgggacgggcttccctcatatgctgtttatggtgcaccctgagtatcggcccaagcggcccgccaatcagtttgttcctcggttgtacggcttcaaaattcaccccatggcttatcagcttcagttgcaggccgcgagcaatttcaagagtcctgtgaagaccatccggtag

SEQ ID NO: 110997 - DNA, 648 bp, synthetic construct
  misc_feature 1..648: note = Description of Artificial Sequence: Synthetic coding sequence
  source 1..648: mol_type = other DNA
atgtcctcgtctgaggaagttagctggatttcatggttctgtggcttacgtggcaacgagttcttctgtgaggtagacgaagactatatccaggacaagttcaatctcacaggccttaacgagcaggtgcctcactacaggcaggctcttgacatgattctggacctagaacccgatgaagaactggaggataaccccaaccagtctgacctgatcgagcaggcagcagaaatgctttatggactcatccatgctaggtacatcctcaccaatcgcggcattgctcagatgctggaaaagtatcagcagggagactttggatactgccctcgggtgtattgtgagaaccaacctatgctgccaataggattgtccgacataccaggagaggctatggtgaagctgtactgccccaagtgcatggacgtgtacacgcccaaatcgagccgccatcatcacacggatggtgcttacttcgggactggcttccctcacatgttgttcatggtgcaccccgagtaccgaccaaagcgccctgctaatcagttcgtgccccggctgtacggtttcaaaattcatcccatggcctatcagctccagttacaagccgcctcaaatttcaagtcccccgtgaagactatccgctag

SEQ ID NO: 110998 - DNA, 648 bp, synthetic construct
  misc_feature 1..648: note = Description of Artificial Sequence: Synthetic coding sequence
  source 1..648: mol_type = other DNA
atgtcttcatctgaagaagtgtcatggattagttggttctgtggattgcgcggtaatgaatttttttgtgaagttgatgaggattacattcaagataaattcaatttgactgggctgaacgaacaggtgccacactacagacaagctttagatatgatcctcgacctggaaccagacgaggagttagaggacaaccccaaccaatccgacctgattgagcaggcggcagaaatgctttacgggctgattcatgcccgctatatccttaccaaccgcggcattgcccagatgctagagaagtaccagcagggcgacttcggatactgtcccagagtgtattgcgagaaccagccaatgttgcccatcgggctttctgacatcccgggggaagcgatggtcaaactatactgccctaagtgcatggatgtatatacacccaagtcctctcggcatcatcacactgacggagcgtactttggcaccggattcccacacatgttattcatggtccatccagagtacaggccgaagcgacctgccaaccagttcgtcccacggctgtacggcttcaagatacaccccatggcctaccagcttcagctgcaggcagctagtaacttcaagtcgccagtgaagactattcgatag

SEQ ID NO: 110999 - DNA, 648 bp, synthetic construct
  misc_feature 1..648: note = Description of Artificial Sequence: Synthetic coding sequence
  source 1..648: mol_type = other DNA
atgtccagctccgaggaggtcagctggatttcttggttctgcggactgaggggtaacgaattcttctgcgaggtggatgaggactatatccaggacaagttcaacttgactggactgaacgagcaggtgccccactaccgccaggctttggatatgatactggacctggagcctgatgaagagctagaggataaccccaaccagagcgacttgattgagcaggctgccgagatgctgtacgggctgatccacgcccgctacattctgacaaacagagggattgcccagatgctagagaagtaccagcagggggactttgggtattgcccacgtgtctattgcgagaaccagccgatgcttcctatcggactttccgacatccccggtgaagccatggttaagttgtattgcccaaaatgcatggatgtatatacaccaaagtcttcccgccatcatcatactgatggcgcttatttcggaacaggattccctcatatgctgtttatggtgcacccagagtacaggcctaagaggcccgccaaccagtttgtgcctagactatacgggtttaaaattcacccaatggcctaccaattgcaacttcaggcagcctccaactttaagagccccgtgaaaaccattcggtag

SEQ ID NO: 111000 - DNA, 648 bp, synthetic construct
  misc_feature 1..648: note = Description of Artificial Sequence: Synthetic coding sequence
  source 1..648: mol_type = other DNA
atgtcatcatccgaggaagtctcttggatctcctggttctgcggtctgcgcggtaacgagttcttttgcgaggtcgacgaagactatatccaagacaagtttaatctcaccggactcaatgagcaggttccccactaccgccaggctctggacatgattctggatttagaacccgatgaagagctggaggacaacccaaaccagtcagatctgatcgaacaggccgctgaaatgctgtacggtcttatccatgctcgttacatcctgacaaatcggggcattgcccagatgctggaaaagtaccaacagggagatttcggttattgcccacgagtatactgcgagaaccagcccatgttgcctatcgggttatccgacatcccaggggaggccatggtaaagctatattgtccaaaatgcatggatgtctacacccctaagtcctcacgacaccaccatacggatggtgcgtacttcggcacgggcttcccgcacatgctttttatggtgcaccctgagtatcggcctaagcgacccgcaaaccaatttgtgccacggctttatggttttaaaattcaccctatggcctatcagctgcaactgcaggccgcttctaacttcaaaagtccagtgaagacgattagatag

SEQ ID NO: 111001 - DNA, 648 bp, synthetic construct
  misc_feature 1..648: note = Description of Artificial Sequence: Synthetic coding sequence
  source 1..648: mol_type = other DNA
atgtctagcagcgaggaggtctcctggatcagttggttctgcggactgaggggcaatgaatttttctgtgaagtggacgaggactacattcaggataagtttaatctcaccggtttgaacgagcaggtgccgcactatcggcaggcacttgatatgatccttgacctcgagcctgacgaggaacttgaggataaccccaaccagagcgacctgatcgaacaggcagctgaaatgctctacggtctgatccacgcacggtacatcctgaccaatcgagggatcgctcagatgctggaaaagtatcagcagggcgattttggatactgcccacgggtctattgtgaaaaccagccaatgctcccaatcggacttagtgacatcccgggtgaggcgatggtgaaactttactgtcctaagtgcatggacgtctatactccaaagtcgtctcgccaccaccatactgacggtgcttatttcggcaccggctttcctcatatgctgttcatggtgcaccccgagtatagaccgaagcgccccgcaaatcagttcgtcccaagattatacgggttcaaaattcaccccatggcttaccagctacagctgcaggcagctagtaactttaagagccctgtgaaaaccattagatag

SEQ ID NO: 111002 - DNA, 648 bp, synthetic construct
  misc_feature 1..648: note = Description of Artificial Sequence: Synthetic coding sequence
  source 1..648: mol_type = other DNA
atgtccagttcagaggaagtctcttggatctcatggttttgcggcctacgcgggaatgagtttttctgtgaggtggacgaggactacatccaagacaaattcaaccttaccggactgaacgagcaggtgccccactaccgtcaagccctagacatgattctggatttggagccagacgaagaactggaagacaatcctaatcagtccgacctgatcgaacaagccgctgaaatgttatacgggctgatacacgctcgttatattctgacaaatcgtggcattgcacagatgctggagaagtatcagcagggagatttcggatattgcccccgagtgtattgtgagaatcagcccatgctaccaattggcctgtcagatattccaggggaagccatggtcaaactgtattgtccgaagtgtatggacgtctacacgcctaaatcttcgagacatcatcacacagatggtgcatatttcgggaccggctttccccatatgctcttcatggtacacccagagtaccgacccaagcggcctgcaaaccagttcgtgccgcggttatatggcttcaaaattcaccctatggcctaccagctacagttgcaagcggctagcaactttaaatctccagtgaagacaatccggtag

SEQ ID NO: 111003 - DNA, 648 bp, synthetic construct
  misc_feature 1..648: note = Description of Artificial Sequence: Synthetic coding sequence
  source 1..648: mol_type = other DNA
atgtcctcttctgaagaggtctcatggatcagctggttttgcgggcttagaggcaatgaattcttctgcgaagtcgacgaggactatatacaggacaagttcaacttgactggccttaacgagcaagtgccacactaccgtcaggctctggatatgatcctcgacctggagcccgacgaggaactggaagataacccaaatcagagtgacctcatagagcaggcagccgagatgctctacgggctcatacacgcaagatacatactaactaaccggggcatagcccagatgttggagaagtatcaacaaggagactttggctattgccccagagtctattgcgagaatcaaccaatgctaccaataggcctttcagacattccaggcgaagctatggtaaagctgtactgccccaagtgtatggacgtgtacacacctaaatccagtcgccaccatcataccgatggtgcctattttggtacgggtttcccacatatgcttttcatggttcaccccgagtatcggccaaagcgtcccgccaaccaatttgtacctaggctttacggtttcaagatccatccaatggcataccagctgcagctgcaggccgctagtaacttcaaaagtccagtcaagaccattcgatag

SEQ ID NO: 111004 - DNA, 648 bp, synthetic construct
  misc_feature 1..648: note = Description of Artificial Sequence: Synthetic coding sequence
  source 1..648: mol_type = other DNA
atgagtagcagcgaggaggtttcttggatctcatggttctgcggccttcgaggaaatgaatttttctgcgaggtcgacgaggactacattcaagataaatttaacctgaccggacttaacgaacaggtcccacattatagacaggccctagatatgatattggacctggagccagatgaggaattggaggataatcccaatcagagtgaccttatcgaacaggccgccgagatgttgtatgggctaatacatgccaggtacatacttaccaaccgcggcattgcccagatgctggagaagtaccagcagggcgattttgggtactgccctagagtgtactgtgagaaccagccgatgttaccaatcggcttaagcgatatcccaggggaagcaatggtaaaactgtactgcccgaaatgcatggacgtgtacacgcccaagtctagccgtcaccatcacaccgacggtgcctactttggcaccggctttcctcacatgctgttcatggtacaccccgagtatagacccaagcgaccagccaaccagttcgtgcctaggttatatggttttaaaatacaccccatggcatatcagttgcagctgcaggctgcttctaatttcaagtccccggtcaaaactattagatag

SEQ ID NO: 111005 - DNA, 648 bp, synthetic construct
  misc_feature 1..648: note = Description of Artificial Sequence: Synthetic coding sequence
  source 1..648: mol_type = other DNA
atgagctccagcgaagaagtgtcctggatctcttggttctgcgggctccggggaaacgagttcttttgcgaggttgatgaagattacattcaagataaatttaatctcactggattgaatgagcaggtcccccattaccggcaggcactggacatgatcctagacctggagccggatgaggaactggaggataaccctaaccagtcagacctgattgaacaagccgctgagatgctttatggtctgatccacgcccggtacattctgactaatagaggaatagcccagatgctggaaaaatatcaacagggagatttcgggtactgcccccgcgtgtattgtgagaatcagcctatgctgcctatcggcttatcagatatacctggtgaggcgatggtgaaattgtactgcccaaaatgtatggacgtgtacactcctaagagtagtaggcatcaccataccgacggcgcgtactttgggaccgggtttccacatatgctgttcatggtgcatccagagtatagacccaaaagaccggccaaccagttcgtgccccggctgtacggtttcaaaattcacccgatggcctaccaactgcagctgcaggctgcctccaatttcaaaagtccggttaagactattagatag

SEQ ID NO: 111006 - DNA, 4296 bp, synthetic construct
  misc_feature 1..4296: note = Description of Artificial Sequence: Synthetic coding sequence
  source 1..4296: mol_type = other DNA
atgggcaaagaacaggaactggtacaggctgtgaaagccgaggatgtggggaccgcccaacgactcctccaacgccccagacccgggaaagcgaagctgttaggctcaaccaagaaaattaatgttaacttccaggaccccgacggcttttccgcccttcatcacgcagccttaaacggtaataccgagttgatttctctcctactggaagcccaggccgccgtagacataaaggacaataaaggaatgagacccttgcactatgcagcctggcaggggagaaaagaacctatgaaattggtgctgaaggctgggtctgcagtaaacataccttccgatgaaggtcatattcccctgcatctcgccgcccagcatggtcactatgatgtttctgagatgctgctgcagcatcagtccaatccgtgcatggtcgacaactccggaaaaaccccacttgacctcgcttgcgaatttggccgagttggtgttgttcagctcttactatcctccaatatgtgtgccgcactcctggagcctagacctggcgatgctacagatcccaatggcacatctccactacatctagccgccaagaatggccatatcgacatcattcggctgctgctacaggccgggattgatatcaaccgccaaaccaagtcaggcaccgccctccacgaagctgccttatgtggcaaaacagaggtggtgagattgcttctggactccggcattaatgcccacgtgagaaacacctatagccaaactgcgctcgacatcgtgcatcagttcactacgtctcaggcgtctagggagattaagcagctgctccgcgaagcgagcgcagcactgcaggtccgcgctaccaaagattactgtaataattatgatctgacaagcctgaatgtaaaggccggcgacattataactgtgttagaacagcaccctgatggtagatggaaaggctgtattcatgacaaccgcaccgggaacgatcgcgtgggatatttcccaagctctctgggagaggcaatcgtgaaacgagcaggatcaagagcaggtaccgagccctctctcccccaaggcagcagtagctcaggcccttctgcacctcccgaagagatctgggtcctgcggaagccatttgccggcggagaccgctccgggagtatctcaggtatggcagggggccgtggctcgggcggccatgcactccacgccggctccgaaggggtgaagctgctggcgaccgtcctaagccagaagagcgtctctgagtccgggcctggtgattcaccagccaagccccctgaaggaagcgcaggggtggctcgctcgcagccccctgttgcccacgcaggtcaggtgtacggcgaacagccgccaaagaagctggagccggcctcagagggcaaaagcagcgaagccgttagccaatggttgaccgccttccagctccagttgtacgcgcctaacttcatatctgcaggctacgatctcccgaccattagtcggatgactccagaagatttaacagccatcggcgtgactaagcccggccataggaaaaaaattgccgccgagataagtggactcagtatcccagactggctgcctgagcacaaaccggccaacttggcagtgtggctgagtatgattggactggcccagtattataaggtgctggttgacaacggctacgagaacattgatttcatcaccgacatcacttgggaggacctgcaagagattggcataacaaagctgggacaccagaagaagctgatgcttgcagtccgtaaactggctgagctccaaaaggccgagtacgccaaatacgagggagggcctttacggagaaaggccccccaaagcctggaggtaatggccattgagagcccccctccaccagagccaactcccgccgattgccagtcccctaaaatgaccactttccaggacagcgagctgtccgacgaactccaagccgctatgacagggcccgcggaagtcggccctaccaccgagaagccttctagtcatctgccgccaactcccagagctaccacaagacaggacagtagtctgggcggcagggcccggcacatgtccagctcacaggagttgctcggggatggacctcccggaccatcttctccaatgtcacggagtcaggaatatctcctggatgaaggcccagccccaggaaccccccctagagaggcccgacccgggcgacacggacactcaataaagcgggcaagcgtgcctcctgttcctggaaagccacgccaggtgcttccgcctgggacgagtcatttcaccccgcctcagacgcccaccaaaacaaggccaggttccccgcaggctctgggcgggccccacgggccagcaccagccaccgctaaggtcaaaccgactccccagctgctaccccctaccgaacgccccatgtccccgcggtcattgccccaatcccccacccatcggggattcgcttatgtcctcccacagcccgtggagggcgaggtcgggccagccgcccctggcccagctcctccccccgtaccaaccgcagtgccaacgctgtgcctgcccccagaagctgatgctgaacctggccggccaaaaaagcgcgcacatagccttaatcgctacgccgcttcggatagcgaacccgaacgggacgaacttctcgttcccgctgctgccggaccttacgcaactgtgcagcgcagggtggggcggtctcattctgtgcgtgcccctgcaggggccgacaaaaacgtgaaccgatctcagagtttcgcggtcagaccccggaagaaagggcctccgcctccccccccaaaaagaagcagctctgcgctggcctctgccaatctcgccgatgagccggtgcccgatgcggagccggaagacgggctgcttggggtaagagcccagtgcaggcgggccagcgatcttgccgggagcgtggataccggatcagccggatctgtgaaaagcatcgctgccatgcttgagctttccagcattggtggaggcggcagagcggctcggaggcctcctgaaggtcatccaaccccccgacccgcatcccctgagccagggcgggttgccactgtgcttgcatctgtcaaacacaaagaagccattggccccggtggagaggttgtgaacagaagaagaacgctctctggacccgttacagggctgttagccaccgcacgccgcgggccaggagagtccgccgatcccggaccttttgtggaggatggaactggcaggcagagacctcgaggtcccagtaagggcgaggccggcgtggaaggtccccccttggcaaaagtggaggctagcgcgactctaaagaggcgcatcagggctaagcaaaaccagcaagaaaatgtcaagttcattctgactgaatccgataccgtaaagcgtaggcctaaggccaaagaacgcgaagctggccctgaaccaccccccccactgagcgtgtatcacaatgggacaggcactgtgaggcgccgccccgcctctgagcaggctgggccccctgaattacctccccctcccccgcctgctgagccacccccgactgatctggcccatctgccaccattgcccccccctgaaggagaagccagaaagccagctaagccccctgtctcacccaaacctgtgctgacacagccagtgccaaagctgcaggggtccccaactccaacttctaaaaaggtcccgctcccgggacccgggtctccagaagtcaagcgggcacatggaacacctccacccgtttcgccgaagcccccccctccccctactgcccccaagccggtgaaagccgtcgcaggcctgccaagcggcagtgctggaccctcccctgctccgtcaccggcccgtcagccaccagcggcactagccaagccacctggcactccaccctcgctcggagctagcccagccaagccaccttctccgggagccccagcgctgcacgtgcccgccaagccccctagggcagcagccgccgcagctgcagccgctgccgcgccgcctgcgcccccagaaggcgcgagtcccggggactccgcccgacaaaaattagaggaaacaagcgcgtgccttgcagcggcactgcaagccgtcgaggagaagattcgtcaggaagacgcgcagggtccacgcgattccgctgcagaaaaaagtactgggtcaatcctggatgacatcggctctatgttcgacgatcttgccgatcagttagacgccatgctcgagtag

SEQ ID NO: 111007 - DNA, 2115 bp, synthetic construct
  misc_feature 1..2115: note = Description of Artificial Sequence: Synthetic coding sequence
  source 1..2115: mol_type = other DNA
atgtgtgctgctctgctcgagccacgtccaggcgacgccaccgaccctaacgggactagccccctgcatcttgcggccaaaaatggccacattgatattataagactgcttcttcaggccggtatcgacatcaaccgccaaacaaagtcaggcacggccctgcatgaagcagccctctgtggcaaaaccgaggtggtccgactgttgcttgactcaggcatcaacgcacatgtccggaatacctactctcagactgcactggatatcgttcaccagttcaccacttctcaggcctcacgtgagattaagcagctgctaagagaagcgtccgcggctctgcaggtgcgcgccaccaaggattactgcaacaactacgatctgacatctctgaatgtaaaggcaggcgatatcataactgttctggagcaacatcccgacggccgttggaagggctgtattcacgataataggacagggaacgatagggtgggctacttcccttcgagtcttggagaggccatcgttaagcgggctggctctagggcaggtaccgagcctagcctcccacagggctccagctctagcgggcccagcgcacctccggaggaaatctgggtattacgcaagccatttgccggtggtgaccggagcggctccataagtgggatggcaggaggacggggttctggaggccacgccctccacgcagggtccgagggtgttaaattactggccactgtgctctctcagaagtcagtctcagaatcggggcctggggattccccggcaaaaccaccagagggttcagctggtgtggccagaagccagccacctgttgcacacgcaggacaggtttacggggagcaaccccctaagaagttagagcccgctagcgagggcaaaagcagtgaggctgtcagccagtggctgacagcgttccagctccagctgtacgcccccaacttcatcagtgccggctatgatctgccaactataagcaggatgacccccgaggatctcactgccatcggtgtgacaaagcctgggcatcgtaagaaaattgccgccgaaatttctggtcttagcataccagactggcttcccgagcacaagcctgccaatctggcagtgtggctcagcatgataggcctggcccagtattacaaggtcctggttgacaacggctatgaaaacatagacttcatcactgatataacgtgggaggatctccaggaaatagggatcactaaactgggccaccagaagaaactcatgctggccgtccgcaaactcgccgagctgcagaaggctgagtacgccaaatatgaaggtggacctttaagaaggaaggccccccagagcctggaagttatggcaattgagagccctccccctccagagccaaccccggctgactgtcaatcaccaaagatgactacgttccaagattccgaactctcagacgaattgcaggccgctatgacagggcctgccgaagtaggcccgaccaccgagaaacctagctctcacctgcctcccacaccacgagccacgacccgtcaagactcgagtctggggggccgggccaggcatatgtcatcatcacaggagttgttaggagacgggccacccggacccagctcccctatgtcccggagtcaggagtacctcttagacgaaggacctgcccctggtacacctccccgagaggcaaggcccggaaggcatggtcactcaattaaacgggcttctgtcccaccagtgcccggaaaacccagacaagtcctgcctcccggcactagccactttactccgccccagacccccactaaaacccggcccggcagtcctcaagctctgggcggtccccatggccctgctccagcgacagctaaagtgaaaccgactccccagctcctcccacccaccgaaaggccgatgtcccccagaagcttgccacagagtccaacccaacggaccgggccagggccagctcagaattgtcctagcggacgccccgcttccaggtctggcgctgctcagggaaccggtgaccaaggacagggtccacccgctccgcctcatcctcagaacataagttatcaagagtattag

SEQ ID NO: 111008 - DNA, 3609 bp, synthetic construct
  misc_feature 1..3609: note = Description of Artificial Sequence: Synthetic coding sequence
  source 1..3609: mol_type = other DNA
atggggcgcgaacaggatctcatcctcgcagtaaagaacggcgatgttacgggagtacaaaagcttgtggccaaggtaaaggctaccaagaccaagctccttggaagcaccaaacggctcaatgtaaattatcaggacgccgatggtttcagcgcgctccaccacgcagccctggggggcagtctggaactaatcgccctgctgttggaggcccaagccacagtggacatcaaggactcaaacggcatgcgtcccctccactatgccgcctggcaaggtcgcctcgagcctgtgaggctgttactccgcgccagtgctgcagtcaatgctgcctctttagatggccaaattcccctgcacctcgcagcgcaatatgggcattacgaagtgagtgaaatgcttctccagcaccagtctaatccatgcctcgttaacaaagcaaaaaaaacccctctggaccttgcctgcgagttcggccgccttaaggtggcccagctgctcctgaactcccacctctgcgtcgccctgctggagggggaggccaaagatccgtgcgaccctaactacaccacacccttacacttagccgctaaaaatggtcatagggaagtcatcaggcagcttttaagggccgggattgagattaatcggcaaacgaaaaccggcacagccctgcacgaggcagcgttatacggcaagacagaggtggtaaggctgctgctggaaggtggcgtcgatgtaaatatccgcaacacgtataaccagacagccctggatattgttaatcagtttactacgtcacaagcatctcgcgaaatcaaacaactgctgcgggaagcttcaggaatcctcaaagtgagagcactcaaagacttttggaacttgcatgatccaactgcactgaacgtccgtgctggcgatgtgatcactgtgctagagcagcatcctgacggaagatggaagggtcatattcacgaaagccagaggggaactgaccgaattggttacttccctcccgggatcgtggaggtggtctcaaaacgtgttggaattcctgctgcgcgactcccttccgctccgacgcccctgaggccaggattctccagaacgcctcagccgccagcggaggagccgccccatccgctgacctattcccaacttcctagggtgggcctgtcacccgatagccccgcaggcgacaggaattcagtgggctcagagggttcagtcgggtctatcaggtccgcaggcagtggccagtcttctgagggcacgaatgggcatggtcctggcctgttgatcgagaatgcccagcctcttccttccgcgggtgaggaccaggtccttccaggcctgcatccaccctctttggccgataatctttcacaccgacctttggcaaactgtagaagcggcgagcaaatatttacacaggatgtcagacctgagcaactgcttgagggtaaggacgctcaggccatccataattggctatctgaattccagctggagggatataccgcccacttcctccaggcgggatacgacgttcctactatctcgaggatgacacccgaggatcttacagctattggtgtgacaaaacctggccaccgtaaaaagatcgcgagcgaaattgcacagctttctatagctgagtggctgccttcctacatccccacggacctgctcgagtggctatgtgctctgggccttccacaatatcataagcagctggtgtcttctgggtacgatagtatgggattagtcgccgatttgacatgggaagaactccaggagatcggtgtgaataaattgggacaccaaaagaaactgatgttgggcgtcaaaagactggcggagctgagacggggactgctccagggcgaggccctgtctgaaggaggcagacggctggcgaaggggcccgagcttatggccatcgagggccttgaaaacggggagggccctgcgacggccggcccccggctgcttactttccagggaagcgagctcagcccagagctacaggctgccatggccggtggcggacccgagccccttcctctgccaccagcccgcagcccctcccaggaatctatcggagctcgctcacgtggctccggccattcgcaggaacaaccagccccacaaccttcggggggcgatccttctccgccccaagaaaggaacctgccggaaggtaccgagcgcccccccaaactttgctccagtttacctggccagggcccccccccctatgtctttatgtacccacaggggagcccttcctctccagcacctggacctccaccgggggcgccttgggccttctcttacctcgccggccccccggctacccccccagaccccccccgaccgaaacgacgctcgcactcactgtcccggccaggcccaaccgagggcgacgcggaaggggaagctgagggtccggtgggcagcacactgggatcctacgctaccctcactagaaggccgggcagaagtgctctggtgcgtactagcccatctgtgacacctactccagccaggggcacccctcgcagccagtcattcgccctccgcgctaggcgcaaaggaccccctccaccgccccccaagagactttccagtgtatcaggtcctagcccagagccaccacccctggatgagtctcccggcccgaaggagggagccactggccccaggagacggacactgtcagaacccgctggcccgagtgaacccccgggacctccggcccccgctggacccgcgagtgacacagaagaagaggaaccaggtccggagggaactcccccgtcacgtggtagtagtggcgaaggcctgccctttgcagaagaagggaaccttactatcaagcagagacccaagccagctgggccccctccacgggagacaccagtgcctccaggcctggactttaatctcactgaatccgacacggtgaagaggaggccaaagtgtcgggagagagaaccactgcagaccgccctactggcctttggcgttgcatcagcaacccctggaccagctgccccactcccaagcccaacaccgggagaatcaccacccgccagcagtctgccccagccagaaccatccagtctgccagcacaaggggttccgacaccgctggccccttctccagccatgcagcccccagtgccgccctgccccggaccaggcctggagagtagcgcagccagtagatggaacggagaaacagaaccccccgctgcccccgcagcactgctgaaggtgcccggggcagggacagctcctaaaccagtgagcgtggcctgtactcagttagcattctcaggcccgaagttggcaccaagactcggacccaggcctgtgcctcctcccaggcctgaatcaacaggcacagtgggacccgggcaggcccagcaaaggctggagcaaacatcaagcagcctcgctgcagcccttagggccgcggagaaatcaattggaactaaggaacaggagggaacccccagcgcctccaccaagcacatcctggatgacatcagtaccatgtttgacgctctcgcagatcagcttgatgctatgcttgactag

SEQ ID NO: 111009 - DNA, 3363 bp, synthetic construct
  misc_feature 1..3363: note = Description of Artificial Sequence: Synthetic coding sequence
  source 1..3363: mol_type = other DNA
atgaggcccctgcactatgcggcctggcagggtagactcgaaccagtgcggctcctccttcgggcttcagccgccgtgaatgctgcatccttggacgggcagatccctctgcatctggcagcccaatatggacactacgaggtgagtgagatgctgctgcaacatcagtcaaacccatgcctggtcaacaaggcaaaaaagacgccactcgatctggcgtgtgagttcggtagacttaaagtcgcacaactactgctcaattctcacctgtgcgttgctttgctggaaggggaagcaaaagatccttgcgaccccaattacacaacacccctgcacctggcagccaagaatgggcaccgggaagtgattagacagctgctaagggccggaatcgagattaacaggcagaccaaaaccggaaccgcccttcatgaggcagcactctacggcaagaccgaggtggtccgtttattgttagagggaggggtggacgtgaatattcgcaacacgtacaaccaaacagctctcgacatcgtgaatcaattcacaacttctcaagccagcagggagataaaacagttgctgagagaggcttccggaattctgaaagtcagggccctgaaagacttttggaacttgcacgatccaactgcactgaatgtccgagcaggcgatgtgattaccgtcttggaacaacaccccgacgggcggtggaagggacatattcacgaatcgcagcgcgggacagatagaatcgggtacttccctcctggtatcgtcgaggtggtgagtaaaagggtcggcatcccggcagctaggctgccatccgcgccaaccccgctgcgcccaggtttctcccgcacgccccaaccacctgcagaggagccacctcatccactcacttattcccagctgccaagagtgggtttatcccctgactccccagctggtgatagaaattccgtgggatccgagggttccgtgggtagtatccggtctgctgggtccggccagtccagtgaaggtacgaacggtcacgggcccggtctattaatcgagaatgcccagcctctaccctcagctggggaggaccaggtcctccccggattgcacccaccctccctagccgacaacctgtcccatcgacctttggcaaactgccgcagcggcgagcagatcttcacccaggatgtgcgcccggagcaactgctggaagggaaagatgcgcaggctatccacaactggctctccgagttccagttggagggctatacggcccacttcttacaggccgggtatgatgttccgactatttctcggatgaccccggaagatctcactgcaattggcgtgaccaaaccgggccatcggaaaaagatcgcgtcggagatagctcaacttagtatcgccgagtggctgccatcttacataccgaccgacctgctggaatggttatgtgccctgggacttccccagtaccacaagcagctagtatcctccgggtacgactccatgggcttggtcgccgacctcacatgggaggagttgcaggagattggtgtgaataagctggggcatcaaaagaaactgatgcttggcgtgaagcgccttgccgagctacgacggggtttactgcagggcgaggctctcagcgaaggcggacgtcggctcgccaaaggaccggagctgatggcgattgaaggactggagaatggggaggggccagcgacggcaggtcctagactgctcacctttcagggcagtgagctgagtcctgaattacaggccgcaatggccgggggcggcccagaaccactccccctgccgccggcccggtccccttcccaggaaagcattggcgctagatctcggggaagcggccactcacaggagcaacctgccccacagccatcagggggagacccatcaccaccacaggaaaggaacctccccgagggtacagaacgaccccccaagttatgctctagcctgccaggccagggcccaccaccgtacgttttcatgtacccccagggcagtcctagttcacctgcacccggtcctccacccggcgcaccctgggccttcagttatctggcaggccctcctgcaaccccgcctgaccctcctagacctaaaaggagatcccacagcctttcacgacctggacctactgagggggatgctgagggtgaggcggagggacctgtggggagcacgctaggctcgtacgcgactttgaccagacgacctggaagatctgctctggtccggactagtccatcggtaaccccgacacccgctagaggaactcctcgatcacaatcctttgcactgagggcccggcgtaagggccctcccccaccccccccaaagcgcctgagtagtgtgtcagggccctccccagaaccacctcctttagacgaaagccctgggcctaaggaaggtgccaccggaccacgcagacgcacactgagcgagcctgccggacccagcgagcccccgggaccacctgcccctgctggtcccgcctccgacacagaggaggaggagccgggtccagagggcaccccaccctcccgggggagctcaggagaggggctgccatttgcggaggaagggaatttgacaattaaacaacggcctaaaccagcgggcccaccaccccgggagactcccgtgcctcccggcctggacttcaacttgactgaatccgatacagtgaaaaggcggcctaaatgccgcgagcgggagcctctgcagactgcgttgctcgcattcggagttgcaagcgcgacccccgggcctgctgcaccattgccttcacctacccccggagagtccccacccgcctcctccctgccccaacccgaaccttcctctttgccagcgcaaggcgttccaactccacttgcccctagtccagctatgcagcctcctgtgcccccctgtcccggccccggtctagagtctagtgccgctagtcggtggaacggagagaccgagccgcccgccgctcccgccgcacttctcaaggtgcctggcgcagggaccgccccaaaaccagtgtccgtggcatgcacgcagctcgcattctccggtcccaaattagctccacgacttggcccccggcccgtaccaccgccgagaccagaaagtacagggaccgtaggtccaggacaggcccaacaacgactcgaacaaacaagctccagcctcgcagccgcgctccgggccgccgaaaaaagcattggtacaaaagaacaggaaggtactcccagcgcttccaccaaacatattctcgatgacatctctacaatgtttgatgcactagctgaccagttagatgctatgttggattag

SEQ ID NO: 111010 - DNA, 1026 bp, synthetic construct
  misc_feature 1..1026: note = Description of Artificial Sequence: Synthetic coding sequence
  source 1..1026: mol_type = other DNA
atggctgatgagaaaccctctaatggggtcttggttcacatggtaaagctcttgattaagacatttctggacggcattttcgacgatctcatggaaaacaacgtcctgaacactgacgaaattcacctgattggcaagtgtcttaagttcgtcgtctcaaacgcagagaaccttgttgatgacatcacagagaccgctcaaaccgccggaaaaatatttagagagcacctttggaacagcaagaagcagctgtcgtccgacatctcctccgacggggagagggaagccaacatgccaggtctcaacatccgtaataaggagttcaactaccttcacaacaggaatgggagcgagctggacttattggggatgagagacttgctcgagaacttaggatacagcgttgttattaaagaaaatttaactgcacaggagatggaaactgctctccgccaattcgctgcgcatcccgaacatcagagctcagacagcacgtttctcgtattcatgtctcactctattttgaacgggatttgtggtaccaaacactgggaccaggaacccgacgtcctgcatgatgacacgatcttcgaaatatttaacaacaggaattgtcaaagccttaaggataagcctaaggttattataatgcaggcatgtagagggaatggagccggaattgtttggttcacgactgatagtggaaaggccggagcggatacccacggacgccttctgcaggggaatatctgtaacgatgccgtgactaaggcgcatgtggaaaaggatttcatcgcctttaagtcaagcacacctcacaacgtgtcatggagacatgagaccaacgggagcgtgttcataagccagataatttattacttccgggagtacagctggtcccaccatttagaggagatatttcagaaagtgcagcactccttcgagacccctaacattttgactcagctgcccaccatcgaaaggctgtccatgactcggtatttctacctgttcccaggtaattag

SEQ ID NO: 111011 - DNA, 1026 bp, synthetic construct
  misc_feature 1..1026: note = Description of Artificial Sequence: Synthetic coding sequence
  source 1..1026: mol_type = other DNA
atggcagacgaaaagccctcgaatggcgtcctcgtgcatatggtgaaactattgattaagaccttccttgacgggatcttcgatgatctcatggagaacaacgtcctcaacacggatgaaattcatcttatcggtaaatgcttaaaatttgtggtgtctaacgccgagaacttagtggacgatattaccgaaactgcccagaccgcaggtaagatctttagggagcatctctggaattctaaaaagcaactatcctcagatatttccagcgatggtgaaagggaggctaatatgcctggactaaatatccggaataaagagttcaattacctgcacaataggaatggatctgaactggacttgctgggtatgagagatctcctggaaaatctggggtatagtgtggttatcaaggagaatctgacagctcaggagatggaaactgcactaaggcagtttgctgctcatccagagcatcaatcctcagattctacattcctcgttttcatgtcacacagtatccttaatggcatttgtgggactaaacactgggaccaggagccagatgtgcttcacgatgacaccatatttgagatcttcaataaccggaattgccagtccctcaaggacaagcctaaagtgatcattatgcaagcatgtcgaggtaatggagctggcattgtctggtttacaacagactctggcaaagccggagccgatactcatggccggctcctgcagggaaatatctgcaacgatgccgtgaccaaagctcacgttgaaaaagacttcattgcctttaagtcctccacgccacacaacgtttcttggcggcacgagaccaatggcagtgtgtttatctctcagattatctactattttagggaatatagctggagccaccacctggaagagatctttcagaaggtccaacatagctttgaaacaccgaatatccttacccagctgccgacaatcgaacgactcagtatgaccaggtacttttaccttttcccagggaattag

SEQ ID NO: 111012 - DNA, 834 bp, synthetic construct
  misc_feature 1..834: note = Description of Artificial Sequence: Synthetic coding sequence
  source 1..834: mol_type = other DNA
atggagaacactgagaactccgtcgactccaagagcatcaagaatctggaacccaaaatcattcacgggagtgaatccatggactctggaatctctctggataattcctacaagatggattacccagagatggggctctgtattattatcaacaataagaacttccacaaaagtacgggaatgacaagtaggagtgggactgatgttgacgcagcaaatcttcgcgagacctttaggaatctgaagtacgaggttcgaaataaaaatgacttaaccagggaagaaatcgtcgaactcatgagagacgtctctaaggaggatcacagtaagcgatcctcttttgtttgcgttctgctcagtcacggagaagaaggcattatattcgggaccaacggtcctgtggacttaaaaaagatcacaaatttctttcgtggggatcggtgccggtcactgacagggaagccgaagcttttcattatacaggcctgccggggcaccgagcttgattgtggcattgagaccgattcaggagtggacgacgacatggcctgtcacaagatccccgtggaggccgactttctttatgcttattccaccgctcccggctactattcgtggcgcaactccaaggacggaagttggttcatccagtccctgtgcgctatgctaaagcagtatgcagacaagttagaatttatgcatatattgaccagggtgaataggaaggtggccacagagtttgaatcgttctccttcgatgctacatttcacgccaagaagcagattccatgtattgtgagcatgttgacaaaagagctctatttctaccactag

SEQ ID NO: 111013 - DNA, 471 bp, synthetic construct
  misc_feature 1..471: note = Description of Artificial Sequence: Synthetic coding sequence
  source 1..471: mol_type = other DNA
atgagcgacgccttgataaaggtgagcatggaaaacaccgagaattctgtggattctaagagcattaagaatctggagccaaaaattatccacggatccgaatctatggattccgggatttccctggacaatagctacaaaatggactacccggagatggggttatgcattatcattaacaacaaaaattttcacaaatcgacgggcatgaccagccggagcggtacagatgttgatgcagcgaacttgcgggaaacattccgaaatctcaagtacgaggttcggaacaaaaatgatcttactagagaggagatcgtggagctgatgcgagacgtctcgaaggaagaccacagcaagcggtccagtttcgtgtgtgttctcctgtcccacggcgaggagggcattattttcggaacgaatggccctgttgatttgaagaacaacaagctgtttcagagaggaagtctttag

SEQ ID NO: 111014 - DNA, 354 bp, synthetic construct
  misc_feature 1..354: note = Description of Artificial Sequence: Synthetic coding sequence
  source 1..354: mol_type = other DNA
atggagaacacggaaaatagcgtcgacagtaaatccatcaaaaatcttgaacctaagatcatccatgggtcagagtcaatggatagcggaatctccctcgacaattcatacaaaatggactatcccgaaatggggctctgcattattattaataataagaactttcacaaaagcacaggtatgaccagccggtccggcaccgacgtggacgccgccaacctgagagagacatttagaaatctgaagtatgaggttagaaacaagaatgacctcaccagggaggaaatcgtggaactcatgagggacgttagcaaggaagaccactctaagcggtccagcttcgtctgcgtgtag

SEQ ID NO: 111015 - DNA, 834 bp, synthetic construct
  misc_feature 1..834: note = Description of Artificial Sequence: Synthetic coding sequence
  source 1..834: mol_type = other DNA
atggagaatacagagaattcggtcgatagcaagagtataaagaacctcgagccgaagattatccacgggagtgaaagcatggatagcggtatatctctggataacagctacaaaatggattaccccgagatggggctgtgcatcatcattaataataaaaactttcataaaagcactgggatgacgagcaggtctgggaccgacgtggacgcggcaaaccttagagagacctttaggaacctgaaatatgaggttcgcaacaaaaacgacctaacgagagaggagatagttgaattgatgagagatgtttcaaaagaggaccactccaagaggagtagctttgtgtgtgtgctgctgagtcacggggaagaagggataatatttgggactaatgggcctgtcgacctcaagaaaatcactaacttttttcgcggagaccggtgccggtcgttgaccgggaagcccaaactctttatcatacaggcatgccggggcacggagttggactgcgggatcgagaccgattccggcgtggatgacgacatggcctgccacaaaattccggtggaggcggactttctttacgcctactcgactgcgcctggctattattcttggaggaattcgaaggacggttcctggtttatacaatccctgtgcgccatgctcaaacagtacgccgacaaactggagtttatgcacatccttaccagggtcaacaggaaggtcgcaaccgaatttgagtctttctccttcgacgcaacgttccacgctaagaaacagatcccctgtattgtgtctatgcttaccaaggagctgtatttttatcactag

SEQ ID NO: 111016 - DNA, 966 bp, synthetic construct
  misc_feature 1..966: note = Description of Artificial Sequence: Synthetic coding sequence
  source 1..966: mol_type = other DNA
atggcagactctatgcaggaaaaacagcgtatggctgggcagatgcttttgcaaacattttttaatattgaccagatctctccaaacaagaaagcccaccccaacatggaagccggccccccagaatcgggcgaatcaaccgatgctctcaagctgtgcccccatgaggagttcctgagactgtgcaaagagcgggccgaagagatttatcccatcaaggaacgcaataatcggacacgactggccctgatcatttgcaacaccgagtttgatcatctccccccgaggaatggcgctgacttcgatattacgggtatgaaagaacttctcgagggtctggactactctgtggacgtggaggaaaatctcactgctcgtgatatggaatccgcccttcgagcattcgctacgcgaccagagcataaaagcagcgactccactttcttggtcttgatgtcacatgggatcctcgaaggcatctgcggaacggtgcacgatgagaagaaacctgacgtgctcttatacgatacaatcttccagatattcaacaacagaaactgcctctccctgaaagacaagccaaaggtgattatcgtccaggcttgcaggggtgccaaccgaggcgaactgtgggttcgcgactccccagcgagtctggaggtcgcgtcaagccagagttctgagaatctcgaggaggacgctgtttacaaaacccacgtcgagaaagactttatcgccttttgctcatcaacaccccacaacgtgagctggagagactcaaccatggggtcaatctttatcactcaacttataacatgctttcagaaatactcttggtgttgccacctagaagaagtgttcagaaaggtacagcagagctttgagacaccccgggccaaggcgcaaatgcctaccatcgagagactctcaatgactaggtacttctacctattccctggcaactag

SEQ ID NO: 111017 - DNA, 213 bp, synthetic construct
  misc_feature 1..213: note = Description of Artificial Sequence: Synthetic coding sequence
  source 1..213: mol_type = other DNA
atggagaaaaaagagtgccctgaaaaatcctccagcagtgaggaagaacttccgaggcgtgattctgggagctcacgaaatatcgacgcctcaaaactgataagactccaaggcagtcgcaagctgttggtcgataatagtattcgcgaattgcagtacactaaaacgggcatttttttccaagcagaggcttgtgttacgaacgatacctag

SEQ ID NO: 111018 - DNA, 3099 bp, synthetic construct
  misc_feature 1..3099: note = Description of Artificial Sequence: Synthetic coding sequence
  source 1..3099: mol_type = other DNA
atgcccggcagagcggaggccggcgaagctgaggaggaggctggcgctgggagcgggtcagaagctgaggaagacgcgctgtgggagcgtattgagggtgtgcgccaccggctggcaagagctctgaatcctgccaagctgaccccttatctgaggcagtgtcgggtgatcgacgagcaggatgaagaggaggtgttgtccacatatagattcccctgccgggtcaaccgaaccggacggctgatggatattcttaggtgccgcggcaagcgaggatatgaggctttcttagaggctctggagttctattaccctgagcactttactctgctgaccggccaagaacctgcccagaggtgctccatgatcctggacgaggagggtccggagggcctgactcagtttttaatgaccgaagtgcgcaggctccgggaggccaggaagtctcaactgcagcgggaacagcaactccaggccagagggcgggtgctggaagaggagagggccggcctggagcagcgtctgagggaccagcagcaggcccaggagcgctgtcagaggttgagagaagattgggaggccggcagcctggaactcctgagacttaaggacgaaaattacatgattgccatgaggttggctcaactcagcgaagaaaagaatagtgccgttttaagatcacgtgatctgcagcttgccgtcgatcaacttaaactgaaggtttctcgactcgaggaggaatgcgctttactaagaagagccagaggtccccccccgggcgcagaagagaaagagaaagagaaggagaaagaaaaggaaccagacaacgtggatcttgtgagtgaattgagagccgaaaatcagaggctgactgccagcctgagggagctgcaggagggattgcaacaggaagcctcccggcccggggcccctgggtcagaacggatcctgttggatattctggaacatgactggcgggaggcgcaagattcccgacaggagttgtgccagaaactgcacgcagttcagggagagcttcaatgggctgaggagctgcgggatcagtatctccaggagatggaggatctccgcctgaagcaccgcacactgcagaaggattgcgacctgtataaacaccggatggctaccgtactggcacagctggaggagatcgagaaggaaagagaccaggctatccagagcagagataggatccaacttcagtacagccagagcctgattgagaaagatcagtaccgtaagcaagtgcgggggcttgaggcggagcgtgacgagctgctaacaactctgacaagcctagagggaactaaggcgttactagaggtccagctgcagagagcccagggcggcacctgtcttaaggcctgcgccagttcacattccctatgttccaacctctctagtacatggtccctatcggagtttcccagtcccctggggggccccgaggccactggagaagccgctgtgatgggaggaccagagcctcataactctgaggaggcaactgactctgagaaggaaataaatcgactttctattctcccattcccgcctagcgccggaagtatcttaagaaggcagcgggaggaagaccctgcgccccccaagcgctcattctcctctatgagtgacatcaccggatccgttactcttaagccctggagcccaggtctgagcagttcctcctcaagcgatagtgtgtggcctctgggcaagccagaaggcttattggctaggggatgtggcctggattttctcaacaggagcttggctataagagtctccggaagatcgccacctggcggcccggagccacaggataagggccctgacggattgagtttttatggggatcgttggtccggtgcagtggttcgtcgggtgctgagtgggcccgggtccgcgcggatggagccccgggaacaaagggttgaggctgcaggactggaaggagcctgccttgaagctgaagcccagcagagaacattgctctggaaccagggttcaacattgccctctctcatggactccaaagcatgccaatctttccacgaagccttggaagcttgggcaaagggtcccggggcggagccattctatatccgcgccaacctgacattacctgagcgcgctgacccacatgcgctctgcgtgaaggcccaggaaattctacggctggtcgattcagcctataagcggagacaggagtggttttgtacccgtgtcgaccctcttaccctccgtgatcttgacagaggcacggtgcccaactaccaacgggcgcaacagctgctcgaagtgcaggaaaaatgccttcccagttcccggcatcgcggccctcgcagcaatctcaaaaagcgcgccttggaccagctgaggctggtccgcccgaagccggtcggggctccggcgggtgacagtccagatcagctcctcctggagccgtgtgcagagccggagagaagtctgcgtccttactctctggtacgacccctcctggtgagcgctctgcggcccgtcgtgctgttaccggagtgcctagcccccaggcttatccgaaatctcctagatctgccctcttcccggttggacttccaagtttgccccgcggaatctctgtccggggaggagctttgtccgtcctccgcccccggcgctcctaaggcccagccagctacccccgggctgggcagcagaattagagctattcaggagtccgtgggcaagaaacactgcctcctggaacttggtgctcggggggtccgcgagctggtgcagaatgaaatctacccaatagtcatacatgtggaagttaccgagaaaaacgtgcgcgaggtcaggggactgttgggacggcccgggtggcgagatagcgagcttcttcgccaatgtaggggtagtgagcaggtcctttggggtcttccttgtagctgggttcaagtgccagcacatgagtggggccatgcagaggaacttgcgaaagtggtccgcgggcgcattcttcaggagcaagctagactcgtgtgggtcgagtgtgggtctagtcgtggttgtcccagcagctccgaagcttag

SEQ ID NO: 111019 - DNA, 3099 bp, synthetic construct
  misc_feature 1..3099: note = Description of Artificial Sequence: Synthetic coding sequence
  source 1..3099: mol_type = other DNA
atgccaggacgcgcagaagccggcgaggcagaggaggaggcaggggccggttcagggagcgaggcagaggaggatgcgttgtgggaacggatcgagggggtgaggcacagactggcaagagctctgaatcctgcaaaactgactccatatctgcggcaatgccgtgtgatcgacgagcaggacgaagaagaagttctttcaacgtatagattcccatgcagagtgaatcggacaggccgcctgatggacattttgaggtgtcgcgggaagcgaggatacgaagcattcctggaagccttggaattttactaccctgagcattttacactgcttaccggtcaggagcccgcacaacgatgtagcatgatcttggatgaagagggacctgagggtctcacgcaatttctgatgactgaggtgagaagactgagagaggcaagaaagtcccaactacagagagagcaacaactgcaagcccggggaagagtcctggaagaagagcgggccgggctggagcagcgcttacgcgaccaacagcaggcacaggagaggtgccagcgtttgcgggaagattgggaggctggaagcctggagctgctgcggctaaaagatgagaattacatgatcgccatgcgccttgcacaactctctgaggaaaaaaacagcgcggtgctgagatcccgagacctgcagctggcagttgatcaactcaaattgaaggtgtcgaggctggaggaagagtgtgcattgctccgccgcgcaagagggccaccgcccggcgccgaggaaaaagaaaaggaaaaggagaaggagaaagagccagataacgtggatcttgtttccgaactgagggcggagaatcaaaggctgactgcttcactccgggagctgcaggaaggattgcaacaagaagcctcaaggcccggcgcgcctggtagcgagagaattttactcgacattctagaacacgattggagggaagcccaggactcacgtcaggaactgtgccagaaacttcacgcagtccagggtgagcttcaatgggcagaggaactgcgggatcagtacctgcaggaaatggaagacctacgcctgaaacacaggactctgcagaaagactgtgacctgtataagcatagaatggcgacagtgctggcacagctagaggaaatcgagaaggagagggaccaagcgattcagagcagggataggatccaactgcaatattcacagagcctgattgagaaagaccagtaccgaaaacaagtgcgggggctcgaggccgagagggacgagttactcaccacactaacatctctggaaggcactaaggccctgctcgaggtgcaattgcaaagagctcagggggggacctgtctgaaggcatgtgcttcttcccactccttgtgctccaatctgtcctccacatggtcgctttccgaatttccaagccccctgggcggtcccgaggctacgggagaagccgccgtcatgggaggtccagaacctcacaattctgaggaggctaccgactccgagaaggagattaatcggctgtccattctgcctttccccccttccgcgggcagtatactgcggaggcagcgtgaagaagatcctgctccacctaagagaagcttctcctccatgtctgatataacaggctcagtcaccctcaaaccttggagcccagggctctccagctcgtctagtagcgactcagtttggccactggggaagcccgaaggtctgcttgcccgcgggtgcggactcgactttctcaaccgatctttggctatccgtgtctccggaagatcacccccaggaggcccggaaccgcaggacaagggccctgacggcctgtctttttatggagacagatggtctggtgcagttgtcagaagagtcctgagtgggcccggctctgcccggatggaaccacgagagcagcgggttgaggcagcaggactggagggggcatgtctagaggcagaggcgcagcagaggacactgttgtggaatcagggatctacactgccgagcctcatggattcaaaagcctgtcagtctttccacgaagctctcgaagcttgggcgaagggcccaggcgccgagcctttttatatcagggccaacctcacactgcccgaacgggccgaccctcatgccctgtgcgtaaaggctcaagagatcttgagactggtggactccgcatacaagaggagacaggaatggttctgtacccgagtggatccccttaccctgcgggacttagatagaggcaccgttcccaattaccagcgcgcccaacagttactggaggtacaggaaaagtgcctgccatcttcccgccaccggggtcccagaagtaatcttaagaagagagccctcgaccagctacggcttgttagaccaaagcccgttggggctccagctggggattctcccgaccaactcctcttggaaccatgcgctgaaccagagagatccctgcgcccctatagtcttgtgcggccactgctcgtaagcgcactgcgcccagtggtgctcttgcctgaatgtctcgctccgcgcctgattaggaacctgcttgacctgccgtcgtcaaggctagatttccaggtttgtcctgccgaaagcctcagcggggaagagctgtgcccctcttcagctcccggcgctccgaaagcacagcccgcgacccccgggctggggtcgagaatcagagctatccaggaaagcgttgggaagaagcattgtctattggaattgggagccagaggcgtgcgcgaacttgtgcagaacgagatctacccgatcgttatacacgtcgaggtgactgaaaagaatgtgcgcgaggtaagaggcctgctgggtcggcccggttggcgagattccgaactgttacgacagtgtaggggtagtgaacaagtcctttgggggctgccctgctcctgggtacaggtcccagctcacgagtgggggcatgccgaggagctcgccaaagttgtgcggggtcggatcctgcaggaacaggccagactagtgtgggtggagtgcggctcttccagagggtgccccagctcaagtgaggcttag

SEQ ID NO: 111020 - DNA, 2241 bp, synthetic construct
  misc_feature 1..2241: note = Description of Artificial Sequence: Synthetic coding sequence
  source 1..2241: mol_type = other DNA
atgggtgttggcgttggactcggaaacggcctgagactgctgccttggatggaggccagtcgccccggcgcccctggaagcgaaagaattctgctggatatactcgagcacgattggagggaggcccaagattcccgtcaggagctttgccaaaagttacacgcagtgcaaggggagttacaatgggcagaagagctgcgggatcagtatttgcaggagatggaggacctccgactgaagcatcggacattgcagaaggactgtgacctgtataagcacaggatggccaccgtgttggcccagctagaagaaatagagaaagaacgggatcaggccatccagtcacgggatcggatccagctacaatatagtcaatctcttattgagaaagaccaatatcggaagcaggtaagagggctggaggccgaaagggacgagctgctcaccacactgactagcctggaaggtactaaggccctgctggaggtgcagttacagcgggctcagggaggcacttgtttgaaggcctgtgccagctcacattccttatgctccaatctgtccagcacctggtcactttccgagtttccatcccctttaggcggccctgaagccaccggcgaggcggcggttatgggcggaccagagccacataacagcgaggaggcaaccgactcagagaaagaaattaaccggctgtccattctgcctttccctcccagtgccggttcaattttgcgacgtcagagggaagaagaccccgcccccccaaagaggtcctttagctctatgtccgacatcactgggagtgttaccctgaaaccttggagccctggcctatcatcaagttcaagttctgacagcgtctggcctctggggaaaccagaaggcctgctggccagaggatgtgggctcgattttttaaatcggagtctggccatacgggtgtcgggccggtctccacctggcggccccgagccgcaggataaggggcctgatggcctgagcttttatggagaccgctggtccggagcggtggtgcgcagagtactgagcggacctggctcggcaaggatggaaccgagggagcagagggtagaggctgccggccttgagggagcatgtctagaggctgaggctcagcaaaggactctgttgtggaaccagggtagcactctcccctcccttatggattctaaagcctgtcagagctttcacgaggctctggaggcatgggcaaaaggaccaggcgctgaacccttctatattagagccaatctcacgctgcctgaaagagctgatcctcacgccttgtgtgtgaaggcccaggaaatcttgaggctagtcgactccgcctataaaaggagacaggagtggttctgtactagagtggatccgctcactttgcgcgacctggatcgcggcaccgtgcccaactatcagagagcgcagcaattactggaggtgcaagagaaatgcttgccatctagcagacaccgcggtcccagaagtaacctgaagaaacgagcactggatcagctgcgattagtacggcctaagcctgtaggagcacctgccggagactcacctgatcagcttttgctggaaccttgtgccgagcctgaacgctcactccggccatactctttagtccggcctttgctggtctccgctttgcgcccagtcgtgctactgcccgaatgtttagcacctcggctaatccgtaacctcctggacttgcccagtagccgcctggattttcaggtgtgccccgcagagtctctgagtggggaagaactgtgccctagcagtgcacctggcgcccctaaagcccaacccgccacccccgggttgggctcaaggatccgcgccattcaggagagcgtcggcaaaaaacactgtctgctggaacttggcgcgcgcggagtgcgggagttggtgcaaaacgagatttacccaatcgttatccatgtagaagtgactgagaaaaatgtgcgcgaggtcagggggcttctgggacggccaggctggcgcgactctgaactgcttagacagtgccggggtagcgagcaggtgttatggggtctgccatgcagttgggttcaggtccctgcgcacgagtggggacatgccgaagaattggcaaaggtcgtgcgcggtcgtatactgcaggagcaagccaggctggtatgggtggaatgtggaagttctagaggatgtcccagtagcagcgaagcttag

SEQ ID NO: 111021 - DNA, 1443 bp, synthetic construct
  misc_feature 1..1443: note = Description of Artificial Sequence: Synthetic coding sequence
  source 1..1443: mol_type = other DNA
atggaagatctccggcttaagcaccgtaccctgcagaaggactgtgacctttacaagcatagaatggcaacggttttagctcagcttgaagagattgaaaaggaacgggaccaagccatccagagtagggacaggattcagctgcagtactcccagtcgttaattgaaaaggatcagtacaggaagcaggtgcgaggcctggaagctgaacgagacgaactattgaccacactcacttcactggagggaacaaaggctctcctcgaagtgcagctccagagggcgcagggtggcacctgcctaaaggcctgtgcaagcagccactcgctatgcagcaacctgagtagcacatggagcctgtccgaatttccatctcccctgggcggacccgaggccaccggggaagctgcagtcatggggggcccagagcctcacaatagcgaagaagccactgattccgaaaaggagattaatagattaagcattctgccatttccaccgagcgctggctccatcctccgacgccaacgcgaggaggatccagcccctcccaagcgcagttttagctcaatgagtgatattaccggatctgtcacactgaagccctggtctccaggcttgtcctcaagctcgagtagtgactctgtgtggccacttggcaaaccagaaggacttcttgctcgcggctgtggcctggacttcctcaaccgctcccttgctattagagtgtcagggcggagcccgcctgggggcccagaaccacaggataaaggacctgacggcctttcattctatggtgatagatggtcaggagccgtggtcagacgtgtgctatccggtccaggtagcgcgagaatggagcctcgagagcaaagagtggaagctgctggattagaaggcgcctgtcttgaagctgaagcccaacagaggacattgctgtggaatcagggcagcactctgccaagtctgatggactcaaaagcctgccagagcttccacgaagccctagaggcctgggctaaaggaccgggtgccgaacctttctatattcgggcaaacctgactctgccagaacgggctgacccccacgcactttgtgtgaaagcacaagagattctacggctcgtggattctgcgtataagaggcggcaagaatggttttgtacccgcgtggatcccctgaccttaagagacctcgaccgtggcacagtcccgaactaccagcgggcacagcaattgctggaagtgcaggagaagtgtttaccctccagcagacataggggaccacgcagtaacctgaaaaagagagctctggatcagctgcgcctggtacggccaaagccagtgggggctccggccggagactcacccgaccagctcctactggagccatgtgctgagcctgagcgcagcctgagaccctattccctggtcaggccctag

SEQ ID NO: 111022 - DNA, 222 bp, synthetic construct
  misc_feature 1..222: note = Description of Artificial Sequence: Synthetic coding sequence
  source 1..222: mol_type = other DNA
atgccagggggcggtcctgagatggacgattatatggagactctcaaggacgaggaagacgccttgtgggaaaatgtcgagtgtaatcgccatatgttaagccgttacatcaacccagctaagctgactccctatctacgtcagtgcaaagttattgatgagcaggacgaagatgaggtattgaacgcgcctatgttgccaagtaaaattaacagagcgtag

SEQ ID NO: 111023 - DNA, 3465 bp, synthetic construct
  misc_feature 1..3465: note = Description of Artificial Sequence: Synthetic coding sequence
  source 1..3465: mol_type = other DNA
atgcctggaggggggcccgagatggatgattatatggagactttgaaagatgaggaagacgcgctttgggaaaatgtggaatgcaacagacatatgcttagccggtacatcaacccagcaaagctcaccccataccttcgccagtgtaaagtgatcgatgaacaggatgaagacgaggtgcttaatgcacctatgctcccatccaagattaatcgtgccggtaggcttctggacattctgcataccaagggtcagcgcggatacgtggtgtttctggaatccttagagttctactaccccgagctttataaactggttaccgggaaagagcctacccgccgatttagtactattgtggtagaagaaggccatgagggattgacacactttctcatgaacgaggttatcaaactgcaacagcagatgaaagctaaagatcttcaaaggtgtgagttgctcgcccgattaagacagctggaagacgaaaaaaaacaaatgactctgacccgcgtagaacttctaaccttccaggagaggtactacaaaatgaaggaagaacgcgattcttacaatgacgagctggtcaaggtaaaggacgacaactataatttggctatgcgctacgcccaactctcagaggagaaaaatatggccgtgatgcggtcccgcgatctccaactggaaatagaccagcttaagcacagactcaacaaaatggaagaggagtgtaaactggaacgaaatcagtccttgaagcttaaaaacgatatcgaaaacaggcccaagaaggaacaggttctagagttagaaagagaaaacgagatgttgaagacaaagaaccaggaactgcagtctatcattcaggccggaaaaaggtccctacctgattccgacaaagccattctcgatattttggaacatgaccgcaaagaggctctcgaggataggcaggagctggtgaataggatctataatctccaggaagaggcgcgccaggcagaagagctgcgagataaatacctcgaagagaaagaggatcttgaattaaagtgcagtacactcggcaaagattgcgaaatgtacaaacaccgaatgaacactgttatgctgcaactcgaagaggtggaaagggaacgcgatcaggctttccactccagggacgaggcacagacacagtactcgcagtgcttgatcgagaaagacaaatatcgcaagcagattagagaactggaagaaaagaacgatgagatgcgcatagaaatggttcgtcgcgaggcatgtatagtgaacttagagtccaaactgcggcgcctgagcaaggattcaaacaacctcgatcagtcactccccagaaacctgcccgtcacaattatctcacaagattttggggatgcttccccaaggactaacggacaggaggctgacgatagtagtacgtcagaagagtcaccagaggattccaagtacttcttaccctaccatcctccccagagaaggatgaatttaaagggcatccagctgcaaagggccaagagccctatcagtctgaagaggactagcgattttcaggcgaagggacacgaagaagagggtacagacgcttctccttcttcctgcggcagcttgcccattactaactcatttaccaagatgcagccacctcggagtagaagctctattatgtctatcacagccgagcccccgggaaacgactcaatagttcgccgttataaagaggacgccccacatcgaagcacagtcgaggaggataacgattctgggggatttgatgccctggacctggacgacgactcccatgagagatactcctttggcccgagctcaatccattcctcctcctcctctcatcagtccgaggggttggacgcctacgacctggagcaggtaaatctgatgttccgcaaattctctctggaaaggccttttcgccccagcgtaacttccgttgggcacgtccgcgggcccggcccatcagtgcagcatacaaccctgaatggcgactctctcacaagtcaactgacacttctgggaggcaacgcccggggcagcttcgtgcatagtgtgaagcctgggtccctagccgaaaaggccggcctccgggagggacaccagttgctcctgttagaaggttgtatacggggcgagaggcaatctgtgcctctggatacttgtaccaaagaagaggcacattggacaatccagcggtgctctggtcccgtgacactgcactacaaggtcaaccatgaaggttataggaaactagttaaggatatggaagatgggcttattacctccggggatagcttttatattcggcttaatctgaatattagtagccagcttgacgcctgtacaatgtccttgaagtgcgacgacgtggttcatgtgcgagacaccatgtaccaggacagacacgagtggttgtgcgcacgggtcgaccccttcactgatcacgatctggatatgggcaccatcccaagttattcaagggctcagcaattgttattggtaaaactgcagaggcttatgcaccgcggttctcgggaagaggtggatggcacccaccacactctgcgcgcgctgcggaacacactgcagcccgaggaggccctgagtacttccgatccccgcgtctcacctagactaagcagagcctccttcctgttcggacagcttctgcagtttgtttccagatcggagaacaagtacaagcggatgaacagtaacgaacgggtgaggattatctcagggtcacctctcggctcacttgctcgcagtagtctggatgcaaccaaactactaacagagaaacaagaagagcttgatcccgaatctgagctcggcaagaacctcagtctcattccttactctctggtaagagccttctattgcgagcgccgaaggccggtgctgttcacccccaccgtgttggctaaaactctcgtgcagagactgctgaattcaggcggggccatggaatttactatctgcaagtctgacattgtcactcgggacgagtttctgcggcggcagaaaacggaaacgattatttactcccgggagaaaaaccctaacgcctttgagtgtattgccccggctaatatcgaagccgtggcagcaaagaataagcattgccttctagaggccgggatcggatgtacgagagacctgataaaaagcaatatctaccccattgtcctattcatccgcgtatgcgaaaaaaatatcaaacggtttagaaagctgctacccagaccagagaccgaagaagaatttctacgcgtgtgcaggctgaaagagaaagagctcgaggcgctgccctgcctctatgccactgtcgaacccgatatgtggggaagtgtggaggagctgctgagggtcgtcaaggataagatcggagaggagcagcgcaaaacaatctgggttgacgaggatcagttatag

SEQ ID NO: 111024 - DNA, 3114 bp, synthetic construct
  misc_feature 1..3114: note = Description of Artificial Sequence: Synthetic coding sequence
  source 1..3114: mol_type = other DNA
atggctacagaaagtaccccgagtgagataatagagagggaaaggaaaaagttgttagagattcttcagcacgaccccgacagcatcctggacaccctgacttccagaagactcatttctgaggaagagtatgaaacgctggaaaacgttactgatttgttgaagaaatcccgcaagctcctgatattagtacagaagaaaggggaggcgacgtgccagcactttctaaaatgtttgttttccacttttccacagagtgcagcgatttgcggcttgaggcatgaagtcctgaaacatgaaaacacagtgcctccacaatccatgggggccagctctaatagcgaggatgctttctctcctgggatcaagcagcccgaagctccagagatcacggtcttcttctcagaaaaagaacacctcgacctggagacctccgagttctttagggacaagaaaacaagttatcgagaaacagctttgagtgcgaggaagaacgaaaaggagtatgatacgcccgaagttaccctgtcttacagcgtagaaaaggtcggctgtgaagtaccagccaccattacttatatcaaggacggccagaggtacgaagagttagatgattcactttacctggggaaagaagagtacctggggagcgtggataccccagaggacgctgaggctactgtggaggaggaggtgtacgatgatccggaacacgtaggctacgatggagaggaggatttcgagaactccgaaaccaccgaatttagcggtgaagagccctcttacgaagggagcgagacaagcctaagtcttgaggaagaacaagagaaaagcattgaggagcgcaaaaaagtgtttaaagatgtcctcctgtgcctgaacatggaccggtctaggaaggtcctccccgacttcgttaagcagtttagtttggatcgtggctgcaaatggacacccgaatcccccggcgatttggcttggaacttcctaatgaaggtccaagcccgcgatgttacggcacgcgacagtattcttagccataaggtgctggatgaggactccaaagaagatctgttggcaggcgtcgagaatctcgaaattcgcgacatacagaccataaatccattggacgtcttatgtgccaccatgctatgctccgattcatccctacagcgacaggtgatgtctaacatgtatcaatgtcagttcgcattgccccttttgctgcctgacgctgaaaataataaatccatcctgatgttgggggccatgaaggacatcgtgaagaagcagagtacccagttttccgggggtccgactgaggataccgagaagtttctaacgctgatgaagatgcctgtcattagcttcgtcagacttggctactgtagttttagcaagtccagaatcctgaatactctgctgtctccagctcagcttaaattacataaaatattcctgcatcaggacctccccttgctggtgctgccgcggcaaatctccgatggactagtggagattacttggtgtttccctgactcagacgacagaaaggaaaacccatttttccagaagccggtggcactagcgaatctgcgcggtaatctggagtctttttggactcagttcggattcttgatggaggtcagttccgctgtgtttttctttactgactgtctcggggagaaggaatgggatctcctcatgtttctcggggaggccgccattgagagatgctatttcgtcctgagcagccaggctagggagagcgaggaggcgcaaatattccagcggattctgaacctcaaaccggcccagcttttgttctgggagaggggcgacgccggtgatcgccggaaaaacatggaagggctgcaagccgcacttcaggaggtgatgttctcttcttgcctcaggtgtgtgtcagtcgaagacatggcggccctggcacgcgagctgggaatacaggttgatgaggacttcgagaacacacagaggattcaggtttcctccggggagaacatggcaggcacagctgagggagaaggccagcagaggcatagtcaactgaaaagttcatccaaatctcaggcgttaatgcctatccaggagccaggcacccagtgtgaactgagtcagaatttgcagaatctgtacgggacccctgtattcagacctgttctcgaaaattcatggctctttcctaccagaattggaggtaacttcaatcatgtgtcattgaaggcatcttgggtcatgggtagaccattcggaagtgaacagagacctaaatggttccaccccctcccgttccaaaatgcgggagctcaggggaggggcaagtctttcggtatccaaagttttcacccccagatcttctacagcggcgagagatttatgaagttcagtcgcgttgcaagggggtgtcattccaacggtacgtttgggcggctgcctaggccaatctgtcagcatgttcaagcatgtcccgaaagaccccaaatgatgggcaccctggaacgcagtcgagctgtagcgtctaagatcggtcactcctactccttggactctcagcccgccagggctgtcggtaagccatggccccagcaagcgtgtacacgagtgacagaacttacagaggcaaccggaaaactcatccgaacgagccacattgggaagcctcacccccagtcttttcaaccggcagcagcgacccagaagctgcggcccgcgagccagcaaggcgtgcagatgaaaacccaaggcggggcttctaatccggctttacagataggaagtcaccccatgtgcaagtcctcacaatttaagtcagatcagtcgaaccccagcactgtgaagcactctcagcccaagcctttccattccgtaccttcccaacccaagtcctcccagacaaaaagctgtcagtcccagccctcgcagacaaaaccctcgccatgcaaaagcacccagcctaagccgagtcagccatggcctcctcagtctaagcctagccaaccaagacctccacagcccaagagctcctcgacgaaccctagccaggccaaggcccaccatagtaaggccggtcagaaacgtggcgggaaacactag

SEQ ID NO: 111025 - DNA, 933 bp, synthetic construct
  misc_feature 1..933: note = Description of Artificial Sequence: Synthetic coding sequence
  source 1..933: mol_type = other DNA
atggctacggagtctacaccaagcgagatcatcgaaagagagaggaaaaaactgctcgaaattctccagcatgaccccgactctatcctggacacactgacctcgcggagactcatctctgaagaggagtacgaaacgctggaaaatgttactgatttactgaaaaaatccaggaaattgcttattctagtgcagaaaaagggcgaggccacttgtcagcattttctaaaatgccttttctccacctttccacagagcgctgccatctgcggattgcggcccgaagtgttgaagcatgagaataccgtgcccccccaaagcatgggggcgtcttccaattcggaagacgccttcagccccggtatcaagcagcccgaggcaccagaaattactgtcttcttctccgagaaggaacacttagacctggagaccagtgagtttttccgcgacaaaaagacctcttaccgcgagactgccctctcggcgcgtaagaatgagaaagaatatgacacaccagaggtaacattgtcttacagcgtggaaaaagtgggctgtgaagtaccagccactatcacttatattaaagatggtcagcgttacgaggagctggatgactccctgtacttgggtaaagaagagtacctggggagtgtggatacccccgaggatgccgaggctacagtcgaagaagaagtgtatgatgaccccgaacacgtcgggtacgatggcgaggaagacttcgaaaattcagagaccacggagttctctggcgaggaaccaagctatgagggttctgaaacaagcctgagtctggaggaggaacaagaaaagtctatcgaagggtggtccaggactcacggactgaagcggtcttcccacgtaggcctgcctaagtgctgggactaccgaagagaacccccctgtttagcttag

SEQ ID NO: 111026 - DNA, 1446 bp, synthetic construct
  misc_feature 1..1446: note = Description of Artificial Sequence: Synthetic coding sequence
  source 1..1446: mol_type = other DNA
atggccactgagtccacaccctcagaaatcattgagcgcgaacgcaagaaactcctggagatcttacagcatgatcctgactcaatcttagacactctgacttccagaaggctcattagcgaggaagagtacgagaccttagaaaatgtgactgatctgcttaaaaaatccaggaaattgctgatcctggtgcaaaagaagggcgaggcaacatgccagcactttctgaagtgtctcttcagtacctttcctcagagcgccgctatatgtggcctgcgacatgaggtcctgaagcatgagaacactgtcccgcctcagagtatgggtgcatctagcaatagcgaggatgccttcagtcctgggataaagcaacctgaggcccctgagattacagttttcttctcagagaaggagcacctcgatctggagacaagcgaattctttcgcgacaaaaaaacctcttaccgggaaaccgctctcagcgccagaaagaatgagaaagagtacgatacaccggaggtgacgctgtcctactccgttgagaaggtaggctgcgaggtcccagcaaccatcacatatattaaagatggtcagcggtatgaagaactggatgactccctttacctggggaaagaggaatatctgggtagcgttgacactcctgaggatgccgaagccaccgtggaagaagaggtctatgatgacccagagcatgtgggctacgatggcgaagaagattttgaaaattcagaaacaaccgaattttccggagaagagcccagttacgagggttccgaaacttcactttctctcgaggaggaacaggagaaaagtatcgaggagcgtaagaaggtgttcaaagatgtactgctctgcctgaatatggaccggtccagaaaggtgctcccagactttgtcaagcagttctcgctcgaccgcggttgcaaatggactccggagtctcctggcgacctggcctggaactttctcatgaaggtgcaagccagagacgttacagctcgagactctattctttcacacaaggttctcgacgaggattctaaggaggatctgctcgctggtgtagagaaccttgaaatacgcgacatacagactataaacccattggacgtcctgtgcgccacaatgctgtgctctgatagcagcctgcagcggcaagttatgtccaatatgtaccagtgccagtttgcccttcccctgcttctccccgacgcggagaataacaagagcattctgatgctgggtgctatgaaagacatagttaagaaacaaagcacccagttctccgggggaccaacagaggatacagagaaattcctaaccctgatgaagactttaaaaaccctgagagagttcaagttccctctcgagaaaacttggctgggacaactcaaagtgcgggtctccaaggatactgtgagttag

SEQ ID NO: 111027 - DNA, 570 bp, synthetic construct
  misc_feature 1..570: note = Description of Artificial Sequence: Synthetic coding sequence
  source 1..570: mol_type = other DNA
atggtgctggagcaccctgcccgagtggaaccattttacgcggtgctcgagtcacccagctttagtctgatgggtatcctactcagaatcgcctctggcacccgactgagcatccctatcacttctaatactttgatctactatcatccacacccagaagatatcaagttccacttgtatcttgtgccaagcgacgccctgctgaccaaggcaattgatgatgaggaggaccggttccatggggtgcggctccagacgagtcctccaatggaacctttgaacttcgggagttcctacattgtgagcaactctgccaacctgaaggtgatgccgaaggagttgaagctgtcctatagatcccccggcgagatacaacatttctcgaaattttacgccggccagatgaaagagcccatccaacttgaaatcacagagaagagacatggcacccttgtatgggacactgaagtgaagccagtcgacctgcagttagtcgccgcatccgcccctccacccttttcgggcctgctctggcagcgccagccccttaatcccccacctgcccggtag

SEQ ID NO: 111028 - DNA, 1296 bp, synthetic construct
  misc_feature 1..1296: note = Description of Artificial Sequence: Synthetic coding sequence
  source 1..1296: mol_type = other DNA
atgatgcggcagcgccagagtcactactgttcagtgctgttcctgtctgttaattatctgggaggcacctttcctggcgatatctgttccgaagaaaatcagatagtgagctcttatgcctctaaggtgtgtttcgaaattgaggaggattataagaatagacagtttctcggcccagagggaaacgtggatgtggaactgatcgataagagcacgaataggtactcagtatggtttcccactgccggctggtatttgtggtctgcaaccggattgggctttttggtgagagacgaggttacagtcaccatcgctttcggctcctggtcccagcatcttgcccttgatctgcagcatcatgaacagtggctggtgggggggcccttgtttgacgtgaccgccgaacccgaagaggccgtagctgaaattcacctgccacattttatttcgctgcagggagaagtcgacgtctcatggttcctcgttgcacactttaagaatgaggggatggtattagaacaccctgctcgtgtggaacctttctacgctgtgctggaatccccctccttctctctgatgggtatcctgctacggatagcctctggcacccggctgtcaattcccattactagcaataccctcatatactaccatcctcaccccgaggacattaaatttcacctgtaccttgtccctagtgatgcccttctgacgaaagccatcgacgatgaggaagaccgctttcacggcgtccgacttcagacatctccccccatggagccactgaacttcggatcttcctatatcgtcagcaacagcgcaaacctcaaagtcatgccgaaagaactcaaactatcctatcgctcacctggagaaatccagcacttctccaagttctatgcagggcagatgaaagaaccaattcaacttgagatcactgaaaagcggcatggcacgctcgtttgggatacagaggtgaagcccgtggacttacagctggtggctgctagcgcgccgccacctttcagcggcgcagctttcgttaaagagaatcacaggcaattgcaagcgaggatgggagatctgaaaggagttctggatgaccttcaagataatgaggtgctgaccgagaacgagaaggaactcgtggagcaggaaaaaacccgccaatccaaaaatgaagcactgctgagcatggttgagaagaagggcgacctggccctggacgtactattccggtccatctcagagcgagatccatatttggtgtcataccttaggcagcagaacctctag

SEQ ID NO: 111029 - DNA, 1614 bp, synthetic construct
  misc_feature 1..1614: note = Description of Artificial Sequence: Synthetic coding sequence
  source 1..1614: mol_type = other DNA
atggagaagaaggagtgtcctgagaagtcgagcagctcggaggaggaactgcccaggagagattctggctcttctcgcaatattgatgcttccaaactcataaggctgcaggggtcgagaaagctgctcgttgacaattctattcgggaactgcagtataccaaaactggaatctttttccaggccgaagcatgcgtgaccaacgacacagtctatcgggaactaccatgcgtgtctgaaaccttgtgcgacatcagtcactttttccaggaggatgatgaaacagaagccgagccgttgctgttcagagcagtcccagagtgtcaacttagcgggggggacattccatcggtatcggaggagcaggagtcaagtgaggggcaagattccggggacatctgttcagaagagaatcaaatagtaagttcatatgcgagcaaagtttgctttgaaatagaggaagactacaagaatcgacaatttctgggccccgaaggaaacgtagatgtggaactgattgacaagtctactaacaggtattcagtttggttccccacagctggttggtacttgtggtcggccacagggctcggctttctggtgcgtgatgaagtcacagtgactatagcatttggttcttggagccagcacctcgccctggacctgcagcaccacgagcaatggcttgtgggcggcccgctgtttgatgttacagccgagccggaagaagctgtggccgagatccatcttccgcactttatcagccttcaggcaggggaggtcgatgtatcgtggttccttgtcgcccacttcaaaaacgaggggatggtcctggaacacccagctagggtcgagccattttatgcagtactcgagagcccgtcgttcagcctgatgggcattcttcttagaatcgcctcgggcactaggctttcgataccaataacatctaacacactgatctattaccacccccatccagaggatattaaattccacctctatcttgtaccaagcgatgcactgttgaccaaggccatcgacgacgaggaagaccgatttcacggtgttcggcttcagaccagccccccaatggagcctctcaacttcggatcaagttacatcgtttctaactcggcgaacctaaaggtcatgcctaaggaactcaaactgagctacagaagtcccggcgaaattcaacacttttctaaattctatgccggacagatgaaggaacccattcagcttgagattaccgagaaaaggcacggtactcttgtgtgggacaccgaagtgaaacctgtagatttgcaactggtggcagcaagtgcccctccgcccttttccggagccgcttttgtaaaggaaaatcaccgacaactgcaggccagaatgggtgacctcaagggcgttctcgatgatcttcaggataatgaggttctgacagaaaacgaaaaagagctggttgagcaggagaaaacgcgccagtcaaaaaacgaagctctgctcagtatggtcgaaaaaaagggtgatttggctctggatgtattgttccgtagcattagcgagcgagatccgtatctggtgtcttatctcaggcagcaaaatctctag

SEQ ID NO: 111030 - DNA, 1464 bp, synthetic construct
  misc_feature 1..1464: note = Description of Artificial Sequence: Synthetic coding sequence
  source 1..1464: mol_type = other DNA
atggaaaaaaaggaatgcccagagaaatcgagttcctcagaggaggagctacctcggcgagtttaccgagagctgccctgcgtaagcgagacgctgtgtgacattagccacttctttcaggaagatgatgagacggaggccgagccattactcttccgagctgttcccgaatgtcagctgtctggcggggacatcccttcagtatcagaagagcaggaaagctcggagggccaggattccggcgacatctgctccgaggaaaatcagattgtgtcctcctatgcatcaaaggtctgtttcgagatcgaagaagactacaagaaccggcaattcctggggcccgaagggaatgtagatgttgagctaatcgacaagtctactaatcgctactctgtgtggttcccaactgccggctggtatttgtggagtgccaccggcctcggattcttggtgcgggatgaagtgaccgttaccattgcattcgggagttggagtcaacaccttgccttggatctacagcaccatgagcagtggctcgtaggcgggccccttttcgatgtgacagccgagcctgaggaagctgtggccgaaatccacctgcctcacttcatctctctccaggctggagaagtggacgtttcctggtttctggtcgcgcacttcaagaacgagggaatggtgcttgaacacccagccagggtggagcctttttacgcagtgctggaatctccctctttttccctgatgggaatcttgctgcggatagccagtggtacgaggctgtcaataccaatcacctcaaacactctcatctattaccatcctcatcccgaagatatcaagtttcatttgtacctggttcctagtgatgctctgctcaccaaggctattgacgatgaggaggacagattccatggcgtgagattgcagacatcaccacccatggaacctctgaacttcgggagttcctacatagtgagcaacagcgctaacctgaaggtgatgcccaaggagcttaagctgtcttaccgttcaccaggagaaatccagcatttttccaagttttatgctggacagatgaaggagccaatccagctggagataaccgagaaacgacacggtactcttgtttgggacacggaggtaaaacccgttgacctccaactggttgctgctagcgcccctcccccatttagcggagccgcctttgtgaaagagaaccatcgccagctgcaggcccggatgggcgatctgaagggggtcctagacgacctacaggataacgaagtgttgacagagaatgaaaaggagctggtggagcaggagaagacccgccagtcaaagaatgaagccctgcttagtatggtggagaagaaaggcgatctggccctcgatgtcctgttcaggagtatctctgagagggatccctatctcgtctcatatctgcggcagcagaatctttag

SEQ ID NO: 111031 - DNA, 1101 bp, synthetic construct
  misc_feature 1..1101: note = Description of Artificial Sequence: Synthetic coding sequence
  source 1..1101: mol_type = other DNA
atgtccgactacgagaatgatgatgaatgctggtcagtcctggaaggcttcagggtaaccctgacatccgtgatagacccttcacgcattactccgtacctgagacagtgtaaggtactgaaccccgacgatgaggaacaggtattgtcagacccaaatcttgtgatccgtaagagaaaagttggcgtcctgctggacatcctgcagcgcactggccacaagggttacgtggcttttttggagagtctggaactgtattatcctcagttgtacaagaaagtgacaggtaaagagccagcccgggtgttttccatgattattgatgcatccggcgagagcggcttgacccagctgctgatgactgaagtgatgaaattgcagaaaaaggtacaagatctgaccgctctcctgtctagcaaggatgattttatcaaggagcttcgggtgaaagactctctactgaggaaacatcaagaaagggtgcagaggctgaaggaggagtgtgaggccggcagtcgagaactcaaaagatgcaaagaggagaattacgatctggccatgcgccttgcacatcagagcgaggagaaaggagcggctttgatgagaaatcgcgatctgcaattggaaattgatcagctaaagcatagcttaatgaaggcagaggacgactgtaaggtggaacggaaacacacgcttaagttgaggcacgctatggagcagagaccctctcaggagctgctgtgggaacttcagcaggaaaaggccctgctgcaagcccgcgtacaggagcttgaggcgagcgtacaggaggggaagttggataggagctctccctacatccaggttctggaggaggattggcgccaagcactcagggaccatcaggagcaagccaacacaatcttctctctgcgcaaggacttgcgccaaggcgaggcacgaagattgcggtgcatggaggagaaagagatgttcgaactccagtgtctggcgttgcggaaggatagtaaaatgtacaaggataggatcgaggctatccttctgcagatggaggaagtagcaatagaacgggaccagtccactcagatggagggcctatag

SEQ ID NO: 111032 - DNA, 1611 bp, synthetic construct
  misc_feature 1..1611: note = Description of Artificial Sequence: Synthetic coding sequence
  source 1..1611: mol_type = other DNA
atgagcgactacgagaacgatgatgaatgctggagcgtacttgagggatttcgagtgacccttacctcggtgatagatccgagtaggatcactccttacctccggcagtgcaaggttcttaatcccgacgacgaggaacaggtgctaagcgacccaaacctggtaatccgcaaaagaaaagtcggtgtcctgctcgatattctccaacgaacagggcacaaagggtatgtagctttcctggaatcccttgagctctactatccccagctttataagaaagtgacaggtaaggagcctgcaagagtattctctatgatcatcgacgcctctggcgagagcggattgacacagctgctgatgactgaggtgatgaaacttcaaaagaaggtgcaggatctgacagcgctgctgagctctaaagatgactttatcaaggaactgagagtgaaggacagtttgctccgcaagcaccaggaacgcgtccagcgtctgaaggaagaatgcgaggctggatcaagggaactcaagaggtgcaaggaggaaaactacgacctggctatgagactggcacatcagagcgaagaaaaaggcgccgctctgatgagaaatcgggacctacaactagaaattgaccagctgaaacattcgctgatgaaggctgaggatgattgcaaggttgagcggaagcacaccctgaagttgcggcacgcaatggagcagagaccaagccaggagcttctatgggaactccagcaggaaaaggccctcttgcaggcaagagtccaagaactagaagcctccgttcaggaaggcaagctggacagaagttccccatacatacaagtgttagaagaggattggcgacaggcactccgcgaccatcaggagcaggcgaacactattttttccctgcggaaagatttgcgccagggtgaggcacgaaggttaaggtgtatggaagaaaaagagatgtttgagctgcagtgtcttgcccttcgaaaggattccaagatgtacaaggatagaatcgaagccattcttctgcagatggaggaggtcgccattgaacgggaccaggctatagccacccgggaggagctgcacgctcagcacgcccgggggctgcaagaaaaagatgccctgcggaagcaggtgcgggaactgggggagaaggcggacgaactccagttgcaagtgtttcagtgtgaggcacagctgctcgccgtggaaggtaggctgcgtcgccagcagcttgaaactctggtcctgagcagcgatctcgaggacgggtctcctcgcagatcccaggaactgagtctgccccaggaccttgaagatactcagctctccgacaaggggtgtcttgcgggaggcggtagtcccaagcagcccttcgccgccctacaccaggaacaggtgctgaggaacccccacgacgcaggattgagcagcggcgagccaccggaaaaagagcgaaggcgtctgaaggagtcgtttgaaaattatcgccggaagcgcgccctgagaaagatgcagaaaggctggaggcagggcgaggaagaccgcgaaaacaccacaggatctgataacaccgacacagaagggagttag

SEQ ID NO: 111033 - DNA, 1479 bp, synthetic construct
  misc_feature 1..1479: note = Description of Artificial Sequence: Synthetic coding sequence
  source 1..1479: mol_type = other DNA
atgtccgactatgagaacgatgatgaatgctggagcgtgctggaggggttcagggtcaccctgacatcggtgatagacccgagtcggatcaccccttacctgaggcaatgcaaggtgctaaaccctgatgacgaagagcaagtcttaagtgaccccaacctagtgatcaggaaacgtaaggtaggtgttctgctcgacattctgcagagaaccggtcataagggctatgtggcatttttagaatccctggagctgtactaccctcaattatataagaaggtcaccggaaaggagccggcgcgggtgttcagcatgatcatcgacgcctcaggtgagtcaggcttgacccaactgttaatgacagaggtaatgaagctgcagaagaaggtccaagatcttaccgctcttctgtcctccaaggatgacttcataaaggagcttagggttaaagattccttgctccgcaagcatcaggagagggtgcagagacttaaagaagagtgcgaagcagggtctagggagctgaagagatgtaaggaagaaaattatgatctcgccatgcggctcgcccatcaatctgaagagaagggggcggcactgatgcgaaatagggatctccagctcgaaatagatcagctgaagcacagtcttatgaaagcagaggatgactgcaaggtggaacggaagcataccctcaaactccgccacgctatggagcagcggccgtcccaagagctgctctgggagctccagcaagaaaaggcgctcttgcaagcaagggtccaagagctagaggcctccgtccaggaggggaaactggacaggagtagcccctatattcaggttctggaagaagattggcgacaggccttgcgggatcaccaggaacaggcgaatactatttttagtctcaggaaggatctgcgtcagggggaagcaagacgcctgaggtgcatggaggaaaaggaaatgttcgaactgcaatgccttgcgttaaggaaagattcgaagatgtataaggacagaattgaagcaattctcctacaaatggaggaggtagcgatcgagcgggatcaggcgatcgcaacacgggaggaacttcatgcgcaacacgcacgggggttacaggagaaggacgcactgcgcaaacaggtgagggaactgggcgaaaaagccgatgaacttcagctccaggtctttcagtgtgaggcgcaacttcttgctgtagagggtagactcagaaggcagcagctcgagacactcgtgctctccagtgatctcgaagacggcagtcctagacgatctcaagagctgtctttgccacaagatttggaagatacccaactgagcgataagggttgcctcgctgggggggggtcgcctaagcagccgttcgcagccctgcatcaggagcaggtgctgagaaatccccatgatgcaggacctgccggactgcctggaataggggcagtgtgttag

SEQ ID NO: 111034 - DNA, 3501 bp, synthetic construct
  misc_feature 1..3501: note = Description of Artificial Sequence: Synthetic coding sequence
  source 1..3501: mol_type = other DNA
atggacctcggtaccgcagagggcacccgttgcactgatcccccagctggaaagcccgcgatggcccctaaacgcaagggggggttaaagctgaacgctatctgcgccaagcttagtagacaagtcgtcgtcgagaaacgggctgacgccggttctcataccgaagggtccccgtcacagcctcgggaccaggaacggtcaggccctgagtcaggcgccgcccgagcccccaggagcgaggaggataagcgacgggctgtgatcgagaagtgggtgaatggtgagtactccgaagagccagcaccaaccccggtccttggcagaatcgctagagagggacttgagcttcctcctgagggggtctacatggtgcagccacagggatgctcggatgaggaggaccatgccgaggaaccatctaaggacgggggtgccctggaggaaaaggattcagacggcgcggctagcaaagaagacagtggaccgtccacccgtcaagcaagcggcgaggcctccagtcttagggactacgcagcctcaaccatgaccgagtttctggggatgtttgggtacgacgaccagaatactcgagacgaattagcgagaaagatttcctttgagaaactgcatgccgggagcacgcctgaggccgcgaccagctctatgctgcctacatccgaagacacactgtcaaagcgagctcgattcagcaagtacgaggagtacatccgaaaattgaaggccggtgaacagttgagttggccagcgcccagcactaaaactgaagagagagtcggaaaggaggtggtgggaacactgccagggcttaggcttccctcctctacagcgcacctggagactaaagctaccattttaccactgcctagccattcctcagtccagatgcaaaacctggtcgccagagcttccaagtatgactttttcattcagaaactaaaaactggggaaaacttgcggcctcagaacggttccacatacaaaaaaccatctaagtatgacctggaaaacgtgaaatatcttcacctatttaagcccggggaagggtcccctgacatgggcggtgccatcgcgttcaaaactggaaaagtggggcgcccctctaagtatgacgtccgcggcatccaaaagccgggacccgccaaggtacctccaaccccgagtctggcgcccgccccactggccagcgtgccatcagccccttccgcccctggccccggtcccgagccccccgcgagcttgtcgttcaatactcccgagtacttgaaatcaacattttctaagacagatagcatcacaaccgggaccgtgagtactgtgaagaacggactgcccaccgacaaacctgccgtgactgaagacgtgaatatctaccaaaagtacatcgcgcgattttccggcagccaacactgtggtcatattcactgcgcgtaccagtatcgcgaacactaccattgtctagatccggagtgtaattaccagcgctttacctcgaaacaggatgtgatccgacactacaacatgcacaagaagcgggataattccttacagcacgggttcatgcggttttctcctctggatgactgctctgtatactaccatggatgccatctcaatggtaaaagcacacactatcactgtatgcaagtaggctgcaataaggtttacactagcacaagtgacgtgatgacccacgagaactttcataaaaaaaatacccagttaattaatgacggctttcagcgcttcagagctacagaggactgcggcacagcggattgtcaattctatggccagaagactacacacttccactgcaggcgccctgggtgcacatttacattcaaaaacaagtgtgacatcgaaaagcacaagtcttatcacatcaaggatgatgcttacgctaaagatggttttaaaaaattttataagtatgaggagtgcaagtacgagggatgcgtatactctaaagccacaaaccattttcactgcatccgggccgggtgcggatttacttttacttctacttcgcagatgacttcccataaaaggaaacacgagcgccgtcacatacggagcagcggagccttgggactgcctccctcccttttgggcgccaaggacacagaacatgaggagtcatccaacgatgacctggtggactttagtgctctctcctctaagaacagttctttgtctgcgagcccgacctcccagcagtcttctgcctctttggccgcagcaactgccgcaacagaggccgggccaagcgcaactaagccaccaaatagtaaaataagcgggctgctgcctcagggcctaccaggttctattcctctcgctctggctctaagcaacagtggtctcccaaccccgactccgtatttccccatccttgccggtagggggtccactagcctccccgtaggcaccccctcgttacttggcgcagtgtcctccggctcagcagcttcggccactcccgacacaccgactctggttgctagtggcgccggggacagcgccccagtggccgcggcttccgtcccggctcctcctgcgtcaatcatggagcggatatccgcgtcaaagggactcatctctcccatgatggctcgactcgcagctgcagccctgaagccttctgcgacctttgacccggggtctgggcagcaagtgactcccgctcgcttccctcccgctcaggtgaagcctgaaccaggagagagcaccggggcaccgggcccccatgaggcctcccaagaccgcagcctcgatttgaccgtcaaagaacctagtaacgagagcaacggccatgctgtccccgccaattcaagtctgctgagttctctgatgaataagatgtctcaaggcaatccaggtctggggtcgttgctcaatatcaaagcggaagctgagggcagtccggccgccgagcctagccctttcctgggtaaagccgtgaaggcgttggtccaggaaaaattggcagagccttggaaggtctacctccgacgctttggtaccaaggatttttgcgacggccagtgcgacttcctccacaaagcacattttcattgcgtggtggaagagtgtggagccctgttctctaccctcgacggagctatcaagcacgccaattttcactttagaaccgagggcggagccgctaagggaaacaccgaagcagccttcccagcatcggcagctgagactaaaccaccaatggcaccctctagtcctcctgtcccgcccgtcacgaccgcaaccgtgtcctcattagagggaccagccccaagccccgcatcggtgccatctacacccacactgctggcatggaagcagctggcttccacaatcccacaaatgcctcagatccccgcctcggtgcctcaccttcccgcatctcctctggccacaactagtctggagaacgccaaacctcaagtcaagcccgggttcctacagtttcaagaaaagtag

SEQ ID NO: 111035 - DNA, 5280 bp, synthetic construct
  misc_feature 1..5280: note = Description of Artificial Sequence: Synthetic coding sequence
  source 1..5280: mol_type = other DNA
atggatcttggaactgccgaaggaacgcggtgcaccgatccccctgcaggcaaacccgccatggctccaaaacgtaagggtggcctgaaactcaacgccatctgtgccaagctgtccagacaagtagtggtggagaaaagggctgacgcaggcagccataccgaaggaagtccatctcagcctagggatcaggaacgctcgggaccagagtccggggccgctcgcgcccctaggtccgaagaagataagaggcgcgcggtgattgagaagtgggtcaatggagagtattcggaagaacccgcccccactcccgtcctggggcgcatcgcgcgggaggggctggaactgccacccgagggtgtatacatggtccaaccccagggatgttccgacgaagaggatcatgcggaagagcctagtaaggatggcggcgcgttagaggaaaaagacagcgatggggctgcatccaaggaagactcaggtccatcaacaaggcaggctagcggcgaggccagcagcctgagagactacgctgctagcaccatgacagagttcctcggcatgttcggatacgacgatcagaatacccgagatgagctggcaagaaaaattagctttgaaaaactgcacgcgggatcaacaccggaggccgccacttccagcatgctgcctaccagcgaagatacactgtctaaaagagcacgtttctcgaaatacgaggagtacatacgaaaactgaaagccggggaacagttgtcctggcctgcacctagcaccaaaaccgaagagagagttggcaaggaggtggtgggaacccttcctggattaagactgccttcatccacagctcacctggagaccaaggcaacaatcctgccgctgccgtctcatagtagtgttcagatgcagaatctggtcgcccgagccagcaagtacgatttctttatccagaaactgaagacaggcgaaaatctcaggcctcagaacgggagcacctacaaaaagccgtccaaatacgatctggagaacgtgaagtatctccacttgttcaagccgggggaggggagccccgatatgggaggtgcaattgcgtttaaaacgggcaaggtgggacgccccagcaagtacgacgtgaggggcattcagaagccaggcccagccaaggtgcctcccactccttccttggcgcctgcaccactcgcatcggttccaagcgcgccttccgcccccggacccggccccgaacctccagcctccttgtcatttaacaccccagagtacctgaagtccaccttttctaagacagactctatcacaactggaactgtgagtaccgtgaagaacgggctgccgaccgacaagcctgcagtcacagaggacgtgaacatatatcagaaatacattgcacgcttttcaggaagccaacattgtggccacattcactgtgcctaccagtatagagaacattatcactgcctcgaccccgaatgtaattatcagcggttcacgtccaagcaagacgtgattcgacactacaacatgcataaaaagcgggataactccctccagcatgggtttatgagattttcccctcttgatgattgctcagtgtactaccatggctgccacctaaatggcaagtcgacccactatcactgtatgcaggtcggatgtaacaaggtgtacacctctacctccgacgtgatgacccatgaaaacttccacaaaaagaatacgcaactcataaatgatggtttccaacggttccgggctactgaagattgcggaactgccgactgtcagttctacggtcagaagacaacgcattttcattgtagacgcccgggatgcacgttcaccttcaaaaacaaatgcgacatcgaaaagcacaagagttatcacatcaaagatgatgcatacgcaaaagacgggttcaagaagttttataaatacgaagaatgcaaatatgaaggctgtgtgtactccaaggctaccaatcatttccattgcattagggcaggctgcggtttcacatttacaagtacctcacagatgacctcgcacaaacgcaagcatgagaggaggcatatccggtcatctggtgctctgggcctgcctccttcgcttctcggcgccaaagacacagaacacgaagaatcctcaaatgatgatctggtcgatttctctgccctttcctccaaaaacagcagtctgtctgcaagtcctacctctcaacagtctagcgcttccctggccgctgctacggcggctacagaggccggtccatctgcaactaaaccccccaattccaagatctccggtctgctgcctcagggtctccctggctctattccactggccctcgctctttccaattccggacttcccactcccaccccttatttccccatcctggccggaagagggagcaccagccttcctgtgggcacaccatcactcctgggcgctgtttcatccggcagtgccgcgagtgccacccccgatacacccacgctagtagcttcaggagccggcgactcggcccctgtcgcggccgcgtccgtccctgccccccctgcgtcgatcatggagcgtatctccgcttctaagggacttatatccccaatgatggccagactggccgccgcagcactgaaaccgtcagccaccttcgatcctggttcgggacagcaggtgacccccgctcgcttccctcctgcccaggttaagcccgaacctggagaaagcacgggcgcccccgggcctcacgaagcaagtcaggaccgttcgctggacctgactgtaaaggaaccttccaatgagagcaatggccacgcagtccccgctaattctagtctgctctcatcccttatgaataagatgtctcagggcaaccctgggctgggcagcctgctgaatataaaggctgaagctgaggggagtcctgctgccgagccctcaccttttctggggaaggccgtgaaggctcttgtccaagaaaaattagccgaaccttggaaggtatatctccggcggtttggtacaaaggatttttgtgatgggcagtgtgacttcctccacaaggcacatttccactgtgttgttgaggagtgcggcgcgctgttcagtaccttagacggggccatcaagcacgccaactttcactttcggactgagggaggcgccgccaagggcaatacagaagcagcctttcctgcaagtgcagctgaaactaaacctccaatggctccaagtagtccccccgtaccccccgtaacgactgccactgtatcttcactggaaggccctgcgcctagtccagcgtccgtcccttccaccccaacactccttgcatggaagcagctggcatctacgattcctcagatgccacaaatcccagccagcgttccccacctacccgccagtcccctggccacaacaagcttagaaaacgcaaaaccgcaggtcaaaccgggctttctgcaattccaggagaacgatccatgcctggctacggactgtaaatacgccaacaaatttcacttccactgcctgtttggaaattgcaaatatgtgtgcaaaacctcaggaaaagccgagtcccactgcctagaccacatcaacccaaataataaccttgttaacgtgagagatcaattcgcttattactcattgcagtgcttgtgccctaaccagcactgcgagtttcggatgagaggccattatcactgtctgaggaccggatgctacttcgtcaccaatatcacaacaaagctgccttggcacatcaagaaacacgaaaaggccgaacgaagggccgccaatggattcaagtactttacaaagcgggaagagtgcggaagattaggatgcaaatataatcaagtcaactctcactttcattgtatccgcgaaggctgccaattcagctttctgctgaagcaccaaatgacctcgcacgctcggaaacacatgagaaggatgctggggaaaaacttcgaccgagtgcctccatctcaggggcccccagggctgatggacgccgaaactgacgagtgcatggactatactggctgttctcctggcgccatgtcttcagagagcagcacaatggatagaagctgtagttctactcctgtgggaaatgagtccaccgccgctggtaacaccatatctatgcctaccgcgtcaggtgctaagaagagattctggatcattgaagatatgagcccttttggaaagcggcggaagaccgcctctagtcgcaagatgctcgacgaaggcatgatgcttgagggctttcggcgctttgatctgtacgaagactgtaaggacgctgcctgccagttttccctgaaggtcactcactaccactgcacccgggagaattgcggttacaaattctgtggaagaacacatatgtacaaacatgcacagcaccacgatagagtggataacctcgtattggacgacttcaaaaggtttaaggcgtccctgtcttgtcactttgcggactgtccttttagtggaacttcaacccactttcattgtctgagatgccggtttcggtgcacagactctacaaaagttacagcgcaccgcaagcaccacgggaagcaggatgtgatttcagcggcaggattttgccagttcagttcatccgcagattgcgccgtgcccgattgcaagtacaaattaaaatgcagtcactttcactgcacctttcccggctgcagacatactgtggtcggcatgagccagatggactcccacaaacggaagcacgagaaacaggagcgcggggaacccgctgccgagggacctgctccaggacctcccatctccctggatgggagtttgtcattaggcgcagaaccgggctctctccttttcctgcagtccgcagccgccgggctgggactcgcactgggggatgccggcgaccctggcccacccgatgccgctgctccaggacctcgggaaggcgcggcggctgccgcagctgccgcgggggaatccagccaggaagacgaggaggaggagctggagttgcctgaagaggaagcggaagacgacgaggacgaggacgacgacgaagatgatgatgatgaagatgacgacgaggacgatgacgacgaggatttacggacagactccgaagaatccctgccagaggccgccgctgaggcagctggggccggtgctcggacacctgcccttgctgctctggccgccctcggggccccgggccccgcccccacggctgcgtcttcaccatag

SEQ ID NO: 111036 - DNA, 4332 bp, synthetic construct
  misc_feature 1..4332: note = Description of Artificial Sequence: Synthetic coding sequence
  source 1..4332: mol_type = other DNA
caggaactggaggctgctcttcatcgggatgacgtggagtttatctccgacctgattgcttgcctcttacaggggtgttatcagcgccgggatatcacgcctcagacattccacagctatctagaggacatcataaattacaggtgggagcttgaggaagggaagccgaacccgttgagggaggcctcctttcaggaccttcccctcagaacccgtgtagagatactgcatcgcctctgcgattaccgtttagatgcggacgatgtgtttgacctgctcaagggtctggacgcagattccttgagagtggagccgctgggcgaggataatagtggtgctctgtattggtatttttacggcactcggatgtataaggaggaccctgtgcagggaaaaagtaatggcgagttgtcattaagccgcgagagtgagggccagaagaatgtctcaagcattcccggcaaaactgggaagcgacgaggaagaccacccaagagaaagaagctgcaggaagagattctgctcagcgagaagcaggaagagaacagccttgcttctgaaccacagacacggcatggatcgcagggtcctggccagggcacctggtggttgctgtgccagaccgaggaagagtggcggcaggtgacagagtcctttcgggaacgcacctcgcttagggaacgccagctttataagttattgtctgaagatttcctgccagagatctgcaatatgattgctcagaaaggcaagcgaccgcagcgcacgaaggccgaacttcacccccgctggatgagtgaccatctgtccattaagcccgtgaaacaggaggagaccccagtgctcacccggattgaaaagcaaaagcgcaaagaggaggaagaagagaggcaaatactgctcgctgttcagaagaaggagcaggaacagatgctgaaagaggaacggaaaagagagctggaggaaaaggtcaaggccgtagaagggatgtgttccgtgcgggttgtgtggaggggggcttgcctgtctacttcccgtcctgtagacagggctaagcgcaggaaactgagagaggagagggcttggcttctggcacagggcaaggagctcccgcctgaactgtcccacctggaccccaactctccgatgcgagaggagaagaagacaaaagacctattcgagctcgacgatgatttcaccgctatgtataaagtgctggatgtcgtcaaagcccataaggactcctggccgttcctcgaacccgtcgacgaatcatacgctcccaattactaccaaataattaaggcgccaatggacatctcttcaatggagaagaaactgaacggcggcctctactgtacaaaggaagaatttgtgaatgatatgaagactatgtttaggaattgccgcaagtacaacggggaaagctctgaatatacaaaaatgtctgataacctggaacgctgtttccatcgtgctatgatgaaacattttccaggcgaggacggcgacacagacgaagagttctggattagggaggatgaaaaacgtgagaaaaggaggagccgcgcaggccgatccgggggctcccatgtgtggacccgctcgcgggaccccgaagggagctcacgtaaacagcagcccatggaaaatggcggcaaatctctgccacccacacgcagggccccctcttccggcgacgaccagtcgagcagttccactcagcctcccagggaggtgggaacatccaatggccggggttttagccatccactgcactgcggggggacaccatctcaagctcctttcctgaaccagatgaggcctgccgtccctggcacattcggccccctacgaggatcagatccggccaccctctacgggtccagtggggtgccagaaccacacccaggtgagcctgtgcagcagcggcagccatttactatgcagcctcctgtcgggatcaattccctgcggggaccccgactgggcacaccagaagagaagcagatgtgcgggggcctcacccacctttcaaatatgggaccacatccggggtccctgcaactggggcagatctctggtcctagtcaggacggctctatgtacgccccagctcagttccagccagggttcataccaccgaggcatggcggagcgccagcccgcccacctgatttcccagagtcgtctgagataccacccagccatatgtaccggtcatataagtatcttaatagagtgcattccgctgtgtggaacggcaatcatggagccactaaccagggccccttaggccccgacgagaaaccccacctgggtccagggcccagtcaccagccccggaccttgggtcatgtcatggacagccgcgttatgcgaccacctgtgcctcccaatcagtggaccgaacagagcgggtttctgccccacggcgttcccagctctggttacatgcgccctccctgcaagtctgccggccacaggctgcaacccccccctgtgccagcacccagttctctgtttggtgcacccgcccaggctttaaggggcgtgcagggcggcgattctatgatggatagccctgagatgatcgccatgcagcagctctcgtctcgcgtgtgcccaccaggcgtcccataccacccccatcaaccagcccatcctaggcttccgggtccgttcccccaggtagcgcatcccatgagcgtcacggtgagcgcccctaagccagcattgggtaaccccggccgcgcccctgaaaactccgaagcacaggagccggaaaacgaccaggcagaaccattgccaggacttgaagagaaacctccgggtgtgggcacatccgagggcgtgtacttaactcagctgccgcaccctactcccccattacagacagactgcactcggcagagctcccctcaagagcgcgagacagtcgggcctgagctgaagtcctctagctcagaaagtgccgataattgcaaggccatgaagggaaagaatccatggccttccgactctagttacccaggcccagctgcacaagggtgtgttagggatctctcaaccgtggcggaccgaggcgccctgagcgaaaatggagtcatcggagaggcttcaccctgtggatccgagggcaagggtttggggtcatccgggtccgagaaactgctctgcccaaggggaaggacacttcaggagaccatgccctgtacaggacaaaatgctgcaacccctccaagtacagatcctggactcaccggaggaactgtaagtcagtttcctcccctgtatatgccaggactggaatacccaaattccgccgctcactatcacatttcacctggccttcagggggttggccctgtcatgggggggaagtcaccagctagtcacccccagcatttcccgccccgtggattccagtccaatcacccgcattctggtggattccccaggtacaggcccccccagggcatgcgatatagttaccacccccctccacagcctagctaccatcactatcagagaaccccatattacgcctgcccccagtctttttccgattggcagcgccccctgcacccccaaggaagtccctcgggcccaccagcctctcagccccctcctccccgatccctattctctgacaaaaacgctatggcatccctacaggggtgcgaaacacttaatgcagcgctgacctctccaacccggatggatgccgtcgctgccaaggtgccgaacgacggccagaacccaggccccgaggaggaaaagctggatgaaagcatggagcgtccggaaagtcctaaggaattcttggatctcgataatcacaacgctgccaccaagagacaaagttctctgtccgcatccgagtatttgtacggaacacctccccccctgtcttcaggcatgggatttggatcatccgcttttcccccccatagcgtcatgttacagacaggcccgccatatacaccacagaggcctgccagccattttcagcctcgagcttatagctcccccgtggcggccctgccacctcatcatcccggcgcgacacagcctaatggtctatcccaagaaggaccaatttaccgctgtcaggaagaaggactcggacatttccaagccgtgatgatggagcaaatcggcacccgtagtgggatccgcggccccttccaggagatgtatagacccagtggaatgcagatgcaccctgtgcagtcccaggcctcgtttccgaaaacacccacggcggcaacgtcacaggaagaggtgccaccccacaaacccccgaccctgcctctggatcagtcatag

SEQ ID NO: 111037 - DNA, 1371 bp, synthetic construct
  misc_feature 1..1371: note = Description of Artificial Sequence: Synthetic coding sequence
  source 1..1371: mol_type = other DNA
gagttggaggcggctctccacagagatgacgtggagttcatttctgacctgatcgcttgcctgctgcagggctgctaccagcggcgcgatataacacctcagacttttcactcttaccttgaagacatcatcaactaccgctgggaactggaagagggcaagcccaatcctttaagggaggcctccttccaggatctgccacttcgaacccgcgtcgaaatcctgcataggctctgcgactataggctcgacgcggatgacgtgtttgacctgctgaagggactcgacgccgacagtctcagggtcgaaccgctgggtgaggacaactctggcgctttatactggtacttttatggtactcggatgtataaagaggatccggttcagggaaagagcaatggggaactctccttgtcaagggagagtgaaggccaaaagaatgtgtcctcaatccctggaaagactgggaaaagacgcggccggccaccaaagagaaagaagctgcaggaggaaatactgctttccgagaaacaagaagagaatagccttgcctcggagcctcagactagacatggatcgcaggggcccggacagggcacctggtggctgctctgccagactgaggaggagtggcgccaggtaaccgaaagcttccgtgagagaactagcctgcgcgaacgccagctctataagctgctgtccgaagactttctcccggaaatttgcaatatgattgcccagaaggagacccctgttctgactagaattgaaaagcagaagcgcaaggaggaagaagaggaaaggcagattctcctggccgtgcagaaaaaggagcaggaacaaatgttgaaggaggagcgaaaaagggaattggaagagaaggtgaaggcagtggagggcatgtgcagtgtgcgagttgtgtggagaggagcgtgcctgtcaacaagcaggccagtggatagggctaaaagaaggaaactgagagaggagcgcgcgtggctactggctcaggggaaagagttgccccccgaactctcacacctcgaccccaactctcccatgcgggaggaaaaaaaaacaaaagacctgttcgaactggacgacgactttactgcgatgtataaggtcttggacgtggttaaggcacataaagactcctggcctttcctcgaacctgtggacgaatcctatgcccctaattattatcaaattattaaagctccgatggacatctcatctatggagaagaagttaaacggtggcctttactgtactaaggaagaattcgttaatgacatgaaaactatgttcagaaattgtcgtaagtataatggggagtcaagcggtaaacaaggacgatcgctctgctag

SEQ ID NO: 111038 - DNA, 1584 bp, synthetic construct
  misc_feature 1..1584: note = Description of Artificial Sequence: Synthetic coding sequence
  source 1..1584: mol_type = other DNA
atggccgactctagggatcccgcgagcgaccagatgcagcattggaaagaacaacgtgctgcgcagaaggcggacgttctgactaccggggccgggaaccccgttggtgacaagcttaacgtgataacagtcggtccgagaggacccctgttggttcaggatgtcgtctttaccgatgaaatggcacatttcgacagagaaaggattccggagagagtggtgcacgcaaaaggcgccggggcattcggatattttgaggtgactcacgacattacaaagtactctaaggcaaaagtgttcgaacatataggaaagaagacacctattgccgtcaggtttagtactgtggccggagaaagcggttcagcggacaccgttagagacccccgcggatttgccgtcaagttctataccgaggatgggaattgggacttagtggggaataacacacctatcttctttatacgtgaccctatcctctttccctcttttatacatagccagaaacggaacccccagactcacctgaaggacccagatatggtgtgggacttctggtctctgaggccagaaagccttcaccaagtgtcctttctcttttctgataggggaatccccgatggacatcgccacatgaatggctacggtagccatactttcaagctcgtaaacgccaacggcgaagctgtttactgcaagttccactataagaccgaccagggaattaaaaatctgtcggtcgaggatgctgcgcggctgtcccaggaggatccagactatgggattagagatctgtttaatgctatagccacagggaagtacccttcatggactttttatattcaagtgatgacatttaatcaggctgaaacatttccctttaatccattcgatctcaccaaggtgtggccccataaagattacccactcatcccagtaggcaaattagttttaaacagaaatcctgttaattacttcgccgaagtagaacagattgctttcgacccaagcaacatgccccccggcattgaagcttctcctgacaagatgttgcagggccgcctgtttgcttatcccgacacccatcgacaccgtctagggccaaattatctgcacataccagtgaactgcccatatcgagctagggttgccaattaccagcgcgatggacctatgtgcatgcaggataatcagggcggagccccaaactattaccctaactcattcggagcacccgagcagcagccttccgcccttgagcactctatccagtactctggtgaggtgcgtaggttcaataccgcgaatgacgataacgtgactcaggtccgtgcgttctacgtgaatgtgcttaacgaggagcagaggaaaagactttgcgaaaatattgcaggccatttaaaagacgcccagatcttcattcagaagaaggcagtgaaaaactttacagaggttcatcccgattatggctctcacattcaggcgttacttgacaaatataacgccgagaaaccgaagaacgcaattcacaccttcgttcagtcaggaagccacctggcagcccgtgagaaagctaacctttag

SEQ ID NO: 111039 - DNA, 816 bp, synthetic construct
  misc_feature 1..816: note = Description of Artificial Sequence: Synthetic coding sequence
  source 1..816: mol_type = other DNA
atgcccgaggccccccctcttctcctcgcggccgtgctgttgggattggtgctcctcgtcgtgctgctcctgctgttgcgtcattggggctggggcctatgccttataggatggaacgagttcatacttcagcccattcacaatctgctcatgggcgacacaaaagaacagaggattttgaatcacgtcttgcagcatgctgaacccggcaatgcgcaaagtgtgctggaagcgattgatacctattgcgagcaaaaggagtgggctatgaatgtgggggacaagaaaggaaagattgtcgacgcagtgattcaggagcaccaaccttccgtgctgctcgaactgggagcctattgcggatacagcgctgttcggatggcacgactgctgtctcctggggcacggctcattacaatagaaattaatccggattgcgccgccatcacacagcggatggtggactttgcaggggttaaggacaaagtcacattagtggtgggggcctctcaggacataatcccccagctgaaaaaaaagtacgacgtggatactttggacatggttttccttgaccactggaaggatcgatatttgcccgatactcttctccttgaagaatgcggattgcttcgaaagggtacggtgttactggcggacaacgtcatttgcccaggcgctcctgacttcttggcccacgtgagagggtcttcctgctttgaatgtacgcactatcaatcattcctggagtatcgcgaagtcgtggacggtctggaaaaggccatctacaagggcccgggcagcgaagccggaccatag

SEQ ID NO: 111040 - DNA, 816 bp, synthetic construct
  misc_feature 1..816: note = Description of Artificial Sequence: Synthetic coding sequence
  source 1..816: mol_type = other DNA
atgccggaggctccacccctgttgttggccgcagtcctgctgggcttggttttgttggtggtgctgcttcttctcctacgacactggggctggggcctgtgcttgatagggtggaatgagttcatcctgcagccaattcataacctcctgatgggtgacaccaaagagcaacggatcctgaatcacgtgctgcaacatgccgagccaggaaatgctcaatccgtactagaagctatagatacgtattgcgagcagaaagagtgggcaatgaacgttggcgacaagaaaggaaagatagtggatgcggtaatccaggagcatcagcccagcgtactgttggagctgggggcctactgcggatattctgccgtgcgcatggcgaggcttctcagccccggggcccgcctgatcaccatcgaaattaacccagactgtgccgctatcactcagaggatggtcgactttgccggggtgaaggacaaagtgacactggtggtgggggccagccaggatatcatcccccagctgaagaagaagtacgatgtggacacactcgacatggtcttcctggatcactggaaagaccgatatctgccggacacgctgctgctagaggaatgtggactcctcagaaaggggactgtgctgttagcagacaatgtgatctgccccggcgccccagatttcctggcccacgtgaggggcagctcctgttttgagtgtacacattaccagtcctttctggagtatcgagaggtagtggacggcctggaaaaggccatttacaaaggccccggctctgaagccggcccctag

SEQ ID NO: 111041 - DNA, 816 bp, synthetic construct
  misc_feature 1..816: note = Description of Artificial Sequence: Synthetic coding sequence
  source 1..816: mol_type = other DNA
atgcccgaggctccgccactgcttctggctgctgtcctgctagggctggtacttctggtggtcctcctcctcctgttacgccattggggatggggcttatgcttgatcggttggaacgagtttatcctgcagcccatccataaccttctcatgggagatactaaagaacagagaatcttaaatcacgttctccagcacgctgaacctggcaacgcacagtcagtgctcgaggctatcgacacctattgcgagcagaaagagtgggctatgaatgtaggggataagaaaggaaagatcgtggatgccgtgatacaggagcatcaaccctccgtgctgctggaattaggcgcctactgtgggtattctgcagtcaggatggcgagactgctgtctccaggtgcccggttgataactatagagattaaccctgactgcgccgccatcacccagcgtatggtggactttgcaggggtgaaagacaaggtgacacttgtcgtgggcgcgtcacaggatatcatccctcagctgaagaaaaaatatgacgttgacacactagatatggtgtttctggatcattggaaggacaggtacttgcccgataccctcctgctcgaggaatgtgggctgctgaggaaaggcacagtgctcctggccgacaatgttatctgtccaggtgctcccgactttcttgctcatgtgagagggtcgagctgcttcgagtgtacacactatcagtcattcctcgagtaccgagaggtcgtcgatgggctcgagaaagccatttataagggccccggatccgaggccgggccctag

SEQ ID NO: 111042 - DNA, 666 bp, synthetic construct
  misc_feature 1..666: note = Description of Artificial Sequence: Synthetic coding sequence
  source 1..666: mol_type = other DNA
atgggcgatacaaaggaacaaagaatcctgaatcacgtgctgcagcacgctgaacccgggaacgcgcaatcagtcctcgaggccatcgacacgtattgcgaacagaaagaatgggctatgaatgtaggcgataaaaaagggaagatagtggatgccgtgatccaggaacaccaaccatctgtcttgcttgaattaggagcctattgcgggtactcagctgtacggatggccaggcttttatctcccggtgcacgccttattactatcgaaattaatcccgactgcgccgcgattacacagcggatggtggatttcgcgggcgtgaaggacaaggtcactctcgttgtcggcgccagccaggatataatcccgcagctgaaaaagaaatacgatgtggatacactggacatggtcttcttggatcactggaaggatagatatttgccagacacccttcttttggaggaatgcggactactccggaaaggcaccgtcctgctggctgataatgtcatctgcccaggcgcaccagacttccttgcccacgttcgtgggtcatcatgctttgagtgcacacattaccagagtttcctggaatatagggaggttgtggacggcctggagaaggccatttacaagggacccggttcggaggccgggccatag

SEQ ID NO: 111043 - DNA, 672 bp, synthetic construct
  misc_feature 1..672: note = Description of Artificial Sequence: Synthetic coding sequence
  source 1..672: mol_type = other DNA
atgcctgaagcaccaccactgcttctcgccgcggtgttactcggtcttgtgctgctggtcgtcttgctccttctgcttcgtcattggggctggggcctgtgtctgattgggtggaatgagttcatcttgcaacctatccataacctgcttatgggcgacaccaaggaacaacgaattctcaaccacgtgctccagcacgccgaacctggcaacgcccagagtgtgcttgaagctattgatacatactgcgagcagaaagagtgggctatgaatgtaggggacaagaagggcaaaatcgtcgacgcggtgattcaggagcaccagccaagcgtgttgctcgagcttggagcttactgcgggtattccgctgtcaggatggccagactgctgagcccaggagccaggctaatcaccatcgaaattaacccggactgcgcggctattacacagcgcatggttgatttcgccggcgtgaaggataaagttacgttagtagtcggagcgtcacaggacatcattcctcagctaaaaaaaaagtatgatgttgacacattagacatggtctttctggaccactggaaggaccgctacctcccagacacactgctgctggaagaatgtggactgttgaggaagggtaccgtgctgctagcagataacgtgatctgctag

SEQ ID NO: 111044 - DNA, 666 bp, synthetic construct
  misc_feature 1..666: note = Description of Artificial Sequence: Synthetic coding sequence
  source 1..666: mol_type = other DNA
atgggggatactaaagaacagcgcattctgaatcacgtccttcagcatgccgaacccgggaatgctcaatcagttcttgaagcgatcgacacctattgtgaacagaaggaatgggctatgaacgtgggtgacaaaaaggggaagatcgtcgatgcagtgatccaggaacaccagccctcggtgctgctagaactgggcgcttactgcggatactccgcagtgagaatggcccgtctcctgagccctggcgccagactgatcactatcgagataaatcctgattgtgcagcgattacacaaagaatggtggatttcgcaggcgtaaaggataaggtgacactggtggtgggagcctctcaggacataattccacaactgaaaaaaaagtacgacgtcgacaccctggatatggtgttcctggaccattggaaggacaggtacctcccagataccctgctcttggaggaatgtggcctgttgaggaagggtaccgtgcttcttgcagacaatgtgatttgccctggggctcctgatttcctcgcccatgtgagaggctctagctgcttcgagtgtactcactaccaatcttttctggaataccgtgaggtggtcgacggtctcgagaaagcaatatacaaaggacccgggagcgaggctggtccctag

SEQ ID NO: 111045 - DNA, 2664 bp, synthetic construct
  misc_feature 1..2664: note = Description of Artificial Sequence: Synthetic coding sequence
  source 1..2664: mol_type = other DNA
atggccaacggaacccttacacgtcggcaccagaatgggaggttcgtgggagatgccgaccttgagcgccagaagttttcggacctaaagctaaacgggccccaggatcactctcacctgctgtactcaacaatccctcggatgcaggagcccggccagatcgttgaaacttacactgaggaggatcccgagggcgccatgtctgtcgtctccgtggagaccagcgacgacggaaccacacggaggacagagaccacagtgaagaaggtggtgaagacagtgacgacccggactgtgcagcccgtggcaatgggccctgacgggctgcctgttgatgcctccagcgtgagcaataattatatacagaccttggggagagattttagaaagaacggaaacggtgggccaggaccctacgttggccaagcgggcactgccacactgccccgaaatttccactacccccccgacggttactccaggcactatgaagacggttaccctggagggtcagacaattacggcagtctttcacgagtcaccagaatagaggaacggtatcgcccgtccatggaaggctacagagcacccagccgccaggacgtgtatggcccccagcctcaggtccgtgttggcggatcctcagtggatctgcaccgatttcacccagagccctacggcttggaagatgaccagcgttccatgggctatgacgatcttgattatgggatgatgtccgattacggaacagcccggaggaccggcacacctagcgatccaagacgacgtctgcggtcatacgaagacatgataggagaagaggtccccagcgaccaatactattgggcgcctttggcccaacacgaacgcggaagcctggcaagcctggatagtctaaggaagggagggccgcccccgccaaactggcggcagccagagttgcctgaggtgatcgcgatgctgggcttccgccttgatgccgtgaaaagtaacgcagctgcctacttgcagcacctgtgttacagaaacgacaaggtgaagaccgacgtgaggaaactcaaaggcattcctgtgttggtgggccttctagaccacccaaagaaggaggttcatctcggtgcttgtggggcccttaagaacatttcatttgggagagatcaggacaacaaaatagctataaagaattgtgacggtgtcccggcactcgtacgattgcttcggaaggctcgcgacatggacttaaccgaagtgatcacgggaaccttgtggaatttgtcaagccatgattcaattaagatggagatcgttgaccatgctcttcacgcccttacagatgaagttattattcctcattccggatgggaaagggagcccaacgaggattgcaagcctcggcatatcgagtgggaatctgttttaacaaacacagcaggttgtctcagaaatgtgagttctgagaggagcgaggcaaggcgtaagctgagagagtgtgacggcctcgtggatgcattgattttcatcgtgcaggccgagatcggacagaaagactctgattcgaagctcgtcgaaaattgcgtatgtctcctgcggaacctaagttatcaagttcatcgcgagatccctcaagctgaacgctaccaggaagctgcgccaaatgtggcgaacaataccggcccccacgctgcaagctgttttggtgccaagaaaggaaaggggaaaaagccaattgaggatccagcaaacgacactgttgactttccgaagcgcacctcccccgcacggggttacgaactgcttttccagcctgaagttgtccgcatctatataagcctgctgaaggagtccaaaacccccgcaattctggaagcctcggcgggcgctatccagaacttgtgtgccgggcgctggacatacgggcggtatatccggagcgcgctaaggcaggagaaagccttgtcagccatagcagatctccttacaaatgagcatgagcgcgtggtaaaagctgcgagcggggctctgagaaacctagccgtcgacgcccggaataaggagcttattggcaaacatgcaatcccaaatctggtcaagaacctccctggaggccagcagaactcctcctggaacttctccgaagacacagttatcagtatactcaacacgattaacgaggtcatagccgagaaccttgaggcagccaaaaaactgcgagaaacacaggggatagaaaagctagttctcattaataaaagcgggaatagatccgaaaaagaggtccgggccgctgctctcgtgcttcagactatctggggctataaagagttgaggaagccactggaaaaggagggctggaaaaagtctgatttccaggtcaatctgaacaacgcttcccgatcccagtccagccatagctatgacgacagcaccttgcctctgatagatcgcaaccaaaagtcggataacaactatagcaccccaaatgagagaggcgatcacaatagaacgcttgaccggtcgggcgatttaggagatatggagccactgaaaggaaccacccccctgatgcaggacgagggacaggagtccttggaagaggagttggatgtgctggttttggatgacgagggtggccaggtctcatatcccagtatgcaaaaaatatag

SEQ ID NO: 111046 - DNA, 1755 bp, synthetic construct
  misc_feature 1..1755: note = Description of Artificial Sequence: Synthetic coding sequence
  source 1..1755: mol_type = other DNA
atggatggctggcgcaggccactccagtcagtcggcaaagtgtgcgaaaaaaacatgaagacgagtgagatgcacacaatgtctggagcacagacaggaagaaaagagaagggggacccactgaatatagctatcgacaagatgacaaagaagactagagacctgcgccgccagttgcgcaaagcagtcatggaccacatcagcgactcattcctcgagactaacgtgcctttactcgtgcttatagaggctgctaagtcaggtaacgagaaagaagtaaaggagtatgcccaagtgtttcgcgagcatgcgaacaagcttgtggaggtagcaaatctggcctgttctataagcaacaatgaggagggcgttaaactggtgcgaatggccgctacgcaaattgactccctctgtccacaggtcattaacgcagccctgacactagccgcccgcccacagtccaaggttgcacaggataacatggacgtgtttaaggatcagtgggagaaacaggttcgagtattaactgaggctgttgatgatattacatcagtggacgatttcctctccgtgagtgagaatcacatccttgaggatgtaaacaaatgcgtgattgctctccaagaaggcgacgtagatacgctggaccgaacggctggcgccataaggggcagggctgcccgtgtgattcatatcataaacgctgaaatggaaaactatgaagccggagtgtacactgagaaggttcttgaagccaccaagctgttaagcgaaactgtgatgcctagatttgcagaacaagtggaggttgcaatcgaggctctatcagccaatgtgccgcagccgtttgaggaaaacgaatttattgatgccagtcgcctcgtttatgacggggttcgcgacatccgcaaagcagtgctaatgatacgcactcccgaagaactcgaggatgatagcgacttcgaacaggaagactacgacgttcgctcccggaccagcgttcagacagaagatgaccagctcatcgccggccagtctgcgcgtgccattatggctcagctgcctcaggaagagaaagcaaaaatcgccgaacaggtcgagattttccaccaggagaagtcaaagttggatgccgaggtcgccaagtgggacgacagcgggaatgacatcatagttcttgctaagcagatgtgcatgattatgatggaaatgacagacttcacaagaggtaagggtccgctgaaaaatacctctgatgtgatcaatgcagccaagaagattgccgaggccgggagccgaatggacaagctcgctcgggctgtggccgatcagtgtcccgactcagcgtgtaagcaggatctgcttgcgtatttacagcgtatcgccttgtactgtcatcagttaaacatatgctcaaaggttaaagctgaggtccagaacctaggaggcgagctgattgtgtcgggacttgactccgccacaagtctgatacaggcagccaaaaacctgatgaacgccgttgtcctaaccgtgaaggcgtcctacgtcgctagcacaaaataccagaaggtatatggcacggccgcggtgaactccccagtggtgtcctggaaaatgaaagctcccgagaagaagcccctggtaaagagagaaaaaccagaagagtttcagacacgggtaagacgcgggagccagaagaaacacatctcgccagtgcaagcgctctccgaattcaaagctatggactcattttag

SEQ ID NO: 111047 - DNA, 2820 bp, synthetic construct
  misc_feature 1..2820: note = Description of Artificial Sequence: Synthetic coding sequence
  source 1..2820: mol_type = other DNA
atgagcggactcatatgcctgcagtacgggctgtggcacgggcagaaaatcgatttcgggggacctcgtagactcctgcaacgtaaccggggagagggctctatgactagcgctacgagtcctattatattgaaatgggaccctaagtcgctggagattaggacgcttacagtggaaaggctgctggagcccctggtcacacaggtgaccacgctggtgaacacttctaacaagggtccatccggcaaaaagaagggccggtcaaagaaggctcatgtgctggccgcgtcagtcgagcaagcaacccaaaacttcctcgagaagggcgagcagattgctaaagagtcacaggaccttaaggaggagcttgttgcagccgttgaggacgtgaggaaacaaggcgagaccatgagaattgcctcatctgaatttgccgatgatccttgctcaagcgtgaagcgcggcactatggtcagagccgctagggctttactgtccgccgtgacccggctcctaatcctcgctgacatggcagatgtcatgcgcctcctgagtcatctgaaaattgtggaggaggctctagaggctgtgaaaaatgctacaaatgagcaggacctggccaacagattcaaggagttcggtaaagagatggtaaagctaaactacgtcgccgccagaagacaacaggaactgaaagacccccactgtcgtgacgaaatggctgctgctagaggagcattgaaaaaaaatgccacaatgttgtacaccgcctcacaggcttttctccgccatcctgatgtggcagccacaagagcaaaccgggattacgtgttcaagcaagtccaggaggcgatcgctggcatcagcaacgccgctcaggcgacgtctcctacagacgaagccaaagggcataccggaatcggcgagttggccgcagccctgaatgaattcgataacaagataattctggatcctatgacgttttccgaggccagattccgccccagcctggaggagcgtctggagtccattatcagcggtgctgctctgatggcagacagttcctgtacccgggatgacagacgcgaacgcatcgtagcagaatgtaacgcggtcaggcaggcgctccaggatttgctatctgaatatatgaataacaccgggcgcaaagagaaaggcgatcccttgaacatagctatcgataagatgacaaagaaaacacgcgacctgcgacgtcagctgcgcaaagcggtcatggatcacataagcgacagctttttggaaacaaatgtgccgttactcgtgctgatcgaggccgcaaaaagcggcaacgaaaaggaggtgaaggaatatgcacaggtgtttagggaacacgcgaataagcttgtcgaagtggcgaacctcgcctgtagcatctctaacaatgaggaaggcgtgaaactggtgaggatggccgccactcagattgactctttgtgtccacaggtgattaacgccgctttgacactagcagcccggccacagagcaaagttgcccaggataatatggatgtctttaaggaccagtgggagaagcaggtgagagtgctgaccgaggcggtcgacgatatcacctccgtggatgactttttgagtgtaagcgagaaccacattctggaagacgtaaataagtgtgtcatagccctccaggagggcgatgtggacactttggaccggaccgccggtgcaattcgcggtcgagcagcccgggtgatccacatcatcaacgccgaaatggaaaattatgaagctggcgtttataccgagaaggtgttagaagctaccaagttgctgagcgagactgtgatgccacggtttgctgaacaggtggaagtcgctatcgaggctctgagtgccaacgtgccccagccctttgaagagaatgaatttatcgatgcctcaaggctggtctacgacggtgtccgcgatatccggaaagccgtacttatgattcggacgccggaggagctggaggacgacagcgacttcgaacaggaggactacgatgtgcgttctcgtacctctgtacagactgaagatgaccagctaattgctggtcagagtgcgcgcgccattatggctcaactgcctcaggaagagaaggctaaaattgccgaacaggttgagattttccaccaggaaaagagcaaattggacgccgaggtggccaagtgggacgatagtggcaacgacattatcgttctcgccaagcagatgtgcatgattatgatggagatgaccgatttcactaggggtaaaggtccactgaagaatacatctgacgtgatcaatgcagcaaagaagattgccgaggcaggttcccggatggacaagctcgccagagccgttgcagaccaatgtcctgattctgcgtgcaagcaggatctcttagcatacttgcaacggatcgccttatactgtcaccagttgaatatatgttccaaagtcaaggccgaggttcagaatctcggaggagagctcattgtaagcgggcttgacagtgccacttcgctgatccaggccgctaagaacttaatgaacgcggtggtgctaaccgtcaaagcgtcatacgtggcctccacaaagtaccaaaaggtgtacggtacagcagccgtgaatagtcctgtggtgtcatggaaaatgaaagccccagagaagaaacccctggtaaaacgggaaaaaccagaggaattccagacacgagtacggcgaggatcccaaaaaaaacatatctctcctgtccaggcactctctgagttcaaagccatggactcattctag

SEQ ID NO: 111048 - DNA, 2862 bp, synthetic construct
  misc_feature 1..2862: note = Description of Artificial Sequence: Synthetic coding sequence
  source 1..2862: mol_type = other DNA
atgacatctgccacgagtcctattatcctgaaatgggacccgaagtctctggaaatcaggactctcactgtggagagactgctggaacccttggtcacacaagtcaccaccctggtcaacacatcaaacaaaggccccagcgggaagaagaagggtcgatccaagaaggcccatgtgctcgccgcgagtgtggaacaggccactcaaaactttctcgagaaaggagaacaaatagcgaaggaatcccaagatttgaaggaagagttagtggccgcagtggaggatgtgaggaaacagggtgagacgatgaggatagcaagttccgaattcgcagacgacccctgcagtagtgtaaaaaggggaaccatggtgagggcagcacgcgccctgctgagtgctgtgacccgacttctgattttagcggatatggcggacgtgatgagactcctatcccaccttaagatcgtggaagaggctctggaggctgtgaaaaacgccacaaatgaacaagacctagcaaataggttcaaagaatttggcaaagagatggtgaaactgaactacgtagcagcgcgtcgccaacaggaactgaaggatccacactgtcgcgacgagatggcagcggccaggggggctctcaagaaaaatgctactatgttgtacacagcaagtcaggccttcctacgtcatcctgacgtggccgccacccgtgccaaccgcgactacgtgttcaaacaggtccaagaagcgatcgcaggcatttcaaacgctgcacaggctacgtctcctacagatgaagcgaaaggacacaccggaattggtgagttagctgccgctctgaacgaatttgacaataaaatcatacttgatcccatgaccttcagcgaagcgcggtttagaccaagtctggaggagagactggaatctattatttccggtgcggctctcatggcagactcctcatgcacgcgggacgatagacgcgaaagaatcgtggccgaatgcaatgccgtgcgccaggccctgcaggatctgctgtccgagtacatgaataacactgggagaaaggaaaagggggaccccttgaacatcgcaatcgataaaatgacaaagaaaactagggatctccgacgacagctccggaaggcggtcatggaccacatctcagactcttttctcgaaactaacgtgccactgttggtcttgattgaggcagctaaatcagggaatgagaaggaggtcaaggagtatgctcaagtgtttcgcgaacacgcgaacaaactagtggaggtagccaacctggcttgtagcatcagcaacaatgaagaaggcgtcaaattagtgaggatggctgctacccagatagactccctttgcccgcaggtgatcaatgcagctctgacactggctgcacgaccacaaagtaaagtcgcccaagataacatggacgtgtttaaagaccagtgggagaagcaagtgcgcgttctcactgaagccgttgacgacattacaagtgttgacgactttctcagcgtttcagaaaatcatatcctcgaagacgtaaacaaatgcgtcattgccttgcaagaaggagatgtcgacaccctcgatcgcaccgcgggagctattcggggtagagctgctcgggtgattcacattatcaacgcggaaatggagaactacgaggctggagtgtacaccgaaaaagtcttggaggccacaaaactcctgagcgagacagtcatgcctcgttttgcagagcaggtggaggtggctatagaggcactatccgcgaacgtgccacagcccttcgaggaaaacgaatttattgacgcttccaggttagtttacgacggagtccgcgacattcgtaaggctgttttgatgatccggactccggaggagctggaagacgattccgactttgagcaggaggactatgatgtgcgttcccgtacatcagtccagacagaggatgaccagctgatcgccggacagagtgccagggccatcatggcccagttgcctcaggaggagaaggccaaaatcgctgaacaggtggagatattccatcaggaaaaatctaagctcgacgcagaggttgcaaagtgggatgatagcggtaacgacattatcgtcttagcaaaacaaatgtgtatgataatgatggaaatgactgacttcacaagagggaagggccccctgaaaaatacctctgacgttattaacgctgccaaaaaaattgctgaagcgggtagcagaatggacaagctcgcccgcgcggtggcagaccagtgccctgattcagcatgtaagcaagacttgttagcctacctgcaacgaatcgccctctattgccatcagctcaacatttgttccaaggtaaaggccgaagtccagaacttaggaggagagctgattgtcagtggtactggtgtccagagtaccttcactactttctatgaagtcgactgtgacgtgatcgatggtgggcgagcgtcgcaactctcaacacacttgccaacatgcgcagaaggggctccaatcggttctggttcatccgatagttccatgctcgattccgccacaagtctcattcaagccgcgaaaaatctgatgaacgctgtcgtgctcaccgtaaaggccagttacgttgcctcaacaaagtatcagaaggtctacgggaccgctgcggtcaatagcccagttgtgtcatggaagatgaaagcccccgagaaaaagccgctcgtgaagcgcgagaagcctgaagaatttcagactagggttcgcagaggcagtcagaagaaacacatatcaccggtacaggctctatccgaatttaaggctatggactccttttag

SEQ ID NO: 111049 - DNA, 354 bp, synthetic construct
  misc_feature 1..354: note = Description of Artificial Sequence: Synthetic coding sequence
  source 1..354: mol_type = other DNA
atgacaagtgcgaccagcccgatcattctgaagtgggatccaaagtctttagaaattcgcacacttactgtggaacggctcttggaaccactggtcactcaggttacaaccctggtcaacacatctaacaagggcccctccgggaaaaagaaagggaggtctaagaaagcacacgtgctcgcagcctccgtggagcaggctacgcagaacttcctggagaagggcgaacagatagccaaagaaagccaggatttaaaagaagaactggtagccgccgtggaggacgtaaggaaacagggagaaactatgcggatagcctctagcgagttcgccgacgatccttgttcatcatag

SEQ ID NO: 111050 - DNA, 201 bp, synthetic construct
  misc_feature 1..201: note = Description of Artificial Sequence: Synthetic coding sequence
  source 1..201: mol_type = other DNA
atgacttccgctacatcccccattattttgaaatgggatcccaaaagccttgagatacggaccttgaccgtggaacgcctgttagagccactggtaacacaggtgaccaccctggtgaatacaagcaacaaaggccctagcgggaagaagaaaggaagatctaaaaaagcacatgtgctcgccgcttcagtggagcaatag

SEQ ID NO: 111051 - DNA, 2718 bp, synthetic construct
  misc_feature 1..2718: note = Description of Artificial Sequence: Synthetic coding sequence
  source 1..2718: mol_type = other DNA
atgacctccgcgaccagcccaataattttaaaatgggatccgaaatctctggagatccgaaccctaacagtagagagacttctcgaacctctggttactcaggtaactaccttggtgaatacttcgaataaggggccatcaggcaagaaaaaaggcaggtctaaaaaggcgcatgttctggccgccagcgtcgagcaggccacccagaacttcctggaaaagggtgaacaaattgcaaaagaaagccaagatctgaaggaagaactcgtggcagccgttgaagatgtgcggaagcagggtgagactatgagaatcgctagctccgagttcgcagacgacccatgcagcagcgtgaagagggggaccatggtgagagccgccagagctcttctctccgcggttacgaggctcctcattctcgccgatatggccgatgtcatgcgcttgctatctcacttaaaaatcgtggaggaggcccttgaagctgtaaagaacgcaacaaacgagcaggatctcgcgaacagattcaaggaattcgggaaagagatggtgaagttgaattatgtagccgcaagaagacagcaggagctgaaagacccacattgtcgtgacgaaatggccgcagcacgcggtgctctcaaaaaaaacgccaccatgctgtacactgcatctcaggccttcctgcggcacccagacgtggctgccactcgggcaaatcgcgactacgtgttcaagcaagtccaggaagccattgcgggcatatctaatgccgcccaggctacgagcccaaccgatgaggctaaaggacataccggaatcggcgaacttgccgctgccctcaacgaatttgataacaagatcatccttgacccgatgacattttcggaagcccgttttagaccgtctctggaggagcgcctggagagcattataagcggcgccgcactgatggcagattcatcgtgcacacgcgacgataggagagaaagaattgtcgcagagtgcaacgcagtgcgccaggccctccaggaccttctgagtgagtatatgaacaacacgggcaggaaggagaaaggagatcccctcaacatcgcaatagataagatgacgaaaaagaccagagatctgcgccgtcagttacgcaaggcagtgatggatcatatctccgacagtttcctagagaccaacgtgcccttgctggtactcatcgaggcagcgaaaagcgggaacgagaaggaggtcaaggagtatgcacaggtatttcgcgagcatgcaaataagcttgtggaagtggccaaccttgcttgctctatctccaacaacgaagagggcgtgaagttagtgagaatggccgccactcagatcgattccctatgcccccaggtaatcaacgcggctttgactctagcggccagaccacagtcgaaggttgctcaagacaacatggatgtgtttaaggatcagtgggagaagcaggtaagagtgctgactgaggcggtggatgacatcaccagtgtagacgatttcctctctgtttctgaaaaccacatcctggaggacgtgaataagtgcgtcatcgctctccaagagggggacgtggatacattggacagaacagctggcgcgatcagagggcgcgccgcaagggtgatccacatcatcaatgcagagatggagaattacgaagcaggagtctacactgaaaaggtcttagaggcaacaaagctgttgtcagaaaccgtgatgcctcgatttgcagagcaggtcgaagttgctatcgaagctctttctgcaaatgtgcctcagccatttgaagagaacgagtttatcgatgccagcaggctcgtctacgatggcgtcagagacattcggaaggcagtcctcatgattagaacgccagaggaactagaggatgactccgatttcgaacaagaggactacgatgtcagatctagaaccagcgtgcagacggaggatgaccagctgattgccgggcagtcagccagggcaatcatggcccagctgccacaggaggaaaaagcgaagattgccgagcaggttgagatttttcaccaggaaaagagtaagcttgatgccgaagtcgccaagtgggacgactcaggaaatgacataatcgtgctcgctaaacagatgtgcatgatcatgatggaaatgactgacttcaccagaggaaaaggacctctcaagaatacatctgatgttatcaacgcagctaagaagatcgccgaggccggctcgcgcatggacaaacttgcccgggcagtcgcagaccagtgtcccgattctgcatgcaaacaagacctcttggcctaccttcagaggattgcactctactgtcatcagttgaacatatgttccaaggtgaaagctgaagtccaaaacttgggcggagagttaattgtctcgggactggactcagctacctcattaatacaggctgctaaaaacctgatgaatgcagtggtcctgacagtgaaagcgagttatgtcgcctcaaccaaatatcaaaaagtttacgggaccgctgccgttaacagccccgtggtttcttggaagatgaaggcacctgaaaagaaaccgctggtgaagcgcgagaaaccagaggagttccagacacgcgtcaggcgcggttctcaaaagaaacacatttccccagtacaggcactctctgagttcaaagcaatggacagcttctag

SEQ ID NO: 111052 - DNA, 2718 bp, synthetic construct
  misc_feature 1..2718: note = Description of Artificial Sequence: Synthetic coding sequence
  source 1..2718: mol_type = other DNA
atgacaagcgcaaccagcccaatcatcctaaagtgggatcctaagtcactcgagattcgaactcttaccgttgagcggctgctggagcctctggtcacacaagtcaccaccctggtcaatacctccaacaaggggccatctggtaaaaaaaagggccggtccaaaaaggctcacgtcctggccgcaagtgtggagcaggccactcaaaatttcctcgaaaaaggggagcagattgcaaaggagagccaagatttgaaggaggaactggtggcagccgtagaggatgttcggaaacagggcgaaacaatgagaatcgctagctccgagttcgctgacgacccctgttcttctgtaaaacgtggcacaatggtccgcgcagctagagcactgctctcagctgtcacccgcctgcttattctggccgatatggctgatgtcatgaggttgttgtcccacctcaagatcgtggaggaagccctggaagccgtcaagaatgcaactaacgagcaggacctggcaaacagatttaaggaatttggaaaggagatggtgaaattgaattacgtggcggctagacggcagcaggagctgaaggatcctcattgccgagatgagatggccgcagcccggggtgctttaaagaagaatgctaccatgctgtatactgctagtcaggcttttttaagacaccccgatgtcgccgccacacgggctaatagagactatgtcttcaagcaggtgcaggaggccatcgccggcatcagcaacgcagcgcaggcaaccagccccacagatgaggcaaaaggacacactggaataggcgaactggccgccgcccttaatgaattcgacaacaagatcatactcgatccaatgaccttctctgaggcccgtttccgcccctcgctcgaggagagactagagtccatcatcagcggcgccgccctcatggctgactccagctgtacgagggacgacagaagagagcggatcgtcgcagagtgcaacgctgtccgccaggccctgcaggatctgctgtctgaatacatgaataatacaggccggaaagaaaaaggtgatccgctaaacatcgctatcgataagatgactaagaagaccagagacctaagaaggcagctcagaaaggctgtcatggatcacataagcgattccttcctggagacgaatgttccacttttggtactcatcgaggctgccaagtcggggaatgagaaagaagtaaaagagtatgctcaggtcttccgagagcacgctaacaagctggtggaggtagctaaccttgcttgtagcatcagcaacaacgaagagggagtcaaactcgtgcgtatggcagctactcagattgattcactgtgcccgcaggtaattaacgccgctttgactctcgcggcgcggccacagtccaaagttgcccaggataatatggatgttttcaaagatcagtgggaaaaacaggtgagagtgctaacagaggcagtggacgacatcacgagtgtggatgactttcttagcgtttctgagaatcacatcctcgaagatgtcaataaatgtgttattgctttgcaggaaggagatgtcgatacccttgatcggacagccggcgctatccgagggagggccgcccgcgtaattcacatcataaatgcggaaatggagaactatgaggctggagtgtacaccgagaaggtactggaagctaccaaactgctgtctgagacagtcatgccccgcttcgcagagcaggtcgaagtggcaattgaggcactctccgccaacgttccacagcctttcgaggagaacgagtttattgatgccagtcggttggtgtatgatggggtcagagacataagaaaggccgtgttaatgattcgtactccagaggaactggaagatgactctgattttgaacaggaggattacgacgttagaagccggacaagcgtgcagacggaggatgatcaactcattgctggacagtctgctagggctattatggcacaactcccccaagaagaaaaggctaagatcgcagagcaggtcgagatatttcatcaagagaagagtaaactggacgcggaagttgccaaatgggacgattccggtaacgacatcatcgtgctggccaagcagatgtgcatgatcatgatggagatgacagacttcactaggggcaagggtccacttaagaataccagcgatgtgattaatgccgccaagaagatcgcagaggccggatcacgaatggacaaattagcaagagcagtggcagaccagtgccccgatagcgcttgtaaacaggacttgctcgcctaccttcagcgcattgccctttactgtcaccaacttaacatttgtagcaaggtcaaagccgaggtccaaaacctagggggcgagcttatcgtgtccggtctggacagcgcaacatccctgattcaggccgcaaagaacctgatgaacgccgtggttctcaccgtgaaggcttcgtacgtggcgtccacgaaataccagaaagtgtacggcactgctgctgtaaactccccagtagtgagttggaagatgaaggctcccgaaaagaaacccctggtgaagcgggaaaaacccgaggagttccagacccgggtgcgcagaggatctcagaagaagcatattagcccagtccaggccctgagtgagttcaaagcgatggactcattttag

SEQ ID NO: 111053 - DNA, 2583 bp, synthetic construct
  misc_feature 1..2583: note = Description of Artificial Sequence: Synthetic coding sequence
  source 1..2583: mol_type = other DNA
atgacatctgcaacttcacccatcatccttaagtgggacccaaagtcacttgagattcgcacactgacagtggagaggctcctagagcctttagtgacacaggtgaccactcttgtcaacacctccaacaaagggcctagcggcaagaagaaggggcgaagcaagaaggcgcacgtgttggctgcgtcggtggagcaagctacccagaactttctggagaagggggaacagattgctaaagagagccaagacctcaaggaagagctggtggccgccgtcgaagatgtgcgtaagcaaggagagaccatgagaattgcaagtagcgagtttgcagacgacccctgctctagcgtgaagcgcgggactatggtgagggccgcacgagccttgctgtcggccgtgacaagacttctcattttggcagacatggccgacgtcatgagacttcttagccaccttaagatcgtagaggaggctctcgaggctgtgaagaacgctaccaatgagcaggatctcgctaatagattcaaggagtttggaaaagagatggtcaaactgaactatgtcgcggcccggcgacagcaagaattaaaggaccctcattgcagggacgagatggctgctgcccggggcgctcttaaaaaaaacgctaccatgctgtacacagcctcccaggcctttcttcgtcacccggatgtggccgcaacacgtgccaatagggattacgtgtttaagcaggtgcaggaagctattgctggaatcagtaatgcggcccaagccacatctcccacagatgaagctaagggacacaccggcattggtgaactcgctgccgcgcttaatgagtttgacaacaaaatcatactggaccctatgaccttctctgaagccaggtttcgaccctctctggaggaacgactggaatcaatcatctcaggtgctgctctgatggccgactcttcttgtactcgagacgaccgccgggagagaattgtggctgaatgcaacgcagtacggcaggctctgcaggatctcctgagcgagtacatgaacaataccggaagaaaggaaaagggagatccccttaatatcgcaattgataagatgaccaaaaagacacgtgaccttaggcgacagttgcgcaaggctgtgatggatcacatatctgattcatttctggaaacaaacgttccactcttagtcctcatagaagccgcaaagagcggcaatgagaaagaagttaaggagtatgctcaagtgttccgagaacacgcaaacaagctggtcgaggtggctaacctggcatgcagtatttcaaacaacgaggagggcgtgaagctcgttcgcatggccgccacacagatcgactctctctgtccccaggttattaacgcagcactcactctggctgccaggccccaaagcaaagtggcccaagacaacatggatgtgtttaaggaccagtgggagaagcaggtccgcgtactgactgaggccgtggatgatataacgtctgtagacgattttctctccgtcagcgagaaccacatcctggaggacgtaaataaatgcgtaatcgcactccaggagggggacgtggacacactggaccggacggccggcgccatcaggggacgcgcagccagagtgatccacatcataaacgccgagatggaaaattatgaggccggggtctacacggagaaagttttggaggcgacaaaactgctgtctgagaccgtgatgccgcggttcgcagaacaagtggaagtggccatcgaggccttgtccgctaacgttcctcagccctttgaggaaaatgagttcatcgacgcaagcaggctagtctatgatggcgttcgcgacatcaggaaagccgtgctgatgatcaggactccagaggagctggaagacgatagtgatttcgagcaggaggactacgatgtgcggagccgcacaagtgttcagacagaggatgatcagttgattgcgggtcagtctgctagagccatcatggcacagctgcctcaggaggaaaaagcaaaaattgctgaacaggtcgagatttttcatcaggaaaaatctaagctggacgcggaagtggctaaatgggatgattctggaaacgatatcatcgtcctcgccaagcagatgtgcatgatcatgatggaaatgacagacttcacgaggggtaagggccccctaaaaaatacttcagatgttatcaatgctgctaagaaaatcgccgaggcaggaagtcggatggataagcttgcccgggccgtagctgaccagttggattcagccacctctctgatccaggccgcaaaaaatcttatgaacgctgttgtcctgactgtgaaagcatcttacgtggcctccacaaaataccagaaagtgtacggcacggccgccgtgaattcacctgtagtttcatggaagatgaaagccccagaaaagaagccactggtcaaaagggaaaaaccggaggagtttcagacacgggtccgccgagggtcgcagaagaagcacatatctcctgtacaagcactctccgaatttaaagcaatggactctttctag

SEQ ID NO: 111054 - DNA, 2718 bp, synthetic construct
  misc_feature 1..2718: note = Description of Artificial Sequence: Synthetic coding sequence
  source 1..2718: mol_type = other DNA
atgacaagcgcaacaagtcctattatactgaagtgggacccaaagtctctcgagataagaaccctaactgtggaacgccttctcgaacctttggtcacgcaggtcaccacacttgtaaacacttccaataaggggccaagtgggaagaagaaaggcaggtccaaaaaagcccacgtgcttgccgcatccgtcgagcaggctactcagaacttccttgaaaagggcgagcaaatcgctaaagagtcccaggacctgaaagaggagctcgttgccgccgtggaggatgtgcgcaagcagggggagaccatgcgtatcgcttcctcagagttcgcagatgatccctgcagcagcgtgaagcggggaaccatggtccgggccgcacgagcgctgctgagcgccgtcacacgacttctaatcctggcagatatggcagacgtcatgagactgcttagtcatctgaaaatagtagaggaggccctcgaggctgtaaagaatgccactaacgaacaggacttggccaataggtttaaagagttcggaaaagagatggtgaagctcaactacgtggctgcccgtcgtcagcaggagttgaaggatccacactgtcgtgatgaaatggctgcagctaggggagctctgaagaaaaatgccaccatgctttatactgcctctcaggcgttcctgagacaccccgacgtggctgccacaagagctaatcgggattacgttttcaagcaggtgcaggaggctatcgccggaatctctaacgcagctcaggccacatcccctaccgatgaggccaaagggcacacagggattggagagctggccgctgcacttaacgagtttgataacaagattatcctcgatccgatgaccttcagcgaggcacgatttcgccccagcctggaagagagactggaaagcattataagcggagcagccctgatggccgactccagctgcacacgcgatgataggcgggaacgtattgtcgctgagtgcaacgcagtcaggcaagcattgcaagatctgctgagtgaatatatgaacaatacggggaggaaggagaaaggtgatccactgaatatcgccatcgataaaatgaccaagaaaacaagagacctcagaaggcagctgcgcaaggcagttatggaccacatctctgattcatttctcgagactaatgtccccctcctggttcttatagaggccgctaagtctggcaacgagaaggaggtgaaagaatacgcccaagtgttccgagagcacgccaacaagctcgtggaggtcgcaaacctcgcctgttctatcagtaacaatgaggagggagtgaaactcgtgagaatggctgctacccagatcgacagcctgtgcccccaagtcattaacgctgccctgactctggctgctcggccacagtctaaggttgctcaggataacatggacgtatttaaggatcagtgggagaagcaggttcgggtactaacggaggcagtggacgatataacctccgttgacgattttttatccgtgagtgaaaatcatatcctggaagatgtcaacaaatgtgtgattgctctacaggagggagatgtcgacactctagaccgtactgctggtgccattcgcggaagagcggcccgcgtaatccatatcattaatgcagagatggagaattacgaggctggcgtctatacagaaaaggtcctagaggcaaccaaactcctgagcgaaactgtgatgcctagatttgcagaacaggttgaagtggcgattgaggcgctgtctgctaacgtgccccagccctttgaggagaatgagttcatcgacgcctcccgtctggtgtatgacggggtccgcgatatccgcaaagccgtattgatgatacgtacgccagaggaacttgaggatgatagcgatttcgagcaggaggattacgacgttagatcaagaactagcgtacaaacagaagatgatcagctgatcgctggacagtccgctagagctataatggcccaactgccccaagaggagaaggcaaagatcgctgaacaggtagagatctttcatcaagaaaaaagtaagctagacgcagaggtggctaagtgggatgactctggaaatgacattatcgtcctcgccaaacagatgtgcatgattatgatggaaatgacagactttacgagagggaaggggccgttgaaaaatacttccgacgtgatcaacgcagccaagaagattgcggaagccggaagccgtatggacaagctagccagggctgtggccgatcagtgtcctgattcagcttgcaagcaggaccttctcgcctacctgcagcgtatagcactgtactgtcatcagcttaacatatgcagcaaggtgaaagctgaagtgcaaaatctgggtggtgagttgatagtgtcaggactagactctgccacctcattgattcaggcggccaagaatctgatgaatgcagtggtcctcacggtcaaagcgagttacgtggcctcaactaagtatcaaaaagtgtatgggacggctgcggtgaattctcctgttgtcagttggaagatgaaagctccagagaaaaagcccctagtgaaacgcgaaaagcccgaagaatttcagactcgagtgcggaggggcagccaaaagaaacacatctcacccgtccaggctctgagcgagttcaaggccatggattctttctag

SEQ ID NO: 111055 - DNA, 582 bp, synthetic construct
  misc_feature 1..582: note = Description of Artificial Sequence: Synthetic coding sequence
  source 1..582: mol_type = other DNA
atgagcgctgagactcctataaccctgaatatagacccacaggacctgcaggtacagacgttcacagtggaaaaactcctcgaaccgttgattatccaggttactacgctcgtgaactgcccgcaaaatccatcttcgcgtaaaaagggacgctcaaagagggcaagtgtcctgcttgcatctgtcgaagaggccacatggaacctgttggacaagggagagaagatcgctcaggaagcaactgttctaaaggacgagctgactgcatccctggaggaggtgcgcaaggagtccgaggccctgaaggtctccgcggagcggtttacggatgatccctgctttctaccgaagcgggaagctgtggtgcaagcagctcgggcgctgctggccgccgtaacaaggctgctgatcttagcagatatgattgatgtgatgtgtcttttacaacacgttagcgctttccagcgcacgttcgaatcattgaaaaatgtggccaacaaatcagatcttcagaagacctaccagaagttgggcaaggagttggagaatttagactatctggccttcaagcgccagcagtag

SEQ ID NO: 111056 - DNA, 705 bp, synthetic construct
  misc_feature 1..705: note = Description of Artificial Sequence: Synthetic coding sequence
  source 1..705: mol_type = other DNA
atgacccagttgccagaggcagaaaaagagaaaatcgctgaacaggtggctgactttaaaaaagtcaaatctaagctagacgcagagatcgagatttgggacgacacctccaatgacataattgtgcttgcaaagaatatgtgtatgatcatgatggaaatgaccgactttacccgaggaaagggtcctctgaagcacactacagacgtaatctacgcggctaaaatgatctctgaatcagggagccgcatggacgtactggctcggcagatcgctaatcagtgtcccgatccttcctgcaaacaggatttactggcctacttggagcagattaaattctattcgcaccagctcaaaatttgtagtcaagtaaaggccgaaatccagaatctaggcggcgaactcattatgagcgcacttgatagtgtgacctccttaatccaagccgctaaaaatctcatgaacgccgtggttcagacagtgaagatgagttacatcgcatccaccaaaattatcagaattcagtctccggccggcccccgccatcctgtggtgatgtggagaatgaaggcaccagccaaaaaaccactgataaagcgggaaaagccagaggagacatgtgcagccgttagacgcggaagtgctaagaaaaagattcaccccctgcaggttatgtctgagttccggggaagacaaatatactag

SEQ ID NO: 111057 - DNA, 2688 bp, synthetic construct
  misc_feature 1..2688: note = Description of Artificial Sequence: Synthetic coding sequence
  source 1..2688: mol_type = other DNA
atgtcggccgagacccccatcacccttaatatcgatccgcaagatctgcaagtgcaaacatttacagtggagaagctgctcgagcctttaatcattcaggtgacgaccctagtgaattgtccccagaaccccagcagtcgtaaaaagggccgctccaagcgtgcttctgtactgctggcgagcgtcgaagaagcgacctggaacctgctcgataaaggtgagaagatagctcaagaagccacggtgctaaaagatgaactgactgcaagcttggaggaagtgcggaaggagagcgaggcactgaaggtctctgcggagcggttcacagatgatccatgcttccttcccaaacgagaggccgtggtgcaagccgcacgggctctcctcgcagcagtcacacggctgcttatcttggccgatatgattgacgttatgtgtctacttcagcatgtctcagcatttcagcgcacatttgagagccttaaaaacgtggccaataagagcgatctgcaaaaaacgtaccagaagctgggcaaagaactggagaatttggattacctggctttcaagagacaacaggatctgaagtccccaaatcagcgggacgaaattgccggagctcgcgcaagtctgaaggagaattcgcctttactgcactcaatctgctcagcttgcctggaacactcggatgttgcatccctaaaagctagcaaggatactgtgtgtgaggaaattcagaacgcccttaacgtgatcagcaatgcctctcaggggatacagaacatgacgaccccaccagagcctcaagcagctactctgggtagcgcactggacgaactggagaacctcattgtattgaaccccctgacagtaacggaggaagagatcagacccagtctcgagaaacgcctcgaggccattatatcaggggcagcattgttggctgattcgagctgtacccgggatctgcacagagaacgcattatcgccgaatgtaatgcaattagacaggccctccaggatcttctgtctgagtatatgaacaacgccggcaagaaggagagaagcaataccctgaatattgccctggataacatgtgtaaaaagactcgggatcttaggagacaactccgaaaggcaattatcgaccatgtttctgattcattcctggacacaactgttcccctgttagtcttaatagaggctgccaaaaacggccgtgagaaagaaataaaggagtacgccgctatattccacgaacacacgagtaggctggttgaagtcgctaatctggcgtgcagcatgtctaccaacgaagacgggatcaaaatagtgaagatcgctgccaaccacctcgagactttatgcccacagatcatcaatgccgctctggctctcgcagctcgacctaaatcccaggccgtgaaaaatacaatggaaatgtacaagagaacgtgggaaaaccatattcacgtcctcactgaagctgtggacgatataacctctatcgacgatttcttagccgtgtcggagtcccacattctggaggacgtcaacaagtgcatcattgcattaagggatcaggacgcagacaacctggatcgagccgctggcgcgatacggggtcgcgcggcccgcgttgcccatatcgttactggagagatggatagttatgagccaggggcgtatacagaaggcgtgatgcggaatgtgaatttcctgacatcaactgtcatcccagagttcgtgacgcaggttaatgtcgccctcgaagcactgtccaagtcatcattaaacgtgctggacgataatcagttcgtggacatctccaaaaaaatttatgacacaatacatgacattcggtgttctgtgatgatgatccggaccccggaagagctcgaagacgtttccgaccttgaggaagagcacgaggttcgcagtcacaccagtatccagacagaaggaaaaacagacagagcaaagatgacgcagttgccagaggcagagaaggagaagattgcagaacaagtggcagacttcaagaaggtgaaaagcaagctcgacgctgaaatagagatatgggacgatacatccaacgatataatagtgctcgcgaagaatatgtgtatgatcatgatggagatgacagacttcacccgcggcaagggcccactgaaacacaccacagacgtgatctatgcagctaaaatgatttccgaatcaggcagccgcatggatgtacttgcgaggcaaattgcaaaccagtgccccgacccctcttgtaaacaggacctgctcgcataccttgagcagatcaagttttacagccatcaactgaagatttgtagccaggtcaaggctgagatccagaacttgggcggcgagctgataatgtccgcactggattcagtgaccagtctgatccaggcggcaaaaaatttgatgaatgcagttgtgcaaactgtcaagatgtcatatattgctagtacaaagatcatccggatccagtctcctgccggacctaggcatccagtcgtaatgtggagaatgaaggccccagcgaaaaagcctctgatcaagcgcgaaaaaccggaggagacatgcgcggctgtacgcagggggagtgccaagaagaagatccatcccctgcaggtgatgtctgaatttagaggacgacagatttattag

SEQ ID NO: 111058 - DNA, 2688 bp, synthetic construct
  misc_feature 1..2688: note = Description of Artificial Sequence: Synthetic coding sequence
  source 1..2688: mol_type = other DNA
atgtcggccgagacacctataacactcaatatcgacccccaagatctgcaggtgcagaccttcacagtggaaaagttacttgagccgctcatcatccaggtgacaacattggtaaactgcccgcagaatccaagtagccgtaagaagggccggtccaagcgagccagcgtgctccttgcttcagtagaagaagctacgtggaaccttttagataaaggtgagaagattgcacaggaggcgaccgtgctgaaagacgagctaacggcctcactcgaggaagttcgcaaggaaagcgaggccttgaaggtgagtgcagagaggtttacggacgacccttgtttccttcccaagcgggaagccgtggtacaggccgctcgagccctcctggccgcagtgacaaggctgctgatcctggctgacatgatcgatgtgatgtgtctgctgcaacatgtgagtgccttccaaaggacgtttgagtctctcaaaaacgtagcaaacaagtctgacttgcagaagacctatcagaaactcggaaaagaactggaaaacctggactacctagctttcaagcgccagcaagacctgaaatctcccaaccaacgggatgagatcgccggcgcccgggcctccttgaaagagaatagcccgctgctgcattccatctgcagtgcatgtctcgagcactccgacgtggcatccctaaaggcatccaaagacactgtctgcgaagagatccagaatgccttaaatgtgatatccaacgctagccaaggtatccagaacatgacgacaccacccgagccacaagccgctaccctcggaagtgccttagatgaacttgaaaatcttatagtactgaatccactcactgtgacagaagaagaaattcggcctagcctggagaaaaggctcgaggcgatcatctcaggcgcggcccttctcgccgattcttcttgcactcgggacttgcacagggagcgtattatcgccgaatgtaacgcaattcggcaggcgctgcaggatctcctgagcgaatacatgaacaacgccgggaaaaaggagcggtcaaacacactaaacattgcactggacaatatgtgtaagaaaacaagggacctgcgaaggcagctgaggaaagctatcatagaccacgttagcgactcgtttctcgatacgacagttccattactggtgcttatcgaggcggccaagaacggaagagaaaaagaaatcaaggagtatgccgcaatattccatgaacacaccagcaggctcgtagaggtggctaatctcgcttgcagcatgtcaaccaacgaggatggtattaaaatcgtgaagatcgcagcaaatcacctggaaaccctgtgcccacagatcataaacgccgccctcgctcttgccgcacggcccaaatctcaggccgtgaaaaacactatggagatgtacaagagaacgtgggagaatcatatacatgtgttaacggaggctgtggatgatatcacctccatagatgattttctggctgtatctgagtcccatattctggaagacgtgaacaagtgcattatcgcgctgcgggatcaggacgccgataatcttgacagggcagccggcgccatccgcgggcgcgccgctcgggtggcgcacatcgtgaccggagagatggattcctacgagcctggagcgtacacagagggggtgatgcggaacgtcaactttctgaccagtactgtcatcccagaatttgtgacacaagttaatgtggctctcgaggccctgtccaaatcctcgctgaacgtgcttgatgacaaccagtttgtcgatatcagcaagaaaatatacgatactatacacgacatccgctgcagcgtgatgatgatcagaacaccagaggaacttgaagacgtgagtgacttggaggaggagcacgaagtgcgaagtcatacttcaatccaaaccgaggggaagactgatagggcaaagatgacccagctaccagaggcagagaaggaaaaaatcgccgaacaggtcgcagattttaagaaagtcaaatccaaactcgatgctgagatagagatctgggatgacacctcaaacgacataattgtactcgctaaaaatatgtgtatgatcatgatggagatgacagatttcacaagaggcaaggggcccctgaagcacaccacggacgtaatttatgctgcgaagatgatctccgaatccggcagtaggatggacgtgcttgcaagacagatagcaaaccagtgcccggacccgtcttgcaaacaggacctacttgcctacctcgagcaaatcaaattttatagtcaccagttgaagatctgtagccaggtgaaagccgagattcagaatcttggcggagagctgatcatgtccgccctggacagcgtgactagcctcatccaggctgccaagaaccttatgaatgcagtggtgcagaccgtgaagatgagctacattgcgtcaacaaagatcatcaggattcagtcccccgccggtcctcgacaccccgtggttatgtggcggatgaaagcgcccgcgaagaagccattaattaaacgggagaagcccgaagagacctgtgctgcagtccgtaggggatcagcaaagaagaagatccatccactgcaggttatgtctgaatttaggggccgccagatttactag

SEQ ID NO: 111059 - DNA, 1131 bp, synthetic construct
  misc_feature 1..1131: note = Description of Artificial Sequence: Synthetic coding sequence
  source 1..1131: mol_type = other DNA
atgagcgcagagacccccattaccctgaacattgatccacaggacctgcaagtccagaccttcaccgttgaaaagctgctggagccccttatcattcaggtgacgacgcttgtcaattgcccccagaacccttcatcgcggaaaaagggtaggtccaagcgggctagcgtgctgctggcatctgtagaagaggctacatggaatctgctggacaagggggaaaaaatagcccaggaggctactgtgctgaaggatgagctgactgctagtttggaagaggtgcggaaggagtctgaagcccttaaggtgtctgctgagcgcttcacagacgatccgtgtttcctgccaaagagggaagccgtagtgcaagccgcgagggccctcttagctgctgtgactcgcctgctgattctcgccgatatgattgacgtcatgtgtttgctgcagcatgtgtccgcgttccagcggacatttgaatccctcaagaatgtggccaacaaatctgatctacaaaaaacctaccagaagctggggaaggagctggaaaacttggactatctcgcgttcaagcgccagcaggacctgaagtctcctaatcagcgagatgaaatcgccggggcccgcgcaagtctgaaggagaactctccactgttgcatagcatctgtagcgcatgcctcgaacactcggacgtggcctcccttaaggctagcaaggatacggtgtgtgaagaaattcaaaatgcattgaatgtcattagcaatgctagccaggggattcagaacatgactacccctccagaacctcaggcagctaccctcggcagcgcactcgacgagctggaaaatctgatcgtcctgaatcccttgactgtaacagaggaggagattcgacccagcctagagaagcgcctggaagccatcatatccggcgctgctcttcttgcagatagttcatgcaccagagatctgcatagggaaagaattatcgccgaatgcaatgcgatcagacaggcccttcaggacctgctgagtgaatatatgaacaatctgtgtaatcagaaatccgaccttgggttaacgggcgtcaagattaagctactcgaggaatgcatcattttctggtccctctag

SEQ ID NO: 111060 - DNA, 582 bp, synthetic construct
  misc_feature 1..582: note = Description of Artificial Sequence: Synthetic coding sequence
  source 1..582: mol_type = other DNA
atgagcgcagaaaccccaatcaccctgaatattgacccccaagacctgcaggtccaaactttcacagtggaaaaactgttagagccattgataatccaggtaactaccctggtcaactgtccccagaatccttcttcacgtaagaaaggacgcagtaaaagagctagcgtgctgctggcttctgtggaagaagcgacttggaatctgcttgacaaaggcgagaagattgctcaggaggccaccgtgctgaaggatgagttgacagcctcactggaggaggttagaaaggaatccgaggccctaaaggtcagcgcggagaggttcacggatgatccatgtttcctgccaaaacgcgaagcagtggtgcaggccgctcgagccctcttagccgcagtgacccggctgcttattttagctgatatgatcgatgtcatgtgtctactccaacatgttagcgcattccaaagaaccttcgagagccttaaaaatgtcgccaacaagtctgacttgcagaagacctaccagaaattggggaaggagctagaaaacttggactacctggcctttaagaggcagcagtag

SEQ ID NO: 111061 - DNA, 1131 bp, synthetic construct
  misc_feature 1..1131: note = Description of Artificial Sequence: Synthetic coding sequence
  source 1..1131: mol_type = other DNA
atgtcagctgaaaccccaatcacattaaacatcgaccctcaggacctgcaggttcaaacatttaccgtggaaaaactactggaacctctgattatccaggtaacaaccctggttaactgccctcagaatcctagctctcgtaagaaaggtagatctaagagggcctccgtgctgctggcctctgtcgaagaggcaacgtggaacctactggataagggggaaaagatagcccaggaggccactgttctgaaggacgagctcactgctagcctcgaggaagtcagaaaggaatcagaggccctgaaagtctccgcagagcgtttcaccgatgatccgtgcttcttacctaagcgggaggcagttgtgcaggcggcccgggctctgctggctgcggtaacaaggttactgatcctggcagatatgatagatgtaatgtgcttactccagcatgtgagcgccttccagcggacattcgagtcactgaagaatgtcgccaacaagtcagatctccagaagacatatcagaagttagggaaggaactggaaaacctcgactaccttgctttcaagagacagcaggatcttaagagccctaaccagagagacgaaatagcaggcgcccgggcctctctgaaagaaaactctcccctgctgcatagtatctgttcggcttgcttggagcacagcgacgtggccagcctgaaggcgagcaaggacacggtgtgcgaggagatccagaatgcattaaatgtgatttccaacgcttcccagggtatccagaatatgactacccctcccgagcctcaagcggctaccttgggcagcgctctcgatgaactggagaaccttatcgtcctcaatcccctgacagttacagaagaggagataagaccttctctagagaaacgcttagaagccataatttccggagccgctctgttggccgacagctcttgcacacgggatctgcatcgggagcgcattatcgccgagtgcaatgcaattcgacaggccctccaggacttgctttcagaatacatgaacaacctgtgtaatcagaagagcgatcttggtctgaccggagtgaaaattaagcttctggaggaatgcattattttttggtccctgtag

SEQ ID NO: 111062 - DNA, 2205 bp, synthetic construct
  misc_feature 1..2205: note = Description of Artificial Sequence: Synthetic coding sequence
  source 1..2205: mol_type = other DNA
atggccgcctcccccgggcctgccggcgtggggggcgccggagctgtttatgggtcaggctcgtccggcttcgcgttagattccggcttggagatcaagaccaggtcagtggaacaaacactgctgccccttgtctctcagatcacaacccttattaatcataaagacaatacaaagaaatcagataaaaccctccaggccatccagcgcgtgggacaggccgtgaatttggctgtagggagatttgtgaaagtcggcgaggccattgccaacgagaattgggacctcaaggaagaaataaatatcgcatgcatcgaggctaaacaggctggcgaaacaattgcagctctgacagatatcactaatctgaatcacttagagagtgacggacagataactatttttaccgataaaacaggggtgattaaggcagctcggctgctgctgtcttctgtgactaaagtgctgctgctagctgaccgggtggttattaaacagattatcacttcacggaataaagtcctcgccactatggagcgcttggagaaggttaacagctttcaggagtttgtacagatcttctctcagttcggaaatgagatggtagagttcgcacatctcagtggcgacagacagaatgaccttaaagatgaaaaaaaaaaggccaaaatggcagccgctagagccgttctcgaaaaatgcactatgatgctgctgaccgcaagcaaaacctgtcttagacacccaaattgcgaaagtgcccacaaaaacaaggagggcgtgtttgacagaatgaaggtcgcgcttgataaagtgatcgaaattgtgaccgactgcaaacctaatggggaaaccgacattagctctattagcatttttaccggaatcaaggagttcaaaatgaatatcgaggccctgcgcgagaatctctactttcaatctaaggagaacctgagcgtgaccttggaagtgattttggaacgtatggaagattttaccgactctgcttacactagccatgaacacagggagcgaattctggaattatctacacaggcccggatggagttgcagcaactcatctcagtgtggatccaggcgcaaagtaaaaaaacaaagagtatcgcagaagaactggagttgtccatcctgaagatttcccactcgctgaacgagctcaaaaaggagctccacagtacagccacccaactggcagccgatctgctcaagtaccacgccgatcatgtcgtgctaaaagcactcaagctgactggggttgaggggaatctcgaggccttagccgaatacgcatgtaagctgtccgagcagaaagaacagctcgtggagacgtgtcggttgctaaggcacatctcgggcacagagcccctggagatcacctgtatccacgcagaagaaacctttcaggtgactggtcagcagatcatcagcgccgcagagactttgactctccatccctcctcaaaaatcgcaaaggaaaatctggacgttttttgtgaggcgtgggagtcacagatctccgatatgagtacactgcttagagagattaatgatgtgttcgagggccgccggggagaaaagtacggatacctgagcctcccaaaacctatgaagaacaacgctaaccttaaatccctgaagcccgataaacccgactccgaagagcaagccaagattgccaagttggggctgaagttggggctcctgactagcgatgccgattgcgaaattgaaaaatgggaggatcaagagaacgagatcgtgcagtacggacgtaacatgtcctctatggcctattctctatatctgtttacacgcggcgaagggcccttaaagacttcccaagatctcatccaccaactggaggtcttcgcggccgaggggctgaagttgacatcatccgtgcaggcgttttctaagcagctgaaggatgacgacaagcttatgctgcttcttgaaattaacaaacttatcccactgtgccaccagctgcagactgttaccaagaccagcctgcaaaataaggtgtttctgaaagtggacaaatgtattacgaagactagatctatgatggctctgttggttcagctcctctcactgtgctacaaacttctcaaaaaacttcagatggagaataatggctgggtctctgtcaccaataaggacacaatggactccaagacatag

SEQ ID NO: 111063 - DNA, 1953 bp, synthetic construct
  misc_feature 1..1953: note = Description of Artificial Sequence: Synthetic coding sequence
  source 1..1953: mol_type = other DNA
atggcagcaagcccaggtcctgccggggtcgggggggcgggcgctgtgtacggatccggaagcagtggatttgcacttgattccggtctggaaatcaaaacacggagcgtcgaacagactttattacccctcgtttcccaaatcacaacactcatcaaccataaagacaatacaaaaaaatcagacaagaccttgcaggcaatccagcgcgtggggcaagctgtcaatctcgccgtgggtcgatttgtgaaagtgggcgaggcgattgcgaacgagaattgggacctgaaggaggagatcaacatcgcgtgtatcgaggcgaagcaggctggcgaaactattgccgccctaactgacatcactaacctgaaccatctcgaaagcgacgggcagataaccatcttcacagataagacaggcgtgatcaaagccgccaggctgctactctcttccgtgactaaggtactcttgctggcagatagagttgtcattaaacagattattacaagccggaataaggtgctcgcaaccatggagcgactggagaaagtgaatagcttccaagaattcgtgcaaatcttctctcagttcgggaacgagatggtggaatttgcacacttgagcggggataggcaaaatgacctcaaggacgagaagaagaaggctaagatggctgccgccagagcagtgctagagaagtgcacaatgatgctgctgacagcatccaagacttgcctccgccaccccaactgcgaaagtgctcacaagaataaagaaggcgtgttcgacagaatgaaggtcgccctcgacaaagtgatagaaatcgtcacagattgtaagccaaacggggagaccgacatcagtagcattagcattttcaccggcattaaggagtttaaaatgaatatagaggcgctacgagagaatctctattttcaatccaaggagaatctcagtgttactctggaagtgatcctggaacgcatggaagatttcacagactcagcttacacttcgcatgaacacagagagcgaattctcgagctgtctacccaggcccgtatggaactgcagcagctcatcagcgtgtggatccaggcccaatccaagaaaactaaaagtatcgccgaggagctcgagttgtctatcctaaagatctcacactctctgaacgaactcaagaaagagatcataagcgcagcagaaacgctcactctgcatccgtctagcaagattgctaaagagaatctcgatgtattttgtgaggcctgggaatcacagatttcagatatgtctaccttactcagagaaattaatgatgtgtttgaaggacggcgaggcgaaaagtacggatatctttcccttcctaaaccaatgaaaaacaacgcgaacttgaaaagtctgaaacccgataaaccggattcggaagagcaggccaagattgctaagctggggctcaaactgggtctccttaccagcgatgctgactgtgaaattgagaagtgggaggaccaggagaatgaaatcgtgcagtacggacgcaacatgtcgtcgatggcctatagcctgtacctgtttacaaggggggagggtccattgaaaacttctcaggatctcatccaccagctggaggtgtttgcagccgagggcttgaagctgacgtcttctgttcaagccttctcaaaacagctcaaggacgacgacaaactcatgctgctgctcgagatcaacaagctcatcccactttgtcaccaattgcagaccgttactaagactagtctgcagaacaaagtcttcctgaaggtagataagtgcattaccaaaacacggagtatgatggccctcctggtgcaattgttgtcactgtgctacaaattgctgaagaaactacaaatggagaataacggttgggtttcagtgacaaataaggacacgatggacagtaagacctag

SEQ ID NO: 111064 - DNA, 552 bp, synthetic construct
  misc_feature 1..552: note = Description of Artificial Sequence: Synthetic coding sequence
  source 1..552: mol_type = other DNA
atggccgcttcccctggaccagccggcgtaggcggcgccggcgcagtctacggctcaggatcatccggctttgccttggatagcgggcttgaaatcaaaacccggtcagtggaacagactctacttccattggtgagtcagatcactacgctgataaatcataaagacaacacaaagaagtccgacaaaacattgcaggctatacagagggtgggtcaagctgtgaatttggcggttggtaggtttgttaaggtgggagaagcaatcgcaaacgagaactgggatttgaaagaagagattaacatcgcctgcattgaagccaaacaagctggagaaacgatcgccgctctgactgacattacaaacctgaaccacctggagagcgacggccagatcacaatatttacagacaaaactggcgtaattaaagcggcaagacttcttctgagctcagtgaccaaggtgctgctcctcgccgatcgggtggtcattaaacagatcattactagccgcaataagagactgactatctacaaccttcgacacagttag

SEQ ID NO: 111065 - DNA, 408 bp, synthetic construct
  misc_feature 1..408: note = Description of Artificial Sequence: Synthetic coding sequence
  source 1..408: mol_type = other DNA
atgtcatcaatggcatattctctgtatctgttcactcgaggcgaaggaccactgaagacctcacaggatctgattcatcaattggaagtttttgcagcggagggcttaaagttgacttcatcagtccaggcattttccaagcaattgaaggacgacgacaagctcatgctcttgctggaaatcaataaacttattcccctctgccatcaactccagacagtgacgaaaactagcctacaaaataaggttttcctgaaggtcgacaaatgcatcactaaaacacggtcgatgatggccctgttagtacagcttctatccttgtgttataagctcctgaagaagctccagatggagaacaatggatgggtgtccgtgacaaataaggacacgatggattctaagacctag

SEQ ID NO: 111066 - DNA, 2157 bp, synthetic construct
  misc_feature 1..2157: note = Description of Artificial Sequence: Synthetic coding sequence
  source 1..2157: mol_type = other DNA
atggctgcttcgcctgggcccgctggtgtcggtggagccggcgctgtgtacgggagtggctctagcgggttcgcgctggactccgggctcgagatcaaaacgaggtcagtggagcagacgctactgccgctcgtgtcccagattaccaccttgataaatcataaggacaataccaagaagtctgataagaccctgcaggccatccaacgagtgggccaagccgtgaacttagctgtgggccgctttgtgaaagtcggggaagcgattgctaatgaaaattgggacctgaaagaagagatcaatattgcatgcattgaggccaaacaggccggggagactattgcagccctaaccgacatcactaacttaaatcacctggagtctgacggccagattacaatctttaccgataaaactggggttattaaagcagcacgactcctgttgtctagcgttacgaaggtgctgctgctcgctgatcgcgtggtgattaagcaaattattacctctagaaataaagtgcttgccactatggagcgcttggaaaaggtgaactctttccaggagttcgtccagatcttttcacagttcggcaatgagatggtggaatttgcgcatctgtccggcgaccgtcagaatgacttgaaggacgagaaaaaaaaggccaagatggctgctgcgagagctgtgttggaaaaatgcaccatgatgctgcttactgcgagtaaaacctgcttaagacatcccaattgtgagtctgctcataaaaataaagaaggagtgttcgacagaatgaaagtcgctctcgataaagtaatagagatagtcaccgactgtaaacctaatggagaaacggacatatcttcaatcagcatatttacaggtattaaggagtttaagatgaatattgaagccctcagggagaatctgtattttcagtccaaagagaacctaagcgtcacactggaagttattctggagcgaatggaagatttcacagattccgcctacacatcccatgaacaccgcgagcggatcctagaactctctacgcaggcgcggatggaactccagcagttgattagcgtttggatccaggctcagtccaaaaagaccaaaagcatagccgaggaactcgaactatcgatacttaagatctcccactctttaaacgagcttaagaaggaacttcactcaaccgccacccagctagcggcagacctcctgaagtaccacgccgaccacgtggtgctgaaagctctgaagttaacgggggtcgaaggaaacctggaggccctagcagagtacgcatgcaaacttagtgagcaaaaggagcagctggtagaaacttgtcggctgctgagacacatatccgggaccgagcctttagaaataacctgtatacatgcggaggaaacattccaagtgaccgggcagcaaattatttccgcagcagagacattaaccctgcatcccagttcaaaaattgccaaagaaaacctagatgtcttctgtgaggcctgggagagtcagatatcagacatgtctaccctccttagagaaattaacgatgtgtttgaaggacgtaggggggaaaaatacggctatctgagtctgccaaagcctatgaaaaataacgctaacctgaagtcactgaagcccgacaagcccgactccgaggaacaggctaagatcgctaaacttggtctcaaattgggacttctaacctctgacgcagactgcgagatcgagaaatgggaggatcaggagaacgaaatcgttcaatacggcagaaacatgtccagtatggcgtactctctctatttattcactcgcggggagggaccgcttaagacgagtcaggacctgatacatcagctggaggtctttgcagccgagggccttaagctgacctcttccgttcaggcattctcgaagcaacttaaagatgatgataaactgatgctgcttcttgagatcaacaagctcatcccactgtgtcaccagctacaaactgtgaccaaaaccagtctgcagaacaaagtttttcttaaagtggacaagtgcatcaccaaaacacggagcatgatggccctgctggtgcagcttctctccctgtgttataagttgttgaaaaagagcgagacccggtattag

SEQ ID NO: 111067 - DNA, 2802 bp, synthetic construct
  misc_feature 1..2802: note = Description of Artificial Sequence: Synthetic coding sequence
  source 1..2802: mol_type = other DNA
atggatgattctgaagttgaaagtactgcttccatcctggcctccgtcaaggagcaagaggcccaatttgagaaactcacacgtgctctggaagaggagcgtaggcacgtgtcagcccagctcgaacgggtaagggtgagtccgcaggatgcaaaccctcttatggcgaacgggaccctgaccaggcggcaccaaaacggaagattcgtgggagacgccgaccttgagaggcaaaagttctccgaccttaaactcaatggccctcaggatcactcccatctgctctactctacaatcccaaggatgcaagagcctgggcagattgtggagacctacactgaagaagatccagagggagccatgtccgtggtgagcgtcgagacttcagacgacggaaccacacgacgcacagaaaccacagtgaagaaggtcgtcaaaacggtaacaacgcgtacggtccagcccgtggctatgggcccggacggcttacctgttgacgcctccagcgtctcgaacaattacatacagactctcgggcgcgacttccgaaagaatggaaatggcggcccggggccatacgtgggtcaagcagggacagctactttgcctaggaacttccattacccgccagacggctattccagacattacgaagatggataccccggtggttccgacaattatggaagcctcagcagagttacccggattgaggaacgctataggccttctatggagggctaccgagctccttcccggcaggatgtgtatgggcctcaaccacaagtccgcgtggggggctcaagcgtagatctgcacagattccacccagaaccttatggcttggaggacgaccagaggtctatgggctacgatgatctggattacggcatgatgagcgattacggcacagctaggagaacgggcacaccgtcagatccacgccgtcgtctcaggagttatgaagatatgataggggaagaagtgccttctgatcaatactactgggcacccctggcacagcatgagcgcggctcgttggccagtctggatagcctacgcaagggtggccctcctccacccaactggcggcagccagaactccctgaagtcatcgcgatgctcgggttccggctggatgctgttaagtcaaatgccgccgcttacttgcagcatctctgttatcgtaacgataaagtgaagacagatgtgaggaaacttaaaggcatcccggttcttgtggggctgttggaccaccctaaaaaggaagttcatttgggagcttgtggggccttgaaaaacatctctttcggccgggatcaagacaacaagatcgctataaagaattgcgatggagtgcccgctttagttagattgctgcgaaaagctcgggacatggacctgaccgaggtcatcaccggtacgctgtggaacttaagttcacacgatagcatcaagatggaaattgtcgaccacgccctacatgcacttactgacgaagtgattatcccccatagcgggtgggagagagagcccaacgaggactgtaagcctagacacatcgagtgggaaagcgtcctcactaatacggccggttgcttacggaacgtttcctcagagcgctcagaggccaggcggaagctcagggaatgtgacgggctggtcgacgcactgatcttcatcgtccaagcggaaataggacaaaaagactctgacagcaaactcgtcgagaactgcgtctgtctgctcaggaatctatcctaccaggttcacagggaaataccccaggcagaacggtatcaggaggccgcacccaatgtcgcgaataatacaggacctcatgccgcaagctgcttcggcgctaaaaaagggaagggcaaaaaacctatcgaggatcccgccaatgatacagttgacttcccaaaacgcaccagccccgcccgcggctacgagcttctgtttcagcccgaagtggtcaggatctacatttcgctgctgaaggaaagcaagaccccagctattctggaagcgagtgccggagctatacagaatctttgcgccggtagatggacttatgggcgctacattcgaagtgctttgcgtcaggagaaggccctgagcgccattgcggacctgcttactaatgaacacgagagggtggtgaaagccgcttccggggccctgaggaatctagctgttgacgccagaaacaaggagctgattggcaagcatgcaattcctaatctcgtgaagaaccttccaggtgggcagcaaaattcgagctggaattttagtgaggatacagtgatctctattctgaacaccatcaatgaagttattgcagagaatttggaggctgccaaaaagcttcgggaaacccagggtattgagaaattggtacttattaataagagcggcaaccggtcagagaaggaggtgcgagctgctgcactggtgctgcagaccatctggggctataaggagctacgcaagcccttggaaaaggagggctggaaaaagagcgacttccaggtgaacctgaataatgcctcccgatcacaatcttcacattcttacgatgatagcacactgccactgatagaccggaatcagaagagcgacaagaagcccgacagagaagaaattcaaatgagtaacatgggctccaacaccaaatcgttggataacaactattctacccctaacgagcgtggcgatcataatcgtacactagacagaagtggagatctgggagatatggagcccctgaaaggaactaccccactgatgcaaaaaatctag

SEQ ID NO: 111068 - DNA, 2844 bp, synthetic construct
  misc_feature 1..2844: note = Description of Artificial Sequence: Synthetic coding sequence
  source 1..2844: mol_type = other DNA
atggatgattccgaggttgagagtacagccagcatccttgcgagcgtgaaggaacaggaagcccagttcgaaaaactgactcgcgccctggaggaggaacggcgacatgtgtccgctcaacttgaacgcgtacgcgtctccccccaggacgccaatcccctgatggcgaatggcaccctaaccaggcgccaccagaacggccgctttgtgggggacgccgatctggaacggcagaagttctctgacctcaaattaaacggcccccaggatcactcacatctgctgtacagtactatccctcggatgcaggaacccggacaaattgtggagacctacaccgaggaggatccagaaggcgctatgtctgtcgtgtctgtagaaacgtctgacgacggcacaacacgaagaactgagactacggtaaaaaaggtggttaagacggtgacgactcgaaccgtgcagcctgtggcaatgggccctgacggtctacccgtggatgcaagcagcgtttctaataattacatccagaccctgggcagggactttcgtaaaaatggtaatggcggacctggcccctacgtcggacaggccggtaccgccaccctccctcggaactttcattaccctcccgatgggtactccagacattatgaggacggatatcctggaggcagcgacaactatggttctctgtcacgcgtgacacggatcgaagagcgttaccgcccgtccatggaagggtacagagcgccctctaggcaggacgtgtatggcccacagccccaggtacgtgtaggcggctcttcagtcgaccttcacaggttccatcccgagccttatggcctggaagacgatcaacggtcaatgggatatgacgatcttgactatggcatgatgtctgattacggtaccgctagacggacaggaactccctcagaccccaggcgcaggctaaggagctacgaagacatgattggggaagaggttccttccgatcagtactactgggcacctttggcacagcatgagagaggctcactggcctctctcgacagccttagaaaaggagggccaccccccccaaattggagacagccagaattaccggaggtcatcgctatgcttggattccgactggacgccgtcaagtctaatgctgcagcctacctgcagcacctctgttaccgaaacgacaaggtcaagactgacgtaagaaagctgaaagggattcccgtcctcgtcgggctcctggatcaccctaagaaggaggttcacctcggagcatgtggggccctgaaaaatattagcttcggtcgtgaccaggacaacaaaatcgccatcaagaattgcgatggtgtgcccgcgctggtgagactgttgcgcaaagcccgggacatggatttaacagaggtcattaccggtacactgtggaacttaagctcccatgactctatcaaaatggaaatcgtggatcacgccctacacgcactgacggatgaggtcataatccctcattccgggtgggagcgggagcctaatgaggactgcaaacccaggcacatcgaatgggagtccgtgttaactaacacagccgggtgcctgaggaatgtgtctagcgaacgcagcgaagccagacggaaattaagggagtgtgacggcctggtagatgccctcatttttatcgtccaggcggagatcggacagaaagatagtgactccaagttagtcgagaattgcgtctgtctgcttaggaacctgtcatatcaagtgcatcgggagattccccaggccgaacggtaccaggaggccgcccctaacgtggccaacaatactggaccccacgcagcgtcttgctttggagccaagaagggtaaggacgaatggttctcccgggggaagaaacctattgaggatcccgctaatgatactgtggatttcccaaaacggactagcccagcccgagggtatgagttgcttttccagcctgaagtggtgagaatttatattagtcttctgaaagagtccaagacgccggccattctcgaagcctcggcaggggcgatccagaacttgtgcgcaggcaggtggacctacgggcgatacatccgctcagcgctgcgccaggaaaaagccctgagtgcaattgcagacctgctgacaaacgaacatgaaagagtcgtcaaggcagcctccggggccttgcgcaacctggctgtagacgctagaaacaaagaactgatcgggaaacatgctatccccaaccttgttaaaaacctccccgggggacagcagaatagtagctggaatttttccgaagacaccgtgatcagcattttgaacacaatcaacgaagtcattgccgaaaacctggaagcagccaagaagctcagggagactcagggcattgagaaacttgtgctcattaataaatcaggtaacaggtctgagaaggaggtgagagccgctgcgctcgtgctccaaactatctggggttataaagagctgcgtaaacccctggagaaagagggttggaaaaaatctgactttcaagtgaacctcaataatgcgtcccgatctcagtcctcccatagttatgatgatagtacgctgccattgattgataggaaccagaaatcagacaacaattatagcaccccaaatgaacggggggatcacaatcggacgctcgatagatcaggagacctgggcgacatggaacccttaaaggggacgacccccttgatgcaggacgaagggcaggagtcacttgaagaggaactggacgtgcttgtactagacgatgaaggaggacaggtgtcgtacccaagcatgcagaaaatctag

SEQ ID NO: 111069 - DNA, 2889 bp, synthetic construct
  misc_feature 1..2889: note = Description of Artificial Sequence: Synthetic coding sequence
  source 1..2889: mol_type = other DNA
atggatgactccgaggtggagtcaacggcctccattctcgcatcagtaaaggaacaggaggctcagttcgagaaactgacccgtgccctcgaggaagaaagacgacatgtttctgcccagctggaaagggtccgagtctcaccgcaggacgcaaatccgcttatggctaacggcacccttacccgccggcatcaaaatggtcgcttcgtcggagacgcagatctggaaagacagaagttcagcgatttgaagctgaacgggcctcaggatcacagtcacctgctctactctaccattcctcgcatgcaggaaccgggacagatcgtcgagacctataccgaagaagacccggagggggcgatgtccgtggtgagcgtggaaaccagcgacgacggcacaactcgccggactgaaacgacagtcaagaaggtcgtgaaaacagtcacgactcgaactgttcagccagtcgccatggggccagatggcttgcctgtggatgcgagttccgtgtctaataactacatccagactcttgggcgggactttagaaagaacggtaatggtggacctggaccctatgtgggccaggctgggactgcaaccctcccgaggaattttcactaccctccagacgggtatagccgtcactacgaagatggctacccgggaggcagcgataactatggtagtctcagtagagtgacacgtattgaggagaggtaccgaccctcaatggaaggctatcgagctccttcaagacaggacgtctacgggcctcagccacaagtgagggtgggaggatcctctgttgatctccaccgattccatcctgaaccctacgggttagaagatgaccaaagatccatggggtacgatgacctggactatggtatgatgtctgattacggcacagcccgcaggactggtacccctagcgatccccgcagaaggctgcgctcgtacgaggatatgatcggagaagaggtgccctccgatcagtattattgggcacccctcgcccagcatgaacgtggctcactcgccagtctggacagcctgaggaagggcgggccaccgccacccaactggcgtcagccggagctgcctgaagtgattgcaatgctcggttttaggttggacgccgtcaagagtaacgccgccgcctacctccagcatctctgctaccggaacgacaaggtaaagacagacgtacggaaactcaagggcattccggtgttagtgggactgctggaccatccaaagaaggaggttcacctgggtgcatgtggggctctgaaaaatatatcctttggacgagatcaagacaataaaatcgccattaagaattgcgacggcgtgcctgcgttagtgcgcctcctgcgcaaggcacgggatatggaccttacggaagtcataaccggtaccctgtggaatttgagttcccatgacagcattaagatggagatcgtggatcacgctctgcacgccctcaccgatgaggttatcattccacacagtggatgggagagagagcctaacgaggactgcaaacccagacacatagagtgggagtctgtgttaacgaacaccgccggctgcctgcggaacgtgagcagcgaaaggtccgaagccagacgaaaattgagagaatgtgacggcctcgtggacgcccttatatttatcgtgcaggccgaaataggtcagaaagattctgactcaaagcttgtcgagaactgcgtctgcttactgagaaacctctcctaccaagtccatagagaaattccacaggctgaaaggtaccaggaagcagctcctaacgtggcaaacaacacagggcctcatgccgcatcatgttttggcgcgaaaaagggtaagggcaagaagccaattgaagacccagccaacgacacagtggattttccgaaacgcacgtcacccgcccgcggttatgagctgttgttccagcccgaagtcgtacggatatatatcagcctcttaaaggagtctaagactcccgcaatactagaagcgtctgctggagcaatccaaaacctgtgtgctggccgctggacgtacggacggtacattcgcagcgccttacgccaggagaaggcactgagtgccatcgccgacttgttgacaaacgaacacgagcgggtggtgaaggcagcttcgggcgccttacgaaatctggcggtggacgcccggaacaaggaattgattggcaagcacgcaatcccgaacctggtgaagaacctaccgggtgggcaacagaactccagctggaatttttcggaggataccgtcatctccatcctcaatacgatcaatgaagttatagccgagaatctggaggcagccaagaagctgagagaaactcaaggcattgagaagctagtactgattaacaagtctggtaaccggtctgagaaggaagtacgggccgctgcccttgtgctccagactatatgggggtataaagaacttcgcaagccactggagaaagaaggctggaagaagtccgacttccaggtgaacctaaacaacgcgtctagaagccaaagctctcatagttatgacgatagcacactgccactcattgatcgcaatcaaaaaagcgataagaagcctgacagagaagagatacagatgtccaatatgggttctaatactaaatccttggacaataactacagcacccccaacgaacggggagatcataatcgtactttagaccggagcggagaccttggcgacatggagcccctcaagggaactacacccctaatgcaggatgaggggcaagagtccctagaagaggaactagacgtactcgtgctcgatgatgaaggtggccaggtgtcgtacccatcaatgcagaaaatctag

SEQ ID NO: 111070 - DNA, 2826 bp, synthetic construct
  misc_feature 1..2826: note = Description of Artificial Sequence: Synthetic coding sequence
  source 1..2826: mol_type = other DNA
atggatgactccgaagtagagtccacagccagcatacttgcgagcgtgaaggagcaggaggcacagttcgagaaacttacccgcgccctcgaggaggaaagaaggcatgtcagcgcccaactggagcgggtcagggtgagcccccaagatgcaaacccactgatggcaaatggcacgctcacacgccggcatcagaacgggagatttgttggggacgccgatctcgaaagacagaagttttccgatctcaagctcaatgggccccaggatcattcccacttgctgtattctacaattcccagaatgcaagagcccggtcagatcgttgagacatacacagaagaggacccggagggagctatgtcagttgtgtccgtggagacctctgacgacggcactacgaggcggactgagactacagtgaagaaggtcgtcaaaaccgttacgacacggaccgttcaacctgtggccatgggccctgatggtcttccggtggatgcttcaagcgtgagcaataactacatccagacccttgggagagatttcaggaagaacgggaatggaggacccggaccctacgttggacaagctgggactgcaacactgccccgcaactttcattacccgcctgacggctacagccgacattacgaagacgggtatcctggggggtctgataactacggctctctttcaagggtcacgcgtattgaggagcgctatcggccgtcgatggaaggttaccgggcaccctcgagacaagatgtttatgggcctcaaccccaggtgcgagtaggcggctcatccgtcgacctgcaccgatttcatccggaaccctacggccttgaggacgaccaacgtagcatgggctacgatgatctcgattatggaatgatgagcgactacggtaccgcccggcggaccggcactccgtctgatccaaggcgcaggctgcggagttatgaagacatgatcggagaggaggtcccaagcgaccagtattactgggcaccactggcccaacacgaaagaggatcccttgcctccctagactcgcttaggaaagggggcccccccccacccaactggcggcagcctgagcttcctgaggtcattgctatgcttggatttcggcttgatgctgtgaaatccaatgcagccgcttacctgcagcatctgtgctacaggaacgacaaggttaaaacagatgtacgcaaactcaagggcatccctgtgctggtgggtttattggatcaccccaagaaggaagtgcacttgggtgcctgtggtgccttaaagaatatctcgtttggccgagaccaggacaacaagatcgctatcaagaattgcgatggcgttcccgccctcgtacgcctgttgcgcaaggcaagagacatggatcttaccgaggtaattaccggtacactatggaacctatctagccacgacagcattaaaatggaaatcgtcgatcacgctttgcatgccctgacagacgaagtgatcattcctcattctggctgggagcgggagcctaatgaagactgtaagccacgccatatcgaatgggagagcgtcctgacaaatactgcgggctgcttgaggaatgtgagtagcgaaagatccgaagccagaagaaaattgagggagtgtgatggactggttgacgcattgatttttatcgtccaggccgaaattggccagaaagattccgacagcaagttagtggagaactgtgtatgtctgctgcgcaacctgtcataccaagtgcaccgggagatccctcaagccgagcgctatcaggaagctgctcccaacgtggccaataacaccggaccacacgccgcctcttgtttcggcgccaagaaaggcaagggtaaaaaacctattgaagaccccgctaatgatacagtagattttccgaagcgaaccagtccagctcgtggttacgaattacttttccaaccagaagtagtgcgaatttacatctccctgctgaaggagtcgaagacacctgctatattggaggcgtctgctggcgccatccagaacctttgcgccggtaggtggacatatgggaggtacatcagaagtgcccttcggcaggagaaagcgctgtcagcaattgctgatctccttacaaatgagcacgagcgagtcgtgaaagctgcttctggagctcttcggaacttggccgtggatgcacggaataaagagctgattggcaaacatgctatccccaacctggtaaagaatttacccggcggccagcagaattcctcatggaactttagcgaagatacggtcattagtatcttaaacacgatcaatgaagtgatcgctgaaaacctggaagcagcaaagaaactgcgcgagacccagggtatcgagaagcttgtgcttatcaacaagagcggaaatagatcagaaaaggaagttagagccgccgccttggttcttcagacaatatggggatataaagagctgcgcaaacctttggagaaagagggctggaagaaatccgattttcaggttaatctcaataatgccagccgtagtcagtcgagtcacagctatgacgactcaacactgcctctcattgataggaaccagaagagcgataacaactactccacccccaacgagaggggggatcataatagaacacttgaccgctctggagatctaggcgacatggagcccctgaaaggaaccacaccactgatgcaggacgaaggccaggaatctttagaggaagagctggacgtgctggtgctcgatgatgaagggggacaggtgagttacccttcgatgcaaaaaatctag

SEQ ID NO: 111071 - DNA, 2802 bp, synthetic construct
  misc_feature 1..2802: note = Description of Artificial Sequence: Synthetic coding sequence
  source 1..2802: mol_type = other DNA
atggatgactccgaagtcgaaagcacggccagtattctcgcctcggtgaaggaacaggaggcccagtttgagaaactgactagagcccttgaagaggaaaggaggcacgtctccgcacagcttgaacgggtccgggtgtctccccaggatgcgaatcctctaatggccaacggcaccctgactaggagacaccagaatggcagattcgtgggcgatgctgatctggagcggcagaaatttagcgatcttaaattgaacggaccccaggatcattcccatcttctgtacagcactataccccgcatgcaagaacccggacagatcgtcgaaacctacacggaagaggacccagagggcgctatgagcgtagtgtccgtagagactagcgatgatgggaccacgcggcgcactgaaaccaccgtgaaaaaggtcgtcaagactgtcacaaccaggactgtacaaccagtggccatgggcccagacggcctcccggtcgacgcctcaagcgtctccaataactacatacagaccctggggagagattttcgcaaaaatggcaacggggggcccggcccctacgtaggccaagcaggcaccgctactctccccaggaacttccactatcctcccgacggatatagtcgacattacgaagatggatacccaggcggcagtgataactatggcagcctctctagggtgaccaggatcgaagaacggtacaggccctccatggagggctacagagctccttccaggcaagatgtctatgggccacagccccaggtaagggtcggaggctcgagcgtggacttacatcgcttccatccggagccatacggcctagaggacgaccagagatccatgggttatgatgatttggattacggtatgatgtcggactacgggacagcacggcggaccggaacaccgtcagaccctcgcagacgacttcggtcctatgaagatatgatcggagaagaggtgcccagcgaccagtactattgggcgcccctcgcacagcacgagagggggtctctggcaagcttggactctttaagaaaggggggacccccccctcccaattggagacagcctgagctgcccgaagttattgccatgctgggattccgcctcgatgccgtaaaaagcaatgccgccgcctacctgcagcacctgtgctaccgcaacgataaagtgaagacagatgtgcggaagctgaaagggattcctgtgctggtgggcctgctggaccatccaaagaaggaggttcacctgggtgcttgtggcgcccttaaaaacatcagtttcggtagagatcaagacaataagattgctatcaagaactgtgacggtgtgcctgcactggttagactgttgagaaaggccagagatatggacttgacagaggtcatcaccggaacgttgtggaatctatccagccacgactccataaaaatggagatcgttgaccacgctcttcacgctctgactgacgaggtcattatcccacattcaggctgggagcgggaacccaatgaggactgcaagccgcgccacattgagtgggagagtgtcctgactaataccgctggatgcctgcggaacgtttccagtgagcggagcgaggcccgtaggaagttgcgggagtgcgatgggctggtggacgctttaatttttatagtccaggccgagattggtcagaaagacagcgactcaaagctcgtcgaaaactgcgtgtgcctgctacgaaatctcagctatcaggtgcaccgcgagattccacaagccgaaaggtatcaggaagcagctccgaacgtcgcaaacaatacaggaccacacgcagcctcttgctttggcgctaaaaagggcaaaggaaagaaacccattgaagaccctgcgaacgatacggttgatttccccaagaggacaagccctgcccggggatacgaactgctcttccagcctgaagtggtccggatttacatatccctgctgaaggaaagtaaaactccggcgatcttagaggcaagcgccggcgctatacagaacctgtgcgccggacggtggacttacggtcggtacattagatctgctctacgacaggagaaagccctctcagcaatcgctgatctgcttactaatgaacacgagcgcgtcgttaaagcagcttccggcgcgctgagaaatctggctgtggacgcacgcaacaaggaactcataggaaagcatgcaatacccaatctagtgaagaaccttccaggcggccagcagaatagcagttggaactttagcgaagacacagtgatttctatcctgaacactatcaacgaggtgatcgctgagaatttggaagcagccaagaagttaagggagactcagggaatcgagaaactggtgttgattaacaaaagtggaaatcgaagtgagaaagaggtgcgcgcagcagccctcgtacttcagacaatctggggatacaaagagttgagaaagcccctcgagaaggaggggtggaagaagtctgacttccaggtaaacctgaacaatgccagtaggtcgcagtcctctcactcttatgatgactccacattgcccctgatcgaccgaaatcaaaagtctgataaaaaaccagatcgagaggagatccaaatgtcaaacatgggcagcaatacaaagtcacttgataacaactacagtacccccaatgaacgcggcgatcacaaccgtaccctagatcggtcgggtgacctaggggacatggagccactgaagggcactacgcccctgatgcagaaaatctag

SEQ ID NO: 111072 - DNA, 2817 bp, synthetic construct
  misc_feature 1..2817: note = Description of Artificial Sequence: Synthetic coding sequence
  source 1..2817: mol_type = other DNA
atggacgacagcgaggtggaaagtaccgcttctattttagccagtgtcaaggagcaggaggcacagtttgagaagttgaccagggcacttgaagaagaaaggagacacgttagcgcacaattggaacgcgtgagagtcagcccccaagacgcaaacccactgatggccaacggaacactgacgcggcgccaccagaatggacggttcgtgggcgacgctgacctggagaggcagaagttttcagatctcaagctcaacgggccgcaggatcatagccacctgctgtacagtacaattccacggatgcaagagcctggtcaaatcgtagagacgtatacagaggaggacccagagggagccatgtccgtggtctcggtggagacttcggatgatgggaccaccaggaggaccgaaacaacggtgaagaaggttgtgaagacagtcacgaccaggaccgtccagccagtcgcgatgggacccgatgggctccccgtggacgcttctagtgtgtctaacaattacattcagacactgggcagagactttagaaagaacggtaacggcgggcctggaccatacgtagggcaagctggcacagccactttgccgcggaattttcactatccgcccgacgggtactccaggcattatgaagacgggtaccctggcggatcagataattatgggagcctctccagagttacgcggatcgaggagagataccgccccagcatggaggggtatagagccccaagtcgacaggatgtttatggcccccagccacaagttagggtgggtggatcatcggtggatctgcataggtttcacccggaaccttacggcctcgaagacgatcagcgatccatgggatacgacgatctcgactacggaatgatgagtgactatgggaccgcccggagaaccggaacaccttcagatcccagaagacggttgcggtcttacgaggacatgataggagaagaggttccaagcgaccagtactactgggcccccctggcgcagcatgagagaggcagccttgcatcactggattccttgagaaagggcgggccgccacctcctaactggcggcagcccgagctgccggaggtcatagcaatgctcggctttagactcgatgccgtgaagtcaaacgccgctgcctacctgcaacatctgtgctatcgcaacgacaaggttaaaaccgacgtgaggaagctaaaggggattcccgtactagtgggcctcctcgaccacccaaagaaggaagtgcaccttggagcctgcggagcgctgaaaaatatctcttttggccgtgatcaagacaataaaatcgctattaagaattgcgatggcgtgccagctctggtccggttgctccgcaaagcgagagatatggatcttacagaggtcatcaccggcacattgtggaatctcagctcgcacgattcaatcaagatggaaatcgtcgatcatgcattacatgctctgacagacgaggtgataatcccacacagcggttgggagagggagcccaatgaagattgtaagccgcgccatatcgaatgggaaagtgtactgacgaataccgccgggtgtctgcgtaacgtctcatctgaacgctccgaggcacgcaggaagctacgcgagtgcgacgggttagtcgatgcactcatcttcatcgtgcaggccgagatcggccagaaagactctgattcgaaactggtcgaaaattgcgtgtgcttactgcggaatctgagctaccaggtgcatcgggaaatccctcaggcggaacgctatcaggaggccgctcctaatgtcgcgaataatactgggccccatgccgcaagttgttttggggcgaaaaaagggaaggacgagtggttctcgagaggcaagaaaccgattgaggaccctgcaaacgacaccgtggactttccaaaacgtacctcacccgccagaggttatgagcttctgttccaacccgaggtggtacggatttacatcagtctcctgaaagagtctaaaacccccgctattttggaagccagcgccggggcaatccagaacctgtgtgccgggcggtggacatacggccgctatattcgatccgcattgcggcaggaaaaggccctttctgctattgccgatctactcaccaatgagcacgagcgtgtcgtcaaggctgcatctggcgccctgcgcaacctcgccgtggacgccagaaacaaagaactgatcggcaagcacgctattccaaacctcgttaagaacctcccaggtggccagcaaaacagttcttggaatttcagcgaggacacagtcatttctattctgaacacaattaatgaggtaattgcggagaacttggaggcagccaagaagttaagggaaactcaaggtattgagaaattagtgctaattaataaatccgggaacaggagcgaaaaggaagtgcgtgccgccgccttagttctgcagacaatttgggggtataaagagctgcggaagccactggagaaggaaggatggaaaaaatccgattttcaggttaacctgaataatgcgtcccgctcacagtctagccattcctacgatgactccacactgccgctcatcgatcgtaatcagaagtcagacaagaagcctgacagagaggagatccaaatgtctaatatggggagcaatacgaagtccctggataacaactatagcactccgaacgagaggggcgaccataaccggactttggatcgctctggagacctcggcgacatggaacctctgaagggaacaactcctctgatgaaaatctag

SEQ ID NO: 111073 - DNA, 2907 bp, synthetic construct
  misc_feature 1..2907: note = Description of Artificial Sequence: Synthetic coding sequence
  source 1..2907: mol_type = other DNA
atggacgatagtgaggtggagagcacagcctccattctggcctccgtgaaagagcaggaggcacagttcgagaagctcacccgggccttagaagaggagagacggcatgtatctgcgcaattggagcgtgtgagagtctcaccccaagatgctaatccactgatggccaatggcaccctcacgagaaggcatcagaacggacgatttgttggagatgctgatttggaaagacagaagttcagtgacctgaagctgaatggaccccaggaccattcccatcttctctattccactattccacgcatgcaggaaccaggacagattgtagagacttatacagaggaagatccagaaggcgcaatgtcagtggtgagcgtggagacctccgatgacggtacgaccaggcggactgagacaacagttaaaaaagtggtaaaaacagtgacaactcgtactgtgcagccggttgcaatggggccagatggactgccagtggatgcctcgtcagtcagcaataactacattcaaaccctgggcagggatttcagaaagaacggcaatggcggacctggaccgtacgtgggccaggccggcacagcaaccctgccccgtaacttccattacccccccgacggctactctagacactatgaggatgggtaccctggtggttcagacaattacggtagcctgagccgggtaacaaggatagaagagagatatcggcccagtatggaaggatatagagctccaagccgtcaggacgtctatggccctcaaccacaggtgcgcgtgggaggtagcagcgtggaccttcatcgtttccaccccgagccttatggcctggaagatgaccagcgcagtatgggctacgatgatttagattacgggatgatgtctgattatgggactgcccgccgcacagggacaccttccgatcccagaaggcggctgcgcagctacgaggacatgattggtgaggaggtgcccagtgaccaatactactgggcgcccctggcccagcatgagagaggatcactagcctcattagacagtttgagaaaaggaggccccccccccccaaattggcgacaacctgaacttcctgaagtaatcgcgatgttagggttcaggctggacgcagtgaaaagcaatgcggctgcctacctacaacatctctgctatcgtaatgataaagtaaagacagatgttaggaaattgaaggggattcctgtgttggtaggcctgttggaccatcccaaaaaggaggtacacctgggagcatgtggggctctgaagaacatttcttttggcagagaccaagataacaaaatcgccatcaagaactgcgacggtgttccagcgcttgttagactattgcgaaaggcaagggacatggatttaaccgaggtaatcaccggaactctatggaatttaagcagccatgactccatcaagatggagattgtagaccatgccttacatgcgttgactgacgaagttatcatccctcattcgggatgggagcgagaaccaaacgaggactgcaaaccccggcatattgaatgggaaagtgtgctaactaacacagccggatgcctgcggaacgttagcagtgagcgatcggaagcgcgcaggaaattgcgcgagtgcgatgggctggtggacgcgttgatatttatcgtccaggcagagattggccagaaggatagcgactccaaacttgtggagaactgcgtctgcttacttcgtaatctgagctatcaagtgcacagagagatcccccaggccgaaagataccaggaggccgcacccaacgtggctaacaacacaggtccccatgccgcttcttgctttggagctaaaaagggtaaggacgaatggttctcgcgcggcaagaaaccaattgaggaccccgccaacgatacagtggatttcccaaagcgcaccagccctgcccgggggtacgagctgctctttcagccagaggttgtgcgaatctatatatccctcctgaaggaaagtaagactcccgctatactcgaggcatcagctggcgccatccagaatctgtgtgccggtagatggacctacggccgctacatccgatcagccctgcgtcaagaaaaagctctctccgccatcgccgatctgttaaccaacgagcacgaaagggtggtcaaagctgcctcgggggcactccgaaatctcgctgttgacgctagaaacaaggagcttattggaaagcacgccatccccaacctcgttaaaaatttgcctggcggacagcaaaattcctcttggaactttagcgaagacaccgtgatcagcatcctgaacacgatcaatgaagtcatcgccgagaacctagaagctgccaagaagctgcgtgaaactcaggggatagaaaaattagtattgattaataaatccggaaataggagcgaaaaagaagtgcgtgcggcagccttggtcttgcagactatttgggggtataaagaactgcggaaaccgctcgaaaaagagggatggaagaaatctgactttcaagtgaatctgaacaacgcaagccgcagccagtcctcacattcctatgacgactctacattacctctgatcgaccgaaaccagaagtctgataaaaagcccgatcgagaagagatacagatgagtaacatgggaagcaacaccaaatccttggataataactacagtacccccaacgagaggggggaccacaatcgcactctggacaggagcggtgacctgggtgacatggaaccgctcaaggggaccacaccgctcatgcaggacgagggtcaggagtccttggaagaggaactggacgtgttggtgctggacgatgaaggagggcaagttagctacccttcaatgcagaaaatttag

SEQ ID NO: 111074 - DNA, 2604 bp, synthetic construct
  misc_feature 1..2604: note = Description of Artificial Sequence: Synthetic coding sequence
  source 1..2604: mol_type = other DNA
atgcaggagccgggtcaaatcgtggagacctacacagaggaggacccggagggcgcaatgtctgtcgtgtccgtggagacttccgacgacggcactacacggcgcacagaaacaactgttaagaaggtggttaagactgtgaccactcgaacagtgcagcccgtggcgatggggccagatgggctccccgtggacgcctcaagcgtgtctaacaactatattcagacgctcggacgggacttcaggaagaatggtaacggggggcctggcccatacgtggggcaagctggtaccgcgacactgccgcggaattttcactatccccccgatggctacagtcgccactatgaggacgggtaccctggcggctctgataactacggtagcctgtcccgtgtaacccgaattgaggaaagatatcgcccatccatggagggatatcgggccccatctaggcaggatgtgtatggcccccaaccccaagtgagggtggggggcagcagcgtcgacctccaccgatttcacccagaaccatacggattagaggacgaccaacgaagcatggggtacgacgatcttgactatggaatgatgtccgactacggcacagcgcgtcgtaccgggacacctagcgaccctagaaggagattgaggtcctacgaagacatgatcggcgaggaagtaccttccgaccagtactattgggcccccttggcacagcacgaaagaggctccctcgcctctctcgactctttgcggaaaggaggaccacccccccctaactggagacagcccgaattgccagaggtaatcgcaatgctgggttttcggcttgatgcagtgaagtcaaatgccgctgcctacctgcagcacctgtgttaccgcaatgacaaagtgaaaaccgacgttcgtaagttaaagggcataccagtcctggtcggccttctagatcatcctaagaaggaagtccatttaggggcctgcggggcactcaaaaatatatcctttggcagagaccaggacaacaaaatagctattaagaactgcgatggcgtgcccgcgttggttcggctgctgcgtaaggcgagggacatggatctgactgaagtgattaccgggacgctctggaatctgtcatctcatgattcgataaaaatggaaattgtggaccatgccttacacgccctgactgacgaagtcataattcctcatagtggctgggaaagagagcctaatgaggattgcaaaccgcggcatatagaatgggagagcgttcttacgaacaccgccgggtgcctgcggaatgtgtcctctgagcgctctgaggctaggcgaaagctaagagaatgcgacggcctggtcgacgctttgatctttatcgtgcaggccgaaataggacaaaaggactcagactccaagcttgtggagaactgtgtatgcctgttgcgcaatttgtcctaccaagtgcatcgggagatcccccaggccgagaggtatcaggaagcagcgccgaacgttgcaaacaatacgggtcctcacgcagcttcttgcttcggtgctaagaaaggaaaggacgaatggttctcgagggggaaaaagcccattgaggaccccgcaaacgacactgtcgactttcctaagagaactagccccgccaggggctatgagttgttgttccaacccgaggtggttagaatatacatcagcctcctgaaagaatccaagacgcctgccatattggaggcctctgcaggcgcgattcagaacttgtgcgccggccggtggacatatggtaggtatatccgcagtgcactgcgacaagaaaaagcactgtcagccattgcagacctgttaaccaacgaacatgaaagggttgtaaaggccgcaagcggggctctccgcaatctggctgtggacgcccgcaacaaagaactaatcggaaagcatgccattccaaaccttgttaaaaatttgcccggagggcagcaaaactcaagctggaattttagtgaggacacggttatcagtattctaaacacaattaatgaggttatcgcggaaaacctggaggctgccaagaagcttagggagacacagggcatcgagaaacttgtgctcatcaataagtcaggtaaccgatctgaaaaagaagtaagggccgctgcgcttgtgcttcagaccatttggggttacaaagagttaaggaagcccttggagaaagagggttggaaaaagagcgacttccaggttaatctgaacaacgcctcacgatcccagagctcgcattcttatgacgactctacattgcccctaatcgatcgcaaccaaaagtctgacaaaaagcctgatcgggaagagattcagatgagtaacatggggtccaatacaaaatcattagacaacaattacagtaccccgaacgagcgcggtgaccataaccgcacacttgataggagtggggacctgggcgatatggagcccctgaaaggcaccaccccactcatgcaagatgaggggcaagaatccctagaggaggaacttgatgtcctggtgcttgacgacgaaggaggacaggtgtcctatccgagcatgcaaaaaatttag

SEQ ID NO: 111075 - DNA, 2499 bp, synthetic construct
  misc_feature 1..2499: note = Description of Artificial Sequence: Synthetic coding sequence
  source 1..2499: mol_type = other DNA
atgcaagaacctggacagattgtcgagacatacactgaagaggatcctgagggcgcaatgagtgtggtctcagtagaaacctccgacgatgggacgacgcggcggaccgagactaccgtgaaaaaagtggtcaagaccgttactacgcggactgtgcagccagtcgctatggggcctgacggtttgccggtggacgctagctccgtaagcaacaactacattcagactttaggacgcgattttaggaagaacggaaacgggggacctggaccttacgtcggccaggctggcacagctaccctgccaaggaacttccattaccctcctgacgggtactccagacactatgaggatggatatcctggaggctccgataactatggatcactttccagggtaaccagaattgaggaaagataccggcccagtatggagggctatcgggctccttctcgccaggatgtgtatgggcctcagccgcaggtgagggtggggggctcttctgtggacctgcaccggtttcaccctgagccctacggattagaagacgaccagcgatctatgggttacgacgatttggactacgggatgatgtctgattacggcacagctagacggacgggaacccctagcgacccacgccggcgccttcgtagctatgaggatatgatcggtgaggaggtgcctagcgatcagtactactgggctccgctggctcagcacgagcgaggatcattggcttccctggactcactccgtaaggggggccccccccctcccaattggaggcagccagaactgcccgaggtcatagctatgctcggctttcggctggacgcagtcaagtccaatgctgctgcctatctgcagcatctgtgttataggaatgacaaggtgaaaacagacgtcagaaagcttaagggcatccctgtgctggtgggcctgctcgatcacccaaaaaaagaggtacatttaggtgcctgcggagccttaaaaaatatatcctttggacgcgatcaagataataaaatcgcgattaagaattgtgacggtgtaccggctctggtacgtctattaaggaaagctcgcgatatggacctgacggaggtcatcactggaaccctgtggaacctgtcctcacatgattcgatcaaaatggagatcgtcgaccacgccctacacgccctgacggacgaagtgataattccacatagtggatgggaaagagagcccaatgaggactgcaagcctcgtcatattgagtgggaatccgttctgacgaacactgctggttgcttgcggaacgtgtcctccgagaggagcgaggcaagaaggaaattacgagagtgtgatgggcttgtcgacgctctgatcttcattgttcaggcagagatcggccagaaagattccgatagcaaattagttgagaactgcgtgtgtctgttgaggaacctttcgtaccaggtgcacagagaaatcccccaggctgagagataccaggaggccgcacctaatgtggcaaacaacacgggacctcacgccgccagttgcttcggcgcaaagaaaggtaagggtaagaagccaattgaagatcccgctaacgacactgtagatttccccaaacgtacctctccggcgcgaggctacgagttgctcttccagcctgaagttgttaggatatacatatcactgcttaaagagagcaagacaccagcaatactggaagcctcagcaggcgcaatccaaaatctctgtgccggcaggtggacctacggcagatatattcgttcggctctgaggcaggaaaaagcgctctcggctattgccgacctgctaacaaacgagcacgagagggtcgttaaagcggcctctggagccctccgtaatttggctgttgacgcaaggaataaggagttaattgggaagcacgccatccctaacctggtgaaaaacctcccaggaggccagcaaaatagctcttggaatttcagcgaagacactgtgatctcaatcttgaatacgataaatgaggttatcgccgaaaatctggaggctgccaaaaagctgagggagacccagggtatcgaaaagcttgtgctaatcaacaaatcagggaaccggagtgagaaggaggtgcgagcagcagctctggtcttgcagactatctggggatacaaggaactccgcaaacctctggaaaaggagggttggaaaaagagtgactttcaggtgaacctcaacaatgcttcgagatcacaatcgtcccattcatacgacgatagcacattacccttaatcgaccggaaccagaaatccgacaaaaagcccgacagggaggagattcagatgagcaacatggggagcaatacaaaaagccttgacaataactattcgactcctaacgaaagaggcgaccataaccgtaccctggatcgtagtggcgatctgggagatatggaacctctgaaagggacaacacctctgatgcagaagatatag

SEQ ID NO: 111076 - DNA, 2802 bp, synthetic construct
  misc_feature 1..2802: note = Description of Artificial Sequence: Synthetic coding sequence
  source 1..2802: mol_type = other DNA
atggacgattccgaagttgaaagcaccgcaagtatcctggcctcagttaaggagcaggaggcccagttcgagaagttaacaagggctctggaagaagagcggcggcatgttagtgcacagcttgagcgcgtccgcgtgtcaccacaggacgccaatcccctgatggctaacggcaccctgactcgcagacaccaaaatggccgttttgtaggagacgcagaccttgaacgccagaaattcagcgatctgaagttgaacggaccgcaagaccacagccacctcctttactccactataccaaggatgcaggagccaggacagatcgttgagacatacacagaagaagatccggagggcgctatgtcagttgtaagtgtagagacttccgatgacgggacaacacgccgaacggagactaccgtgaagaaagtggttaagacagtgacaacaagaaccgtgcagccagtcgctatgggtccagatggtcttcctgtggacgcttcatccgttagcaacaactatatacaaacactgggaagggactttcggaagaatgggaacgggggccctggcccttacgtggggcaggctgggacggccacacttcctcgaaactttcattacccccccgatgggtactcgaggcactacgaggatggataccccggaggcagcgacaattacggaagtctgtctagggtcacacgcattgaggagagataccgaccctctatggagggttacagggccccttcgagacaagacgtgtacggaccacaaccacaggtgcgggtggggggctcttctgtggaccttcaccgttttcatcccgagccttatggtcttgaggacgaccagcgatctatgggatatgatgacctggactacggcatgatgtcggactatggaacagctagaagaaccgggactcccagcgacccgcggcgccggctccgaagctatgaggacatgataggagaggaggtcccgtcagaccaatattactgggcacccctggcccaacatgaaagaggttcactggcctctctggacagtctcaggaaggggggcccacctccacccaattggcggcagcctgaattgccagaggtcattgctatgttgggatttcgcctggacgctgtaaaatctaacgctgctgcttacctccagcacctctgttaccggaatgacaaggtaaaaactgatgtgagaaagctcaagggcattccagtcctggtgggcctgctcgaccacccaaaaaaggaagtgcaccttggcgcatgcggagccctcaagaatatcagtttcgggcgggaccaggataacaaaattgcgattaagaactgcgatggggttcccgctctggttagactgctccgaaaggccagagacatggacttaactgaggtcataacaggcacactgtggaacttgtcttcccacgactctattaagatggaaatcgttgaccacgcgctgcacgctcttaccgatgaggtgataattcctcactctggctgggagcgggagcccaatgaggattgcaaacctcgacatattgaatgggagtccgtgctgacgaataccgcgggatgtctgcgcaacgtctcctctgagaggagcgaggcccggagaaagttgagggaatgtgatggacttgttgacgcactgatctttattgtccaggctgagatcggtcagaaggattccgactctaaacttgtcgagaactgcgtgtgcctgttacgcaatctctcgtaccaggtgcaccgagagatcccccaggcagagaggtaccaagaggcagcaccaaacgtggcaaataatacaggcccccacgccgcgtcctgtttcggcgctaagaagggaaaaggaaaaaagcccattgaagatccagcaaatgatactgtggacttccctaagcgtacctctccagcaaggggctacgaactcctgtttcagcccgaagtagttcggatctacattagtttgttgaaggagtccaaaactcccgcgatcctggaagcctccgccggagccattcagaatttgtgcgccgggcgatggacttacgggaggtacattcggtccgcgctcagacaggagaaggctctgtcggctattgcagacctcctcacaaacgagcatgaacgtgttgtcaaggcagcctctggcgctcttagaaacctggccgtagatgccaggaataaggaactgattggaaagcacgcgatccccaatctggtaaagaacctgcccggtgggcagcagaatagcagctggaacttctcagaggacacggtgatcagtatcctgaatacgatcaatgaggttatcgcagagaatctggaagccgcaaaaaaactccgggaaacccagggtatcgaaaaacttgtgctgatcaacaaatcgggaaacagatctgaaaaagaagttagggccgctgccttagttctgcaaacaatctggggttataaagagctgcgaaagccacttgagaaggaaggctggaaaaaatcggattttcaggtgaatttgaacaacgcaagccggtctcaaagcagccatagctatgacgattcaacgctgccgctgatcgacaggaaccaaaaaagtgacaagaagccggaccgggaggagatccagatgtctaacatggggtcgaatacaaaaagcctggataataattactccactccaaacgagagaggcgaccataatcgaaccctggataggtccggggatcttggagatatggagcccctgaaaggaaccaccccactaatgcagaaaatctag

SEQ ID NO: 111077 - DNA, 15 bp, synthetic construct
  misc_feature 1..15: note = Description of Artificial Sequence: Synthetic coding sequence
  source 1..15: mol_type = other DNA
atggatgactcctag

SEQ ID NO: 111078 - DNA, 2802 bp, synthetic construct
  misc_feature 1..2802: note = Description of Artificial Sequence: Synthetic coding sequence
  source 1..2802: mol_type = other DNA
atggacgattcagaagttgagagtactgcgagcatcctcgcgtcagtgaaggaacaagaagcacagtttgagaagctgaccagggctctggaggaggaacgcaggcatgttagcgctcagttggagcgggttcgcgtcagtccccaggacgccaatcctctcatggccaacggcaccctcaccagacggcaccaaaatggtagattcgtcggtgatgccgacctagagcgtcagaagttttccgaccttaaactgaacggcccccaggatcactcgcacctgttgtacagcacgattcccaggatgcaggagcccggccaaatagtcgagacttataccgaggaagacccagagggcgctatgtctgtagtgagtgtggaaacatcggacgacgggaccactcgtagaacagagaccaccgtcaagaaagtcgtgaaaacagtaacaactcggaccgtccagcctgtggcaatgggccctgacgggctgcccgtggatgctagctctgtttcaaacaactacattcagaccctggggagggactttcgcaaaaatggcaacgggggtcccggcccgtatgtcggccaagccggcaccgctacactacccaggaactttcattatccccccgatggctattcacgacattatgaagacgggtatccaggcggcagcgacaattacggtagtctctctagggtgacaagaattgaggaaaggtacagaccaagtatggagggttaccgcgcccccagccggcaggacgtgtacggcccacaaccgcaagtgagagtgggcggcagtagcgttgacctgcataggttccaccccgaaccctacggtcttgaagatgaccagcgaagtatggggtatgatgatctggattacggaatgatgtcggattatggtaccgcaagacgcaccgggacccctagcgatcctaggaggaggctgcggtcatatgaggacatgatcggggaagaagtgcccagcgatcaatattattgggcccccctggcccagcatgaaagagggtccctcgcctcccttgacagcttgcggaagggcggacctcctccccccaactggcgccagcctgagctgcctgaagtcatagccatgctgggctttcgactggacgcagtgaagtcaaacgcagctgcctatctgcaacacctgtgctacaggaacgataaggttaaaactgacgtgcgaaaacttaaaggcatcccagtgttagtaggacttctggatcatcctaagaaagaggttcacctcggtgcttgcggggctctgaaaaacataagtttcggacgagatcaggacaataagattgctatcaaaaactgtgatggcgtacctgctttagtgaggctccttagaaaagcacgcgatatggatctgacagaggtcattacgggaactctttggaacctgagttcacatgactctatcaaaatggagatcgtcgatcatgcacttcatgcgttgaccgacgaagttattattcctcattcaggctgggagcgggaacccaatgaggactgtaaaccccgccatatagagtgggagagcgtgctgaccaacacagctggatgtttgcgcaatgtcagcagcgaacgctcagaggcccgccgcaaactccgtgaatgcgacggactcgtagatgcactcatcttcatcgtccaggccgaaattggccagaaagacagcgacagcaagctggtggagaactgtgtatgtctgttacggaacctgtcctaccaggtccacagggagataccgcaagccgaaagatatcaggaggctgctcccaacgtcgctaataatactggacctcatgcggcgtcctgctttggtgcgaaaaaaggtaaggggaaaaagccaatagaagacccggcgaatgataccgtggatttcccaaagcgcacatctccagctaggggttacgagctccttttccaacccgaggtggtgagaatctacatctcactgctgaaagagagcaagacaccagcaattctggaagcatccgccggggcaattcagaacctatgtgcaggccgttggacctatgggagatacatcagatccgctctgagacaggagaaagccttgtccgccatagcagatctactgaccaacgagcacgaacgcgtggtgaaggctgcatctggagctctgcgaaacctggctgtggatgcacgcaacaaagagctgattggcaagcacgccatcccaaacctagtcaaaaatctacctggtggacaacagaattcctcatggaatttctctgaggacactgtaataagcattcttaacacaattaatgaagtcatagctgagaatttggaagccgctaaaaaactcagagaaacacaggggatagagaagcttgtcctcattaacaagtccgggaaccggtccgaaaaggaagtgcgcgcagcagccctggtccttcagacaatttggggatacaaagagctgaggaagcctctggagaaagaaggctggaagaaatcggatttccaggtaaacctcaataacgccagtcggtcccagagctcgcatagttatgacgatagtaccttacctctgatcgatcgcaatcagaaaagcgataaaaagcctgatcgtgaggagatacaaatgagcaatatggggtcaaacactaagagcttggataataactactcgactcccaacgagagaggtgatcacaatcgtacgctggatcggagcggcgacttgggagacatggagcccctaaaaggcacaacgcctctcatgcagaaaatttag

SEQ ID NO: 111079 - DNA, 1851 bp, synthetic construct
  misc_feature 1..1851: note = Description of Artificial Sequence: Synthetic coding sequence
  source 1..1851: mol_type = other DNA
atgatcggagaggaggtgccctccgaccagtattactgggcccccctcgcccaacatgagcgaggttctctcgcttctcttgactctctgcgaaagggtggaccacctcccccgaattggcgacagccagaattaccggaagttatcgccatgctcggttttaggcttgacgccgtgaaatccaatgccgccgcttacctacagcacttgtgttacagaaacgacaaagtgaaaaccgacgtcagaaagctgaaggggatcccagtactggtcggactcctggatcaccccaagaaggaagtacatctgggcgcctgcggagcactgaaaaacatctctttcgggcgcgaccaagataacaaaatcgcaattaagaactgtgacggagtccccgcgcttgtgagacttctgcggaaagccagagacatggatctcaccgaggtgatcaccggaactctgtggaacttgagctcccatgacagcattaaaatggaaattgtcgaccacgctctgcatgcccttacggacgaggttattatcccacattctgggtgggagcgagagcctaatgaggactgtaaaccgcggcatattgaatgggagtctgtactcactaatactgcagggtgcctgcgaaacgtatccagtgaacgttccgaagcaaggaggaaactaagggagtgcgatggcctagttgatgctcttatttttattgtgcaggccgagataggtcaaaaggactccgactcaaagctggtcgagaattgtgtgtgtctcctgcgcaaccttagttaccaagtccatagagagatcccacaggcagagagatatcaggaggccgcacccaatgtggctaataacactgggccccacgctgcctcgtgcttcggggcaaaaaagggaaaagacgagtggttctctcgcggcaagaaaccaatcgaggaccctgccaatgataccgtggatttcccaaagcggaccagccccgccagaggctacgaactcctgtttcaaccagaggtggtccggatctatatttccctgcttaaggagtcaaagacaccagctatcctagaagccagcgcaggcgccattcagaatctgtgtgccggacgctggacctacggaagatatattagatcagccttgaggcaggagaaggcgctgtcagcaatcgccgatttattgaccaacgagcacgaaagagtggtcaaagcagcatcaggagctttgcgtaatttggcagtcgatgctcggaacaaagaactgattggtaagcatgccatcccaaaccttgtgaagaatctgccaggcgggcagcagaactccagttggaatttcagcgaggatacagtgatctcaattctgaataccattaacgaggtaatcgctgagaacctagaggctgccaagaagcttcgcgagacgcagggaattgagaagctcgtgcttatcaacaagtctgggaatcgaagtgaaaaagaggtgcgtgcggctgctctcgtccttcagacaatttggggttacaaggagttacggaagccgcttgagaaggaaggttggaaaaagtcggacttccaggtgaatttgaataacgcatcccgttcgcaaagcagccactcctatgatgatagcacactgcctctgattgatcgcaatcaaaagtctgataagaaacctgatcgggaggaaatccagatgagtaatatgggatccaataccaaatcgctagataataactattccacacccaatgagagaggagatcacaaccggaccctggatcgctcgggggacttgggggacatggagcccctcaagggaactacccccctaatgcaaaaaatctag

SEQ ID NO: 111080 - DNA, 2727 bp, synthetic construct
  misc_feature 1..2727: note = Description of Artificial Sequence: Synthetic coding sequence
  source 1..2727: mol_type = other DNA
atggcgaacggcactctgaccagacgccaccagaatggtcgatttgttggtgatgccgacctagagcgacagaagtttagcgatcttaaactgaatggcccacaagatcatagtcatctgctgtacagtacgatcccacggatgcaggaaccaggacaaatcgtggagacgtacacagaagaagaccccgagggtgctatgagcgtggtgtctgtcgagactagcgatgacgggacaaccagacgcactgagactaccgttaaaaaagtcgttaagacagtgaccacccggacagtgcagcccgtcgccatgggcccagatggactccccgtggatgcctccagtgtgtccaacaattatattcagacgctgggaagagattttcgtaagaatggtaatgggggcccaggcccatatgttgggcaagccggtaccgctacactgcctcgtaacttccattacccccctgacggatatagcaggcattacgaagacggttacccaggcggcagcgacaattatgggtctttgtcaagagtgacccggattgaggaacgctaccgcccatcgatggagggctatcgcgcaccatctcgccaagatgtatacggtccacagcctcaggtaagggtgggaggatccagcgtcgatttgcacaggtttcaccctgaaccatatgggctcgaagacgaccagaggtcgatgggatacgatgatctcgattacggtatgatgagcgattacgggaccgctagaaggaccggcacgcctagcgatccacggcgtagactccggtcttatgaggatatgattggtgaggaagtaccctctgaccaatactactgggctccattggcgcaacacgaacggggatctctggcatccctggatagccttcgcaaaggagggcctcctccaccaaattggcgtcagccggaattgcccgaggtgatcgccatgctaggattccgacttgatgccgttaagtcaaatgccgcagcctacttacagcacctgtgctatagaaacgataaggttaaaactgacgtgaggaaactgaaaggcattcccgtgctggtggggctcctcgaccaccctaagaaggaggtccatctcggagcctgcggagctctgaagaatataagctttggccgggatcaggacaacaaaattgccattaagaattgcgatggcgtcccggcactcgtcagacttctccggaaggctcgggatatggacctaaccgaagtgatcaccgggactctgtggaacttatccagccatgacagcatcaaaatggagatcgtggaccatgcactgcacgcccttaccgatgaggttattatcccccactcaggctgggagcgcgagcctaatgaggattgcaagccacgtcacatcgagtgggaatccgtactgacgaataccgctggatgtttgaggaacgtcagttctgagagaagtgaagcccgtcgtaaactccgtgaatgcgatggtttggtcgacgcgctgatattcatagtccaggctgaaatcggacaaaaagactctgatagcaagctggtcgaaaattgtgtttgccttctaagaaatctgagctatcaggtgcatagagaaatcccccaggccgaacgctaccaagaggccgcacctaatgtggccaacaacacagggccacacgccgctagctgctttggcgccaaaaaaggcaagggcaaaaagccaattgaagatcccgccaatgataccgtagactttcccaaacggactagtcccgcacgtggttatgaattgctgtttcagcccgaagtcgtgagaatctatatcagtctgctgaaggaaagtaaaacaccggccattctagaagccagcgccggcgccatacagaacctttgcgcggggcggtggacttacgggcgctatattagatcagctctgagacaagaaaaagccctctcagctatagctgacttgctcaccaatgagcacgagcgagtggtcaaggccgctagtggagccctcaggaacctcgcagtcgatgccagaaacaaagagctcatcgggaaacacgctatcccaaatctggtcaagaacctgccaggaggccaacagaattcctcgtggaattttagcgaagatactgtgatctccattttgaacaccataaacgaggtgatagccgaaaatttagaagccgcaaaaaagttacgcgagactcagggcatcgaaaaattggttctcattaacaagtctggaaacaggagtgagaaggaggtgagggcagcggcattggtgctgcagaccatatggggttacaaagaacttcggaaaccactcgagaaggaggggtggaaaaagagtgatttccaggtcaacctaaacaatgcttcaaggagtcaaagttcacacagctatgatgacagtaccctgccgctgatagatcgtaaccagaagtctgacaaaaaacccgatcgagaggaaatacagatgtcaaacatggggagtaataccaagtcgctcgataataactattctacgcccaacgagaggggggatcataatcgcactcttgacagatctggggacttgggggacatggaacccctgaagggcaccacccctctgatgcaggatgaaggccaggagagtctggaggaggagctggatgtgctcgtgcttgacgacgaggggggccaagtttcttaccccagtatgcaaaaaatctag

SEQ ID NO: 111081 - DNA, 1833 bp, synthetic construct
  misc_feature 1..1833: note = Description of Artificial Sequence: Synthetic coding sequence
  source 1..1833: mol_type = other DNA
atgatcggtgaggaggtcccttccgaccagtattattgggcccccttggcacaacacgagcggggctcgctcgccagcctggatagtttgcgcaaaggaggacctccacctcccaattggcgtcagccagaattgccagaagttattgctatgcttggatttcggctggacgccgtcaagtctaatgccgcggcgtacttgcagcatctgtgctatagaaatgacaaggtgaagaccgatgtgcgtaaactgaaaggaattccagtcttggtaggactgctcgaccacccaaagaaggaagtgcacctgggagcatgcggtgctttaaaaaacatatcattcggaagggaccaagataacaaaattgccatcaagaactgcgacggggtccctgctttggttaggctgttacggaaggcacgggacatggacctgaccgaggtgatcacgggcactctgtggaatctatcttcccacgattccataaagatggaaatcgtggaccatgctcttcacgccttgacagacgaggtgattattccacactctggatgggagagagaacccaacgaagactgcaagccaagacacatcgagtgggagagcgtattaaccaatacagcagggtgcctaagaaacgtgtcaagcgagcggtccgaggctcgacgcaaactgcgggaatgcgacgggctggttgacgctttgatcttcattgtgcaagcagagatcggccaaaaagattccgatagtaaacttgtggagaattgtgtctgccttcttagaaatttatcatatcaggtgcacagggaaatcccacaggcggaaagatatcaggaagctgccccaaatgtggcgaataacactggtccccacgctgcatcttgttttggcgcaaagaaggggaagggcaaaaaacccatcgaggacccagctaacgataccgtggacttccctaagaggaccagccccgctcgaggatatgagctgctgttccagcccgaggttgtgcgaatttacatatcgcttctgaaagagtcaaagactcctgcaattctggaggccagcgccggagcaatccagaacctgtgcgctggtcgttggacatacggacgctatattaggtcagccctgagacaggaaaaagctctgtctgccatcgcggatttactgacgaacgaacacgaaagagttgtcaaagccgcaagcggggccctgcggaatctggccgtagacgcccggaataaagagctaattggtaaacacgccattcccaatctcgtgaagaatctccccggcggacagcaaaactcgtcatggaatttctctgaagatactgtgatcagcatacttaataccatcaacgaggtgatagccgagaatcttgaagcggcgaaaaagctgcgggaaacccaaggaatcgaaaagctagtcctgataaacaaatctggcaacagaagcgagaaagaggtgcgcgcagccgccctcgttctccagacaatttggggttacaaagagctgagaaaacccctcgaaaaagaaggctggaagaagagtgatttccaggttaatctcaacaacgcctcccgcagccaaagttcacattcatatgatgattctacactcccactaatcgaccggaatcagaaatctgataagaagcctgatagagaggagatccagatgagtaacatgggcagtaatactaaaagcctggataacaattactctacccctaacgagcgaggagaccataataggacgctcgataggagtggagacctgggcgacatggagcctctcaagggtacaacccccctcatgcagaagatatag

SEQ ID NO: 111082 - DNA, 1938 bp, synthetic construct
  misc_feature 1..1938: note = Description of Artificial Sequence: Synthetic coding sequence
  source 1..1938: mol_type = other DNA
atgatcggggaagaagttccatccgatcagtactactgggcacctcttgctcagcacgagagggggtcactcgcgagtttggatagtctcagaaaagggggtccccccccgcctaactggcggcagcccgagctgccagaggtgatcgccatgctcgggttcaggctcgacgcagtgaagtcaaacgctgcagcctaccttcagcatctatgttataggaacgacaaggtgaaaaccgacgtacggaagctgaaaggcattcccgttctagtcgggctgctcgatcatccaaagaaggaggtgcacctcggagcatgcggagcactgaagaatatctctttcgggagggatcaagacaacaaaatcgccatcaagaactgcgacggagtcccagctctggtgagacttctgagaaaggcacgggatatggatttaactgaggtcattactggaacactgtggaacctgagctcccacgatagcattaaaatggaaattgtggatcatgccctgcatgctctcacggatgaagtcattataccacacagcgggtgggaacgcgagcccaatgaggactgcaagccgcgccacatcgaatgggagtccgtgctaactaacaccgcagggtgcctaagaaacgtttctagcgaacggagcgaagctcggcgcaagctgagagagtgcgatggtttggtggatgcactcattttcatcgtgcaagctgagatcggccagaaggactccgacagcaagctggtggagaactgcgtttgccttctccgcaatctgtcttaccaggtccatagggagattccacaggccgaacggtatcaggaggctgcccccaacgtggccaacaatactggaccccatgccgcatcttgctttggagccaagaaaggcaaagacgagtggtttagtagggggaaaaaacctatcgaggatccagctaacgatactgtagattttccaaagaggacatccccagccaggggctacgaacttctgttccagcctgaagtggtaagaatttatatttctcttctgaaggagagcaagacccctgccattctcgaagcaagcgccggcgccatccagaacctatgcgcgggccgatggacctatgggagatacatcaggagcgcgctgcgccaggagaaggcactgtctgccattgctgacctactaaccaacgaacatgagagagtggtaaaggcagcgtcaggcgcgctgaggaacctggctgtggatgccagaaacaaagagctcattggcaagcatgcaatcccaaatctagtcaagaaccttcccggtggacagcagaatagtagttggaatttcagtgaggacactgtaatctccatcctgaacacgatcaacgaggttatagcagaaaacctggaggccgctaaaaaactgagagagacacagggcatcgaaaaactggtcctgatcaataaatccgggaacagatctgagaaagaagtgagagccgcagctctcgtcctgcagaccatctggggctataaggagctgagaaagccgcttgagaaagaaggctggaaaaagtcagacttccaggtaaatctaaacaatgcctctcgttcccaaagctctcactcctatgatgactccacactccctttaatagatagaaatcaaaaaagcgacaagaagcccgaccgcgaagagatacagatgagcaatatgggatctaacaccaagagtctggacaacaattattctacccctaacgaaagaggcgaccataatcggacactcgaccgtagcggggatctaggggacatggagcccctcaagggtaccacgcctctgatgcaagacgagggccaagaatctctcgaggaagaattggatgtgctagtgctcgacgatgaaggcgggcaggtctcatatccaagcatgcagaagatctag

SEQ ID NO: 111083 - DNA, 2517 bp, synthetic construct
  misc_feature 1..2517: note = Description of Artificial Sequence: Synthetic coding sequence
  source 1..2517: mol_type = other DNA
atgcaagagccaggacagatcgtcgaaacatataccgaagaagaccctgagggagctatgtccgtcgtgtccgtggaaacctctgatgatggtacaacgcgccgcactgagaccacagtcaagaaagttgtcaaaaccgtgacaacaaggactgttcaaccagtggccatgggaccagacggtttaccagtggatgcttcgagcgtgtctaacaactacatacagactctggggagggactttcgtaagaacgggaacgggggtccaggaccttacgtggggcaggcagggactgccactttgccacggaacttccattacccaccagatggatattccagacactatgaagacgggtaccctggcggttcagataattatggatctctaagcagagtaactaggatagaagagcgctatcggccgagtatggagggttacagggcaccatcccggcaggatgtatatggaccgcagccccaagtgcgggtcgggggatcctcggtggacttgcaccggttccaccccgaaccatacggtctggaagacgaccaacgtagtatgggttacgatgatctcgattacggcatgatgtccgactatggcacagcccgcagaactggcactccttctgatcctagacggaggctgcggtcctacgaggatatgataggcgaagaggttcctagcgaccagtactactgggctccacttgcccagcatgaacgggggtcgttagcctcactcgattccctgaggaaggggggccctccaccccctaattggagacagcctgaactaccagaagtgatagcaatgttggggttcaggttagacgcagtaaaatccaacgcagcagcatacttgcaacacttgtgttacaggaatgataaggtaaagactgatgtccggaagttgaaagggatcccagtcctggttggtctcttagaccatcccaagaaggaagtgcacctcggagcgtgtggcgccctgaagaatatatcatttggacgggatcaggacaacaagatcgccatcaaaaactgtgatggcgtaccagctctggttagactgctcaggaaggccagagacatggacctcaccgaagtcattacaggcactctttggaacctgtcaagtcatgactcaatcaagatggaaatcgttgaccacgccctccatgccctcacggacgaagttatcatcccgcacagcgggtgggaacgcgagccaaacgaagactgcaaaccaagacatatcgaatgggagtctgtactcacaaacacagcaggatgtctgaggaatgtctcgagcgaacgatcagaggctcgcagaaagcttagggaatgcgatggcctggtggatgcactcatctttatcgtacaggccgagatcggacagaaggactcggacagtaaactcgtcgaaaattgcgtctgtttgctgagaaacctgtcctaccaggttcatagggagataccacaggctgagcgttatcaggaagctgcacctaatgttgctaacaacacgggcccacacgccgcctcttgttttggtgcgaagaaaggaaaagacgaatggttttccagaggtaaaaaacctatagaggaccccgcaaatgacacagttgactttccaaaacgcaccagtccagctcgcggttacgaattgctcttccagcccgaagtagtgcgcatctacatttccctgctaaaggaatccaaaactccagcaattctcgaagcttccgcaggagccatacaaaacctctgtgcggggcgttggacatacggtaggtacatccggtccgccctgagacaagaaaaagctctgtctgcaatcgccgatctgctgacaaatgagcatgagagagtggtaaaagcagcgtccggcgcactacgcaacctcgccgtggatgcccggaataaggagctcatagggaaacatgctataccaaatttggttaaaaatttacctggtgggcagcagaattctagttggaatttcagcgaggacaccgttatttctattctcaacaccataaacgaagttatagcggaaaacctcgaggctgcaaaaaagttacgggaaacccaggggatagagaagctggtgcttatcaacaagagcggcaatcggagcgagaaagaggtaagagcagcagcgcttgtgctgcagacaatctgggggtataaagagctccgcaaacccctcgaaaaggagggttggaagaaatctgatttccaggtgaatctcaacaatgcttctaggagtcaatctagccattcttatgatgacagcacactaccgctgattgataggaatcagaaatcagataagaagcccgaccgagaggagatccagatgtctaatatgggctccaacactaagtcactagacaacaactactctacccctaatgaacgcggggaccataatagaacgctcgatcggagcggcgatcttggggacatggagccactgaaagggaccactcccctgatgcaaaaaatctag

SEQ ID NO: 111084 - DNA, 2640 bp, synthetic construct
  misc_feature 1..2640: note = Description of Artificial Sequence: Synthetic coding sequence
  source 1..2640: mol_type = other DNA
atggccaatggtactctgactcgacgtcatcagaacggaagattcgtcggcgatgccgaccttgaaaggcagaagttctccgatctcaagctgaatgggcctcaggaccactcccacctgctttactctacaatccccaggatgcaggagcccggccagatagtggaaacctatactgaagaggaccccgagggggcaatgtctgtggtaagtgttgaaacttcagacgacgggacgaccaggcgcactgagaccaccgtgaaaaaggtggtcaaaaccgtcacaacccgcacagtgcagccagtggcgatgggccctgacggactgccggtggatgccagctcagttagcaacaattatatccagacactgggccgggacttcagaaaaaatggcaacgggggccctggcccatacgttgggcaggccggtaccgccaccttgcccaggaatttccactacccccccgacggctatagccggcactacgaagatggatatcctggcggtagtgataactatggcagtctgagcagagtcacccgtatcgaagaaagatatcgaccctcaatggagggctatagagcaccctcccggcaggatgtgtacgggccacagccccaggttcgcgttggtggctcctccgttgaccttcaccggttccaccctgaaccgtacggtctggaagatgaccagaggagcatgggctatgatgatttagattacggcatgatgtccgattacgggacggcacggaggacaggaaccccttccgaccctcggaggcgcttaaggtcatatgaagacatgattggtgaggaagtcccctccgaccagtattactgggccccactggctcaacatgagagggggtctttggcgtcactggattccctgaggaaggggggacctcctcctcccaactggaggcaacctgagctgcccgaggtgatcgctatgctggggttccgtctggacgctgtgaagagcaatgcagctgcgtatctccagcacttatgctataggaacgataaggttaagactgatgtacggaagttgaagggcatccccgtcttagtcggactgcttgaccaccctaagaaggaagtccatctcggagcctgtggcgcactcaaaaatataagtttcggtagagaccaggataataagattgccataaagaattgtgacggggttcccgccctggtacggctgcttaggaaagccagggacatggatctgaccgaagtcattacgggaacgctgtggaacttgagctcacatgactccataaagatggagatcgtcgatcatgcacttcatgctttaacagacgaggtgatcataccgcacagtggttgggagcgcgaaccaaacgaggactgtaagcctagacacatcgagtgggagtcagtgctgacaaacaccgctggatgcttgcgcaacgtatcctccgaaaggtctgaggccaggcggaagctgagggaatgtgacgggctggtggatgctctcatatttattgttcaggcggagattgggcaaaaagattccgatagcaaactcgttgaaaactgtgtgtgcttgctgaggaacctttcatatcaagtccaccgcgaaattccgcaggccgagcggtaccaggaggcagctccgaatgtggcgaataacaccggcccacatgctgcttcttgcttcggggcgaaaaagggtaagggcaaaaagcctattgaagacccagctaacgataccgtcgactttccaaagcgtacgtcccccgctcgaggatatgaactcttgtttcagccagaggtggtcaggatttacatttctctattgaaggaaagcaaaaccccggccatcttggaagccagtgctggcgccattcagaacttgtgcgccggaagatggacttacggaagatacattcgtagtgcactccggcaagaaaaagcactgagtgctatcgctgacctgctaaccaatgagcatgagagggtggtaaaggctgcatcgggcgctctcagaaatcttgcagttgatgccagaaataaggaacttattgggaagcatgccatacccaatctagttaagaacttgccgggtggacagcagaacagttcatggaacttctctgaagacaccgtgatttcaatccttaataccatcaatgaagttattgccgaaaatctggaggccgcgaagaagctgcgtgagactcagggcattgaaaagctggtccttataaataagtctggcaacagatccgagaaagaggtccgggccgctgccctggtgctccagaccatctggggatataaagaactgcggaagccattggagaaagaagggtggaaaaagagcgattttcaggtgaacctgaataatgcaagtaggagccagtccagccactcttatgacgactcaaccctgccactgattgataggaatcagaagagcgataaaaagcccgaccgagaggaaatccagatgtcaaatatgggcagcaacaccaaatcgttagataataattattcaacacctaatgagaggggcgatcacaaccggacacttgataggtccggagatcttggagatatggaaccactaaagggtaccacacccctgatgcagaaaatctag

SEQ ID NO: 111085 - DNA, 2640 bp, synthetic construct
  misc_feature 1..2640: note = Description of Artificial Sequence: Synthetic coding sequence
  source 1..2640: mol_type = other DNA
atggcaaacggaactctaacccgacgacatcagaacggcaggttcgttggcgatgcggacctggagcgccagaagttttctgacctgaagctcaacggcccccaggaccatagtcacttgttatatagcactatcccgcgcatgcaggagcctggccaaatcgtggagacatacacagaagaagaccccgaaggggctatgtcggtcgtgtctgtggagaccagtgacgacggaaccactaggcggaccgaaactacagtgaagaaggtggttaagacggtgaccactaggaccgttcaaccggtagcaatgggtcccgacggactccctgtggacgcctctagcgtctccaacaattatatccaaactctgggcagagattttaggaagaacgggaatggtggccctggcccgtatgtcgggcaggctggcacggcgacacttccgaggaactttcactatccccccgacggctactcccgccattatgaggacgggtacccgggcgggagcgacaactatgggtcgctctctcgagtgaccagaattgaggagaggtatcgcccatccatggaagggtatagggctccttcgaggcaggacgtgtacgggccacagccccaggtgcgagtagggggttcgagtgtggatcttcatcgcttccatcctgaaccatatggtttggaggacgaccagaggtctatgggctacgatgacctcgattacgggatgatgtctgactatggcactgctcggcgcactgggaccccatctgatcctaggagacgactgcggagctatgaggacatgatcggcgaagaggtaccctccgatcaatattattgggcgcctcttgcacagcacgaaagaggctcgctcgcctcactggactcccttaggaaaggagggccacctcccccgaattggagacagcccgagttgcccgaggtgattgccatgctgggctttcgcctggacgcagtgaaatcaaacgctgcagcctacctgcaacacctgtgctaccgcaatgataaggtcaaaactgacgtccgcaagctcaaagggatcccagtgctggtgggcttactggaccaccccaagaaggaagtgcaccttggagcttgtggcgcccttaagaacatctcatttggccgagatcaggataataagattgctattaagaattgtgatggggtcccagcccttgtccgcttgctccggaaggctcgcgacatggatctcacagaggtcatcacgggaacgctgtggaacctgtcttcccacgactctattaagatggagattgtagatcatgccctccacgcactgaccgatgaagtgattatcccccactcaggatgggagagagagccaaatgaggattgcaaacccagacatattgagtgggagagtgtgcttaccaataccgcgggttgtctccggaatgtttcatctgagagatcagaagctaggcgtaagttgcgagaatgtgatggccttgtagatgcccttatcttcattgtgcaagctgaaatcggccagaaggactctgatagcaagcttgtcgaaaactgcgtgtgtctgctcagaaatttatcgtatcaggtacatcgggagataccccaagctgagagatatcaagaagccgcacctaatgtggctaacaataccggacctcacgctgctagttgtttcggggccaaaaagggcaaaggcaaaaaaccaatcgaggaccccgcaaacgataccgtggattttcctaagcggacgagcccagcaaggggatacgagctccttttccaacctgaggtcgtgaggatttatatttcactgctgaaagaatccaaaacccctgcaatactcgaagcatccgcaggagctattcaaaacctgtgtgcgggtaggtggacctatggccggtatatcaggagcgcgctcaggcaggaaaaggctctgagtgccatcgctgatctgctgactaacgaacatgaacgtgtggttaaagctgcttcaggtgcgctgagaaacctggccgttgacgctcgaaataaagagttgattggcaaacacgcaatcccaaacttggtgaaaaacctgcctggtgggcagcagaacagctcctggaacttttctgaggatacagttattagcatccttaataccattaatgaagtcattgctgagaacctggaagctgcaaagaaactgcgcgagacacaaggaatagagaaactggtgctcattaacaagtctggaaacagatctgaaaaggaggtccgggccgcagcactggttcttcagacgatctggggctataaggaactgagaaaaccgttggagaaggaaggatggaagaagtcggatttccaggttaaccttaacaatgcaagccgctcccaatcctcacacagttatgacgatagcacactgcccttgatcgaccgtaaccaaaagtcagataaaaagcctgatcgggaggagatccaaatgtctaacatggggtctaatacaaagtctctcgacaacaattacagcacacccaacgagaggggagaccacaataggaccttagataggagtggggatttgggggatatggagccactgaagggaaccacgccactgatgcaaaaaatatag

SEQ ID NO: 111086 - DNA, 2499 bp, synthetic construct
  misc_feature 1..2499: note = Description of Artificial Sequence: Synthetic coding sequence
  source 1..2499: mol_type = other DNA
atgcaggaaccaggacaaattgtcgagacctacactgaggaagacccggaaggtgcgatgtcagtggtgagtgtggagacctcagacgatggcaccaccagacgcaccgaaaccaccgtcaaaaaggttgtaaaaacagtcaccaccaggacggtgcaaccggtcgcgatgggtcccgacggcctacccgtcgatgctagtagcgtgtccaacaactacatccaaaccctgggccgggacttcagaaagaacggaaacggcggtcctggcccctatgtcggccaggccggaaccgccacactgcctcggaacttccactacccgcccgatggatactctcggcattacgaggatggatacccagggggtagcgataactacggatctctgagtcgcgtaacgcgcatcgaggagcgctatcgcccgtcaatggaaggctaccgggccccctcacgccaggacgtatacggcccccagccacaggtccgagtcggcggctcatccgttgatctgcacaggttccaccctgaaccatatggtctcgaagatgatcagaggagcatgggctatgatgacttagattatggtatgatgagcgactatggcactgcaagaaggaccggcacccccagtgatccccggcgaaggctcaggtcatacgaagacatgattggggaagaagtgccctccgatcagtattactgggctcctcttgcccagcatgaacgcggcagcctcgcctcccttgactctctgagaaaaggaggcccgcccccccccaattggaggcagccagagctgccagaagttattgctatgttggggtttcgcctggacgcagttaagtcaaacgctgcggcttacctgcagcacttatgttacagaaacgacaaggtaaagacagacgtgcggaaacttaaaggtatcccagtcttggtgggactgcttgaccaccctaagaaggaagtccacctcggtgcctgcggagcattgaaaaatatcagctttggaagggatcaagataataaaatcgctatcaaaaattgcgatggcgttccagccctggtcaggcttctgcgaaaggcccgggacatggatttaaccgaggtcattactgggacattgtggaacttgtcctcgcacgactccattaagatggagattgtggatcacgctctccacgcgctcaccgacgaagtcattatcccacacagcggctgggagcgcgagcctaacgaggactgtaagcctcgacacatcgagtgggagtcggtgctgactaacacggctggatgtctccggaatgtcagcagtgagcgttcggaggcaagaaggaaattgcgggagtgtgatggattggtagacgccctgatttttatcgtacaagcagagattggccagaaggatagcgactcgaagttagtggagaactgcgtgtgcctgttgagaaacttatcctaccaggtgcatagagagatcccccaagctgagcggtaccaagaagctgctcctaatgtggcaaataacacgggcccccacgcagcatcttgtttcggggcaaagaagggcaagggtaaaaagccaatagaggatcccgcaaatgacacggttgactttccaaagcgcacatccccagcacgtggatacgaattgctttttcagcctgaggtggtgcgaatctacatctcactattgaaggagtccaagacaccagctatactcgaggctagcgcgggggcaatacagaatctgtgcgcaggtcgatggacttatggccgctacatcagatccgctttgcgtcaagaaaaagccctgtccgccatcgcggaccttcttaccaatgaacatgaaagagtggttaaagcagccagcggcgcactgaggaatctggctgtagatgctcgaaacaaggagttgattggaaaacacgctatacccaatctcgtgaagaatctgcctgggggccagcaaaatagttcttggaacttcagtgaagataccgtaattagcattctgaatactatcaatgaggtcatcgcggagaatctggaggcagccaagaagctcagagaaactcaggggatcgaaaagctggtcctgatcaacaagtcaggtaatcgcagcgagaaagaggtgagggcggctgctctggtgttgcaaacaatttggggatacaaggagctacgaaagccactggaaaaagaaggctggaagaaaagcgattttcaggtgaaccttaacaacgcaagccgtagccagagctctcacagctacgatgattccacattgccactgatagaccgtaaccaaaaatctgacaaaaagccggatagggaggagatccagatgagcaatatgggcagcaacaccaagtctctcgataacaattactccaccccaaacgagaggggagatcataaccgcacactcgatcgcagtggcgatctaggggatatggagccgctgaagggaacaacaccacttatgcagaagatctag

SEQ ID NO: 111087 - DNA, 390 bp, synthetic construct
  misc_feature 1..390: note = Description of Artificial Sequence: Synthetic coding sequence
  source 1..390: mol_type = other DNA
atggctaacggaaccttgacccgccgacatcaaaacggtcggtttgtgggcgatgccgatctggaacgccagaagtttagtgatctgaaactgaatgggcctcaggaccactcacacttgttatacagcactattcctagaatgcaggaaccaggacaaatcgtggagacttatactgaagaagatcctgagggcgccatgagtgtggtcagtgtcgaaacttccgacgacggcaccactaggcggaccgaaactacggtaaagaaggtggtgaagacagtcaccactcggactgtgcagcctgtggcaatggggcctgatggcctcccagtggacgcaagtagcgttagcaacaattacatccagacccttggacgggatttccggtag

SEQ ID NO: 111088 - DNA, 2586 bp, synthetic construct
  misc_feature 1..2586: note = Description of Artificial Sequence: Synthetic coding sequence
  source 1..2586: mol_type = other DNA
atgcaagagccaggccagatcgtcgaaacatacaccgaggaagaccccgagggggccatgagcgtggtatccgtagaaacaagcgacgacgggactaccagaagaaccgagaccaccgtgaagaaagtggttaagaccgtcacgacccggacagtccagcctgtggccatgggaccagatggactgcccgtggatgcaagtagcgtgagcaataactacattcagacactgggccgagacttccggaagaatggcaacggagggcccggtccgtacgtggggcaagctggaactgcaaccctgccacgaaatttccattatccccctgacggttacagcagacattacgaagatggctacccggggggcagcgacaactacggctccctgagcagggtgacaaggatcgaggagcgatatcgcccttccatggaaggatatcgagcccccagtcgtcaggacgtgtacggcccacagccccaggttcgcgttggtggttcctctgtggacttacatcgcttccaccccgaaccctacggactggaagatgatcagcgttctatgggctacgacgatctggactacgggatgatgagtgactacggtactgccaggcgcacagggactccctctgacccgcgaagacgcctgcgctcttatgaggacatgattggcgaggaggtccccagcgaccaatattattgggccccgttggcccaacatgagcgggggtccttggcgtctctcgattcactgcgcaaagggggtccgccacccccaaattggcgtcagccggaacttcctgaggtgattgcgatgcttgggttccggcttgacgcagtcaagagcaacgcggccgcgtacctccagcatttgtgctataggaatgataaggtgaaaacagacgttcggaaactgaagggcattcccgtgctggttggacttttagaccatccgaagaaagaggtacacctgggagcttgtggcgctttaaagaatattagttttggccgggaccaggataataagatcgctattaaaaattgtgacggcgtgcctgctctcgtacgactgctgcgcaaggctcgtgacatggacctgacggaagtgatcactgggacgctgtggaacctttcatctcatgactctatcaaaatggaaatcgtggatcacgcactgcatgcactgaccgacgaggtaataattccccattctggttgggagagggagccaaatgaagactgtaagccacggcacattgagtgggaatctgtgcttacgaatactgctggatgtcttcggaatgttagctctgaacgctctgaggcccggagaaagttgcgggaatgtgatggactggtcgacgcactgatattcattgtgcaggccgagattggacagaaggattctgattccaagctcgtggagaactgtgtgtgcctgctaagaaacctttcgtaccaggtccacagagagattccacaggctgagaggtatcaggaagcagcacctaatgtggcaaataatactgggccacacgccgcaagttgttttggggccaagaaggggaaagggaagaaaccaattgaagacccagcaaatgacaccgttgactttcctaagcggacctcacccgcccgggggtatgagctgctgtttcagccggaagtggtaaggatatatattagcctgctgaaggaaagcaaaacacccgctatactcgaagcctcagccggggcaatccagaatctgtgcgctggacgctggacctacgggcgctacattaggtcagctttgaggcaggagaaggctctatctgctatagctgatctccttaccaacgaacacgagagagtggttaaggccgctagcggtgccctacggaacctggccgtcgacgccaggaacaaggagcttattggtaagcacgccatccccaacttggtgaagaacctgccaggcggacaacaaaattcatcctggaacttttccgaagatacggtgataagcattctgaacactatcaatgaggtgatcgccgaaaatttggaagccgccaagaaactgcgggagacacaagggatagagaaactggtgttaatcaataagtcgggaaaccggtcggaaaaagaggtgcgggccgctgcgctcgtccttcagaccatctgggggtataaggagctccgtaagccgctggaaaaagaaggttggaagaagagcgattttcaggtcaatctgaacaatgcttcaaggagtcaatcatctcattcttacgacgactctaccctgccactgattgatagaaaccagaaatcagacaaaaaacccgacagggaggagattcaaatgagcaatatgggctcaaataccaagtcgctggataacaattacagcacccccaacgaacggggtgatcataaccggacattagatcgaagcggagacctcggggacatggaacctctgaaaggaacaacccctctgatgcaggatgaaggccaggagtctctggaggaggagctggatgtgttggtactggacgacgaggggggtcaggtctcctaccctagcatgcaaaagatctag

SEQ ID NO: 111089 - DNA, 2658 bp, synthetic construct
  misc_feature 1..2658: note = Description of Artificial Sequence: Synthetic coding sequence
  source 1..2658: mol_type = other DNA
atggccaacgggactctgaccagaagacaccaaaacggaaggtttgtaggggacgctgaccttgagaggcaaaagtttagcgatttaaagctcaacggaccccaggaccactcacacctgttgtatagcacaattccaagaatgcaggagcccggacagatcgtggaaacctacacagaagaggacccagagggagcgatgagcgttgtgtctgtggaaacttctgacgacggcactaccagaagaactgagacaacagtgaaaaaggtggtaaagacagtcacgacaagaactgtgcagcctgttgccatgggccctgacggcctgcctgttgacgcttcctctgtaagcaataattacatacagactctgggtagggatttcagaaagaacggtaatgggggccccgggccttacgtgggccaggccggaaccgctaccctgccgagaaattttcactacccccctgatggatatagcaggcactatgaggacggctaccccggcggctcagacaattacggatctctgtcgcgtgtaaccagaattgaggaaagatacagaccctctatggaggggtaccgtgcccctagccggcaagatgtctacggcccacagcctcaggtgcgcgtgggaggtagtagcgtcgatcttcaccggttccacccagagccctacggtttagaagacgaccagcgaagtatgggatacgatgacctggactacggaatgatgagtgattacggcacggctcgtcgtacaggaactccctccgaccctaggagacgtttgcgctcttacgaagacatgatcggtgaagaagtccctagtgatcagtactattgggctcccctcgctcagcacgagcgaggaagcctcgcaagccttgatagcctgcggaaggggggcccgcctccacctaattggaggcagcccgaactgcctgaagtgattgccatgctagggttcagactcgatgctgtgaagtcaaacgcagcagcctacttgcaacatctctgctacaggaacgataaggttaaaacagacgtgaggaagttgaagggaatccccgtgctcgtggggttgctcgaccacccaaaaaaggaggtacacctgggggcctgtggagctctgaagaacatatcattcgggcgggatcaggacaacaaaattgcgataaaaaattgcgatggtgtccctgctttagtgcgcctgcttcggaaagctcgagatatggacctgaccgaagtaatcaccggaactctttggaatctgagctctcacgatagcatcaaaatggaaattgttgatcatgcattgcatgccctgaccgatgaagtaataatccctcattcgggctgggagagggaaccgaacgaggactgtaagccacgccatattgaatgggagtccgtgctcacaaacactgcagggtgtctgaggaatgtatcatcagaaaggtccgaagcccggcgtaagctgagagaatgcgacggtctcgtggacgctctgatttttattgtccaggccgagatcggtcagaaagatagcgattctaagttggtggaaaactgtgtctgcctgctccggaatctctcctatcaggtccatcgggaaattccccaggccgagaggtaccaagaggctgcacctaatgtcgccaataacacaggcccgcacgctgccagttgttttggggccaaaaaggggaaagatgagtggttctctcggggaaagaaaccaatagaagacccagcaaatgatactgtggacttccccaaaagaacgtcacctgcacgtggatacgaattattgttccagcccgaagtcgtgcgcatatacatctcactgctgaaggagagtaagacccctgcaatactggaggcgagtgcaggggctattcagaacctttgcgccgggcgctggacttatggtaggtacatccgttcggccttgcggcaggagaaagcactttcagccatcgccgatttgctgactaacgaacatgagagggttgtcaaggcagcctccggagcactaagaaacttggcggtcgacgcacggaataaggagctgattgggaaacatgctattccgaacctggtcaaaaaccttccgggaggacaacagaatagctcatggaatttttctgaagacactgttatcagtatactgaacacaatcaacgaggtcattgcagagaatctagaagctgcgaaaaaattgagggaaacacagggaatcgagaagttggtgctgattaataagtcgggaaacagatctgagaaggaggtccgcgcagctgccctggtgctgcagactatttggggctataaggaactgcgcaagcctttggaaaaagaaggatggaaaaaaagtgacttccaagttaatctgaataatgcctccaggtctcaaagcagccatagttatgatgatagcacactgccattgatcgatcgcaaccaaaaatctgacaaaaagccagatcgagaagaaatacagatgtccaatatgggctcaaacacaaaatcattagataataactacagcactccaaacgagcgaggagatcacaaccggaccctggatcgctcgggtgatctgggtgatatggaaccattaaagggaactacgccacttatgcagaaaatatag

SEQ ID NO: 111090 - DNA, 1920 bp, synthetic construct
  misc_feature 1..1920: note = Description of Artificial Sequence: Synthetic coding sequence
  source 1..1920: mol_type = other DNA
atgattggagaggaagtgccatctgaccagtactactgggccccactggcccagcacgagcgtggctccttggcgagtctcgactctctgcggaagggcgggccgccgccccctaactggaggcagccggaattgccggaagtaatagccatgctcggcttccgcctcgatgcagtgaagtccaatgccgctgcttacttacagcatttatgctaccgcaacgacaaggttaagaccgacgttagaaagctcaagggaatacctgtgctcgttggacttctggaccaccccaagaaggaggttcaccttggagcttgtggagccctgaaaaacattagttttggaagagaccaggataataaaattgcaataaagaactgtgacggcgtacccgcgctggtcaggttacttcgcaaggcaagggatatggacctaacggaggtcattactggaactctgtggaatctttccagccatgatagtatcaaaatggagatagtcgaccatgccctgcacgccctgactgacgaggtgataattccacacagtggatgggagagggagcccaacgaggactgcaaacctcgtcacatcgagtgggagagcgtgctcacgaatacagccggctgcttgcgcaacgtcagctcagaaaggagtgaggctcgacggaagttgcgggagtgcgatggactcgtggacgccctgatcttcatcgtacaagccgaaattggccagaaagactctgactctaagctggttgagaactgtgtgtgccttttgaggaatctgtcttaccaggtccaccgggaaatacctcaagctgaaagataccaagaggccgcgcccaacgtggccaacaacaccgggccacatgctgcctcctgtttcggggccaaaaagggtaaaggaaagaaacctatcgaggatcccgctaatgataccgtcgatttccccaaacgaactagcccagcacggggctacgaactgctgttccagcctgaggtcgttcggatctacatctcccttttaaaagaaagcaaaacccctgcaatcctggaggcttccgcaggagcaattcagaatctgtgtgcagggagatggacatatggcaggtatatcaggtctgctcttcgtcaggagaaggcactgagtgccatagccgacttgctcactaatgagcacgagagggtggtgaaggctgccagtggagccttaagaaatctggcagtggatgcccggaataaggagttgattggcaagcacgctatccccaatctcgttaaaaacctgccaggaggccagcagaacagctcttggaacttttccgaagataccgtgataagcattctgaataccatcaatgaggtgattgccgagaacctagaggccgctaaaaagctgcgtgagacccaggggatcgaaaaattagttctaattaacaaatccggcaacagaagtgagaaggaggtgcgcgctgcagccctggtgttgcagacaatctggggatacaaggagctccgcaagccactggagaaggagggctggaagaagtccgactttcaggtcaacttgaacaatgcttccaggagccagtcctctcatagctatgatgactcaaccctgccactcatcgataggaatcagaaatcagataaaaagccagacagagaggagatccaaatgtccaatatgggtagcaacacaaaatcattggataataactacagcacgcctaatgagcgcggagaccacaaccgcaccctggaccggtctggcgacctaggggacatggagcctctgaaaggcaccacccctctgatgcaagatgaaggccaggagtctctagaagaagagttggacgtgctcgtcctcgacgatgaggggggacaagtaagttaccctagcatgcagaagatttag

SEQ ID NO: 111091 - DNA, 2499 bp, synthetic construct
  misc_feature 1..2499: note = Description of Artificial Sequence: Synthetic coding sequence
  source 1..2499: mol_type = other DNA
atgcaggaaccaggccagattgtcgaaacctatactgaggaggatcccgaaggcgccatgtctgtagtgtccgtagaaaccagcgatgacggcacaacccgcaggactgagaccaccgtaaaaaaagtcgtcaagacagtaaccacccgtacagtgcagcctgtggctatggggccagatgggctccccgtggacgccagcagcgttagtaataactacatacagactctcggacgagattttcgcaagaacggcaacggcggtccgggaccttatgtgggacaagctggcactgccaccctgcccaggaacttccattatccacctgatggatatagcagacattacgaagacggctaccctggcggcagcgacaattatggctcccttagccgggttacgcgaatcgaggaaaggtatcgcccatctatggagggatatcgggccccatctagacaggatgtgtacggcccccaaccgcaggttcgggtgggcggaagtagtgtagacctccacaggttccatcccgagccctatgggctggaggatgatcagcggtccatgggttatgatgatctcgattatggaatgatgtccgattacggcacggcgagacgaacaggaaccccctcagacccccggcggcgccttcggagttatgaagacatgatcggcgaagaagtcccatccgaccagtactactgggcccctcttgcccagcacgaaagagggtctctggcctcactcgattctctgcggaaaggtggtcctcctccacccaattggcgtcagccagagcttccagaggtcatagcaatgcttggcttcagactggatgccgttaaatccaacgccgccgcttacctacaacacctgtgctaccgaaatgacaaggttaagactgacgtaaggaaacttaagggcatccccgtgctcgtgggactcctagatcatccaaaaaaagaagtccatttaggcgcatgcggggcccttaagaacatatcttttggaagggaccaggacaataagatcgccatcaagaattgcgacggggtccccgcccttgttagactcctgaggaaggcgagggacatggacttgacggaagtgatcaccggaactttatggaacctctctagtcatgatagcattaagatggaaatcgttgaccatgccctccacgcactgacagacgaggttatcatcccacattccggttgggaacgcgagcctaacgaggattgtaagcctcggcatatcgaatgggaatccgtgttgacgaataccgccggctgtttgcggaatgtttcatctgagcgctctgaggcgagacgaaaattgagggaatgtgatgggctggtcgacgcattgatctttattgttcaggcggagatcggtcagaaggattccgacagtaaactggtggagaactgcgtttgcctgctgcggaacctgtcataccaagtgcacagagagattccccaggccgaaaggtaccaagaagccgccccaaacgttgccaataacacaggaccgcacgctgcctcatgtttcggcgcaaagaaggggaaaggcaagaagcccatagaggaccctgccaatgacaccgtcgattttcccaaacggacaagtccagcaagaggttacgaactactgtttcaacctgaagtggtgagaatctatatcagtctccttaaggaaagcaagacccctgccattttggaagcgtctgccggagctatccagaatttgtgtgccgggcggtggacctatggtagatatatcaggagtgcattgagacaagagaaggcattgagcgctatagccgatctgctgactaacgaacacgaaagagtcgtcaaagccgcctccggagccctccgaaacttggctgtggatgctcggaataaagagttgataggcaaacacgcaatccctaatctggtaaaaaaccttcccgggggccagcagaacagttcatggaacttttcggaagatacagtgatcagcattctgaataccattaatgaagtgattgctgaaaaccttgaggctgcaaagaagcttcgggaaacacagggcatcgaaaagttggtcctcattaataaatcgggcaaccggtcagagaaagaagtcagggccgccgccctcgtgctccagacaatctggggctacaaagagctccgtaaacctttggagaaggaaggttggaaaaagagcgatttccaggttaatttaaataatgcatccagatcacaaagttctcactcctacgacgactccaccctgcctctgattgataggaaccaaaagagcgataagaagcccgaccgagaggaaatccagatgagcaacatggggtcaaatacgaaaagtctggataataactactcaacacccaacgagagaggtgatcacaacagaaccctggacagatccggcgacctgggagacatggaacccttaaagggaactaccccactgatgcagaagatatag

SEQ ID NO: 111092 - DNA, 2499 bp, synthetic construct
  misc_feature 1..2499: note = Description of Artificial Sequence: Synthetic coding sequence
  source 1..2499: mol_type = other DNA
atgcaggaaccagggcaaatcgtagagacctacaccgaggaggaccctgaaggggcaatgagcgttgtgagcgttgagacgagcgatgatggtaccacccgcagaaccgaaacaacagtcaagaaagtcgttaagactgtgacaacaagaacggtacagcccgtcgccatggggcccgacggccttccggtggacgcaagttccgtgagtaacaactacatccagactctgggaagagacttccgcaagaatggaaatggtgggcccggaccatatgtcggccaggctggcaccgcaaccctacctcgcaacttccactatccacctgacggctactctagacactatgaggacggttacccagggggtagtgacaattatgggtccctgtccagggtcacacgaattgaagagcgctatcggccttcaatggagggatatcgcgctccttctagacaggacgtctacgggccacaaccccaggtaagggtgggcgggtctagtgtggacctacacagattccacccggagccctatggtttggaggacgatcagcggagtatggggtacgatgacctcgattacggtatgatgtccgattacggaacagcacggcgcacgggaactccaagcgaccccagaaggcggttgagaagctacgaggacatgataggagaagaggtacccagtgatcagtactactgggcaccattagcccagcacgagcggggatccctagcgtctctggactccctgcgaaagggcgggcccccaccacctaactggcgccagccggaactgccagaagtaatcgcgatgttggggtttaggctggatgccgtgaaaagtaatgctgcagcctacttacagcacctctgttacagaaacgacaaagtcaaaacagatgtgaggaagctcaagggcattcctgttcttgttgggctacttgatcaccccaagaaagaggttcatctgggagcttgcggtgctctgaagaacataagcttcggccgggatcaggacaacaagatagctattaagaactgtgatggggtcccggctctggtgagactgttgcgaaaagccagagacatggatctgactgaggtcatcacaggtaccctttggaatctgtcctcacatgactctatcaaaatggaaattgtggaccacgcacttcatgctctcacggacgaggtgataatccctcatagcggatgggaacgggagcccaatgaagattgcaaacctaggcatatcgaatgggaatcagtccttacaaatacagccggctgtttgaggaatgtctcatctgaacgatcagaggcaagacgcaagctgcgggagtgtgatggactggtcgatgccctaattttcattgttcaggcagagatcggacagaaagattctgacagcaaactagtcgagaactgcgtctgccttctgagaaatttatcttaccaggtccacagggagataccacaggctgagagataccaagaggctgctccaaacgtggctaacaatacgggcccacacgcagcgagctgttttggtgctaagaaagggaagggcaagaagccaatcgaagatcccgctaatgacaccgtcgacttccccaagcgaaccagccccgccaggggatatgagctgctctttcaaccagaggtggttaggatttatatcagcctgctgaaggagtctaagactcccgcaatcttagaagcatctgcgggagccattcagaatttgtgtgcaggtagatggacatatgggagatacatcagaagcgccttacgtcaggagaaggcactgtctgctatcgcagacttgctcacaaatgagcacgaacgcgtggtgaaggctgcaagcggtgcacttagaaacctggccgttgatgccagaaacaaagaattgattggcaagcacgccatacccaatcttgtgaaaaacttacctgggggccagcagaactcttcttggaacttttctgaggacactgtgatcagtatcctcaacaccataaacgaggtaatcgcggagaatctggaggcagcgaaaaagttacgggagactcaggggattgaaaaattagtgctgatcaataagagcgggaaccgaagcgagaaggaagtaagagcagcagccctcgtcctgcagacgatctgggggtataaagagttgcggaaaccgttagaaaaagaaggctggaagaagagcgactttcaggttaatctgaacaacgcttcacgcagccagtcctcccactcatatgatgactcgacactgccattgatcgaccgcaaccagaagagtgataaaaagcccgaccgggaggaaattcagatgtcaaacatgggtagcaacactaagtcgctcgataacaattattccactcctaacgaacgaggagaccacaaccgcacgctggaccggtcaggagacctaggcgacatggagcccctgaagggtaccaccccactcatgcagaagatctag

SEQ ID NO: 111093 - DNA, 2640 bp, synthetic construct
  misc_feature 1..2640: note = Description of Artificial Sequence: Synthetic coding sequence
  source 1..2640: mol_type = other DNA
atggccaatgggaccctcacccgccggcaccagaacggtagattcgtaggagacgccgacttagaacgccagaaattcagtgatctgaaattgaacggtccacaagaccactcccacctcctttattcaacaatcccacgtatgcaggaacccggccagattgtagaaacctatacagaggaggatcccgaaggcgccatgtctgtagtctctgtggagacctcagatgacggcacaacaaggaggacagagacaacagtaaaaaaggtggtcaaaactgttacaacgcggactgtccagcccgtcgccatggggcctgatggactgcccgtggacgcgtcctccgtgtcgaataactacatacagacgcttggacgcgattttaggaagaatggtaacggtggtccaggcccatacgtgggccaggccggaacggccaccctgccgcgaaactttcattatccacccgacggctattcccggcattatgaggacgggtacccgggaggatcagacaattatggctctttatcccgggtaactcgaattgaagagagatatcggccttcaatggaggggtaccgtgctcccagcaggcaggacgtgtacggtccccagccacaagtgagggttgggggatcgtcggtcgacctccacagattccacccggagccatatgggttggaggatgatcaaagaagtatgggctacgacgatctggattatggcatgatgtctgattatggcacagcaagacgaaccggcaccccatctgatccacgccgacggctcagaagctacgaggacatgataggcgaggaagtacctagcgaccagtactactgggcgcccctggctcagcacgaaagaggtagcctcgcttcgcttgattctctgcgcaaaggggggcctccaccgccaaattggcggcaacccgaactccctgaggtgattgctatgctggggtttagacttgacgccgtgaagtccaatgctgcagcctacctacagcacctatgctacaggaacgacaaggtcaaaacggacgtcagaaaactcaagggaatccccgtacttgtcggattgctggatcacccgaaaaaagaggtgcatctgggagcctgcggcgcgctcaagaacatcagcttcggaagggaccaggacaacaagattgccattaaaaactgcgatggggtccctgcgttagtgagattgctgcggaaagccagggacatggacttgacagaagtcattacaggaacgctctggaatctgtcctctcatgatagcatcaagatggagatcgtcgaccatgcactgcacgcccttactgatgaggtgattatccctcacagcgggtgggaacgagaacctaatgaggattgcaagccccgccacatagagtgggaatccgtgctgacaaacacggcagggtgcctaagaaacgtatcgagcgaacgctcagaggctaggcggaaattgcgagaatgcgatggccttgtggatgctctgatctttatagttcaagctgaaattggtcaaaaagactcggactccaagctggttgagaattgtgtgtgtctccttcgtaatctgagctaccaagtccaccgcgaaattccacaggcagagagatatcaggaagcggcccccaacgtggctaacaatacagggcctcatgccgcttcatgttttggcgctaagaagggcaaggggaaaaaacccattgaggaccctgctaatgatacagtcgatttcccaaagcgcaccagtccagcccgcggatacgagctgcttttccagccagaggtggtccgaatttacatcagcctattaaaggagagtaagacgcctgcaattcttgaagccagcgccggagccatccagaacctgtgtgctgggcgctggacctacggcaggtacataaggagtgcgttgagacaggagaaagccctctcagccatcgctgacttactgacaaatgaacacgagagagtggtgaaagctgcaagtggggcactgcgtaacctggcggtcgacgcccggaataaagagctaatcgggaagcacgcgatacctaatctagtgaaaaatttaccaggcggacagcagaattcatcctggaactttagcgaggacacagtgatcagtatcctgaataccatcaatgaagttatcgcagagaatctcgaggcagcgaaaaagcttcgggaaacgcagggaatcgagaaattggtacttataaataagagcggtaaccgctccgagaaagaggtgcgcgccgccgcccttgtactgcagacaatctgggggtacaaagagctccggaaacccctggaaaaagaaggctggaagaagtcagatttccaggttaacctcaacaacgcctcaaggagtcaaagcagtcattcatatgacgattccacccttcctcttatcgatagaaaccaaaaaagtgataagaagcccgatcgggaggagattcagatgagcaacatgggctccaacaccaaaagcttggacaataactacagtacgccaaacgaacgtggggaccacaaccggactttagaccggtccggagacctgggagacatggagccgctgaagggaacaacccccttgatgcagaaaatatag

SEQ ID NO: 111094 - DNA, 2523 bp, synthetic construct
  misc_feature 1..2523: note = Description of Artificial Sequence: Synthetic coding sequence
  source 1..2523: mol_type = other DNA
atgcaggaacccggccaaatcgtggagacctacactgaggaggatcccgagggggccatgtcagtggttagcgtggagacttctgatgatggaacaacaagacgaaccgagactaccgtgaagaaggtggtgaagactgttaccacccggactgtacagccagtcgccatgggtccagacggactgccagtggatgccagcagcgtgtcaaataactatattcagacgctggggagggattttcggaagaacgggaatggaggaccaggtccttatgtcggccaggccggcactgccaccctcccacggaattttcactacccacccgacggatacagccggcactatgaagacggctaccccggcggctcggacaactatggatccctgtcccgcgtcacacgcattgaggaaaggtaccggccgtccatggagggctaccgggccccttcaaggcaggatgtatacgggccacagccacaggtccgggtgggaggatcatctgtagaccttcaccgctttcacccagaaccttacgggctcgaagacgaccaaaggagtatgggctacgacgacttagattacggcatgatgtctgactacggcacagcaagacggacaggaacccctagtgatcctagacgaaggctgcgatcttacgaggatatgataggcgaagaggtgcccagtgatcaatattattgggccccgctcgcccagcacgagagaggaagcctggcaagcttagatagtttgagaaagggcgggcctcctccacctaattggaggcagcctgagctgccagaggtgatcgccatgttaggcttccgccttgatgctgtcaagtctaacgccgccgcctaccttcagcacttgtgttaccgaaatgacaaggtgaaaaccgacgtaagaaaattgaaaggtatcccggttttggtggggctgttggaccacccgaaaaaggaggtgcaccttggcgcgtgcggtgctttgaaaaatattagttttggacgggaccaagacaataaaatcgcaattaagaactgtgatggcgtgcctgccttggtccggttgcttcgtaaagccagggatatggatctaaccgaggtcataacaggcactctctggaatctgagtagccatgactctattaagatggaaattgtcgaccacgccctccatgccctgacagacgaggtgatcatccctcacagcggatgggaacgcgaacctaacgaggattgtaagccacgtcacattgagtgggagagcgtacttaccaatacagcaggttgtctgagaaacgtcagctctgaaaggtcagaggccaggagaaaactaagggaatgcgacgggctcgtagatgcattgatctttatcgtacaggccgaaattggacagaaagatagcgacagcaaattggtggagaactgtgtgtgtctgctgagaaacctctcctaccaagtgcacagagagatcccccaggcagagagatatcaggaggcggctcccaatgtggcaaacaacacagggccccatgccgcctcttgctttggagctaagaagggtaaaggaaaaaaacccatcgaagatccagctaatgatacagtggacttcccaaaacggacctcacctgcacgaggctacgagctgctattccagcctgaggtggtgcgcatatatatctccctgttgaaggagtcgaagactccagcaatccttgaggcatccgcgggagctattcagaatctgtgcgccgggcggtggacctatggccgatatattcgaagtgcactgagacaggagaaagcattatcagccattgcagacctgttgaccaacgaacacgaacgtgtggttaaagcagcatcgggagctcttaggaatttagccgtagacgcacgcaacaaggagttgatcggtaagcacgctatccctaatttagtgaagaacctcccagggggccaacagaattcatcttggaacttcagcgaggacactgtgatctccattctgaacacaatcaatgaggtgatagctgagaatctcgaggccgctaagaaattaagggagacacagggcattgaaaagctggtcctcatcaataagtccggaaacagaagcgagaaagaggtccgcgcagcagccctggtgctgcagacaatctggggttataaagaattacgcaagcctttagagaaggaaggctggaagaaaagtgattttcaggttaacttaaataacgcctctagatctcagagttctcattcttacgacgattcgacactgccgcttatcgatcgcaaccaaaagtcagataacaattactccacaccgaacgagaggggcgaccataatcggacgttagacaggagtggagacctgggggatatggagcctctaaagggaacaacccccctaatgcaggacgaaggtcaggaaagcttggaagaggagctagatgtgctcgtgctggacgatgaaggcggccaggttagctacccatcaatgcaaaaaatatag

SEQ ID NO: 111095 - DNA, 2745 bp, synthetic construct
  misc_feature 1..2745: note = Description of Artificial Sequence: Synthetic coding sequence
  source 1..2745: mol_type = other DNA
atggcaaatgggactttaactcgtcggcaccagaacgggcgtttcgttggggatgccgatctggagcggcagaagttcagtgaccttaaactgaacggcccacaggatcatagtcatttattgtacagcacaatcccccggatgcaagaaccgggacagatcgtcgagacctataccgaggaagatccagagggtgctatgtcagtcgtgtccgtggagactagtgatgatggtacaaccagacggaccgaaacaactgtcaagaaagttgtgaagacggtgacaactcgcactgtgcagccagtggctatgggccccgatggcctgccggtggacgcctctagcgtaagcaacaattacattcaaaccctcgggcgcgactttcgaaaaaacggcaacgggggcccgggaccttacgttggtcaggccggcaccgctacactaccccggaactttcattacccccctgacggctattcacgccactacgaagatggctatcctggagggtcggataattacgggagtttgtctcgagttacacgcatagaggagaggtacaggccctctatggagggatatcgggcaccctctaggcaggacgtgtacggaccgcaaccccaggtccgggtcggagggagctccgtggacctgcaccgatttcacccagagccatacgggctggaagatgatcagaggtcgatgggatatgatgacttagactacgggatgatgtccgattatggtacagccagaagaactggcacacccagtgacccaaggcgccggctcaggagttatgaggatatgattggagaggaggtcccctcagaccaatattattgggctcctctagcccagcatgagcgcggtagcctggcatcactggattccctgcgcaagggcggccccccaccaccgaactggcgacagcctgaattgccagaggttatcgccatgttaggatttagactggacgcagtgaagtcaaacgccgcggcatacctgcagcacctttgttaccgaaacgataaggttaagacagacgtgcgcaagctgaaagggattccggtcctcgtgggcctgctggatcatcctaaaaaagaagtgcacttgggtgcttgcggcgccctaaagaacatctctttcggacgggatcaggataataaaatcgccatcaaaaattgtgatggcgtccctgccctggtgcggctcctcagaaaagcacgcgacatggacctgactgaagtaatcacagggactctgtggaacctgagttctcacgactcaatcaaaatggaaatcgtagatcacgccttacacgcactgaccgacgaggttataattcctcacagcgggtgggaacgcgagcccaatgaagattgtaaaccccggcatattgaatgggagagtgttctcacgaacaccgccgggtgcttgcggaacgtcagctctgaaaggagtgaggcacgcaggaaactgcgtgaatgcgatggtctggtggacgctctgatcttcatagtgcaggccgaaatcggccaaaaggacagcgactcaaagttggtggaaaattgcgtttgcctgctgcgcaacctgtcttaccaggtgcaccgtgaaattccgcaggctgagcgctatcaggaggccgcacctaatgttgctaacaacaccgggccccatgcagcctcttgttttggggccaaaaagggaaaagacgagtggtttagccgtggtaaaaagccaatcgaagaccccgccaatgacactgtggacttccctaaacgtactagtcctgccaggggatatgagctactgttccagcccgaagtcgtgcgaatctatatcagcctgcttaaggaaagcaaaacacccgccattctggaagccagtgccggcgccatacagaacctgtgcgcagggcgatggacctatggacggtatataagatccgccctgaggcaggaaaaagccctgtccgctatcgccgaccttctgactaacgaacacgaacgagtcgtcaaggccgccagtggcgccttgaggaaccttgcggtagatgctcggaataaggaattgatcgggaagcacgcaattcccaatcttgtgaagaatttgccaggaggccagcagaactctagctggaatttctccgaagataccgtgatctccatactaaacacaatcaacgaggtgattgcagagaatctggaagccgccaagaaactccgggagacccaggggatagaaaaattggtcctgattaacaaatctggcaatagaagtgagaaagaggtcagagccgcagcccttgttctgcagacaatctggggctataaggaactgcggaaaccccttgagaaggaggggtggaagaagagcgactttcaggttaacctgaacaacgcatcgcgatcccagagttctcacagctacgacgatagtaccttgcccctgattgaccgaaaccagaagtcagacaaaaaaccagaccgggaagaaatccagatgagcaacatgggctcaaacactaaaagcctggacaacaactacagtacgccgaatgagagaggggaccataatagaaccctcgaccgctcaggcgatctgggggacatggaacccctgaaaggaacaactcccctcatgcaggatgaaggtcaggaaagtctcgaagaggagctcgacgtgctggtgctggacgatgaaggaggccaggtgtcctaccccagcatgcagaagatctag

SEQ ID NO: 111096 - DNA, 381 bp, synthetic construct
  misc_feature 1..381: note = Description of Artificial Sequence: Synthetic coding sequence
  source 1..381: mol_type = other DNA
atgatcggagaagaggtccctagcgatcaatactattgggctccgctagcacagcacgagcgcggaagcttggcctctctggatagcctgcggaagggaggcccgccgccgccaaattggagacagccggaactacctgaagtcattgcaatgttgggcttccgtctggatgctgtcaaaagtaatgctgctgcctatctacagcacctgtgttaccgcaatgacaaagtcaaaactgacgtgcgaaagctaaagggcatacccgtgctagtggggctacttgaccatcctaagaaggaagtgcatctgggagcttgtggagctcttaaaaatattagttttggacgggaccaagataataagatcgcgataaagaattag

SEQ ID NO: 111097 - DNA, 2640 bp, synthetic construct
  misc_feature 1..2640: note = Description of Artificial Sequence: Synthetic coding sequence
  source 1..2640: mol_type = other DNA
atggctaacggcacgctcacacgacgtcatcaaaacggacgcttcgtcggggatgctgaccttgagagacagaaattttcagacctcaaactgaatggcccacaggatcactcacatctgttatactctaccattccaaggatgcaggaacctggacagatcgtggaaacctatacagaagaggatcccgaaggcgcaatgtctgttgtttccgtcgagacttccgacgacgggacaacgcgcagaaccgaaacaacagtcaagaaagtagtgaaaactgtaacaacccggacagtgcagcctgtcgccatgggtcctgacggtttaccggtggacgcctcatccgtatcgaataactatatccaaacactgggccgcgatttccgtaaaaacggaaacggcggacctggcccctatgtgggccaggctggcacagccaccctccctcgcaactttcactaccccccagatggttattcccggcactatgaagatggctatcccggaggaagcgacaactatggcagtctgagtagagtgactcgcatcgaggaacgctacagaccttctatggaaggataccgagctccctcaagacaggatgtatatgggccacagcctcaggtccgcgtaggtggtagttccgtcgaccttcaccgattccacccagagccctatggcctcgaagatgatcagaggtctatgggctacgacgacttagattatggtatgatgagtgactatggcaccgcacggcgaaccggtacaccaagcgaccctcggaggcgattacgctcttatgaggatatgatcggagaggaagtgccgtctgatcaatattattgggctccactagcccagcacgagcgcggcagcctggcctccctcgactccttgaggaagggcggcccccctccacccaactggcgccagcccgagcttcctgaagttattgccatgctgggcttcagactggacgccgtgaagagcaacgcagcagcttacttacagcacctgtgttatcgtaatgacaaggtgaagaccgatgtacggaagttaaagggaatccctgttctcgttgggctgctcgatcatcctaagaaagaagtgcacctaggcgcttgtggcgctcttaaaaacattagcttcggtagggatcaagataataagatagcaatcaagaactgtgatggggttcctgcgcttgtgaggctgttaaggaaggcgcgcgacatggatttaacagaggttattaccggaactttgtggaatctttctagtcatgattcaataaagatggagatcgtagaccacgcccttcacgccctgactgacgaggtgatcattcctcatagtggttgggagcgggagccgaacgaggactgcaagcccaggcatatagagtgggagtccgttctgactaacacggccggctgcctgcgcaatgtgagtagcgagcgctcagaggccagaaggaaattgcgtgagtgtgatgggttggtggatgccctgatcttcatcgtgcaggctgaaattggacagaaagatagtgacagcaagcttgtcgagaattgcgtgtgccttctgcgaaatctgagctaccaggtacaccgcgagattcctcaggctgagcgatatcaagaggcggctccaaatgtggcgaataatacgggcccgcatgctgcatcttgctttggcgcgaagaaggggaaaggaaagaagccaatcgaagatcccgccaacgatacagtggatttcccgaaacgaacatcgcctgcgcgaggttatgaactgctgtttcaacctgaagtcgttaggatttatattagtctattaaaagagtccaagaccccagccatcttagaagcttccgcgggagcgattcagaatctgtgcgccgggcgatggacatatggtcgctacatacgcagtgcactgcgacaggagaaagccctgtctgctatcgccgatctactcactaatgagcacgaacgtgttgtgaaggcagcatctggggcgctcaggaacctcgctgtggacgccaggaacaaagagttgatcgggaaacatgctatccccaacctcgtgaaaaacttgcccggcgggcaacagaactcttcttggaacttctctgaagacactgtgattagcatcttgaacacgattaacgaagtcatagcagagaacctcgaggccgctaagaaattgagagagacacagggcatcgagaaactggtgttgattaataagtcaggcaaccgtagcgagaaggaagttagagccgccgccctagtattgcagaccatatggggctataaagagctgcgcaagcctctcgaaaaagaagggtggaagaagtcggatttccaggtaaacttgaataacgccagccgatcccagtcgtcccactcctatgacgactccactctgccactgatcgatagaaaccagaaaagtgataaaaaacccgatcgcgaggagatccaaatgtcaaacatgggctccaacaccaaatctttggataacaattatagcacacccaacgagcgaggcgatcacaatcggactctggatagatccggagatctcggggatatggaacccctgaaaggaactacccccctgatgcagaaaatctag

SEQ ID NO: 111098 - DNA, 3678 bp, synthetic construct
  misc_feature 1..3678: note = Description of Artificial Sequence: Synthetic coding sequence
  source 1..3678: mol_type = other DNA
atgttcgcccgcaagcccccaggcgccgcccccctcggcgcaatgcccgtgccagaccaacctagcagtgcttctgaaaaaacatcttcacttagtcctggtcttaatactagcaatggcgacggaagtgaaacagagacgacctcagcaattttggcttcagtcaaggagcaggaattacagttcgaaaggctaactcgcgaactggaggcggaaagacagatagtagcaagccagcttgagcgatgcaagctgggttccgagaccgggagtatgagcagcatgtctagtgctgaggagcagttccaatggcagagtcaggatggacagaaggacattgaagatgaactgaccactggcttggagttagttgatagctgcatccgaagtcttcaggaaagtggaatcctggaccctcaggattacagtacaggagagcggccctcacttctgtcccagtctgccctacaactgaactcaaaacccgagggaagctttcagtaccccgcatcataccactctaaccaaactttggcattaggggaaaccaccccctctcagctgcccgctcggggaacccaggcgagggcaaccgggcagagctttagccagggcacaacctccagagcagggcacctggccggccccgagccagctcctccccccccaccgcctcctcgagagcccttcgcgccctccctaggtagcgcctttcacctgccggatgcgcctccagccgctgccgccgcagccctgtactattcatcaagcaccctgcctgcaccacccaggggaggaagcccacttgcagccccccagggtgggagccctactaaacttcagcgtggcggttccgccccggagggcgctacctacgcagcacctcgcggaagcagccctaaacagagtcctagccggctggccaaaagttattctacgtcctctcctattaacattgtagtctcctcagctggcctctctccaatccgcgtgacgtcaccccctactgtccagtccactatatcctcgagccccattcaccagctttcatctacaattggaacctacgcgacactttctcctactaaaagactggtgcacgcttctgagcagtactcgaagcactctcaggaattatacgctaccgccacccttcagagaccaggctccctagccgccggatccagagcgtcctactccagccaacacggccacctgggtccagaactgagggctctccagagtcccgaacatcatatcgatccgatctatgaagacagggtatatcagaagccacctatgaggtccctgtctcagtctcagggggaccctctgccgcccgcgcatacaggcacctacagaaccagcaccgcacctagtagtccgggcgtcgattccgtgccattacagaggactggttcccagcacggaccacaaaatgctgccgccgccacctttcaacgggcatcgtacgccgcaggaccagcctcaaactacgcggacccgtatagacagctgcagtactgtccatccgttgagagtccctattctaagagcggtcccgcactgcctcctgagggcactttggccagatctccctcaatagatagtatccagaaagacccccgggagttcgggtggcgagatccagagttacctgaagtgattcagatgctgcagcatcaattccctagcgtgcagtcaaacgctgcggcctacctgcaacatttgtgttttggagacaataagattaaagccgagataaggcggcaggggggtatccagctcctagtcgatctcttagaccaccggatgaccgaggttcatcggagcgcttgcggcgctctccgcaacctggtgtatggtaaagccaatgacgataacaagatagctctgaagaattgcggaggcatcccagccctggttaggctgttgcggaaaacgacagacctggaaattagggagctcgtcacaggcgtgttatggaatcttagctcatgcgacgccctgaaaatgccaattattcaggatgctttggctgttctaaccaacgccgtgatcataccccacagcgggtgggaaaactctcctctgcaggacgacagaaagattcagctccacagctcacaggtactgcgtaatgccactggatgccttaggaatgtctccagtgccggggaggaggcacgaagacggatgagagaatgtgatggactcaccgatgccctcctttacgtcattcagtcagccctcggcagcagtgaaatcgattctaagaccgtggaaaactgtgtgtgtatcctgcgaaacctgagttaccggctggcagctgaaacatcacagggacagcatatggggactgatgagctagacggacttctgtgtggggaggccaatgggaaggacgcagagtcttctgggtgctggggcaaaaagaaaaaaaagaagaaatctcaagatcaatgggatggcgtgggacccctccccgactgtgccgagcctccgaagggtatccaaatgctctggcaccccagcatcgtcaagccttatttaacattattgtccgaatgctccaatcctgatactttggaaggggcagccggtgctctgcaaaacctcgcagctggctcctggaagtggtctgtgtatatccgcgcagctgtgcggaaggaaaaaggcctccccatcctagtcgaactgctcagaattgacaatgaccgcgtggtgtgtgctgtcgccacagccctccgcaacatggcactcgacgtgcgcaacaaggaactcataggaaagtatgccatgcgggatctggtgcacagactgcccgggggcaataattccaacaacaccgctagtaaggccatgagcgatgatactgtgactgcagtttgctgcacccttcatgaagtgatcacgaaaaatatggagaacgctaaagctctacgagacgcaggaggtatcgagaaacttgtcggtatcagtaaatcaaaaggtgacaagcactcccccaaagtcgtcaaggccgctagccaggtgctcaactccatgtggcagtacagagacctgagatccctgtataagaaagacggttggtctcaatatcacttcgtggcttcctcgagcactattgagcgcgaccggcaaagaccatactcctctagtcggactcctagcatctcccctgtgcgggtctctcccaacaatcgaagcgcctctgcaccggcatcgccgagggaaatgatcagcctcaaagaaagaaagacagattacgagtgcaccggaagtaatgccacctaccatggagccaaaggagaacatacatccaggaaggacgccatgaccgcccagaatactgggatctcgaccctgtataggaactcctatggcgccccagcagaagatataaagcacaatcaggtgtcagctcagcccgtccctcaagagccttcacgaaaggactacgagacatatcagccgtttcagaacagtacgaggaattatgacgaatctttctttgaagatcaggtccaccacagaccccccgcctccgagtatacaatgcatctgggtctgaagtccactggcaattacgttgatttttactcagcagctcgtccctattctgagttgaattacgagacctctcattatcctgcctcgcctgacagttgggtgtag

SEQ ID NO: 111099 - DNA, 3504 bp, synthetic construct
  misc_feature 1..3504: note = Description of Artificial Sequence: Synthetic coding sequence
  source 1..3504: mol_type = other DNA
atgtttgccaggaagcccccaggagccgcccccttaggagcaatgcccgtgccagaccagccttcctccgccagcgagaaaaccagctccctgagccccggcttgaatacaagcaatggagacggatccgaaacagaaaccacatccgcgattctggccagcgtcaaggagcaggaacttcagtttgaaaggttgacgagagagctcgaagcagaaagacagattgtggcgtcccagcttgagaggtgcaaactaggatctgagaccggaagtatgtcatcaatgtcctctgccgaggagcagttccagtggcagtcccaagatggccagaaagacattgaggacgagctcactacaggtttagaactagtggactcttgcattagaagcctgcaggaaagcggcatactggatccccaagactactcaacaggtgagagacctagcctgctgagtcaatctgcactgcagttaaacagtaaacccgagggatcatttcagtatccagcatcataccactccaaccagaccctggccttgggcgaaactaccccaagccagctgcctgccaggggcacccaggctagagctaccggacagtcattttcgcaaggcaccacaagtcgagcaggacaccttgcaggcccagagcccgccccaccgcctcctcctcctccacgggaaccattcgcacccagcttgggcagtgcctttcacctgcctgatgcccctcctgctgctgcagcagcagctctgtattacagctctagtacattaccagctcctccgagaggaggctctccactcgccgctccgcagggggggtcccccaccaagctgcagcgaggaggatcagcgcctgagggcgctacatatgccgctccaagggggtcttcaccaaaacaaagcccctccagattggcaaaatcctacagtacctccagtccaattaacatagtggtcagcagcgcaggcttaagccccataagggtcactagcccaccgactgtgcagagcactattagctcaagccctattcaccaactctcgtctaccatcgggacctacgctacactgtccccaaccaagcgactggttcatgcatcagagcagtattccaagcattctcaagagctgtacgcaactgccactctccagagaccaggatccctcgcagccgggagccgcgcaagctactccagtcagcatgggcatctaggcccagaactgcgcgcattgcagtctccagaacaccatatagacccaatctatgaggacagggtgtaccagaagccccccatgcgtagtctgtctcagtctcagggagaccccctaccacctgcgcacacgggaacctatcgcacttccacagcccccagcagccccggggtcgactcagtgcctctccagcggacaggtagtcagcatggaccccaaaacgcagccgctgcaacctttcagagggccagctatgccgccgggcctgcctctaactatgctgatccttatcgacagctgcagtattgtcccagcgtggaaagcccgtactccaagtctggaccagccctgccccctgaaggaaccctggcgcgctctccctccatcgatagcattcaaaaggaccctagggagttcggttggcgcgaccctgaacttccagaggtgatccaaatgctgcagcaccagtttccaagcgtacagtccaatgccgcagcctacctgcagcacctgtgtttcggcgataacaaaatcaaagccgaaatccggcggcaaggaggaatccaattgctggtagatctgctggatcacaggatgactgaagttcataggtctgcgtgtggggctctgcggaatcttgtttacggtaaggccaatgacgataacaagatcgcactcaaaaattgtggcgggataccagcacttgtcaggctgctgcgcaagacgacagaccttgaaattagagagcttgtgacgggtgtgctctggaacttgagctcttgcgatgccttgaaaatgccaataattcaggacgctctggctgtcctcactaacgcagttattatcccacattcagggtgggagaactccccccttcaggacgacagaaagatccagctccactctagccaggtgctgaggaacgcaacggggtgtctccgcaatgtttctagcgctggtgaggaagcaagacggcggatgagagagtgtgacggactgacggatgccctgctatacgtcatccagagtgctttaggctcctcagagatcgacagtaaaacagtggaaaactgcgtctgcatcctgcggaacctgtcgtatcggttggcagccgagaccagccagggacagcatatgggaacagatgaactcgacgggttgctttgtggggaggcaaatggcaaggatgccgagagctcaggctgctggggcaagaaaaagaagaagaagaagtcccaggatcagtggtcagtgtacattcgcgcagccgtgcgcaaagaaaaagggcttcctatccttgtggaacttctgcgaatcgacaatgatcgggtggtctgtgctgtcgctaccgctctgaggaacatggctcttgacgtccggaacaaggaactgatcgggaaatacgccatgagggacctggtccaccgactgcccggcggaaataactccaacaacactgcctcaaaagcaatgtcagatgacaccgtgaccgctgtgtgctgtacacttcacgaggtgatcactaagaacatggagaacgctaaggctttgcgcgacgcaggaggcattgagaagctggtaggaataagtaagtccaaaggtgataagcacagcccaaaggtcgttaaagccgcctcccaggttctgaactctatgtggcaataccgagatctcaggtctctgtataagaaggacggatggagtcagtaccacttcgtggcttccagctctactattgagcgggatcgccagcgtccctacagcagctcacggactcctagcatatctcccgtccgtgtgagtcccaataatcggagcgccagcgccccggcttcacctcgggagatgataagcttgaaagagagaaagactgactacgaatgcacgggctccaatgcaacataccacggtgccaagggggaacatacaagccgaaaagacgctatgacagcacagaataccggaatctctaccctttacaggaattcgtatggggctcctgcagaagacataaaacacaatcaagtaagcgctcagcccgtacctcaggaaccgtcccgcaaagattacgagacatatcaaccctttcaaaacagtactcggaattatgacgagtctttctttgaggatcaagtgcatcacaggcccccagcttccgagtatacaatgcacctggggctgaaaagcacgggaaactacgttgacttctacagtgccgcaagaccttattcagaactgaattatgagaccagtcattacccagctagcccagactcatgggtctag

SEQ ID NO: 111100 - DNA, 2379 bp, synthetic construct
  misc_feature 1..2379: note = Description of Artificial Sequence: Synthetic coding sequence
  source 1..2379: mol_type = other DNA
atgaggtctttgagccagtcccagggggatcctctgccaccagctcacactggtacctacaggacttccactgccccatcgtccccaggcgtggattcagttccattacagcggaccggatcacaacatggacctcagaacgctgcagccgccacctttcagagggcctcatatgccgcgggtccagcgtctaattatgccgatccgtaccgccagcttcagtattgccccagcgtggaatcaccctactccaagtcaggtcccgcgcttccccctgagggcaccctcgcacgcagtccatccatcgatagcatccagaaggatccacgcgaattcggctggagagacccagaattacctgaggtgatacaaatgctccagcaccagtttccatccgtgcaaagcaatgccgctgcttatctgcagcacctgtgcttcggcgacaacaagattaaggctgagatccggagacaaggcggcattcagctcctggtcgaccttttggatcatcggatgaccgaggtacaccgatctgcgtgtggcgcccttagaaatctggtgtacgggaaggccaacgatgataacaagattgctctgaagaattgcggaggcattcccgccctcgtacggctgctgaggaagaccaccgatctggaaattagggaattggtgaccggtgtactgtggaacctgagcagctgcgatgcattgaagatgcccatcatccaagacgctcttgcagtgctcactaacgcagttattattcctcattctggatgggagaatagtccactgcaggatgatcggaagatccaacttcactcaagccaggtcttacggaacgccaccggatgtcttcgcaacgtaagtagcgctggagaagaggctagaaggagaatgagagaatgtgacggcctcaccgatgctctgctctatgtgatccagagtgcactcggcagctcggaaatagattctaaaaccgttgaaaattgtgtgtgtatcctgcggaacctgagttaccgacttgcggccgaaacatcacaaggtcagcacatgggcacagacgagctggatggcctcctgtgcggcgaagctaatggcaaagacgctgaaagctccggctgttggggcaaaaagaaaaaaaaaaaaaaatcacaggatcaatgggatggggttggacccttaccagactgcgccgagcctccgaaagggatccagatgttatggcatccttcgatcgtcaaaccctatctcaccctcctttccgaatgctccaacccggatacccttgagggcgcggcgggcgcacttcagaatcttgcggccggaagctggaagtggagcgtttacatcagagctgcagtgcggaaggagaaaggcctgcctatcttagtagagctgttacggatcgacaacgacagagtcgtgtgcgccgttgctactgctctgagaaatatggccctggacgtgaggaataaggagcttatcggcaagtacgccatgcgcgatctggtgcaccggcttccagggggtaataattccaataacacggccagtaaggcaatgtcagacgataccgttactgccgtgtgctgcacactgcacgaggtgatcaccaagaacatggagaacgcgaaagcccttcgtgatgccggagggatagagaagctcgtcgggatttctaaaagcaagggggataagcattccccaaaagtagtcaaggccgcaagtcaggtgttgaattccatgtggcagtaccgtgatctccgctctctctataagaaagacggctggagccagtatcatttcgttgcttcttctagcacaattgaacgcgatcgtcaacgcccctattcatcttctcgcaccccgtctatatcccccgtgagggtctctcccaataatagaagcgcatctgctcccgcctcgccgcgggaaatgatctccctgaaagaacggaagacagactatgagtgtaccggctcaaacgccacctaccatggcgccaaaggggagcatacatccagaaaggacgcgatgactgctcagaataccggcataagcactctctacagaaactcctacggtgcgcccgctgaagatattaagcacaaccaggtgagtgcccagcccgttccccaggagcctagtcgtaaggactatgagacctaccagcctttccagaacagcacacgcaattatgacgagagtttcttcgaagaccaggtccatcacaggccgccagcgagtgagtacacgatgcaccttggcctgaagagcaccggaaattatgtcgacttttattctgctgcaagaccgtattccgaacttaactacgaaacttctcattaccctgccagtccagattcttgggtttag

SEQ ID NO: 111101 - DNA, 2667 bp, synthetic construct
  misc_feature 1..2667: note = Description of Artificial Sequence: Synthetic coding sequence
  source 1..2667: mol_type = other DNA
atgagcagtatgtcatccgctgaggagcagtttcagtggcagagtcaggatggtcagaaggacattgaggacgaactgaccacgggactggagctggttgatagttgtatcaggagtttgcaggaatccggcattctggacccccaagactattccacaggcgaaaccggatccagggcatcatattcctcacaacacggtcatctgggacctgaactgcgcgccctccagagcccagagcaccacatcgatcccatctacgaagacagggtgtaccaaaagccgccaatgaggtccttgagccagagccaaggagatcccctgcctccagctcatacaggcacttataggacgtctactgctccttcctcacccggcgttgattcagtacccctgcagaggaccggatcccaacacggtccacagaatgccgccgctgcaacgttccagagggctagctacgcggccggtccggcttcgaattatgccgatccctacaggcagttgcaatattgcccttctgtcgaatccccttattccaagagcggcccagctctccccccagaaggaacgctggctcgatcaccttcaatcgattccattcagaaagacccacgggagttcggttggcgggacccagagttgcctgaagtgattcagatgttgcagcaccagttcccatcagtccagagcaatgcggccgcctatctccagcacctgtgtttcggcgataacaaaattaaggccgaaataagaaggcaagggggaattcaactgttagtcgatctgttggaccacagaatgactgaggtacacagatctgcctgtggcgcgttacggaatctggtttacggcaaagctaatgacgacaacaaaatcgctctgaagaattgcggtggaattccagccctggtccggcttctgaggaaaacaaccgatctggaaatccgagaactcgtaaccggcgttttgtggaatctgagctcctgcgacgctcttaagatgcccattatccaggacgctctggctgtcctgaccaacgcggttattattccccatagtgggtgggagaattcgcctctgcaagacgatcgaaagatccagctgcatagcagtcaggtgttgaggaatgctacaggctgtctccgcaatgtgtcctccgccggcgaagaagctaggaggaggatgcgggagtgcgacgggctgacagacgccctcctgtacgtgattcagagcgccttggggagcagcgaaattgatagtaaaaccgtggagaactgtgtgtgcatcctccggaacctttcctacaggctggcagccgaaaccagtcagggacagcacatgggtacggatgagttggacggtctcctgtgtggcgaggctaatggtaaagatgcggagtcatcaggctgttggggcaagaaaaagaaaaaaaagaagagccaggaccagtgggacggggtgggacctttgccagactgcgccgaacctccaaaagggatccagatgctgtggcacccctccatcgtgaaaccatatctgacactgctttccgagtgtagtaatcctgacaccctcgagggggcagctggtgctctccagaacctggctgcaggttcatggaagtggtctgtgtatataagggctgccgttcggaaagagaaaggcctcccgatccttgtggagctgctacggattgataatgacagagtagtctgcgccgttgccaccgctttgcggaacatggctctcgacgtacggaataaggaactgataggcaaatatgccatgagagatctcgtgcacagactcccaggaggaaataatagcaataatactgcctcaaaagcaatgagcgatgacaccgtaacagccgtctgttgcactcttcacgaggtaataacaaaaaacatggagaatgcaaaggccctgcgagatgcagggggcattgagaaactggttgggatctcaaagtccaaaggagataaacactctcctaaggtcgtgaaggccgccagccaggtgctgaattccatgtggcagtaccgagaccttagatccctgtataagaaggatggatggagtcagtatcatttcgttgcgtccagctccacgatcgagcgggatcgtcagcgcccttactcatcctcccgaacacctagtatttctcccgtacgcgtctccccaaacaaccggtccgcttccgcgccagcttcgccaagggagatgatcagcctgaaggaacggaagactgattacgagtgcactgggagcaacgccacctaccacggtgcaaaaggcgagcatacatcccgaaaggatgctatgaccgcccagaacacgggtatcagcacactgtataggaatagctatggtgctccagccgaggacatcaagcacaatcaagtcagtgcccagcccgtcccccaggagcccagtaggaaagactacgaaacctaccaacccttccagaattcaacccggaattacgacgagtccttcttcgaggaccaggtacatcatcggcctccagcctccgaatatacaatgcacctgggactcaaaagcactggaaattatgtggatttctactctgctgcaaggccttattccgagttaaactatgaaacctcccactatccggcgagtcctgactcctgggtgtag

SEQ ID NO: 111102 - DNA, 546 bp, synthetic construct
  misc_feature 1..546: note = Description of Artificial Sequence: Synthetic coding sequence
  source 1..546: mol_type = other DNA
atgagtagcatgtcgtctgccgaggaacaatttcaatggcagagccaagatggacagaaggatattgaagatgaattgaccaccgggcttgaactggtcgactcctgtatccgctccttgcaggagagcgggatcttggatccccaggactattcgaccggtgaaaggccaagtctgctgtctcaatcagccctccagctcaatagtaaaccagaaggttctttccagtatccagcatcctatcactctaaccagaccctggctctaggtgagactaccccctcgcaacttcctgctcgcgggacccaggctagagctaccggccagtctttctcccaagggacgacctcacgggccggccatttagctggacccgagcccgcacccccacctcccccacccccccgtgaaccgtttgcaccaagcttagggagtgcatttcatcttcctgacgcaccccctgcagccgcagccgcagcactatactatagttcttccacacttccagcacctccacgcggcgggtctccactcgctgcgccctag

SEQ ID NO: 111103 - DNA, 963 bp, synthetic construct
  misc_feature 1..963: note = Description of Artificial Sequence: Synthetic coding sequence
  source 1..963: mol_type = other DNA
atgacagtatggtgtgccgtggcgacagccctccggaacatggcactcgacgtcagaaataaggagttaattggaaagtacgcgatgagggacctggtgcaccgactacctggggggaataattccaacaatactgcatctaaggctatgtcagacgacacagttactgcggtgtgttgtacactgcacgaggtgattaccaagaacatggaaaacgcgaaagcgctgagggacgctggcggaattgagaaactagtcggcatcagtaaatccaagggggacaagcactcacctaaggtcgtgaaggccgctagccaggttctaaatagtatgtggcagtaccgggatctgcgtagtctctataagaaggatggttggagccagtatcacttcgttgcttccagcagcaccattgaaagagatcgtcagcgcccgtactcttcttctcgcactccttcgataagccctgtacgcgtgagccccaataatcggagcgcctctgctccggcctctccacgcgagatgatttctctgaaggagcgtaaaactgactacgaatgtactggctctaatgccacgtaccatggcgccaagggtgagcacactagccgcaaggatgcaatgacggctcagaataccggcattagtacgctatacagaaattcatacggggcaccggccgaggacatcaaacataatcaggtttctgctcagcctgtaccacaagagccgtcgagaaaagactatgagacatatcagcccttccagaactccactcgcaactacgatgagtccttcttcgaagatcaggtgcaccacagaccaccagcgagcgagtacacgatgcacttaggcctgaaatccactggaaattacgttgacttctattctgccgcacgaccatactctgaacttaattacgagacaagccactatcctgcctcccccgactcgtgggtctag

SEQ ID NO: 111104 - DNA, 246 bp, synthetic construct
  misc_feature 1..246: note = Description of Artificial Sequence: Synthetic coding sequence
  source 1..246: mol_type = other DNA
atgaaccgagagggtgctcccgggaagtccccagaagagatgtatatccagcaaaaggttcgtgtgctgttaatgcttagaaaaatggggagcaacttgaccgcttctgaggaggagttcctgaggacatatgcaggcgttgtcaattctcaattaagccagcttccgccccatagtattgatcagggtgctgaggacgtggtcatggcctttagtagatccgagacggaggacaggagacagtag

SEQ ID NO: 111105 - DNA, 246 bp, synthetic construct
  misc_feature 1..246: note = Description of Artificial Sequence: Synthetic coding sequence
  source 1..246: mol_type = other DNA
atgaacagggaaggcgcccctgggaagagtccagaagagatgtatatacaacagaaagtgagagtactccttatgctccgcaaaatggggtcaaacttaactgctagcgaggaagagtttctccggacgtatgcaggcgtcgttaactctcagttatcccagctccccccacattccattgaccagggcgccgaggacgtggtcatggcatttagccgctccgagacagaggataggcgacagtag

SEQ ID NO: 111106 - DNA, 246 bp, synthetic construct
  misc_feature 1..246: note = Description of Artificial Sequence: Synthetic coding sequence
  source 1..246: mol_type = other DNA
atgaatcgagaaggcgcacccgggaaaagccctgaagagatgtatattcagcagaaagtaagagtacttcttatgctgcgcaagatgggatccaacctgacagcatctgaggaagagttcctgcgaacctatgcaggcgtcgtgaattctcagctgtcgcagctgcccccacactctatcgaccagggcgcggaagatgtggtaatggcgttcagtcggtcagaaaccgaggacagacgacaatag

SEQ ID NO: 111107 - DNA, 246 bp, synthetic construct
  misc_feature 1..246: note = Description of Artificial Sequence: Synthetic coding sequence
  source 1..246: mol_type = other DNA
atgaaccgggagggggctccaggaaagagccccgaagaaatgtacatccaacagaaggtccgtgtcctactgatgctcaggaaaatgggttctaacttgacagcttcagaagaggaatttctgagaacctacgccggcgtcgtcaattctcagttaagtcagctccccccccatagcatcgaccagggcgcagaggatgtggttatggcattttcccggtcagagactgaggaccgtagacagtag

SEQ ID NO: 111108 - DNA, 246 bp, synthetic construct
  misc_feature 1..246: note = Description of Artificial Sequence: Synthetic coding sequence
  source 1..246: mol_type = other DNA
atgaatcgagaaggtgctccggggaagtccccggaggaaatgtacattcagcagaaggtgagagtattactcatgctacggaagatggggagcaacctcactgcttccgaagaggagttcctgcgcacttatgccggagtcgtgaactctcagctatcccagctgccgcctcactcaatcgaccagggggcggaggatgtggttatggcgtttagccggagcgagaccgaggaccggcggcaatag

SEQ ID NO: 111109 - DNA, 1692 bp, synthetic construct
  misc_feature 1..1692: note = Description of Artificial Sequence: Synthetic coding sequence
  source 1..1692: mol_type = other DNA
atggatgttggagaactgctctcttatcagcctaaccgcggaaccaagagacctcgggatgacgaggaagaggaacagaagatgcgtcggaaacagacaggcaccagagaaagaggtaggtatcgtgaggaagaaatgaccgtcgtggaggaagccgatgacgataaaaaaaggctgctgcagattatagatcgtgacggcgaggaggaggaggaggaagaggagccgctggacgagtctagtgttaaaaagatgatcctgacgtttgagaagaggagctataaaaatcaggagctgaggatcaagttcccggacaatccagagaagtttatggagtcagagctggacctcaatgacattatccaggagatgcacgtggtggccactatgcctgacttgtatcacctcctggtagaactcaatgcagtgcaatctcttctgggactgctagggcatgacaatacggatgtgtcgatcgcagtagtcgacctgctacaagaactcaccgatattgatacgctgcacgagagtgaggagggtgcagaggtgctgatcgatgcactggtggatgggcaggtcgtggcactccttgtgcagaacctggaaaggttagatgagagtgtcaaagaagaggccgacggagtgcacaataccttagccattgtcgagaatatggcagagttccggcccgaaatgtgtacagaaggggctcagcagggattgctccagtggctattgaaacgtctgaaagccaagatgccattcgatgcaaacaagctgtattgcagcgaagtcctggccatcctgctgcaggataatgacgaaaatcgggaactgctcggagaattagacggtattgatgtgcttttgcagcagctgtcagtttttaaacgccataacccctctaccgccgaggagcaggaaatgatggaaaacctcttcgactctttatgctcttgtctgatgctgtcatccaatagagaaagattcctgaaaggcgagggcttgcaactgatgaatctcatgttacgggaaaaaaagattagccggagcagtgccctgaaggtgctagatcacgcaatgataggacccgaggggacagataactgtcacaagtttgtggatattttgggcctgaggaccatctttcctctgtttatgaagagcccccgaaagattaagaaggtcggcacaacagagaaagagcacgaggaacatgtgtgttctatcttggcaagcctcctgcggaatctccgcggacagcagaggaccaggttactgaacaaatttacagaaaatgactctgagaaggtggatcgacttatggaactgcactttaagtatttgggagccatgcaggtcgccgataagaagatcgagggcgagaaacacgacatggtcagacgtggggaaattatcgacaacgacacagaagaggagttttatctccggcggctggatgcggggctctttgtccttcaacatatctgctatattatggccgagatctgcaacgccaatgtgccccagattcgtcagcgcgttcaccagattcttaatatgcgcgggtcatctatcaagatcgtccgccacattattaaagaatacgccgaaaacatcggagacgggaggtcccccgagttccgcgagaatgagcagaagagaattctgggactgctggagaatttctag

SEQ ID NO: 111110 - DNA, 1611 bp, synthetic construct
  misc_feature 1..1611: note = Description of Artificial Sequence: Synthetic coding sequence
  source 1..1611: mol_type = other DNA
atgcggcggaaacaaactggcaccagagagcgtggacgctatagggaggaagaaatgacagttgtcgaggaagcggacgacgataaaaaacgccttctgcaaattatcgacagggatggagaagaggaagaggaggaggaggagccactggacgagtccagcgtgaagaaaatgatacttacgttcgaaaagcgtagctataaaaaccaggagctacgcattaaatttcccgacaacccggagaaatttatggaatccgagttggatttaaatgatataatccaggaaatgcacgtcgtagcgacaatgcctgatctgtaccacttgttagtcgaactcaacgcagtgcagagcctgcttggactgctgggccacgacaacactgacgtttctatcgccgtggtcgatttgctgcaggagctgaccgacatcgatacactccatgagtctgaagaaggtgcagaggtactgattgacgctctggtggacgggcaggtcgtggcactgctggtgcagaacttggagaggcttgatgagagtgtgaaggaggaggcggatggcgtccataatacactcgccatcgtcgagaacatggccgaattccggcctgagatgtgtacggagggcgcccagcagggattactgcagtggttgctgaagcggctcaaagcaaagatgccttttgacgccaataagctgtattgttccgaggtgctcgctatcctgctgcaggacaacgatgagaacagggaattgcttggagagctggacggcatagacgtgctgctgcagcagctcagcgtcttcaagcgtcataatccttccactgcagaagagcaggaaatgatggagaatctgtttgacagtctctgctcttgcctcatgctgtcctctaatagagagcggtttctgaagggcgaaggccttcagcttatgaaccttatgcttagagaaaagaaaattagtcgatcatccgcactgaaggtgctagatcacgctatgatcggcccagaagggacagacaattgtcacaaattcgtcgatatcttagggctccgcaccatcttcccccttttcatgaagtccccgcggaagattaagaaggttggaacaaccgagaaagaacacgaggaacacgtttgttcgattcttgcttcactccttcgcaacctgcgcggccagcagcgcaccagactgttaaacaagtttaccgagaatgattctgaaaaggtggaccggctgatggaactacacttcaagtacctgggcgctatgcaagtagcagataaaaagatagagggggaaaagcacgatatggtgcgacggggcgaaatcatagacaacgacactgaggaggaattctatcttcgccggttggatgccgggctgtttgtcctgcaacacatttgttatattatggctgagatctgcaacgctaatgtgccccaaatcaggcaacgggtccatcaaattctgaacatgcggggcagttccatcaagatcgttagacacataatcaaggaatacgccgaaaacataggggacggaaggagccctgagtttcgggagaatgagcagaagcggattctagggctgctcgaaaatttttag

SEQ ID NO: 111111 - DNA, 501 bp, synthetic construct
  misc_feature 1..501: note = Description of Artificial Sequence: Synthetic coding sequence
  source 1..501: mol_type = other DNA
atgcgccgtaagcaaaccgggacacgcgaacggggtagataccgcgaagaggaaatgactgtggtcgaagaggccgacgatgacaaaaagaggctcctgcagattatcgatcgcgacggggaagaggaggaagaagaagaggagcccctggacgagtcctccgtgaaaaagatgatcctgacattcgagaaaaggtcgtacaagaaccaggaactgaggattaagtttcccgacaaccctgagaagttcatggagtccgaactcgacctcaacgacattatccaggagatgcacgtcgtggctacgatgcccgacttgtatcacctgctggtggaacttaatgctgtgcaatctctcctgggactgctgggccatgataacacagatgtgtccatcgccgtggtggatctcctgcaagagctgactgacatagacactttgcacgagtctgaagaaggcgccgaggtgttaatcgatgccttagtggacggacaagtatag

SEQ ID NO: 111112 - DNA, 1443 bp, synthetic construct
  misc_feature 1..1443: note = Description of Artificial Sequence: Synthetic coding sequence
  source 1..1443: mol_type = other DNA
atgatccgggccgccccacctccgctgtttttactgctgttacttctgctgctgctggtgtcctgggcctctcggggtgaagctgcccctgatcaggatgaaattcagagactcccaggccttgccaagcagccatccttccgtcagtatagcggctatctcaaaggctctgggtctaaacatctccactattggtttgtagaaagccaaaaggatccagaaaactctcccgtggtgctgtggctgaacggcggcccaggctgcagcagcctcgatggattattgacggaacacggacctttcctggtgcagcccgacggagttaccttggagtacaatccgtactcttggaatcttatcgccaacgtgctgtatttagagagtcccgcaggagtgggattttcctatagtgacgacaagttctacgcaacaaacgatacggaagtcgcccagtctaattttgaggccttgcaggactttttccggttatttcctgagtacaaaaacaacaagctatttttaacaggggagtcatatgcaggaatatatatccccactctggctgtccttgtaatgcaggacccatcaatgaacctgcagggtctagccgtagggaatgggttatccagttacgagcagaacgacaattctctggtgtactttgcatattaccacgggctcctagggaatcggctatggtccagcctccagacccactgttgctcccagaataagtgcaatttctacgataataaagacctggagtgcgtcacaaatctgcaggaagttgctagaatcgtaggtaatagcggcctcaatatctataacctgtatgcaccatgtgcaggaggagtgccgtctcacttcaggtacgagaaagatacggtggtggtgcaggatctgggcaatatcttcacccgcctgccactcaaacgcatgtggcaccaagccttactgcgcagcggcgacaaagtgcgaatggatcccccatgcacgaacacaacagcagccagtacatatttaaacaatccatacgtaagaaaggctctgaatatacctgaacagctgccacaatgggatatgtgcaatttcctggttaaccttcaatacagacggttatatcggagcatgaacagtcagtatctgaagcttttgtctagtcagaaataccagatcctcctctataacggagacgttgatatggcctgtaattttatgggtgatgagtggtttgtcgactccctgaaccaaaaaatggaagttcagaggaggccctggcttgtaaagtacggtgactccggagaacagatcgcagggttcgtcaaggagttttcgcatatcgcgttcctgacaatcaagggagctgggcacatggtacctaccgataagcctctcgccgcctttactatgttttccagattcctgaataagcagccttactag

SEQ ID NO: 111113 - DNA, 1446 bp, synthetic construct
  misc_feature 1..1446: note = Description of Artificial Sequence: Synthetic coding sequence
  source 1..1446: mol_type = other DNA
atgacgagcagtccgagagctccccccggcgagcaggggcgaggcggtgcagaaatgattcgtgctgcccctcctcctctctttttgctgttactgctgctcctcctgctcgtgtcatgggcctcacggggcgaggcagcacccgatcaggatgagatacagagacttcccggacttgccaagcaaccgagctttcggcaatactcagggtatcttaagggatctgggtctaagcacctgcactactggtttgtcgagtcacagaaagacccagagaacagcccagtggtcttgtggctgaacggtggacctggttgctcctctcttgacggcctgctcaccgaacacggtccctttctgatcgcaaacgtcctgtatctggagtcacccgccggcgtcggcttttcgtattcagatgataagttttacgccaccaatgatacagaggtggcccagtccaatttcgaagccctgcaggattttttccggctgtttcctgaatataaaaacaataagctattcctcacaggggagtcctacgccgggatctacatccccacactagccgtcctggtgatgcaggatccttccatgaaccttcaggggttagctgttgggaatgggttgagcagctacgagcaaaacgacaatagcctggtgtatttcgcttactaccacggccttctgggaaatcgcttgtggagcagtttgcagacacattgctgcagccagaataagtgtaacttttacgataacaaagatttggagtgcgttactaatctccaggaggttgctagaatagtcggaaactcaggactcaacatttataatctgtacgctccatgcgctgggggtgttccgtcccatttccgatacgagaaggacactgtggtggtgcaggacttggggaacatctttacccggctgcctctgaagcggatgtggcatcaggccctactacgcagtggggacaaggttaggatggatccaccctgcacaaacactacggcagcaagcacgtatctgaataacccatacgtgcgtaaggccctcaatatacccgagcaattgccacaatgggatatgtgtaattttcttgtgaatctgcagtatagacggctctatcgcagcatgaattcccagtatctgaagctgcttagctcccagaaataccaaatcctgctctataatggcgatgtcgatatggcctgtaacttcatgggggacgaatggtttgtagacagcttaaatcagaaaatggaggtgcagcgcaggccttggctcgtgaagtatggagattccggagagcagatcgcaggttttgtgaaggagtttagccatatagccttcctgaccatcaaaggagccggccacatggtgcctacagataaaccattagctgcttttacgatgttctcaagattcttgaataaacagccgtattag

SEQ ID NO: 111114 - DNA, 870 bp, synthetic construct
  misc_feature 1..870: note = Description of Artificial Sequence: Synthetic coding sequence
  source 1..870: mol_type = other DNA
atgattagggcagcgccacctccacttttcctcctacttcttttacttctactactggtttcatgggcaagcaggggcgaggccgcccctgaccaagacgaaatccagcgtctgccgggcctcgcaaagcagccatcttttaggcaatattccggctatctcaaaggctcaggatcaaagcacctgcattattggtttgtggagtctcagaaggatcctgaaaattccccagtcgtcctgtggcttaatggaggccccggttgttcatctctggatggcctgttgacggagcacggccccttcctggtgcagcctgacggggttactctggagtacaatccctacagctggaatctgattgcaaatgtgctgtacttggagagccctgctggagttggcttctcttattccgacgataagttttatgccacaaacgacaccgaagtcgctcaaagcaacttcgaagccttgcaggattttttcagacttttcccagagtataaaaataacaaattgttcctgactggcgagagttacgccgggatttacattcccacgctggccgttttagtcatgcaggatccctccatgaatcttcagggccttgccgtagggaatggtctatcaagttacgagcagaatgataattccctggtgtactttgcttactatcatgggctactgggcaatcgcctttggtcttccctccagactcattgttgcagccaaaataaatgtaatttttatgataataaggacttggagtgcgtgactaatcttcaagaggttgctcgaattgtgggcaattccggattgaacatctacaacttgtatgcaccatgtgccgggggcgtccctagccacttttag

SEQ ID NO: 111115 - DNA, 1497 bp, synthetic construct
  misc_feature 1..1497: note = Description of Artificial Sequence: Synthetic coding sequence
  source 1..1497: mol_type = other DNA
atgaccagctcaccacgtgccccacccggcgagcagggacgcggaggcgccgaaatgatacgcgccgcacccccacctctgttcctgctactgctcctgttgctgctgcttgtgtcttgggcttctaggggcgaggctgcacctgatcaggatgagatacaaaggttaccaggtctggcaaagcagcccagctttcgacagtacagtggctacctgaaaggaagcggcagcaagcacctgcactattggtttgtcgagtctcagaaggatcccgagaatagcccggtcgtactttggctcaatggcgggcctggatgttcgtccctcgatggcttgttgactgagcacggcccctttctggtgcagccagacggtgtcactctcgaatacaatccatacagctggaacctgattgctaacgtgctttatctggaaagtcctgccggagtaggttttagctactctgacgataagttctatgcgacgaacgacacagaggtggctcagagcaacttcgaggccttgcaagactttttccgcctgttccctgaatataaaaataataagctgttcttgaccggggagtcttatgccgggatttacatccctaccctggccgtcctagtgatgcaggatccctcaatgaacttacaaggcttagccgtgggcaatggattgtcctcatacgaacaaaatgacaattcactagtgtactttgcttactatcatgggctcctggggaatcgtctctggtcctctcttcaaacgcactgctgttcgcagaacaaatgtaatttctacgacaacaaggacttggaatgcgtcaccaacctgcaggaggtggcccgaattgtgggcaactccgggctcaacatttacaacctgtacgctccatgtgccgggggtgtccccagccattttaggtacgagaaagatactgtggttgtgcaggacctagggaacatattcacaagattgcccctcaagcgcatgtggcatcaggccctcttgcgatccggagacaaggtacggatggatcccccctgcaccaatacaactgcagcctcaacctatctaaacaatccatacgtgaggaaagctctaaacattccggagcagttgccccaatgggacatgtgcaactttctggtgaaccttcaatatcgcaggctctaccgctccatgaattcacagtacctaaagcttctgtcaagtcaaaaatatcagattctactgtacaacggcgacgttgatatggcctgcaacttcatgggcgacgagtggtttgtcgattcgctcaaccagaaaatggaggtgcaacgtcgtccatggctcgtgaagtatggcgacagcggtgaacagattgctggcttcgtgaaggaatttagtcacattgcatttttgacaattaagggggccggccacatggttcctaccgacaaacccttagccgccttcacaatgttctcacgctttctgaacaaacagccatattag

SEQ ID NO: 111116 - DNA, 1038 bp, synthetic construct
  misc_feature 1..1038: note = Description of Artificial Sequence: Synthetic coding sequence
  source 1..1038: mol_type = other DNA
atgataagggccgccccaccacccctattcctgcttctgttgctcctgttgctgctggtgagctgggcgtctaggggggaggccgcccctgatcaggacgagatccagcgtttgcccggcttggccaaacagccatcatttcgccagtacagcggatacctgaagggatcaggtagcaagcacttgcactactggttcgtggagagccagaaagatcctgagaacagtcctgttgtcttatggcttaatgggggccccggatgttcttctctggacggtctgctcaccgaacacgggcctttcctgatcgcaaacgttttgtatcttgagtctccagccggtgtgggcttctcctactctgacgacaaattttatgccactaatgatacagaggtggcacagtccaattttgaagcccttcaggatttcttccgactgttcccagagtacaagaacaacaagttgtttctgacaggcgagtcatacgctggcatatatatccctacactcgccgtcctggtaatgcaggacccatccatgaacctacagggtctggcagtgggaaacggcctaagcagctatgagcaaaatgacaactctcttgtgtatttcgcttactaccacgggctgctgggcaaccgattatggagctccttgcagacccactgctgttcccagaacaagtgcaacttttacgataataaagacctagaatgcgtgaccaacttgcaggaggtggctagaatcgtcggcaattcaggtctcaacatctacaacttgtacgctccttgcgccgggggggttccttcccattttcgatacgaaaaagatactgtcgtggttcaggatctaggcaatattttcactagacttcccttgaagaggatgtggcatcaggccttattgagatcaggtgacaaggttcggatggatcctccttgtacgaataccactgcagcaagcacctacctgaacaacccctacgtacgcaaagccctcaacattcccgagcagctgcctcagtgggacatgtgttag

SEQ ID NO: 111117 - DNA, 1149 bp, synthetic construct
  misc_feature 1..1149: note = Description of Artificial Sequence: Synthetic coding sequence
  source 1..1149: mol_type = other DNA
atgatgtttccaggcttgctggctccaccagcaggatatccatccctcctgcgtcccacgcctacattgacattacctcagagcttgcaaagcgccttctctgggcactccagcttcctggtcgaagatttgattagaatttcaagaccgccggcctatcttcccagatcggtgcctacagcctcgatgagtcctcccaggcagggagcacctaccgctctcaccgacacaggcgctagtgatctgggctcgcctggcccgggcagtaggcggggtggctctcctccgaccgccttttctcccgcctccgaaactacttttctgaagtttggagtgaatgccattctgagctcaggccctaggacggaaacatcccctgctcttttgcagtctgtccctccgaagacttttgcgttcccgtacttcgaggggtcattccagcccttcattcggagttcttattttcctgcttctagttctgtggtgcctatccctggaactttcagttggcctctcgccgcccgcggcaaacctaggagaggcatgctgcgacgtgcagtgttctctgacgtacaacggaaagctctggagaaaatgtttcaaaaacagaaatacattagcaagccagataggaaaaaattggcagcgaagctgggcctcaaagactcgcaagatactgcaagaaggacggaaccagcccccgattcaactccccgcccacgggcctctccaggggcacctgatctgaccagcgcttcaccctttttctctcccgccgggacatttcaggttaagatctggtttcaaaatcgcaggatgaagtggaggaattcaaaggagagggagctattatccagcggtgggtgtagggaacagactcttcctaccaagctaaacccccaccctgacctgagtgatgtgggtcagaagggccccggaaatgaagaagaagaagaaggtccaggctcaccctctcatcggctggcctatcacgccagctcggatccgcagcacctgcgggacccacgtttgcccggcccgctgcccccaagccccgcccatagctcaagtccaggcaagcctagcgacttcagcgatagcgaggaggaggaagaaggggaggaacaggaggagattactgtgagctag

SEQ ID NO: 111118 - DNA, 1341 bp, synthetic construct
  misc_feature 1..1341: note = Description of Artificial Sequence: Synthetic coding sequence
  source 1..1341: mol_type = other DNA
atgggcgccggaccaagttgtgatacccccgccaactgcacctacctggatctcctgggcacctgggtgttccaagtgggcagcagtggctcgcaacgggacgtgaattgctctgtgatgggaccacaggagaagaaagtggttgtttacctgcaaaagctcgataccgcctacgacgatctggggaactcagggcatttcactataatctataatcaaggatttgagatagtcctgaacgactacaagtggtttgcatttttcaagtacaaggaggagggctccaaagttacaacatactgtaacgaaacaatgaccggatgggttcacgacgtactggggcggaactgggcctgctttacaggcaagaaagtaggaacagcctccgagaacgtctacgtgaacatcgcccacctgaaaaatagccaggaaaagtattccaatcgcctatataaatatgatcacaactttgtcaaagcaattaatgcaattcaaaagtcctggacagccactacgtacatggagtacgaaacgcttaccctgggagatatgatcagacgatctggaggacactcacgcaagatccctcgtccaaaacccgccccacttacagccgaaatccagcaaaaaatcctccatttgcctacctcttgggactggaggaatgtacacggcattaacttcgtatctcccgtgagaaaccaggccagctgcggatcctgctacagctttgcaagtatgggaatgctagaggcccgaattcggatacttacgaataactcgcagactccaatcctgtcccctcaggaagttgtgagctgctctcagtatgcccagggttgtgagggcggctttccctatctcatcgctgggaaatatgcccaggattttggtctcgtggaggaagcttgcttcccttacactggaacggatagcccctgtaaaatgaaggaggactgcttccgttattactctagcgaatatcattacgtgggcggattctacggaggttgcaacgaggctctgatgaaactggagctggtccatcatggacctatggctgtggcttttgaagtctatgacgatttcttgcactataagaaaggcatctaccatcacacgggactcagagacccctttaatccctttgagcttacgaaccatgccgtgctgcttgtaggctacgggacggacagtgcatccggaatggattattggatcgttaagaattcttggggcactgggtggggagagaacgggtacttccgcatacggagaggtacagatgagtgcgcaattgaaagtatcgctgtcgccgcaactcctattccaaagttgtag

SEQ ID NO: 111119 - DNA, 414 bp, synthetic construct
  misc_feature 1..414: note = Description of Artificial Sequence: Synthetic coding sequence
  source 1..414: mol_type = other DNA
atgggcgcaggtccctctttgctgctcgccgccctgctgctcctcttgtcaggggacggcgctgtacgatgtgacacgcccgcgaattgcacatacctggatcttctgggaacgtgggtgttccaggttggcagcagcggctcccagcgtgacgtcaactgcagcgtaatgggtcctcaggagaaaaaagtggtcgtgtatttacagaagctggatacagcgtacgatgatttggggaactctggacactttacgataatctacaaccagggcttcgagatcgttctcaacgactacaagtggttcgcgttttttaaggatgtaaccgattttatcagccaccttttcatgcaattggggacagtcgggatctacgacctcccccacctgcgcaacaagctggttattaagtag

SEQ ID NO: 111120 - DNA, 426 bp, synthetic construct
  misc_feature 1..426: note = Description of Artificial Sequence: Synthetic coding sequence
  source 1..426: mol_type = other DNA
atgggcgcggggccctcactcctgctggccgccctgcttttgctgctgtcaggggacggcgcggtccggtgcgatacacccgctaattgcacctacttggatcttttgggtacttgggtgtttcaggtgggatcatctggcagccaaagagatgtgaactgctcggtcatgggcccccaggagaagaaagtggttgtttatctgcaaaagcttgacaccgcatatgatgatctgggtaactcaggacacttcaccataatctacaatcaaggattcgaaatcgttttgaacgattacaagtggttcgctttcttcaaagatgtgacagacttcatcagccacctgtttatgcagcttggcacagtgggcatctacgatctgccgcacctgagaaataagctggcaatgaaccgacgatgggggtag

SEQ ID NO: 111121 - DNA, 1191 bp, synthetic construct
  misc_feature 1..1191: note = Description of Artificial Sequence: Synthetic coding sequence
  source 1..1191: mol_type = other DNA
atgaaaacgctgctcctactgcttttagtactgctggaactcggcgaggcacagggaagcctgcatcgagtcccattacggcgtcacccaagcctcaaaaaaaaacttagggcacgttcacagctgtcagagttttggaaaagtcataacctggacatgatccaatttacggagtcttgctccatggaccagagtgcaaaggaacctctgatcaactacctggacatggaatacttcggaacaatttctattggctcgcctccccaaaacttcaccgtgatctttgacaccgggagctcgaatctttgggtaccaagcgtgtattgtacatctccagcttgcaaaacacacagtagatttcagccgagtcagtcttctacatactctcagcctggacagtccttcagtatccagtacggcactggatctctgtcagggatcatcggcgccgatcaggtctccgttgaaggactgaccgtggttggccagcaattcggcgaaagtgtgactgagccgggtcagaccttcgtggatgccgagtttgatggaattcttggccttggctaccccagcctagcggtggggggcgtaacaccagtttttgataatatgatggcccaaaacctcgttgacctccccatgttctcagtgtatatgagttctaacccagagggaggggccgggtccgagctcatatttggaggatatgatcatagccacttctccggctcattaaattgggtccctgtgacaaaacaagcttactggcaaatcgccctggataacatccaggtcggtggaactgtgatgttctgcagtgagggatgccaggccatagttgatacggggacctctttaatcaccgggccctcagataagataaagcagctgcagaacgcaattggagctgctcccgttgacggagaatatgccgtggaatgcgcaaatcttaatgtgatgccagatgtcaccttcaccataaacggcgtcccttacacactgagccctaccgcttacacactgctcgactttgtggacggaatgcagttctgctccagcgggtttcaagggctagacattcatccccccgcaggccctttatggatactgggcgacgtcttcatcaggcagttttattcggtcttcgacagaggaaataaccgggtcggtcttgcccctgctgtgccctag

SEQ ID NO: 111122 - DNA, 1092 bp, synthetic construct
  misc_feature 1..1092: note = Description of Artificial Sequence: Synthetic coding sequence
  source 1..1092: mol_type = other DNA
atgaagactctgctactgctcctcttggtgctgcttgaattgggagaggcacagggatctctgcaccgggtgccactgagaaggcacccttctttgaaaaaaaagctgagagctcggagccaactgtccgagttctggaaaagccataacctggatatgatccaattcacagaatcatgtagcatggaccaatctgcaaaggaacctctgataaactacctcgatatggaatactttggcacaatctctataggatcccccccccaaaatttcacagtcattttcgacaccggtagtagcaatttgtgggtgcctagcgtctattgcaccagtcccgcatgtaaaacccactctagatttcaaccgtcacagtcttctacgtatagtcagcccggtcaaagcttttccattcaatatggcacagggtccctgagcggaatcatcggtgcagaccaagtgagtgtggagggcctgaccgtggtcggacaacagtttggtgagtccgtgacagagcccggacagacctttgttgacgcggagtttgacgggatcctcggacttggctatccttctttggccgtcgggggggtgaccccagtgtttgacaacatgatggcacagaacctggtggacctccccatgttttcagtttatatgtccagcaatccggagggaggagccggcagcgagttaatcttcgggggctatgatcactctcacttctctggaagcctgaattgggtgcctgttacaaaacaggcctattggcagattgccctagataacatgctgtggtccgtgccaaccctcacaagctgtcgtatgtcaccttcacccttgaccgagtcccctattcctagcgcacagctgcctactccatattggacatcctggatggagtgtagttcagctgccgtcgcttttaaggacctgacatccactctgcagttaggccccagcggatcttgggggatgagctcctttgactctttcactcagagcctcacggttggcattacagtgtgggactggcctcagcagagcccaaaagagggtccctgtgtttgcgcttgtctgtcagatcgtccctag

SEQ ID NO: 111123 - DNA, 1206 bp, synthetic construct
  misc_feature 1..1206: note = Description of Artificial Sequence: Synthetic coding sequence
  source 1..1206: mol_type = other DNA
atgaaaacactcctgctgctgttgctggtactgctggaattgggagaggctcaaggatctttgcacagagtcccgcttcggcgacatcccagtttgaagaaaaagctgcgcgcacggagccaattatcggagttctggaagagccataatctggacatgattcagtttaccgaatcctgctccatggaccagagcgctaaagagccactcatcaactacctggatatggaatattttggaacaatctcaatcggaagtccaccccagaattttactgtgatctttgatacgggatcatccaacctttgggtacctagcgtgtactgtacgagtcctgcctgcaaaacccattcgcgcttccagccctctcagtcaagtacctactcgcagccagggcagtccttctctattcaatacggcactggatctctaagcggaatcattggggctgaccaagttagcgcgtttagctatcaggttgaagggttaaccgtcgtcgggcagcagttcggtgagagcgttacggagcctgggcagacatttgtggatgctgagttcgacggaatcttaggacttgggtacccgtccttagccgtgggcggcgtgactcctgtgttcgataatatgatggcccagaatctcgtggatttgcccatgttctctgtctacatgtcatccaatcccgagggtggagccggatctgaactgatcttcggcgggtacgaccacagccacttctctggatctctgaactgggtgcccgtgaccaagcaggcatactggcagatagcacttgataacattcaggtcggggggactgttatgttctgtagcgaaggttgtcaggcaattgtggatacgggcacctcactcattacagggcctagcgacaaaatcaagcaactgcagaatgcgattggggcagctcctgttgatggagagtacgcagtggaatgcgctaacctgaatgttatgcctgatgttacgttcaccatcaatggtgtgccgtatactctctcccccacagcatatactttgctcgatttcgttgatggtatgcagttttgctcctccggcttccagggtctggacattcatcctcctgctgggccgctgtggatcttgggagacgtgtttatacggcagttttacagcgtgtttgacagagggaacaatcgagtcggcttagcgcccgccgtaccctag

SEQ ID NO: 111124 - DNA, 867 bp, synthetic construct
  misc_feature 1..867: note = Description of Artificial Sequence: Synthetic coding sequence
  source 1..867: mol_type = other DNA
atggaatatttcggtaccatatccattggtagccccccacagaattttacggttattttcgataccggttctagtaacctttgggtgccttctgtgtactgtaccagccctgcatgcaaaactcactcccgtttccagccttctcagagctccacctatagtcagccaggacagtccttcagcattcaatatggcaccggctctttgagcggaatcattggagcagaccaggtgtccgtcgagggtttgacggtggtcggacagcagtttggtgagagtgttacagaacctgggcagacattcgtggacgcagagttcgacgggatcctgggactcggatatcctagcttggccgtcggaggtgtgacacccgtgttcgacaatatgatggcacaaaacctggtagatcttcccatgttcagtgtgtacatgagttcgaacccagagggaggcgctggctcggaactgatctttggagggtacgaccactcccacttcagcggatccctgaattgggtgccagtaaccaagcaggcgtattggcagatcgccctggacaatatgctctggtctgtgcccacactgacaagctgccggatgagccccagtcctctgacggaatctccaatcccctctgcacaactccccacgccatattggacttcctggatggaatgttcctctgcggctgtcgccttcaaggacctgacatccactctccagctggggccgagtgggtcatggggaatgtcatcatttgacagcttcacacagtccttgacagtgggtattactgtgtgggactggcctcagcagtccccaaaagaaggaccctgcgtctgcgcatgtctcagcgatcgcccttag

SEQ ID NO: 111125 - DNA, 1455 bp, synthetic construct
  misc_feature 1..1455: note = Description of Artificial Sequence: Synthetic coding sequence
  source 1..1455: mol_type = other DNA
atggctccctggctgcagctcctgtctctcctgggtctgttgccaggcgccgtcgcagcgccggcccaacctcgggccgccagcttccaggcatggggacctccttccccagaactgctggctcccacccgctttgccttggaaatgtttaatcgtgggcgggcggccgggacaagagcggtgttagggcttgtcaggggacgggttcgcagagctggacaaggcagcctgtactccctggaggctacattagaagagcctccctgtaacgaccctatggtgtgccggttgcctgtgagcaagaaaacattactgtgttcctttcaagtgctcgatgagctcgggcgccacgtgcttcttcgcaaggactgcggaccggtcgacacgaaggtccccggggccggtgaacctaaatcagcctttacccagggctcagccatgatttcttcattgagccagaaccatccagacaatcgaaacgaaacctttagctcagttattagtctgctcaacgaagatcctctcagtcaggatctaccggtaaagatggcatccatttttaagaactttgtgataacctacaaccgcacttacgaatccaaggaggaggctcggtggagactgtccgtctttgtaaataacatggtgagagcccagaagattcaggctctcgatcgcgggacggctcagtacggagtgaccaaattctccgacctcactgaggaggaatttcggaccatctatcttaacaccctgctgcgaaaggaacccggcaataaaatgaagcaagctaaaagcgtcggcgacctcgcccccccagagtgggattggcgtagtaaaggcgcagtgaccaaggtgaaagatcagggaatgtgcggctcatgctgggcattcagcgtcacggggaatgtcgagggtcagtggttcttaaaccagggaacactgctgtccttgagtgagcaggaactcttggattgcgataagatggataaagcgtgcatggggggactcccgtcaaatgcttatagcgccatcaagaatctaggaggtctggagaccgaggacgattactcataccaagggcatatgcaatcctgcaactttagcgctgaaaaagcaaaggtatatattaacgacagtgtggagttatcccagaacgaacagaagctcgcagcatggctcgcaaaaaggggccctatttctgtggctatcaatgcatttggaatgcagttttatagacatggcatctcccggccccttcgacccttatgcagcccatggctcattgaccacgccgttctgctggttggttatggaaacagatccgacgtgcccttttgggctattaaaaattcctggggcaccgattggggggagaaggggtattactacttgcacaggggaagtggggcatgtggcgtcaacaccatggcatcgtcagcagttgtagactag

SEQ ID NO: 111126 - DNA, 675 bp, synthetic construct
  misc_feature 1..675: note = Description of Artificial Sequence: Synthetic coding sequence
  source 1..675: mol_type = other DNA
atggcagctgccgtgccacagagagcctggactgttgaacagttgcggagtgagcaactccctaaaaaagacatcattaaatttttgcaggagcacggttccgacagctttctggcagagcataagctgctaggaaacatcaaaaacgtcgcaaagacagcaaataaagaccacctggtgacggcctacaatcacttattcgaaaccaaacgtttcaagggaaccgagtccatctccaaagtttccgagcaggtaaagaatgttaaattaaacgaggataagcccaaggagaccaagtccgaagagaccctcgacgaaggtcccccaaagtacaccaaatccgtcctgaagaagggcgacaagacaaactttcccaaaaagggtgacgtggtgcactgttggtacacagggacattacaggacggcacggtatttgacaccaacattcagacttctgctaaaaaaaagaaaaatgctaaacccctctcctttaaggttggcgtcgggaaggtaatacgcgggtgggacgaagccctcttgacaatgtcaaagggggagaaggcgagactggaaatcgaaccggaatgggcctacggaaaaaaaggtcaaccggacgctaagatccctcccaacgccaagctgacgttcgaagtcgaactggtcgacatcgactag

SEQ ID NO: 111127 - DNA, 801 bp, synthetic construct
  misc_feature 1..801: note = Description of Artificial Sequence: Synthetic coding sequence
  source 1..801: mol_type = other DNA
atgagctctgtctttggcaaacctcgtgccgggagtgggccccagtctgcaccattagaagtcaacctggccatactggggcgccgaggtgccggcaagtccgccttgacggtaaaatttctcaccaaaaggtttatctcagagtatgatccaaatcttgaagacacatacagtagcgaggagacagtcgaccaccagcccgtccatcttagagtgatggacacagccgatctggacacaccacggaactgcgagagatatctcaactgggcccacgctttcctggtggtgtacagcgtggattcaaggcaatccttcgacagcagctctagctacctcgagcttctggccctgcatgcaaaggagacccaacggagcattcccgcactgctgctaggaaacaagttggatatggcccaataccggcaggttaccaaagcagaaggggtcgcactggccgggagatttgggtgcttgttcttcgaggtgtcagcttgcctggactttgaacacgtccagcatgtgtttcacgaggccgtgcgggaggcccgtcgcgagcttgaaaaatccccactcacccgccccctgttcattagtgaggagagagctctcccacaccaggcaccgttaactgctaggcatggccttgcgagttgcacttttaacacccttagcacaatcaacctaaaggaaatgcctaccgtggcacaagctaaactggtgactgtcaaatccagtcgcgcccagtctaagaggaaagcccccacactcactttgctgaaagggttcaagatattctag

SEQ ID NO: 111128 - DNA, 972 bp, synthetic construct
  misc_feature 1..972: note = Description of Artificial Sequence: Synthetic coding sequence
  source 1..972: mol_type = other DNA
atgtgggccacacttccacttctctgcgcagcggagctgtgtgtgaactccctcgaaaagttccatttcaaaagctggatgagcaaacatcgtaaaacatactccacggaagaataccaccatagactccaaacttttgccagtaattggagaaaaatcaacgcccacaataatggtaatcatacttttaagatggctctcaatcaattctccgatatgagcttcgcggagatcaaacataagtatctgtggtctgaaccacaaaattgtagcgccaccaagagtaactatcttcggggaacaggcccctaccccccttccgtcgattggcggaagaaagggaatttcgtgagccccgtcaagaaccaaggggcttgcggaagctgttggaccttttcaactaccggcgcattagaaagcgctatcgccatcgccacaggcaaaatgctgtccctcgctgagcaacagcttgtcgactgtgctcaagactttaataaccacggttgtcaggggggtctgccatcacaggccttcgagtacatactgtataacaaagggataatgggtgaggatacgtatccctaccagggcaaggacgggtattgtaaattccagcctggaaaggctattggcttcgtgaaagatgttgccaatatcacaatctacgatgaggaggccatggtggaggccgttgcactttacaacccagtaagtttcgcgttcgaagtaacccaagatttcatgatgtaccgaacaggcatttattcttcgacctcatgccataaaacaccagacaaggtgaaccacgccgtactcgctgtcggttacggggagaagaacggtatcccgtattggatcgtgaagaactcttggggtcctcagtggggcatgaatgggtattttctgatagagagaggtaagaatatgtgtggattggcggcatgcgcatcctatcctatccccctggtatag

SEQ ID NO: 111129 - DNA, 621 bp, synthetic construct
  misc_feature 1..621: note = Description of Artificial Sequence: Synthetic coding sequence
  source 1..621: mol_type = other DNA
atgtgggccacactccctctgttatgcgccggcgcctggcttctgggcgtgccggtgtgtggtgcagcagagttgtgtgtgaattcccttgagaaattccacttcaaatcgtggatgagcaagcacagaaaaacctattcaactgaggagtatcaccatagacttcaaacctttgcctcaaactggcgaaagatcaatgcccataacaacgggaatcacacattcaaaatggcccttaatcaattttccgacatgtcttttgccgagatcaagcataaatacctatggtccgagccacagaactgttctgccaccaagtctaactacctgagaggcacgggaccctacccacccagtgttgactggaggaaaaagggcaactttgtcagccccgtcaagaatcaagtgtgcctcgctatctctattctgagtctacagaacggccacacacctcgccagtatactagaaaaaataattcaaagggcccacaaaaccaccacaagcatataccagcttcagtttctagtcgtcacctcagtccagggcgtccgtctttaccccagttacgcgagatttgtgagggtaaacgactaggggaggctagtgttaatctgggttag

SEQ ID NO: 111130 - DNA, 990 bp, synthetic construct
  misc_feature 1..990: note = Description of Artificial Sequence: Synthetic coding sequence
  source 1..990: mol_type = other DNA
atgtggggattaaaggtattgctgttacccgttgtgtcatttgccctgtatccggaagagattctagacacccattgggaactgtggaaaaaaacgcatcggaagcagtataataataaagtcgacgaaatctctagacgtctcatatgggagaaaaacctgaagtacatttctattcataatctcgaagcctctttgggcgtacatacttacgaattggctatgaatcacctgggagacatgacctccgaggaggttgtccagaagatgaccggactgaaggttcctctttcccattcccgttcaaacgatacactatatattccagaatgggaaggtagagcaccagattcagtggattatcggaagaagggttatgtgactcccgtaaagaatcagggccaatgcggcagctgttgggccttcagcagcgtgggggcacttgagggacagttaaagaagaagaccggcaaattgcttaacctgagcccccagaacctcgtcgattgtgtgtccgagaatgatgggtgcggagggggctacatgactaatgctttccagtacgttcagaaaaatcgaggaatcgactcagaagatgcatatccgtatgtcggtcaggaggaatcttgcatgtacaaccctactggaaaagcagcaaaatgtagaggctacagggagattcccgaggggaacgaaaaagcactgaagcgtgcagtggctcgggttgggccggtttccgtggccatagatgcttccttgacaagtttccagttttactctaagggagtatactacgatgaaagttgcaattcagacaatcttaaccatgctgtcctggcagtgggttacgggatccagaagggaaacaaacattggatcattaaaaacagttggggcgagaattggggcaataagggctacatcctgatggctcgcaacaagaataatgcatgtggaatagccaacctcgccagttttcccaaaatgtag

SEQ ID NO: 111131 - DNA, 777 bp, synthetic construct
  misc_feature 1..777: note = Description of Artificial Sequence: Synthetic coding sequence
  source 1..777: mol_type = other DNA
atgcataaggagaatgaggagatatacaacgttagcgagaatcggaaacattgtccaatctttccttgcccgctgttgacacggtctggaaaagtgcctgagttccggcatgagcgtgaagagcgccttgaagaaatgattcggcggcaaaatctggacggcaacctgtctttcgtcatgtgggggctgaaggtattactgctcccagttgtgagtttcgctctatatccggaagaaatcttggacactcactgggaactgtggaaaaaaactcacagaaagcagtataacaacaaagttgacgagatcagcaggcggctgatttgggaaaaaaatctaaaatatattagcatacataacttggaggcatcccttggcgtgcacacttacgaactcgccatgaaccacctgggcgatatgacttcggaggaagtagtccaaaagatgacaggattgaaggtccccctgtctcacagccggagcaacgatactttgtacattccggagtgggaaggccgggctcctgacagcgtggattaccggaaaaagggttatgtaacacctgtgaagaatcagggccagtgtggaagttgctgggccttttcatccgtgggagcactagaaggccagcttaaaaagaaaacaggcaagctgcttaacttgagtcctcagaacctggtcgattgcgtgtcagagaatgacgggtgcgggggaggctacatgactaatgcttttcagtacgtgcaaaagaatcgtgggatcgattccgaggactag

SEQ ID NO: 111132 - DNA, 1005 bp, synthetic construct
  misc_feature 1..1005: note = Description of Artificial Sequence: Synthetic coding sequence
  source 1..1005: mol_type = other DNA
atgaacctctctcttgttctggccgccttctgcctgggaatagcgagtgcagtcccaaagtttgaccagaacttagacactaagtggtatcaatggaaggccacccatagaaggctgtacggagccaacgaggaggggtggaggcgagcggtctgggaaaaaaatatgaaaatgatcgagctacacaacggagagtactctcagggaaaacacggttttactatggctatgaatgcttttggagacatgacaaatgaggagttccggcaaatgatgggctgctttagaaaccaaaaattccgcaaaggtaaggttttcagggagccgctgtttctagacctgcccaaaagcgtggactggcgcaagaaggggtacgtgacccctgtgaaaaaccaaaagcagtgcggaagttgttgggccttcagcgctacgggtgcattggaggggcagatgtttcgcaagactggcaagctagtttccctgtctgaacagaacttggtggactgttcccgaccacagggcaaccaggggtgcaacggtggattcatggcccgggcattccaatatgtgaaggagaatgggggcttagactcggaggagtcttacccttacgtggccgttgacgaaatttgtaagtacagacccgaaaactcggtcgccaacgacacaggtttcacagttgtggcccccggcaaggaaaaggcgctgatgaaggctgtcgcgacggttggtcccatttccgtggcgatggacgccggtcatagctcttttcagttttataagtccggcatctattttgagcccgactgctcatctaaaaacctggatcacggcgtacttgtggtgggctacgggtttgaaggcgcgaattctaacaattcgaagtactggctggtgaaaaactcttggggcccagagtggggctctaatggttatgttaagatcgccaaagacaagaataaccactgcgggatcgccacggccgcaagctatcccaatgtttag

SEQ ID NO: 111133 - DNA, 1005 bp, synthetic construct
  misc_feature 1..1005: note = Description of Artificial Sequence: Synthetic coding sequence
  source 1..1005: mol_type = other DNA
atgaatctctctcttgtgctcgccgctttctgtctggggatagcctccgcagtacctaaattcgatcagaatcttgatactaagtggtaccagtggaaagctacccaccgccgcttgtacggcgcgaacgaggaaggttggcggagggctgtatgggaaaagaacatgaagatgatcgagttgcataacggagagtactctcagggcaagcacgggtttaccatggctatgaacgctttcggcgatatgaccaacgaggaattccgccaaatgatgggttgtttcaggaatcaaaagtttcgtaaggggaaagtatttagagaacccctgttcctcgatcttccgaagtctgtggactggagaaaaaaaggatacgtcacacctgtcaagaatcagaagcagtgtggttcttgctgggcgttttctgcgactggagccctggagggtcaaatgtttagaaaaaccggcaagctcgtttctctgtccgagcagaaccttgtggattgcagccggccacagggcaaccagggctgtaacgggggtttcatggcccgggccttccagtacgtgaaagaaaacgggggcctagattccgaggaatcttatccatatgtagcagtggatgagatctgtaagtatcgacccgagaattccgtggccaatgataccggctttacagtggtggcaccaggcaaagagaaggctctcatgaaggctgttgcaactgttgggcccatcagcgtggcgatggacgccgggcactcaagctttcaattctataaatcaggcatttattttgagcctgattgctcttcaaaaaacctcgatcatggggtcttagtggtcggatacggattcgagggcgccaactcgaataactccaagtactggctggtgaagaactcctgggggcctgagtggggatctaacggctacgtgaagattgcaaaggacaagaacaatcattgcgggattgcgacagccgcttcctacccaaatgtgtag

SEQ ID NO: 111134 - DNA, 996 bp, synthetic construct
  misc_feature 1..996: note = Description of Artificial Sequence: Synthetic coding sequence
  source 1..996: mol_type = other DNA
atgaagaggctggtgtgtgtgctgctggtgtgctcttctgccgtggcacagctccataaagaccctacgctggatcaccactggcacctctggaagaagacctacggcaaacaatacaaagagaaaaatgaagaggcagtgaggcgactcatctgggaaaaaaatctgaagttcgttatgctgcacaacctggaacacagcatgggaatgcattcctatgacctgggaatgaatcacctgggcgacatgacgagcgaggaagtgatgagtctaatgtcgagcctgcgagtcccatctcagtggcaaaggaacataacctacaaaagcaacccaaatagaatcctgccggactcggtggattggcgggaaaaagggtgtgtgaccgaggtgaaataccaaggctcttgcggcgcttgctgggccttcagtgcggtaggagctctggaggcccagttgaagcttaaaaccggaaaacttgtgagcctgtctgcccagaatctggttgattgcagcaccgaaaagtacggcaataagggttgcaatggggggttcatgacgactgccttccaatacatcatcgataataaaggcatcgatagtgatgcctcttacccttataaggccatggaccagaagtgtcagtacgactccaaataccgggctgctacttgttccaaatacaccgaactgccatatggacgagaagacgtcctgaaagaagccgtcgcgaacaagggtccggtgtccgttggagtggatgctcgacaccctagcttcttcctctaccggagcggcgtgtattatgagccttcttgcacccagaatgtgaatcatggtgtgctggtggtgggctatggagaccttaacggtaaggagtattggctcgtcaaaaactcttggggccacaattttggcgaggaaggctacatcagaatggccagaaataagggaaaccattgcggtattgcatccttcccctcctatcccgaaatttag

SEQ ID NO: 111135 - DNA, 846 bp, synthetic construct
  misc_feature 1..846: note = Description of Artificial Sequence: Synthetic coding sequence
  source 1..846: mol_type = other DNA
atgaagcgtctcgtttgtgtgctgctagtgtgcagttcggctgtggcccagcttcataaagaccccacactggatcaccattggcacctgtggaaaaagacttatggcaaacagtataaggagaaaaacgaggaggcggtgcgccggctgatctgggaaaaaaacttgaaatttgtaatgttgcataatctcgaacactcaatgggaatgcattcctacgatctggggatgaaccacctcggcgatatgggtagctgtggggcctgttgggctttttcagctgtgggagccctagaagcacagctgaagctgaaaacgggtaaactggtttctctaagtgctcagaacttggtcgactgttccactgaaaaatacgggaataagggatgcaacggaggctttatgaccaccgcattccagtatatcatcgataacaagggcatcgacagcgatgctagctacccttacaaagccatggaccagaaatgccagtatgactccaagtatagggcggctacctgctctaagtacacagagctgccctatggaagggaagacgtcctgaaggaggcggttgctaacaaaggccccgtgagtgttggcgtggatgcgcgacacccttcattcttcctttacaggtctggggtctattatgagcccagctgtacccagaacgttaaccatggagtcttggtcgttggatacggcgatctgaatggcaaggagtactggttggtcaaaaattcatggggccataacttcggcgaagaggggtacattcgtatggccagaaacaaggggaatcattgtggtattgcctcgtttccatcctatcctgaaatatag

SEQ ID NO: 111136 - DNA, 1131 bp, synthetic construct
  misc_feature 1..1131: note = Description of Artificial Sequence: Synthetic coding sequence
  source 1..1131: mol_type = other DNA
atggccctgactgctcatccttcttgtctcctcgcactcctagtggccggcctcgcccagggcatccgcggacctctgagggcgcaagatctgggtcctcagcctttggagttgaaagaagcgttcaaactctttcagatccagtttaacaggagctacctgagtcccgaggagcatgcacaccggcttgatattttcgcacacaacctggcccaggctcaaagactccaagaggaagacctgggcacagcagagtttggggtcacgcctttcagcgatctgaccgaagaagaattcggtcagttatatggctatcgacgagctgccgggggcgtgccaagcatggggcgtgagatccgctcagaagaacctgaggaatcagtgccatttagctgcgattggcgaaaggttgcttccgctatatctccgatcaaggaccaaaagaattgtaattgctgctgggctatggcggctgccggaaacatcgaaactttatggagaatatccttttgggattttgtagatgtgtctgtccaagagctgctggactgtggcaggtgcggggacggatgtcacggtggtttcgtctgggatgcgtttatcacagtactgaataatagcggcttggcgtcagaaaaagactatcctttccagggtaaggttagggctcatcgatgtcaccccaagaaataccagaaagtggcatggatccaagatttcatcatgctgcagaacaacgagcaccgaatagcccagtatctcgcaacttacggccccattactgtaacgattaacatgaagccactgcagctctaccggaagggagttattaaagccactccaactacttgtgacccacagctggtggatcactctgtcttgctggtggggttcggcagcgttaagtcagaagagggaatttgggctgagaccgttagtagtcagagccaaccgcagcccccgcaccctaccccatactggattttaaagaattcttggggcgcccagtggggagagaagggttattttcggttgcatcgcggctccaatacttgcggcattaccaagtttccccttacagcgcgggttcagaagcctgacatgaagccacgggtctcttgcccgccttag

SEQ ID NO: 111137 - DNA, 2679 bp, synthetic construct
  misc_feature 1..2679: note = Description of Artificial Sequence: Synthetic coding sequence
  source 1..2679: mol_type = other DNA
atgacagatcctttttgtgttggagggcggcgactgccaggcagtagcaagagcggccccggcaaggacggtagtaggaaagaagttaggcttcccatgctgcacgaccctccgaaaatgggtatgcccgtcgtgcggggaggacagaccgtgcccggccaggcacccctgtgttttgatcctggatcgcccgcatctgataaaactgaaggtaaaaagaagggaagaccgaaagctgagaaccaagctctgagagacatcccgttgtcgctgatgaacgattggaaggacgagtttaaagcacacagtagggtgaaatgtccaaactctggatgttggcttgaatttccaagcatttacgggctcaaataccattaccagagatgtcagggtggtgctattagcgacagactagcattcccctgccccttttgcgaagctgcatttacctctaagacccaactcgagaagcaccgtatatggaatcatatggacagacctctcccagctagcaagcccggtccaatatcacgcccagttaccatctccagaccagtgggtgtgagtaaaccaatcggggtgtcgaagcccgtgacaattgggaaacctgtcggcgtgtcgaagcccattggtatctctaagcccgtgtctgtgggaaggcctatgccggttacaaaggccattcctgtgacaaggcccgtgccggttactaagccggtaacggtatcaagacccatgcccgttacaaaggcaatgcctgtgaccaaaccaatcacagtgactaaaagcgttcccgtgacaaaaccagttcccgtgactaaacctatcaccgtgaccaagctcgtgactgtgacaaagcccgtgcccgtcactaagcctgtgacggtatctcggcctatagtcgtgtccaagcctgtgacagtgagccggccgatagccatcagtagacatactcctccttgtaaaatggtgttgttgaccaggtctgaaaacaaggcccctcgcgcaacaggaagaaattcgggaaagaagcgcgcagccgattctttggacacgtgtcccatcccccccaagcaggcacggcctgagaacggcgaatacggtcccagctccatgggtcagtcttccgcctttcagctcagtgctgacacctcatccggcagtttgtccccaggctcaagacccagtggtggcatggaagctctcaaggcagcaggacccgccagtcctccagaggaggatccagaacggaccaagcatagaagaaaacagaagaccccgaagaaattcactggcgagcagccaagtatcagcgggacgttcggcctcaagggactggtaaaggccgaagataaggcacgagtgcaccggtctaaaaagcaggagggccctgggccagaggacgctcgaaagaaggtgcctgcagcccccataacggtgagcaaagaggcacctgcccctgtggcccatcccgctccaggtggtcctgaagaacagtggcaacgcgcgatccacgaacggggggaggctgtgtgtcccacctgtaacgtggtcactaggaaaaccctggtggggcttaagaagcatatggaagtgtgtcagaaattgcaggacgcccttaagtgtcagcactgcagaaagcagtttaaaagtaaggcaggactgaattatcacactatggccgagcactctgcaaaaccatccgacgccgaggcctccgagggaggggagcaggaggaaagggagaggctgcggaaggttctgaaacagatgggccggctacggtgtccccaggagggctgcggtgccgcattcagcagtctcatggggtaccagtaccatcaaaggcgttgcggaaagccgccatgtgaagttgactcaccctccttcccttgcacccattgtgggaaaacctataggagcaaggccggacacgactaccacgtgcggtcagagcacaccgctccacctccagaagagcccaccgacaagagcccggaggcagaagatccactaggggtggaacggaccccctctggcagggtgaggagaacaagtgctcaggtggccgtgttccacctccaggagatcgctgaggacgaactggcccgcgattggacaaaacgtagaatgaaggacgatttagtccctgaaacggcccggctgaattataccaggcctgggctccctacactcaatccgcaattgctggaggcatggaagaatgaagtgaaagagaaggggcatgtcaattgccctaatgattgctgcgaagctatttactctagcgtgtcaggtctgaaggcacacctggcctcttgttctaagggggcccacctggccggcaaataccggtgcctcctttgtcctaaggagttcagcagtgaaagcggggtgaaataccatattctgaagacgcacgctgaaaactggttccgcacatctgctgaccccccccccaaacaccggtcacaggacagcctcgtgccaaagaaggaaaaaaagaaaaatttggccggcgggaagaaacggggcaggaagcccaaggagagaacgcctgaggagccagtcgccaaactgccaccgcgccgtgacgattggccaccagggtgtcgtgataagggcgcacggggctccactggccgcaaggtgggagtgagcaaggcgccagaaaagtag

SEQ ID NO: 111138 - DNA, 2343 bp, synthetic construct
  misc_feature 1..2343: note = Description of Artificial Sequence: Synthetic coding sequence
  source 1..2343: mol_type = other DNA
atggatcagaactccgtccccgagaaggcacaaaacgaggctgacactaacaatgccgaccgcttcttccggagtcattcttcacctccacatcaccgaccgggccactcaagagcccttcatcactatgagctgcatcaccacggggtcccacaccagcgcggcgagagtcaccatcctcctgagttccaagacttccacgaccaggctctttccagtcatgtgcatcagtctcaccatcattcagaggcccggaatcacgggagagcccacgggcctacaggttttggcctggcgccttcacagggcgcggtcccatcacatagatcttatggggaggattatcatgatgagctccaaagagacgggcgcagacaccacgacggttctcaatacggcgggttccaccagcagagcgactcacactaccaccggggatctcaccacggacggccacagtatctgggcgaaaatctgagtcattactccagcggcgtgccccaccatggagaagcctcccaccacggaggaagttatcttccccacgggccgaacccatatagcgaaagcttccaccattcagaagccagtcatctaagtggtctgcagcacgatgagtctcagcatcatcaggtgccacatcgcggatggcctcatcatcaccaggtgcaccaccacggccggtctcgtcaccacgaagctcatcagcatgggaaatcgcctcatcacggagaaacaatctctccacattctagtgttggctcataccagcgaggcatctcagactaccactcagagtaccaccagggcgaccaccatcccagcgaataccatcacggagatcaccctcaccacacccaacatcactaccaccagacccaccggcatagagattaccatcagcaccaggaccaccacggtgcttatcacagttcgtatcttcacggagattatgtacagtccacttcccagctctccattccgcacacgagtaggtcactcattcatgacgctccaggccccgctgcctccagaactggcgtatttccctaccacgtcgcccacccccgtgggagtgcccattccatgactcgaagcagctcaactatccgatcccgcgtcactcaaatgagtaagaaggtgcatacccaagacatcagcacgaaacactctgaggactggggcaaggaggaaggacagtttcagaagagaaaaaccggccgcctccaaagaacgcgcaagaagggccatagtactaacctctttcaatggctgtgggaaaagctgacctttctgatacaggggttccgggaaatgatcagaaatcttacacagtcgcttgccttcgagacctttatcttcttcgtcgtctgcctaaacacagtcatgctggtggcgcaaaccttcgcggaagtcgaaattagaggggagtggtattttatggcacttgactctattttcttttgcatctacgttgtggaagctctgctgaaaattattgctctgggtttatcctacttttttgacttttggaataatctggatttcttcatcatggccatggccgtactggactttctactgatgcagacacattcattcgccatctatcatcagtctttgtttaggattctaaaagtgtttaagtctctgagagccctgcgcgcgatccgggtgctaagacggcttagcttcctgacatctgtgcaagaggtgaccggcactctgggtcagtctctgccctctatagccgcaatcctgatactcatgtttacttgcctattcctgtttagcgcggtactaagagccctctttcgcaagtctgaccccaagcggtttcagaacatatttaccacaatctttactctgtttacacttttaactctggatgactggagcctgatctacatggattcgagggcgcagggcgcgtggtacatcatccctatcctcgtgatatacatcataatccagtactttatcttcctgaacctagtgatcacggttttggtcgactcattccaaactgcgttattcaagggccttgagaaggccaaacaggagcgagccgcccgcattcaagagaagttactggaggattccctgacagagctcagagccgccgagcccaaagaagttgcgtcggaaggcactatgttaaagagacttatcgaaaagaagtttggcacaatgaccgaaaagcagcaggaacttttgttccactatttgcagctggtggcgtctgtggagcaagaacagcagaagtttaggtcccaggctgccgtgattgatgagatcgtcgatacgaccttcgaagccggtgaggaggacttccgtaattag

SEQ ID NO: 111139 - DNA, 1197 bp, synthetic construct
  misc_feature 1..1197: note = Description of Artificial Sequence: Synthetic coding sequence
  source 1..1197: mol_type = other DNA
atgagccagcatagacaccagcgccatagccgtgtcatctcatcatctcccgtggacaccacatctgtcgggttctgcccgacttttaaaaaattcaaacggaatgatgatgagtgccgggcctttgttaagagagtcataatgtccagattcttcaagatcataatgatatcaacagttacatccaacgcattttttatggccctgtggacatcttatgatatacggtatcgcctctttcgcctgttggagttttctgaaatcttttttgtttctatatgtacctcagaacttagtatgaaagtctacgttgacccaatcaattattggaagaatggctataacctgcttgatgttattatcatcattgtgatgtttcttccctatgccctgcgtcagcttatggggaagcagtttacctacctttacatagcggatggtatgcagtctttacggatcctgaagctgattggctattcacaggggatcagaactctgatcactgctgtgggtcagactgtttacaccgtcgccagcgtgctcctgttattatttctgttgatgtatatttttgctattttgggattctgtttgttcggatctcctgacaatggcgaccacgataactggggtaacctggcggcagcctttttcactctgttctcactggctaccgtcgacgggtggacagatcttcagaaacaactggacaatagggaatttgctctcagtagagcttttactatcattttcattctgctcgcttccttcatttttctaaacatgtttgttggagtgatgattatgcataccgaggactctatccgcaagtttgagcgagaactgatgctggaacagcaagagatgctcatgggcgaaaagcaagtgatcctccagaggcagcaggaggaaatttcccgactgatgcatattcaaaagaatgctgactgtacttccttttccgaactcgtggaaaatttcaaaaaaaccttgtcccacaccgacccaatggtattggatgattttggaactagcctgcccttcatcgacatctatttcagcacactggattatcaggatacaaccgtgcacaaacttcaggagctttactacgaaattgtacacgtactcagcttgatgcttgaagatctcccccaagaaaagccccagtcactcgagaaggtcgatgagaagtag

SEQ ID NO: 111140 - DNA, 1419 bp, synthetic construct
  misc_feature 1..1419: note = Description of Artificial Sequence: Synthetic coding sequence
  source 1..1419: mol_type = other DNA
atgcgcgataatgaaaaagcctggtggcagcagtggacaagccataccggccttgaaggttggggtggcacacaggaagatcgcatgggttttggaggcgctgtggccgccctgaggggccggccctcaccgctgcagtcgaccattcacgagagctacgggaggccagaagagcaagtgcttataaataggcaggaaataacaaataaggctgacgcctgggatatgcaagagttcattacccacatgtatataaagcaacttttacggcacccagccttccagcttcttttagccttgctcctggtcatcaacgcaatcacaatagctttacgcacaaacagctacctcgaccagaagcactacgagctattttcgacgatcgacgatattgtgttaacaatcctcttgtgtgaggttctgttgggctggctgaatggcttttggatcttttggaaggatgggtggaacatcttaaactttattatcgtttttatcctcttgctccggtttttcatcaacgagatcaacatccccagtatcaattataccctgagggcccttagactggtccatgtatgtatggccgtggagccattagcccggattatcagagtcatcctacaatctgtccccgatatggctaacattatggtgctgatcctgttcttcatgcttgtcttctcagtctttggcgtgacacttttcggcgcctttgtccccaagcacttccaaaacattcaggttgcattgtacacactatttatctgcattactcaggacggctgggtcgatatctactcggattttcagactgaaaaaagagagtatgccatggagatcgggggtgcaatctattttactatctttatcaccatcggtgccttcatcgggattaacctatttgtgattgtcgtaaccacaaacctcgagcaaatgatgaaggcaggcgaacaaggccagcaacaacggataacttttagcgaaacaggtgcagaggaggaggaagaaaacgatcagctgccacttgttcactgtgtggtggctagaagtgaaaaaagcggcctgctccaggagcctctagctggtgggcctcttagcaacctctctgaaaacacatgtgacaacttctgtttagtgctggaagccatacaggagaatctgcggcaatataaagagatccgcgatgagctgaatatgatagtggaagaggtgagggctattagattcaaccaggaacaggagagcgaggtcttgaataggagatcctctacatcaggctcccttgagactacatctagcaaagatattagacagatgagtcagcagcaagaccttttgtccgcgctggtctccatggagaaggtgcacgacagcagctcacagattttactcaagaaacacaagagttcccattag

SEQ ID NO: 111141 - DNA, 3351 bp, synthetic construct
  misc_feature 1..3351: note = Description of Artificial Sequence: Synthetic coding sequence
  source 1..3351: mol_type = other DNA
atggaatctcctctgatctacgtgtcggtgctcctacttaatatctttgagttttcttcgggcatcgtgtacaacaaggacgatactgagaagcggtttgcctgttctaacaagggattcccgcaggaaaacgagataattaaactctatctgttcctggaaaatttgaaaattcagtgctttttccagactgagaatgagatcgccagcaaggcaatgctctccgtgttcacaagcgggggtcttgcccctagtctagggattatgaatagcacttataatgggatctttcactttaatcttactctgtttagtgacagaattctgtggcttgtagatatcccaagggagaacataacacagtccacagacattgctgctgtcgaggagtggctggtgaggattaccttgcaccacggcttaaatatttatgctaccgagggaaccctcctcgacgtcatccgggagccaatccttcaatggaccccaggcgacgtaatcccagagtctgaaatcagcaagctgtatcctcacgttgttgatctgaaagttacaaaatgcccatgtgcaaacgatgtagccttgctcggcttcatcgtagataccattgtcgacggcgtgtatattggcataacctttggggggttctggcacgactacgataccacttggttcaatatgacacagaccatttactcccagttgcaagaagaatatgaagacttgtcattggtcgacatggtcctcactaaccactttttggtgatcttgaccagccttggcctctttgtatccgaagatttacgctacccttcccgtcattccctgagtttctcgcgagcagatttttgtgggttcgagcgcgttgattacgtaaaggggaagctctggtataacgagcggtgcttcgcaaaccgcgaacacttcgaagttgattatgtgactgtaacctttgaacgaaatcgcaccctctccgagtcatcctcgtgcttttatagccaggagccatttctagaatgggtcccctgtctgccacacatatttaaaggaatcaaaatctttcccaccgttcttaccttccttgtggaccaggagaggggaacaggagtttaccttttctacaacaaggtacgtaagacagccattgcgagcgtgtcaaccctacgtaacaatgagccaaattcccagagtaagtttcccatctttaggtttccatcctccttttctagccccgtagggatggtgtttcacccacgtagtcacttcctatacgcctacgggaaccagatctggctgtctgtggacggcggaaatacgtttcagctcatagccaacttccatgacgacattattaagaagaccttccactctttctacacctcggccatcacttttgtgagtcagcgcggcaaggtctattctactaaagcaggcatgggaagatacagtgcggtgggatctgtaacagagcggatctttaccctttactacgaccacctgggttttttacacaaactgacactgggtcgcttcgaggccagcggcccaccaaccgcatttggcaacagccggaacctgtttggacaaccccccgatatgggttttgagactgccttagctcctcaacatacctctttagatgaaatcatattcttcgcctatgtgcccgaaaatgaaccacaggagaccatttactctaagaaatttgggaacatacactatggcaaggtaatccactcaggaaaaacaggacgtgcctacatacggaaagtgctgcagcatacaactcccaaaggatttctgagcagtgttatagccgagatgaaggaaccgttcggtcttgaagaggtgaatgaatcctcatgcctgtcttccagtctgttgataaataaggcgggcaacgtgtataagctgacgctcgactcacaagtggtccaggcactcttcgaagatactgacatcgagaagactgtcgttctgccagggtatagctccttcttgatcaccagcatactcgacaacaagaatgcactggctatcgcgaccatgccggagagcgcaccgaacaacatgacctttctgaaaagtacttggttcctgtacaactttggccaaagaaatggacggacctggaagatctattcaaaaccctgcaattattggtttcagcatgacgattcgccctcactgaatatcgtgaagtacatcgacctcggaaacagttacgttctgaaagcgaaagtcatacggaacgccaagggtttcagaatgctggagatacctctccttacagtttttgtgggtaatccaaatctgcttgaagttactgctgaggttaccttcgatgacaccgactcctacgtgatcaccatctccgctgctagcaaggtgctgcaccaaggctccacttcactggccttcattatgtggtctgcttcaacagagtgctttgttaccaccatggtgccaaccctgaaatcttcctgttcatatttgaggagtatgcaccacataccctctaaattcatcccctttgaagattggatttcaggcgtgcataaggacagccagggcttcaacctgattaagactttgcctatcaattatcgacctccttccaacatggggattgccattcctctcacagacaatttttatcacgcggatcctagtaaacctatcccccggaatatgtttcatatgagtaagaaaacgggcaagttcaagcagtgtgcaaacgtgagcacccgggaggaatgcaattgcaccaaggatcagaaattttcccatgccgtggcctttagtgattgcagagaaaaggtgccaaggttcaagttccctattactcagtaccccgtctcacttgagatcattaatgaggacggtagggtaccactccagtccccctatctagtgacggtgactgaagtaaatatgcgtcacaactggaaacttaagcataccgttcccgagaacatcaaacgcatgaagcagcttgtggaacccatactgggcgcagcagtttacaacccttcaggactgaacctgagtataaagggcagtgaactgttccacttccgtgtcaccgtaattagcggagtgaccttttgcaatctgattgaggaattccaaatctacgtggacgaggcccctttaccattccccggtcatacacttattgcagttgctacggcggtagtcctcggtgggttgatcttcatcgcgttcatgttccagctacagggaattcatccctggaggaccttccagcgttggatccggcgaaaccaggaaaagtttagcagcatatcgttgagcgagttaattcatcgctccaagtcagaagagtag

SEQ ID NO: 111142 - DNA, 225 bp, synthetic construct
  misc_feature 1..225: note = Description of Artificial Sequence: Synthetic coding sequence
  source 1..225: mol_type = other DNA
atggagagcccactgatatatgtgtccgtgctgttgctgaacatctttgaattttcctccggtatcgtctataataaggatgacacggaaaagcgctttgcctgttctaacaaaggattccctcaggagaacgagattatcaagctttacctttttctagaaaatctgaaaatccagtgcttttttcagacggagaacgaaattgctagcaaagccatgctatag

SEQ ID NO: 111143 - DNA, 303 bp, synthetic construct
  misc_feature 1..303: note = Description of Artificial Sequence: Synthetic coding sequence
  source 1..303: mol_type = other DNA
atggaatcaccactcatttacgtctccgtattacttctgaacatcttcgagttttcaagtggcatagtctacaacaaggacgatacagagaagcgtttcgcctgctcaaataaggggttcccacaggagaacgagatcattaagctttacctctttctggagaacttgaaaatccagtgttttttccagactgaaaatgaaatagcctccaaagccatgttaagcgtgttcacaagcggaggcctcgcccctagcctgggcatcatgaacagcacctacaatgggatcttccacttcaattag

SEQ ID NO: 111144 - DNA, 225 bp, synthetic construct
  misc_feature 1..225: note = Description of Artificial Sequence: Synthetic coding sequence
  source 1..225: mol_type = other DNA
atggaatcacccctgatctatgtgagtgttctgctgctgaacatttttgaattctcgtccggcatcgtgtacaataaagatgacaccgagaagcgtttcgcttgcagcaataagggcttcccccaggaaaacgaaatcattaagctttacctttttctcgagaacttaaagattcagtgtttctttcagacagaaaatgagatcgcatcgaaggcaatgctttag

SEQ ID NO: 111145 - DNA, 795 bp, synthetic construct
  misc_feature 1..795: note = Description of Artificial Sequence: Synthetic coding sequence
  source 1..795: mol_type = other DNA
atgcacaatcctgacgggagtgcctctcctactgccgatccaggctcggagcttcagacactgggacaggcagcgagacggcctcccccgccccgagccggacacgatgcccctagacgaaccagaccttccgctcgaaaaccgctatcctgtttctcaaggaggccaatgcctacgagagaacctcctaagacacgcggttcgcgggggcatctccacacccatccaccaggccctggacctccattgcagggcttggccccccggggcctgaagacatcagcacctcgccctccatgccagccccagccaggaccccacaaggctaaaacgaaaaaaatagtgtttgaggatgaactattgagtcaggcgttactcggcgccaagaaacccatcggtgctattccaaaagggcataaacctaggccgcaccccgtgcctgactatgagctgaaataccctcctgtctcttctgaacgggagcggtcccgctacgtggctgtgtttcaggaccagtatggagaattcctcgagctgcaacatgaagtgggctgtgcgcaggcgaagctcagacaactggaagcactgctgtcgagcctgcctccaccccaaagccaaaaagaggcccaggtcgccgcaagggtgtggcgcgagtttgagatgaagcggatggacccaggatttttggataagcaggcccggtgtcattacctgaagggtaagctccggcaccttaagacacaaatccagaaatttgacgatcagggggattccgaggggagcgtctatttctag

SEQ ID NO: 111146 - DNA, 3480 bp, synthetic construct
  misc_feature 1..3480: note = Description of Artificial Sequence: Synthetic coding sequence
  source 1..3480: mol_type = other DNA
atgtgtggaccggccatgtttccagctggccctccgtggccacgggtccgagtggtgcaagttctgtgggcactcctcgccgtgctgctggctagctggcgcctgtgggcaatcaaggattttcaggagtgtacctggcaggtagtcctcaacgagttcaagagagtcggtgaatctggagtgtctgactctttcttcgaacaagaaccagtggatactgtgtctagtctatttcacatgctggtcgatagcccaattgacccctccgagaaatatctgggctttccctattaccttaaaataaattattcttgcgaagaaaaaccctctgaagatctggtgaggatgggccatctgaccggtttgaaacccctggtgctagtgaccttccagtccccagtcaacttttatcggtggaaaatcgaacagctccagatccagatggaggccgcccctttcaggagcaaagaaccttgtatggccgaggaagtttgctctatgtcctggtacactccaatgcccatcaagaaaggctccgtcgtaatgcgcgtcgacataagttcaaacgggttaggcacctttatcccggacaagcgcttccagatgaatatcaacggttttcttaaacgggatagggacaacaatattcaattcaccgtgggcgaggagcttttcaacctgatgccccagtacttcgtcggcgtgtctagcagacccctctggcacactgttgaccagtctccggtcctcatcctgggaggcattcctaacgaaaaatatgtccttatgacagatacaagcttcaaagacttctcattagttgagctatctatcgactcatgttgggtcggcagtttctattgccctcattcaggcttcacagccaccatctacgacacgattgcgaccgaaagcacgctgtttattagacagaatcagctggtgtactatttcactggcacatacactacactgtacgagaggaaccggggctccggaagctggatacgggtcctcgctagcgagtgtataaagaagctttgtccagtctactttcactccaatgggtctgagtatatcatggcactgaccaccggaaagcatgagggttacgtgcactttgggaccatccgcgatgggcaggtgtcctttgaaatgctacctcggcaatggtccgtgtgtgaacagatcggggtcaccacctgttccattatctggtccgaatacatagcaggagagtataccctgcttctgctggtggagagcggatacggaaacgcgtccaaacgctttcaggttgttagttacaatacagcttctgatgacctagagctcttgtaccacataccagaatttatcccggaggcacgggggctggagttcttgatgattcttggaaccgagagctacacgagcaccgccatggcaccaaagggcatcttctgcaacccatataacaatcttatatttatctggggtaacttcctgctgcagtcatctaataaagagaattttatatatctggccgacttcccgaaagaactttcaataaagtatatggcccggtcatttcgcggcgccgtggctattgtgacagaaaccgaggaaatctggtaccttctggagggctcttatcgggtgtatcagttgttcccctctaagggttggcaggtgcacatttctttgaagctcatgcagcagagctctctgtatgcttctaacgagaccatgctcacactcttctacgaggactccaaactctaccagttagtgtacctgatgaataatcagaaaggacaactggtgaaaaggttagtgcccgttgaacagctgcttatgtatcagcaacacacgagccactatgacctggaacgtaagggtgggtatttgatgctttctttcatagatttctgcccattctccgtgatgcgactacgttctctgcctagtcctcagcgatacaccaggcaggagagatacagggcccgaccaccacgagtcctcgaacggtccggattccataacgaaaattcactggcaatttaccagggattggtgtactacttgctgtggctgcacagtgtctacgataagccatacgctgacccagtccacgatcccacctggaggtggtgggccaataacaaacaggatcaagattactacttctttttagcatcgaactggagatccgctggtggtgtatctattgagatggactcctacgaaaaaatctacaatcttgagtctgcgtacgagctgcctgagagaatatttcttgataagggcactgagtacagctttgctatatttttgtcggctcagggacactcattccgcactcaaagtgagttggggaccgcctttcagctccacagtcaggtcgacgtcggcgtagtgctggccgatccagggtgtatcgaggccagcgtgaagcaggaggtgctgataaaccgcaatagcgtgttgtttagcatcaccctgaaggataagaagttatgctacgaccaggggatctcaggtcatcatctgatggagacatccatgacggtcaacgtggtgggctcaagtggactgtgttttcaggagacacatctgggaccacacatgcaaggtaatcttatggttccggtgttcattggatgccctcccgggaaacgacttgcatttgatatcacctacactctggagtacagccgtctgaaaaacaagcactatttcgactgcgttaatgtcaaccccgaaatgccatgctttctgtttagagacatattctacccgttctttctcatccaggacctggttaccggagacagcggctcctttcaggggagttacgtgctcctggttgtgggtggaggtcctactctggactccttgaaggattatagtgaggacgaaatttatcgctttaacagcccactagataaaacaaattctctgatttggacgacgagaactacacgtacaactaaagattctgctttccacatcatgtcacacgagtccccgggtatagagtggttgtgcctggaaaatgcaccctgctatgacaatgttccgcagggtattttcgcaccagagttcttctttaaggtcctcgttagcaataggggagtggacacaagtacctactgtaattatcagctcacatttttgctccacattcacggcctgcctctgagtcccaagcgagcgctgtttattatcatggtgtcagcttccgtttttgttggcctggtaatcttctatatcgctttctgtcttttgtggcctctggtcgtgaaaggatgcaccatgatcagatggaagattaacaatcttatcgctagcgagagctactacacttatgcaagcatctctggcatttctagtatgcctagcctgcggcactcccggatgggaagcatgttcagttctcgcatgactgaggatcgcgcggagccaaaggaagctgttgaaaggcagctgatgacttag

SEQ ID NO: 111147 - DNA, 3480 bp, synthetic construct
  misc_feature 1..3480: note = Description of Artificial Sequence: Synthetic coding sequence
  source 1..3480: mol_type = other DNA
atgtgtggcccggctatgtttcctgcagggcctccctggccccgagtccgcgttgtgcaagtcttgtgggccctgctcgcggtactcctggcctcttggaggctgtgggcaatcaaagattttcaagaatgtacatggcaggtcgtccttaacgaatttaagagagtaggtgaaagcggtgtgtctgactcatttttcgagcaggaaccagtcgacaccgttagctcattatttcacatgctggttgattcccctattgatccgtcggagaaatacctggggtttccatattatttaaagataaattacagctgtgaggagaaaccaagcgaagatcttgtccggatgggtcatctgaccggactcaagccactcgttctggtgacattccagtcaccagtcaacttttaccgttggaagattgagcagctgcaaatccagatggaggcagcccctttccgaagcaaagagccctgcatggctgaagaagtatgcagtatgtcatggtatactccaatgccaattaagaagggctccgtggtgatgcgtgtggacatctcatccaatggtttgggaacctttattccggacaagcgtttccagatgaatattaacggtttccttaagcgggacagagataataatatacagtttacagtgggggaagagctgtttaatctgatgccccagtacttcgttggagtttcttccagacctctgtggcacactgtagaccagtcgccagtgctgatactgggcggaatcccaaatgagaagtatgttcttatgacagatacgagcttcaaggacttcagcctggtggaactttcaattgattcgtgttgggttgggagtttttactgtccacacagcggattcaccgccacaatttacgacactatagcgacagaatccacgcttttcattcgccagaaccagctggtctattattttactgggacatataccaccttgtacgaacggaaccgggggagcgggtcctggatcagagtattggccagcgagtgcatcaagaagttatgcccagtgtacttccattcaaacggaagcgagtacattatggccctgaccaccgggaaacatgaaggatacgtgcactttggcacgatcagggatggtcaagtgagtttcgagatgctgccacggcaatggtcggtatgcgagcagatcggcgtgacaacgtgttctattatttggagtgaatacatagccggcgagtacacgttattgctcctggtagaatcaggctatggcaacgctagcaaacgatttcaggtggtgtcctataacaccgcctccgacgatctggagctgctctatcacattcctgaattcatccctgaggcacgtgggttggaattccttatgatattgggcaccgaatcctatacctccactgctatggcacccaaaggtatattttgtaacccctataacaatctgatctttatatgggggaactttctgctacagtcttctaacaaagagaattttatctacctggctgatttcccaaaagaactgtcaatcaaatatatggcaaggagctttcggggggctgtggctatagtcacggagaccgaggagatctggtatcttttagaaggctcctatcgggtttaccagctcttcccatctaagggatggcaggtgcacatctccttaaagctgatgcagcagagctccctctacgcctctaatgaaacaatgttgacactattttacgaagatagcaagctgtaccaactggtctacctgatgaacaatcagaaaggacagctggtgaaaagacttgttccggtagaacagctgctgatgtaccagcaacacacctcccactacgaccttgagaggaagggaggctacctgatgctctccttcattgatttctgccccttctcggtcatgcggctgcgtagcctcccgtccccgcagaggtatacacgacaggagaggtacagggccaggccccctcgcgtcttggaaagatccggatttcataacgagaacagcctggccatctatcagggcctcgtgtattatcttctttggcttcattcagtatacgacaagccatatgctgacccagtacatgatccaacctggagatggtgggccaacaacaaacaggaccaggactattatttctttctggcatctaactggaggtctgccgggggcgttagtatagagatggacagctacgaaaagatctacaaccttgagagtgcctatgagctccccgaacgcatcttcctggacaaaggaaccgaatacagtttcgccatcttccttagtgctcagggccattcctttcgcacccaatctgaacttggtacggcgttccagctgcactcccaagttgatgtcggggtggtgctggccgatccagggtgcatcgaggcaagcgttaagcaagaggttctcatcaatcgcaactctgtcctgtttagtattacactcaaagacaagaaactgtgctacgatcagggaataagcgggcatcacttgatggaaacaagcatgaccgttaatgttgtaggctcaagcggactctgtttccaagagactcacctgggcccgcatatgcagggtaatctgatggtgcccgtctttatcggctgtcctccggggaagagattggcatttgacatcacttacactctagaatatagtcggctcaaaaacaaacattatttcgactgtgtcaacgtaaatcctgagatgccgtgcttcctgttccgggatatcttttatccttttttcctgatccaggatctggtgacaggtgattcgggcagcttccagggcagctacgtgctgctcgtggttgggggtgggccaacattggacagtctgaaggactattcggaggacgaaatctatcgctttaactcacccttggataagaccaacagtctgatctggaccacaaggaccacccgcaccactaaggatagcgcttttcacattatgtcccatgaatcaccaggaatcgagtggctgtgcctggaaaacgcaccatgctatgacaacgtgccccagggcatctttgctcccgaattcttcttcaaggtcctggtgagcaaccgaggtgtcgacacctcaacatattgcaactaccagctcacgttcctgttgcatattcacggcctgccactttcaccaaaacgcgcgctgttcatcataatggtgtccgcctccgtcttcgtcggtctggtgatattctacatagcattctgtctgctctggcctctggtagtgaaggggtgcacgatgatacgctggaagatcaataatctcatcgccagcgagtcttactacacgtatgcttctatctctgggatttccagtatgccatctctgaggcactctcgaatgggcagcatgttctccagtcgtatgacggaggacagagctgaacctaaggaagctgttgagagacaactcatgacttag

SEQ ID NO: 111148 - DNA, 1983 bp, synthetic construct
  misc_feature 1..1983: note = Description of Artificial Sequence: Synthetic coding sequence
  source 1..1983: mol_type = other DNA
atggatgtgctggtgtcagaatgcagtgcccggctgcttcagcaggaggaagaaataaagtcgctaactgccgaaattgatcgccttaagaactgtggatgcctgggggccagcccaaatctggagcagctgcaggaggagaatctgaaattaaagtatagactgaatattttgcggaagagcctgcaggctgagcgcaacaagccgactaaaaatatgataaatatcatcagtcgtctccaggaggtatttggccacgcaatcaaggctgcatatcccgacttggaaaaccctccactgctagtgacaccttctcaacaggcaaaattcggcgactaccagtgtaactccgccatggggatatcccagatgctcaagaccaaagaacagaaggtgaacccccgggagatcgccgagaacatcacaaaacacctcccggataacgaatgcatcgaaaaagtggagatcgcaggtccaggctttattaacgtgcacctgcggaaggatttcgtgagcgagcaactgactagcctgctggtcaatggtgttcagctgccagccctgggtgaaaacaaaaaagtgatcgtagacttttcaagccccaacatcgctaaggagatgcacgttggccatctgaggagcacaataattggagagtcgatttcccggctgttcgagttcgctggctatgacgtgttaagattaaatcacgtgggggattgggggacacaatttgggatgctgattgcccacctacaggacaaatttccggattatctgacggtaagccctccgattggtgatcttcaagtattttacaaagagagcaaaaagaggttcgacactgaagaagagttcaagaaaagggcatatcagtgtgttgtgctgctgcagggcaagaaccccgatatcacaaaagcctggaagttaatatgcgatgtctcgaggcaggagctcaacaagatctatgatgcactggacgtctctctaatcgaacgaggggagtctttctatcaggatcgtatgaacgatattgtcaaagaatttgaggatagggggttcgtccaggtggatgatgggagaaaaatagtgttcgtgccgggctgctctataccattgactattgtcaagagcgatgggggatatacatacgatacgtcagacctcgccgcaataaaacagagactgtttgaagaaaaagcggacatgattatatatgtcgtagacaatggtcagtctgttcatttccagaccatcttcgccgccgcacagatgatcgggtggtatgatcctaaagtcacacgtgtcttccatgcaggtttcggagtagtgctgggcgaggataagaaaaaatttaaaacacggtcaggtgagactgttcggcttatggacttattgggtgagggtttaaagaggtctatggataagctcaaggaaaaagagcgggataaggtgctaaccgcagaagaacttaacgcagcacaaactagcgtcgcttatggatgcataaagtatgcagatctctcccacaataggttgaacgactacatattttcgttcgataaaatgcttgacgaccgcggcaataccgctgcttatcttctctatgcctttacacgtattcgaagcattgcgcgcttggcaaatatcgacgaagagatgcttcagaaagccgcgcgagagactaagatcctgcttgaccacgagaaggaatggaagctgggacgatgcatcctgcgattcccagagatactccagaagattttggacgacttgttcctgcatactctctgcgactatatctatgagctggccaccgccttcacggagttttacgactcctgttactgtgttgagaaagaccggcagactggtaagatccttaaagttaatatgtggagaatgctactgtgcgaggcggttgcagccgtcatggcaaagggatttgacatccttggaataaaacctgtgcaacgcatgtag

SEQ ID NO: 111149 - DNA, 465 bp, synthetic construct
  misc_feature 1..465: note = Description of Artificial Sequence: Synthetic coding sequence
  source 1..465: mol_type = other DNA
atgtgttggacaaggattagacccgggactcccagcagtccaggcgcacagagacctacaccatacgagtggatgaggcgcagtgtcgcggctggcggtgggggaggctccggtaagactagaaccaaagataaatatagggtggtctacactgatcaccagcggcttgaactcgagaaggagttccactatagcaggtatattactatccgacgcaaaagcgagctggcagcgaacctcggacttactgagcggcaagtgaaaatttggtttcagaataggagagcaaaagaaagaaaagtcaataagaaaaagcagcagcaacaacagcctccacagccacctatggcccatgatatcaccgcgacccccgccggcccctctctgggaggcctttgtcctagcaatacgtccttgttagctacttccagtcctatgcctgtcaaggaggaatttctcccttag

SEQ ID NO: 111150 - DNA, 183 bp, synthetic construct
  misc_feature 1..183: note = Description of Artificial Sequence: Synthetic coding sequence
  source 1..183: mol_type = other DNA
atgagaggcggacctaggggtcatcacgtttgtggactgtgcgccgggcaaggcttcgccagggtgccccggccctctcaggcctcccagccgcgtcctggtccggcttcgctctgcccctcaaatacaagtctgttagccacctcttctcctatgcccgtaaaagaggagtttttgccttag

SEQ ID NO: 111151 - DNA, 942 bp, synthetic construct
  misc_feature 1..942: note = Description of Artificial Sequence: Synthetic coding sequence
  source 1..942: mol_type = other DNA
atgtacgtgtcctacctgttggacaaggacgtgagtatgtatccaagctccgtaagacattcagggggcctgaatctggcccctcagaatttcgtctctcctccacagtaccctgattatgggggctatcacgtggcggccgccgccgctgcggctgctaacttggactctgcccagtcaccaggcccaagctggcccgcggcctatggggcacccttgcgggaggattggaatggatatgcaccaggcggcgctgctgccgcagccaacgccgtcgcacacggactgaatggagggagtcccgccgccgctatggggtacagctcgcctgccgactatcatccccatcaccacccacatcatcaccctcaccatcccgcagcagctccaagctgtgcatccggactgctgcagacgctgaatcctggtcctccaggcccagctgcaactgcggcagcagagcagctgtcccccggaggacagaggagaaatctgtgtgagtggatgaggaagccagcccaacagtctctcggcagtcaggtaaaaacacgtacaaaggacaagtatcgcgtagtttacacagaccaccagcgcctcgagctggaaaaagagttccactatagccgctatatcaccattcggcgcaaggcagaactggccgctactctgggcttgagcgaacggcaggtcaaaatctggttccagaacaggagagccaaagagcgcaaaataaacaagaagaagctgcagcaacagcaacaacagcagcctccccaaccccctccgcctcccccacaacccccccaacctcagcccggtcctctgagatcagtgcccgagcctctcagcccagttagcagcttgcaagctagtgtgccaggcagcgtcccaggcgtcctcggtcctaccggcggagtgctgaaccctactgttacacagtag

SEQ ID NO: 111152 - DNA, 855 bp, synthetic construct
  misc_feature 1..855: note = Description of Artificial Sequence: Synthetic coding sequence
  source 1..855: mol_type = other DNA
atgtacgggagctgtctcctggagaaggaggcaggcatgtatccgggaaccttaatgtctccaggcggcgacggaacggctggaaccgggggaactggtgggggtggctcaccaatgcctgccagtaacttcgcggccgcccctgccttttcccattacatggggtacccgcacatgccaagtatggacccacactggccctcactgggggtgtggggctcaccttattcgcccccacgcgaagattggtctgtgtaccctggcccatccagtaccatgggcaccgtacctgtgaatgatgtcacctcatctccagcggctttctgctccaccgattatagcaacctgggcccagtgggcgggggcacttctggatctagtctacctggccaggccgggggttccctggtgccgaccgacgccggggctgccaaggccagcagtccctcacgctccaggcattctccttatgcctggatgcggaagaccgttcaggtgacaggcaagactagaaccaaagaaaaatatcgcgtggtctacacagaccatcagaggcttgagctggagaaggagtttcattgcaaccgctatataactatacagaggaagtcagagcttgccgttaacctcggactctccgagcgccaggtcaagatctggtttcagaatcgtagggcaaaggagagaaagatgataaagaagaaaatcagtcagtttgagaattccggaggtagcgttcagtccgatagcgactctatctcacccggcgagctccccaatactttttttactaccccatcagccgttcgcgggttccagcctatagagattcagcaagtcattgtgagcgagtag

SEQ ID NO: 111153 - DNA, 456 bp, synthetic construct
  misc_feature 1..456: note = Description of Artificial Sequence: Synthetic coding sequence
  source 1..456: mol_type = other DNA
atgatggctgaagaacatacagacctcgaggcacagattgtcaaagatattcactgcaaagaaattgatctggtgaacagggacccgaagaatataaatgaagacattgttaaagtggacttcgaggatgtcattgccgagcccgtcggcacctacagttttgatggcgtctggaaggtgagctacaccaccttcaccgtgtcgaaatactggtgttatcggcttctgagcacgctcctcggcgttccactagctcttctgtggggattcctgttcgcctgcatctctttctgccacatatgggcggttgtgccttgtatcaagtcctacctgatcgaaattcagtgtatcagccatatttattctctctgcatccgaactttttgtaacccactattcgcagcgctgggccaggtgtgctccagtatcaaggttgtgttacgcaaagaagtgtag

SEQ ID NO: 111154 - DNA, 456 bp, synthetic construct
  misc_feature 1..456: note = Description of Artificial Sequence: Synthetic coding sequence
  source 1..456: mol_type = other DNA
atgatggccgaggaacataccgatctggaggcccagatcgttaaagacattcactgcaaggaaattgatttggtcaaccgggatcccaaaaatattaacgaggacattgtgaaagtggactttgaagatgtaatcgcagagccagtgggtacttacagcttcgacggtgtctggaaggtgtcgtataccacattcaccgtcagtaagtactggtgctatcgcttgttatccactctcctgggtgtgcccctggctctgctgtgggggtttctgttcgcctgcatcagtttttgtcacatctgggccgtggtgccctgtataaagtcttatctcattgagatacaatgtatttcacacatctattccctgtgtatacggacattctgtaacccactgttcgccgcactcggtcaagtgtgtagctccattaaggttgttctgcgtaaagaagtctag

SEQ ID NO: 111155 - DNA, 813 bp, synthetic construct
  misc_feature 1..813: note = Description of Artificial Sequence: Synthetic coding sequence
  source 1..813: mol_type = other DNA
atggcggaccatatgatggcaatgaatcacggtcgattccccgatggcacgaatgggctgcaccaccatcctgcccataggatgggcatgggccagtttccttccccacatcaccaccagcagcagcaacctcaacacgctttcaatgcgctcatgggagaacacatacattacggggctggaaacatgaacgcaacatctgggatacggcatgctatgggcccaggcaccgtcaatggggggcatcccccatcagcattggctcccgccgctaggttcaacaatagccagttcatgggccccccggttgcaagtcaaggagggtccctcccggcttcgatgcagctgcagaagctcaacaatcaatattttaatcaccacccatatcctcacaatcactatatgccagatctgcatccagccgctggtcaccaaatgaatggaacaaaccagcatttcagagattgcaatccaaagcactcaggaggaagctccacaccaggcggctctggtggatcttctactccaggcggctccggcagttcgagcggaggcggcgccggctcctcgaacagcgggggaggtagcggatcgggcaatatgccagcttcagttgcacatgtgcccgccgcgatgttaccccctaatgttatcgacacggatttcattgatgaagaggtccttatgagcctcgtaatagaaatgggtttggatagaataaaggagttgcccgaattgtggctgggccagaatgagttcgactttatgactgacttcgtttgtaaacagcagccaagtcgtgtgagttgctag

SEQ ID NO: 111156 - DNA, 645 bp, synthetic construct
  misc_feature 1..645: note = Description of Artificial Sequence: Synthetic coding sequence
  source 1..645: mol_type = other DNA
atggccgatcatatgatggctatgaatcacggccgtttccctgatggcactaatgggctccatcaccacccggcacacagaatggggatggggcagttcccgagcccccaccatcaccagcaacagcagcctcaacatgcattcaatgcactcatgggcgaacacatccattacggcgccgggaacatgaacgccacctccggtatcagacacgctatgggtcccgggactgtgaacgggggccatcctccttctgctttggcccccgctgcgcgtttcaataatagtcagtttatgggccctcccgtggcctcccagggagggtctctgcctgcttcaatgcagctgcaaaaattgaataatcagtattttaaccatcacccctaccctcacaaccactatatgcctgacttacaccccgccgccgggcaccagatgaacggcaccaatcaacattttagagattgcaacccaccaaatgtaatcgacactgacttcattgatgaagaggtgcttatgagtttggttatcgagatgggactggataggatcaaggaattgcccgagttgtggctcggacagaacgagtttgacttcatgaccgacttcgtttgtaagcagcagccaagtcgagtttcttgctag

SEQ ID NO: 111157 - DNA, 813 bp, synthetic construct
  misc_feature 1..813: note = Description of Artificial Sequence: Synthetic coding sequence
  source 1..813: mol_type = other DNA
atggccgaccatatgatggccatgaatcacggccgatttcccgacggaaccaatgggctgcatcatcatcccgcccatcggatgggaatggggcagttcccatcccctcaccaccaccaacagcagcagccacagcatgcctttaacgccctgatgggggaacatattcattacggtgctggtaatatgaacgctacaagtggcatccgccatgccatgggccctggcaccgtgaatggaggacatccgccctctgccctggctcctgcagcccggttcaacaattcacagtttatggggccacccgttgccagccaagggggcagcctcccagcctcaatgcaattgcagaaacttaataatcagtacttcaatcatcacccataccctcacaaccattacatgcctgatttacaccccgcagctggacatcaaatgaatggaactaaccaacatttccgcgattgcaacccaaaacacagcggagggtcaagtacaccgggggggtccgggggatcttcaactcctgggggcagcggaagttccagcggaggaggggctggatcttctaatagcggaggcggatccgggtcaggtaacatgccagcatcagtggcccacgttcccgcagccatgctcccgcccaatgtgattgacaccgattttatcgacgaggaagtgctgatgagtctcgttatcgagatgggcctggataggataaaggagttgcctgagctgtggttggggcagaacgagtttgattttatgaccgacttcgtgtgcaagcagcaaccgtctcgagtcagttgttag

SEQ ID NO: 111158 - DNA, 813 bp, synthetic construct
  misc_feature 1..813: note = Description of Artificial Sequence: Synthetic coding sequence
  source 1..813: mol_type = other DNA
atggcagatcacatgatggcaatgaaccacggcaggttccccgacggaacgaacggactacatcatcatccggctcaccgtatgggcatgggacagttcccaagcccccatcatcaccagcaacagcagccccagcacgcgtttaacgccctcatgggggaacacattcactatggagcaggcaacatgaacgctacttctgggatccgccatgctatgggtccgggtaccgtgaatggcggacacccacctagcgccctggccccggctgctcggttcaacaattctcagtttatggggcccccggtggccagtcaggggggatctttgcccgctagcatgcagctgcagaagctgaataaccagtatttcaaccaccatccctacccacacaaccattatatgcctgatctgcaccccgcagctggacaccagatgaacggtaccaaccagcactttagggattgcaatcctaagcactctgggggctcaagtaccccaggcggatcgggcggcagtagtacccctggcggctccgggtcgagctctggaggcggagccggtagctccaactctggcggaggctcaggctctgggaatatgcccgcaagcgtggcccacgtgcctgctgccatgttacctccgaatgttatagacacagactttatagacgaagaggtactgatgtccctcgtgattgagatgggactcgaccgcatcaaggagttacccgagctttggctgggccagaatgagtttgattttatgacagactttgtttgcaaacagcaaccttctagagtgtcttgctag

SEQ ID NO: 111159 - DNA, 1797 bp, synthetic construct
  misc_feature 1..1797: note = Description of Artificial Sequence: Synthetic coding sequence
  source 1..1797: mol_type = other DNA
atggaaaattcgagtgctgcttctgcctctagcgaggcgggctcatccaggtctcaggaaatcgaagaactggagagatttatcgacagttatgtgctcgagtaccaggttcaagggctgcttgcggacaaaactgaaggggatggcgaatccgagaggactcagtctcacatctctcaatggactgctgactgcagtgagcccctcgactcctcttgcagctttagccgtggccgtgcacctccgcaacagaatggcagtaaagacaattcccttgatatgcttggaaccgacatctgggctgctaatactttcgatagtttctctggagcaacctgggatcttcagcctgagaaactggacttcacacaattccacaggaaagtgcggcatactcccaagcaaccattgccccacatcgatagggaggggtgcgggaagggcaagctggaggatggcgatggaataaacctgaatgatatcgaaaaagtcctccccgcatggcaggggtaccaccctatgccccatgaggttgagatcgcgcacaccaaaaaactttttcggcgccggaggaacgatagacggagacagcagagaccaccgggtggcaataaaccccagcagcacggcgaccaccaacctgggtctgccaagcacaaccgcgatcaccagaagagttatcaaggaggttcagcgccacatccgtccggtcggcccacacatcacggatactctcaaaaccggagatggcatcatggaaatatgaagcatcctcccggcgataaaggggaggccggcgctcatcggaacgccaaagagaccatgacaattgagaatcccaaactcgaggacactgccggcgacacaggccattcctctctcgaggccccgcggagtcccgacactctggcaccagtggcctctgagcgattgccgccccagcaaagcggcggacccgaagtcgagacgaaaaggaaagatagcatcttacccgagagaataggcgagcgtccaaagatcactctcctgcagtcttctaaggaccgcttaagaagaaggctgaaggaaaaggatgaagtagccgtcgaaacgacaacgccacagcagaacaagatggataaactgatcgagatactcaatagcatgaggaacaatagctctgatgtggataccaaactgacgacattcatggaagaagcccagaacagtaccaactcagaggagatgcttggcgagatcgtaaggaccatttaccaaaaggccgtatcagataggagctttgctttcaccgcggccaaactctgtgacaagatggctctgtttatggttgaggggactaagtttcggtcactgctgctgaatatgttgcaaaaggatttcacagtgcgggaagagctacagcagcaggacgtggagcggtggctgggcttcattacttttctatgcgaagtgttcgggaccatgagatcttccactggagagccattccgcgttttggtgtgtccaatatatacatgtctccgggaacttttgcagagtcaagatgtcaaagaagatgcagttctgtgctgctcaatggaactccaatcgacagggcgattacttgaagaacaattgcctgagatgatgactgaactgcttgcgagtgccagggataagatgctatgtccctcggaatccatgctgacacgtagcttgttactcgaggtgattgagctgcatgcgaactcgtggaatcccctaaccccacccatcacgcagtactacaacaggaccatccagaaattgactgcatag

SEQ ID NO: 111160 - DNA, 1803 bp, synthetic construct
  misc_feature 1..1803: note = Description of Artificial Sequence: Synthetic coding sequence
  source 1..1803: mol_type = other DNA
atggagaattcaagcgcagcctctgcgtcctccgaagccggcagtagcaggagtcaagaaattgaggaactcgagcgcttcatcgattcttatgttctcgagtaccaggtgcaggggctcttagcggataaaacagagggagacggcgaatcggagcgcacacagtcccacatctcgcagtggacagccgattgttctgaacctctggactcttcatgctccttttcaagaggtagagcaccccctcagcagaatggcagtaaggacaactctctcgacatgctggggacagatatttgggccgcaaatacttttgactccttttcgggagctacttgggatctgcagcctgaaaaactggactttactcagtttcaccggaaggtccgccacacaccgaaacaacccctgcctcatattgacagagaaggctgcggcaaaggcaaactcgaggacggagatggcattaacttaaatgacattgaaaaggtgctgcctgcttggcagggctaccatcccatgccccatgaggtcgaaatcgcacacaccaaaaagctgttcagacgccgcagaaatgatagacgccggcaacagaggccacccgggggtaacaagccgcaacagcatggcgaccaccaacctggaagcgctaagcacaaccgggaccatcagaaatcttaccaaggtggttctgcaccacatccttctggtcggcctactcatcacggatacagtcagaaccgtcggtggcaccatggcaatatgaagcacccgcccggagacaagggcgaggcaggggcacaccgaaacgctaaggagactatgactatagagaaccctaagctagaagacacagcgggcgacacaggccactcatccctggaggctccgagatctcccgatacgctcgcccctgtagcctcagagaggctgccaccacagcaatcgggagggcctgaggtcgagaccaaacggaaggattctattctgccagagcgaattggtgagagaccaaagatcacattgctgcagtcctctaaggacagactgaggcggagacttaaagaaaaagtgcccgatgaggttgccgtcgagacaactacaccacagcagaataagatggataagcttatcgagatattaaacagtatgcgcaacaattctagtgatgttgacactaaactgaccacctttatggaagaagctcagaactcgaccaactctgaggaaatgctgggagagatcgtgcgcacgatctatcaaaaagctgtaagcgatagatcttttgcgttcacagcggcgaaattatgcgacaaaatggcccttttcatggtagagggtaccaagtttagatctttactcttgaacatgctgcagaaagattttactgtgagggaggagttgcagcagcaggatgttgaacggtggctgggcttcattacctttctctgtgaggtgttcggcaccatgcgtagctccaccggagagccctttagggtgctggtttgtccaatttatacttgtctgagagaattgctgcaatctcaggatgtcaaagaagacgcagtgctgtgctgctccatggagctgcagagcacggggcgtctcctggaggaacagctgcccgagatgatgactgaactgctggcctcagcccgcgacaaaatgttgtgtccttcagagagcatgctgacaagatccttattactcgaagtaatcgagctgcacgctaattcttggaacccgctcaccccgcccattactcaatattataatcgcacgatacaaaagttaactgcctag

SEQ ID NO: 111161 - DNA, 1947 bp, synthetic construct
  misc_feature 1..1947: note = Description of Artificial Sequence: Synthetic coding sequence
  source 1..1947: mol_type = other DNA
atgggtcggctgccctgtgggccattgcctggccaatggactgctgattgcagcgagcccttggactcgtcctgctccttttctcgcggaagggctccgccccagcaaaacgggtccaaggacaactctcttgatatgcttggtaccgatatctgggccgcaaatacgtttgatagtttttccggggcaacctgggacttgcaacccgaaaaattggattttacccagtttcatcgcaaggttcgccatacccctaaacagcctctcccgcatattgatagagagggctgcggtaaggggaaactggaagacggcgacgggattaacctgaacgacatagaaaaggtccttcctgcttggcagggctatcatccaatgccccatgaggttgagatagcgcacacaaaaaaactgtttagaaggagaagaaatgacaggaggcggcagcagcgaccccctggcggaaacaaaccccagcagcacggcgatcatcagcctgggagcgccaaacataatcgtgatcaccaaaaaagttaccagggcggatcggcaccccatcccagcggtagaccaacacaccatggatattctcagaataggagatggcatcacggcaacatgaagcatccgccaggcgataagggtgaagcaggagcgcatagaaacgccaaagagaccatgaccattgaaaaccccaagctcgaggacacagccggtgatactgggcattcctcccttgaagcaccccgtagccccgacactttggcccccgtggcctccgagcgtttaccccctcagcagagcggggggccagaggttgagaccaaacggaaagactccatattgccggaacggataggcgagagacccaagattactttgttgcagagttctaaagatcgactgagacgaagattgaaagaaaaggacgaagttgccgtggaaaccaccaccccccagcaaaacaagatggacaaattgatagaaattctgaacagtatgcgtaacaacagttcagacgtcgataccaagctgacaacttttatggaggaggctcagaattctacgaactctgaagagatgttgggggagatcgttagaacaatttaccagaaggccgtgtccgacagaagcttcgcattcactgcagccaaactgtgtgataagatggctctctttatggttgagggaaccaagttcaggtcactcctgcttaatatgctgcagaaggactttactgtgcgggaagaactgcagcaacaagatgtagaaagatggctcggcttcatcacttttctgtgcgaggtgttcgggacaatgcggtctagcaccggcgagccattcagggtactggtttgtcccatctacacctgtctgagggagctgctccaaagccaggacgttaaagaagacgccgtactgtgttgctcaatggaattgcaatccacaggccggctgctggaggaacaactgcccgaaatgatgaccgaactcttggcctctgcccgcgataaaatgctctgcccgagtgagagcatgttgactaggtctctgctcctcgaagtcattgaacttcacgccaacagctggaaccagggggcatggcaggcagctcacggccagctggggccctggtgcaccggccccgacggacaggccggcggccagggatggccctggagagagaaggagatgggccgtcgtgcagggcgggtgggaggccagtctggagctcgggcctgcaaactgacgcccattcgggaagcttgcttttttttcctggtcgccctggccctgcctttccttaccccagcaagtcctttgcccatccggccaataccccacggagcgctttgtgaggggtctcataggtgtgacagttccgagaccctcgcagcatctcacgcgggcgcacctctcggatcagagaggacctccgaaggatag

SEQ ID NO: 111162 - DNA, 1077 bp, synthetic construct
  misc_feature 1..1077: note = Description of Artificial Sequence: Synthetic coding sequence
  source 1..1077: mol_type = other DNA
atggagagcgccgacttctacgaggcagagccccggccgccaatgagctcccatcttcagtctccgccgcacgcccctagcagcgcagccttcgggttcccccgcggagccggaccggcacaacccccagccccccccgcagccccggagccactgggcggaatttgcgaacatgagacctccatcgacatctctgcttatatcgatccggctgcattcaacgacgaattcctggctgatttgttccagcactcccgacagcaggaaaaggccaaggcagcggtcgggccaactggcgggggaggtggtggcgactttgattacccgggggccccagccgggccaggtggtgccgtcatgcctggtggggcgcatgggcccccacctggctatgggtgcgctgccgctgggtacctggacgggcggctggaacccctgtacgagcgggtgggagcgcccgccctgcggcccttagtgattaagcaggagccccgtgaagaggacgaagctaaacaattggctctggcaggcctgttcccataccagccaccgccaccaccaccaccctctcacccccacccccacccgccacccgcacatctcgcagcccctcacttgcagttccagatcgcacattgtgggcagactacaatgcacctccagcctggtcatccaaccccaccccccacacctgttccgtccccccaccccgccccggccctcggcgctgcggggctgcccgggccaggctctgcgctgaagggtctgggcgcagcccatcccgatctgcgtgcatctggtggctccggcgcgggcaaagcaaagaagtcagtggacaagaactccaacgagtatcgagtccggcgcgaaaggaataacattgctgtgcgaaagtcaagggataaggccaaacagaggaatgttgagacccagcagaaagttctcgaacttacctcggacaatgatcggctgcgcaaacgggtcgaacagctctcacgggagctggacacactgcgcggtatctttagacaactgccagagtcatctctggtgaaggctatgggcaactgtgcgtag

SEQ ID NO: 111163 - DNA, 810 bp, synthetic construct
  misc_feature 1..810: note = Description of Artificial Sequence: Synthetic coding sequence
  source 1..810: mol_type = other DNA
atgagcgcagccctgttctccctggatggccccgccagaggagccccttggcccgctgagccagcccccttctacgagccaggacgggctggtaaaccaggccggggagccgagcctggggcactcggggagcccggtgccgcagctcccgcgatgtacgacgacgaatcagccattgacttcagtgcttatattgactccatggctgccgtccccactctggagttatgccatgatgagctgttcgcagatctctttaattcaaaccataaggcgggtggggccggcccattagagctgctgcccgggggccctgctaggcctctggggcctggacccgccgctcccagactgctgaagcgcgagcccgattggggcgacggtgatgcacccggctccctgctgccggctcaggtggcggcttgtgcccagactgtagtgagcctggcggccgccgggcagccaacgccccctactagcccggagcccccccgctcctctcctcgacagactcccgcaccgggacccgcgagagaaaagtcagctggaaagcgcgggcctgatagaggttcacctgagtacagacagcggcgtgaaagaaataacatcgccgtgcgaaaaagcagagacaaggccaaaagaagaaaccaggaaatgcagcagaagctcgttgagcttagcgccgaaaacgaaaagttgcaccagagagtggaacagctgacccgtgatctggccgggctccggcagttctttaaacaattgccctccccaccctttctcccggccgcaggaaccgcagactgtcgatag

SEQ ID NO: 111164 - DNA, 402 bp, synthetic construct
  misc_feature 1..402: note = Description of Artificial Sequence: Synthetic coding sequence
  source 1..402: mol_type = other DNA
atgagtgcggctctttttagtctggacgggccggccaggggagccccatggcctgcagagcctgcccccttttatgaacctggccgggctggcaaaccagggcggggcgccgaacctggagccctgggcgaacccggggcagcagcacccgccatgtatgatgacgaaagcgcaattgatttctcagcgtacatagattccatggctgccgttcctactctcgaactgtgtcacgatgagctgtttgccgaccttttcaattccaaccacaaggcgcgcgccccgtgggccagggcactaccattgcctgcctgttcaagtgcttctcccaccggggccacagctactcgcccagcccgctgctgcccccgccgctggccccgagcacaccggccctggtag

SEQ ID NO: 111165 - DNA, 1092 bp, synthetic construct
  misc_feature 1..1092: note = Description of Artificial Sequence: Synthetic coding sequence
  source 1..1092: mol_type = other DNA
atggcctctggagacttctgctcacctggtgaaggcatggagattcttcagcaagtttgtagtaaacagttacccccatgcaacctgagcaaggaagatttgctacagaacccatattttagtaaactgctcctcaatttgagtcaacatgtggatgagagcggtttgagtctcaccctcgcgaaggagcaagcccaggcctggaaggaagttagactccacaaaacaacctggttgaggagcgaaatcctacatcgcgtcattcaagagttattagttgattactacgtgaaaattcaggacacaaatgttacttccgaggacaagaagtttcatgaaactctggagcagcgccttcttgtgactgagctgatgcgcctcctgggcccgagccaggagagagaaatccctcctttactcggccttgagaaggcagacctcctggaactcatgcctctttctgaggatttcgtatggatgagggctcggctccaacaggaagtagaagagcagctgaaaaaaaagtgcttcacacttctgtgttactacgatccaaactcagatgcagactcagagaccgtgaaggccgcaaaagtgtggaagctggctgaggtgctggtgggagagcagcagcagtgccaggacgctaaatcacagcagaaagagcaaatgctgctgctagagaaaaaatccgcagcttattcccaagtgctccttcgttgtttgacattactccaaaggcttttgcaagaacatcgtcttaaaacacagtccgaattagaccgcatcaacgcccaataccttgaggtcaagtgcggggccatgatcttgaagctaaggatggaagagctcaagatcttgtccgatacgtacaccgttgagaaggtagaagtccaccggctgatcagggatcggcttgaaggagcaatacacctgcaggaacaggatatggagaattcccgccaggtgctgaactcttatgaggtgttgggagaggagtttgacaggctggtgaaggagtacactgtccttaaacaggcaacggaaaacaaacgctgggctcttcaggagttctccaaggtttacagatag

SEQ ID NO: 111166 - DNA, 1359 bp, synthetic construct
  misc_feature 1..1359: note = Description of Artificial Sequence: Synthetic coding sequence
  source 1..1359: mol_type = other DNA
atggggagctcccaatcagtcgaaatccccggtggtggaacagaaggctaccatgtcctgagggttcaggaaaacagtcccggacacagggcaggactcgagcccttctttgacttcatcgtgtccatcaatgggagtcggcttaataaggacaatgacacactgaaggacctgttaaaagcaaacgtggaaaagcccgtgaaaatgttgatttatagttctaaaaccctggagctcagggagactagtgtaaccccttcgaatctgtggggggggcaaggacttttgggtgtctccattcgattttgtagcttcgacggagccaatgaaaatgtttggcacgtgttagaggtggagagcaattctccggctgccctggctggcctccgcccccacagcgattatatcataggggccgacacagtgatgaacgagagcgaagaccttttcagccttatcgagacacacgaggcaaaacccctgaagttatatgtctataatactgacacggataattgccgtgaggttatcataacacccaattccgcttggggtggagagggctcactcggatgcgggattgggtatggttatcttcaccggatccctacacgcccttttgaggaaggtaagaagatttctctgccaggccagatggcaggcacaccaatcaccccactcaaagacggtttcaccgaggtgcagctctcttccgtaaaccccccttctctctctcctccggggacaaccggaattgagcagagtctcaccggactaagtatatccagcacgcctcccgcagtcagctcagtcttaagtactggcgttcctacagtccctttgctcccaccacaggttaaccagtctttaacgtcagtccctccaatgaaccctgcaacaactttacccggcctaatgcctctgcccgccggcctccctaatctgcctaatctcaatctgaatttgccagctcctcacataatgcctggtgtgggactccctgagctggtgaatcctggattgcctccgctgccctccatgcctccgcggaacctccctggaatcgcccctttaccccttccatcagagtttctcccatcgttcccgttagttcctgagagtagctctgcagcaagtagtggcgagctcctgtcttctttgcctcctacatccaatgcaccatcagatcccgccacaacgaccgcaaaggccgatgccgcatcttcccttacagtggacgtgacacctcccaccgcaaaggcccctactacagtcgaagaccgagtgggagattccacacctgtgagtgagaagcctgtgtcagcagcagtagatgcaaatgccagcgagtcgccctag

SEQ ID NO: 111167 - DNA, 2997 bp, synthetic construct
  misc_feature 1..2997: note = Description of Artificial Sequence: Synthetic coding sequence
  source 1..2997: mol_type = other DNA
atggccgccgtgaaggagcctttggagttccacgccaaaagaccgtggagaccagaggaggccgtggaggaccccgacgaggaagacgaggataatacctccgaagcggagaatggcttcagtttggaagaggtcctacgtctcggcggtacaaaacaagactacctcatgttagctaccttggacgaaaacgaggaagtgatagacggagggaagaaaggtgccatcgatgacttgcaacagggcgaactggaggcgtttatacaaaacctaaacctggccaagtacaccaaagcttctttagttgaggaagatgagcctgccgagaaagaaaactcatcaaagaaggaggtgaaaataccaaaaatcaacaacaaaaatactgccgaatcccagagaacttccgttaacaaggtgaagaacaaaaacagaccggagccacactctgacgagaatggtagcactacacccaaagtaaaaaaagacaagcagaacatctttgaattcttcgagcgacagactctgctcctccgcccgggggggaaatggtatgacctggagtacagtaatgaatattctctgaagccccagccacaggatgtggtatctaagtacaagacgctcgcccagaagctctatcagcacgaaattaacctcttcaaatcaaaaactaacagccagaagggcgcctcttcaacttggatgaaagcaattgtcagtagcggaacacttggcgaccggatggctgccatgatcttgctgattcaggacgacgcagtgcacacactacaattcgtggagacgctggtcaatttggtgaagaagaaagggtccaagcagcagtgcctcatggcactagatacattcaaggagctcctgattacggacctgttacccgacaaccgcaaactgcggatattctctcagagacctttcgacaaactcgaacagttatcttctggcaataaggactccagggacagaaggctgattctgtggtactttgaacaccagctgaaacatcttgtcgcagaatttgtgcaggtgctcgagaccctgtcccatgatacgctggttacaacaaagacccgcgcactgactgttgcccacgagctgttgtgcaataagcccgaagaagagaaagccctgcttgtgcaggttgtcaataagctcggggatccgcagaaccgtattgcaaccaaagcgagccatctgctggagacactgctctgtaaacaccctaacatgaagggtgtagtcagtggggaagtggaaaggttgctattcaggagtaacatttcctcgaaagcgcaatactatgccatctgttttctgaatcagatggccctgtcacatgaggagtctgagttggcaaacaagctgatcacggtgtacttttgtttctttcgcacctgtgtgaaaaagaaggacgtggaatccaagatgctgtctgctcttctgactggggtaaacagggcatatccttacagccaaacaggtgatgacaaggtcagagaacagatcgatactctcttcaaagtgctgcacattgtcaacttcaatacctcagtacaggctctcatgctgctcttccaggtgatgaacagtcagcaaactatcagtgacaggtactacacagctctgtatcgaaagatgctcgatcctggattgatgacctgctctaaacaagccatgtttctgaacctagtatacaaatcccttaaggcagacatcgtacttcggcgggtgaaagcttttgtgaaaaggttgttacaggtcacctgtcagcaaatgccaccgtttatctgcggcgcactatacctggtttcagaaattttgaaggccaagcctggactgagatcccagctcgacgaccaccccgagagtgacgatgaggagaactttatcgacgccaatgacgatgaggacatggagaagttcacagatgccgacaaggagaccgagatagttaagaagctggagactgaggagacggtgccagagacagatgttgaaacaaagaagccagaggtcgctagttgggtacatttcgacaatctgaagggcggaaaacaactgaacaaatatgatccgtttagcagaaaccctctgttttgtggggcggagaacacaagcctctgggagttgaagaagctgagcgtgcacttccacccgagtgtggccctattcgctaaaacaatactccagggcaattacatccaatactccggtgaccctcttcaggattttacgcttatgcggtttctggataggtttgtgtatcggaatcccaagccacataagggaaaagagaacaccgacagcgtggtcatgcagccgaaaaggaaacactttataaaggacatccggcatttacctgtcaactctaaagagtttctggcgaaagaggaaagtcaaatcccagtcgatgaagtgttcttccatcgctactataaaaaagtggcagtcaaggaaaagcaaaaacgggacgctgacgaggaatctatcgaggatgtggatgatgaggagttcgaggagcttatagacactttcgaagacgataactgcttcagcagcggaaaagatgacatggactttgctgggaacgtgaaaaagagaactaagggagctaaggacaataccctcgacgaagacagcgagggtagtgatgacgaattggggaacctggacgatgacgaggtttctctgggctcgatggatgacgaggagtttgccgaggttgacgaagatggagggacattcatggacgtgctagatgacgagtccgagtcagtaccggagttagaagtccattccaaagtgagcactaagaaaagtaagagaaagggaaccgatgacttcgacttcgcaggatccttccagggtccaaggaaaaaaaaaaggaatctcaatgactcaagtctcttcgtatctgcagaagagttcggccatctgctggatgaaaacatgggttccaagttcgacaatattgcttag

SEQ ID NO: 111168 - DNA, 1992 bp, synthetic construct
  misc_feature 1..1992: note = Description of Artificial Sequence: Synthetic coding sequence
  source 1..1992: mol_type = other DNA
atggctgctaccgagatctcagtgctgtccgaacagtttactaagatcaaagaactcgagcttatgccagagaaggggctcaaggaggaagaaaaggacggggtctgcagggaaaaggatcaccggtcacccagtgaactggaagcagaacggacgtcaggcgctttccaggattctgtgcttgaggaggaggttgaactggtgctggctcctagcgaggagtccgaaaaatatatcctgactcttcagacagtgcatttcaccagtgaagcagtggaactccaggacatgagcttactcagcatacagcagcaggaaggggtgcaggttgtcgtgcaacaacctggccctggcctgctgtggctcgaggaaggccccaggcagagcctgcaacagtgtgttgcgatctcaatccagcaagaattgtatagcccgcaagaaatggaagtcctccagttccacgcgctggaggaaaacgttatggtagcaagtgaagattcgaagctggctgtgagccttgccgagacaacgggtctaatcaagcttgaggaggaacaggagaagaatcagctactggctgagagaaccaaggagcagttgttttttgtcgaaacgatgtctggagatgagcgatccgatgaaattgtcctaacagttagcaattcgaatgtcgaagagcaagaggaccagcctactgctggtcaggctgatgccgaaaaagctaaatccacgaaaaatcagcgaaagacaaaaggagcaaaaggcacatttcattgcgatgtctgcatgtttacctcttccagaatgagcagcttcaaccggcatatgaagacccatacctctgaaaaaccacacctttgtcacctgtgtctgaagactttcaggaccgtcacattgctaagaaaccatgtgaatactcacaccggaacgaggccatacaaatgcaacgattgcaatatggcttttgtgacatccggggagctggtccggcaccggagatacaagcatacccacgaaaaacccttcaagtgttccatgtgtaagtacgccagcgtggaagccagcaagctgaagcgccatgtgagaagtcacaccggagaaagaccattccaatgctgtcagtgctcctatgcatctcgggacacgtataaactgaaacggcacatgaggacacatagcggagaaaaaccttatgaatgccacatctgtcacactagatttacacaaagcggaactatgaaaattcacatcctgcagaaacatggggaaaatgtgccgaaatatcagtgtcctcactgcgccacaatcattgccaggaagtctgatcttagggtgcacatgcgtaacttacacgcttacagtgctgcagaacttaagtgtcgctattgcagcgcagtgttccacgagcgctatgccttgatccagcatcaaaaaacacataagaacgaaaaacgatttaaatgcaagcactgcagctacgcgtgtaaacaggagaggcatatgactgcccacattcgaactcatacaggggagaagccattcacatgtctcagttgtaataaatgtttcaggcaaaaacagttgttgaacgcccactttcggaaatatcacgatgccaatttcatcccgaccgtctacaaatgctcaaagtgtggcaaaggattctccaggtggataaacctacatcgccattctgaaaaatgcggctcaggtgaggccaagagcgccgcatctgggaagggtcgaaggacgaggaaacgcaaacagaccattttgaaggaggccactaaggggcaaaaagaagccgcgaagggatggaaggaagcggcaaacggcgacgaggcggcggccgaggaggctagcacaacgaagggggaacagttccccggcgagatgttccccgtggcctgcagagagactactgcgcgagtgaaagaggaggttgatgaaggcgtgacatgtgaaatgttgcttaacacaatggacaagtag

SEQ ID NO: 111169 - DNA, 1992 bp, synthetic construct
  misc_feature 1..1992: note = Description of Artificial Sequence: Synthetic coding sequence
  source 1..1992: mol_type = other DNA
atggccgccacagagatctcggtgttgtcagaacaatttacaaagataaaagagttggagcttatgccggagaaggggctaaaggaggaggaaaaggatggcgtatgcagggaaaaggaccataggagtcctagcgagctcgaggccgagaggactagcggggcatttcaggactccgtgcttgaagaagaagtggaactggtgctcgccccctccgaggagagtgagaaatatattctgacactgcagactgtccactttacctccgaagcagtcgagttgcaggatatgtcattgctgagtatccagcagcaggagggcgtacaggtggttgtgcagcaaccaggtcctgggctgctctggcttgaggaaggtcctcgccaatcactgcaacaatgcgtggccataagcatccagcaagagctatactcccctcaggaaatggaagtcctccagttccatgctctggaagagaatgttatggtggcaagcgaggattcaaaactcgctgtttcgctggccgagactaccggcctaatcaagttagaggaggagcaggagaagaaccaacttctagcagaacgaacaaaagagcagcttttcttcgtggaaacaatgagtggtgacgagcgttccgatgaaatcgtgttgaccgtgtccaacagtaacgtggaggagcaggaggaccagcccaccgcagggcaggcagacgctgaaaaggcgaaaagcacaaagaatcagagaaagactaagggggcaaaggggacgttccattgcgatgtctgcatgtttacaagcagtcggatgagctcattcaatcgacacatgaaaacccatacgtctgagaagccgcacctgtgccatctgtgcctgaaaaccttccggaccgtgaccctgctccggaaccatgtcaatacacatactgggacaagaccatataagtgcaatgattgtaacatggcatttgtgacgtccggcgagctggtgcggcatcgcaggtataaacacacacacgaaaaaccattcaaatgtagtatgtgtaaatatgccagtgtagaggcatcgaagttgaaaagacacgtccggtctcataccggcgaaaggcctttccagtgttgccagtgtagctacgcctcccgggacacatacaagctgaaaaggcacatgcgaacgcacagtggggagaagccctatgaatgtcacatctgtcacacaaggttcactcaatcagggaccatgaaaatccacattctgcagaaacatggcgaaaatgtgccgaaatatcagtgccctcactgtgccactattatcgcaagaaagtccgatctgcgcgtgcatatgcggaatctccacgcatactccgcagccgagctcaagtgtagatactgctccgccgtgttccatgagcgctatgcacttatccaacaccagaagacacacaaaaacgagaagagattcaaatgcaagcactgttcttacgcctgtaagcaggagcgccatatgactgcacatatacgaacccacacaggcgaaaaacctttcacgtgcctgagctgtaacaagtgtttccgtcagaaacagctgctgaacgcccacttccggaaataccacgatgccaatttcattccaaccgtgtataaatgttctaagtgcgggaaggggtttagtcgatggattaacctccatcgacacagcgaaaaatgtggttctggcgaagctaaatcagccgcatccgggaaggggcgtcgcaccaggaagaggaaacagaccattctgaaagaggctaccaaagggcagaaagaagccgctaagggatggaaggaggcggccaacggagatgaggctgcagctgaggaagcctccaccacaaaaggcgaacagttcccaggcgaaatgttccccgtagcttgtcgggagaccacagctagagtgaaagaggaggtggatgagggcgtcacttgcgaaatgctgctgaacacaatggacaagtag

SEQ ID NO: 111170 - DNA, 1284 bp, synthetic construct
  misc_feature 1..1284: note = Description of Artificial Sequence: Synthetic coding sequence
  source 1..1284: mol_type = other DNA
atggctgccaccgaaataagtgtgctcagcgaacagttcacaaagatcaaggagctggagctcatgcccgaaaagggcttgaaagaggaggagaaggacggagtgtgcagagaaaaggatcacagatctccatctgagctggaggccgagcgcacatctggagcattccaggacagcgtgctggaagaggaggtggagctggtgctggccccttcagaagagagcgagaagtacatcctgacactccaaaccgtccattttacttccgaggctgtggagttgcaggatatgtcacttctcagtatacagcagcaagagggggtacaggtcgtggtacagcaaccaggtcccggtttattgtggcttgaagagggaccccggcaaagtctgcagcagtgcgtggcaatctcaattcagcaggagttgtattctccacaagagatggaggtgttgcagtttcacgctctcgaagaaaatgtcatggtggctagcgaggacagcaagctagccgtatcactggcagagacaacaggactgattaagctggaggaggagcaggagaaaaaccagctgctcgcagagcgaactaaagagcagctattctttgtggagaccatgagcggcgacgaacggagcgacgaaattgtgctgacagtgtcaaattctaacgtggaagaacaggaagaccagccgacggccggccaggcggacgctgagaaggctaaatcaactaaaaaccaaaggaaaacaaagggagctaagggcaccttccattgcgacgtttgtatgttcaccagttcccgcatgtcctctttcaacaggcatatgaaaacacacaccagcgagaagccgcacctgtgtcacttatgtttaaaaaccttcagaactgtgacacttctacgaaatcacgttaacacacatacagggacccggccttacaagtgcaatgattgtaatatggcattcgtgacaagcggcgagctggttcggcacagacggtacaagcatactcacgagaagccttttaaatgcagcatgtgtaaatacgccagcgttgaagccagcaagctgaaacgccacgtccgaagtcatacaggtgaaagacctttccagtgctgtcagtgcagttatgccagccgggatacatataaactgaaacgccatatgcgcacccactcagaggctacttccaagcgtagcctgcaggaaattccccgctgcaagttccatcccgactgtctccagatgctccaagtgtggcagcgcctatttcctctggattag

SEQ ID NO: 111171 - DNA, 1722 bp, synthetic construct
  misc_feature 1..1722: note = Description of Artificial Sequence: Synthetic coding sequence
  source 1..1722: mol_type = other DNA
atggcagctactgagatttctgttttatctgagcagtttacgaagatcaaggaactggaattgatgcctgagaaagggctaaaagaggaagaaaaagacggcgtgtgtagggagaaagaccatcgtagcccttccgagctcgaagcggagaggactagcggcgccttccaggattctgtgctggaggaggaggttgagctcgtactagctccatctgaagagtctgagaagtacatcctcactcttcagacagtccacttcacctcggaggccgtagagttgcaggatatgagcttgctgagcattcagcaacaggaaggggtgcaggtggtcgtgcagcagcctgggccaggcctgctctggttggaggaagggcccagacagtcactccagcagtgtgtcgccatcagtatccaacaagaactgtactcccctcaggagatggaagtcctgcaattccatgctctcgaggagaatgtgatggtcgcctccgaggactccaagctggccgtgtcattggccgaaacgaccggcctgatcaaactggaagaggagcaggagaaaaatcagctgctggccgagcggactaaggagcaactgttcttcgtcgagactatgtcgggcgatgagaggagcgatgaaatagtgctgacagtttccaacagcaatgttgaggagcaggaagatcagcctacagccggacaggccgatgccgagaaagctaaaagtactaaaaaccaacgaaagactaaaggagctaagggcaccttccactgtgatgtgtgtatgttcacctcatcaaggatgagcagcttcaacagacacatgaagacacacacttcggaaaaacctcacctgtgccacttgtgtctcaaaacatttaggacagttacactgcttcgaaaccatgtgaatactcacacaggtactcgtccgtataaatgtaacgattgtaatatggcatttgtgacatccggcgagctcgtccgacaccgccgctacaaacacacccacgagaagccttttaagtgtagtatgtgcaagtacgcttctgtcgaggctagcaaactgaagcgccatgtaagatctcacaccggggagcgacccttccagtgttgtcagtgctcttatgcttcccgcgacacatataagctgaaacggcatatgcggacccatagtggcgaaaagccctacgagtgtcatatctgccatacccggtttacacaatctgggacaatgaaaattcacatcttacagaagcatggcgagaacgtgcctaaataccagtgcccacactgcgcaactataatcgcccgcaagagtgatcttagagtgcacatgcgcaatctgcacgcctacagcgctgcagagctcaaatgccgctactgttccgctgtgttccacgagcgctacgccctgatccagcaccagaagacacacaagaatgaaaagcgctttaagtgtaaacactgcagctacgcatgcaagcaggaaaggcatatgacagcccatatcaggacacacacgggcgagaaaccattcacttgtctctcttgcaacaaatgctttcggcaaaaacaacttttgaatgcgcattttagaaaatatcacgacgcaaatttcattccaaccgtgtataagtgctcgaaatgcggaaagggattttcaaggtggatcacttctaaatggagcgggctgaagcctcagacttttatcacatag

SEQ ID NO: 111172 - DNA, 2103 bp, synthetic construct
  misc_feature 1..2103: note = Description of Artificial Sequence: Synthetic coding sequence
  source 1..2103: mol_type = other DNA
atggccgctacggaaatctcagtgttgagcgaacaattcaccaagatcaaggaactcgaattaatgccagaaaagggactcaaagaagaagaaaaggatggcgtgtgtcgcgaaaaggaccatagatctccgtccgagctggaagcggagcgaactagcggcgcattccaggattcagtactggaagaagaagtggagctcgtcctcgccccaagcgaggaatcagagaagtacattctgacactccagacagtccacttcacaagtgaggccgtggagctccaggacatgagtctgttgagcattcagcagcaggaaggagttcaagttgtagtccagcaacccggcccagggttgctgtggcttgaggaagggccaaggcaatctctgcagcaatgcgttgcaataagcattcagcaggagctgtacagtccgcaggagatggaagtgctgcagtttcacgccctggaagaaaacgtcatggtggcatccgaggactctaaattggctgtatctctcgcggaaacaacgggtctgatcaagctggaagaggagcaggagaagaaccaacttctggctgagcgtacgaaagagcagctgttctttgtggaaaccatgtcaggtgatgagagaagtgatgaaatcgttctcaccgttagtaattctaacgtcgaggagcaagaggaccagccgacagcaggacaggcggacgctgagaaggcgaaatccacaaaaaatcagagaaagacgaagggcgctaagggcacattccattgtgatgtgtgcatgtttaccagtagcagaatgtcctctttcaaccgccacatgaagacccacacatcagaaaaaccacacctctgccatctgtgtctaaagacatttagaacggtgactcttttgcgaaatcacgtgaatactcacacgggaactcgtccatacaagtgtaacgattgcaatatggcttttgtgacttctggtgagctggtgcgccaccgccggtacaaacacactcacgagaagcccttcaaatgctctatgtgtaagtatgcctccgtggaggcctccaaactaaagagacacgtgcgctctcataccggagaaagacccttccagtgttgccaatgttcctatgcctctcgggacacctacaagctcaagaggcacatgcgaactcattctggggagaaaccgtacgagtgccatatctgccacacccgtttcacacagtccggaaccatgaaaattcatattttacagaagcatggagaaaacgttccaaagtatcagtgcccccattgcgcaactatcattgctcgaaaaagcgatctgcgtgtgcacatgcggaatcttcatgcatattctgcagccgaactgaagtgtaggtattgttctgctgtcttccatgaaaggtacgcccttattcagcatcaaaagacacacaaaaatgagaaacggtttaaatgtaagcattgcagctatgcctgcaaacaggaaagacacatgactgcccacatacgaacacatacgggggagaagccttttacgtgtttatcttgtaacaaatgtttcagacaaaaacagttgctaaacgcccatttcaggaagtaccatgatgctaacttcatacccacagtatacaaatgttctaaatgcggcaagggcttctcgagatggataaacctgcatcggcactcagaaaaatgcggtagtggtgaagcgaagagcgcagcctccggcaagggaagacggacacgtaagaggaagcagactatccttaaagaggctacgaaagggcagaaggaagccgccaagggctggaaggaagccgccaatggcgacgaagccgcagccgaagaagcttcaaccactaagggagagcagtttcccggagagatgtttccagtggcttgccgtgaaactacagctagagtgaaagaagaggttgacgagggagttacttgcgaaatgctccttaacactatggacaactctgctgggtgtaccggacggatgatgctggtctctgcgtggctcctgggcagaccacaggagacctataaccagggcaggagaagacggggcagcagaagggtgacctggtag

SEQ ID NO: 111173 - DNA, 1356 bp, synthetic construct
  misc_feature 1..1356: note = Description of Artificial Sequence: Synthetic coding sequence
  source 1..1356: mol_type = other DNA
atggcagccaccgaaatctccgtgctcagcgagcagttcaccaaaatcaaggagttggaactcatgcctgagaaagggttaaaagaagaggaaaaggatggtgtgtgtcgcgaaaaggatcataggtctccatccgagctcgaggccgagcgtacgtctggcgcttttcaggacagcgtactagaagaggaggtggaactggtgcttgccccgtccgaagagagtgagaaatatattctgacactgcagaccgtgcatttcacgtctgaagccgttgagctgcaggacatgtctctgctgagtatacagcagcaagagggcgtgcaagtcgtggtgcagcagccagggcctggcctgctctggcttgaagagggcccccggcagtcgctgcagcagtgtgtggctattagcatacaacaggagttgtatagtccccaagaaatggaggtcctgcaattccacgctctggaagaaaatgtgatggttgctagcgaggatagtaagctggccgtctccctggccgaaaccacagggctgattaaactggaggaggagcaggaaaaaaatcagcttctggccgaacgcaccaaagagcaactcttctttgtggagactatgagcggggatgaacggtctgatgagattgttctgactgtcagtaactctaatgttgaggagcaagaggatcagcctactgcaggccaggctgacgcagaaaaggccaagtccaccaaaaaccagcggaaaactaagggcgccaaaggcacttttcattgcgacgtttgtatgttcacttcctcccggatgagctcctttaatcggcatatgaagacacatactagcgagaaaccacacctgtgccatttgtgtctgaaaacatttcgcactgtcaccctgcttcgcaaccatgtgaacactcacaccgggacacgcccatataaatgcaatgattgtaacatggctttcgtgacatccggcgaacttgttagacaccgccgttataagcacacacacgagaagcccttcaagtgcagcatgtgtaaatacgcctccgttgaggccagcaagctaaaaagacatgtgcggtctcatactggggaacgccccttccagtgctgccagtgctcatatgcctcccgggatacatacaagctcaagaggcatatgcgcacccactctggcgagaagccatacgagtgtcacatttgccacacccggtttacccagtcaggaaccatgaagatacacattttacaaaaacacggggaaaatgtgccgaagtaccagtgccctcactgcgccactattatagcacgaaaaagcgatctgcgattcttgggattgccatttccctag

SEQ ID NO: 111174 - DNA, 1842 bp, synthetic construct
  misc_feature 1..1842: note = Description of Artificial Sequence: Synthetic coding sequence
  source 1..1842: mol_type = other DNA
atggctgccacagagatctcagtgttgtctgaacagtttaccaaaattaaagagctggagcttatgccagagaaaggtctgaaggaggaggaaaaagacggggtgtgtcgagaaaaggaccacaggtccccttccgagttggaggccgaacggactagcggcgccttccaagactcagtgcttgaggaagaggtggaactcgtgctggcacctagcgaagagtcggagaagtatatccttaccctccaaacagtgcattttacatccgaggctgtggaacttcaagacatgtctctcctcagcattcaacagcaggaaggcgtacaggtggttgtgcagcagcctgggccggggctcctgtggctggaggaggggcctagacagagcctgcagcagtgtgttgcaatatctatccagcaggagttatatagcccacaggagatggaggtactgcagtttcacgccctggaggaaaatgtgatggtggcatccgaggactctaaactggccgtaagtctcgctgagaccactggcctgatcaaattggaggaggaacaggaaaaaaaccagctcctggcagagaggactaaggaacaacttttttttgtagaaacaatgtccggcgatgagcgcagcgatgaaatcgtgcttacagttagcaattcaaatgtcgaagagcaggaggaccaacctaccgctggccaggctgacgccgagaaggcgaagtccaccaagaatcagagaaagactaagggcgccaagggcaccttccactgcgatgtgtgcatgttcacatcaagcaggatgagtagctttaatcggcatatgaagacacatacctctgaaaagcctcacctctgtcacctgtgtctaaagacgttcagaaccgtgacactgttacgcaaccacgttaatacacataccggtaccagaccctataagtgtaatgactgtaatatggccttcgttacgtctggagagctcgtacggcacaggagatataaacatactcacgagaagcccttcaaatgcagcatgtgcaagtatgcttctgtggaagcaagcaagctgaagaggcacgttcgctcccacacaggggaacgtccttttcagtgttgtcagtgcagttacgcctcccgcgacacttacaagctaaaacggcacatgcggacacacagtggagtccatatgaggaatctgcacgcctacagtgcagctgagttgaagtgcagatattgctccgccgtttttcacgaacggtatgcccttatccagcatcagaagacccacaaaaatgagaagcggttcaaatgtaagcactgcagctacgcctgcaaacaggagcggcacatgacagcccacatccgcacgcataccggcgagaaaccatttacctgtctcagctgtaacaaatgctttaggcaaaaacagcttttaaacgctcactttcgcaagtatcacgatgccaacttcatccccacagtgtacaagtgttcaaaatgcgggaaagggtttagccgatggataaacctgcacaggcatagcgaaaaatgtggatctggagaagcaaaaagtgcagccagcggtaaagggcgcagaacacggaaaagaaaacagacaattctcaaggaagccacaaaggggcagaaagaggccgccaagggatggaaagaggccgccaatggcgacgaggctgccgcggaagaggccagcacaacaaaaggcgagcagtttcccggagaaatgtttcccgtcgcgtgtcgcgagacgacggccagggttaaggaagaagtagatgagggcgttacctgtgagatgctgctgaacacaatggataaatag

SEQ ID NO: 111175 - DNA, 1452 bp, synthetic construct
  misc_feature 1..1452: note = Description of Artificial Sequence: Synthetic coding sequence
  source 1..1452: mol_type = other DNA
atggccgctactgaaatctctgttcttagcgaacaatttaccaaaattaaggaacttgagcttatgccagagaagggactgaaagaggaagaaaaagatggcgtgtgtcgggaaaaggaccataggagtccttcagagttggaagcggaacgcacgtctggtgcatttcaagatagcgtcttagaagaagaggttgaactcgttctggccccctcggaggagtccgagaagtacattctgacactccagacagtgcatttcacaagcgaggccgtggagctgcaagatatgtccctcttgtccatccagcaacaggaaggggtccaagtagtggtacaacagcccggacctggactgctctggctagaggaggggcccaggcagtctctccagcagtgcgtggctatcagcatacaacaggaactgtattcccctcaggaaatggaagtcctacagttccacgccttagaagagaacgttatggtcgcatccgaggattcgaagttggccgtatccctggcagagaccactgggcttattaaattggaagaagagcaggagaagaatcagctgttagccgaaaggaccaaggaacagttgttcttcgtggagacgatgagtggggatgagaggtccgacgagatcgtcttgaccgtgtccaatagtaatgttgaggagcaggaagaccaacctacagccgggcaggccgacgcagaaaaggccaaatccaccaaaaatcagaggaagaccaagggtgcgaaggggacattccattgtgatgtttgcatgtttacatcctcccgtatgagttcctttaacagacatatgaagacacacacgtcggaaaaaccacatctatgccatctttgtttgaaaacgtttaggactgtaaccctgctgaggaatcatgtgaacactcacacggggacccgaccctataaatgcaacgactgtaacatggcttttgtcaccagtggcgagctcgtgagacaccggcgctataagcacactcatgagaagccttttaaatgttccatgtgcaaatacgcaagtgttgaagagagacacatgactgctcatattcggacacacaccggagagaaacccttcacatgtctctcatgtaataagtgcttcaggcaaaaacagcttctaaacgctcatttccggaagtaccacgatgccaatttcatccccactgtgtataaatgtagcaaatgcggcaaaggattcagtaggtggattctatgggttggaaattctgaagtggcagagctgggcggacctgggagtggtcccctgctcagactgcagtcagggtgtcccccagggctgcaccatcctaaggccggactcgggcctgaggatcctctacccggccagttgcggcatacaactgcaggcacaggcctcagtagcctgctgcagggcccactttgccgcgcagcctag

SEQ ID NO: 111176 - DNA, 1998 bp, synthetic construct
  misc_feature 1..1998: note = Description of Artificial Sequence: Synthetic coding sequence
  source 1..1998: mol_type = other DNA
atggccgccacagagattagtgtgctgtcagagcagtttaccaaaataaaagaactcgagcttatgcccgaaaaaggacttaaagaggaagagaaggatggcgtgtgccgggagaaggatcatagaagcccttcagagctggaggcagagcggaccagtggggcatttcaggatagcgtgctcgaagaggaggtagagcttgtgcttgccccgagtgaagaatcggaaaagtacatcctgactctgcagacagtgcatttcacatccgaagctgtggagctccaggatatgtccctgctctctatccagcagcaggagggtgtgcaggtggtggtacaacagccgggccctggcctcctatggctggaggaggggcctcggcaatcacttcagcagtgtgtggcgatcagtatccagcaggagttgtattccccacaagaaatggaggtcttacagtttcatgccctcgaagagaatgtgatggtcgcttcagaagatagtaagctagccgtcagcctcgccgaaacaacaggccttattaagcttgaagaggaacaggagaagaatcagcttctggccgagcggaccaaggaacagctttttttcgtggagaccatgagtggagatgagaggtcagatgagattgtgctgacagtgtccaatagcaacgtagaggagcaggaagaccagcctaccgctggccaagcagatgccgaaaaggctaagtccacgaagaaccaacgcaagaccaagggtgccaagggaaccttccactgtgatgtttgcatgtttacttccagtcgaatgagctcattcaatcggcacatgaagactcatacttccgagaaaccgcacttgtgccatctgtgtttgaagacattcaggacagttaccttattgcggaatcacgtgaatacccacacaggcacacgcccttataaatgcaacgactgtaacatggcttttgtgacgtctggggagctggtgagacaccgcaggtataagcacacacacgagaaaccctttaaatgttccatgtgcaagtatgctagcgtcgaggcctccaagctaaagcgtcatgtgcggtcacacacgggggaacgaccctttcagtgctgccaatgttcatacgcgtcaagggacacctataagctgaagagacatatgcgtacccattctggcgaaaaaccctacgaatgccacatctgccatacccgctttacccagagcgggaccatgaaaatacacatcttgcagaaacatggcgagaatgtaccaaagtatcagtgcccacattgtgcaacgattatcgctcggaaatcggatttaagggtccacatgaggaacctgcacgcgtattcagctgcagaactgaagtgccgctactgttcagccgttttccacgagagatacgccctgatccaacatcagaaaacacataaaaatgaaaagcggttcaaatgtaagcattgcagttatgcctgtaagcaggaacgacatatgaccgcccatatcaggacccatactggggagaaaccgtttacgtgtctctcctgtaacaaatgtttccggcagaagcagttgctgaatgctcatttcaggaagtaccacgatgccaatttcattccaacagtctacaagtgctccaagtgtggaaagggtttctccaggtggatcaacctgcatagacattcagaaaaatgcggctctggtgaagccaaatccgctgcttccggcaagggaagacggaccagaaaaaggaaacaaacaatcctgaaggaagccacaaagggccagaaagaagccgccaaggggtggaaggaggccgccaacggtgatggggtgatcagtgctcatcgtaacctgtgcctcctggggagttctgactcccacgcatccgtgagtggggcaggtattacagatgctagacatcatgcatggctgatagtcctgcttttcctggttgagatgggcttttatcatgtttcacattcttag

SEQ ID NO: 111177 - DNA, 1212 bp, synthetic construct
  misc_feature 1..1212: note = Description of Artificial Sequence: Synthetic coding sequence
  source 1..1212: mol_type = other DNA
atgtttaccagcagtcggatgtcttccttcaatcggcatatgaagactcacactagtgaaaagccccatctgtgccatctctgccttaagacgttccgtaccgttacactcttgagaaatcacgtgaacacccatactggcaccagaccatataagtgtaacgactgtaacatggcttttgtcacatccggcgagctagtccggcacaggcggtataagcacacccacgagaaaccttttaagtgctctatgtgcaaatatgcctcagtggaagcctcaaaactcaagcggcatgtgaggtcccatacaggggaaaggcctttccagtgctgccagtgtagttacgctagccgggatacatacaagctcaaaagacatatgcgcacccattctggtgaaaagccttatgagtgtcacatttgccatactagatttacgcagagcggcactatgaaaatccacatcctgcagaagcacggcgaaaacgtgcctaagtatcagtgtcctcattgcgccaccatcatcgctagaaaatccgacctccgcgtgcacatgcgtaacctgcatgcttatagcgctgcggaactgaagtgccgatattgcagtgccgttttccacgagaggtacgcgctgattcagcatcaaaaaacccataagaacgaaaaacgcttcaaatgcaagcattgtagctacgcgtgtaaacaggaacggcacatgaccgctcacatacggacgcacaccggagaaaagccttttacttgcctgtcctgcaataagtgtttccgtcaaaagcagttactgaatgcccattttaggaagtatcacgatgccaacttcataccaaccgtgtacaagtgttcaaagtgcgggaaggggttctcacgttggattaacctgcaccgtcacagcgagaaatgcggtagtggggaggcaaagtccgcagcctcaggcaagggcagacggactagaaagcgcaagcagactatcttgaaagaggctaccaaggggcagaaggaagccgccaaggggtggaaagaggctgccaatggggacggcgtaatttccgcccataggaatctgtgtttgcttggtagttccgatagtcacgcgtccgtgagcggcgccggcattacagacgctagacatcacgcctggctaatagtcttactcttcctggtcgaaatgggattttatcatgtgagccatagctag

SEQ ID NO: 111178 - DNA, 1269 bp, synthetic construct
  misc_feature 1..1269: note = Description of Artificial Sequence: Synthetic coding sequence
  source 1..1269: mol_type = other DNA
atgtccggggacgagcgatcagacgagatagtcctcaccgtctctaattccaatgttgaggaacaggaagatcagccgaccgccggccaggcggacgctgagaaggcgaagagcacaaaaaaccaacgcaagacaaaaggtgccaagggcacgtttcactgcgatgtgtgcatgttcacctcttcacggatgtcatcttttaatcgccatatgaaaacccacacctcagagaaaccacatctgtgtcacttatgcctgaaaacatttcgaacggtcaccttactacggaaccatgtgaatactcataccgggacccgaccttacaagtgcaacgattgtaatatggccttcgtcactagtggagagctggtgaggcacagacgatacaagcacacgcatgagaaaccttttaagtgtagcatgtgtaaatacgctagtgttgaagccagtaagctgaagaggcacgtgaggtcccacaccggcgagcgaccatttcagtgttgccaatgctcttacgcatctcgggatacgtacaaattaaagcgacacatgcggacacattctggggaaaagccttatgaatgccacatctgtcacacccgtttcactcagtctggcactatgaaaattcacatcctgcaaaagcacggcgagaacgtgccaaagtaccaatgtccccactgcgcgaccattatcgcccgcaaatcagaccttcgcgtgcacatgagaaacctccacgcttactcagctgcagagctcaagtgtagatattgcagcgccgtcttccacgagcgctacgcgctcatccaacatcagaaaacccataaaaatgagaaaaggttcaagtgcaagcactgcagttatgcttgtaagcaggaaagacatatgactgcacatattcgcacacatacgggtgagaaaccttttacctgcctcagctgtaacaaatgtttccgtcagaagcaactcctgaatgcacattttcggaaatatcatgatgcaaactttatccccacagtgtataaatgtagcaagtgtggaaagggatttagtcgttggattctctgggtgggcaatagtgaggtcgccgagcttggagggcccgggtcaggccccttgcttcggcttcagtcaggctgtccgcctgggttacatcatcccaaagccggactaggtccagaggacccattgcccggacagttacgccacaccacagccggtacaggattgtctagcttgctacagggaccgctgtgccgggcagcttag

SEQ ID NO: 111179 - DNA, 1296 bp, synthetic construct
  misc_feature 1..1296: note = Description of Artificial Sequence: Synthetic coding sequence
  source 1..1296: mol_type = other DNA
atgtttcattccccgcgaaggctgtgttctgccctcttgcagcgggacgctcctggactgaggcgcctgcccgcacccgggcttcgccgtcctctttcccctccagccgccgtgcctcgccccgcctcacctagactcctggctgcagccagcgctgcctctggcgctgccagatcatgttcaagaaccgtgtgctctatgggcactggcaccagccgcctgtacagcgcgctcgccaagactctgaacagcagcgctgcctcacaacatcccgagtacctcgtgtcccccgaccctgagcatttggagccaattgaccccaaggagcttctcgaagagtgtcgcgccgtgctgcacacccgccctcccaggttccaacgcgacttcgtggacctgcgcactgactgcccatcaactcacccccctatccgggtcatgcagtggaacatccttgctcaggccctcggcgagggaaaagacaactttgtccaatgccccgtagaggccctgaagtgggaggagcggaagtgcctgatactggaggagatcctggcctaccagcctgatatcctctgcttacaggaggtagaccattactttgatacattccaaccgctactcagtcgcctcgggtaccaagggacctttttccccaaaccatggagcccttgccttgatgttgaacataacaatggccccgatgggtgtgccttgttcttcctccagaataggttcaaactggtcaacagcgctaatatcaggctcaccgcaatgaccctgaagaccaatcaggtcgccattgcccaaacactggagtgtaaagaatcgggtagacaattttgcatcgcggtcacccatttgaaggccaggactggctgggagcggttccgttcggcccagggttgcgatctgctacagaatctccagaacattacacagggtgctaagattcccctgattgtatgtggcgactttaacgcggagccgaccgaggaagtgtacaagcattttgcctcctcgagtctgaacctgaactccgcatacaaactgctctctgccgacggccagagcgagcctccgtacactacttggaaaatccgaactagcggggagtgtcgccacactctggattacatatggtatagcaagcatgcattaaacgtgagatcggcccttgacttgttgacagaggaacaaatcggtcccaatcgactgccatcctttaattatccgtccgaccacctctcgcttgtatgtgacttttccttcacagaggagagtgatggactatcctag

SEQ ID NO: 111180 - DNA, 2133 bp, synthetic construct
  misc_feature 1..2133: note = Description of Artificial Sequence: Synthetic coding sequence
  source 1..2133: mol_type = other DNA
atgtctaggtcccctgacgcgaaagaagatccagtggagtgtcctctttgcatggagccactcgagatagatgatataaattttttcccgtgtacttgtgggtaccagatttgcagattctgttggcaccgcatccggacagacgagaacggtctatgccctgcctgtcgtaaaccctatcctgaggatcctgccgtttataaaccgctgagtcaggaagaactccagcgcattaagaacgagaagaaacagaagcagaacgagaggaagcaaaagatcagcgagaataggaaacaccttgcaagcgtgagggtagtgcaaaaaaacttagtatttgtggttggactatcccaacgtttagccgatcccgaagtcttaaagaggccagaatatttcgggaagtttggcaagatccataaggtcgtgattaacaacagcacgtcctacgcaggctcccaggggccaagcgccagcgcatacgtgacctacattcgctcggaggatgcactgagagccatccagtgtgtcaataatgtcgtggtggatgggagaacgctcaaagcctccctgggcactacaaagtactgctcctacttcttaaaaaacatgcagtgtccaaagccagattgtatgtacttgcacgagctgggcgacgaagctgcatcatttaccaaggaggagatgcaagccgggaaacaccaggagtacgaacagaagttgcttcaggaactttacaagctgaatcccaatttcctgcagttgtccaccggtagcgtagataagaataaaaataaggtaaccccactacagagcccgatcgataagccctccgacagcctttcgatagggaatggcgacaactcccaacagatctcaaatagtgatactccttcaccacctcctggcctgtctaaatctaatcctgttattcccatctctagctccaaccacagtgctaggagtccctttgagggcgccgtcaccgagtcgcagtctctgttttcagacaattttcgacacccaaatcccatcccaagtgggttacctcccttcccaagctcaccgcagacgagcagcgattggccaaccgcccctgagccacagtccctgtttactagtgaaactatacccgtcagctctagtacagactggcaggccgcgttcggcttcggcagcagcaagcaaccagaggatgatctaggcttcgatccatttgacgttacaaggaaggcactggccgatctgatcgaaaaggaattgagcgtacaggatcagccctccctgtcacccactagtctccagaattctagcagccacaccacaaccgcgaaaggccccggcagtggatttcttcatcctgccgcagccactaatgcaaattccctgaacagcacattctcagtcctgccacagaggttcccccaatttcagcagcatagagcagtgtataactcgttttctttcccaggccaggctgcacgatacccgtggatggcgtttcctaggaattccatcatgcacctaaaccatactgcaaatccgacgtccaacagtaatttcttggacctcaacctgccaccgcagcacaatactggattagggggaatccctgtggcagataatagcagcagtgtggaatcgcttaatatgaaagagtggcaggatggccttagggccctactgcccaatatcaacatcaatttcggcgggctgcccaattcttcctccccttctaatgcaaaccatagcgctccgacctcaaacaccgccaccacagacagtctgagctgggactcacccgggagttggacagatcccgctatcatcacagggattcctgcctcgtcggggaactccctagacagcctgcaagatgataacccgccccattggcttaaatctttgcaggccctgactgagatggacggcccttcggccgccccaagccagacccatcactcagcccctttttctacccaaatccctctccaccgggcgtcctggaacccgtatccgcccccttctaacccgtcatcattccattcaccgccacccggcttccaaactgccttccgacctccaagtaaaactcccacagatctgctgcaatccagcacactagacagacactag

SEQ ID NO: 111181 - DNA, 3684 bp, synthetic construct
  misc_feature 1..3684: note = Description of Artificial Sequence: Synthetic coding sequence
  source 1..3684: mol_type = other DNA
atgacgcagaaagtggaggagttaaaggaaacagtgaaagaggagtttatgccgtgggtatcccaatatctcgttatgaagcgagtatcaattgagccaaacttccactccctgtattccaacttcctcgatactctaaagaatccagagttcaacaaaatggtactcaatgagacctataggaatatcaaagatctcgatgtgaaatctctcttattggaagcctacgttaagggtcaacaggaactgctatatgtcgtgcctttcgtcgccaaggttttagaatcatccatacggtccgtggtgtttcggccccccaatccttggaccatggccataatgaacgtcctagccgagttacatcaggagcatgatttgaaactgaatctgaagtttgagattgaggtgctctgcaagaacttggctctggatatcaacgagctgaagcccggaaacctgctcaaggataaggacagactgaagaacctggatgagcagctgtcagcgccaaaaaaggatgtgaaacagcccgaggaactcccaccaattaccacaacaactaccagcaccacaccagcaacgaataccacttgcactgcgacagtgccaccacagccacagtatagctatcacgatatcaatgtgtacagcttggctggattggccccacacataactctcaatcccacaattcctctgtttcaggcccacccccagcttaagcagtgtgttcgccaagctattgaaagagccgtccaagagctggtgcatcccgtggtagatcgttctattaaaattgccatgacgacctgtgagcagatcgtgagaaaggatttcgccttagacagcgaggagtctaggatgaggatcgctgcccatcatatgatgcgaaacctcacggcaggcatggcaatgattacttgccgagagccattgctcatgtccatctctaccaatcttaagaattcctttgcttccgctctccggacagcctccccccagcagcgcgagatgatggaccaggccgctgcacagctggctcaggataactgtgagctggcatgctgtttcatccagaaaacagccgttgagaaggccggtcccgagatggacaagagactggcgacggaattcgagctgcggaagcatgctcgccaggagggtcgaaggtattgcgatcccgtggttctaacatatcaggccgagaggatgccagagcaaattagactgaaggtaggaggggtagacccaaagcaactcgctgtttatgaggagtttgccagaaatgtgcccgggttcctgccaaccaacgatttgagccagcccacagggtttctcgcccagccaatgaagcaggcatgggcaactgacgacgtggcgcagatctatgacaagtgcatcaccgagctggaacagcatctgcatgctataccgcctactctggcaatgaatcctcaggcacaggcattgcgttctcttctggaagtggtggttctgtctagaaactccagagatgccatagccgccctggggctgctgcagaaagccgtggagggcctgcttgatgcgacttccggggcagatgccgacttgcttcttaggtaccgtgagtgccatctgctggttctgaaggctctccaggacgggagggcatacgggtcaccatggtgcaacaagcagattacacgttgtcttattgagtgtagagacgagtataagtataatgtggaggccgttgagctgctgattcggaatcacctggtgaatatgcagcagtacgatctgcatttggcccagagcatggagaacggcctgaattacatggcggtcgccttcgcaatgcagctggtcaaaatcctgttggttgatgaacggtccgttgcccacgtgacagaagccgatcttttccacacgatcgaaaccctgatgaggataaatgcccattcccgcggaaatgcccccgagggcctgccacaactgatggaagtagtgagatcaaattacgaagctatgatcgatcgcgcacacggaggtcctaacttcatgatgcatagcggaatcagtcaggcaagtgagtatgacgatccaccagggctgagggagaaggccgaatacctgctcagagaatgggtcaatctgtaccactcggccgcggctggccgagactcgacgaaagcattttccgcatttgtaggacagatgcatcagcaggggattctgaagaccgatgacctgatcacgagattcttccgactgtgcactgagatgtgcgtggagatctcctatcgagcccaggcagaacagcagcacaaccccgctgccaacccaaccatgattcgggcaaaatgctaccacaacctggacgccttcgtcagactaatcgctttactcgttaagcattctggtgaggctaccaatacagtgacaaagattaatctgctgaacaaggtcctaggcattgttgtgggcgtgctgttgcaggaccacgacgtcagacagagcgagtttcagcaattgccataccacaggatttttatcatgctgctgctcgagctgaacgcccctgagcacgtgctggagactattaactttcaaaccctaaccgcattttgcaatacgttccatatcctgcggcctactaaagctcccggatttgtctatgcatggctggagctcatctcccatagaatctttatcgcgcgtatgctggcacacaccccccagcagaaaggctggcccatgtacgcacaactgttgattgatctttttaagtacttagcacctttcctcaggaacgtggagctgacaaaaccaatgcagattctgtataaggggactctgcgggtgcttctggtgctcctccatgattttccagagttcttgtgtgactaccactacggcttctgtgatgtaatcccccctaattgtatccagctgagaaatctcattttgtccgctttccctcggaacatgagacttccggatcctttcacaccgaatctaaaggtggatatgctgagtgagatcaacatcgccccgaggattctcaccaattttacaggcgttatgccaccccagtttaagaaggacctggattcttacctcaaaacccgctcacccgtgacctttcttagtgatctgagatccaatctccaggtgtccaatgaacccgggaataggtataatctgcagcttatcaacgctctggtgctctatgtgggcacacaggcaatcgctcacatccataacaaaggctccacaccgtcaatgagcaccattacacattccgcacacatggacattttccagaacctggcagtggatctcgataccgaaggccgctatctttttttaaatgccatcgccaatcagctcaggtatcccaattctcacacccactacttctcttgcaccatgctgtatctattcgctgaagcgaacactgaagccatccaagaacaaattaccagagtcttgttggagaggctcatcgtcaatcggccccacccctggggtctgttaataacttttattgaactcataaagaaccctgccttcaagttctggaaccatgaatttgtccattgcgcgcctgaaatcgagaaactattccagtcagtagcccaatgctgtatggggcagaagcaggctcaacaagtgatggagggcacaggagccagttag

SEQ ID NO: 111182 - DNA, 7131 bp, synthetic construct
  misc_feature 1..7131: note = Description of Artificial Sequence: Synthetic coding sequence
  source 1..7131: mol_type = other DNA
atgaacttggatagtctaagtctggcccttagtcagatatcttatctagtggacaacctgaccaaaaagaattatcgcgcctcccagcaggagatccagcatatagtaaacaggcacggtcctgaggcagaccgccacctactgaggtgcctgttcagccatgtcgacttcagcggagatggtaagtccagcggaaaggactttcatcagacccagtttcttatccaggagtgcgccctccttattaccaagccaaatttcatctccacactctcatatgcaatcgataaccctctgcattatcaaaagtcactgaagcccgctcctcacctattcgctcagctgagcaaggtacttaagctgagtaaggttcaggaagtgattttcggcctcgcactgcttaattccagtagcagcgatttgagggggtttgctgcccagtttataaagcaaaaacttcccgacttgttgcgcagctatatcgacgctgatgtctcgggaaatcaggagggcggattccaggacatcgcgatcgaggtgttacatctcctgctaagccacttgctgtttgggcagaagggggcgttcggagtgggacaagagcagatcgacgcctttctcaagacccttagaagagattttcctcaggagaggtgcccagtggtgctggctcctttactctacccagagaaaagagacatactcatggacaggattctgccagattccggtggggttgcgaagactatgatggagagctcacttgccgatttcatgcaagaggtgggatatggcttctgcgcctctattgaagaatgcagaaatatcattgtgcagttcggagtgagagaggtcactgcagcgcaggtcgcacgagtgctcggcatgatggcacggacacattcaggactcacagatggaatccccctgcagtccataagtgctccaggctcaggcatttggtcagacgggaaggataagtctgatggcgctcaggcccatacatggaacgtcgaggtgctcatcgacgtgttaaaagaactgaacccaagcctcaatttcaaagaagtgacttatgagctcgaccatcccggctttcaaataagggatagtaaaggtttgcacaatgtcgtgtatggaattcagcgtgggctagggatggaagtcttcccagtggacctgatctaccgaccctggaagcacgcagagggccaactgtctttcatccagcactcacttatcaatccagagattttctgtttcgccgactacccttgccacaccgtggcaacagatattctaaaggctcctcctgaggacgacaatcgtgaaattgctacttggaagtcattggatttaattgaatcactcctgcgtctagccgaggtgggccaatatgagcaggtcaaacagcttttttcattccctatcaaacattgccccgatatgttagtcctggccttattgcaaatcaatactagttggcataccctacggcacgaactcattagcacactaatgcccatttttctcgggaatcacccaaatagcgcgatcattctccattatgcttggcacggccagggtcagtcaccatctatccggcagctgataatgcacgccatggctgagtggtatatgcgtggtgagcagtacgaccaggctaaactgtctcggatacttgatgtagctcaagacctgaaggctctgagcatgctcctgaatgggactcctttcgcgttcgttatcgatctcgccgcactcgcctctagaagagagtacttaaagcttgacaagtggctaaccgataagatcagagaacacggcgaaccattcattcaggcctgtatgacctttttaaagcggagatgtccaagcattttaggcggcctggcacccgaaaaggatcagcccaagtccgcacagctgcctccggagaccctcgcaacaatgttagcctgtttacaggcctgcgcagggagcgtgtcacaggagctatccgagacaattctgactatggttgctaactgtagcaatgtcatgaacaaggctcggcagccaccgccaggtgtgatgccgaagggaagaccccctagtgcctcctccctggacgctatctctccagtccagattgatcctttggctggtatgacttccctatcgatcggcgggtctgcagctcctcatactcagtccatgcaaggctttcctccaaacctgggctccgccttttctactccgcagagtccggccaaggctttcccgcctttatcaaccccgaatcagaccaccgccttctctggaattggtgggctctcaagccagctacccgtcggaggcctgggaactggatccctcacgggcatcggcactggggctctcgggttgcctgctgttaataatgacccctttgttcagagaaaactcggcacctcagggctaaaccagccgacgttccagcagagcaaaatgaaaccgagcgatctctcccaggtgtggcctgaggccaaccaacattttagcaaggaaatcgacgacgaggccaattcatacttccaaaggatttacaaccaccctccccaccccaccatgtccgtcgatgaagtgttagaaatgctccagcgattcaaagacagcaccatcaaaagggaaagggaggtctttaattgcatgctcagaaacttgttcgaagaatacagatttttccctcagtacccggataaagagctgcacatcaccgcctgtctattcgggggaatcattgaaaagggtttagtgacttacatggccctgggcctggcccttaggtatgttctcgaggctctccgtaagccattcggcagtaaaatgtactactttggtatcgcagcccttgatcgcttcaaaaacaggctcaaggattacccacagtactgccagcacctcgccagtatctcacatttcatgcagtttcctcaccatttgcaggagtatattgaatatgggcagcagagtcgagatcccccagtcaagatgcagggaagtattacgacccctgggtcaatcgcactggcacaggcccaagcacaagctcaagtgccggcaaaggcgcctctggcaggccaagtaagcaccatggtgaccacaagcaccacaaccacagttgctaagactgtcacagtgactcggcctaccggcgtctcatttaaaaaagacgtcccaccctccattaatacgaccaacatcgataccctgctcgtggctacagaccaaactgagcggatcgtcgaaccacctgaaaacattcaggaaaaaatagcatttattttcaacaatctcagccagtctaatatgactcaaaaagtcgaggagcttaaagagactgttaaggaagagtttatgccttgggtgtctcagtacttggttatgaaaagggtatctatcgagcccaactttcactcactgtactcaaacttcttggatacactcaaaaatccagagttcaacaaaatggtgttaaatgagacttataggaacatcaaggtgttgttgacctccgataaggctgccgctaacttctccgaccgtagcctccttaagaacctcggacactggctgggaatgattactctcgctaaaaataaaccaattctgcatactgacttggacgtaaagagcctgttgttggaggcctacgttaaagggcaacaagaactgttatatgtggtgcctttcgtggccaaggtactggaatctagtattcggtctgtagtgttccggcctcctaatccttggaccatggcgataatgaacgtattagctgagttacatcaggagcatgacctgaaacttaacttgaagttcgaaatcgaggttctgtgcaaaaatctggctttggacataaatgaactcaaaccgggcaaccttctgaaggacaaggacaggctgaaaaacctggacgagcaactctccgccccaaaaaaggacgtgaagcaaccggaagaactccccccaattacaaccaccacaaccagcacgactccagccactaatacaacctgcaccgcgaccgtgccgccacagcctcagtatagttatcacgacatcaacgtgtactctctagccggcctggctccgcacataacattaaacccaactatccccttgtttcaggctcacccacaactgaaacaatgcgttcgccaagcaatcgaaagggcggtccaggaactggtccaccccgtagtagaccggagtataaaaatcgccatgactacgtgcgaacaaattgtccgcaaagatttcgcactcgacagcgaggagtccagaatgcgcattgcagcccaccacatgatgcgtaatctgacagccggcatggccatgatcacatgccgggaacctttactaatgagcatctccacgaatttaaagaatagctttgcttctgccttaaggacagcgagcccacaacaacgtgaaatgatggatcaggccgcggctcagctggcccaagacaattgcgaattggcctgctgcttcatccagaaaacggcagtggaaaaggctgggcctgagatggataagcgcctggcaaccgagttcgaactaagaaaacacgctcggcaagagggaagacggtactgcgacccggtggtactgacgtatcaggcagagcgtatgcctgaacagatcagactgaaggtggggggtgtggatccaaaacagctggctgtgtatgaggaatttgccaggaatgttccaggatttctacccacgaatgatctgtctcagcctactgggttcctggctcagcccatgaaacaagcttgggccaccgatgatgtcgcacaaatctatgataagtgcatcactgagcttgagcagcacctgcacgccataccccccactctcgccatgaatccccaagctcaggctctgcgttcgcttctcgaagttgtagtgctgtcccggaactccagagacgcaatcgctgcgctgggattgttgcagaaagctgtcgagggactgcttgacgcaaccagcggggccgatgctgacctcctgctccgatacagagagtgccacctactggtgttaaaggccttgcaggatggacgagcttacggctccccttggtgtaataagcagattaccagatgtctcatagagtgccgggatgaatacaagtataatgtggaggctgtggaactcttaatccgcaatcacttggtcaacatgcagcaatatgacttgcatctggcacagtctatggagaatgggcttaattatatggccgtggccttcgcaatgcagctcgttaagatcctactggtagatgagagatcagttgcacatgtgaccgaagcagacctcttccacacaatcgagactctgatgcgaataaatgctcattcacggggaaatgctcccgaaggactcccgcaattgatggaggttgtgagatctaactacgaagctatgatagatcgtgcccacggtgggcctaattttatgatgcatagcgggataagccaggcctccgaatatgacgaccctcctggactgcgcgagaaagcagagtacctgctgagggaatgggtaaatttataccattctgcggctgcaggacgggatagcaccaaggctttctcagcctttgttggccaaatgcaccagcagggcatcctgaaaaccgatgacttgatcaccagattcttcagactgtgcactgagatgtgcgtggaaatatcctaccgagcgcaagctgagcaacaacacaatcctgccgcgaatcctacaatgattcgtgcaaagtgttaccacaacctcgatgccttcgtccgattaatcgcactgctggtgaagcactccggcgaggccactaacaccgtcacaaaaattaaccttctgaacaaggtgttgggaattgtggtgggagtcctgctccaggaccacgatgtcaggcagtctgaatttcagcagttgccttatcacaggatttttatcatgttactgttggagttaaacgctcccgaacatgtgctggaaacgatcaacttccagacgttgaccgccttttgcaacactttccatattctcagacctacaaaagcgcccggctttgtttacgcatggctcgagctgataagtcaccgcatttttatagcgcgaatgctggcacatacccctcagcagaagggttggccaatgtatgctcagttgctgattgatttgttcaaatacttagctccttttctgaggaacgtcgagctgacaaagcccatgcaaatcctctacaaagggacgttgagagttctacttgtgttgctccacgacttcccggagttcctgtgcgactaccactatggcttttgcgatgtcatacctccaaactgtatccagctccgaaacctaattttgagcgcatttcctcgaaatatgcgcctgcccgacccatttactcccaacttaaaggttgacatgctctccgagataaatatcgcaccacgcatcttaactaacttcaccggcgtcatgcccccacagtttaaaaaagacctggatagttacttaaaaactcggagccccgtgacgttcttatctgaccttaggagcaatctacaggtttcaaatgaaccggggaatcgctataatctccagctaataaatgcccttgtgctttatgtgggcactcaagcaattgcacacatccataataaaggatcgacaccctctatgtccacaattactcattctgctcacatggatattttccagaatctggcggttgaccttgacacagaaggccgctatttgttcctgaacgccattgcgaaccagttaagatacccaaattcacacactcactacttcagttgcacaatgctgtatctatttgctgaggccaatacagaggcaatccaggaacaaatcactcgcgtgctgttagagcgcctcattgtcaacaggccccatccgtggggtctgctgataacctttatcgaactgatcaagaatccagcttttaagttctggaaccacgaattcgtccactgcgccccagaaattgagaagctgtttcagagcgtggcgcagtgttgtatgggccagaagcaggcccagcaggtgatggaaggtaccggtgctagctag

SEQ ID NO: 111183 - DNA, 6453 bp, synthetic construct
  misc_feature 1..6453: note = Description of Artificial Sequence: Synthetic coding sequence
  source 1..6453: mol_type = other DNA
atgaacctcgatagcctttccttggccttatcacagatcagctacctggttgataacctcaccaagaaaaactatagagcctcacagcaggaaatccagcacattgtcaatcgacacggccctgaagctgacaggcacctgttaaggtgcctatttagccacgttgatttcagcggtgacgggaagtcctccgggaaggactttcaccaaactcagttcctgatccaggaatgcgctctgctcatcacgaagcctaacttcatctccactctgtcttatgccatagataacccactgcattatcaaaaatctctgaaaccagcccctcatctttttgcacagttgtctaaggtgctgaaactgagtaaggtgcaggaagtcatctttggactcgcgttgctgaacagctcctctagtgatcttcgaggctttgctgcacagttcattaaacagaagctgcctgatttgctccgctcctatatcgacgcagacgtctccggtaaccaagaagggggattccaggatatcgccatagaggtcctccatctgctcttgagccacctactgtttggccagaaaggagctttcggggtgggccaagagcagattgatgcgttcctgaaaacccttcgccgcgacttccctcaggaacgctgtcctgtagtgcttgcgccactgttgtatcctgaaaaacgggatattctgatggaccgcatcctgccagatagcggtggggtcgctaagacaatgatggagagctctcttgccgactttatgcaggaggtcggctacggtttctgtgcctcgattgaggagtgccggaatatcatagttcagttcggggtcagagaagtgacagctgcgcaggtagcccgagtactgggcatgatggcacgcacccactcgggccttaccgatggaataccattgcagagtataagtgcacccggctcaggtatttggtcagacgggaaggataaatccgacggtgcccaggcccatacctggaatgtggaggtgcttatagatgtcctgaaagaattgaacccgtcactcaacttcaaggaggtgacatacgagctcgaccacccaggtttccaaatcagagacagtaaggggttacataacgtggtatatgggattcagaggggcctgggtatggaggtatttcccgtggatctaatctatagaccttggaaacacgctgaaggccagttgtccttcatacaacattcactgatcaatccagagattttttgctttgccgattatccatgtcacaccgtcgccacagacattctcaaagccccccccgaagatgacaacagggagatcgctacctggaaatcactggatctcatcgaaagtcttctgcgactggctgaggtaggccagtatgaacaggtgaagcagctgttttcattcccaataaagcattgcccggatatgttagtgcttgcacttctgcagatcaatacctcctggcacaccttacgccacgaactgatcagcacactcatgccaatctttcttggaaatcaccccaatagcgctataatcttacactatgcatggcacggacagggccagtcaccaagcatccgacaactcatcatgcatgccatggcagaatggtacatgcggggcgagcagtatgaccaggcgaagctgagccggatcctcgatgtggcccaagaccttaaagcactatccatgcttctgaacggcactccttttgccttcgttattgatttagctgcacttgcatcaaggcgggagtacctgaagctggataaatggcttaccgacaagatccgtgagcacggtgagcccttcattcaggcttgcatgaccttcctgaaaaggagatgtccaagcatcctaggaggattggcgccagagaaggaccagcccaagagcgctcaactacctccagaaacactcgccacaatgctcgcctgtctgcaggcatgcgccgggagcgttagccaggagctctccgagacaatcctaacaatggtcgccaactgttctaatgttatgaacaaagcccgtcagccccctccgggcgtgatgcctaagggacgacctccatcagcttcctcactagatgctatatcaccagtacagatcgatccactagctggcatgactagcctgtctattggggggagcgcggcccctcacacacagtctatgcagggttttcctcccaatctgggaagtgcctttagtaccccgcagtctccagccaaggccttccccccactgagcactcccaatcaaaccactgctttctcaggcatagggggattatccagtcaattgcccgtagggggtctcggtactggcagtctgaccggcataggaaccggagctttaggactgccggcagttaataacgatccttttgtgcagagaaagttggggacaagtggtctgaaccagccaacattccaacagaccgacctttcacaggtgtggccagaagctaatcagcatttctccaaggaaatcgatgatgaggcaaattcctacttccagcgtatctataaccacccgccgcaccctacgatgtcagtcgacgaagttctcgagatgttgcagcggttcaaggacagcactatcaaaagagaaagagaggtgttcaactgtatgttacggaacctgttcgaggagtatagattttttccgcagtacccggataaggagctgcatatcacagcctgcctgtttggaggaattattgaaaaaggattggtgacctatatggcgctggggctagcattgcgctatgtcctggaggcgctccggaaacccttcggtagcaagatgtactattttggcattgccgccctggaccgctttaaaaaccgcctgaaggactacccacagtactgccagcacttggccagtatatcccacttcatgcagttcccacaccatctacaggaatacatagaatacggccagcagtcaagggatccccccgttaaaatgcaggggtctatcactacccccggcagtattgctctcgcccaggcccaggcacaggcccaggtgccggccaaagcgcctctcgctggccaagtgtctactatggtgaccacctcaacaacgaccactgtcgctaaaacagtgaccgtcacccgccccacaggcgtatcctttaaaaaagatgttccacccagcatcaacaccaccaatattgatacactgctggtggctacggaccagaccgaacgaattgtcgagccaccagagaatattcaggagaagattgccttcattttcaataatttgagccagagtaatatgacacagaaggtagaggaactcaaggagaccgtgaaggaggagttcatgccctgggtgagtcagtacctagttatgaaacgtgtgtctattgagcctaatttccattcactgtattctaattttcttgacactcttaagaaccccgagtttaacaaaatggtgctgaatgagacatataggaacattaaggtattactcacgtccgataaggcagctgcgaatttttcggaccgaagccttcttaagaacctgggccactggctgggaatgataactctggcaaaaaataaaccaatcttgcacactgacctcgatgttaagagtctgttactcgaagcttatgtcaagggacaacaagaattactgtatgtggttccgttcgtcgcaaaggtcttagaaagttctataaggagtgtcgtctttagaccgcccaacccttggactatggcgatcatgaacgtccttgccgagctccatcaggagcacgacctgaagttaaacctaaagttcgagatcgaagtcctatgtaaaaacctggccctggacatcaacgagcttaaaccaggcaatttgttaaaagacaaagaccgactcaaaaatctggatgaacagctatccgctccaaagaaggacgttaagcagccagaggagctaccccccatcacaacgacgaccacatcaacaacgccagctacgaatacgacgtgtaccgccactgtcccccctcagccccaatattcttatcacgacatcaacgtttattccctggctggccttgctcctcatatcaccctgaacccaacaatccccttgttccaggcccacccgcagctcaaacagtgcgtgagacaagccattgagagagccgttcaggagctggtacatccagtcgtggatcgttctatcaaaatcgccatgaccacttgcgagcagatagtgcgtaaggacttcgctttggactctgaagaatctcgcatgcggattgccgctcaccatatgatgcgtaatcttaccgctggcatggctatgataacctgccgggagcctctgctgatgagcatctcaacaaacctgaaaaacagctttgcctccgcgttgcgcaccgcatccccccagcagcgcgaaatgatggaccaagccgccgcacagctcgctcaggacaactgtgagctcgcctgttgctttatccagaaaacggctgtcgagaaggccggccctgagatggacaagaggctcgctactgagttcgaattgagaaaacatgccagacaggaaggtaggaggtattgtgatccagtcgtacttacctatcaggcggagcgaatgcctgaacagattcggcttaaggtaggtggagtggatcctaagcagctcgctgtgtacgaggagtttgctcggaacgtaccaggttttcttcctacgaacgatctctcccaacccacaggatttcttgctcagcccatgaagcaagcctgggccaccgatgacgtggcacagatctacgacaagtgcatcaccgagttggagcaacatctgcatgcgattcctcctaccctggcgatgaatccacaagcgcaagctttacgatccctcttggaagtggtggtcctgtcacgcaacagccgcgatgcaatagcggcccttggcctgttgcaaaaggcagtcgaaggcctgcttgatgcaaccagcggtgccgacgctgacttgctactgcggtatagagagtgccatcttctggtgctaaaagcattacaggacggccgggcctatgggtccccctggtgcaacaagcaaatcacaagatgtctcattgagtgtagagacgaatacaaatataacgtggaagccgtggaactactgatcaggaaccacctcgttaatatgcagcagtacgatctgcacttggcgcagagtatggagaacggcctgaattacatggccgtggcattcgcaatgcagctagttaaaatcctgttagtggatgaaaggtctgtcgcacatgtgaccgaggcagatctgttccatacaatagaaactctcatgaggatcaacgctcattcaagagggaacgcccccgaagggttgcctcagctcatggaggtggtcagaagtaactatgaggccatgatcgaccgagcccatgggggtccaaacttcatgatgcatagcggcataagtcaggctagcgagtatgacgatccacctggattgcgcgagaaagcggagtacctccttcgcgagtgggtcaacctgtaccactctgccgcagcaggtcgcgacagtactaaagcgttctccgcatttgtgggacagatgcaccagcagggtatcctgaagacagacgacctcattacccggtttttcaggctctgcacggagatgtgtgtggaaattagttatcgcgcccaggccgagcaacaacacaatcccgcagcgaaccccaccatgattagagcaaagtgctaccataaccttgatgcttttgtcagactcattgctctgctagtgaaacattcaggcgaagctaccaatactgtgaccaaaattaacctactgaacaaagtgttaggcatcgtcgtgggcgttctgctgcaggatcacgatgtacgccaatccgaattccagcagttaccatatcaccgaatattcatcatgctcctcttggagttgaacgcacctgagcatgtgcttgagacaatcaacttccagactttgacggctttctgtaacacatttcacatccttcggcctaccaaagcgccggggttcgtctacgcatggctggagctgattagccacaggatcttcatcgcaagaatgcttgcacacacaccgcagcaaaaagggtggccgatgtacgcccagctgctgattgatttgtttaagtacttggctccatttcttagaaacgtggagttaactaaacccatgcagatcttgtacaaaggtacattacgggtcttgttagtcctgctccatgatttcccagagtttctttgcgattatcattatggcttttgcgacgtgattcccccgaactgtatacagttaaggaatctcatactgtcagctttcccaagaaacatgcgcctgcccgaccccttcactccaaatctgaaggaaatcatgttgtag

SEQ ID NO: 111184 - DNA, 3213 bp, synthetic construct
  misc_feature 1..3213: note = Description of Artificial Sequence: Synthetic coding sequence
  source 1..3213: mol_type = other DNA
atgctcctgaatgggactcctttcgcttttgtgattgaccttgcagccctcgctagtcggagagaatatctaaagctggataagtggttgaccgacaaaattcgggaacatggcgagccatttatccaggcgtgtatgacgttcttaaaacgtcgctgcccgtcgatcctgggtggcctcgcacccgagaaagatcagcccaaatctgctcagctgccacccgagacactggccacaatgctggcttgcctgcaggcatgtgcaggatccgtgtctcaagagctgtctgaaaccattttgaccatggtagcaaattgcagtaatgtgatgaataaagctcgacaaccaccccccggcgtcatgccaaaaggtcgacctcctagtgcatcaagcctggacgcaatttccccagtgcaaattgacccactcgcagggatgacttccctttcaattggcggctcagccgctccccacacccagagcatgcagggcttcccccctaatctggggtctgcgttcagcactccacagtcccctgccaaggcgttcccacctttaagcacaccaaaccaaacaaccgctttctcaggaataggtgggctctctagccagctgcccgtgggggggctgggcactggatctctgacgggcatcgggactggggcattggggttacccgcagtcaacaacgacccttttgtacagaggaagctgggaaccagtggcttaaaccagcctactttccagcaatctaagatgaagcccagcgatcttagccaggtttggccagaggcgaaccaacacttctcgaaagagatcgacgacgaggcaaacagttacttccagcgcatttacaatcaccccccccaccccacaatgtctgtggacgaagtactggagatgctgcagcgcttcaaagattccactattaaacgcgagcgagaggtttttaattgtatgctgagaaacctgttcgaagagtatcgcttctttccccagtacccagataaggagctacatattaccgcatgcctcttcggggggattattgagaaggggctcgttacatatatggccctgggactcgccctgcggtacgtgttggaggcattaagaaaacccttcgggtcaaaaatgtattacttcggcattgccgccctggatcggttcaagaacaggctgaaagattatccccaatactgccaacacctcgcctccatttcccacttcatgcagtttcctcatcacctgcaggagtacatcgagtatggacaacagtcacgggacccgccggtcaagatgcaaggatctatcactacaccaggctctattgccctggcacaggcccaagcacaggcacaggtgccagctaaggccccgcttgcaggtcaggtctctactatggttacaacgtcgaccactacaacagtggcaaaaaccgtgacagtgacacggccaacaggagtctccttcaagaaagacgtcccgccctctataaacaccactaatattgacacccttctggtggcgacagaccagaccgaaagaatagtggaacctccagagaacatccaggaaaagatcgcattcattttcaataacctgtctcagtccaatatgactcagaaggtcgaagaactaaaagaaacagttaaggaagagtttatgccttgggtttctcaatacctggttatgaagagggtcagtatcgagcctaacttccactctctgtattctaatttcctcgatacgctaaaaaaccttattacacgtttctttaggctatgcacagagatgtgtgtagagatttcctatagggctcaagcagaacaacagcataatcccgcagcaaatccgaccatgattagagctaagtgctaccacaacctggatgccttcgtgagactgattgctctgctggtcaagcatagcggcgaagcgaccaacaccgttacaaagattaacttactgaacaaggtattgggtatcgtcgtcggggtgctcttgcaggatcacgacgtgcggcagtcagaatttcaacaactcccataccaccgaattttcatcatgttattgctcgagctgaacgcgccagagcacgtcctggaaacaatcaattttcaaacactgactgcattttgcaataccttccatattctccggcccaccaaagccccaggatttgtctacgcatggctggagctcatatcgcatagaatctttatagcaaggatgttggcacataccccccaacagaaaggttggcccatgtacgcgcagttactgattgatttgtttaagtatttagccccattcctgagaaatgtcgaactgaccaaaccaatgcagattctatacaaaggcaccctgcgggttctgctggtgctgctccacgactttccggagtttctgtgtgactatcactacggtttttgtgacgtcatcccaccaaactgcattcagctgcggaacctgatacttagtgcgttccctcgcaacatgaggcttccagaccccttcaccccaaacttgaaagttgatatgctgtcagaaatcaatatagccccccgcatcctcacaaatttcaccggagtcatgccgcctcagtttaaaaaagatctggacagttacctcaagacccggagcccggtgaccttccttagcgatttacgtagcaatctccaggtctcaaacgagcctggtaatcgttacaatcttcagctgattaatgcccttgttctctatgtcggcacacaggccatagcccacattcataacaagggctcgaccccatctatgtccaccattacccattctgcccacatggacatcttccaaaatttggccgtcgatctggataccgaggggagatacttgttccttaacgccatcgcaaatcagctccggtaccccaattcccacactcattacttcagctgcactatgctctatttatttgccgaagcaaacacagaggccattcaagaacagattacacgcgtccttctggaacggctgatcgttaacagacctcatccctggggcctgctcataacatttattgaactgattaagaatcccgcctttaagttctggaaccacgaattcgttcattgcgcccctgagatcgaaaaactctttcagtcggtagcccaatgttgtatgggacagaagcaagcccaacaagtgatggaagggactggagcctcttag

SEQ ID NO: 111185 - DNA, 4656 bp, synthetic construct
  misc_feature 1..4656: note = Description of Artificial Sequence: Synthetic coding sequence
  source 1..4656: mol_type = other DNA
atgaatctcgatagcctctctctcgcactatcccagatcagctatctcgtcgacaacctgactaagaaaaattaccgcgcttcccagcaggagattcagcacatcgttaaccgacacggccccgaagctgatcgccatctactgcggtgtctgttctcacatgtggacttctccggggatgggaagagctctggtaaagatttccatcagactcaattcctgatacaggagtgcgctctgttgatcaccaagcctaattttatcagcacactctcatacgcaattgacaatcctttgcattatcagaagtcacttaaaccggctccacatctgtttgcgcagctcagcaaggtccttaaactgtccaaagtgcaagaggtgatttttggactagccctcctcaatagtagttcatctgacctacggggttttgctgcccaattcattaaacaaaaacttcccgatttattaaggtcctacatcgacgctgatgtctcaggtaaccaggaaggaggctttcaagatatcgccatcgaagtgctccatttactcttgagccacttgctgttcggtcagaagggagccttcggagtgggacaggagcaaatcgacgcctttctgaaaacgctgcgccgggacttcccccaggagcgctgtcccgtggtgctcgcccccctgctgtaccccgaaaaaagagacatcctgatggatcgtatcttgccagattcgggcggggtagccaaaaccatgatggaatcatcacttgctgatttcatgcaggaggtggggtacggtttttgtgctagtatagaggaatgtaggaatattatcgtacagtttggcgttagagaggtaaccgcagcgcaagtggcccgagtgctgggcatgatggcccgcacccattctgggctgactgatggcattcccctgcagtccatatccgctccgggttccggcatttggagcgatggcaaggacaaatctgatggagcgcaggcccatacctggaacgtggaagtgttgattgacgtgttgaaagagttgaacccaagtcttaattttaaagaggtcacatatgaattagatcatccaggttttcagatccgggatagtaaggggcttcataatgttgtgtacggcatacagcgcggtttaggaatggaagtttttcctgtggatttaatatacagaccatggaaacatgctgagggccaactaagctttattcagcattcgctgatcaatcccgaaatattctgtttcgccgactacccttgccacacagtagcaacagatatcctcaaagccccccctgaggacgacaaccgggagatcgctacctggaagtccctcgaccttattgagtctctgctcaggctcgccgaagtagggcagtatgagcaagtcaagcaactgttctcatttcccatcaagcattgtcctgacatgctggtcttggcattgctgcagatcaatacttcctggcacactctgcggcatgaactcatttccacattaatgcctatctttttgggcaaccaccctaattcagccattatcctccactatgcatggcacgggcaaggtcagagtccctccattaggcagctcatcatgcacgccatggccgagtggtatatgcggggtgaacagtacgaccaagcaaagcttagccgcatactcgatgtcgctcaggatctgaaggctttgagcatgctgctaaacggaacgccttttgccttcgtcatcgatcttgcggccttggccagcaggcgggagtatctgaaattggacaagtggctgacagacaagatacgggagcacggggagcccttcatccaggcgtgcatgacctttctcaagcgacggtgtccgtcaatccttggcggcctcgccccagaaaaggaccagcctaaaagtgctcaactgccgcctgaaaccctggctacaatgctggcgtgcctgcaagcctgcgcagggagtgtgtctcaggagctctccgagacaatcctcactatggttgccaactgctctaacgttatgaacaaggcccgacagccaccccctggggtgatgcccaaagggcgacctcccagtgcctcttccctggatgctatttctcccgtccagatagatccccttgctggaatgacttctctgagcattggagggagtgccgcccctcatactcagtctatgcaaggttttcctccaaatttgggatcagcgtttagtaccccacagtcaccagctaaggcctttcctccattatccacccctaatcagactacagcatttagcggcattggaggattgtcttcccagttgcctgtcggcgggttggggacagggagtctgacagggatcggcactggggctctgggtctgcccgctgtgaacaacgatccgttcgtccagcgcaaacttggtacctccgggctcaaccaaccaacatttcaacagtccaagatgaagccttccgacctttctcaggtctggccggaggccaaccagcacttttctaaggagattgatgatgaggccaatagctatttccagcggatttacaaccatccaccgcatcccaccatgtctgtagacgaggttcttgagatgctacagcgcttcaaggatagcaccatcaaacgcgaacgagaggtctttaattgtatgctgaggaatctgttcgaggaatataggtttttcccacagtatccggacaaggagctgcatattaccgcgtgcttattcggcggaatcattgagaaagggctcgtgacctacatggccttgggtttggctcttcggtatgttctagaggccctgagaaagccatttggcagtaaaatgtattacttcgggatcgcagctctggaccggttcaaaaacagattgaaggactacccacagtattgtcagcatttggcatcaatttcccattttatgcagtttccgcatcatctgcaggagtacatcgaatacggccaacaatccagggatcctcccgttaaaatgcaaggcagcattaccacccccgggtccattgccttggcgcaggcccaggctcaagctcaagtgcctgccaaagctcccctggctggtcaggtctcaaccatggtcaccacctctacaacaactactgtcgcaaagaccgtgaccgtgacaaggcccacaggggtgagttttaaaaaggacgtgcccccgtcaatcaatacaaccaacattgacactcttctcgttgcaactgaccagactgaaaggatcgttgagccccccgaaaatatccaggagaaaattgcatttatatttaataatctctcacagagtaacatgacccagaaggtagaggagcttaaggagacagtgaaggaagagttcatgccatgggtctcccagtaccttgtgatgaaaagagttagcatcgagcccaattttcatagcctctattcaaactttctcgatacactgaaaaatcctgaattcaacaaaatggtactgaacgaaacatacaggaatatcaaggttctgctgacaagtgataaggccgcagctaactttagcgatagatctctgcttaagaatttgggtcattggctcggcatgataactctcgctaaaaacaagccaattcttcacacagatctggatgtcaaaagcttactgctggaggcttacgtgaaaggccagcaagaactgctgtacgttgtgccgtttgtcgcgaaagtcctggagagcagtatcaggtccgtagtgttccgcccccctaatccctggacaatggccataatgaatgtgctggccgagctgcatcaagaacacgaccttaaactgaacctgaagtttgagatcgaggttctctgtaagaatctggcactcgacatcaatgaattgaaacctggcaatttgctcaaagacaaggacagactgaagaatttggatgagcagctctctgcccctaagaaggacgtgaaacagcccgaggagttgcctccaattacgaccacgactacttcaactactccagccaccaacacaacttgcaccgcaacggttccaccccagcctcaatattcataccacgatattaacgtatattccctcgccggattagctccccatattacgcttaatccgactatcccgctctttcaggcccatccccagttgaagcagtgtgtgaggcaggccattgagagagctgtgcaggaattggtccatcccgttgtagatcggagcatcaagattgccatgacaacctgcgagcaaatcgtaaggaaggactttgctctggattctgaagagtcgcggatgaggatcgcagctcaccatatgatgaggaatctaactgccggcatggcgatgatcacatgcagggagccacttctgatgtctatatctactaacctgaaaaattcctttgcctccgctcttagggtcagttggctcttcccatggtaccgctacaaaacttattactgtctctcagtgattatcttcttcttcgtatacatctggcattgggcccttccattgatcctcaataatcaccacatctgcctgatgtctagcataatcctcgactgcaattcagtccgccagtcaattatgagcgtctgcttcttcttcttcttgctctattcacagcacgatgtctag

SEQ ID NO: 111186 - DNA, 951 bp, synthetic construct
  misc_feature 1..951: note = Description of Artificial Sequence: Synthetic coding sequence
  source 1..951: mol_type = other DNA
atgctgctgttggagttgaacgcaccagaacacgtcctggagacgataaactttcagactttgacagccttttgtaacacattccatattctgagacccacaaaggcacctggattcgtgtacgcctggctggagctgatcagccaccggatctttattgcaagaatgttagcacatacaccgcagcaaaagggctggccaatgtacgctcagctgctcatcgatctgttcaagtacttggccccctttctgaggaacgtggagctcaccaagcctatgcagatcctctacaagggtacactccgagtgctgttggtgctgctgcacgactttcccgagttcctgtgcgattaccactacggtttctgtgacgtcatcccacctaattgtatacagctgcgcaatctcatccttagcgcattccctaggaacatgcggcttcccgatccctttacccccaatctgaaggttgacatgctgtcagagattaatatcgccccccggattctgaccaacttcactggcgtgatgccacctcaatttaaaaaggaccttgatagttacctgaagacgcggtcaccagtgacatttcttagtgacttgcgctccaacctgcaggtttccaatgagcccggcaataggtacaatttgcagttgatcaatgctctcgttctctacgtcgggacccaggccattgcacacatccacaacaaggggtcaacacccagtatgagtacgatcacacattccgcccacatggacatatttcagaatctggctgtagacctagataccgaaggaaggtacctgttcctgaatgccattgccaatcaatcaggcacacagatcgccacactgactacatcagtggcaccctgttgtacattcttgcaacgccctatccgcaaaccttcaaagaatcgctcacaggagttcagctggaatggatag

SEQ ID NO: 111187 - DNA, 2778 bp, synthetic construct
  misc_feature 1..2778: note = Description of Artificial Sequence: Synthetic coding sequence
  source 1..2778: mol_type = other DNA
atggatcgtagcggctttggagaaatctcctctccggtgataagggaagccgaggtgacgcgcaccgctaggaagcagtccgctcagaaaagagtgttactccaggcctcccaggatgagaatttcggaaatacgacccccaggaatcaggttatcccgagaacaccgtcctcttttcggcaacctttcacccccaccagtaggagcctgctgaggcagcccgacatcagctgcatccttggcaccgggggaaagtctcccaggctgacccagtcatcaggcttctttgggaatttaagcatggttacaaatctggacgactccaattgggcggccgcattcagttctcagcggagcggacttttcacgaacacagagccacatagtatcacagaagatgtgaccatttcggctgttatgctgcgagaggacgaccccggggaggccgctagcatgtccatgttttctgattttctgcagagtttcctcaaacactccagttcaaccgtgttcgatctagtggaagagtatgagaacatctgtggttctcaagtaaacatcctctccaagatcgtgtcaagagccacacccggcttgcagaaattttcaaaaaccgcgtccatgctgtggctgctgcagcaagaaatggtcacttggagattgttagcctctctgtatcgggatagaatccagtcggccttggaggaggagtcagtgttcgccgtcacagctgttaacgctagtgaaaagaccgtggtggaagcgttgtttcaacgtgattcactggtgcggcagagccagctggtggtggactggctcgagagtatcgcgaaagacgaaattggagaattctccgataatatagagttttatgccaaatcagtgtattgggaaaatactctgcacacccttaaacagcgccagctgacctcgtacgtgggttccgttcggcctctggttactgaactcgatcctgatgctcctattagacagaagatgcccctggacgacttagaccgagaggatgaagtgaggctgctgaagtatctctttactcttataagagcaggaatgaccgaagaagcacagaggctgtgtaagcgatgtggacaggcctggcgagcagccacgcttgaaggttggaaactctatcatgacccgaacgtgaacggaggcacagagctcgaaccagtcgagggaaatccatataggcgtatatggaaaataagctgctggcgcatggcggaggacgaactgttcaacaggtacgagcgtgccatctatgctgcactgtccggtaacctcaaacagctgctcccggtgtgtgacacttgggaagacaccgtctgggcctatttccgagtgatggtggacagcctggtggaacaagagatccagacaagcgtggctactctcgatgaaaccgaagagttgcctagggaatatctcggcgccaactggactcttgagaaggtgttcgaagaactgcaggcaaccgataagaaacgtgtgttagaagagaaccaagagcactatcacattgtccaaaaattcctaatcctgggcgacatcgacgggctcatggacgaattttcaaagtggctttcgaagagccggaataaccttccagggcacttgctgaggtttatgacccacctcatcttgttttttcgaactttggggctgcaaactaaggaggaagttagtatcgaggttctcaaaacttacattcagctactgatacgagaaaaacacacgaacctgatagccttctacacatgtcacctgccccaggacctggcagtggcccagtatgccctgttcctggagagcgtcacagaatttgagcaacgtcatcactgccttgagctcgctaaggaagctgatctagacgtcgccaccattactaagacagtggttgaaaacatacgtaagaaggataatggcgagttttctcaccatgacctggcccctgctcttgataccggaactactgaagaggaccggctcaaaatagatgtgatcgactggcttgtctttgaccccgctcagcgcgctgaggcactgaaacagggcaatgcgatcatgagaaagtttctggcttctaaaaagcatgaagctgcaaaagaagttttcgtaaaaattccacaggattccattgccgaaatatacaatcaatgtgaggagcaggggatggaatcacctcttcccgctgaggatgataatgcaatccgagagcatctttgtatccgtgcttatctggaggctcacgaaactttcaatgagtggtttaagcacatgaattcggtgccacaaaaaccggcccttatcccccagcccaccttcacggaaaaggttgctcacgaacacaaagaaaagaagtatgaaatggacttcggaatctggaaaggtcacctagacgcccttaccgccgacgtcaaggagaagatgtacaacgtgctgttattcgttgatggcggatggatggtcgatgtccgcgaggatgcaaaggaggatcacgagcggactcatcaaatggttctgctcagaaaactgtgccttcccatgctttgcttcctactgcacaccatccttcacagcaccggccagtatcaggagtgtctgcagcttgctgatatggtgtccagcgaaaggcataagctctatcttgtattttcaaaagaagaattgcgcaaattgttgcaaaaactaagggagagctcactgatgctcctggatcagggcctggatcctctgggatatgaaatccaactgtag

SEQ ID NO: 111188 - DNA, 1623 bp, synthetic construct
  misc_feature 1..1623: note = Description of Artificial Sequence: Synthetic coding sequence
  source 1..1623: mol_type = other DNA
atggtccggaccgacggccatactctgtccgaaaaaagaaactaccaagtaactaattctatgtttggcgcctcacgtaagaaattcgtagaaggggtggactccgattatcacgatgagaatatgtattacagccaaagcagtatgttcccccacagaagtgaaaaggacatgctggcttctcctagcactagcggtcaactgagccaattcggagcgtctctgtacgggcagcaaagtgccctgggactgcccatgcgtggcatgtctaataacacaccacaactcaacagatctctgagccaaggcacacagcttccatcccacgtgacacctaccaccggagttcctaccatgtccttgcatactccaccatcccccagtcggggtatcctacctatgaaccctagaaacatgatgaaccactcccaggtaggtcagggaataggaatcccatccaggactaacagtatgtcctcatcaggactgggcagccctaataggtcatccccgtctattatttgtatgcctaagcaacagccctctcgccagcccttcaccgttaactccatgtctggctttggcatgaaccgaaatcaggcctttggtatgaacaactcactcagctctaatatcttcaatggaactgatggatctgagaacgtcactggacttgacctcagtgatttcccggccctggcggaccggaatcgccgagagggatctggaaaccctactcctctcattaaccctttagccgggagggccccttacgtgggcatggtgaccaaacccgcaaacgagcaatctcaggacttctctatccataatgaagactttccggcccttcctggctcaagttacaaagaccccacctcaagcaacgatgattctaaatccaacctcaacaccagcggaaagaccacctcatcgaccgatggaccaaaatttccgggagacaagtcatccactactcaaaataacaatcagcaaaaaaagggcattcaggtgttgccagatggccgggtgactaatataccccaaggtatggtgaccgaccagttcggcatgattggactactcaccttcattcgggcagccgagactgaccccggtatggttcacttagccctgggatctgatctgacaacattgggcctcaacctgaattctccggaaaacctctatccaaagtttgcaagtccctgggcctcctcaccctgtcgcccacaggatattgacttccatgtcccatccgaatacctgaccaatatccacatccgcgacaaactcgccgctatcaaactggggaggtatggggaggacctgctcttttacctatactatatgaatggtggtgatgtgctccaactgcttgccgccgtagagctctttaatcgggactggcgttatcacaaggaagagcgggtgtggatcaccagagctcctgggatggagccaacgatgaagaccaatacctacgagcgggggacctattatttcttcgactgcttgaactggcgtaaggtggctaaggaatttcacctggaatacgataaactggaggagagaccccaccttccctccacgtttaattacaatccagcacagcaggctttttag

SEQ ID NO: 111189 - DNA, 78 bp, synthetic construct
  misc_feature 1..78: note = Description of Artificial Sequence: Synthetic coding sequence
  source 1..78: mol_type = other DNA
atggtaagaaccgatggacatactctctcagagaagcgcaattaccaggtgacaaactcaatgtttggggcgtcgtag

SEQ ID NO: 111190 - DNA, 552 bp, synthetic construct
  misc_feature 1..552: note = Description of Artificial Sequence: Synthetic coding sequence
  source 1..552: mol_type = other DNA
atggtcagaaccgacgggcataccttaagtgagaagagaaactatcaggtgactaatagcatgtttggagcctccaggaaaaagtttgtggagggcgtggattctgactaccacgacgaaaatatgtattactcacagtccagcatgttccctcaccgatcagaaaaggacatgctggcctccccatctaccagcggccagctgtcccagttcggggcctcactctatgggcagcagtccgccctgggacttcccatgcggggtatgtctaataacactcctcagcttaacaggtctctgagtcaggggacacaactgcccagccacgtgacccctactacaggggttccaactatgagcctgcacacaccgccttcacctagcagggggatccttccaatgaaccctcgcaatatgatgaaccatagccaggttggccagggtattggtatccccagccggaccaattctatgagttcatccggactaggtagccctaatcgatcctccccatctatcatttgtatgcctaagcagcagccaagtcgctag

SEQ ID NO: 111191 - DNA, 1623 bp, synthetic construct
  misc_feature 1..1623: note = Description of Artificial Sequence: Synthetic coding sequence
  source 1..1623: mol_type = other DNA
atggtgcgcaccgacgggcacaccctcagcgagaagcgaaactatcaggtgacaaacagtatgtttggcgcatcccgaaaaaaattcgtggaaggtgtggacagcgactaccacgacgagaacatgtattacagccaatcatccatgtttccccacagaagcgaaaaggatatgctagccagcccctccacaagtgggcaactctctcaatttggagccagtctctacggacaacagtcggcattggggctgccaatgcgtggcatgtccaacaacacccctcagctcaaccggtcactcagtcagggcacgcagcttccaagtcatgttacccctaccactggggtccctactatgtctctccacaccccaccgtcaccttcaaggggaattctgcccatgaacccgaggaacatgatgaaccattcacaagtgggccaaggaatcgggattcctagcagaacaaactctatgagcagcagcgggctaggaagccctaaccggtcaagcccctcgatcatatgcatgccgaagcagcagcctagtcgccagccatttacagtaaactccatgtctggttttgggatgaacagaaatcaggcgtttggaatgaacaactctttgtcgtctaacatattcaacgggacggacggaagcgaaaatgtcacagggctcgacctgtcagactttcctgctttggcggatagaaaccgtagagaggggtctggcaatccaacccccctgattaaccctctcgcaggtagagctccgtatgttggtatggttaccaaacctgctaacgaacagagtcaggactttagcatacataacgaggattttcctgccctgccgggctcatcttataaagatcctacctcatcaaatgatgactccaagtctaatctaaataccagcggtaaaaccacatccagtaccgacggccctaagttccctggcgacaaatccagcacaactcaaaataataatcagcaaaaaaaggggatacaagtgttgccagacggtagggtcacgaacatcccacagggtatggtgacagaccaattcggcatgatcgggcttctcacatttattagggctgctgagacagatcccggaatggtccacctagcgctcggttctgacctgactacactgggcttgaacctgaattcccctgaaaacctatatccaaagttcgcgagtccttgggcctcctccccctgtcgaccacaggacattgatttccatgttccttctgaatatttgaccaatatacatattagagacaaactagccgccattaagctgggaaggtatggggaggatttgctcttctacctctattacatgaacggtggagacgtgctgcagctgctggctgccgtggagctgttcaatcgcgactggcgctaccacaaggaagaacgagtctggattactcgagcgccaggaatggagccaacgatgaagacaaatacatacgagaggggcacgtactacttctttgactgtctgaactggaggaaggtggccaaagagttccaccttgagtacgataagctcgaagagaggccccacctgccctccaccttcaattacaatcccgctcagcaggctttttag

SEQ ID NO: 111192 - DNA, 576 bp, synthetic construct
  misc_feature 1..576: note = Description of Artificial Sequence: Synthetic coding sequence
  source 1..576: mol_type = other DNA
atggtgaccgatcagtttggtatgatcggacttcttacattcattagggcagctgaaactgaccccggaatggtccatctggctctgggatccgatctaactactttgggactgaatctgaacagccccgaaaacctttacccaaaattcgcctcaccgtgggccagctccccttgtagaccacaagatattgatttccacgtcccaagcgaatatttgactaacatccatatccgtgataaactcgcagctataaaattagggcgatatggtgaggatctcctgttctatttatactatatgaacgggggcgatgtgctgcagctccttgccgccgttgagcttttcaaccgggattggcgctaccataaggaggagcgggtgtggataacaagggcgcctggaatggagccgacgatgaaaaccaacacgtatgagagaggaacatactacttctttgattgtctcaactggagaaaggtcgccaaggaattccacctagaatatgataaattagaggaacggccgcatttgccgtccaccttcaactacaatcccgcacaacaggctttttag

SEQ ID NO: 111193 - DNA, 966 bp, synthetic construct
  misc_feature 1..966: note = Description of Artificial Sequence: Synthetic coding sequence
  source 1..966: mol_type = other DNA
atggtccgcacggacgggcataccctgtctgagaaaaggaattaccaggtgacaaactctatgtttggcgctagcaggaagaagtttgttgaaggtgttgactcggattaccacgacgaaaacatgtattattctcagagctccatgtttccccaccgatccgagaaggacatgctggcgagcccatccacttcaggacaactctctcagttcggggcatctctctatggtcagcagagtgccctgggtcttcctatgcgtggcatgtcgaataatacaccccagcttaaccggtccttgagccagggcacgcagctaccgtcccacgttacgcctactacaggggtgcctacaatgtccctccatacaccaccctccccatccagaggcatactcccgatgaaccctcgaaatatgatgaaccattctcaagtgggccaaggcattggcatcccaagtagaactaatagcatgtcgtcaagcggcctcggtagccctaaccgcagtagcccgtcaataatttgtatgcctaaacagcagccgagccgtcaacctttcacggtgaatagtatgtctgggtttgggatgaacagaaatcaagcttttggcatgaacaattctctctcctcaaacatttttaatggcactgatggttcagagaatgtcacagggctggacctgtctgatttcccggccttggcagaccggaacagacgagaaggctcaggcaatccgacacccctgatcaatcccctggctgggagagctccatacgtgggaatggtgactaagcccgctaacgagcagtcccaggatttcagtattcataacgaggactttcccgccctgccaggaagctcatacaaagatcctacttcgagcaacgatgattccaagagcaacctgaatacctcgggtaagacgacctcctcaaccgatggccctaagttcccaggagataaatag

SEQ ID NO: 111194 - DNA, 978 bp, synthetic construct
  misc_feature 1..978: note = Description of Artificial Sequence: Synthetic coding sequence
  source 1..978: mol_type = other DNA
atgtccaccgcccgagaacagcctattttctctacaagggcacatgtgtttcagattgaccccgcaactaaacgcaattggattccggccgggaaacatgccctcaccgtgagttacttctatgatgctaccaggaatgtctacagaatcatcagtatcggcggtgcaaaagctatcattaatagtactgtcacgcctaacatgaccttcactaagaccagtcagaagttcggccagtgggccgattcccgagcgaacacagtttatggattgggatttgcctctgaacagcatctgacacaggtccccccctcacctctggtgtcagcaaacggacccggggaggaaaaactgtttaggtcccagagcgctgatgctcccggacccacagaaagagagcggttaaaaaagatgctaagtgagggcagtgtcggcgaggtacagtgggaggccgaatttttcgctcttcaagactccaataacaaactggctggagctctacgtgaagcaaatgccgctgcggcgcagtggcgccagcagctggaagcccagagggcagaagccgagagactccgccagcgagtggcagagctggaagcacaggccgcatctgaagtgacccctactggcgagaaggaagggctgggtcaagggcagtcactggagcagctggaagctctggttcagacgaaggatcaggagattcaaactttgaaatcccagacaggcggcccccgggaggcccttgaagcagcggaacgagaggaaacgcagcagaaggttcaagatctggaaacaaggaatgctgagctggagcatcagctgcgggccatggagagaagcttggaggaagctcgggcagagagagagagggcacgggctgaggttggccgagcggcacaacttctggatgtatctctgttcgagctgtctgagctgcgagaaggactggctaggctcgccgaagccgccccttag

SEQ ID NO: 111195 - DNA, 1716 bp, synthetic construct
  misc_feature 1..1716: note = Description of Artificial Sequence: Synthetic coding sequence
  source 1..1716: mol_type = other DNA
atgctcgaaactattctccggatgctcgacaacgattctatcctggtggacgctattcggaagattaaggacgatgtggaatactacgtggacagctcccaggatcccgactttgaagagaacgagttcctgtacgacgatttggatctcgaagatattccccaggccttagtcgcaaccagccccccttctcacagccatatggaagatgaaatctttaatcaatccagctcaactcccactagtaccacctcgtctagcccgatacccccctccccagctaactgcaccactgaaaacagtgaagacgataaaaaacggggcaggtcgacagatagcgaagtgtctcagagccctgctaagaacgggagcaagccagttcattctaatcagcacccacaaagtcccgcagttccacccacatatccctctggccccccacctgctgcctccgccctctcaacaacccctggaaacaatggcgttccagcaccggcggcccctccatctgcactaggtccaaaggcttcccccgcccccagccacaacagcggcacgcccgcaccttacgcacaggccgtggccccacccgccccatccgggccttctactactcaaccccgcccccccagtgtgcagccgtcgggcggaggaggcggcggttctggcggaggcggaagtagttcaagtagcaattcttcagccggcggaggggcaggcaaacagaatggagcaacatcttatagtagcgttgtcgctgatagccccgctgaggtcgctctgtcatcctcaggaggtaacaacgcctcctcccaggccttgggtccaccttccggcccacacaacccgccaccctccacgagtaaggagccttcagccgctgcacctactggcgccggaggcgtggctcccggaagcggtaacaatagcggtggaccctccctcctcgttcccctccctgtgaaccctcccagtagtcctactccatcgttctctgatgccaaggcagccggtgccctgttgaacgggccgccccaattctctacagctccggaaatcaaagccccagagccactcagttccttgaagagcatggctgaaagagcagctatctcctccggcattgaggatccagtccctacactacacttgaccgagcgtgatattatattgtcttccacatctgccccccccgccagtgcacagccgccactgcagctctccgaggtgaatatccccctttccttaggcgtatgtccactaggacccgtgccgttgactaaggagcagttataccagcaggccatggaggaagccgcatggcatcatatgccacacccttccgatagtgaacgcatccggcaatatttgccccgcaacccatgtccgacccccccataccaccatcagatgccgcccccacatagcgatacagtggagttctaccaaagactgagtactgagactctcttctttattttctattatttagagccacgcgacgttaggacggcctgggttgattccgaggccgggcctttgcgccatacctccgcgccgcttcccgtggctcactggttaactaggggccctagccctgcactgcttcagcagcctcaatcccgacctacaccactgtgtagctccgctcactcacaggcatccctggaaaccactggagaactgtcttctcccctgccaacgcctctactgtag

SEQ ID NO: 111196 - DNA, 2262 bp, synthetic construct
  misc_feature 1..2262: note = Description of Artificial Sequence: Synthetic coding sequence
  source 1..2262: mol_type = other DNA
atggccgacaaacgtaagttgcagggagagattgaccgctgtctgaagaaagtgagtgaaggagtggaacagtttgaggacatctggcaaaagctacataacgcagctaacgcaaaccagaaggaaaagtacgaggccgatctgaagaaagaaatcaaaaaattacagcgcttgcgtgaccagataaagacctgggtagcttctaatgagatcaaggataagagacaattgatagataatcgtaagctgatcgagacccagatggagcgattcaaagtggtggaacgggaaacaaagacaaaggcctatagcaaggagggactggggctggctcaaaaggtggaccccgctcagaaggaaaaagaggaagtgggacagtggcttacaaacaccattgataccctgaatatgcaggtcgaccaatttgaaagcgaggtcgaatcactatcggtgcaaactaggaagaagaaaggcgataaagacaaacaggaccgcatcgaggggttgaaaaggcacatcgaaaaacatcgatatcacgtcaggatgctggaaacaatcctgcggatgctcgacaatgacagcatcctggtggacgctatcaggaaaatcaaggatgacgtcgagtattacgtggattctagccaggatccagatttcgaagagaacgaattcctctacgatgacctcgacctggaggacattccccaggcgctggttgccacctcgccacctagccacagccatatggaagacgaaatttttaaccagagtagttctacacctaccagcacaacctctagtagccctattcccccatcccccgcaaattgtacaaccgagaactcagaggatgataagaagagagggcgcagtaccgatagtgaggtgagccaatcacccgcgaagaatggatccaaacctgtccacagcaaccagcacccccaatctccagccgtccctcccacgtatccctcagggcctccgcccgcagcctccgcccttagtacaacacctggaaataacggagtgcccgctcccgccgcacctccttccgctttaggcccaaaagcatcccccgcgcctagccacaatagcggaacaccggctccttatgcccaagccgtggcccctccagcccccagcggaccttccactacacaacctcggcccccaagcgtgcagccatcgggagggggaggagggggctctggaggcggcgggtccagcagttccagcaatagctccgccggcggcggggccgggaaacaaaacggagctactagctatagcagcgttgtggccgattcacccgccgaagtagctctcagttcatcaggggggaacaacgcgagttcgcaggctctgggtccaccgtctgggccccataaccctcctccgagcacctcaaaggagcccagcgccgctgccccaaccggggcaggcggcgtagccccgggttccggtaacaactccggcgggccctccctgctggtacctctgcccgtgaatcctccctccagcccaacaccctccttcagtgatgccaaagcagccggggcactgctcaatggccccccccagttcagtacagctcctgaaattaaggccccagaacctttgtctagtttaaagtcaatggctgagcgtgcggctatctcgtccgggatcgaggacccagtgccaactctgcatctcactgaaagagacatcatcctaagcagcacttccgctccaccagctagtgctcagccaccccttcagctgagtgaagtgaacattcccctcagtttgggtgtttgtccactgggtcccgtgcctctgaccaaggaacagctctaccagcaggccatggaagaagccgcttggcaccatatgccgcatccttcagacagcgagcgcatccgtcagtatctccctcgcaacccatgtcccacacctccttatcatcaccagatgcccccaccccacagcgacacagtcgagttttaccagcgtctgtctaccgagacactattcttcattttttactatctggagggcacgaaggcacagtaccttgcagcaaaagcgctcaagaagcaatcttggcgcttccacacaaagtatatgatgtggtttcagaggcacgaggaacccaaaaccataacagacgagttcgaacaggggacatacatctattttgattacgagaagtggggacaaagaaagaaagagggtttcaccttcgaatatcgatacctggaagatagagatctgcagtag

SEQ ID NO: 111197 - DNA, 867 bp, synthetic construct
  misc_feature 1..867: note = Description of Artificial Sequence: Synthetic coding sequence
  source 1..867: mol_type = other DNA
tgaaaagaaccctcagctgctgccccaacaggagctgggggcgtcgcccctggctccgggaacaatagcggaggccctagcctgctggtcccgctccccgtgaatccaccgtcttcgccaaccccaagcttcagtgacgctaaagctgcaggcgcccttctgaatggtcctccgcagttctccaccgcccccgagatcaaggcacccgaaccactgagtagcctgaaatctatggccgagcgggccgctatctcctcaggtattgaggatcccgtgccgacccttcatctgaccgaaagagatattattctttcaagcacgagcgcgccgccggcaagtgcccagcctccactgcagctgagcgaagtaaacatccctttgagcttaggagtctgtcccctcggacccgtacccctcactaaggaacagctttaccagcaggctatggaagaggcagcctggcatcacatgccgcatccgagtgattccgagaggattcggcagtatctgcctagaaacccttgtcccactccaccataccaccaccagatgccccccccacactccgacaccgtggaattctatcagaggctgtcgacggagaccctatttttcatcttttactaccttgagggcaccaaagctcagtacctcgcagctaaggcactgaaaaaacaatcttggagatttcataccaagtacatgatgtggttccagcggcatgaggagcccaaaacaataaccgacgagttcgagcaactggctcaaagtttgagcctgactaagtactcaagcctgtggctctcagctcagccagggactcccccctcacaccccccgctcggccagctgctgggtttgctatag

SEQ ID NO: 111198 - DNA, 2304 bp, synthetic construct
  misc_feature 1..2304: note = Description of Artificial Sequence: Synthetic coding sequence
  source 1..2304: mol_type = other DNA
atgagcaggtcccccgacgccaaggaggatcctgtggagtgccctttatgtatggagccactggaaattgacgacattaatttttttccttgtacctgcggctaccagatttgccggttttgttggcacaggattcgtacagacgagaacggactgtgtcctgcctgtaggaaaccatatccagaagacccggcagtatacaaaccactgagccaggaagagttgcagcgcataaagaacgagaagaaacagaaacagaatgaaagaaagcagaagatttccgaaaatagaaagcatctggcgtcggtgcgggtcgtgcagaaaaacctagtctttgtcgtgggcctgagccagagattggctgacccggaagtgcttaaaaggccagaatacttcggaaagttcggcaagattcataaagtcgtcattaacaactccacgagttatgcaggctcccaaggtccaagtgccagcgcgtatgtgacgtatattagatctgaagacgctttgcgtgccatacagtgcgtgaacaacgtggtggttgatgggcgaacactcaaggcgtccctgggcaccaccaaatattgcagctacttcctgaaaaatatgcagtgtccaaagccagactgcatgtacctgcacgagctgggagatgaggccgcgtcttttacaaaggaagaaatgcaggcaggcaaacaccaggagtatgaacagaaattgctacaggaattatacaagctgaacccgaatttcctgcaactatccactggtagcgttgacaagaataagaataaggtaactcccctgcagcgatacgatactccgatcgacaagccatccgacagcttatcaattggaaacggggacaatagccaacagatctctaattctgatactccctcacctccccctgggctgtccaagtcgaacccggtgattcctataagttcatccaatcactcagcccggagcccatttgaaggtgctgttaccgagtctcaaagcctgttctctgacaacttcaggcaccccaaccccatcccctccgggctgcccccattcccctctagcccacagactagcagcgattggccgacagcacccgagcctcaaagcctgttcacttcagaaaccattcccgtgtcttccagcactgactggcaggccgctttcggcttcggctcctcaaagcagccagaagacgacctgggttttgacccattcgacgtgacacggaaggcacttgccgacttgatagaaaaggaactgagtgtgcaagaccagccatccttgtctccgactagcctgcagaacagcagcagtcacacaaccactgcgaagggtcccggtagtggctttctccaccctgccgccgcaacaaatgctaactccctcaactccaccttctctgtgctgccccagcggtttccccagttccagcagcaccgcgccgtctataatagtttctccttcccaggacaggcagcccgatacccctggatggcctttcctcggaactctatcatgcacctcaaccatacagctaaccccaccagcaactccaactttctggacttgaacctgccccctcaacataacacgggactgggaggaatcccagtcgcagataattcctcttcggttgagtccttaaacatgaaagaatggcaggacggtttgcgagcattattgcccaatataaacatcaactttggcggactgcctaactcttcatctccctccaacgccaaccattctgctcccacttccaacacagctaccacggactccttgtcgtgggatagcccaggttcatggacagaccctgctattattacaggcataccagccagcagtggcaacagcttggattctctgcaggatgataaccccccccactggctgaaatcattgcaagcgctgacagagatggacggaccgtctgccgcaccctcgcagacccatcatagtgcacccttcagtacacagattcctctgcaccgtgcatcctggaatccctacccacctccctctaatccatcctcattccattcaccaccgcctgggatctactatcgcgttcaacactggaccgccatccggcagcggggcgcaacaatccggaagtgtaggatttgcccaactctgttcagcccctcacagcccacaacacacagctccctgctcatttcttatgtgcttaaaaatccagtgccggaccagttcttcttctccctgacaccagatgcaatgcgctcccagggacactaccatctcttcatcaactgtaaaaacttctgttag

SEQ ID NO: 111199 - DNA, 1728 bp, synthetic construct
  misc_feature 1..1728: note = Description of Artificial Sequence: Synthetic coding sequence
  source 1..1728: mol_type = other DNA
atgagccgtagtcccgacgccaaggaggaccctgtcgagtgccccctctgtatggagccattagagattgatgacatcaatttctttccttgtacttgcggataccagatttgcagattctgttggcaccggattcgcactgatgagaacggcctttgtcctgcttgccgcaaaccatatcccgaggaccccgccgtctataagcctctgagccaggaggagctccaaagaatcaagaacgagaagaagcagaaacagaatgaaagaaaacaaaagatcagcgaaaaccgcaaacatttggcgtccgtaagggtcgttcagaagaatttagttttcgttgtgggcctgtcccaacgcctggccgaccccgaagtgctgaagaggcccgagtacttcggcaagttcggtaaaatccataaagttgtgataaacaattccacttcatacgcgggatctcagggtccatctgcctcagcgtatgtgacttacataagatccgaagatgctctccgtgctatacagtgtgttaacaatgtggtggtcgacgggcgtacactcaaagctagcctgggtacaacgaaatattgctcctacttcctgaagaacatgcagtgccccaagcccgactgtatgtatctccacgaactcggcgacgaagccgcaagctttacaaaggaagagatgcaggccggaaagcaccaggaatacgagcagaaactgctgcaggaactgtataaattgaaccccaattttctacagctcagcacaggcagcgtggataaaaacaaaaataaagttacacccctacagaggtacgacacccccatcgacaagccgtctgattccctatccatcggcaacggtgacaactcgcaacaaatcagcaactccgacactccgtctcctccgcccggccttagcaagagtaatccagtcattccaatttcctcctcaaaccattcggctcgcagcccttttgaaggggccgtgaccgagtcacaatctctgttctcagacaactttcggcatccaaatcctattccttctgggctccctccatttccatcttcccctcagacctccagcgattggccaacagctcccgagccccagagcctgttcacatccgaaactatcccagtttcctcgtccactgactggcaggcggcatttggattcggcagtagcaaacagcccgaagacgaccttggctttgatccttttgacgtaaccagaaaagctctcgccgacttaatagagaaggagttgtcagtccaagatcaacccagcctctcgcctactagcctacagaacagttcttctcatactaccaccgccaagggtcccggatctggctttcttcacccagcggccgcgactaacgccaatagcctaaactctacattttcagtgctgcctcagcggttccctcagtttcagcagcatagagccgtatacaatagtttctcgttccctgggcaagcagcgagatatccttggatggctttccctcgcaacagcatcatgcatctcaatcacactgccaaccctacctccaatagtaacttccttgacctgaaccttccaccccaacataatactggcctcggagggattcctgtcgccggggaggaggaggtgaaggtgtccaccatgcccctgagtacatcttctcactcactgcagcaggggcagcagccaacgtctcttcacacgacagtggcatag

SEQ ID NO: 111200 - DNA, 1302 bp, synthetic construct
  misc_feature 1..1302: note = Description of Artificial Sequence: Synthetic coding sequence
  source 1..1302: mol_type = other DNA
atgagtagatccccagacgctaaggaggatcctgtggagtgtccactgtgcatggagcctctcgaaattgacgacattaacttcttcccatgcacttgcggttaccagatttgtcgattctgctggcaccgaatccgcacggacgaaaacggtctgtgtcctgcctgccgcaaaccttatccagaagatccagctgtttacaaacctctaagccaggaagagttgcagcgaatcaagaacgagaagaagcagaaacaaaacgagaggaaacaaaagatatcagagaatcgtaaacatctagctagcgtgcgcgtggtacaaaagaatctggtcttcgttgtcgggctctcccaaaggctagcagatccggaggtccttaaaaggcctgagtatttcggcaagtttggcaaaatccataaagtggtaattaataactctacttcatatgccggatctcagggtccgtccgcttctgcatacgtgacctacataagaagcgaagacgcactgagggcaatccagtgcgtgaacaacgtggtggttgatggcaggacactgaaggccagccttggcactactaagtattgctcctattttttgaaaaacatgcagtgccccaaacctgattgcatgtacctccacgagctgggggacgaagccgcgtcgttcaccaaagaggaaatgcaagccgggaaacatcaggaatatgagcagaaactcctccaagagctatataaattaaacccgaattttctacagcttagcactggctcggtcgataaaaataagaacaaggttacccctttgcaaagatacgatacacccatagacaaacccagcgatagccttagcatagggaacggtgacaattctcagcagatttcaaactccgacacaccatcgcccccacctggcttgagtaaatcaaatccagtcatcccaattagtagcagcaaccattcagcccgatctccattcgagggagcagtgactgaatcacagtcattattctccgataattttcggcatcctaacccgatccctagcgggctgccgccatttcctagttcaccacaaacaagttctgattggccgactgcgccagagccccagtccctgttcacctccgagaccatccctgtgtcatcctctactgactggcaggccgcattcgggtttggaagctcaaagcagcccgaagacgacctgggctttgaccctttcgacgtaaccaggaaagcattggcagatctcactgagccaattgagcgaaagcggctggctgtcctgaagcgacgatag

SEQ ID NO: 111201 - DNA, 1920 bp, synthetic construct
  misc_feature 1..1920: note = Description of Artificial Sequence: Synthetic coding sequence
  source 1..1920: mol_type = other DNA
atgtctcgcagtcccgacgccaaggaggaccctgtggaatgtcccttatgcatggagcccctcgagatcgacgacatcaatttcttcccttgtacatgtggctaccagatctgcagattttgttggcacaggatcaggaccgacgaaaacggcctctgtcctgcatgccggaagccatacccggaggaccccgccgtgtacaagccactgtcacaggaagaactgcaacgcatcaaaaatgagaagaagcagaagcaaaatgaaaggaagcagaagatctctgagaatcggaaacatcttgcgtccgttcgagtcgtgcagaagaacctcgtctttgtggtgggattgtcacagaggttagccgatcctgaagtgttgaagcggcccgagtactttggaaagtttggaaaaatacataaggtcgtcattaacaacagtacatcctacgctgggagccagggccccagcgcctccgcgtatgtgacgtacattcggtcagaagacgcattgcgcgccatccaatgcgttaataacgtcgtggtggacggccgcaccctgaaggcatctctcggcaccactaaatactgctcatacttcctgaagaacatgcagtgccccaagcccgactgtatgtacctgcacgaacttggagacgaagcagcatcattcactaaagaagagatgcaggccgggaaacaccaggaatacgaacagaagctgttgcaggaactatataagttaaatccgaacttccttcagttgtcgacgggttccgttgataaaaacaaaaacaaagtgactcccttgcagagccctattgataaacccagtgactccttgagcattggtaatggggacaacagccaacagatcagtaattcagacactccctcgcctcctccaggactgtccaaatcgaatcctgtgatacctatctctagctcaaaccattcagccagatcaccctttgagggtgctgtcacagagtcccagagtctcttcagcgacaatttccggcatccgaatcctatccccagcggcctgccacctttccccagctccccccaaacctccagtgattggcccaccgcacctgaaccacaaagtttattcaccagcgagaccataccagttagctcatctaccgactggcaggccgcgtttgggtttggaagcagcaagcagccagaagacgacttgggcttcgatccatttgatgtcaccaggaaagctctggccgacctgattgaaaaggagctgtcagtccaggatcaaccttctctctccccaacatccctgcaaaattcgagcagccatacaacaactgcgaaaggtccgggatccggctttttgcaccctgccgccgccaccaatgcaaattctctaaattccaccttttctgtcttgcctcagcggtttccacaattccagcagcaccgcgccgtttataacagcttttcttttcctgggcaggcggcccggtacccatggatggcattccccagaaattccataatgcacctgaatcacacagcgaaccctaccagtaactcgaacttcctcgatctcaatctgcccccgcagcataacacaggactgggcggcattcctgtggccgggattcccgcctctagcggtaacagcttagattcactccaagacgacaatcctccacactggctgaagtccctacaggcgctgacagagatggatggccccagcgccgctccatctcagactcaccatagcgcccctttctctacccagattccactgcaccgagcttcatggaacccatatcctcccccaagcaatccatctagtttccattccccaccaccaggctttcagaccgctttcaggcctccatctaaaacacccacagatttgctgcagagcagtacattggataggcactag

SEQ ID NO: 111202 - DNA, 1302 bp, synthetic construct
  misc_feature 1..1302: note = Description of Artificial Sequence: Synthetic coding sequence
  source 1..1302: mol_type = other DNA
atgtctcgctctccggacgctaaggaggaccctgttgaatgcccgctgtgcatggaacctttagagattgacgatatcaacttttttccgtgtacctgcggataccagatctgcaggttctgctggcacaggattcgcaccgatgaaaatggtctgtgccccgcgtgtcgaaaaccatatccagaggatcctgcagtgtacaagcccctgagccaggaggaactccagaggataaagaacgagaagaaacaaaagcagaacgagcgtaagcagaaaatctccgaaaacaggaagcacctcgcttcagtgcgcgttgtgcaaaagaaccttgtgttcgtggttggactgagccagaggctcgccgatcccgaggtcctgaagcgaccggagtatttcggaaagtttggtaagatccacaaggtggtaatcaataactctacctcctatgccggatcacaaggcccatccgcaagcgcgtacgtgacatacatacggagcgaagacgccctcagagcaatccagtgcgtgaacaacgttgttgtggacggccggacactgaaggctagcttggggacgacaaaatactgctcatacttccttaagaacatgcagtgtccaaaacccgactgtatgtacctgcatgagctgggcgatgaggctgcttcattcaccaaagaagagatgcaggctgggaagcaccaggagtacgagcaaaaactcttgcaggagctgtataagttgaaccccaatttcttgcagctctccacaggctctgtggacaagaacaagaacaaggttacgcctttacagcgctacgatacgcccatcgacaaaccttccgattcactgtcaattggtaacggagataattcccagcagatttccaatagtgatactcccagccccccaccgggtttaagtaagagcaaccctgtgattccgatcagcagctccaatcattccgcgaggtccccctttgaaggagccgtgaccgagagtcagagcctgttctcagacaactttcgacacccaaacccaattccatccgggttgcccccctttcccagcagcccacagactagtagtgactggcccaccgcgccggagcctcagtcactctttacctctgagactatccctgtgtcatcctctaccgactggcaggcggcctttgggtttggttctagtaagcagcctgaggacgacctgggcttcgacccttttgacgtgacccgtaaggcacttgcagacctcacggagcccatagagcgaaagcgtctagctgtattaaagaggcggtag

SEQ ID NO: 111203 - DNA, 1929 bp, synthetic construct
  misc_feature 1..1929: note = Description of Artificial Sequence: Synthetic coding sequence
  source 1..1929: mol_type = other DNA
atgtcgcgaagtcccgacgccaaggaggacccggttgaatgtccactgtgtatggaaccattagaaatcgacgatatcaacttctttccctgcacttgtggataccagatctgtagattctgctggcaccgcattaggacagacgagaacgggttgtgccctgcgtgtcgaaaaccttatcctgaagaccctgccgtatataaaccgctgtcacaagaggaactgcagagaattaagaatgagaaaaaacagaagcagaatgagagaaagcaaaaaatcagcgagaaccgcaagcaccttgccagcgtccgtgtcgttcagaaaaatctggtcttcgttgttggactctcccaacggctggctgacccagaggtccttaagagaccagagtactttgggaagtttggtaaaatacacaaagtggttattaacaactctactagttacgctggtagccaggggcctagtgcctcagcctacgttacctacatcagatccgaagacgccctaagagcaattcaatgtgttaataacgttgtggtcgacggtcgcaccctgaaagccagcttgggcactacgaagtactgcagttactttctgaagaatatgcagtgtcccaagccggactgtatgtacctccacgagctgggagatgaagcggcctcattcaccaaagaagagatgcaagccggcaagcatcaggaatatgaacagaagctattgcaggagctctacaaactgaatcctaatttcctgcagctcagcacgggctcagtggacaagaacaaaaataaggtgactcctctccaacggtatgacacaccaatcgacaaacccagtgacagtctaagtataggaaatggggacaactcgcagcagatctcaaactctgatacacccagtcccccacctggtctctccaaaagcaaccccgtcatacccatttcttccagtaaccacagtgcaaggtcgccgttcgagggggcggttacagagtcccaatcccttttcagtgataactttcggcatccaaaccctatcccctccggactgccaccttttccatcgtccccacaaacaagctccgattggcctacggcccctgaaccacaaagcttgtttacctcggagacaattcccgtatcttccagtaccgattggcaagcagctttcggcttcggatccagcaaacagcccgaggatgatctcggtttcgatccattcgatgtcactcgaaaggccctggccgatctgattgaaaaggagctgtctgtgcaagaccaaccgagtttatcacccacatccctgcaaaatagctccagccacactaccacagcaaagggtcccggtagtgggtttctgcaccccgccgccgctaccaacgccaatagtctgaacagcaccttttctgtgctgccccagaggttccctcaatttcagcagcacagagcagtctacaacagtttctctttccccggccaggctgcacgctacccatggatggcctttccaaggaatagcatcatgcatctgaaccacactgctaatcctacttcaaattctaattttcttgatctaaatttgcccccccagcataatactgggctggggggtattccagtcgccggaattcccgcttcctcaggaaacagcctagacagcctccaggatgataatcccccccactggctaaagagcctccaggccctcacggagatggacggtccttcggccgcaccttctcaaacccaccacagtgccccctttagtacacaaattccattacaccgtgcctcctggaacccttatcctccaccaagcaacccatcgtccttccatagccctccacccgggtttcagactgcattcaggcccccctccaagacccccacagaccttcttcagagttccactctggacagacattag

SEQ ID NO: 111204 - DNA, 1719 bp, synthetic construct
  misc_feature 1..1719: note = Description of Artificial Sequence: Synthetic coding sequence
  source 1..1719: mol_type = other DNA
atgagcagaagccccgacgccaaagaggatcctgtggagtgccctctctgcatggaaccattggagatcgacgacattaatttctttccatgcacttgtggctatcagatatgtcgcttctgctggcatcgtatccgcaccgatgagaacggcctctgtccagcctgccgtaagccataccccgaagatcctgcggtctataaacccctttcacaggaggaattgcaacgcattaaaaacgaaaagaagcaaaagcagaatgagcggaagcaaaaaattagcgagaaccgcaagcacctcgcatcagtgcgcgtggtgcaaaagaatctggtattcgtcgtcggtctgagtcagcggctcgccgatcccgaggtcctcaaacgaccggaatattttggaaagtttgggaaaattcacaaggtggtaataaacaactccaccagctatgccgggtctcagggcccctctgctagtgcctacgttacgtacattaggtcagaagatgctttgcgtgcaattcaatgcgtcaataacgtggtggtcgatgggcgaactctgaaagcatccttaggcactacaaaatactgctcctactttctgaaaaatatgcagtgcccgaaaccggattgtatgtacctccacgaactcggagatgaggctgccagctttactaaagaggagatgcaggctggaaaacaccaggaatatgagcagaaactcctgcaagagctatataagttgaaccctaattttttacagctgtctactggctctgtggacaagaataagaacaaggtaacaccgctccagtcccccattgacaaaccttccgactcactaagtatcggaaatggcgataactcccagcagatcagcaatagtgataccccgtctcccccccccggcctgtctaagagcaacccagtcatccctattagctccagtaaccattcggccagatcaccttttgagggtgctgtcaccgagtcccagtccctcttctcagacaactttcgccatcctaaccctatacctagtggcctacctcccttcccgtcatccccccagacatcttctgattggcccaccgctccagaaccccagtccctgttcacgtcagagaccattccagttagctctagtactgattggcaggcagctttcggctttggcagttcaaaacaacccgaagatgacctggggttcgacccatttgatgttacccggaaggcacttgccgatctgatcgagaaagagctttcagtacaggatcagccatcgctgagtcctacatccctacagaattctagctctcacacgacgactgccaagggacctggcagtggttttctgcacccagccgcggctaccaatgctaactcgctcaactctacattcagtgtcttaccccaacggttcccacagtttcagcagcaccgggctgtttataactcttttagttttccggggcaagcagcccgctatccctggatggccttcccccgaaattccattatgcacctaaatcacacagccaatccaacctccaactcaaactttttggacttgaaccttcctccccaacataacacaggcctcggtggcattccagtggctggtgaggaagaagtgaaggtgtcgaccatgcctctgtcaaccagcagtcactcactgcaacagggccaacagcccacttctctccataccacagtggcttag

SEQ ID NO: 111205 - DNA, 2142 bp, synthetic construct
  misc_feature 1..2142: note = Description of Artificial Sequence: Synthetic coding sequence
  source 1..2142: mol_type = other DNA
atgagccggtcccctgatgccaaggaggacccagtggaatgtcccctgtgtatggagcctctcgaaatcgacgacatcaatttttttccatgcacttgtggttatcaaatctgccggttttgctggcaccggatcagaaccgacgagaacggcctttgcccggcctgtaggaaaccctaccccgaggaccctgcagtctataagcctctgagtcaagaggagcttcaacgtatcaagaatgaaaaaaagcagaaacagaacgaacgtaaacagaagatctcggaaaaccgaaagcacctggcctctgtccgtgtcgtgcagaaaaacctggtgttcgtggttggactcagccagcgcctggcagaccctgaggtgctaaagcggccggaatatttcggcaaattcgggaaaatccacaaggtggtgattaacaactctacctcctatgctggctctcagggcccttcggcaagtgcttacgtcacctatatcagatctgaagacgctctacgcgcgattcaatgcgtgaacaatgtcgtggtagacggccgaactcttaaagcttccctgggcacgacaaaatactgctcgtacttcctgaagaacatgcagtgtcccaagccagattgtatgtatctgcacgaattgggggacgaagccgcttcatttactaaggaggagatgcaggctgggaagcaccaggaatacgagcagaagctactgcaggagctgtacaagcttaatcccaattttctgcagctcagtacgggatctgtggacaaaaataagaataaagtcacccccctccaacgttacgacacacccatcgataagccctcagacagcctctcgatcggcaacggagacaattcgcagcaaatttcaaattcagataccccttcgcccccacctggcttgagtaagagcaaccctgtgatccccatatcatcctctaaccattcagcccgcagcccattcgaaggagccgtaacagagtctcagagtcttttttctgacaatttccgccaccctaatccgattccctcaggtctgccgcctttcccatctagtccacaaacttcatccgactggcccactgcccctgagcctcagtcacttttcacatctgagacgatcccggttagcagctccactgattggcaggcggccttcggattcggttcatccaagcaacctgaagacgacctcggatttgatccattcgacgtgacacgcaaggctcttgccgacctgatcgagaaggagctgagcgtccaggaccagccatctctttcgcccacctcattgcagaattcgtcctcacatacaacaaccgccaagggcccgggttcaggcttcctgcaccctgccgcggcaacaaatgccaacagtctgaactcaacgttcagcgtcctgcctcaacgttttcctcagttccaacagcacagggcagtttacaactccttctcatttccggggcaggcagccaggtacccctggatggcctttcctagaaattcaataatgcacctcaaccataccgctaatcccacgtctaactcgaacttcctggaccttaatctgcctccacaacacaacacaggcctgggtggtattcctgttgcagataatagcagttctgtcgagtcgcttaacatgaaggaatggcaggacggcctgcgtgcactgctcccaaatatcaatataaactttggggggctgcctaactcgagttcccccagcaatgcaaatcactctgcacccactagcaacacagcgacaaccgattccctgtcttgggactctcccggctcttggaccgacccagccatcatcacaggcatcccagcctcatccgggaactcactggactcccttcaagacgacaatccgccgcactggctcaagagtctgcaagcactgacagaaatggacggaccatccgccgctcccagccagacacaccacagcgcaccttttagtactcagattcctttgcacagagcttcctggaatccgtatcccccgccgagcaacccgtctagttttcactcccccccgccagggtttcagactgcttttagacctccatccaagacacctactgacctgctccagtcatcaactcttgatcggcattag

SEQ ID NO: 111206 - DNA, 1674 bp, synthetic construct
  misc_feature 1..1674: note = Description of Artificial Sequence: Synthetic coding sequence
  source 1..1674: mol_type = other DNA
atgccaaaagagaagtatgagcccccggacccgagacgtatgtatacaattatgagttccgaagaggccgccaatgggaagaaatctcattgggccgagctcgaaattagtgggaaagtgcgatccctctccgccagcttgtggtcactaacacacttaacggctttgcacttatccgacaattccttgagccgaatcccctctgatatcgcaaagctgcacaatctggtctatctggatttgtcttccaataagatacgatcacttccggccgagttagggaatatggtgtcactccgggagctccacctgaacaacaacctgctgcgggtgcttccctttgagctgggcaagctctttcagcttcagacactggggttaaaaggtaacccgctgacacaggatatccttaacctgtaccaggagcctgatgggacgagacggttgctcaattatctcctcgacaatcttagtggaaccgccaaacgcattactactgagcagcctcctccgcgctcctggattatgttgcaagagccagacagaacacgacccacagctctattttccgtcatgtgctataacgtactgtgtgataagtacgcaacccgacagctgtacggctattgtccctcatgggccctaaactgggactacaggaagaaggcgattatccaggaaattcttagttgcaatgcggatatcgtgtccctgcaggaagtcgagaccgaacaatactactcattttttctggtggagctgaaggagagaggctacaatggctttttcagtcctaaatcacgggcacgcactatgtcagaacaagagagaaagcacgtggatggatgcgcaatcttcttcaagacagagaaatttacacttgttcagaagcacactgtggagttcaatcagctggccatggctaatagcgaagggtctgaggctatgctgaacagggtcatgaccaaggacaatataggcgtggcggtgctccttgagctcaggaaggaatcaatcgagatgccttcaggaaagccccatctgggcacggagaagcaactgattctggtggccaatgctcacatgcactgggaccctgagtattcggacgtgaagctggtacagacaatgatgttcctcagtgaggttaaaaatattattgacaaggcgagccggaatttaaagtcaagtgttctcggagaatttggaacaatccctctagtgctgtgcgcagacttgaactccctccccgattctggagtcgttgaatatttgagtacagggggagtcgagacaaaccataaagattttaaggagttacggtacaacgaatctctgacgaatttctcttgtcacggcaaaaatggcaccacgaatgggcgaattacccatggctttaaactgcaatccgcctatgaaagcggattaatgccatacactaactatacattcgattttaaggggatcatcgactatatattctactcgaaaccacaactgaacacgctgggcattctggggccgctcgatcaccactggttggtggagaacaacataagtggttgcccgcacccactcatcccctctgaccatttttcactgtttgcccaattagaactgcttctgccatttttgcctcaggtgaatggcatccatctgccaggccgcagatag

SEQ ID NO: 111207 - DNA, 1674 bp, synthetic construct
  misc_feature 1..1674: note = Description of Artificial Sequence: Synthetic coding sequence
  source 1..1674: mol_type = other DNA
atgcctaaggaaaagtacgaacctcccgaccctcgtcggatgtataccatcatgtcgagtgaagaggccgccaacggtaagaagtcacattgggctgaactggaaatatccgggaaggtgaggtcattgagcgcttccttgtggagcctgacccacttgactgctctgcacctcagcgacaactccttatcaaggatccctagcgatatcgccaagttgcataatctggtttatcttgacctatccagcaacaagatacgctcccttccagccgaactgggaaacatggtctccctccgcgaactgcacctgaataataatttacttagggtcttgccttttgagttaggcaaactatttcagctccaaactctgggcctcaagggcaacccccttacccaggatatcctgaatctgtatcaggagcctgacgggaccagaaggctcttaaactatttattagacaacctcagcgggactgcgaaaaggataaccaccgagcagccgcctcctaggtcctggataatgctccaggagccagatcgtacacgccccacagccctctttagcgttatgtgttataatgtcctctgcgacaaatatgccacaagacagttatatggttattgtccatcttgggccttgaactgggactaccgaaaaaaagcaattatccaggagatcctgtcctgtaacgccgatatcgtgtccctgcaggaagtggagactgaacagtattatagtttttttctggtagagttgaaggaaaggggctataacggattttttagccccaagtcccgagcaagaaccatgagtgagcaggaacgcaagcatgtcgatgggtgcgccatcttcttcaagaccgagaagtttaccctggtccagaagcatacggtggagttcaatcagctagctatggccaacagcgaggggtcagaggccatgctgaatagagtgatgacaaaggacaatattggtgtggccgtccttctcgagttgcgcaaggagagcatcgagatgcccagcggcaaacctcaccttggaacagaaaaacagctgatactagtggcaaacgcacatatgcactgggatcctgaatattcagatgtgaagctggtccaaacaatgatgttcctgtccgaagtcaagaacatcattgataaagcgtcacgtaacctgaaatcctccgtgctaggggagttcggtacaatcccactggttctgtgcgccgatctcaactccctgccagactctggcgtcgtggaatatctgtcgaccggaggagtggaaacaaaccacaaagattttaaagagttgcgttacaacgagtccctgacaaacttctcatgccatgggaagaatggcacgaccaacggccggattactcacggcttcaagctccagtctgcttacgagtcgggcctgatgccttataccaactacacttttgactttaagggtataattgactatatattctactccaagccccagctgaatacgttaggaatcctcggtcccttagaccaccactggctcgttgagaataatatctcaggttgccctcacccactgattccgagcgaccacttctcactgtttgcccagcttgagctcttgctgcccttcctgcctcaggtcaacggcatccacctgcccgggcggcgctag

SEQ ID NO: 111208 - DNA, 858 bp, synthetic construct
  misc_feature 1..858: note = Description of Artificial Sequence: Synthetic coding sequence
  source 1..858: mol_type = other DNA
atgccagccgcaacggtggatcactctcaacggatttgtgaagtgtgggcctgtaaccttgacgaggagatgaagaagattagacaggttatcaggaaatataactacgtcgccatggataccgaattccccggggtggtcgcacggccaatcggagaattcaggtctaatgcagactatcagtaccaactccttcggtgcaatgtggacctgctgaaaatcatccaactcggcttaacattcatgaatgaacaaggcgaatatcctcccgggacaagcacctggcagttcaattttaagttcaacctaacagaagacatgtacgcacaggattcaatcgaactgttaactacctccggaatccagttcaaaaaacacgaggaggagggcatcgaaactcagtattttgcagaactcctgatgacctcaggagtcgtgttatgtgagggagtcaaatggctgtctttccactcggggtacgacttcggatacttgatcaagatactaaccaattctaatttgcctgaagaagaattagattttttcgaaattctccggctcttttttcctgtgatttacgatgtcaagtatttaatgaagagctgtaaaaatctgaaggggggattgcaagaagtcgccgagcagctcgagctggagcggattggcccacagcatcaggccggcagcgacagcctgctgactggtatggctttcttcaaaatgcgggagatgttttttgaggatcatattgacgatgctaaatattgcggacatctgtatggtctcgggtcaggctcaagctacgtgcagaacggaacaggcaatgcatacgaggaggaggccaacaaacagtcctag

SEQ ID NO: 111209 - DNA, 126 bp, synthetic construct
  misc_feature 1..126: note = Description of Artificial Sequence: Synthetic coding sequence
  source 1..126: mol_type = other DNA
atgcccgctgcaactgtggaccactcgcagcgtatctgtgaagtctgggcatgcaatcttgatgaggagatgaaaaaaatccggcaggtaatccgcaagtacaactatgtggcgatggacacttag

SEQ ID NO: 111210 - DNA, 735 bp, synthetic construct
  misc_feature 1..735: note = Description of Artificial Sequence: Synthetic coding sequence
  source 1..735: mol_type = other DNA
atgcccgcggcaacagttgaccattcccaacggatatgtgaggtttgggcctgcaacctggacgaggagatgaaaaaaattagacaagtgataaggaaatacaactacgtggccatggacaccgaattccccggggtcgtggcccgccctatcggcgagtttcggtccaacgctgattaccagtatcaattactccgctgcaatgtggatctccttaagattatccagctgggattgacatttatgaatgaacagggagagtatccgcccggcactagcacctggcagtttaacttcaaattcaatctgaccgaggatatgtatgcccaagattcaattgagttactgaccacctcagggattcagttcaaaaagcacgaagaggaaggcatcgagacgcaatatttcgccgagctgctcatgacctctggtgttgtgctgtgtgagggcgtaaagtggttatcattccattccgggtatgacttcggatacttgatcaaaatcctaacaaatagtaatctgcctgaagaagagctggacttctttgaaatcctgaggctgttcttccccgtgatctacgacgtcaagtacctgatgaaaagttgcaaaaatctaaagggcggacttcaggaggtggccgagcaactagaactcgagcggatcggaccccagcaccaggcaggctctgattccctgctgaccgggatggccttcttcaaaatgagagaggtgtag

SEQ ID NO: 111211 - DNA, 444 bp, synthetic construct
  misc_feature 1..444: note = Description of Artificial Sequence: Synthetic coding sequence
  source 1..444: mol_type = other DNA
atgcccgccgctaccgttgatcacagccagcggatttgtgaagtctgggcctgcaacctggatgaggagatgaagaaaattcgccaagtcattcgtaaatacaattatgtagcaatggacaccgagtttcccggagtggttgcaagacctattggggaattcagatccaatgcggactaccagtaccagctcttacgttgcaacgtcgatctgttgaagatcatacaacttgggctgaccttcatgaatgaacagggcgaatatcccccaggaacaagcacatggcagtttaatttcaagttcaatttgactgaggacatgtatgcacaggactccatcgagttgttgaccaccagtggcattcaattcaaaaaacacgaagaggaaggaattgaaacccagtactttgccgaattgctgatgactagcggcgtcgtgctctag

SEQ ID NO: 111212 - DNA, 879 bp, synthetic construct
  misc_feature 1..879: note = Description of Artificial Sequence: Synthetic coding sequence
  source 1..879: mol_type = other DNA
atgcctgctgccttggtcgagaacagccaggtaatttgtgaagtgtgggcgtccaacctagaagaggagatgcggaagatccgcgaaatcgttctctcttattcatatatcgccatggacacggagtttcccggtgtggtggtgaggcccatcggagagttcaggtcttcaatcgattatcagtaccagctgctgcgatgtaatgttgatctgctcaagatcattcagttgggcctgacatttaccaatgaaaaaggggagtatccttccgggattaatacttggcaattcaactttaagttcaacctgactgaggacatgtattctcaggactcaatcgacctgttagctaacagtggtctgcagttccagaagcatgaagaggagggaatcgacaccctgcattttgcagaacttttgatgacctcaggggtggtgctatgtgataacgtaaagtggctgtccttccatagtgggtacgacttcggctatatggttaaactacttacagatagcaggttgccggaagaggagcacgaatttttccacattctgaatctcttttttccttccatctacgacgtgaagtatctgatgaagtcgtgtaagaacctaaagggaggcctgcaagaagtcgctgaccaactggacctacagcgaattggtaggcagcaccaggccgggtcagattcattactgaccgggatggcatttttccgtatgaaggaactgttcttcgaagactccatcgacgacgctaagtattgcggaagactgtacggcttgggcacaggggtggctcagaagcaaaatgaagacgttgactccgcccaggagaagatgagcattttggccattatcaacaacatgcagcagtag

SEQ ID NO: 111213 - DNA, 879 bp, synthetic construct
  misc_feature 1..879: note = Description of Artificial Sequence: Synthetic coding sequence
  source 1..879: mol_type = other DNA
atgcctgctgcactggtggagaactcacaagtgatatgcgaggtgtgggcatctaacctggaggaggagatgaggaagatacgcgagatcgtgctatcctactcatacatcgctatggacactgaattcccgggggtggtggtgaggcccattggggaattccggtcctcaattgactaccagtaccagctgttaagatgtaacgtggatctgctcaagataatccagctggggttgacatttaccaacgagaagggagagtatcccagcggcatcaatacttggcaatttaacttcaaattcaatctgactgaggacatgtactctcaagacagcattgacctcctggccaatagcggcctgcagtttcagaagcacgaagaagaagggatcgatactctgcacttcgccgagctactcatgacatccggcgttgtgttgtgcgataacgtcaagtggctgtccttccacagcgggtacgatttcggctacatggtcaaattgctgaccgactcccgactgccagaagaagagcatgagttcttccacattcttaacttattcttcccctctatttatgatgtcaaatacctgatgaagagctgtaagaatctaaaagggggactccaggaggtggcagaccagctcgatctccagagaattggtcggcagcaccaggctgggtcggacagcctactgaccggcatggcattttttagaatgaaagagcttttctttgaggactcaatcgacgacgctaagtactgcggaaggttatacggtctcggtaccggagtggcgcagaagcagaacgaggacgtagatagtgcgcaggaaaaaatgtcgatcctagccatcatcaataatatgcaacagtag

SEQ ID NO: 111214 - DNA, 357 bp, synthetic construct
  misc_feature 1..357: note = Description of Artificial Sequence: Synthetic coding sequence
  source 1..357: mol_type = other DNA
atgcccgccgctctggtggagaactctcaggtcatttgcgaggtgtgggcaagcaacctcgaggaggagatgcggaagatcagggagatagtgctatcgtacagctatattgccatggacactgagtttcctggggtggtggtgcgacccatcggagagttccgttcctctatcgactaccaatatcagcttcttaggtgcaacgttgacctgctgaagatcattcaactcgggctgacatttaccaatgaaaagggagagtacccgtcaggcatcaacacttggcagttcaattttaaattcaacctcaccgaggacatgtatagccaggacagcattgacttgctggcaaattag

SEQ ID NO: 111215 - DNA, 879 bp, synthetic construct
  misc_feature 1..879: note = Description of Artificial Sequence: Synthetic coding sequence
  source 1..879: mol_type = other DNA
atgcctgcagcactcgtcgaaaattctcaagttatttgtgaagtgtgggcctccaatcttgaggaagaaatgcgcaagatccgcgagatagtgctgtcctattcttatatcgcaatggacacagagttcccgggcgtggtcgtgcgccccataggagagtttagaagttcgatagattatcagtaccagcttctgagatgcaacgtggatctgctgaaaattatccagttgggtctcactttcacaaacgagaagggcgagtatccttccggaataaacacttggcagttcaatttcaagtttaacctgactgaagacatgtattcacaggacagcattgacctgctcgccaactcaggcctccagttccaaaagcatgaggaagagggcatcgacaccctccactttgccgaactcctgatgacaagcggagttgtcctttgtgataatgtgaagtggcttagctttcacagcggctacgactttggatatatggtcaagctcctgaccgattccagactgcccgaagaggagcatgagttctttcatatccttaacctgttcttcccttctatatatgacgttaagtacttaatgaaatcatgtaaaaacctcaaggggggcttacaggaggtggccgatcagctcgatttacagcgtataggcaggcagcatcaggctgggtcagattcactgctcactggcatggctttcttccggatgaaggaattgtttttcgaagattctattgacgacgcaaaatattgtggccggctctatggcctcgggactggcgtagctcagaaacagaacgaagacgtggactctgcccaggaaaaaatgtcaatcctcgctataatcaataatatgcagcaatag

SEQ ID NO: 111216 - DNA, 168 bp, synthetic construct
  misc_feature 1..168: note = Description of Artificial Sequence: Synthetic coding sequence
  source 1..168: mol_type = other DNA
atgccagcggctctggtcgagaatagtcaggtgatttgtgaggtctgggccagtaacctggaggaggagatgaggaaaataagagagatcgtgctgagctatagttatatagccatggatactgaattccccggggtcgtggttagaccaattggggagtttcggtag

SEQ ID NO: 111217 - DNA, 678 bp, synthetic construct
  misc_feature 1..678: note = Description of Artificial Sequence: Synthetic coding sequence
  source 1..678: mol_type = other DNA
atgcccgccgctttggtggagaatagccaggtgatctgtgaggtgtgggccagcaacctggaggaagagatgagaaagatccgggaaatagtcctctcctattcgtacattgcaatggatactgaatttcctggggtagtggttcggcccattggagagttcagatcttcaatcgattaccagtaccagctgctccgctgtaacgtcgaccttttaaaaatcatacagctcgggttgacctttaccaatgaaaaaggagaatatccatctggaataaatacatggcaatttaactttaaattcaaccttactggctacgatttcgggtacatggtaaagttactcacagattcacgcttgccggaagaagaacacgagttctttcacatcctgaatttgttcttcccctctatttatgacgtgaagtatcttatgaagtcctgtaagaacctgaagggcggcctgcaggaggtagcggatcagttagacctccagaggattggcaggcagcaccaagcgggaagtgattctcttttgacagggatggcctttttccgaatgaaggaactcttttttgaggattcaatcgatgatgccaaatactgtggacggctgtatggattaggaactggcgtggctcagaagcagaacgaagatgttgactcagcccaggagtag

SEQ ID NO: 111218 - DNA, 360 bp, synthetic construct
  misc_feature 1..360: note = Description of Artificial Sequence: Synthetic coding sequence
  source 1..360: mol_type = other DNA
atgcccgctgccctcgtggagaactctcaggtgatttgcgaggtctgggccagcaatctcgaggaggagatgaggaaaatccgcgaaattgtcctctcatactcatacatcgcgatggacacagaattccctggggtagtggtacgcccaataggtgaatttcgaagttcaatagattatcagtaccaactgctgaggtgcaacgtagacctattgaagatcatccaactgggactcactttcactaatgagaagggcgaatacccatcaggcatcaacacctggcagttcaattttaaatttaacctgacggaggatatgtatagtcaggattctatagatctacttgccaactcctag

SEQ ID NO: 111219 - DNA, 717 bp, synthetic construct
  misc_feature 1..717: note = Description of Artificial Sequence: Synthetic coding sequence
  source 1..717: mol_type = other DNA
atgcccgccgcccttgtcgaaaattcccaggtcatttgcgaagtgtgggcatccaatctggaggaggagatgcgaaaaatcagggaaatcgtgctctcctactcgtatattgccatggataccgaattcccaggagtggtggtcaggcctatcggggagttcagatcgagtatagactaccaatatcagctattacggtgtaacgtggaccttctgaaaattattcaactgggcctcacattcacaaacgagaagggtgaatatccaagcggtattaacacatggcagttcaacttcaagttcaacctgaccggctacgatttcggctatatggttaaattactgacagattcaagactccccgaggaggaacacgaattcttccatatattgaacctttttttcccctcaatttatgacgtgaaatatctaatgaagagctgcaaaaatctaaagggaggtctgcaagaagtagctgaccagctcgacctgcaaagaattggaagacagcaccaggcaggctccgattctctcctcacaggcatggccttttttagaatgaaggagctcttctttgaggatagcatcgacgacgcaaagtactgtgggcgcctttacgggctcgggaccggggtggcccagaaacagaacgaggatgtggattctgcccaagagaagatgtcgatattggctatcattaacaacatgcagcagtag

SEQ ID NO: 111220 - DNA, 168 bp, synthetic construct
  misc_feature 1..168: note = Description of Artificial Sequence: Synthetic coding sequence
  source 1..168: mol_type = other DNA
atgcctgctgccctggtcgaaaactcccaagtgatctgtgaagtatgggcatccaacttggaagaggagatgcgtaaaattagggaaatagtcctgtcatactcttacattgctatggataccgagtttcccggagtggtggtaagacccattggcgagtttagatag

SEQ ID NO: 111221 - DNA, 258 bp, synthetic construct
  misc_feature 1..258: note = Description of Artificial Sequence: Synthetic coding sequence
  source 1..258: mol_type = other DNA
atgtatagtcaggacagcatagacctgttggccaattccgggttgcaattccagaagcacgaggaagagggaattgacaccttgcacttcgctgaactgctcatgactagcggagtcgtgctctgcgacaatgttaagtggctcagcttccattccggatacgacttcggctacatggtcaaattgctgaccgactccagattgccagaggaagagcatgaattcttccatatcctcaacctgtttttcccttcgtag

SEQ ID NO: 111222 - DNA, 402 bp, synthetic construct
  misc_feature 1..402: note = Description of Artificial Sequence: Synthetic coding sequence
  source 1..402: mol_type = other DNA
atgcctgctgccctcgtggagaactcccaggtgatctgcgaggtttgggcctcaaaccttgaagaagagatgcgcaaaatccgggagatcgtcctgagctactcctacatcgccatggataccgagttccccggagtagttgtgcggcccataggcgaattcagaagcagcatcgactaccagtaccaactactaaggtgcaatgtggatctactcaagataattcagctgggtcttaccttcacgaatgaaaagggcgagtaccctagtggtattaacacttggcagtttaacttcaaatttaatctgacggaggacatgtactctcaggacagtattgatctgcttgcaaattccgggcttcagttccaaaaacacgaggaagaaggcatagacacatag

SEQ ID NO: 111223 - DNA, 561 bp, synthetic construct
  misc_feature 1..561: note = Description of Artificial Sequence: Synthetic coding sequence
  source 1..561: mol_type = other DNA
atgtattcacaggattcaatcgacctgctcgccaacagcgggctgcagtttcagaagcacgaagaggagggtattgacactctccacttcgccgagctcttgatgacttctggagtagtattgtgcgacaatgtgaagtggctttcttttcacagtggatatgatttcggctacatggtaaagcttctcaccgatagtcggctccctgaggaggagcatgagttctttcatattttgaatctatttttcccttcaatctatgacgttaagtacctaatgaagagttgtaagaacttgaagggcggactgcaagaagtggcggaccagctcgatcttcagagaatcggacgtcaacatcaggccggatcagattccctgctgaccgggatggcatttttccgcatgaaggagttgttctttgaagactccattgatgacgccaaatactgcgggaggttatatgggctcggcactggcgttgcccagaagcaaaatgaggatgtagactccgctcaggaaaaaatgagtatcctggccattataaacaacatgcaacagtag

SEQ ID NO: 111224 - DNA, 561 bp, synthetic construct
  misc_feature 1..561: note = Description of Artificial Sequence: Synthetic coding sequence
  source 1..561: mol_type = other DNA
atgtattcccaggattcaatagatctgctagctaattctggcctacagtttcagaaacacgaagaggaaggaatagataccctgcactttgctgaactcctgatgactagcggggtggtgttgtgcgacaatgttaaatggctgagtttccattccggatatgatttcggttacatggtaaagctacttactgactcgcgactgccagaggaggagcacgaattttttcatatactcaatcttttcttcccaagcatctatgatgttaaatacctcatgaagtcctgcaagaatttgaaaggggggctccaggaagtggccgatcaactcgatctgcagcggatcgggagacagcaccaggcaggaagtgacagccttctgaccggcatggctttcttccggatgaaggaactattctttgaggacagcatcgacgatgccaaatactgcggaagactgtacggcctgggcaccggcgtagcgcaaaagcagaacgaggacgtcgactccgcccaggagaaaatgtctattctggctattattaacaatatgcagcagtag

SEQ ID NO: 111225 - DNA, 561 bp, synthetic construct
  misc_feature 1..561: note = Description of Artificial Sequence: Synthetic coding sequence
  source 1..561: mol_type = other DNA
atgtatagccaagattctattgacctgcttgctaatagtggcttgcagtttcagaagcacgaagaggaaggcatcgacacactgcactttgcagagctcttgatgacgtctggggtcgtgttgtgcgataacgtcaagtggctgtcctttcactcggggtatgattttggatatatggtgaagctgctcaccgatagccgactgcccgaagaagagcacgaattcttccatatcctgaacttattttttcctagcatctatgatgtaaagtatttaatgaaatcctgtaagaacctcaagggagggctgcaggaagttgctgatcagttagacctgcagcgtattggacgacaacaccaggccggctccgactcattattgacgggaatggcgtttttcagaatgaaagagctattctttgaggacagcatcgatgacgccaagtattgcggtagactttacggcctcggaactggggttgctcagaagcagaacgaagatgtggatagtgcgcaggagaagatgagtattttggcgattattaacaacatgcagcagtag

SEQ ID NO: 111226 - DNA, 366 bp, synthetic construct
  misc_feature 1..366: note = Description of Artificial Sequence: Synthetic coding sequence
  source 1..366: mol_type = other DNA
atgccagccgcactggttgagaattctcaggttatatgcgaggtctgggcgagcaatttagaggaggagatgaggaaaattagggaaatcgtgctgtcttattcttatatcgccatggatactgaatttcctggggtggtagttcggcccataggcgaattccggagctccattgactaccagtaccaactcctgagatgcaatgttgacctgctgaaaatcatccagctggggttgaccttcaccaacgaaaaaggcgagtatccatctggtattaacacatggcagtttaacttcaagttcaatctcacagggtatgacttcggttatatggtgaagctgctgactgactctaggctgccttag

SEQ ID NO: 111227 - DNA, 561 bp, synthetic construct
  misc_feature 1..561: note = Description of Artificial Sequence: Synthetic coding sequence
  source 1..561: mol_type = other DNA
atgtactcccaggactcgatcgacctactggctaatagtggcctacagtttcagaagcacgaggaggagggaatcgacactcttcacttcgccgaactgctgatgacatccggcgtggtgctgtgcgataatgttaagtggctgagctttcatagcgggtacgactttggctacatggttaagctgctaacggatagcagacttcccgaagaggaacacgagtttttccatatcctcaacttgtttttcccatccatttatgatgttaagtacctgatgaagtcgtgtaagaacctgaaaggtggtctgcaggaagtggccgatcagctggatttacaaaggataggccgccagcatcaggcaggttcagattcactcctgacgggcatggcgtttttcagaatgaaggagctcttcttcgaggacagtattgatgacgcaaaatactgcggccgcttgtatgggctgggtacgggggttgcacagaagcaaaatgaggacgtggactccgcacaggagaagatgtccatcctggccataatcaataacatgcagcagtag

SEQ ID NO: 111228 - DNA, 387 bp, synthetic construct
  misc_feature 1..387: note = Description of Artificial Sequence: Synthetic coding sequence
  source 1..387: mol_type = other DNA
atggttaaacttttgacagactccaggctgcccgaggaggagcacgagtttttccatatactgaacctgtttttcccgagtatttacgacgtgaagtacctgatgaagagttgtaaaaatttgaaggggggattgcaggaggttgccgatcagctcgatctacagcgcattggacgccaacaccaagccggttctgattcactactgactggtatggcattttttcggatgaaggaattgtttttcgaggattcaatcgatgacgctaagtactgtggccggctttatggactgggaacaggcgtcgcccagaaacagaacgaagacgttgacagtgctcaagagaaaatgagcattttggcaattattaataatatgcagcagtag

SEQ ID NO: 111229 - DNA, 810 bp, synthetic construct
  misc_feature 1..810: note = Description of Artificial Sequence: Synthetic coding sequence
  source 1..810: mol_type = other DNA
atgaggaaaatccgggaaatcgtgctcagctattcatatattgccatggacactgagtttcctggcgtggtagtcagaccaataggcgagtttcggagctcgatcgactaccaatatcaactgcttaggtgtaacgtagatctgctgaagatcatccagctcggactcactttcaccaacgagaagggggagtacccatctggaattaacacctggcaatttaacttcaagtttaacctcaccgaggacatgtactctcaggattcaattgacctgctggccaattctgggctgcagttccagaagcatgaagaggagggaatagacaccctgcatttcgccgaactgctcatgacgtctggcgtggttctatgtgataacgtcaagtggctgtcattccatagcgggtacgacttcggatatatggtgaaattgcttaccgactctcggctgcctgaagaagagcacgaattcttccacattctaaacctcttcttcccaagcatttacgacgtgaagtacctgatgaaatcttgtaaaaatctcaaaggcggattgcaggaggtggctgaccagctggatcttcagagaatcggacggcagcaccaggcaggctccgatagcctgcttacaggcatggctttctttcgaatgaaggaattattcttcgaagactctattgacgacgctaagtattgcggccgtttatacgggctcggcaccggtgtggcacaaaaacagaacgaagatgtcgatagtgcccaggagaaaatgtctatcctggcaatcatcaacaacatgcagcagtag

SEQ ID NO: 111230 - DNA, 4338 bp, synthetic construct
  misc_feature 1..4338: note = Description of Artificial Sequence: Synthetic coding sequence
  source 1..4338: mol_type = other DNA
atgcagggccctcccctcttgactgctgcccatctgttatgcgtgtgcacggccgctttagctgtcgctcctgggccgaggtttctcgttactgcaccaggaattattagaccggggggcaatgtgacgatcggggtggagctgctggaacattgcccatctcaggttaccgttaaggcagagttactcaagacagcatctaacttgactgtctctgttctggaagctgagggtgtttttgagaaaggctcatttaaaacactgaccttgccaagcttgcctctgaacagcgcggacgagatctacgagctgagagtcacaggaagaacccaggacgagattctcttctccaacagcacacgtctgtcatttgaaaccaagcgcatctcggttttcatccagacagataaagctctgtacaagcccaaacaggaagtaaagttcaggatcgtcactctgttcagcgacttcaagccttataaaacatcacttaatatacttattaaagatccaaaatccaatttgatacagcagtggctgagtcagcagtcagacctaggggtcattagcaagaccttccaactgtcctcacatccgatcctcggtgactggagcattcaggtgcaagtgaacgatcagacctactatcagagcttccaggtctctgagtatgtcttaccaaaatttgaggttacgctgcagacgccactttactgttccatgaattcaaagcatctgaatgggaccatcaccgcaaagtatacgtatggcaaaccagtgaagggagacgttactcttacctttctgccactcagcttttggggcaaaaagaaaaatattacaaaaaccttcaaaatcaatgggtctgctaacttttccttcaacgacgaagaaatgaaaaacgtcatggacagttccaacggcctgagcgagtacttggatttatcaagtccaggaccagtagaaatactgaccacggttaccgaatcagtaacaggaataagccggaatgttagtaccaacgtttttttcaaacagcacgattatatcatcgaattcttcgactacaccaccgtgttgaaaccaagtcttaattttacagcgactgtgaaagtcaccagagcagatggcaatcaattaacactggaggagcgaaggaacaacgtcgttattacagttacacagagaaactacaccgagtactggagcggctctaactccggaaaccagaagatggaggccgtccagaagatcaattataccgtcccccaatctgggacctttaagatagagttccctattctggaagactcgtcagagctgcagttgaaggcctacttcttgggatctaaaagctctatggccgtgcactccctgttcaaaagtccatctaaaacatacattcagctcaagactagagacgaaaatataaaggtcggaagtccgttcgagcttgttgtctcgggcaataagcgattgaaagaactcagctatatggtcgtcagccgaggccagctggttgctgtggggaagcagaacagcaccatgttcagtctgacaccagagaattcatggacaccgaaagcgtgtgtgattgtgtactatatcgaagacgacggagagatcatcagcgatgtgttgaagattccggtgcagttggtgtttaaaaacaagatcaagctttactggagcaaagtgaaagcggagcccagcgaaaaagtgagtcttcggatctcggtcacacagcccgattcaatcgtagggatcgttgcagtcgataaatctgtgaacttgatgaacgcgtccaatgatattacaatggagaatgtagtccatgaattagaattgtataatacaggatactacctcgggatgttcatgaactcattcgctgtgttccaagagtgcgggctttgggttctcaccgacgcaaacctgacgaaagactacatcgacggggtttacgacaatgctgaatatgcagaaaggttcatggaggagaatgaagggcacattgttgatattcatgacttttccctcggctctagtccacacgtccgtaagcattttcccgagacgtggatctggctcgataccaatatgggttacagaatctaccaggaatttgaggtcaccgttcccgactcaattacaagctgggtggccacgggctttgtcatcagcgaagacctcggtctggggctgacaaccactccagtcgaactccaggcctttcagccattttttattttcttgaatctgccgtactcggtcattcggggggaagagttcgctctggagatcactatcttcaattacttgaaggatgccacggaagtgaaggtgattatcgaaaaatctgataaattcgacatccttatgacttcaaatgaaattaatgccacggggcaccagcaaacgctgcttgtgccgtccgaggatggagcaaccgtgctctttcccatacggcccacacaccttggcgaaatcccgatcactgtgaccgccctaagtccgacagcaagcgatgctgtgactcaaatgatcctggttaaggctgaggggattgagaagtcctatagccagtcaatcctcctcgacctcacagataatagactgcagagcactctcaaaaccctcagcttcagcttcccacccaacaccgtgacaggctccgaacgcgtgcagattaccgccattggcgatgttctcggaccgagtattaatgggctggctagtttgatacgcatgccatatggatgcggagaacaaaatatgatcaattttgcccccaatatctacatcctggactatctaaccaagaagaaacaattgacagacaacctcaaggagaaagcattaagcttcatgcgacaggggtatcaaagagagctcttgtatcagcgtgaagacggctcattcagtgcctttggtaattacgatcctagcggatccacttggttgtccgctttcgtattacggtgtttcctggaggcggacccatatatcgacattgaccagaacgtacttcaccggacttacacctggttgaagggccatcagaagagtaacggagagttctgggaccctggccgggtaatccactctgaactgcaagggggcaacaaaagtcctgtgaccctgactgcttacattgtgacctcgctgctgggctacagaaagtaccagcctaacatagatgtacaggagtcgatccatttcctcgaatccgaattcagccgtggcattagcgacaactataccctggcactgatcacttatgctctctcttccgttgggtcccccaaggcaaaggaggctctcaacatgctcacctggcgggcagagcaggaaggcgggatgcagttctgggtcagttctgaatccaagctctctgactcttggcagccaagatcgctggatatcgaagtggcagcatacgctttattgagtcatttcctgcaatttcagacctctgagggcattccaatcatgaggtggctgagccggcaacgcaattctctgggcgggttcgcttccacgcaggacacaaccgtagccctgaaagccctgtcggaatttgctgcactcatgaatactgaaaggacaaacattcaagtcacagtgactggcccaagtagccctagcccagttaaattccttatcgatacccacaataggttgctgctgcaaaccgcagaactcgccgtcgtgcagcccacagcagtcaatatcagtgccaacggatttggattcgctatttgccagctgaacgttgtatataatgtaaaggcgagtggttcatctcggcgacggaggtctattcagaaccaagaggcttttgatctggatgtagcagtgaaagaaaacaaagacgatctgaatcatgtcgatctgaatgtttgcacatcattttcaggccccggcaggtccgggatggctctcatggaagttaatctcttgtccggtttcatggttccctccgaggcgatctcactctccgaaaccgtgaaaaaggtcgaatatgatcacgggaaattaaacctgtacctcgattctgtgaacgaaactcagttttgcgtgaatatccctgcggtacgcaacttcaaagtgagcaacacacaggatgctagcgtgagcatcgtggattattatgaacccagaaggcaggccgttaggagctacaatagtgaggtgaaattgagctcatgcgacctttgctccgacgttcagggatgtcgcccttgtgaagatggcgccagcggcagtcaccaccattcctcggtgatatttatattttgtttcaaactgctgtattttatggaactgtggctgtag

SEQ ID NO: 111231 - DNA, 4107 bp, synthetic construct
  misc_feature 1..4107: note = Description of Artificial Sequence: Synthetic coding sequence
  source 1..4107: mol_type = other DNA
atgcagggccctcctttactaacagctgctcacttgctatgtgtgtgcactgccgcactggcggtggcgcccggcccacgtttcctggtgacagccccaggaatcattaggcctggaggcaacgtgaccatcggcgtcgaactgctggagcattgcccttcacaggtcaccgtgaaagcagagttgctcaagactgcatctaatttgactgtctccgttctggaagccgagggggtgtttgagaaggggagctttaaaacactaacactgccatccgatccaaaaagcaacctgatacagcagtggctctcacagcaatccgatctgggggtgatttccaaaacgttccaactgtccagccaccctattcttggtgattggagtatccaggtgcaggtcaatgaccaaacgtactaccagtcgttccaggtaagtgagtatgtcctccctaagtttgaagtgactctccagacccctttgtactgtagtatgaactctaagcatctgaatggcacaatcacagccaaatacacatacgggaaacctgtgaagggcgacgtcacactaacctttctccctctgtccttctggggtaagaagaagaatatcactaagacctttaaaataaacggctctgccaatttctcattcaacgacgaagagatgaaaaatgtcatggattcctccaacgggcttagcgaatacttggatttgtcatctcctggccctgtcgaaatcttaaccaccgtgaccgagtccgttactgggatttccagaaacgtttctactaatgttttcttcaagcaacacgattacattattgagttcttcgactacactacggtgttgaaaccttcgctgaatttcactgctacagtcaaggttacgcgagccgacgggaaccaactgactctcgaagaacggcgcaataatgtcgtaattactgtgactcaacggaattataccgaatattggagcggttcaaactctgggaatcagaagatggaagcagtccaaaagatcaattatacggtgccgcagtcgggaacctttaagattgagttccccattctggaggacagctcggagctgcagctgaaggcatattttcttggctcaaagtctagtatggcggtgcacagtcttttcaagtccccatctaagacatatatccaactcaaaacccgcgatgaaaatattaaagtgggctcccctttcgaattggtcgtgtcaggcaacaagcgcctgaaggagttaagttacatggtcgtctccaggggccagcttgtggcagtgggtaagcagaacagtaccatgttctccctgacccccgaaaattcgtggacccctaaggcctgtgtgattgtgtactatatcgaggacgacggggaaatcattagcgacgtactgaagattcctgtccagttggtgttcaagaataagattaagctgtactggagcaaagtaaaggcagagccctcggagaaggtgtccctgaggatctcagtgacccaaccagactcaatcgtcgggatagtcgccgtggacaagtccgtgaacctcatgaacgcaagcaacgacattactatggagaatgtggtccacgagcttgagctgtataacacaggctactatcttggcatgtttatgaactcattcgcggtctttcaagaatgtggattgtgggtgctgaccgacgctaacctgactaaagactatatcgacggcgtttacgacaacgctgagtatgccgagcggtttatggaagagaacgagggacatatcgttgatatccacgacttttctctcgggtcaagcccccatgtgaggaaacattttcccgaaacctggatttggttggacaccaatatgggataccgaatctaccaggagtttgaagtgactgtgcccgactccattacaagctgggtcgctaccggctttgtcatatctgaagatttgggcctcggccttactaccacgcccgtggagcttcaggcgtttcagccctttttcatctttctcaatctaccttacagcgttatcagaggcgaagagtttgccctagaaatcaccatcttcaattacctcaaggatgctacagaagtgaaggtgattatagaaaagtcagataagtttgacattcttatgaccagcaacgaaatcaacgcaactggacatcaacagacattactggtaccaagtgaagatggagcgaccgttctcttcccgatccgcccgactcacctcggcgagatccccattactgtgaccgctctgtcgcctaccgcctccgatgcagttacccaaatgattttagtgaaagccgaaggaattgaaaaatcctacagtcagtcaatactcctcgacctgacagacaacaggctgcaatctacactgaaaaccctctcattcagcttcccacctaacaccgtgacgggcagcgagagagtccaaatcacagcgatcggtgacgtcttaggcccctccatcaatggtctggcgtctttgattcggatgccatatggatgcggcgaacagaacatgattaactttgccccaaatatctatatcctggactacttgacaaagaaaaagcagctcaccgacaacttaaaagaaaaggccttgtctttcatgaggcagggttaccagagagagctactctaccaaagagaggacggtagcttctctgcctttggaaattacgaccccagcggaagcacctggctgtccgcgtttgtcctgaggtgctttctcgaggcagacccgtatatcgacatcgaccagaatgtacttcaccggacatacacatggttaaaaggccaccagaagagtaatggtgaattctgggatcccgggcgtgtgattcacagcgagctccagggaggcaataaatcaccagtaacactgacagcctacatcgtaacttccctgctaggttatcgcaagtatcagcccaacatcgacgttcaagaaagtatccattttctggaatcagaattcagccgggggatctcagataattataccctcgcattgataacctacgccctaagctctgtaggtagtccaaaggccaaagaagcccttaacatgttgacttggcgggctgagcaagaaggaggcatgcagttttgggtctctagcgaatccaaattaagcgattcatggcagccacgatccctagacatcgaagttgccgcctatgccttattgagccattttctccagtttcagacctcggaagggatccccatcatgcgctggctgtcccgacagcggaactctttaggcgggtttgcctccactcaagatactacagtagcgctgaaggcgctatcagagttcgcagctctcatgaatactgagaggacgaatatacaggtgaccgtgaccggccctagcagcccctctccagtcaaattcctcatcgatacccataacagactgctcctgcagacagctgagctggctgtggtgcaacccactgcagtgaatattagtgctaatgggtttggctttgcaatctgccaactcaatgtcgtatacaacgtgaaagcgtcagggtcttcacgcaggaggagaagtatccaaaatcaggaagcgtttgatcttgacgtcgctgtcaaggagaacaaggatgacttgaatcatgtggatttgaatgtctgcacttccttcagtggccccggccgatctggtatggccttaatggaagtgaatttactgtccggtttcatggtcccctcagaggctatttccctgagtgagaccgtgaagaaggtggagtacgatcacgggaaactaaatctttatctggattctgttaatgaaactcagttttgtgtaaatatcccagctgtcagaaacttcaaagtgtccaatacacaggacgcgtctgtctctatagtcgattattacgaaccacgacgacaagcagtccgaagctacaacagcgaggtgaagctcagcagttgtgacttgtgtagcgacgtgcagggatgccggccctgcgaagatggcgcatcaggctcccatcaccatagctccgttatcttcatcttttgctttaagcttctctattttatggagctgtggctctag

SEQ ID NO: 111232 - DNA, 4287 bp, synthetic construct
  misc_feature 1..4287: note = Description of Artificial Sequence: Synthetic coding sequence
  source 1..4287: mol_type = other DNA
atgcagggacctccacttctgactgcagcacaccttctgtgcgtctgtaccgcagctctcgctgtagcccccggaccccgtttccttgtgacagccccagggataattcgacctggagggaacgtgaccatcggagtagagctacttgagcactgcccttcccaggtgacagttaaggccgaactactaaagactgccagtaatctcactgtctccgtgttggaggccgaaggagtgttcgagaagggtagctttaaaaccctgaccctgccctccctcccactgaatagtgccgacgagatctacgagctacgtgtgactggaagaacccaggacgagattctgttcagcaattccaccaggctaagcttcgaaactaagcgcattagcgtgtttattcagacggacaaggccttatataaacctaagcaggaagtgaaatttcgtattgtgacgttgtttagtgattttaaaccctataaaacaagcctcaatatccttatcaaggaccccaagagcaacctgatccagcaatggctgagccagcagagcgatctcggagtcatttccaagacctttcagctgtcaagtcatccaattctcggtgattggtccatccaggtccaagtcaatgatcagacctattatcaaagcttccaggttagtgaatatgtgttacctaagtttgaggtgacactacagacccccctctactgcagtatgaactcaaaacatctaaacgggacaatcaccgcgaaatacacttacggcaaaccggttaagggggacgtcaccctaacattcctgccgcttagcttttgggggaagaaaaagaacatcaccaaaaccttcaagataaatgggagcgcaaatttttctttcaacgatgaagagatgaaaaacgtgatggacagttctaatggcctgagtgaatacctcgacttatcctcaccgggtcctgtggagatcctgaccacagtcacagagtctgtaacaggtatttctcggaatgtgtctacgaatgtattcttcaaacagcacgactacatcatcgagttctttgattacacgacagtcctgaagccctcactgaattttacagccaccgttaaggtcacccgggcagacggcaatcagcttacgttggaagagcggcgcaataatgtagtcattacagttactcagagaaattacaccgagtattggtccgggtctaattccggcaatcagaagatggaagcagtccagaaaattaactacaccgtgccgcagtcgggtacgttcaagatcgagtttccaatactggaagatagcagcgagttacaactcaaagcctattttctcggcagtaaatcctcaatggctgttcacagtctttttaaaagcccatccaaaacatatatccagttaaagaccagagacgagaacattaaagtgggctcaccttttgagcttgtggtctctggcaataaacgcctgaaagaactctcctacatggtggtttcccgcgggcagctggtggctgtcgggaagcaaaatagcaccatgttcagcctcactccagagaactcctggacccccaaagcgtgtgtgatagtatattacattgaagacgacggcgaaataatctccgacgtgttaaaaatccccgtgcagctcgtgtttaagaacaagatcaaactgtattggagcaaagtgaaggccgagccgtcagaaaaggtttcactgaggatatcagtcacacagcccgacagtatcgtcggtatagtggctgtcgacaaatcagtaaatctgatgaatgcctcaaatgatattaccatggagaacgttgtccacgaactggagctgtacaataccgggtattacctcggcatgttcatgaattcatttgcagtcttccaagaatgtgggctgtgggttttgacagatgccaatttgacaaaagattatattgacggcgtttacgataacgcggagtacgctgagaggtttatggaggaaaacgagggtcatatagttgacattcatgacttctcacttggctcttctcctcatgtcaggaagcatttccctgaaacttggatctggctggacaccaatatgggataccggatttaccaggaattcgaggtgaccgtgcctgatagcatcacatcctgggtggcaaccggcttcgtgatctcagaggatctgggtttgggcctcacaacaacacctgtcgaactacaggcttttcaacctttcttcatttttctgaacctcccttacagtgtaatacggggagaggaattcgccctggagatcacaatttttaactacttaaaggatgccacagaggtcaaagtgatcattgaaaagtcggacaaatttgacattctcatgactagcaacgaaatcaacgcgacgggacatcaacagaccctacttgttcctagtgaggacggcgctactgtgctgtttccaatccggccaactcaccttggcgagattcctattactgttactgcgctctcaccaacagccagtgatgccgttacgcagatgatattagtcaaggccgaggggattgagaagtcatactcacagtccattcttctcgatctcacggataatcgcctgcagagtacacttaaaacactcagtttcagttttccccccaatacagtgactggctctgagagggtgcagataacggcaatcggagacgtacttggccccagtatcaatggtctggcaagccttatccgcatgccctatggctgcggcgaacaaaatatgatcaacttcgcccctaatatctatattcttgattacctgaccaaaaagaagcagttgaccgacaatttgaaggagaaagccttgtcctttatgcgccagggctaccagcgggagctcctgtatcaacgagaggacggtagcttcagcgctttcggcaactatgatccatccgggagcacctggttgtcagcctttgttttgagatgctttctggaagccgatccgtacatcgatatagaccagaacgtgctacacagaacatatacgtggctgaaggggcatcaaaaaagtaacggcgagttctgggatcccggcagggtcattcacagcgaactccaagggggaaacaagagccccgtcacactgaccgcctacatcgtaaccagcctattaggttataggaagtaccaaccaaatattgatgtgcaggagtcaattcattttctggagagcgaatttagtagaggtatttccgataactacaccctggccctcattacttacgccctctcatccgtgggatcccccaaagcgaaagaggccctgaacatgcttacctggagggctgaacaagaaggcggaatgcagttttgggtatcatctgaaagcaaactgtctgatagctggcagccaaggagtctggatatcgaagttgctgcctacgcgttgttatcccacttcttgcagttccaaactagtgagggcattccaatcatgcgctggctgtcccgacaaaggaacagcctgggtggtttcgccagcactcaggacaccacagtcgctttgaaggccctgagcgaatttgcagcattgatgaataccgagcgcacaaatattcaagtaaccgtgactggaccatcctcgccgtctcctctggcggtcgttcaaccaaccgccgtgaatattagcgctaacggttttggctttgcaatttgtcagctgaatgtcgtttacaacgttaaggcctcgggaagcagtcggcggcggaggagtatccaaaaccaggaagcattcgaccttgacgtggccgtaaaagaaaacaaggacgatctgaaccacgtagatttgaacgtgtgcacaagcttctccggccctgggaggagtgggatggcactgatggaggtaaacctgctgtctgggttcatggtgccatcagaggctattagtctcagcgaaacagttaagaaggttgagtatgatcatggcaaactgaatctctatctggacagcgtaaatgaaacacaattttgcgtcaatatccccgccgtacggaattttaaagtgtctaatacacaggatgcctcggtttctattgttgattactatgaaccgaggaggcaagcagttagatcatataattctgaagtgaaactctcttcatgtgatctatgttccgatgtgcagggttgtagaccctgtgaggacggcgcctccgggtctcaccaccattctagcgtaatattcatattttgtttcaagctcctatattttatggagctctggttgtag

SEQ ID NO: 111233 - DNA, 762 bp, synthetic construct
  misc_feature 1..762: note = Description of Artificial Sequence: Synthetic coding sequence
  source 1..762: mol_type = other DNA
atgggagagtttaacgaaaaaaagaccacatgcggtacggtgtgtttgaaatatctgctgtttacgtacaactgctgcttctggctggccggactcgctgttatggctgtgggaatctggaccctcgccctgaagtctgattacatcagcctcctggcaagcggtacttatctcgccacagcttatatcctggtcgtagctggaactgtcgtgatggttacaggcgtcctggggtgctgtgcgaccttcaaagagcgccggaacctactccgactgtatttcatcctcctgttaattatcttcttacttgagatcattgctgggattttagcttacgcttattatcagcaactaaacacggaattgaaagaaaacctgaaggacaccatgactaagagatatcatcagccaggtcacgaagccgtgacttccgccgtggatcagttgcaacaagagtttcattgctgtggaagcaacaactctcaagattggcgggacagcgagtggatccgttcacaggaggcgggtgggagggtggttcctgattcatgttgtaagactgttgtcgcactttgcgggcagcgggatcacgcgtcaaatatctataaggtggaaggaggttgcattactaagcttgagactttcatccaggaacacctgcgtgtgatcggcgcagtcggcatcggaattgcttgcgttcaggtattcggaatgatattcacctgttgtctatatcgatctctgaagcttgaacactactag

SEQ ID NO: 111234 - DNA, 762 bp, synthetic construct
  misc_feature 1..762: note = Description of Artificial Sequence: Synthetic coding sequence
  source 1..762: mol_type = other DNA
atgggagaattcaatgagaagaagacgacctgcggaacagtatgtctcaagtatctgttatttacctacaactgttgtttctggcttgccgggctcgctgtaatggcagtgggtatatggactctggcgctcaaatctgattatatttccctgctggccagtggaacctatctcgcaaccgcgtatattcttgtggtggctggtactgttgtcatggtgacaggagttctcgggtgttgcgccacattcaaagaaagacggaatctgctgcgcctgtatttcattctgctgcttataatctttctcttagaaattattgcaggtattctcgcctacgcgtactaccaacaacttaacacagagctgaaagaaaacctgaaagatacgatgaccaaaagataccaccagcctggtcatgaagcagttactagtgccgtcgatcagctccagcaggaattccactgttgtggctcgaataacagccaggactggcgtgattcagaatggatcagatctcaagaggctggcggacgagtggtgccagactcctgttgcaagaccgtggtggctctctgtggccagcgggatcacgcttctaacatttataaagttgagggcgggtgcatcacaaagctagagacgttcatccaggagcatctgcgcgtaattggtgctgtgggaataggcatcgcttgtgtacaggtgttcgggatgatttttacctgttgcttgtatagatctttgaagcttgagcactattag

SEQ ID NO: 111235 - DNA, 762 bp, synthetic construct
  misc_feature 1..762: note = Description of Artificial Sequence: Synthetic coding sequence
  source 1..762: mol_type = other DNA
atgggggagttcaacgagaaaaagaccacttgtggcacagtgtgtctgaagtaccttctattcacgtacaattgttgtttctggctggctggactggccgttatggctgtggggatatggactttggcattaaaaagcgactatatatcgctgctcgcctccggtacctacctcgctacggcatacatcctggtggttgcaggcacagttgttatggtgaccggggttctcgggtgttgtgctacttttaaagagcggagaaatcttctccgcctgtactttattttgctgctaatcatctttctgctcgagatcattgctggaatactggcatacgcttactaccagcaactgaacacagagctcaaagaaaatctaaaggataccatgacaaagaggtatcaccagcctgggcatgaagcagtgacctccgcagtcgaccagctccaacaagaatttcactgctgtggtagtaataattcacaggattggcgcgactcggagtggatccggtcccaggaggcaggtggccgggtggtgccagattcttgttgtaaaacagtggtcgctctatgcgggcagcgagatcacgcatcaaacatctataaagttgagggcggatgcatcacaaaattagagacatttattcaggagcatctgcgggtgataggagcagttggcataggaattgcttgtgtgcaggtgtttggcatgatttttacatgctgtctgtatcgctcactgaagttggagcactactag

SEQ ID NO: 111236 - DNA, 543 bp, synthetic construct
  misc_feature 1..543: note = Description of Artificial Sequence: Synthetic coding sequence
  source 1..543: mol_type = other DNA
atgggtgagttcaatgagaaaaagactacttgtggcaccgtgtgcttgaagtatctcctgtttacttacaattgttgcttttggttagcaggcctcgctgtgatggctgtgggtatctggacccttgccctgaagagcgattatataagccttctcgctagcgggacgtatttagcaaccgcttacatactggtggtggcagggacagtcgtgatggtaaccggagtgttgggctgctgcgccaccttcaaagagagacggaaccttttgcgactatactttatactgttactcattatcttccttctcgagattatcgccgggattctagcctatgcttactaccagcagcttaacacggagctcaaggaaaacctgaaagataccatgactaagcgttatcatcagcccggccacgaggccgtcacaagtgcggttgatcagctccagcaggaattccattgctgcggatctaataatagccaggactggagggatagcgagtggattaggagccaagaggctggggggagggtggtgtag

SEQ ID NO: 111237 - DNA, 240 bp, synthetic construct
  misc_feature 1..240: note = Description of Artificial Sequence: Synthetic coding sequence
  source 1..240: mol_type = other DNA
atgggtgaattcaacgagaagaagaccacttgcggcacagtatgtcttaaataccttctgtttacatacaactgctgtttctggctggccgggctggccgtgatggccgtggggatatggaccctggcactcaagagcgactacattagcttgttggcctcagggacctatctagccacagcgtacatactggtcgttgcgggaactgtggtaatggtgaccggtgtactgggctgttag

SEQ ID NO: 111238 - DNA, 279 bp, synthetic construct
  misc_feature 1..279: note = Description of Artificial Sequence: Synthetic coding sequence
  source 1..279: mol_type = other DNA
atgggagagtttaacgagaaaaaaacaacatgtggaactgtgtgtctgaaatatctgctgttcacctacaattgctgcttctggctcgcaggactcgctgtcatggcagtggggatctggactctcgcacttaagtcagactacatctccctgctagccagcggtacatacctggccactgcttatatccttgtggtagcaggtaccgtcgtaatggtgactggggtcttggggtgctgcgcgacattcaaagaaagaaggaacctcctgcgcctgtag

SEQ ID NO: 111239 - DNA, 198 bp, synthetic construct
  misc_feature 1..198: note = Description of Artificial Sequence: Synthetic coding sequence
  source 1..198: mol_type = other DNA
atgggtgaatttaacgaaaaaaagaccacctgtggcacagtgtgtcttaagtatcttttattcacatataattgttgcttttggctggctggactggcagtcatggctgtcgggatctggacgcttgcactcaaatccgattatatctctctactggcttccggcacttatttagcaaccgcctacattctggtttag

SEQ ID NO: 111240 - DNA, 531 bp, synthetic construct
  misc_feature 1..531: note = Description of Artificial Sequence: Synthetic coding sequence
  source 1..531: mol_type = other DNA
atgggcgaattcaacgagaagaagacgacttgcggcactgtttgtctcaaatatctgttgtttacatacaactgctgtttttggttggcgggcctggcagtgatggccgtgggtatctggacgctggccctcaaaagcgactacatatccctgcttgcgtcgggtacataccttgctactgcttatatactggtggttgcaggaactgtggtgatggtgacgggtgttctcggctgctgcgccaccttcaaagagcgcaggaacctcttgaggctctattttatcctattgctgataatcttcctcctggagatcatagccgggatcttggcctatgcatactaccagcaactcaatactgaactgaaggagaacttaaaggataccatgaccaagcggtatcaccagcccggtcatgaggccgtaacatcagcagtggaccagctccagcaagaatttcactgctgtggctccaacaattcccaggattggcgggatagtgagtggattcgctcacaggaagctggctag

SEQ ID NO: 111241 - DNA, 543 bp, synthetic construct
  misc_feature 1..543: note = Description of Artificial Sequence: Synthetic coding sequence
  source 1..543: mol_type = other DNA
atgggagaatttaacgagaaaaagaccacctgcgggaccgtgtgcctgaaatacctcctttttacgtacaattgttgtttttggctcgctggactggctgttatggctgtggggatttggacactagctctgaaaagcgactatatctccctgctcgcttcaggcacctatcttgcaactgcttatatactggtcgtggctggcaccgtggttatggtcactggagtactcggctgttgtgccacatttaaagagcgtaggaacttattacgtttgtattttatcctcctgctgataattttcctcctggaaatcattgcaggcatcctggcttacgcatattatcagcagctgaacacagagttgaaggaaaacctgaaggatactatgacgaagcgctaccatcagcctggacatgaggcagttacctccgctgtggaccaactccagcaggaatttcactgttgtggctcaaacaattcgcaggactggcgggattccgagtggattaggtctcaagaggccgggggcagagttgtgtag

SEQ ID NO: 111242 - DNA, 273 bp, synthetic construct
  misc_feature 1..273: note = Description of Artificial Sequence: Synthetic coding sequence
  source 1..273: mol_type = other DNA
atgggggaattcaatgaaaaaaagacgacatgcggaaccgtgtgtttgaaatatttgctgttcacttacaattgctgcttttggctggccggcctggccgtcatggctgtgggcatctggacgttggctcttaagtctgattacatcagcctgctggcatcaggaacctacctggccacagcttacattctagtggttgctgggaccgtggtgatggttaccggggtcctagggtgctgcgccaccttcaaagaacgcaggaacctactatag

SEQ ID NO: 111243 - DNA, 513 bp, synthetic construct
  misc_feature 1..513: note = Description of Artificial Sequence: Synthetic coding sequence
  source 1..513: mol_type = other DNA
atgggagaattcaacgaaaaaaagaccacctgtggtacggtatgcctcaagtatctcttgttcacttataactgctgcttttggctggccgggctggcggtaatggctgtgggtatctggaccctggcactcaaatctgattatatatctctcctggccagcggcacatatctggctaccgcatacatcctggtggtggctggtacggtggtgatggtgactggggtgctgggctgttgcgccacttttaaggagagacggaatctgctgagactgtactttattctgcttctcatcatttttctactggagatcatcgccggcatcctggcttatgcttattatcagcagcttaatacagaacttaaggagaacctgaaggacacaatgacaaaacgctaccatcagcccgggcacgaggcagtcacaagtgcagtagaccagctgcaacaggagttccactgctgcggcagcaacaattctcaggattggcgggatagtgagtggatttag

SEQ ID NO: 111244 - DNA, 762 bp, synthetic construct
  misc_feature 1..762: note = Description of Artificial Sequence: Synthetic coding sequence
  source 1..762: mol_type = other DNA
atgggcgaatttaacgaaaaaaagacgacctgcggaacagtttgcctgaagtatttattgttcacatataactgttgtttctggctggcaggactggccgtgatggccgtagggatctggaccctggccctcaaatcagattacattagcttgttggcatcaggaacctacctggcaacagcatacatcctggtggttgcagggaccgtggtgatggtcacgggagtactcggatgttgtgccacattcaaggagaggaggaacctgctgagactctactttatcctcttgctcataatattcctccttgagataatagccggaatcctcgcctatgcatattatcagcaactgaataccgaactgaaagagaacttgaaggacacgatgacaaagcggtaccaccagcctggtcatgaagctgtcaccagtgccgtcgatcagttgcagcaggagtttcattgttgcggcagcaacaattctcaggactggagagattcagagtggatcaggtcccaggaagccgggggtcgcgttgtgccagactcctgttgtaagactgtggtggccctgtgtggacagcgcgaccatgccagcaatatttacaaggtggagggaggatgtatcactaaattggagacgttcatccaggagcaccttagagtgatcggagctgtgggaatcgggatcgcttgcgtccaagtcttcggtatgatttttacgtgttgcttgtaccgcagcctgaagctcgagcattactag

SEQ ID NO: 111245 - DNA, 3471 bp, synthetic construct
  misc_feature 1..3471: note = Description of Artificial Sequence: Synthetic coding sequence
  source 1..3471: mol_type = other DNA
atgtcgaaattgaggatggtgctactggaggactctggatccgcagactttcgacgccatttcgtaaacctgagcccgtttacgatcaccgtggttctgctgctctccgcctgctttgtgacgtcctctttggggggtactgataaagaactgagactagtggatggcgagaacaagtgctccggccgggtggaagtgaaagtgcaggaagaatgggggacagtgtgtaacaacgggtggagcatggaagcagtttctgttatctgcaaccagctgggatgtcccacagcaataaaggctcccggctgggctaattcaagcgctggttctggcaggatatggatggaccacgtgagttgcagaggcaatgaatccgccctttgggactgcaaacacgatggatggggtaagcactctaactgtacccaccaacaggacgcaggagttacttgtagcgacggctcgaacctggaaatgcggcttacacgtggtgggaatatgtgcagcggccgcattgaaataaaatttcaagggcgctggggtacagtgtgcgatgacaacttcaacatcgaccatgcttccgtcatctgcagacaactcgaatgcggctccgcagtctccttcagcggaagcagtaattttggtgaagggagcggccctatctggtttgacgatctgatctgcaatgggaacgagtccgccctctggaattgcaaacatcagggatgggggaagcataactgcgatcacgcggaggacgccggcgtcatttgctctaagggcgcggatctctccctgcggctcgtcgacggggtgaccgaatgcagtggaagactggaggtccgatttcagggcgagtggggtacaatctgtgacgacggttgggatagctacgacgctgcagttgcttgcaaacagctggggtgtcctaccgctgtgaccgccattggacgggttaatgcaagcaagggtttcggccacatttggctggactccgtctcctgccagggacacgagcctgcaatctggcagtgcaagcaccatgaatggggaaaacactattgtaaccacaacgaagatgctggtgtaacctgctctgacggttccgacctcgaactgcgtctgagaggagggggaagccgctgcgccggaacagtggaagtggagattcagaggctgcttgggaaagtgtgtgatcgaggctggggcctgaaagaggctgacgtggtctgccggcagctgggctgcggcagtgccttgaagaccagttaccaggtgtactccaagatccaagctactaatacctggctgttcctcagctcttgtaatggcaatgagaccagcctctgggactgtaagaattggcagtggggaggccttacctgcgaccattatgaagaagcgaagattacctgtagcgcgcaccgagagcctcggcttgttggtggagacatcccttgttctggacgagtggaggtaaagcacggtgatacttggggctcaatctgcgacagcgacttttcattggaggccgcatctgtcctgtgcagggaactccagtgtgggactgtggtgagcatcttgggcggtgctcactttggcgagggcaacggacagatctgggccgaggaattccagtgtgaaggccatgaatcccacctgtccctttgcccagtagccccacgccctgagggtacatgctcccacagcagggatgtcggtgtagtgtgcagccggtacacagagattagactcgtgaacggcaagaccccctgtgagggacgtgtcgagctcaagacattaggggcttggggatcactctgtaacagccactgggacatcgaggacgctcacgtgctgtgccaacaacttaaatgcggggtcgccttgagcactccaggaggcgccaggttcgggaaaggcaacgggcagatttggcggcacatgtttcattgcaccggtaccgagcagcatatgggcgattgtcctgtcacagctttgggagcctctctgtgccctagcgagcaagtcgcctctgtaatttgttctggtaatcaatctcagactttgagttcatgtaacagctcctccctcggtcccacacgcccaaccataccagaggagtccgcagtcgcctgcattgagtctgggcagctgcgcctagtgaacggcgggggccgatgcgccgggcgggtcgaaatctaccacgaaggcagctggggaacgatctgtgatgactcatgggacttatccgacgcccacgtggtctgccgtcagcttgggtgcggtgaggccataaacgccacaggatccgcgcacttcggggagggtaccgggcccatttggctggacgaaatgaagtgtaacggtaaggagtctagaatctggcagtgccacagccacggatggggccagcaaaactgtaggcacaaagaggacgcgggcgttatctgttctgagttcatgagtcttcggctgaccagcgaagcgagccgagaagcctgtgctggtcggctggaggtgttttacaatggagcttggggaactgtcggcaaatcctccatgtccgagaccaccgtgggtgtggtgtgtcgccagcttggttgcgcagataaggggaaaattaacccagcctcactcgataaggccatgagtatacccatgtgggttgataatgttcaatgtcccaagggacccgacactttgtggcagtgtccgtcctcgccatgggagaagcgtcttgcctccccgtccgaagagacatggataacttgcgataacaaaatacggcttcaagagggcccaactagttgttccggtcgtgtggagatttggcacggcggcagctggggaacagtctgcgacgactcctgggatttggacgatgcccaggtggtctgccaacaactgggttgcggacctgccttaaaagctttcaaggaagctgagttcggacaaggaactggccctatatggctgaacgaggtcaagtgcaagggcaacgaaagctctttgtgggattgtcctgctcgccgatggggccactctgagtgtggccataaagaggacgctgccgtgaactgtactgacatcagtgtgcagaagacgcctcagaaagctacgacaggtaggagcagcaggcaatcctcttttattgctgtcggcatcctaggagtcgtgcttctggcgatcttcgtcgcactttttttccttacaaaaaaacgcagacaacgtcaacgcttggctgtgtccagccgaggcgaaaatctcgtccaccaaattcaatatagagagatgaatagctgcctcaacgcggacgaccttgacctgatgaatagctccgaaaactcacatgagagtgctgattttagtgcagccgagcttatctcagtgagtaaatttctcccaatcagtggcatggagaaggaggcaattttatctcatacagagaaagagaatgggaacttgtag

SEQ ID NO: 111246 - DNA, 3465 bp, synthetic construct
  misc_feature 1..3465: note = Description of Artificial Sequence: Synthetic coding sequence
  source 1..3465: mol_type = other DNA
atgtcaaagctgcggatggtgctgcttgaggatagcgggagtgctgattttcgtagacactttgtcaacctatccccctttactattacggtggtactgctgctctcagcctgttttgttacaagctcacttggcgggacagacaaggagctgcgcttggtggatggcgagaacaaatgcagcggacgagtcgaagtaaaggtacaagaggaatggggaactgtctgtaacaatggctggagcatggaggccgtgagcgtgatatgcaaccaattaggctgccctaccgcaattaaagccccaggatgggccaatagctccgcgggatccggccgaatttggatggaccatgtctcctgcagggggaatgaatctgccctctgggactgcaagcatgatggttgggggaagcacagcaactgtacacatcagcaggacgccggagtgacgtgcagcgacgggtcaaatctcgaaatgcgcctgacgagaggagggaacatgtgctctggtcgcattgagataaagtttcaaggccggtggggcacggtttgcgatgacaactttaacatagatcacgcctctgttatctgtcggcaactcgagtgcggctctgcggtctctttctctggttccagcaacttcggggagggatccgggccgatttggttcgatgatctgatatgtaatgggaacgaatccgcgctttggaactgcaaacatcaaggatgggggaagcacaattgcgaccatgctgaggacgcaggcgtaatctgtagtaaaggggccgacctttcgttaagactcgtcgatggagtaactgaatgctccggaaggctggaggtcaggtttcaaggagagtggggcaccatttgtgatgatggttgggatagttacgatgctgctgttgcctgcaagcagcttggctgtcctacagctgtcactgcaatcggccgcgttaacgccagtaagggcttcggacatatttggctggattccgtttcctgtcaagggcacgaaccagcaatctggcagtgcaaacaccacgaatggggcaaacattattgcaatcataatgaggatgctggtgtgacttgtagtgatgggtcagacctggaactaagattgaggggagggggatcccgatgcgcgggtacggtggaggtcgaaatacagagactattgggtaaagtttgcgacagaggatggggccttaaggaggcggacgtcgtatgccgacaactcgggtgtggctctgcactgaagacatcatatcaggtgtacagtaagatccaggcaactaatacctggttgtttctgtccagctgtaatggcaacgaaacctccctgtgggactgcaagaattggcagtggggaggactgacatgtgaccattacgaggaggccaagataacatgcagcgctcatcgggagcccaggctcgtgggcggagacatcccatgctccggccgtgtggaggtcaagcacggcgatacttgggggtccatatgtgattccgattttagcctcgaggcagccagtgtcctatgtcgagagctgcagtgtggcaccgtggtctcaatcttgggaggcgcacactttggggaggggaacggccaaatttgggcagaagaattccaatgcgaaggccatgaatctcacctgtccctgtgtcccgtggctccccgcccagaaggaacttgttcacatagccgcgacgttggggtagtatgtagtagcaaaactcagaagacatctctgatcggtagccacactgtcaagggcacgggattgggatcccacagctgcctcttccttaagccatgcctgttgcccggctataccgaaatcagattggttaatggcaaaacaccttgtgagggccgggtggagcttaagactctaggagcttggggctctctatgcaacagtcactgggacatcgaggatgcccacgtgctgtgtcagcaactgaaatgcggggtggctctgagcacacctggcggtgctcggtttggcaagggaaacggtcagatctggcggcatatgttccattgcactgggactgaacagcacatgggcgactgccccgtcactgctctgggcgcctccctatgcccatctgagcaggttgccagcgtcatatgtagcggaaaccaaagccaaacgctgtcaagctgcaacagcagttctctgggccctacaaggccaaccatcccagaggagtcagccgtggcctgcatagagtccggccaactgcgactggtcaatggcggcggaaggtgtgccggaagagtggagatttaccacgaaggatcatggggaactatctgcgatgactcatgggacctgtctgacgctcacgttgtgtgccggcagctgggctgcggggaagctatcaacgcaacgggttcagcgcattttggagagggaaccgggccaatttggctagacgaaatgaaatgcaacggaaaggagagtcggatttggcagtgtcactcacatggttggggtcagcaaaattgccgacacaaggaagatgcaggggtgatttgcagtgaatttatgtcactcaggctgacaagcgaggcgagccgcgaagcatgcgccggaagacttgaggtgttctacaatggggcatgggggaccgttgggaaaagctccatgagtgagaccactgtgggagtggtctgccgacaactcggctgtgccgacaaggggaagataaatcccgcgtccctggataaggcaatgagtattcctatgtgggtggataacgtgcagtgccctaaaggtcctgatactttatggcagtgtcccagcagtccctgggaaaagcggctggcgagtccaagtgaagaaacatggataacgtgcgataacaagattcggctccaggaggggcccacaagctgcagtggtcgcgtagaaatctggcatggaggttcttggggcaccgtgtgcgacgactcctgggacctggacgacgctcaggtcgtctgccagcaactaggatgcggacccgcactaaaggcttttaaggaggcggagtttgggcagggtactggcccaatctggctcaacgaggtgaagtgcaagggaaatgagtcgtcactctgggactgccctgcccggcggtggggccactcagaatgcggccacaaggaagacgctgctgtgaactgtactgacatctccgtccagaagacacctcagaaagctactactggccggagcagtcggcagtctagcttcattgctgtgggcatactaggggtggtgcttctggcaatctttgtggcgctgttcttcctcaccaagaaacgccgtcaacggcaacgcctcgccgtttcttctaggggagaaaatctagtgcatcagatacagtacagagaaatgaatagttgtctgaatgctgacgacctggacctgatgaattcatcaggcggccatagcgagccacattag

SEQ ID NO: 111247 - DNA, 3366 bp, synthetic construct
  misc_feature 1..3366: note = Description of Artificial Sequence: Synthetic coding sequence
  source 1..3366: mol_type = other DNA
atgtctaaactcaggatggttctactggaggactctggttccgccgactttagacgccacttcgtgaatctgtcccctttcacaataacggtcgttttgttgcttagtgcgtgtttcgtcactagctctctgggcggcacagataaagaactgcgactggtggatggtgaaaacaagtgttctggtcgcgtggaagtcaaagtgcaagaggaatgggggactgtgtgcaataatggctggagtatggaagcagtctccgttatctgtaaccagttgggttgccccacggctatcaaagcccccgggtgggccaactcaagcgccgggagcggcagaatctggatggatcatgtgagttgccgagggaatgaatcagccctgtgggattgtaaacacgatggttggggtaagcactccaattgcactcaccagcaggacgcaggagtcacctgcagcgacgggtccaatctggagatgcgccttaccaggggtggaaacatgtgttcaggacggatcgaaattaagttccagggccgctggggtaccgtatgcgatgataacttcaacattgatcacgcctcagtaatctgtaggcaacttgagtgtggctctgctgtgagcttctcaggtagctcaaatttcggagagggaagtggtccaatatggttcgatgacctcatttgcaatgggaatgagagcgcactgtggaactgtaaacatcagggctgggggaaacacaactgcgaccacgctgaagacgcaggtgtgatctgtagtaagggagccgatctgtccctccggctggtggatggtgtgacagagtgttcgggcagattagaggtgagatttcagggcgagtggggtaccatctgtgatgatggctgggacagctacgatgccgctgtcgcctgcaaacagttgggctgcccaactgccgttactgcaataggacgggttaatgcaagcaagggattcgggcatatttggctggacagcgtcagctgtcagggtcatgaacccgctatctggcaatgtaagcatcatgaatgggggaaacactattgcaaccataatgaggatgccggagtaacgtgctcagatgggtctgatctcgagctgcgactccggggggggggttctcggtgtgcgggaacagtcgaggtggagattcaaaggctgttgggaaaggtctgcgacagaggatggggcctgaaagaggcagacgtagtctgcaggcagctgggttgcggcagtgctctcaagacatcctatcaagtatacagtaagatccaagccaccaacacttggctgtttttgagctcctgcaatggaaatgagacctcactgtgggactgcaagaattggcagtggggtggactcacctgtgatcattatgaggaggcaaaaattacatgctcagcccatagggagccaaggctggttggtggagacatcccttgttccgggagagttgaggtgaagcacggtgacacctggggttccatttgcgattcagacttcagcctggaggctgcaagcgtgttatgccgcgaattacaatgtggaactgttgtttctatcctaggaggagcgcacttcggagaaggaaatggccagatatgggcggaagagttccaatgcgaggggcacgaaagccacctttccctctgtcctgtggcgcccaggccagaagggacatgttcccactctagagacgtgggcgtggtatgtagtaggtacacggagatcagactagtcaatggtaagaccccttgcgagggcagagttgagctgaagactcttggagcatggggcagtctgtgcaactcacattgggacattgaggacgcacacgtcctctgccagcagttaaaatgtggagttgccctgtccactcccggcggtgcacggtttgggaaagggaacgggcagatatggcgccacatgttccactgtacaggaactgagcagcacatgggggactgcccagtaaccgccttaggagccagtctttgccccagcgaacaggttgccagcgtaatttgttcaggaaaccagtcacagacactgtcttcatgtaattcttcatccctgggcccaacgcgacccacgatacctgaggaaagcgctgtcgcctgtattgagtccggacagctgagactagttaatggcggcgggcgctgcgctggcagggtggagatttatcacgagggcagttggggtaccatttgtgacgattcatgggatctcagtgacgcccatgttgtgtgtcggcagttaggctgtggggaggcaatcaacgctactggctcagcccactttggtgagggcactggcccgatttggctggatgaaatgaaatgcaatggtaaagagtctcgcatctggcagtgccactcccatggctgggggcagcagaattgtcgacacaaggaggatgctggggttatttgtagtgaatttatgagtctgagactcacaagcgaggcctccagagaagcctgtgccgggagacttgaggtgttctacaatggggcctggggcaccgtggggaaatcttctatgagcgagactacagtgggagtggtttgccggcaactcgggtgcgctgacaaaggaaaaattaatccagcctcactggataaggctatgtcaatcccaatgtgggtggacaacgtacagtgcccaaagggacctgacacgctctggcaatgcccctcctccccttgggaaaaaaggctggcctcaccctctgaggaaacctggatcacatgtgataataagatccggctgcaggaaggacccactagctgttctggacgcgtcgagatctggcacggtgggtcatgggggacagtgtgcgatgactcttgggaccttgacgacgctcaggtggtttgtcagcagttgggctgtgggccagccctcaaggctttcaaggaggccgagttcggccagggcaccggacctatttggctcaacgaagtcaagtgtaagggaaatgagtcctcactgtgggattgccccgctaggagatggggccatagtgagtgcggtcacaaagaagatgccgccgttaattgcacagatatttccgtgcagaaaactccccagaaagcaactactggtcgcagcagtagacagtcgtcatttattgcagtcggtattcttggggttgtcctactggctatatttgtggccctttttttcctcacaaagaagcgcaggcagcgccagcgcctggccgtgtcttccagaggcgagaacttggtccatcagatccagtatcgggagatgaactcctgcttaaatgccgatgacctggacctgatgaattcaagtggaggtcactccgagccgcactag

SEQ ID NO: 111248 - DNA, 555 bp, synthetic construct
  misc_feature 1..555: note = Description of Artificial Sequence: Synthetic coding sequence
  source 1..555: mol_type = other DNA
atgtccaggttatcaaggtcactgctgtgggctgccacctgtttgggagtgctgtgcgtacttagtgcggataaaaacacaacccaacatccaaatgtgaccactctcgcccccatttctaatgtcacatccgccccggtgactagcctgcccttggttaccaccccagcccccgagacatgtgagggacgaaactcttgtgtctcttgtttcaacgtgtccgtcgtcaacactacctgcttctggatcgagtgtaaggatgagagctactgcagccataattctaccgtctctgattgtcaagtcgggaatactacagatttttgttcggccaagcccacagtgcagcctagccccagcaccaccagcaagacagtcacgacatcagggactactaacaatactgtaaccccaacgagtcagcccgttcgcaagagcacttttgatgccgcatccttcatcggcggaatcgtcctggtgctgggtgtgcaggctgttatcttcttcctgtataagttctgcaagtctaaggagaggaattaccacactttgtag

SEQ ID NO: 111249 - DNA, 594 bp, synthetic construct
  misc_feature 1..594: note = Description of Artificial Sequence: Synthetic coding sequence
  source 1..594: mol_type = other DNA
atgtcccgcctgtctcggtctctgttatgggcggccacttgcctgggggttttgtgtgttctttctgcagacaaaaatactactcaacacccgaatgtcactacgttagccccgatctcaaatgtgacgtcagcccccgtgacttctctgcctcttgtgaccactcccgctcccgagacctgtgaagggcgcaactcctgcgtgtcttgctttaatgtttccgttgtgaataccacatgcttctggatcgagtgcaaggacgagtcttactgcagccataatagcaccgtgtcggattgtcaggttgggaatacaaccgatttctgttcggtgtccaccgcgacccccgtgcccactgcaaattcaaccgcgaagccgaccgtgcaaccgagccctagcacaacttccaaaaccgtcacgaccagcggtaccactaataatacagtcacccccacttctcagcccgtgcggaaatctacttttgacgccgcgtccttcatcggtggaattgtgctggtgttaggcgtccaagccgtcatcttctttctgtataagttctgcaagagcaaggagcgcaattaccacacactatag

SEQ ID NO: 111250 - DNA, 537 bp, synthetic construct
  misc_feature 1..537: note = Description of Artificial Sequence: Synthetic coding sequence
  source 1..537: mol_type = other DNA
atgagtcgcctctcacgatctctgctctgggccgctacatgcctgggggtcctatgtgtcctcagcgctgataagaacaccactcagcatcccaatgtcaccacacttgcccctatcagcaacgttacctccgccccagtgacatccttacctctggtgactacaccagctccagagacatgcgaaggtaggaacagttgcgtaagctgcttcaacgtcagcgtggttaacacaacttgtttttggatcgaatgtaaagatgagtcctactgcagccataactcgaccgtgagcgactgccaagtggggaacaccacagatttctgtagtgtcagcacggcgacccccgtccccacggccaactccacagggacaacaaacaacacagtgactccaacctctcagccagttagaaaatccacatttgacgccgcctcgtttattggcggtatcgttttggtcctgggggtgcaggcagtcatcttcttcttgtacaaattttgcaagagcaaggaacgtaattaccatacgttatag

SEQ ID NO: 111251 - DNA, 498 bp, synthetic construct
  misc_feature 1..498: note = Description of Artificial Sequence: Synthetic coding sequence
  source 1..498: mol_type = other DNA
atgtccagactgtcacgctccttgctgtgggccgcaacttgcctcggggtgctgtgcgttctctcggccgacaagaacactactcagcacccgaacgtgactaccctggcccccatatccaatgtgacatcagcgcccgtgacttctctgcccctggttaccaccccagcccccgaaacttgcgaaggaaggaactcttgcgtgagctgtttcaacgtgagcgtggttaatactacgtgcttctggatcgagtgcaaggacgagtcttattgctctcacaatagtacagtgtctgactgtcaagtgggcaacacgactgatttctgctcaggcaccaccaataatacagtcacacctacttcacagccagtgagaaagtcaacatttgatgccgccagtttcatcggtggcattgtcctcgttctaggtgtgcaggccgtgatcttcttcctgtataagttttgcaagtccaaagaacgcaactaccacacactttag

SEQ ID NO: 111252 - DNA, 570 bp, synthetic construct
  misc_feature 1..570: note = Description of Artificial Sequence: Synthetic coding sequence
  source 1..570: mol_type = other DNA
atgagtaggctctctcgctcgttgctgtgggctgccacatgcctgggtgttctctgcgtattgagcgctgacaaaaacacaactcagcaccccaacgttaccacactagcccccatctcgaatgtcacatcagcgccagtgacaagtcttccgctggttacaactccagcacccgagacatgtgagggcagaaactcttgcgtgtcttgctttaatgtcagcgtggtgaacaccacttgtttctggatcgaatgtaaggacgaaagctattgctcccacaacagcaccgtctctgattgtcaggtcggcaatacgactgacttctgtagtgtgtcgacagcaacgcccgtaccgactgctaattccacagcaaagccgaccgtacagccttcccccagcactacctcaaagacggtcacaacgtcaggtaccactaataacactgtgacgccaacaagccagcccgttcgtaaatccacctttgatgcggctagttttattggcggaattgtcctagttctggagatacgctgtcatacccggaattatatacccgatctgaaaaagtag

SEQ ID NO: 111253 - DNA, 474 bp, synthetic construct
  misc_feature 1..474: note = Description of Artificial Sequence: Synthetic coding sequence
  source 1..474: mol_type = other DNA
atgtctaggttatcccgctcattgttgtgggccgcaacttgtttaggggtcctgtgtgtgctctcagccgataagaataccacacagcatcccaatgtgactacattggccccaatcagcaatgtgacttctgcccccgtcacttccttgcctctagttactacaccagcaccagaaacctgtgagggacgaaatagctgcgtgagctgcttcaatgtgtcagtcgtgaacactacgtgcttttggattgaatgtaaggacgaatcttactgctcccataactctaccgtctctgattgccaagtgggcaataccaccgatttctgctccgtttcaaccgccactccggttcccaccgccaattctactgcaaagcctacagtgcagccatcaccttcgacgacaagcaagaccgttacaacaagtgaaatcagatgtcatacccggaactacattcccgatctcaagaagtag

SEQ ID NO: 111254 - DNA, 747 bp, synthetic construct
  misc_feature 1..747: note = Description of Artificial Sequence: Synthetic coding sequence
  source 1..747: mol_type = other DNA
atgtccgcggtgctgcttctcgctttgctcggctttatcctgccgcttccaggagtgcaagcactactgtgtcagttcggaactgtgcagcacgtgtggaaagtgtctgacctgccaaggcagtggactcctaagaacaccagctgcgattctggactcgggtgtcaggacaccctgatgttaattgagagtgggcctcaggtcagcctggtgctatcaaaaggatgcactgaggctaaggaccaggagccaagagtcacagagcacaggatgggtcctggtttgtcgctgattagttacacatttgtgtgccgccaggaagatttctgtaacaacctcgtgaacagcctcccattatgggcgcctcagccaccagctgacccgggctccctgaggtgtcccgtgtgtctttcaatggagggttgcctggagggaaccacagaggagatctgcccgaagggcactacacactgttacgacggcctgctccgactccgggggggtgggattttttccaaccttagagtccagggttgcatgccacagcccgtgtgcaatctgttgaacggcacccaggaaataggtcccgtgggtatgactgagaattgtgacatgaaggacttcctccagctcaaacccgtgggacttctagaagagcacaacgttggagagaaggagagaggacaaggacagcatcaatgcgtacagctcgattggcagaaaagggctgccactggtattttctag

SEQ ID NO: 111255 - DNA, 438 bp, synthetic construct
  misc_feature 1..438: note = Description of Artificial Sequence: Synthetic coding sequence
  source 1..438: mol_type = other DNA
atgtctgctgtccttctattggcactgctcggttttatcctcccactgcccggcgtccaggcgctgctctgccaattcggaaccgttcaacacgtctggaaggtttctgatcttccgcggcaatggacgccaaagaacactagttgcgattctggactggggtgccaagatactctgatgctgatcgagagtgggcctcaggtgtccttagtgctgtctaagggttgcacggaggccaaggaccaggaacctcgtgtgactgaacaccggatgggcccgggcctgtcattgatcagctacacgtttgtatgtagacaggaagatttttgcaacaacttggtgaatagtcttccactatgggccccccagccacctgccgatccgatgatgggtgccgctgagggccctttcgggaaagcggaacaagttgactcctag

SEQ ID NO: 111256 - DNA, 438 bp, synthetic construct
  misc_feature 1..438: note = Description of Artificial Sequence: Synthetic coding sequence
  source 1..438: mol_type = other DNA
atgagcgcagtgttactgctcgcgttgttgggatttatcctgcccctgcctggagtacaagctcttctctgccagtttgggactgtgcagcacgtttggaaagtgtcggatctgcctcggcagtggacgccaaaaaatacttcatgcgactctggactcgggtgccaggacaccctgatgcttattgaatccgggccacaggtgtctctcgtcctgagcaaaggttgtacagaggccaaggatcaggagccacgagtgacagaacacagaatgggtccaggactaagcctgatatcctatacatttgtgtgcagacaagaagacttctgtaacaacctggttaattcactccctctgtgggccccacagccaccggctgatcccatgatgggggcagccgaaggcccattcgggaaagctgaacaagtggatagttag

SEQ ID NO: 111257 - DNA, 1671 bp, synthetic construct
  misc_feature 1..1671: note = Description of Artificial Sequence: Synthetic coding sequence
  source 1..1671: mol_type = other DNA
atgcctccaccacgccttttgttcttcctgctgtttctgacccccatggaggtgagacccgaagaaccactcgtggtgaaggtcgaagaaggggacaacgccgtcctgcagtgcctgaaggggactagtgacggccctactcagcagttaacttggtcccgtgaatcaccccttaagcccttcctgaagctgtcacttgggctgcccggactgggcatccacatgcggccgcttgccatatggcttttcatctttaatgtgagccagcaaatggggggtttctacctgtgccagccaggaccaccctccgaaaaagcatggcagccgggttggacagtgaatgtagagggcagcggagagctgtttcgttggaatgtgtccgacttaggcggactggggtgcggcctgaagaataggtcctctgagggtccttcttcccctagtggaaaattaatgagtccaaaattatacgtgtgggccaaggacaggcctgaaatctgggagggggagccaccctgtctgcccccccgggactctcttaatcagtccctgagtcaggacctgaccatggcaccgggatcaaccctgtggctgtcttgcggcgtgcctcccgacagtgtcagccgcggtcctctaagctggactcatgtgcacccaaagggcccaaagtccctgctgtcactagagctcaaggatgatcgccccgctcgagacatgtgggtgatggaaacgggactgctgctgcccagagctacagcacaggacgccggaaaatactattgccacaggggtaacctgacaatgagcttccacttggagatcaccgcacggccggtcctgtggcactggcttctgaggactgggggctggaaggtatccgccgtgactctcgcttacctcatcttctgcctgtgctccctggttggaattctacacctacagcgcgccctggtgctccggcgtaagcgcaagcggatgactgaccctactcgaagatttttcaaagtgacccccccccccgggtctggccctcaaaatcaatatggcaatgtgctgagcctgcccacaccaaccagtggcctcggccgggcgcaaagatgggctgcaggcttgggcggcaccgccccatcctacgggaacccgtcctcagatgtgcaggccgatggcgccctgggttctcgcagcccgcccggcgtgggccctgaagaagaagagggtgaggggtacgaggagcccgacagtgaagaggactccgaattttacgaaaacgattcaaatcttggacaggatcagctcagccaggatggaagtggatatgagaacccagaagatgaacctttaggaccagaggacgaggattcgttttcaaatgctgaatcttatgagaacgaggatgaagagctgactcagcccgtggcccgtacgatggattttctgagccctcatggctcagcttgggacccatctcgcgaggcgacctctttaggcagtcagtcgtacgaagatatgcgggggatcctgtacgcagcacctcaactgcggagcattcgaggacagccaggacccaaccatgaagaagatgctgactcatatgagaatatggataaccctgatgggcctgatcccgcatggggaggtggtgggcgcatgggtacctggtctaccagatag

SEQ ID NO: 111258 - DNA, 1092 bp, synthetic construct
  misc_feature 1..1092: note = Description of Artificial Sequence: Synthetic coding sequence
  source 1..1092: mol_type = other DNA
atggaagtcagacccgaggaacctctagttgtaaaggtggaagagggggataacgccgtgctccagtgcctcaagggaacatctgatggacctacccagcagctgacatggtcccgggaatctcccctgaaacccttcctgaaactttcactcggcctgcccggactgggaatccatatgcgacccctgggcaagtattattgtcatagaggcaatttaaccatgtctttccatttagagattaccgcaagacctgttctctggcattggctactgcgaaccgggggctggaaagtgagcgcggttaccctagcctacctgatattctgtttgtgcagtctggtcggaatattacacctgcagcgtgcgctggtcttacgtaggaaacggaagcgaatgacagacccaacaagaagattttttaaagtaacccctccccctggaagtggtccccagaatcagtacggtaatgtactttcactcccaacgcctactagcggacttgggcgggctcagcgctgggccgccggtctcggcggaaccgccccatcttatggaaatccttcatcggatgtccaggctgatggtgccctcggatcccggagccctccaggagtgggtcctgaggaggaggagggcgagggctacgaggagcccgacagcgaagaagactctgagttctacgaaaatgacagcaatctgggccaggaccagttatcacaggatggcagcgggtacgaaaatcctgaggacgagcccctggggccggaggacgaagatagctttagcaacgccgagagttatgaaaacgaagacgaggagctgactcaacccgtggcccgcaccatggacttcttgagcccacacgggtccgcttgggacccaagccgcgaggccacctcattagggtcccagagctatgaagacatgcgggggattctatacgccgcaccccagctgagatccatcagggggcaacccggtccaaaccatgaggaagatgcggactcctacgagaatatggacaaccccgacggacccgacccagcctggggcggcggcggccgcatggggacttggagcactaggtag

SEQ ID NO: 111259 - DNA, 1218 bp, synthetic construct
  misc_feature 1..1218: note = Description of Artificial Sequence: Synthetic coding sequence
  source 1..1218: mol_type = other DNA
atgagcccaaagctttacgtttgggctaaggatcgaccagagatatgggagggagagccgccatgcctcccaccaagggactccctgaatcagagcttaagtcaagacctgactatggcccctggatccaccctgtggctctcctgtggggtgccccctgactcagtttctagaggcccactgtcttggacccacgtacatcccaaggggccaaaatcactgctgtccctggagctgaaagatgataggcccgcccgggacatgtgggtcatggaaactgggcttcttctacccagggccaccgcccaggacgccgggaaatattattgccatcgaggcaatttgaccatgtctttccacttggaaatcacagccaggcccgttctgtggcattggctcctgagaaccggcgggtggaaggtgtcagccgtaactctggcatacctgattttctgcctttgctctctcgtaggaatcctccatttacagagggcactcgttctgaggcgcaagaggaaacgaatgaccgatcccaccagaagatttttcaaggtgacccccccccccgggtctggaccccaaaaccaatacggcaatgttttaagtttgcccacacctacctctgggctgggccgcgcccagagatgggcggctggcctaggaggaacggccccatcttatggcaacccaagttctgatgttcaagccgatggggctctgggttcccgcagccctccaggggtgggcccagaggaggaagaaggagagggctacgaggagcccgactctgaggaagactctgaattttatgaaaatgatagcaacctaggtcaggaccagctcagtcaggatggctctgggtacgagaatccagaagatgaaccgctgggtcccgaggatgaggacagcttctcgaatgctgagagctatgagaatgaagatgaggaacttacacagcccgtagcacgaaccatggatttcctaagccctcatggatcagcctgggatcctagtagagaggctacttcactggggtcccagtcatatgaggacatgcgtggtattttatatgcagctccacagcttcggagcattcggggccaacctggacccaatcacgaggaggacgctgacagctacgagaacatggataacccagatggtccggatccggcttggggaggaggtgggcgcatgggcacctggagtacccgttag

SEQ ID NO: 111260 - DNA, 1674 bp, synthetic construct
  misc_feature 1..1674: note = Description of Artificial Sequence: Synthetic coding sequence
  source 1..1674: mol_type = other DNA
atgcctcctcctcggctgctttttttcctcctgtttttgacacctatggaggtgagacctgaggagcctctcgtcgttaaggtagaagagggagacaacgcagtgctccagtgtttaaaggggacctccgacggcccaacacagcagctcacttggtctagggaaagccccctgaaaccattcctgaagctcagcctgggtttgcccggtctgggcatccatatgaggccattggcaatctggctttttatcttcaatgttagccagcagatggggggcttctacctgtgccaaccggggcctccaagcgagaaggcctggcagcccggatggactgtgaacgttgaaggttccggcgaactcttccggtggaacgtttccgatctgggagggttaggctgcgggctcaaaaaccgttcttcagagggccctagttcaccatcggggaagttgatgtctccgaagctgtacgtttgggctaaagatcgccccgagatctgggagggagaaccaccttgcctccccccccgggacagccttaatcagtcactgagccaggatctgacaatggctcctgggtccaccttgtggttgagctgtggagtaccccccgacagtgtgagtagaggcccgctcagctggacccacgtgcatcccaagggtcccaagtcactcctgtcgctggagttaaaagatgaccgcccggcacgcgacatgtgggttatggaaacgggcctacttctgccacgggccacagctcaggacgcgggcaaatattactgtcaccgtggaaacctcacaatgtcctttcacctggagattacagcgcgcccagtgctctggcactggcttttgcgaacgggcggatggaaagtgtcagctgtgactcttgcgtacttgatattctgcctttgttccctcgttggcattctgcacctgcagcgcgctctcgttctgagacggaaaagaaagaggatgaccgatccaacccggcggttctttaaggtcactccaccgccaggatcgggcccacaaaaccagtacggtaacgtgctcagcctacccacacccacctctggtctcggtcgcgcccagaggtgggcggccggactcggaggaactgccccttcttatggtaaccccagcagtgatgtccaggccgatggcgccttgggctcaagaagccctcctggggtgggtccggaggaagaagagggtgagggctatgaggaacctgactcagaagaagattctgaattttacgaaaatgacagcaatctgggacaggatcagctttcccaggatggatcaggatacgagaacccggaggatgaaccgctgggcccagaagacgaagactccttcagtaatgcagagtcttacgaaaacgaggacgaagaactgacacagcctgtggcccgtactatggatttcctgagtccccatggctccgcttgggatccatcccgggaggcaactagtctggctggtagtcagtcgtacgaagatatgagaggtatcctgtatgccgccccccaattaagatccatccgcgggcagccgggccccaaccacgaggaggacgccgatagttacgagaacatggataacccggatggtcctgacccggcgtggggcggcggcggacgtatgggaacttggtctacccgctag

SEQ ID NO: 111261 - DNA, 984 bp, synthetic construct
  misc_feature 1..984: note = Description of Artificial Sequence: Synthetic coding sequence
  source 1..984: mol_type = other DNA
atgctgttcttgctgctgcctcttctggccgtgctcccaggagacggcaatgcagacggactgaaagaaccactctccttccatgtgacctggatcgcatccttttataatcattcatggaagcagaacttggtgagcggctggttgagcgacctgcagacgcacacgtgggactcaaattcctctacaattgtctttctgtgcccttggtctcgaggaaacttttctaacgaggaatggaaggagctggaaacgttattccgaatacgcacaatccggtcctttgaggggattaggcggtacgcccacgaactgcagttcgagtacccttttgaaattcaagtcaccggtggctgcgagctccattccggcaaggtgagtggatcatttctccagctggcttatcaggggtctgactttgtgtccttccagaataatagctggctcccctatccagtggctggcaatatggccaaacatttctgtaaagttctaaatcagaaccagcacgaaaatgacatcacacacaacctgctgtccgacacgtgtcctcgttttatcttgggtctcctggatgcgggcaaagcccacctccagcgtcaggtgaaaccggaagcatggctttcacacggtccatcacctggccccgggcatctgcagttggtgtgtcacgtgagcggcttctacccaaaacctgtgtgggtgatgtggatgaggggagaacaggaacaacagggcacccaacgcggggatatattgccgagtgccgacggcacctggtacctacgagctacacttgaggtggccgccggcgaggccgctgacctatcctgcagggttaaacactcttcactggagggccaggatatagtcctttattgggagcaccattcttccgtaggcttcattatcctagctgttatagttcctctgctcctgctgattgggctggccctctggttccgtaaaagatgcttttgctag

SEQ ID NO: 111262 - DNA, 1002 bp, synthetic construct
  misc_feature 1..1002: note = Description of Artificial Sequence: Synthetic coding sequence
  source 1..1002: mol_type = other DNA
atgttactcctgccattccagctgctcgctgttttattccccggcggcaattccgagcatgcattccagggccctactagcttccacgtgatccagacatcttcctttactaatagtacatgggcgcagactcagggttctggttggttggacgacctacagatacatggatgggatagtgatagtggaacggcgatattcctgaaaccctggtctaagggaaatttctctgataaggaggtagcggaactcgaagaaatcttccgggtttacatctttggcttcgcccgcgaggtgcaggacttcgctggggatttccaaatgaaataccccttcgaaattcagggcattgcaggctgcgagctccactctggcggggctattgtgagcttcctgaggggagcccttggtggcctcgattttttatctgtcaaaaacgcctcatgcgttccaagtcctgaaggaggaagtagagcacagaagttttgcgcattgataatccagtaccaaggaatcatggagacggttaggattctcctctatgaaacctgtcctaggtatctactcggtgtgttaaacgccggtaaggccgacctccaaaggcaggtaaagccagaggcttggcttagcagcggaccctctccagggcccgggcgcctgcagctggtctgtcatgtcagtggtttttaccccaagcctgtgtgggtgatgtggatgagaggggagcaggagcaacaggggactcagttgggggacatactccctaatgctaattggacgtggtacctaagggctactctcgacgtggcagatggggaagccgctggtcttagctgtagggtcaagcattcctctctggaagggcaggacatcatactgtattggaggaaccccacatcaattggatctatcgtcctagcgatcatcgtgcctagtctgcttctgctgctttgccttgccttgtggtacatgagaagaaggtcctatcagaatataccatag

SEQ ID NO: 111263 - DNA, 741 bp, synthetic construct
  misc_feature 1..741: note = Description of Artificial Sequence: Synthetic coding sequence
  source 1..741: mol_type = other DNA
tgatcctctttcacgaacagcacttgggctcagacacaggggagtggttggctggatgacctacagatccacggttgggactcggattccgggacagcaatcttcctcaaaccgtggtcgaaaggcaacttcagcgacaaagaggtagcggaattggaagaaatttttcgagtatacatttttggcttcgctcgtgaggtgcaggactttgcaggcgattttcagatgaagtaccccttcgagatccagggaatcgccggctgtgagcttcactcagggggagccatcgtctccttccttaggggcgcccttggcggcctcgattttttatctgtgaagaacgcctcctgcgtgccttccccggagggaggcagccgggctcagaagttctgtgccctgatcatccaatatcagggcattatggagaccgtgaggattctgttatatgagacatgccctcgttaccttctgggcgtgctcaatgccggcaaagcagacctgcagcgacaggtgaagcctgaggcttggctgtcctccgggccttcccccggcccaggcaggctccagcttgtttgtcatgtgagcggattctaccccaaacccgtttgggttatgtggatgagggggaaccccacaagcattggttccattgtgctcgccatcatagttccatcccttctgctgctgctgtgtttggcactctggtacatgcgcagaaggtcctatcagaatataccttag

SEQ ID NO: 111264 - DNA, 1041 bp, synthetic construct
  misc_feature 1..1041: note = Description of Artificial Sequence: Synthetic coding sequence
  source 1..1041: mol_type = other DNA
atgctatttctgcaatttcttctcttagccctgctgctgccaggcggggacaatgcggacgcctctcaggaacatgtgtccttccacgtgattcagattttcagtttcgtgaatcagtcttgggctcggggacagggatcgggctggctcgacgagctgcagacacatggctgggattctgaatccggcacaattattttcctccataattggagcaagggcaactttagcaatgaggagctgtcagatttggagctcctcttccgcttttacctgttcggattgacaagagaaatccaggatcacgcctcccaggattactcgaagtacccttttgaggttcaggtgaaagccgggtgcgagttgcacagtggcaagtctccggagggttttttccaggtagcattcaatgggctggacctgctgtcattccaaaataccacgtgggttccatcccccgggtgcggcagtctggctcagtccgtatgccatctcctgaatcaccagtatgaaggcgtaaccgaaacagtttataatctgatcaggtcaacgtgcccacgctttctgcttggactgctggatgcaggaaagatgtacgtccaccgtcaggtacggcctgaggcttggctgtcatcaagaccatcactgggttcaggccagctcctcctcgtgtgccatgcgtcggggttctaccccaagcctgtctgggttacctggatgcggaatgagcaggaacagctaggaactaagcacggcgacatactgccaaatgctgatggtacctggtatctgcaggttatcctggaagtggccagcgaggagcccgctgggctgagctgtcgagtcagacattcatcactgggagggcaggacatcatactgtattgggcccacatacgcacctcatgtgagaccctccctcctgattctccaatagtgctgcgtacccaacagccaaggtccttggtgcaatatagcgacgctattccatccacgctccacctcaattgcttctccttctgtatcatcaatatctgctag

SEQ ID NO: 111265 - DNA, 1002 bp, synthetic construct
  misc_feature 1..1002: note = Description of Artificial Sequence: Synthetic coding sequence
  source 1..1002: mol_type = other DNA
atgttgtttctgcaatttctgctcctggccctgctgctgcccggtggcgacaacgctgacgcttctcaggaacacgttagtttccatgtgattcaaatcttttcttttgtaaatcagagttgggcaaggggacagggaagtgggtggctcgatgagctgcagacacatggctgggactccgaatccggtaccatcatcttcctccacaattggtcaaagggtaattttagcaacgaagaactcagtgatctggagcttttattccggttctatttattcggactgactagggaaatccaggaccacgcttcccaggattatagcaagtatccatttgaggtgcaggtcaaagcgggatgcgaactacacagtgggaaatcacccgagggcttcttccaggtggccttcaacggcttggatctactcagtttccagaacaccacttgggttccgtcccccgggtgcggaagcttggctcagtctgtttgccacctgttaaaccaccagtatgagggcgtgaccgaaaccgtctataatttaatccgttctacatgtcctcggttccttctgggactgctggacgctgggaaaatgtatgtccacaggcaagtcaggccagaggcatggctttcaagccggccttcgcttgggtctggtcagctattattggtgtgtcacgccagtggattttatccaaaacccgtatgggtgacctggatgcggaatgagcaggaacaactcgggaccaaacacggcgacattttaccaaacgctgatggaacctggtacctgcaggtcatcctggaggtcgcgtctgaggagccggcgggcctgtcatgcagggtgcggcactcgagtctgggagggcaagacattattctatactggggccaccactttagtatgaactggattgcgctcgtcgttatcgtgccccttgttatcctgattgtcctcgttctctggtttaagaagcactgttcctatcaggacatactgtag

SEQ ID NO: 111266 - DNA, 846 bp, synthetic construct
  misc_feature 1..846: note = Description of Artificial Sequence: Synthetic coding sequence
  source 1..846: mol_type = other DNA
tgatttctccataattggagtaaaggtaacttctctaatgaggagttatcagacttagaactgctgttccgtttctacttgttcggtctaacacgggagatccaagatcatgcctctcaggattactctaaatatccatttgaggtgcaggtgaaggcaggctgcgagctgcatagcgggaaatcacccgaggggttctttcaggttgctttcaacggtctggacctgttatcttttcagaacacgacctgggtgcctagccccggctgcgggagcctagcccagtcagtttgccatctgttaaatcaccagtatgagggagtaaccgagacagtatacaacctcatacgctccacgtgtccacggttcctgttgggcctgctggacgctggtaaaatgtacgtgcaccgacaggtaagaccagaggcttggctgtcctccaggccaagccttgggagtggacagctactgctggtgtgtcatgcatctggcttttatccaaaacccgtgtgggtaacctggatgcggaatgaacaagaacaactgggtaccaagcacggggatatccttcccaatgccgatgggacctggtacctgcaggtaatactcgaggtagcatccgaggagcccgccgggctaagttgccgggtccggcacagctctttggggggccaggacatcatcctgtattgggcacatatccggactagctgcgaaactctgccgcccgactccccgatcgttctgcggacccagcaacctcgttctcttgtccagtatagtgacgcgattccatccacgctgcatttgaattgcttctccttttgcattatcaatatttgttag

SEQ ID NO: 111267 - DNA, 411 bp, synthetic construct
  misc_feature 1..411: note = Description of Artificial Sequence: Synthetic coding sequence
  source 1..411: mol_type = other DNA
atgtatgtgcatcggcaagtgaggccggaggcctggcttagctctaggcccagcctcggttcgggtcagttgttgctagtgtgccacgctagcggattttatcctaaacccgtctgggtcacatggatgcgtaacgagcaggagcaactgggcacgaagcacggagacatcctgccaaacgccgatggcacatggtacttgcaagtgatcctggaggttgccagcgaggaacccgcaggcctgagctgtagagtcagacacagttctctgggcggacaggacattattctctactgggggcatcacttctctatgaactggatcgcgctggtggtcattgttcctctcgtgatactaatcgtcttggttctatggttcaagaaacactgctcttatcaggatatcctgtag

SEQ ID NO: 111268 - DNA, 1008 bp, synthetic construct
  misc_feature 1..1008: note = Description of Artificial Sequence: Synthetic coding sequence
  source 1..1008: mol_type = other DNA
atggggtgcctgctgttcctgctgttatgggccttacttcaagcctggggcagtgcagaggttcctcagcgtctttttcccctgagatgtctgcagataagtagcttcgcgaactccagctggaccaggacggatgggctggcgtggctgggtgaactgcagacccactcttggagcaacgatagtgataccgttagatcattgaaaccctggtctcaagggaccttctctgaccagcagtgggagactctacagcatatttttcgcgtctaccgatcatcctttaccagagacgtcaaggagttcgcgaaaatgctccggctgtcttatccattggagctccaggtatccgctggctgcgaggttcatccgggtaatgcatccaataatttctttcatgttgccttccaaggcaaggacattctgagtttccaggggacatcctgggagcccacccaggaggccccactgtgggtcaacttggcaatccaagttctgaaccaggataaatggacgagggaaaccgtccagtggctcctgaacggaacgtgccctcaattcgttagcgggctacttgagagcgggaaatcagagctgaagaaacaggtgaagccaaaggcatggcttagtcgtggtccgagccctggacccggcagactccttttagtgtgccacgtgagtggtttctacccaaagcccgtctgggtaaagtggatgaggggcgagcaggaacagcaaggcacacagcccggtgacattttgcccaatgcagatgaaacatggtacttgcgcgccacgctggatgtggtggccggggaggcggccggcctttcatgccgggtcaaacacagctccttggaaggtcaggacattgtattatattggggcggttcttacacctcaatgggcttaattgccctggcggttctggcttgtctgctgtttctcttgatcgtcggtttcaccagtaggttcaaacggcaaaccagttatcagggtgtgctttag

SEQ ID NO: 111269 - DNA, 435 bp, synthetic construct
  misc_feature 1..435: note = Description of Artificial Sequence: Synthetic coding sequence
  source 1..435: mol_type = other DNA
atgctgttgctctttctccttttcgagggcttatgttgtcccggcgagaacaccgccgtaaaaccggaagcgtggctctcatgtggccccagtcccggtcctggccgacttcagttggtctgccacgtgagcggcttttatccaaaacctgtttgggtaatgtggatgcggggcggctattcaatcttcctcatcctgatatgcctcacagtcatcgtcacattggtgatcctggtagtagtggactcacgcctcaagaagcagtccagcaacaagaacattctgagccctcacaccccaagcccagtgttcttgatgggggccaatacacaggataccaaaaactccaggcaccagttttgtctggctcaggtgagctggataaagaatcgcgtattgaaaaaatggaagaccagactcaaccagctctggtag

SEQ ID NO: 111270 - DNA, 696 bp, synthetic construct
  misc_feature 1..696: note = Description of Artificial Sequence: Synthetic coding sequence
  source 1..696: mol_type = other DNA
atgttattgctttttctgttgttcgaaggactgtgctgtcccggggagaacaccgccgcccctcaagccttgcagagctaccatcttgccgctgaggaacaactatcttttagaatgttgcagacatcctctttcgctaaccattcctgggcccacagtgaggggtccggctggctaggggatcttcagacccacgggtgggataccgttttgggaaccattcgattcctaaaaccttggtcccatggaaatttctcaaagcaagagctgaaaaatctgcagagcctgtttcaactttactttcatagctttatacaaattgtgcaggcgtctgctggccaatttcaactggagctgaagccagaggcttggctgagctgtgggccttccccaggacctggaaggcttcagctggtgtgtcacgtgagcgggttctacccaaaaccagtctgggtcatgtggatgcgggggggatactcaatctttctgatactcatctgtttgacagtcatcgttacattagtgatcttggtcgtggttgactctcggcttaaaaaacagtctcccgtcttccttatgggggccaatactcaggacactaaaaactcccgccatcagttctgtctggcccaggtttcttggatcaagaatagggtcttaaaaaaatggaagaccagactaaaccagttgtggtag

SEQ ID NO: 111271 - DNA, 861 bp, synthetic construct
  misc_feature 1..861: note = Description of Artificial Sequence: Synthetic coding sequence
  source 1..861: mol_type = other DNA
atgttgcttttgttcctcctgttcgagggactttgttgtcccggggaaaatactgctgctccccaagctttgcagtcttatcaccttgcagccgaggagcaattgtccttcagaatgttgcaaacttcgtctttcgccaaccactcctgggcccactctgaggggtcgggatggctcggagacctgcaaacacacggatgggacactgtacttggaacaattcggtttcttaaaccctggagccatggcaacttttcaaaacaagagttgaagaacctccagtccctctttcagttatattttcattcattcatacagatcgtccaagcgtcagccggacaatttcagctggaactgaagcccgaagcttggttgtcttgtggaccttctcccgggcccggtcggcttcaattggtttgccacgtgtctgggttttatcctaaacccgtgtgggtcatgtggatgagaggagaacaggagcaaagagggacacaacggggagatgtactcccaaatgcagatgagacatggtacttgcgagctactcttgacgtggcagcgggcgaggccgcgggcctaagttgccgcgtcaagcatagcagtctggggggtcatgatctgattatccattggggcggctactccattttcttgatcttaatatgcttgactgtgatcgtgactctggttattctcgtggtggttgattccagactgaaaaagcagtcccccgtgttcctaatgggcgcaaatacgcaagacaccaagaatagccgccatcagttctgtcttgcccaagtgagctggatcaaaaaccgggttcttaagaaatggaagacccggctgaatcagctgtggtag

SEQ ID NO: 111272 - DNA, 399 bp, synthetic construct
  misc_feature 1..399: note = Description of Artificial Sequence: Synthetic coding sequence
  source 1..399: mol_type = other DNA
atgcttttactgtttttgctttttgagggactgtgctgtccaggtgagaataccgctgtgaagccagaggcgtggctgagttgtggacccagccccgggcccggtaggcttcaactggtctgccatgtgtccggcttctatcctaaaccagtctgggtgatgtggatgcgaggaggctacagcatttttctcatactaatttgccttaccgttatcgtgactctggtgattttagtcgtggtggactcacgtctcaagaaacagtcccctgtgttcctgatgggcgccaatacgcaggatactaagaattccaggcatcaattctgtctggcacaggtctcctggataaagaatcgggtgcttaaaaaatggaaaacacgcctgaaccagctgtggtag

SEQ ID NO: 111273 - DNA, 1131 bp, synthetic construct
  misc_feature 1..1131: note = Description of Artificial Sequence: Synthetic coding sequence
  source 1..1131: mol_type = other DNA
atgttactcctttttttgctctttgaaggactgtgttgtccgggcgagaacacagccgcaccacaggcgttacaatcataccacctggcggccgaggaacagctctcttttcggatgctgcagacgagctcattcgctaaccactcgtgggcccacagcgaggggtccggctggctgggagacctgcaaacgcacgggtgggacacagtcttgggcacgattcggtttctgaagccgtggtcacacggcaacttctccaagcaagagctgaaaaacctgcagtccctgttccagctgtacttccacagtttcatccagatagttcaggcgtccgccggccagttccagctcgagtaccccttcgagattcaaatcctcgccggatgccggatgaacgccccccagatctttctgaacatggcataccagggctccgatttcctcagtttccagggcatttcatgggagccctcaccaggagcgggaatcagggcacagaacatctgtaaagtgctcaatcgctacttggacataaaagaaattctgcagtcactgctaggccacacctgcccacgtttcttggctggcctcatggaggccggcgagtcggaactgaagagaaaagtgaagcccgaagcctggctgagttgtggaccctctccaggccctggacgactgcagctggtttgtcacgtaagtggcttttaccccaagccagtgtgggtcatgtggatgaggggagagcaggaacagcgggggacacagcggggagatgtgctacccaacgcagacgaaacatggtacttacgcgccacattggatgtagctgcgggggaagcagccgggctgagctgtcgcgtgaagcacagcagcctggggggccacgatctcatcatacactggggcggatattctatatttctcattctgatctgcctgactgttatcgtgaccctggttatcttggtcgtggtcgacagccgcctaaaaaaacagtcccccgtcttcctgatgggggcaaatactcaggatactaaaaattctcggcaccaattttgtttggcccaggttagctggataaaaaatcgggtgttgaagaagtggaaaacaagactgaaccaactctggtag

SEQ ID NO: 111274 - DNA, 873 bp, synthetic construct
  misc_feature 1..873: note = Description of Artificial Sequence: Synthetic coding sequence
  source 1..873: mol_type = other DNA
atgttgcttctttttctgctgttcgaggggctgtgctgccccggggaaaacacagcggctccccaggctctccagagctatcacttggctgctgaggagcaactgagtttccggatgctgcagacaagttcgttcgccaatcactcttgggcccactccgaaggaagtggctggctgggcgacttacagacccacggctgggacaccgtgctaggcaccatacgatttctcaagccttggtctcatggtaatttcagtaagcaggaacttaagaacctccaatctttattccagctatatttccactccttcattcaaatcgtccaggcatctgcgggacagtttcagctcgagtacccatttgagatccagatcttggcagggtgccggatgaacgcgccacaaatttttctgaacatggcttaccaggggtcagacttcctctccttccagggtatctcctgggaacctagcccaggcgccggaatccgagcccagaacatctgcaaggtcctcaatcgttatctcgacataaaagaaatcctgcaatcgctcctgggacatacgtgccctcgattccttgcggggctcatggaagctggggagagcgaactcaaaaggaaagtgaaaccagaggcctggttaagttgtggacccagcccaggacccggcaggctgcagctagtgtgtcatgtgtccggtttttatcctaagccagtctgggttatgtggatgcggggtgaacaggaacagcgaggaacacagcgcggcgatgttctacccaacgccgacgaaacctggtggattttccacctcagccatccggatctgttcgattgtgacagttatcctggccacatcggttgctcatag

SEQ ID NO: 111275 - DNA, 183 bp, synthetic construct
  misc_feature 1..183: note = Description of Artificial Sequence: Synthetic coding sequence
  source 1..183: mol_type = other DNA
taagtctccgggttctatcccaaaccagtgtgggtgatgtggatgcggggtgaacaggagcagagagggacccaaaggggcgacgtgttgcccaacgcagatgaaacgtggtggatcttccatttgtcgcatccagacctattcgactgtgatagctaccctggacacatcggctgtagctag

SEQ ID NO: 111276 - DNA, 966 bp, synthetic construct
  misc_feature 1..966: note = Description of Artificial Sequence: Synthetic coding sequence
  source 1..966: mol_type = other DNA
atgcttttgctttttctgctttttgaagggctatgctgtcccggggagaacacagccgcgcctcaagctctccagagttaccatctggccgctgaggaacaactttctttcagaatgcttcagacctcatcattcgcgaaccatagttgggctcatagcgagggttcaggctggctaggggacctgcagacacacggttgggataccgtcctggggaccatcaggtttctgaaaccttggagccatggcaatttcagcaagcaggagctgaagaacctgcagtccttgttccagctgtacttccacagctttattcagatcgtccaggctagcgctggacagttccaactcgagtacccctttgaaattcagattctggcggggtgcaggatgaatgctccgcagatttttttaaatatggcctatcaggggtccgatttcctcagttttcaaggaatatcatgggagccgagtcccggggccggaatccgagcccagaatatctgcaaagtgctgaatcggtatctcgacataaaggagatcctgcaatctctattaggtcatacatgtcctcggttcttggcagggctgatggaggcaggagaaagcgaactgaagagaaaagtaaaaccagaagcctggttgagttgcggtccatcccctgggcccggtcgcctacaattggtgtgtcacgtcagtggcttctatccaaagcccgtatgggtaatgtggatgcggggcggttacagtatcttcctcatacttatctgcttgaccgtcatcgtcacactcgttatccttgtagtcgttgactccaggttgaagaagcagagtccagtattcctgatgggcgccaacacgcaggacaccaaaaacagccggcaccagttctgtttagcacaggtctcctggatcaaaaatagggttttgaaaaagtggaaaactcggctgaatcaattatggtag

SEQ ID NO: 111277 - DNA, 306 bp, synthetic construct
  misc_feature 1..306: note = Description of Artificial Sequence: Synthetic coding sequence
  source 1..306: mol_type = other DNA
atgcttctcttgttcctactctttgaaggcctgtgctgccctggtgaaaatacagccgtgaagccagaggcttggctgagctgcggcccgtcacctgggcccggccgtttacagttggtctgccacgttagtggattctatcctaagcctgtgtgggtcatgtggatgagaggagagcaggagcaacgggggactcagcggggagacgtcctgcctaacgcagacgagacatggtggatatttcacctctcccaccccgatttgttcgattgtgactcctatccaggccacattgggtgctcgtag

SEQ ID NO: 111278 - DNA, 897 bp, synthetic construct
  misc_feature 1..897: note = Description of Artificial Sequence: Synthetic coding sequence
  source 1..897: mol_type = other DNA
atgctcctcctgttcctcctctttgaagggctctgctgccctggcgaaaacactgcggcaccacaggcgctccaaagctaccacctggctgccgaggaacagctgtcttttcgcatgctacagacttcaagtttcgcaaatcactcctgggcacacagcgagggatcaggatggttgggcgatctacaaacacatgggtgggacaccgtcctggggacgattcggttcttgaagccgtggagccacggcaacttctcaaagcaagagctcaaaaaccttcagagcctgttccagctgtatttccactccttcatacagatcgtgcaggcttccgccggacagtttcaactggaactaaaacctgaagcctggctgtcctgtggaccttcacccggcccaggcagacttcagttagtctgccacgtctctgggttctaccctaaaccggtgtgggtgatgtggatgaggggcgagcaggagcagcgaggaactcagaggggagatgttcttccaaacgccgacgaaacctggtatctgagagcgaccttagatgtcgccgctggtgaggcagctgggctttcatgccgcgtgaagcattcttcactcggaggacatgacctcatcattcattgggggggatattccatcttcctcattctgatctgtctgacagtgatcgttaccctcgtgatcctggtggttgtcgattctcggctgaaaaagcagtctagcaacaagaatatcctgagtcctcacacgccctcccctgtgttcttaatgggagccaacacccaggatacgaagaactcacggcaccagttctgtttagctcaagtgtcatggataaaaaaccgagtgcttaagaagtggaagactcggctcaatcaactgtggtag

SEQ ID NO: 111279 - DNA, 564 bp, synthetic construct
  misc_feature 1..564: note = Description of Artificial Sequence: Synthetic coding sequence
  source 1..564: mol_type = other DNA
atgctgctcttatttctcctattcgaagggctctgttgccctggtgagaacacggcagtcaaacccgaagcgtggctgagctgcggacccagtccgggccccgggaggctgcagctagtctgccacgtgtctgggttttaccccaaacctgtctgggtgatgtggatgcgtggggaacaggaacaacgagggactcaacgtggagatgtgctgcctaatgccgacgaaacctggtacctccgtgccacactcgatgtggcagcaggtgaggctgccggactgtcttgccgcgtgaagcattcttctcttggcggccatgacctgataatacactggggcggctactcaattttcttgatcctcatctgcttgacagtaattgtgaccctggtcatacttgttgttgttgactctcgtcttaaaaagcagagtcccgtgtttctcatgggcgcaaacacccaggacactaagaacagccgccaccagttctgtctggcccaagtcagttggatcaagaaccgggttttgaagaagtggaagaccagattaaaccaattgtggtag

SEQ ID NO: 111280 - DNA, 1167 bp, synthetic construct
  misc_feature 1..1167: note = Description of Artificial Sequence: Synthetic coding sequence
  source 1..1167: mol_type = other DNA
atgctactcctgttccttctgtttgaagggctctgttgcccaggtgaaaacacagcagctccccaggccctacagtcttaccatctggctgctgaagagcaattaagttttagaatgctccagacaagttcatttgcaaatcacagctgggctcactccgaggggtctggttggctaggcgacctccagacccacgggtgggacaccgttttaggcaccatccgctttctcaaaccatggagccatggaaacttcagtaaacaggagctgaaaaacttgcagagtctgttccagttatacttccactcctttatacagatcgtacaggccagtgccggtcaatttcagctcgagtaccctttcgagatccagatcttggcaggatgtcggatgaacgcgcctcaaatctttctgaacatggcatatcagggctccgattttctctctttccagggcataagctgggagccttcccccggcgccgggatcagggcacagaacatctgcaaagtgctcaaccgctacctggacatcaaagagattctccagtctcttctgggtcacacctgtcctaggttcttggccggtctgatggaggctggagaaagtgaactgaagagaaaagtgaagcccgaagcatggttgtcgtgtggaccgtccccaggcccgggcaggctgcagctcgtttgtcacgtcagcggtttttatcctaaaccagtttgggtgatgtggatgagaggtgaacaggagcagcggggaacacagagaggagacgtcttgcccaatgctgatgagacttggtatctcagagccacactagacgttgccgccggtgaagcagcagggttgtcatgcagagtgaagcattctagccttggaggccacgacctcatcatccactggggaggctacagcatttttctgattctgatctgcctgactgtcatcgtaaccctagttatccttgtcgtggtggactcaaggctcaaaaagcagtcatctaacaagaacattctttccccacacaccccatcaccggtgtttctcatgggcgccaacacgcaggatacaaaaaactctcggcaccagttttgcctggcccaggtaagctggattaaaaacagagtgctgaagaagtggaagaccaggctgaaccaactatggtag

SEQ ID NO: 111281 - DNA, 1023 bp, synthetic construct
  misc_feature 1..1023: note = Description of Artificial Sequence: Synthetic coding sequence
  source 1..1023: mol_type = other DNA
atgattaaaagcagggtaaaacgctatcgaagaaggcgtggctctcagagagcccctcaagccctgcagagctatcatcttgccgctgaggaacagttaagcttccggatgctccagacttcatcctttgctaaccacagctgggctcatagtgagggaagtggctggttgggcgatctgcagacccatggttgggatacagttctcgggactataaggtttcttaaaccatggtctcacggaaacttctccaagcaggaactcaagaacctccagagtctgtttcaactctatttccactctttcatccagatcgtgcaagccagtgccggccagtttcagctggagtacccgtttgaaattcagatcctcgcaggctgccgtatgaacgcaccccagatttttctcaatatggcttaccaggggtccgactttctttcctttcaaggtatatcatgggagcctagtccgggtgcagggatccgggcccagaacatctgtaaagtcctgaataggtaccttgatatcaaggagatactccagtccctgctgggacatacctgtccccggttcctggctgggcttatggaggcaggcgagtctgagctgaagcgaaaggtcaagccagaggcttggctgtcctgcggaccctccccaggccccggccggctgcagctcgtgtgccatgtttctggcttctatcccaagccggtgtgggtgatgtggatgcgtggggaacaggagcagaggggcacccagaggggggacgttcttccaaatgctgatgagacttggtacctgcgcgcaactctggatgttgccgcaggtgaggcagcagggttgtcttgcagggtgaagcattcatccctcggcggtcacgaccttattattcactggggcgagaagcagctgcgcctgtgttgggaaattatgaaaattgccttggggctcctgagtgtagggctccgtaaatgggttgggatgctgggcacccgacgggtcaagctaggacaaagtaagtag

SEQ ID NO: 111282 - DNA, 870 bp, synthetic construct
  misc_feature 1..870: note = Description of Artificial Sequence: Synthetic coding sequence
  source 1..870: mol_type = other DNA
atgctcctactgttcttgttattcgagggcctctgctgtcccggggaaaacacagcagacccattcgagatccagatactggcagggtgccggatgaatgccccccaaatattcctgaacatggcctaccagggctccgactttcttagctttcagggaatctcctgggaaccttcacctggagccggtattcgagctcagaacatctgtaaagtactgaacaggtatctggatatcaaagagattcttcaaagtttgttgggtcatacttgtccacgatttcttgcaggcctgatggaggccggagagtcggaattgaagcggaaggtgaagcctgaggcctggctgtcatgcggacccagccctggccctggccgactgcagctcgtgtgccatgtgagtggcttttatccaaagcccgtatgggtgatgtggatgcgtggcgaacaggagcagcgagggactcagcgtggagacgtgctgccgaatgccgatgagacgtggtacctgagagcaactctggacgtagcggctggtgaggctgccgggctatcctgccgagtgaagcactcgtctctgggcggacacgatctgattattcactgggggggatattccatatttttgatcctgatctgccttacggtaatcgtgaccctggtaatcttagttgtggtggattctaggctcaagaaacaatcctccaataaaaatattctctctccacacaccccttctccagtatttctcatgggtgcgaacacccaggataccaagaacagccgacaccagttttgtctggcccaggtgtcttggatcaaaaaccgagtgctgaagaagtggaaaaccaggcttaaccagctgtggtag

SEQ ID NO: 111283 - DNA, 600 bp, synthetic construct
  misc_feature 1..600: note = Description of Artificial Sequence: Synthetic coding sequence
  source 1..600: mol_type = other DNA
atgctcttgctgttcctgctttttgaggggctttgttgccctggtgagaatacagctgttaagccagaagcctggctgagctgcgggcctagccctggaccgggtagactccagctcgtgtgccacgtatcaggcttttatccaaaacctgtctgggtaatgtggatgcggggggagcaggagcagcgtgggacccaacgaggcgatgtcctgcctaacgcggacgagacatggtatctgagggccacccttgacgttgctgctggcgaggctgctggactgtcatgcagagttaagcactctagcttggggggtcacgatctgattatccactggggcggttattctatctttttaattctcatttgccttaccgttattgtgaccttagttatcctggtggtggttgactcaaggctcaagaagcagtcttccaacaagaacatactgtccccccacacaccatcaccagtgttcttgatgggagccaatactcaggataccaagaacagtagacatcaattttgcctggcccaggtgagttggataaagaatcgcgtcttgaagaagtggaaaaccaggctcaaccaactgtggtag

SEQ ID NO: 111284 - DNA, 1047 bp, synthetic construct
  misc_feature 1..1047: note = Description of Artificial Sequence: Synthetic coding sequence
  source 1..1047: mol_type = other DNA
atgctttgtccgtggagaacagctaacttaggcctgttactgatcctgaccatatttctggtagctgaagccgagggtgccgctcaacctaataactcactgatgcttcaaacaagcaaagagaaccatgccctcgcatctagctcactttgtatggatgagaaacaaatcacacagaattatagcaaagttctggccgaggtcaatacttcatggccagtgaaaatggccaccaacgctgtactgtgctgcccccccatcgccttacgtaacttgatcatcatcacctgggagatcattttgcgagggcagccttcatgcactaaagcttataaaaaggaaaccaatgagacaaaggaaaccaattgtactgacgagcggattacctgggtatctaggccagaccagaactcagatctacagattaggacagtcgccattactcacgacggttactatcgttgcattatggtgacccccgacggtaatttccacagagggtatcatttgcaagtcctggtaaccccagaagttacactgtttcagaacagaaatcgtaccgcagtgtgcaaggcagtggccggcaaaccagctgcccatatctcttggatccccgaaggggattgtgcaacaaaacaagaatactggagcaacggcacagtcaccgtcaaaagcacctgccactgggaggtccacaatgtctccacagtgacttgccacgtttcacacctcaccggtaataagtctttatatatcgaactactgccagtacctggcgccaagaaatctgccaaactgtacataccctatatcatcctaacaatcatcatactcaccatcgtgggatttatctggcttttgaaggttaatggatgcaggaaatataagctaaataaaactgagagcactccagttgtggaggaagacgaaatgcagccgtatgcttcatataccgaaaaaaacaatccgctctacgatacaacgaataaagtcaaggcatcagaggcccttcagtctgaggtagatactgatctccacaccctgtag

SEQ ID NO: 111285 - DNA, 567 bp, synthetic construct
  misc_feature 1..567: note = Description of Artificial Sequence: Synthetic coding sequence
  source 1..567: mol_type = other DNA
atgctttgcccctggaggaccgccaacctgggcctactgcttatattaacaatcttcctggtggctgaagccgagggcgctgctcaacctaataatagcctcatgcttcagacgtctaaggagaaccatgctttagctagctcaagcttgtgcatggacgagaaacaaatcacacagaattactcaaaagtcctcgctgaagtgaatacgagttggccagtaaaaatggccactaacgcagttctgtgttgtccccccattgccttaaggaatctgattattatcacgtgggaaattattctccgcgggcagcctagctgtaccaaggcctataaaaaggagacgaatgagacaaaggaaactaattgtaccgatgagcgcattacctgggtcagcagacccgatcagaactccgaccttcaaattcgcacagtggcaattacgcacgacgggtattacagatgtattatggtcacaccagatgggaattttcaccgaggctaccacctgcaggtcctcggaaaggagcaccacatcctgcggtacttcacctcacccgatctgtag

SEQ ID NO: 111286 - DNA, 978 bp, synthetic construct
  misc_feature 1..978: note = Description of Artificial Sequence: Synthetic coding sequence
  source 1..978: mol_type = other DNA
atgctgtgtccctggcgcactgctaacttaggtctgcttctcattctgactatcttcctggttgcagcgagctctagtctctgcatggacgagaagcagatcactcagaattacagcaaggtattggctgaggtaaatacatcctggccagtgaagatggccactaacgcagtactgtgctgcccaccaattgctctgaggaatctgatcattataacgtgggaaatcatattgagaggtcagccatcatgtactaaagcctataagaaggaaactaacgagacgaaggaaaccaactgtacagatgagcgtatcacttgggtgtcacggcctgaccagaactctgatcttcagattagaaccgtggctatcacacacgacggatattatagatgcataatggttacccccgatgggaactttcataggggctaccatcttcaggtcttggtgacacccgaagtgacgctctttcagaaccgtaatagaactgccgtatgcaaggctgtggcaggcaagcctgctgcccacattagctggatacctgaaggcgattgtgcaacaaaacaggagtactggtccaacggtactgttacagtaaagagcacctgtcactgggaggtgcacaatgtctctacagttacatgtcacgtatcccatctgacgggaaacaaatcactgtacattgaacttctgccagtgcctggtgccaagaagtcagccaaactatatattccctatatcattctcaccattattatccttaccatcgtagggttcatctggttgttaaaggtgaatggatgccgtaagtataaactaaataaaaccgagtctacccccgttgtggaagaggacgagatgcaaccctacgcatcatacactgagaaaaacaatcccctgtatgacactaccaataaagtaaaggcgtccgaggctctgcaatccgaagttgacaccgatctccacactctgtag

SEQ ID NO: 111287 - DNA, 498 bp, synthetic construct
  misc_feature 1..498: note = Description of Artificial Sequence: Synthetic coding sequence
  source 1..498: mol_type = other DNA
atgctttgcccttggcggactgccaacttgggcctgctacttatactgacaatattcttagtagccgcctcatcttctttgtgtatggatgagaaacagattacgcaaaattactcaaaggtgctggccgaggtcaacacaagctggcctgtgaaaatggcaaccaacgccgtactttgctgccctcccattgctctaaggaacctgataataatcacctgggagatcattttacgagggcagccctcatgcacaaaggcttacaagaaggagacaaacgagacgaaggaaaccaactgtacagacgaacggatcacttgggttagccgccccgatcagaacagcgacttacaaattagaactgtcgcaattacccatgatggctattaccggtgtatcatggtcactccagacgggaacttccaccgggggtaccacttgcaagtgttggggaaggaacaccacattcttcggtactttacgagcccagatctctag

SEQ ID NO: 111288 - DNA, 987 bp, synthetic construct
  misc_feature 1..987: note = Description of Artificial Sequence: Synthetic coding sequence
  source 1..987: mol_type = other DNA
atgacagtggagaaagaggcgcccgacgcccacttcaccgtggataaacagaatatcagtctctggcctagggagcctccacctaaaagcggcccttcgctggtgcccggcaaaacgcctacagtcagggccgccctgatctgcctgaccttagttttagtggccagtgtgctgcttcaggcggttttatatcctcgtttcatgggcaccataagtgacgtgaaaaccaacgtacaactgctgaagggcagagtggataacatctccacgctggactctgagataaaaaagaattcagacggaatggaagctgcaggcgtgcaaatccagatggtcaacgagtctctgggctatgtgcgctcccagtttttaaaattgaaaacctctgtggagaaggcgaacgctcaaatacagatcttaaccagatcctgggaagaggttagtaccctgaatgcccagattcctgaactcaaatccgatctagagaaagcctcagccctgaatacgaagatacgagcattgcaaggcagcctggaaaacatgagtaagctgttgaaacgacagaacgacattctacaggttgtttcccaaggatggaagtattttaagggtaatttctattacttttcacttattcctaaaacatggtatagcgccgaacagttttgcgtgagccggaactcacatctgacaagcgtgacaagtgagtctgagcaggagtttctttacaaaactgcagggggtctgatttattggatagggttgactaaggccggtatggagggcgattggagctgggtggacgataccccattcaataaagtgcagtctgtccgattttggatcccaggagaacctaataacgcaggcaacaatgaacattgcgggaacatcaaggctccctccctccaagcctggaacgatgctccctgtgacaagacctttctgtttatttgcaagaggccctacgttccttctgagccttag

SEQ ID NO: 111289 - DNA, 4497 bp, synthetic construct
  misc_feature 1..4497: note = Description of Artificial Sequence: Synthetic coding sequence
  source 1..4497: mol_type = other DNA
atggatggtgccagcgccgagcaggacggacttcaggaggacagatcccactccggcccttcttctctcccagaggctccactgaaaccccctggcccactagtcccaccagatcagcaggacaaggtgcagtgtgctgaagttaacagggccagtaccgaaggcgagtctcccgatgggcccggtcagggaggtctctgtcagaacggacccactcctccattcccagatcctccatcttccctggatcctacgacctcccctgtgggaccggacgcctctccaggagttgctggcttccacgacaacttgagaaagagccagggcaccagcgcggaggggtccgtgcggaaggaggccttacaatcccttaggctgtctcttccaatgcaagagacgcagctctgtagcactgattcccctcttcccctggagaaggaggaacaggtgaggcttcaggctagaaaatggcttgaagagcagctgaaacagtaccgcgtaaagcgccagcaggagcgcagttcacagccagccacaaagacgcggctctttagcactctggaccccgaacttatgctcaatccagagaatctgccaagggcctccacgctggcaatgaccaaagagtattctttcttgcggacatctgtacccaggggcccgaaggtgggctcactgggactccccgctcatcccagggaaaaaaagaccagcaagtcttccaagatccgttccctggcggactatcgaacagaggattcaaatgcgggaaatagtggggggaacgtgccagcgcctgatagcacgaagggcagcctgaaacagaatcgcagttcggcagcctccgtggtcagcgagatcagcctgagtcccgacacagacgataggctggagaacaccagcttagctggtgacagcgtgtctgaggtagacgggaatgattccgatagttctagctactctagcgcttctacaagggggacttatgggatcctgtcaaagaccgtaggaactcaagacactccgtacatggttaatggacaggagatccccgcagataccctcggacaatttccttccataaaagacgtacttcaggcagctgccgccgaacatcaggaccaagggcaagaagtcaacggggaagtgcgatcccgccgtgatagcatctgtagcagtgtttcgctggaatcaagcgccgccgaaactcaagaagaaatgctccaggtcctgaaagagaaaatgcgcttagagggacagcttgaggccctttccttggaagcctctcaggcactgaaagagaaggccgagctccaggctcagctggctgcgctaagtacaaagctgcaggctcaagtcgaatgctctcactccagccaacagagacaggactcactgagttcggaagtggacactttaaagcagtcatgctgggacctggagcgtgcgatgaccgaccttcaaaacatgctcgaggccaaaaacgctagcctcgctagttccaacaatgacctgcaggtggccgaggagcaatatcagcgcttgatggctaaggttgaagatatgcagaggtctatgctgtctaaggacaatactgtgcacgacctgaggcagcaaatgaccgctctgcagtctcaactgcagcaggtgcagctggagaggacaactctgacaagcaagcttaaagcctcccaggctgaaatctcaagtctacagagtgtacggcagtggtaccaacagcagttagcccttgcgcaagaagcgcgggtgagactgcagggagaaatggcacatatccaagtggggcagatgacccaagcgggtctgctggaacatcttaagttggagaatgtctcactctctcagcagctcaccgagactcagcatcgcagtatgaaggagaagggcaggatagccgcccaattgcagggaattgaagccgacatgctggatcaggaagccgccttcatgcagatccaggaagccaaaaccatggtggaggaggacctgcaaagacgcttggaggagtttgagggcgagcgcgaacgcctccagaggatggcagacagtgcagcctcactcgagcagcagcttgagcaggttaaactcactctgctgcagcgggaccagcagctcgaagccctccagcaggaacacctggatttgatgaagcagctcacactgacccaggaggccctgcaaagccgggaacagtctctggatgccctccagacacattatgacgaacttcaggctcgtttgggggagctacagggcgaggccgcatctcgcgaggatacaatctgcttgctacaaaacgagaaaatcatcttggaagccgccctccaggctgcaaagtctggtaaggaggagttggatcggggggcccggcgcttagaggaggggacagaggagacctccgaaactctggaaaagctgagagaagagctggccattaagtcgggacaggtggaacaccttcagcaggagaccgccgctctaaagaaacagatgcagaagattaaggaacaatttttacaacagaaagtgatggtggaggcttacagaagagacgccacttccaaggaccagcttatctctgaactgaaggccaccaggaagcggctggactcggaactgaaagagctccgacaggaattaatgcaggtccatggggagaaacgtaccgctgaagctgagctctcccggctccatagagaagttgcgcaggtgcggcagcatatggccgacctggagggtcacctccagagcgcccaaaaagagcgggatgagatggagacacatctgcaaagtctccaattcgacaaagaacagatggtggctgtgactgaagccaatgaggccttaaaaaagcagatcgaggagctccagcaggaagctagaaaggccattaccgaacagaagcagaagatgcgaagacttggctcagatttgacctccgcccagaaagaaatgaaaactaagcacaaggcctacgagaatgccgtcggaatactgtcacggcgcctccaggaggctctggctgctaaagaggctgcggatgccgagcttggccaacttcgagctcaaggaggcagctccgactcctcattagccctccacgaacggatccaggcactggaggctgagctccaggcagtttctcactctaaaacacttctggaaaaagagctgcaagaagtgattgctctcacctcacaagaactcgaagagtcacgtgagaaggtgctagaacttgaggacgagctccaggagagtcgtggttttagaaagaaaattaagagactagaagagagcaataagaagctcgctctggagctggagcatgaaaagggcaagctgactggtttgggccaaagcaatgcagctctccgtgagcataattccatcctcgaaacggctttggccaagagagaggccgacctggttcagctgaacttacaggtccaagcagtgctccagaggaaagaagaagaggatcggcagatgaaacatttggtacaggctctccaggcttccctggaaaaagagaaggagaaggttaattctctgaaggagcaggtcgctgctgcaaaggtggaggccggtcacaataggcgccatttcaaggccgcaagtctggaactctctgaagttaagaaagaacttcaggcaaaggagcacctggtgcagaaactgcaagccgaagcggacgacttacagattcgcgagggtaagcactcacaggagatagcccagtttcaggctgagttggccgaagcacgagcccagttacagctgcttcaaaagcagctggatgagcagttgtcaaaacagccggtgggcaatcaagagatggagaaccttaagtgggaagtagaccagaaggaaagggagatccagagcctgaaacaacaactggaccttaccgagcagcaggggcgcaaagagcttgaggggctgcagcagctgttgcagaacgtcaagagcgagttagagatggcacaggaggatttgagtatgacccagaaagataagttcatgctgcaagctaaggttagtgaactcaaaaacaatatgaagacattgttgcagcaaaaccagcagctcaagctggacttaaggagaggtgctgccaaaacgcgcaaagaaccaaagggagaagctagcagctctaaccccgccacaccaattaagattccagactgcccagtaccggcatcccttctcgaggagctgctccgtcctccgccggcagtatcaaaagagccgctgaagaatctcaactcatgcctccagcaattgaaacaggaaatggacagcctgcagagacagatggaagagcacgcactgacagtgcacgagtccctgagtagttggacacccctggagcccgccaccgcatcaccagtgcccccgggtggccacgcgggcccgcggggggaccctcagcggcattcccagtcaagagcttctaaggagggacctggagagtag

SEQ ID NO: 111290 - DNA, 807 bp, synthetic construct
  misc_feature 1..807: note = Description of Artificial Sequence: Synthetic coding sequence
  source 1..807: mol_type = other DNA
atgtccgatagcaaagagccgcggctacaacagttgggcctgcttgtctctaaagtgccctctagcattagtcaagaacaaagcaggcaggacgccatctaccaaaacttaacccagttgaaggccgccgtaggggaactgagtgagaagtcaaaactacaagagatctatcaagagctaactcaactgaaagccgccgttggcgagctgccagaaaagtcaaaactgcaggagatctaccaggagcttacaaggctgaaggccgccgtcggagaattgcccgaaaaatccaaacagcaggaaatctatcaggaacttacccagctgaaagccgccgtggaaagactctgccatccatgtccttgggagtggaccttttttcaaggcaactgttacttcatgtccaactcccagaggaactggcatgacagtataaccgcatgcaaagaagtgggagcccagctggtggttattaaatctgcggaggagcagaatttcctacagctccagagctcgagatctaaccggttcacctggatgggcttatctgacctgaatcaggaagggacctggcagtgggttgatggcagccctctgctcccatccttcaaacaatattggaacaggggcgaacccaataatgtaggtgaggaggattgtgcagagttttctggaaatggctggaatgacgataagtgcaacctcgccaagttctggatttgcaagaagtccgcggcttcatgcagcagggacgaggagcagtttctgtcccccgcacccgccactccaaaccccccaccggcctag

SEQ ID NO: 111291 - DNA, 1143 bp, synthetic construct
  misc_feature 1..1143: note = Description of Artificial Sequence: Synthetic coding sequence
  source 1..1143: mol_type = other DNA
atgagcgactcaaaggaaccccggctgcaacaattggggttactcgaggaggaacagctgcgaggcctgggattccgtcagacccgcggctataagtcattggcagtatctaaggtgccttcatcaatctctcaggagcaaagtcgtcaggacgcgatatatcagaatctcacccagcttaaggccgcagttggggagctgtcggagaaaagcaagcttcaagaaatctaccaggagctaactcagctcaaagctgccgttggagagctccctgagaaaagcaagttacaggaaatttaccaggaactgactcgtctcaaagccgcagttggggagttaccagagaaatctaaattacaagagatataccaggaattgacctggctgaaggctgccgtcggggagctccctgagaagtctaagatgcaagaaatataccaggagctgactcgattgaaagccgccgttggggagttgcctgaaaagagtaaacagcaggagatatatcaagagctgacccggttaaaagcagccgtcggcgagcttcctgaaaagtccaagcagcaagagatctatcaggaactgacacggttaaaagccgccgtgggggagctccctgagaaaagtaaacagcaggaaatatatcaggaattgacacagttgaaggcggccgtcgagaggttatgtcacccttgcccttgggaatggacctttttccagggcaactgttatttcatgtcaaactcacagagaaattggcacgactcaatcacagcttgcaaggaggtgggcgcacagcttgtggtgatcaagtctgcagaagaacagaattttctgcaactgcagtcatctagaagcaatagattcacttggatgggactgagcgatctaaatcaggaagggacctggcagtgggtggatggaagtccactgttgccgagctttaagcagtactggaatcggggtgaaccaaataacgttggagaagaagattgcgctgagttcagtggcaacgggtggaacgacgataaatgtaatttggctaaattttggatctgcaagaagtctgccgcctcttgtagcagggatgaggaacaattcctgagcccagctcctgctacacccaaccctccccctgcttag

SEQ ID NO: 111292 - DNA, 1215 bp, synthetic construct
  misc_feature 1..1215: note = Description of Artificial Sequence: Synthetic coding sequence
  source 1..1215: mol_type = other DNA
atgtctgacagtaaagaacctcggctccaacaattgggtcttctggaggaggagcaattgagaggccttggcttccgtcagaccagggggtacaaaagtctggctggatgccttggacacggccccctggtgttacaattgctaagttttacgctccttgccggcttgctggtccaagtgagtaaagtgccctcttcaatatcacaagaacagtctcggcaggatgcaatataccagaatttaactcagttgaaagctgccgtgggtgagctctctgagaaatcaaagctacaggaaatctaccaggagcttacacaacttaaagctgccgtgggagaactgccggaaaaatctaaactgcaggagatatatcaggaactgacccggctcaaggcggctgtgggcgagcttcctgagaagtctaaactgcaggaaatataccaggagctgacatggctgaaggcggctgtgggtgagctgccagaaaagagcaaaatgcaagaaatctatcaggaactaacaagattaaaggctgccgtcggcgagctgcctgagaaatcaaagcagcaggagatctatcaggagctgactcgactcaaggccgccgttggtgaattgcccgaaaagtccaagcagcaggagatctatcaagagttgacacgactgaaagcagcagtgggagagttgccagagaaatccaagcagcaggagatctatcaagaactcactcaactgaaagccgctgtcgaaagactgtgccatccgtgtccatgggagtggactttctttcagggcaactgttactttatgtccaactcacagcggaattggcacgactcaattaccgcgtgcaaagaggttggtgcccagcttgtggttattaaatctgccgaagagcaaaattttcttcaactgcagagcagcaggagcaatcgttttacctggatggggctcagcgatctgaaccaggaaggaacatggcaatgggtggatggcagcccactgctgcccagcttcaagcagtactggaatagaggcgagccgaataacgtcggagaggaggactgcgccgagttctcgggcaatggatggaatgacgacaaatgtaatctggccaagttttggatttgcaagaaatctgcagcttcctgctctagggatgaagaacaattcttgtctccagcacctgccacccccaacccccctcccgcttag

SEQ ID NO: 111293 - DNA, 1197 bp, synthetic construct
  misc_feature 1..1197: note = Description of Artificial Sequence: Synthetic coding sequence
  source 1..1197: mol_type = other DNA
atgtcggactctaaagagcctcgtctgcaacaattgggactgctggaggaagagcagctgcgaggccttggatttcggcagaccagaggctataagagtctggctggctgtctaggtcacggccctctggtattgcagctgttgtcttttacgctcctggctggcctgctcgtccaggtaagcaaggtgccctcttctatctcccaggagcagagccgccaggacgctatttatcagaatctgacgcaacttaaggctgctgtaggggaactgtctgagaaatcaaagttgcaagagatttaccaggagctgactcagttgaaggccgccgtcggggagctccccgagaagtcaaagctgcaggagatttatcaggaacttacccggctcaaagctgccgttggcgaactgcccgaaaaaagtaagctgcaggaaatatatcaggaactgacttggctcaaggcagccgtcggcgaattacctgaaaagtctaagatgcaagaaatctatcaggagctgacccgtttgaaagccgccgtgggtgaactgccagaaaagtcaaaacaacaggagatttatcaggaactcaccaggctcaaagctgccgtcggggagttgcccgaaaagtctaagcaacaggaaatttaccaggagctgacgcgcctgaaggcagctgtcggcgaactgcccgagaagagcaaacagcaggaaatctatcaggaactaacacagctcaaggctgcggtggagcgcttgtgccatccttgcccctgggagtggacattcttccagggcaattgctactttatgtccaatagccagcgtaactggcacgactccattactgcctgtaaagaagttggcgcgcagctggtggtgattaaatctgctgaggaacagagctcacgaagcaacaggttcacctggatgggactgagcgacttgaatcaagaaggaacctggcagtgggtcgatggaagccctctgctcccatccttcaagcagtattggaatagaggtgaacccaacaacgtcggggaagaagattgtgccgaattttccggaaacggctggaacgatgataagtgtaacttagccaagttctggatttgtaagaagtctgccgcctcctgctcacgcgatgaggaacaatttctctcccctgccccagccaccccgaaccctccccccgcttag

SEQ ID NO: 111294 - DNA, 507 bp, synthetic construct
  misc_feature 1..507: note = Description of Artificial Sequence: Synthetic coding sequence
  source 1..507: mol_type = other DNA
atgtctgatagcaaggagccgcgcctgcaacagttaggtctgcttgaagaggaacagctgcgagggctaggcttccggcagacccggggatataagtctctcgctggatgcctaggacatggtccgttggtcttgcagttgctatcatttactctccttgctggattgctggtgcaagtctcaaaagtgccctctagcattagccaggaacaatctcgatcaaatcggtttacctggatgggcctctcagatctgaatcaggagggaacttggcagtgggtcgacggctcccccttactcccctcattcaagcaatactggaataggggcgagccaaacaatgtcggtgaggaagactgcgcagagttctccggtaatggatggaacgatgataaatgcaatcttgctaaattctggatatgtaaaaagagcgcagccagttgttctagagatgaagagcagttcctctcccctgccccagcaactccaaaccccccgcccgcttag

SEQ ID NO: 111295 - DNA, 939 bp, synthetic construct
  misc_feature 1..939: note = Description of Artificial Sequence: Synthetic coding sequence
  source 1..939: mol_type = other DNA
atgtctgattctaaggaaccgcgccttcagcagctgggcctcttagaagaggagcagcttcgaggtctcggattccgccagacaagaggttacaagtcattggcaggatgccttggacacgggccactggttttacaactgctgagctttactcttctggctgggcttctcgtccaggtttcgaaagttccctcctccatttcacaagagcagtctcgccaggatgccatatatcagaatctgacccagctaaaggccgcagtgggagagctgagtgaaaaatccaaactgcaggaaatataccaagaactgactcaactcaaggccgcagtcggggaattgcccgaaaagtcaaagctacaagagatttatcaggagctgacacggctcaaagcagctgtgggggaactcccggagaagagcaagctgcaggagatttaccaggaactcacatggttgaaagccgcagtggagcgtctttgccacccttgtccgtgggaatggactttcttccagggcaactgttacttcatgtccaactctcagcggaactggcatgactctatcaccgcctgtaaggaagtgggagctcagctcgtcgtgattaagagcgccgaagagcagaactttctccagctccaaagcagccggagcaataggttcacctggatggggttgtctgacctgaaccaagaaggtacctggcagtgggtggatgggtcaccactccttccttctttcaaacagtactggaatagaggagaaccaaacaacgtaggagaggaagattgcgcggagttcagcgggaacggatggaatgatgataagtgcaatctggcgaaattctggatctgtaaaaagtcggccgcttcgtgctcacgagacgaagaacagttcctgagtccagcccccgctactcctaacccgccgcccgcctag

SEQ ID NO: 111296 - DNA, 105 bp, synthetic construct
  misc_feature 1..105: note = Description of Artificial Sequence: Synthetic coding sequence
  source 1..105: mol_type = other DNA
atgtcagactctaaggagccgaggctgcaacagttaggtttgttggaggaggaacagctgagggggctcggctttcgtcagacccggcggaatcagaagtgttag

SEQ ID NO: 111297 - DNA, 855 bp, synthetic construct
  misc_feature 1..855: note = Description of Artificial Sequence: Synthetic coding sequence
  source 1..855: mol_type = other DNA
atgagtgattccaaagagccacggctgcagcagttggggttactggggtgcctaggccatggccccctggtgctccaactcctgtccttcacgctgttagcgggcctgttagtgcaggtcctgggccccgtaagtaaggtcccatcatcgatcagccaggaacagagtagacaggacgcaatctaccagaacctgacacagctcaaggctgcagttggggaactgtccgagaagtccaaattgcaggagatctatcaggagctcactcagctcaaggctgccgtcggcgagctgccagaaaaatctaagcttcaggagatttatcaggaactgactcgtctaaaagccgcggttggcgaactgcccgaaaaaagcaagctgcaggagatataccaggaactgacgtggctgaaggcggccgtcggcgagctgcctgagaaaagtaaaatgcaggagatttaccaggagctgaccagactgaaggccgctgtcggggaattaccagaaaaaagcaagcagcaggagatttaccaggaacttacgcgactgaaggcagccgtgggcgagctcccagaaaagagcaagcagcaggaaatataccaggagctgactcggctaaaggccgctgtgggcgaacttcctgagaaatcaaaacagcaggagatctatcaggagctgactcaactcaaggccgccgtagaaaggctgtgtcacccatgtccctgggaatggacattttttcagggtaactgttattttatgagtaactcccagcgcaattggcacgattccatcactgcttgtaaggaggtgggggcacagctagtggttattaaatctgcagaggagcagtag

SEQ ID NO: 111298 - DNA, 939 bp, synthetic construct
  misc_feature 1..939: note = Description of Artificial Sequence: Synthetic coding sequence
  source 1..939: mol_type = other DNA
atgtccgactctaaggagccccgcctgcagcagctggggctgttagaggaagaacagcttagagggctgggttttagacagacccgggggtacaaaagccttgctggctgtctcggacatgggccattggtgttgcaattgctgagttttacacttctggccggcctgctggtgcaggtgtctaaggtgcctagttccatttcacaggagcaatctaggcaggatgccatttaccagaacctgacgcagctcaaggccgccgtaggcgagctaagcgagaaatccaagcttcaggagatttatcaggagctgacccagctaaaggccgccgtgggtgagctgcctgaaaagagtaagttacaagaaatctaccaggagttgaccaggctgaaagccgccgttggagagcttccggagaagtcgaaacttcaggagatttatcaggagttaacctggctcaaggcagcagtggaacggctttgtcatccatgtccctgggaatggaccttttttcagggcaattgttattttatgagtaactcccagcggaattggcatgatagtattaccgcttgcaaagaagtcggagcacaattagtggtgatcaaatcagctgaggagcagaattttttgcagcttcagtcttcgcggagcaataggttcacttggatgggcctgagcgatctaaaccaggagggaacatggcagtgggtcgacgggtctccattgctgccttcctttaaacaatactggaaccgcggggagcctaacaatgttggcgaggaggactgtgctgaattttctggaaacgggtggaacgacgataagtgtaacttagccaaattttggatatgtaagaaaagcgcagccagctgcagtcgagatgaggagcagtttctgtcacctgcgcctgctactccaaatcccccacctgcatag

SEQ ID NO: 111299 - DNA, 1011 bp, synthetic construct
  misc_feature 1..1011: note = Description of Artificial Sequence: Synthetic coding sequence
  source 1..1011: mol_type = other DNA
atggattaccccaccctgctgctggccctgttacatgtttaccgggctctgtgcgaggaggttttgtggcatacctcggtgccttttgccgagaacatgtctttggaatgtgtttacccaagcatgggtatcttgacccaggtagagtggtttaagattggaacacaacaggacagcattgccattttctccccaacgcacgggatggtgatccgcaaaccctacgccgaaagagtgtactttctcaactctactatggcctctaacaacatgaccctgttttttaggaatgcttcagaagatgacgttggctattactcttgcagcctttatacatacccacaggggacttggcaaaaggtgatccaggtggtacagtcagactcattcgaagcggcagtgcccagtaacagccacattgtctctgagccgggtaaaaatgtgacgctgacctgtcagccccagatgacctggccagtacaggccgtgagatgggagaagattcagccccggcagattgatctcctgacatactgtaacctggtccacggaagaaacttcactagcaaattcccacgccagattgttagcaactgttcacacggcagatggagtgtgatcgttatcccggacgtgaccgtctcagacagtggcctatatcggtgttatctccaagcatctgcgggagaaaatgagacctttgtaatgcgcctgactgtggctgagggcaagaccgataaccagtataccctttttgttgctgggggaacagtgctgttactgctgttcgtcatctctatcaccacaataattgtcatatttctgaataggcggagaaggagggagagaagggatcttttcactgagtcctgggacacccagaaggcgcctaacaactataggtctcccatttccacatcgcagccaactaatcagtctatggacgataccagagaggacatctacgtgaactaccctacatttagccggcgccccaagaccagggtttag

SEQ ID NO: 111300 - DNA, 822 bp, synthetic construct
  misc_feature 1..822: note = Description of Artificial Sequence: Synthetic coding sequence
  source 1..822: mol_type = other DNA
atgctggggcaggtggtaaccctgattctcctgcttctcttaaaagtgtatcagggaaaagggtgtcaaggttcagcggaccatgtggtctctatctctggagtgcctttgcaattgcaaccgaatagtattcaaaccaaagttgatagcatagcatggaaaaagctcctgccatctcagaacggatttcaccacatcctgaagtgggagaatgggtcactcccctccaatacatctaatgaccggtttagctttattgtgaaaaacctgtctttgctaatcaaggccgctcagcagcaggatagtggtctctattgtctggaggtgacgagtatatcgggcaaagtgcagactgccacctttcaagtgtttgtatttgaattccgtttttggccgttcctcgtgataattgtcattttgtcagctctgtttctcggaactcttgcctgcttttgtgtgtggcgccggaagagaaaggaaaagcagagcgaaacaagtccaaaggagtttcttactatttatgaggatgtgaaggacctgaagacacggcgaaaccacgaacaagagcagacatttccaggtggcggttctaccatctacagcatgatacagtctcaatcctctgctcccacttctcaggagccagcctacaccctatattctctgattcagccttccaggaagtccggcagccgcaagcggaatcactccccttcattcaactcaaccatttacgaggtgataggtaagtctcaacctaaagctcaaaatccggctcggctgagcaggaaggagcttgagaattttgatgtctatagctag

SEQ ID NO: 111301 - DNA, 990 bp, synthetic construct
  misc_feature 1..990: note = Description of Artificial Sequence: Synthetic coding sequence
  source 1..990: mol_type = other DNA
atgctgggacaggtggtgaccctaatcttgctgttattactcaaggtgtaccaaggtaaaggctgccaggggagcgcggaccacgtcgtgagtattagtggagttcctttgcaactgcaacccaattccatacaaaccaaggtggactcaatcgcctggaaaaaactgctcccatctcagaatgggtttcaccatatcctgaagtgggaaaacggctctctcccgagcaatacatccaatgatagattctcatttattgtgaagaaccttagtcttcttataaaggctgctcagcagcaggattctggtttgtactgtctagaggtcacctccatttcgggtaaggtgcagactgcaaccttccaggtgtttgtcttcgacaaagtggagaagccaagactgcaaggccagggaaagatcctggaccgtgggcggtgtcaggtcgccctgagttgcctagtcagccgggatggtaacgtttcctatgcttggtaccgcggttctaaactcattcagacagctggaaatttgacctacctagacgaagaggtggacattaatggaacacacacttatacttgcaacgtgtccaaccctgtgagctgggaaagccacactctgaacctgacccaagattgccaaaatgcgcaccaggagttccggttctggccgttcctggtaattatcgtcattttgagcgccctgtttctcggcactttggcctgcttttgcgtgtggcggcgtaaaagaaaggagaagcagagtgaaacctccccaaaggagttcctgaccatttatgaagatgttaaggacttgaagacaagacggaatcacgagcaggagcagacctttcctggggggggctcaacaatctatagtatgatccaaagtcagagttcagctccgaccagccaggaaccagcctacacattgtatagccttattcagccctcacggaagggagacagattttattcatttagcggatag

SEQ ID NO: 111302 - DNA, 1113 bp, synthetic construct
  misc_feature 1..1113: note = Description of Artificial Sequence: Synthetic coding sequence
  source 1..1113: mol_type = other DNA
atgctcggtcaggtggtgactcttattcttctcctcctgttaaaggtctatcaaggcaaagggtgccagggctcggcggatcatgtggtctcaataagcggagtcccattacagctgcaaccaaactccatccagaccaaggtggattccatcgcttggaaaaaactgctaccttcccaaaatgggtttcaccacattctcaagtgggaaaatggctccctccctagtaacacctcaaatgatagattcagcttcattgtcaaaaacctatctctgctcattaaggccgcccagcagcaggatagtgggctgtattgcctggaggtcacgtccatctctggcaaagtgcagaccgcaacattccaggtcttcgtgtttgagtccttgctaccggataaggtggagaagcctcgtcttcaggggcaggggaaaattttagaccgaggacgctgtcaggtcgctctcagctgcttggtctcgcgcgacggtaacgtgagctacgcttggtacagagggagcaaattgattcagactgctggcaatttgacttacctcgacgaagaggtcgatattaacggcacccacacatatacctgcaacgtctctaaccctgtgtcgtgggagagtcatacattgaatctaacgcaggattgccaaaacgctcatcaagagttcagattttggccttttctggtgatcatcgtgattctgtccgctctgttcctggggaccctggcctgtttctgcgtgtggcggcggaagcggaaagaaaagcaatcagaaacctcgccaaaggagttcctgacaatctacgaggatgtgaaagaccttaagaccaggcggaaccatgagcaggaacaaaccttccctggtggcggtagcaccatttattcaatgatccagtctcaaagttccgctccaacctcacaggagccagcttacacattatactcgctcattcagccaagccgcaagagcggcagtcggaaacggaaccattctcccagcttcaactccaccatttacgaggtgattggtaagagccagccgaaggcccagaaccctgcgcggctatctcggaaggagcttgagaacttcgacgtctatagctag

SEQ ID NO: 111303 - DNA, 1098 bp, synthetic construct
  misc_feature 1..1098: note = Description of Artificial Sequence: Synthetic coding sequence
  source 1..1098: mol_type = other DNA
atgctggggcaggtggtcaccttgatcctgcttctactcttgaaagtgtaccagggcaagggatgtcagggatctgcggaccacgtggtgagtatatctggcgtgcccctgcaactccagcctaattcaattcagaccaaggtcgattcaattgcctggaagaagttgctgcccagtcagaacggctttcaccacattctgaagtgggagaacggctcgctgccatcaaacacctcaaacgatagattctcttttattgttaaaaacctgtcccttctgattaaggcggcccagcagcaggattccggcctgtattgcctggaggttacaagcatatcaggaaaggtgcagaccgccacttttcaagtgttcgtgttcgacaaagtggaaaagcccagacttcaagggcaaggtaaaatcctggacaggggccgctgtcaggtcgctctgagctgtctcgtttcacgtgacggaaacgtcagctatgcatggtacaggggttcgaaactgatccagaccgcgggaaaccttacctatttggacgaagaggttgatatcaacggaacacacacttacacttgtaacgtaagtaaccctgttagttgggaaagtcacacacttaatctcacgcaagattgccagaacgcacaccaggaatttcgattttggccctttctggtcataattgtaatcctgtctgcattattcctgggaactctggcgtgcttttgtgtatggcgccggaaaagaaaggaaaagcaaagcgaaacctcaccaaaggaattcctgaccatctatgaagacgtcaaggatcttaaaactcgacgtaaccatgagcaggagcagacgttccctggaggcggctctacaatctatagcatgatccaatctcagtcctcagctcctacctcccaagagccagcttataccctgtattccctgattcagccttctaggaagtccggcagccggaagaggaatcattcccccagctttaatagcacaatttatgaggtcatcggtaaaagtcagcccaaagcacagaacccagcaagactctcccgtaaggagctcgagaatttcgacgtctacagttag

SEQ ID NO: 111304 - DNA, 495 bp, synthetic construct
  misc_feature 1..495: note = Description of Artificial Sequence: Synthetic coding sequence
  source 1..495: mol_type = other DNA
atgaagtggaaggctttatttaccgccgcgatcctgcaggcccagctgcccatcactgaggcacagtcttttggcctccttgacccaaaactgtgctatctgttggacggaatcctttttatctatggcgtcatccttacagcgctgttcctcagggtcaagttcagtagatctgcagatgctccagcctaccaacagggacagaaccagctttataacgagctcaacctgggtagacgggaagaatacgatgtgttagataaacgaaggggacgagacccggaaatgggcggaaagccccagcgccggaagaacccccaggaggggttatacaacgagctgcagaaggacaaaatggctgaggcgtactctgagattggaatgaagggggagcgacggcgggggaaaggtcacgacggtctttatcaaggccttagcaccgccacgaaggatacctacgatgctcttcacatgcaagccttgcctccaagatag

SEQ ID NO: 111305 - DNA, 492 bp, synthetic construct
  misc_feature 1..492: note = Description of Artificial Sequence: Synthetic coding sequence
  source 1..492: mol_type = other DNA
atgaagtggaaggctctctttacagctgccatactccaggcacagctaccaattacagaagcacagtcctttggcttactcgatccgaaactctgctacctgctcgatggaatcttattcatctatggagtaattttgacggccctctttctacgggtgaaattcagtcgttccgcagatgcacccgcatatcagcaggggcagaatcagctctacaacgaactaaatctggggcgtcgggaggagtatgacgtgctggataagcggcgtggcagagacccagagatgggaggcaagcctcgtcggaaaaacccccaagagggtctctataacgaactgcagaaggacaagatggcggaagcatactctgagattggaatgaagggcgagcgaagaagggggaaggggcacgatggcttgtaccaagggctgagcacggcgactaaggacacgtatgacgccctccacatgcaggctttacctccgcgttag

SEQ ID NO: 111306 - DNA, 2274 bp, synthetic construct
  misc_feature 1..2274: note = Description of Artificial Sequence: Synthetic coding sequence
  source 1..2274: mol_type = other DNA
atgcttcttcgtctcctgctggcatgggccgcagccggtccaacgctgggccaggatccctgggccgcggagccccgagcggcctgcggaccttctagctgctatgcgttgttcccaaggcgtcgaacatttctggaagcttggcgggcctgccgagaactggggggggaccttgcaaccccccgaactccagaagaggctcagagagtcgactcactggttggagccggaccagcatcccgcctcctctggatcggattgcaaagacaggctaggcagtgccaactgcagcggccactgcgaggattcacttggacaaccggtgatcaggacaccgcttttactaattgggcgcaacccgcctcaggtggaccctgcccggctcagcgatgtgttgcattggaggcctctggtgaacataggtggctcgaggggtcctgcacactcgctgtggacgggtacttgtgccagttcggttttgagggcgcttgcccagcattgcaggatgaggccggtcaggcgggcccagctgtttacaccactccatttcacctcgtctctacagagttcgagtggctgccctttggcagcgttgctgcggtccagtgccaggccggtcgcggcgcgagtcttttatgcgtcaagcagccagaaggcggtgtggggtggtcaagagccggccccctttgccttggcacaggatgcagccccgataacggcggctgcgaacacgagtgcgtggaagaggtggacggacacgtgagttgcagatgcacagagggcttccgtctcgctgcagatgggaggtcgtgtgaggatccgtgcgcacaggcgccctgtgaacagcagtgcgagcccgggggtcctcaaggatattcctgccactgcaggctgggttttcgtcccgcagaggatgacccacacaggtgtgttgatacagatgagtgtcaaattgccggagtttgccagcagatgtgcgtcaattatgtaggagggtttgagtgctactgctcagaaggacacgaattggaagctgacggaatctcgtgctctcccgccggggcaatgggtgcgcaagcttcccaggaccttggcgatgagctgctggacgatggggaagacgaagaagatgaggacgaggcatggaaggccttcaatggcggctggaccgaaatgcccggcatactgtggatggagccaacccagccccctgattttgctctggcataccgcccttcgttccccgaggaccgggaacctcagatcccctatcccgaacccacctggcccccacccctgtcagctccccgcgttccgtaccactcttccgttctctctgtgacccgacccgttgtggtctccgctacccacccaacattgccttcagcacaccagccacctgtcatccccgctactcatccagcactttctcgggatcaccaaatccctgtgatcgctgcaaactacccagatcttccctccgcatatcaaccaggtatcctctcagttagtcacagcgcccagccaccagcccaccagcctccaatgattagtacaaagtatccagagctgttccctgctcaccagagtccgatgtttcctgacacccgggtggcagggacacagacgacaactcatttgcctggtattccaccaaatcatgcccccttggtgaccacccttggagcacaattaccaccccaggcaccagacgcactggtgctgaggactcaggccacgcagttgccaatcatacctactgcacagccgagcctgactaccacgtctcggagccccgtgagtcccgctcatcaaattagtgtcccagctgcgactcagcccgccgcccttcccaccttactgccgtcccaatccccaacgaaccagaccagccccatcagccccactcaccctcatagcaaagcccctcagattccgcgagaagacggcccatcccctaaactcgcgctctggctgcccagtccagcaccaaccgcggccccgaccgccctgggcgaggccggattggctgagcactcccagcgtgatgatcgctggctcctggtggcacttctggtccctacatgcgttttcttggtggtgctgctggctctcggaatcgtgtactgtacaaggtgtgggccccatgcccccaacaagcgcattacagactgttacaggtgggttatacacgcaggtagtaagagtccaacagaacccatgccccccaggggctccctgacgggcgtacaaacttgccgcaccagcgtgtag

SEQ ID NO: 111307 - DNA, 951 bp, synthetic construct
  misc_feature 1..951: note = Description of Artificial Sequence: Synthetic coding sequence
  source 1..951: mol_type = other DNA
atgctgagacggagagggtcccctggcatgggcgttcacgtgggcgccgccctcggtgccctgtggttttgtctgaccggcgccctcgaggtccaggttcctgaagatcctgtggtggcactggtgggaacagatgcaaccttgtgctgcagtttcagccccgaaccaggatttagtctggcacaactcaatcttatttggcagctgaccgacacgaagcagttagtgcactccttcgccgaagggcaggatcaggggagtgcctatgccaacaggacagctctgtttcccgatctcttggctcagggcaacgctagcctgaggctccagcgagtgagagtagcagacgaaggaagcttcacatgtttcgtgtcgattagagattttggcagcgccgcggtctctctacaggtcgcagcaccgtactcaaagccctcgatgactctggagcccaacaaggatctgaggccaggcgatactgtaactataacctgtagctcttaccgaggctaccccgaggccgaagtgttttggcaggatgggcagggcgttcccctcacaggcaatgtgactacctcgcagatggccaatgagcagggtctgtttgatgttcactctgtgctgcgcgttgttctgggagccaacggaacatactcatgcctggtgaggaatccggtcctgcaacaggacgctcatggctctgtgactattacaggccagccaatgacatttcctcccgaggccctgtgggtcacagtgggactcagtgtttgtctgatcgctctgctggtggcgctggcctttgtctgctggagaaaaatcaaacagtcatgcgaggaggagaacgcaggggctgaggaccaggacggggaaggcgaaggtagcaagaccgcactccagcctctcaaacacagtgattcaaaggaagacgacggccaggagatcgcgtag

SEQ ID NO: 111308 - DNA, 1605 bp, synthetic construct
  misc_feature 1..1605: note = Description of Artificial Sequence: Synthetic coding sequence
  source 1..1605: mol_type = other DNA
atgctcagacgccgagggtcacctggaatgggcgtgcacgttggcgccgccctcggcgccctctggttttgtctgaccggggccctggaggttcaggtccctgaagatccagttgtggcactagtcggcaccgatgctaccctatgttgctccttcagtccagaaccaggtttctctctggcccagcttaacctcatttggcagctgactgataccaaacagctggtgcactctttcgcagaggggcaggatcagggctcagcttatgccaacagaaccgccttattcccggatctgctggcacaggggaacgcatcccttaggctgcaaagagtgcgagtggctgacgaagggagtttcacttgtttcgtgagcatccgcgacttcgggtctgccgctgtaagtctgcaagtggcagccccctatagcaaacccagtatgaccttggaacctaacaaggatctgagacccggtgataccgttacaataacgtgtagctcttaccaagggtacccagaggccgaagtcttttggcaggatgggcagggagtccctctgacagggaatgtcactacctcccagatggccaacgaacagggcctctttgatgttcacagtatcttacgcgtggtattgggagccaacggtacctattcctgtttggtgcgcaacccggtcctccagcaggacgcacactccagcgtgaccataactccgcagaggtctcccactggcgctgtggaggtgcaggtgccagaggatccagtcgtggccctggttgggaccgacgcaacactacggtgcagcttctcccccgaacctggtttcagcctcgcacagctgaatctcatctggcagctgacagacaccaaacagctggtgcattcatttacagagggacgggatcagggttcagcatatgcaaataggaccgcgctgtttcccgacttactggcacagggcaatgcctcgctgaggttgcaaagagtcagggttgccgatgagggctcttttacctgcttcgtctcaattcgtgattttgggagcgcggccgtcagcttacaggtggctgccccttattccaaaccgtctatgacactggagcccaataaggaccttcgcccgggcgacactgtgactatcacatgcagttcatacagggggtaccccgaggccgaagtgttctggcaggatggccagggggtaccattgacaggcaatgtgaccacttcccagatggccaacgagcagggtttgtttgacgtgcattctgttctgcgtgtggtgcttggggccaacgggacctactcatgcctggtccggaatcccgttctccagcaggatgcccacggcagcgttactatcactggtcagcccatgacctttccccccgaagcactgtgggtaactgttggcctgtcggtctgcctgatcgctcttttggttgcacttgccttcgtttgctggagaaaaatcaagcagagctgtgaagaggagaatgccggggccgaggaccaggacggagagggggagggttcaaagaccgctttgcagcccctgaaacacagcgatagcaaagaagacgatggacaggaaattgcctag

SEQ ID NO: 111309 - DNA, 1482 bp, synthetic construct
  misc_feature 1..1482: note = Description of Artificial Sequence: Synthetic coding sequence
  source 1..1482: mol_type = other DNA
atgttgaggaggcgggggtccccaggcatgggagtccacgtcggcgctgcgttgggagccctatggttctgcctgacaggggcgctcgaggtccaggtgccagaagacccagtagtggccttggtcggaaccgatgccactctctgctgtagctttagcccagaacctggcttttccctggcccagttaaacctcatctggcagctgactgacactaagcagctcgtgcacagcttcgcagaggggcaagaccagggatccgcctatgcaaaccggacggctctgttccctgatttgttggctcagggaaacgcctccctgcgccttcaaagagtgcgcgtagctgatgaaggaagttttacttgcttcgtcagcatccgagacttcggaagcgcagcggtgtccctgcaggtggctgcgccttactcaaaacctagcatgactctagaaccaaataaggatctgaggccaggagacacagtcacaataacctgctccagctatcagggttatccagaggctgaagtgttttggcaggatgggcagggagtacccctgacaggtaacgtgaccacatcacaaatggcaaacgaacagggactgtttgatgtgcactctatcctccgcgtggtcctaggggctaacggtacatacagctgccttgtcaggaatcccgtgctgcagcaggatgcgcactctagcgttaccattaccccgcagaggtctcctaccggcgcggtggaggtgcaggtgcccgaggatcccgtcgtggccttagtcggcactgacgctacccttcgctgcagtttctcacccgagcccgggtttagtctcgcacagttgaacctgatttggcagctcacggatacaaaacagctggttcactctttcacagaaggacgggatcagggaagcgcttacgcaaatagaacagccctctttcccgatctgttggcccaggggaatgcctctctgcggctgcaaagggttcgcgttgccgatgagggcagcttcacttgcttcgtttctattagggactttggatccgcagccgtgagcctccaagtcgcagcaccatattccaagccatcgatgaccctggaaccaaacaaggatttgcgtcctggggatacggtgaccatcacgtgctcatcttatcgggggtatcccgaagcagaggttttctggcaggacggccagggcgttcccttgacggggaacgtgacgactagccagatggctaatgagcagggccttttcgatgtacatagtgtgctccgggtcgtgttaggagcgaatggtacttactcctgcttggtgcgtaaccctgtcctacaacaggatgcgcatgggagcgtgaccatcacaggacaacccatgaccttcccacctggccctgcctccagcgcagtccctcttagtcctgcccaccccccacacggcagtatgtgttggtcccactggttctcccggggactttag

SEQ ID NO: 111310 - DNA, 423 bp, synthetic construct
  misc_feature 1..423: note = Description of Artificial Sequence: Synthetic coding sequence
  source 1..423: mol_type = other DNA
atgcttcggcggcgggggtctcctggaatgggggtccatgtaggggccgcactgggtgctctctggttttgccttactggagccctggaggtacaagtaccagaggatcctgtagtggcactcgtcggaaccgatgccacactttgttgtagcttcagccccgagcccgggttttccctggcccaactgaatctgatctggcaattgacagacacgaaacagctggtccactccttcgccgaaggccaggatcagggtagcgcctacgcaaatagaaccgccttgtttccagatctgcaccgggccgcatacgacattccgccacgggggcctgtgggtgaccgaggagccgtgtgtctgtcgcactgtacagccggagggccgggcttccgggtactggaaaaggatcagactgagctctag

SEQ ID NO: 111311 - DNA, 411 bp, synthetic construct
  misc_feature 1..411: note = Description of Artificial Sequence: Synthetic coding sequence
  source 1..411: mol_type = other DNA
atgcttaggcgcagaggctcacctggaatgggcgtgcatgtcggggcggccctgggcgccctgtggttctgtttgacaggggcccttgaggtgcaggtgcccgaagaccccgtggtggccttagtaggaaccgatgctactctgtgttgctccttttcacctgagcccggcttcagtctggcacagctgaaccttatttggcagttgacagacacaaagcagctggtgcatagcttcgctgagggtcaagatcaggggtcagcatacgctaaccgtactgcattattcccagaccttttggcccagggcaatgcctctctcagactacaacgagtgagggtcgcggacgaaggctcgttcacgtgcttcgtgtcgatcagggactttgggtccgctgccgtgagtctatag

SEQ ID NO: 111312 - DNA, 402 bp, synthetic construct
  misc_feature 1..402: note = Description of Artificial Sequence: Synthetic coding sequence
  source 1..402: mol_type = other DNA
atgctccgccgccgcggcagtcccggaatgggcgtgcacgtcggagccgccctcggcgccctgtggttttgcttaacaggtgcgcttgaggtccaggttccggaggaccccgtcgtcgcactcgtgggaacagacgccacgctctgctgtagtttcagtcctgaaccggggttctcattagcacagctgaatctcatctggcagctgactgacactaagcagttggtgcattccttcgccgaagggcaagaccaggggtctgcctacgcgaatcggaccgctctgtttcccgacttgttggcccagggcaacgcgagtctgaggcttcagcgagtgagagtagcagatgagggttcttttacctgtttcgtgtccattagggatttcggaagtgctgcctag

SEQ ID NO: 111313 - DNA, 1602 bp, synthetic construct
  misc_feature 1..1602: note = Description of Artificial Sequence: Synthetic coding sequence
  source 1..1602: mol_type = other DNA
atgctgcgccggcggggtagccctggaatgggcgtgcacgtaggcgctgctctcggcgctctgtggttttgtttaacgggggccctcgaggtacaggtcccagaagacccagttgtcgctctggttggcactgacgcaacactttgctgtagcttttctcccgagcctggattcagcttggcacagctcaaccttatctggcagctaactgataccaagcagttagttcactcctttgctgaaggacaggatcaaggctccgcgtatgccaatcgcaccgccttgtttcccgacttactggcccaagggaatgccagcctgcgcctgcagcgtgtccgcgttgctgacgaggggtccttcacctgcttcgtatctatacgagacttcgggtccgctgccgtctctctgcaagtggccgctccatacagcaagccttccatgaccctggagcccaacaaagatctgagacccggcgacaccgtgacaattacctgctcttcatatcaggggtacccggaagcggaagtgttttggcaggacggacaaggagtgcccttgacagggaacgttacaacctctcaaatggcaaacgaacagggccttttcgacgtgcattcgatcctgagagtagtgctgggggccaacgggacatactcgtgcttggtgcgtaaccccgtgctccagcaggacgcccatagcagcgtcactatcacgcctcaacgctcacctacaggtgccgtggaggtccaggtccccgaggatccggtcgtagcgttagttggtacagacgccacgctgagatgctctttttcaccagagcccgggttctcgctcgctcaattaaatctgatctggcaactgacagacacgaaacagctcgttcactccttcactgagggccgggatcaggggtcagcatatgctaaccggactgcgctctttccagacctgctggcccagggaaacgcatcgctgcgcttgcagcgtgttagggtggctgatgagggttccttcacttgttttgtgtccatcagagactttggcagtgcagcagtaagtctccaggttgcagctccatactctaagccaagcatgacgcttgagccaaataaggaccttcgacccggcgatactgtcaccatcacatgctcatcctaccggggatacccagaggcagaagtgttttggcaggatgggcagggtgttccccttactggtaacgttactacctcacagatggcaaatgaacaaggtttatttgatgtgcacagcgtgctgagggtggtgcttggtgcaaatgggacttactcatgtctagtgagaaatccggtgcttcagcaggacgcacacggcagtgttacgatcactggacagcccatgacctttccacccgaagcattgtgggttaccgtagggctatccgtgtgtctgatagcactactagtagccctggcttttgtctgctggcgcaaaataaaacaatcatgcgaggaggaaaacgccggtgctgaagaccaggatggggaaggggagggttccaaaactgcacttcaacctctcaagcattctgactctaaagaggggaaagatacctgggcctag

SEQ ID NO: 111314 - DNA, 498 bp, synthetic construct
  misc_feature 1..498: note = Description of Artificial Sequence: Synthetic coding sequence
  source 1..498: mol_type = other DNA
atgctgcgccgtcgaggatctccaggaatgggggtccacgtgggagccgccctaggcgctttatggttctgtctcaccggcgcattagaggtccaagtgcccgaggaccccgtggtggccctggttggcactgacgccacattgtgctgttctttttcacctgagcctggtttctcgcttgctcagttgaacctgatctggcagttaacagacacaaagcagctcgtccactcctttgccgagggacaggaccagggatccgcctatgccaataggacagcattgttcccagacctgttggctcagggcaatgcgagcttaaggcttcagagagtgagggtcgccgacgaagggtctttcacgtgctttgtctccatccgcgacttcgggtcggctgcggtgtccctgcaggtcgctgccccgtattccaagccaagtatgacacttgaacctaacaaggacctacgacctggcgacacagttacaataacctgctag

SEQ ID NO: 111315 - DNA, 156 bp, synthetic construct
  misc_feature 1..156: note = Description of Artificial Sequence: Synthetic coding sequence
  source 1..156: mol_type = other DNA
atgcttcggcgtaggggctcccccgggatgggggtgcacgtgggggccgccctaggtgccctttggttttgcttgaccggcgcactcgaggtgcaagtaccagaggaccctgtggttgcactggtcggcactgatgctaccctgtgttgctcttag

SEQ ID NO: 111316 - DNA, 663 bp, synthetic construct
  misc_feature 1..663: note = Description of Artificial Sequence: Synthetic coding sequence
  source 1..663: mol_type = other DNA
atgttgcggctgttgcttgccctcaacctgttcccttcaattcaggtgaccggaaacaagattttagtgaaacagtccccaatgttggtcgcttatgataatgctgtgaacctgtcttgtaagtatagctacaatctgttctcacgagagtttagggcgagcctgcataagggactcgactcagctgtggaagtatgtgtagtgtacggaaactatagtcagcagttacaagtgtactcgaaaacaggctttaactgcgacggtaagctgggcaacgaatctgtgacgttctatctccagaacctgtacgttaaccagacagatatttacttttgtaagatcgaggttatgtaccccccgccctatctggataatgaaaaatccaatggcaccatcatccatgtcaagggaaagcacctctgccctagccctctttttcctggccccagcaagcctttctgggttctggtcgtagtgggcggagtgctggcttgttactccctcctagtgactgtggcattcatcatcttttgggtcaggtcaaaaaggagccgtctgctgcatagcgactatatgaatatgactccaaggcgccccgggcctaccagaaaacactaccagccttatgctcctccgcgtgactttgccgcctatcggagctag

SEQ ID NO: 111317 - DNA, 306 bp, synthetic construct
  misc_feature 1..306: note = Description of Artificial Sequence: Synthetic coding sequence
  source 1..306: mol_type = other DNA
atgctgcggctcctccttgcgctcaatttgttccctagtattcaggttaccggtaagcacctatgcccgagtcccctgttccccggaccgtctaagccattctgggtcctggtcgtggtcggtggagtgctggcctgttatagcctgttggtcactgtagcctttattattttttgggtcagatctaaaagatcccgtcttctccacagtgattatatgaacatgaccccaaggaggcccgggcctacccgcaagcactaccagccttacgccccacctagggattttgccgcttacaggtcctag

SEQ ID NO: 111318 - DNA, 411 bp, synthetic construct
  misc_feature 1..411: note = Description of Artificial Sequence: Synthetic coding sequence
  source 1..411: mol_type = other DNA
atgctgagactgcttctggccctaaatctcttccccagtatacaggtgacagggaacaaaattcttgtgaaacagtcgcctatgctcgttgcatacgataatgccgtaaacctgtcgtacaatgaaaaatccaatgggaccatcatccacgtaaagggaaagcatctttgcccttctccactgtttccaggcccctccaaaccattctgggtgctcgtggtggtcggtggggttttggcctgctacagcttgctggttacagtggcattcatcatcttctgggttaggagcaagagaagccggctgctccactcagactacatgaacatgacacctagaaggccaggcccaaccagaaaacactatcaaccgtacgccccgccccgcgattttgcagcttaccgctcttag

SEQ ID NO: 111319 - DNA, 705 bp, synthetic construct
  misc_feature 1..705: note = Description of Artificial Sequence: Synthetic coding sequence
  source 1..705: mol_type = other DNA
atgccttgtggcctgtccgcactcataatgtgtccaaagggtatggtggcagttgtggtggcagttgacgatggtgatagccaggcattagccgggaataagatactcgtgaagcaatctcctatgcttgtggcatacgataatgccgttaatctcagctgcaagtacagctacaatctgttttctagagagtttcgtgcaagcctgcacaagggcttggactcggccgtagaggtgtgcgtcgtttatgggaactatagtcaacagttacaggtttacagcaaaacagggtttaattgcgacggcaagttgggaaacgaatctgttactttttatctgcagaacctgtacgtaaaccagacggatatctacttctgcaaaatcgaagttatgtacccccccccatatttggataacgagaaatccaacggtacaatcattcatgtgaagggcaaacacctctgtcctagccctttgtttcccggaccatctaaaccgttttgggtactggtggtggtcggcggcgtgctggcctgttatagtttgctggtcactgtggcctttatcatcttttgggtcagatctaagaggagcaggcttctgcatagcgattacatgaatatgactccgcgaaggcctggacccacacggaagcactaccagccatatgctcccccccgagatttcgccgcgtatcgtagctag

SEQ ID NO: 111320 - DNA, 1920 bp, synthetic construct
  misc_feature 1..1920: note = Description of Artificial Sequence: Synthetic coding sequence
  source 1..1920: mol_type = other DNA
atggtcgactacattgtggagtatgattatgacgccgtccacgacgatgaactgacaataagagtgggcgagatcattaggaacgtaaagaagcttcaggaagagggctggctcgagggggagctgaatggccgtcggggaatgttccctgacaactttgtcaaggaaattaagcgggaaacagagttcaaggacgacagcctacctatcaaacgcgagcggcacgggaatgtggcaagcctagtccagcgtatctccacatatggtctgcccgccggcgggatccaaccgcacccgcagacaaagaacatcaagaaaaagacgaaaaaaaggcagtgtaaggtactattcgaatacattcctcaaaatgaggacgagctcgagctgaaggtgggcgacattatcgatattaatgaggaggtagaagagggttggtggagcggtacgctcaataacaaacttgggctgtttccttctaacttcgtcaaggagctggaggtcactgacgatggcgaaacccatgaagcccaggatgacagtgaaacagtgctcgccggaccaacctcgcccattccatcactgggcaatgtgagcgagactgcatcaggttctgtgacgcaacccaagaagatccgtggaattggatttggcgatattttcaaggagggtagcgtgaaacttcggacccggaccagcagtagcgagaccgaagagaagaagcctgagaagccactcattttgcagtccctcggtcccaagacccagtctgttgaaatcacaaaaacagataccgaggggaaaattaaggcgaaggagtactgccgcaccttgttcgcctatgaggggaccaacgaggacgagttaactttcaaagagggcgaaatcattcacttgatatccaaagagactggtgaagcaggctggtggaggggtgagttgaacggcaaggagggcgtttttcctgataactttgcagtgcagataaacgaactggataaggacttccccaaaccaaagaaaccgccccccccagccaaggcccccgctcctaagcccgagctgatcgctgccgagaagaagtatttcagccttaaacccgaagaaaaggacgagaaatccacactggagcagaagccttcgaagccggccgccccgcaggtgcctcctaagaaacctactcctccgactaaggcttctaatctgcttcgtagttccggcacagtgtaccccaagaggcccgaaaagccagtacctcctccgccccctattgcaaaaattaacggggaggtgtcttctatatcttccaaattcgaaaccgagcccgtttctaaattaaaactcgactcagaacagctgccgctgaggcccaaatccgttgacttcgatagcctgaccgtgagaacctcaaaagagaccgacgtggttaattttgacgacatagctagtagtgaaaatctgctccatctgactgcgaaccgacccaagatgcctggcagacgactgcccggccgatttaacggcggtcattcacctacacacagccccgaaaagatcctcaaattaccaaaggaagaggattccgcaaaccttaaaccgagtgaactcaaaaaagacacttgctacagtcccaagccatccgtgtatttgtcaaccccgtcttcagctagtaaggccaacaccaccgcctttctgacacctctggagatcaaagcaaaagttgaaactgacgacgtgaagaagaacagcctcgatgaactgcgtgctcagatcattgagctcctttgcatagtggaagctctgaaaaaggaccacggaaaagagttggagaaactgcggaaggatttggaagaggagaagactatgcggagcaatctcgagatggaaattgagaaactgaaaaaggcggtcctgagttcatag

SEQ ID NO: 111321 - DNA, 717 bp, synthetic construct
  misc_feature 1..717: note = Description of Artificial Sequence: Synthetic coding sequence
  source 1..717: mol_type = other DNA
atgtgccggaggtgtaaaccagagctcaggcagaattttcagagcgcctctggaatctgtatctgtcactggctgcagatacggagaactaggagccgcgaaggcagggcaatgtggttaccgccggcgctgctacttctgagcctgtctggctgcttttcaattcagggacccgagagcgtaagagctcccgagcagggatccctgactgtacagtgccactataagcaaggctgggaaacctacattaaatggtggtgccgcggcgtgagatgggacacctgtaagatactgatcgaaaccaggggctctgagcagggagaaaaaagcgatcgggtctccatcaaggacaatcagaaagataggacttttaccgtcactatggaaggcctgaggcgggacgatgcggatgtctattggtgtggcatcgagagaaggggcccagacctgggtacacaggttaaagttattgtggatcccgagggtgccgccagcaccaccgcttctagtcctactaactcaaatatggctgtgtttattggttctcacaagcgtaatcattacatgctgctcgtcttcgttaaagtccctattctgctgattctggtaaccgcgatcctctggctcaagggcagtcaacgcgtgccagaggagcctggcgaacagcctatctatatgaacttctccgaacctttgaccaaggacatggcaacctag

SEQ ID NO: 111322 - DNA, 606 bp, synthetic construct
  misc_feature 1..606: note = Description of Artificial Sequence: Synthetic coding sequence
  source 1..606: mol_type = other DNA
atgtggctgccccccgccctgctgctgctgtctctgtcaggatgcttttcaattcagggccctgaatccgtgcgagcaccggaacagggctctctgacagtccaatgtcactacaagcaaggatgggaaacctacattaagtggtggtgcaggggagtgaggtgggacacgtgtaaaatcttgattgaaacacgggggtctgaacaaggcgagaagagtgatagagtcagcataaaagacaaccaaaaagacaggacctttacagtgacgatggaaggcctgcgcagggacgacgcagatgtgtattggtgtgggatcgagaggagagggcccgacctgggtacccaggtcaaggtaattgttgatccagagggcgcagcttccaccacagcatcatcacctactaactccaacatggcagtattcattggaagccataaacgcaaccattacatgctgctggtctttgtgaaggtccccattctgttgatcctggtgaccgccattttgtggcttaagggctcccagagagtgccagaagaaccaggggaacagccaatctacatgaatttcagtgaacccctcaccaaggatatggccacctag

SEQ ID NO: 111323 - DNA, 735 bp, synthetic construct
  misc_feature 1..735: note = Description of Artificial Sequence: Synthetic coding sequence
  source 1..735: mol_type = other DNA
atgccccttctgacattgtacctgcttctcttttggctaagtggctattctatagtcactcagatcacgggcccaaccacagtcaatggcttagaacgcggctcactaacggtgcagtgcgtgtacaggtcgggttgggaaacctacttgaaatggtggtgccgaggagcaatatggagggattgcaagattctggttaagacctctggctctgaacaggaagtgaagagggacagggtctcaatcaaggacaatcaaaaaaatagaacctttacagttactatggaagaccttatgaaaacagacgcagatacatactggtgtggcatcgagaaaaccggtaacgacctcggtgtgactgtgcaggtgaccattgatcccgcccctgttacacaggaggagactagctcctcacctactctcacaggccatcacctagataatcgaagcgagggatcccaggctgccaattacagacctgccgcgcaccaggcacaggcacctgaggcacaatgcccacccgcccctcatctccaccatattgccgccgctttcggcggtaggctgaccctgggactggaggatgacgaagttccagccgagtccagtcgggatgtgcctagggccgggaccgcagcgcctggagggcgtcccctgctttgccggccagatccggccgctggaagaaatctgcccgcaaaaggctaccacgaggccttcctgtgtcctggttag

SEQ ID NO: 111324 - DNA, 873 bp, synthetic construct
  misc_feature 1..873: note = Description of Artificial Sequence: Synthetic coding sequence
  source 1..873: mol_type = other DNA
atgcctctgttaacgctctacctgctgctgttctggctcagtgggtactctatcgtgacccagatcaccgggcccaccacagtcaacggcctagaacggggcagtttgacagtccagtgtgtttataggtctggatgggagacttatctgaagtggtggtgtagaggcgcaatctggcgcgattgcaagattctggttaagacaagcggctctgagcaggaagtaaaaagagacagagttagtatcaaggataatcagaagaaccggaccttcaccgtgaccatggaggaccttatgaagactgacgctgatacctactggtgcggaatcgaaaagactgggaacgacctgggtgtgaccgttcaggttacaatcgaccctgcacccgtaacccaggaggagacgtcgtccagtccgactttgacaggccatcacctggataacagacacaagctcctaaagctttcagttctgctgccattaattttcacaattctcctgctgcttctggtggccgcatccctcctggcttggcgcatgatgaaatatcagcagaaagcagccggtatgagccccgagcaagtcctgcagccacttgagggcgacctgtgttacgcagacttgaccctacaactcgccggcacaagcccgcagaaagccacaacaaaactgtcttctgcccaagttgaccaggtggaggttgagtacgtgaccatggcaagtctgccgaaggaagacattagctatgcttcattgaccttgggggctgaagaccaagagcccacatactgcaacatgggccatttatcttcccatcttccaggaagaggaccagaggagcctacagagtactcaaccatctccagaccttag

SEQ ID NO: 111325 - DNA, 585 bp, synthetic construct
  misc_feature 1..585: note = Description of Artificial Sequence: Synthetic coding sequence
  source 1..585: mol_type = other DNA
atgtggctgcctcaacttgatctcatgagagttattagtgccaaaagccagggttattcaatagtgacccagattacaggacctaccactgtgaacggcctggaaagggggtcactgacagtgcaatgcgtttatagaagcgggtgggagacatatctgaagtggtggtgtcgcggtgccatctggcgggattgcaaaatcctggtgaaaacctcaggcagcgaacaggaggtcaagcgtgacagagtgtccattaaagataaccagaaaaatcgcactttcacagtgacaatggaggacctgatgaaaactgatgctgacacatattggtgcggcattgaaaagacagggaacgacctgggggtaacagtgcaagtgaccatcgatccagcccccgtaacccaagaggaaacctccagttcccccacacttactggacatcaccttgacaatagtagcagagatgtgccccgtgcgggcaccgccgcccccggtggcaggcctctgctgtgccggcctgaccctgccgccggcaggaatctcccagccaaagggtatcacgaagctttcctgtgtcctggctag

SEQ ID NO: 111326 - DNA, 720 bp, synthetic construct
  misc_feature 1..720: note = Description of Artificial Sequence: Synthetic coding sequence
  source 1..720: mol_type = other DNA
atgtggctccctcagttggacctgatgagagtgatatcggctaaaagccaggggtactctatcgtgactcagattacagggccgacaacggttaacggacttgaacggggatctctaaccgttcagtgcgtttatcggtctggatgggagacctacttaaagtggtggtgtaggggagcaatttggcgtgattgcaagattctcgtgaagacttccgggagtgagcaggaggtgaaacgggatagggtgagcatcaaagataatcaaaagaacagaacatttaccgtgaccatggaagatctcatgaagactgatgctgacacttactggtgtgggatcgaaaagactggaaatgatctcggagtgaccgttcaggtcactatcgaccccgcctccactcccgcccccactacccccacatccacaacctttacggctccagtaactcaggaggagacttcttcttcccctaccctcacgggccatcacctcgacaatagacataagcttctgaaacttagtgtcctcttgcccctgattttcaccatactgctgttgctgcttgtggctgcctccttactggcgtggcggatgatgaaataccagcagaagggaactgcggccccaggtgggaggccattgttatgtagaccggacccagccgcaggccggaacctgcctgcaaaggggtaccatgaggcatttctgtgcccaggatag

SEQ ID NO: 111327 - DNA, 699 bp, synthetic construct
  misc_feature 1..699: note = Description of Artificial Sequence: Synthetic coding sequence
  source 1..699: mol_type = other DNA
atgttacgggcggccctgcctgcgcttcttctgccactattgggattagcggccgccgctgtagccgattgtcctagttcaacctggatacagttccaagacagttgctacatcttcttgcaagaagcgatcaaagtcgagagcatagaagacgttcgcaatcagtgcacggaccatggtgccgacatgattagcattcataatgaggaggagaacgcttttatactcgataccctgaagaagcagtggaagggccctgatgatattctgctcggcatgttttatgatacagacgacgcttcgttcaagtggttcgacaactccaacatgacattcgacaagtggacggatcaagacgatgatgaagaccttgtagatacctgtgcgttcctacacatcaagaccggagaatggaagaaaggcaattgcgaagtttcaagcgttgaaggaacgctgtgcaaaacagcgattccatacaagaggaaatacctgtctgataatcatatcctgatttctgctctggtgattgcctcaacagtgatccttactgtcctcggagctattatttggttcctgtacaaaaaacattccgactcacgcttcactaccgtattttctacggctccacagtcaccttacaatgaggattgcgtgctcgtggtaggcgaggagaatgagtatccagtccagttcgactag

SEQ ID NO: 111328 - DNA, 525 bp, synthetic construct
  misc_feature 1..525: note = Description of Artificial Sequence: Synthetic coding sequence
  source 1..525: mol_type = other DNA
atgctgcgggccgctctgccggcgctgctgctgccactgcttggcttggccgccgccgctgtcgcggattgccctagcagtacctggatccagttccaggactcctgttatatttttctccaagaagccataaaggttgaatctattgaagatgtgcggaatcagtgtactgaccatggcgctgacatgatcagcatccacaatgaggaggagaatgcattcatcctggataccttaaagaaacagtggaagggccccgatgacattcttctgggaatgttttacgatactgatgtgccctacaaaagaaaatacctgtccgataatcacatcctgatctccgccctggtgattgctagcactgtaattctcacggtgctcggagccataatctggtttttatacaagaagcatagcgatagtagattcactactgtcttctccactgcaccacagtcgccctacaatgaagactgtgtgcttgtggtgggtgaggaaaacgaatacccagtgcaattcgactag

SEQ ID NO: 111329 - DNA, 849 bp, synthetic construct
  misc_feature 1..849: note = Description of Artificial Sequence: Synthetic coding sequence
  source 1..849: mol_type = other DNA
atgagcgggggctggatggcccaggtcggcgcgtggagaacaggcgccttagggttagcacttctgttactcttagggcttggcctcggtctggaagccgcagcaagccctctgtccacccccacttcagcccaagcggctggtccttctagtggttcgtgtccacctaccaagttccagtgtaggaccagcggcctttgtgtgcctctgacctggcgatgcgaccgtgacctagattgcagcgacggtagtgacgaagaagagtgcagaatcgagccttgtacacagaaaggacagtgtcctccccccccaggcttgccctgtccctgcacgggagtctcagactgtagcgggggcaccgataagaagctgcgaaactgtagtagacttgcctgtctggcgggcgaactgaggtgtaccctctctgatgattgcattccactgacttggagatgcgatggacaccctgactgccccgatagcagcgatgaacttggctgtggtaccaacgagatactgcccgagggagatgctacgacgatggggccacctgttaccctggaatctgtcacctccttaaggaacgctaccacaatggggccccctgttacgcttgagtctgtcccctcggttggaaatgcaacttcatcctctgctggcgatcagtccggtagcccgaccgcatacggagtgattgccgccgccgcagtgctctctgcatctctggtaacggccaccttgctgcttctgagctggctgcgggcccaagagagattgcgccctttaggcttgctcgtcgcaatgaaagaatcccttctgctgtctgaacagaaaacctctctgccctag

SEQ ID NO: 111330 - DNA, 606 bp, synthetic construct
  misc_feature 1..606: note = Description of Artificial Sequence: Synthetic coding sequence
  source 1..606: mol_type = other DNA
aatgaaatcctgccagaaggcgatgctacaacaatggggccccccgtgacccttgagtcagtaacctctctgaggaacgccaccacaatgggaccgccggtgactcttgagagcgttcccagcgtcgggaatgctatactgctatgcaggcgtccggtgtggaagcccaactgcctgtgggggtactgttcctgctgtggtgcacaatgcaaacccggccaccggcaccctccacccttcgtactcgcaccttcccctggtgctccaccccccactggggtaaccggagggcatgagggagtccctgctgccgtgcgcacagaggacttggcggcattgcgcacgtcaacctgccatcatagacacagcgctcttggtgtggcaggacaggaagagagcagcgacgccgatggctaccccggaacgccggccttacgggacctctctagctctgggcacgtagagccgcgcactagggcacctgctgaggtcgccctggagattgagggtccctggaccctgccaatggaaatcagaggggccagaatgggcaaccttccccaacctgaactgcgtggttggccacaggccgcacctcgcggctag

SEQ ID NO: 111331 - DNA, 723 bp, synthetic construct
  misc_feature 1..723: note = Description of Artificial Sequence: Synthetic coding sequence
  source 1..723: mol_type = other DNA
atgtcaggtgggtggatggcccaggttggcgcatggcggacaggtgcactgggccttgcacttctactgctactgggcctaggactggggttggaggctgctgctagcccgctgtcaacaccaacatctgcccaagcagcaggaattgagccttgtactcagaaaggacagtgccctcctccaccggggctgccctgtccctgcacaggagtgagcgactgctctggtggcaccgacaaaaaattgaggaactgttctagactcgcctgcttggctggcgaacttcgatgcaccctgagcgacgactgtattccactcacttggcggtgtgacggtcaccccgactgccctgattccagcgatgaactcggctgcggcaccaacgaaattttgcccgagggggatgctactactatggggcctccggtcactcttgaatctgtcacctctctaaggaatgctaccaccatgggcccacctgtgaccttagagtccgtgcctagcgtcggaaatgccacctcgtctagcgccggggatcagtcgggttcccccacagcttatggcgtaatcgccgcagccgcggtactttctgccagcttggtcaccgcgaccctattgctcctcagctggctcagggcccaggaacgtctgcgcccactcggacttttagtggccatgaaagagagcctgctgctgtccgagcaaaagacgtctcttccttag

SEQ ID NO: 111332 - DNA, 1095 bp, synthetic construct
  misc_feature 1..1095: note = Description of Artificial Sequence: Synthetic coding sequence
  source 1..1095: mol_type = other DNA
atgcctcttcttcttttactgccacttttgtgggccggagccctggccatggaccctaatttctggctccaggtacaggaatctgtgaccgtccaagaagggctgtgcgtgctcgtcccatgtacattcttccaccccattccgtattacgacaagaatagcccggtgcacggctactggtttagagagggcgccatcatttctcgcgattcccctgtggcaacaaataagctggaccaggaggtccaggaagagacccagggcaggtttagactactgggggaccctagtcgcaataactgtagtctgtctattgtggacgcccgccgacgggataacggttcatacttctttcggatggaaaggggcagtacgaagtattcttacaagagtccccaactaagtgtacacgtgacggatctgacacaccggcccaagatcctgatccctggaacactggagccaggacacagcaagaacctcacttgcagcgtctcctgggcctgcgagcaagggaccccaccaattttttcctggctcagcgctgcgcctacttccctcgggccgcgcaccacccacagctccgttctgattattactcctcgcccccaggaccacggtacaaatttgacatgccaggtcaagttcgctggagctggagtcactaccgagagaactatccagctgaacgtgacatacgtcccacaaaacccaacgacaggtatcttccccggcgacggatcagggaagcaggagacccgcgccggtgttgtgcacggcgccatcgggggcgccggtgtgaccgcgctgctggctctctgtctttgtctgattttttttattgtcaaaacccatcgacgcaaggcagccaggacggccgttggaaggaatgatacacacccgacgactggttcggcttcacctaaacatcagaagaagtcaaagctccatggcccaacagagacctcaagctgctctggtgccgctcctaccgtagagatggacgaagagctccactacgctagtttgaattttcacgggatgaatccctccaaggatacaagcactgagtatagcgaggtcaggacgcaatag

SEQ ID NO: 111333 - DNA, 933 bp, synthetic construct
  misc_feature 1..933: note = Description of Artificial Sequence: Synthetic coding sequence
  source 1..933: mol_type = other DNA
atgcctttgcttctgttgctcccgctgctgtgggcaggcgcactggctatggaccccaatttttggctgcaagtgcaggaatcagttactgtgcaggaggggctgtgcgttctggtcccctgcacgttttttcaccccatcccgtactacgacaagaattccccagttcatggatactggttccgcgaaggagctatcataagcagagacagccctgtggccactaataaattggatcaggaagttcaggaggagacccaggggagatttaggctcctcggggacccctctcggaacaactgtagtctttcaattgtggatgcccggaggcgagacaacggctcatactttttccgcatggagcgggggagcactaagtattcttacaaatcccctcagctcagtgtccacgttacagatcttacacacaggcccaagatattaattccggggactttggaacccggccactctaagaacctgacctgctctgtgtcatgggcctgcgaacagggcacacctccaatatttagttggctttcggctgctcctacttctctcggcccgaggacaacccactcatccgttctgatcatcacccctcggccacaagatcacgggactaacttaacatgtcaggtcaaatttgctggcgcaggggttacaaccgagcggacaatacaacttaacgtgacctatgtaccgcagaatcctacgactgggattttccctggtgacggtagcggcaagcaggagactcgcgctggggtggtgcatggcgccatcggcggtgccggagtcactgccctcctggccctgtgtctgtgcctaatcttctttatcgtcaaaacccataggcgtaaagcagccaggaccgctgtcggtaggaatgacacccacccaacaaccggctctgcctcaccagtgagatag

SEQ ID NO: 111334 - DNA, 714 bp, synthetic construct
  misc_feature 1..714: note = Description of Artificial Sequence: Synthetic coding sequence
  source 1..714: mol_type = other DNA
atgccactgctgctgcttctacctctgctctgggcagatctcacccatcggcctaaaatactgatccccggtaccctggaacccggacactccaaaaacctgacctgctctgtcagctgggcctgcgaacaggggacccctccaatcttttcatggctaagcgcagcacccacaagtctgggtccaaggacgactcattcttccgtcttaattattaccccccgcccccaggaccatggtactaatctcacttgtcaggtcaagttcgcgggagccggagtgaccaccgagagaactatccagttaaatgtgacatacgtgcctcagaaccccacaacaggcatctttcctggtgatggcagtgggaagcaggaaacgcgcgccggtgttgtccatggggccataggtggcgccggcgtcacagcactgctcgcgctatgtctttgtttaatcttcttcatcgtgaagactcatagacggaaggctgcccgtacagccgtagggcggaatgatacccaccccaccactggaagcgccagccccaagcaccaaaagaagtccaagctgcacggacctaccgagacttcctcctgctccggtgcggctcctactgttgaaatggatgaggagcttcattacgcaagtctaaactttcatggaatgaacccaagcaaggatacctcaacagagtatagcgaagttaggacacaatag

SEQ ID NO: 111335 - DNA, 639 bp, synthetic construct
  misc_feature 1..639: note = Description of Artificial Sequence: Synthetic coding sequence
  source 1..639: mol_type = other DNA
atgcctttgctactgcttcttcccctgctctgggccgacttaactcaccggcccaagattctgatacccgggaccctcgagccaggacattccaagaacctcacatgttccgtctcttgggcttgcgaacagggcacaccgccaatctttagttggttgtctgccgcacctacaagtctgggcccccgcactacacacagctcagtgctgatcattacacctcgaccccaggaccacgggactaatctgacatgccaggtgaagttcgccggcgcgggcgttacaactgaaagaactatccagttgaacgtgacctacgtccctcagaacccgacgaccggaatctttccgggtgacgggagcggtaaacaggagacaagagccggtgtcgtccacggagctataggcggcgcgggcgtgactgctcttctggccttatgtttgtgtttgatattcttcatcgtgaagactcatagaaggaaagcagcgcgaactgctgtcggacggaacgacacccacccaaccactggatctgccagccccgtgagtgatggcgcaagctggcaccccgtatgtcctgcagacactagttcccagtgcgggcccccaagttgcccaattcaacacttccagaactag

SEQ ID NO: 111336 - DNA, 1419 bp, synthetic construct
  misc_feature 1..1419: note = Description of Artificial Sequence: Synthetic coding sequence
  source 1..1419: mol_type = other DNA
atgggctgcgataggaactgtgggctcatcgcaggtgctgttattggggcagtactagccgttttcggaggcattctaatgcccgttggcgatcttctgattcagaagacaattaaaaaacaagtcgtgctggaggagggcactatcgcctttaaaaattgggttaagactgggaccgaggtttatagacagttttggatcttcgatgttcagaacccgcaggaagtgatgatgaactctagcaacatccaagtcaagcagcggggaccatatacttatcgggtgaggtttctggctaaagaaaacgttacgcaggatgccgaagataacaccgtcagctttttgcaaccaaacggagctatatttgagccatctttaagcgtgggaaccgaagctgacaattttacagtgctgaatcttgccgtagccgcagcttctcatatctaccagaaccagtttgttcaaatgatcctgaactcacttataaataaaagcaaatccagtatgttccaggtgcgaactctgagggagctattgtgggggtaccgagatcctttcctcagtctggtgccctatcccgtcacaaccactgtgggactattctacccatacaataacaccgctgacggcgtgtacaaagttttcaatgggaaggacaacatttccaaggtcgctataatcgatacttataaggggaagagaaatcttagttactgggaatcacattgcgacatgatcaacggcacagatgccgcctcctttccgccatttgtggagaaatcacaagtgctgcagtttttcagctccgacatatgccgctctatatatgcggtgtttgagtccgacgtgaacttgaaaggcattcctgtctaccgatttgtgctgccctctaaagcgtttgctagtcctgtcgagaaccccgataactactgtttttgcacggaaaaaattatctcaaaaaactgtacaagttatggggtcctggacatttcaaaatgtaaagagggaagaccagtctacatcagtcttccacacttcctatacgcatcacctgacgttagcgagccgatcgacgggctgaatccaaacgaagaggagcatagaacctatttggatattgagcctattaccgggttcacgctgcaattcgctaaacggctgcaggtgaatctgctggtgaaacctagcgagaaaatccaggtgctgaaaaatctgaaacgtaattacatagtgcccatcctttggcttaatgaaaccgggaccatcggagatgagaaggccaatatgttcagaagtcaggtgacagggaagataaatcttctaggcctcatagagatgattcttctctctgtgggcgtggtgatgtttgttgctttcatgataagctattgtgcctgtcgcagtaaaacgatcaagtag

SEQ ID NO: 111337 - DNA, 1419 bp, synthetic construct
  misc_feature 1..1419: note = Description of Artificial Sequence: Synthetic coding sequence
  source 1..1419: mol_type = other DNA
atgggatgcgacagaaattgcgggttgatcgcaggcgccgttattggcgccgtgctggctgtgtttggaggcattctgatgcctgttggggacctgctgatacagaaaaccatcaagaagcaggtggtcttagaagaggggaccatagcatttaagaactgggtgaaaaccggaactgaagtgtataggcagttttggatttttgacgtgcagaatccccaggaggtgatgatgaatagttccaatatccaagtcaagcagagaggcccatacacttaccgggtccggttcttagccaaagaaaacgtgacacaggacgcagaggacaatactgttagctttctgcaacccaacggcgctatctttgagccctctctgagtgtgggaacggaagccgataacttcactgtactcaatctcgctgtggctgctgcatctcacatttaccagaaccagttcgtgcagatgatcctaaacagcctgattaataagagcaaatcatctatgttccaggtgcgaacactgagggagctgttatggggatatagggatcctttcctgagcttagttccgtatcctgtcactactactgtggggctcttctacccatacaataataccgctgacggcgtttataaggtctttaacggaaaggacaatattagcaaggtggctatcatcgacacctacaaagggaaacgaaatttgtcctactgggaatcacactgtgacatgatcaatgggacggatgccgcctcttttcccccattcgtcgaaaagagtcaggtacttcagttcttctcatcagatatttgccgatcaatttacgcagtgttcgagagtgacgtgaacttgaaaggcattccagtgtaccgattcgtgctcccttcaaaggccttcgccagtcccgtggaaaacccggacaactattgcttttgcactgagaagattataagtaaaaactgcacgtcatatggagtcttagatatttccaaatgcaaggagggacggcctgtctatatcagcttgccacattttctctatgcgtctcccgacgtttccgagccgatcgacgggctgaatccaaatgaagaggagcatcgaacctacctcgacatcgaaccgatcactggatttactttgcaatttgctaaacggttgcaggtcaacctgttagtcaaaccaagtgagaagatccaggtgctaaagaatctgaaacggaattacatcgttccaatactatggcttaatgagactggcaccatcggcgacgaaaaggcaaatatgttcagatcgcaggtgacaggcaaaataaatttgctgggccttatcgaaatgattcttctgagcgtgggagttgtcatgtttgtggccttcatgatttcatattgcgcttgccgctcaaagaccatcaagtag

SEQ ID NO: 111338 - DNA, 612 bp, synthetic construct
  misc_feature 1..612: note = Description of Artificial Sequence: Synthetic coding sequence
  source 1..612: mol_type = other DNA
atgggatgtgacaggaattgtggactgattgcaggagcagtgattggggcggtcttagccgtatttgggggaatcctgatgcctgtgggggatctgctgatccaaaaaactatcaaaaagcaggtggtgttggaggaaggcactatcgcattcaagaactgggtgaagacaggcaccgaagtgtaccgtcagttttggatcttcgacgtgcagaaccctcaggaggtcatgatgaacagctctaacatccaggttaaacaacggggaccctatacgtatcgcgtgcggttcttggccaaagagaacgttacacaggacgccgaggacaacacagtttcatttctacagcctaatggcgcaatcttcgagccatcgctttccgtgggaaccgaagctgacaactttacagttttaaacctggcggttgccgccgcctcccacatttatcagaaccagttcgttcagatgatactgaattcgttgattaacaagtccaagagctcgatgtttcaggtgcgcacactccgtgaattgttatggggatatagggaccccttcctgagtctggtcccgtatccagtgactaccactgtcgggctgttctacccatag

SEQ ID NO: 111339 - DNA, 1392 bp, synthetic construct
  misc_feature 1..1392: note = Description of Artificial Sequence: Synthetic coding sequence
  source 1..1392: mol_type = other DNA
atggggtgtgaccgaaactgcggtctgattgcaggggccgtcatcggagctgttttagcagtgtttgggggaattctaatgcccgtgggtgacctgctgatccagaagacaataaagaagcaagtagtgctggaagaggggactattgcctttaagaactgggtaaagacgggcaccgaagtatacaggcaattctggatcttcgatgttcagaatcctcaggaagtcatgatgaacagctccaacatccaggtgaagcagcgcggcccctacacctaccgagtgaggttcctagccaaagagaatgtgacacaggatgccgaggacaatactgtttcgtttctgcagcctaacggagctatattcgagcccagcctatctgtcgggaccgaggccgataacttcacggtcttaaaccttgcagtggctgcagcaagtcatatctatcagaaccagtttgtacagatgattcttaatagcctgattaacaaatctaagagctcaatgttccaggtgcgtaccctaagggaactgctctggggttacagagacccattcttaagcttggtgccctaccccgtcactactactgtggggctcttctatccttacaacaataccgccgacggggtgtacaaggtgtttaatggcaaggataatataagcaaagtggctatcattgatacatacaagggtaagcgaaacttgagctactgggagtcacactgcgacatgatcaacggaactgatgctgcgtccttcccccccttcgtagagaagagccaggtcttgcaattttttagttccgatatctgtcgctccatctatgccgtgttcgaaagtgacgtgaacctcaaggggatcccagtgtaccggttcgttttaccatcaaaggcctttgcttcacctgtagagaatcctgataactactgcttttgtacggagaaaatcatcagcaagaactgcacctcctacggcgtgctggatatcagtaaatgcaaagagggccgacccgtgtacataagcctgccccatttcttgtacgctagtcccgacgtcagcgagcccatagacgggctgaatccaaacgaagaagaacataggacatacctcgatatcgagcctataactggtttcactcttcagttcgctaaacgcctccaggtgaatctcctggtgaagccctcggagaagatccaggtcctgaagaatttgaagcgaaactacatcgtacctattctgtggctaaatgagacgggaactattggcgatgagaaagccaacatgttcaggtcacaggtgaccggaaagattaacctgttaggcctgatagagatgatcctcctgtccgtgggcgtcgttatgtttgtcgcctttatgataagctattag

SEQ ID NO: 111340 - DNA, 447 bp, synthetic construct
  misc_feature 1..447: note = Description of Artificial Sequence: Synthetic coding sequence
  source 1..447: mol_type = other DNA
atgggttgcgaccgaaactgcggtttaattgccggtgcagtaataggcgctgtcttggctgtgttcggtggtatcctgatgcctgtgggggatctcctcattcagaagactattaaaaagcaggttgtgttagaggagggaaccatcgctttcaagaactgggttaaaaccggcactgaggtttaccgacagttctggatctttgacgtgcagaatcctcaggaggtgatgatgaattccagcaacatccaggtgaaacagcggggcccatacacttaccgagtccgttttttggctaaggaaaacgtgacccaggacgcggaagataacacagtttcctttctacagcctaacggggctattttcgaacccagcttatccgtcggaaccgaggccgacaacttcactgtcctaaatttggccgttgctgccgcctcccacatctag

SEQ ID NO: 111341 - DNA, 282 bp, synthetic construct
  misc_feature 1..282: note = Description of Artificial Sequence: Synthetic coding sequence
  source 1..282: mol_type = other DNA
atgggttgcgaccgtaattgcgggctgatcgcgggagcagttatcggagctgtgttggcggtttttggtgggatcctaatgccagtgggcgatctgctcatccagaagacaatcaaaaaacaagtggtgctcgaggaggggaccatcgcctttaagaattgggtgaaaactggcacagaggtttaccgacagttctggatctttgacgttcagaaccctcaggaagtcatgatgaactcatctaatatacaggtcaagcagaggggcccctatacctactag

SEQ ID NO: 111342 - DNA, 1419 bp, synthetic construct
  misc_feature 1..1419: note = Description of Artificial Sequence: Synthetic coding sequence
  source 1..1419: mol_type = other DNA
atgggatgcgaccggaactgtgggctaattgccggcgctgtgataggagctgtccttgcggtgttcgggggaattttaatgcctgtcggtgacctactgattcaaaagacaatcaaaaaacaggtcgttcttgaggaaggtactattgcttttaaaaattgggttaagaccggcacggaagtgtatagacagttttggatcttcgacgttcagaaccctcaagaggtcatgatgaacagctcaaacatacaggtcaagcagcgtggtccatacacctacagagtccgctttctggccaaggaaaacgtgacacaagacgctgaggataacacggtctcctttcttcagcccaatggagcaatttttgagccatccctgagcgtcggaaccgaggcagacaattttacggtgctgaacctggccgtggctgccgctagccatatttatcagaatcagtttgtgcagatgatcctaaattcactgattaacaagtccaagtcgagcatgttccaagtgcgaaccctccgagagctcctgtggggctacagagatcctttcctcagccttgtaccatacccggtgacaactaccgttggtctgttttacccctacaataacacagctgacggggtctacaaagtcttcaatgggaaagacaacatttccaaggttgctattattgatacttacaaaggaaagagaaatctgtcctactgggagagccactgtgatatgatcaacggaaccgatgccgcatcatttcccccatttgtcgagaaaagtcaggtgttacagtttttttcgtcagacatttgcaggtccatctacgccgtgttcgagtcggatgttaacctgaaaggaattcctgtgtataggttcgttttgccctctaaggcattcgccagcccagttgagaatcctgacaactactgcttttgtactgagaaaattatctctaaaaattgcacatcctacggcgtattagacatcagtaagtgtaaggaaggccgacccgtgtatatctccttaccgcacttcttatacgcttcccctgacgtgagcgaaccaatcgacggcctcaatccaaatgaggaagagcatagaacatacctggacattgaaccgattacaggttttaccctgcagtttgcgaagcgactccaggtcaatcttttggtgaaaccaagcgagaagatacaggtgctgaaaaatcttaaacggaactacatagtgcccattctctggctgaacgagaccgggacaataggagacgagaaggccaacatgtttcggtcccaggtgactggcaagattaacttattgggattaattgagatgattctgcttagtgttggtgtggttatgtttgttgccttcatgatcagctattgcgcctgtcgcagcaagacaataaagtag

SEQ ID NO: 111343 - DNA, 1302 bp, synthetic construct
  misc_feature 1..1302: note = Description of Artificial Sequence: Synthetic coding sequence
  source 1..1302: mol_type = other DNA
atgggatgcgataggaactgtggtttgattgctggcgctgtgataggcgcagtgctcgccgtgtttggcggcattctcatgcccgttggcgacttgctgattcagaaaaccattaagaaacaggtggtgttagaggagggcacaattgctttcaaaaactgggtgaaaaccggtaccgaagtatacaggcagttttggattttcgatgtccagaaccctcaggaggtgatgatgaattcctccaatatccaagtcaaacagcgaggtccctatacctatcgcgtgaggtttctggcaaaggagaatgtgactcaggacgccgaagacaacacggtgagtttcctccagccaaatggtgccatcttcgaaccttcccttagcgtgggcactgaggctgataattttacagtgctgaacctggcagttgccgctgcaagtcacatatatcagaaccagtttgtccagatgattctcaactccctaatcaacaaatccaaatcctctatgttccaggttcgcacactgcgcgagctcctttggggctatagagacccctttcttagcttggtgccgtatcccgtcaccacgactgtcggattgttctacccctataataatacagccgatggggtctataaagtcttcaacgggaaggataacatcagcaaggtggccatcattgatacctataaaggaaaaagatcgatctacgccgtgttcgagagcgacgtcaatcttaaaggtattccagtttacaggtttgtactcccctcgaaggcgttcgcttcaccagtcgaaaatcccgacaattattgcttctgcacagaaaaaattatcagtaagaattgcacttcatatggggttctcgatatatccaagtgtaaggaggggagaccagtctacatttccctcccccattttctctacgctagtccagatgtaagcgaacctatcgacgggttgaacccgaacgaggaggagcacaggacataccttgacatcgaaccaattaccggatttacgcttcaattcgccaagcggctgcaggtgaacctgttggtgaagccgtctgagaaaatccaggtgttaaaaaatctgaagcgcaactatattgttccaatactttggcttaatgaaactggaaccattggagacgagaaagccaacatgttcagatcacaggttaccggcaaaatcaatttactgggcttaatcgaaatgattttactcagcgtaggtgtcgtcatgttcgtagcgttcatgatttcctattgtgcatgtcggtcgaagactatcaagtag

SEQ ID NO: 111344 - DNA, 1419 bp, synthetic construct
  misc_feature 1..1419: note = Description of Artificial Sequence: Synthetic coding sequence
  source 1..1419: mol_type = other DNA
atgggatgcgatcggaattgcggtttaatcgctggcgccgtaatcggagcagttctggccgtcttcggaggcatactgatgccagtaggcgatctcctcatccagaaaacaattaaaaaacaggtagtcctggaagaaggtacgatcgctttcaagaactgggtgaagacaggcaccgaggtgtatcgacaattttggatttttgatgtacaaaatccacaagaggtcatgatgaatagttctaacattcaggtgaagcagaggggcccttacacataccgcgtgagatttctggcaaaggagaacgtgacccaagacgcagaagacaataccgtcagcttcctccagccaaatggagcaatctttgagccttctttgagtgtgggaacagaggccgataacttcaccgtgctcaacttagctgttgctgcagcaagccacatctaccagaaccagttcgttcagatgatcttgaatagcctgatcaacaaaagcaagtccagcatgttccaagtgagaacattgagagagttactgtggggatacagagacccatttctgtccctggtgccataccccgtgacgacgacagtgggactcttttacccatataataatacagccgatggcgtttacaaggtcttcaacggcaaggataacatcagtaaagtagcgattattgacacttataagggcaagagaaatttaagctattgggagtcccattgcgacatgataaatggtaccgacgcggcctcttttcctcccttcgttgagaagtcacaggtgttgcagtttttctctagtgatatatgtaggagcatttacgctgtgttcgaatctgatgttaaccttaagggcattccagtgtatcgcttcgtgttacctagtaaagcgttcgccagcccagttgagaatccagataattactgtttctgtacggagaaaatcatatccaagaactgcacttcatatggggtcctggatatttctaagtgtaaagagggccgaccagtgtacatcagcctcccacacttcttatatgcctctccggacgtgtcagagcctatcgacggactcaacccaaacgaagaggagcaccggacttatctggatatcgagcccattacaggctttactctgcagttcgccaaaaggctgcaggtgaatctcctcgtaaaacccagcgagaaaatccaggtgctgaaaaatctgaagagaaactatatcgttcctattctgtggctgaatgaaacaggaacaatcggggatgaaaaggccaatatgttcagatcccaggtgacagggaagattaatctcctcggactcatcgagatgattctgctgagcgttggggtggtcatgtttgtggccttcatgataagttactgtgcctgccggagcaagactatcaagtag

SEQ ID NO: 111345 - DNA, 282 bp, synthetic construct
  misc_feature 1..282: note = Description of Artificial Sequence: Synthetic coding sequence
  source 1..282: mol_type = other DNA
atggggtgtgaccgcaactgtggactgatcgctggggctgtgatcggagccgtgcttgccgtgttcggcggcattctcatgcccgtgggtgacctgcttattcagaaaacgattaagaagcaggttgtcctcgaggagggaacgatcgccttcaagaactgggtgaagactggcacagaggtttaccgacagttctggatcttcgatgtccagaatccccaggaagtgatgatgaattcttccaatattcaggtaaaacagcgaggcccatatacttattag

SEQ ID NO: 111346 - DNA, 432 bp, synthetic construct
  misc_feature 1..432: note = Description of Artificial Sequence: Synthetic coding sequence
  source 1..432: mol_type = other DNA
atgggttgtgaccggaactgcggactcatcgctggggctgtgattggagccgttctggcagtgtttggaggcattctcatgcctgttggagatctgctcattcagaagaccattaagaaacaggtggtactcgaggaagggacaattgcttttaaaaactgggtgaaaactggcacagaagtgtatagacaattctggatcttcgatgtccagaatccccaagaggttatgatgaattctagcaatattcaggttaaacagcgcggtccctatacgtatcgggttagattcctggctaaagagaacgtgacacaggatgcagaggacaatactgtgtcatttttgcaaccgaacggagctattttcgaaccgagtctgagtgtgggtacggaggcagacaattttaccgtgcttaatcttgctgtagcctag

SEQ ID NO: 111347 - DNA, 1419 bp, synthetic construct
  misc_feature 1..1419: note = Description of Artificial Sequence: Synthetic coding sequence
  source 1..1419: mol_type = other DNA
atgggatgtgaccgtaactgcggcctcatcgcaggcgcagtgattggagccgtgctcgcagtgttcggtgggattctgatgcctgtgggagatctattgatccaaaaaacaataaagaaacaggtcgtactcgaggaaggaactatcgcctttaagaactgggttaaaaccggcaccgaggtatatagacaattttggatcttcgacgttcagaatcctcaagaagtcatgatgaattcatccaatatacaggtcaaacagagaggaccatatacatatcgggttagattcctggcaaaggaaaatgtcactcaggatgccgaggacaatactgtatcatttctgcagcccaatggggctattttcgagcccagcctctccgtgggaacagaagccgataattttactgtgcttaacctggccgttgccgctgctagccacatctatcagaaccagtttgtccagatgatcctcaattccctgatcaataagtctaagtccagcatgttccaggttcgcactttgcgggaattgctgtggggctacagggatcctttcctgtcattggtgccatacccagtgacgactacagttggcctattctacccatacaataataccgcagatggcgtttataaagtcttcaacggaaaagataatatctccaaagtggccataatcgatacttacaagggtaagcggaacctgtcctactgggagtctcactgtgacatgattaatgggacggacgccgcttcattcccaccattcgttgagaaatcccaggtgctacagttctttagttcggatatatgtagaagtatttacgccgtgtttgagtccgatgtcaacctgaaaggaattcccgtttaccgcttcgtactgccttccaaggcttttgcaagtccggtcgagaaccccgataattattgtttttgtactgagaagattatctcaaagaactgcactagttacggtgttctcgacatttctaagtgtaaggagggacggcccgtgtatataagccttcctcactttctttatgcctctccagatgtcagcgaacccattgatggattgaacccaaacgaggaggaacaccgcacatacctggacattgagcccatcacaggcttcaccctgcagttcgctaaacgtctccaggttaatctcctcgttaaaccttccgagaaaatccaagtgttgaaaaaccttaagcgcaattacattgtccccatactttggctgaatgagactggaacaataggggacgaaaaggccaatatgttcaggtctcaggtgacaggcaagattaacctcctgggcctcatcgagatgatcctactctctgtgggtgtggtgatgtttgtggcctttatgatatcttattgtgcatgccggagtaaaactattaaatag

SEQ ID NO: 111348 - DNA, 198 bp, synthetic construct
  misc_feature 1..198: note = Description of Artificial Sequence: Synthetic coding sequence
  source 1..198: mol_type = other DNA
atggggtgcgaccggaattgcggcctcattgccggcgccgtgatcggcgcggttcttgcggttttcggcgggattctgatgcctgtgggcgacctgcttatccagaaaaccatcaagaagcaggtcgtgcttgaggaagggaccatcgcttttaaaaactgggtgaaaactgggacagaggtgtaccgccagttttag

SEQ ID NO: 111349 - DNA, 1191 bp, synthetic construct
  misc_feature 1..1191: note = Description of Artificial Sequence: Synthetic coding sequence
  source 1..1191: mol_type = other DNA
atgatgaattcttcaaatattcaagtgaagcagcgagggccctatacttatagagtgcggttccttgccaaggagaacgtgactcaagacgcagaggataacacagtgtctttcctacaacccaatggggctatattcgaacctagcttgtctgtcggcactgaggccgacaacttcacagttctaaatctagcggtagccgccgcgtctcacatataccagaatcagtttgtgcagatgatacttaatagtctgatcaataagtcaaaatcttcaatgttccaggtgaggactttgagggaactgctgtggggttaccgtgatccttttctgagccttgtgccttacccagtgacgacaaccgttgggctcttttacccttacaacaatactgctgatggcgtttataaggtatttaacgggaaagacaatatttcaaaagtggctataattgacacctacaagggaaaacgcaatctaagctactgggagtcccactgcgatatgatcaatggcacggacgccgccagcttccctcctttcgtggaaaaatcccaagtgttacagtttttctccagcgacatttgtcgtagtatctacgctgtatttgagtccgatgttaaccttaaaggcatcccagtgtacaggttcgtattgccttctaaagcatttgcatcaccggttgagaacccagacaattactgcttctgtacggagaagatcatttccaaaaactgcacctcttatggtgtgctcgacatttccaagtgcaaggaaggacgccctgtctacatttcgctgccacatttcttgtacgcttcacctgatgtgtctgagcctattgacgggttgaatcccaatgaggaagaacatagaacttatctcgatattgaacccataacggggtttaccctgcagtttgcaaaacggttacaggtcaaccttctggtaaagccttctgaaaagatccaggtgctgaaaaatctaaagaggaattacattgtccctatcttgtggctcaacgagaccggcaccatcggagacgagaaagctaatatgtttaggagccaggtgactggaaagattaacctgttgggcctgatcgagatgattctactatctgttggagtggttatgtttgttgctttcatgatctcttactgcgcctgcagaagtaagactatcaaatag

SEQ ID NO: 111350 - DNA, 1239 bp, synthetic construct
  misc_feature 1..1239: note = Description of Artificial Sequence: Synthetic coding sequence
  source 1..1239: mol_type = other DNA
atgggatgcgatcggaattgtggccttattgcgggcgctgtcatcggggcagttctggctgtctttggcggcattcttatgcctgttggtgatttgctgatccagaagacaatcaagaagcaggtggttcttgaggaggggacaattgctttcaaaaattgggttaagaccggtacagaggtgtaccggcaattttggatcttcgacgtccaaaatccgcaagaggtgatgatgaatagcagtaatattcaagtaaagcagcgtggcccctacacataccgcgtgcggttcttggccaaggagaacgtgacacaggacgcggaggataacacggtgtcctttctgcaacccaatggcgccatattcgaaccgtccctaagcgtcggcacagaggctgacaatttcactgtattgaatctcgccgtggcatataacaacactgctgacggggtttataaagttttcaatggaaaagacaatatctctaaggtggccatcatagatacttataaaggcaagcggaatctgtcctactgggagagccactgcgatatgattaacggtacagacgcagcgtcatttcctcctttcgtagagaaaagccaggtgttgcaattctttagcagcgacatttgtcgttctatatatgccgtgtttgagtctgatgtgaatctgaaagggattcctgtgtatagattcgtgctgccaagcaaggcctttgcgtcccctgtggagaatcccgataactattgtttctgcactgagaaaataatctccaaaaactgcaccagttacggcgtgctggatattagtaaatgcaaagaggggagacctgtttacatcagcttaccacacttcctttacgcctcacccgacgtttcagaaccaatcgacggccttaacccgaacgaggaggagcatagaacatacctggacattgagcctatcactggattcacgttacaatttgcaaaacgtctccaggtcaacctgctcgtgaagccttcggagaaaattcaggtgctcaagaatctgaagaggaattacatagtgcctattctgtggctcaatgaaactggaacaatcggggatgagaaggccaacatgttcagatcccaggtgacgggtaaaataaatctgctaggactcatagaaatgatcctcttatcagtgggcgtcgtgatgtttgtcgctttcatgatctcttactgtgcctgtcgaagcaagacaatcaagtag

SEQ ID NO: 111351 - DNA, 867 bp, synthetic construct
  misc_feature 1..867: note = Description of Artificial Sequence: Synthetic coding sequence
  source 1..867: mol_type = other DNA
atgggatgcgaccgcaactgcggcctcatagccggtgctgtcatcggtgctgtgctcgcagtttttggcgggatcctgatgccagtgggtgatctgctgatccagaaaaccattaaaaagcaagttgtgctggaggagggtacaattgcctttaaaaactgggttaagactggaacggaggtttaccgccaattttggattttcgacgtgcagaatccccaggaggtaatgatgaactcttccaatatccaggtaaaacagcgcggcccctacacctaccgggtaagatttctggccaaggaaaacgtcacacaggatgccgaggacaacaccgtctcctttctccagccgaatggagctatattcgagcccagtttgtcagtaggcacggaggcagacaatttcacagtactgaatttagctgtcgccgcggcttcacatatataccagaatcagtttgtgcagatgatactgaatagcctgataaacaagtcaaagtccagcatgtttcaggtccggaccctacgtgaactactgtggggatatagagacccctttctttcactggtgccctatcctgttacaacgacggtggggcttttctacccctacaacaacaccgccgacggggtgtataaggttttcaatgggaaagacaacattagtaaagtggccattatcgatacatataaaggcaaaagaaacctcagttattgggagagtcactgcgacatgatcaatggcacggacgcggctagctttccaccattcgtcgagaagagtcaggtcctccagttcttctcaagtgacatttgccgcgaaacctgtgtccacttcacctctagcttttccgtgtgtaagagctag

SEQ ID NO: 111352 - DNA, 846 bp, synthetic construct
  misc_feature 1..846: note = Description of Artificial Sequence: Synthetic coding sequence
  source 1..846: mol_type = other DNA
atgagcgctcaagaatcctgcttatctctcataaagtatttcctgttcgttttcaatctgttctttttcgtgctggggtccctgatattttgttttggtatctggattcttatagataagactagcttcgtgagctttgttggcctcgctttcgtccccctgcagatctggagtaaggtgcttgctatcagcggcatctttacaatgggcatcgctctcctcggatgcgtcggagccctcaaggagctgaggtgtttactgggactctacttcggtatgctgctcttgttgttcgctacacagatcaccttggggatactgatcagtactcaaagggcccaattggagcgcagcttgagggacgttgtagaaaaaacaatccaaaagtatggtaccaaccccgaagagaccgcagccgaggaatcttgggattatgtgcagttccagctccgatgttgtggatggcactacccgcaggattggtttcaagttctgattctgcgcggaaatgggagcgaagcccaccgagtcccttgctcctgttataacctaagcgctacaaacgacagcacaatcttagataaggtgatactcccacagctcagccggcttggccatctagcaaggtctagacacagcgcagatatctgcgctgttccagccgagtcacacatttatcgcgagggctgcgcccagggccttcagaaatggctgcataacaacctcatctccattgtgggtatctgcctgggggtcgggctacttgagctcggctttatgacactcagcatctttctgtgtagaaatctggaccacgtttacaatcgactagcaaggtatagatag

SEQ ID NO: 111353 - DNA, 471 bp, synthetic construct
  misc_feature 1..471: note = Description of Artificial Sequence: Synthetic coding sequence
  source 1..471: mol_type = other DNA
atgagcgcgcaggaatcttgtttgagcctcatcaaatactttctgttcgttttcaacctgttctttttcgtgctggggagtctgatcttttgcttcggcatttggatcctgatagacaaaacaagctttgtatcttttgtcggactagccttcgtgccgctccagatctggagcaaagtgcttgccatctccggcatctttacaatggggatagcactactcggctgtgttggagccctcaaggagctgaggtgtttgctgggcctgtacttcggtatgctgcttcttttgtttgcgacccaaattaccctcggaattctgatctcaacccagcgcgcacagaaagatactcccacgtggaccaaaggcgacagacataagcaactgcagagagagacccatgggaagaaacgcgaacaggaaaaggaaatcgacgcactgaaggaggagacggagacttacgaaccctag

SEQ ID NO: 111354 - DNA, 642 bp, synthetic construct
  misc_feature 1..642: note = Description of Artificial Sequence: Synthetic coding sequence
  source 1..642: mol_type = other DNA
atggggattgcgctgctgggatgcgttggcgctctcaaggagctgcgatgcttactgggcctgtactttggtatgctcttgttgctgttcgccacacagattacgcttgggattctgatttccacacagcgtgcccagctggaacggtcccttagggacgttgtggaaaaaactattcaaaagtacggaacaaatcctgaggaaacagctgctgaggaaagctgggactacgtgcagtttcaactccgttgctgtggatggcattaccctcaggactggtttcaggttctgattctgcgaggcaacggctccgaggcccacagggttccctgtagctgctacaatctgtcggctaccaacgactcaactatactggacaaagtgatactgcctcaacttagtagacttgggcatttggcacgtagcagacattctgctgatatctgcgcggttcccgccgagtcgcatatctatagagaagggtgcgcacagggtctgcaaaaatggctgcacaataatttaatcagcatcgtaggaatctgtctaggcgtcgggctactggaactcggtttcatgaccctctccattttcctgtgtcgaaatttggaccacgtgtacaatagactggcccgatacagatag

SEQ ID NO: 111355 - DNA, 813 bp, synthetic construct
  misc_feature 1..813: note = Description of Artificial Sequence: Synthetic coding sequence
  source 1..813: mol_type = other DNA
atgtccgcccaggaatcatgtctgagcctaatcaagtattttctcttcgtatttaaccttttcttcttcgtactggggagcttgattttttgttttggcatatggatattgatagacaagaccagttttgtttcatttgttggactcgctttcgttccgctacaaatctggtctaaggtgttggccattagtgggatctttacaatgggtatcgcactgttgggttgcgtgggagccctcaaggaactgaggtgtttgctgggtctgtacttcgggatgcttttgttgttgttcgctactcagattactctgggcatacttatttcaacgcaaagggcccaactcgaaaggtctctgcgagacgtcgtggaaaaaacgatacagaagtacgggacgaaccctgaggagaccgccgctgaagagtcatgggactacgtgcagttccaactccggtgctgtggctggcattacccccaggactggttccaggttctgatactccgcggcaacggtagcgaagcacatagggtgccctgcagttgttacaatctcagtgcgacaaacgactccaccatcctggacaaggttattctcccacagttgtctcggctcgggcacctggcacgctcgaggcactccgccgatatctgtgcagtccccgctgagtcccatatttatagggagggctgtgcccagggactccaaaagtggctgcataataacctcatctccatagtcgggatttgtctcggcgtgggactgctggaggtgatatggccacggccccacccacggtcagccctgaacccctag

SEQ ID NO: 111356 - DNA, 1095 bp, synthetic construct
  misc_feature 1..1095: note = Description of Artificial Sequence: Synthetic coding sequence
  source 1..1095: mol_type = other DNA
atgcctcattcttacccagctctgagcgcagagcagaagaaggaactctcagatattgcactccgaatagtggcaccagggaaggggattcttgccgcggatgaaagtgtcggctccatggccaagcggttatcccagataggggtggagaacaccgaggagaatagaagactctatagacaggttctctttagcgcggacgaccgtgtgaagaagtgtatcggcggcgtgatattcttccacgaaactttatatcagaaagatgacaacggggtccctttcgttagaacaatccaggataaggggattgttgtgggcattaaggttgacaagggtgtggtgccactggctggcacagacggcgagactacaacgcagggtttagatggattaagtgaaaggtgtgcccagtataagaaggacggggctgacttcgccaagtggagatgcgtgctcaaaatctcagaacggactccctccgcgctcgcgatcctcgagaatgccaacgtcctggcgcgttacgcctctatctgccaacaaaatggtatcgttccgatcgtagaaccagaaatattgcccgacggtgaccatgatctcaagaggtgccagtatgtaactgaaaaagtgctggcggccgtgtataaagccctctcagaccaccacgtctaccttgagggaactttactgaagcctaacatggttactcctggccacgcttgtcccatcaagtacacgccagaggagatcgctatggctaccgtgacagctctcagacggaccgttcccccagcggtcccaggagtgacattcctttccggcgggcagagcgaggaagaagcatccttcaacctgaatgccatcaacaggtgtcccctgccccgcccttgggcacttaccttcagctacgggcgggcactgcaggccagcgccctgaacgcctggcgtggccaaagagataatgctggcgcagcgaccgaggagttcatcaagcgggctgaagtcaacggccttgctgcacaggggaagtatgaaggatccggcgaagatggtggtgcggccgcgcaatccctgtacatcgccaatcacgcctattag

SEQ ID NO: 111357 - DNA, 483 bp, synthetic construct
  misc_feature 1..483: note = Description of Artificial Sequence: Synthetic coding sequence
  source 1..483: mol_type = other DNA
atggcaaattgcgaattttcacccgtcagtggcgataagccttgctgccggctaagtcggagggcacagctgtgtctcggggtgtcaatcctagtgctgattctggtggttgttttggctgtagtcgtgccaagatggaggcagcagtggtcaggcccagggactaccaagagattccccgagaccgttctcgctcggtgcgttaaatacaccgaaattcatccagaaatgcgccatgtcgactgtcagagcgtctgggatgcattcaagggggcctttatctccaagcacccctgcaatattactgaggaggactaccagcccctgatgaaattgggcactcaaaccgtgccctgtaacaagaacgaaaccattaacttggcccagaccggcgagaggaccgctgctactacactgttccagtattccggcaagcgatttcccgctggtctgcagaaactccctgtgatgtggtccatgtag

SEQ ID NO: 111358 - DNA, 624 bp, synthetic construct
  misc_feature 1..624: note = Description of Artificial Sequence: Synthetic coding sequence
  source 1..624: mol_type = other DNA
atgcagtcagggacgcactggcgtgttctgggcctttgtctactttctgtcggagtgtgggggcaagatgggaatgaggaaatgggcggaatcacacaaaccccgtataaagtgtctatcagcgggactactgtgatcctgacatgtccccagtatcccggatcagagattctgtggcagcataacgataagaacataggtggagacgaagatgacaaaaatatcggttccgacgaggaccatctgtcccttaaggagtttagtgaactggagcaatctggctactacgtatgttaccctcgaggttccaaacccgaagatgctaacttttatttgtacctgcgggcccgcgtctgcgaaaactgtatggaaatggatgtgatgtcagtcgccaccatcgtgatagtcgacatttgcatcaccgggggcctcttgctacttgtttactattggtcgaaaaacaggaaagccaaggcaaagcctgttacgcgcggcgcaggagccggcgggcgacaacgcggtcaaaacaaggagcgcccacctcccgtgcccaaccccgactatgagccaatccggaaggggcagagggacctttatagtggcttgaatcaacgccgaatttag

SEQ ID NO: 111359 - DNA, 606 bp, synthetic construct
  misc_feature 1..606: note = Description of Artificial Sequence: Synthetic coding sequence
  source 1..606: mol_type = other DNA
atgcagagtggtactcattggagagtgttgggcctttgcctcctgtcggttggggtgtggggtcaggacgggaatgaagaaatggcctacaaggtgagtattagtggtaccaccgtcattcttacttgtccccagtatccggggtctgaaatcctgtggcagcacaatgacaaaaacattggcggtgatgaagacgataagaatatcggctcggatgaagaccacctctctcttaaagagttttcggagttagaacagtccggctattatgtgtgctatcccagagggtccaagcccgaggatgccaatttctacctgtacctccgcgcccgggtttgtgagaattgcatggagatggacgttatgagcgttgcaaccatcgtaatcgtggacatctgtatcacgggaggcctgctgttgctcgtctactactggagcaagaatcgaaaagccaaggccaagcccgtgacccgcggcgcgggggctgggggtaggcagagaggtcaaaacaaagaaaggcctcctccagtgccaaatcctgattacgaacccatcaggaaaggccagcgcgatctttactccggtctgaaccagcgacggatttag

SEQ ID NO: 111360 - DNA, 237 bp, synthetic construct
  misc_feature 1..237: note = Description of Artificial Sequence: Synthetic coding sequence
  source 1..237: mol_type = other DNA
atgatcggttttcttacagaggataagaagaagtggaacttggggagtaacgcaaaagatccccgtgggatgtaccaatgcaagggcagtcagaataaatctaagccccttcaagtctactataggacctctgacaaacaaacactgctgcccaatgatcagctctatcagcccctaaaggaccgggaggatgatcaatactctcacctgcagggcaaccagctcaggaggaattag

SEQ ID NO: 111361 - DNA, 549 bp, synthetic construct
  misc_feature 1..549: note = Description of Artificial Sequence: Synthetic coding sequence
  source 1..549: mol_type = other DNA
atggagcagggaaagggacttgctgtgctgattctggcaatcatcctgctccaaggaaccttggctcagagcattaaaggaaaccacttagtgaaggtgtatgactatcaagaggacgggtccgtcctattgacgtgtgatgccgaggcaaagaacataacatggtttaaggacggtaaaatgattgggttccttacagaagacaaaaaaaaatggaatcttggtagtaacgcaaaagatcctaggggtatgtaccagtgcaaaggctcacagaataaatctaagcccctgcaagtgtattatcgaatgtgccagaactgtatcgaattgaatgctgcgacaattagtgggtttctctttgctgagatcgtctccattttcgtgctcgccgtcggtgtgtattttattgcaggacaggacggggtgagacagtctagggccagcgacaaacagacactattgcctaatgatcaactttatcagcccttgaaagatcgcgaagacgatcagtattcacatttgcaggggaatcaactcagacgcaattag

SEQ ID NO: 111362 - DNA, 1200 bp, synthetic construct
  misc_feature 1..1200: note = Description of Artificial Sequence: Synthetic coding sequence
  source 1..1200: mol_type = other DNA
atggaaccacccggtcgtagagagtgcccattcccaagctggaggttcccaggactgttactcgctgccatggtcctgctcctgtacagcttcagcgacgcctgcgaggaacctcccacttttgaggcgatggagctcatcggcaagcccaaaccatattatgagattggcgaacgagtcgactataagtgtaaaaaaggatacttctacattcctccactggccacacacacaatttgcgaccggaaccatacctggctgccagtgtctgatgacgcctgctaccgcgagacctgcccttacattcgagacccactcaatgggcaggctgtccccgctaatgggacctatgagtttggttaccagatgcacttcatctgtaacgaggggtactatctcataggcgaagaaatcctttattgcgagctgaaaggctccgttgcaatttggtctggtaagccaccaatttgtgaaaaggttttatgcacgcctccgcccaaaataaaaaatgggaagcatacattctcagaagttgaggtcttcgagtatttggacgctgtgacgtattcatgtgaccctgcacccgggccagacccatttagcctgattggagagagtacaatctactgcggcgacaacagcgtgtggagtagagccgctccggagtgcaaagtcgtgaaatgtagattccccgtagtggagaatggcaaacaaatcagcgggttcggtaaaaagttttactataaagcaactgttatgtttgagtgtgacaaagggttttatctggacggcagtgacactatcgtgtgtgacagtaattctacatgggaccccccggtacctaagtgccttaaagtcctccccccctcatctaccaagccccccgccctaagtcactccgtctcaacatcctcaaccaccaaatcacctgccagtagcgcatctggccctagaccgacttacaagccgccagttagcaattaccctggataccctaagcctgaggagggaattttagactccctcgatgtatgggtgattgctgtgatcgttatcgcgatcgtagtgggtgtggccgttatctgcgtggtgccgtaccgctacctacagagacgaaagaagaagggcaaggcggatggaggggcggaatacgccacttaccagacaaagtcgacaactcccgccgaacaacgcggttag

SEQ ID NO: 111363 - DNA, 1050 bp, synthetic construct
  misc_feature 1..1050: note = Description of Artificial Sequence: Synthetic coding sequence
  source 1..1050: mol_type = other DNA
atggagccccccggacggagagagtgtccattccctagctggcgattcccaggcctcctccttgcagcgatggtgctgttgctgtactccttttccgatgcatgcgaagagcccccaacatttgaggcgatggaattgatcgggaagcccaaaccatactacgaaatcggagaaagagtggattacaagtgtaaaaaggggtatttctatatcccccctctcgcgacccacaccatttgtgaccgtaaccatacttggcttcccgtaagcgatgacgcatgttaccgcgagacctgcccctacatccgcgaccccctcaacgggcaagcggtcccagctaacggcacgtatgaatttggataccaaatgcatttcatttgtaatgagggctactacctaatcggggaagagatactctactgcgaactgaaggggagcgtagcaatttggtcagggaaaccgcccatatgtgagaaagtgttatgcactccgcctcccaaaatcaagaacggcaagcatactttctccgaggtcgaggtttttgagtacctcgatgccgtgacatacagttgcgaccccgctccgggccctgaccccttctctctgatcggggagagcaccatttattgtggcgacaattccgtctggtcccgggccgctcccgagtgtaaggttgtcaaatgccggttcccggtagtagagaatggaaagcaaatcagtggtttcgggaagaaattttactacaaggccaccgtcatgttcgagtgtgacaaaggcttttatctggatggatctgatacaatagtatgcgactcaaactctacgtgggatccaccagtgcctaagtgtttgaaggggcctagaccaacatataagcctcctgtgtctaactatcctggatatcccaagcccgaggaggggatcctggactccctagacgtgtgggtgatcgctgtgattgtcatcgctatcggcaaacaaatggtggagcttaacatgcccttgacacgcttaaaccagcccttgcagcaaagcagagaagcagaatag

SEQ ID NO: 111364 - DNA, 1155 bp, synthetic construct
  misc_feature 1..1155: note = Description of Artificial Sequence: Synthetic coding sequence
  source 1..1155: mol_type = other DNA
atggagcccccaggccgacgcgaatgcccatttcccagctggagatttcccggcttactcctcgccgctatggtgctactgctatattcattttcggacgcgtgcgaagaacccccaacattcgaggcgatggaattgatcggcaagccaaagccttactatgagattggggagcgggtcgattacaagtgcaagaagggatacttttacatcccccccctggccacacataccatttgcgatcggaaccacacctggttgcctgtgagtgatgatgcttgttatagagagacttgcccttatattcgcgatccccttaacggacaggccgttcccgcaaacggcacctatgaattcggttaccagatgcacttcatctgtaacgaaggttattacctaattggagaggaaatcctgtattgcgaactgaagggcagcgtggccatttggtccggtaagccaccgatctgtgaaaaggtgctgtgcacaccacctcctaaaataaaaaatggaaagcacacattcagcgaggtggaggtttttgagtatttagatgcagttacatactcctgtgacccagcaccgggccctgaccctttcagtttgatcggagagtcgaccatctactgcggcgacaattcggtttggagtcgtgccgcccctgaatgcaaggttgttaagtgtcgattcccagtggttgagaacgggaagcagatctcagggtttggaaagaaattctactataaagccacggtcatgtttgagtgcgacaagggattctacctcgacgggtctgataccatcgtctgtgacagcaattctacctgggacccccctgtgcctaagtgtttgaaggtctctacatcttcaaccaccaagtcgcccgcctctagtgcctctggccctcgaccaacatacaaacctcccgtgagtaattacccaggttaccccaaacccgaggagggaatccttgatagtcttgatgtatgggtcatcgccgtcattgtgattgctatcgtggtgggcgtggccgtgatttgcgttgtcccgtacaggtacctgcagcgtcgaaagaagaaagggaaagccgatggcggcgctgagtatgctacctaccaaacaaagtccacgactccggccgaacagcgaggttag

SEQ ID NO: 111365 - DNA, 1110 bp, synthetic construct
  misc_feature 1..1110: note = Description of Artificial Sequence: Synthetic coding sequence
  source 1..1110: mol_type = other DNA
atggagcctccaggaaggagagaatgtcctttcccttcttggcgctttccgggcttgctgttggccgcaatggttctgctcttgtattctttttctgacgcttgcgaggaaccaccaacgttcgaagccatggagcttattgggaaacccaagccatattatgagatcggcgaacgtgtagactacaagtgcaaaaaggggtacttttacatcccaccgctcgctactcacacaatctgtgatcgcaaccacacttggctgcctgtcagcgacgatgcttgttacagggagacatgcccatatattagagatccactgaatggtcaagccgttccagcaaacggtacttatgagttcggatatcaaatgcatttcatctgtaacgaggggtactacctcatcggcgaggagattctctactgcgagcttaagggctctgtggcaatatggtcaggcaaacctcccatttgcgagaaggtactgtgtactccaccacctaagattaagaatggcaaacacaccttttccgaggtcgaggtgtttgaatacctggatgccgtcacctactcctgcgatcccgcaccaggcccagaccccttttctctgatcggagagtcaactatctattgtggcgataactctgtttggtcccgtgccgcgccggagtgtaaggttgttaagtgtagatttcctgtcgtcgaaaatggcaagcagatcagcggctttggaaaaaagttctattataaagcgaccgttatgtttgagtgcgataaaggcttctacttagacggcagcgacaccatcgtgtgcgactcaaactctacctgggatccgcccgtacccaaatgtctgaaaggcccccgccccacctacaagccccctgtgtccaattatcctggctaccccaagccagaggaaggaatactcgacagccttgatgtatgggtaatcgctgttatcgttattgccatcgtcgtaggcgtggctgttatctgcgtcgtgccttatagatatctgcaaagacgtaaaaagaagggcaaagcggatggcggtgccgaatacgcgacatatcagacaaagtccactacacccgccgaacaacggggatag

SEQ ID NO: 111366 - DNA, 1179 bp, synthetic construct
  misc_feature 1..1179: note = Description of Artificial Sequence: Synthetic coding sequence
  source 1..1179: mol_type = other DNA
atggagccgcccggacggcgagaatgcccctttcccagctggcggttccctggtttactgctggccgctatggtactcttgctatacagtttcagcgacgcatgtgaggagcccccaactttcgaggccatggaacttatcggcaagccaaagccctactatgagataggggagcgggtagactacaagtgcaaaaagggctacttttatattcccccattagccacgcatacaatctgcgatcgtaaccacacttggttacccgtgagtgacgatgcctgttaccgtgaaacatgcccctacattagagaccccctgaacgggcaagccgttcccgccaacggcacatacgaattcgggtaccagatgcacttcatctgcaatgaaggttattacttgataggcgaggaaatcctgtattgtgagctcaaaggctcggttgccatttggtctgggaagcccccaatctgtgagaaagtgctgtgtacccctccccccaagattaagaatggcaaacacacctttagcgaggtggaagttttcgaatacctggacgccgttacatactcctgtgatcctgccccaggaccagaccccttttctctgattggagaaagcaccatctattgcggcgataatagcgtgtggtcaagagccgctcccgaatgtaaagtggtaaaatgtcgctttccagtggtcgaaaacggaaaacaaatatcgggctttggcaaaaagttctactataaagctaccgtgatgttcgagtgtgacaaaggtttttatctcgatgggtctgacacaatcgtctgtgatagcaactccacttgggatccaccagtgcccaagtgcctgaaggttctgcccccgtcatcaacaaaaccccctgctctatctcatagcgtcagcacctctagcaccactaaatctccggctagctcggcatcagggccgaggccaacatacaagcccccagtgtcaaactaccccggatatcctaaacccgaagaaggtatactggacagcctggatgtgtgggtgatcgctgttattgtgatcgctatcgtagtgggggtagcagtgatctgtgtggtcccctataggtatctacagcgccgtaaaaaaaaggggacctatctcacagatgagactcatcgcgaggtcaagttcacaagcctgtag

SEQ ID NO: 111367 - DNA, 1068 bp, synthetic construct
  misc_feature 1..1068: note = Description of Artificial Sequence: Synthetic coding sequence
  source 1..1068: mol_type = other DNA
atggaacctcctgggcgccgtgaatgtccattcccatcctggcgctttcccggcctccttctggccgccatggtgttactgctgtactctttcagcgacgcctgcgaagaacctcctacctttgaagcaatggaacttattggaaagcccaaaccgtattacgagatcggtgagagagtcgattataagtgcaagaagggttatttttacatcccccctctggcaacccacaccatctgtgatcgtaaccacacctggttacccgtgtcagacgatgcctgttatagggaaacgtgcccatatattcgggatccactcaatggacaagctgttcctgccaatggaacctatgagttcggctaccagatgcactttatctgcaatgaaggctactatctgataggtgaagaaatcttgtattgcgagcttaagggcagcgtcgcaatttggtccggcaagcctcctatctgtgagaaagtgctgtgcacaccaccccccaagataaaaaacggcaagcacaccttttctgaggtggaggtgttcgagtacctagatgccgttacttacagctgtgatccagcacccggtccagatcccttctcactcatcggagagtccaccatttattgtggagataacagcgtgtggagtcgggctgcacctgaatgtaaggtggtgaaatgcaggtttccagtcgtagagaatggcaagcagatatctggatttggaaaaaagttttattataaagcaaccgtaatgttcgaatgcgacaaaggtttttatctcgatggcagcgataccatagtgtgtgatagcaattcaacctgggatccccctgttccaaaatgcctgaaggggtaccctaaacccgaagaaggcatcctggactcccttgacgtgtgggttatcgctgtgattgtcatcgcaatagtggtaggagtggcggtcatttgtgtggtcccctatcggtacctacaacgtcgaaaaaaaaaaggcaaggccgatggaggcgccgagtatgcaacctaccagacaaagagtaccacccccgcggagcaaaggggatag

SEQ ID NO: 111368 - DNA, 1158 bp, synthetic construct
  misc_feature 1..1158: note = Description of Artificial Sequence: Synthetic coding sequence
  source 1..1158: mol_type = other DNA
atggagccccctggaagaagagaatgtccattccctagctggcgtttccccggtttactcctggctgctatggtgctactgttgtattctttctctgacgcctgtgaggaaccacctactttcgaagccatggagctgatcggtaaaccgaagccgtactatgagatcggggagagggtggactacaagtgcaaaaaggggtatttctatatcccaccccttgccacccacacaatttgcgatcggaatcatacctggcttcccgtgagtgatgatgcatgctatagagagacttgtccctacatacgagatccactgaacggccaggccgtgcctgcgaatgggacatacgaatttggctaccagatgcactttatttgcaacgagggctattatctgatcggcgaggagatactttactgcgagctgaaaggctccgttgccatttggtctggcaagccgccgatttgtgagaaggtgctgtgcacccccccacctaagatcaagaacgggaagcacaccttctccgaagtggaagtgttcgagtacctagatgccgtgacgtactcctgtgatcctgcgccggggcctgacccattctcactcatcggagaatcgacaatttactgcggcgacaacagcgtctggagccgggctgcacccgagtgtaaggtggtgaagtgcaggtttcctgtggtggagaatgggaagcagatcagtggctttggtaaaaaattttactacaaggctacagtgatgttcgaatgtgacaagggcttctatcttgatggtagcgataccattgtgtgcgactctaactcaacctgggatccacccgttcctaaatgtttgaaggttctccccccctctagcacaaaaccccccgctctttcccatagtgtcagcacatcttccactacaaaatctccggcatcctctgcaagtggataccccaagccggaggaaggaatactggattcactcgatgtatgggtcatcgctgtcatcgttatcgcaatcgtagtcggggtggcagttatttgcgtcgtgccttatagatatctccagagaagaaaaaagaaggggaaggctgatggaggggccgagtacgctacataccaaacaaaatctactaccccagcggaacaaagggggtag

SEQ ID NO: 111369 - DNA, 1089 bp, synthetic construct
  misc_feature 1..1089: note = Description of Artificial Sequence: Synthetic coding sequence
  source 1..1089: mol_type = other DNA
atggagcctcccgggcggcgcgagtgccctttcccaagctggcggttcccaggattgcttctggcggccatggtgctcttactgtatagttttagtgatgcctgcgaggaaccccccacattcgaggccatggaattgatcgggaaacccaagccttactatgaaattggcgagcgggttgactataagtgtaagaaaggatacttttacattcctcctctggctacacacacgatctgcgacagaaaccacacgtggctgccagtctccgatgatgcatgttaccgtgaaacctgcccctacattcgggatccattgaatggacaggctgttccggctaacggcacttacgagttcgggtaccagatgcacttcatttgcaatgagggctactaccttattggggaggaaattctgtactgcgagctgaaaggaagcgtggccatctggagcggtaaaccaccgatttgcgaaaaggttttatgtaccccaccgcctaaaataaagaacgggaaacatactttctccgaagttgaagttttcgaatacctggacgcagtcacatacagctgcgatccggcaccaggccccgatccattttctctgattggggaatcaacgatctattgcggcgataacagcgtctggtcccgggctgctcctgagtgcaaagtcgtaaaatgccgattccctgtggtggagaacggcaaacagattagtggctttgggaaaaaattctattacaaggcgactgtgatgttcgagtgtgataaaggattctacttggacgggagcgacactatcgtgtgcgattccaacagcacctgggacccaccagtgcctaagtgcctcaagggacctagaccgacttacaagccccctgtcagcaattaccccgggtacccaaaacctgaggaaggcatcctcgacagcctggatgtctgggtaatcgccgtgattgtgattgcaatcgtggtgggtgttgctgttatttgcgtggtcccttaccgctatttacagcgcagaaagaaaaagggtacatatcttacggatgagacacaccgagaggtcaagtttaccagtctttag

SEQ ID NO: 111370 - DNA, 1134 bp, synthetic construct
  misc_feature 1..1134: note = Description of Artificial Sequence: Synthetic coding sequence
  source 1..1134: mol_type = other DNA
atggagccccctggccgcagagagtgtccgtttccctcgtggagatttcctggccttctcttggcagcaatggtcttgctgttatatagcttcagcgatgcgtgcgaggagccaccaacatttgaggctatggaactgataggaaagcccaaaccatactatgagatcggtgaacgcgtggactacaagtgtaagaaagggtatttttacatacctcccctcgcaacccatacaatttgcgacagaaaccatacctggctgccggtcagcgacgacgcgtgctaccgagaaacctgtccctacatccgagacccgctcaacggccaggcggtacctgccaatggaacgtatgaattcggttaccagatgcacttcatttgcaacgaggggtattatttgataggggaagagattctgtactgtgagctgaagggtagtgtcgcgatttggtccgggaagcctcccatctgtgaaaaagtcctatgcacccctccccctaagatcaagaacggaaagcataccttcagtgaggtcgaggtgtttgaatatctggatgctgtgacttattcctgcgatcctgcccctggacccgaccccttcagtcttatcggagaatcaacaatttattgtggtgacaacagtgtgtggagcagagccgctccagaatgcaaagtcgtaaagtgccgatttccggtagtggagaatggcaagcagatctcgggatttgggaagaagttctattacaaggctactgtcatgttcgagtgcgacaagggattctatctcgatggctccgacactatcgtttgtgattcaaactctacctgggacccgcccgtgcctaaatgcctaaaagtgtcaaccagctctaccaccaagtcccccgccagctcagccagcggccctagaccgacctacaaaccgcccgtctctaattacccagggtacccaaagcccgaggaagggatactcgatagcttggacgtctgggttattgccgtgattgtgattgcaattgtagttggcgtggccgtgatttgcgtggtcccttataggtacctgcaaagacggaaaaaaaaggggacatatctcaccgatgagactcacagggaagtgaagttcacaagtttatag

SEQ ID NO: 111371 - DNA, 1011 bp, synthetic construct
  misc_feature 1..1011: note = Description of Artificial Sequence: Synthetic coding sequence
  source 1..1011: mol_type = other DNA
atggagccacctggacggagggaatgtccctttccgagctggaggtttcctggcttattgcttgcagccatggtcctgctcttgtactcatttagcggagagacatgcccctatatccgtgatccactgaacggccaggccgttcctgcgaacggcacttacgagtttggatatcaaatgcacttcatctgtaatgagggatactacttaattggagaggaaatcctctactgcgagttgaagggctcggtggcaatctggtccggcaagccacctatctgtgaaaaagtgctgtgcacaccccccccaaagatcaagaacgggaagcacactttctcggaggttgaggtatttgagtacttagacgcagtgacctactcgtgcgaccccgcccctggacccgaccccttttctctcatcggcgagtctactatctactgcggtgacaactctgtatggagcagagccgccccggaatgcaaagtcgttaaatgtaggttccctgtggtggagaacggaaaacagatttctggattcgggaaaaaattttattataaggcaacggtgatgttcgagtgtgataaaggattttatttagacggatcggatactattgtatgcgacagcaattcaacttgggatcctccggtcccgaaatgcctgaaggtgttgccgcctagctcgaccaaaccacccgctctgagtcactctgtgagcacaagcagcactaccaaaagcccagccagctccgctagcgggcctaggccaacttataagccccctgtgtccaattatcccgggtaccctaaacccgaagagggtattctcgactcgctggatgtgtgggtgatcgctgttatcgtcatagccatcgtggtgggagtggcggtgatttgcgtggtcccctaccgctacttgcagaggagaaagaaaaagggaaaagctgatggcggcgcggaatacgcgacgtatcaaaccaaaagtacaacaccagctgagcagcgggggtag

SEQ ID NO: 111372 - DNA, 1095 bp, synthetic construct
  misc_feature 1..1095: note = Description of Artificial Sequence: Synthetic coding sequence
  source 1..1095: mol_type = other DNA
atggagccgccaggcaggagggaatgcccctttccttcttggcgctttccaggtctcctgttggcagctatggttctgctgctctacagcttctcggatgcatgcgaagaacctcctacatttgaggctatggagctgattggcaaaccaaaaccctattatgaaataggcgaaagagtggactataagtgtaagaagggatacttctacatcccacctctagccacccacacaatttgcgatcggaaccacacctggctgcctgtctctgatgacgcctgttacagagaaacatgcccatacatccgggacccgttgaacgggcaggctgtccccgctaacggaacgtacgaattcggctaccagatgcacttcatttgtaatgagggctactatctgatcggcgaagagatcctctactgtgagcttaagggttctgtggccatctggtcaggcaagcctccaatctgcgaaaaagtcttgtgtacacctcctccaaagatcaagaatggtaagcatacattcagtgaggttgaggtttttgagtatctagacgcggtaacctactcctgcgaccccgcacccgggccggatcccttcagcctgatcggcgagagcacaatctactgcggagataactccgtatggtcaagagccgctcctgaatgcaaggttgttaagtgccgttttccagttgtggagaacggtaaacaaatttcagggttcgggaagaagttctattataaagctactgtcatgtttgaatgcgacaaggggttctatctcgacggatccgataccatcgtctgtgatagcaattccacatgggacccaccagtgcccaaatgtctgaaggtcagcacatcctcaaccaccaaaagtcccgcctcttcggcctccggccccagaccaacctacaaaccccccgtctcaaactaccctggctatcctaagcccgaagagggcatactcgactcactggatgtctgggtcatcgcagtcattgtaatagctatcggaaaacaaatggtcgagcttaatatgccactgacacgtttaaaccagcccctgcagcagtccagggaggcggaatag

SEQ ID NO: 111373 - DNA, 1113 bp, synthetic construct
  misc_feature 1..1113: note = Description of Artificial Sequence: Synthetic coding sequence
  source 1..1113: mol_type = other DNA
atggaacctcctgggagaagagagtgtccattcccaagttggaggtttcccgggctgttgcttgcggccatggtactgcttttatatagctttagcgacgcctgtgaagaaccccccactttcgaggcgatggaactcataggaaagccaaagccctactatgagatcggcgagcgagtggactataagtgtaagaagggatatttttacatccctcccctcgcgactcacactatatgcgatcggaatcacacatggttgcctgtaagtgacgatgcatgctacagggagacttgcccctacatcagagacccccttaacggtcaagccgtgccagccaacgggacttacgagtttggctatcagatgcattttatatgtaacgaagggtactacttgattggagaggagattctgtactgtgagctcaagggctcagtggccatctggagcggtaaacctccaatttgtgagaaagtgctctgtactccccctcccaagatcaagaatggtaaacataccttttctgaggtggaagtcttcgagtaccttgatgctgtcacttactcctgtgaccccgcgccagggcccgatcctttttccttgattggggagtcaacaatttactgtggtgacaattctgtgtggtctcgggcggcaccagaatgcaaggtagtgaagtgtagattcccagtagtggaaaatggcaagcaaatttctggcttcggcaagaagttttactataaggctaccgtgatgtttgagtgcgataaaggcttttacctggacgggtccgatacaatcgtttgcgactcaaatagtacttgggatcctccggtgccaaagtgtctgaaggtgagcacaagcagtaccactaagtctcctgcctcgtcggcctcagggtacccaaagcccgaggagggcatcctagatagtcttgatgtctgggtcatcgcagtcatagtaattgccatcgtcgtgggtgtggccgtcatctgcgtagtcccctaccgctacctgcagaggcgcaagaagaagggcaaagctgatggcggcgccgagtatgccacctatcagaccaagtctacaactcctgctgaacagcgcggttag

SEQ ID NO: 111374 - DNA, 510 bp, synthetic construct
  misc_feature 1..510: note = Description of Artificial Sequence: Synthetic coding sequence
  source 1..510: mol_type = other DNA
atgtgtagcaggggatgggattcctgcctggctctggagctccttctgttacctctgtcgctgctggtcaccagtattcaaggacacttagtgcatatgacagtggtgtcaggaagtaacgtgacgctgaacatttcagaatctcttccagaaaattacaagcaactgacctggttctatacctttgatcaaaaaattgtcgagtgggactcgcgcaaaagtaaatacttcgagagcaagttcaaagggcgggtcaggctcgacccacagagcggagctctgtatatatctaaggtacagaaggaagataatagtacttacatcatgagggtgctcaaaaaaacaggcaatgaacaggagtggaagatcaagctgcaggtgttgggagagagtggcgagcctaagtccaagtcgccgctacagtggcctcagatggatcactgtcgcgcttcctgggaggcatggggcacgctgggagaggaggagcgtaagacatccgggcaggtatag

SEQ ID NO: 111375 - DNA, 732 bp, synthetic construct
  misc_feature 1..732: note = Description of Artificial Sequence: Synthetic coding sequence
  source 1..732: mol_type = other DNA
atgtgctcgagaggatgggacagctgcctagccttggaactcctgttgctaccactaagcctgcttgttactagcatacagggccacctggttcatatgaccgtggtgtcgggcagtaatgtcaccctaaacatctctgaaagcctacctgaaaattacaagcagctcacctggttttacacttttgatcagaaaatagtggagtgggactctcgcaagagtaagtatttcgagtctaagtttaagggccgcgtgcgcctggacccacagtctggggcgctgtacataagcaaagtgcaaaaagaagataactccacatacatcatgcgtgtgctgaaaaaaacggggaatgaacaggaatggaagatcaagctgcaagtgctggacccggttccaaaacccgtgattaagatcgagaagatcgaggacatggatgacaactgttacctcaagctgtcttgtgtgattccgggcgagtccgtgaactatacatggtatggagacaagcgccccttcccaaaggagctgcaaaattccgtgctggaaacaacgctgatgccgcataattattctcggtgctatacctgtcaagtatccaattccgtgtcgtccaagaatggcactgtgtgcctctcaccaccttgtactctggcccggtcgtttggggtagagtggatcgcgtcttggttagtggtgactgttccaactatcctaggactgctattgacctag

SEQ ID NO: 111376 - DNA, 1044 bp, synthetic construct
  misc_feature 1..1044: note = Description of Artificial Sequence: Synthetic coding sequence
  source 1..1044: mol_type = other DNA
atggcactgctgttttcactcatcctggccatctgtactaggcctggcttcctggctagtccctctggggtgaggttggtgggcggtcttcataggtgtgaaggtcgggtcgaggtggaacagaagggccaatggggcaccgtgtgcgatgacgggtgggacattaaggatgtggcggtcttatgccgcgaacttggttgcggggctgcttctggcacaccatccggcatactgtatgagccccccgcagaaaaggaacagaaggtcttgatccagagcgtgagttgcactggcactgaggacacactggcccagtgcgaacaggaggaggtttatgattgctcccacgatgaggacgctggggccagctgtgaaaacccagagtctagcttcagccctgtccctgagggagtgagattggccgacgggccaggacactgtaaaggccgcgtggaggtgaagcaccagaatcagtggtataccgtctgtcagacgggctggagcctgcgagctgcaaaagtagtgtgcagacaactcggctgcggccgcgccgttctgactcaaaaacgttgtaataagcatgcatacggtaggaaacctatctggctgagtcagatgtcttgctccggacgggaagccacgctgcaggactgtccaagcggcccttggggcaaaaacacctgtaatcacgatgaagacacctgggtagagtgtgaagatcccttcgacctgaggctggtagggggagataacctgtgttctggaagactggaggtactacacaaaggcgtgtgggggtctgtgtgcgacgacaattggggggagaaagaggatcaggtggtgtgcaagcagctgggatgtgggaagtccctatcccccagctttcgagaccggaaatgctacggcccaggagtgggacgcatttggctggataatgtgcgatgctccggtgaagaacagtctctcgagcagtgccagcacagattttgggggttccacgactgcactcatcaagaagatgtcgctgtgatttgctcaggttag

SEQ ID NO: 111377 - DNA, 660 bp, synthetic construct
  misc_feature 1..660: note = Description of Artificial Sequence: Synthetic coding sequence
  source 1..660: mol_type = other DNA
atgggaatgtcttcgctcaaacttctgaagtacgttctattttttttcaatctactgttttggatatgcgggtgctgtatcttggggttcgggatttacctgctaattcataacaactttggtgtgttgttccacaatctgccctccctcacactaggcaacgtgtttgtcattgtgggttctattataatggtggtagcatttttagggtgcatggggagtattaaggagaacaagtgcctcctcatgtccttcttcattttgctgctgatcatcctgctagctgaggtgaccctggctatccttttgttcgtatatgagcagaagcttaacgaatacgttgctaagggccttacagactctatccaccgttatcattctgacaattccactaaagcggcctgggactcaatccagagtttcttacagtgctgcggcatcaatggcacttctgactggacctccggccctccggcgtcctgcccttctgacagaaaagtggaaggttgttacgctaaggcgcgactgtggttccactctaacttcctttatattggcataatcacgatatgcgtctgtgtcattgaggtcctgggaatgtcctttgctttaaccctgaattgccaaatcgataaaacaagtcaaacaatcggcctatag

SEQ ID NO: 111378 - DNA, 483 bp, synthetic construct
  misc_feature 1..483: note = Description of Artificial Sequence: Synthetic coding sequence
  source 1..483: mol_type = other DNA
atgggaatgagttcactgaaactgctgaaatacgtgctgttcttcttcaacctcttgttctggatctgtggctgctgtatcttagggtttggcatttacctcttaatacataataatttcggcgtgctgtttcacaatctgccctctctgacactggggaacgtgttcgtgatcgtcggttccatcataatggtagttgcctttctgggatgcatgggcagtattaaagaaaataaatgcctgctgatgtcatttttcatcctcctgctaattattttgctagcagaagtcaccctggcgattcttctctttgtgtacgagcaaaaaggatgttacgccaaggctagattgtggtttcacagcaactttctgtacattgggataatcacaatttgcgtgtgcgtcattgaagtcctggggatgtcgttcgctctgacgcttaactgccaaattgacaagacctctcaaacgataggcctgtag

SEQ ID NO: 111379 - DNA, 1323 bp, synthetic construct
  misc_feature 1..1323: note = Description of Artificial Sequence: Synthetic coding sequence
  source 1..1323: mol_type = other DNA
atgaccgttgccagaccatccgtcccagccgctcttcctcttcttggggagctgccaaggcttctcctgctcgtgctgttgtgcttgcccgctgtctggggagactgcggtctcccaccagacgttccaaatgcccagcccgcgctcgagggtcggacatccttcccagaggacacagtgatcacctataagtgcgaggagagcttcgtgaagatccctggcgagaaagatagtgtaatttgcctgaaagggtcccagtggagcgatatcgaggagttctgcaacagatcttgcgaggtgccaaccaggctaaattcggcctctctgaagcagccctacataacacagaactacttcccggttggaaccgtggtggagtacgagtgccgtcccggctataggagagagccatccctctccccaaagcttacctgtttacagaacctgaagtggtctaccgccgttgagttctgcaaaaagaaatcttgtcctaaccctggcgagataaggaacggacagatcgatgtgcctggtggtattcttttcggcgccacaatcagtttcagttgcaataccggctataagctgttcgggtccacctcctcgttctgcctcatttctggcagctctgtgcagtggtcggatcctttgccagaatgccgtgaaatctactgccctgctccaccacaaatcgacaatgggattatacaaggggaaagagatcattacggttaccgccagagtgtgacctacgcctgtaataaaggtttcactatgattggggagcacagtatctactgtaccgtgaataacgacgaaggggagtggtctggtcccccccctgaatgtcgcggaaagagtctcacctccaaggtgccccctacagtccaaaagcccaccacagttaacgtacctactacggaggtgtcacctacgagccagaagacaaccaccaagaccacaactccgaacgctcaagctacacgatcaacacctgtgtcacgcaccacaaagcattttcacgagacaacgccaaacaagggatccggaacgaccagcggaactactagactgttgtcaggctctaggcctgtgacacaggctgggatgcgctggtgtgacaggtcaagcctacagagccgaacgcccggattcaagagaagcttccacttctcactgccatcctcctggtattatcgggcccacgtgtttcatgttgatcgcttcgcctgggatgcgtcaaaccatgggttggccgatttggctaaggaggaactacgacgaaaatatacccaggtctaccggttattcctggtatcctag

SEQ ID NO: 111380 - DNA, 1095 bp, synthetic construct
  misc_feature 1..1095: note = Description of Artificial Sequence: Synthetic coding sequence
  source 1..1095: mol_type = other DNA
atgacggtggcgcggccttccgtcccagcagccttgcctcttctgggcgaattaccaagattgctgctgctagttctgctgtgcctccctgctgtgtggggggactgcggcctgcctccagacgtgccaaacgctcagcccgccttggaggggagaacctcatttcctgaggacacagtgatcacctacaaatgcgaggagagtttcgtcaaaattccaggggagaaagactctgtgatttgtctcaagggtagtcaatggagcgatatcgaggagttttgcaaccgctcctgcgaagttcccacaagattaaacagcgctagcctgaaacaaccttacatcacgcagaactacttccctgttggtacggtggtggagtacgagtgccgccccgggtataggagagagccctcactctcccccaaactcacttgtttacaaaatctcaaatggagcacagctgtggaattttgcaaaaaaaaatcttgtcctaaccccggtgaaattcgcaacggccagatcgatgttccgggaggcattctcttcggcgccaccatcagcttttcttgtaacacagggtataagctgtttggctcgactagtagcttttgcttgatttccggctcttcagtgcagtggagcgatcctttacctgaatgcagggagatttattgcccggctcctccccagatcgacaatgggatcattcagggtgaaagagaccattacgggtaccgtcaaagtgtgacctacgcctgcaacaaaggtttcactatgattggagagcacagcatctactgcacagtgaataatgatgaaggcgagtggagcggacctcctcctgagtgccggggtaaatctctcaccagcaaagttccaccgacagtacagaaacccacaaccgtcaatgtgcctaccactgaggtgagcccaacaagccagaagactactaccaagacaactacgcctaatgctcaggctacgagatccacgcctgtctcacgaacaacgaagcacttccacgaaacaacaccaaacaagggatcaggcactacttccggaacaacaagactgctttctgttctttttatgtag

SEQ ID NO: 111381 - DNA, 1146 bp, synthetic construct
  misc_feature 1..1146: note = Description of Artificial Sequence: Synthetic coding sequence
  source 1..1146: mol_type = other DNA
atgaccgtggctcggcctagcgtgcccgcagccctgccgctgctcggcgagttgcctcgccttctgcttctggtgctgttgtgtctaccagctgtctggggtgactgtgggcttccacctgacgtgccaaacgcccaaccagctttggaaggacggacatcctttcccgaggacacagtaattacttataagtgcgaggagagcttcgtgaagatccctggcgaaaaagactctgtgatctgtctcaaaggaagccagtggagtgacatcgaggaattctgcaataggagttgtgaagtgccaacaaggctgaacagcgcttctctcaagcaaccatacatcacccagaactattttcccgtgggaaccgttgtggagtacgaatgccgacccggatacaggcgcgaacccagcttgtcacccaagcttacatgccttcagaatctgaaatggagcaccgccgtggaattctgtaaaaagaagtcatgccctaaccctggcgaaattcgtaacgggcagatcgatgtccccggaggcatactgtttggtgccacgattagttttagctgtaataccggatacaagctgtttggatctacaagctccttctgcctaatctcaggcagttcagtgcagtggagtgacccactccccgaatgccgtgagatctattgccccgcgccccctcagatcgataatggcattatccagggcgagcgagaccactatggctatagacaaagtgttacttacgcctgtaataagggctttaccatgattggcgaacattcaatttattgtactgtcaacaacgatgagggcgaatggtcgggcccacccccggaatgtagggggaaaagcctgacttcgaaagtgcccccgacggtgcaaaagccaacgactgtgaacgtacctacaacagaagtctcgcccacctcacaaaaaaccaccaccaaaacaaccacacccaacgctcaggctacgagatccaccccagtgtcaaggacaacaaaacactttcacgagactacaccaaacaagggctctggcaccacatcaggcaccactcgtctcctctccggacatacctgcttcacactgaccggtctgttaggtaccctggtgaccatgggcctgctgacttag

SEQ ID NO: 111382 - DNA, 1320 bp, synthetic construct
  misc_feature 1..1320: note = Description of Artificial Sequence: Synthetic coding sequence
  source 1..1320: mol_type = other DNA
atgaccgttgctcgcccaagtgtacccgcagccttgccactcctcggagagttgccaagactcctgttgctagtacttctgtgtctgcccgcggtttggggggattgtggtttgccacccgacgtgcccaacgctcaaccagcgctcgaaggccgcaccagctttccagaggataccgttatcacttacaaatgtgaagagtcttttgtcaagattcccggagaaaaggattccgtaatctgcctcaagggatcgcagtggtctgatattgaggaattctgtaaccgcagttgcgaggtgcccactcggctgaactccgcctctctgaaacagccctacattacacagaattatttccccgtgggtaccgtggtcgagtacgagtgtcggcccggctaccgccgagagccgagcctctcaccaaagttgacttgcctacaaaacctcaagtggagtaccgccgtggaattctgcaagaagaaatcctgcccaaacccaggggaaatcagaaacggacagatagacgttccaggcggaatcttgtttggtgctaccataagcttctcctgcaacaccggctacaagttgtttgggagcacttcatcgttctgtctgatttcaggaagctccgtgcaatggtccgatcctttgccagagtgtcgcgaaatatattgtcccgcaccgccccagatcgataatggaattattcagggcgaacgcgaccactacgggtatagacagtctgtgacgtacgcgtgcaacaagggcttcacaatgatcggggaacactcgatatactgtacagtgaacaacgacgaaggggagtggtccgggccacctccggaatgtcgtggtaagtctctcacaagtaaggttccaccaacagtccaaaaacctactacggtgaatgtcccaaccactgaggtgagtcccacctcccagaagacgaccaccaaaaccacgacgcccaatgcccaggcaactagaagcacaccggtgtctcgcacaaccaagcattttcatgaaacaacaccgaacaaaggcagcggcacaacttcggggacaactcggctgcttagtgaaactgtctttcatcgcgtaattcaggacggcctcgacctgctcgcgagccgcagcgcctgtctcggcttgcctaaatgctgggactataggcgcgagccccctcatcttgcacgcgcgcacgtattccatgtggacagattcgcttgggatgcatcaaatcatggactcgcggatcttgccaaggaggaactgcggcgaaagtacactcaagtgtatcggctgtttctggtgtcatag

SEQ ID NO: 111383 - DNA, 390 bp, synthetic construct
  misc_feature 1..390: note = Description of Artificial Sequence: Synthetic coding sequence
  source 1..390: mol_type = other DNA
atgacggtagcacgaccgtctgtgcctgccgctcttcctctgctaggagagttgccccgactacttcttttggtgctgctctgcctgcctgcggtctggggtgattgcggtctacctcctgacgtcccaaacgcacagcctgcactcgagggccggacttcctttcccgaagacacggtgataacttacaagtgcgaggaatcattcgtcaagattcctggcgagaaagatagcgttatctgtctgaaggggtctcagtggagcgatatcgaggaattttgtaacagaagttgcgaggtgcccacacggctgcagaagaggactttctccatcaccaaaacgaatctcccctcagagtttaaaatggtacactctagcagaatcttgtag

SEQ ID NO: 111384 - DNA, 1155 bp, synthetic construct
  misc_feature 1..1155: note = Description of Artificial Sequence: Synthetic coding sequence
  source 1..1155: mol_type = other DNA
atgacagtcgcacgccctagtgttccagcggctttgccgctcctcggcgagctgccccgtttgctgctactggtactgctgtgcctaccagccgtgtggggggattgcgggctaccacctgacgtccctaatgcccagcccgccttagaaggcaggacatcttttccagaggatacagtgattacctataagtgtgaagaaagtttcgtgaagataccaggcgagaaggactccgtaatatgcctaaaaggctctcagtggtctgatattgaggaattttgcaatagatcttgcgaagtgccaactcgcctcaactccgccagcttgaaacagccttatataactcagaactacttcccagtgggaacagtggtggagtacgaatgcagacctggctataggcgggagccttccctctcccccaagctaacctgcttacaaaaccttaaatggtccactgctgtagaattctgtaagaaaaagagctgtccgaatccaggcgagatccggaatgggcagattgatgttcctgggggtattttgtttggggcaacaatttccttttcttgcaacacaggatataaactgttcgggagcacctcctccttttgcttgattagcggaagcagcgtccagtggagcgatcccctgcccgagtgtcgcgaaatatactgtccagccccgcctcagattgacaatgggattattcagggtgaaagggatcattatgggtataggcagtctgtgacatacgcgtgtaataagggattcaccatgatcggggaacattctatttattgtaccgtcaacaacgatgagggcgagtggagcggtccgccacctgaatgccgcggcaagtcattgacgagtaaggtgcctccaacagttcagaaacctaccaccgtgaacgtcccaaccactgaggtctcccccacatcccagaaaactacaacgaaaaccacaacacccaacgcccaggcaaccaggtccactccagtgagcaggacaacgaaacacttccatgaaaccacaccaaataagggttcagggacaacatccggcaccacccggctgttgtccgcactacaggtccgcccgtttgaagttagcggaagttctcacatcagtagtaaaaagatgatgtgcatcctttag

SEQ ID NO: 111385 - DNA, 954 bp, synthetic construct
  misc_feature 1..954: note = Description of Artificial Sequence: Synthetic coding sequence
  source 1..954: mol_type = other DNA
atgaccgtggcaagacctagcgttccagccgccctgcctctgctgggagagctcccgcgcctgctcctgctagtcctgctgtgtttacctgccgtatggggagattgcgggctgcctccagatgtgcccaatgcccaaccagccctggagggccgaaccagtttccctgaggacaccgttatcacgtataagtgtgaagagagttttgtgaagattcccggggagaaagatagcgtcatttgtttaaaggggtcacagtggagcgacattgaggaattctgcaaccagaaaagctgtccgaacccaggagagatcagaaatggccagatcgatgttccaggtggcattctctttggcgccactattagcttctcctgtaacactgggtacaaattgttcggaagtacgagctcattttgtctgatttccggcagctctgtgcaatggagcgatccactgccagagtgccgcgagatctattgtccggccccaccccagatcgacaacggaataatccagggcgaaagggaccactatgggtaccggcaaagcgtgacttatgcctgtaacaaagggtttaccatgatcggagagcactctatatattgtaccgtcaataatgacgagggcgagtggtccgggccaccgccagaatgcaggggtaagtccctgaccagcaaggttcctcccaccgtgcagaagccaaccactgtgaatgtgcccacgacagaggtaagccctacgtcacagaaaactaccacgaagaccacaacaccaaatgcccaggccacacgctctacgccggtctcaaggacaaccaagcatttccacgaaaccacgcccaacaaagggagcggcactacctctggccagttgaccctattcagcggtcacacttgctttaccctcacaggactcctcgggacgctggtgacaatgggactgctgacatag

SEQ ID NO: 111386 - DNA, 753 bp, synthetic construct
  misc_feature 1..753: note = Description of Artificial Sequence: Synthetic coding sequence
  source 1..753: mol_type = other DNA
atggttgctggttccgatgccggtagggcacttggggttttgagcgtcgtttgtctgttacactgtttcggcttcatctcttgtttctctcagcagatttacggagtagtctacggaaatgttactttccacgtcccgagcaatgtgcctctgaaagaggtattatggaagaagcaaaaggacaaggttgcggagctggaaaactcggagtttcgcgcattttccagctttaagaaccgggtataccttgacactgtctccggctcgttaaccatctacaatctcacttctagcgacgaagatgagtatgagatggaatccccgaacattacggacaccatgaagttttttttatacgtactggagagtttgccatccccaacgctgacatgcgcactgactaacgggtccatagaagtccagtgtatgatcccagagcactataatagtcaccgcgggttgataatgtatagctgggattgccctatggaacagtgtaaaaggaattcgactagtatctacttcaaaatggaaaacgacctgccccagaaaattcagtgtacattgagtaacccattgttcaataccacatcgagcattatcctgactacatgcattccgtccagcggtcattcgaggcaccggtacgccctgatccctatccccctggcagtcattaccacctgcatcgtattgtacatgaatggtatactgaaatgcgaccggaagcctgaccggacaaattctaattag

SEQ ID NO: 111387 - DNA, 747 bp, synthetic construct
  misc_feature 1..747: note = Description of Artificial Sequence: Synthetic coding sequence
  source 1..747: mol_type = other DNA
atggtagctggctccgatgccggcagagcattgggtgtgttgagcgtggtgtgcctgttgcattgtttcggattcattagctgcttctcccagcagatatatggtgtggtatacggcaatgtgaccttccacgtgccttcaaatgtaccactgaaggaagttctgtggaagaagcagaaagacaaagtagctgagctcgaaaatagcgaattcagggcgttcagttcattcaaaaacagggtgtacttagataccgtctctggctcattaacgatctacaatttgacttccagcgatgaggacgagtacgagatggagagtccaaatatcacagatactatgaaattttttttatatgtgttggaatcactcccttctcctacactcacttgtgccctaaccaatggttctattgaagtgcagtgcatgatccctgagcactataattcacatagaggactgatcatgtactcatgggattgtcctatggaacagtgtaagagaaactcaacctctatttatttcaaaatggaaaacgacctcccacaaaagattcagtgcacactgtccaatccgttgtttaatacaaccagcagcatcatcctaaccacttgtattccttcttctgggcacagtcgacaccgttatgctctgattccaattccgctagctgtaatcacaacttgcatagtgttatatatgaacggaattcttaagtgcgacaggaaacccgatcgcacaaagtag

SEQ ID NO: 111388 - DNA, 387 bp, synthetic construct
  misc_feature 1..387: note = Description of Artificial Sequence: Synthetic coding sequence
  source 1..387: mol_type = other DNA
atgggtattcaaggtgggtcagtcctgtttggactgcttctagtgttggcggtgttctgtcacagcggccacagcctgcaatgttataattgtcccaaccctacagccgattgtaaaacagcggtcaattgctcctccgactttgatgcttgcctgatcaccaaggcagggctccaagtatacaacaaatgctggaaatttgaacactgtaattttaacgacgttactacgaggctgcgagaaaacgaactgacttattattgttgcaagaaagacctctgcaatttcaacgaacaacttgagaacggtggtacctccttaagcgagaaaaccgtgctgctgcttgtgacgcctttcctcgccgccgcctggtccttacacccctag

SEQ ID NO: 111389 - DNA, 387 bp, synthetic construct
  misc_feature 1..387: note = Description of Artificial Sequence: Synthetic coding sequence
  source 1..387: mol_type = other DNA
atggggattcaaggagggtcggtcctttttggtctgcttctggtgctggccgtgttttgccacagtgggcactctctgcagtgctacaactgcccgaaccccacagctgactgcaaaacagccgtgaactgtagctccgatttcgatgcatgcctgattactaaggcaggcctccaggtttacaataaatgttggaaattcgagcactgtaatttcaacgatgtcacaacacgacttcgggagaacgaactgacatactattgctgcaaaaaagacttgtgtaattttaacgaacagctcgaaaatggcggaacctccctgtcagagaagacggtcctacttctggtcactcctttcttggccgccgcatggagtctgcatccctag

SEQ ID NO: 111390 - DNA, 387 bp, synthetic construct
  misc_feature 1..387: note = Description of Artificial Sequence: Synthetic coding sequence
  source 1..387: mol_type = other DNA
atgggcattcagggcggaagtgtgctgttcggtctgctgctggttctggctgtcttctgccactcagggcactctctccagtgttacaactgtcctaacccaacagctgattgcaagacagctgtgaactgcagttctgatttcgacgcttgcctcataactaaagccggactccaggtgtataataagtgctggaagttcgagcactgtaactttaacgacgtgaccactcgcctccgagaaaatgagctgacttactactgttgtaaaaaggatctgtgtaatttcaatgagcagctggagaatggtgggacctccctctcggagaaaaccgtgctgctcttggtgacacctttcctggctgccgcctggagtctgcatccgtag

SEQ ID NO: 111391 - DNA, 387 bp, synthetic construct
  misc_feature 1..387: note = Description of Artificial Sequence: Synthetic coding sequence
  source 1..387: mol_type = other DNA
atggggattcagggaggctccgtgttgttcggccttctgctggtcctggccgtattttgccattcagggcatagcctgcaatgctataattgtccaaaccccaccgccgattgtaaaaccgcagttaactgctcatccgactttgatgcctgcttgataactaaggctgggctccaggtctataacaaatgttggaagttcgaacattgtaatttcaatgatgtgacaaccagactccgtgagaatgagctcacctactactgctgtaaaaaggacctctgtaactttaacgagcagttggagaatggggggacttctctatctgagaagactgtgctcctcctggtgacacctttcttggctgccgcgtggagtctccacccctag

SEQ ID NO: 111392 - DNA, 387 bp, synthetic construct
  misc_feature 1..387: note = Description of Artificial Sequence: Synthetic coding sequence
  source 1..387: mol_type = other DNA
atgggtattcagggcggatcggtgctctttgggctgctgctcgtattggcggttttctgtcattcggggcactctctgcagtgttacaattgtcctaacccaactgctgattgcaagaccgctgtgaattgctctagcgattttgacgcttgcctcatcaccaaagcaggcctgcaggtttacaataaatgttggaagttcgaacattgcaactttaacgacgttactactagattgagagagaacgaattaacatattattgctgcaagaaggacctttgtaactttaatgaacagctagagaacgggggaactagcctttctgagaagactgttctgctactagtaaccccattcctggcggcggcctggtctctacacccttag

SEQ ID NO: 111393 - DNA, 387 bp, synthetic construct
  misc_feature 1..387: note = Description of Artificial Sequence: Synthetic coding sequence
  source 1..387: mol_type = other DNA
atggggattcagggcgggtcagtgctgttcggcctgctgctggttctcgcagtgttctgtcactccgggcattcactccagtgctacaattgccctaaccccactgcagattgtaaaacggcagtgaattgctctagcgatttcgatgcctgcctgatcaccaaagccggactgcaggtttataataaatgttggaagtttgagcattgcaatttcaacgacgtgacaaccaggctgagggagaatgagttaacgtactattgctgcaagaaggatctgtgcaactttaacgagcagctcgagaacggcggtacttctctatccgaaaaaacagtccttctgttagtaacacctttcctagccgctgcgtggagtctacatccctag

SEQ ID NO: 111394 - DNA, 387 bp, synthetic construct
  misc_feature 1..387: note = Description of Artificial Sequence: Synthetic coding sequence
  source 1..387: mol_type = other DNA
atgggcattcaaggcggttccgtgctgtttggcctgttattggtcctggcagtgttctgtcactcaggccacagtctgcagtgttacaattgtccaaacccaaccgcagactgcaagaccgcagtgaactgttctagcgactttgacgcctgccttataactaaagccggccttcaggtttacaacaaatgctggaaattcgaacactgtaactttaatgatgtgactacacggctgagggagaatgagctgacttattattgctgcaagaaggacctgtgcaactttaacgagcaactagagaacggaggaacatccctgtctgaaaaaaccgtgctactgctggtgactccttttctcgcggcagcttggtcactgcatccatag

SEQ ID NO: 111395 - DNA, 387 bp, synthetic construct
  misc_feature 1..387: note = Description of Artificial Sequence: Synthetic coding sequence
  source 1..387: mol_type = other DNA
atggggattcaaggcggttcagtcctatttggactgctgctggtgctggccgtgttttgtcattctggccattcattacagtgttataattgcccaaatcctacggcagattgtaagacagccgtgaactgctcgagtgactttgacgcatgcctgatcactaaggccggtctgcaggtatataataagtgttggaaatttgagcattgcaactttaacgatgtcactacaaggctgcgtgaaaatgagctcacttattattgctgcaaaaaagatctgtgtaattttaacgagcagcttgaaaacggcggtacctccctgagcgagaaaaccgtccttcttctcgtgaccccattcttggctgccgcatggagcctgcacccttag

SEQ ID NO: 111396 - DNA, 387 bp, synthetic construct
  misc_feature 1..387: note = Description of Artificial Sequence: Synthetic coding sequence
  source 1..387: mol_type = other DNA
atggggatccaaggcggcagcgtcctattcggtttgctcctcgttctggccgtgttctgccattccggccattccctccaatgttataactgtccaaacccaaccgcagattgtaagaccgccgtaaattgttcctcagatttcgatgcatgtctcattactaaggccggcctgcaagtatacaacaaatgttggaaattcgaacactgtaattttaatgacgtcaccacacgattacgtgaaaatgagctgacctactattgctgcaaaaaggacctctgcaatttcaatgaacagctggagaacgggggaacctctctatcagagaagactgttctgcttctcgtgacgccctttttggccgccgcatggtcactgcacccctag

SEQ ID NO: 111397 - DNA, 2007 bp, synthetic construct
  misc_feature 1..2007: note = Description of Artificial Sequence: Synthetic coding sequence
  source 1..2007: mol_type = other DNA
atgtggctgttctttggtattactggcctactcactgccgctctatccggccatccttcacccgctcctcccgaccagctcaacacatcctcagcagaatcagagctctgggagcccggcgagcgcttgcctgtcaggctgacgaacggctcttcctcttgtagtggaactgtggaagttaggttggaagcatcttgggagccggcctgcggagccctgtgggatagccgtgctgccgaagccgtgtgtagagctcttggctgcggaggagccgaggctgcgagccagttggccccccccacccccgaactgcccccaccacccgccgcagggaatacgtctgtggccgcaaacgccacgttggccggcgctccagcgctgctttgctctggggccgagtggcggctatgtgaggtcgtggaacatgcctgcaggtcagacggccgccgggcaagagtgacttgcgctgaaaatagagccctgcgtctagtggatgggggaggggcttgcgccggacgagtggaaatgttggagcatggcgaatggggctcggtttgcgatgatacatgggatttagaggacgctcacgttgtttgtcgacagctgggatgtggctgggccgtgcaggcattgccgggccttcatttcactcccggaagagggccaatccatagagaccaggtcaactgtagcggagctgaggcgtacctctgggactgccctggtctgcctggacagcactactgtggtcataaagaagacgcaggcgctgtgtgttctgaacaccagagttggcgccttaccggaggcgctgaccgctgcgaaggacaagtcgaggtacattttagaggagtgtggaataccgtctgtgacagtgaatggtatccttccgaggccaaagtactgtgtcaatcccttgggtgtggcacagccgttgaacgaccaaaggggctgcctcactccctgagtggacggatgtattattcctgtaatggtgaagagctgaccctcagcaattgtagctggaggttcaacaatagtaacctgtgtagtcaatcgctggctgcaagagtactgtgctctgcaagccgatcgctgcataacttgagtacaccagaagtgccggcatccgtgcagacggttacaatcgagagtagcgttacggtcaagatcgagaataaggagagcagggaactgatgctactgattccaagcattgtcttgggaattcttctcctgggttccctgatattcatagcattcatccttctccgaatcaaaggaaaatacgccctccccgtgatggtcaaccaccagcacctccctacgaccatcccagctgggagtaatagttaccaaccggttccgattacgatccccaaggaagtgttcatgctccccatccaggtgcaagcacctccccctgaggatagcgactcaggatccgactccgattatgagcattatgacttctccgcgcagccccccgttgctctgacaacgttttataattctcagaggcaccgggtgactgacgaagaggtgcagcagtcccgattccagatgcctcccctggaggaaggcttagaggaactacatgcttctcacatccctactgctaatcccggacactgcattaccgaccctccgtccctgggcccacaatatcacccgcgatcaaactcagagagcagcacttctagtggggaagattattgtaactcacccaagtctaaactgccaccctggaatcctcaagtatttagcagcgagagaagctctttcttggagcaaccccccaatttggagttggctggaactcagccggctttctccgctggaccacccgcagatgacagttcctcgaccagctccggtgagtggtatcaaaatttccaacctcctcctcaaccgccttccgaggaacagtttggctgtcctgggtctccttccccgcagcccgactctacagacaacgatgactacgatgacatctccgccgcctag

SEQ ID NO: 111398 - DNA, 1911 bp, synthetic construct
  misc_feature 1..1911: note = Description of Artificial Sequence: Synthetic coding sequence
  source 1..1911: mol_type = other DNA
atgtggctcttctttggtatcacgggcttgcttacggccgctctctctggtcatccttccccagcaccacctgaccagcttaatacatcctctgccgagtctgagctgtgggaaccaggagagcgcttaccagttaggctgacaaatggcagtagttcttgcagcggtacggttgaagtgagactagaagcctcttgggaaccagcttgtggagccctgtgggactcccgggccgccgaagcagtctgccgcgccctggggtgtggcggcgccgaggccgcttcgcaactcgcgcccccgaccccagaactcccgcctccccccgccgcagggaatacttcagtcgctgctaatgcaacgctggccggcgctcccgccttgttatgtagcggggctgaatggcgactgtgtgaggtggtcgaacacgcttgcagatctgacgggcggagggcacgtgtgacgtgtgcagaaaatcgcgccttgcgcctggtagacgggggaggcgcatgtgctggtagggtcgaaatgctcgagcatggcgagtggggctctgtctgtgatgatacttgggacctcgaagatgcccatgtggtgtgcagacaactcggctgtggctgggccgtccaggccctgccgggactgcacttcaccccaggcagaggacccatccacagagatcaggtcaactgcagcggggccgaagcttacctctgggactgccctgggctaccgggccaacactactgtggccacaaggaagacgcaggggctgtctgtagcgaacaccagtcttggcgacttactgggggcgctgacagatgcgagggccaggtggaggtgcactttagaggtgtgtggaatacagtctgtgattcagaatggtatccctcagaggcgaaggtgttgtgccagagcctcgggtgcggcaccgcggtggagcgcccaaagggccttccccactctctgtccggccggatgtattatagctgtaacggcgaggaactgactctgtcgaactgcagctggaggtttaacaacagcaacttgtgctctcagtcattggcagcaagggtgctgtgttcagcctctcggtcgctgcacaatctgtctaccccagaggtgccggcaagcgtgcagacggtgacgattgagagcagcgtgactgtgaagatcgagaacaaagagtctcgagagttgatgctgcttatacccagcatagtcctaggtattctcctgcttggttctcttatcttcattgcattcatcctcctgagaatcaagggcaaatacgtgtttatgctgccaattcaggtccaggccccacctcccgaggactccgatagcggctccgacagcgactacgagcattacgattttagcgcacagccccctgtcgctctgaccaccttctacaattcccagcgacaccgggttaccgatgaggaggtacagcagagcaggttccaaatgcctcccttggaagagggtctggaagagctgcatgcttcccacatcccaactgcgaaccccggacactgcataactgatccaccttcactgggacctcagtatcaccctaggagcaatagtgagtcttcaaccagctcgggtgaggactattgcaactctccgaaatcaaagcttcccccttggaatccccaggtgttttcctctgagagatcgagctttcttgaacagccccccaacctggagctggccggcacccagcccgctttctcggcaggcccaccggctgacgattcatcgtcgacgtcaagtggcgagtggtatcaaaatttccaacctcccccccagcctccatcggaggagcaatttggctgccctggcagcccttccccccaaccagactctacagataatgatgactacgacgacatttcagccgcgtag

SEQ ID NO: 111399 - DNA, 1788 bp, synthetic construct
  misc_feature 1..1788: note = Description of Artificial Sequence: Synthetic coding sequence
  source 1..1788: mol_type = other DNA
atgtggctatttttcggcattactggattgttgactgcagctctgagcggccatccaagcccagcaccgcccgaccagttgaatacctcatccgcagagagcgaactctgggaacctggtgagagactccccgttaggctgacaaacggcagctcgtcctgctctggaaccgtggaggtgcgcctcgaagcgtcttgggagcctgcttgcggcgctctgtgggattctcgggcagctgaagcagtgtgtcgagccctaggctgtggcggtgcagaggccgccagtcagctggctccacccacccctgagctgccacctcctcccgctgcaggcaacaccagtgtggctgcaaacgccacacttgcaggcgcacctgccttgctgtgcagtggggccgagtggcggctgtgcgaggtagtggaacacgcgtgtagatccgatgggcgtagggcccgcgttacctgtgctgaaaatcgagcccttcgcctggtcgacggtggaggtgcctgtgccgggcgggtggagatgttagagcatggagaatggggttctgtctgtgatgatacttgggatcttgaggacgcacacgtagtctgtaggcaactagggtgcggctgggcggtgcaggccttgcccggactgcacttcaccccaggccgcgggccaattcatagggatcaggttaactgttccggggctgaggcttatctatgggattgcccgggcctgcctggacagcactattgtggacataaggaagacgctggggccgtttgttcagaacaccagagttggcgcctcaccggaggcgccgaccggtgtgagggtcaggtggaggtccatttccggggcgtctggaataccgtctgtgattctgagtggtaccctagcgaggccaaagttctctgtcagtcacttggctgtggaacagccgttgaaaggccaaaaggattgcctcattccctgagcgggcggatgtattactcgtgcaatggcgaagagcttacgctgtctaattgcagttggaggttcaacaactccaatctctgctcacaatctcttgccgcaagggtcctgtgcagcgcctcccgtagcctgcacaacctctctactccagaagtgcctgcaagcgtccaaactgtcacgattgagtcctccgtgacggtgaagatcgaaaacaaggagtctcgtgaactcatgctcctgatccctagcattgttctcggcattctcttattagggagcttgatttttatcgcctttatcctgttgagaatcaagggtaagtacgattcccaacgccaccgcgtgacagatgaggaggtacagcagtccaggtttcagatgcctccacttgaggaagggcttgaggagctgcatgccagccatatccctactgccaatcccggacattgcattacagaccctccgtctctcggaccccaatatcacccacgctccaatagcgaaagttctacgtcgagcggcgaggattattgtaacagcccaaaaagcaagttacccccctggaaccctcaggtgttcagcagcgaacggtcaagcttcctcgagcagccgccaaatctggagttggccggaactcagcccgccttctcagcggggcctcccgcagacgatagctcctccacttcctcaggggagtggtatcagaactttcagcccccaccccagcccccgtccgaggagcagtttggctgtccaggctcgccgagtccacagcctgacagcactgataacgacgattacgacgatatcagcgcagcctag

SEQ ID NO: 111400 - DNA, 1806 bp, synthetic construct
  misc_feature 1..1806: note = Description of Artificial Sequence: Synthetic coding sequence
  source 1..1806: mol_type = other DNA
atgtggctgtttttcggcataaccggtctcctgaccgccgcacttagcggacatccttcgcctgccccacccgaccaattgaacacttctagtgccgaatcagaactctgggagccgggagagaggctcccagtgcgcctgaccaatggtagttcaagttgcagtggaaccgtcgaggtgagattggaagctagttgggagcccgcgtgtggcgccctgtgggactctcgagccgcagaggctgtgtgtcgcgcgctgggctgtggtggcgctgaagctgcctcccagcttgcccctcccacacccgagctgcccccgccccccgctgctggtaacacttcggtggcagctaacgcaacactcgcaggggcgcccgcactcctttgctccggcgctgaatggaggctgtgtgaagttgtggaacacgcctgccgctcagacggtcgaagggcgcgcgtcacctgcgccgaaaacagagccttacggttggtggatggtgggggggcctgtgcaggtagggtggagatgctggaacacggcgagtgggggtctgtgtgtgacgacacctgggatctggaagacgcacacgttgtatgtcgccagctcgggtgtggctgggcagttcaggccctcccaggtctccatttcacaccaggtcgtggtccaattcatagggatcaggttaactgcagcggggccgaggcttacctttgggactgtcctggcctgcccggacaacactattgtggccataaggaggatgctggcgcggtatgctcagagcaccaatcatggcgtctgacaggtggcgcagataggtgcgagggacaagtcgaggtccatttcagaggtgtctggaacaccgtttgcgacagcgaatggtacccgtccgaagcgaaagttctctgtcagagcctgggatgcggcacagcagttgagagacccaagggccttccccacagtctgtctggaagaatgtattacagctgcaacggcgaagagcttactttgtccaattgctcctggcgcttcaataatagtaatctctgttcccagtccttagcagctagagttctgtgctcagccagcagatcattgcataatctgagtactccggaggttcccgcaagtgtgcaaaccgtgactattgaaagtagcgtaaccgttaagatcgaaaataaggaatccagagagctgatgctcctaatccctagcattgtgctgggtatcctccttctaggtagcctgatattcattgccttcattctccttcgaattaaaggcaagtacgtgttcatgctccctattcaagttcaggccccacctcctgaagactcggatagtggcagtgattcggattatgaacattacgactttagcgcacagcccccggtcgccctgacaacattctacaattcccaacggcacagggtgaccgatgaggaagtgcaacaatctaggttccagatgccaccattggaagaggggctggaagagttgcatgcctcccacatcccgaccgcaaatcccggccactgcatcacagaccccccctctctggggccacaataccatcccagaagtaattctgaaagttctacatcatctggcgaggactattgcaattctcctaaatctaaactgccaccttggaacccccaagtcttttcatcagagcgcagctcattccttgaacagccaccaaacctggagctggccggcacgcagcccgccttcagcggctccccctcaccacagcccgattccacggataatgatgattacgacgatatttctgcggcctag

SEQ ID NO: 111401 - DNA, 1779 bp, synthetic construct
  misc_feature 1..1779: note = Description of Artificial Sequence: Synthetic coding sequence
  source 1..1779: mol_type = other DNA
atgtggctgttcttcggcatcacagggctcctcaccgccgctctttccggtcatcctagcccagcaccacccgaccagctaaatacttcctcggctgagagcgagctttgggaaccaggagaaagattgccggtccgccttaccaatgggagcagtagctgcagtggtacggtggaagtgcgccttgaagcctcctgggagccagcctgtggagcgctgtgggattcaagggcagcagaggccgtgtgtagagccctgggatgcggtggcgccgaggcggcgtcgcaactggcccccccgaccccagagcttcccccccctccagctgctggcaatacttccgtcgctgccaatgcgaccctggcgggcgcacctgcccttctgtgctccggggctgagtggaggctctgtgaagtcgtggagcacgcctgcaggtcagatggacgaagagccagagtgacttgtgctgagaacagggccctgaggttggtggatggggggggggcctgcgccggaagagtcgagatgctcgagcatggcgaatgggggtccgtctgcgacgacacttgggacctagaggacgctcatgtggtgtgcagacagctcggctgtggctgggctgtgcaggctttgcctggattgcacttcactcctggcaggggccccattcaccgcgaccaagtaaactgtagtggagccgaggcctatctatgggattgtccagggcttcccgggcagcactactgcggtcacaaggaagacgcaggcgcagtgtgcagtgaacaccaatcttggcggctcacgggcggtgctgatcgatgtgagggacaggtcgaggtgcatttccgcggtgtatggaacaccgtctgtgatagcgaatggtacccctctgaggccaaggtgttgtgccagtctctgggctgcggcaccgcggtcgagagaccaaaaggccttcctcattccctcagtggaagaatgtactacagctgcaacggggaagagttaaccctgagtaattgttcttggaggttcaacaactctaacttgtgttcccaaagtcttgccgccagagtattatgttccgcctcacgaagtcttcacaatctttccaccccagaggttccggccagtgtccagaccgtcaccattgaatcctccgtgaccgtaaaaattgagaataaagagtcgagggaacttatgttgctcatccccagcatcgtgctgggcattctcctgctcgggagcttgatcttcatcgcctttatccttctgcgaattaaggggaagtatgcactgcccgtgatggtaaatcaccagcatctacctactactattccggccggaagtaattcttaccagcctgtgcctattacaatacctaaagaggattcccagcgccacagggtgaccgacgaagaggtgcagcagtcccgatttcaaatgccaccactcgaggagggtctggaggagctgcatgcctcccacattccaacagcaaaccccggtcattgcattacagacccgccatcacttggcccccagtaccaccctcggagcaatagtgagagcagcacttcttccggggaagattattgcaacagcccaaaaagtaagttgccaccttggaatccacaggtgtttagctctgagcgttcatcatttctcgagcagccaccaaatctggaactggcgggaacccagcccgccttctccgggagtccatctccccagcccgacagcaccgataacgatgactatgacgacatttcagcagcctag

SEQ ID NO: 111402 - DNA, 717 bp, synthetic construct
  misc_feature 1..717: note = Description of Artificial Sequence: Synthetic coding sequence
  source 1..717: mol_type = other DNA
atggcggtggagggagggatgaaatgtgtgaagtttttgctgtatgtcctgctccttgcgttttgcgcctgtgccgtgggattgatcgcggtgggggtgggagctcagcttgtgctgtctcagaccattattcaaggagctacaccaggctcgctcttgcctgttgtcatcatcgcagtgggagtgtttctgttcctcgtggcatttgtcggttgttgtggagcctgtaaagagaattactgtctaatgatcacctttgctatatttctgagcctcatcatgctggtggaggtggccgcagccatcgccggttatgtgtttcgggataaggtcatgtccgagtttaataataatttcaggcagcaaatggaaaattatcctaagaacaaccacaccgctagcattctggacagaatgcaggccgatttcaagtgctgtggcgccgcaaactatactgactgggagaagataccctcaatgagcaagaatcgggttccagattcctgctgcattaatgtgactgttggatgtggtatcaatttcaatgaaaaggccatccacaaggaaggctgcgttgagaaaatcgggggttggctcaggaaaaatgtgttagttgttgccgccgcagctctgggcattgctttcgtggaggtgctgggtatcgtgtttgcctgctgtctggttaagtccatcagatccgggtatgaggtaatgtag

SEQ ID NO: 111403 - DNA, 711 bp, synthetic construct
  misc_feature 1..711: note = Description of Artificial Sequence: Synthetic coding sequence
  source 1..711: mol_type = other DNA
atggccgtggaaggcggtatgaagtgcgtcaagtttttgttgtatgttctgctactggcgttctgcgcatgcgccgtcggacttatcgcagtaggggtaggtgctcagctcgtgctgtcccagacaattattcagggggccacccctggaagcctgctgcctgtggtgatcattgcagtcggagtgttcctgtttcttgtggcctttgttgggtgctgtggagcttgtaaagagaattattgcctgatgatcacatttgccatttttttaagcctgatcatgctagtagaagtggcggcagccattgctggctatgtctttcgcgataaggtcatgtcagagtttaataacaatttccggcagcaaatggagaactaccccaaaaacaaccacaccgctagcattctcgaccgaatgcaagcagatttcaagtgctgtggcgccgccaactatactgactgggagaaaataccctcaatgtctaagaatcgggtccctgactcatgttgcatcaacgtgacagtcggctgtggcattaattttaatgaaaaagctatacataaagagggatgcgtagagaagattgggggttggctccgtaaaaacgtcctggtcgtggcagctgcggctctgggaatagcatttgtgctcggcatcgtttttgcatgttgcctggtgaagagtatccggagcggctacgaagtgatgtag

SEQ ID NO: 111404 - DNA, 402 bp, synthetic construct
  misc_feature 1..402: note = Description of Artificial Sequence: Synthetic coding sequence
  source 1..402: mol_type = other DNA
atggccgttgagggagggatgaagtgcgtgaaatttctactgtatgtgctgctgctcgccttttgtgcctgtgcagttggcctcatcgcagtcggtgtcggcgcccagctggttctctcccagacaatcatacagggtgccactcccggctctcttcttcctgtagtcattatagctgtgggagtctttctgtttctggttgccttcgtaggctgctgtggcgcttgcaaagagaactactgccttatgattaccttcgccatttttctgagtttgatcatgctcgtggaagtcgcagccgccatagcgggttatgtatttagagataaggtgatgtccgaattcaataataacttcagacaacagatggagaactatcccaaaaacaaccacacagcctag

SEQ ID NO: 111405 - DNA, 717 bp, synthetic construct
  misc_feature 1..717: note = Description of Artificial Sequence: Synthetic coding sequence
  source 1..717: mol_type = other DNA
atggccgtcgaaggtggcatgaaatgcgttaaattcctcctttacgtcctgctcctagccttttgtgcctgcgccgttggcctcatcgccgttggggtgggagctcagcttgttctgtcccagaccatcattcagggggcgactccaggctctttactgcctgtagtgattattgccgtgggtgtatttctatttttagtggcattcgtcggctgttgcggcgcctgcaaagagaattactgtctgatgatcacttttgccatatttttgagcctcatcatgctggtcgaggtggcggcagcaatagccggctacgtgttcagagacaaggtcatgtctgaattcaacaataatttccgccagcagatggaaaattaccctaagaataatcacactgcttcgatcctggatagaatgcaggccgacttcaagtgttgcggggccgcaaattataccgactgggagaaaatcccctcaatgtctaaaaacagggttcccgatagctgttgcatcaacgtcactgtgggctgtggaattaatttcaacgagaaggccatacacaaagagggatgcgtggaaaagataggcgggtggcttaggaaaaacgtgcttgtggtggcagccgccgcgttggggatagcattcgttgaggtcctgggcattgtgttcgcttgttgtctcgtgaaaagcatcagatccggttatgaagttatgtag

SEQ ID NO: 111406 - DNA, 648 bp, synthetic construct
  misc_feature 1..648: note = Description of Artificial Sequence: Synthetic coding sequence
  source 1..648: mol_type = other DNA
atggcagtcgaagggggcatgaagtgcgtgaaattcctgctgtatgtactgcttctcgcattctgtgcatgtgccgtgggccttatcgccgtgggcgttggtgcacagctcgtcctgtctcagaccataattcagggggcaacccccggaagtctgttgccagtggttataattgcagtcggcgtcttcctcttcctcgtggcttttgtcgggtgctgcggcgcttgtaaagagaattattgtttgatgattacctttgccatatttctgtcactgatcatgttggtcgaggtggcagctgctatcgctggctacgtttttagggacaaggtgatgtctgagtttaataataactttagacagcagatggaaaattatcctaagaacaaccacactgccagcatcctcgaccgaatgcaggcggattttaagtgctgtggagccgccaattacacagactgggagaaaattccatccatgagcaagaacagagttcccgattcatgctgtattaacgtaaccgtagggtgtggcatcaatttcaatgaaaaggccatccacaaagaaggatgcgtggaaaagatcggcggctggctccgtaaaaacgttctggtcgtggctgccgcagccttgggaatcgcattctag

SEQ ID NO: 111407 - DNA, 654 bp, synthetic construct
  misc_feature 1..654: note = Description of Artificial Sequence: Synthetic coding sequence
  source 1..654: mol_type = other DNA
atggcagtggagggaggcatgaaatgtgtgaaatttctgttgtatgtgctgctgctcgccttttgtgcatgtgctgtgggccttatagccgtgggagtgggggctcagctggttctgtcccagacaatcattcagggggctacaccagggagcctcctcccagtcgttattatagcagttggagtcttcctttttctcgtagccttcgtgggctgttgcggagcttgtaaagaaaattactgcttaatgattactttcgcaatttttctttctctaattatgcttgtagaagttgctgccgctatcgccggctacgtgtttcgggataaggtaatgagtgagtttaacaataactttcgacagcaaatggaaaactaccccaaaaataatcatacagcatccattcttgatcgcatgcaggccgatttcaagtgttgtggtgccgccaactacaccgattgggagaagatcccaagcatgtcaaagaaccgagttcccgattcctgttgtatcaacgtgaccgtcgggtgtgggatcaatttcaacgagaaggccatccacaaggagggatgtgtcgaaaagatcggcggatggctgagaaagaacgtgctagtggtggcggcagcggcccttgggatcgcctttgtcgaatag

SEQ ID NO: 111408 - DNA, 717 bp, synthetic construct
  misc_feature 1..717: note = Description of Artificial Sequence: Synthetic coding sequence
  source 1..717: mol_type = other DNA
atggctgtcgaaggcggcatgaagtgtgtgaagttcctcttatatgtgctgctactcgctttttgtgcctgtgcagtgggattgatcgccgttggcgtgggtgctcaactcgttctcagtcaaacgattatccagggggcaactccaggttctctcttgccagtggttattattgccgtcggcgtgtttctttttctggttgccttcgtaggatgctgtggcgcgtgcaaggagaactattgcctgatgatcacgttcgccatcttcctttctctgatcatgctcgttgaagttgccgcagccattgcggggtatgtttttcgggacaaggtgatgagcgagtttaataacaatttcagacagcagatggagaactaccctaagaacaaccacactgcgagcatcctggaccgtatgcaagctgacttcaaatgttgcggcgcagctaattacacagattgggaaaagattccctcaatgagtaaaaaccgggtgccagactcatgttgcatcaatgtgacggtgggatgcggcataaatttcaacgagaaagcgatccataaagaggggtgtgtcgagaaaataggaggctggctacggaagaatgtgttggtagtggctgcagccgcgcttggcatcgcctttgtggaggttctcggcattgttttcgcatgctgcctcgtgaaaagcattaggtccggctatgaggtaatgtag

SEQ ID NO: 111409 - DNA, 648 bp, synthetic construct
  misc_feature 1..648: note = Description of Artificial Sequence: Synthetic coding sequence
  source 1..648: mol_type = other DNA
atggccgtggagggcgggatgaaatgtgtcaagttcctgctctatgtcctcttgctggcattttgtggagctacacccggatctctcttgccagttgtgataattgctgtaggagtgtttcttttcctggtggcttttgttggctgttgtggcgcatgcaaggagaactactgccttatgattaccttcgcgatattcctctcactgatcatgttagtggaagttgcagcggctattgccgggtatgtgttccgggacaaggtgatgagcgagttcaataacaattttaggcagcaaatggagaattatccaaagaataaccatacagcgtcgatcctcgaccgcatgcaggccgactttaaatgctgcggggcggcgaactatacagactgggaaaagattccatcaatgagcaagaatcgcgtgccagatagctgctgcatcaacgttaccgtgggctgtggcattaatttcaacgagaaagcaatccataaagagggctgtgtggaaaaaatcgggggctggctacgtaaaaacgtactcgtggtagctgccgctgccctaggcattgcattcgtcgaggtgttagggatagtcttcgcatgttgcttggtgaaatcaattcgctctggctacgaggtcatgtag

SEQ ID NO: 111410 - DNA, 471 bp, synthetic construct
  misc_feature 1..471: note = Description of Artificial Sequence: Synthetic coding sequence
  source 1..471: mol_type = other DNA
atgatcacgtttgccatatttctttcattgataatgctggtggaggtggcagccgctattgcaggttatgttttcagggataaagtaatgtcagagttcaataacaattttcggcagcaaatggagaactatcccaagaataaccatacagcttccattctcgatagaatgcaggcggacttcaagtgctgtggcgctgcaaattacacagattgggagaagatcccttcaatgtctaagaacagggtcccagatagctgttgcattaatgttacagtgggttgcggcataaacttcaatgaaaaagccatacataaggagggatgcgtggagaagatcggcggatggctgaggaaaaacgtcttggtcgtcgcagcagccgccctgggtatagccttcgtggaggtcctcgggattgtgtttgcatgttgcctcgtaaagagcatcagaagcggctacgaggtaatgtag

SEQ ID NO: 111411 - DNA, 471 bp, synthetic construct
  misc_feature 1..471: note = Description of Artificial Sequence: Synthetic coding sequence
  source 1..471: mol_type = other DNA
atgatcacatttgcaattttcctttctctgatcatgctggtcgaagtcgccgcggccattgccggctacgtgtttagggacaaggttatgtctgagttcaataacaattttcggcaacagatggagaattatccaaaaaacaaccacacagccagcattcttgatcggatgcaggcagactttaagtgctgcggagcagctaattacactgattgggaaaaaataccatccatgtccaagaaccgcgtgcctgactcttgttgtataaacgttacagtgggttgtggcatcaatttcaacgaaaaggccatccacaaagagggctgcgtcgagaaaataggggggtggctccgtaagaatgtgctcgtcgtggctgctgcagccttgggtattgctttcgtggaagtattaggaattgtcttcgcctgctgcttggtgaaaagcattcggtcaggctacgaggtaatgtag

SEQ ID NO: 111412 - DNA, 1065 bp, synthetic construct
  misc_feature 1..1065: note = Description of Artificial Sequence: Synthetic coding sequence
  source 1..1065: mol_type = other DNA
atgagactggctgtactcttctctggggccctcctgggcctgcttgccgctcagggaaccggtaacgattgtccgcacaagaagagcgccacattgcttcccagctttaccgtcactccgacagtgacggagtccaccgggaccacgagtcacagaacaacaaagtcacacaaaaccacaacccatcgaacaactactactgggacaacctcccacggtcctactactgcaacacataaccctaccaccacctctcacggcaatgttactgtccatccaactagcaatagtaccgcgactagtcaggggccaagtaccgccacccattccccagcgaccacaagtcacgggaatgctaccgtccacccaacctccaactcaacggccaccagccccggcttcacctcttctgcccaccctgagccaccccctccctccccctccccatctcctacctctaaggagaccattggcgactacacatggactaatggcagtcagccctgtgtgcacctacaggcacaaatacagattcgggtcatgtacactactcagggtggtggagaagcttggggcatatccgtactcaaccctaacaagaccaaggtgcagggaagttgcgaaggcgcccatccacatttgctgctctccttcccctatggacaccttagcttcgggtttatgcaggacctgcaacaaaaagtagtttacctaagctacatggcagtggagtataatgtgtccttcccacacgctgcacaatggaccttttcggcccagaacgcatccctgagggacctgcaggctccactcggacagtccttttcatgtagcaatagttctattattctctctcctgcagttcatctagatttgctgtcgctccggctacaggccgctcagttgccacacaccggagtgtttggacagtctttttcttgtccctcagatcgcagcattttgctcccactcatcataggtctcattctgctgggcctactggcgttggtcttgatcgccttttgcatcattaggaggcgaccgagcgcctaccaggcattgtag

SEQ ID NO: 111413 - DNA, 894 bp, synthetic construct
  misc_feature 1..894: note = Description of Artificial Sequence: Synthetic coding sequence
  source 1..894: mol_type = other DNA
atgcggctggcggtgctgttttcgggggcgttgttgggcctgctagctgaaagcacagggacaacctcccacaggaccaccaaatcgcataagaccaccactcacaggacaacaacaactgggactaccagccacggacccacaacagcaacacataatcctacaaccacttcccatggaaacgccactgttcaccctacttccaacagcactgccacatcccctggatttacttcctcagcccaccccgagcctccccctcctagtccaagcccaagtccgacgtctaaggaaaccatcggcgactatacctggacaaatggttctcagccctgcgtgcacctgcaagcacagattcaaatacgcgtcatgtatactactcagggtgggggcgaagcatggggcatttccgtgcttaatcctaataaaaccaaggtgcagggcagttgtgaaggcgcccacccacatcttctcctgtccttcccttatgggcatctgtcattcgggtttatgcaggatcttcaacaaaaagtggtatatttgtcctacatggcggtagaatacaacgtctcattcccgcacgctgctcagtggaccttctctgcccagaatgcatctcttcgcgaccttcaagcaccactgggccagagtttctcttgttcgaattcctctattatcctcagtccagcggtgcatcttgatctgctaagcctgcgccttcaggccgcccagctgcctcataccggagtcttcggccaatccttctcgtgccctagtgaccgctctatcctgctgccactgatcattggactgatccttctgggactgctcgctctggtgttgatagccttctgtatcatcaggaggcgcccatcggcctaccaggcactctag

SEQ ID NO: 111414 - DNA, 3018 bp, synthetic construct
  misc_feature 1..3018: note = Description of Artificial Sequence: Synthetic coding sequence
  source 1..3018: mol_type = other DNA
atgatgtcagatgccagcgacatgcttgcggccgcattggaacagatggacggaatcatcgctggctccaaggctttggagtactccaacggcatttttgattgccaaagcccaactagcccttttatgggtagtcttcgggctctgcacctcgtggaggacctcagaggcctgctcgagatgatggagactgatgaaaaggaggggctgcggtgccagattcccgactccaccgcagagactttggtggaatggctgcagtcccagatgaccaatggtcacctgcctggaaacggtgacgtgtaccaggagagacttgctaggttggaaaatgataaagaatcactggttctccaggtaagcgttctgacagatcaggttgaagcacagggtgaaaaaatcagggacctagagttttgcctcgaagagcacagagagaaagtgaatgcaaccgaagagatgctgcagcaagagcttctatctaggacatcactcgagactcagaagctcgaccttatggctgagatctccaatctgaaactcaaactaacagccgttgagaaagaccggctggactacgaggacaagttcagggatacggagggcctcatccaggaaataaacgatctccgcttgaaggtgagcgagatggacagtgaaaggctccagtatgaaaagaagctgaaatcaacaaaagacgaactggccagccttaaggagcagctggaagagaaagagagcgaagtcaagcggctgcaggaaaagctggtatgcaaaatgaagggtgagggggtcgagatagtcgaccgggacgagaattttaagaagaagctcaaagagaagaatatagaggttcagaagatgaaaaaggccgtagaaagcctaatggccgcaaacgaggagaaagatcggaaaattgaagatctacgccagtgcctcaataggtacaaaaaaatgcaggatactgtcgtcttagcccagggcaagaagggaaaggacggagaatacgaggaattactcaattcctcatcaataagttctctcctagacgctcagggtttctccgatcttgaaaagtccccttctccaaccccagtgatgggctccccttcttgtgacccctttaatacatccgtccccgaggagttccacacaacaatcctccaggtcagcattccatcactgctgcctgccaccgtgtccatggagacctcggagaagtctaaactgacgcccaaaccagagacctcattcgaggaaaacgatgggaacattattctgggcgctaccgtcgatacacaactatgcgataaactgctcacatcttcattacagaaatcatcttccctgggaaacctgaaaaaggagacaagcgatggtgaaaaggaaacaattcagaagacgagcgaagaccgagctccagccgagagccgtcccttcggcacgctccccccccgcccgcctggtcaggatactagtatggacgacaatcctttcggtacaaggaaggtgaggagctcctttggtcgtggctttttcaagattaagtccaacaaaagaaccgcctccgcccctaacctggatagaaaaagaagtgcctccgcccccactctcgctgagaccgaaaaggagaccgccgaacatttggatttagctggcgctagctctcgcccaaaggattctcaacgaaattctccgtttcagatcccgcctccatcaccagacagcaagaagaagtcacggggcattatgaaattgtttgggaagttaaggagaagccagtccactacctttaatccggatgacatgagtgagcctgagttcaaaaggggcgggacgcgggctacagctggaccgcgcttggggtggtccagggaccttggacagtcaaactcagacttggatatgccatttgccaagtggacaaaggaacaagtctgcaactggctcatggagcagggtctggggtcctatctgaattctgggaaacactggatcgcttctggccagacgttattgcaagctagccagcaggatttggagaaggagcttgggattaaacactcgctgcaccggaaaaagctccaactggccctgcaggctctgggaagtgaagaagagacaaaccatgggaagcttgacttcaattgggtgacgcgttggttagatgacataggcttgccacaatataagacccagttcgacgaggggagggtcgacggaaggatgttgcattatatgaccgttgacgacttactgagcctgaaagtcgtgtcagttctgcaccacctgtcaatcaaaagagctatccaggtgctcaggatcaataacttcgaaccaaattgcctaagaaggcggccttcggacgaaaacacaattgcaccttcagaagtccaaaagtggaccaaccaccgtgtgatggagtggctccgttctgtggatctcgctgagtacgcccctaacctgagaggatcaggcgtgcacggtggtctaatggtcttagaaccacgttttaatgtcgagacaatggcccagttattgaatatccctccaaacaaaacactattgagaaggcacttggctacacactttaaccttttgatcggcgctgaggctcagcaccagaagcgggatgccatggagctccccgattacgtgttgctgactgcaaccgcaaaggtcaagccaaaaaaactggcctttagtaatttcggcaatctcagaaaaaaaaaacaagaggacggtgaggagtacgtttgccctatggaactgggccaggcctccggttccgcctccaaaaaggggttcaaaccaggtctggatatgcggctttatgaagaggacgatctggatcgactggagcagatggaggactccgaagggacagtcaggcagattggcgctttcagcgagggaatcaataacctgacacacatgttaaaggaagatgatatgtttaaagatttcgccgccaggtcacctagtgcaagcattacagacgaggatagtaatgtgtag

SEQ ID NO: 111415 - DNA, 495 bp, synthetic construct
  misc_feature 1..495: note = Description of Artificial Sequence: Synthetic coding sequence
  source 1..495: mol_type = other DNA
atgtcgagtgagaactgcttcgtagccgagaatagctcactgcacccggaaagcggacaggagaacgatgctacctcccctcacttctccactagacacgaaggctcttttcaggtgcccgtcctttgtgccgttatgaacgttgttttcataacaattttaattatcgcccttatcgcgctgtctgtggggcaatacaattgccccgggcagtacacattctctatgccgagtgattctcacgtttccagttgcagtgaggactgggtcggttatcagcgaaagtgctatttcattagtacagtcaaacgttcatggacgtcggcgcaaaatgcttgtagcgaacacggcgctacactggcagtcattgatagcgaaaaagatatgaactttctgaagagatacgccggcagggaagaacattgggttggcctaaaaaaggaacctgggcatccttggaaatggtcaaacggaaaggaatttaataattggtag

SEQ ID NO: 111416 - DNA, 723 bp, synthetic construct
  misc_feature 1..723: note = Description of Artificial Sequence: Synthetic coding sequence
  source 1..723: mol_type = other DNA
atggccgggcctcctcggctgctcctgttacctctccttctggccctcgctagaggtttaccaggcgccctggcggcccaggaagtccagcagtcaccacattgtaccaccgttccagttggagcctctgtcaacatcacgtgcagtaccagcggtgggctacgcgggatttatctaagacagcttggacctcagccgcaagacatcatctattatgaggatggagtggtccctacaaccgatcgtaggttcagagggcggatcgatttttccggtagtcaggataacctcaccatcactatgcacaggttacaattatcagataccggtacttacacatgccaggccattacagaagtgaacgtgtacggcagtggaacactcgtgctggtcacggaagaacagtcgcagggctggcatcggtgctccgacgctcctccccgcgcctccgcattacctgccccgcctacgggctctgcactccccgacccacagactgcctccgccctgccagaccctccagccgccagcgcactccctgccgctctggccgtcatctcttttctcctggggttaggcctgggtgtggcttgcgttttagccaggacccagatcaagaagctctgtagctggagggacaagaactccgctgcttgcgtcgtctacgaggatatgagtcattcccggtgcaatacattatcatcgcctaaccagtatcagtag

SEQ ID NO: 111417 - DNA, 1080 bp, synthetic construct
  misc_feature 1..1080: note = Description of Artificial Sequence: Synthetic coding sequence
  source 1..1080: mol_type = other DNA
atggctgaggcaattacatacgcggatttgcggttcgtgaaggcacctttaaagaagagcatatcctcaaggctcgggcaggaccccggggccgatgatgacggcgaaattacctatgaaaacgtacaggtccctgcagtcctaggtgtgccgtcatctctcgcgtcttctgttctgggtgacaaagcggcggttaaatcagagcagccaaccgcgtcatggcgagcagttacgagcccggctgtaggccgcatcctgccttgcagaaccacttgcctgcgctacctgctcctggggctcctgttgacatgcctgttgctgggggtgaccgctatttgtcttggcgtgcgatacctgcaggtctcccaacagctccagcagaccaacagagtattagaagtcacaaacagctcactcagacagcagctgagactgaaaatcacacaactcggccagtcagcagaagacctgcaggggagtcgcagagagttagctcaatcacaggaagccctgcaagttgagcagcgcgcccaccaagctgcggagggccagttgcaggcttgtcaggccgatagacaaaaaacgaaggaaaccttacagtctgaagagcagcaaagaagagctctggaacagaagttgtctaacatggaaaatcgtttgaagcccttttttacgtgcggctctgcagatacatgctgccccagcggatggattatgcatcaaaaatcatgcttttacattagcttgacaagcaagaactggcaggagagccaaaagcaatgtgagacactaagctccaaattagcaactttcagcgagatatacccccaatcccacagttactacttccttaatagcttgttaccgaacgggggatcgggcaatagctattggactggactgagttctaacaaagactggaaattgacggatgacacacagagaacccgaacctacgcgcagagctctaagtgcaacaaagtgcataagacgtggagctggtggacacttgagtcagagtcttgtaggtcctccctgccatatatctgtgagatgaccgcattcagatttcctgattag

SEQ ID NO: 111418 - DNA, 363 bp, synthetic construct
  misc_feature 1..363: note = Description of Artificial Sequence: Synthetic coding sequence
  source 1..363: mol_type = other DNA
atggccgaagcaatcacttatgcggacctccgtttcgtgaaggcacctctgaagaaatctataagttctcgactgggccaggacccaggggccgatgatgatggtgagattacttatgagaatgtacaagtgcctgctgttcttggggtgccatcaagtctggcctcttctgtgttgggggataaggccgcggtgaaatccgagcagcctaccgcctcatggcgcgcagtgacatcgccggcagttggacggattctgccttgcgaatgtgcttgcgccggacaacctaggggtcaagttctggccccagtcccagctgccgatggggccggacctaggggcgtgcagctcctgccgggatag

SEQ ID NO: 111419 - DNA, 360 bp, synthetic construct
  misc_feature 1..360: note = Description of Artificial Sequence: Synthetic coding sequence
  source 1..360: mol_type = other DNA
atggctgaagccatcacctatgctgacttacggttcgtcaaagctcctttgaaaaagagcatctctagccgattgggtcaggatccgggcgccgacgacgacggcgagataacctacgagaatgtccaggtgcccgccgtgctgggcgtgcctagttcactggcctcgagcgtgctgggggacaaggcggccgttaagtccgaacagcctaccgcaagctggagagcagtcacatcacctgccgtgggccgcattctgccctgcagaacaacgtgccttcgctacctgctcctagggctgttgctgacatgcctgctgttgggcgtgaccgctatttgtctgggcgtgcggtgcgaatag

SEQ ID NO: 111420 - DNA, 1080 bp, synthetic construct
  misc_feature 1..1080: note = Description of Artificial Sequence: Synthetic coding sequence
  source 1..1080: mol_type = other DNA
atggccgaggctatcacgtacgccgacctccgcttcgtcaaggcccccctgaagaaaagtattagcagcaggctgggtcaagaccccggagctgacgatgacggggagatcacctacgagaatgttcaagtgcccgcggtgcttggcgtgccctctagcctggcttcctctgtgttgggcgataaggctgccgttaaaagcgagcagcctacggccagctggcgtgcagtgacatccccagccgtgggccgtattctcccatgcaggactacttgcctaaggtatctgcttctgggattgttactcacctgcctgcttttaggtgtcaccgcgatttgcctcggagtccgttacctacaggtttcccagcaactccagcagaccaaccgggttctcgaggtgaccaattccagtctgcgccaacagctacggctaaaaatcacacaattaggccaaagtgccgaggatctgcaaggcagcagaagagagcttgcacagtcacaggaggcactgcaggtggaacagagggcccaccaggcagccgaaggtcagttacaggcgtgtcaggccgaccgccagaaaaccaaagaaactctgcagagtgaggagcagcagcggagagcactggagcagaagctctcaaacatggagaacagactgaaaccattttttacatgtggctccgccgatacgtgctgccccagcggatggataatgcaccagaagtcctgtttctacatatcactgacttctaaaaattggcaggagagtcagaaacagtgtgaaactctgtcttcgaagcttgccacattctcagaaatctatccccagtctcattcttactactttttaaacagcctgctgcccaatggcggcagcggcaactcctattggaccgggctgtcaagcaacaaggactggaagctgacagacgacacccagcgtacacggacatacgcacagtcaagtaagtgcaataaggtgcataagacatggagttggtggactcttgaatcagagtcatgcaggagttctctcccgtatatttgcgaaatgaccgcgtttcggttccctgattag

SEQ ID NO: 111421 - DNA, 1080 bp, synthetic construct
  misc_feature 1..1080: note = Description of Artificial Sequence: Synthetic coding sequence
  source 1..1080: mol_type = other DNA
atgcagacgagaaatccccagagtcatggggagaatggtgccagcccttggtcttggggagaccgcctcggccccgggccggacccaggtgctgatgatgatggggaaattacatatgagaatgttcaggttcccgcagtattgggagttccttcttccctggcatcctccgtgctgggcgacaaggctgctgtgaaaagcgagcagcccaccgctagttggcgggccgtcactagcccagctgtgggccggattttgccatgtagaacgacatgcctgaggtacctgctgcttggactcctgttgacgtgtcttctgctgggtgtgaccgctatatgcctgggagtgcgctacctgcaggtgtcccagcagctccaacagacgaatagggttctcgaagtgacaaacagctccctgcgtcagcagcttaggctcaagataacccagctgggccaaagcgcagaggacctacagggcagtcgacgggagctggctcaaagtcaggaggctctccaggttgagcaacgggcccaccaggcagcggagggccagctgcaggcttgccaggccgacaggcagaagacaaaggaaacgttgcagtccgaggagcagcagaggagagcacttgagcagaagctgtccaatatggaaaaccggctcaagccgttctttacctgtgggtcggcggacacatgctgcccgagtggctggatcatgcaccagaagagctgcttctatattagtctgacctctaagaactggcaggaatctcagaagcagtgtgaaacactatcctctaagctcgcgacattctcggagatctacccacagtcccactcgtattacttcttgaattccctcctgccaaacggcgggtctggtaactcctactggactggcctgtccagcaacaaggactggaaattaacagatgatacccagcgaacaaggacctacgctcagtcatccaaatgtaacaaagttcataaaacctggagttggtggactctggagtcggaatcttgtagatcctctctgccttatatatgcgaaatgacggccttccgtttcccagattag

SEQ ID NO: 111422 - DNA, 891 bp, synthetic construct
  misc_feature 1..891: note = Description of Artificial Sequence: Synthetic coding sequence
  source 1..891: mol_type = other DNA
atgcacagacgacgctctagaagttgccgcgaagaccaaaaacctgtgatggatgatcagcgcgacctcatatcaaacaatgaacagctccccatgctggggaggcgcccaggggcacctgagagcaagtgttcacggggggccctgtacacaggattttcaatcttggttactctactgctggctggacaggcaactaccgcgtactttttataccagcagcagggaagattggacaagcttaccgttacgagccagaatctccaactcgaaaacctgcggatgaagctgccaaaaccccctaagccagtgtcaaagatgagaatggccacccctctcctcatgcaggcactcccaatgggcgccctgccacagggacccatgcagaatgccacgaagtacggcaacatgacagaagatcacgttatgcatctgctacagaatgccgaccccctcaaagtgtacccacctctgaaaggctctttcccagagaatctgagacatctgaagaataccatggagacaatagactggaaagtgttcgaatcttggatgcatcactggctactgttcgagatgtctcggcactcactagagcagaagcctaccgatgcacctcctaaagttctcactaaatgtcaggaagaggttagtcacattcccgcagtccaccccggcagttttagacctaagtgtgacgagaacggtaactaccttcccctccagtgctatggaagtattgggtactgctggtgcgtattcccgaacggcactgaagtgcctaatactcgttcccgagggcaccacaactgctctgagtccttggagttagaggatcccagcagtgggctgggtgttacaaagcaggaccttgggccagttcctatgtag

SEQ ID NO: 111423 - DNA, 699 bp, synthetic construct
  misc_feature 1..699: note = Description of Artificial Sequence: Synthetic coding sequence
  source 1..699: mol_type = other DNA
atgcacagaagacggtcacgaagctgccgggaagaccagaaacctgtcatggatgaccagcgtgatctgatcagtaataacgagcagttgcccatgctcggccggaggccaggagctccagagtcaaaatgctctagaggcgctctgtataccggtttcagtattctcgtgacgttgcttttagccggtcaggccaccaccgcctattttctgtaccaacagcagggacggctggataaactcaccgtgacctctcagaacctccagttagagaatcttagaatgaagctgcctaagccaccaaagccagttagtaagatgaggatggcaacccccctactgatgcaagccctgccaatgggagctctcccgcaaggacctatgcaaaacgctaccaaatacggcaatatgaccgaggatcatgtgatgcatttgctccagaacgcagatcccctgaaggtgtaccccccactgaaagggtcattcccagagaatttacgtcacttgaagaacaccatggagacaattgactggaaagtgttcgaaagttggatgcaccactggctgctgttcgagatgtcacgccatagcttggaacaaaaacctacggacgccccacccaaagagtctcttgaactggaggacccaagcagtggactgggcgttaccaagcaagatttaggccctgtgcctatgtag

SEQ ID NO: 111424 - DNA, 483 bp, synthetic construct
  misc_feature 1..483: note = Description of Artificial Sequence: Synthetic coding sequence
  source 1..483: mol_type = other DNA
atgcatcgaagacgttcgcggtcctgtagggaagaccaaaaacccgtgatggatgaccaaagggatctgatttctaacaatgaacagctcccaatgctgggccggaggccaggagcgcctgaatccaagtgtagcagaggtgccttgtacaccggcttctctatactagtgactttgctattggcgggccaggctaccaccgcttactttctataccagcaacagggccgactggacaagctgactgttacctcacagaatctgcagctcgaaaacctgaggatgaagttgccaaagccgccgaagcccgtcagcaagatgaggatggccacgcccctgctcatgcaggcgctgccgatgggggctctcccccagggcccaatgcagaatgcaacaaagtacggcaacatgactgaagatcatgtcatgcatctcctgcagagccactggaattggaggactagattactgggatgggtgtag

SEQ ID NO: 111425 - DNA, 951 bp, synthetic construct
  misc_feature 1..951: note = Description of Artificial Sequence: Synthetic coding sequence
  source 1..951: mol_type = other DNA
tagagaagttgcagagaagatcaaaaaccggtgatggacgatcagcgggatcttatttccaataatgaacagctgccgatgttgggccggcggcctggggcccccgagtcgaagtgttccagaggagccctgtacactggctttagtattctcgtgacccttctcctggcgggacaggccaccacggcctacttcctctatcagcagcaaggacggctggacaagctcacggtcactagccaaaatctgcagctggagaatctgcgcatgaagttacccaagccccctaagccggtctccaaaatgcgtatggctacaccactgctgatgcaggcactccctatgggagcgttgcctcagggcccaatgcagaatgctacaaagtatggcaatatgaccgaggaccacgtgatgcacctgcttcagaacgctgatcccctcaaggtgtatcctcctctcaagggaagctttccggagaatctgagacacttgaagaacactatggagacgattgattggaaggtgtttgaatcctggatgcaccactggctactttttgaaatgtcacggcattccctggagcagaagccaaccgacgcacccccaaaggtcttgaccaagtgccaggaagaagtttctcatattccagctgtgcaccctggcagttttcgtcccaaatgtgacgaaaacggcaactatctgcctctccagtgttacggcagcattggatattgctggtgtgtgtttcctaatggaaccgaagtgcccaacacaaggagtagaggccaccataattgttccgagagtctggagttggaagatccttcctctggactcggggtgaccaaacaggatctggggccaggcaaggggctggcggaagggcacctcgttacctcctcttcctcaccagccgggcccgccccattgtgggccggcgagggcgtgtag

SEQ ID NO: 111426 - DNA, 369 bp, synthetic construct
  misc_feature 1..369: note = Description of Artificial Sequence: Synthetic coding sequence
  source 1..369: mol_type = other DNA
atgcacaggagaaggagccgctcatgccgagaagatcaaaaacccgtgatggatgatcagcgcgatctgatctctaataacgagcagttacccatgttgggccgccggcccggggcacccgagtctaagtgttcaagaggtgctctgtatacaggatttagcatacttgtgacactgctgctcgctggccaagccacaaccgcatactttttgtaccagcaacagggccggctcgacaaattgactgtcacatcccagaatctgcagttggaaaatctgcgcatgaagttgccaaagccgcacgccgagtgccatcaggtctggcaacatgaccggggaccatgtgacgcgccagcgcctgagtgctag

SEQ ID NO: 111427 - DNA, 459 bp, synthetic construct
  misc_feature 1..459: note = Description of Artificial Sequence: Synthetic coding sequence
  source 1..459: mol_type = other DNA
atgcatcggaggcgctctcggagctgcagggaggaccagaagccagttatggacgaccagcgggacttgatttccaataacgagcagctccctatgctcgggcgcaggcctggcgcccctgaatctaagtgctctcgaggggccctgtacaccggatttagcattctcgttaccctactgttagccggccaggccacaacggcctatttcctctaccagcaacaagggagactggataagttgacggtgacatcccagaaccttcagctcgaaaacctacggatgaaactgccaaaacccccaaagccagtgagcaaaatgagaatggctactcccttgctcatgcaggctctgcccatgggggcactcccacagggccctatgcagaacgccaccaagtatggcaacatgaccgaggaccacgtgatgcatctgttgcaggaagtggccaaatcctag

SEQ ID NO: 111428 - DNA, 690 bp, synthetic construct
  misc_feature 1..690: note = Description of Artificial Sequence: Synthetic coding sequence
  source 1..690: mol_type = other DNA
atggcgaggctggctcttagtcctgtcccgagccattggatggttgctctgttattgctgctctctgccgagcctgtccctgccgcccgttccgaagaccggtatcgcaaccctaaggggtcggcttgctcacgaatttggcagtctcccaggtttatcgctcggaaacgcggttttacagtcaagatgcactgttacatgaacagtgcttccggcaatgtgagctggctgtggaagcaagaaatggacgaaaacccacagcagctaaaactagaaaaaggacggatggaagagtctcaaaacgagtcactcgctactctgacaatccaggggattcggtttgaagataatgggatatatttttgccagcagaaatgtaacaatacgagcgaggtatatcagggttgtggtacagagcttcgcgttatgggcttcagcacccttgcccagctcaaacaaagaaatacactcaaggatggcattattatgatacagactttgcttatcattctgttcatcattgtgccaatcttccttctgcttgataaggacgattctaaggcaggaatggaagaggaccatacttacgagggcctcgacatcgaccaaacagccacttacgaggacattgtaacgttgcgcactggagaagtcaaatggtccgtgggcgaacaccctggccaggagtag

SEQ ID NO: 111429 - DNA, 378 bp, synthetic construct
  misc_feature 1..378: note = Description of Artificial Sequence: Synthetic coding sequence
  source 1..378: mol_type = other DNA
atggcccgacttgctcttagtccggttcctagccactggatggtggccctgctgctcctgctgtccgctgaacctgtcccggccgcaagatcggaggatcgatatcgtaaccccaaggggtttagtacgctggctcagctgaagcagagaaacaccttgaaagatggcattattatgatccagaccctgctcatcattcttttcattatcgtgcccatctttttgcttctcgataaagacgacagtaaagcaggtatggaggaagaccatacatacgagggtttggacatagatcagacagcaacctatgaagatattgtaaccctgcgaaccggggaagtgaagtggagcgtgggagagcatcccggccaggaatag

SEQ ID NO: 111430 - DNA, 693 bp, synthetic construct
  misc_feature 1..693: note = Description of Artificial Sequence: Synthetic coding sequence
  source 1..693: mol_type = other DNA
atggcacggctcgcactgtcccctgttccatcacactggatggtcgcgttgttgctcctgctcagtgcagccgaacccgtcccagccgctagatcggaggacagataccgcaacccgaagggctcggcctgtagtagaatctggcagtctccacggtttatcgctcggaagagagggttcacggtaaaaatgcattgttatatgaactcagcttccgggaatgtgtcctggttgtggaagcaggaaatggatgaaaacccacagcaacttaagctggaaaagggtcggatggaagaatcccagaatgaaagcctagctaccttgacaatacaaggaatccgtttcgaggacaacggcatctatttttgccaacaaaagtgtaataacacatcagaagtgtaccaggggtgcgggacagaactgcgggttatgggattcagtacactggcacagttgaagcagcgcaacactctaaaagatggaatcatcatgatccagacactgctaataatcctgtttataattgtccccattttcttgctgctggataaagatgattccaaggcgggcatggaggaagatcacacctacgaaggacttgatatcgaccagaccgccacctatgaggatatcgtcacactgagaacaggagaggtcaagtggtccgttggtgaacatccaggccaagaatag

SEQ ID NO: 111431 - DNA, 711 bp, synthetic construct
  misc_feature 1..711: note = Description of Artificial Sequence: Synthetic coding sequence
  source 1..711: mol_type = other DNA
atgggagtggagggatgcacaaagtgcatcaaatacctgctcttcgtgttcaactttgtcttctggctcgcaggtggagtgattctgggcgtggcattgtggcttcgtcacgatccacagactacaaatctgctatacttggagctgggagacaaaccggcaccaaacacattctacgtgggtatctatattctcattgccgtaggggccgtaatgatgtttgtgggcttcctcgggtgttatggagccatccaagagtcacagtgtttgctcggcacattcttcacttgcttggtgatcttgtttgcttgcgaagttgcagctggcatttggggattcgtgaataaggatcagatagctaaagacgtaaagcaattctacgaccaggccttgcagcaggccgtagtggacgatgacgcgaataacgccaaagcagtggttaagacattccacgagaccttggattgctgcggcagcagtaccttgaccgccctcacgactagcgtgctgaaaaacaacctgtgtccttcagggagtaacattatttcaaatcttttcaaggaggattgccaccagaagatcgatgacttgtttagcggcaaactgtatctgatcggtatagctgccattgtggtggcagtcataatgatattcgaaatgattctttcgatggttctgtgttgcggaatcaggaatagttcagtttattag

SEQ ID NO: 111432 - DNA, 618 bp, synthetic construct
  misc_feature 1..618: note = Description of Artificial Sequence: Synthetic coding sequence
  source 1..618: mol_type = other DNA
atgtctcggggcttgcagcttctgcttctgagctgtgcctactctttggcgcccgccactcctgaggtaaaggtggcctgctcggaggatgtggatctgccctgcaccgcgccttgggatccccaggtgccgtatactgtgtcgtgggtgaaactgctcgaggggggggaagaaagaatggagaccccacaggaggatcatctcaggggccagcactaccatcagaagggccagaatggtagctttgacgccccaaatgagcgcccatattcattgaaaattcgtaatacaacaagctgcaattcgggaacatacagatgcacactacaggaccccgatggtcagcgcaatctatccgggaaggtgattctcagagtgactggctgtccagctcagcgaaaagaggaaacctttaagaaataccgggccgagatcgttcttttacttgccctggtgattttctatctgacccttattatcttcacctgcaaattcgcgaggctgcagtcaatttttccggatttctcaaaggctggcatggagagggccttcctcccggtgaccagccctaataaacatcttgggctagttacacctcacaagacagagctagtctag

SEQ ID NO: 111433 - DNA, 351 bp, synthetic construct
  misc_feature 1..351: note = Description of Artificial Sequence: Synthetic coding sequence
  source 1..351: mol_type = other DNA
atggaccctcagtgcaccatgggcctctcaaatattctttttgtgatggccttcctcctctccgaactagaggacccccaaccaccacctgatcatatcccctggataacggcagtattgcccacagtgataatttgtgtgatggtattctgcctgatcctgtggaagtggaaaaaaaaaaagagaccaaggaattcttataaatgcgggacaaatacaatggaacgagaggaatcagaacaaacaaagaaaagggagaagattcacatccccgagcgttccgacgaggcgcagcgagtgttcaaatcttccaaaacctctagctgtgataagtccgacacttgtttttag

SEQ ID NO: 111434 - DNA, 990 bp, synthetic construct
  misc_feature 1..990: note = Description of Artificial Sequence: Synthetic coding sequence
  source 1..990: mol_type = other DNA
atggacccccagtgtactatggggctcagcaacatcttgtttgtcatggcgtttctgttgtcaggagccgcacctctgaagatccaggcctactttaacgagacagccgacctcccttgccagttcgcgaatagtcagaaccagtctctgtcagaactggtggtgttctggcaagatcaggagaaccttgtcctgaatgaggtgtatctagggaaggagaaattcgatagcgtgcacagcaaatatatgggccgcacatccttcgactctgattcgtggacgcttcgcttgcataacctgcagatcaaagataaggggctgtatcagtgcatcattcaccataaaaaacccactgggatgatccgtatacatcagatgaatagtgaactatccgtactcgccaacttttcacagcccgagatagttccaattagcaatattactgagaacgtgtacattaatttaacctgctcttccattcacggctatcccgagccaaagaagatgtctgtactcctgcgcacaaagaacagcactatcgaatatgatggcgtgatgcagaaatctcaggataatgtgacagagttgtatgacgtttccatcagtctcagcgtgagtttcccagacgtcacttccaacatgactatcttttgcatccttgagacggacaaaactagacttctatcgtcaccattttctatcgagctggaagaccctcagcctcctcccgatcacattccttggataactgctgtgctccctacagtaattatctgtgtgatggtgttttgccttatactatggaagtggaagaagaaaaagcggcctaggaattcatacaagtgcgggacaaacacgatggaacgtgaggagtccgagcagactaagaaacgagaaaagattcacatacccgagcggagcgacgaggcccagcgcgtgttcaaatctagcaagacctcttcatgcgacaaaagcgatacttgtttttag

SEQ ID NO: 111435 - DNA, 972 bp, synthetic construct
  misc_feature 1..972: note = Description of Artificial Sequence: Synthetic coding sequence
  source 1..972: mol_type = other DNA
atgggcctgtctaacatcttatttgtgatggccttcttgcttagtggcgcggctcccctgaagattcaggcttacttcaacgagacagccgacttgccctgccagttcgcaaattcccagaaccagtcactgagcgagcttgtcgtcttctggcaggatcaagagaacctggtactaaacgaggtgtatttgggtaaggagaagtttgattcagtgcacagcaagtacatgggccgcacttcttttgatagcgatagctggactttgcgtttacataacctccagatcaaagacaaagggctctatcaatgtataattcatcacaaaaaaccaacagggatgatcaggatccaccaaatgaactccgagctgtccgttttggccaacttttcgcaaccagaaatcgttcccatctccaatattacagaaaatgtatacattaacctcacttgctcctctatacacggctacccagagcctaaaaagatgagtgtgctgctgcggactaagaatagtaccattgagtatgatggggtcatgcagaaaagccaggataatgttacagaactgtatgatgtcagcatcagcttaagcgtgtcatttccggacgtgaccagtaacatgactatattttgcatcctggagaccgataagacaagactgttgtcctcacctttctccattgagctggaagatccccagcctcctcctgaccatatcccatggattacagccgtgctccccactgtcataatctgcgtcatggtcttctgtctgattttgtggaaatggaaaaaaaaaaaacgccccagaaatagttacaaatgcggtacaaataccatggagcgggaagagtccgaacagacaaaaaagagggaaaaaattcatattccggagcgttctgatgaagcccagcgggtattcaagagcagcaagacctcctcctgcgataagtccgatacctgcttctag

SEQ ID NO: 111436 - DNA, 504 bp, synthetic construct
  misc_feature 1..504: note = Description of Artificial Sequence: Synthetic coding sequence
  source 1..504: mol_type = other DNA
atggggctgagcaatatactcttcgttatggcctttctgctaagcggcgcagctcccctgaagattcaggcctactttaatgagacagccgatctgccctgccagttcgctaattctcagaatcagagcctgtccgagctggtcgtgttctggcaggaccaggagaaccttgtcttaaatgaggtctatctaggaaaggagaagttcgactcagtacactcaaaatatatggggcggaccagctttgactctgacagctggacactgcgtttacataacctacagatcaaagacaaagggctctatcagtgtataatccatcacaaaaagccgactgggatgattaggattcaccagatgaactccgagctgtccgtcctcgccaatttcagccaacccgaaattgtgcccatttctaatatcacagagaatgtatacatcaatcttacatgttccagtatccatgggtatcccgagcccaagaagatgtccgtgcttctgtag

SEQ ID NO: 111437 - DNA, 744 bp, synthetic construct
  misc_feature 1..744: note = Description of Artificial Sequence: Synthetic coding sequence
  source 1..744: mol_type = other DNA
atggggaggactagcttcgatagcgactcttggacattgaggctgcacaatctccaaatcaaggataaaggtctctaccagtgcattatacaccacaaaaagcccacaggaatgatcagaatccaccagatgaatagtgaactcagcgtactcgcaaatttctcgcagccagagatcgtgcctatcagcaatatcaccgaaaatgtgtatattaaccttacatgcagctccattcacggttatccagaacccaagaaaatgtccgtgctgctccgcacaaagaattctacaattgagtacgatggcgtaatgcaaaagtcccaggataatgtgacagaactgtacgacgttagcattagcctcagcgtgtccttccctgatgtgacatcaaatatgacaattttctgtatcctagagacagataaaacccgcctcttgagttctccattctctattgagcttgaggaccctcaaccacctcctgatcatatcccttggattaccgctgtcctgcccaccgtaatcatatgcgtgatggttttttgcctaattctctggaagtggaagaagaagaaacgacccaggaatagctataagtgcggcaccaacaccatggagagggaggagtctgagcagactaagaagcgggagaagattcatatacccgagagaagtgatgaagcacagagggtgtttaagtcttccaagacctcttcatgcgataaatctgatacttgcttctag

SEQ ID NO: 111438 - DNA, 654 bp, synthetic construct
  misc_feature 1..654: note = Description of Artificial Sequence: Synthetic coding sequence
  source 1..654: mol_type = other DNA
atggacccgcagtgtaccatggggcttagtaatattctgtttgtcatggcattcctgttgagcgcaaatttcagtcagcccgagattgtcccaatatcaaacatcactgagaacgtgtatatcaatttaacatgttcttctattcacgggtatcctgaaccaaagaagatgtccgtgttgctgagaaccaaaaatagcacgatcgagtatgatggtgttatgcaaaagtcccaagataacgtcaccgagttgtatgacgtaagcatctccctgtctgtgtcatttccagacgtcaccagcaacatgaccatcttctgcattctggagacagacaaaacccggctcctttcgtcccccttctcgattgaacttgaagaccctcagcctccacccgatcatatcccgtggattacggctgtgctccccaccgtcatcatctgtgttatggtgttttgtttaatcctttggaaatggaaaaaaaagaaaaggccacggaactcatacaagtgcggcactaacacaatggagagggaggagtctgagcaaacaaagaaacgggaaaaaattcacattcccgagcgcagcgacgaggcgcagagggtttttaagtcctcaaagacaagctcttgcgataagtcagatacttgcttttag

SEQ ID NO: 111439 - DNA, 732 bp, synthetic construct
  misc_feature 1..732: note = Description of Artificial Sequence: Synthetic coding sequence
  source 1..732: mol_type = other DNA
atgcggccgcggctttggctcctgctggctgcgcaattgaccgtgttacatggcaactcagtactacaacagacaccagcatatataaaagtccagactaacaagatggtgatgctttcatgtgaagctaaaatttccctgtctaacatgaggatctactggcttagacaaagacaggcgccctcgagcgacagccaccacgaatttttggctctttgggactctgcgaagggaacgattcacggggaagaggtggaacaagaaaagatcgctgtgttcagagatgcgtcaagatttattctgaacctcaccagtgtcaaaccagaagactccggaatctacttttgtatgatcgtggggagcccagagctcactttcgggaaaggaacccaactgtctgtggtggatttcttacctactactgcacaacccactaagaagtctactcttaaaaaacgcgtgtgccgcctgccgaggcctgaaactcagaaagggccgttgtgctctccaattaccctgggacttctcgtggcgggtgttctggtgctgctcgtgagtctcggtgtggcaattcacttatgttgccggagaaggagagcaagacttcgctttatgaaacagccacagggtgaaggcatctcaggcacctttgtaccgcaatgcctgcatgggtactactccaacacgactaccagccaaaagctgctgaacccctggatcctcaaaacttag

SEQ ID NO: 111440 - DNA, 642 bp, synthetic construct
  misc_feature 1..642: note = Description of Artificial Sequence: Synthetic coding sequence
  source 1..642: mol_type = other DNA
atgcgacccagactgtggctactgctcgcagcacagcttactgttctgcatggtaactctgtgctgcagcagacccccgcatatattaaagtgcagactaataagatggtgatgctgtcttgcgaagcaaagatttccttgtccaacatgcgaatttactggctgaggcaaaggcaggctccaagtagcgatagccaccatgaattcctggccctgtgggactccgctaagggaacaattcatggggaggaggtagagcaggagaagattgctgtgttccgagacgcctctcggtttatcctcaatctgacctcagtgaagccagaagatagtggaatctacttctgtatgattgttggatcccccgagctgaccttcggtaaaggtacacagctgtccgtggttgacttcttgccaactaccgcgcaaccaactaaaaaatcgacgctgaaaaagcgtgtgtgtaggttgcctcggccagaaactcaaaaaggacgccgcagaagggccagactgagattcatgaagcagccccagggggagggtatcagcggcaccttcgtgcctcagtgtctgcacggatactattctaacactacaacgtcacagaagttgcttaacccttggatactgaagacttag

SEQ ID NO: 111441 - DNA, 633 bp, synthetic construct
  misc_feature 1..633: note = Description of Artificial Sequence: Synthetic coding sequence
  source 1..633: mol_type = other DNA
atgcgccctcggctctggctcctcctggccgcccagctgaccgtactgcacggtaattccgtgctgcagcagactcctgcatacatcaaagtccagactaacaagatggtcatgctctcctgcgaagctaagatttcgctgtccaacatgaggatctactggttgcgccagagacaagccccatcgtcggactctcaccacgagttcctcgcattgtgggatagcgcaaaaggcaccatccacggtgaggaagtggaacaagaaaaaatcgccgtatttagagacgcgagtcgtttcatattaaatcttacctctgttaaaccggaagatagcgggatttacttctgcatgatcgtgggctccccggagctgacatttgggaagggcacacagttgagtgtggtggacttcctgcccactacagcccagccaacaaaaaagagtactttgaagaaaagagtgtgccgactgccaaggcctgaaactcagaagggacctctgtgctctccaattactcttggactgctcgttgctggcgtgctggtgctgctcgtctcactgggcgtggctatccatctgtgttgccggcgcaggagggcccggctaagattcatgaagcaattctacaagtag

SEQ ID NO: 111442 - DNA, 666 bp, synthetic construct
  misc_feature 1..666: note = Description of Artificial Sequence: Synthetic coding sequence
  source 1..666: mol_type = other DNA
atgcgacccaggctgtggttgctcctggccgcacagcttactgtgcttcatggcaatagcgtcttacaacaaacacctgcttacattaaagtgcaaaccaacaaaatggtgatgctctcttgtgaagctaagatttctttatcaaacatgaggatctactggctgcggcagagacaagctccttcttctgactcacatcacgagttcctcgcactgtgggattctgccaagggaacgattcatggggaagaagttgaacaggagaagattgccgtgtttcgggacgctagccgatttatcctcaacctgacttccgtgaagccggaggatagcgggatttatttctgcatgattgtgggaagtccggaactaacattcggcaagggtactcagctgagtgttgttgacttcctgcctacgactgcccagcctacgaagaagtccactcttaaaaagcgggtttgccgactgccgaggcccgaaacccagaaggggccactgtgctcacccatcacactgggtttgttagtggccggcgtacttgtgctgctcgttagcttaggcgtggcaattcatctgtgctgtcgtcgacggagagcacggctccggttcatgaaacaactcaggctccaccctcttgaaaagtgcagcagaatggattactag

SEQ ID NO: 111443 - DNA, 597 bp, synthetic construct
  misc_feature 1..597: note = Description of Artificial Sequence: Synthetic coding sequence
  source 1..597: mol_type = other DNA
atgcgcccccggttgtggctgttgctcgccgctcagcttacagtcctgcacggcaacagcgtgttgcagcagactcccgcttatatcaaggtacagacgaataagatggtcatgttgtcttgcgaggccaaaattagtctcagtaatatgaggatttactggctccgccagcgacaggcaccctcgagcgactcccaccacgagttcctcgctctgtgggattccgctaagggtacaatccacggggaagaggtcgaacaggagaagatagccgtttttagagatgccagccgatttatccttaacttgacttcagtaaaacctgaagacagtggcatatacttctgcatgatcgtcggcagtccagagttgactttcggaaagggcacacaactgtcagtcgtagatttcctgcctactaccgctcagccaacaaagaagtccactttgaagaaacgcgtgtgtcggctgccgcgccccgagacacagaaaggattgaagggcaaagtctatcaggaacccttgagccccaacgcatgcatggacacgaccgctatcctgcaaccccacaggagttgcctgacccacggtagttag

SEQ ID NO: 111444 - DNA, 93 bp, synthetic construct
  misc_feature 1..93: note = Description of Artificial Sequence: Synthetic coding sequence
  source 1..93: mol_type = other DNA
atgcgccctcgactgtggctcctgttagccgctcagctgaccggcaggaggcgtcgcgcccgcttgagattcatgaaacaactatataagtag

SEQ ID NO: 111445 - DNA, 624 bp, synthetic construct
  misc_feature 1..624: note = Description of Artificial Sequence: Synthetic coding sequence
  source 1..624: mol_type = other DNA
atgagaccaaggctgtggcttcttttagcagcgcagctaacagtgcttcacggcaattctgtgctgcagcagactcccgcctacatcaaagttcagactaacaagatggttatgttatcctgtgaagctaagatatcgttatcaaacatgcgcatctactggctccggcaaagacaggcgccaagttcagactcccaccatgaatttctggcgttgtgggactctgcaaagggaacaattcatggggaggaggttgaacaggaaaaaatcgccgtgtttcgcgatgcttcccggtttatcttaaacctgacctcggtaaagccggaagactcaggaatctacttttgcatgatcgtggggagccccgagcttaccttcggtaaaggcactcagctgagcgtggtcgatttcctgcccaccaccgcacagccaactaagaagtctactttgaaaaaacgtgtgtgcagacttccaaggccagaaactcagaagggacctctgtgtagtcctatcacactgggacttttggtggccggcgtgctggtcctgctggtgtctctcggcgtggcaatccatttgtgctgcaggcgacgacgcgcacggcttcgctttatgaagcaatag

SEQ ID NO: 111446 - DNA, 153 bp, synthetic construct
  misc_feature 1..153: note = Description of Artificial Sequence: Synthetic coding sequence
  source 1..153: mol_type = other DNA
gagaggggtagggagcgccgggtaaaactccggttctctgctcggccccaaggggaaggaatttccggcaccttcgttcctcaatgcttgcacggctactatagtaacaccactaccagccagaagctacttaatccctggatccttaagtag

SEQ ID NO: 111447 - DNA, 687 bp, synthetic construct
  misc_feature 1..687: note = Description of Artificial Sequence: Synthetic coding sequence
  source 1..687: mol_type = other DNA
atgcccgtgaaaggaggtaccaaatgtatcaagtatctgctgttcggttttaatttcatcttctggcttgccgggatcgccgtgctggcaatcggactgtggctgagattcgatagtcagactaagtctatttttgaacaagagaccaataataacaactcaagtttctatacgggagtgtatattctgatcggtgcaggtgccctcatgatgctggtgggcttcctaggttgctgcggagccgtacaggaatctcagtgcatgctgggactcttctttggctttctcctggtcatcttcgccatcgaaatcgctgcagctatttggggctactctcacaaagacgaggtgatcaaagaggtgcaggagttctacaaggatacttacaataagttgaaaacaaaggatgagccccagcgggagaccctgaaggccattcattatgctttaaactgttgcggtctggcagggggcgtcgagcagttcatttccgacatctgccccaaaaaagacgtgctggagacttttacagtgaagagttgcccagatgccataaaggaagtctttgacaacaaattccatatcataggagctgtcggaatcggcatcgccgtggtaatgatctttggcatgatttttagcatgattttatgttgcgcaatcagaagaaatcgggagatggtttag

SEQ ID NO: 111448 - DNA, 480 bp, synthetic construct
  misc_feature 1..480: note = Description of Artificial Sequence: Synthetic coding sequence
  source 1..480: mol_type = other DNA
atgatgcttgtaggatttctcggatgctgtggagcagtccaagaatcccagtgcatgcttggactgtttttcggcttcctgttggtgatctttgctatagaaattgctgctgccatttgggggtactcccacaaggatgaggtcattaaagaggtgcaggaattctacaaagacacctataataagttgaagacgaaagacgagccccagcgcgagacacttaaggcaatccactatgccctcaattgctgcggactagccggcggtgtggaacaatttataagcgacatttgtcccaaaaaggatgttctcgagacattcaccgttaagtcctgtcccgatgcgatcaaggaggtctttgacaacaaatttcatataatcggagctgtaggcataggcatcgccgttgtgatgatttttggtatgatcttcagcatgattttgtgttgcgcgatcaggagaaatagagagatggtgtag

SEQ ID NO: 111449 - DNA, 687 bp, synthetic construct
  misc_feature 1..687: note = Description of Artificial Sequence: Synthetic coding sequence
  source 1..687: mol_type = other DNA
atgcccgttaagggcggaactaagtgcattaagtacctgctcttcggcttcaactttattttttggttggccggtatagctgtgctggcaattggattgtggctgcgatttgactcacaaactaaatctatcttcgagcaggagacgaataacaataactcctctttttacacaggcgtctacattctcattggagcaggcgctctgatgatgctggtcgggtttctgggttgttgcggagccgtacaggaatctcagtgtatgttgggcttgtttttcggtttcctactggtaatttttgccatcgagattgcggctgccatttgggggtattcccataaagacgaggtgataaaagaggtacaggagttctataaggacacctacaacaagttaaagacaaaggatgaacctcaacgggagacgctgaaggctatccattacgccctgaattgctgcgggctcgctgggggcgtggaacagttcataagtgatatttgcccgaaaaaggacgtgctggaaactttcaccgtcaagagctgtccagatgctattaaggaggtgtttgacaacaagtttcacatcatcggagctgtcggaatcggtattgccgtggttatgatttttggaatgatttttagcatgattctttgttgcgctatacgacggaatagggaaatggtttag

SEQ ID NO: 111450 - DNA, 687 bp, synthetic construct
  misc_feature 1..687: note = Description of Artificial Sequence: Synthetic coding sequence
  source 1..687: mol_type = other DNA
atgccggtaaaagggggcacaaaatgcatcaagtacctacttttcgggtttaacttcatattttggctggctggaatcgctgttcttgcaattgggttatggctgcgatttgatagccagacaaagtcaatctttgaacaggaaacaaataataataactccagtttttacaccggggtttatatcctaatcggcgccggggcactgatgatgctcgtcggctttctgggctgctgtggggctgtccaagaatcccaatgcatgctcggccttgccacaaagcggacaatgtttccaccctttctcgaagaccatgtgtgcttcttcagcctgaatccccagtttttcggtttcctcctggtcatttttgccattgagatcgcggcagcaatctgggggtatagccacaaagacgaggttattaaagaggtgcaagagttctataaggacacatacaacaagctcaagacaaaggatgagccccagagggagacattaaaagcaattcattacgctctgaactgttgcggcctcgcggggggcgtcgagcaattcattagcgacatctgccccaagaaggacgtacttgagacttttacggtcaagtcttgtccagatgccattaaggaggttttcgataacaagtttcacattatcggtgctgttggtatcgggattgctgtgtag

SEQ ID NO: 111451 - DNA, 546 bp, synthetic construct
  misc_feature 1..546: note = Description of Artificial Sequence: Synthetic coding sequence
  source 1..546: mol_type = other DNA
atgcccgtaaaagggggcaccaagtgcattaaatacctgctgttcggtttcaactttattttttggctagcgggcatagctgtactcgctatcgggctctggctccggttcgactctcaaacaaaaagtatctttgagcaagagacaaataataataattccagtttttataccggcgtgtatatcttaatcggcgcaggggccctcatgatgctcgtcggcttcttggggtgctgtggggctgtccaagaaagtcagtgcatgctcggcctttttttcggttttctgctggtgattttcgccatcgagattgctgctgcgatctggggctacagtcataaagatgaggtgatcaaggaagttcaggaattctacaaggacacttataataaactaaaaacgaaggacgaaccacagagagaaacactgaaagccattcactatgccctaaatctgtggttcggctggggtaggggcacggtttatttgcggcatctcccacaggagggaaggaccaggaatctacatagggaggtgctgtcctag

SEQ ID NO: 111452 - DNA, 426 bp, synthetic construct
  misc_feature 1..426: note = Description of Artificial Sequence: Synthetic coding sequence
  source 1..426: mol_type = other DNA
atgctgggcttattcttcggctttctgctagtgatctttgctattgaaattgccgctgccatatggggctattcccacaaagacgaggttattaaggaagttcaggaattctacaaggacacttacaacaagctgaagactaaagacgagcctcaaagagagacactcaaagccatccactatgcccttaactgctgcggcttggcaggtggcgtagaacagttcatcagtgacatctgtccgaagaaggacgttttggaaactttcacagtcaaaagttgccccgatgcgattaaggaggtctttgacaacaagtttcatataatcggagctgtcggcattggaattgccgtggtcatgatctttggaatgatattttctatgattctatgctgcgccattaggagaaatagagaaatggtttag

SEQ ID NO: 111453 - DNA, 1758 bp, synthetic construct
  misc_feature 1..1758: note = Description of Artificial Sequence: Synthetic coding sequence
  source 1..1758: mol_type = other DNA
atggaaaagaaatggaaatactgcgccgtgtactacatcattcagattcacttcgtgaagggcgtctgggagaaaaccgtcaatactgaggaaaacgtgtacgccaccctcggctctgacgtaaatctcacttgtcaaactcagactgtcgggtttttcgtgcagatgcagtggagtaaagtgactaataaaatcgatctgattgccgtgtaccacccccagtatgggttttattgcgcctacggccgcccttgcgaatccctggtcaccttcacagagacacctgagaacggatcaaagtggaccttacacttacgcaatatgagctgctccgtgtccggaagatatgagtgcatgctcgtgttgtatcctgaaggtatacaaacaaagatctacaacctgttgatacagacccatgttactgcagatgagtggaatagtaatcatacaatagaaatagagattaaccaaaccctggaaatcccctgcttccagaactctagttcaaagatctcctctgagttcacctacgcctggagcgtggaaaatagtagcactgactcttgggtgttactttctaaaggaatcaaggaggataatggcacccaggagacactgatcagtcaaaatcatctcatcagcaacagtacgttgctcaaggacagggtaaagctggggaccgactacaggctccatcttagcccagtgcagattttcgacgatgggcggaagttctcctgccatatccgagtcggccccaataaaatactccgcagtagcactacggttaaagtcttcgccaagcccgagatccctgtcatagtcgagaataactctaccgatgtgctggtcgagaggcgctttacctgtctgctcaaaaatgtcttccccaaagcgaatataacatggttcattgatgggtcattcctgcatgacgaaaaagaaggaatctacatcactaatgaggaaaggaagggcaaggacggctttctggagttgaaaagtgtactgactagggtccactccaacaaacccgctcaatcagacaatctgactatctggtgtatggccctcagccctgtgcctggaaataaggtttggaacatatcttctgaaaaaataaccttcctgctcggcagtgaaattagcagtacagaccctcctttgagtgtcaccgagagcacgctcgatacccagccctcacccgcctctagtgtgtccccagcgaggtaccccgccactagcagtgtgaccctggtggacgtgtcagccctccgcccaaacaccactccccagccctctaatagttctatgaccacaagaggtttcaactacccttggacatcaagtgggacagacaccaaaaagtcagtgagccggattccgtccgagacatattcatcctccccttccggggctggaagcacactgcacgacaacgtgtttacaagtactgctcgcgctttttctgaggtgcctactactgctaacggcagcacaaaaacaaatcatgtccacattactggcatcgttgttaataagcctaaagatggtatgagttggccagtgattgttgccgcactgctgttctgctgtatgattctgtttgggctaggcgtccggaagtggtgtcagtatcaaaaggagatcatggaaagaccgcccccgtttaaaccccctccacctcctataaagtacacgtgtattcaggagccaaatgaatctgatctgccgtaccacgagatggaaacactgtag

SEQ ID NO: 111454 - DNA, 1710 bp, synthetic construct
  misc_feature 1..1710: note = Description of Artificial Sequence: Synthetic coding sequence
  source 1..1710: mol_type = other DNA
atggaaaagaagtggaagtactgtgccgtgtactatatcattcagatccacttcgttaagggagtgtgggagaaaaccgttaacactgaagaaaacgtgtacgccactctcggtagcgacgtgaatctcacctgtcagacccagacggtcggttttttcgtgcagatgcaatggtcaaaggtcactaataagattgatttgatcgccgtgtatcatccccagtacgggttctattgcgcatatggtagaccttgcgaatcgctcgtgacctttaccgaaacccccgagaacggtagtaaatggacactccatcttagaaacatgagctgttcagtttctggcagatatgagtgcatgctagtgctgtaccccgagggcatccaaaccaagatctataatttgctgattcagacccacgtaactgcagatgagtggaacagcaatcacacaatcgagatcgagatcaatcagaccctggaaatcccctgcttccagaactcatcgagcaagatcagtagcgaattcacttacgcttggtccgtagaggacaatggaactcaggaaacgctgatttcccagaaccatctgataagtaacagtacattactgaaggaccgtgtcaagctggggacagattacaggcttcacctgagcccggtgcagatctttgacgatggtcggaaattttcgtgccacatcagggttggccctaacaagattctgaggtccagcacaacagtgaaggtatttgccaagccagaaattcccgtcatagtagagaacaattctaccgatgtgctggtggaacggcgctttacttgcctgttgaaaaacgtatttcctaaagctaatatcacctggttcatcgatggatccttcctacatgacgagaaggagggaatctacataaccaatgaggaacggaagggtaaagacggcttcttggaactgaaaagtgtactaacacgagtccatagcaacaaaccagcccagtctgacaacctgacaatttggtgcatggcactgagtccagtgccaggaaacaaggtgtggaacatttcaagcgagaagatcacatttttattaggctctgagatttcaagcaccgatccaccactgtctgtcacagagagcaccctggatacacagccatctcctgcaagcagcgttagcccagcccgctaccctgctactagctccgtgacactggtcgacgtttcagcgctgaggcccaacaccacaccacagcctagcaacagcagcatgactacgcgaggttttaattacccatggacaagctccggaacggataccaaaaagtctgtcagcaggatcccgtcagagacatacagcagttcccccagcggtgccggctctacccttcatgataacgtgtttacctccaccgcgcgagccttcagtgaagtgcctactacagctaacggaagtaccaaaactaaccacgtgcacatcacgggaatcgtggtgaataaaccaaaagatgggatgtcatggccagtgattgtggctgctttattgttttgctgtatgatcctcttcggtttgggagtccgaaagtggtgtcagtaccagaaggagatcatggaacgtccccccccctttaaacccccgcctccccccataaagtatacatgcatacaggaaccgaatgaaagtgatctgccataccacgagatggaaaccctgtag

SEQ ID NO: 111455 - DNA, 2508 bp, synthetic construct
  misc_feature 1..2508: note = Description of Artificial Sequence: Synthetic coding sequence
  source 1..2508: mol_type = other DNA
atgggaggtcgggtgttcctagccttctgtgtttggctgacactgcctggcgcggaaacccaggattcaaggggctgcgctaggtggtgccctcagaatagctcatgtgttaacgctaccgcatgtagatgtaatccagggttctctagctttagtgaaatcatcacgactccgaccgaaacttgtgatgatataaacgagtgtgcgacgcctagcaaggtgagctgcggaaagtttagtgactgctggaacacggagggctcttacgattgtgtgtgcagtcctgggtacgagccagtgtccggcgctaaaacttttaaaaatgagtcagagaacacctgtcaggatgtagacgagtgccaacagaacccgcgtttatgcaaatcttacggcacatgtgttaataccctaggttcctacacatgtcagtgcctaccggggttcaaattcattcctgaggatcccaaggtatgtactgatgtgaacgagtgtacatctggtcagaatccttgccactccagtactcactgcctcaacaacgtgggttcataccagtgccgatgtaggcctggctggcaacccataccagggtcacccaacggacctaacaacaccgtgtgtgaggacgttgacgagtgtagttctggccagcaccagtgtgactcgtccaccgtttgtttcaacaccgtaggcagctattcgtgtagatgtcgtcccggttggaaaccccgccacgggattccaaataatcagaaagacacagtgtgcgaagacatgacctttagtacttggacccctccccctggcgttcactcacagactttgtcacgcttttttgacaaggtccaggatcttggccgtgactcgaagaccagcagtgctgaggttacaatccagaacgtgattaagctggtagatgagctcatggaggccccgggcgacgttgaagcccttgctccacctgtacggcatctcatagctactcagctactgagcaatctcgaggatattatgaggatacttgcaaaaagcttgcccaaggggccattcacctacatttctccatctaataccgagctgacactcatgatccaggaacgcggcgataaaaacgtcacaatggggcagtcttccgctcgcatgaaactcaattgggctgtcgctgccggggcggaggatcccggccccgccgtggccggaatcctgagcatccagaatatgacaactctgctcgccaatgcttctttaaatctccattctaagaagcaggctgagctcgaggagatttacgaaagctccataagaggagtgcaattgagacgacttagcgctgtaaattctatctttctctctcacaataataccaaggagttaaatagtcccatcctgttcgctttctctcatttagagtcttccgatggggaagccggcagggaccctccagctaaagatgttatgcctgggcctcggcaggagctcttatgtgccttttggaagtccgatagcgatagaggtggtcattgggctacagaagggtgccaggttttgggtagtaaaaacgggtccaccacatgtcaatgctcgcatctgtccagcttcgctattctgatggcgcattacgatgtggaagattggaagctgactctcattacccgtgtggggctggccctgtcgctgttctgcctgttgctatgtatcttgacgtttctcctcgtgcggccaattcagggatctaggactacgatccatctgcatttgtgcatctgtttattcgtgggaagcacaattttcctggcagggatcgaaaacgaaggcggtcaggtgggcctacgatgtcggctcgtagcaggcctccttcattactgttttctggcggccttctgctggatgtccctcgaaggattagagctctactttctcgtagttagggtcttccagggacaaggcctctccacgcgctggctgtgtctgatcggatacggagttccattactcatcgtgggtgttagcgcggcgatatactctaagggctacgggcgaccaagatattgttggctggatttcgagcaggggtttctgtggtctttcctcggccctgtgacttttatcatcctgtgcaatgcagttatcttcgtaactacagtgtggaaactaacccaaaaattctctgaaatcaatcccgatatgaagaaactaaaaaaagccagagctctgacaataactgccatcgctcagctgtttctcctaggatgcacctgggtatttgggctctttatctttgatgatcggtcactggttctgacctatgtgttcacaattctgaactgcctacagggggcttttctctaccttttacactgtctattgaacaaaaaagtacgggaggaatacaggaaatgggcgtgcctggtggctggaggctcaaaatatagcgagtttacttctactacaagtggcactggacacaaccagactcgggctctgagggcttcagagtccgggatttag

SEQ ID NO: 111456 - DNA, 2361 bp, synthetic construct
  misc_feature 1..2361: note = Description of Artificial Sequence: Synthetic coding sequence
  source 1..2361: mol_type = other DNA
atggggggcagggtgtttcttgcattctgtgtgtggctgacccttcctggagctgaaactcaggacagccgaggatgtgccagatggtgtccgcagaattcctcctgcgttaacgcaactgcttgcagatgcaatcctggattctcgtctttctctgaaattataacaactccaactgaaacatgcgacgacatcaacgagtgcgcaacgccttcaaaggtgagctgcgggaagtttagtgactgctggaacacagaaggttcgtacgactgcgtgtgctcacctgggtacgagcccgtttctggggccaaaacgtttaagaacgagtccgagaacacatgtcaggacgtcgatgagtgccagcagaatccccgcctttgtaagtcttatggcacctgcgtgaatacattggggtcgtatacctgccagtgtctcccaggttttaaatttattccagaggatcccaaagtctgtaccgatgtggacgaatgttcttctggccagcatcagtgcgactcaagcacagtgtgttttaacacagttgggtcttactcctgccgatgtcggcctggatggaaaccaaggcatggcatcccaaacaaccaaaaggatacggtgtgtgaagatatgactttttctacatggacgccgcccccgggcgtgcactcccagaccctaagcaggttcttcgacaaggtacaggacttaggacgcgactcaaagacttcttctgcagaagtcaccattcagaacgttattaagttagtggatgagctgatggaggcccctggtgacgtagaagctcttgctcctcctgttcgtcatttgatcgctacccagctgctgtcaaacctggaggacattatgagaatactggctaaaagccttcccaaaggcccgtttacatacatatctcctagcaataccgagcttaccttgatgatccaggagcggggggacaagaatgtcactatgggacagtcttcagcccgtatgaagctgaattgggccgttgccgccggagcagaggatcccggacctgcagtggcaggcatccttagtatccagaatatgaccacgttattggctaatgctagtcttaacctgcattcgaaaaagcaagccgagctcgaggaaatttacgagtcgtccattagaggcgttcaactgagacgactctctgcagtgaattctatttttctcagccataacaacaccaaggagctgaattcccctatcctctttgcctttagccacttggaatccagtgatggtgaggcaggtagagaccccccagcgaaagatgtaatgccgggcccccggcaagagctgctgtgtgccttctggaagtctgattccgaccggggggggcattgggcaacagagggctgtcaggtgctagggagcaagaacggttcaactacctgtcaatgcagtcacctgagctctttcgccatcctgatggcccactacgacgtggaggactggaaactgaccctcatcactcgcgtggggcttgccctatcactcttttgtctgctgttgtgtatactgacattccttttggttcgacctattcaaggcagcagaaccaccattcatctgcatttatgtatttgtcttttcgtgggcagcactatttttctagctgggatagagaatgaaggggggcaggttgggctccgctgccggctcgtcgctggactgctccactattgttttctggctgcattttgctggatgtccctcgagggcctggagctgtacttccttgtggttagggtgtttcaaggccagggcctgagcacacgctggctttgcttgatcgggtacggcgtgcctctgctgatcgtgggagtgtctgctgccatctattccaaaggatatggaagacctaggtactgttggctcgatttcgagcaaggatttctttggtccttcttggggccggtcaccttcatcattttatgcaatgcagtcatctttgtgactacagtttggaaactaacacaaaaattttccgaaatcaaccccgacatgaaaaaacttaaaaaagctcgcgcgctgaccataacagccatcgcccagctgtttttgctaggctgcacctgggttttcggcctgtttatttttgacgataggtctctggtgctgacatacgtttttactatactcaattgcctgcagggcgcattcctgtatctgttacactgcctgctgaataaaaaagtgcgcgaagaatatcgcaaatgggcctgcttagtggcagggggatctaagtatagcgagttcaccagcaccacatcaggcactgggcacaaccagacaagagcattgagagcgagcgaaagcggcatttag

SEQ ID NO: 111457 - DNA, 2229 bp, synthetic construct
  misc_feature 1..2229: note = Description of Artificial Sequence: Synthetic coding sequence
  source 1..2229: mol_type = other DNA
atgggcggtcgcgtcttccttgcattctgtgtgtggctgacactccccggtgccgagacacaggacagccgcggatgcgcacgctggtgtccccagaatagtagttgtgtcaatgccacagcctgtcgatgtaatcctggctttagcagcttctccgaaatcattacaacaccaaccgaaacttgtgatgacatcaacgaatgtgctacccccagcaaagtcagctgcggcaagttcagcgattgctggaacactgagggttcttacgactgtgtctgtagccccggatacgaacccgtgtctggtgcaaagaccttcaaaaatgaaagtgaaaatacgtgccaggacgtggatgagtgttcctccggacagcaccagtgcgatagttcgactgtttgcttcaataccgtcggaagttactcttgtcgctgtagaccaggatggaagccccgacacggcatacctaataaccagaaagacactgtatgtgaagacatgacattctctacctggacaccccctcccggtgtccattcacaaaccctgtcaagatttttcgacaaagtgcaggatctgggccgtgacagtaagaccagctctgccgaggtcaccatccagaacgttatcaagctggtggatgaattgatggaagccccaggtgacgtggaggcattggcaccccctgtgcggcatttgattgctacccagttactcagcaatctggaggacattatgcgaatcctcgccaagtctcttcccaaaggtcctttcacctacatctctccaagtaacacagagttaaccctgatgatccaggaaaggggagacaaaaacgtgaccatgggccagtctagtgccagaatgaaactcaactgggccgtcgctgccggtgccgaggatccgggaccggcagtggctggaattctcagcattcaaaacatgacaaccctcctggcaaacgctagtctcaacttgcactccaaaaagcaggcagagcttgaggaaatctatgagagctcaatccggggggtccaactgcgccggctctctgcggtgaattccatcttcctgtctcataacaacactaaagagttaaattcccccatcctcttcgccttctcccacctggaaagctccgacggagaagccggtagggaccccccagccaaggatgtgatgcctggccccagacaggaactgctctgtgctttttggaagtcggatagcgatcgcggcggccactgggccacagaagggtgccaggttctcggctccaaaaatgggagcaccacttgccaatgcagtcacctaagctcctttgccatactgatggcacattatgacgtcgaggattggaaattaacacttataacacgcgttgggctggcactgagcttgttctgtctgttgctttgtattttgacttttctgttagtgcgaccaatccagggaagccgcactaccatacatctgcatctatgcatctgtctgtttgtcgggagtacaattttccttgccgggatagagaatgaaggtgggcaagtgggactcaggtgtaggctggtggccggactattgcattattgctttttagctgccttctgctggatgtctctggagggtttggaactctacttcctggtggtgagggtctttcaggggcagggactgtccaccagatggctgtgcttgatcggttatggagttccgctgttgattgtaggagtgagcgctgctatctacagcaagggatacggccgacccaggtactgttggctcgatttcgaacagggctttctgtggtcatttttgggaccagtaacattcatcatcctttgcaatgctgttattttcgtcacaactgtgtggaaacttacacagaagttctcggagattaaccctgacatgaagaaactgaaaaaagctcgcgccctgacgataaccgcgattgcccagctttttttgcttggttgtacatgggtctttggcctgtttattttcgatgaccgcagcctggtccttacttacgtgttcaccattttgaactgcctccagggtgccttcctctacttgctccactgcctgcttaataagaaagtccgtgaagagtaccgaaagtgggcctgtcttgtagcaggtggttcaaaatacagtgagttcacctccaccacttccggtaccggccacaaccagacgcgggcactgcgagcaagtgaatcaggtatttag

SEQ ID NO: 111458 - DNA, 2358 bp, synthetic construct
  misc_feature 1..2358: note = Description of Artificial Sequence: Synthetic coding sequence
  source 1..2358: mol_type = other DNA
ggcggacgtatcatgcgggcattttgcgtttggttaactctgcctggtgctgaaacccaggactcccgtggatgcgcaaggtggtgcccacagaactccagttgtgttaatgccaccgcctgcagatgtaaccctggtttttcctcattctcggaaattatcacgacacctaccgaaacttgtgacgatataaacgaatgtgcaacgccatccaaagtcagctgcggaaaattctcggattgctggaataccgagggaagctacgattgtgtgtgtagcccaggatatgaacctgtctctggtgcgaagactttcaaaaatgaaagtgaaaacacctgccaggacgtggatgaatgccagcagaatcctcgcctttgcaaaagctatggcacatgcgttaacaccctggggagctacacctgccagtgcctgccaggctttaaattcatcccagaagaccctaaggtctgcacagacgtagatgagtgcagctctgggcagcaccaatgtgactcaagcacggtttgttttaacactgtgggttcttatagctgtaggtgccgccctgggtggaaacctcgacacggcatccccaacaatcaaaaggatacagtttgcgaggatatgaccttcagcacgtggacacctccaccaggagtgcattctcagaccctcagccgattcttcgacaaggtccaggatctgggccgggatagcaaaacctccagtgctgaggttaccatccagaacgtaattaaactcgtggatgagctcatggaagctccaggcgacgtggaagccctggctccccccgtcagacacttaatcgccactcagcttctgagcaatcttgaagatattatgcgaatcctggctaagtctctccctaaaggcccctttacctatatttcccctagcaacacagagttaacgctgatgatccaggaaaggggtgataagaacgttactatggggcagtctagcgcccggatgaagctcaattgggcagtggccgccggagccgaggatcctgggcccgctgtcgccggcatcttgtccatacagaacatgaccacattgctggccaatgctagcctgaatctgcattcaaagaaacaagcggagctggaggagatttacgaatccagcattcggggcgtgcagctgcggcggctctccgccgtaaattcaatcttcctgagccacaacaacaccaaagaactgaactcaccgattctattcgcctttagccacttagaaagttcagacggggaagcagggcgtgaccctcccgccaaggacgtaatgcctggacctcggcaggagctcctgtgcgccttttggaaaagcgatagtgacagaggcgggcactgggcaaccgaggggtgccaagtccttggctcaaagaacggctctacgacatgtcaatgtagccatttatctagttttgcaatccttatggcccattacgatgtagaggactggaagctaacactgataactcgggtgggcctggctctcagtttgttttgcctcctgctgtgcatcttaaccttcttgcttgtgaggcccatccaggggtcccgaaccaccatacacctgcacctgtgtatttgtctatttgtaggatctacaattttccttgctggcattgagaatgaaggggggcaggtgggactgcggtgccgacttgtagctggactgctccactactgctttctggccgcattttgttggatgagcctggaaggcctagagctgtactttttagttgtacgtgtgtttcaggggcaaggcctgtctactcgctggttgtgtttaatcggatacggcgttcccctgctgattgtgggcgtgagtgctgctatctacagcaaagggtatggtagaccacgttattgctggctggacttcgagcaaggattcttgtggtctttcctaggccccgtgacattcataatcctgtgtaacgctgtaattttcgtgaccaccgtgtggaagctcactcagaagttctctgagatcaatcccgacatgaaaaagctgaagaaagctagagccctgacaataactgccattgctcagttgttcctcctgggctgcacctgggtctttggactgtttatctttgacgatagaagtttggtgttaacatatgtattcactatccttaattgccttcagggggcctttttgtatctattgcactgcctgctgaacaaaaaagtgagagaagaataccgcaaatgggcttgtctggttgctggaggctcgaagtattctgagttcacgagcaccaccagcggaaccggtcacaatcaaactcgtgccctgcgagcatctgagtctgggatttag

SEQ ID NO: 111459 - DNA, 297 bp, synthetic construct
  misc_feature 1..297: note = Description of Artificial Sequence: Synthetic coding sequence
  source 1..297: mol_type = other DNA
atgtccgtcaggttgcatgtcccctccggcagccgagggtctgaactgagtgctctgattcaggctattggagcgagcacctctggaaaaccgaaatgttttgtctgcatcctaaggtccgggctgtctgttgcgctgtccctgtcagtgtacttccttctgctctttagtcggacccgcgggggcgggcatggggaaccccccgaatgccagagacgggcatcctgcagtgcatatagttttcgcgagattgaagattgcaggcagaaacaaccaaggaggtggcagcagggttag

SEQ ID NO: 111460 - DNA, 231 bp, synthetic construct
  misc_feature 1..231: note = Description of Artificial Sequence: Synthetic coding sequence
  source 1..231: mol_type = other DNA
atggctagaggcgccgccttggcactcttactgttcgggctgctgggagtcttggttgctgcaccaggatttggcgacctgaggctgcaggctgcaaggggcggccggcccggggttgcctgccactctcatgctctgcgtcccggacccaagttcggcatagctcgatcccttagaccgggttggtggggcgaaggtaaggagaaattagagaagaatttcgaaccatag

SEQ ID NO: 111461 - DNA, 534 bp, synthetic construct
  misc_feature 1..534: note = Description of Artificial Sequence: Synthetic coding sequence
  source 1..534: mol_type = other DNA
atggcacgcggcgccgcacttgctctcctgctgtttgggctcctaggtgttctggttgccgcccccgacggcggctttgacctgtccgatgccttgcccgataatgaaaacaagaagcccacagctatccctaaaaagccgagtgccggggacgattttgatctcggtgatgcggtagtggacggcgaaaatgatgacccacgtccacccaacccacccaagcccatgcctaacccgaacccgaaccatccatcctcgagtgggtctttctctgacgccgatctggccgatggagtgagcgggggggagggcaagggtggcagcgatggcggtgggagccaccggaaagagggcgaggaggcagacgctccgggtgtgattccaggaattgtcggggcagtcgtcgtggctgtggccggggccatcagctctttcatcgcctatcaaaaaaagaaactttgtttcaaggagaacggacaactcgccggaagcctgggaccctgtattggtataaggcgcgaggccgacggatag

SEQ ID NO: 111462 - DNA, 510 bp, synthetic construct
  misc_feature 1..510: note = Description of Artificial Sequence: Synthetic coding sequence
  source 1..510: mol_type = other DNA
atggctcgcggggctgctttagcccttctgttatttggcctgctcggcgtcctggtcgctgcccccgatggcggcttcgatttgtctgacgctttgccgggcgacgacttcgatctgggggacgccgtcgtggatggcgagaacgatgatccacgcccacccaatcctcccaaacctatgccgaaccccaacccaaaccacccatcctcctccgggtctttctctgacgcagacttagccgacggcgtttcaggcggggaaggtaaagggggctcggacggtggcggttcacatcgtaaagagggagaagaggcagacgccccaggcgttattcctggaatcgtgggtgccgtcgtcgtggcagttgcaggtgccataagctctttcatcgcctatcagaagaaaaaactgtgcttcaaggaaaatgcagaacaaggcgaggtagacatggaatcacatcgaaacgccaatgcggagccagctgtacagagaacactacttgagaagtag

SEQ ID NO: 111463 - DNA, 558 bp, synthetic construct
  misc_feature 1..558: note = Description of Artificial Sequence: Synthetic coding sequence
  source 1..558: mol_type = other DNA
atggccaggggggccgctttagccctgctccttttcggactgctgggggttctcgttgcagccccggacggcggatttgatttgtctgacgcattgcccgacaatgaaaataagaagccaaccgcaattcctaaaaaacccagtgcaggtgatgactttgatctcggggacgcagttgtggacggtgagaacgacgatccacgcccaccgaatcccccaaagccaatgcctaatcccaatcccaatcacccgagctcaagcggcagcttctcggacgcggatctggcagatggggtttctgggggtgaaggaaagggcggatccgacggaggtggctctcacaggaaggagggagaagaggcagacgcacctggagtgattccagggattgtgggggctgtggttgtggcagtcgccggagccatctccagtttcatcgcctaccagaaaaaaaaactctgttttaaggaaaatgccgagcagggagaagtggacatggaatctcaccggaacgccaatgcggaacctgctgtgcagcgcacgcttctcgagaaatag

SEQ ID NO: 111464 - DNA, 606 bp, synthetic construct
  misc_feature 1..606: note = Description of Artificial Sequence: Synthetic coding sequence
  source 1..606: mol_type = other DNA
cgcaggtggggcagaccagcaggcaccccaggtgcctctagcttgccagggcggacaagatgcgcgcatggaggtcccggaccggaggaggccccgacgttctccccaacattgtttcttgaaccttttcaacgggaaaagagcgcattcgtggtgggcgttgccaattcatacatgtggggcgggctcggtagagatggcggctttgatctgagcgacgcattgcctgacaacgagaataaaaagcctacagctattccaaagaagcccagcgcaggagatgactttgatctaggagatgcagtggtggacggagaaaacgatgacccgcgcccaccaaatccgccaaaacctatgcccaaccctaaccccaatcatccctcttcatccggaagctttagtgacgccgacttagcagacggtgtgtcaggaggagagggaaagggcggtagcgacgggggagggtcacatcgcaaggaaggcgaggaagccgatgcaccgggggtgattcccgggatcgtcggtgcagtcgtcgtcgccgtggcaggcgcaatctccagcttcatagcataccagaaaaagaagttgtgctttaaggaaaattag

SEQ ID NO: 111465 - DNA, 438 bp, synthetic construct
  misc_feature 1..438: note = Description of Artificial Sequence: Synthetic coding sequence
  source 1..438: mol_type = other DNA
atggtggcttggcggtcggccttcctggtgtgtctggctttttctttagcaaccctcgtccagcgcggatccggggatttcgatgatttcaatcttgaagatgccgttaaggagacctcttctgtgaaacccgccctggggatgtatcacaagctggacgggctcaagcagcagaacttcattctgtcccttttctggatgttagaggtattgtatcagggggtggggtgggcaacattctctctcaaggccttggggaaaaacttaagcctgacatttcccactagcggcggtagccgctgttccttggtctgcggctgcatcacacctatatctgcgtctgtggtgacatggtgctcacctttctgcgtgtccctactctccctcaccaagatgctagtgagcggctttaaggctcatttggataaccccggctag

SEQ ID NO: 111466 - DNA, 573 bp, synthetic construct
  misc_feature 1..573: note = Description of Artificial Sequence: Synthetic coding sequence
  source 1..573: mol_type = other DNA
atggtggcctggcggtcagccttcctggtatgcctcgcattcagtctggcgactctggtgcagcggggatctggggactttgacgatttcaacctggaagacgccgttaaagaaaccagttctgtgaagcggaatgacttcgacctggcggacgcattggatgacagaaacgacagggatgacggtaggaggaaaccgatcgccggcggagggggattctccgacaaggacctggaggacattgtgggtggaggggagtataagcccgacaaggggaagggggacggtaggtacgggagtaacgatgaccctggatccggtatggtagcagagcccggtactatcgctggggtggcttctgcactcgccatggccctaattggagcagtctcaagctacattagctaccagcaaaaaaaattttgcttctctatacagcaaggcctaaacgcggactacgtgaagggcgagaatcttgaggccgtggtttgcgaggaaccacaggtgaagtattcgacccttcacacgcaaagtgcagagcctccaccaccgccagaacctgctcgtatttag

SEQ ID NO: 111467 - DNA, 789 bp, synthetic construct
  misc_feature 1..789: note = Description of Artificial Sequence: Synthetic coding sequence
  source 1..789: mol_type = other DNA
atggtggcctggcggtctgccttcctcgtctgcctggctttcagtctcgctacgctggttcaaaggggatcaggagatttcgacgatttcaacctggaggacgctgtgaaagagaccagctcggtgaaacagccatgggaccacactacaaccacaactacgaaccgccccggcacaactcgcgcacccgccaaacccccaggatccggtcttgacctggcagacgcactcgacgaccaggatgatggccgtagaaaaccaggcatcggaggcagagagcggtggaaccatgtgaccactaccaccaagcggccagtgaccactagggcacccgcaaacaccctgggcaatgattttgatctggccgatgctctggacgatagaaacgatcgagatgatggtaggcgcaaaccaattgcaggcggggggggcttctctgataaggatttggaggatatagtagggggcggcgaatataaacccgataaagggaagggagacgggcggtatgggtccaacgacgatcccggctcagggatggttgccgagcctgggaccattgccggggtggcttcagcgctggccatggcgctgatcggcgcagtttccagctacatctcctaccagcagaagaagttctgcttctccatacagcaaggtctgaatgcggattacgtaaagggtgaaaatctggaagcggttgtgtgtgaagagccacaggtgaaatatagtacactgcatactcaatccgcagagccaccaccacctccagagcccgcaaggatatag

SEQ ID NO: 111468 - DNA, 474 bp, synthetic construct
  misc_feature 1..474: note = Description of Artificial Sequence: Synthetic coding sequence
  source 1..474: mol_type = other DNA
gagacgtctagcgtgaagcagccctgggaccataccaccacaactactaccaacaggcccggcaccacgcgtgcccctgctaaaccacctgggagcggactggatctcgctgacgctctggatgaccaggacgacggtcgaaggaagcctggcattggtggccgggaacgctggaatcatgtcaccactactacaaagcggcccgtcaccacgcgagctcccgctaacaccttgggaaatgacttcgacttggccgatgcgctggatgataggaatgatagagatgacggtaggaggaaacccattgccggcggggggggtttctccgacaaggacctggaggacattgtgggaggcggggaatataaaccagacaagggcaagggggatggtcgctatggaagcaatgatgaccccgggagcggaggctttctcaatcctgaggctcctgtgggccacgttaaaggaaagtag

SEQ ID NO: 111469 - DNA, 570 bp, synthetic construct
  misc_feature 1..570: note = Description of Artificial Sequence: Synthetic coding sequence
  source 1..570: mol_type = other DNA
atggtggcttggcggtcagcttttctggtgtgtctggctttctcgctggctactctggtgcagcgcgggtccggtgactttgacgatttcaacttggaggacgcggtgaaggagacctcttccgtcaaacaaccctgggatcacacaaccacgacaactactaatcggcccgggactacacgggccccagccaagcctcccggctcaggattggacttggccgacgctctcgacgaccaagacgatggccggaggaaacctggcatcggggggagaggagatgggcgttacgggtccaatgatgaccccggttccggcatggtagcagagccaggcaccatcgccggcgtagcctcggctctggccatggcccttatcggcgccgtgtcttcttacatcagctatcagcaaaagaagttctgcttctcgatccagcaaggactgaatgcagattatgtcaagggagagaatctagaagctgtcgtttgtgaggagccccaggttaagtattccaccctgcatacacagagcgctgaaccacccccccctcccgagcctgccagaatctag

SEQ ID NO: 111470 - DNA, 819 bp, synthetic construct
  misc_feature 1..819: note = Description of Artificial Sequence: Synthetic coding sequence
  source 1..819: mol_type = other DNA
atggtcgcctggcgcagcgcgtttttagtgtgtctggcctttagcctagccacactcgtgcaacggggcagtggagacttcgatgatttcaatctggaagacgccgttaaggagacctcaagcgtgaagcagccatgggaccacaccacaactaccactacgaaccgccctggaacaacaagggctcctgcgaagccccctggtcctaccgaagggtcgggcctggacctcgccgacgctctagatgatcaagatgacggtcggcgaaagcccggtattggcgggagagagcgttggaaccatgtgaccacgaccaccaaacgtcccgtgaccacccgggcccctgccaataccttgggtaacgactttgatctggccgatgctttagatgacagaaatgacagagatgacggcaggcggaagcccatcgcagggggcggggggttctcagataaggatctcgaagatattgttgggggcggcgaatacaaacccgacaaaggcaagggcgacggacggtacggtagtaacgatgaccccggctccggcatggtggccgaaccaggtacaattgccggagtggccagtgctctagctatggcactgatcggcgctgtttctagttacatatcataccaacagaagaagttctgctttagcatacagcacgcagcggccggacaggagggactgaatgctgactacgtgaaaggagagaatctagaagcggtggtgtgcgaagagcctcaggtgaagtattcgacactacacacccaatcagctgagcctccacctccaccagagcccgccagaatctag

SEQ ID NO: 111471 - DNA, 642 bp, synthetic construct
  misc_feature 1..642: note = Description of Artificial Sequence: Synthetic coding sequence
  source 1..642: mol_type = other DNA
atggtggcttggagatctgcctttctcgtctgtctggcctttagcctggccaccttagtgcagcgcggttcgggtgattttgatgatttcaatttggaagatgcagtgaaggagacgagcagtgttaagcagagatggaatcatgttacaaccacgactaagagacccgtgaccacacgggcccctgcgaatacgcttggcaacgacttcgatcttgccgatgccctggacgatcgaaacgaccgggacgatgggcgacggaagccgattgcaggggggggtggattttcggataaggatctggaggatattgtcgggggcggtgagtataagccagataaggggaagggagatgggcggtacgggagcaatgatgatcctggtagcggcatggtagcagaaccaggaaccatcgctggagttgcctcagctctggctatggcgctgataggtgccgtcagttcttacatctcttaccagcagaagaagttttgcttttcaattcagcaggggttgaacgccgattacgtgaaaggggagaatctggaagcagtggtgtgtgaggagccgcaggttaagtattccactttgcatacacagtcagctgagccgccccctccacccgaacctgcgagaatatag

SEQ ID NO: 111472 - DNA, 1785 bp, synthetic construct
  misc_feature 1..1785: note = Description of Artificial Sequence: Synthetic coding sequence
  source 1..1785: mol_type = other DNA
atggccgcagagtccggagagcttatcggagcctgcgagttcatgaaggaccgactgtattttgctaccttaaggaataggcccaagtccaccgtgaacacacactatttttccatagatgaggagctcgtttacgagaacttttatgcggactttggtccgcttaatctggcaatggtctatagatactgctgtaagctaaacaagaagctgaaatcgtactcactctcccggaaaaaaatcgtgcattatacatgttttgaccagaggaagagagcgaacgccgccttcctgatcggcgcgtacgccgtgatctacctgaaaaagacacctgaagaggcctacagagcactactttccggaagtaacccaccttatctgccattccgggatgcatcctttggaaattgcacttacaacctcaccatcctggactgcttgcagggtatccgaaagggcttgcagcacgggttttttgactttgaaactttcgacgtcgacgaatatgaacattacgagagagtggagaacggcgatttcaattggatcgttccaggaaaatttctcgcatttagcggacctcacccaaagagtaaaatcgagaatggctacccactccacgctcccgaagcctacttcccttattttaaaaagcataacgtgaccgcagtagtgaggctaaataaaaagatatatgaggctaagcgatttactgacgcaggctttgaacattacgatctgttttttatagacgggtccaccccttctgataacatcgtcagacggttcttgaatatttgcgagaatacagagggcgccattgccgttcattgtaaagcaggacttggcagaactggcaccctcatcgcctgttacgtgatgaagcattaccgcttcactcatgcggagattatcgcgtggatcaggatttgccgccccggcagcatcattggaccccagcaacactttcttgaagaaaagcaagcaagtctatgggtgcaaggggatatatttaggtcaaaattgaagaacagacctagctctgaaggcagcattaacaagatacttagcggactggacgacatgagtataggagggaatctaagtaaaactcagaatatggagagatttggagaggacaatctggaagacgacgatgttgaaatgaagaacggaataactcagggagacaaattgcgtgcactgaaatcgcaacgtcagccgcggacgagccctagttgtgcattcaggtctgacgacactaaaggccaccctcgggcggtgagtcagccatttcgcctttcgagcagtctgcaaggatcggccgttacgttgaagaccagcaagatggctctttccccctcagccaccgccaaaagaatcaataggacaagcttgagttccggggccaccgtccgttctttttctattaactcgcgcttagctagctcactgggtaatctgaacgcagccactgatgatccggaaaacaaaaagacttcgtcaagctctaaagccggattcactgcaagccctttcaccaaccttcttaacggtagcagccagcctacaacgagaaattatcctgaactgaataataaccagtacaatcgcagctccaactcaaatggaggtaatttaaactcacccccaggtccccatagtgccaagacagaagaacacacaacaatcctgaggccttcctacaccggactttctagtagctccgcccgtttcctgtcccggtcaatcccctcattgcaaagcgaatacgtgcattattag

SEQ ID NO: 111473 - DNA, 1872 bp, synthetic construct
  misc_feature 1..1872: note = Description of Artificial Sequence: Synthetic coding sequence
  source 1..1872: mol_type = other DNA
atggccgcagagtctggagagctaattggcgcttgtgagttcatgaaggaccgactgtatttcgctacgctacgtaaccgacctaaatctactgtcaatacacactatttctctatagatgaagaactggtgtacgaaaatttctatgcggactttgggccattaaatctggccatggtttataggtactgttgcaaactaaacaagaagctcaagtcctattctttatcacgaaaaaagatcgtccactatacctgctttgaccagcgtaagcgcgcaaatgcagcctttctgatcggcgcttatgccgttatatacttaaagaaaaccccagaggaggcttatcgagctctgctgagcggatctaacccgccctatctgccctttagagatgcttcgtttggtaactgcacctataatttaactattttggattgtctgcaagggatccgtaaaggactccagcacggtttctttgatttcgagaccttcgacgtggacgagtacgagcactatgaacgagttgaaaatggtgacttcaactggattgtaccaggaaaattcttagcctttagtggccctcatcctaaatcaaagatagaaaacgggtatcctctccacgccccagaggcctattttccctactttaaaaagcataacgttacagcggttgtgcgattgaataagaagatctatgaggcgaaacggtttaccgacgctgggttcgagcactacgatctgttcttcattgacggctccaccccaagtgataacatcgtgcggcgattcttgaatatttgtgagaataccgagggtgctattgcggtgcactgcaaagccggcttgggacggacaggcacgctcatagcatgttatgtcatgaaacactatcgcttcacccatgctgagatcatcgcgtggatccgaatttgtcgacctggcagcatcatagggccgcagcagcattttctcgaagagaagcaggcttcactgtgggttcagggtgatatctttcgctctaagttgaaaaaccggccgtctagtgaagggtcaatcaataagatactctctgggctggatgatatgagtatcggtgggaacctctccaagacacaaaacatggaaagattcggggaagataatttagaggatgacgacgtggaaatgaaaaacggcatcacgcagggggacaaactgcgcgctcttaagagccagaggcagcccaggacctcccccagttgtgccttccggtccgatgataccaagggccatccgcgcgctgtctcacaacccttccgattgtcctcaagcctccagggcagcgcggtgaccctgaagacctctaagatggctctctccccaagtgccactgctaaaagaattaacagaacatccctgtcctctggtgccacagtcaggtctttcagcatcaattctagacttgctagttccctgggaaatcttaatgccgccaccgacgatcctgagaataagaagacttcatctagcagcaaagcagggtttacagccagtccattcaccaatctgttaaacgggtcctctcagccaaccacgcgtaattacccagagctcaacaataatcaatataacaggagcagcaattccaatggtggaaatctgaactccccccctgggcctcattcggccaagaccgaagaacatacaactatcctgcgcccatcctataccgggctctctagtagcagcgctcgctttctgagccggtctattcccgtatcggcccaaacacctcccccaggtccacagaaccctgaatgcaacttctgcgctttgccttctcaaccccgcctccctcccaagaaatttaattccgccaaggaagccttttag

SEQ ID NO: 111474 - DNA, 1152 bp, synthetic construct
  misc_feature 1..1152: note = Description of Artificial Sequence: Synthetic coding sequence
  source 1..1152: mol_type = other DNA
atggcggccgagtctggagagctgataggagcttgtgagttcatgaaggaccgtttatactttgcaacccttcgtaatagacctaaatcaaccgtgaacacacattacttttctatcgatgaagagctcgtttacgaaaacttttatgccgattttggtcccctgaacctcgcaatggtgtacagatactgctgtaagctgaacaagaaactcaagtcctacagcctatcccgaaagaagatagtccactacacctgttttgaccaacggaagcgcgctaatgccgcattcctgatcggggcatatgcggttatctacctcaagaagacgcccgaagaggcctatcgggcattgctgtccggtagcaacccgccttatttgcccttccgcgatgcgtcctttggtaactgcacttacaacctcaccattctggactgtctgcagggcattcggaaagggctgcagcatggctttttcgacttcgagactttcgatgtggacgaatacgagcactacgagagggtcgaaaacggggattttaattggattgtccctgggaagtttctggctttctctgggccacaccctaagtctaagatcgagaacgggtacccattgcacgccccagaagcatatttcccatatttcaagaagcataacgttacagcagtggtgagactgaacaagaagatttatgaggcgaaacgttttacagatgctggatttgagcactacgacctgtttttcatcgatgggagcaccccttcagacaatatcgtgcgtagattcctgaatatctgtgagaacacggagggtgcgattgctgtgcactgcaaagccgggctgggacgcaccggcaccttgatcgcgtgctacgttatgaaacactatagattcacacacgctgagatcatagcttggatccggatctgtaggccagggtccattatcggcccccagcagcattttttagaggagaagcaggcatctttgtgggttcagggcgacatatttcggtctaagttaaagaatcggccgagcagtgagggctcgattaataaaattctcagtggtctcgatgacatgtctattggcggaaatctgagcaagacccagaatatggaacggttcggggaggtcagtttcccttag

SEQ ID NO: 111475 - DNA, 576 bp, synthetic construct
  misc_feature 1..576: note = Description of Artificial Sequence: Synthetic coding sequence
  source 1..576: mol_type = other DNA
atggctgcggaaagcggcgagcttatcggagcatgcgaatttatgaaagatagactgtactttgctaccctgagaaacagacccaaatcaaccgtgaatacacattatttcagtatagacgaggagctggtttacgagaatttctatgctgacttcggcccactcaacttggctatggtgtacaggtactgctgcaagctgaataaaaagctcaagtcttatagcctttctagaaaaaagatcgttcattacacctgcttcgaccagagaaagagagcaaatgccgcctttttgataggagcatacgcagtaatataccttaagaagacccctgaagaagcatatagggctctgttgtccggtagcaatcctccttatcttccgttccgagacgcaagctttggaaattgcacctacaacctgacgatcctggattgcctacaggggatcaggaaaggactacagcacggtttttttgattttgagacgttcgacgtggacgagtacgaacactatgaggtgatcctgtttactcccctgaaaccaacatttctgatttcaaagtctatcatgtag

SEQ ID NO: 111476 - DNA, 822 bp, synthetic construct
  misc_feature 1..822: note = Description of Artificial Sequence: Synthetic coding sequence
  source 1..822: mol_type = other DNA
atgggcaattttctgagccgcgaaaacaaagtgcaggtgatttcggagtcagaccgactatactttgcaaccttacgcaaccgccccaagagcacagttaacacccactatttctcaatcgatgaggaactggtttacgagaatttctacgcagatttcgggccgctgaacctggccatggtgtataggtactgttgcaaattgaacaagaagctgaagtcatatagcttgtctcgtaagaagatcgtacattacacgtgttttgaccagagaaaaagagcaaatgccgcttttctcataggagcttacgccgtgatctacttaaaaaagacacccgaggaggcctaccgcgcgttgctcagcggctccaatccgccctacctgccatttcgggacgcatccttcggcaattgtacatacaacctcacaattctagattgcttgcagggtatccgcaaggggctgcagcacggctttttcgactttgaaactttcgacgtggacgaatacgagcactacgaacgagtcgagaatggagactttaactggattgtgcctggtaagttcttagcattcagcggccctcaccccaaatccaagatagaaaatggctatccccttcacgcgccagaagcctacttcccttacttcaaaaagcacaacgtgactgctgttgtgcgtttaaataagaagatttatgaagccaagcggtttactgacgctgggttcgagcactacgacctttttttcattgatgggtctaccccatctgataacatagtaaggcgctttctcaatatttgcgagaacaccgaaggctag

SEQ ID NO: 111477 - DNA, 1698 bp, synthetic construct
  misc_feature 1..1698: note = Description of Artificial Sequence: Synthetic coding sequence
  source 1..1698: mol_type = other DNA
atggtctacaggtattgctgcaaactgaacaagaaactgaagtcctactcactgtctagaaaaaagatcgtccattatacatgctttgatcagcggaagagggcaaatgcagcctttctgatcggagcgtacgcggtgatatacctcaaaaaaacacccgaggaagcatatcgggctttgctatcaggcagcaatcctccgtacctgccctttagagatgccagcttcggaaattgtacctataacctgacaattctcgactgtctgcagggtattagaaagggactgcaacatggcttcttcgacttcgaaaccttcgacgtggatgaatacgagcattatgaaagggtagagaatggcgactttaactggatcgtgccgggcaaattcctcgccttcagtggcccacaccccaagagtaagattgagaatggctatccgcttcacgccccggaagcgtacttcccctattttaagaagcacaatgttacagcagtcgtcaggctaaataaaaagatttacgaggcgaagaggtttacagacgctggatttgagcattatgacctgttcttcatcgacggaagcacgccgtctgacaatatcgttagaaggtttctcaacatctgcgagaacaccgagggggccattgccgtacactgcaaggccggcctcggccggactgggactttgattgcctgctacgtgatgaagcactatagatttacacatgccgagatcatcgcgtggattaggatctgccggcctggttctatcatcggtccacaacaacactttttggaggagaaacaagcgtcgctctgggtgcagggggatatttttcgcagtaagttaaaaaatcggccctcatcagagggatccatcaacaaaatcctctccggactggacgacatgtcaatcggcggcaatttgtcgaaaacacaaaacatggagcggttcggagaggacaacctagaagatgatgacgtagaaatgaaaaatggaatcacgcaaggcgacaagctccgagccctcaagagtcagcggcagccccgcacctctccaagttgcgcatttagatcagacgacaccaaaggacaccctcgtgccgtcagccagccattccgcttatcctcctctctgcagggatcagccgtgaccctcaaaacttctaaaatggctcttagcccctcagctacagccaagaggataaatcggacgtccctttccagcggggctacagttcggtccttctcaattaactcccgccttgcaagtagtctgggaaatttgaatgctgccaccgacgatcctgaaaacaaaaagacctcgagttcttccaaggctggctttaccgcctctccatttacaaatcttctgaacgggtcatcccagcctaccaccagaaattacccagaactgaacaataaccagtacaacagatcctccaacagtaatgggggaaacttgaattccccacctggacctcatagtgccaagacagaagaacataccacgatactgcgcccaagttacacaggtttatctagctcaagcgctaggttcctctcacgctcaatcccagtctccgcacagaccccaccgcctggccctcagaatccagagtgcaacttttgtgccctgcccagtcaaccccggctaccccccaagaagttcaacagcgccaaggaggcgttctag

SEQ ID NO: 111478 - DNA, 1833 bp, synthetic construct
  misc_feature 1..1833: note = Description of Artificial Sequence: Synthetic coding sequence
  source 1..1833: mol_type = other DNA
atggcggccgagtctggggagttgatcggcgcgtgtgagtttatgaaagatagactctacttcgcaacgctgcgaaaccgcccgaaaagcacagtaaacacacactatttttctatcgacgaggagctcgtgtacgagaatttctacgccgatttcggtcccctgaacctggctatggtgtaccgctattgttgcaaactgaacaaaaagttgaagtcgtactctttatcccgcaaaaagatagtgcactatacatgttttgaccagcggaagagagcaaacgccgccttcttgattggcgcttacgccgtaatctatctcaaaaaaactcccgaagaagcttatcgggctctcctgtccggttccaaccccccttacctgccgttcagggacgcgagcttcggtaattgcacttataacctcactatcctcgactgcttacagggaattagaaaaggcctccagcatgggttcttcgacttcgaaaccttcgacgtggacgagtatgagcactatgaaagggttgaaaacggtgatttcaactggatcgtcccagggaaatttctggccttcagtggcccgcatcccaaatccaaaattgagaacggatacccactgcatgcgcccgaagcctattttccatatttcaaaaaacacaatgtgacagctgttgttcgcctcaataaaaagatttacgaggccaagcggttcacagacgccggattcgagcactatgatttgttctttattgacggctcaacccccagtgataacattgtgagaagatttcttaacatttgcgagaatactgagggcgctatcgcagtgcattgcaaggcggggctcggacgtactgggacactgatcgcctgctatgtaatgaaacactaccggtttactcacgccgaaataatcgcctggattcgcatatgtcggcctggatcaatcatcggtcctcagcagcattttcttgaagagaaacaggcgagcctgtgggtgcagggcgatatttttcggtccaaactgaaaaataggccatctagtgagggttcgatcaataagattctgagtggcttagatgatatgagtatcgggggaaatctgtcaaaaacgcagaatatggagagatttggcgaggataatctggaagacgatgatgtggagatgaagaacgggatcactcagggcgacaagctgagagcactcaaatcacagcgacagccccgcaccagtccaagttgcgcttttagatcggacgacacaaaaggacatccaagagcagttagccagcccttccgattatcttccagtttgcaaggatccgccgtaaccttaaagacatctaagatggcactgagccccagcgccaccgcaaaaaggatcaatcggacctctctctctagcggagctacggtgaggagctttagcatcaatagtcgcttggcaagttctctgggcaacttgaacgcagcgaccgatgacccggaaaacaagaagacctcctcatccagcaaggctggtttcactgcgtctccctttacaaaccttttgaacggctcgagtcaacctaccacgagaaattaccccgaactgaataacaaccagtataacagaagcagcaacagcaatggaggaaacttaaattctccccccggaccgcactccgccaagactgaggaacacactacgatcctgcgcccctcctacaccggtctctcatcttcttccgctcgttttctgagtcgttccattccatgttcatgtctgcttctggtgtttaggaagccttttctcggatcccctcttctgagcctgccaatcagccacctatag

SEQ ID NO: 111479 - DNA, 1416 bp, synthetic construct
  misc_feature 1..1416: note = Description of Artificial Sequence: Synthetic coding sequence
  source 1..1416: mol_type = other DNA
atgaagcgaaaatcagagcgtaggtccagttgggctgctgccccaccttgctcgagacgttgcagtagcacctctcccggcgtgaaaaaaattaggtcttccactcagcaggatcctagacgacgggacccccaggacgatgtctacctggacattacagatagactctgcttcgccatcctgtattcacgacccaaatccgcctcaaatgtgcattatttctccattgacaacgagctggaatacgagaacttctacgcagactttggacccctcaacctcgctatggtgtatagatactgctgtaaaatcaataagaaactgaaaagcattacaatgctccgcaaaaagattgtgcacttcacaggttccgatcaaaggaagcaggccaatgccgctttcctcgtcgggtgctacatggtgatctacctgggccgaactcccgaagaggcttataggatactgattttcggagagactagctacatcccctttcgcgacgccgcctacggctcctgcaatttttacataactcttcttgattgttttcacgccgtcaaaaaagctatgcagtacggattcctgaactttaattccttcaacttggatgagtatgagcattatgaaaaggccgaaaacggcgatttaaactggatcatacctgatcgatttatagctttctgcgggccccactccagagcccggctcgagagcggctaccatcagcattcacctgagacctacattcaatactttaagaaccacaatgtgaccacaattatccggttgaataagagaatgtatgatgcaaagcggtttactgacgccgggttcgaccatcatgatctgttctttgccgacgggagtaccccgacagatgcgatcgttaaagagttcttggacatttgtgagaacgctgagggcgccatcgccgtgcactgcaaagcgggcctggggagaacgggaaccctgattgcttgctatatcatgaagcattaccgaatgactgctgccgagactattgcctgggttcgcatctgtcggcctgggagtgtcataggacctcagcaacagtttctcgtgatgaagcagactaacctttggttggagggcgactacttcagacagaaactcaaagggcaagagaacggacagcaccgtgctgcctttagcaagcttctgtccggcgtagacgatatttcaatcaacggagtggagaaccaggatcagcaggaaccagagccgtattccgacgacgacgagatcaacggcgttacccaaggtgacaggctgcgtgccctaaaatcacgcaggcagtctaagacaaatgctattcccctcacggacggatggctgagccaggccgtcacatttctggatcgactgctcatttggctgggaatccataaagattag

SEQ ID NO: 111480 - DNA, 1458 bp, synthetic construct
  misc_feature 1..1458: note = Description of Artificial Sequence: Synthetic coding sequence
  source 1..1458: mol_type = other DNA
atgaagagaaagtccgagagaaggagctcatgggcggccgcacccccgtgctcacgccgctgcagcagcaccagccccggagtgaaaaagattagatctagcacacagcaggacccacgtagacgagacccacaggatgatgtgtatttggatatcactgataggttatgtttcgcaattctgtattcgcggccaaaaagcgccagtaacgtgcactacttttcgattgataatgaactggagtacgagaacttttatgccgactttggccccttgaatctggcaatggtgtacaggtactgttgcaaaatcaacaagaagctaaagtcaataactatgcttcgcaaaaagattgtgcatttcactggtagcgaccagagaaaacaggcaaatgccgcctttctagtggggtgttacatggttatctacctggggcgaactcctgaggaagcgtaccggattctgatcttcggtgaaaccagctacatcccatttagggatgccgcatacggctcctgcaacttctatatcaccctgttggactgctttcacgcagtcaagaaggccatgcagtacggctttttgaactttaactccttcaatctggacgagtatgaacactatgaaaaagccgaaaacggcgaccttaactggataatacctgaccgattcattgctttctgtggaccgcatagcagggctaggctggagtctgggtatcaccagcattcaccagagacctatattcaatacttcaagaaccacaatgtcactaccataatccgactgaataagcggatgtatgacgctaaacgcttcaccgatgccgggttcgatcaccatgacctcttctttgccgacggcagcactcccacagacgcaattgtaaaagaattcttggatatatgcgaaaacgctgagggcgcaatcgcagtccattgtaaagccgggctcggcagaaccggaacactgatagcatgttacataatgaaacattacaggatgacagccgccgagaccatcgcctgggttcgaatttgtagacccggcagtgtcatcggaccacaacagcagtttctggtgatgaaacagaccaatctatggctggagggcgattactttcgacagaagctgaaaggccaggagaatggccaacacagagctgcgttcagcaagttattgtccggcgtagatgatataagcatcaatggcgttgaaaatcaagaccagcaagaacccgaaccatactccgacgatgatgagattaacggtgttactcagggcgatcgtctgcgcgccctgaaatcacggcgtcagagcaagaccaacgccatccctctaacgtgccctttggcagttctcacaagtgcactctgttccgtcgtgatttggtggattgtttgtgactatattctgccaatcctacttttttgcctggacgggtttaggacacagtag

SEQ ID NO: 111481 - DNA, 1380 bp, synthetic construct
  misc_feature 1..1380: note = Description of Artificial Sequence: Synthetic coding sequence
  source 1..1380: mol_type = other DNA
atgaaacggaagtcagagcggcggtcctcatgggccgctgcacctccctgctctcgcagatgtagttccacctcgccaggcgtcaaaaagatccgaagctcaactcagcaggatcccaggagacgggacccccaggacgatgtctacctcgacattacagacagactttgcttcgctatactatatagccgaccaaaatcggcatctaacgtccattacttttctatcgacaatgaattggaatacgaaaatttttatgccgatttcggtccattaaacctggccatggtgtacagatactgctgtaagatcaataagaagcttaaatccataaccatgctcaggaagaagatagttcactttactggcagtgatcagagaaagcaggccaatgctgcattcctggtggggtgctacatggttatttatttgggcagaacccccgaagaagcttaccgtatcttaatcttcggtgagactagttatatcccctttagggacgctgcctatgggtcttgtaacttctatataacactgctcgactgtttccacgcagtgaaaaaggcgatgcagtacggcttccttaattttaattcgttcaatttggatgagtatgaacactacgagaaagctgaaaacggggacctcaattggatcattccggataggttcatcgccttctgtggcccacacagtcgtgctagactggagtctggatatcatcagcacagtccggagacttatattcagtattttaagaaccacaatgtaacaactatcatccggctgaacaaaaggatgtacgacgctaagagattcacggatgctggctttgatcatcacgatctgtttttcgcggatgggtccacaccaaccgatgccatcgtcaaggaattcctcgacatctgcgaaaatgctgagggcgccattgccgtgcactgcaaagccgggcttggccgcacgggcaccctgatcgcatgctacatcatgaaacactataggatgacagccgccgaaactattgcttgggtgagaatctgtaggcccggaagtgtgatcgggccccagcagcagttcctcgtgatgaaacagaccaatctctggctcgaaggcgactatttcagacaaaaacttaaaggccaggagaacggccagcatcgagcagccttttccaaactattgtcaggtgtcgacgacatctccatcaatggagtcgaaaaccaggaccagcaggagcctgaaccctactccgacgacgacgaaataaacggagtgacacagggcgatcggctgcgggcgttaaagagcagaagacagtcaaaaactaatgccatcccgctgaccttgtccatctcaagaaccaagaccgtgctgcggtag

SEQ ID NO: 111482 - DNA, 1497 bp, synthetic construct
  misc_feature 1..1497: note = Description of Artificial Sequence: Synthetic coding sequence
  source 1..1497: mol_type = other DNA
atgaagaggaagtctgaacgccgcagttcctgggcagccgctcccccatgctcccgaaggtgctcttcgacatctccaggagtgaaaaagattcgcagttcgacccagcaagacccacggcgccgggaccctcaggacgatgtctacctcgacattacagacaggctgtgcttcgccattctttactcccgccccaagagcgcgagtaatgttcactatttctcaatagataacgagttggaatatgaaaacttttatgccgacttcggtccactgaatttggctatggtgtatcgctattgctgcaagatcaacaaaaaactgaaatcaatcacaatgcttaggaagaagattgtgcatttcaccggatcagaccagcgcaaacaggccaacgccgccttcctcgtgggctgctacatggttatctatttggggaggactcctgaagaggcctatcggattcttatatttggtgagactagttacatacctttccgcgatgcggcctacggatcttgtaacttttacattaccctgctggattgcttccatgccgtgaaaaaagcgatgcagtacgggttcctcaacttcaatagtttcaatctggatgagtatgagcactacgagaaggctgagaatggcgatcttaattggatcatccccgacaggtttatcgccttttgtggcccacactcgcgggccaggcttgagtccgggtatcatcagcatagccctgaaacttatatccagtactttaagaatcacaatgtgacgacaataatccgcctgaacaagagaatgtatgacgctaagcgatttaccgacgctgggttcgaccatcacgacctgtttttcgccgacggaagcacgcccaccgacgcgatcgtgaaagagtttctggacatctgcgagaatgccgagggggcaatcgccgtgcactgtaaggcaggccttggtaggacgggcaccctaattgcttgctacattatgaagcattatcgcatgaccgccgccgaaactattgcatgggtgaggatttgtcgccccgggtccgtgattggcccccagcagcaattcctggtgatgaagcaaactaacttgtggctcgaaggggattatttccgccagaagctgaaaggccaggaaaacggacagcatcgcgcagctttcagcaaattgctgtcaggagtggacgacatatctataaatggcgtggagaatcaggaccaacaggagcccgaaccatatagcgacgacgatgagattaatggagtcacacaaggggaccgcttgcgggccttgaagagcagacggcagagcaaaactaacgctattccactgactgtgatcttgcagtcttctgtgcagtcgtgtaagaccagcgagcctaacatctccggcagtgccgggatcacgaagcgtaccaccaggtccgcctcccgcaaatcatccgtgaagagtctgtccatttcacggaccaagaccgttctgaggtag

SEQ ID NO: 111483 - DNA, 1386 bp, synthetic construct
  misc_feature 1..1386: note = Description of Artificial Sequence: Synthetic coding sequence
  source 1..1386: mol_type = other DNA
atgtctcgggaaggcgccggcgctgctttggtggccgaggttataaaggatcgactttgcttcgcgatcttatatagcaggccaaagtcggcttccaacgtgcattacttctccatcgataatgaattggagtatgaaaacttctatgcagacttcggacctctcaacctcgccatggtctacagatattgctgcaaaattaataaaaagcttaagagtattacaatgttgaggaagaagattgtgcacttcacaggatctgaccagcgtaagcaagccaacgcggccttcctggtgggttgctatatggtgatctacctgggacgaactcctgaagaagcctacaggatcctgatcttcggtgagactagctatatccccttcagagatgcagcatacggaagttgcaacttctatataactctactggattgtttccatgccgtgaagaaagcgatgcagtacggctttctgaattttaattctttcaacctggacgagtacgagcattatgagaaagcagaaaacggcgacctaaactggattatacccgacaggttcatcgctttctgcggcccccacagccgggcgcgattagagtcaggatatcaccagcactcccccgagacttatattcagtatttcaagaaccataatgtgacaactatcattagactgaataagcgaatgtatgatgctaaaagatttaccgatgccggcttcgaccaccacgacctgttcttcgctgacggttccacccctaccgacgctattgtcaaagaattcctagacatctgtgagaatgcagagggagccatcgcagtgcactgtaaggccggcttggggcggactggaaccctgatcgcttgctacataatgaagcactacaggatgaccgctgcggaaacaatcgcctgggtgagaatatgtagaccaggctcagttatcggaccccagcagcaatttctggtcatgaagcaaacaaatctgtggctcgagggtgactactttagacaaaagcttaagggtcaggagaacggtcagcatcgggccgcgttctctaagctactgagcggcgtggacgacatcagtatcaatggcgttgaaaatcaggatcagcaggagccagaaccttacagcgacgatgatgagatcaatggggtgactcagggcgatcggttaagggcccttaaatcaaggagacagtcaaagacaaatgcaattcccctcacagtgatccttcagagcagcgtccagagttgcaagacgagcgaacccaatataagtggtagtgcaggaataactaaacggacgacacgcagcgcctcacggaaaagcagcgttaagtctctatccatcagtaggacaaagactgtgcttcggtag

SEQ ID NO: 111484 - DNA, 1458 bp, synthetic construct
  misc_feature 1..1458: note = Description of Artificial Sequence: Synthetic coding sequence
  source 1..1458: mol_type = other DNA
atgaaaagaaagagtgagcggcggagttcatgggctgccgctccaccttgcagtcggagatgttcgagcactagccctggcgttaaaaaaattcggagctcaactcaacaggaccctaggcgcagggatccacaagacgacgtttacctggatattactgataggctgtgttttgccatcctctatagcagaccgaaatcagccagcaatgtgcattatttttcaatcgataacgagctggagtatgagaatttttatgccgactttggcccactcaacctggcaatggtttaccgatactgttgcaagatcaacaaaaagctaaagagtattacaatgctacgcaagaagattgtgcatttcactggctctgaccagcggaaacaggctaatgccgcctttcttgtggggtgctatatggtcatttacctcggtcgcacccccgaagaggcctaccggattctaatattcggcgagacttcatatatcccgttccgtgatgcagcgtatggatcttgtaatttctatattaccctgctggattgcttccatgctgtgaagaaagctatgcaatacgggttcctcaatttcaattcattcaatttggacgagtacgagcactatgagaaggccgaaaatggggatcttaattggattatccctgatcggttcatcgcattttgcggtccacacagtcgcgcccgtctcgaatccgggtaccatcagcactcgcccgaaacgtacattcagtattttaaaaaccacaacgtcacaacaatcataaggctcaataagcgaatgtacgatgccaagagatttacagatgcaggctttgaccaccacgatctgtttttcgcagatggcagcaccccaacagacgccattgttaaggagtttttggacatttgcgagaatgcagagggagcaatcgctgttcattgcaaggccggacttgggcggacaggaacactgatcgcctgctacattatgaagcactaccgcatgactgccgcagagacaatcgcatgggttcgaatctgccgcccgggttcagttatcggaccgcagcagcagttcctggtgatgaagcagaccaacctgtggctggagggggattattttcggcagaaactgaaaggccaggagaacggccagcacagagccgctttcagcaagctgttgagcggagtggatgacatctcaatcaacggagttgagaaccaagatcagcaggagcctgaaccctactcagatgatgacgagatcaatggcgtaacccaaggtgacaggctccgcgcactaaagagccgacgccagagcaagactaatgctattcctctgacctgtcctctcgctgtactcacttccgccctgtgttcggtggtgatctggtggattgtctgtgattatattttacctattcttctattttgcctcgatggcttccgaacccagtag

SEQ ID NO: 111485 - DNA, 5346 bp, synthetic construct
  misc_feature 1..5346: note = Description of Artificial Sequence: Synthetic coding sequence
  source 1..5346: mol_type = other DNA
atgtccggcgaggtgagattacgccaattagagcaatttatcttggatggccctgctcaaacaaatggtcagtgcttcagcgtggagacactgctggacatcctcatctgcctgtatgatgaatgcaataactcacccctccgcagagagaaaaatatccttgaatacctggaatgggcgaagccgtttacttcaaaagtgaaacagatgcgcctacatcgagaagatttcgagattttgaaagtgatcggacgtggcgccttcggtgaagtggccgttgtgaaacttaaaaatgcggataaagtgttcgctatgaagattcttaataaatgggagatgcttaaacgggcggaaaccgcttgttttagagaggaaagggacgtgctggttaacggggataataagtggattacaacgctgcactacgcgttccaggatgacaacaatctctacttggtcatggattactatgtgggcggggaccttttaactctcttgagcaaatttgaagataggctaccagaagacatggccagattctacttggcagagatggtgatcgccattgatagtgtgcatcagctgcattatgtgcacagagatattaaaccggataacatcttgatggatatgaatgggcatattcgcctcgccgactttggatcctgcctgaagctgatggaagacggtaccgtacagtccagcgtagccgttgggactcccgattatatcagcccggaaatcctgcaggctatggaagatggcaaaggccgatacggcccggaatgcgattggtggtccttaggcgtgtgcatgtatgagatgctatatggcgaaactccgttctatgcagagagccttgtcgaaacctacggtaaaattatgaaccacaaagagcggtttcagtttcctgcgcaagtcaccgatgttagcgagaacgcaaaggatctcatcaggagacttatctgctcgcgcgaacatagactcgggcagaatgggatagaagacttcaagaagcacccgttcttttctggtattgactgggacaatatacgaaactgcgaggcaccttacatccccgaggtatcatctcccaccgatacatccaattttgacgtggatgacgattgtctaaaaaactcagaaacaatgccaccaccgacgcacacagcattcagtggtcatcatcttccgttcgttggatttacctatacctcctcatgtgttctatcagatcgttcctgcttacgtgttacagctgggccaacaagcttggacttggatgtgaatgtgcagagaaccctggataataatcttgccacagaggcctatgagagacggataaaaagactggaacaggagaagttggaactgtccagaaaacttcaggaaagtactcaaaccgtacaggcactccaatactctactgtggatggaccactcaccgcttctaaggacctggaaatcaaaaatctcaaagaggaaattgagaaactcaggaagcaggttactgaatcatcccacctagagcagcaactggaggaagccaacgcagtcagacaggagctggatgatgcgttccggcagattaaagcatacgagaaacagatcaagacactgcagcaggagcgcgaggatcttaataaagagctggtgcaggcctctgaacgcctgaagaaccagtcaaaagagctgaaggatgctcactgtcaacgaaagctggcaatgcaggagttcatggaaatcaatgaacgcctgacagaattgcatacacagaagcagaagctcgccaggcatgtgcgggataaggaagaggaggtggacctggtcatgcagaaagtcgagagtctgcggcaagaactgagacgcactgagagggccaagaaagaactggaagttcacactgaggctctcgctgcagaggcctctaaagaccggaaactgagggagcagtcggagcattattctaaacagttggaaaacgagttggagggcctgaagcagaagcagatcagttacagcccaggagtttgttctatcgaacatcagcaggaaatcactaaactcaaaacagatttggaaaagaaaagcattttttacgaagaagagctgagcaaacgcgaaggcatacatgccaacgaaattaagaacctgaagaaggagctccacgactccgagggtcaacagcttgccctgaataaagagataatgattctgaaggataagctggagaagaccaggcgggagtcccagtctgaacgggaagaatttgaaagtgagttcaagcaacagtacgagagggagaaggtgctcctgaccgaggagaataagaagctgacctcggaactggacaagctgacaacgctgtatgagaatctcagtattcataatcagcagcttgaggaggaggtaaaagatctcgccgataaaaaagagagcgttgcacattgggaggcccagatcacggagatcatccaatgggtcagtgatgagaaggacgcccgggggtacctccaggctcttgcatctaagatgactgaggaattagaagcacttagaaactcttccctgggcacaagagccacagacatgccatggaagatgcgacgctttgctaaacttgatatgagcgcaagacttgagttacagagtgcacttgatgcagagatcagagccaaacaggctatccaggaggagctgaacaaggtgaaggctagtaacatcattaccgagtgcaaactcaaggattccgagaagaaaaatctggaactcctgtccgaaatcgagcaactgatcaaggacacagaggaacttagatcagaaaaagggattgaacaccaggactctcaacatagctttttggcatttttgaatacgccaaccgacgcccttgatcaattcgaaaccgtggacagcacgcccctgtcagtgcacaccccaacgttaaggaaaaagggctgcccgggcagtaccggctttccgcccaaacgaaaaactcatcaattctttgtgaaaagtttcaccactcctactaagtgtcaccagtgcacgagtctcatggtgggtttaattcgccagggatgtagctgtgaggtgtgtggctttagctgccatatcacatgcgtcaacaaggctccaactacgtgtcctgtaccacccgagcagactaaaggaccgcttgggatagaccctcagaagggtatcggaacagcatatgaaggacacgtaaggatcccaaagcctgccggggtgaaaaaagggtggcagcgcgcgttggccattgtgtgcgattttaaactttttctctatgatatcgctgagggaaaagctagccaaccctccgtggttattagccaggtaattgatatgagagacgaggagtttagcgtgagctctgtcctggcttccgatgtgatccatgcatcccgaaaagatatcccatgtatcttccgggttacagcgtcacagctgtcagcgagcaacaacaaatgttccatcctgatgctggcagataccgagaacgagaagaacaagtgggtgggggtcctgtccgagctgcataagatcctcaaaaaaaataagttccgcgacagatctgtgtatgtgccaaaggaggcgtacgactctaccttgcctcttatcaaaacaacacaggccgctgcgatcatagatcatgagcgaatcgccctgggaaacgaggaaggactattcgttgtgcacgtaacaaaggacgaaattattcgagtgggtgacaacaaaaagattcatcagatcgagctgattcctaacgatcagttagtggccgttattagtgggcgtaataggcacgtgagactgtttcccatgtcagccctggatggcagagaaacagatttctataagctttccgaaactaagggctgccagaccgtcacgtcaggaaaggttcggcacggcgctctgacgtgtttatgcgtcgcaatgaagagacaggtgctgtgttacgagctgttccagagcaagacgagacaccggaagttcaaggagattcaggtcccttataacgtgcaatggatggccattttctctgagcagctgtgtgttgggttccaatccgggtttttgaggtaccctttgaacggagagggcaatccttacagtatgctacactcgaatgatcatacactcagttttatcgctcaccaacccatggacgcgatatgtgccgtggaaatcagtagcaaagaatacttactctgcttcaactcaattggcatctatactgattgtcaggggcgtcgctcccggcagcaagagctcatgtggccagctaacccctcgagttgctgttataacgctccctacctatccgtttactctgaaaatgccgtcgacatctttgacgtgaactcaatggagtggatacagacactcccgctcaaaaaggtcaggcctctcaacaatgagggcagtctgaacctgctgggcctggagactattaggctaatctattttaaaaacaagatggccgaaggggacgaacttgtggtcccggaaaccagtgataacagtagaaagcaaatggttaggaacatcaataacaaacggcgctattccttccgcgtacctgaggaagagagaatgcaacagagacgggaaatgcttcgcgatccagagatgagaaacaaattaatcagtaatcctactaatttcaaccacatcgcccacatgggcccaggcgatggtatacaaatccttaaagatttaccaatgcctggcttcccctatccttctccccaccaccactccggacttatttcatctccaatcaatttcgagcatatctatcatatgacagtcaattccgcggagaagttcctgagcccagattcgattaacccagaatactctccctcactccggagcgtgcctggaaccccctctttcatgacactccgcaaccccagaccgcaggaatcgcgcactgtgttcagcggcagcgtgtcaattccttccatcactaaatctcgacccgagccaggccggtccatgagtgcatcttccggcctgtcagcacggtccagtgcccaaaacggcagtgctctgaagagggaattctctgggggttcgtacagtgcaaagagacaaccaatgccttccccaagcgaaggctctctttcctccggcggaatggatcagggaagcgatgcccccgcccgggacttcgatggggaagattccgacagtccacgccattctaccgcaagtaactcatcaaatctaagctcacccccctctcccgccagtccaaggaaaacaaagagtctcagtcttgaatctaccgatagaggatcatgggacccatag

SEQ ID NO: 111486 - DNA, 2457 bp, synthetic construct
  misc_feature 1..2457: note = Description of Artificial Sequence: Synthetic coding sequence
  source 1..2457: mol_type = other DNA
atgatcctgaaggataaactggagaaaacgcgacgcgagtcccagtcagagagagaagagtttgaatctgaattcaagcagcagtacgaaagggagaaggtgttgcttacagaagaaaataagaaacttacgtcggagctcgataagctcacaacattgtatgaaaacttgagtattcataatcagcagcttgaagaggaggtgaaggatttggcagataaaaaggagtccgttgcccattgggaggcccagattacggagattatccagtgggtatccgacgaaaaagacgcccggggctacctgcaggctctcgcgagtaaaatgaccgaagaactggaggccctgcgtaattcttctctcggaacacgtgccaccgacatgccctggaaaatgcggcggtttgccaagcttgatatgtctgcaagactcgagctgcagtctgctctggacgctgaaattcgggctaaacaggccatccaggaggagctaaataaggtgaaggcctctaacattatcacagaatgcaagctgaaagactccgagaaaaaaaacttagagctgcttagcgagatcgagcaactaattaaggatacagaggaactgcgcagcgaaaaggggattgagcatcaggacagtcagcattctttcctggcctttctgaacactcctactgacgcgctggaccagtttgaggatagcttctcctcctcgtcctcttcgctaatcgactttttagatgacactgaccccgtggaaaacacttatgtgtggaatccctcagttaaattccacatccagagtcgctccacttccccttccacatcatcggaagctgagcctgttaaaactgtagattcgaccccactgtccgtacacaccccaactctccgtaagaagggttgccctggatctacgggctttccgccaaaaagaaaaactcaccagttctttgtgaaaagcttcacaaccccaacaaagtgccatcagtgcactagcctcatggtgggtctcattaggcagggttgctcctgtgaagtgtgcggattttcatgccacataacctgtgttaacaaggcacctacaacgtgtcccgtccccccggagcagaccaagggacctctgggaatcgaccctcagaaaggcatcggtaccgcatacgaaggacatgtgcggataccgaagcccgcgggagtgaaaaaaggctggcagagagcgctcgcaatcgtgtgcgattttaaactctttctgtacgatatcgcagagggtaaagcatcacaacccagcgttgtgatctcacaggtcattgatatgcgtgatgaggaattctccgtcagcagcgtcctagcctccgacgtcatacacgctagtagaaaggacatcccttgcattttcagggtcaccgcttctcaactttctgcttcgaataacaaatgttctatcttgatgctggcagacacagagaacgagaagaacaaatgggtgggggtcctgtctgagctgcacaagattcttaaaaaaaataagtttcgggaccggagtgtgtatgtgcccaaggaagcctatgattccaccctgccccttattaagacaacccaggccgccgccattatcgaccacgaacggatcgcactcggtaatgaggaggggctcttcgttgtacacgtgaccaaagacgagataatccgggtgggcgacaacaagaagatccaccagatcgagcttatacccaacgatcagctggtggctgtcattagcggacgcaatcgccacgtccggctctttccaatgtccgcccttgatggccgtgaaactgatttctataagctgtcagagaccaagggctgtcaaactgtgacgagcgggaaggtcagacacggcgccctaacctgcctgtgcgtagcgatgaaacgacaggtcttatgctatgagctcttccagtctaagacacgacacagaaaattcaaagaaatccaagtaccttacaacgtccagtggatggccatcttcagtgaacagttatgtgtcgggttccagtctggctttctcagatatcccttaaacggggagggaaacccctacagcatgctccatagcaacgaccacaccctgagctttatcgctcaccagcctatggacgctatttgtgccgtcgaaattagtagcaaggagtatctgctgtgtttcaatagcatagggatctacaccgattgccaaggccgccgatcgcgtcagcaggagcttatgtggcccgcaaacccctcctcgtgttgttacaacgcgccttacctgagcgtctactctgaaaatgcagttgatattttcgacgtgaactccatggaatggatccagaccctgcctcttaaaaaggttcgtccgctgaacaatgaaggaagtctgaatctcctggggctggagacaattagacttatctatttcaaaaacaagatggcttag

SEQ ID NO: 111487 - DNA, 5076 bp, synthetic construct
  misc_feature 1..5076: note = Description of Artificial Sequence: Synthetic coding sequence
  source 1..5076: mol_type = other DNA
atgtccggagaagttagactgagacagctggagcagttcatcctggacgggccagcacaaacaaatggacagtgcttcagcgtcgagactcttctcgatatcctgatttgtctctacgatgaatgtaataatagcccactaagacgcgaaaagaatatattggaatacctggagtgggcgaagccattcacatccaaagtcaagcaaatgaggctgcaccgggaggatttcgaaatcctgaaggtaatcggacgcggagcgtttggggaggtggcggtggtgaagctgaagaatgctgataaagtgttcgctatgaaaattctgaacaagtgggagatgctcaagagggccgagactgcctgctttagggaagagagggacgtgctggtgaacggagacaacaaatggatcactacgcttcactatgcatttcaggatgacaataacttgtacctggttatggattactacgtaggcggcgatcttctcacactcctgtcaaaatttgaagacagactgcctgaggacatggctcggttctacctggccgaaatggtaatagctattgactctgttcaccagttgcactacgttcacagagacataaaacctgacaacatcctgatggatatgaatggtcacattcgacttgccgacttcggctcctgcctcaagctgatggaggacgggactgtgcagtccagtgtcgcagttggcacgccggattatatctcccctgaaatcctgcaggcgatggaggatggcaagggtagatatgggcctgaatgcgattggtggtcgctgggtgtctgtatgtatgagatgctgtacggggaaacccctttttatgctgagagtctcgtggagacttatggcaagataatgaatcataaggagagattccagtttcccgcccaggtcaccgacgtatccgagaatgccaaggatctgattcggagactcatttgctcaagggaacatcgccttggccagaatggaatagaagatttcaagaaacatccttttttcagcggtatagattgggacaatatcaggaattgcgaagccccttacatccctgaagtctcttcacccacagacacctccaacttcgacgtcgacgacgattgcctgaaaaatagcgagaccatgcccccaccgacacacactgctttttctggtcatcacctaccctttgtgggattcacttatacctcaagctgtgtcctcagcgataggtcctgcttgcgcgtgaccgcaggccccacgagtctggacctcgacgttaacgttcagaggaccttggacaataacttggctacagaggcgtatgaacgccgcatcaagcgcctggagcaggaaaaacttgaactgtcccgcaagctgcaggaatctacacagacggtccaggccctgcagtactcgaccgtggatggccccctgaccgcgtcaaaagatctggaaatcaaaaaccttaaggaggagatagaaaaactgcgtaaacaggtgactgaatctagccatttagagcagcagctggaagaggcgaacgccgtgcgccaggaacttgatgatgcattcaggcagatcaaggcatacgaaaagcagatcaagacgttacagcaggagcgtgaggatttgaataaggaactcgtgcaggcttccgagaggctaaagaaccagtccaaggagttaaaggatgctcattgccaacggaaacttgctatgcaggaatttatggaaattaatgaaagactgaccgagttacacacgcagaagcagaaattggcacggcatgtgcgggataaagaggaggaagtggatctggtgatgcagaaagttgagtcattacgacaagaactcagaagaaccgagagagcaaagaaagagctggaagtacacactgaagctctcgcggccgaagccagtaaagatcggaaactccgcgagcagtcagagcactactccaaacagctggaaaacgagctcgaaggcctaaaacagaaacagatcagctactctcccggcgtgtgcagcatcgaacatcagcaggaaattaccaaacttaagactgacctcgagaagaaaagtatcttttatgaagaagagctaagtaagcgcgaggggattcatgcgaacgaaattaagaatctgaagaaagagttgcatgacagtgagggccagcagctggctctgaacaaggaaatcatgattttgaaggataagttagaaaaaacccgtcgagagtctcagtctgagcgagaggagtttgagtctgaattcaagcagcagtatgaacgagaaaaggtgctactcaccgaggagaacaagaaattaacttctgaattggataagctcacaaccctgtatgaaaacctctccatccacaaccagcagctcgaggaagaggtcaaagacctggccgacaaaaaggagagcgtggcccattgggaggcccagatcacggaaatcatccagtgggtctccgatgagaaggatgcccgtggctacttacaggcattggcgtctaaaatgactgaagaactggaggccctgcggaattcttctctgggcactagagccactgacatgccgtggaaaatgcggcgctttgcgaaactggacatgtccgcacgccttgagctacagtcggctctagatgccgagattcgtgccaagcaggctatccaggaggaactgaataaagtgaaggctagcaatattataaccgagtgcaaactgaaggacagcgaaaaaaaaaatttagagctgctgagcgaaatagagcaacttattaaagataccgaagagctgcgcagcgaaaaaggcatcgaacatcaggatagtcaacactcctttctggcctttctcaacacacccactgatgcactggatcagtttgagcgcaaaacacatcaattttttgtaaagtcttttacaacgcctaccaagtgtcaccagtgcacttcattgatggtgggactaattcgtcagggctgttcgtgtgaggtctgcggtttcagttgccacatcacatgcgtgaataaagcccccaccacgtgcccagttcctccagagcaaactaagggcccactcgggattgatcctcagaaaggtatcggtaccgcctacgagggccatgtcagaatccccaagcctgcgggggtgaaaaaaggttggcaacgggccctggccatcgtatgcgactttaaactgtttctatacgacattgctgaggggaaggcttctcaaccttctgtggtgatatctcaggtgattgacatgcgtgacgaggagttttctgtgtcctcagtcttggcaagtgacgtgatccatgcgagccgtaaggatatcccctgcatttttcgggtcacagcctcccagttgagcgcctccaacaataagtgttccatactgatgttagccgataccgagaatgagaagaacaagtgggtcggcgttttatccgaacttcataagatactgaaaaaaaacaaatttcgtgataggtccgtgtacgttccaaaagaggcttacgactccaccttgccattgatcaagactacccaggccgccgccatcatcgaccacgagcggatcgccctgggcaacgaggaaggcctcttcgtggtgcatgtgacaaaagacgagatcatcagggtgggggacaataagaagattcaccagattgaactgattcccaacgaccagttggttgccgtaattagtggaagaaaccgccacgtccgtctgttcccgatgtcggctcttgacggtagggagacggacttttataaattatccgaaacaaaagggtgtcagactgtgacaagcggcaaagttagacacggagccctgacatgtctgtgtgtcgctatgaaaagacaggtgttgtgttacgaactattccaatcaaagacgcgccaccggaagtttaaggagatccaggttccctacaacgtacagtggatggctattttttccgagcaactgtgtgtcgggttccagtcaggttttttgaggtatccacttaacggcgaagggaacccttattcaatgctgcattcgaacgatcatacgttgtctttcatcgcacaccagcctatggatgctatctgcgctgtggaaattagcagtaaggagtacctcctctgctttaactccattggtatctataccgattgtcaaggcaggcgcagccgccagcaggagttgatgtggcccgcaaatccaagcagctgttgttacaatgcaccttacctcagcgtttacagcgaaaatgctgttgatatatttgacgtgaactcaatggagtggatccagacactacctctcaagaaggtgagaccgcttaataacgagggttccctaaacttgctagggctcgagactattcggctgatatacttcaaaaacaaaatggccgagggtgacgaactagtcgtgcccgagacctccgataattcccgaaagcagatggtccggaatatcaataataaaaggagatactcctttagagtccctgaggaggagcgcatgcagcagagaagggaaatgctgcgcgacccagaaatgcggaacaaactgatttctaatcctacgaacttcaatcacattgcacacatggggcccggggacggcatacagatcttgaaagatctgcctatgaacccgaggcctcaggaaagtaggacagtgttttctggatccgttagcattcccagcattacgaagagcaggcctgagcctggcaggagtatgtcagcttcgtcaggcctgtcagctagaagtagtgctcagaatggcagtgccttgaagcgggaattcagtgggggctcctactcggccaagaggcaacctatgccgtcccccagtgaagggagcttgagttcaggcggcatggatcaaggctcagacgcgcccgccagggacttcgacggcgaggatagtgattctccgcggcacagtacagcgagcaactctagtaacctttcctcccccccctcaccagcaagcccgcggaagactaagtctcttagcctcgagagcacagatcgggggagctgggacccatag

SEQ ID NO: 111488 - DNA, 5199 bp, synthetic construct
  misc_feature 1..5199: note = Description of Artificial Sequence: Synthetic coding sequence
  source 1..5199: mol_type = other DNA
atgagcggagaagtgaggcttagacagctcgagcagtttatcctggatggacccgcacagacgaatggtcaatgctttagtgtcgaaacactgctggacatcctaatctgtctgtacgatgagtgtaacaactctccactgagaagggagaagaacattttggagtacctggagtgggccaaaccctttacttcaaaggtgaaacagatgcggctgcacagagaagattttgaaatcctgaaggtgattgggcgcggcgctttcggcgaagtggctgtcgttaagctgaagaatgccgacaaagtgttcgcaatgaagatccttaataagtgggagatgcttaagagagccgagacagcttgcttcagagaggaacgcgatgttctcgttaacggtgacaacaagtggataacaactttgcactacgcctttcaagatgacaacaacttgtatttagtaatggattactacgttggaggggatctgttgacattgctgtccaagtttgaggatcggttgccggaggacatggcaaggttctacctcgccgaaatggtgattgccatagattcagtacaccagctccactatgtgcatagagacattaagcccgacaacatcctgatggacatgaatgggcacatccggttagccgatttcggctcttgtctgaagctaatggaagacggaactgtgcagtctagcgttgcagtggggaccccagattatatttctcctgaaatccttcaggctatggaggacgggaaaggacggtatggcccagagtgcgattggtggtccctgggggtctgcatgtacgagatgctgtacggggagacaccgttttatgccgaaagcctggtcgagacgtatggcaaaatcatgaaccacaaagagagattccagttcccagctcaggttacggatgtcagcgaaaatgcgaaagacctaattaggagactgatatgcagccgagagcatagactgggccagaacggaatcgaggactttaaaaaacacccgtttttttcgggaatcgactgggataacatccgaaactgcgaggcgccatacattcctgaagtaagcagccccacagacacatccaactttgatgtcgacgatgattgccttaagaactccgaaaccatgccacctcctacacatactgcatttagtggacatcatctgccctttgttggatttacctatacaagctcatgtgtactgtcggatcgatcatgtttaagagtgaccgcaggacccacaagtctggacctcgatgtaaacgtccagcgcacgttggataacaacctggccaccgaggcttacgaaaggcggatcaagcggcttgagcaggaaaagctcgagctgtccaggaagcttcaggaatccactcaaacagtgcaggctttgcagtattcgactgtcgatggtccccttaccgcctctaaggacttggagattaagaatctcaaagaggagatcgagaaactgagaaaacaggtcacagagtcaagccacctggaacagcaactggaggaggctaacgctgttcgacaggagctcgacgacgcatttcggcaaatcaaggcttatgaaaagcagatcaagacactccagcaggaacgcgaggatctcaataaggaactggtgcaggcaagcgagcgccttaagaatcagagcaaggagctaaaagacgcgcactgtcagcgcaaactcgctatgcaggaattcatggagattaatgagcgcctcaccgagctgcacacgcagaaacagaaacttgcccggcatgtccgggacaaagaggaggaggtcgatcttgtgatgcaaaaggttgagagcctcagacaggaactgagaaggaccgaaagggcgaaaaaggagctcgaagtacataccgaggccctcgccgccgaggcctccaaggatagaaagttgcgagaacagtctgaacattactcaaaacaactagagaatgaattggaagggctgaaacaaaagcagatctcctactcccccggagtatgctctatagaacatcaacaggaaatcaccaagctaaagactgacctggagaaaaagtccattttctatgaggaggagctgtcgaaacgagagggaattcacgcaaatgagatcaaaaatttaaagaaagagctccacgactccgagggccagcaactggctctgaacaaggagatcatgatcctgaaagacaaactggagaaaaccagaagagaatcccaatccgaacgtgaggagttcgagtccgaatttaaacaacagtatgagcgggagaaggttctcttgacagaagagaacaagaaactgacttctgaactcgacaaacttaccactctttacgagaatctcagtatccacaatcagcagctagaagaagaggtcaaagatttagccgacaagaaggaatccgtagctcactgggaggctcagattaccgagattattcagtgggtctcagatgaaaaagatgccaggggctacctgcaagcactggcctccaaaatgacagaagaattagaggcactccggaattcaagtctgggcactcgtgcaacagatatgccttggaaaatgagaagattcgccaagctggatatgtccgcccggctcgagctgcaaagtgctttagatgcagagataagagccaagcaggctatccaggaagaacttaataaggtaaaggctagcaacatcatcaccgagtgcaaactaaaagacagtgagaaaaagaaccttgagcttctctccgaaatagagcaactcattaaagatacagaagagttacgaagcgaaaaaggaattgagcaccaggattcccagcattccttcctggcattcctgaacacaccaacagacgccctagaccagtttgagcgttcaccatcgtgtaccccagcgagtaaaggtaggagaaccgtggactcgacccccctgagtgtgcatactcctaccctgcgtaaaaaggggtgccccggtagcacaggctttcctcctaagaggaaaacccaccaattctttgtgaaaagtttcactacacctaccaaatgccatcaatgcacaagcttgatggtgggactgatcaggcagggttgcagttgcgaagtgtgcggattcagctgccacatcacctgtgtcaacaaagcccctaccacttgtcccgtgccacccgagcagaccaagggccccttaggcattgatccccagaaagggatcggtactgcttacgaagggcatgttcgcatcccgaagcctgctggggtgaagaagggatggcaacgagccttagctatcgtttgcgactttaaactctttttgtacgatattgctgaaggaaaagcaagtcaacccagcgtggttatctcccaagtcattgatatgagggacgaggaattctcagtgtcctctgttttagccagtgacgttatccatgctagtcggaaggacatcccttgcatcttccgcgtgaccgcctcacagctgagcgcctcaaataataagtgttccatcctgatgctggccgacaccgaaaatgagaaaaacaagtgggtgggtgtgttatccgagctgcacaagatccttaagaaaaacaaatttcgcgaccgttctgtctatgtgcctaaagaggcatatgacagtaccctaccactgataaagacgacgcaggccgcagccattatcgaccacgagcggattgcccttgggaacgaggaaggcctgttcgttgtacacgtgacaaaggacgagatcattagggttggagataataagaagattcaccaaattgagttaatccccaacgaccagctggttgctgtgatttcggggcgtaaccgacacgtgagattgtttccaatgtcagccctggacgggagagaaacagacttttataaactgagcgagaccaaggggtgccagaccgtcacctccggtaaggtgagacatggtgcactcacctgcctttgcgttgcgatgaaacggcaagtcctgtgttatgagctgttccagagtaagacaaggcaccgtaagtttaaggagattcaagtgccctataacgtacagtggatggccatcttttctgagcaactgtgtgtgggtttccaatctggcttcttacgttacccactaaatggcgaagggaacccttattctatgttacactcaaacgatcacacattgagcttcatagcccatcagccgatggacgccatctgtgcagttgagatatctagcaaggagtatctgctctgcttcaatagcatcggcatctacacagattgtcaggggcgcaggtccaggcaacaggagctgatgtggccagcaaatccctcttcttgttgctataacgccccgtatctcagcgtttattccgagaacgctgttgatatttttgacgttaacagcatggaatggattcagaccttgccgctgaagaaagtgcggccacttaataacgaaggctccttaaacctactaggccttgagaccattcgcctcatctacttcaaaaataagatggcagagggggacgagttagtggtgccggaaacgagtgacaactctagaaagcagatggtccggaatattaacaacaaacgccgatactcattccgagtgccagaggaagaacgaatgcagcagagaagggagatgttacgggatccagagatgagaaacaaactgatatccaatccgactaatttcaaccatatcgcgcatatggggcccggcgatggcattcagatactgaaagacttaccaatgaatccacgccctcaggaatcccggaccgtgtttagcgggagtgtgtcaataccatctatcacaaagtcaaggcctgagccggggagatcaatgtcagccagttctggactcagtgcacggtcctcagcccagaacggcagcgccctgaaacgcgagttcagtggtggtagttacagcgccaagcggcagccgatgcccagtcccagcgaaggatccctgtcttccggagggatggaccaggggagcgatgctcctgcaagggactttgatggagaagatagcgactcgccccgccacagcactgcttctaattcatccaatctcagctctcctccctccccagctagcccacggaaaactaagtccttgtctctcgagtctaccgaccgagggagctgggatccctag

SEQ ID NO: 111489 - DNA, 5265 bp, synthetic construct
  misc_feature 1..5265: note = Description of Artificial Sequence: Synthetic coding sequence
  source 1..5265: mol_type = other DNA
atgagtggcgaagtgagactccgtcagctcgagcaattcattctggatggcccagctcagaccaatggccagtgtttctccgtggagaccctcctcgacatacttatctgtctctacgatgagtgcaataactcacctctgcggcgtgaaaagaacatcctggagtacctggaatgggctaagcccttcaccagtaaagttaaacagatgaggcttcatagggaagactttgaaatcctgaaagttattggtagaggggccttcggagaagtggccgtggtcaaactcaaaaacgccgacaaggtgtttgccatgaagattcttaataagtgggagatgctaaagcgtgctgagaccgcttgtttcagggaggagcgggacgtgctcgtaaacggggacaataaatggataacgactttgcactatgcttttcaggacgacaacaatctctacctcgtcatggactactacgtggggggtgatcttctgaccctgctgtctaagttcgaggatcgattacccgaagatatggcccgcttctacttggctgagatggtgatcgcaatagacagtgttcatcaactccattacgtgcatcgcgatattaagccagacaatattttgatggacatgaacggccatatcagactggctgatttcgggtcatgtttgaaacttatggaggatgggacagttcagagtagcgtcgcagttggcactccggactacatttctcccgagatactgcaggcaatggaagatggtaagggccgctacggcccggaatgtgattggtggagtctcggcgtgtgtatgtacgaaatgctctacggggagacccctttctacgccgagagcctcgtggaaacctacgggaagataatgaaccacaaagaaagatttcagttcccggctcaggtgacagatgtctcagagaacgctaaagacctgatcagacgactgatttgtagtcgagagcacaggctggggcaaaatggcattgaggacttcaaaaaacatcccttcttttcgggtatcgactgggataatataaggaactgcgaagcaccttatatccccgaggtttcgagtccaacagacactagcaattttgacgtcgatgacgattgcctcaaaaattccgaaaccatgcccccaccaactcacacagccttctctgggcaccaccttccctttgtgggatttacctacacctccagctgtgtgttgagcgatcggtcatgcttgcgcgtcaccgccggccccaccagtctggacctggatgtgaatgtgcagaggacattagataataatctggctaccgaggcttatgagcggcggatcaaaagacttgagcaggaaaagctggaactcagtaggaagttgcaagagtccacacagactgtacaggctctgcagtatagcactgtagacggacccctcaccgcatccaaggatctcgaaatcaagaacctcaaggaagaaatcgaaaaactccgtaagcaggtaacggagagttctcatctagagcaacaactggaggaagctaatgctgttcggcaggaactcgatgacgcattccggcaaattaaagcgtacgagaaacagattaaaactttacagcaggagcgggaggatctgaacaaggagctcgtccaggcctcagagcggctgaagaaccagagcaaagagctgaaggacgcccactgtcagcgaaaattggccatgcaagaatttatggaaatcaacgagaggctgaccgagctgcatactcagaagcagaagctggcccggcacgtacgcgataaagaagaggaagttgacctggtgatgcagaaagtggaatcattacggcaggaactgcgccggacggagcgcgctaaaaaagaacttgaggtccacacggaagcgcttgccgccgaggccagcaaagaccgaaaactgcgcgagcagtctgagcactatagcaaacagctcgaaaatgaacttgaaggtcttaagcagaagcagatatcttacagccccggggtgtgttctattgagcatcagcaggaaattaccaaacttaagacagatctggaaaagaaatcgatcttctatgaggaagaattgtctaagagggaaggcattcacgcaaacgagatcaagaatcttaagaaggaactccacgactcagagggacagcagctggccctcaacaaggagatcatgattcttaaggacaaactggagaagacgaggcgtgagagtcagagtgaacgcgaggagttcgagagtgagtttaaacaacagtacgagcgggaaaaagttctgctgacagaagaaaataagaagcttaccagtgaattggacaagctgacgaccctttatgaaaacctgagtatacacaaccagcagctggaggaagaagtaaaagatctggccgataaaaaagagagcgttgctcactgggaggctcaaattactgagatcattcagtgggtctcggatgaaaaggatgcccgcggctatctccaggcattagcctccaagatgacagaagagctcgaggcgttgcgtaactcctcccttggtactcgtgccaccgatatgccctggaagatgaggcggttcgcaaagctggacatgagcgcccggctggagcttcagtctgcactggacgcagagatccgcgcaaagcaggcgattcaggaagagctcaacaaggtcaaagcttctaatatcatcactgaatgcaaacttaaagactcggagaaaaaaaacctcgagctcctctcggagatcgaacagctcattaaggatacagaggaactgcggtcagaaaagggcattgaacaccaggattcccagcactccttcttggcatttctgaacactcctaccgacgcgctcgaccagttcgaaaccgacccagtcgagaatacgtacgtttggaaccctagcgtgaagttccacatacaatcgcggtcaacctcgcctagcacaagctccgaggcggagcctgtaaagacggtcgacagtactcccctgagtgtgcacacacccacactgcgtaagaaaggttgtcccgggtctacagggtttcctccgaaacgaaagacacatcagttctttgtgaaatcattcactaccccaacaaagtgccatcaatgtacttctctaatggtgggcctaattagacagggctgctcgtgtgaggtttgcgggttctcttgtcacatcacctgcgtgaacaaggccccaacaacatgtcccgtgccaccagaacagaccaaaggccctttggggatcgatccccaaaaagggataggcacggcttacgagggacacgtgcggatcccaaaacctgctggcgtgaagaaaggctggcagcgggctttggccatcgtctgcgattttaaacttttcttgtatgacatcgcggaggggaaagcgagccagccatctgtagttatctcccaggtgatcgacatgagagacgaggaattctccgtctcatctgtgctcgcttccgacgtcatccacgcatcccgtaaagatatcccgtgtatctttcgggttaccgcatcacagctctcagctagtaataacaagtgctctatacttatgcttgccgatactgagaatgagaagaataagtgggttggcgtactctccgagctgcacaaaattctaaaaaaaaataaatttagagatagatctgtgtacgtgcccaaggaagcttacgatagcacacttcctctgattaagaccacgcaggcggccgctattatcgatcacgaacgaatcgctctaggcaacgaggaaggactgttcgtcgttcacgtaaccaaggatgagataatccgtgtgggcgataacaaaaaaattcaccagattgagctgatccccaatgaccagttagtagctgtgattagcgggcgtaaccgtcatgttaggctgttccctatgtctgcgctagacggccgcgagactgacttttacaaactgagtgaaaccaaaggatgccaaaccgtgaccagcgggaaagtgcggcatggcgctcttacctgcctgtgtgttgccatgaaacgccaagtgctctgttacgaactgtttcagagcaaaacccggcaccgtaagttcaaggagatccaagttccctataacgtgcagtggatggccatcttttccgagcaactctgcgtgggcttccaatccgggttcctgcggtaccccctgaacggcgaagggaacccatattcgatgttgcattcaaacgatcacacacttagtttcattgcacatcagcctatggatgcaatttgcgcagtggaaatatcttccaaggaatacctcctctgcttcaactctatagggatctacactgattgtcaaggacggcgtagccgccagcaggagctgatgtggcccgctaatccctcgtcatgttgctacaacgctccatatctttcggtctattccgaaaatgccgtggatatttttgacgtgaatagcatggagtggatacaaactttgcctctgaagaaagtcaggccactcaataatgaaggcagtctgaacttacttggcctggaaaccattcgcttgatctattttaaaaacaaaatggccgaaggcgacgagctggtggtccctgaaacatcagataactccagaaaacagatggtgcgtaatattaataacaagagacgatattcgttccgggtgccggaagaggagaggatgcaacagcgccgggagatgctgagagacccggaaatgcggaataagctaatctccaaccccacaaactttaaccatatcgcgcacatgggaccaggcgatgggatccagatactgaaggatctgcccatgaatcccagacctcaagagtccagaacggtgttcagcggatccgtaagtatccccagtattaccaagtctaggcctgaaccaggccgttcaatgtctgcctcgagcgggctgagcgctcgatcatcagctcagaacggctccgctctcaaaagagagttctctggaggtagttatagcgcaaagaggcagcctatgccaagtcctagtgaagggtcccttagcagcgggggaatggaccagggcagcgatgcgccggcaagagattttgatggggaggatagtgattcacccagacattccacagctagtaatagctctaatctgtcatctcctccgagtcccgcctcacctaggaagaccaagagtcttagcttggaaagcaccgatagagggagttgggatccctag

SEQ ID NO: 111490 - DNA, 4917 bp, synthetic construct
  misc_feature 1..4917: note = Description of Artificial Sequence: Synthetic coding sequence
  source 1..4917: mol_type = other DNA
atgtcgggggaagttcggctcagacagctcgagcaatttattcttgatggacctgcgcaaaccaacggtcagtgtttcagtgtggagacattactggatatcctaatctgcctctacgatgaatgtaataattcaccactgcgccgagagaagaacattttggaatacctggaatgggctaaacctttcacctccaaggtcaagcagatgcgactgcatagggaggacttcgagattctcaaggtgatcggtcgaggagcatttggggaagtggcagtggttaagctaaaaaacgctgataaagtgtttgctatgaaaattctcaacaagtgggaaatgttgaagcgcgccgagacagcttgcttcagggaggagagagacgtgctggtcaatggagacaacaaatggattacaactctgcattatgcattccaagatgataataacctgtacctggttatggactattacgtcggtggagacctgcttactttgctaagcaaattcgaggataggctgcccgaagatatggcacgcttctacctggcggaaatggtgatcgccatcgattctgtgcatcagttgcactatgtacatagagacatcaaaccagacaacatcctgatggatatgaatggccacatccgcttagccgatttcggatcatgcctgaagcttatggaggacggcacggtgcaaagctcagtggcagtcggaaccccagactacattagccctgaaatcctccaagccatggaggacggtaagggtaggtacggaccagaatgcgactggtggtcattaggggtctgtatgtatgagatgctctacggcgagactcctttttacgccgagtccttggttgaaacctatgggaagattatgaatcataaagaacggtttcaattccccgcccaggttacggacgtctccgagaacgccaaggacctgatccgtcgtctgatttgtagtcgagagcaccgcctgggtcagaatggaatagaggactttaagaaacatccttttttctccggaatcgactgggacaacatccggaattgtgaagctccatacatcccggaggtatcatcccctacggatacctccaattttgacgtggatgacgactgccttaagaattccgaaacaatgcctccgcccacccacaccgcatttagcgggcaccatctaccttttgtagggttcacgtacacaagctcatgtgtgcttagcgaccggagctgtctgagagtaaccgcaggaccaaccagcttagacctggatgtgaatgtccaacggacccttgacaacaacttggccaccgaggcctatgagcggcggatcaagagattggagcaggagaaacttgaactgagccgcaagctacaagaatctacccagacagtgcaagctctgcagtactcaactgtcgacggccctctgaccgccagcaaggacctagaaatcaagaacttgaaagaagaaattgaaaagctgcgcaagcaggtgaccgaatcttcacacctcgagcagcaattagaagaagccaacgcagtgcgacaggagctggatgacgcattcaggcagattaaggcctacgagaagcagatcaaaactctccagcaggaaagagaggacctcaataaactagaagtgcatacggaggccttggccgccgaagcgtccaaagaccgcaaactccgggagcagagtgagcactacagcaagcagctggaaaacgaactcgagggcctaaagcagaagcagatatcttatagcccaggtgtttgctcaatcgagcaccagcaggaaattaccaagctaaagacagacttagagaagaagtccatcttttatgaggaggagctttccaagagagagggaattcacgcaaacgagatcaagaatctgaagaaggaactccacgattctgagggacagcagttagcattaaacaaggagataatgattttgaaggataagttggagaagactagacgagaatctcaaagcgaaagagaggaattcgaatctgagttcaagcaacaatacgaacgtgaaaaagtgctgttgaccgaggagaataagaaactgacctcagagctggacaaactgaccacgctgtatgagaatctgagtattcacaatcagcaactcgaggaggaggtgaaggacctggctgataagaaggagtctgtggcccactgggaggcccagatcaccgagatcatccagtgggtgtcagatgaaaaagatgccagaggctatctacaggcgctcgccagtaaaatgaccgaagaactagaggctctccggaactcatcactcgggactcgggccactgacatgccttggaagatgagacggtttgctaagttagacatgagtgcgagactcgagctgcaaagtgctctagatgctgagatcagagctaagcaggctatccaggaggaactgaataaggttaaggcctccaacattataaccgaatgtaaactgaaagactccgagaaaaagaatttagagctactttccgagatagagcagttaatcaaggatacagaagagcttcgttctgagaaaggaatcgagcaccaggacagtcaacactcatttttggccttccttaacacgccaactgatgctttggaccagttcgagacggtcgatagtacacctctctcagtgcatacaccaactctgagaaaaaagggctgtccggggtcaacgggattcccacccaagcgaaagacacaccaattctttgttaaaagttttaccacccctacaaagtgtcaccaatgcactagcctgatggtcggcctgatccggcagggatgctcatgcgaagtttgcgggttctcctgccacattacctgtgtcaacaaggccccgacaacgtgtcccgtccccccagaacaaacaaaaggcccgctaggtattgatccccagaaggggataggcacagcctatgaggggcacgtgcggattcccaagcccgcgggcgtcaagaaaggttggcagcgtgctctggccatagtatgtgattttaaactcttcctctatgatatagccgagggtaaagcgtctcagcctagtgtcgtcatttcccaggtgattgacatgagggacgaggagttctccgtctcctcggtgctggccagtgatgtgatccacgcttccagaaaggacataccctgcatttttagagtgactgcctcccagctttccgcaagcaataacaaatgtagcatcctgatgcttgccgacacggaaaacgaaaaaaataaatgggtgggggtgctctctgagctgcacaagatactcaaaaagaataaatttagggatcggagcgtgtatgtgccaaaagaagcctatgactcgactctgcccctgatcaagactactcaggcagccgccattatcgaccacgagcgtatagccctgggtaatgaggagggtctgttcgtggtacacgttaccaaggacgagatcattagagtgggcgataataagaagatacaccagatcgagttaattcctaatgatcagctggttgccgtcatttctggccggaatcgtcacgttagactctttcccatgagtgcactggatggtcgcgagactgacttttataagctgagcgagaccaaagggtgtcaaacagtgaccagcgggaaagtgagacatggcgctctgacttgcttgtgtgtggcaatgaaaagacaagtgctctgctacgagttgttccagtccaaaactcgccacagaaaatttaaagagatccaggtgccctataacgtgcagtggatggccatattctctgagcaactttgtgtgggcttccagagcggctttttgcggtatcctttgaacggagagggaaatccctacagtatgcttcattctaatgatcatacactgtcattcattgctcaccaacctatggatgctatttgtgcagtggagatctcctcaaaggagtatctgctgtgttttaattctatcggcatatacactgattgccagggccggcgttcacggcagcaggaattgatgtggccagccaacccctccagttgttgctacaatgcaccttacctttccgtttatagtgaaaacgccgtggatattttcgacgtgaactctatggaatggatccagacgctgccgctgaagaaagtccggcctctaaataatgagggctctttgaacttactggggctcgaaacaatccggttaatctatttcaagaataaaatggccgagggcgacgaactggtggtgcctgaaacatcagataattctcgtaaacaaatggtccgtaatattaataacaagaggaggtactctttcagggtaccagaagaggaacgcatgcagcagcgcagagaaatgttgcgggaccccgagatgagaaacaagctgatctcaaaccctactaattttaatcacattgctcatatgggcccaggggatggtatccaaattctgaaggacctccctatgaatccccgacctcaggagtcaaggaccgtgttcagtgggagcgtatctatcccatcaattaccaaatctcgtcccgaacctggtcggagcatgagcgccagtagtgggctgtccgcacggagttccgcacagaacggcagcgccttgaagagagaattttctgggggatcatacagtgccaagcgccagccaatgccttcgccctccgagggatcgctgtcctcaggcggaatggatcagggcagtgacgcacccgcgcgcgatttcgatggcgaggactcagatagtccccggcatagtacagccagcaacagctcaaacctttcctcacctccatccccagcttcccctcggaaaacaaaatctctctctctagaatctacagatagagggtcttgggacccctag

SEQ ID NO: 111491 - DNA, 5160 bp, synthetic construct
  misc_feature 1..5160: note = Description of Artificial Sequence: Synthetic coding sequence
  source 1..5160: mol_type = other DNA
atgtctggcgaggtgagactacggcagctcgagcagtttattttggatggcccagcccagaccaatggacagtgtttctctgtggagaccttgctggacatcctcatttgcctgtacgacgaatgtaataacagtcccctgcggcgggaaaaaaatatcttggagtatctggagtgggctaagcccttcaccagtaaagtgaagcaaatgcgcctgcatcgagaggacttcgaaatcctcaaggttatcgggagaggagcctttggagaagtcgctgtggtcaagctgaaaaacgcggacaaagtattcgctatgaagatcctaaacaaatgggaaatgctgaagcgagccgagaccgcttgctttagggaggagcgcgatgtgttggtcaacggcgacaacaaatggattacaaccctgcactacgcgtttcaggatgataacaatctgtatcttgtcatggactattacgttgggggagacttactgaccttgctgtcaaaattcgaggacaggctacccgaagatatggcacggttctacctagcggagatggtgattgcaatcgattccgtacatcaactgcattatgtccaccgcgatattaagccagacaatatcctgatggatatgaacggtcatatccgacttgccgattttgggagctgtctaaagctcatggaagacggaactgttcagtccagcgtggccgtgggcacacccgactacatctcccccgagatcctgcaggcgatggaggatggcaaaggtaggtatggaccggaatgtgactggtggagccttggcgtgtgcatgtacgagatgctctatggagagacacccttttatgctgagtcacttgtcgaaacctacggcaagatcatgaatcacaaggagcggttccaattccctgcacaggtaaccgatgtgagcgagaacgcaaaagacctgattcgtcggctgatctgcagccgagagcatcggctaggacagaatggaatcgaggattttaaaaaacaccctttttttagtgggatcgattgggacaatataaggaattgcgaggcgccatatatccccgaggtaagcagccccaccgatacaagcaacttcgacgtcgacgatgattgcctgaagaattcggagaccatgccaccacccacgcacaccgctttcagtggacaccatctcccctttgtcggattcacatatactagtagctgcgtgctttctgatcgatcctgtctgagagtgacagctggcccaacctccctggatctggacgtgaatgtacagcgcacactggataacaatttggcaaccgaggcctacgaacgtagaatcaaaagacttgaacaggaaaaactggaactttccaggaagctgcaggagtcgacacagaccgtacaggctctgcaatacagcacagtggatggccccctgacagctagcaaggacctggaaatcaagaacctaaaagaggaaatagaaaaactgcggaaacaggtcacggaaagtagccacctcgaacaacagctggaagaggccaatgcagtccgtcaggagcttgatgacgccttccggcagataaaggcttatgaaaaacagattaagacactccaacaggaacgcgaggatctgaacaaagaactggtgcaagcatccgagcggctcaaaaaccagtccaaagagctgaaagatgcccattgccagcgtaagctggcgatgcaggagtttatggaaattaacgaaagactgactgagcttcatacccagaagcagaaactggcccgtcatgtccgcgataaggaggaggaagtagacctggtgatgcagaaggttgagagcctacgccaggagctcagaagaacagagagagctaagaaggaactcgaagtgcacaccgaagcactcgccgctgaagctagcaaagataggaaactgagagaacagtccgaacactattccaagcagcttgagaatgagctggaaggtctgaaacagaaacagatttcatacagtcccggtgtgtgtagtattgagcatcagcaggaaatcaccaaattgaagacagatctggagaagaagtctattttctatgaggaggagctctcaaagagggaaggtatacatgcgaacgagattaaaaacctcaaaaaggagctgcatgactccgaaggccagcagttagccttaaataaggaaataatgatactgaaagacaaattagagaaaaccagaagagagtctcaaagcgaacgagaagagtttgagagtgagtttaagcagcagtacgagcgagaaaaggtgctgttgacagaggagaataaaaagctcaccagcgaactcgataaattaaccaccctgtacgagaacttgagcattcacaatcagcagctcgaagaggaagttaaagacttggcagataagaaagagtctgttgcccattgggaggcacagatcacagagattattcaatgggtttccgatgagaaggacgcccgcgggtacctccaggctctggcttccaagatgaccgaggaactcgaagcactgcggaactcctcgctgggaacaagagccacagatatgccttggaaaatgcgccgcttcgccaagctggacatgtccgcaagacttgagctgcagtctgcgctggacgctgaaattcgcgccaagcaggctatacaggaggaactaaacaaggtcaaagcgtcaaacatcatcactgagtgcaagctgaaggacagcgaaaagaagaatctagagctgctctcagagattgaacagttgatcaaagatactgaagaactgaggagtgaaaaaggaatcgagcatcaggattctcagcactctttcctagcctttctaaatacgccaacagacgccttggatcagtttgagaccgtggactccacgcccctgtcggtgcatacgccgaccttgaggaaaaaggggtgtcccggcagtactggtttccctccgaagcggaagacccaccagttcttcgtgaagagctttacaacccccaccaagtgccaccagtgtactagcctgatggtagggctgataagacaagggtgctcttgcgaggtgtgtggctttagttgccacattacatgtgtgaacaaggctcccacaacctgtccagtgccaccagaacaaactaagggaccgttgggtatagaccctcagaagggaataggcactgcatacgagggccacgtccggatacccaaacccgccggcgtaaagaagggctggcagagagcgctggccattgtctgcgatttcaaacttttcctttatgacatcgctgaggggaaggcttcccagcctagcgtagtgatctcccaggtcatagacatgagggacgaagagttctcagtctcttcggttctggcttccgacgtaatccatgcttccagaaaggatataccatgcatatttcgggttactgcctcccagcttagcgcctctaataataagtgttctattctcatgttggcggatactgagaacgaaaaaaacaaatgggtgggagttctttccgagctgcataagattctgaagaaaaacaagtttagggatcggagcgtatatgtgccaaaagaagcatatgattcaacgcttcctctgatcaagactacccaggctgccgctatcattgaccatgagagaattgctctgggtaacgaagaaggtctgtttgtggtgcacgttacaaaggatgaaattatacgggtaggcgacaacaaaaagatccaccagatcgagctgataccgaacgaccagctggtagctgttatatcaggtaggaacagacatgtccgactctttcctatgtcggcgcttgacggtcgggagaccgatttctataagctgagcgagactaaagggtgccagactgtcacctcagggaaggtccggcatggcgctcttacatgcttgtgcgtggccatgaagcggcaggtcctgtgctatgagctttttcagtcaaagacccgccatcgcaagtttaaggagatacaggtcccctacaacgtgcaatggatggccatattcagcgagcagctctgtgttggattccaatccggtttcctaaggtatcccctcaatggagaaggtaacccctactctatgcttcattctaatgatcatacactcagtttcatcgcccaccaacccatggacgcaatttgcgccgtggaaatcagcagcaaggagtacctgctgtgctttaatagcattgggatatatactgattgtcaaggccgtcgtagccgccagcaggagttgatgtggcccgctaaccctagctcttgttgttacaatgccccttatctgagtgtttatagcgaaaacgccgtggacatctttgatgtcaattctatggagtggattcagactttacccctgaagaaagtgcggcccctgaacaatgaaggttccctcaacctcctgggtctcgaaactattagactgatctactttaaaaacaagatggccgagggagacgagctggtggtaccagagacatccgacaacagccgaaaacagatggtacggaacatcaacaacaagagaagatattcatttcgcgtcccggaggaggagcgtatgcagcagaggcgcgaaatgctgcgagatcctgagatgagaaacaaacttatcagtaaccccacgaattttaaccacattgcacacatgggccctggggatggcattcaaatcctgaaggacttgccaatgaacccccgtcctcaggagtcccggacagtgttcagtggctctgtatccatcccaagcatcaccaaaagccgccctgagcccggcagatccatgagtgcaagtagcggcctctcagcaaggtcttctgctcagaacggctctgccttaaagagggaattctcaggaggctcttatagcgccaagcgccagcctatgccttctcccagcgagggaagcctgtctagcgggggcatggatcagggaagcgatgcccccgcacgggatttcgatggggaggactcagatagccctcgccatagtacggcgagcaactcttctaacctttcttctccgccctccccagcttctccccgaaaaactaagagcctgagcctcgaatccacagatcgcggcagctgggatccctag

SEQ ID NO: 111492 - DNA, 1641 bp, synthetic construct
  misc_feature 1..1641: note = Description of Artificial Sequence: Synthetic coding sequence
  source 1..1641: mol_type = other DNA
taagacattgcagagggtaaggccagtcagccctctgtcgtgatctcccaggtcattgacatgcgcgatgaggagttcagcgtaagttcagtgctggccagtgacgtgatccacgcaagcagaaaggatatcccgtgcatcttccgagtgacggctagccaactgagcgcgagcaacaataagtgtagtattttgatgctggccgacaccgaaaatgaaaagaataaatgggttggcgtgctaagtgagctgcacaagatactgaagaaaaataagttccgcgacaggtcagtgtacgtgcccaaggaagcctatgatagcacacttccgctgatcaaaacaactcaggcagcagcaattattgatcacgagcggatcgctctgggaaatgaggaaggcttattcgtggtccacgtgacaaaggacgagattataagagtgggagacaacaagaagattcaccaaattgagctcatacctaatgaccagctggtagccgtgattagcgggcggaacagacacgttcgactattccccatgtcagccctcgacgggcgtgagactgacttctacaaactcagcgaaaccaaggggtgccagaccgtgacttcggggaaagtgcgccacggagctctgacatgtctgtgtgtagccatgaagcggcaagtcctgtgctacgaattgttccagagtaagaccagacacagaaagtttaaagagatccaggtcccttacaacgtgcagtggatggcaattttcagcgagcagctgtgtgtcggattccagtcaggcttcttgcggtaccctttaaacggcgaggggaacccatactctatgctgcattcgaacgaccacaccctgtccttcatcgcccaccagcccatggacgcgatctgcgcagtagaaatctcaagtaaggagtatttactgtgcttcaatagcattggcatctatactgattgccagggaagacgtagtcgccagcaggaactgatgtggcccgcgaacccaagttcatgctgctacaacgccccttatctatccgtctactctgagaacgcggtcgacatttttgacgttaactccatggagtggatccaaacactgccactgaaaaaagtgagaccgctaaacaatgaaggtagtctcaaccttttaggactggagaccatacgcctgatttactttaagaacaagatggcggagggagatgagctagtggtgcccgaaacaagtgataattctaggaaacagatggtccggaacatcaataacaaaaggcggtactcgtttagggtcccagaagaggagcgtatgcagcagaggagggagatgctacgcgaccctgagatgaggaacaaactcataagtaatccgactaacttcaaccacatcgctcatatgggcccaggcgacggaatacaaattttgaaggacctgccgatgaatcctcgccctcaagaatcccgtactgtgttctctggctccgtttccattccgtcaataaccaagtcccgtcctgagcctggaaggagtatgtcagcttccagtgggttaagtgcatccaaatgcagagggtatcggaaagtgccactgcggcaaggcgaccctcaattgccgcctttactgtcaagaggatag

SEQ ID NO: 111493 - DNA, 2187 bp, synthetic construct
  misc_feature 1..2187: note = Description of Artificial Sequence: Synthetic coding sequence
  source 1..2187: mol_type = other DNA
tgagtgagcgatgaaaaggacgcaaggggctacctccaggcactggcgtcaaaaatgaccgaggaactggaggcgctccgaaatagctccctgggaacgagagctaccgacatgccctggaagatgaggcgattcgctaagctggacatgtccgcacggctcgaactgcagtcagctcttgatgccgaaattagagccaaacaggccattcaggaggagttgaacaaggttaaagcctctaacatcattacagagtgtaagcttaaggattccgaaaaaaaaaacttagagttgttgagtgagatcgaacagctaattaaagatacagaggaactccgttccgaaaagggtattgagcaccaagacagtcaacattcctttctcgcctttctgaacaccccaaccgacgcactggaccagtttgaagattccttcagtagttcttcaagctctctcattgatttcctcgatgatacggatccagttgaaaatacatatgtatggaacccttcagtgaaatttcacatccagtctaggagcacatctccttcgacaagctcagaagctgagcctgtgaaaacggtggactcaacaccactgtccgttcatacccctacactccggaagaaaggctgtcccggctcaacaggattccctccgaagagaaagacccatcagtttttcgtgaagagctttacgacccctacaaaatgccatcagtgcacttccctgatggtagggctcataaggcaaggctgttcttgtgaagtctgcggattctcttgtcacataacatgcgtcaataaggccccgacaacctgcccagtgccaccagaacagaccaagggtccgctgggaatagacccacagaaagggataggtaccgcctatgagggccatgtgagaatccccaagcctgccggggtgaagaagggctggcaacgggctctggctatagtctgtgatttcaagctgtttttgtatgacatcgcagagggaaaagcttcacagccatcagtggtgatttcacaggtaatagacatgcgggatgaagaattctctgtttctagcgtcctggctagcgatgtcatccacgcatctcgaaaggacatcccctgtatatttcgggtcaccgcatcacagctgtcagccagtaataataaatgtagcatcctgatgttggcggacaccgaaaacgagaaaaataaatgggtaggggtcctctccgagctccacaagatactgaagaagaacaaatttagagatcgaagcgtctacgtgcccaaagaggcttacgacagcacccttcctttaatcaagacaacacaggccgccgctattattgatcacgaacgaatagccctcgggaatgaggaaggtcttttcgtagtccatgtaacgaaggatgagatcatacgggtgggtgacaacaaaaagatccatcaaatagaattgatccccaacgatcagcttgtcgctgtaatcagtggccggaaccggcacgtccgactctttcctatgagtgcactcgacggtcgagagactgatttttacaaactctccgaaactaaaggatgccaaacagtcacgtcagggaaggtgcgacatggagctttaacatgcctttgcgtcgcaatgaagcggcaggtcctgtgttacgagctcttccagagtaagactaggcatagaaagttcaaggagatacaagtcccctataatgtgcagtggatggccatcttctccgaacagctgtgtgtgggtttccagtcaggtttcctccgatacccgctgaatggagagggcaatccctattccatgctgcactccaacgatcacaccctgagttttatcgctcatcaaccaatggatgcaatttgtgccgtggagatcagcagtaaggagtatttattgtgctttaatagcatcggtatctataccgactgccagggacggcggagtcgccaacaagagctgatgtggcctgctaaccccagctcgtgttgttacaatgccccttatctctctgtgtacagcgagaatgccgttgacatatttgacgtgaattccatggaatggattcagactctgcccctcaaaaaggtccgcccattaaataacgaaggtagtttgaatcttttgggtctggagacaatcagattaatctacttcaaaaacaagatggcatag

SEQ ID NO: 111494 - DNA, 3147 bp, synthetic construct
  misc_feature 1..3147: note = Description of Artificial Sequence: Synthetic coding sequence
  source 1..3147: mol_type = other DNA
tgagagggcattcacgcgaatgagattaagaacctgaaaaaggagctacacgattcagaagggcagcaactggccctgaacaaggaaatcatgattttgaaagataagctggaaaagacgcggagggaaagccagtccgaacgcgaagagttcgagtctgagtttaaacaacagtacgagcgggagaaggtgttgctgacagaggagaataagaaactcacctcagaactagataaactcacaactctctatgaaaacctaagcattcacaatcagcaattagaggaggaggtaaaagatctcgccgacaaaaaggagagcgtggcccattgggaggctcaaatcacagaaatcattcagtgggttagtgatgagaaggacgcccgcggttatctccaggctcttgcatctaaaatgaccgaagagttagaggccctgcggaacagttccctcgggacaagagcgaccgatatgccctggaagatgcgcagattcgctaaattggacatgagcgctagacttgagctgcagagcgccctagacgctgaaattcgagccaagcaagccatccaagaagagctgaataaggttaaagcgagtaatatcattacggaatgtaagttgaaggatagcgagaaaaagaacctcgagctcctgtctgaaatcgaacagcttatcaaagataccgaggagctacgctctgaaaaaggcattgagcaccaggactcccagcattctttcctcgccttcttgaacacccctaccgatgcccttgaccagttcgagactgatcctgtggaaaacacctacgtatggaacccgagcgtgaagttccatatacagtcaagatctacgagcccttccacttcctcggaagctgaacccgtgaagacagtagactccacccccttaagcgtacatacgcccaccctgcgtaagaagggatgccccggtagcacaggctttccccccaagcgcaagactcatcagttctttgtaaagagtttcaccactcctactaaatgccatcaatgtacctctttgatggtcgggcttattcgccagggatgttcttgcgaagtatgcgggttttcttgtcatattacctgcgtgaacaaggctccgactacctgccccgtgcctcctgagcaaaccaaaggacccttaggtatcgacccacaaaaagggataggaactgcctacgaaggccacgtgagaatccccaagccggctggggtgaagaagggatggcaaagagcactcgccatcgtttgcgacttcaagctcttcctatacgacatcgctgagggcaaagcatcccagccatccgtcgtgatttctcaagttatcgatatgagagacgaggagttctccgtgagttccgtgctggctagcgatgtcatccatgctagtcggaaagatattccatgcatttttagggtcacagcctcccagctcagcgctagcaacaacaaatgtagcattctgatgcttgccgacacagaaaacgagaaaaacaaatgggtcggtgtgctgagcgagttacacaaaattctgaaaaagaacaaatttagagaccgaagtgtctacgtgcccaaagaggcatacgactcaaccctccccctaattaagaccacacaggcagctgctataatcgaccacgaacggatcgccctcggaaacgaagagggcctctttgtcgtccacgttaccaaggatgaaattatacgtgtgggtgacaataagaagattcaccaaatagagttgatccccaatgaccagctggtagctgtaatctctgggagaaatcgccacgtgaggctcttcccaatgtcagcccttgacggccgggaaacagatttctacaagctatccgagactaagggatgtcagaccgtcacatcaggtaaagtgcgccacggcgctctcacatgtctctgcgtagccatgaagcgacaggttctctgctatgagctattccaatcaaagacaaggcatagaaagttcaaggaaatccaggtcccatataacgttcagtggatggctattttttctgagcaactgtgcgtcggttttcagtccggattcctgcgatatcctctgaacggcgagggaaatccctactctatgttgcacagcaacgaccatacgctcagtttcatagcacatcagccaatggacgccatatgtgccgtggaaattagctcaaaggagtacctgctctgctttaactcaatcggtatatacacagactgccagggcagacggagccgacagcaagaactgatgtggcctgccaacccctcgtcatgctgttataacgcaccctacctctctgtatactccgagaacgcggtggatatctttgacgtcaactccatggagtggatccagactctgcctttaaagaaggtgagaccactgaacaatgagggctccctaaatctactaggcctcgaaacgataaggcttatatattttaagaacaaaatggcagaaggtgacgagctcgttgtgccagagactagcgacaactctcgcaaacaaatggttagaaacattaataataaacgtagatattctttcagagtgcctgaggaggagcgtatgcagcaaagacgcgaaatgctgagggatcccgaaatgcggaacaagctcatcagcaatcccaccaatttcaaccacatcgcacatatgggtccgggggacggaatccaaatcctcaaggatttgcccatgaacccacggcctcaggaatcacgcaccgtgttctcgggaagcgttagcatccccagcattacaaaatcacggccggagccaggccgctctatgagcgcaagtagtggcttgagtgcccggtcctccgcgcaaaatggatccgccctaaagcgtgagttcagtggtgggtcatatagcgccaagcgtcaacccatgccaagcccatcagaagggtctctgtctagcggaggcatggaccaggggtcagatgccccggcgagggattttgacggggaagattctgacagccccaggcatagcactgccagcaattcctcaaatctgtctagtcccccatcccctgcttctcccagaaaaacgaagagtttgagtctggagtccaccgatagaggatcgtgggatccctag

SEQ ID NO: 111495 - DNA, 2955 bp, synthetic construct
  misc_feature 1..2955: note = Description of Artificial Sequence: Synthetic coding sequence
  source 1..2955: mol_type = other DNA
tgacagctcgaagaagaggtgaaggacttggctgacaaaaaagaatcagtcgcgcattgggaggcacagattacagagattatccagtgggtctccgatgagaaagacgcacggggttacctgcaggcgttagctagtaagatgactgaagagctggaagcactgcggaatagcagcttggggacacgcgcaactgacatgccatggaagatgcggcgatttgccaagctcgacatgagtgcccgcctggaactccagtctgccctggacgccgagattagggcgaagcaagctattcaagaggaactcaataaggttaaggccagtaacataattaccgaatgcaaactgaaagatagcgaaaagaagaatcttgaattattatcagagatcgagcagctgattaaagataccgaagagttgaggagtgaaaaggggatcgagcaccaggactcccagcattcctttttagccttcctgaacaccccgacagatgccctcgatcagttcgagacagtcgacagcacgccgctcagtgttcataccccgaccctgcgaaagaaaggttgtcctggctccaccgggttccctccgaaacgcaaaacacaccagtttttcgtgaaaagcttcacaacaccaacaaagtgccatcaatgtacatcactgatggtgggcctcatccgccagggctgctcctgtgaagtttgcggatttagctgccatattacatgcgtcaataaggcgcccaccacctgtcccgtgcccccagagcagactaagggcccacttgggatcgaccctcagaaaggcatcggtacagcctatgaggggcatgtcagaatccccaaaccggccggcgtgaagaaaggttggcagagggcccttgcaattgtctgtgacttcaagctgtttctgtatgatatagcagaaggcaaagccagtcagccttccgtcgttatctctcaggtgatcgatatgcgcgacgaggaatttagtgtcagcagcgtcctggccagtgacgtcatccatgcctcgaggaaggatattccatgcatctttcgcgtgaccgctagccagctcagtgcttcgaataataagtgcagcattcttatgctagctgatacagagaacgaaaaaaataagtgggtcggagtgctgtctgaactgcacaaaatcttaaaaaaaaataagtttcgagatcgctctgtttacgtgcctaaggaagcctatgattccacactgcctctaatcaaaactacccaggcggcagccatcattgaccatgagagaattgcccttggcaacgaggaaggcttgttcgtggtgcatgtcactaaggatgaaatcattcgcgttggagacaataagaaaatccaccaaatcgaactaatcccaaatgatcagctggttgctgtgatttctggacgtaacagacacgtgcgcctcttccctatgtctgcgctcgacggcagagagaccgacttttacaagctgtctgagactaaggggtgtcagaccgtgaccagtgggaaggttcgccacggcgccctcacctgtctgtgcgtcgcgatgaaacgacaggtgctctgctacgagctatttcagtccaagacaaggcacagaaaatttaaggagatccaggttccctataacgtccagtggatggccatcttctccgagcagttgtgcgtgggcttccagtccgggttcttgagatatcctcttaatggtgaaggcaacccctattcgatgcttcactctaatgaccataccttgtcatttattgctcaccagcctatggatgctatctgtgcagtggagatatcgtccaaggagtatctgctgtgcttcaatagtattggaatttacaccgattgccaggggagacggagcaggcagcaggaactgatgtggcccgctaaccctagcagttgctgttataatgctccctatctctccgtttactcagagaatgctgttgacattttcgacgttaactccatggaatggattcaaaccctgccccttaagaaggtgcgaccattgaacaatgagggctcattaaacttgcttggacttgaaaccatccggctcatatattttaagaataagatggccgaaggcgatgagttggttgtccccgaaacgtcagacaactccaggaagcagatggtacggaacattaacaacaaacggcgttactccttccgagttccagaggaagaacggatgcagcaacgcagagagatgttacgcgaccccgagatgcgcaacaagctgatctccaaccctactaatttcaaccatatcgctcatatgggccctggagatgggattcagatactcaaagacctgcccatgcctggatttccttacccgtcaccccaccatcatagcggcctgatatccagtccaattaattttgaacatatctaccacatgactgtgaactccgccgaaaagttcctgtcgcccgatagcattaaccctgagtattctccatccctacggtcagttcctggtaccccttccttcatgaccctgagaaacccgaggccccaggagtccagaacggttttttccggcagtgtctcgataccaagcattactaaaagccgccctgagccgggccggtcaatgtccgctagtagtggcctctccgcccgctcctccgcccagaatggctctgcactgaagagagagttctcagggggctcttactcagcaaagcgccaaccaatgccgtctccctcagaggggagcctcagcagcggcggtatggatcagggtagtgatgcccctgctagggactttgatggcgaagatagcgactccccacggcacagcaccgcttcaaatagcagtaacctgagtagtccaccctcacctgccagtccccgaaagaccaaaagtctttctctcgagagtacagacagaggtagttgggatccatag

SEQ ID NO: 111496 - DNA, 5100 bp, synthetic construct
  misc_feature 1..5100: note = Description of Artificial Sequence: Synthetic coding sequence
  source 1..5100: mol_type = other DNA
atgtcgggagaggtacgactgcgacagctagaacagttcattctggacgggcccgcacagacaaatgggcagtgcttcagcgtcgagacactgctggatattttaatttgcctatacgatgagtgtaacaactcgcccttgaggcgcgagaagaacatcctcgaatacttagaatgggccaaaccgtttacctccaaagtgaagcagatgcggctgcacagagaggacttcgagatcctgaaggtaatcggtagaggtgcattcggtgaagtcgccgtcgtgaaactcaaaaacgctgataaggtgtttgccatgaagatactcaacaaatgggagatgttaaaacgagccgaaactgcctgctttcgcgaggaacgggacgtgctggttaacggcgacaacaaatggatcaccacgctccactatgcatttcaggacgataataatctgtacttggtgatggattactacgtgggcggcgaccttcttactttgttgagtaagtttgaagatcggctgcccgaggatatggcccggttctatctcgctgaaatggtcatcgccattgacagtgttcaccagctccactatgtccacagagatataaagccggataatatcctgatggacatgaatggacacattaggctggctgatttcggctcttgtttaaagctcatggaggacggcaccgtacagagcagcgtggctgtgggcacgcccgactacataagtccagaaattttgcaggccatggaagacggcaagggacggtatgggccagaatgcgattggtggagcctgggagtgtgtatgtacgagatgctgtatggagagactcccttctatgctgaaagcctcgtggagacatatggtaaaattatgaatcacaaggaacggtttcagttccccgcccaggtgaccgacgtatcagagaacgccaaggatctgatcagacggctgatttgctccagagaacaccgcctggggcagaatggtatagaggacttcaaaaaacatccctttttcagtgggatagactgggataatatcaggaactgcgaagccccatacattcccgaagtgtcttcacccaccgacaccagtaatttcgatgtggacgacgactgtctgaaaaactcggaaactatgcctcccccgactcacaccgccttctccggccatcaccttccttttgtcggatttacgtatacctcaagctgtgtcctgagtgacagaagttgccttcgggtcactgccggacctaccagccttgatctggacgtgaacgtgcagaggacactggataacaatctggcaacggaggcttatgagcggagaatcaaacgtttggaacaggaaaaactggaactgtctaggaaattacaagaaagtacccagacagtgcaggccttgcagtactcaacagtggacggacctctgactgcaagcaaagacctggaaatcaagaacctaaaggaagagatcgagaagctgcgcaagcaagtcacagaatctagccacctcgagcagcagctcgaagaggctaatgccgttcgtcaggagcttgacgacgccttccgtcaaattaaagcgtacgagaaacagattaaaacactgcaacaggagcgcgaggaccttaataaagagctggtgcaagcctccgaacgtctgaaaaaccaatctaaggagttgaaagatgcccactgccagaggaagcttgctatgcaggagttcatggaaatcaatgagaggctgactgagctgcatactcagaaacagaagctggcaaggcatgtacgtgataaagaagaagaagtggacctggtcatgcagaaagtggaatctctgcgccaagagttacgaaggacggagcgagctaagaaagagctggaagttcacaccgaggccctggctgcagaagcctcaaaagataggaaactgcgcgagcagagtgagcactattctaagcagctggagaatgagctcgaggggttgaagcaaaaacaaatttcctacagtcccggtgtgtgttccatcgaacaccagcaggagatcacaaagttgaagactgacctggagaaaaagagcatcttctatgaagaggagctatctaaaagggagggaatccacgcaaatgagatcaagaacctcaagaaggaactacatgattccgagggacagcagttggcgttaaataaggaaatcatgatccttaaagataagctcgagaaaacccggcgggagagccagtctgagagagaagaatttgagagcgaattcaaacagcaatacgagagggagaaggttctactgacggaagaaaataagaaactaacaagcgaactggataaactgaccacactctacgagaacctatccatccacaaccagcagctggaagaagaggttaaagatctggccgacaagaaggagtccgtggctcattgggaggcccagattacggaaatcatccagtgggtttcagacgaaaaggatgctagggggtacctgcaggcacttgctagcaaaatgacagaagagctcgaggccctacggaacagttcgctgggcacacgggctaccgacatgccatggaaaatgcgtcgctttgcaaaacttgatatgtccgcacgcctcgaactccagtctgctctagatgccgagatccgagccaaacaagccatccaggaggagctgaacaaagtaaaagcatctaacataattactgagtgtaagctgaaggatagcgagaaaaagaacctagaactcctctcagaaatcgagcagctgatcaaagacacagaggagctacggagcgaaaaggcttccaagggtcggagaacagtagattccacccccctcagcgtgcacacccctacactcaggaaaaaggggtgtcctggaagcacaggttttccaccaaaacggaagacccatcaattctttgttaagagtttcacaacacctaccaagtgtcaccagtgtacctccctgatggtgggtttgatacgacagggctgcagctgcgaagtttgtggcttttcatgccatattacttgtgtgaacaaggctcctactacctgcccagttcccccagagcagacaaagggccctttgggcatcgaccctcaaaaagggataggcacagcttatgagggccatgtgcgtatccccaaacctgccggcgtgaaaaaggggtggcagagggctctggctattgtatgcgacttcaagttattcttgtacgatattgccgaaggaaaggcttcccagccctccgtcgtgataagccaggtgatcgacatgcgggatgaagaattttccgtgtcttcggtgttggccagtgatgtcattcacgcctctaggaaagacattccatgcatttttagggtgacggcaagtcagttgagcgcaagcaacaataagtgctctatcctgatgctggcagacactgaaaacgagaagaacaagtgggttggagtgttaagcgagctgcataaaatcttaaaaaagaacaagtttagagaccgcagcgtgtacgtccctaaagaagcctatgattccacattgcccctgatcaagaccactcaggcagctgcgatcatcgatcacgagcggattgccctggggaatgaggaggggcttttcgtcgtccatgtgactaaggacgaaatcataagagttggagacaacaagaaaattcaccagatagagcttattcccaatgaccaactggtggctgtgatatctgggagaaaccgccatgtgcgcctgttccccatgagcgcactagatggtagagagacggacttttataaactctcagagactaagggctgccagaccgtgactagtgggaaggtgagacatggggccctcacatgcctgtgtgtggctatgaagcgtcaggtgttatgttatgagttattccagagtaagacaagacacagaaagttcaaagagattcaagtgccttataacgttcaatggatggctatctttagcgagcagctctgcgtggggtttcaatcggggttcctcagatacccccttaatggcgagggcaacccttattctatgctccattcaaatgaccataccctgtcgtttatcgcacaccagcctatggacgccatctgtgctgttgagatctctagcaaagagtacttgctatgctttaacagtatcggtatttatactgactgtcaaggcaggaggtctcgccaacaggagctgatgtggccggccaatccttcctcctgctgttataatgcaccctacctctcagtatactccgaaaacgccgtggacatctttgacgtaaactctatggaatggatccagacactgcccctcaaaaaggtgaggcctctgaacaatgagggctcactaaatttactcgggctggaaaccattcgcctgatctacttcaaaaataagatggcagagggggacgagctggttgtgcccgaaaccagcgacaacagccggaagcagatggtgcgcaacattaataacaagcgtagatattctttccgggtgcccgaggaagaacggatgcagcagaggcgcgagatgcttcgtgatcctgaaatgcggaacaagttgatttccaacccaactaattttaatcatattgctcatatggggcccggagacgggatacaaatcctgaaagatctgcctatgaatccaaggcctcaggaatcccgcactgtgttttctggtagcgtgtccatccccagtattaccaagagcaggccagaacccggccgcagtatgagtgcctcatctgggctctcagccagatcttccgcacagaacggcagcgccttaaaaagagaattttcaggtggaagctactccgcaaagagacaacctatgcccagtccgtccgaaggatctctatccagcggaggaatggaccaggggtctgacgcccccgcgagagactttgatggggaagactcggactcacccagacattcaacagcgtcaaacagctccaacctctcatcacccccttctcctgcatcacctcgtaagacaaaaagcctttccctcgagagcacagacaggggctcttgggacccttag

SEQ ID NO: 111497 - DNA, 5136 bp, synthetic construct
  misc_feature 1..5136: note = Description of Artificial Sequence: Synthetic coding sequence
  source 1..5136: mol_type = other DNA
atgtctgccaaagttcgacttaaaaaattggaacagctgctcctggatggcccctggagaaatgagagcgctctgtccgtggagacacttctggatgtgctggtctgcttgtacacagaatgcagtcatagtgcactccgcagggacaaatacgttgcggagttcctggaatgggcaaaacccttcacacagctggtcaaagaaatgcaactgcatagagaggacttcgagattattaaggtgatcggccgcggcgcctttggcgaggtagccgtggttaaaatgaagaataccgagagaatttacgccatgaaaatacttaataaatgggagatgcttaagagagctgaaactgcatgtttccgtgaggagcgcgatgtgctggtgaacggagactgccagtggattaccgctctccattacgcctttcaggacgaaaaccacctgtacctggttatggactattatgtggggggtgacctgttgacactgctttcaaagttcgaggacaagcttccagaggacatggctcggttctatataggtgaaatggttcttgctatagatagcatacaccaactacattatgtgcatcgagacattaagccagacaacgtcctcttagatgtcaatggacatatccgtctggcagactttggcagctgtcttaaaatgaatgacgatggaaccgtccaatcatcggttgctgtgggaacgcctgactatatttctcctgaaatccttcaagcaatggaagacgggatgggtaagtatggacctgaatgtgactggtggagcttgggcgtttgcatgtacgaaatgctttacggcgagacccccttttacgccgaatctcttgtggagacatacggaaagatcatgaaccatgaggagagattccagttcccatcccacgtgaccgatgtatcagaagaagccaaggatctcatccaaagactgatctgttctagggagagacggcttggacaaaacggcattgaagacttcaagaagcacgcctttttcgaaggtctgaactgggagaatatccgcaatctagaagccccatatatccccgatgtgagtagcccctccgataccagcaatttcgacgtggatgatgatgtgctgcgcaacaccgagatcctcccgcctggcagccatactgggttctctggtctgcacctcccatttatcggcttcacttttaccactgagtcctgcttctccgaccgcggcagcctgaaaagtattatgcagagcaatactctgaccaaggacgaggatgtgcagcgcgacctcgagcattccctgcagatggaggcatatgaaagacggattcgccggctcgagcaggaaaaactggagcttagtcggaaattacaagaatcgacacagacggtgcaaagcctccacggctccagcagggccctgtcaaactccaaccgcgacaaagagataaagaaactgaacgaggagatagaacgacttaagaacaagattgctgatagtaacaggctggaacggcagttagaagacaccgtcgccctgcggcaggaacgtgaagacagtactcagaggctgaggggccttgaaaagcaacaccgagttgttcggcaagagaaagaagaactccataagcagctcgtggaggccagcgagaggctgaagagccaggcaaaagagctgaaggatgcccatcagcagcggaagcttgcactccaagagttctcagagttaaacgaaaggatggcggagcttcgagcccagaaacaaaaggtgtctcgccaactacgggataaggaggaagaaatggaagtcgctacccagaaggtagacgcaatgaggcaggaaatgcgccgagccgagaaattgaggaaggaactggaagcccagttggatgacgcggtagccgaagcttccaaggaacgcaaactccgcgaacactccgagaatttctgcaagcagatggagagcgagctcgaagcactgaaggtaaagcaggggggaagaggtgctggcgcaactcttgaacaccagcaggagatctcaaagataaaatccgagctcgaaaagaaggtcctattttatgaggaagaactggtgaggagagaggcctcgcatgtgttagaggtgaaaaatgtgaaaaaggaagttcatgactctgaaagccaccagctggccctgcagaaggagattcttatgctgaaagacaagctggaaaagtctaagcgcgagcgacataatgaaatggaagaggccgtaggcaccataaaagacaaatatgagcgagagagggcaatgctgtttgatgagaacaaaaaactgacagccgagaatgagaaactgtgttcttttgtggataaactcactgcacagaacagacagttagaagacgaactgcaggatctagccgcaaaaaaggaatccgtcgctcactgggaggcacaaatcgctgagattatccagtgggtttcagatgaaaaagatgcccgagggtatctgcaggctcttgcttccaaaatgactgaggagctcgaagccttacgtagttctagcctggggtcccgcacgctggaccccctttggaaggtgcgacggtcgcagaaactggatatgtcagctaggctcgagttacagtccgctctggaggccgaaatcagggccaagcagttggtccaggaagagctgcgtaaggtgaaagacgcaaacctcacccttgaatctaagctgaaggatagcgaggctaagaaccgcgagctgttggaagaaatggaaatccttaaaaaaaagatggaagagaagtttagggccgacactggcttgaagctgcccgacttccaggattccatatttgagtatttcaacaccgcgccactggcccacgatctcaccttccggacctcaagtgcttcggagcaagagactcaggcccccaagcctgaagccagcccatcaatgtccgtggccgctagcgagcaacaagaggacatggcccgaccacctcagagaccatctgccgttcccctacctacaactcaggctttagcccttgccgggcccaagccgaaggcccatcagttctccatcaagtcattcagctcccccactcagtgctcgcactgtacaagcctcatggtgggattgatcaggcagggatacgcatgcgaagtttgcagcttcgcatgtcatgtgtcctgcaaggacggcgcaccgcaggtgtgccccatccctccagagcagtccaaacgcccattgggcgtggatgtccagcggggcatcggtaccgcttataaaggccacgtcaaggtccccaaaccaacaggagtgaaaaaagggtggcagcgagcctacgctgtcgtgtgtgactgtaaactttttctctatgacttgcccgagggcaagtctacccagccaggtgtcatcgcaagccaggtgctggatctgcgggatgatgagttcagtgttagtagtgttttagccagcgatgttatccacgcaactcggagagatattccctgcattttccgcgttaccgcttctctgctgggggcacctagcaagactagttccctactcatcttgacagaaaatgagaacgaaaaacgcaaatgggtagggatccttgaaggcctccagtcaattttgcacaaaaatcgcctgaggaatcaggttgtccacgttccactggaggcatacgacagtagcctccctctcatcaaagccatcctaaccgccgctatcgtagacgccgataggattgccgtcgggttggaagaaggactgtatgtcatcgaagttacgagggacgtgatcgttagagccgctgactgtaaaaaagtgcatcaaatcgagctcgcgcctcgggagaagatagtgatccttctctgtggccgtaaccaccacgtgcacctctatccctggtcttcactcgacggggctgagggatcctttgatataaagttgccggagactaagggttgccagttgatggccacggcgacactgaagagaaattctgggacctgtctgttcgtagcagtcaaaagactgatcctgtgctacgaaatccaacgcacaaagcccttccacaggaaattcaatgaaatcgtcgctccaggcagcgttcagtgtctagcggtgttgcgtgatagactatgcgtgggatacccaagcggcttttgcctgctgtcgatacagggcgacgggcaacctctcaacttggtgaatccaaacgatcccagcctagctttcctctctcagcagtccttcgatgctttgtgtgctgtggagttagagagcgaggaatacctgctgtgtttttcgcacatgggcctttatgtggatccacagggccgcagagcccgagcccaagagctgatgtggcccgccgcacccgtggcctgctcctgtagccccacacatgttaccgtatactccgagtatggtgtcgatgtattcgacgtgcggaccatggaatgggtgcagactattggcctgcgcaggatccgccctcttaattccgagggaaccttgaacttactaaactgcgagccccctcgcctgatatacttcaagtccaagttctccggcgccgtgctcaatgtacccgatacaagcgataattccaagaagcagatgttaaggacacgaagtaagcgccggtttgtgttcaaggtccctgaagaagaaaggctgcaacagcgcagggagatgctgagggacccggagttaagaagtaagatgatctccaaccctactaactttaatcacgtggcccacatgggtccaggcgatggcatgcaggtgttgatggacctgccccttagtgctgttcctccctcacaggaagagcggcccggccctgccccgactaacctggccaggcagccgccgtcaagaaacaagccatacatcagttggccatcaagcggcggttctgagccctctgtaaccgtgcctttaagatccatgtccgatcccgatcaggatttcgataaagaaccagattcagactctacgaagcactctacaccttccaattcgagcaatccctccgggccccccagccctaactcacctcaccgctcacagctgcccctcgaagggctggaacaaccagcctgtgatacctag

SEQ ID NO: 111498 - DNA, 1593 bp, synthetic construct
  misc_feature 1..1593: note = Description of Artificial Sequence: Synthetic coding sequence
  source 1..1593: mol_type = other DNA
aaggtgcggcgctcccagaaattggatatgagtgctcggcttgaactgcagtctgctctcgaggcagaaatccgggccaagcagttagtccaggaagagctgagaaaggtcaaagacgctaatctgactttggagagcaagctgaaggacagcgaggccaaaaacagggagctgctggaagagatggagatcctgaagaaaaaaatggaggaaaagttcagagcagacaccgggctcaagctgcctgacttccaagacagcatttttgagtatttcaacaccgctccactggcacacgacctaacttttagaacaagtagcgcatcagagcaggaaacccaagcccctaaacctgaggcctcaccttccatgagcgtggcagcaagtgaacaacaggaacctaaggcacaccagtttagcatcaagtctttctcatctccaacacagtgttctcattgcacctcactgatggtgggactcatacggcagggctatgcctgcgaagtttgtagcttcgcttgtcacgtcagctgtaaggatggagcacctcaggtttgtcccatcccacccgagcaatccaagagacccctcggggttgatgtgcagaggggaatcgggacagcttacaaaggacatgtgaaagtccctaaaccaacaggtgttaagaaaggctggcagagagcatacgctgtggtgtgcgattgcaagttgttcttatatgatctgcctgaggggaagagtacccagcccggggtgatcgcctcccaggtactagatcttcgagatgacgagttctcagtcagctccgttctcgcctcagatgtgattcatgctacgaggagggacataccttgtattttcagagtaacagctagcctcctcggcgccccctctaaaacctccagcctgctcatcctcaccgagaatgagaatgaaaaacgcaaatgggtcggcatcctcgagggcctgcagtccatactgcacaagaaccgcttgcggaatcaagtggtgcatgtcccgttggaggcctatgattcatcgctcccactcattaaagccatattaaccgctgctattgttgacgcggatagaatagccgtcggcctggaagagggcctatatgttatcgaagtgactcgagacgtgattgtgagggccgcggattgcaaaaaagtccaccaaatagagctggccccgcgggaaaaaattgtgatcctattgtgcggcagaaatcaccacgtgcacctctatccatggtcatccctcgatggtgcagaaggcagcttcgatatcaagctgcccgaaacaaaggggtgccagctcatggccaccgctaccctcaaacgtaattccgggacttgcctttttgtcgctgtcaagagactgatcctgtgttacgagatccagcggactaagcctttccatcgaaagtttaatgagatcgtcgctccaggctccgtgcagtgcctggctgtcctgagagaccgactgtgcgtgggatacccctctggtttctgtctgctgtcaatccagggtgatggccagccactcaatctcgtcaatcctaatgatccatccttggcatttctgtag

SEQ ID NO: 111499 - DNA, 4656 bp, synthetic construct
  misc_feature 1..4656: note = Description of Artificial Sequence: Synthetic coding sequence
  source 1..4656: mol_type = other DNA
atggagcggcgcctaagggccctcgagcagctagcccgtggagaagcaggaggctgtccagggttagacgggcttctcgatctccttctggctctgcatcacgagctcagctccggcccactccggagggagcgttccgtggctcaatttctctcttgggcttcccccttcgtttctaaggtaaaggaactacgtctgcaaagggatgatttcgaaattctgaaggtgatcgggcggggtgcgtttggcgaggttacggtcgtccgacaaagagacacaggccagatattcgcaatgaagatgttgcataaatgggaaatgctgaaacgcgctgagaccgcatgttttcgagaggagcgagacgtgttggtgaaaggtgattcaagatgggtcacgactttgcattatgcattccaagacgaggaatacctctacctggttatggattactacgccggaggcgatcttctaaccctgttgagtagattcgaagatagactgccaccagaactggcccagttctacctagccgagatggtactcgccatccacagcctccaccagctgggctacgtgcatagggatgtaaagccggataatgtgctcctcgatgtaaacggacacattcggctcgcagatttcggtagctgcctccggttgaacacgaatggcatggtagattcttctgtcgccgtcgggactccagattatattagccccgaaatccttcaggccatggaagaggggaaggggcattatggacctcagtgtgattggtggagccttggcgtatgtgcctacgagttactgttcggagaaaccccattctacgccgagagcctggtggaaacttatgggaaaatcatgaatcacgaggaccacttacagttcccccctgatgtgcccgatgtgccagcttctgcccaggacctgatcagacagctgttgtgccgacaggaggagaggctgggaagaggagggcttgatgacttccgaaaccaccctttttttgagggcgtggattgggaaaggttagcatcctctaccgccccttatatacccgaactgcgcggccccatggacaccagcaatttcgacgtcgatgatgacaccctgaaccacccagggacactgccaccaccatcacacggcgctttttcagggcaccacctgccttttgtgggcttcacctacacaagtgggtcccacagcccggagtcatcctctgaggcctgggccgccttagaacgaaaactccaatgcttggagcaggagaaggttgagctgtcgcgaaagcatcaggaagccctgcacgcgcctactgaccaccgcgaactggagcagcttagaaaggaggtccagacgctccgggaccggctgcctgaaatgctgcgcgacaaagcatctctcagtcagactgatgggccccctgcagggtcgcccggtcaagactccgacctacggcaggagttggatcgacttcaccgggaactagccgaagggcgagcaggcttacaagcgcaagaacaggagttgtgcagggcccagggccaacaggaagaacttctgcagcggctgcaggaggcacaggaacgcgaggctgctacagcaagccaaaccagggctctgtccagccagttggaggaggctagagcagcccagagagagctcgaggctcaggttagctccttaagcagacaggtgacacagctgcaagggcagtgggaacagcgcctggaggagtcttcccaggccaaaacaattcacacagcctccgaaaccaacggtatgggcccacccgaaggcggcccgcaggaagcacagcttagaaaagaggtggcagctctgagggagcagctggagcaggcccattcacaccgccctagcggcaaagaagaggctttatgccagttgcaggaggaaaaccgacgactgtcacgggagcaagagagactggaggccgaactggcccaggagcaggagtctaaacagcgactcgagggggagcgaagagaaactgaatcaaattgggaagcacaactcgctgacattttgtcttgggtgaatgatgagaaggtgtctcggggttacctgcaggctttggccaccaaaatggcagaagaattagagtctttgcgcaatgttggtacacagacactccccgccagaccactagatcaccagtggaaagcacggcgtctgcagaagatggaggcgtccgcccggcttgagctgcagtccgcacttgaagcagaaattcgggccaagcagggtctgcaagaacggttaactcaggtgcaggaagcccagctgcaggccgagcgccgtcttcaggaggccgaaaagcaaagccaggcgctgcagcaagaactagcgatgctgcgcgaggaactccgtgctcgcggccctgtcgacaccaagccatctaacagtctgattcccttcctatcgttccgctcctctgaaaaggactctgctaaggaccctggcatcagtggtgaggccactcggcatggtggggagcctgacttgcgaccagaggggcgtaggtccctcagaatgggcgcagtgttccccagggcccccaccgcaaataccgcgtccacagagggtctacctgcaaaacccggctcccacaccctccggccaaggtcctttccttctcccaccaaatgcttacggtgtacctctctaatgctcggactgggccgacagggcctggggtgtgatgcatgcggctacttttgtcatacgacctgtgcgccacaggcacccccatgccctgttccccccgaccttctccgaactgcactgggggtccatccggagaccggaaccgggacggcttacgaagggttcctctccgtcccccggccatctggagtgcgtagaggttggcaacgggttttcgctgcactctctgatagtcggctgcttctgtttgatgctccggatttacggctcagtcctccctctggcgcactcctgcaggtgctggacctgagagacccccaatttagtgccaccccagtgttggcttcagacgtcatccacgcgcagtcaagggatcttcctagaatctttcgggtgaccactagccagctggcagtgcctccaaccacatgcacggtgctgcttctagcggaatccgagggggagcgtgagaggtggctgcaagtgcttggggaactgcaacgtctgcttctcgacgcgcggccccgtcctaggccagtttacactctcaaggaggcctacgacaacggcttaccactgttgcctcacaccctctgtgcagcaatacttgaccaggatcgcctggccctcggaactgaggagggcctgttcgtcatccacctgagaagtaacgatatcttccaagtgggcgaatgccgcagagtccagcagctgacactgtcacctagcgctggcctgctggtcgttctgtgtggacgagggccttctgtaaggctgttcgccctggccgaacttgagaacatagaagtggcgggagcaaagatcccggagtctagaggatgtcaggtccttgcggctggctctatcctacaggcccggaccccggtgctctgcgtggccgttaaaaggcaggtactgtgttaccagcttgggccaggccctgggccttggcaaagacgtattagagagctccaggcccctgcaaccgtgcaatcactggggctcctgggggatcgactgtgtgtcggagcagctggcggttttgccctgtacccgctcctgaacgaggccgcgcccctggctctaggtgctggtctagtacccgaggagctgcctccttcgcgcgggggacttggggaggcattgggagccgtcgagctgagcctgagtgagttcctgctgctgtttaccactgccggcatctacgtggatggggcagggaggaaatcacggggacatgagttactttggcctgccgcccctatggggtggggctacgcagctccctatctgaccgtgtttagtgaaaatagcattgatgtcttcgacgtacggcgggctgaatgggtgcagacagtgccgctcaagaaggtaaggccactgaatccagaaggcagcttgttcctatatggaacagagaaagttagactcacgtatctgagaaaccagttggccgaaaaagacgaatttgatatcccagacctgaccgacaatagccggcggcagttgttccgcacaaaatcaaaacgacggtttttttttagggtgtccgaagagcagcagaaacagcagcggagggaaatgctgaaggatccattcgttaggtctaaattgattagtcctcccacgaattttaaccatttggttcacgtaggccccgccaacggaagaccgggagcccgggacaaaagtcccgctcctgaagaaaagggacgagttgccagggggtcagggccacagagaccgcatagcttttccgaagccctgcgccgtcctgcttctatgggctcagagggcctggggggcgatgccgatcccatgaagagaaagccttggacctctctcagcagtgagtcggtttcttgtccccagggcagcctgagtcccgcgacaagtctcatgcaggtctcggagcgccctcgcagcttacccctaagccctgaactggagagctccccttag

SEQ ID NO: 111500 - DNA, 1176 bp, synthetic construct
  misc_feature 1..1176: note = Description of Artificial Sequence: Synthetic coding sequence
  source 1..1176: mol_type = other DNA
atgccaggtcctcaaggcggtcgtggcgccgcaactatgtccctaggcaaactaagccctgtgggctgggtttcaagcagtcagggcaagaggaggctgacagcagacatgatctctcaccctcttggggacttccgccacaccatgcatgtgggtagggggggcgacgtcttcggagacacatcttttctatctaatcatggtggctcctcagggtccacacatagatctcctagatccttcctggcaaaaaagctgcagctagtccgtcgcgttggagcgccacctaggcgcatggctagtcccccggctccgtcccctgctcctcccgccatttcacccataattaagaacgccatatctcttccacaattgaatcaggccgcatacgattcactcgtggttggaaaattaagctttgactccagtcctacctcgtccaccgacggacactcctcatatggccttgattctggcttctgcaccatctccaggttgccacgctctgagaaaccccacgacagggaccgagatgggagcttcccctctgagcccgggctcagaagatctgactcgttgctgagttttcgcttggacctggacctcggaccatctctgttatcagaacttctcggagttatgtcgctgccagaagctccagcagccgaaactcccgctccagccgccaatcctcctgcacctaccgcaaacccaacaggtccggctgcgaacccgcctgctactaccgctaacccaccagcacccgctgctaaccccagcgctcctgccgctaccccaactggacccgcggctaacccgccagctcccgctgccagttctactcctcatggacactgccctaacggggtgaccgccggtctcggccctgtcgctgaggtgaagtcctcacccgttggaggggggccaaggggtcccgctggtccagcactgggccggcactggggagcgggatgggatggaggccaccactatccagaaatggacgcaagacaggagcgtgtggaagtattgccgcaagctcgggctagctgggagtccctcgacgaagagtggagggcgcctcaggccgggtcccggactcctgttccttccacagtgcaggcaaacacgttcgagttcgccgacgctgaggaagatgacgaggtaaaggtctag

SEQ ID NO: 111501 - DNA, 183 bp, synthetic construct
  misc_feature 1..183: note = Description of Artificial Sequence: Synthetic coding sequence
  source 1..183: mol_type = other DNA
atgccagggccacagggaggacgcggagctgctacgatgtctctcggcaaattgtcaccagtgggctgggtgagctcttcccaaggaaagcggcgactcactgcggacatgatatcccaccccctgggggattttagacacaccatgcacgttgggagagggggggatgtgtttggagactag

SEQ ID NO: 111502 - DNA, 213 bp, synthetic construct
  misc_feature 1..213: note = Description of Artificial Sequence: Synthetic coding sequence
  source 1..213: mol_type = other DNA
atgccaggcccgcaagggggcaggggagcagccactatgagcttgggaaaactctcccctgtcggatgggtgagttcctcacagggaaaaaggcgcctgacagctgacatgatctctcatcccctgggagacttccgacataccatgcacgtagggcggggcggcgatgtgttcggcgatacaagtttcttgtcgaaccacgggggctcttag

SEQ ID NO: 111503 - DNA, 147 bp, synthetic construct
  misc_feature 1..147: note = Description of Artificial Sequence: Synthetic coding sequence
  source 1..147: mol_type = other DNA
atgcctggcccgcaagggggccgaggagcagccaccatgagcctcggaaaactatcccctgtgggctgggtgagtagcagccagggaaaaaggcgtctaactgctgacatgattagccatccccttggggacttcaggcacacatag

SEQ ID NO: 111504 - DNA, 633 bp, synthetic construct
  misc_feature 1..633: note = Description of Artificial Sequence: Synthetic coding sequence
  source 1..633: mol_type = other DNA
atgagcacaaaggtaccaatttacctgaagcggggttcccgcaagggtaagaaagagaagcttcgggacctacttagttccgacatgattagcccccctttgggggattttagacataccatccacatcgggtccggcggcggctcagacatgttcggagacatctcattcctccagggcaagttccacctgctgcccggaacaatggtggaagggccagaggaagatgggactttcgacctgccttttcagtttacacgaacagctaccgtgtgtgggcgcgaactgccagatggcccatcaccactcttaaaaaatgccatttccctaccggtgattggcggaccacaggcccttactctccctaccgctcaagctcctcccaagcccccaaggcttcacttggagacaccacaaccttccccccaggaggggggatcagtcgacatttggaggataccggagaccggctctcctaatagcggtctgactcccgaatccggcgccgaagaaccgttcttgagtaacgcatcctccctgctttcactgcacgtggacctgggcccgtctattttggatgatgtcctacagattatggatcaagatctagactcgatgcagattccaacatag

SEQ ID NO: 111505 - DNA, 633 bp, synthetic construct
  misc_feature 1..633: note = Description of Artificial Sequence: Synthetic coding sequence
  source 1..633: mol_type = other DNA
atgtccactaaggtgcccatttacttgaagaggggctccagaaagggaaagaaagaaaaactgagggacctattgagctccgacatgatcagtcctccactcggagacttccgtcacaccatccacatcggatccgggggcgggagtgacatgtttggcgacatctcttttctgcaaggcaaatttcaccttctaccaggtacgatggtcgagggtcctgaggaagacggaacattcgatttgccgttccagtttaccaggacagccaccgtgtgtgggcgggagctccccgacggtcctagcccattattaaagaatgcgatcagcctccccgtaattggcggtccccaggccctgaccctcccaacagcccaagcaccccccaagccacctcggctccacctggagacgccccagccttctcctcaggaggggggcagcgtagacatctggaggatccctgaaactggaagtccaaacagcggcctgacacccgagtccggagctgaagagccgtttctgagcaacgcatcatccctgctctctctgcacgttgaccttggtccttccatccttgacgacgtgctgcagatcatggaccaagacttggattccatgcagatccctacatag

SEQ ID NO: 111506 - DNA, 633 bp, synthetic construct
  misc_feature 1..633: note = Description of Artificial Sequence: Synthetic coding sequence
  source 1..633: mol_type = other DNA
atgagcactaaagtccctatttacctgaagaggggtagccgaaagggaaagaaagaaaaactgcgcgatcttttatcaagtgacatgatatcaccgcccctgggtgatttccggcacacgattcacatagggagcggcggtggatccgatatgtttggggatatttcattcctgcagggcaaatttcatcttctgcctggaaccatggtggaaggtccagaagaggatggaactttcgacctgcctttccagttcacccgtaccgccaccgtctgtgggcgggaactgcccgacgggcctagccctctattgaaaaacgcgataagtttgcctgtgattggcggcccccaggctcttacactgcccacggcccaggctcctcctaaaccccccaggctgcatctggaaaccccacaaccatcaccacaggaaggggggtctgtagacatatggaggatccccgagaccggcagcccgaactcaggcctaacacccgaatcaggcgccgaagaaccctttttgagtaacgcctcctccctgctgtccttgcatgtggacctgggcccttcgattcttgacgatgttcttcagatcatggatcaggatctggatagtatgcagattccaacctag

SEQ ID NO: 111507 - DNA, 765 bp, synthetic construct
  misc_feature 1..765: note = Description of Artificial Sequence: Synthetic coding sequence
  source 1..765: mol_type = other DNA
atgcccgcaaaaacacctatatacttaaaggcagctaacaataaaaaaggtaaaaaatttaagctgcgcgatatcctgtcacccgatatgatcagtcctcccttgggggattttagacatactattcatataggcaaggagggccagcacgacgtgtttggggacatttccttcttacagggcaactacgagctccttccgggcaatcaggagaaagcccacctcggtcagttcccggggcataatgagttctttagggctaattctacgagtgacagtgtgtttactgaaactcctagtcccgtgttgaaaaatgctatatctctgccaactatcggggggagccaggccctaatgctgccactgcttagccccgtcacctttaactcgaagcaagagagctttggacctgctaaactgcctaggcttagttgcgaaccagtgatggaggaaaaggcccaggagaaatcttctctcctagagaacggaacagtgcaccagggagacacctcctggggttcttctgggtcggcttcccaatccagccaagggcgcgattcacatagcagttccctgtccgagcagtacccagattggccagccgaagacatgttcgaccaccccacaccctgtgagctgatcaaaggtaagaccaaatcggaagagagcctcagcgacctgacaggatcccttctgtcacttcaactggacctcgggcccagcctcctggatgaagtgttaaacgttatggacaaaaataagtag

SEQ ID NO: 111508 - DNA, 45 bp, synthetic construct
  misc_feature 1..45: note = Description of Artificial Sequence: Synthetic coding sequence
  source 1..45: mol_type = other DNA
atgccagccaaaacaccgatttacttgaaagcggccaacaattag

SEQ ID NO: 111509 - DNA, 108 bp, synthetic construct
  misc_feature 1..108: note = Description of Artificial Sequence: Synthetic coding sequence
  source 1..108: mol_type = other DNA
atgcccgccaaaacaccaatttacttaaaggccgccaacaataagaaaggcaagaaatttaaactgcgcgatatcctgtcccccgacatgatcagcccgcctctttag

SEQ ID NO: 111510 - DNA, 651 bp, synthetic construct
  misc_feature 1..651: note = Description of Artificial Sequence: Synthetic coding sequence
  source 1..651: mol_type = other DNA
atgccagccaagactcctatttatcttaaggctgcaaacaataaaaaaggcaaaaaattcaagttacgcgatatcctatctcccgacatgatttcccctcctctgggcgattttaggcacactatccacatcgggaaggagggccagcacgacgttttcggcgacatctccttcctccagggaaactacgagctgcttcctggcaaccaggaaaaggcacacctgggacagttcccaggacataatgagtttttccgcgcaaacagtacttctgactcagtattcactgaaacaccaagtcctgttctcaagaacgccattagtctgcctactattggaggttcacaggctcttatgctgccattgctatctcccgtgacattcaacagtaagcaggagtctttcgggcctgccaagttaccgcgtctctcctgcgaacccgtgatggaagagaaggcccaggagaagtcatcccttctggagaatgggactgttcaccagggggacaccagctggggctccagtggctcagcctcccagagctctcaagggagagatagtcattcctcatccctttctgagcagtacccggactggccagcggaggatatgtttgaccaccccactccctgtgagctgataaagggttag

SEQ ID NO: 111511 - DNA, 1071 bp, synthetic construct
  misc_feature 1..1071: note = Description of Artificial Sequence: Synthetic coding sequence
  source 1..1071: mol_type = other DNA
atgcccattctaaaacagctcgtgagctcttcagttcactctaagaggaggtcacgtgccgacctaactgccgagatgatctctgccccactcggagattttcggcatacaatgcatgtgggccgcgccggcgacgctttcggggacaccagcttccttaattcaaaagccggcgagcctgacggagagtctctcgatgaacagccttcgtcctctagtagcaaaagatctctgctctctaggaagttccgcggcagcaagaggagccaatcggttacacggggcgagagggagcagcgggatatgttgggcagccttagagattctgcactcttcgtgaagaacgcgatgagcctcccgcaacttaatgaaaaggaggccgccgagaaggggacatctaagttacccaaatctctcagtagctcccccgtcaaaaaagccaatgatggcgaagggggcgacgaagaagctgggacagaggaggctgttccccgtcgtaacggcgcagctggaccacactcccccgatcccctgctcgacgaacaggcctttggagacctgaccgacctacccgtcgtccccaaggccacctacggcctgaagcacgccgagtccatcatgtccttccatatcgacctgggccctagcatgctgggggatgtgctttccatcatggacaaggaggaatgggaccccgaggaaggtgagggcggataccacggcgacgaaggcgctgccggtaccatcacacaagcgcctccctatgccgtggccgccccccccctcgcgagacaggagggtaaggccgggcctgacctgccttcccttccatcccatgcactcgaggacgaggggtgggctgcggccgctccttctccaggatctgctcgaagcatgggcagccacacaactcgagatagtagtagcctgagtagttgtacctcgggtatactggaggaacgatcacccgcttttcgcgggcctgacagagccagagccgcagtgagcagacagccggacaaagagttcagctttatggatgaggaagaagaggacgaaattcgcgtgtag

SEQ ID NO: 111512 - DNA, 861 bp, synthetic construct
  misc_feature 1..861: note = Description of Artificial Sequence: Synthetic coding sequence
  source 1..861: mol_type = other DNA
atgcctattttaaaacagttggtgtcgtcatccgtccactctaaacgacgatccagagccgacctcactgcagaaatgatctctgcccccctgggtgacttccggcacactatgcatgttggcagagccggcgacgctttcggagacacttccttccttaacagtaaggcagctgagaaagggacctcaaagctgcctaagtcgttgtcctcatcccccgtgaaaaaagctaacgatggcgagggcggcgacgaagaagccggaacggaggaggccgtgcctagaaggaacggtgctgccggcccccactcccccgacccgctgctcgatgaacaggcctttggggacctcactgacctgccagtcgtgcctaaagccacatacgggttaaagcatgccgagtccattatgtcgtttcatatagacctcgggccttcaatgctgggagacgtgttatcgattatggataaggaggagtgggaccccgaggagggcgagggaggctatcatggggacgaaggcgccgctggcacgatcacccaggctccgccctacgccgtggctgccccgcctctcgcaaggcaggagggtaaagcaggccccgatctgccctccttaccaagccacgctctcgaagacgaaggctgggctgcagccgccccctccccagggagcgctagatcaatgggttctcacacaacgagggactcttcctcactgagttcatgtacttccggaatacttgaggaaaggagccctgcattcaggggtcccgatcgtgcgcgtgctgccgtgtcgcggcagcccgacaaagaattttcctttatggacgaagaagaggaagacgagattcgggtgtag

SEQ ID NO: 111513 - DNA, 1551 bp, synthetic construct
  misc_feature 1..1551: note = Description of Artificial Sequence: Synthetic coding sequence
  source 1..1551: mol_type = other DNA
atgactctcctgattacgggggactccatcgtttccgcggaggcggtttgggaccatgtgaccatggccaaccgcgaactggcgttcaaggcgggtgatgtcattaaggttctggacgcctccaacaaggactggtggtggggccagatagacgatgaagaggggtggtttcctgcatcgttcgttagactgtgggtgaaccaggaagacgaagtggaagagggcccttctgatgttcagaatggccacttagatcctaatagcgattgcttgtgcctgggacgcccgctgcagaatcgtgaccagatgcgcgccaatgtcatcaatgagattatgagcacagaaagacactacatcaaacaccttaaagatatctgtgaaggatatctaaaacagtgcagaaagagaagggatatgttctctgacgagcaactcaaggttatatttgggaacatcgaagatatctacaggttccagatgggcttcgtgagagatttggagaaacagtacaacaatgacgacccccacctttctgaaatcggaccctgcttcctggaacaccaggatggattttggatttatagtgagtactgcaataatcatcttgacgcatgcatggagctgtccaaactgatgaaggactcacggtaccagcatttttttgaagcatgccggctcctgcaacaaatgattgatattgccatagacggatttctcctcacacctgtgcagaagatttgcaagtaccctctccagctagccgagctactcaaatataccgcccaggaccactctgactatcgctatgttgccgctgccctggcagtaatgagaaatgtaacgcagcagatcaatgagcgcaagcggagactagagaatattgataagatcgcccagtggcaggcctctgtactagattgggagggcgaggatatcctcgaccggtcctcggaattgatctacacaggggagatggcctggatctaccagccatacggaagaaaccagcagagggtgttcttcctgtttgatcaccaaatggtgttatgcaagaaagaccttattcgtagggatatactgtactacaaagggaggatagatatggacaagtatgaagtggtggacatagaagacgggagggatgacgacttcaacgtttcaatgaagaatgcatttaaacttcacaataaggagacggaggagattcatctgttcttcgcgaaaaagctggaggagaagataaggtggctcagagcatttcgtgaggagcgtaaaatggtacaggaggatgagaagataggatttgagattagcgagaaccagaagaggcaggctgccatgactgtccggaaagtccccaagcaaaagggcgttaactcagccaggtccgtgccccctagctacccacctccacaagatccactcaatcatggacagtacttggttcccgacgggatcgctcagtcacaggttttcgagttcacagagccaaagaggtcacagagccctttctggcaaaatttttctagattaacaccattcaaaaagtag

SEQ ID NO: 111514 - DNA, 1245 bp, synthetic construct
  misc_feature 1..1245: note = Description of Artificial Sequence: Synthetic coding sequence
  source 1..1245: mol_type = other DNA
atgcgcgcaaatgtgatcaacgaaatcatgtctactgagcggcattacatcaagcatcttaaagacatctgtgagggttatctcaagcaatgcaggaagaggcgggacatgttttctgacgaacagcttaaggttatcttcggcaatatcgaggacatctaccgttttcagatggggttcgtacgtgatctcgagaagcagtataacaacgacgacccccacctgtctgagatcggtccttgttttctggagcaccaggacggtttctggatctactccgaatactgtaacaaccacctggacgcatgcatggagcttagcaagttgatgaaggacagtcggtaccagcacttttttgaggcctgtagactactccaacaaatgattgacattgccattgacgggttcctactgactcctgtccaaaagatttgcaagtaccccctgcagctggccgagctgctcaaatacactgcccaagatcactctgactatagatatgtggctgccgccctggccgtaatgaggaatgtgacacagcagattaatgagcgaaagcggaggctggagaacattgacaagattgcacagtggcaggcgagtgtcctggactgggaaggcgaagatatcctggaccggagtagtgagctcatttatacaggcgaaatggcgtggatttaccagccttatggaagaaatcagcagcgggtttttttcctttttgaccatcagatggtgttgtgcaagaaggatcttatacggcgggatatcctttactataagggtagaatcgacatggacaagtacgaagtcgtggacattgaagacggaagggatgacgatttcaatgtgagtatgaagaatgcatttaagctacacaataaggagaccgaggagatccacctgttcttcgctaagaagttagaggagaagattagatggctgagggcctttagagaggagcgaaagatggttcaggaagacgagaagatagggtttgaaattagcgagaatcagaagcggcaagcagctatgacagtgaggaaggtacccaagcagaagggggtcaattcagcccgttctgtcccaccctcataccctcccccacaggaccctctgaatcacggacagtatttagtgcccgatgggatcgcccagtcacaagtcttcgaattcacagagcccaagagaagtcagagccctttctggcagaatttcagcagactgactcccttcaaaaaatag

SEQ ID NO: 111515 - DNA, 1488 bp, synthetic construct
  misc_feature 1..1488: note = Description of Artificial Sequence: Synthetic coding sequence
  source 1..1488: mol_type = other DNA
atggccaaccgggaactggcttttaaggctggggacgtaatcaaggtgcttgatgcctctaacaaagactggtggtggggacaaatcgatgacgaagagggttggtttcccgcctcttttgtcagactctgggtgaatcaagaggatgaagttgaggaaggccctagcgatgtccagaatgggcatcttgatcctaattctgattgcctgtgtctcggacgcccattgcagaaccgggatcagatgcgggcgaatgtgatcaatgaaataatgtcaactgagcgtcattacatcaagcacctgaaggacatttgcgaagggtatttgaagcagtgccgcaaacgtcgggatatgttttccgatgagcaactgaaagtgatcttcgggaacatagaggatatctacagattccaaatgggttttgttagagatcttgaaaaacagtacaacaacgacgaccctcatctgagtgagattgggccctgcttcctggaacaccaggacgggttctggatttacagcgagtattgcaacaatcacctggatgcttgcatggaactgagcaaactgatgaaggacagcaggtatcagcacttttttgaggcctgtagactcctccagcaaatgatcgatattgcaatagatggctttctgcttacgccagtgcagaaaatctgcaagtaccctttacagctggctgagcttcttaagtacacagcccaagatcacagcgattaccggtatgtcgccgccgcattagccgtaatgcgcaatgtgactcagcagattaacgagcggaaacggaggcttgagaacatagacaaaattgcacagtggcaggctagcgtgctggactgggagggggaagacatcttggatcgcagctccgaattgatatacactggagagatggcctggatttatcagccttatggacggaaccagcagcgtgtgttctttttgttcgaccaccagatggtgctctgtaagaaagacttgataaggagagacatcctttattataagggtcgaatcgacatggataagtatgaggtcgttgacattgaagacggacgggacgacgacttcaacgtcagcatgaagaacgccttcaagctgcataataaagagaccgaggagatccatctatttttcgcgaagaaactggaagaaaagatcaggtggctgagggcctttagagaagagcgtaaaatggttcaggaagatgaaaagatcggttttgaaatatcagagaaccagaaacggcaggctgcgatgactgtccggaaggtgccgaaacagaaaggggtgaactcagctaggtccgtgccaccaagctacccacccccccaggaccctctaaaccatggccagtatctggttccggacggaatagcccagtctcaggtgttcgagttcacagaacccaaaagatctcagtccccgttttggcagaatttctcacgcctgactccctttaaaaaatag

SEQ ID NO: 111516 - DNA, 1437 bp, synthetic construct
  misc_feature 1..1437: note = Description of Artificial Sequence: Synthetic coding sequence
  source 1..1437: mol_type = other DNA
atgctcattaccggagattctatagtgtcagccgaggctgtctgggaccatgtcactatggcaaatagagaactggcatttaaagctggcgatgtgatcaaggtgttggacgcatccaacaaagattggtggtggggacagatagacgatgaagagggttggttccctgcatcatttgtgaggctttgggtgaaccaggaagacgaagttgaagaagggccgtcagatgtgcagaacgggcatctcgacccaaatagtgattgcctgtgtctgggaagacccctgcaaaatcgcgaccagatgcgtgccaacgtgataaacgagatcatgtcgaccgagaggcactatatcaagcatttgaaagatatttgcgaagggtacctgaaacagtgtcggaagcgccgggatatgttttccgacgagcagctgaaagtgatctttggcaacattgaggacatctatagatttcaaatgggatttgttcgagacctggaaaagcagtacaacaacgatgacccgcacctcagcgagattggaccttgctttctggaacaccaggacggcttttggatatactcggagtattgcaataaccatctcgacgcttgtatggagctatcaaaactgatgaaggacagccgataccagcattttttcgaagcctgtcggctgctccagcagatgattgatattgccatcgatgggttcctccttacacctgtacaaaagatctgtaagtaccctttgcaacttgccgagctactgaagtataccgcacaggaccatagtgactaccgctacgtggccgcggcgctcgccgttatgcggaacgttacacaacaaattaacgaacgcaagagacggttggagaatattgacaaaattgcccaatggcaggcctcggttctggactgggagggcgaggacattctggatcgaagctccgaactcatctatactggcgaaatggcctggatctaccagccttatggcagaaatcagcagcgcgtctttttccttttcgatcatcaaatggtgttatgcaaaaaagatctcattaggagagatattctttattataaaggcagaatcgatatggataagtatgaagtcgtcgacatagaggatggcagagacgacgacttcaacgtgtcgatgaaaaatgcatttaaactccataataaggagactgaggagattcacttgttcttcgctaaaaaactggaggagaaaatcagatggcttagggctttccgcgaggagcggaaaatggtccaggaggacgagaagatcggcttcgaaatcagcgagaatcagaaacggcaggccgccatgaccgtacgtaaactgcccttcccacagctgtcggaagccaggatctgcagccctaaagggtttgcctctgtgtttaacgggacatgttgcggcgaatcttag

SEQ ID NO: 111517 - DNA, 732 bp, synthetic construct
  misc_feature 1..732: note = Description of Artificial Sequence: Synthetic coding sequence
  source 1..732: mol_type = other DNA
atgatcgacattgctatagatgggtttctgctgacaccagtgcaaaaaatttgtaagtacccattgcaactcgctgagctgcttaagtatactgcccaagatcattcggattatagatacgttgctgcggccctcgccgttatgagaaacgtaactcagcagatcaatgagcgaaagcggaggctcgagaacattgacaagatcgctcagtggcaggcttctgttctggactgggaggatctgattaggcgggatattctctattataagggtcgcatcgatatggataagtacgaagtggtggatatagaagatgggagagacgacgactttaatgtgtccatgaaaaacgcatttaaattgcataacaaagaaaccgaagaaatccatctctttttcgccaaaaagctggaggagaagatcaggtggcttcgggcctttcgagaagagagaaaaatggttcaggaggacgagaagatagggtttgaaatttctgagaatcagaagcgccaggcagctatgactgtgcgcaaagtgcccaagcagaaaggggtgaacagcgcacggagcgttcctccctcctacccaccaccccaggaccccctcaaccatggtcagtatctggtgccagacggcatcgctcagagtcaagtctttgagtttacggagccaaagcggagccagtcgcctttttggcagaattttagcagactcacaccttttaagaaatag

SEQ ID NO: 111518 - DNA, 1392 bp, synthetic construct
  misc_feature 1..1392: note = Description of Artificial Sequence: Synthetic coding sequence
  source 1..1392: mol_type = other DNA
atgcagtggattagaggtggttccggaatgctctgggtcaaccaggaggacgaggttgaggaaggccctagtgacgtccagaacggccatctggacccaaactctgactgtctatgtcttggccgacctctccaaaaccgcgaccagatgagagccaacgtaattaatgagatcatgtccactgaaagacattatatcaagcatctgaaggacatctgtgaaggctacctcaagcagtgtaggaagcgtcgggacatgtttagtgacgaacagctaaaggtgatttttgggaatatagaggatatttatcgatttcagatggggttcgtaagagacttggagaagcaatataacaatgatgatcctcacctgtctgagatcggcccctgcttcttagagcaccaagatggcttttggatctattctgagtactgtaacaatcatctcgacgcttgcatggaattaagtaagctcatgaaagactcacggtaccagcacttttttgaggcttgccgcttactgcagcagatgatcgatattgccatcgacggattcttgctcacacctgttcagaaaatttgtaagtatcccttgcagctcgccgagttactcaaatacactgctcaggaccattctgactacagatatgtggccgcggctttggcagtgatgcgaaatgtgacccagcagatcaatgagcggaagagaagattggaaaacatcgacaagatagctcagtggcaggcctccgtgctggattgggaaggggaagacatactggatcggagtagtgagctaatctatacaggagaaatggcctggatctatcagccctacggtaggaaccagcagagagtgttcttcctgttcgatcatcagatggttctctgtaaaaaggatctgatcagacgcgacattctgtattacaaaggtcggatcgacatggacaagtacgaggtggtcgatatagaagatggacgcgacgatgactttaacgtgtccatgaagaacgcctttaagctgcataataaggaaaccgaggaaattcacctattcttcgccaagaaactcgaggagaaaatacgctggcttagagcattccgagaagaaaggaagatggtgcaggaggatgaaaaaatcggctttgagataagcgagaaccagaaaagacaggccgcgatgactgtgcggaaagtgcctaaacaaaaaggcgttaatagcgcccggtcagtgccaccatcatatccacctcctcaggatccgctcaatcacggtcagtatctcgtccctgacggcattgcccagtcccaggtcttcgagtttaccgaacccaagcgctctcagtcacctttttggcagaatttcagccgccttacaccatttaagaaatag

SEQ ID NO: 111519 - DNA, 2409 bp, synthetic construct
  misc_feature 1..2409: note = Description of Artificial Sequence: Synthetic coding sequence
  source 1..2409: mol_type = other DNA
atgcctcggattatgataaagggcggagtctggaggaatacagaggacgaaatcctcaaagccgccgtaatgaagtatggtaaaaaccagtggtccaggatcgcttctctccttcatcgaaaaagtgctaaacaatgtaaagcccggtggtatgaatggctggacccatccattaaaaagaccgagtggtcccgcgaggaggaggagaaacttctgcacctggcaaaactcatgcccactcagtggcggacaatcgccccgattattggcaggaccgccgcccagtgcctggagcactatgagttccttttagacaaggctgcccagcgtgacaacgaggaagagaccaccgacgaccctaggaaattgaaacccggcgaaatcgatcccaaccccgaaacaaagccggcaagaccagatcccatcgacatggacgaggacgaacttgagatgctgagtgaggctcgcgcacggctcgcaaacacacaagggaagaaggccaagcggaaggcgcgcgaaaaacagctggaagaggccagacgtctggcagccttgcagaaacggagagagcttcgggcagcaggaatagagatccagaagaaaaggaagaggaagcgtggagtggactataatgctgagattccatttgagaagaagccggccctcggcttctacgatactagcgaggaaaactaccaagcgctggacgccgacttccgcaaactgaggcaacaggatctagatggagagctgcgatctgagaaagaagggagggaccgtaaaaaggataagcaacacctgaagagaaaaaaggagtccgacctgccctctgctatccttcagaccagcggggtttcagagttcaccaagaagaggtctaaacttgtgttgcccgcaccgcagatatcagacgccgaactccaggaggtcgttaaggtaggccaggcctctgagatcgccagacaaacggccgaggagtctggaatcaccaattcagcctcatcaacactgctgtccgagtataacgtaaccaataacagtgtggctctccggactccccgcacacctgcgtcccaggataggattttgcaggaggcacagaatttaatggccctaaccaatgtggacaccccccttaaaggcggacttaacacgccactgcacgaaagcgacttctccggagttaccccccagcgccaggtggtacagacaccaaacactgtactctctacgccctttagaacgcctagcaatggggctgaaggcctgacacctcggtccgggactacaccaaaaccagttattaattcgacacccggcagaactcccttacgagacaagttaaacattaatccagaagacggtatggccgactactccgatccttcctatgtcaaacaaatggaaagagaatctcgtgagcacctacgactcggactcctggggcttccagcccctaaaaatgactttgaaatcgttctccccgagaacgccgaaaaggaattggaagagagagagatcgacgatacatacattgaggatgcggccgacgtggacgcccgcaagcaagcaattcgggatgccgaacgtgtaaaggagatgaaacgtatgcataaggctgtgcagaaagatttgccccgcccgtcagaggtaaacgagacaatactgcgccccttgaacgtcgaaccacccctgaccgacctgcaaaagagcgaagaactaatcaagaaagagatgatcaccatgctgcactatgatcttctccaccatccatacgagccctctgggaacaaaaagggtaaaactgtgggcttcggaacaaacaattcggagcacatcacctatttggagcacaatccatatgaaaaattctctaaggaagaattgaagaaagcacaagacgtcttggttcaggaaatggaagtggtcaagcagggaatgtcacatggtgaactgagcagcgaagcctacaatcaggtgtgggaagagtgttacagtcaggtcctgtatctcccgggccagtcgcggtacacaagggccaaccttgcttcgaaaaaagatagaattgagagtctggagaaaaggctcgagatcaaccgcggccatatgactaccgaagcaaaacgcgccgccaagatggagaagaaaatgaaaattctgctcggcggctaccaatccagggcgatggggcttatgaaacagttgaacgatctgtgggatcagattgaacaggcccacctggagcttaggacttttgaagagctgaagaaacacgaagatagtgccatccctaggcgattagagtgcctgaaggaggacgtgcaacgccagcaggaacgcgagaaggagctgcaacacaggtacgccgaccttctgttagaaaaggaaactctgaagtctaagttttag

SEQ ID NO: 111520 - DNA, 1455 bp, synthetic construct
  misc_feature 1..1455: note = Description of Artificial Sequence: Synthetic coding sequence
  source 1..1455: mol_type = other DNA
atgcggcactctaaaaggacctattgtcccgactgggatgataaggactgggactatggcaagtggcggtcgtcatcctcacacaaacgcaggaaaagaagccactcttcagcccaggagaacaagcgctgcaaatataaccattccaagatgtgtgattctcactacctggaaagcaggagcattaatgagaaagactaccattcgagacgatacattgacgaatacaggaatgattacacacagggctgtgaacccgggcacaggcagcgtgatcacgaatctcggtatcaaaaccactcaagtaagtcaagcggacggtctggccgtagctcctacaagtcgaagcaccggattcaccatagtacatctcatcgcagaagccacggcaagtcccatcgcagaaagcgtacccgctctgtcgaagatgatgaagagggacatcttatttgtcagtcgggggacgtgcttagtgcacgatacgagattgttgacacccttggggaaggcgccttcggaaaggtggtcgagtgtatcgatcataaggccggcggtaggcacgtggccgtgaagatcgtgaagaacgtggaccgatattgtgaagctgctaggagcgaaattcaggtgcttgaacatcttaacaccacagaccctaacagcacgtttcgttgcgtccaaatgctggagtggttcgaacaccacggccatatttgcatcgtgttcgaattgctagggttgtcaacttacgattttattaaggaaaatggcttcctgccctttaggctggatcatattagaaagatggcatatcagatctgcaagagcgtcaactttctgcactccaacaagcttactcacacagacctgaaacccgaaaatatcctgtttgtgcaaagtgattacactgaggcatataatcctaaaatcaaacgggacgaacgcaccttaataaatcctgatattaaagttgtggactttggctctgcaacctatgacgacgagcatcattccactctcgttagcacgcggcactaccgggcccccgaggtcatcctggccctgggttggagtcaaccttgcgatgtgtggtccattggttgcattttgatcgaatactatttagggttcaccgtgttccctactcacgattccaaggagcacttagcgatgatggagagaatcttaggcccactgcccaagcatatgatccagaaaacacgcaaaagaaagtatttccatcacgacaggctcgactgggatgagcattcatctgcagggaggtacgtctcccgccgctgtaaaccactgaaggagtttatgctgagccaagatgtcgaacacgagcggctgttcgacctcatccaaaaaatgctcgagtatgaccccgctaagcggatcactctgcgagaagctctcaaacaccctttttttgatttactgaagaagtccatctag

SEQ ID NO: 111521 - DNA, 1365 bp, synthetic construct
  misc_feature 1..1365: note = Description of Artificial Sequence: Synthetic coding sequence
  source 1..1365: mol_type = other DNA
atgaggcacagcaaaagaacatattgtccggattgggacgataaggactgggactatgggaagtggaggagttcaagctctcataagcgtcggaaacgttcacacagctcggctcaggagaataagcgctgtaaatacaatcattcaaaaatgtgcgattcacattatctggaatccagatctattaacgagaaagattatcactcacgaaggtacatagatgagtaccgcaacgactacacgcagggctgcgaaccaggacatagacagcgcgaccacgaaagcaggtatcagaatcacagcagcaagtcatctggcagatccggaagatcctcctataagtccaagcacaggattcaccactccaccagccacaggagatcacacggtgatgagatcgtggataccctcggggaaggcgcatttggaaaagtagtcgaatgtattgatcacaaagccggagggcggcatgtagccgtgaaaatcgtcaagaacgtcgacaggtattgtgaagcggcaaggtctgaaatacaggttctcgaacacctcaacacaacagatcccaacagcaccttcagatgtgtgcaaatgctggagtggttcgaacatcatggacatatctgcatcgtttttgaattactggggctgtctacctacgactttatcaaggagaacggcttcttacctttcaggctggatcacatcaggaaaatggcgtatcagatctgcaagtctgtcaattttctgcactcaaataaacttacacatacggatctgaaacctgagaatatcctttttgtacagtccgactatactgaagcttacaatcccaaaataaaacgtgatgagcggacgttgataaatcctgatatcaaggtcgtggacttcggttccgccacttatgatgacgagcaccactctactctggtctccacaagacactacagagccccagaagtgattctggccctgggatggtctcagccttgcgatgtgtggagcatcggatgcatactgatcgagtactatttgggcttcacagtctttcctacccatgatagcaaagagcacttagccatgatggaaaggatattgggtccccttcccaagcatatgattcaaaaaactcggaaacgcaagtattttcatcacgatagactggactgggacgaacattccagcgcaggaagatacgtgtctcggagatgcaagcccctgaaggagtttatgctgtcgcaggacgttgaacacgagcggctgttcgacctgatacaaaagatgctggagtacgatcccgcgaagaggatcaccctgcgagaagcattgaagcacccatttttcgatctcctgaaaaaaagcatctag

SEQ ID NO: 111522 - DNA, 1581 bp, synthetic construct
  misc_feature 1..1581: note = Description of Artificial Sequence: Synthetic coding sequence
  source 1..1581: mol_type = other DNA
atggcagccggcaggcggccagcgtctgcactgtggccagagaggcggggctcccccctccgaggggatctcttaggatttcagaacgtccgggaacccagttcctgcggggagactctgtccgggatgcgacactccaaaaggacgtactgccccgactgggacgacaaggactgggactacggtaaatggcgctcctcctccagccacaaacgtcgaaagcgctcccattcctcagctcaggagaacaagcgctgtaaatataatcatagcaagatgtgtgacagtcattatctggaaagcaggtcaatcaatgagaaggactaccattcaaggcgctacatcgatgaataccggaacgattatacacagggctgtgagcccggacatcggcagcgcgaccacgagtcacgttaccagaatcactcgtcaaaatcctccggccgctcaggccgaagctcatacaaaagcaagcacagaatccatcacagcacgagccaccgaagaagtcatggaaaatcgcaccgccgtaagagaacgagatctgtcgaagacgacgaggagggacatttaatctgccagtcgggcgatgttctctcagcccgttacgaaatcgtcgatacacttggcgaaggggccttcggtaaagtggtggagtgcattgatcataaagcaggaggaagacacgtggccgttaaaattgttaaaaatgtagataggtactgcgaagcggctagatctgagattcaggttctggagcacctgaatacaacggatcctaatagcacctttcggtgtgtgcaaatgctcgaatggttcgagcatcacggtcacatctgtatcgtgttcgagctattgggcctgagtacatacgatttcataaaggagaatggcttcctcccatttaggttagaccacatcaggaaaatggcctaccagatttgcaaaagcgtgaactttcttcatagcaataaactgacccatacggatctaaaacctgagaatatattattcgtccagtctgactatactgaggcctataatccaaagatcaaacgggatgaacgaactctgataaatcccgatattaaagtggtggatttcggcagcgctacctacgacgacgaacaccacagtacgttggtcagtactcgccactacagagcccctgaagtgatcttggctctgggctggtcccagccttgcgacgtgtggagtatcggctgtatactcattgagtattatcttggatttaccgtcttcccgacacacgatagcaaggagcacctcgcaatgatggagcgcatcttgggcccgttaccgaaacacatgatccagaaaaccagaaagcgtaagtacttccaccacgatcgcttggattgggatgagcactccagtgctggcagatatgtgagcaggcggtgtaagccccttaaggaattcatgctgtcccaggatgtggaacatgaacggttgtttgaccttattcagaagatgttggagtatgaccctgctaagaggataaccttgagagaagccttgaaacatccatttttcgatctactcaaaaaatctatctag

SEQ ID NO: 111523 - DNA, 1494 bp, synthetic construct
  misc_feature 1..1494: note = Description of Artificial Sequence: Synthetic coding sequence
  source 1..1494: mol_type = other DNA
atgcctcacccgcgtcgataccactcttccgaaaggggttcgcgtggtagttacagggagcactaccgttctcgcaagcataaaagaagaaggagtcgttcctggagctcatcatctgatcggaccagacgcagaagacgtgaggattcctaccacgtccggtctagaagttacgacgaccggtcctctgatcgtcgggtgtatgacaggaggtattgcggaagttataggcggaatgattacagtcgggacaggggcgacgcgtactatgacacggactacaggcactcttatgagtaccagcgtgagaatagtagttatagatctcagcgcagttcaagaagaaagcatagaaggcgccgacgacggtcccggacattcagtagaagcagttcccattcttctagaagggccaagtctgtcgaagacgatgcagaagggcatctcatatatcacgtgggggattggctccaggaacggtacgaaatcgtgtctacgctgggcgaggggacattcggccgcgtggtgcaatgtgtagatcatcgacgcgggggggcaagggttgcgctcaaaattattaaaaacgtggaaaagtacaaggaagcagctaggcttgagatcaacgtccttgaaaaaattaacgaaaaggacccagataataagaacctctgcgtccagatgtttgattggtttgattaccacgggcatatgtgcatttcttttgagctgctgggcttgtctacctttgatttccttaaagataataattacctcccgtaccctattcaccaggtgcggcatatggcttttcaactgtgccaggccgttaagtttcttcacgataataagctgacgcacaccgacctgaagcctgagaacatactcttcgtgaatagtgactacgagctgacatataacctggagaagaagcgggatgaacggtccgtcaagtctactgccgtcagagtagtggactttggatcagctaccttcgatcatgagcatcattctactatcgtgagcacccgccactacagggcgcctgaggtaatcttggaacttgggtggagtcagccatgtgacgtgtggtcgattgggtgcataatattcgaatattatgttggatttacacttttccaaacccacgacaatagagaacatctagctatgatggagcgaattttagggcccatcccttctcgcatgattcgtaagactaggaagcagaagtatttctatcgggggcgtctcgattgggacgaaaacacctccgccggtagatacgtgcgcgaaaactgcaagcctcttagacgctatctgacgtcggaggcagaagaacatcatcagctgtttgatctgatagaatcaatgttagaatatgaacccgccaagcgtctcacactcggcgaagcactgcaacaccccttcttcgcacgattaagggccgagcccccaaacaagctgtgggacagcagcagagatatctcaagatag

SEQ ID NO: 111524 - DNA, 1497 bp, synthetic construct
  misc_feature 1..1497: note = Description of Artificial Sequence: Synthetic coding sequence
  source 1..1497: mol_type = other DNA
atgcctcatccacggcggtaccactcctcagaacgcgggtcaaggggaagctatcgcgagcactaccgcagcagaaaacataaacgtcggaggtcgcggagctggtcgtcgtctagtgataggacaagaagacgccgtagggaggactcctatcatgtgaggagccgatcaagctatgacgatcgatcttccgacagacgggtgtatgaccgtcgttattgcggtagctatagaaggaacgactattcccgtgaccggggagatgcatattatgacacggattatcgacacagttacgagtaccagcgcgaaaatagttcttacagaagccagagatctagcagacggaagcataggcgccgcagaaggcgctcgcggacgttctcaaggtccagctcccacagcagcagacgcgctaagagcgtggaggacgatgctgagggccacttaatttatcatgtgggagactggctgcaggagcgctacgagatcgtgagcacattgggcgagggtacatttggacgcgttgtgcaatgtgttgatcatcgccgagggggcgcaagagtcgcccttaaaatcattaaaaacgttgagaagtataaggaagcggcacgcttggagattaatgttttggaaaagatcaacgagaaagacccggataataagaacctgtgcgtccaaatgtttgactggtttgactaccacggacatatgtgcatctctttcgagttgctgggactatccacgttcgatttcctcaaagacaataattatctgccatatccaatacaccaggtgaggcacatggcctttcagttatgtcaggcagtcaagtttctgcacgataacaagctaacccataccgatctcaagccagagaatattctgttcgtcaattctgactatgagctgacctacaatttggagaagaagcgtgatgagcgctcagtcaagtccacagcagtcagagtcgtagattttgggtctgccacattcgatcacgagcaccatagtacaatcgtctccactcggcactatagagctccagaagtgatcttggaattaggctggtcccagccctgtgatgtgtggagcatcggatgcatcatattcgaatactatgttggcttcactttatttcagacacatgataacagggaacatctggccatgatggagagaattctgggaccgataccatctcggatgatcaggaagaccaggaagcagaagtacttctacaggggccgattggactgggatgaaaacaccagcgccggacgttatgtgcgcgaaaattgcaaacccctccggcgatacctaacaagtgaggccgaggagcatcaccagctgttcgatctcatcgagagcatgctggagtatgaaccagcaaagcgtctcactctaggggaggcacttcagcacccgttttttgcccggctcagagccgagccacctaataaactttgggactcctctcgcgatatctctcgctag

SEQ ID NO: 111525 - DNA, 1500 bp, synthetic construct
  misc_feature 1..1500: note = Description of Artificial Sequence: Synthetic coding sequence
  source 1..1500: mol_type = other DNA
atgcctcatccgcgacgataccacagctctgagagggggtctcggggtagttacagagaacactaccgctctcgaaagcataaacgcaggaggtcgcgcagttggtcttctagttcggatcggactcggaggaggcgcagagaggattcttaccacgtgcggagcaggtcgagttatgatgataggtcttctgacagaagagtctacgatagacgatattgcgggagttataggagaaacgattactcccgagatcggggtgatgcatactacgacaccgactacaggcactcgtacgaatatcagcgtgagaactcctcatatcgatcacaacggtccagcaggcggaagcatcgacggcggcggagaaggagccgaacgttttcacgatcttccagtcaacattcctcacggcgggctaaatcggtggaagatgatgcggaagggcacctaatctaccatgttggagactggctccaagaaagatatgaaattgtttcaacactcggcgaggggacatttgggcgggtggtgcagtgcgtcgatcacaggcgggggggcgccagggttgctctcaaaattatcaagaacgtggagaagtacaaggaagccgccaggcttgaaatcaatgtgctggagaaaatcaatgaaaaagaccccgataacaaaaacctgtgcgttcagatgttcgattggtttgattaccatggccatatgtgtattagttttgagcttctcggcttaagcaccttcgatttcctgaaggataacaattacctgccgtatccaatccaccaggtgaggcacatggcgttccagctgtgccaagccgtcaaattcctacacgacaataaactcactcacaccgatctaaagcctgaaaacattctgtttgtcaatagcgattacgagttaacgtacaatctggaaaagaagagagacgagaggtcagtgaagtcaactgctgttagggtcgtcgatttcgggtccgccacatttgatcacgagcaccacagcactattgtctccacccggcactaccgagcccccgaggtcatcctcgaactgggctggtctcagccttgcgacgtttggagtataggatgtataatttttgagtactacgtcgggttcacactgtttcagacacacgacaacagagagcacttagccatgatggaaaggattctgggccctatccctagccggatgattcggaaaacgcggaagcagaaatacttttaccgtggcaggctagattgggatgagaacacgtcagccggccggtacgtgagagagaactgcaaacccctgcggagatatcttacatcagaagccgaggagcatcatcagttgttcgatctgattgaaagcatgctggagtacgaaccggccaaacggctcacactgggagaggcactccagcatcccttctttgcccgcctcagggctgagccccccaacaagctatgggactcatcacgggatatctctcgctag

SEQ ID NO: 111526 - DNA, 816 bp, synthetic construct
  misc_feature 1..816: note = Description of Artificial Sequence: Synthetic coding sequence
  source 1..816: mol_type = other DNA
atgttcgattggtttgactaccacggccacatgtgtatatcattcgagctcctaggattatcgacattcgacttcctaaaggacaacaactacctcccttatcccatccaccaggtaaggcatatggcttttcaactatgtcaggcggtcaagttcctgcacgataataaattaactcatacagacctgaagccagaaaatatactctttgttaattccgactacgaactgacatacaacttagagaaaaagagagacgaacggagcgtcaaatccacggcagtgagggtggtcgatttcgggtcagctacgttcgatcacgaacaccactccacaatagtgtctactaggcactacagggctcctgaggtcatcctggaactcggatggagccagccatgcgatgtctggtccatcggttgcatcatattcgagtattatgtcggatttaccttgtttcagacacatgataatcgggaacacctggcaatgatggagaggattcttggtcccatcccatcccgcatgattcgcaagactcggaagcaaaaatacttctaccgtggacgcttggattgggacgagaatactagtgctggcagatacgtgcgggaaaactgtaaaccacttagacgatacctcacctccgaggccgaggagcaccaccagctcttcgatctgatagaaagcatgctcgaatacgaaccagccaagagactgaccctgggcgaggccttacagcatcccttctttgctcggctacgcgccgagccccccaacaagctgtgggattcttccagggacataagcagatag

SEQ ID NO: 111527 - DNA, 1500 bp, synthetic construct
  misc_feature 1..1500: note = Description of Artificial Sequence: Synthetic coding sequence
  source 1..1500: mol_type = other DNA
atgccccacccccgcagatatcacagctctgagaggggatcacgaggatcttaccgcgagcactatcgatctcggaagcacaagcgcagacgaagtcgcagttggtcctcatcttccgaccggaccagaaggcgaagaagagaagattcatatcacgttagaagcagatccagctacgacgacaggagttccgataggcgtgtgtatgataggcggtactgtggttcataccgacgcaatgattattcccgtgacaggggtgatgcttattatgataccgactaccgccatagctatgagtaccagagggagaattcctcatatagatctcagcgctcttcccgccggaaacataggaggagaagaaggcggtcacgtacgttttctcgctcctctagtcaacattcctcccggcgcgcaaaatctgtggaagatgacgccgaaggacacctgatctatcacgtgggcgactggctacaggagcggtacgaaatcgtgagcacgctgggcgagggcaccttcggccgggtggtgcagtgcgtggaccaccgcagaggaggagctagagtagctttgaaaattattaaaaatgttgagaagtacaaggaggcagcaagactggagatcaacgtgctagagaagattaacgagaaagaccctgacaacaagaacctatgcgtccagatgtttgattggtttgactaccacggccatatgtgcattagcttcgaactccttggactgtctacatttgatttcctaaaggacaacaactatcttccataccccatccaccaggtccggcatatggcattccagctttgccaggcagtcaagtttttgcacgacaataaactaacacataccgatttaaagcctgaaaacatcttgtttgttaatagcgattacgagctgacctataatctggagaagaagcgcgacgagagatcagtgaagtctaccgccgtgcgcgtcgtggacttcggcagtgctacatttgaccacgaacaccattccaccatagtgtccacacgacactaccgtgcccccgaggttattctggagcttgggtggagccagccttgtgacgtctggagcattgggtgcatcatcttcgagtactacgttgggttcacactctttcagacgcacgacaaccgggagcatctggcaatgatggaaaggattctggggcctatcccaagtcggatgattagaaaaactcgcaaacagaagtacttttaccgcggtcgactggattgggacgagaacacctccgcaggccggtacgttcgggagaactgtaaacccctgcgaagatacctcacgtctgaagcagaagaacaccaccagctttttgatctgatcgaaagcatgctggaatatgagcccgccaagcggttaactctgggggaggccctccaacatccatttttcgctcgcctcagagccgaacccccgaacaagctgtgggatagttctcgcgatatttcacggtag

SEQ ID NO: 111528 - DNA, 1473 bp, synthetic construct
  misc_feature 1..1473: note = Description of Artificial Sequence: Synthetic coding sequence
  source 1..1473: mol_type = other DNA
atgcaccactgcaaaaggtatcggagtcccgagcccgacccttacctctcataccgctggaaacgtcgccgctcttactcccgggagcacgaggggcgcttgagatacccctcccgccgggagccaccacctcggcgatcccgcagccgctcccacgacaggctcccctaccagaggaggtacagggagcggagagattccgacacgtaccgctgtgaagagaggagcccctccttcggagaagattactatggcccatcccggagtaggcatagacgcaggtcccgcgagaggggcccatatagaactaggaagcacgcccatcattgtcataagcgacgcactcggagctgttccagtgcaagcagccgaagtcagcagtcctcaaagcgaagttcccgcagtgttgaggatgataaggaaggtcatctcgtgtgcaggataggggattggttacaagagaggtatgaaatcgtcgggaacctgggtgaaggaaccttcgggaaggtggtggagtgtcttgaccatgcccgggggaagtcgcaggtggccttaaaaatcatccgtaatgtgggcaagtatagggaggcagctcggcttgaaattaacgtgctgaagaaaatcaaagaaaaagataaagaaaataagtttctgtgcgtgctcatgagcgactggtttaatttccacggtcacatgtgtattgctttcgaattgcttggaaagaatacattcgagttccttaaggagaataactttcagccttaccctcttcctcacgtccggcacatggcataccagctgtgtcatgccctcaggttcctgcacgagaaccaactcacacacaccgatctcaaacccgaaaacattctgttcgtgaattctgagttcgaaaccctgtataatgaacacaagtcctgcgaggagaagtctgttaagaacacatccattcgagtggctgacttcgggagtgccactttcgatcacgaacaccacaccaccattgtcgccacgcgacattatagaccccccgaggttatcctcgagttggggtgggctcagccttgcgatgtttggtccatcggctgcatactcttcgaatactatcgcggtttcactctgtttcagactcatgagaacagagagcaccttgtgatgatggagaagatcctagggccaatcccatctcacatgattcatcgcaccaggaagcaaaaatacttttataagggaggcctggtttgggacgaaaatagttcggatgggcgctatgtgaaagagaattgtaaacccctaaaatcttacatgctccaggacagtttagagcatgtgcagctttttgatctgatgcgcagaatgttggagtttgaccccgcgcagcgtatcactttagctgaagctcttctacaccccttttttgcaggccttacaccggaggaacgaagcttccacacctcaagaaatccttctcgctag

SEQ ID NO: 111529 - DNA, 459 bp, synthetic construct
  misc_feature 1..459: note = Description of Artificial Sequence: Synthetic coding sequence
  source 1..459: mol_type = other DNA
atgcaccattgtaaaaggtaccggagcccggagccagatccatatctgtcgtaccgctggaagaggcggcgaagttactccagggagcacgaggggcgacttagatacccatccaggagagaacctcccccccggcgcagcagatccagatcacatgataggctaccataccagcgtcggtatcgggagcgaagagactctgacacctaccggtgcgaggagcgctctccatctttcggcgaggactactacggtccttctaggtccagacaccggcgtaggtctagggaacgcgggccataccgcacgagaaaacatgcccatcactgccacaaaaggcgcacacgctcgtgtagtagtgccagcagtatgaggctgtggggcacctgggtcaaggcccctctcgcacggtggtggtctgcctggactatgccagagggaagcctgcgccttccatag

SEQ ID NO: 111530 - DNA, 1404 bp, synthetic construct
  misc_feature 1..1404: note = Description of Artificial Sequence: Synthetic coding sequence
  source 1..1404: mol_type = other DNA
atgcatcattgcaaacggtaccggtctcctgaaccagacccctacctttcctatagatggaagaggaggcgttcctattctagagagcacgagggaaggctcagatacccatccaggagagaacctccccccagaaggtctcgaagtagaagccacgatagattgccataccagcgtcgctacagagaaagaagagactcagacacctaccgctgtgaggagaggagtccaagctttggcgaagactactatgggccgagccgctccagacatcgcagaagatctcgggaacggggcccataccgaactcggaagcatgctcatcactgccataagcggagaaccagaagctgctcaagtgcttctagccgaagccagcagtccagcaagcgctcttccaggagcgtcgaggacgacaaggaaggtcatctcgtctgccgtatcggggattggctgcaagagcgctggaagagtcaagtcgcactgaaaatcataaggaatgtgggcaagtacagggaagctgctagactggaaataaacgtgctaaagaaaatcaaagagaaagacaaagaaaacaaattcctgtgcgtcctcatgtccgactggttcaactttcatggacacatgtgtatcgcgtttgagcttttaggtaagaatacctttgagttcttgaaggaaaacaattttcaaccgtacccgctcccccatgtgagacacatggcctaccagctctgccatgctctgcggttcttacatgagaatcagctcactcacacggacctgaagccggagaacattctgtttgtcaacagcgagttcgagactctctacaatgagcacaagtcttgtgaggaaaaatctgttaagaacacctcaatcagggtagctgacttcggaagcgcaaccttcgaccacgagcaccacaccacaattgtggccacaagacattacagacctcctgaagtgattctggagctcggatgggcccagccctgtgatgtgtggagcattggctgcattctattcgaatattatcggggtttcactctgtttcaaacgcatgagaatagggagcaccttgtcatgatggaaaaaatcttgggccccatccctagtcatatgatccataggaccaggaagcagaagtatttttataaaggaggcctcgtgtgggacgagaactcatccgacggccgttacgtgaaggagaactgtaagcccctgaaaagctatatgttgcaggattccctggagcacgtccagctcttcgatcttatgaggaggatgctggaatttgaccccgcccagcgtattactctggccgaggcccttctgcacccgttttttgccgggctgaccccagaagagcgtagttttcacacaagcagaaatcctagtaggtag

SEQ ID NO: 111531 - DNA, 1473 bp, synthetic construct
  misc_feature 1..1473: note = Description of Artificial Sequence: Synthetic coding sequence
  source 1..1473: mol_type = other DNA
atgcaccattgcaagaggtaccgctctccggagcccgacccatatctttcctatcggtggaagagaaggaggtcgtactctcgggagcacgagggccggctgagatacccaagccgccgggagcctcctcctcgacggtctcgtagccgcagtcacgacaggttaccctatcagaggagataccgagagaggcgcgactcagatacgtacagatgtgaagagcgctcaccctcgtttggtgaggactactatgggccaagtagaagcaggcacagacggaggtctcgtgaacgagggccctaccgcacccggaaacacgcccaccattgtcacaagaggcgaactaggtcgtgttcctccgcaagttcaagaagccagcagtcctcaaagagaagcagccggtccgtggaagatgataaagagggacatcttgtctgtcgcatcggggactggctccaggaacgttacgagatcgttggtaatctgggggaaggtaccttcgggaaggtcgttgagtgtctcgatcatgccagaggcaagtcacaggtagcgctgaaaatcatcagaaatgtaggcaagtaccgcgaagccgcaaggctagaaatcaacgttctcaaaaaaattaaagagaaggataaggaaaacaaattcttgtgtgtcttaatgagcgactggttcaattttcatggccacatgtgtatagcctttgaattattgggcaagaacacattcgagtttctcaaggagaataactttcaaccttaccctctgccccatgtgcggcatatggcttatcagctctgtcacgcactcagatttctgcatgaaaaccagctaacacacaccgatctgaagcccgagaacatcctgttcgtgaatagtgaatttgagacactctacaatgagcacaaatcctgcgaagaaaaatcggttaagaacacctccattcgcgtggctgacttcggatctgccacattcgatcacgagcaccacaccactatcgttgcaacccgacattatagacctccagaagtcatccttgagctcggctgggcgcagccttgcgacgtttggagcattggttgcattctcttcgagtattatcgcggcttcaccctgtttcagacacacgagaatagggaacacctggtgatgatggaaaaaattttaggtcctatacccagccatatgatccaccgaactcgtaagcagaagtacttctacaagggcggcctggtgtgggacgaaaacagcagtgacggcagatacgttaaggagaactgcaagccactcaagtcttatatgttgcaggacagccttgaacatgtgcagctgttcgacttgatgcgtcggatgctcgaatttgatccagcccaaagaatcacccttgcagaggcactcctacacccattcttcgcgggactgactcctgaggagagatcatttcataccagccgaaatccctcaaggtag

SEQ ID NO: 111532 - DNA, 1917 bp, synthetic construct
  misc_feature 1..1917: note = Description of Artificial Sequence: Synthetic coding sequence
  source 1..1917: mol_type = other DNA
atgcctgttctgagcgcaaggaggcgagaacttgccgatcacgcgggatcaggtaggaggagcggcccatcaccaacggcacggagcggacctcacttgtccgcactgagggcccagcccgcacgcgccgctcatcttagtggtcgaggcacatacgtgagaagagatacggctggaggcggtccagggcaggcccggcctttgggaccaccaggaacatcacttttgggccgtggtgcacgccggagcggggagggttggtgcccgggagcctttgagagtggcgcgagggccgctaggccaccctccagggtggagccccgtttggcaactgcagccagtcgggagggtgcagggcttcctcgggctgaagtcgctgctggctctggcaggggagcccggtctggagaatggggcttggctgctgccggagcctgggagaccatgcatcactgtaagcgctatcggagcccagaacccgacccttacctgtcctatcggtggaagcgtcgtcgcagttatagtagggaacacgaaggacggctcaggtatccatcccgtagagaaccacctcccaggaggagccggtcacgatctcacgatcgactgccataccaacgtaggtatagagaaaggcgggattccgatacttatcgttgtgaagagcggagcccctcgtttggcgaggactactacggtccgtcccgcagccgacatagaaggaggtctcgggagcgaggcccttacagaacccgcaagcacgcacaccactgtcacaagcgcagaaccaggagttgctcctcagcgtcaagtcggtctcagcaatcttctaagcgttcttctaggtctgtggaggatgacaaggaaggtcacctagtatgtcggattggcgattggctccaggaaagatacgagatcgttggaaatttgggagaagggacattcgggaaggtcgtggaatgcctcgaccacgcccggggcaaaagtcaggtggctctgaagattatacgaaacgtagggaaatatagggaggccgcacgtcttgagattaatgtgcttaagaaaatcaaagaaaaggataaagaaaataagtttctttgcgttttgatgtcggactggtttaacttccacggacacatgtgcatcgcattcgaactgctgggaaagaacacttttgaattcttaaaagaaaacaattttcagccttatcccctgccgcatgtgcgtcacatggcgtatcaattgtgccatgccctgaggtttctgcacgagaatcaattaacgcacaccgatctgaagccagaaaacatattgttcgtgaactcggagttcgagaccctgtacaacgaacataaatcttgcgaagagaagagtgtgaagaacacaagtatccgtgtagccgactttggttccgccaccttcgaccatgagcaccacaccacgattgtggctaccaggcactaccgacctcccgaggtaatcctcgaactgggttgggcacagccttgtgacgtctggtcaattggatgtattctctttgagtattatcgcggatttacactgttccagacacatgaaaaccgagaacatctggtcatgatggagaagatcctcggccctatcccttcccacatgatccacaggacccgcaaacagaagtacttctacaagggaggacttgtgtgggacgaaaatagctcagacggtaggtacgtgaaagagaactgcaagcctctgaaatcatatatgctccaagactcccttgagcacgtccagctgtttgacctcatgcgaagaatgctcgagttcgatcccgctcagagaattacattggccgaggctctccttcacccgtttttcgcggggctcactcctgaggagcgttcgtttcacacctctaggaacccgtcccgatag

SEQ ID NO: 111533 - DNA, 327 bp, synthetic construct
  misc_feature 1..327: note = Description of Artificial Sequence: Synthetic coding sequence
  source 1..327: mol_type = other DNA
atgagcctgacgtcctcctcctccgtgagggtggaatggatagccgccgtcactatcgcggctggtacagcagccatcggctacctggcttacaagaggttctatgtgaaagaccaccgcaataaagccatgatcaatctccatatacagaaggacaatcccaagatcgtacatgcctttgatatggaggacctcggtgacaaggctgtctactgccgctgttggcggagcaagaagttccctttttgcgacggggcgcacacaaagcacaatgaggagactggagacaatgtcggcccacttattattaagaagaaagagacctag

SEQ ID NO: 111534 - DNA, 408 bp, synthetic construct
  misc_feature 1..408: note = Description of Artificial Sequence: Synthetic coding sequence
  source 1..408: mol_type = other DNA
atggtcctagagagcgttgctcgcattgttaaagtacagctacctgcataccttaagcgcttgccagtccccgaatctattaccggctttgcacggctcacggtatccgagtggctgcgtctgctgcctttcttaggcgttctggctcttctcggctacctcgccgtgcgcccgtttcttcccaaaaagaagcagcagaaagatagtctgatcaacctgaagattcagaaggagaacccaaaggtcgtgaacgagataaacattgaagacctctgcctcactaaagccgcctactgtcggtgttggaggagcaagactttccccgcctgcgatgggtcacacaacaaacacaacgagcttacaggggataatgtcggacctctcatccttaagaagaaggaggtgtag

SEQ ID NO: 111535 - DNA, 384 bp, synthetic construct
  misc_feature 1..384: note = Description of Artificial Sequence: Synthetic coding sequence
  source 1..384: mol_type = other DNA
atgcggggagccggggccatcctccgacccgcagctaggggagcgagggacctgaatcctagacgagacatctcaagctggctggcccagtggtttccaagaacacctgctcggagtgtggtggctctgaagactcccatcaaggtggagttggtggcaggtaaaacatatcgctggtgcgtatgtggacggtccaaaaagcagccgttttgtgacgggagccatttcttccagagaacagggttatccccactcaaattcaaggctcaggagacgaggatggtggccctgtgcacttgcaaagcaacgcaacggcccccatactgcgatggcactcatcgatcagagagagtgcagaaggctgaggtgggatcccccctatag

SEQ ID NO: 111536 - DNA, 1740 bp, synthetic construct
  misc_feature 1..1740: note = Description of Artificial Sequence: Synthetic coding sequence
  source 1..1740: mol_type = other DNA
atgcccagtgcctcctgcgatacactactggacgacatcgaggacatcgtatctcaggaggacagtaagcctcaggatcgccatttcgtccgcaaagatgtggttccaaaggttaggcggagaaacacacaaaagtacctccaggaggaggagaattctcccccatctgactctacaattccagggatccagaagatctggattcggacctggggttgtagtcacaacaactccgacggcgaatatatggccggacagttagcagcctacggctataaaattactgagaacgccagcgacgccgatttgtggctcctcaacagttgcaccgtgaagaaccccgccgaggaccacttccggaacagcattaagaaagctcaggaagagaacaaaaagatcgtgctggcaggatgtgtgccacaggcccagccgaggcaagactatctgaagggtttgtctattattggtgtccagcagatagatagggtggttgaggtcgtagaagaaaccataaaaggacacagcgtccgcctgttaggccaaaagaaagataacggccggaggctgggcggagctcggctggatctgccaaagatccgaaaaaacccattaatcgagattatttctatcaataccgggtgcctcaacgcctgcacatattgcaaaaccaaacacgcacggggcaacctcgcttcctatcctatcgatgagttggtagatagagctaaacagagcttccaggagggagtatgtgaaatttggcttacgtccgaggacacaggggcctatggacgtgacatcggtacaaatctacccaccctgctctggaaactggttgaagtgatccccgagggcgccatgctgcgtttgggaatgacaaaccccccctacatactcgaacacctggaagagatggcaaagatactcaaccatccccgagtatacgcattccttcatatccctgtacaatctgccagcgacagcgtactgatggaaatgaaaagggaatactgcgtggcagattttaaaagagtggtcgacttcctgaaggagaaagtgcccggtataacaattgctacagacatcatctgcggatttcctggagaaaccgatcaggattttcaggaaaccgtgaaacttgtagaagaatacaaatttccatccctgttcattaatcagttctatccccgacccggaacacccgcagccaaaatggaacaggtacccgctcaggtgaagaagcaaaggacgaaggacctctcaagagtgttccattcttactctccatatgaccataaaatcggcgagcggcagcaggtcctagtgaccgaggagagtttcgattccaaattttatgtggctcacaaccagttctacgagcaggtcctcgtgcctaaaaatcccgctttcatggggaaaatggttgaggttgacatttacgagtctggcaagcactttatgaaagggcaacctgtgtccgacgccaaagtgtatacacctagcatttctaaacctctggccaagggcgaggtttccggcctgactaaggatttccgtaacggtctcgggaaccagctgtctagcggatctcataccagcgctgcctcacagtgcgatagcgcctcttcaagaatggtcctccccatgccgaggctgcaccaagattgtgccctgcgaatgtctgtgggtcttgccctcctgggcctgctgtttgcgtttttcgtgaaggtttataactag

SEQ ID NO: 111537 - DNA, 1740 bp, synthetic construct
  misc_feature 1..1740: note = Description of Artificial Sequence: Synthetic coding sequence
  source 1..1740: mol_type = other DNA
atgcccagcgcctcatgcgacaccctgctggatgatatagaggacatcgtgtcacaagaggacagcaaaccacaggacagacacttcgtccggaaggacgtcgtgcccaaagttcggaggaggaatacccaaaaatatttgcaggaggaagagaactcacccccctctgattcgaccatccccggcatccagaagatatggattcgtacttggggctgtagtcataacaatagcgatggcgagtacatggcagggcaacttgcggcttatggctacaagatcactgagaacgcctccgatgccgacttatggctgctgaactcctgtactgtcaagaatcctgcggaagatcatttcaggaattcaattaagaaggcgcaggaggagaacaagaagatcgtgttggctgggtgtgttccacaggcccagcctcggcaagactatttgaagggcctgagtatcatcggtgttcagcagattgatcgggttgtcgaagtggtcgaagaaaccatcaagggacacagtgtgcgactgcttgggcagaaaaaagataacggccgccgcctcggcggtgccaggttggacttacctaagatacggaagaacccacttatcgaaattatatcaatcaatacaggatgtctgaacgcttgtacctattgcaagaccaagcatgctagggggaacctcgcaagctaccccatagatgaactggtcgacagagctaaacagagcttccaagagggagtctgcgagatttggttgacctccgaggatacaggggcttacggtcgcgatatcgggactaacctgcccacattgctatggaagctcgtggaggtgattcctgagggcgcaatgctgcgcctaggaatgacaaaccccccttatatcttggagcatctggaagaaatggccaagattcttaaccaccccagagtttatgcctttctccacattccagtgcagagtgcctctgacagcgtgttgatggagatgaaacgcgagtattgtgtcgctgacttcaaacgggtggtcgattttctgaaagaaaaggtgccagggattacaattgcgacagacatcatatgcggatttcccggggagacggaccaggattttcaggaaaccgtgaagttagttgaggagtataagttccctagtctgtttattaaccagttctacccgagacccgggacccctgcagctaagatggagcaggtgccggcccaggtgaagaagcagcggaccaaggacctttcacgggtctttcacagctactcaccatatgatcacaaaattggcgagcgccagcaagtgttggtgacagaggaaagcttcgattcgaaattctacgtcgcccataaccaattctacgaacaggtgctcgtgcccaaaaatcctgccttcatggggaagatggttgaggtggacatatatgagagtggtaagcactttatgaaggggcaaccggttagcgatgccaaggtgtacacacccagcatttcaaagcctctagcaaaaggcgaggtatccggcctcaccaaggactttcgaaacggactgggcaaccaattgagtagcggctcacacacctccgccgcatcacagtgcgattctgccagctcccgcatggtactgccaatgccccggctacaccaggactgtgctctcagaatgtccgtcggcctagccctcctgggtcttctgttcgcttttttcgtgaaggtgtataattag

SEQ ID NO: 111538 - DNA, 1467 bp, synthetic construct
  misc_feature 1..1467: note = Description of Artificial Sequence: Synthetic coding sequence
  source 1..1467: mol_type = other DNA
atgctatcaaggcgctacgaaggtgagattccgaaaaatatctgcaaacggaaaaagaccgtccaccaggttacagagaacgccagtgacgcggatctatggctactgaactcctgcaccgtcaagaacccggctgaggaccactttagaaatagtataaaaaaagcgcaagaagagaataaaaaaattgtgctagctggctgcgtaccacaggctcaaccccgccaggattacttgaaggggctgagtatcatcggtgtacagcagattgacagggtggtggaggtcgtagaggagacaatcaagggccatagcgttcggctgctgggacagaaaaaggataatgggcgtcgactggggggcgccaggctcgacctgcctaagatccgcaaaaatcccctgatcgaaattatctcaattaacaccggctgtctgaacgcctgcacatactgtaagacaaagcacgccagaggaaaccttgcttcttaccctatcgatgagctggtggacagggctaagcagagttttcaggagggcgtatgtgaaatttggctaacgagcgaagacactggtgcatacggccgtgatataggcaccaacctccccacactattatggaagctggttgaggtgataccagaaggcgccatgctgcggctgggcatgacaaaccctccctacattctcgagcacctcgaggaaatggctaagatcctgaatcacccccgtgtctatgccttcctgcacattcccgtccagtccgcctccgattctgtcctgatggaaatgaaacgagagtattgtgtggcagactttaagagggtagttgacttcctgaaagaaaaggttcccggcataacaattgccacagacatcatatgcggcttcccaggggagactgatcaagacttccaggaaaccgttaaattagttgaggaatacaagtttcccagtctgttcattaatcagttctatccgcggcccggaaccccggcagcaaagatggaacaagtgcccgcccaggtcataggtgagaggcagcaagtgttggtaaccgaagagagttttgattccaaattctacgttgcccataaccagttctatgagcaggtacttgtgccgaaaaaccccgccttcatggggaaaatggtggaagtggatatctacgaatccggcaagcatttcatgaagggacaaccggtttccgacgccaaagtgtataccccaagcatctcaaaacccttggccaaaggagaagtctccggtcttacaaaagactttaggaacggtctggggaaccagctaagttcagggagccacacatctgccgctagtcagtgcgatagcgcgtcatcccggatggtcctccccatgcctcggttacaccaagactgcgcactgcggatgtccgtgggtcttgcactcctcgggctcctttttgccttcttcgtgaaagtctacaattag

SEQ ID NO: 111539 - DNA, 4824 bp, synthetic construct
  misc_feature 1..4824: note = Description of Artificial Sequence: Synthetic coding sequence
  source 1..4824: mol_type = other DNA
atgatggacttagtcctggaggaggatgttacagtgcccggaactctgtcaggatgtagtggtctggttccctccgtacccgatgacctcgacggtattaatcctaacgcaggtcttggtaacgggctgctccctaacgtttccgaagagacggtgagccccacgcgtgctcggaacatgaaagacttcgagaatcaaatcaccgagttaaaaaaggaaaatttcaatctcaaactgcgaatctattttttggaagaaagaatgcagcaggagtttcatggtccaaccgagcatatttacaagacaaacatcgagttaaaggtggaagtggagagtctgaagcgtgaactgcaggaacgggaacaactcctaataaaggcctctaaggcggtcgaatcacttgccgaagctggaggttcagagatccagagagttaaagaagacgcaagaaagaaggtgcagcaggtcgaggacctgctgactaaacgtatcctattgttagaaaaggcaaaggatgttaccgccgcacaggccgaattggaaaaagccttcgcgggtactgaaactgaaaaggcattaagacttcgcttagagagcaagctgtctgagatgaagaagatgcatgagggtgatctggctatggctctggtgctggatgaaaaagatcggttgatcgaagagctcaagctcagcttaaaatctaaagaggcactcattcagtgtctgaaagaagagaagagtcaaatggcctgccctgacgaaaatgtctcctctggagagctgaggggtctctgtgccgccccaagagaggagaaagagcgagagacagaggctgcgcagatggaacatcaaaaggagcgcaattcttttgaagaaagaatccaggcactcgaggaggatcttcgagagaaggagcgggaaattgccaccgagaagaaaaattccctcaaaagagacaaagctatacaaggcttgacaatggccttaaaaagtaaagagaagaaggtggaggaactaaactctgagattgaaaaattaagcgccgcgtttgccaaagcaagggaagccctgcaaaaggcacagacacaggaattccagggctccgaagactatgaaacagccctgagcgggaaagaagcactgtcggcggcgcttcgatctcagaaccttactaagtcaacagagaatcacagactcaggaggtccataaaaaaaattactcaggaattgtccgacttgcagcaggagcgtgagcggcttgaaaaagatcttgaagaagcacaccgagaaaagtccaagggagactgcaccatacgcgatctgaggaacgaagttgaaaagctgcggaacgaagtaaacgaacgtgaaaaagccatggagaacaggtacaaaagccttcttagtgagagtaataagaagcttcacaaccaagaacaggtgattaaacatttgactgaaagtacaaaccaaaaggatgttctgctccagaaatttaacgagaaggacctggaagtgattcagcagaattgttacctcatggcagcagaagatctggagctccggtccgaggggttaatcaccgagaagtgctcgtctcagcaaccacccggctccaagacaatctttagtaaagagaagaaacaatccagcgactatgaggaactgatccaggtgctcaagaaggaacaagatatttacacccatctggttaagagtctgcaggagagcgattcaataaataacctgcaggcagagctcaataagattttcgcattaagaaaacagctggaacaggatgtgttgagctaccagaacctcagaaagacgctcgaagagcagatctccgaaattagaagacgagaggagagcttctctctgtactcggatcaaaccagctatctgtcaatctgtctcgaagagaacaataggttccaggtagagcactttagtcaggaagagcttaagaagaaggtctccgacctgattcagctcgtgaaagagttgtacaccgataatcaacatctcaaaaaaacaatatttgatttgtcttgtatggggtttcagggtaacggctttcctgaccggctggcatcgactgaacaaacagaggaagctaagaagtctaggctgcccatcctcattaaacctagcaggagccttggcaacatgtatcggctgccggctacccaggaggtcgtcactcagctccagagccagattcttgagctccagggagagctcaaggaattcaagacttgtaataaacagctgcatcagaaactgatcctggcagaagcagtcatggaagggcggcctaccccggacaaaacccttctgaatgcccagcctcccgtgggcgcggcctatcaagattcccctggcgaacagaagggaattaagactaccagttctgtctggagggacaaggagatggactcagaccagcagcgtagttacgaaatcgacagcgaaatctgcccgcccgatgatctcgcatctcttccaagctgtaaagaaaatcccgaggatgtgctttccccaacatctgtagccacttaccttagcagtaagagccagccctcggccaaggtgagcgtgatggggactgatcagagtgagtccattaacacatcaaacgaaacggagtacctcaagcagaaaatacatgacttggagacagagctcgagggctatcaaaactttatatttcagttacaaaagcacagccagtgcagtgaagccatcataacagttctttgcgggaccgagggggcacaggacggtttgagcaaacccaaaaatggaagcgatggggaagagatgacgttttcatcactccaccaggtgaggtacgtcaagcatgttaaaattttgggaccgcttgcgccggagatgatcgattcacgagtactggagaacctcaagcagcaattggaggagcaggagtataagctgcaaaaggaacagaatcttaacatgcagttgttctccgagattcacaacctccagaataaattccgagatctgtccccaccaagatatgacagcttagtgcaaagtcaagccagggagttatctctgcagagacagcaaatcaaggacggccacggcatctgtgtgatctccaggcaacacatgaacaccatgataaaggcattcgaggagctgctacaggctagcgatgtggattactgcgttgccgaggggtttcaagagcagctcaatcagtgtgccgagctcctcgagaagctggagaagctgtttctgaatggcaaatcagtgggggtcgagatgaacacgcaaaacgagctgatggagcgcatcgaagaggacaacctaacatatcagcatctcctgcctgagagcccagagccatctgcctctcacgctctgtctgactacgagacctcagagaagtcctttttctcccgggaccagaagcaggacaatgagacagaaaaaaccagcgtcatggtgaacagcttttcccaggatttgctcatggagcacatacaagagatacggacactacggaaacgactcgaagaatctatcaagactaacgaaaagctgcgaaaacaattagaaaggcaagggtctgaattcgttcagggttccactagtatcttcgcttctggcagtgaactgcatagctcacttaccagcgaaattcacttcctgcggaagcagaatcaggcactcaatgctatgctgataaaaggctctagggataagcagaaggaaaacgataagctgcgcgagagcctgtctaggaagactgtcagtctcgagcacttacagcgggagtatgcttcggtgaaggaagaaaacgaacgactgcaaaaagagggttctgagaaggagcgccacaaccagcagctaattcaagaagtccgttgcagtggtcaggagctctccagggttcaagaagaagtgaagttgcgacagcagttactctctcagaatgacaagttactccagtccctccgcgtggaactgaaggcttacgagaagctggacgaagagcaccgaaggctcagggaggcctcaggtgagggctggaagggacaggatccctttagagatctgcactccttgctgatggagatccaggcattgagattgcaacttgagaggtctatcgaaacttccagcactttacagtcacgactgaaagagcagctggcaagaggcgctgagaaggctcaggagggcgccttgacactggccgtgcaagctgtgtctatccctgaggtccccctccagcccgataagcatgacggagacaagtatccaatggaaagtgataacagcttcgatctcttcgacagttctcaggcagtcacacctaagtccgtttctgaaaccccacctctgtccggcaatgacacagatagcctcagctgtgactcagggtcaagtgcgacgagtaccccatgtgtctcgagactggttaccgggcaccatctgtgggcctctaaaaatggacggcatgtccttggcctgatcgaggattacgaggcactgctgaaacaaatcagccagggccagcgcctcctcgcggagatggacattcagacccaggaggcaccttccagcacatcccaggagcttggcaccaagggcccccatcctgccccactgtccaaatttgtgagttctgtatccacagcaaagctgacgttggaggaagcctatcgacgattaaaactcctgtggcgggtctcactgcctgaggatggacagtgccctcttcactgcgaacagattggcgagatgaaggcggaggttacaaagctgcacaagaagctcaaaaagtcatag

SEQ ID NO: 111540 - DNA, 5682 bp, synthetic construct
  misc_feature 1..5682: note = Description of Artificial Sequence: Synthetic coding sequence
  source 1..5682: mol_type = other DNA
atgatggacctggttcttgaagaggacgtcacggtgcccggcacactaagcggctgctccggactggtgccttcggtcccggacgacctggacggaatcaacccaaacgctgggctgggaaacggattactgccaaacgttagtgaggagacggtgtcacccacccgtgcaagaaatatgaaggacttcgaaaatcagatcactgaactgaagaaagagaatttcaatttaaaattgaggatctattttttagaggaacggatgcaacaggaatttcatggacccaccgaacatatctataaaacaaacatcgaactcaaggtcgaggtcgagagccttaaacgcgagttacaagaacgcgaacagctgctaattaaagcgtctaaagccgttgaatcacttgctgaggcgggtgggagtgaaatacagagggtcaaggaagacgcccgaaaaaaagtgcagcaagtcgaggatctgcttaccaagcgtattcttttgctggagaaggacgtcacggcagcccaggccgagctggaaaaggcctttgccggaacagagacagaaaaagcattacgtctgcggctcgagtccaagctttctgagatgaagaaaatgcacgagggcgaccttgccatggctctagtgcttgatgagaaggatagattaattgaagagctcaagctttccctcaagtccaaagaggcccttatccagtgcctcaaagaagaaaagagccagatggcttgtccagacgagaatgtgagctccggagaactgaggggactttgtgctgctcctagagaagagaaggaaagggagaccgaggccgcccagatggagcaccagaaggagagaaattcgttcgaagaacggatccaggccctggaggaggatctaagggaaaaagagcgcgaaatcgctacagaaaaaaagaattcactaaaacgcgacaaagctatccaagggttgaccatggctttgaaatctaaagagaagaaagtggaagagctgaactctgaaatagaaaaattgagcgcagcattcgccaaagccagggaggccctgcagaaggcacagacccaagagttccagggatcagaggattacgagacggctctgagcggaaaggaggcattgagcgctgcactgcggagccagaacctgaccaagtctacagaaaatcatcgactcagaagaagtattaaaaaaattacacaagaactgtccgatttacagcaagagagagaacgactagaaaaagacctggaagaagcccatagggagaagtcaaagggagattgcacaatacgcgaccttaggaatgaagtagagaagctgcgaaacgaggtgaacgaacgggagaaggcaatggaaaatcgttataagtcgcttctcagtgagtcaaataaaaagctacataatcaggaacaagtcatcaaacatctgaccgagtccacaaaccagaaggacgtcctcttgcaaaagtttaatgaaaaggatcttgaggtgatccagcaaaactgctacctgatggccgctgaagacctggaactgcgtagtgagggacttataacggagaaatgctccagccagcaaccacctggtagtaaaaccattttttccaaggaaaagaaacagagcagtgattacgaggaactaatccaggtattaaagaaagaacaagacatttatacccacctcgtgaaaagccttcaggaaagtgacagcatcaataatctccaagccgagctgaataagatatttgcccttcgcaagcagcttgaacaggatgtgctgagctaccaaaacctgcgcaagactctggaagagcagatttccgagatacgccgacgcgaagaggagtccttctctttatactctgaccaaacgtcttacctgtctatctgccttgaggagaataacaggttccaggtggaacacttttcccaagaagagcttaaaaagaaggtcagcgaccttatccagctcgtgaaagaactgtatactgacaatcagcacctgaagaagaccatttttgatcttagctgtatgggctttcaggggaacggattccccgaccgactggctagtaccgaacaaacagagctactggcatctaaagaggatgaagatacgatcaagatcggggaagatgacgagataaatttcctgtctgaccagcacctgcaacagagcaatgaaataatgaaagacctctccaaaggtggatgtaagaacggttacttgcgacacacagagtccaagatctccgactgcgatggagcacacgctcctggttgcttagaagaaggagcgtttatcaacctgctcgcccccctatttaatgagaaggcgaccttattgctggagtctcgaccggatctgttgaaggtggtgcgagaactgctgctcggtcagctgtttctcactgagcaggaggtctcaggcgaacacctcgacggaaaaactgaaaagaccccgaaacagaagggtgaactggtgcatttcgtccagactaatagtttttcaaagcctcatgacgagctgaaactgtcctgtgaagcccagctggtgaaggctggcgaggttcccaaagtggggctcaaagatgcctccgtgcagacagtcgccaccgagggagacctattgagatttaagcacgaggcaactcgcgaagcctgggaagaaaagcccatcaacacggctcttagtgcggagcatcgtccagagaacctgcacggtgttcccgggtggcaagccgcgttgctgagcttgccaggcatcacaaaccgggaggcaaaaaagagccgactgcctattcttatcaagccgtcgcgctccctcggcaatatgtatcgtctgcctgctacccaggaggttgtcactcagctgcagagccagattctggagctacagggcgaactcaaagagtttaaaacttgcaataaacaactgcaccagaagctgatccttgcagaggctgtgatggaagggcggcccactcctgacaagacattgttgaatgcccagccaccagtgggggcagcctatcaagactcgcctggcgaacagaaaggcattaaaaccacctcctcagtttggagagataaggaaatggatagcgatcagcagagatcctatgagattgattcagaaatatgcccacccgacgacctcgcctccctgccttcctgcaaggaaaatcccgaagatgtcctgtctccaacgagcgtggccacctatctcagtagcaaatctcagccatccgcaaaggtgtccgtgatggggacagatcagtccgaaagtatcaacacaagcaacgaaactgaatatctaaaacagaaaatccacgatctcgagactgagctcgaggggtatcagaacttcattttccagctgcagaaacattcccaatgcagcgaagcgatcatcacagtgttgtgtggaactgagggggcacaggatggcctctcgaagcctaaaaatggatcagacggagaggaaatgacctttagttctctgcaccaagttagatatgtgaaacacgtaaagatcttaggcccactcgctccagagatgatcgatagccgcgttttagaaaaccttaaacaacaactcgaggagcaggaatataagctgcaaaaggagcagaacctcaacatgcaactattttccgagattcataatctacagaataaattcagggatctgtcaccgcccagatacgattcgctggtccagtcacaagccagggaactgtccttacaaagacagcagattaaggatggacacggcatttgcgttatcagccgccaacacatgaataccatgattaaagccttcgaggaattactgcaagcttccgatgtggattactgtgtcgcagagggcttccaggagcagttaaatcaatgtgcagaactgctggagaagctggagaaactgttcctgaatggcaaaagcgtcggcgtcgagatgaacacccaaaacgaattaatggaacgcattgaggaagataacctgacgtaccagcatctgctgcctgagagccccgagcccagtgctagccatgctctatcagattatgaaacgagcgaaaaatctttcttttcccgtgatcagaagcaggataacgagactgaaaagacctctgtgatggtcaatagctttagccaagacctgctgatggaacatatccaggagatccgtactctcaggaagagattggaggagtctattaagactaacgagaaactgaggaaacagctggaaaggcaggggagtgaatttgttcaaggtagcacatcaatcttcgcatccggctctgaactgcacagctctcttaccagcgagatccacttcttgcgcaagcagaaccaggctttgaacgccatgctcatcaaaggcagccgcgataaacagaaagagaatgataagctgcgggagtctctgtctcgcaaaacagtctctctggagcatttgcagagagaatatgcctctgtcaaagaggaaaatgaaagactgcagaaggaaggatccgagaaagagcgtcacaatcaacaactgatccaagaagtgcggtgttcaggccaggaactgtcaagggtccaggaggaggtgaagctgcgccagcagcttctaagtcagaacgacaaactgctgcaatctcttcgggttgagctgaaggcctatgagaaactcgacgaggaacatagaaggctaagagaggcttcaggagaaggttggaagggccaagaccctttccgggacctgcattccctactgatggagatccaggccctacgcctgcaactagagaggtctattgaaacctcctccaccctgcagagtcggcttaaggagcagttggctcgcggggccgagaaagcccaggagggcgccttgacactcgccgtgcaggccgtgagtattcccgaagttccgttacagccagacaagcacgatggagataagtaccctatggaatctgacaactcattcgacttgtttgactcatctcaggctgttaccccaaaaagcgtgtccgagacaccgcccctgtccgggaacgacacagactctctgtcatgcgactctggctcttctgctacatccaccccttgtgtgtccagacttgtgactggtcatcacctctgggccagcaagaacggccgacacgtactgggtttaatagaagactatgaagctttgttaaagcagatatcccaggggcagcggctccttgcggaaatggatatccagacacaggaggcaccgagctctacgagccaggagctaggcactaagggccctcaccccgccccactatctaaattcgtaagctctgtaagcacagctaagctgactcttgaggaagcctatcgaaggcttaagcttctgtggcgggtgtcgctgccagaggatggacagtgccctctgcattgtgaacagataggcgagatgaaagccgaagtcactaagctccacaaaaagctctttgaacaagaaaagaagctgcagaataccatgaaattactgcaattgagcaagaggcaagagaaggtcatattcgatcagctagtggtgacccataagattctgcgaaaagcgcggggaaacctcgaactgcggcccggcggggcacacccggggacttgtagccctagcaggcccggaagctag

SEQ ID NO: 111541 - DNA, 5559 bp, synthetic construct
  misc_feature 1..5559: note = Description of Artificial Sequence: Synthetic coding sequence
  source 1..5559: mol_type = other DNA
atgatggatctggtgctcgaggaggacgttaccgtgcccggcacactgtccggctgcagcgggctggttccgtctgtacccgacgatctcgacgggattaacccgaacgccggtcttggcaatggccttctgccaaatgtgagcgaggagaccgttagccctacacgggccagaaacatgaaggattttgagaaccagattactgaattgaagaaagaaaactttaacttgaagctccggatttactttttggaggaaagaatgcaacaggagtttcatggccctactgagcacatttataagactaatatcgagttgaaagtcgaagtggaaagcctcaagcgtgaattgcaagagcgagagcaactgcttatcaaggccagcaaggctgtcgaatccctcgctgaggcgggcggtagcgagattcaaagagtcaaggaggacgctcggaaaaaagttcagcaggtggaagacctcctgacaaagagaattttattactcgagaaggatgtcactgccgcccaggctgagctggaaaaggcctttgccggcaccgagactgaaaaggccttgcgacttaggctagaatctaaactctccgagatgaaaaagatgcacgagggcgacctggcaatggcgctcgttctcgatgagaaagatcggttgatcgaggaactcaagctgagcttaaagtctaaggaggccctgatccaatgtctgaaggaggaaaagtcccagatggcatgtcctgacgaaaatgtctcaagcggcgaacttaggggcctctgtgccgccccaagggaggagaaggagagggagaccgaggctgctcagatggagcaccagaaggaacgcaactcttttgaggagcgtatccaggcactagaggaggacctgcgagaaaaggagagggaaattgcaacagagaagaagaacagcttaaaacgtgacaaggctatacaaggactcactatggcgctgaagtccaaggagaaaaaggtagaggagctcaacagcgagattgagaagctttccgcagccttcgcgaaggcacgagaggcacttcagaaggcacagacccaggaattccagggatctgaggattatgagactgccttaagcggcaaagaagctttatcagcagccctgcgcagtcagaatttaaccaagagcaccgagaaccacagacttcgcagatctattaagaagatcacccaggaactttctgatctgcagcaagagcgggagaggctcgagaaggatctggaagaagcccacagagagaagtccaaaggagactgtacaataagagatcttaggaatgaagtggagaaacttcgaaatgaggtgaacgagagggagaaggccatggaaaacaggtacaagagtttgctgagcgagagtaataagaaacttcataatcaagagcaagttattaagcacctgacagagtccactaatcaaaaagatgtgctccttcagaagttcaacgagaaagatctcgaagtcatacagcaaaactgctatctaatggcagccgaggatctggaactaaggtcagaaggattgatcactgagaaatgcagctcgcaacagcctcctggcagcaaaacaatcttctccaaagaaaagaaacagtcatctgattacgaggaactcatccaagtattgaaaaaggagcaggatatttatacgcacctggtcaaatccctccaggagagcgactccataaataaccttcaggcggaactcaacaagatcttcgccctcagaaagcagctggaacaagatgtcttgtcttaccagaatctccggaagacactggaagaacagatatccgagatacgtcggagggaggaggaatcattctccctctattctgatcaaaccagttacctcagcatttgtctggaagaaaacaacagatttcaggtagaacacttttctcaggaggaactaaagaaaaaagttagtgacttgatccaactcgtaaaggagttatacacagataaccagcacctcaagaagactatcttcgacttgtcttgcatgggttttcaaggcaacggtttccctgatcggctggccagtaccgagcagaccgaactgcttgcgtcaaaagaggatgaagacaccatcaaaataggggaagatgacgaaattaacttcttgtccgaccagcaccttcagcaatcaaacgaaatcatgaaggatctctcaaagggcgggtgcaaaaatggatatttgcgccataccgaatcaaaaatttcggattgtgacggcgctcatgccccggggtgtttggaagaaggggcgttcattaatttactcgctcccttgtttaatgaaaaagccaccctcctcttggaatctcgccctgatctcctgaaggtcgtcagggagctgttgctgggccaattgttcctgactgagcaggaggtgtcgggagaacacctggacgggaaaactgaaaaaaccccaaagcagaaaggcgaactggtccacttcgttcagaccaattctttctcaaagccgcacgacgagctgaaactttcctgcgaagctcaattagtgaaggcgggggaggtgcctaaggtgggcctcaaggacgcatccgtccagactgtcgctacggagggcgatttactcagattcaaacacgaggccactagagaggcatgggaagagaaaccaatcaataccgccctgtccgccgagcaccgcccggagaacctgcatggggtaccaggttggcaagcagccctcctctccctgccagggatcacaaaccgtgaggccaagaagtctcggctgcctatcctgattaagccttctagaagcctgggcaatatgtacagactacctgccactcaggaagtcgtgacacagctgcaatctcagatcctggaactgcagggggagctgaaagagttcaagacttgtaataagcagctgcaccagaagttaatcctggctgaggctgtgatggagggccgccccaccccagataagacactcttgaatgattctgaaatttgcccgcctgacgacttggcatctctgccttcttgcaaagagaacccagaagacgtcctcagcccaacctctgtcgctacttatctttcttccaagagccagccctccgcgaaggtatctgtaatgggtaccgatcagagtgagagcataaatacatcaaacgaaactgaatatctcaagcaaaagatccacgacctggagaccgaacttgaaggctaccaaaacttcatctttcagctccagaagcactcacaatgctccgaagccatcatcactgtactgtgcggaaccgagggcgcccaagatggactgagcaaacctaagaacggcagtgatggtgaagaaatgacattttccagtctgcatcaggtacggtatgtgaaacacgtaaagatcctggggcctctggcacccgagatgatcgacagccgcgtcctggagaatctgaagcagcaactggaagaacaggaatataagctgcagaaggagcagaacctgaatatgcagcttttcagcgagatacacaacctgcaaaacaagttccgggacctatcccctccgcgttacgactctctggtgcagtcccaggccagagaactgtctttgcagcgccagcagattaaggatggtcacgggatctgtgtgatcagtcggcagcatatgaacacaatgattaaagcatttgaggagttgctgcaggcttccgatgtggattactgcgtcgcagagggtttccaggagcaactgaaccagtgtgctgagctgctggagaagcttgaaaaattgtttctcaacggcaagtccgtaggcgtagagatgaacacgcaaaatgagttgatggagaggatcgaggaagataacctgacctatcagcaccttctaccagagtctccagagccatcagcgagccacgcgttgtctgattatgagacttctgaaaagtcatttttctcacgcgatcagaaacaggataatgagactgagaagacaagcgtgatggttaactccttttcacaggacctgctgatggagcatattcaggaaattcgaacacttcgcaagcgcctcgaggagtccattaaaactaacgagaagctgaggaaacagctggaaaggcagggctcggaatttgtacagggaagcaccagcattttcgcttctgggagcgagctgcactcatccctgacctcagaaattcacttcctgcgcaagcagaaccaggcactgaatgccatgttgataaagggaagcagggataagcagaaggagaacgacaagctccgcgaatccctctcaagaaagactgttagcctggaacatctccagcgcgaatacgcgagcgttaaagaagaaaacgagcgcctccaaaaggaggggtctgagaaggagaggcacaaccaacagctaatacaggaagttagatgcagtggacaggaactgagtcgcgtgcaggaggaggtcaagttacgccagcagctgctgagccagaacgacaaactgctgcagagcctcagagtcgaacttaaggcctatgaaaagcttgatgaggaacaccgacgtctccgcgaagcgtccggtgaaggctggaagggtcaggatccttttagggacctgcactccctcctgatggaaattcaagcgctgcgtctccaactcgagaggtcaatcgagacaagctcaacgctccagagtcgccttaaagagcagctggctaggggggctgagaaggcacaagagggagccttaaccctggctgttcaggcagtctcaatccctgaagtgccgttgcagcccgataagcacgatggggacaagtatcccatggagtcagataattcattcgaccttttcgattcttctcaggcagtgacacccaagagtgtgtctgagacacctcccctcagcgggaatgataccgacagcctgtcttgcgacagcgggtcaagcgccacctccactccatgtgtttcacgcctcgtgactggacatcatctgtgggcctctaaaaatggtcgccacgtgctcgggttgatcgaggattacgaagcgttgctcaagcaaatctctcaggggcagaggctcctagcagagatggacattcaaactcaggaagcgccaagtagcacaagccaggagctggggacaaaagggccgcacccggctccgctgtctaagtttgtgagcagcgtgagtacagccaagctgactctggaggaggcctataggcgcttaaagctgctgtggcgggtaagtctgcctgaggatggccagtgtccgctgcactgtgagcagataggtgagatgaaagccgaggtcacgaaattgcacaagaagctgtttgagcaggagaagaagttacagaataccatgaagcttctgcagctgagtaaacgacaggagaaagttatcttcgatcagttagtggtcactcacaagattctgaggaaagccaggggtaatctggagctacggcctggaggcgcccaccctggcacatgctccccgtcacggccagggagttag

SEQ ID NO: 111542 - DNA, 5445 bp, synthetic construct
  misc_feature 1..5445: note = Description of Artificial Sequence: Synthetic coding sequence
  source 1..5445: mol_type = other DNA
atgatggatctggtgctggaagaagacgtcactgtgcctggaacccttagcggctgttccggtctggtaccatccgttcctgacgacttggatgggatcaacccgaacgctggcctcgggaacggattactccctaacgtgagtgaggagaccgtttcgccaaccagggctcggaacatgaaggactttgaaaatcaaattacagagcttaagaaggagaattttaacctaaagctccgaatctactttctcgaagagagaatgcagcaggaattccacggacctactgagcatatttataagacaaacattgagcttaaggtggaggtcgaatcccttaagagagaactccaggaacgcgagcagctgcttattaaggcatctaaagcagtggagtctctggcagaagcagggggctctgaaatccagcgcgttaaggaagatgctcgaaaaaaagtacagcaggtagaggatttgctaacaaagaggatcttgttactggaaaaagacgtcacggccgcacaggctgagctcgagaaagctttcgctgggaccgagaccgaaaaggcccttaggctccggctggaatctaaactgtcagaaatgaaaaaaatgcacgagggggatctggcgatggcactggtgctggatgagaaggaccgcctcatcgaggaattgaaactgtctctgaaatcaaaggaagccttaattcagtgcctgaaagaggaaaagagccagatggcgtgcccagatgagaacgtgtcaagcggcgaactccgcggtctctgcgctgccccaagagaggaaaaagagcgcgagaccgaggctgcccagatggaacatcagaaggagaggaattctttcgaagagaggattcaagcactggaggaagacttgcgcgaaaaggagcgcgagatcgccactgaaaagaagaatagcctcaagcgcgacaaggcaattcaggggttgaccatggcccttaaatctaaagaaaagaaagtagaggagctaaattccgaaattgagaaattgtcagctgcatttgcgaaagcccgtgaagcacttcagaaggctcagacccaggagttccagggctcagaggattatgaaaccgcactttctggaaaggaggccttgagtgccgctttaaggagccagaaccttaccaagtccacggaaaaccataggctgcggagaagcattaaaaagatcacacaggagctgtcagacctccaacaggaacgagaaaggcttgagaaggacctggaggaagcccatcgggagaaaagtaaaggggattgtacaatacgggatctacgcaatgaggttgagaagctgcgcaacgaggtcaatgagcgggagaaggcaatggagaacagatacaagagcctgctgagcgaaagtaataaaaagctacacaaccaggagcaggttattaagcatctgactgaatccaccaatcagaaagacgttctactccaaaagttcaatgagaaggacctggaggtgatccagcagaattgttatttgatggctgccgaggacttggaattgcgctcggaaggtctgataacggagaagtgttcctctcaacagccccctggtagcaaaaccatctttagcaaggagaagaaacagagttccgactacgaggaactgattcaggtgctgaagaaggaacaggacatatacactcacctggtcaaatccttacaagagagtgattcaatcaacaatttacaggcagaactgaataagatttttgcccttcggaaacagctcgagcaggacgtattaagctatcaaaatctaagaaaaacccttgaagagcaaatcagtgagatccgacgtcgtgaggaagagagtttcagcctgtattctgaccaaacgtcctacctaagcatctgcctcgaggaaaataataggtttcaggtggagcacttctctcaagaggaacttaaaaaaaaagtttctgacttaatacagttggtcaaggagctgtacactgataaccaacatctgaagaagacaatctttgacctgtcatgtatggggttccagggtaacgggttccctgatagactggccagcaccgagcagacagaattgttggcttctaaggaagatgaggatactatcaaaatcggcgaagatgacgaaataaattttctgtccgaccagcacctccagcagtctaacgaaatcatgaaagatttgagcaagggtggatgtaagaacgggtacctcagacacaccgagtccaaaatatcggactgcgacggcgcacatgcccctgggtgtcttgaggagggagcctttatcaacctcttggccccgcttttcaacgaaaaggcaaccctattactggaatccagaccagatttgctcaaagtcgtcagagagctgctgctaggacaactgtttttgaccgagcaggaagtttctggagaacacctggacgggaagactgaaaagacacctaaacagaaaggcgagttggtgcatttcgtgcagacaaatagttttagtaagccccacgatgaactcaaactgtcatgcgaggctcaattagtcaaagccggcgaagtccccaaggtgggattgaaggatgcgtcggtgcagaccgtggccaccgaaggagacttactcagattcaagcacgaagcaacccgagaagcatgggaggagaaaccgatcaacaccgccctgtcagcagagcaccgtccagaaaacttgcacggagttcccggctggcaggccgcattactgtcactgcctggaataaccaatcgtgaggcaaagaagtctagattgcccatcctcataaaaccttccaggagtctgggcaacatgtaccggttgccggctacccaggaagtcgtaacacagctccagagccagatattggaactgcaaggggagttgaaggagtttaagacttgcaataagcagctccaccagaaacttattctagctgaggctgttatggaaggacgtccaacacctgataagacgcttctgaacgcccagcctcctgtgggtgcagcttaccaggatagccccggagagcagaagggcattaagaccacctccagtgtctggcgcgataaggagatggacagtgaccaacagaggagctacgagatagattccgagatatgtcctccagatgacttagcctctctgccctcttgtaaagagaaccccgaagatgtcctgagtccaacctcggtggcgacttatctaagttccaagagtcagccatccgcaaaggtttctgttatgggcaccgaccagtccgaaagtattaatacttctaatgaaacagaatacctcaaacagaagatccacgacctcgaaacggaactggagggctaccagaacttcatcttccaacttcaaaagcatagccagtgtagtgaggccattataactgtgttatgcggcacggagggggcccaggatggcctctctaagccaaaaaacggttctgacggcgaggagatgacctttagctcactgcatcaggtgcggtacgttaagcatgtcaaaatacttggcccgttggcacctgagatgatcgatagccgcgtgctggaaaatctgaagcagcagcttgaggaacaggaatataagcttcagaaggaacagaacctcaatatgcagctttttagcgagattcataaccttcaaaacaaatttagggatctttcccctcccagatatgattcactggtccagtcccaagcccgcgagttaagcttacaaaggcagcagataaaggacggtcacggcatttgcgtgatcagcagacagcacatgaataccatgattaaggccttcgaggaattgctccaggctagtgacgtggattattgcgttgccgaaggtttccaggagcagctgaaccagtgtgccgagttactcgagaaactggagaagctctttctcaatgggaaaagtgtcggagtggaaatgaacacccaaaacgagttgatggagcgcattgaagaggacaatctaacctaccaacatctgctgccggagagccccgagccttcagccagccatgcgctgagcgactacgagacatccgagaaatccttcttctctcgggaccagaagcaggacaacgaaacagagaagacctccgtgatggtgaattcgtttagtcaggacctcctcatggagcacatacaggaaatccgcaccttacgcaaaagattggaagagtcgattaagactaatgagaaactgagaaaacagttggaaaggcaggggtctgaattcgtgcaaggatcaaccagcatctttgctagtggctccgaactccactctagcctgacttccgagatccactttctgagaaagcagaatcaagccctgaacgccatgttgatcaaaggcagccgcgacaagcagaaggaaaacgataagttgagggaatccctctcccgcaagaccgtgagcctggaacacctccaaagagagtacgccagcgttaaagaggaaaatgagcgtcttcaaaaagaaggatccgaaaaggagcgacacaatcagcagctgatccaggaagttaggtgctctggccaagaactctctcgtgtgcaggaagaagtgaaacttcggcagcagttattgtcccagaatgataagcttttgcagtccctaagagtagagctgaaggcttacgaaaaactggacgaggaacacagaaggctacgggacggcgacaagtaccctatggaaagtgataattctttcgatctgtttgactcatctcaagccgtgactcccaaaagtgtttctgagacaccacccttatctgggaacgacaccgatagcttgtcctgtgattccggatctagcgccacgagtaccccctgtgtaagcaggctcgtaaccggccaccatctatgggcctccaagaacgggcgccatgtgcttggccttatagaagactatgaagccctgctgaagcagatatcccaaggccaaaggctccttgccgagatggatattcagacccaagaagctccgtcatccacctcacaagaactgggcaccaagggcccccacccggctcccttgtcaaaatttgtttcgtcagtgagcacagctaaacttacccttgaagaagcatatcggaggctgaagctcctgtggagagtatcactgccagaagatgggcaatgtcctctccattgcgaacaaattggcgaaatgaaggctgaagtgacaaaactgcacaagaagctgtttgaacaggaaaagaaactgcagaacacaatgaagctgctgcaactgtccaaaaggcaggagaaggtgatcttcgatcagctcgttgttacacataagatattgagaaaggcacgaggaaatctcgaactgcgacccggcggagctcacccgggtacgtgttctccatcccgcccaggttcttag

SEQ ID NO: 111543 - DNA, 5586 bp, synthetic construct
  misc_feature 1..5586: note = Description of Artificial Sequence: Synthetic coding sequence
  source 1..5586: mol_type = other DNA
atgatggaccttgtgcttgaggaggacgtcaccgtgcctggcacactgtcaggatgtagtggactcgtccctagcgtgccagacgacctcgacgggatcaatccaaacgctgggttgggcaacggcctgctgcctaacgtttccgaagaaaccgtttctcctaccagagcgaggaacatgaaagattttgagaatcagatcaccgaattgaaaaaagaaaatttcaacttgaagctacggatctatttcttagaggagcggatgcaacaggaattccatggcccaaccgaacacatatataagaccaacattgagctgaaagtagaagtcgagagcctgaagagggaactgcaggagagggaacagctacttattaaagctagcaaggcagtggagtcattggctgaggcaggtgggtctgaaattcagagggtcaaagaggacgctaggaagaaggtacagcaggtggaagatctcctgacgaaaaggatactgctgcttgaaaaagacgtgacagccgcccaggcagaactcgaaaaggcgtttgcagggacagaaaccgagaaggcactgcgcctgagactggagtccaagctgagtgagatgaaaaaaatgcacgagggagacctggcgatggctctcgtgttagatgagaaagacaggctcattgaggagctcaaactaagcctcaaaagtaaggaggcactgattcagtgccttaaagaagagaagtctcagatggcttgtcccgacgaaaacgtgtcttccggcgaactgcggggactgtgcgccgcaccacgggaggagaaggaacgagagactgaagccgctcaaatggaacaccagaaagaaagaaactccttcgaagagcggatccaagctctggaagaagaccttcgcgaaaaggagagggagatagcaacagagaagaaaaactctctaaagagggacaaggccatccaaggattaacaatggctcttaagtctaaggagaagaaggtcgaagagctgaattccgagatcgagaagctgtcagccgccttcgccaaagcaagggaggcccttcagaaggctcaaacccaggagtttcagggtagcgaagattatgaaactgccctgagtggaaaggaggccctgtccgctgctttgcgctcccaaaatcttaccaagagcaccgaaaatcaccggctcaggcggagtatcaagaaaatcactcaagaattgtcggacttgcaacaagagcgagaaaggctcgagaaagatctggaagaggcccatagagaaaagtccaaaggggactgtaccatccgggacttgcggaacgaggtggagaagctacgtaacgaggtaaatgaacgtgagaaggctatggagaacagatataaaagtctcctgagcgaatcaaacaaaaagcttcacaaccaagaacaggttatcaaacatttgacggaatcaaccaatcagaaggatgtgttgttgcagaaatttaacgagaaagacttggaagtgattcaacagaattgttatctcatggccgcagaagacctggaactccgctcagaagggctaataacagaaaagtgctcatcacagcagccccccggatccaaaacaatattctcaaaggagaagaagcaatcatctgactatgaggagctgatccaggtgctgaaaaaggaacaggatatctacacacatctagtaaaaagccttcaggaatccgattctatcaataacctgcaggcagaactgaataagatttttgccttgcggaagcagttggagcaggacgtgctgagctaccagaacctgcgcaaaaccttagaagagcagatcagcgaaatcagacgacgcgaggaggagtcattttctctgtattccgatcagacatcttacctctccatctgtctggaggagaacaaccggttccaggtggagcactttagtcaggaggagctgaaaaagaaggtgtcggacttgattcagcttgtgaaggagctgtacacagacaatcaacacctgaagaaaactattttcgatctttcatgcatggggtttcaggggaacgggttccccgatagactagccagcaccgagcaaaccgagattatgaaggatctgtctaaagggggttgcaaaaatggttatctaagacacacagagagcaagataagtgactgcgatggtgcccacgctcccggctgcctcgaggagggtgcattcataaacttgctggcccctttattcaacgagaaagctaccttgctgctcgagtcaagaccagacttacttaaagtcgtgcgagagctccttttgggacagttattcttgaccgaacaggaagtttcaggagagcatctagacggtaagaccgaaaagacacccaaacaaaagggggaactagtccactttgtgcagacgaatagtttctctaagccacatgatgagctgaagctcagctgtgaagctcagctggtgaaggccggcgaggtgcccaaagtggggctcaaggatgccagtgtgcagaccgtagcaactgaaggcgacctgctgcgatttaaacacgaggccacaagggaggcttgggaggagaaaccaattaacacagccctctcggccgaacacaggccagaaaacttgcacggtgtacctggctggcaggcagctctgctgagcctccctggcatcaccaatcgcgaagcaaagaagtcacgacttccaattctgattaaaccaagccgttcgttgggaaatatgtaccgcctgccagctacacaggaggtcgtgacccagcttcaaagccagatcctggaactgcagggtgaacttaaagaattcaagacatgcaacaaacagttgcaccagaagctgatccttgccgaggcagttatggagggccgacccacaccagataagacgctgctcaatgcccaaccacctgttggcgccgcatatcaggattccccaggggaacagaagggaattaaaacaacttcctccgtttggcgtgacaaggaaatggacagcgatcagcagagaagctatgaaatagacagtgaaatttgtccacctgacgacttagctagcctaccgtcttgcaaagaaaacccagaagatgttctcagtcctacgtctgtagcaacgtaccttagcagtaagagccagccctctgctaaagtgagcgtgatgggcactgaccagtctgagtcgattaacacctccaacgaaaccgaatacctgaagcagaagattcatgaccttgaaacagagcttgaaggctatcagaatttcatcttccaactgcagaaacactctcagtgttctgaggccattatcacagtgctctgtgggactgagggagcccaggacggcctgtcaaaacctaagaacgggagcgacggtgaagagatgaccttttcttctttgcatcaagtgcggtacgtcaagcacgtgaagatactcggacccctggcacccgagatgatagacagccgcgtgcttgaaaatctgaagcagcagctggaggaacaagagtataagctgcagaaagagcaaaatctcaacatgcagctgttttctgagatccacaacttgcagaacaagtttagagacctgtctcctcccaggtatgattctctggtgcagtctcaagccagggaactgagcttgcagcggcagcagatcaaagatgggcacggcatatgcgtgatatcccgtcagcacatgaacactatgatcaaggccttcgaggaacttctgcaggcctctgatgtagattactgtgttgctgaaggattccaggagcagctcaaccagtgtgccgaactcctggagaagctcgagaagctgttcctgaatggaaaaagtgtgggagtggagatgaatacccagaatgaactcatggaacggattgaagaggacaacctgacatatcagcatctcctgcctgagtctccggagccgtctgccagccacgcattgtcggactacgaaacctctgaaaagtcattcttcagccgcgaccagaagcaggataatgaaacagagaaaacctcagtgatggttaacagcttctcgcaggacctgctcatggaacacatacaggaaatacgtactctccgcaagcgtctcgaggagtccattaaaactaacgaaaagttgcgcaagcagctggaaagacaggggagtgaatttgtgcaggggagcacgagcattttcgctagtggttccgagctgcattcatctctaaccagcgaaatacatttcttgcgcaagcaaaaccaggccctgaacgcaatgctcatcaaggggagcagggacaagcaaaaggagaacgataaactacgagagagcctgtccaggaaaaccgtttcccttgagcacctacaacgtgagtacgctagtgttaaggaggaaaatgagcgtctgcagaaggaaggcagtgagaaggaaaggcataaccagcagcttatccaggaggtgcgctgtagcgggcaggaactctcgagggtgcaggaggaggtgaaactccgtcagcagctgttgtcacaaaatgataaattgctgcagtcgttgcgtgtggaactgaaagcgtatgagaagttagatgaggaacatcgccggctgcgagaggcttccggcgaggggtggaagggccaagacccatttagggatctccatagtctattgatggagatccaggctctgaggttacagctcgagcgctctatcgagacctcaagtaccctgcagtccaggctgaaggagcagttggccaggggagccgagaaggcgcaggagggtgcgttgaccctagccgtgcaagccgttagcatcccagaagtccctctgcagcccgataagcatgacggtgacaaataccctatggagagtgacaacagctttgacctgttcgattcatcgcaggccgttaccccgaaaagcgtcagcgaaactccccccttgtcaggaaacgacacagactctttatcctgtgactccgggtcatcagctactagcaccccctgtgtgtccagattggtgaccggccaccacttatgggcgagtaaaaacggaaggcacgtcctgggccttatcgaggattacgaagcactcctgaagcagatctcccaaggccaacggctgctcgccgaaatggacatccaaacccaggaagccccctcatccacatcacaggagctgggtacgaagggcccacatccagcacctctgagcaagttcgtgagttccgtgagcactgccaagttgacacttgaggaggcatacagacgactgaaactactgtggcgagtgtctctgcctgaggacggtcagtgtccattgcactgtgaacaaataggcgagatgaaagccgaagtcacaaagctccacaaaaagctttttgaacaggagaagaagctacagaatacaatgaaactgcttcaactctccaagcgccaggagaaggtcatttttgaccagctcgtagtaacccacaagattttgcgaaaagcacggggaaatctagagctgcgccccgggggtgcgcatcccggtacctgctccccttcccgccccggttcatag

SEQ ID NO: 111544 - DNA, 1521 bp, synthetic construct
  misc_feature 1..1521: note = Description of Artificial Sequence: Synthetic coding sequence
  source 1..1521: mol_type = other DNA
atggaggaccaccagcacgtacccatcgatatccagacctctaaactgctggactggttagtggaccgtcggcactgcagccttaagtggcagagtttagtacttacaatcagagaaaagatcaatgccgccattcaggacatgcccgagtctgaggagatcgctcaactccttagcggatcatacattcactactttcattgcctgaggatcctggatttgttgaagggcacagaggcttccaccaaaaacatcttcggccggtatagtagtcaacggatgaaagattggcaagagataatagcactttacgaaaaggacaacacatatcttgtggagctgtcctcactcctcgtaagaaacgtcaactatgagattcccagcctgaaaaaacagatcgcgaagtgtcagcagttgcagcaggaatatagccgtaaagaagaagagtgccaagccggcgcggctgagatgagggaacagttctaccatagctgtaagcaatatggcatcacaggagagaacgtgcgcggcgaactcctcgccttggtgaaggatttaccttcgcagttggccgagatcggggcggccgcccagcagtctctcggggaggcaattgacgtgtatcaggcctcagtgggcttcgtttgtgagagtcctacagaacaagtattgccaatgctcaggttcgtgcaaaagagaggaaacagtacagtctatgagtggcggactggcacggaaccctctgttgtcgagcgcccacacctggaggagttgcccgagcaggtggctgaggacgccatcgattggggggactttggcgtggaggcagttagcgagggaaccgattctggcatcagtgcagaagctgccggcatcgactggggcatctttcccgagtcagattctaaagaccctgggggggatggcatcgactggggtgatgacgcagtcgccttacagattacagtactagaagcagggacacaggcccccgagggagtagcacggggacctgatgctctcacactgttggagtacacggagacgcgaaatcagttcctggacgagctcatggagttggagatcttcctagcacagcgagccgtcgaactctccgaagaagcggacgtacttagtgtgtcccagtttcagctggccccggcaatcttgcagggacagacaaaggaaaagatggttaccatggtgagcgtgctggaggatctgatcggaaaattgacttctctgcagctgcagcacctgtttatgattttggcgagtccgcgctacgtcgatagagtgacagagtttctccaacagaagctgaaacagtctcagctgcttgccttaaagaaggaactaatggtacagaagcagcaagaagctcttgaggagcaggctgccttggagcctaagttggacctgcttcttgagaagacgaaggagttgcagaaattgatagaagcggacattagcaagaggtactccggacggcccgtcaacctgatgggcacgtccctgtag

SEQ ID NO: 111545 - DNA, 1596 bp, synthetic construct
  misc_feature 1..1596: note = Description of Artificial Sequence: Synthetic coding sequence
  source 1..1596: mol_type = other DNA
atgagacggcagtctatgactagtgcaactagagacctgcatactgctctggatggtaaggctactcagggcgggaaaaaggatcaccagcatgtacctattgacatccagacctcaaaactgctggattggttggtcgacaggagacactgctcactgaagtggcagagcttagtgctgacaatacgagaaaagattaatgctgccatccaggacatgccagagagcgaggagattgcccagctcttgtccgggagctatattcactattttcattgcttgcgcatcttagatcttttaaaaggcacagaagcaagtacaaaaaacatcttcggacgctattcatctcagaggatgaaagactggcaagagattattgcgctgtacgaaaaagataacacataccttgtggagctctctagcctcctggtgcggaatgtcaactatgaaatccctagtttgaaaaaacagatcgccaaatgtcaacagttgcagcaggagtactcaaggaaagaggaggaatgccaggccggggcggccgaaatgcgggagcagttttaccactcttgtaaacagtatggcattactggcgaaaatgtcagaggggaactcctcgccctggtgaaagaccttcctagccagctggccgagatcggtgctgctgcccagcagagccttggagaggcaatcgacgtgtatcaggcctcagtcggatttgtgtgtgagtcgcctaccgagcaagtgctgcctatgttgcgcttcgtacagaaaagaggaaattcaaccgtctacgaatggcggactggcaccgagcccagtgtggtcgagagacctcatctggaggaactccctgaacaagtggctgaagacgccatcgactggggtgacttcggggtggaagcagtgtcagagggaacggactctggcatttccgcagaagcagccggaattgactgggggatcttcccggagtcggacagtaaggatcctggtggggatggcattgactggggtgatgatgcagtcgccttgcaaattacagtcctggaagctggtacccaagctccagagggcgtggctcgcggccctgacgcactgacactactggaatacaccgagaccaggaaccagttcctggacgagctgatggagctcgaaattttcctggctcagagggccgtggagctgagcgaagaggccgatgtgctctccgtctctcaatttcagctggcacctgccattctgcaggggcagaccaaagaaaagatggtgaccatggtatcggtgctggaagatctgatcgggaagctcaccagcctccaattacagcatctcttcatgatactggcctctccgcggtacgtggaccgcgtgaccgagtttctacagcaaaaattaaagcaatcgcaactgttagcacttaaaaaagagctgatggtgcagaaacagcaggaggccctggaggagcaggctgctctggaacctaagttagatttactgttggagaagactaaagaactgcagaagctcattgaagcagatatctccaagaggtacagtgggcgaccagtcaacctgatgggcacttcactatag

SEQ ID NO: 111546 - DNA, 3864 bp, synthetic construct
  misc_feature 1..3864: note = Description of Artificial Sequence: Synthetic coding sequence
  source 1..3864: mol_type = other DNA
atgcaccccgatctcgggcccctctgtaccctgttatacgtcaccctgacaattctctgctcatcagtgagttctgatttagccccttattttaccagtgaacctctgtccgcagttcagaaacttggcgggccagtggttctgcattgttcggcacaacctgtgacaacccgaatttcttggctgcataacgggaaaactctcgatggcaatctggagcatgtgaagattcatcaggggaccctgacaatcctgtccttgaatagctctctattagggtattaccaatgcttggctaataacagtatcggcgctattgtctccgggcccgccactgtgtccgtggccgtgttgggtgatttcggttcatctactaaacatgttattacagcagaagaaaaatctgccggattcattggatgcagggtgccagaatccaatcctaaggcggaagtcaggtataaaatccggggcaaatggttggagcactctaccgaaaactaccttatcctaccttccgggaacctgcagattctcaacgtatctttagaggataaagggtcttacaaatgtgccgcctacaaccccgtcacccaccagctaaaggttgaacccattgggaggaagctccttgtgtccagaccctcctcagacgatgtccatatcctgcatcctactcatagccaggcacttgcagtgctaagcaggagcccagtcacactcgaatgtgtggtttccggtgtcccagccccacaggtgtattggctgaaagatggccaggacatcgcaccaggcagtaactggcggagattatacagtcatctggctaccgacagtgtggaccctgccgatagcgggaactatagctgcatggctggaaacaaaagtggcgacgtcaaatatgtgacttacatggtcaatgtcctcgagcatgcaagtatctccaagggattgcaggatcaaattgtcagtttgggggcaacggttcacttcacttgcgacgtgcacggtaaccccgctcccaactgtacctggtttcacaatgcgcaacctattcatccttccgctcgtcacttgaccgctggtaatggcctcaagatcagcggagtcacagtggaagatgtcggcatgtaccagtgtgttgctgacaacggtattggcttcatgcactcaactggacggcttgagattgagaatgacggtggcttcaagcctgtaataatcaccgcccctgtgagcgctaaagtggctgatggcgactttgtgaccctgtcatgtaatgcctccgggttgccagtgccagtaatacgctggtatgactcccatggcttaattacgtctcacccatcccaggtgctacggtctaagtcaagaaagagtcaactttccagaccagaggggcttaacctggaaccagtttatttcgtactcagccaagcaggcgctagctctcttcacatccaagcggtgacgcaggagcatgcgggcaaatatatctgcgaggctgcaaacgaacatggtaccacgcaggccgaagcctcactgatggtggtgcctttcgaaacgaataccaaggctgaaactgttacccttcccgacgcagcacaaaacgatgacagatccaagcgggatgggtcggaaaccggcctgctgtccagcttcccagtcaaagtgcatccttccgccgtcgaatccgcacccgagaagaatgcaagtgggatctctgtgcctgacgccccaattattttatcacccccacagacccatacacctgacacctacaacctggtgtggcgtgctgggaaagatggcggactgccgataaacgcatactttgtgaagtatcgtaagcttgacgatggcgtagggatgctcgggtcctggcacacggtgcgcgtccctgggagcgaaaacgagttacacttggctgagcttgagcccagttctctgtatgaagtgctgatggtcgcccggtcagccgctggagagggccaacctgcaatgcttacattcagaaccagtaaggagaagacagcttcgtccaaaaatacccaagccagcagccctccagttgggattcctaagtatccagtggtgtcagaggctgccaacaacaactttggagtggtgctgaccgactcctctcggcattcgggcgtgccagaagcccctgataggcctacaatatccaccgcgtcggagacatcagtgtatgtgacgtggatcccacgggccaatggcggcagtcccataaccgcatttaaagtcgaatacaaaaggatgaggacttctaattggctggtggccgctgaggatatccccccttcaaaactctctgtagaagtgagaagtctggaacctggctcaacctataaatttcgcgtgattgctattaaccactacggcgaaagttttaggtctagcgctagcaggccgtaccaagttgttggatttcctaacagatttagttccagaccaattacaggacctcacatcgcatataccgaggccgtgtctgacacccagatcatgctgaaatggacttacataccctcttcaaataataatacaccaatccaggggttttatatctattacaggcctaccgacagcgataacgacagtgattataaacgggacgtcgtggaaggatccaagcagtggcacatgattggccatctgcagcccgagacatcctacgatattaagatgcagtgctttaatgaaggaggagagagtgaattcagtaacgtcatgatttgtgagacaaaggttaagagagtgcctggcgcatccgagtatcccgtcaaagaccttagcaccccccctaacagtctgggaagcggcggcaacgtaggccccgcaactagtcctgctaggtccagcgatatgctttacttaattgtcgggtgcgtgcttggggtcatggttctgatacttatggtctttatagctatgtgcttgtggaagaatcggcagcagaacacaattcagaagtacgatcccccgggctatctttaccaggggtcagacatgaatggtcagatggtcgactacacaaccttatcaggcgccagtcagatcaatggaaatgtccacggcggcttcttgaccaatggggggctctcgtccggttattcccacctgcatcacaaagtgcccaacgccgtcaacggtattgtgaacgggtcccttaacggaggcctgtactccggccatagcaatagccttacacggacacatgtagactttgagcatccccaccacctggtcaacggaggggggatgtacacagcagtccctcagatcgaccccctggaatgtgtgaactgtagaaattgccgcaacaataatcgctgtttcactaaaactaactccaccttttccagttctcctcccccagtagtgcccgttgtggccccttacccccaggacggcctagaaatgaaacccttatcgcatgtgaaggttccggtatgtttgacctcagccgttccggattgtggacaactccccgaagagagtgtcaaggacaatgtggagccagttcctacccagcgaacttgttgtcaggacatagtgaatgatgtgtcctcggacggcagcgaggatccagccgagttttctcggggtcaggagggcatgatcaacctgcgcattcctgatcacctccagctcgcaaaatcatgtgtgtgggagggcgactcatgtgcccattctgagacagagatcaacatcgtgtcatggaatgccctgattttgcctcccgtcccagagggatgtgcagaaaagaccatgtggagcccccccggaatccctctggattctccaacagaagtactgcagcagccgagggagacctag

SEQ ID NO: 111547 - DNA, 3795 bp, synthetic construct
  misc_feature 1..3795: note = Description of Artificial Sequence: Synthetic coding sequence
  source 1..3795: mol_type = other DNA
atgcaccccgacctgggacctctgtgcactctactatacgtgactcttaccatcctttgctcgagcgtgtcttcggacctggcgccatattttacttccgaaccactctctgccgtgcagaaacttggagggcctgttgttctgcattgctccgcacagcctgtgacaactcgcatcagttggctgcacaatggaaaaactctcgatggtaacctggaacacgtaaaaattcaccaaggaacattgactatcttatccttaaactcctctctactgggctactaccaatgtctagcaaataatagcatcggagcaatagtctcaggaccggcgactgtctctgtagccgtcctcggagattttggtagttcaacaaagcacgtgataaccgcagaagagaagtctgcaggcttcatcggatgtcgggtcccggaatctaatcccaaggccgaggtgaggtacaagattcgcggcaaatggttagagcacagtaccgagaattatctgatcctcccaagcgggaacttgcagatccttaatgtctcactggaggataagggctcttataagtgcgccgcttacaatcccgtcacccaccagctgaaagtcgaacccatcgggagaaaactgctagtcagccgcccttcgagcgacgacgttcacatacttcacccaacacattctcaggccttggctgtcctgtctagaagtccagtcacgctggagtgcgttgtgtctggggtacctgcaccccaggtatattggctcaaggacggccaagatatcgcacccggttctaactggcgtcggctgtatagccatttggcaacggatagcgtggacccagcagactccggaaactattcgtgtatggcgggaaataagtcgggagacgtcaaatacgtgacgtacatggtaaacgtgctcgaacacgctagtatttccaaggggcttcaggatcaaattgttagtcttggtgctacagttcactttacctgtgacgttcacggcaacccagcccccaactgcacctggttccataacgcccaacccatccacccgtccgccaggcaccttactgcgggcaacggtctgaaaatctcaggcgtgacagtggaggacgtaggcatgtatcagtgcgtcgccgataatgggattggctttatgcattctacgggtcgactcgagatagaaaatgatggtgggttcaaacctgtgatcataacggcgcctgtgagtgcaaaagttgccgacggtgatttcgtgacattgtcctgcaacgccagcggcctgcctgttcctgtgatccgctggtacgattctcatggcctgattacgtcccatccatctcaagtgcttaggtccaaatctcgcaagagccagctgtctcgtcccgaggggcttaacttggaacctgtgtactttgtgctgtcccaggccggcgcttcctctctccacatccaggccgtaacgcaggaacatgccgggaaatacatctgtgaggccgctaacgaacatggaactactcaagccgaagctagcctgatggtagtcccattcgaaacaaacactaaggccgaaactgttaccctgcccgatgcggcccagaacgatgacagatctaagcgcgacgggtcagagactggcctcctgtctagctttcccgttaaggtccacccatcagctgttgagagtgctcccgagaaaaatgcttccggaatatctgtgcctgatgctccaatcattctgtccccccctcaaacacacaccccagacacctataatctcgtgtggagagccggaaaggatggcgggctcccaataaatgcttactttgttaagtatcgcaagcttgacgatggagtcggtatgctcggcagctggcacacagtgagagtacctggatctgagaacgagctgcatctggccgagctagagcctagctccttatacgaggttctaatggtagctcgctcggctgctggagaagggcagcccgcaatgctgacctttcgtacatccaaagagaaaactgcttcaagcaaaaacacccaggccagctccccgcctgtgggaatacccaagtacccggtcgttagcgaagctgccaacaataattttggcgtcgtactgacggacagcagtaggcactcaggagtcccagaggccccagacagaccgactatctccacggctagcgaaaccagtgtttatgtgacttggattccacgagcgaatggagggtccccaattacagcatttaaggtggagtataagcgcatgcgcacctctaattggttagttgctgcagaggacatcccaccctctaaactgagcgttgaggtaagaagtcttgaaccaggctcaacatacaaattcagggtaatcgcgatcaaccattatggcgagtctttcagatcctctgcaagtcgcccctatcaggtcgttggcttccccaacagattttcctcgagacctataaccggaccccacatagcctatactgaggctgtgtctgacacccagatcatgctcaaatggacatacattccctctagcaacaataacacccccatacagggcttttacatatattatcgacctactgactctgataacgactccgactataagcgtgacgtagtggaaggaagtaaacagtggcacatgataggacacctgcagcctgaaaccagctatgacatcaaaatgcaatgtttcaacgagggaggtgagagtgagttctccaacgtgatgatctgcgaaaccaaagtcaaaagggtgcccggagcttcagaatatcccgtgaaggatctgtccacccccccaaactcattgggatccggaggcaatgtcggacccgctacctctcccgcgagaagttccgacatgctgtacctgatcgtagggtgcgtactgggcgtgatggtcctgattctgatggtcttcatcgcaatgtgtctgtggaaaaacagacagcagaacaccatacagaagtacgatccgccaggctacctgtaccagggatcagatatgaacggccagatggtagactacactaccctaagtggggctagccagatcaacggtaatgtccatggaggcttcttaactaacggtggactgagttctggctatagccacctccaccataaagtgcccaatgccgtgaatggaatcgtcaatggaagcctcaacggcggtctctactctggccactctaacagcctgacccggactcacgtcgatttcgagcatccacaccatcttgttaatggaggtggcatgtacactgctgttccccagattgatcccctggaatgtgtgaattgtaggaattgcaggaacaacaacagatgttttaccaagacaaattccacattttcttcatctccaccaccagtggtaccagttgtggcgccatatccgcaggacggtttggagatgaagcccctgtctcacgtgaaagtgcccgtgtgcctcacatccgccgtgcctgattgcggtcaactcccagaagagtccgtgaaggataacgtagaacctgtccccacacagagaacctgttgtcaagacatagtgaacgatgtgtcaagcgatgggtccgaggatcctgcggaatttagccggggagattcctgcgcccatagtgaaacagaaatcaatatcgtatcttggaacgctctgatcctcccacctgtcccggagggttgtgccgaaaaaaccatgtggagcccccccggtatcccattggattcaccaaccgaggtgcttcagcaaccaagggagacatag

SEQ ID NO: 111548 - DNA, 1386 bp, synthetic construct
  misc_feature 1..1386: note = Description of Artificial Sequence: Synthetic coding sequence
  source 1..1386: mol_type = other DNA
atgcttgagctccgacaccgggggtcgtgcccagggccaagagaggctgtcagccctccccaccgcgaaggtgaggcagctggaggagaccacgagactgagtcgacatccgacaaggagactgatatcgacgacagatatggagatttagactctcggaccgattccgatattccggaaatcccaccctcttccgaccggactcccgagatcctaaaaaaggctcttagtgggttatctagtcgatggaagaactggtggattagaggtatcctcacgctgactatgattagcctgttcttcctgattatttacatgggctcttttatgctcatgcttcttgtcctgggaattcaggtgaagtgtttccatgaaattataacaatcggatatcgagtttatcatagctacgatctgccctggttccgcaccctgagctggtatttcttattatgtgtgaactatttcttttatggggagacagtggctgactacttcgcgacttttgtgcagagggaagaacaactgcagttcctgattcgatatcatagatttatctctttcgcgctctacttggccggcttttgcatgttcgtcctcagcctagtgaagaagcattatagattacaattctacatgtttgcgtggactcacgtgacccttctgatcactgtgacccagtcacacctggttatacagaacttatttgagggcatgatctggtttcttgtgccaatcagcagtgtaatttgcaatgacataactgcttatctgttcggatttttttttggaaggacacctttgattaaattgtcaccaaagaagacatgggaaggcttcataggaggtttcttcagcacagtggtcttcggttttatagccgcatacgtgctgtccaaataccaatatttcgtgtgtccggtggagtaccggagcgacgtgaactcttttgtgaccgagtgtgagccgtccgagctgtttcagctccaaacctatagcctgcctccattcctgaaagccgtgctacggcaagagcgtgttagtttataccctttccaaatccactcaatcgcgctgtctactttcgcctcacttatcggccccttcggaggctttttcgcgagtgggttcaaacgagcgttcaagattaaagattttgccaacaccatcccaggtcacgggggtattatggatcgatttgactgccagtatctgatggccacgttcgttcatgtgtacatcacatcttttatacgggggcccaatccttccaaagtgctccagcaactgcttgtcctccagcccgagcagcagttgaacatctacaagacattaaaaactcacttaattgagaagggcatactgcagccaacactaaaagtgtag

SEQ ID NO: 111549 - DNA, 978 bp, synthetic construct
  misc_feature 1..978: note = Description of Artificial Sequence: Synthetic coding sequence
  source 1..978: mol_type = other DNA
atgtcacgtctgaggcacccccggacacgctactttctcctctgtgtcaactactttttttacggtgagactgtcacagactactttttcaccctggtccagcgagaagaaccgttacgcattcttagcaaataccatcgattcattagcttcacactctacctgatcggcttttgcatgttcgtcctgtcattagtaaagaagcattaccggctgcagttctacatgtttggctggacgcacgttaccctgctcattgtggttacgcagagtcacctggtgattcataacctgtttgaaggcatgatctggtttatcgtgccaatctcatgcgtcatctgcaatgatatcatggcgtatatgttcggattcttctttggcagaactcccctgataaagctgtcaccaaagaagacctgggaagggttcattgggggcttctttgcgactgtggtgtttggtctcctccttagttatgtgatgagcggttatcggtgctttgtatgtcccgttgagtataataacgacaccaattcttttaccgttgactgcgaaccctcagacctgtttcgtttgcaagagtataatatccccggggtgatccagagcgtgattggctggaagaccgtccggatgtaccccttccagattcactccatagccctgtccactttcgcttcactgatcgggccttttggaggatttttcgcttctgggttcaaaagagccttcaagatcaaggatttcgccaacacaattcctgggcacggtggaatcatggacagattcgactgccagtatttaatggccacgttcgtgaatgtgtacatcgcgagctttatccgtggtcccaatcccagcaaattgattcagcagttcttgaccctgagaccagaccagcagctccacatcttcaacaccctgaggagccatttaatcgataaggggatgctgacttccaccactgaggatgaatag

SEQ ID NO: 111550 - DNA, 753 bp, synthetic construct
  misc_feature 1..753: note = Description of Artificial Sequence: Synthetic coding sequence
  source 1..753: mol_type = other DNA
atgagccggttacgtcatcccagaactcggtggaaaaattggtgggtcagaggcattctaaccctggccatgatcgctttcttctttataattatctacctaggacctatggtgctcatgattatcgtgatgtgtgtgcagattaaatgtttccacgagataatcacgatcggatacaacgtatatcattcctatgacctgccatggtttagaaccctaagctggtacttcttgctctgcgtgaattacttcttctacggggaaactgttacggactacttctttacattagtgcagcgcgaagaaccattacggatcttatcaaagtaccaccgatttataagctttactctctacttgattggtttctgtatgttcgttctctccttggtgaaaaaacattaccgactccagttctacatgttcggctggacccacgtcaccctattaatcgtcgtgacccagtctcaccttgtgatccataatttgttcgaaggcatgatctggttcatcgtgcccatttcttgcgttatctgtaatgacatcatggcatacatgttcgggttttttttcggacggactccactcattaagctgagtccaaaaaaaacttgggaagggtttattggtggctttttcgctactgtcgtttttggccttctgctctcttacgtgatgtcgggctaccgttgcttcgtgtgtccagtggaatataataacgatacaaattctttcacagtagattgtgaatag

SEQ ID NO: 111551 - DNA, 1338 bp, synthetic construct
  misc_feature 1..1338: note = Description of Artificial Sequence: Synthetic coding sequence
  source 1..1338: mol_type = other DNA
atgacagaactgcggcaacgggttgctcacgagccagtggccccgccagaggacaaggagtcagagagtgaagctaaagtggatggagaaaccgccagcgatagcgagagtagggctgaatccgcacccttgcctgtgtccgcagacgatactcctgaggtactgaacagggccctgtctaacttgtcttccagatggaagaactggtgggtacgcggcattctcacactggccatgattgccttcttcttcatcatcatatatcttggaccaatggttttgatgattatcgtcatgtgcgtgcaaatcaaatgctttcacgaaattataaccattgggtataacgtgtatcactcttacgatctcccttggttccgaaccctgagttggtacttcttgctctgcgtaaactacttcttctacggtgagaccgtgacagattacttttttaccctcgttcagagggaggagcccttacggattctcagtaagtaccataggtttatttccttcacactctaccttattggcttttgtatgtttgtgctgagtctggtcaaaaaacactaccgacttcaattctacatgttcggatggactcacgtgaccctgctgatagtggtaactcagtctcacttggtcattcacaatctcttcgaaggcatgatctggtttattgtgccaatttcttgcgtaatctgtaatgatattatggcctacatgttcggatttttttttggccggacgcccttaattaaactgtcaccgaaaaaaacctgggaaggctttataggcggatttttcgctaccgtcgtcttcggactgctactcagctatgttatgtcaggctaccgatgctttgtgtgtcccgtagaatataataacgacaccaacagttttacagtggattgtgagcccagcgacctgtttcggttgcaggaatataacatacctggagtcatccagtccgttattggctggaaaactgtgcggatgtatcctttccaaattcactcgatagccttaagcacattcgccagcctgatcgggccctttggggggtttttcgcaagcggatttaagagagcatttaagattaaagatttcgccaacactatccccggccatggcggcatcatggatcgctttgactgccagtaccttatggccacattcgtgaatgtctacatagcgagtttcatccgcggacccaacccatccaagctcatccagcagttcctgactctgcggccagaccagcagttgcatatcttcaataccctgagatctcacctcattgataagggcatgctgacaagcaccaccgaggacgagtag

SEQ ID NO: 111552 - DNA, 648 bp, synthetic construct
  misc_feature 1..648: note = Description of Artificial Sequence: Synthetic coding sequence
  source 1..648: mol_type = other DNA
atgtttgttctaagtctggtgaaaaaacattacaggctgcaattctacatgtttggatggacacacgtgaccctgctcatcgttgtgactcagagtcatctagtcatacataatctgttcgaggggatgatatggttcatcgtgcctatcagttgtgtgatttgtaacgatattatggcgtatatgtttggtttctttttcggacgaacgcccctcatcaagctgtcaccaaagaaaacctgggagggatttattggcggattttttgctactgtcgtgttcgggttgttaaagacggtgcggatgtacccattccaaatacacagtatcgctttgagcacgttcgcatctttaatcgggcctttcggcggattcttcgcctcggggttcaagagagcttttaaaatcaaagattttgccaacactattcctggtcatggagggattatggaccgattcgactgccagtacttgatggccactttcgtcaacgtgtatattgctagctttatcagggggccaaatccttctaaactcatccaacagtttctcacattgcggcctgatcagcagctgcacatcttcaacaccctgcggtcacatctgatcgataaggggatgctgacttccactacagaagacgagtag

SEQ ID NO: 111553 - DNA, 3675 bp, synthetic construct
  misc_feature 1..3675: note = Description of Artificial Sequence: Synthetic coding sequence
  source 1..3675: mol_type = other DNA
atggagcccctgctgctgggtcgcgggctgattgtctacctcatgttccttttgttgaagttctccaaggctattgagataccaagctcagtgcagcaggtacccaccatcatcaaacaaagcaaggtgcaagtagccttcccattcgacgaatactttcagatcgagtgcgaggcgaaggggaatcccgaacctacctttagttggactaaagatggtaatcctttttatttcacagaccatcgtatcattccttccaacaatagtggcactttccggatccctaatgaaggtcatatcagccactttcagggcaagtaccggtgctttgcttcgaacaaactgggtatagctatgagtgaagagatcgagttcatcgttcctagtgtccccaaattccctaaagagaagattgacccattggaggtggaggagggtgatccaatcgtgctgccctgtaatcccccaaaaggacttccgcccctgcacatctactggatgaacattgaacttgagcacattgaacaggacgagagggtgtacatgagtcaaaaaggtgatctctacttcgccaacgtggaagaaaaggatagtaggaacgactattgctgtttcgctgccttcccccggttgcgaacaatcgtgcagaaaatgcctatgaagctgacggttaactctctcaaacacgccaatgacagcagcagtagtactgagattggctcaaaggctaactcaattaagcagcgcaaaccgaagttacttcttccgccgacagagtcagggtccgaatcctctattacaatactcaagggcgaaatcctcctcctggaatgtttcgccgagggccttccaaccccacaagtagactggaacaagattgggggtgatttgcctaagggaagggaaactaaagagaactacgggaagacccttaagattgagaacgtgtcttatcaggataagggcaactacagatgcacagcatccaatttcctgggcacagccacccacgacttccatgtcatcgtggaggagccgcccaggtggaccaagaagccacagagcgcagtctacagcacagggagcaatggaatccttctctgtgaagccgagggtgagccgcagcccacaattaaatggcgagtcaatggaagcccggttgataatcatccttttgcgggagatgtggtatttcccagggagatttccttcactaatctgcagcccaaccacaccgccgtgtaccagtgtgaggccagtaatgtgcacggcacaattttagccaacgccaatatagacgtggttgatgttaggcctctgattcagacaaaggacggagaaaactacgcaacagtggtggggtacagtgcctttctccactgcgagtttttcgccagccctgaggccgtcgtctcatggcaaaaggtcgaggaagtgaagcctcttgagggccgcaggtaccacatctatgagaatggcacgttgcagattaaccgcactacagaggaggatgccgggtcatacagctgctgggtcgagaacgctattggcaagacagccgtgactgcgaacctggatatacgcaacgccaccaaactgagagtcagtcctaagaacccgcgcattccaaaactccatatgctcgaactacactgtgagagcaaatgcgatagccatttgaaacactcactcaagctttcatggtccaaagatggagaggcttttgaaattaacggcaccgaggacgggcggataatcatcgacggtgcgaatcttacgatctccaacgttaccctcgaagaccagggtatttactgttgctccgcgcacaccgcgctggacagtgcagctgatattacacaagtgacagtcctagacgtgcctgatcctcccgagaacctgcacctgagtgagcggcagaatagaagtgtacgcctgacatgggaagccggcgcggatcataacagcaacatatccgaatatatagtcgagttcgaaggcaataaggaagagccgggaagatgggaagagctgacacgcgtgcagggaaagaagaccacagtcatattacctctcgccccgtttgtgagataccagttccgcgtgatcgccgtgaatgaagtaggccgctcccagccttcccagccttccgatcatcacgagaccccaccagcagcccccgatcgaaatcctcaaaacatcagggtgcaagcgagtcagcctaaagagatgattatcaagtgggagccactcaaatctatggagcagaacggcccgggcctagagtatcgtgtgacctggaagccccagggtgcgcctgttgagtgggaggaggaaacagttacaaatcatactcttcgggtgatgacgcccgcagtatatgctccatatgatgtaaaagtacaggcaattaaccaactgggttcaggccccgacccacaatcagtcactctctactcaggcgaagactatccggacacggcccccgtcatccacggcgtagacgtgataaacagcacactcgttaaggtcacgtggtcgacagttcctaaagacagggtccacgggagactcaaggggtatcagatcaattggtggaaaactaaatctctcctggacggaagaacccaccccaaagaggtgaatatactgaggttctccggccagaggaactctggtatggtcccgagcctggacgccttctctgagttccatcttaccgtactggcgtacaatagtaaaggtgcgggccctgaaagtgaaccatatatctttcaaactccggagggagtgccggagcagcccacatttctcaaagttatcaaagtggataaagacactgcaaccttgtcatggggtctccctaaaaagttgaacggcaatcttactggttatctactccaataccagataataaatgatacctatgaaataggagagctgaacgacatcaatatcacgacgcccagcaagccctcgtggcacctttctaacctcaatgctacaaccaaatacaagttctatcttagggcttgtacgagccaggggtgtggcaaacctataacggaggagtcctctacactgggcgagggttctaagggcatcggcaaaatatctggcgtcaatctgacgcagaagacacacccgatagaagttttcgagcctggcgctgagcacatcgtcaggctcatgactaaaaattggggcgacaatgacagcatctttcaggatgtgattgagaccaggggtcgtgaatacgctggactttatgacgacatttccacacagggttggttcatcggactgatgtgcgccatcgccctcctcaccttgctgttgctgaccgtatgctttgtcaagaggaataggggcggcaagtactccgtgaaggaaaaagaagacctgcaccccgatcccgaaatccagtccgtgaaagacgagaccttcggggaatatagcgattccgatgaaaaacccctgaaaggaagcttgcggagcctaaaccgggacatgcagcccacggaaagcgccgattcactggtcgagtacggggagggagaccacggactgttctcagaagatggctcgttcattggcgcttacgctggatctaaggagaaaggatcggtggaatccaatggcagctctacggccacctttcctcttcgcgcatag

SEQ ID NO: 111554 - DNA, 3627 bp, synthetic construct
  misc_feature 1..3627: note = Description of Artificial Sequence: Synthetic coding sequence
  source 1..3627: mol_type = other DNA
atggaaccactgctgctcggccgaggcctgattgtgtacttaatgttcttgctgctgaagttctccaaggctattgagattccctccagcgtgcaacaggtaccaactatcattaaacaatcgaaagtgcaggtagcttttcccttcgacgaatattttcagatcgaatgtgaggctaaggggaacccagagcccaccttttcttggactaaggatggaaatccattctatttcactgatcacaggattatcccatccaataattcaggaacttttaggatacctaatgagggccacattagtcatttccagggaaagtacaggtgctttgcctctaataagctgggcatcgcaatgtccgaagagatcgagttcatcgtcccatccgtgccaaagttccccaaagagaaaatcgatccattggaagttgaagaaggggaccccatcgttcttccgtgtaaccccccaaagggcctgccacctctgcatatctactggatgaatattgaattggaacacattgagcaggacgagagagtttacatgtcccagaagggcgacttgtacttcgccaacgtggaggaaaaagactctcgaaacgattattgctgctttgcagcctttcctcgactcagaaccatcgtccagaaaatgccgatgaagctgacggtcaactcaagcaactctatcaaacagcgaaagcctaagcttttgctcccacctacagagagtgggagcgaaagttccataaccatcctcaagggcgagattctgctgctggagtgttttgctgaaggcttacctacaccccaagtggattggaataaaatcggcggagatctcccaaagggccgagaaaccaaagaaaattacgggaagacactgaaaattgaaaacgtgtcttaccaagacaaaggaaactaccggtgtaccgctagtaattttctaggaactgcaacccacgattttcatgtgatcgtcgaggagccccctagatggaccaagaaacctcagtctgctgtgtacagcactgggtctaacgggatcctgctgtgcgaagccgaaggcgagcctcagccaacgattaagtggagggttaatggcagccctgtggacaatcaccccttcgccggggatgtggtctttccacgggaaatctcatttaccaatctgcaaccaaaccacacggcagtgtaccagtgtgaagcttcaaatgtgcacggtaccatcctcgcgaatgcaaatatcgatgtcgtggatgtaaggccgcttattcagactaaagacggggagaattatgcaaccgtcgtcggctattccgcttttttgcactgcgaattttttgcttcgcctgaggctgttgttagttggcaaaaggtggaggaagtaaagcctttggaaggtagacgataccatatatacgaaaacggaaccctgcagattaaccggacaacagaagaagacgcaggctcttattcctgttgggtggagaacgccatcgggaaaacagctgtgactgcgaatctggatatccggaacgctaccaagctcagagtgtctcctaaaaaccctagaatccctaagcttcacatgcttgagctgcactgcgaatcgaaatgcgacagtcatctgaaacatagtctgaaactgagttggagtaaggacggggaggcgtttgagatcaacgggaccgaagatggccggataatcattgatggcgcaaatttgactataagtaacgtgacgctggaagatcaaggcatctactgctgctcggcgcatacagccctggattctgccgccgacattactcaggtaacagtgctcgacgtacctgatcccccagaaaatttacatctaagtgagcgccagaatagaagtgtcaggttgacttgggaagcgggagcggaccacaacagtaatataagcgagtatatagtcgagtttgagggtaataaagaagagcccgggcgctgggaggaactgacaagagtgcagggcaagaagacaactgttattttgcctctggcacccttcgtgcgctatcagttccgggttatagcagtgaatgaggtgggaaggtcccaacctagtcagccttcggatcaccacgagacccctcctgccgcccccgaccggaatccccagaacattcgggtgcaggctagtcagcccaaggagatgatcatcaaatgggagccccttaaatctatggagcagaatggccccgggctggaatatagagtgacttggaagccacagggggcaccagtcgagtgggaggaggaaactgtcacaaaccacacgctgcgtgttatgacaccagctgtgtacgccccatacgacgtgaaggtgcaggcaattaaccagctcggctccggtccagacccacagtccgtgacgctatacagcggggaagattatccagacacagcccccgtcatccatggcgttgatgtgataaacagcactttggtcaaggtcacctggtccaccgtcccaaaagaccgggttcatggacggttgaaggggtaccagatcaattggtggaaaaccaaatctctcttggacggacggacacacccgaaggaagtaaacatcctgagattcagtggacagcgtaactccgggatggttccctctctggacgcattttcagagttccacctgactgtgcttgcctacaattcaaaaggtgccgggccagagagcgaaccttacatcttccagacacctgagggagtgccggagcagccaacatttctgaaagttatcaaagtggataaggacacagctaccctgtcatggggattgcccaagaaactaaatggtaatctcactggatacctgctgcagtaccaaattatcaacgatacttacgagatcggggagctgaacgacatcaatattactaccccctccaagccaagttggcacctgagcaacctgaacgccaccaccaagtacaagttttatctgcgcgcttgcacttcacaaggctgtgggaagcctattactgaggagagttccacactcggggagggctccaagggcatcggaaagatatccggagtgaacctgacgcagaagacccacccgatcgaggtgtttgagcccggagccgagcacatcgtgcgtcttatgaccaagaactggggcgacaatgacagtatctttcaggatgttattgaaacacgcggcagagagtatgccggcctgtatgatgacatctcaactcagggatggttcattggactcatgtgtgcaattgccctgcttacgctgctgttgctgaccgtatgcttcgtgaaacgaaaccgtggaggcaaatacagcgtaaaagagaaagaggacctacatcccgatcctgagatccagagtgttaaggatgaaaccttcggagagtactctgattcagatgagaagccactgaagggaagtctgaggagtttgaatagagacatgcagcccacagagtccgctgattctttggtcgaatatggggagggcgatcatgggcttttcagcgaagacggctcttttattggagcttacgctggctctaaagagaaaggtagcgtcgaatccaatggtagcagtaccgcaacctttccactcagggcctag

SEQ ID NO: 111555 - DNA, 291 bp, synthetic construct
  misc_feature 1..291: note = Description of Artificial Sequence: Synthetic coding sequence
  source 1..291: mol_type = other DNA
atggagcctcttctactgggcaggggactgatcgtatatctcatgttcttgctgcttaagttttctaaggccattgaaatcccttctagtgtacaacaggtgccaaccattatcaagcagtccaaagtgcaagttgcgttcccattcgatgaatacttccagattgaatgtgaggcaaaaggaaatccagagcccactttctcttggactaaggacggcaatcccttttactttacggaccacaggatcatcccatctaataattccgggactttccgaatccccaattag

SEQ ID NO: 111556 - DNA, 201 bp, synthetic construct
  misc_feature 1..201: note = Description of Artificial Sequence: Synthetic coding sequence
  source 1..201: mol_type = other DNA
atggagccactgctcctgggtcgagggctgatagtgtacttaatgttcttactactgaaattttctaaggccatagagattccaagctccgttcagcaagtccccactatcattaagcaaagtaaagtccaggtagctttcccctttgatgaatatttccagattgaatgtgaagccaagggaaatcctgaacctacctag

SEQ ID NO: 111557 - DNA, 546 bp, synthetic construct
  misc_feature 1..546: note = Description of Artificial Sequence: Synthetic coding sequence
  source 1..546: mol_type = other DNA
atggaaccccttttgctgggaagggggctgatagtttacttaatgttcctactgcttaagtttagcaaagccattgagatacccagctctgttcaacaggtacctaccatcattaagcagagcaaggtgcaggttgcatttccttttgatgaatattttcagatagagtgcgaagccaagggcaaccccgagccaacattctcatggactaaggacggaaatccgttttatttcacagaccaccggataatcccttctaacaactctggcacatttagaattcccaacgaaggccacatttctcacttccagggtaagtaccgctgtttcgcttctaataagcttggtatagcgatgagcgaagaaatcgaattcatcgtgccatccgttcctaaattcccgaaggagaaaatcgaccctcttgaggtggaagagggagatcccatagtgctgccgtgtaatccgccgaaggggctcccaccactgcacatctactggatgaacattgaacttgaacacatcgagcaggacgagagggtctactag

SEQ ID NO: 111558 - DNA, 954 bp, synthetic construct
  misc_feature 1..954: note = Description of Artificial Sequence: Synthetic coding sequence
  source 1..954: mol_type = other DNA
tagagcgtgacactgtatagtggagaggactaccccgacacggctccagtgatccatggcgttgacgtaatcaacagcactctagtcaaagtgacctggagcaccgtgccaaaagatcgcgtgcatggtcgactcaaaggataccagattaactggtggaaaactaaatctctactggatgggcgcactcaccctaaagaggtgaatattttaaggttctctgggcagaggaattccggcatggtcccatctctggacgctttctccgagttccatttaacagtcctcgcatataactccaaaggggccggtcctgaatccgagccttatatctttcagacccctgaaggcgtacctgagcagcctacatttttgaaagtcatcaaagtcgataaggatacagctactctatcatggggtttaccaaagaagctcaacggaaacctgactgggtatctcctgcagtatcagatcataaatgatacctacgagattggggagctaaatgatataaatatcacgacaccctcaaagccttcttggcacctttcaaacctcaatgcaaccaccaagtacaagttttaccttagggcatgtacctcgcagggttgtggtaaaccaatcacggaggagagctctaccttgggagaaggtaaatacgcagggctgtacgatgatatatcaacacaaggttggttcatcggactcatgtgtgctatcgcattactcaccctgttgctgctgaccgtatgttttgtgaaacgtaatagaggaggtaaatatagtgttaaagaaaaggaggacctgcaccccgaccctgaaatacagagcgtgaaggacgaaacctttggggaatattccgacagtgacgaaaagcccttgaaaggctcactacgctccctcaacagggacatgcagccaacggagtccgcagacagtcttgtcgaatattag

SEQ ID NO: 111559 - DNA, 258 bp, synthetic construct
  misc_feature 1..258: note = Description of Artificial Sequence: Synthetic coding sequence
  source 1..258: mol_type = other DNA
atggaacccctgctcttgggaaggggcctaattgtctacttaatgttccttctgcttaagtttagcaaggctatcgagattccctcaagtgtgcagcaggtcccaacaatcatcaagcagtctaaggtccaagtcgcgtttccattcgatgagtatttccaaatcgagtgcgaggcgaaagggaatccagagcctacctttagttggaccaaggatggtaacccattttacttcaccgatcataggattatcccttag

SEQ ID NO: 111560 - DNA, 450 bp, synthetic construct
  misc_feature 1..450: note = Description of Artificial Sequence: Synthetic coding sequence
  source 1..450: mol_type = other DNA
atggaaagtcgcgggaagtcagcttctagccctaaacctgataccaaggtacctcaggtgactactgaggccaaagttccaccagccgccgatggcaaggcccctctcaccaaaccctccaaaaaagaagctccagccgagaagcagcaacctcccgccgctcctactaccgcacccgcaaagaagacttctgctaaggccgaccccgcgttgctcaacaatcattctaaccttaaacctgctcccaccgtgccgagctccccagacgctacgccggagcctaaggggcccggagatggcgccgaggaggatgaagccgcgtcaggtggccccggcggacggggcccatggagctgcgaaaactttaaccctctgctggtggctggcggggttgcagtggccgcaattgcccttatacttggagtggccttcctggtccgcaaaaagtag

SEQ ID NO: 111561 - DNA, 627 bp, synthetic construct
  misc_feature 1..627: note = Description of Artificial Sequence: Synthetic coding sequence
  source 1..627: mol_type = other DNA
atgtcctccgaaccacctcccccttaccctgggggtccgacagcccctctcttggaggagaagtctggcgcgccccccacgccaggcaggagctcaccagcggtgatgcagcctccccccggtatgcccctgcccccagcagacatagggccccccccctacgaaccaccagggcacccaatgccacagcccggcttcatccctccccacatgagcgccgatggcacatatatgccccctggattttaccctccccctgggccccatcctcctatggggtattatcctcctggaccatacactccaggaccttatcctggacctgggggccacaccgctactgtgcttgtgccatccggagctgctacaaccgtcactgttctgcaaggcgaaatctttgagggcgcccccgtacaaactgtttgcccccattgtcagcaggccatcaccactaaaataagctacgagatcgggctgatgaacttcgtgctcggcttcttctgctgctttatggggtgtgatctgggctgttgcttaatcccatgcctcattaacgattttaaggacgtcacacatacttgtccctcctgcaaggcatacatctacacttacaaacgcctgtgttag

SEQ ID NO: 111562 - DNA, 456 bp, synthetic construct
  misc_feature 1..456: note = Description of Artificial Sequence: Synthetic coding sequence
  source 1..456: mol_type = other DNA
atggcggccagcacttcaatggtacccgtggctgtgaccgccgctgtggcacccgtcctctccatcaacagcgactttagtgacctgcgcgagataaagaaacagttactgctgatcgccggccttacccgggagcgtgggctgcttcacagctctaagtggtctgcggagctcgctttctccctacctgctttgcctttggcagagcttcagcccccaccaccaatcactgaggaggacgcccaagatatggatgcttacacgctggcaaaagcctactttgatgtcaaggagtatgacagggctgcccactttttgcacggttgcaactctaaaaaagcatacttcctctatatgtactcaagatatctggtgcgggccatcttgaaatgccactccgctttttcagagacaagcatattccgaactaacggcaaggttaagtcctttaagtag

SEQ ID NO: 111563 - DNA, 1794 bp, synthetic construct
  misc_feature 1..1794: note = Description of Artificial Sequence: Synthetic coding sequence
  source 1..1794: mol_type = other DNA
atggcagcctctacttccatggtccctgtggctgtgacagccgcggtggctcccgtgctttcaatcaactctgatttttccgatctgagggagatcaaaaaacagctgctgcttatcgccgggctgactagggagagaggcttgcttcatagcagcaagtggtccgctgagctagccttcagcctccctgccttaccattggccgagttacagcctcccccccccattacggaggaggacgctcaggacatggacgcatacacattagctaaagcgtatttcgatgtgaaggagtatgaccgtgccgcacacttcttgcatggctgcaatagcaagaaggcatattttttgtacatgtatagccgctatctgtcaggagagaaaaaaaaagacgacgagacagtcgacagcctggggcctctggaaaagggacaggtcaaaaacgaagcactccgggaactgagagtggagctgtctaagaagcatcaggcacgggagttggatggctttggcctgtatctttatggggtcgtgctgcggaaactggatctggtgaaagaggctattgacgtatttgtggaggctacccacgtccttccgcttcactggggagcctggttagagctatgtaatctgataaccgacaaagagatgcttaaatttctttccctgccagatacctggatgaaggagttctttctcgcacatatctatactgagttgcagctgattgaggaggcactccagaaataccaaaacttgatcgacgtgggtttttctaagtcttcttatatcgtgagtcagattgcagtcgcttatcataacatccgagatattgataaggctctaagcatctttaatgaactgcgtaagcaggatccctatcgcatcgagaacatggatacattctcaaaccttctgtacgtgcggtccatgaagtctgagttgtcctatcttgcccacaatctgtgcgagattgacaaatatagagttgaaacttgctgtgttatcggtaactactactccttgagaagtcagcatgagaaagctgccttgtacttccagagggccctgaagctgaatccgagatacctcggggcctggaccctcatgggccatgagtacatggaaatgaagaacacttctgctgccatccaggcctaccggcacgccatcgaggtgaacaaaagagactaccgagcgtggtacggcttgggccagacctacgagatcctgaagatgccattttattgcttatattattataggagggcacaccagttgcggcctaacgactctagaatgttggttgctttgggcgaatgttatgagaagttgaaccagttggtcgaggccaaaaagtgctactggagggcgtacgcagtgggggatgttgagaaaatggcactggtcaagcttgcgaagctgcacgaacagctcacggaatcagagcaggcagcacagtgctacattaagtatatccaggacatttacagctgcggtgagatagtggagcacctggaagagagcaccgcttttagatacctggcccagtactatttcaaatgcaagctgtgggatgaagcctcaacatgtgcgcagaagtgttgcgcctttaatgacacccgagaggagggcaaagccctgttgcgccagatcctccagttgcgtaatcagggcgaaactcctactactgaggttcctgcgccatttttcttacccgccagcttaagcgccaataataccccgacccggagggtgtcaccactgaatctgtctagcgttaccccgtag

SEQ ID NO: 111564 - DNA, 1575 bp, synthetic construct
  misc_feature 1..1575: note = Description of Artificial Sequence: Synthetic coding sequence
  source 1..1575: mol_type = other DNA
atggagctcggaccagaaccaccccatcggcggcggcttctgttcgcatgctctcccccgcctgcctcacagcctgttgtgaaggctttgttcggggcaagcgcagcaggcggcctgtcacctgtaacaaatctaaccgtgacgatggaccagttacagggcctggggagcgactatgaacagccactcgaagtaaagaacaattcaaacctgcagcgcatgggatcctccgagtccacagattcaggtttctgtctggatagccccggccctctggattccaaagaaaatctcgaaaaccccatgaggcgaatccattccctgccccaaaagttgctgggatgctcacctgccctgaaaagatcccattccgactcattggatcatgatatctttcagctcatcgacccagatgagaataaggaaaacgaggccttcgaatttaaaaagccagtaaggcctgttagccgtggatgccttcactctcatggactgcaggaggggaaagacctcttcacccagcgtcaaaatagcgcgcctgcccggatgctctcgagcaacgagcgggatagcagcgaacccgggaatttcattccccttttcactcctcagtccccagttacagctaccctgtcagacgaggacgacggcttcgtggacctgcttgacggcgagaacctcaaaaacgaggaggagactccatcctgtatggcctcattgtggacagccccgttagtcatgcgcaccactaatctggacaatcggtgtaaattgtttgacagcccctctctttgcagttcttctactcgatctgtgttgaagcggccagaacgctctcaggaggagtcacctcccggtagtactaagaggcggaagagcatgtcgggcgcaagtccaaaagagtccaccaaccctgagaaggcacacgaaacacttcaccagagcttgtccttagcctcctccccaaagggtacaatcgagaatatcctggataatgatccgcgggatctcattggcgatttctccaaggggtacctgttccacacggtcgctggaaaacaccaggaccttaaatatatttctccggaaatcatggctagcgtgctcaatgggaaattcgctaatctgataaaggaatttgtgattatcgactgcagatacccgtatgagtacgaaggcggacacatcaaaggtgccgttaacctccatatggaggaggaggttgaagactttttgctaaagaagcctatcgtcccaaccgatggcaaaagggtgattgtcgtgtttcattgcgaattcagctctgagcgaggcccacgtatgtgccgctatgtgcgagaaagggacagattaggcaatgagtatccaaaactccactatcccgagttgtatgtgctgaagggaggctataaagaattctttatgaagtgccagtcttattgcgagcctccctcttacaggccgatgcaccacgaagactttaaagaggacctcaagaagtttcggaccaaaagtaggacatgggcgggagagaagtcaaagagagagatgtattctaggctgaaaaagctgtag

SEQ ID NO: 111565 - DNA, 1455 bp, synthetic construct
  misc_feature 1..1455: note = Description of Artificial Sequence: Synthetic coding sequence
  source 1..1455: mol_type = other DNA
atggagctgggtcccgagcctccgcaccgaagaaggctgctgtttgcgtgttcgcctccacccgctagccagccagtggtgaaagctctgtttggcgcttctgccgcgggtggtctgtcaccggtcaccaatcttacagtcactatggatcagctgcaagggctgggatctgactatgagcaacccctcgaggtgaaaaataactccaacctgcagaggatggggtcttccgagtctactgacagcggcttctgcctggactctcctggtcctctggattctaaagaaaacctggagaatccgatgagaagaatccacagtctgccacaaaagttgctgggatgttcgcccgccttgaagaggagccactcagactcgcttgaccacgatattttccagctgatcgaccctgacgagaacaaggaaaatctgagctccaatgagagagactcctcagaaccaggcaatttcatcccactatttacccctcaaagcccagtaacagccacacttagtgatgaagatgatggcttcgtggacctgttggacggtgaaaatttgaaaaatgaggaggagaccccgtcttgcatggcaagcttatggactgctcctcttgtgatgaggacaacaaacctggataatcggtgtaaacttttcgatagcccatccctttgctcttctagtactaggagcgtgctaaagcggcccgaaagaagccaggaggaatcccccccgggctctactaagcggcggaagtcaatgtccggcgctagccctaaagagagtacaaaccctgagaaagctcatgaaacactgcatcagagtctgtccctcgcctccagtcctaaggggacgattgagaacatcctcgacaacgatccgcgcgatcttatcggtgacttcagcaaaggctatcttttccatactgttgccgggaagcaccaggatttaaaatatatcagcccagagattatggcatcagtgctgaacgggaaatttgctaaccttattaaggagttcgttattattgattgtcggtatccttacgaatacgagggaggacacataaaaggcgctgtaaatctccacatggaagaggaggtggaagattttctgttaaaaaagcccattgtacccaccgacgggaaaagagtgatcgtcgtctttcattgtgaattcagttctgagcgcggccctagaatgtgtcgttatgttagagaaagggataggttgggcaacgagtatccgaaattgcactaccctgagttatacgtgcttaaagggggttataaagaattctttatgaagtgccaatcctactgcgagccaccttcctacagacctatgcatcatgaggattttaaagaagacttgaagaagtttcggaccaagtcaagaacttgggccggtgaaaagtcaaaacgggagatgtacagtcggttaaaaaagctctag

SEQ ID NO: 111566 - DNA, 432 bp, synthetic construct
  misc_feature 1..432: note = Description of Artificial Sequence: Synthetic coding sequence
  source 1..432: mol_type = other DNA
atggagctgggaccagagccaccacaccggagacgcctgctgtttgcatgctcgcccccccctgcaagccagcccgtggtgaaggcactgttcggcgctagcgctgccggcgggctctcgcctgtcaccaatttgacagtgactatggaccaactacaagggttgggaagtgactacgaacagccacttgaggtcaagaacaacagtaatctgcagcgcatgggtagctctgaatctactgactctggtttttgtttagatagtcctggccctctggattctaaagagaatctcgagaaccctatgaggcggattcacagcctccctcagaagttgctgggttgctctccggcgctcaaacggagtcactccgattccttggaccatgatatattccagctgattgacccggatgagaataaggagaactag

SEQ ID NO: 111567 - DNA, 1743 bp, synthetic construct
  misc_feature 1..1743: note = Description of Artificial Sequence: Synthetic coding sequence
  source 1..1743: mol_type = other DNA
atggaagtaccacaacccgagcctgcacccggcagcgctctatctcccgcaggagtgtgcggcggcgcacagaggcccggccacttgcccggccttctcctcggaagtcacggtttacttgggtcaccagttcgagcggccgcctcctctccggttactactcttactcagaccatgcacgatcttgctggtctcgggtctgagacccccaagtctcaagtaggcacgctgctgttccgtagtcggagcaggctgacccatttaagcctaagcagaagagcttcagaaagttccctttcatcggagagctccgaaagctcagatgcaggcctgtgtatggattctccatcacctatggacccacacatggccgagcagacgttcgagcaagcgattcaggcggcatctaggatcattagaaatgagcaatttgcaattcgtagatttcaatccatgccagtcaggttgctgggccactcacctgtcctgagaaatatcacaaactcccaggcccctgatggtaggaggaaatccgaggctggaagcggtgcagctagttcctccggagaagacaaggagaatgatggcttcgtcttcaagatgccctggaagcccacacatccaagctctacacacgccctggctgagtgggcaagcagacgtgaagcgttcgcacagcgaccgtcctcggcacctgacctaatgtgcttgtctccagacagaaagatggaggtggaggagctgtctccattagccctaggacggttttcactgacccccgcagagggggacacagaagaggacgatggcttcgtcgacattctcgagagcgacttgaaagatgacgatgcagtacctcccggaatggagtctctgatctcggctccactggtgaaaactctggagaaggaggaggagaaagacctcgtaatgtattcgaagtgtcagcgcctcttcagaagtccttctatgccctgttcagtgattcgcccaatactcaagaggctggagaggcctcaggacagggacacccccgtgcagaacaagagacgtcgaagcgtgacaccaccagaagagcagcaggaagcagaagagcccaaagccagggttttaagaagtaagagcctctgccacgacgagatcgaaaatcttctcgattcagaccacagggagcttataggggactatagcaaggccttcctccttcagacggttgacggaaaacaccaggatctgaaatacatctccccagagacaatggtcgccttgctaaccggcaagttttctaacatcgtggacaagttcgtgattgttgactgccgctatccttacgagtacgagggcggtcacatcaaaaccgcagtaaatttacctctcgaacgcgacgccgagtccttcctcttgaagagcccgattgctccttgttccctggacaaaagagtgatcttgatattccactgcgagttctcaagtgaaagagggcccagaatgtgccgatttatacgagaacgggatcgagctgtgaatgactaccctagcctgtactaccccgagatgtatattctcaagggggggtataaggagttcttcccccagcaccccaatttctgtgagccccaggactacaggccaatgaaccatgaggcttttaaagacgagctgaagacttttcggctgaagacgcgctcatgggctggagaacgcagccggagagaactgtgctctagacttcaagatcagtag

SEQ ID NO: 111568 - DNA, 1620 bp, synthetic construct
  misc_feature 1..1620: note = Description of Artificial Sequence: Synthetic coding sequence
  source 1..1620: mol_type = other DNA
atggaggtccctcagccggagccggcgcctggatctgcattgtctcctgccggtgtctgcggaggcgctcagcggccagggcacctgccaggactgctgctgggatctcatggcttgctggggtcccctgtgcgcgcagcggcatcgtcccctgttacaactctgactcaaacgatgcatgacctggcaggacttgggtccgagaccccaaaaagccaggtcgggactctattgttcagatccagatcccgtttgacccacctgtccctgtctcggagggcgagtgagagctcattgagtagcgagtcttctgagtcatcagacgccgggctgtgtatggattccccctctccaatggacccgcacatggctgagcagacctttgagcaagcgatccaggccgcgtcccggatcatcagaaacgaacaattcgcaatcaggcgatttcagtcgatgcctgatggatttgtcttcaaaatgccctggaaacctacacacccctcatcaacccacgctttagctgagtgggcgtcccgcagagaggccttcgcccaaagaccatcaagtgcacccgatcttatgtgtctgagccccgacaggaaaatggaggtagaggagctcagtccactcgccttgggcagattttcactgacccccgctgagggcgataccgaagaggacgatggctttgtggatattctcgagagcgacctgaaagacgacgacgccgtgcctcctggaatggagagtctcattagcgccccactcgtcaaaactctggaaaaggaagaagaaaaagacctggtcatgtactccaaatgccaacggctgtttagaagcccctctatgccgtgctctgtgattcgccctatccttaagcggcttgaacggccacaagatcgggacaccccagtgcaaaacaagagacgaaggtctgtcacaccccccgaggaacagcaagaggctgaagaacccaaggccagagtgttgcgttctaaatctctctgtcatgacgagatagaaaacctgcttgacagcgatcatcgggaactcattggggactactccaaagccttcctgctgcagacggtcgacggtaaacaccaagatcttaagtatatatctcccgaaacgatggtcgccttgctgaccggcaaattcagtaacatagtggataagtttgtaatagtggactgcagatacccctacgaatatgagggcgggcacattaagacagcagttaacttgccattggaacgagacgccgagtcattcctgctaaagtccccaatcgccccatgctccctcgataaacgcgttattctaatatttcactgcgaattctcttctgaacggggtccacggatgtgccgcttcatccgggagcgggaccgcgcagttaatgactatccctccctgtactatccagagatgtatattctgaagggagggtataaggagttttttccccagcatcccaatttctgcgagccccaagactatcgcccgatgaatcacgaagcgttcaaggacgagttgaagacctttagactcaaaacacgctcctgggccggagagcggagcaggcgagagctgtgttcccgccttcaggatcagtag

SEQ ID NO: 111569 - DNA, 1551 bp, synthetic construct
  misc_feature 1..1551: note = Description of Artificial Sequence: Synthetic coding sequence
  source 1..1551: mol_type = other DNA
atgcattctgaaacccccaagtcccaggtggggaccctcctgtttcgaagccgcagcagattgacccacctcagtttatctagacgcgcaagtgaaagttctctgtcgagcgagtcctctgaaagttctgatgcgggcctttgcatggacagtccctccccaatggacccgcacatggctgaacagacttttgaacaggccatccaggcagcctcaagaataattaggaacgaacagttcgcaattcgccgctttcagagtatgccagtgcgcctgctgggccattcacctgtgctccgaaacattactaatagtcaagcacctgacggcagacgaaagtccgaagccggcagtggcgccgcttctagcagtggcgaggataaagagaatgacgggttcgtcttcaagatgccctggaagcctacacacccctcatctactcacgccctagccgaatgggccagccgccgcgaagcttttgctcaaagaccaagcagtgcccctgacctgatgtgtctgagccccgatagaaagatggaagtggaagagctttctcctttggcactgggacgcttttctctcacgcctgccgagggggatacagaggaggatgatggcttcgtcgacatcctggagagcgacctgaaggacgacgacgctgtgcccccaggcatggaatctttaatatcggctcccctggttaaaacccttgaaaaggaggaagagaaagacctggtcatgtattcaaaatgccagagactatttaggtcccctagcatgccctgctcggtcatcagacctattttgaagagactcgagcgtccacaagatagggatacccccgttcaaaataagcgtaggcgatcagtgacccctccagaggagcagcaggaagcggaggagcctaaggctcgcgttttgaggtcaaaaagcctctgtcacgacgagatcgaaaaccttctggatagcgaccaccgcgaactgattggagattatagtaaggctttcttgctgcagaccgttgacgggaaacaccaggacctcaagtatatcagccctgaaacgatggtggcgttgttgacaggaaagttctctaatattgtcgataaattcgtcattgtcgattgtagatatccttacgagtatgagggcggccacatcaagacagccgtgaacctaccgctggaacgcgacgctgagtccttcctcctaaaaagtcctatcgctccatgctctctcgataagagggtgatcctgatttttcactgcgagtttagctcagaacgagggccacggatgtgtcgtttcatacgtgagcgagaccgtgccgtaaatgactacccgtccctgtactatccagaaatgtatatactcaaaggggggtataaagaattcttccctcagcaccccaacttctgtgagccacaagactatcggcctatgaatcacgaagctttcaaagatgaacttaagactttcaggctgaaaaccagatcttgggccggagaacgcagcagacgcgaactgtgctcgaggttacaggaccaatag

SEQ ID NO: 111570 - DNA, 1470 bp, synthetic construct
  misc_feature 1..1470: note = Description of Artificial Sequence: Synthetic coding sequence
  source 1..1470: mol_type = other DNA
atgcatagcgagacgccgaaaagccaggtgggaactctgttattccggagccgtagtaggctgacacatttgagcctgagccgcagggcctctgagagtagcttgtcgtcagaatcgtcagagtcttctgatgccggcctgtgcatggattccccatctccgatggatccccacatggctgaacaaacctttgagcaggctattcaggccgcttccaggatcattcgtaatgaacagtttgccattcggcggtttcaaagtatgcccgtccgtcttctgggacattccccagtccttcgcaacataaccaactctcaagccccggacggcaggagaaagagcgaggctggctctggcgctgcctccagctcaggtgaggataaggagaatgatggtttcgtattcaagatgccttggaagccaactcacccaagctccacccatgcattagcggaatgggcatcacgaagagaagcctttgcccaacgtccatcttctgcgcccgatttaatgtgccttagccccgaccgtaagatggaggtcgaagagctgagtcctctcgccctgggccggttttcattgaccccagccgagggggatactgaggaggatgacggatttgtcgatattctcgagagtgaccttaaggacctcgttatgtactctaaatgtcagcgactgttccgctccccgagcatgccttgctcggtgatcagacccatccttaagcggctcgaacggccccaggacagggatactccagtgcagaataagcggaggaggagtgtgaccccccctgaggagcagcaagaagctgaggagcctaaggcgagagtcttgcggtcaaaatctttgtgtcatgatgagatagagaatctgctggattctgatcatagggagctcattggggactactcgaaagcgttcctcctgcaaactgtagatgggaaacaccaggacctcaaatatatctcaccggagacaatggtggccctgcttacaggtaagtttagcaatatcgtggataagtttgttattgtggattgtcggtacccttatgagtacgagggaggacatatcaaaaccgccgtcaacctcccattggagcgggacgcagagtccttcttgctcaagtcccctattgccccgtgtagtctagacaaacgcgtcatcttgattttccattgtgaatttagctcagaacgagggccccgcatgtgcagatttatcagggaaagggacagggccgtgaatgattacccaagtctgtattaccccgaaatgtacattcttaagggaggatacaaggagtttttcccccagcacccaaatttttgcgagcctcaggattatcgacctatgaatcacgaggctttcaaagacgagctgaaaacattcagactgaaaaccaggtcctgggcgggtgaaaggtcacgaagggaactctgttctcggctgcaggaccagtag

SEQ ID NO: 111571 - DNA, 1701 bp, synthetic construct
  misc_feature 1..1701: note = Description of Artificial Sequence: Synthetic coding sequence
  source 1..1701: mol_type = other DNA
atggaagtaccacagcccgagcctgctccaggttccgcccttagcccggccggggtgtgcggtggcgcccagcgccccggtcaccttccaggtctccttctcgggagtcatggtctgttggggtcccctgtgcgagccgctgcatcaagccctgtgactaccctcacacagaccatgcatgacctcgcaggactaggaagtaggagtaggctgacacatctgtcactatctcggcgagcaagtgaatcatctctctcctcagagtcatcagagtcttcagacgctgggctgtgcatggacagcccaagccccatggacccgcacatggctgaacagacattcgaacaggcgatccaggcagcctccaggatcataagaaacgagcaatttgccattaggcggtttcagtcaatgccggtcaggctcctcgggcattcaccggtcctgagaaatataaccaattcccaggctccagacggccgccggaaaagcgaagcaggaagcggggcagccagctcatctggggaggataaggagaacgacggttttgtgttcaagatgccatggaagcccactcatccttcttctacgcacgcgctagccgaatgggcctccagacgtgaggccttcgcacagagaccatcaagcgcaccagacctgatgtgtctatctcctgatcgaaaaatggaagttgaagagttatcccccctcgcgttggggagattttctctcacacctgctgagggcgatacggaagaggatgacggcttcgtcgacatacttgagagcgatctcaaagacgatgacgctgtgcctccgggaatggagagcctcatttccgccccgctcgtgaaaacccttgagaaagaagaggaaaaagacctggtgatgtacagtaagtgccagagactgtttcgttcccccagcatgccatgttccgtgatcagaccaatccttaaacggctcgagagaccacaggatagagatactccggttcaaaataagcgccgcaggtccgtcacgccgccagaggaacaacaggaggctgaggagccaaaggcccgggtgctgagatctaagtccttgtgccatgatgagatcgaaaacttgctggattccgaccatcgcgagttgatcggtgattactcgaaggccttcctcctgcagaccgttgacggcaagcaccaagatcttaagtacatttcacctgaaactatggtggccctccttacagggaagttcagtaacatagtggataagtttgtgatcgtggactgcaggtacccgtacgagtacgaaggtggccatattaaaaccgcagtgaacctccctctggagcgcgacgcagaaagctttcttctcaagtctccgatagccccgtgtagtctcgataagagggtgattctgatttttcactgtgaattttctagcgaacgcggaccacgcatgtgtcggttcatccgcgagcgcgatagggccgtgaatgattacccttcactgtattaccccgagatgtacattctaaaaggcggatacaaagagtttttcccccaacatcccaacttttgtgagccgcaggattatcgccccatgaatcacgaggcctttaaggatgaacttaagaccttcaggttgaagacaaggagctgggcaggagagcgctcaaggcgcgaattgtgttcaaggctccaggaccagtag

SEQ ID NO: 111572 - DNA, 2475 bp, synthetic construct
  misc_feature 1..2475: note = Description of Artificial Sequence: Synthetic coding sequence
  source 1..2475: mol_type = other DNA
atgactgtactgcaggaacctgtccaggctgccatttggcaggccctgaaccattatgcctaccgtgacgctgtcttcttggcggagcgcctgtacgcggaggtgcacagtgaggaggccctgtttttgcttgccacgtgttattacaggtcaggcaaagcctacaaggcataccgcctgcttaaagggcactcttgcactacaccccaatgcaagtacttgctggcgaagtgctgcgttgacctgtcaaagctggccgagggcgaacagatactgagtgggggagttttcaacaaacaaaagtcacatgacgacatcgtgaccgagttcggagactccgcctgtttcacactttccctactgggccacgtgtattgtaagaccgacaggctggcaaaaggatcagaatgttaccagaagtcgctatccttaaaccccttcctctggagccctttcgagagcttgtgtgagattggggagaagccagatcccgatcaaacctttaagtttacctcactccaaaattttagtaactgccttcccaatagttgcacaacccaggtgccaaatcactccttgagccacaggcagcccgagaccgtactcacggaaactcctcaggatacaatcgaactgaatcggcttaacctcgaatcatcaaacagtaagtactcactgaatacagatagcagcgtctcttacatagactctgccgtgatctcaccagacacagttccgctggggaccggaaccagcatcctctccaagcaggtgcagaacaaaccgaagacgggacggagccttctaggagggccagcagccctgtcccccctaactcccagctttggcatcctcccacttgaaacaccctctcccggagacgggtcctacctgcagaattataccaatactcctcccgtgattgacgtaccctccacaggcgctccctccaagaagtccgtggctagaattggacaaactggaactaagagcgttttctctcagtcaggtaacagtcgggaagtcacgccaatactggcccagacccagtccagtgggccccagacgtccacaacgccacaggtgctgtctcctacaataacaagtcctcctaatgcgttgcctaggcgcagttctcggctcttcacctctgattcgagcactacaaaagagaattctaagaagctgaaaatgaaatttccccccaaaatccccaacaggaagacaaagtctaagactaacaaggggggtataacacagccgaacattaacgactctctggagatcaccaagctcgatagttctatcattagcgaagggaaaatctccaccataactccccagatccaggctttcaatttgcaaaaagcggcagccgaggggcttatgtctctactgagggagatgggaaaaggttatttggccctttgcagctacaactgtaaggaggccatcaacattttgtcacacctgccctctcaccactacaacactggttgggtgttatgccagattggacgggcctacttcgagctgagtgaatatatgcaggctgaaaggatttttagcgaagtccggagaatcgagaactatagggtggaaggcatggaaatttactcgacgaccttgtggcacctgcagaaggatgtggccttgtccgtcctctctaaggacctgactgatatggacaaaaatagcccagaagcgtggtgtgccgccgggaattgcttctcactccagcgggagcacgatatcgctattaagtttttccaaagagctattcaggttgatccaaattacgcctacgcctatacccttctgggccacgagtttgtgcttaccgaggaactggataaggcattagcctgcttcaggaacgcaatccgggtgaacccgagacactataatgcatggtacggcctcggaatgatttattacaagcaggagaagtttagcctagccgagatgcattttcagaaggcgttggatataaatccgcagagtagcgttctgctgtgccatatcggcgtggtacagcacgccttaaaaaagtccgaaaaggccctggacacgctgaacaaagccatagtcatcgatcctaagaaccccctttgcaagttccaccgcgcctcagtcttgtttgccaacgaaaagtataagtctgccctccaagagttggaagagctgaagcagatcgtgcccaaggagtccctggtgtattttctgatcggaaaagtgtacaagaagctcggacaaacccaccttgccttaatgaatttcagctgggcaatggaccttgatcccaagggcgccaacaaccagataaaggaagccattgacaaaagatatctcccagatgatgaagaacctatcacacaggaggagcagatcatgggaacagacgaatcacaggaatccagtatgacagacgctgacgacacccagttgcatgcagcggagtcagacgaattttag

SEQ ID NO: 111573 - DNA, 2292 bp, synthetic construct
  misc_feature 1..2292: note = Description of Artificial Sequence: Synthetic coding sequence
  source 1..2292: mol_type = other DNA
atggctagtacgaagccactgtgtctcccccgttgtggcttcccccgacgtacacccctatgtcgaagacttgctgaaggtgagcaaatcctgtccggcggggtcttcaataagcagaaatcccacgacgacattgtgactgagttcggcgattccgcttgttttacactgtctctgctggggcacgtgtactgcaaaacagatcggctggcaaaaggtagtgagtgctatcaaaagtcgttgtccctgaacccttttctttggtccccatttgagagtctatgtgaaatcggcgagaaacccgatccggaccaaacttttaagttcacctcactccagaacttttctaattgcctcccaaactcctgtaccacccaagtgccaaaccacagcctgtcacatcgccagcccgagaccgtgctcacagagacgccccaagatacaattgagctaaaccgacttaatttggagtccagcaatagcaagtattccctcaatactgatagctcagtttcatacattgattccgccgttatatcgccagacaccgtgcccctgggaaccggcacctctatcctgtccaagcaagttcagaataaacccaagacaggacgctctctgctgggcggtcccgccgctctcagtccattgactccttctttcgggatcctgcctttggagacgccatctccgggcgacggatcttacctgcagaactatactaacacacccccagtgatcgacgtgccctcaactggggcgccctccaaaaagtctgtggcaagaattggacaaactggcaccaaaagtgtctttagtcaaagtggaaatagtcgggaggtgacgcctatcctggcgcaaacccagtcctccggtccacaaacatccacgactcctcaggtactttcacctactattacaagcccccccaatgctctcccacggaggtcttctcgtttgttcacctcagattcatctacaactaaagaaaattcgaaaaaactaaaaatgaagtttccaccgaagatcccaaatcgtaaaaccaagtccaagacgaacaaaggtggcatcacacaacctaacattaatgatagcctggaaatcacgaagctggactcttcgattatttccgagggaaagatatcgacaatcacaccgcagatccaggcgttcaacttgcagaaagctgcagcagagggtcttatgtctctgctgagggagatggggaaggggtatctggctctgtgcagttataactgtaaagaggccattaacatcctctcacaccttccttcacaccactacaacacaggttgggttctgtgtcagattggtcgcgcctacttcgagctctccgaatacatgcaggcagaaagaattttttccgaagtacggagaatcgaaaactatcgagtggaagggatggagatctattccacaacactctggcatctgcaaaaagacgtggctctgtctgtcctgtctaaggacctgaccgacatggacaaaaactcccccgaagcctggtgcgcagctggaaattgttttagccttcagagagagcacgatattgctatcaaattcttccagcgcgcgatccaggttgacccaaattatgcctacgcctatacgttgctggggcacgaattcgtgctcacagaagagttggataaagctctcgcgtgtttccgaaacgctatcagggttaaccctagacactacaacgcgtggtacgggctgggaatgatctactacaaacaggagaaattctctttggcagaaatgcactttcagaaagcgttagacattaacccgcagtcctcagtgctgctctgccacataggggtggtgcagcacgctctgaaaaaaagtgagaaggccctggacacgttaaacaaagctattgttatcgaccccaaaaatccactgtgcaaattccaccgggcatcagtgctctttgctaatgaaaaatacaagtccgctttgcaggagctggaagagttaaaacaaatcgtgcccaaggaatcattagtgtactttcttataggtaaagtgtataaaaaactaggacagactcatctcgctctgatgaatttctcctgggctatggacctcgacccgaaaggcgctaataaccaaataaaagaggccattgacaaacggtacctgcctgatgatgaagagcccattacccaggaggagcagatcatgggaaccgacgagtcccaggaaagttctatgaccgacgcggacgatacacaactccacgccgcagaaagtgatgaattttag

SEQ ID NO: 111574 - DNA, 2472 bp, synthetic construct
  misc_feature 1..2472: note = Description of Artificial Sequence: Synthetic coding sequence
  source 1..2472: mol_type = other DNA
atgacagtgctccaggaacctgttcaggcagccatctggcaggcccttaatcattatgcctacagggacgccgtgtttctcgccgaaaggctatatgctgaagtgcactcagaagaggctctctttctacttgctacctgttattacaggtctgggaaagcttacaaggcctataggctgctaaaaggacactcgtgcactacccctcaatgcaaatacctgctggccaaatgctgtgtggatctttcaaagctagcggaaggggaacaaatcttgtccggaggggtgttcaacaagcaaaagagccacgacgacatcgtgactgagttcggtgacagcgcctgctttactctctccttacttggtcacgtctattgcaaaacagacagacttgcaaaaggtagtgagtgctatcagaaaagtttaagtctcaacccctttctgtggagcccatttgaaagcctctgtgagatcggggaaaagccggaccccgaccaaacatttaagtttacttcactccagaacttctctaactgcctacctaacagctgcacgactcaggtgcctaatcactccctctcccaccgccaacctgagacagtgttaaccgagactccgcaggataccattgaattgaatcgtctgaacctggaatccagcaactccaaatacagtctgaataccgactcctcagtgtcctacatcgactcggctgtaattagccctgatactgtgccactggggacgggaaccagcatactctctaagcaggtccagaacaagcctaagactgggagaagcctgttaggaggaccggcggctctgtctcctcttactccatcgtttggcatactgccgctggagaccccgtcaccgggtgatgggagttacctgcagaactacacgaacaccccccctgtgatcgatgtacccagtaccggggcacccagcaagaagtcggtggcaaggatcgggcagaccgggaccaagagcgtgtttagtcaaagcggtaattcgagggaggtaaccccgatccttgcgcaaacgcagtcatcaggcccccagacgagtacaactccacaagtcctgagtccaactattacttctccgccgaatgccctcccccgccggtcatcccggctgttcacatccgacagctctactacgaaggagaactccaaaaagctgaagatgaaatttccgcctaagattcctaatagaaagactaagtcaaaaacaaataagggtgggataacacagcctaacatcaacgacagtctcgagatcacaaaactcgacagctccatcatctctgagggtaaaatcagcactatcacaccccagatccaagctttcaatcttcagaaggccgcggccgggttgatgtccctgctgcgcgagatgggcaaaggctacttggccctgtgttcctacaattgcaaggaggccatcaacattcttagccatcttccctcccatcactacaataccggatgggttttatgccaaattgggagagcatattttgaactgtctgaatacatgcaagcagaaagaattttctcagaagttagacggattgaaaattatcgggtggaagggatggaaatttactcaaccacactgtggcacttacagaaggacgtggctctcagtgtgctgtctaaagatctcacagacatggataaaaatagcccagaagcctggtgcgcagcagggaattgcttcagcctccagagagaacacgatatcgcaatcaagttttttcagcgagcaatacaggttgatccaaactacgcatatgcgtacaccctgctaggtcatgagttcgtgctgactgaggagctcgacaaggcacttgcatgcttccgaaatgccatccgggttaatcctaggcactacaacgcttggtacgggctgggaatgatatattacaagcaggaaaagttcagtctcgctgaaatgcattttcagaaggccctggacattaatccccagagctctgtcctcctttgccacataggcgttgtacaacatgctctgaagaaaagcgaaaaagcccttgatactctgaataaagcaattgtgatcgatcccaagaaccctctctgcaagtttcatagggccagtgtcttgttcgccaacgaaaagtataagtctgccttgcaggaactcgaagagttaaaacagattgtgcctaaggagagtctagtttacttcctgattggcaaagtgtataaaaaactgggtcagacacacctggcacttatgaattttagctgggcaatggacctggaccctaaaggcgccaacaaccaaattaaggaagctatcgataagagatacctgccagacgacgaggaaccaatcactcaagaggaacaaataatgggcactgatgagtctcaggagtcttccatgactgacgctgatgacacacagctccacgccgccgagtccgacgaattttag

SEQ ID NO: 111575 - DNA, 2493 bp, synthetic construct
  misc_feature 1..2493: note = Description of Artificial Sequence: Synthetic coding sequence
  source 1..2493: mol_type = other DNA
atgactgtgctccaggaaccggttcaggcagccatctggcaagccctgaaccattatgcataccgggacgccgtgttcttggccgaacgcctgtatgccgaagtacacagtgaggaggccttgttcctgctggcaacgtgttattacagatctggcaaggcttataaggcataccggttactcaagggccactcctgtacaactccccaatgtaagtacctgctggccaagtgttgtgtggatttatccaaactcgctgaaggagagcagatcttgagtggaggcgtttttaacaaacagaaaagtcacgacgatatcgtgacggaatttggcgactctgcctgtttcacgctcagtctgttaggccatgtatactgtaagacagaccgtctcgccaagggctcagagtgctaccaaaagagcctgtcgctgaacccattcttgtggtcaccctttgagagtctctgcgaaattggtgaaaagccagacccagaccaaacctttaagtttacaagcttacagaacttctccaattgtctccccaacagctgcaccacgcaggtccccaaccactctttgagccacagacagcctgaaaccgtgctgacagagacacctcaagatacgatcgagttgaatagactcaatctggagtcaagcaattctaaatactcacttaatactgatagcagtgtgagctacatagattccgcagttattagtccagacacagtccctttagggactgggacatctatcctctccaagcaggtgcagaataaaccaaagactggacgctcactccttggaggtcccgctgctctgtcgcctttaacaccttctttcggcattctgcccctggagaccccctctcccggtgacggaagttatcttcaaaactataccaacacaccacccgtcattgatgtgccttccaccggggcccccagtaaaaagacatttcgcgttctccagtctgtggcacgcataggacagacgggaaccaagtctgtgttttcacagtcaggtaattcgagagaggtgactccgatcctggctcagacccagagctctggtccacagaccagcaccacaccccaggtgctctcacccacaataacaagtcctccaaatgcactacctagaaggtcgtcacggctttttactagtgattccagcactacaaaggagaattctaaaaagctgaaaatgaaattcccaccaaaaatcccaaacagaaagacaaaaagcaaaacaaataagggcggcatcactcagccgaatattaacgattccctagagataactaaacttgatagctctataatctcagaaggcaagatatcaaccatcacacctcagatccaggcgttcaacctccagaaagccgctgccgaaggcctgatgtctctgttgcgggaaatgggaaagggttatctggcgctttgttcctacaattgtaaggaggcaatcaacattctgagtcacttaccatcacaccactacaacaccgggtgggtgttgtgccaaatcggtagggcgtatttcgagttgtcagaatacatgcaagctgaacgcattttctcagaggtaaggcggattgaaaactacagagtcgaagggatggagatttactcaaccactctgtggcacctccagaaagatgtcgcattgtctgtactcagcaaggatctgacagacatggataagaatagcccggaggcttggtgcgcagctggcaactgttttagcctgcagcgggaacatgacatcgcgatcaaattcttccaaagggctatccaggtggaccccaattacgcttacgcttacacccttcttggccacgagtttgtgctcacagaggagttggataaggcactggcctgcttccgtaatgccattcgggtaaatcctcgccattacaatgcatggtatgggctcggcatgatctattataagcaggagaaattctcattagccgagatgcacttccagaaagctcttgacataaatccacagagttccgtgctcctgtgccacatcggtgtggtccaacacgccctgaagaaaagtgaaaaggccttggataccctgaacaaggccatcgttatcgatcctaagaacccgttgtgtaagttccatcgcgcgtcagtgcttttcgcgaacgagaaatataaaagcgctctccaagaactcgaggaactgaagcagattgttccaaaggagtcattggtatatttccttatcggcaaggtgtataaaaaactcggccagacccatctggccctgatgaacttctcttgggccatggatctggaccctaaaggagcaaataaccaaataaaggaagcgatcgataagcgctatctacccgatgacgaagagcctattacccaggaagaacaaataatgggcactgacgaaagccaggaatcttctatgacggacgctgatgatacacagctacacgcagcagaatccgacgagttttag

SEQ ID NO: 111576 - DNA, 1740 bp, synthetic construct
  misc_feature 1..1740: note = Description of Artificial Sequence: Synthetic coding sequence
  source 1..1740: mol_type = other DNA
atgagtgccgccatcgcagcccttgcagcgtcatacggctcgggatccggcagcgagagcgacagtgatagcgagagttcaaggtgtccgctacctgcagcagattccctgatgcatctcacgaagagcccaagctcaaagccatcactagccgtagctgtagacagcgccccagaggtcgcagttaaggaagacctggagaccggggtgcatttggatccggccgtgaaagaggtgcagtataatccgacttatgagactatgtttgcccctgaatttggaccagaaaatcctttccggactcagcagatggccgccccgagaaacatgctgtccgggtacgccgagccggcacacatcaatgacttcatgttcgagcagcagagacggacatttgccacatacggctacgcactcgatccatcgctggacaatcatcaggtaagtgcgaagtatatcggctcggttgaggaggccgaaaagaatcagggactgactgtgttcgagacagggcaaaagaagaccgagaaacggaagaaatttaaggaaaacgacgcctcaaatatcgatgggttcctgggcccttgggcaaagtacgtggacgagaaggatgtggccaaaccctctgaggaggagcagaaagagctggacgaaataaccgccaaaagacaaaaaaagggcaaacaagaggaggaaaagccaggtgaggaaaaaactatacttcatgtgaaggagatgtacgactaccaaggtaggagctacctacatatcccccaggacgtcggtgtgaacctcaggtccactatgccacctgagaagtgctacctccccaaaaagcagatccacgtatggagtggccataccaagggcgtgtccgccgtgcgattatttccactttctggacacctcctgttatcttgttccatggactgcaagatcaagctgtgggaagtatacggagaacgacgttgtctccggacctttattggccacagtaaggctgtgagggatatctgcttcaatacggctggtacccagtttttgtccgcagcatatgaccgttacctgaaactgtgggatacggaaacaggtcagtgtatttcacgatttactaatcgcaaggtgccttactgtgtgaagtttaacccggatgaggacaaacagaatctcttcgtggccggaatgtctgataaaaaaattgtccaatgggatattcggtcgggcgagatagtccaggagtacgaccggcatctcggagcagtcaacacaattgtgtttgtggacgagaaccgtaggttcgtttccacttccgacgacaaatcattgagagtgtgggagtgggatatacctgtggacttcaagtatattgccgaaccatcaatgcactccatgccagcagtaactctgtccccaaacggaaaatggctagcgtgtcagtccatggataatcagattctgatcttcggcgcccagaaccggtttcgcctcaacaaaaaaaagattttcaagggccatatggtggcaggatatgcgtgtcaggtggatttctcacccgatatgagctatgtgatcagcggcgacggaaacgggaagttgaatatctgggactggaaaaccaccaagctgtattcccgctttaaggcacatgacaaggtttgcatcggagcagtgtggcatccccacgaaacctccaaagtcattacctgtggatgggatggtctcatcaagctttgggactag

SEQ ID NO: 111577 - DNA, 1620 bp, synthetic construct
  misc_feature 1..1620: note = Description of Artificial Sequence: Synthetic coding sequence
  source 1..1620: mol_type = other DNA
atgtctgctgccattgcagccctggctgcaagttatggaagcggctcaggctccgagtcagattctgattctgagtcgagccggtgtccccttcctgccgccgatagtctgatgcaccttacaaaatcccctagttctaagccgagcttagccgtggcggtggacagcgcccctgaagtggctgtgaaggaagatctcgaaaccggagtgcacctggatcccgccgttaaagaagtgcagtacaatcccacctacgaaaccatgtttgcgcctgaattcggccctgagaaccccttccgaacgcagcagatggccgcccctcggaatatgctgagcggctacgcagaacccgctcatattaatgattttatgtttgaacagcagagacgcactttcgccacttatggatacgctctagatccatcactcgataatcatcaagtgtcagccaagtacatagggagtgtcgaggaggctgagaaaaaccaaggcctcactgtttttgagacagggcagaagaagactgaaaaaaggaaaaaattcaaggagaatgatgcatctaatatagacggattcctgggcccctgggcaaagtatgtggacgaaaaagacgttgctaaaccctcagaagaggagcagaaagagttagatgagattacagctaagcggcagaagaagggcaagcaagaagaggagaaaccaggggaagagaagacgatcctgcatgtcaaggaaatgtatgactatcaggggcgaagttacttgcacattcctcaagacgtaggggtcaacttgaggtccaccatgccccccgagaagtgctatttaccaaagaaacagatccacgtgtggagcggacacacgaaaggagtgagtgccgtgcgtctgttcccgcttagtggacatctgctgttaagctgtagcatggactgcaaaatcaagctgtgggaggtgtatggggaacgccggtgtttacggaccttcatcggacacagcaaggcggtgcgggatatctgttttaacactgcaggcacacaattcctctccgccgcttatgaccgatatcttaagctgtgggacaccgagaccggacagtgcattagtcgcttcaccaataggaaagttccttactgcgtcaaatttaaccccgatgaggataagcaaaacctgtttgttgccgggatgtcagataagaagatcgttcagtgggacatacggtcgggagagatagtgcaggagtacgacagacatttaggggctgtaaacacaattgtgttcgtcgacgagaatcgccggttcgtgagcacaagtgatgacaagagccttagggtatgggaatgggatatacctgtggacttcaagtatatcgccgagccttctatgcactctatgccagcagttaccctatccccaaatggaaaatggctggcatgtcagagcatggacaatcagattctgattttcggggcacagaaccggtttaggctgaacaaaaaaaaaattttcaaaggacacatggtggccggatatgcctgccaggtagatttttccccggacatgcgcgtacctcaatcttttcagaacctcaaagaggtcacagccggtccacaggagggatag

SEQ ID NO: 111578 - DNA, 1740 bp, synthetic construct
  misc_feature 1..1740: note = Description of Artificial Sequence: Synthetic coding sequence
  source 1..1740: mol_type = other DNA
atgtctgcggccatagccgcccttgcggcgtcctatggcagcggttccggatccgagtctgactcagactccgagtcatcccgctgccctctgccagctgcagattccctgatgcatttgaccaagagcccttctagtaagccttccctggccgtggcagtcgactctgccccagaggtggcggtaaaagaagatctggagaccggcgtgcacttggatcccgccgtcaaggaagtgcagtacaaccccacctacgagactatgttcgcacccgagttcggccctgaaaatccgttcaggacccagcagatggcagctcctcgtaacatgctcagcggctatgccgagcccgcccacatcaacgactttatgttcgaacagcaaagaaggactttcgcaacctatggctatgccctcgatccttctctggacaaccaccaggtgtccgcaaaatacatcggctctgtagaagaggctgagaaaaaccaagggctgaccgtgttcgagactggtcaaaagaagaccgagaagcgtaaaaagtttaaggagaatgatgcatctaacatagatgggttcttgggcccatgggccaagtatgttgatgaaaaagacgtggctaaaccctccgaggaagagcagaaagagctcgatgaaataacagccaaacggcagaagaaaggcaaacaggaggaagagaaaccgggagaagagaagaccatactacacgtgaaggagatgtacgattaccaggggaggtcttacttacatattccgcaggacgtcggggttaatctgcgctccaccatgcccccggagaagtgttacttgcctaaaaagcagatccacgtgtggtccgggcacacaaagggtgtgtcagcagtccgcctcttcccactctctggccacctgctcttgtcatgcagcatggactgtaagattaagctctgggaggtgtacggagaaaggagatgcctccgcacttttatcggccactcaaaggcagtgagggacatctgttttaacacggctggtacacagtttctatctgctgcatacgaccgctacttgaagctgtgggacacagaaacaggccaatgcatctcccgcttcactaacagaaaagtcccttactgcgtaaaatttaatcccgatgaggataaacagaatctattcgtcgccgggatgtctgataagaaaatcgtccagtgggacattcggagtggggaaattgtccaagaatatgataggcatcttggggcagtgaatacaatcgtctttgtcgacgagaacaggagattcgtgagcacgtctgatgataagtcgctcagagtctgggaatgggatatcccagttgattttaagtacatcgccgaaccttccatgcactcaatgccagcagttaccctctctccaaatggcaagtggctggcctgccagtccatggacaaccagattcttatcttcggcgcgcagaaccgctttcgtctaaacaaaaaaaaaatcttcaaggggcacatggtcgccggctacgcatgtcaggtcgatttctcccccgacatgtcatacgtgataagcggcgacggcaacggcaagctgaacatttgggactggaaaacaacaaagctctatagtaggtttaaggcccatgataaagtttgtatcggagccgtttggcatcctcacgaaacctccaaggtcataacctgcggttgggacggactcattaagttgtgggattag

SEQ ID NO: 111579 - DNA, 1620 bp, synthetic construct
  misc_feature 1..1620: note = Description of Artificial Sequence: Synthetic coding sequence
  source 1..1620: mol_type = other DNA
atgagtgccgctattgcagctctggcggccagttacggctcgggcagtggctcagaaagcgattcagactccgagtcctccaggtgtccgctgcccgccgctgactccttgatgcacctgactaaatcgccgagctcaaagccaagtctggccgtagccgtggactccgcccccgaagtggccgtgaaagaggatcttgaaacaggcgtacacctggatcctgcagtaaaagaagtgcagtataacccgacttacgagacgatgttcgcccctgagtttggaccggagaacccctttcgaacacaacagatggcggcccctagaaacatgctctctgggtatgccgaacccgctcacattaatgacttcatgtttgagcagcaaagaaggacatttgcaacttacggttatgctctggatccctccctggacaatcatcaagtatccgccaaatacattggcagtgttgaggaggccgaaaagaatcagggattaactgttttcgaaacaggccagaaaaaaacagagaaacggaaaaaattcaaagaaaacgacgcaagcaacattgatggttttctcggaccttgggcaaaatacgtcgatgaaaaagacgtcgcgaaacccagtgaagaagagcagaaagaacttgacgagatcacggcgaagaggcagaagaaaggaaagcaggaagaggaaaagcctggggaggaaaaaaccattctacacgtgaaggaaatgtacgactaccagggaaggtcctacctgcacatcccgcaggatgtgggagtgaatctcaggagtacaatgccccccgaaaagtgctacctgcctaagaaacagatccatgtatggagcgggcacacgaaaggagtctcagcagttcgcctgttcccactgtccgggcacctgctgctcagctgtagtatggactgtaagattaaattatgggaggtttatggggaaagaaggtgcctgcgcacattcatcggccactccaaggcggtacgagatatctgcttcaacacagctgggacacaattcttatccgctgcttacgatcggtatctgaagctgtgggacacggagactggtcagtgcatttcgcgcttcaccaatcggaaggtgccttactgcgtcaaattcaacccggacgaggacaagcagaacctgtttgtggccggtatgagcgataaaaagatcgtccagtgggacatcaggagtggagagattgtgcaggaatacgatcgccacctgggcgctgtgaatactatagtttttgtcgatgagaacagacgatttgtttcaacatcggacgacaagagtctcagagtgtgggaatgggacatccccgtggattttaagtacatcgcagaaccttcaatgcactctatgccggccgtaacattgagcccgaacgggaagtggctggcatgccagtccatggacaaccagatcttgatcttcggcgctcagaaccgttttcggctcaacaaaaaaaagatcttcaaaggtcacatggtggcaggttatgcatgtcaggtagactttagtccggacatgagggtgccacagtctttccaaaacctgaaagaggtgaccgccgggcctcaagaaggctag

SEQ ID NO: 111580 - DNA, 378 bp, synthetic construct
  misc_feature 1..378: note = Description of Artificial Sequence: Synthetic coding sequence
  source 1..378: mol_type = other DNA
taaaatatgcttagcggatacgcagagcctgcccatataaacgactttatgtttgagcaacagcgccggaccttcgccacatacggttatgctctggacccttctttggataatcaccaggtgagtgctaaatacattgggtctgtggaggaggccgagaagaatcaggggttaacagtcttcgagacggggcagaagaaaacggagaagaggaaaaaattcaaagagaacgacgcctcaaacatcgacggcttcctcggcccctgggccaagtacgtggatgaaaaggatgtggcaaaacccagcgaggtgagctttgacgtttttaattgccagttcagatatacactttacctttacgaggggtacctgcactag

SEQ ID NO: 111581 - DNA, 495 bp, synthetic construct
  misc_feature 1..495: note = Description of Artificial Sequence: Synthetic coding sequence
  source 1..495: mol_type = other DNA
atgagtgccgcgatagccgcccttgccgcaagctatggctccggctccggctctgagagcgactcagacagtgaatcctcccgctgccccttgcccgcagctgattccttgatgcacctgactaagagcccgtcaagcaagccatccctggcagtggctgtggatagcgctcccgaggtggctgtgaaggaagacctcgagacaggtgttcatctggacccagctgtgaaggaagtgcaatataatccaacctatgaaaccatgttcgcccccgaattcggccccgagaatccatttaggacacaacaaatggctgcacccagaaacatgttgtctgggtacgcggagcccgcccatattaatgattttatgttcgaacaacaacgtcggacattcgcgacttacgggtacgctctggatccctcattggataaccaccaagtgtctgcaaagtatatcggaagtgttgaggaagccgagaaaataaaggtgtag

SEQ ID NO: 111582 - DNA, 213 bp, synthetic construct
  misc_feature 1..213: note = Description of Artificial Sequence: Synthetic coding sequence
  source 1..213: mol_type = other DNA
atggccgctccgcggaacatgctaagtggatacgctgagcccgctcatatcaacgattttatgttcgagcaacagcgccgcacctttgccacttatggctatgccctggacccctcactggacaaccatcaagtgagtgctaagtatatcggatctgtagaagaggctgagaaaaatcagggtctgacagtgttcgagacaggccaaaagtag

SEQ ID NO: 111583 - DNA, 1305 bp, synthetic construct
  misc_feature 1..1305: note = Description of Artificial Sequence: Synthetic coding sequence
  source 1..1305: mol_type = other DNA
atgagcattctgaagattcatgcgcgggagattttcgattccaggggaaaccctaccgttgaggttgatctattcacttcaaagggactttttagggcggccgtgcccagcggcgcttctaccgggatctacgaggccttagaacttcgcgataatgataaaacacggtacatgggaaaaggggtaagtaaggccgtggaacacatcaataaaaccatagcacctgcgctcgtgtctaagaaattaaatgtgacagaacaagaaaaaattgataagctaatgatcgaaatggatggcaccgagaataaatcaaagtttggagccaatgccatcctgggcgtgagcttggcggtgtgtaaagctggggctgtggaaaaaggcgtacccctatatagacacattgctgatttagccggaaattcagaggtaatactgccagtacctgccttcaatgttatcaatgggggcagccatgctggaaataagctcgccatgcaggaatttatgatattgccagttggggctgcaaacttccgcgaggccatgcgcatcggcgcagaggtgtaccacaatctcaaaaatgtgattaaagaaaaatatggtaaagatgctaccaatgtgggagatgaagggggttttgcccccaacatacttgaaaacaaagaaggactcgagttgttaaaaaccgccattgggaaggcaggatataccgataaagttgtgatcgggatggatgtcgcagcatcagaatttttccgcagtgggaaatacgacctggacttcaaaagcccggatgacccgtcaaggtacatctctcctgaccagctggcagacctgtataagtcatttatcaaggattatccagtagtgtccatcgaggacccatttgatcaggacgactggggggcttggcaaaagttcaccgcttctgctggtatccaggtggttggcgatgacctgactgtgactaacccaaagcggatcgctaaggcggtgaatgagaagtcatgcaactgcctcctgctaaaagtgaaccagatcgggtcagtgacagaatcacttcaagcttgtaagctggcccaggctaatggttggggtgtgatggtgtcgcatagaagtggtgagaccgaggatacatttatcgcggacctcgtggtgggcctgtgtacaggacagatcaagacaggcgcaccttgccgcagtgagcggttggctaaatacaaccagttactgagaattgaagaagaactaggaagcaaggccaaatttgccggacgaaacttcaggaatccgctggccaagtag

SEQ ID NO: 111584 - DNA, 360 bp, synthetic construct
  misc_feature 1..360: note = Description of Artificial Sequence: Synthetic coding sequence
  source 1..360: mol_type = other DNA
atgaggaaaaccgcgtcttcttgcccagctagcctgacctgcgactgctatgctacagacaaggtctgtagtatctgcctgagccggcgacagcaggtcgcgccccgtgctggaacacccgggttcagggccccagaagttctgaccaagtgcccaaaccagactaccggaaaatcaatcctttgttccaaggaagttcctgctcaggatctacgtaagctatgtgagagactacgggggatggatagctcaacccctaagctcacgtctgacattcaggggcatgccagtcaccagccggccatctccgagaagacggatcacaaagccagttgtttggtgcagacacccccaggctag

SEQ ID NO: 111585 - DNA, 474 bp, synthetic construct
  misc_feature 1..474: note = Description of Artificial Sequence: Synthetic coding sequence
  source 1..474: mol_type = other DNA
atggaggctagcctgggcatccagatggatgaacctatggcattctcgcctcaaagagataggttccaggcggaaggttctctgaagaagaatgagcagaatttcaagctcgccggcgtgaaaaaagacatcgagaaactctatgaagctgttccccagctgtccaatgtcttcaagatcgaggataagatcggggaaggtactttcagtagtgtctacctggccactgcacagctccaggtcggtcctgaggagaagatcgccttgaaacatctaatcccaacctcacaccccattcggatcgcggcagaacttcagtgcctcacagtcgccggagggcaggataacgtgatgggtgtgaagtattgcttccgtaaaaatgaccacgtggtaattgcgatgccctacctcgaacatgaatccttcttggacatcctcaattcgctctcattccaggaggttagagagtactag

SEQ ID NO: 111586 - DNA, 1725 bp, synthetic construct
  misc_feature 1..1725: note = Description of Artificial Sequence: Synthetic coding sequence
  source 1..1725: mol_type = other DNA
atggaagcctctctcggaatccagatggatgagcccatggccttttctcctcaacgtgatcgctttcaggccgaaggatccctgaagaaaaatgaacaaaatttcaagctcgccggagtgaaaaaagacattgagaagttgtatgaagccgtacctcagctcagtaacgtctttaagattgaggataaaataggcgaaggaacattctctagcgtttacctagctacagcacagttgcaagtgggacctgaggagaagattgctttgaagcatctgatcccaacatcccacccaattcgaatcgctgctgaactacagtgtctgacagtcgccggcgggcaagataacgttatgggagttaagtactgctttcgcaagaatgatcacgttgtgatagctatgccatacctggagcatgaatccttcctcgatatcttgaacagtctcagtttccaggaggtgagggaatatatgctgaatctgttcaaggctcttaagaggattcatcaattcggtatcgtgcatcgcgacgtgaaaccatctaactttctttataacaggcggttgaagaagtacgctcttgtggatttcggcctggctcagggtacccacgatacgaagatcgaacttctcaagtttgtgcagtcagaagcccaacaggaaagatgctcccaaaataaaagtcacatcatcaccggaaataagattccgctgagcggtcccgtgcccaaggaactcgatcagcagtctacaactaaggcttccgtgaagcgcccctataccaatgcacagattcagataaagcagggcaaggatggtaaggaaggatctgtaggcttgagcgtgcagaggagcgtttttggggaaagaaacttcaacattcattcttctatctcccatgagtccccagcagttaagctgatgaagcaatcaaagactgtggacgtgctgagcagaaagcttgccacgaaaaaaaaagctatctctacgaaagtgatgaactccgccgttatgagaaaaaccgcctcctcgtgtcccgcatctctgacctgcgattgctacgctaccgataaggtctgctcaatctgtctcagccggcgccagcaagtggccccacgagcagggacaccaggattcagggccccggaagtgctcactaaatgcccgaaccagaccacagccatcgacatgtggagcgccggggtgatttttctgagccttttgagcgggagataccccttctataaagcatccgacgacctaaccgccctggcgcaaataatgacaattagaggatcacgtgaaactattcaagccgctaagacgttcggaaagtccatactctgtagtaaggaagttcccgcacaggatctgaggaagttatgcgagaggctgcggggaatggatagctcaacacccaaactcactagtgatattcagggtcacgcctcacatcagccggcaatttctgaaaaaacagaccataaggcatcatgcttagtgcagacccctccagggcagtactccgggaactcttttaagaagggagacagtaatagctgcgaacactgttttgacgagtacaatacaaatctggagggctggaatgaggtacctgatgaagcatatgacttgctggacaaactgttggatctcaatcctgcctccagaattaccgctgaggaagccctcctccatccgttctttaaagacatgagcttgtag

SEQ ID NO: 111587 - DNA, 1641 bp, synthetic construct
  misc_feature 1..1641: note = Description of Artificial Sequence: Synthetic coding sequence
  source 1..1641: mol_type = other DNA
atggaggcctccctggggattcagatggatgagccaatggcctttagcccacagcgcgacagattccaggcagaagggtccttaaagaagaacgagcagaacttcaaactcgccggtacgttctcttccgtgtacctggcgactgctcagctgcaggtgggccccgaggaaaagattgcactcaagcatcttattcccacgtcccaccctatccggatcgccgctgaactccagtgtctgactgtggccggcggccaagacaacgtgatgggcgtcaaatactgcttcaggaaaaacgatcatgttgtgatagccatgccttatttagagcacgaatcctttctcgatatcctgaactccctgtcgttccaagaggtccgagaatacatgctgaatctcttcaaagccctcaagagaatacaccagtttgggattgttcaccgggatgtgaagccatcgaacttcctatataacagaaggttgaagaaatatgccctggtagactttgggctggctcaaggcactcacgacactaaaattgaactgctcaagttcgtgcagtccgaggcacagcaggaacggtgtagtcaaaacaagtcccacatcattaccggcaacaagattcctctcagcgggccagttccaaaggaactagatcaacagagcactacaaaggcatccgtgaagagaccttatactaatgctcagattcaaattaaacagggaaaggatgggaaggagggaagtgttggtttaagtgtgcaacggtccgtgttcggagagaggaattttaatatccacagcagcatctcgcacgaaagcccagcagtgaaactaatgaagcagtcaaagaccgtagacgtgttgagcagaaaactcgcaaccaagaagaaggcaatatctaccaaagttatgaacagcgccgtcatgcgtaagacagcctcctcttgccccgcctctctgacttgtgattgctacgccacagataaagtatgcagcatatgtctgagtagacgacagcaggttgccccgcgggccggtactcctgggttcagagcccccgaagtgttaaccaagtgtcccaatcagaccacagcgatcgacatgtggagcgccggagtcatctttctctccctgctctccggtcgataccctttctataaagcctccgatgatttaaccgctttagctcagatcatgaccatccgggggtcaagagagaccattcaggcagcaaagacgtttggcaagtccatactctgctcaaaggaagtccctgctcaggatctccggaaactctgcgaacgtctgagagggatggattcatccactccaaagcttactagcgatatccaagggcatgcctcccatcagcctgccatctctgagaagaccgatcacaaagccagttgtctagtgcaaacacctcccggccaatacagtggcaatagctttaaaaagggtgactcaaatagttgtgaacattgtttcgacgaatataacactaatctggagggatggaatgaagttcctgacgaggcctatgatcttttagacaaactgctggaccttaacccagcgtctaggattacagctgaagaggcattgctccatcccttcttcaaagatatgtcactgtag

SEQ ID NO: 111588 - DNA, 3453 bp, synthetic construct
  misc_feature 1..3453: note = Description of Artificial Sequence: Synthetic coding sequence
  source 1..3453: mol_type = other DNA
atggcccagttcggcgggcagaaaaaccccccctgggccacgcagttcactgcaactgcggtgagtcaacctgcagccctcggcgttcagcagccttcccttctcggggctagccctaccatctacacacagcagacagctctggctgccgcaggccttactacacagacccctgccaattatcagctgacccaaaccgctgctctccaacagcaggccgctgcagctgctgctgccctccagcaacagtattcgcaacctcaacaggcactgtactctgtgcagcagcagcttcagcaaccacaacaaacactgcttactcagccagcagtggcgctccctacttccctatctctgtcaacaccacagccaacggctcagatcaccgtgtcctatcctacacccaggagcagccagcagcaaacgcagccccagaagcagcgggtgttcaccggggttgttacaaagctccacgataccttcggcttcgtggacgaggatgtcttttttcaactaagtgctgtgaaaggcaagactccccaggtaggtgaccgagtgttggtggaagctacttacaacccgaacatgccatttaagtggaacgcacagaggatccagacattaccgaatcagaatcaatcacagactcagcctttgctgaaaacaccaccggccgtcctgcaaccaattgctccccagacaacttttggtgtccagacccaaccccagccacaaagcttgttacaggcccaaatctccgcagcaagtatcacccctttgctgcagacacaaccgcagccactcttacagcaacctcaacagaaggcagggcttctgcaaccccctgtgcggatagtgtcccagcctcaaccagcgcgcagattagacccgccctccagattctccggccggaatgatcgcggtgaccaggttccgaatcgcaaggatgatagaagtcgagaacgagagcgcgagaggaggcgcagccgagagcgatctccacagaggaagcgtagtagagagcggagtcctcgtagggagcgggaacgctcacctagacgtgtgaggagggtggtccccagatacaccgtacagttttccaagttcagcttagattgtccgtcatgcgacatgatggaactgcggaggaggtaccaaaacctatacattcccagtgatttttttgacgcccagttcacttgggttgacgcttttccactctcccgtccattccagcttgggaactactgcaacttttacgtgatgcaccgggaagtcgaaagcctcgaaaaaaacatggccatcctggacccgcctgacgccgatcatctatatagtgccaaggtgatgttaatggccagtccatcaatggaagacctgtaccataagtcatgcgcactggccgaggatcctcaggagctgagagacgggtttcagcaccctgcccggttggtcaagttcttagtcggaatgaaggggaaagatgaagccatggcgattggggggcattggtctcccagtctcgatggcccagatccagaaaaggatccttccgtcctgattaagactgcaatccgctgttgtaaggctcttaccggaatcgacttgtccgtctgtactcagtggtataggttcgcggagattcggtatcacaggcctgaagagacgcataaagggaggactgtcccagctcacgtggaaacagtggtgctttttttccctgatgtgtggcactgtctgccaacccgtagcgaatgggagacactgagtaggggctataaacagcaacttgtggagaagctccaaggtgagagaaaggaggcagatggggagcaggatgaagaagaaaaggacgatggggaagccaaagaaattagcacccccactcactggtcaaaacttgatccaaaaacgatgaaagtgaacgatctgcgtaaagaactcgaatctcgcgcgctctcatctaagggattaaagtcacaactgatcgcccggctgacgaagcagctgaaggtcgaggaacagaaagaggaacagaaagaactggagaagagtgaaaaagaggaggacgaggatgatgacaggaaatcagaagatgacaaggaggaggaggaaagaaaaagacaggaagagattgagaggcagcgccgtgagcggagatacatcctgcctgacgagcctgccatcatagtgcatccaaactgggccgccaaatccggcaaatttgactgtagcatcatgtctctatcagtactactggattatcgcctggaggacaataaggagcactccttcgaggtgtccctgttcgccgaactctttaacgagatgctccagcgggacttcggagttcgcatatataaatccctactttctctccccgagaaggaggacaaaaaggagaaggataaaaaatcaaaaaaagacgagcgcaaggacaagaaggaagaacgagacgacgaaaccgacgaacctaaacccaaacggagaaaatccggtgacgacaaagacaagaaggaggatcgcgacgaaagaaaaaaagaggataaacgaaaggacgactctaaagacgacgacgaaacagaggaggataacaatcaggatgagtatgaccctatggaggcagaggaagcagaggatgaagaagacgaccgcgatgaagaagaaatgacaaagagagacgacaagcgggatatcaaccgatattgcaaggaacggccatctaaggataaggagaaggaaaaaacacagatgattacgataaaccgcgatctgttaatggcatttgtctactttgatcagagccattgtggttatctgcttgaaaaagatcttgaggagatcctgtacaccctgggcctgcatctgtcccgcgctcaagtcaagaaattgctgaataaggtagtcctgcgcgagagctgcttctacaggaagctgaccgacacaagtaaagatgaggagaatcatgaagagtccgagtccttgcaggaggacatgttaggaaaccggctgttactgcctacccccaccgttaagcaggagtctaaggatgtagaggagaatgtcggccttatcgtttacaatggagccatggtcgacgtcggctcgctgttgcaaaagttagaaaagtccgagaaggttagggccgaagtagaacagaagttgcaactcctcgaggagaagacagatgaagacgagaagacgatcttgaacctcgagaactccaataaaagtttgtcaggcgaactccgagaggtgaaaaaagatctgtcccagttgcaggagaatcttaaaatcagtgagaacatgaatcttcagttcgaaaatcagatgaacaagaccatccgcaatttatccaccgttatggacgagatccacaccgtactgaagaaagataacgtgaagaacgaagataaagaccaaaagtctaaggagaacggcgcttcggtctag

SEQ ID NO: 111589 - DNA, 3408 bp, synthetic construct
  misc_feature 1..3408: note = Description of Artificial Sequence: Synthetic coding sequence
  source 1..3408: mol_type = other DNA
atggcccagtttggaggccaaaagaaccccccatgggccactcagtttaccgctactgcagtttcccagcctgcggctctgggcgtgcaacaacctagccttctcggggccagccctacgatctatactcagcagaccgctttagccgcggccgggctgactactcagactcctgcaaattatcagttgacccaaactgcggccctccaacaacaggcagctgctgcggcagcagcgttacagcagctgcagcagccgcagcagactctcctcacccagccagctgttgctctgcctacatccttatcactctccacaccccagccaacggcccaaattaccgtaagctatcccacaccaagatcttcccaacagcagactcagccgcagaaacagcgtgtgttcacaggcgtggtaactaagctgcatgacacattcgggtttgtggatgaggacgtattttttcaactgtcagcggtgaaaggaaaaaccccgcaggtgggggaccgagtgctcgtcgaagcgacgtacaaccccaacatgccatttaagtggaatgctcagcggatccagacactgccaaatcaaaatcagtcccagacacagcctctgttaaagacgccccccgctgttctccagccaatcgccccccagacaacatttggggtgcagacccaacctcagccacaatctttgctccaggcacaaatttctgctgcctcaattacaccactgctgcagacccagccacagcctctgctgcagcagccacaacaaaaggctggactgctccagccgcccgtacgcattgtcagccagcctcagcctgcgcggaggctcgaccccccctccagattcagcggacgaaacgaccgcggcgaccaggtgcctaaccgtaaggacgacaggagccgcgaaagagagcgagagaggagaagatcccgagaaaggtccccacagcgcaagcggtcgagagagagatcccctagaagagagcgggaacgctctccaagacgcgttaggagggtcgttcctcggtataccgttcagtttagcaagttttccctcgactgcccaagctgcgacatgatggaactccgacgtcgctaccaaaatctgtacatcccctcagatttcttcgacgcccagttcacctgggtagatgctttccccctctctcggccttttcaactgggaaattattgtaacttctatgtgatgcatagagaagtcgagtctctggagaaaaacatggctatcctcgaccctccagatgcggaccacctgtattcagcaaaggtgatgttaatggcctcaccctcaatggaggacctataccacaagagctgtgccttggccgaggaccctcaggagcttagggacggatttcagcaccctgctcgtctcgtgaaatttctcgttggcatgaagggcaaggacgaggccatggctattggagggcattggtcccctagcctcgacgggcccgacccagagaaggatccctctgtcctcattaagaccgccattcgttgctgcaaagctctcaccggaatagacctgtcagtgtgcacacaatggtatcggttcgccgagatcagataccatagacccgaagaaacccataaaggtaggaccgtgccagctcacgtcgaaacagtggtgttgttcttccccgacgtatggcattgcctgcccacacggtctgagtgggagacgctgtctcggggttacaagcagcagctggtggaaaaactgcaaggcgagcgaaaagaggccgacggcgaacaggatgaggaggagaaggatgacggggaagccaaggagattagcacaccaacacactggtccaagctggaccccaaaactatgaaggtcaacgacctgcgcaaggagctagaaagccgagcgctctcctcaaagggccttaaaagccagctgattgcccggttgaccaaacagctgaaggttgaggaacaaaaagaagaacaaaaagagttggaaaagtcagagaaggaggaagatgaagacgatgataggaaaagtgaggacgacaaagaagaagaagagcggaaaagacaggaggaaattgagcgccagcggagagagagaaggtacatccttccggatgaacctgccatcattgtccaccccaactgggccgccaagtctgggaagtttgattgcagcattatgtctctctctgtcctcttagattaccgactggaggacaataaagagcatagctttgaagtgagtctgttcgcagagctgttcaatgaaatgctgcagcgagatttcggggtgagaatctacaaatctttgctcagcttgccagagaaggaagacaagaaggagaaggataaaaagtccaagaaagacgagcgtaaggacaagaaggaggagcgtgatgatgaaacagatgagccaaagccaaagagaagaaagtctggcgacgataaggataagaaggaagacagggacgagcgcaagaaggaagacaaacggaaagacgactcaaaggatgatgacgagactgaagaagacaataaccaggatgagtatgaccccatggaagcggaggaggccgaggacgaggaagacgatcgggacgaagaggagatgacaaagagggacgacaaacgtgatatcaatcgatattgcaaagagcgcccaagcaaggacaaggagaaagagaagacccagatgataaccatcaacagagacctcctgatggcatttgtgtattttgatcagagccactgtggttacctattggagaaagacttggaggagattctgtatacgctgggtctccatctctctagagctcaagtgaaaaagctgctcaataaagtggtcttaagagagtcatgtttctaccgcaagttaactgacacatcgaaggacgaagagaaccatgaagagtcagagagcttacaggaggatatgttgggaaatagactgctactgcctacacccaccgttaagcaggaatctaaggacgtggaggagaacgtaggcctgatcgtgtataacggggctatggtcgacgtgggatcactgctccaaaagctagagaaatccgagaaagttagggccgaagtagagcaaaagctacagttactggaggagaagacagacgaggacgagaaaaccatcttgaacctggaaaattctaacaagtcactgtcaggggaactgcgggaagtgaagaaggacctttctcagctccaggaaaacttgaaaatttctgaaaacatgaacttgcagttcgaaaaccagatgaataagacaatccgaaacctcagtactgtaatggacgaaatacatactgttttaaagaaagataacgttaagaacgaggacaaagatcaaaaaagtaaagaaaacggtgccagcgtttag

SEQ ID NO: 111590 - DNA, 360 bp, synthetic construct
  misc_feature 1..360: note = Description of Artificial Sequence: Synthetic coding sequence
  source 1..360: mol_type = other DNA
atggctcagttcggcgggcagaaaaatcccccatgggctacccagtttaccgcaaccgcagtgagccagcctgctgcgctgggcgtgcagcaaccttctctgcttggcgccagtcctacaatatatacccaacagactgcactggccgccgctggacttactacgcagacccccgctaactaccagctgacccagacggcagccctgcaacagcaggccgcagccgctgccgccgccctgcagcagcaatactcccagcctcagcaggcactgtattcagttcagcagcagctgcaacagcctcaacaaacactgcttactcagccagccgtagccttgcctacatccctgtccctgtag

SEQ ID NO: 111591 - DNA, 516 bp, synthetic construct
  misc_feature 1..516: note = Description of Artificial Sequence: Synthetic coding sequence
  source 1..516: mol_type = other DNA
atggcccagtttggaggccagaaaaaccccccatgggcgacacagttcactgcgaccgctgtgagtcagccagctgcgctcggggtacagcaaccttcgcttctcggcgccagtccgactatttacactcaacagaccgcccttgcagccgctggcctcacgactcaaaccccggctaactatcagctaacccagaccgccgccctgcagcagcaagcagctgcagcagcagccgccctgcagcaacagtacagtcagcctcagcaggcgttatatagcgtccaacaacaactccagcaacctcagcagactctcttaacacagcctgctgtggccctccccacttcgctaagtctctccactccccaacctaccgcccaaatcactgtaagctatcctaccccaaggtcaagtcagcagcaaactcagcctcagaaacagagggtgtttactggcgtggtgaccaagttgcacgatacgtttggattcgtcgacgaagatgtgtttttccaatag

SEQ ID NO: 111592 - DNA, 3132 bp, synthetic construct
  misc_feature 1..3132: note = Description of Artificial Sequence: Synthetic coding sequence
  source 1..3132: mol_type = other DNA
atggcgcagtttggtggccaaaagaatcccccctgggctacccagtttactgcaacggcagtgtctcagccagccgccttgggcgtgcagcagccttcactgctaggcgcctcgccaacgatatatacccagcaaacggccttagccgccgctgggcttaccacccaaacccccgcgaattaccaactcactcaaacagctgccctgcagcagcaggcggcagcagccgccgcagcgctccagcagctgcagcagccccagcagactctgttaacccagcccgccgtcgccttacctacatctttgtccctgtctaccccgcaacctaccgcacagatcaccgtctcatatccgactcccagatccagccagcagcagacccagccccagaaacagcgggtgttcaccggggtggtcactaagcttcatgacacctttggttttgtggatgaagacgttttctttcagctttcagcggtcaaaggaaaaaccccgcaggtgggagacagggtcctggtcgaggcaacctataatccgaatatgccgtttaagtggaatgcacagaggatccagacactgccgaaccagaatcagtcccagacacagccccttttgaagaccccgcccgctgtacttcagccaatcgctccccaaacgacctttggggtgcagactcagcctcagcctcagtcactgttacaggcgcaaatatctgctgcttcaatcacgcctctacttcagactcagccacagccactcctgcagcaaccccagcagaaagctggccttttgcagccacctgtccgaatcgtctcacagccacagcccgcgaggcgactggaccctccctcgcgctttagtgggcgcaatgaccgcggcgaccaggttcctaatagaaaggacgatagatcacgcgaaagggaaagggagcggcggaggtccagggaaagaagcccgcagcgcaaaaggtcaagagagagaagtccaaggcgtgagcgagaaagaagtcctcgccgtgttaggcgcgtggtgccacgctacactgtccagttctccaaattcagcctcgactgccccagctgtgacatgatggaattgcggcggagataccagaacctctacattcccagcgattttttcgatgcccagttcacctgggtagacgccttccctctcagcagacccttccaattgggcaactattgtaacttctatgttatgcaccgggaggttgagagtctcgaaaaaaatatggcgatcttggatcctcctgatgccgaccatctttactcggctaaggtgatgctcatggcgagccctagcatggaagacctgtatcacaagtcatgtgctctcgcagaagatccacaagagctgagggacggatttcagcatcccgcccgtctggttaagtttttggtgggcatgaaagggaaagatgaagccatggcaatcggtgggcactggtcaccttcactggacggacctgatcctgagaaagatccttctgtgctgataaagacagctatacgatgctgcaaggccctgacgggaatcgacctctcagtctgcactcagtggtataggttcgcggagatccgctaccatcggcccgaggagacgcacaagggccggacagtcccagctcacgtggaaaccgtggtgctgttttttcctgatgtgtggcattgcctgcccaccaggtctgagtgggaaaccttatcaaggggctacaaacagcagctagtcgagaagcttcagggtgagcgcaaagaggccgacggagaacaggatgaagaggagaaagacgatggggaggccaaggaaatttctaccccaacgcattggagtaaactcgacccaaagacgatgaaagtgaacgatctgcgcaaggaactggaaagcagggccttgtcctctaaaggactgaaatcgcagcttattgcccggctcaccaaacaactgaaggtagaggaacagaaggaagagcaaaaggagctcgagaaaagcgaaaaagaggaggatgaagatgacgacaggaaatctgaggatgacaaagaggaggaggagcggaaacgtcaagaagagatcgagcgacagagaagagagcgcagatatattctccctgacgaacctgcgatcattgtgcatccgaactgggcagccaaatcaggcaaatttgactgtagtattatgagtttgtccgtgttgttggactatcggctggaagataacaaggagcatagtttcgaggtgagtctgttcgctgagctgtttaatgagatgctccagcgcgacttcggcgtgcgtatttacaaaagtctgctctccttgccagagaaggaggacaagaaagagaaagataagaaaagcaagaaagatgagagaaaagataaaaaggaagagagggatgatgagaccgatgaaccaaaacctaagcggcgaaaaagcggcgacgacaaggacaagaaggaggaccgggacgagagaaagaaggaggataaaagaaaggacgactccaaagacgatgacgagacagaagaagataacaaccaggacgagtacgatccaatggaagctgaggaggccgaggatgaggaggatgatagagatgaggaggaaatgactaaacgtgacgataagagagacattaacaggtactgtaaggagaggcctagtaaggataaggagaaggaaaagacacagatgatcacaatcaatagggacctgctcatggccttcgtatactttgaccagtctcactgcgggtatctgctggaaaaggacttagaggagattctgtacacacttggcctgcacttatctcgggcgcaagtgaagaaacttttgaataaagtggtattgcgtgagtcatgcttctataggaaactcaccgacactagtaaggatgaggagaatcacgaagaatctgagtcgctgcaggaagatatgctggggaatcggctgctgctacccacccccacagtcaagcaggaatcgaaggacgtggaggagaatgtgggccttatcgtttataacggtgccatggtcgatgttgggtcactgctgcaaaagctagaaaagagtgagaaagttcgcgccgaagtcgagcagaagcttcagcttctgtag

SEQ ID NO: 111593 - DNA, 726 bp, synthetic construct
  misc_feature 1..726: note = Description of Artificial Sequence: Synthetic coding sequence
  source 1..726: mol_type = other DNA
atgtttgctcgcggtttaaagcgcaaatgcgtgggccacgaagaagacgtggagggagctctggccggactgaagaccgtgagcagctacagcctgcagaggcaaagcttattggacatgtcattggtcaaactccaactgtgtcacatgttggttgaacccaatctgtgtcgatccgttttgatcgcgaatacggtgagacagatccaggaagagatgactcaggatggtacttggaggaccgtagctccacaggccgctgagcgggcacctctggataggctcgtttccaccgagatactgtgcagagctgcttggggacaagaaggagcccacccagcgcccgggctgggggacggtcatacccaagggccggtttccgacctgtgccctgtcacctccgcccaagcccctcgacacctacaatcatccgcttgggaaatggatgggccaagggagaaccgaggttcctttcacaagagtctggaccagatatttgaaactctcgagacaaagaaccccagctgtatggaggagctgttctcagacgtggactctccttactacgatctagacactgtgttaaccgggatgatgggaggagcccggccagggccttgtgagggtctggaaggcctcgcaccagctactcctggacctagttcttcctgtaagagcgacctgggtgagctggatcacgtggttgagatcttggttgagacctag

SEQ ID NO: 111594 - DNA, 726 bp, synthetic construct
  misc_feature 1..726: note = Description of Artificial Sequence: Synthetic coding sequence
  source 1..726: mol_type = other DNA
atgtttgcccgtggcctgaagcgtaagtgcgtaggtcatgaggaagatgtggagggggccctagcaggcttgaagaccgtctcttcttacagcttacagcgccaatccctgttggacatgtctcttgtaaagctccaactctgccacatgctggttgaacctaatctctgccgatctgtactgattgccaatactgtgcgccagatccaggaagaaatgactcaggacggtacctggaggacagttgccccacaggccgccgagagggcccctctggaccggcttgtgtcaactgaaattttgtgtagggcagcttggggccaagaaggcgcccatccagcgcccggtctgggggatgggcatacccagggacccgtgagtgacctctgccccgtgacaagcgcccaagctccaagacatttacagtccagtgcttgggagatggacgggccgcgagaaaataggggcagtttccacaagagtctagatcagatctttgaaacgcttgaaacaaaaaaccctagttgcatggaggaactgttttcggacgtagatagcccttattacgacctggacactgtgctgaccgggatgatgggaggtgcccgcccaggtccttgcgagggcctcgaggggctggccccggccacccctggcccgagcagctcttgcaagagtgatcttggtgagctggaccacgtggtggagatcctcgtggaaacttag

SEQ ID NO: 111595 - DNA, 759 bp, synthetic construct
  misc_feature 1..759: note = Description of Artificial Sequence: Synthetic coding sequence
  source 1..759: mol_type = other DNA
atgtcaggtagacgaacgcgaagcggcggcgccgcccaacgcagtggacccagggctccttcacccactaagcccctccgtaggtctcagagaaagtccggttctgaactaccatctatcctgcccgaaatctggcctaagacaccatctgctgcggctgtgcggaaaccaattgtcctaaagaggattgttgcgcatgccgtggaggttccagcagtacaaagccctaggcgcagccccaggatctccttcttcctcgagaaggagaatgagccacctgggcgagaacttactaaagaagacctgttcaagactcattcagtgcctgcaacaccaacaagcactcctgtccctaatcctgaggccgagagttcgtccaaggaaggagagctcgacgccagagacctcgaaatgtccaagaaggtgcgaagatcttacagccgactcgaaactctggggagtgcaagcacctcaacccccggcaggcgcagctgctttggcttcgagggcctgctgggcgcagaggacttgtccggagtctcaccagtggtgtgtagtaagctcactgaggtaccgagagtctgtgccaagccatgggctccagacatgacgttgcctgggatctcacctcctcccgagaaacaaaagcgtaaaaagaaaaaaatgccagagatcctcaagaccgaattagatgagtgggccgctgccatgaacgcagaattcgaggcggccgagcaatttgatctgctggtggagtag

SEQ ID NO: 111596 - DNA, 216 bp, synthetic construct
  misc_feature 1..216: note = Description of Artificial Sequence: Synthetic coding sequence
  source 1..216: mol_type = other DNA
caatttcttgaccaggaagactggggccctcaaaggacctcaaaagaaattaggcagctgcagaacgactgtatgcgactgagggagtccctaaacactacgcaggtgcacaacttggctctcggggaaaaactccagaatttgccgaccctactgtacaaaagcctgaaggagggcgctcaggcaattcaagaggaggctcaggccattcagtag

SEQ ID NO: 111597 - DNA, 1353 bp, synthetic construct
  misc_feature 1..1353: note = Description of Artificial Sequence: Synthetic coding sequence
  source 1..1353: mol_type = other DNA
atggacgcccggcgagttccacaaaaagacctgagagtgaaaaaaaatctgaaaaagtttcgttacgtgaagctcatttccatggagacctctagttcctctgacgacagctgtgactcattcgcgtctgacaacttcgccaatacaaaacccaaatttcgttcagatatatctgaagaactcgctaatgtgttttatgaagatagcgacaatgagagcttctgtgggttctcagagtccgaggttcaggatgtgcttgatcactgcggctttctgcagaagcccaggcccgacgtcacaaatgagctggcgggaatattccacgcggattccgacgacgagagtttctgcgggttttccgaaagcgagatccaggatgggatgaggttacaaagcgtaagagagggatgccgcaccagatcacagtgccggcattccggcccgctgcgtgtggcgatgaaattccctgcccgatcaactcgcggcgccaccaacaagaaggccgaaagtagacagccttctgagaactccgtgacagacagcaacagcgattccgaggacgaatccggcatgaacttcttagagaaacgtgcactaaatatcaaacagaataaagccatgctggctaaactgatgtcagaattagagagtttccccggatcctttagagggaggcaccctttgccagggtccgattcccaatcccgccggccccgccgaaggacctttcccggagtcgcgtcacggaggaaccctgaaagacgggcccggcccctgacacgctctcgttctaggattctgggatcattggatgccctcccgatggaggaagaggaagaggaggacaagtatatgctggtacgaaagagaaagacagttgatggctacatgaatgaagacgatcttccccggtctcgacggtcacggtcgagtgttacgctccctcacatcatccgtccggtggaggagatcacagaagaggaactggagaacgtatgcagtaactcacgcgagaagatctataaccgctcgctgggaagcacctgccatcaatgcagacaaaagaccattgatacgaagactaactgcagaaacccagactgttggggtgttcggggccaattttgtggaccctgcctccgtaaccggtatggcgaagaagtccgagatgcacttctagatccgaactggcactgcccgccttgtaggggtatctgcaattgcagtttttgtcgtcagcgcgacggcaggtgcgccaccggggtgcttgtgtacctggccaaatatcacggttttggaaacgttcacgcttacctgaagtccctgaagcaagaattcgaaatgcaggcttag

SEQ ID NO: 111598 - DNA, 1116 bp, synthetic construct
  misc_feature 1..1116: note = Description of Artificial Sequence: Synthetic coding sequence
  source 1..1116: mol_type = other DNA
atggatgctaggcgcgtaccccaaaaggacttgagagtcaagaaaaacctgaaaaagttcagatatgtcaaactaatcagcatggagacctcgtcaagcagcgacgattcatgtgatagtttcgcatccgacaatttcgctaacacaagactgcagagtgtccgggagggttgtagaacccggagccagtgccggcacagtggccctctcagggtggctatgaaattccctgcgcggtctacgagaggggccaccaacaaaaaggccgaatcgaggcaaccaagtgagaatagtgtgactgattccaattccgacagtgaagatgagagcgggatgaacttcttggaaaagagggccctcaacatcaagcagaataaggcgatgctcgcgaagctgatgtccgaactcgagagcttccctggttcattcagagggaggcaccccttgccgggaagtgatagtcaaagtaggcgcccacgacgccgtacatttcctggagtagcaagccgtagaaatcccgaaaggcgagcacgtccactaacaaggagcaggagccgcattttgggctcacttgatgcactccccatggaggaagaggaggaagaggacaaatatatgcttgtgcggaagcggaaaacggttgacggctatatgaacgaagatgacttaccacggagtcgccgttctagaagcagcgtaacacttccccatatcattcggcccgttgaggaaatcacagaagaagaactggagaatgtgtgcagtaatagccgcgagaagatttataaccggagcctcgggtccacatgccaccaatgtagacaaaaaacgatcgatacaaaaaccaactgcaggaatcccgattgttggggagtccgaggtcagttctgtgggccttgcctgcgaaaccggtatggcgaggaggtgcgcgatgccttactcgatccaaattggcactgtcctccttgtaggggcatatgcaactgctccttttgtagacagcgcgatggccgctgcgccaccggtgttttggtataccttgccaagtaccatggctttgggaacgttcacgcctatctgaagagcctgaaacaggagttcgaaatgcaggcatag

SEQ ID NO: 111599 - DNA, 966 bp, synthetic construct
  misc_feature 1..966: note = Description of Artificial Sequence: Synthetic coding sequence
  source 1..966: mol_type = other DNA
atggacgctaggcgggtcccccagaaggaccttcgcgtcaagaaaaacctcaagaaatttcgttacgtaaagctcatatcaatggagaccagttcctcctccgatgactcttgcgactcctttgcttccgataatttcgcaaacacaagactgcagtcggtccgcgaaggctgcagaacccgatcacagtgccggcacagcggccccctccgggtggctatgaaatttcctgcccggtccacacggggggcaactaacaaaaaagcagaatcaaggcagccatctgaaaactccgttaccgactctaacagcgactcagaagatgagtccggtatgaatttcttagagaagagggccctgaacattaagcagaataaagctatgttagcaaagctcatgtccgagcttgagtcgttccccgggtcatttaggggacgtcatcctctccccggttctgactcccaatcccggcgtccacgcagacggactttccctggcgtcgcttccaggaggaatccagagaggcgggctcggccactgacgaggagtcggtcccgcatcctggggtcactggatgctctgccaatggaggaagaagaagaggaagataagtacatgctggtgcggaaacggaagaccgtggacggatacatgaacgaggatgatctcccacggagccggcggtctcggagcagtgtgacactccctcatataattcggccggtggaggagatcaccgaggaggaacttgaaaatgtctgcagcaattccagagaaaagatctataatagatccctcaactggcactgtccaccatgtcgtggcatctgtaactgtagcttctgccggcagcgggatggaaggtgcgcaactggcgtgctcgtttacctggcaaagtatcacgggtttgggaacgtgcacgcttatctcaagagcctcaagcaggagtttgaaatgcaggcctag

SEQ ID NO: 111600 - DNA, 1263 bp, synthetic construct
  misc_feature 1..1263: note = Description of Artificial Sequence: Synthetic coding sequence
  source 1..1263: mol_type = other DNA
atggaaactttgagttccgaggaaagctgcgacagttttgactcactcgagtctggcaagcagcaagatgtgcgattccatagcaaatacttcactgaagagttgcggcggatttttattgaggataccgattcagaaacggaggattttgccggattcacacagagcgaccttaatggcaaaactaacccagaggtcatggtggtcgagtccgacctgtcagatgacgggaaagcctctctcgtctccgaagaggaggaggacgaagaggaagataaggcgaccccgcgaaggtcccggtccaggcgctcgtctatcggcctaagggtggcctttcagtttccaactaaaaaactcgcaaacaagcctgacaaaaactcttcctccgagcagcttttctcctcagcccgattgcaaaacgaaaaaaaaacaatcctggaaaggaagaaggattgtcggcaagtgatacagagagaagacagtacgtctgagtctgaagatgactcccgggacgaaagtcaggagagctcagacgcattgctgaagcgaacgatgaatatcaaagagaataaagccatgttggctcagttattggctgagttaaactccatgcccgacttttttcccgtgcgtactcccacatccgcatctcgaaaaaaaaccgtgcgcagagccttctccgagggtcagattacacgccgcatgaatcctacccgatcagcacggcctcccgaaaagttcgcccttgagaactttactgtgtctgccgccaaattcgctgaggaattctacagctttcgccgcaggaaaaccatcggtggcaaatgtcgcgagtacagaaggcgacacagaatctcatcctttagacccgtcgaagatatcaccgaggaggacctggagaacgtcgcgatcacagtgagggacaaaatctatgataaagtactcggcaatacttgtcaccagtgccgtcaaaaaacaattgacacaaaaaccgtttgtaggaatcaggggtgttgtggcgtgagaggacagttctgcggaccgtgcttgaggaaccgttacggcgaggatgtccgatccgccttactggaccctgactgggtgtgcccaccttgcaggggcatctgcaattgtagttattgtcgcaagagagacggcagatgcgccacggggatcttgattcatctagccaaattctatggctacgacaatgtgaaggaatacctggaaagtctccagaaagaactagtcgaggataactag

SEQ ID NO: 111601 - DNA, 1227 bp, synthetic construct
  misc_feature 1..1227: note = Description of Artificial Sequence: Synthetic coding sequence
  source 1..1227: mol_type = other DNA
atggagctggccacccgatatcagattcccaaagaggttgcggatatctttaacgctccatcagacgatgaagaatttgttggctttagggatgacgtgccaatggagacactcagttcggaagagagttgtgactcttttgacagcctggagtccggtaagcaggtggttgagagtgacctaagcgatgacggaaaagcgtctttggtcagcgaggaagaggaggatgaagaagaagacaaggccacccctagacgatcccgtagccgccgcagctcaatcgggctccgggtggcatttcagttccctactaagaaactagccaacaagccagataagaactcttcttctgagcaactctttagttcagctaggctgcagaacgagaagaagactattctggaaaggaagaaggattgccggcaggtcattcagcgtgaagactctacctctgagagcgaggacgattcccgagacgaaagccaggaatcctcggatgcactactgaaacggacgatgaacataaaagagaacaaagctatgcttgctcagctgctggcagaactcaactctatgccagattttttcccagtccgcacccctaccagcgcaagccgcaaaaagacagtaagacgtgcctttagcgagggacagattacacgccggatgaacccaacaagaagtgccagaccacctgaaaaattcgccctcgaaaatttcacagtcagcgctgccaagttcgcagaagagttttactcctttcgccggcgcaagaccattgggggcaagtgcagggaatacagaagaaggcaccgtatttcctcttttaggcccgtcgaagacataaccgaggaggacctggaaaatgttgctattaccgtccgggataagatctacgataaggtcctgggtaacacatgtcatcagtgtcgccagaaaaccatagatacaaagaccgtgtgccgaaatcagggctgctgcggagtaaggggccagttttgcggtccgtgtctgagaaatcgctatggggaggatgtgcggagcgcactcctggatcccgactgggtctgtccaccctgccgggggatttgtaattgcagttactgccgaaagagggatggcaggtgtgccaccggaattcttatccacttggctaagttctacgggtacgacaatgtgaaggaatatctggaatcattgcagaaggagctcgtggaagataactag

SEQ ID NO: 111602 - DNA, 1365 bp, synthetic construct
  misc_feature 1..1365: note = Description of Artificial Sequence: Synthetic coding sequence
  source 1..1365: mol_type = other DNA
atggaactggcgacacggtatcagatccctaaggaggtcgccgacattttcaatgcaccatctgatgacgaggagttcgttggcttccgcgacgacgtgcctatggaaaccctctcttcagaggagagttgcgactctttcgattctctggagagcgggaagcagcaggatgtgaggtttcatagcaagtacttcactgaggagcttagacgcatatttatcgaggataccgattccgagacagaggatttcgctggttttacccagagcgacttgaatggcaagactaaccccgaagtgatggtggtggagtcagatctctctgacgatggtaaggctagcttggtctcagaggaagaggaggatgaagaagaggacaaggccacccctcggcggtcaaggtcccgcagatcttccattggcctgcgcgtggcatttcagttcccaactaaaaagcttgccaataagccggataaaaattccagctcggagcagttattttcatctgcgcggctgcagaatgaaaaaaaaaccattctggagcggaaaaaggactgcagacaggttatccagagggaagatagcacctctgaatcagaagatgattcacgcgacgaaagccaggagtctagcgacgcactgctgaaaaggaccatgaacataaaagaaaataaagcaatgttagctcagcttctggctgaattaaatagcatgcccgatttttttccagttcggactccaaccagcgcctcaagaaaaaagactgtcaggcgcgctttctccgagggtcagatcacccggcggatgaacccgacaagatcagcaagaccccctgaaaaattcgctctcgaaaactttacagtctccgcggctaaattcgcagaggagttttattcttttagacgcagaaagactatcggtggcaaatgccgcgaatacagacgaaggcaccgcatttcctcgttccggccagtggaagacattaccgaggaagatctcgaaaatgtagctatcaccgtgagggacaaaatctatgacaaggttctgggcaacacctgccaccagtgtagacaaaagacgattgacacaaaaaccgtgtgccgtaatcagggatgttgtggcgtgcgagggcagttctgcggcccatgtctaaggaatcggtatggcgaagacgttaggagtgcactgctggacccagactgggtttgccccccttgccgcgggatttgtaactgctcatattgccgaaaaagggacggaagatgcgctactgggatcctcatacacctcgctaagttttacgggtacgataacgtcaaggaatatcttgagagcctccagaaagagctggttgaggataattag

SEQ ID NO: 111603 - DNA, 291 bp, synthetic construct
  misc_feature 1..291: note = Description of Artificial Sequence: Synthetic coding sequence
  source 1..291: mol_type = other DNA
atggagaccttatcttccgaggaatcttgtgacagcttcgactccctagagtcaggtaagcagcaggacgtccgctttcactctaagtactttactgaggagctccgacggatttttatcgaggataccgattccgaaacagaggatttcgcgggtttcacccagtcagatttaaacgggaagactaatcccgaggtgatggttgtggagagcgacttaagtgacgatgggaaggcttcgcttgtctcagaagaagaggaggacgaagaagaagataaagcaactccctag

SEQ ID NO: 111604 - DNA, 843 bp, synthetic construct
  misc_feature 1..843: note = Description of Artificial Sequence: Synthetic coding sequence
  source 1..843: mol_type = other DNA
atggcccctaggaaagggtcttctcgagtcgcaaagacaaacagtttgcgccgaagaaagctcgcttccttccttaaggacttcgaccgggaggtcgaaattcggatcaagcagatcgaatccgacaggcaaaacctcctgaaggaggtggacaacctctacaacatcgagatcctccgtctgcccaaagcccttcgtgaaatgaactggcttgactattttgctctaggaggtaataagcaagcgctggaagaggcggctaccgccgacttggacataaccgagatcaacaagctcacagccgaagctatccagaccccactgaaaagcgcgaagacgagaaaagtgatccaagtcgatgagatgattgtcgaggaggaagaggaggaggagaatgagcgtaaaaaccttcaaaccgcacgcgtgaagcgctgccccccctcaaagaagcgaactcaaagcatccagggtaaggggaaaggtaagagatccagccgggccaatactgtcaccccagccgttggaagactggaggtgagcatggttaagcctactccaggcttgacaccacggttcgactctcgcgtattcaagaccccagggctcaggacacctgctgcaggcgagaggatttataacatcagtggcaacggaagccctttggccgattccaaagaaatctttcttactgtgccggtgggcggaggcgagtctctgagactacttgcatccgacttacaacgccacagtattgcgcaattagatccagaggctctgggaaacattaagaagctgtccaaccgattggcccagatttgtagctcaatccggacccacaaatag

SEQ ID NO: 111605 - DNA, 843 bp, synthetic construct
  misc_feature 1..843: note = Description of Artificial Sequence: Synthetic coding sequence
  source 1..843: mol_type = other DNA
atggctcctcggaaaggctctagtcgggtggctaagactaatagtctgagaagacggaagctggcctcatttctgaaggatttcgatagggaggtggagattaggatcaagcagattgagtccgatcggcagaatctgctgaaggaagtggacaatctgtataatatcgagatcttgcgacttccgaaagcactgcgtgagatgaattggcttgattacttcgcattgggtggaaacaagcaagctctcgaggaggcagcaaccgcggatctagatatcacagagatcaacaagctcacggccgaggctatacagacacctctaaagtctgcgaaaacaaggaaagttatccaggtggacgaaatgattgtggaggaagaggaagaagaagagaacgaacgtaaaaatctccaaacagcccgggtgaaacggtgtcccccgagtaagaagcgcacccagtctattcaggggaaggggaaagggaagagaagctctagggccaacacggtgacgccagccgtgggccgactcgaagtgtctatggtgaagcccacccccggcctgactcccagattcgactcaagagtgttcaaaactccgggcctccggaccccagcggctggcgaacgaatctataacataagcggcaatggtagccctttggctgacagtaaagaaatctttctgaccgttcccgtgggtggcggtgagtctctccgactgctcgcatctgatctccagcggcattctatcgcgcagctggacccagaggcgcttggcaacattaaaaagctctctaaccgcctagcacagatctgttcgtccatcagaacgcataagtag

SEQ ID NO: 111606 - DNA, 414 bp, synthetic construct
  misc_feature 1..414: note = Description of Artificial Sequence: Synthetic coding sequence
  source 1..414: mol_type = other DNA
atgcccaacttcgctggtacttggaaaatgcgcagttccgagaatttcgatgagctactcaaagccctcggggtgaacgcaatgctgagaaaagtcgccgtggctgctgcctccaaaccccatgttgagataagacaagacggcgatcagttctacataaagacaagcacgaccgtccgtacgaccgagatcaattttaaagtgggagaggggttcgaggaggagacggtggacggtcgcaagtgccgatccctggccacttgggaaaacgagaacaagattcattgtacacagactctcctcgaaggtgatgggcccaagacttactggacgcgcgagctggccaacgacgaactcatcctgacattcggagctgatgacgtcgtctgtactagaatatacgtgcgcgagtag

SEQ ID NO: 111607 - DNA, 249 bp, synthetic construct
  misc_feature 1..249: note = Description of Artificial Sequence: Synthetic coding sequence
  source 1..249: mol_type = other DNA
atgcctaatttttctgggaattggaagataatcagaagcgagaactttgaggagctgctcaaagttctgggggtgaacgtgatgttaaggaaaattgccgtcgccgcagcttccaagcccgcagtggaaataaagcaagaaggagatactttctatattaaaacttccactaccgttcgcacgacagagattaactttaaggtcggcgaagagttcgaggaacagaccgtagacggtagaccctgctag

SEQ ID NO: 111608 - DNA, 417 bp, synthetic construct
  misc_feature 1..417: note = Description of Artificial Sequence: Synthetic coding sequence
  source 1..417: mol_type = other DNA
atgccaaacttctccggaaactggaaaatcattcgctcagagaacttcgaggaactcttaaaggttctgggcgttaatgtgatgctgcgcaagatcgctgttgccgccgccagtaagcctgccgttgaaattaagcaagagggcgatacattctacatcaaaacctctaccacggtgcgcacaaccgagattaactttaaggtcggtgaagaatttgaagaacaaacggtcgacggaagaccctgtaagtctttggtgaagtgggagagtgagaacaaaatggtgtgcgagcagaaactcctgaagggagagggacctaaaacgagctggacaagagaactgacgaacgacggtgaactgattttaactatgaccgccgatgacgtagtgtgcaccagggtgtatgtgcgagagtag

SEQ ID NO: 111609 - DNA, 417 bp, synthetic construct
  misc_feature 1..417: note = Description of Artificial Sequence: Synthetic coding sequence
  source 1..417: mol_type = other DNA
atgcctaattttagtggcaattggaaaatcatccgtagtgaaaacttcgaagaactcctgaaggttttaggcgtgaacgtgatgctgcgaaagatcgccgtcgcagccgcgtccaagcccgccgtggagataaaacaggaaggggatacattctacataaagacttctacaaccgtgaggacaacagagattaattttaaagtaggcgaggaatttgaagaacagactgttgatggacgcccatgcaagtcacttgtgaaatgggaatccgagaacaagatggtctgcgagcaaaagctcttaaagggagagggtccaaagacctcatggaccagggagttgacaaatgacggtgaactgatcctgacgatgacagcagacgacgtggtgtgcactcgagtgtacgtgagggagtag

SEQ ID NO: 111610 - DNA, 744 bp, synthetic construct
  misc_feature 1..744: note = Description of Artificial Sequence: Synthetic coding sequence
  source 1..744: mol_type = other DNA
atgggtacctcatccacagactcccagcaggccgggcatagacggtgttcgacctccaatacctctgccgagaatctgacgtgcctctcactccccggctctcctggcaaaaccgcacccctgcccggtcccgcgcaagccggcgccgggcagcccctgcccaagggctgcgccgcagttaaggccgaggtcggcatcccagctcctcatacctcccaagaagtgcgaatccatatccgacgcttgctgtcatgggcggcccctggtgcttgcggtcttaggtctacaccctgcgctctcccacaagcgctcccacaagcacggccatgtcctggacgatggttttttcctggctgctcactccctactggaggcgcacagactatactgtcactgtggacctggagacactttctgaattgggctctgcagcagagagaggagaactctggcagggcacgccgggtacctcctgttcccaggactgctcctgtgagcaaaggtgagggctcccaccctccacagaattcgaatggcgagaaggtcaaaaccattacgcccgacgtgggcttacaccagagcctgacatccgatcccactgttgccgtgctaagggctaaacgagctcctgaggcccacccccctaggtcctgctcagggagcctgactgctagggtttgccacatgggagtctgccagggacagggagacactgaagatgggagaatgaccttgatgggatag

SEQ ID NO: 111611 - DNA, 744 bp, synthetic construct
  misc_feature 1..744: note = Description of Artificial Sequence: Synthetic coding sequence
  source 1..744: mol_type = other DNA
atgggcacgtcatccaccgattctcagcaagccggccaccgccgttgctcgacgagcaatactagcgctgaaaacctcacctgcctctccctccccggttcgccaggcaaaacggccccattgccaggccctgctcaagccggggcgggacagcccctgcccaaaggatgtgctgccgtcaaggccgaagtgggcatccctgctcctcacacttcccaggaggtcaggattcacatacgcagactgctttcatgggccgcccctggggcctgtggactgcggtctaccccctgcgcactgccacaagccctgcctcaggctagaccttgccccggccgctggtttttcccaggctgctccctgcccacaggcggggcacagaccattctttcgctttggacatggcgccattttttgaactgggctcttcaacagcgggaggaaaatagcggcagagctcgtagagtgcccccggtgcctcgcacggcccctgtgagcaagggcgagggaagccatcctccgcagaatagcaatggggaaaaagtgaagacaatcaccccagatgttggactgcaccagtcattaacgagcgatccaacagtggcggtactgcgggcaaaaagagccccagaagcacatccccctcgctcatgctcaggcagcctgacagcacgcgtctgccacatgggcgtgtgtcaaggccagggcgacaccgaggacgggcgcatgacacttatgggttag

SEQ ID NO: 111612 - DNA, 4218 bp, synthetic construct
  misc_feature 1..4218: note = Description of Artificial Sequence: Synthetic coding sequence
  source 1..4218: mol_type = other DNA
atggccgcccgctctcccccctctcctcatccctcccctcccgcccggcaactaggaccacggagtccacgggtgggacggggcgccgaggtgcacgccatgagatcggaagctagcggctttgccggcgctgctagagaagtggttgccgacgaaagcgacaaaatttgggtaggcgaggaaggtagcggcggcagacggggtccgggcggagctgctcctgctcacgcccctctgttgtcagcacccatgggatctcggcgtcttgaaggcatatcggtggaagaggcaatggtgacccgcactcaactccttgaggaggagttatccagcttaaaggaagagttagcactttgccaggctgataaagaatttgtgtggagtctctggaagcgcctgcaggtgactaacccggacttaacccaagttgtaagcttggtcgtagagcgcgagaagcagaaatccgaagccaaagacagaaaggttctcgagattttgcaagtaaaagatgccaagattcaggaattcgaacagcgcgagagcgtcctgaaacaggaaatcaatgaccttgtcaagcggaagattgccgttgacgaggaaaatgcattccttcgcaaagagttttccgacctggagaagaagttcaaggacaagtctcaggagataaaagacactaaggaatgtgtccaaaataaagaggagcagaaccgtcttgtgattaagaacttggaagaagaaaacaaaaaactgtcaacacgttgtaccgacttactcaacgatttggaaaagctgaggaagcaggaagcccatctgcgcaaggagaaatatagcactgacgcaaaaattaaaaccttcgaggataatctcatagaggccagaaaagaagtagaggtctcccaatcaaagtacaacgcactgtctctacaattatcaaacaaacagaccgagctgattcaaaaagatatggacatcacactagttcgccaggaacttcaggagcttcaaaacctctataagcagaacagtacccacacagcacagcaggcagaactgatccagcagttgcaggtacttaatatggatactcaaaaggttctgcgtaatcaggaggacgtgcatacagctgagagcatcagctatcagaagctctataatgagctacatatctgcttcgaaacgaccaagagcaacgaggctatgctgagacagtccgtgaccaatcttcaggatcagctgctccagaaggaacaggagaatgcgaaactcaaagagaagctgcaggagtcacagggtgctcccctgcccctcccgcaggagtccgatcccgattattctgcacaggttccgcaccgccccagcctgtcgagtctcgaaactctgatggtcagccagaaatctgagattgaatacctccaggagaagcttaaaatagccaacgaaaagctgagtgagaacataagtgccaacaaaggtttctccaggaagtccattatgacatctgccgagggcaaacacaaggagccccccgtaaagaggagccggtcgctgtctcctaaatccagttttaccgactctgaggagctccagaagttgcgtaaagcagaacgcaagattgaaaatttggaaaaggcactccaactgaaatcccaggaaaacgatgagctcagggatgcacatgaaaagaggaaagaacgactgcagatgttgcagactaactaccgggccgtgaaggagcagcttaaacagtgggaggagggttctgggatgaccgaaatccgcaagattaaacgggccgacccccagcaactccgccaggaggattccgatgcagtctggaatgagctggcctatttcaaacgcgaaaatcaggaactgatgattcaaaagatgaacctggaggaagagcttgatgaattaaaagtgcacattagcatcgacaaagcagccattcaggagctcaatcggtgtgtcgccgagaggcgagaggagcagctctttcgaagtggtgaggacgacgaggttaagagaagcacacccgaaaaaaacggaaaggaaatgctcgagcaaaccctccagaaagtgaccgagctggaaaacagactgaaaagcttcgagaagcgaagccgtaagctgaaggagggcaacaaaaagctgatgaaggagaatgattttctgaaaagtttgcttaagcaacaacaggaagatacagaaactagggagaaagaattagaacagataatcaaagggagtaaggacgtggagaaggaaaacacggaactgcaggtgaagatcagcgagctcgagacagaggttacatccctgcggcgccaagtagctgaggctaacgccctcaggaacgaaaatgaggagcttatcaacccaatggagaagtctcatcagagcgcagaccgggccaagagcgaaatggcaacaatgaaagtgagaagcggtagatacgactgcaagaccacgatgaccaaggtaaagttcaaagctgctaaaaaaaattgtagcgtcggcaggcaccacacagtgttaaatcactcaatcaaggtgatgtcaaatgtgtttgaaaacttgtcaaaggacggatgggaggacgtttcagagagctcttcagactccgaagctcagacatcccagaccctaggtactatcatagttgaaacatcacagaagatcagtcccacagaagacggtaaggaccaaaaggagtcggatcctacagaagatagccagacacaggggaaggagattgtgcagacatatttgaacatcgatggcaagactcccaaggactactttcacgataaaaatgccaagaaaccgacgttccagaagaagaattgtaagatgcaaaaaagctcacacacagccgttccaactcgagtgaatcgggagaagtataaaaacattactgcacagaagagctcctcaaatatcatcctcctgcgagaaaggatcatctccctgcaacaacagaacagtgtcctacaaaacgccaaaaaaacagccgaactcagtgtgaaggagtataaagaggttaacgagaaactgctccaccagcagcaggtgagcgatcagagattccagacaagtagacaaactatcaagaagctaaatttggatctcgccggactccgtaaggaaaaggaggacctgctgaagaaattagaatccagtagcgaaatcacgagtctggcggaggagaactctcaggtgacatttccaagaatccaggtaacctctcttagccccagccgctctatggatctagagatgaaacagctgcagtataaactgaagaatgctaccaatgagctgaccaagcagtcatccaacgtgaaaactcttaaattcgaattattggccaaggaggaacatatcaaggaaatgcacgaaaaaatttccagaatggagcgggatattaccatgaagaggcaccttatcgaagaccttaagtttcgccaaaaagtcaacctggagtcaaataagtcctttagtgaaatgctccaaaatctcgacaagaaggttaagacactcacggaggagtgctccaataaaaaagtgtctattgactcgttaaagcagcgactgaacgttgcggtgaaagagaagtcccagtatgagcagatgtaccagaaaagcaaagaagagctcgagaagaaggatctgaagttgacactactggtcagccgcatctctgaaactgaaagtgctatggccgagattgaaacggcagcttcgaagcaattgcaggaactggcccttcagagcgaacaggtgctggaaggcgcccagaaaaccttactcctcgctaacgaaaaagtggaggagtttactacttttgttaaggcccttgccaaggagctgcagaacgacgtgcatgtggtaagaaggcaaattagggagctcaaaaagatgaagaaaaaccgggacgcctgtaagacatccacccacaaggctcagaccttggctgccagcatcctgaacattagccgatccgacctggaggaaatcctcgacactgaagatcaagtggaaatagagaagactaaaatcgacgctgagaacgacaaggagtggatgttgtatatccaaaagttgctagaaggacagagtctggcactgagccctcggctgaagtgtaacggcgcaattgtagctcaccagaacctacggttgcccgactctagttccagtgccagcgcctcatag

SEQ ID NO: 111613 - DNA, 1176 bp, synthetic construct
  misc_feature 1..1176: note = Description of Artificial Sequence: Synthetic coding sequence
  source 1..1176: mol_type = other DNA
atggccgcccgaagccccccatccccacacccttccccaccagcgcggcagctgggacctaggagccctagagtcggcagaggcgcagaggtgcatgcgatgcggtccgaggcttccggctttgccggagctgcccgcgaagtggtagcagacgagtctgacaagatatgggtgggcgaggaaggctcgggcggacgaagaggcccggggggggcagctcctgcccacgcccccttactctcggcccccatgggaagcaggagacttgaagggatctcggtggaagaggccatggtgacgagaacacagctcctggaggaggagctgagctctctaaaagaggagctggcgctgtgccaggcggacaaggaattcgtctggtcattgtggaagcggctccaagttacaaatcctgatctgactcaggtggtgtcgctggtggtggagagggaaaagcagaagtctgaggctaaggacagaaaggtgctggaaatattacaggtgaaagacgccaagatacaggagttcgagcaacgggaatctgtgctgaaacaagagataaacgatctcgtcaaaagaaagatcgcagtggacgaggagaatgccttcctgaggaaggaattcagcgacttggaaaaaaagtttaaggataaaagtcaggagataaaagatacaaaggagtgcgtgcaaaacaaggaagagcagaatagactcgttatcaaaaatctagaggaggagaataagaaattatctactcggtgtactgacctgttgaacgatttagagaagttgcgaaagcaagaggcccacctccggaaagagaagtactctaccgacgcgaagatcaagacttttgaagacaacctcattgaggcccgcaaggaggttgaggtttcccagtccaagtacaacgcactgagtctccagctgtccaataagcagacagagttgatacagaaagacatggatattaccctggtgaggaaggagctgcaagagctacagaacctgtataagcagaattctacccacactgcccagcaggcggagctcatccagcagctgcaagtactaaatatggatacgcagaaagtactgaggaaccaggaagacgtacatactgcagaatcaatcagctatcagaaggtgtgtttctactctgtgattaagatgtag

SEQ ID NO: 111614 - DNA, 4221 bp, synthetic construct
  misc_feature 1..4221: note = Description of Artificial Sequence: Synthetic coding sequence
  source 1..4221: mol_type = other DNA
atggctgctcgctctccaccttctccgcacccaagtccacccgcgcggcagctgggcccgaggtctcctcgtgtgggtaggggagccgaggtgcatgctatgaggagcgaggcaagcggctttgccggcgccgcccgagaggtcgttgccgacgagtctgacaagatatgggtaggcgaagagggcagcggaggtcgccggggccctgggggagcagccccagcgcatgcccctctgttgtccgcccctatgggatcacgtaggctggagggtataagcgtcgaggaggctatggtgactagaactcagttactggaggaggaactgtcttccctgaaggaagagctggctctttgccaggcagacaaggaattcgtgtggtccctctggaaaaggttgcaggtaactaacccagacctgactcaggtggtgagtctggtcgtggagagggaaaagcagaaaagcgaggccaaggaccgcaaagtcctcgagattctgcaggtgaaggacgccaagatccaagagtttgagcagcgcgaaagcgtcttgaagcaggaaattaacgatctggtgaagaggaaaattgccgtcgatgaggaaaacgcttttctgcggaaggagttttccgatttggagaaaaagtttaaggacaagtcacaggaaattaaggacaccaaggagtgcgtgcagaataaggaggagcagaacagattggtgatcaagaatctggaggaggagaacaagaagcttagtacccgttgcacagatctgttaaatgatctcgagaaactgcgcaagcaggaggctcaccttagaaaagaaaagtactccaccgatgcaaaaatcaagacatttgaggataatctcattgaggcgcggaaggaggttgaagtcagccagtctaagtacaatgcattgtcccttcaactaagtaacaaacagactgagctcattcaaaaggatatggacatcacgctagtccgaaaggagctgcaggagctccagaatctttataagcagaacagcacacacaccgctcagcaggcagaacttatacagcaactacaggttttgaacatggacacccagaaagtactcaggaatcaagaggacgtgcatacagctgaaagcatcagctaccagaagttgtacaacgaacttcacatttgcttcgagacaaccaaatcaaatgaggccatgctcagacagagcgtgactaacttacaggaccaactcctgcagaaagagcaggagaatgccaaattaaaagagaagctgcaggagagtcagggggcaccactgcccctacctcaggagagtgaccccgactacagcgcccaggtaccccatagaccgagcctgtcatccctagaaaccctgatggtatcccaaaagtcagagatagagtacttacaggagaagctcaagatagctaatgagaaactgtcagagaacatctctgcaaacaagggcttttcacgaaaatctattatgacgtcagctgagggtaagcataaggagccccctgtcaagcgctctagatcacttagcccgaaaagctcatttactgacagcgaggagttacagaaactgcgcaaggccgagcgcaagatcgaaaatttagaaaaggctttgcagttgaaatcccaggagaatgatgagttaagggacgcgcacgaaaagcgcaaggaacgactgcaaatgttgcaaactaactatagagctgtaaaggagcagctgaaacagtgggaagaaggcagtgggatgactgaaatccgcaaaatcaaacgggcggatccccagcagctccgccaggaagactctgacgcggtatggaacgaacttgcctactttaagcgggaaaatcaagagttgatgatccagaaaatgaacctagaagaagagcttgacgagcttaaagtccatatcagcatagacaaagccgctattcaggagttaaaccgatgcgttgctgaacgtcgagaagaacagctctttcgctccggagaggatgatgaggtgaagcggtccaccccagagaaaaacggtaaggaaatgctggaacagactttgcaaaaagttacagaactggagaatcgccttaagtcttttgagaagcgaagcaggaagctaaaagagggtaataagaagctgatgaaagagaacgattttctgaagtcactgcttaagcagcaacaggaggacactgagacaagggaaaaggaattggaacagattattaaggggtcaaaagacgtggaaaaggagaataccgagctgcaagtcaagatcagcgaactcgaaaccgaggtgacgtccctgaggaggcaagtggccgaggcaaatgctctgagaaatgagaatgaggagctgataaatccaatggagaagtcacaccagtctgcagatagggcaaaaagtgagatggcgactatgaaggtacggtcgggaaggtatgattgtaagactacgatgaccaaggtaaagttcaaggctgcgaaaaagaactgctctgttgggcgacaccacactgttctaaaccatagcattaaggtgatgtcaaacgttttcgagaacctgtcaaaagatgggtgggaagacgtgagtgaatctagctcagacagcgaggcacagacttcccagacattgggaacgatcattgttgagactagccagaaaatctcccccacagaggacggtaaggatcagaaggaatcagatcctactgaggactcacaaacccagggaaaggaaattgttcaaacttatctcaatatcgatgggaagacgcccaaagattatttccatgataaaaatgctaagaagcccacgttccagaaaaagaattgcaaaatgcagaaaagctcccataccgccgtgcctacccgagttaatagagagaagtacaaaaacatcaccgcccagaagtcctcctctaatattatactactgagggagcgcatcatctccctgcagcaacaaaatagcgtgctccagaatgcaaaaaagaccgcagaattgagcgtcaaggagtacaaagaggtgaacgaaaaactactccatcagcaacaggtttccgatcagcgatttcagacgtcacggcagaccattaaaaaactgaacttggatttagccggactccgcaaagaaaaagaggatctgctgaagaagctcgagtcaagctcagaaatcactagcttggcagaggagaactcccaagtaacttttccgcgcatccaggtaactagcctgtctccctccaggtctatggatctagagatgaagcagcttcagtacaaattaaaaaacgcaactaacgaacttacaaagcagtcgagcaatgtgaaaaccctcaagttcgaactactcgccaaagaagagcatatcaaagaaatgcacgagaagatctctcgtatggagcgtgacattactatgaaacgacacttaatcgaagacctcaagttcaggcagaaggttaaccttgagtcaaataagtccttcagcgaaatgctgcagaatctggataagaaggtcaagactttgacggaggaatgctcaaataaaaaggtgtctatcgattctttgaaacaacgtcttaacgtggccgttaaagagaaatcccagtacgagcaaatgtaccaaaagtcaaaggaagaactggagaagaaagacctgaaactcaccctcctcgttagtaggatctcagaaacagaatctgcaatggccgagatcgagaccgctgccagtaagcaactacaagaactggctctccaatcagaacaggtcttggaaggagcgcagaagacactcctcctagcaaacgagaaagtggaagagttcacgacattcgttaaagccctcgccaaggagctccagaatgatgtacacgtcgtcagacgacagattcgggaactcaagaagatgaaaaagaaccgtgacgcctgtaagacaagcacccacaaagcccaaaccctcgcggcctccatcctgaatatctcaaggtcagacctggaagagatccttgacacggaggatcaggttgaaatcgaaaagacgaagattgatgccgaaaatgacaaggagtggatgctctatatccaaaagttgctggagggccagttgccttttgccagttacctgctggaggcagtccttgagaaaattaatgaaaagaagaagctggttgagggttatttcactataatgaaggacatcagatag

SEQ ID NO: 111615 - DNA, 4221 bp, synthetic construct
  misc_feature 1..4221: note = Description of Artificial Sequence: Synthetic coding sequence
  source 1..4221: mol_type = other DNA
atggctgctagatcaccgcctagccctcacccttcccccccagcccggcagctgggtccacgttcgccacgtgtcgggagaggcgcagaagtgcacgcaatgagaagcgaggcaagcggtttcgcaggagctgctcgcgaggtagttgccgacgagagcgacaagatttgggtcggggaggaagggagcggcggaagacgcggccccgggggtgctgcacccgcgcacgctcctttgctgtctgcccccatgggttctagacgacttgaaggcatctccgtcgaagaagcaatggtgacccggacccagctcttagaggaagaactgtcttctctgaaggaggagttagcgttgtgtcaggccgataaggagttcgtctggagcctatggaaaaggttgcaggttaccaatcctgatttaacccaggtggtgagcctggtagtagaaagggagaagcagaagagcgaggcgaaagatagaaaagtactggaaatcctacaggtgaaggatgctaagattcaagagttcgagcaacgcgagtcggtgctgaaacaagagattaatgatcttgtcaagcggaagatcgccgtggacgaggagaatgcctttctgagaaaggaattttcagacttagagaaaaaatttaaagacaagtctcaggaaattaaagacacaaaagagtgcgtgcagaataaggaggaacagaatcggctagttattaagaatctggaggaagagaacaagaaactttctactcggtgcacagacctgttaaacgatctggaaaagctgaggaagcaggaggctcatttaaggaaggaaaaatattccactgacgcaaagatcaagacattcgaagataatctaatcgaagctaggaaagaggttgaggtcagccagagtaagtacaatgctttatcgctgcagctgagcaataaacagacagaactgatacaaaaagatatggatatcacgctcgtacggcaggaattacaggagctccaaaacctctacaagcagaactccacgcataccgcccaacaggccgagctaatacagcagctgcaagtgctgaatatggatacccaaaaggttttgaggaatcaggaggacgtgcacaccgccgaaagtatatcatatcagaagctctataatgagctgcatatctgctttgagaccaccaagtctaatgaggccatgttgcgccagagcgtaaccaatctgcaagaccaactgctccaaaaagagcaggaaaacgcaaagctcaaagaaaaactccaggagagtcagggggcacccctgcccctgccccaggagagcgatccggattatagtgcccaggtccctcacagacccagcctttcctccttggagaccctgatggtgagccaaaaatctgagattgaatatctgcaggagaaattgaaaattgctaatgagaaattgtcagaaaacattagcgccaacaagggtttctcccggaagtctataatgacgagcgccgagggcaagcataaggaacctccagtcaagagaagccggagccttagcccaaaatccagcttcacggactccgaggaactgcagaaattacggaaagccgaacgcaagatagagaatctagaaaaagcgttgcagctgaaaagccaagagaacgatgaactgagggacgcccatgagaagcggaaagagcggctgcaaatgctccagactaattatcgagccgttaaagagcaactgaagcagtgggaagagggcagcggcatgacggagattaggaaaattaagagggccgacccccaacagttgcgccaggaagattccgacgcagtgtggaatgaattagcctactttaagagggaaaaccaggaactcatgattcagaagatgaacctcgaggaggagttggatgaactcaaagttcacatttcaatcgataaggccgccatccaggagctgaaccggtgtgtcgctgagcggagagaggagcagcttttccggtcaggcgaggacgacgaagtcaaaagaagtacgcctgagaaaaatggcaaggaaatgctggaacagaccttgcaaaaagtaactgaactcgaaaatagactgaagtcatttgaaaagaggtcaaggaaactgaaagaagggaacaagaagctcatgaaggaaaacgattttctcaaaagcctcctgaaacaacaacaagaagataccgaaaccagggagaaagaacttgaacagattattaaggggagcaaggacgtcgaaaaagagaacacggaactccaggtgaagatatctgagctggagactgaagtaaccagcctcaggcgccaagtggccgaggccaacgcgttgcgaaacgaaaacgaagaattgatcaatcccatggagaaaagtcaccagagtgcagacagagccaaaagtgagatggccactatgaaggtgcgctccggtcgatatgactgtaagaccaccatgacaaaagtgaaattcaaggctgcaaagaagaactgcagtgtgggccgccaccacactgtccttaaccatagtattaaggtcatgtcaaacgtgtttgaaaacttgtccaaggacgggtgggaggacgtctcagagagctccagtgattccgaagctcagacgagtcagacattggggacgattatcgttgagacctcacagaagatcagtcctactgaggatggcaaagaccagaaggagagcgatcccactgaggatagtcaaacacaggggaaagagatcgttcaaacctatctgaatatcgacgggaaaacgcccaaggactacttccacgataagaacgcgaaaaagccgactttccagaaaaagaattgtaaaatgcagaaaagtagccacaccgccgtccccactagagtgaaccgggagaaatacaagaatataacagcacagaaaagctcaagcaacattatcttattgcgagagcggatcatatctctgcaacaacaaaacagcgtgttgcagaacgccaaaaagacagccgaactgtccgtgaaggaatacaaggaagtgaacgagaagctgctgcaccagcagcaggttagtgaccagaggttccagactagcaggcagacgatcaaaaagcttaatctagacctggctggcctgagaaaagaaaaggaggaccttctgaaaaagctggaatcttccagcgaaatcacaagcttggcagaggagaattctcaggtcaccttcccacgcattcaggtcacgagtttatccccctcgagaagcatggatctcgagatgaagcaactacagtacaagttgaagaatgctacgaatgagcttaccaagcagagcagtaatgtgaaaacactcaaattcgagctgctcgccaaggaggagcacattaaggaaatgcacgagaagattagtaggatggagagggacatcactatgaagagacaccttatcgaggatttgaagttccgccagaaggtaaatcttgagagcaacaaatccttctccgagatgctgcagaacttggacaagaaggtgaagacgttaaccgaagagtgtagtaacaagaaagtgagcatagatagcttgaaacagagactcaatgtggctgtcaaagagaagagccaatacgagcagatgtaccagaaatcaaaagaggagttagaaaagaaagatttaaaactaactctgctcgtgtctagaatttcggagacagaatcagctatggccgaaattgagacagccgctagtaaacaattgcaagaactggcacttcagagcgagcaagtactcgaaggagcccaaaaaacccttctgctcgccaatgagaaggtggaggaattcacaacattcgtgaaagccctggccaaagaactccagaacgacgtgcatgtcgtccgcaggcagatccgcgaattaaagaagatgaaaaagaatcgagatgcatgtaagacttcgacccacaaggctcagacgctggccgccagcattctcaatatctcccgcagcgatttagaggaaattttagatacagaggatcaggtggaaatagagaaaaccaagatcgatgctgagaatgacaaggaatggatgctatatattcagaaattactggagggccagctcccgttcgcatcctacttgctggaggccgtacttgagaagatcaatgagaaaaagaaactggtggaaggatactttaccatcatgaaggatataagatag

SEQ ID NO: 111616 - DNA, 519 bp, synthetic construct
  misc_feature 1..519: note = Description of Artificial Sequence: Synthetic coding sequence
  source 1..519: mol_type = other DNA
atggcttccggatttaaaaagccttccgccgcatccaccgggcagaaaaggaaggtcgccccgaaacccgagttaaccgaagaccagaagcaagaagtcagagaggcctttgacctttttgacgtagatgggtccggtactatagacgctaaggagctaaaggtggccatgagagccctcggattcgaaccacgcaaggaagagatgaaaaaaatgatcagtgaagtggatcgcgagggaactggaaaaatttcattcaatgacttcctagctgtaatgacacaaaagatgtccgaaaaggacaccaaggaggagattctgaaggccttcagactgtttgacgacgatgaaaccggcaaaatcagcttcaaaaatttgaagagagtcgctaatgagctgggcgagaatttaaccgacgaagaactgcaggagatgatagacgaggccgatcgcgatggggatggagaggtgaacgaggaagagttcctgagaatcatgaagaaaactagcctgtactag

SEQ ID NO: 111617 - DNA, 519 bp, synthetic construct
  misc_feature 1..519: note = Description of Artificial Sequence: Synthetic coding sequence
  source 1..519: mol_type = other DNA
atggcaagcaatttcaaaaaggcgaatatggcttctagcagtcagcgcaaaaggatgtcacctaagccggagcttacagaagagcagaagcaggagatacgggaggccttcgacctgtttgatgctgatggcacagggaccattgatgtaaaggagctgaaagtcgcgatgcgcgctctggggtttgaaccgaagaaagaggagattaaaaaaatgatctccgagatcgacaaggaaggcaccggcaagatgaacttcggggacttcctgaccgtgatgacacagaaaatgtccgaaaaagatactaaagaagagattctgaaggcctttaaactgtttgatgatgatgaaacagggaaaattagtttcaaaaatctgaaaagagtggcaaaggagctcggcgaaaatcttacggatgaggagttgcaggagatgattgacgaagccgacagagatggggatggtgaagtcagtgagcaggagtttctgcgcatcatgaaaaagacatcgctttactag

SEQ ID NO: 111618 - DNA, 378 bp, synthetic construct
  misc_feature 1..378: note = Description of Artificial Sequence: Synthetic coding sequence
  source 1..378: mol_type = other DNA
atggctatgcaggccgccaaaagggctaacatccgcctaccacccgaagtgaaccgcatcctgtatatcaggaacttaccatacaagataaccgcggaagaaatgtatgacatctttggaaagtatgggcccattcggcagatcagggtgggtaacacaccagagaccagggggaccgcatatgtcgtatatgaagacatcttcgacgccaagaatgcatgtgatcacttgagcggttttaacgtgtgtaacaggtacctcgtcgtgttatattataacgccaatagagcattccaaaaaatggacacgaaaaagaaagaggagcagctgaaactgctaaaagaaaagtacgggattaacactgacccaccaaagtag

SEQ ID NO: 111619 - DNA, 423 bp, synthetic construct
  misc_feature 1..423: note = Description of Artificial Sequence: Synthetic coding sequence
  source 1..423: mol_type = other DNA
atgggtccaagacgccgctcccgtaagcccgaagctcccaggcgtagaagcccctcccccacccccacccccggacctagccgccggggcccttcactgggggcaagctcccaccagcattcacggagaaggcagggttggctgaaggaaatccgcaaattacagaaatcgacacatcttctcatccgaaagttgccgttctcccgtttggcacgcgaaatctgcgtgaaattcacccgaggggtggactttaactggcaggcacaggcactgctggcattgcaggaagccgccgaggcgttcttagtccacttgttcgaggatgcctacctgctcactttacacgcaggcagagtcacactgtttccgaaggacgtgcagttggctcgtcggattagaggactggaagagggactcggctag

SEQ ID NO: 111620 - DNA, 1800 bp, synthetic construct
  misc_feature 1..1800: note = Description of Artificial Sequence: Synthetic coding sequence
  source 1..1800: mol_type = other DNA
atgggtccaaagcgtagacagctgacctttagagagaagtctcggattatccaggaggttgaggaaaatcctgaccttagaaagggcgagattgccaggaggttcaatatacctcccagcactctatctacaatactcaagaacaaacgcgctatattggccagtgaaagaaaatatggggtggcctctacttgcagaaaaactaataagctctccccatatgataagctggaggggctcctcattgcatggttccagcagatcagggccgcgggtctccccgtgaagggtatcatactgaaggaaaaggccctgcggattgcggaagaactcggtatggatgattttactgcttcgaatgggtggcttgatagattcaggcgacgacatggagtggtgtcctgctcgggcgtcgcgcgggcccgggcacgaaacgcggccccgcggaccccagccgctcccgcatctccggcagccgttcctagcgagggatccggaggcagcacgaccggatggcgggcgagggaagagcagccacccagtgttgctgaggggtacgcttcccaagatgtttttagtgccaccgagacttcactgtggtacgactttctgccagaccaagccgctggtctctgcggcggagatgggaggccaagacaggctacgcagcgtctaagcgtgctcctgtgcgcaaacgcagacgggtcagagaaactaccccccctggtggccggaaagtccgcaaagccccgcgccggccaagccggcctgccatgcgactacaccgcaaattcaaaggggggagtaacaacccaagccctggccaagtacttgaaggcattagacacccggatggccgccgagagcaggagggtgctcctcctcgccgggaggctagctgcacaatcattggacacaagtgggctacgacacgttcaactggcttttttccccccagggacagtccatcccctggagcgaggagtggtccagcaggtcaagggacactaccgacaggccatgctgcttaaggcgatggctgcattagaagggcaggacccctctgggctgcagctgggacttacagaagcccttcactttgtggccgcagcatggcaggccgtggagccttccgacatagccgcatgtttcagagaagccgggtttggcgggggcccgaacgctactattaccacatctctgaaatcagagggagaggaggaagaagaggaagaggaggaggaggaggaggaagagggtgaaggagaagaggaagaggaggaaggcgaagaagaggaggaggaggggggggaaggtgaagagctcggcgaggaggaagaagttgaggaagaaggtgacgttgactctgacgaagaggaagaagaagacgaggagtcgtcgtcggagggacttgaagccgaagattgggcacagggagtagtggaggccggagggtcttttggggcctatggagcacaggaggaagcccagtgtccaacactgcacttcttagaagggggtgaagattcagatagtgattctgaagaagaagatgacgaggaggaggacgatgaagatgaagatgacgacgacgatgaagaggatggcgacgaagtgccagtgccttcttttggcgaggcgatggcgtactttgcaatggtgaaacgataccttacgtccttcccgattgacgaccgagtccagagtcatatactacacctcgagcacgaccttgtgcatgttacacgcaaaaaccacgcccgccaggctggagtcagaggcctggggcatcagagctag

SEQ ID NO: 111621 - DNA, 417 bp, synthetic construct
  misc_feature 1..417: note = Description of Artificial Sequence: Synthetic coding sequence
  source 1..417: mol_type = other DNA
gaggatgaagagtctagtagtgaagggcttgaggctgaagattgggcccaaggagtagtcgaggctggcggctctttcggagcatatggtgcgcaagaagaggcccaatgccctacattacacttcctagagggtggtgaagattcagattctgactctgaggaggaggacgatgaagaggaggacgatgaggatgaagacgacgacgacgatgaagaagacggcgacgaggtgcctgttccgtcctttggagaggccatggcttactttgccatggtgaagcgatacctcacaagctttccaatcgacgacagagttcagagccacatcttgcacctcgagcatgatctggttcacgttactcggaagaatcatgcacggcaagcgggagttaggggactcggacaccaatcctag

SEQ ID NO: 111622 - DNA, 2832 bp, synthetic construct
  misc_feature 1..2832: note = Description of Artificial Sequence: Synthetic coding sequence
  source 1..2832: mol_type = other DNA
atggccgccagtggccttgaccacctcaaaaacggttataggagaaggttctgtcggccctcccgagccagggatattaacacggaacaagggcagaacgtgcttgagatccttcaggattgttttgaggaaaaaagtctggccaatgatttttcaaccaactctaccaaaagcgtaccaaactccactaggaagatcaaagacacatgcatacaatccccttctaaagaatgccagaagtctcaccctaagtctgtgcctgtatcttctaagaagaaggaagccagtctccagttcgtggtggaaccttcggaagccacaaacagaagcgtgcaggcccacgaagtgcaccagaaaattttggccacagacgtgagttccaagaacaccccagactctaaaaagatttctagcaggaatataaacgatcaccactccgaagcggatgaagaattctatttgagcgtgggcagcccttctgtgctcctggacgctaagactagcgtaagccagaatgtcatcccatcatcagcacaaaaaagagagacatacacattcgagaactcggtcaatatgctcccatcctcgaccgaagtatcggtgaagaccaagaagcgcttgaattttgatgataaagtgatgctgaaaaagatcgagattgacaacaaagtgtctgacgaggaagacaagacctcagaaggccaggagcgtaagccgtctggatctagtcagaaccggatacgcgactcggagtatgagattcagcgccaggcgaagaaaagcttctctacgctgttcctggagacggtgaagaggaaatccgagtccagccccattgttcggcacgccgccactgctcctccgcactcatgcccccccgacgataccaagctgatcgaagacgagtttataatcgacgaaagcgatcagtcattcgcaagtaggtcatggattaccattccccgcaaggcgggctcgctcaagcagagaacaatctcacccgcagagtctacagccctgctgcagggaagaaagagcagggagaaacatcataacatcctcccaaagaccctggccaacgataagcattcccacaaaccccatccggtggagactagccaaccttcagacaaaacagtattggatacttcttacgcactcatcggagagaccgttaacaactacaggtcaactaagtatgaaatgtactccaaaaacgcagagaagccctcgagaagcaagagaacaatcaaacagaaacagcgcaggaagttcatggccaaaccagctgaggagcagttagacgtaggacagagcaaggacgagaacattcatacatcccatataacccaagatgaatttcagaggaattctgacagaaatatggaggagcacgaagagatgggcaatgattgcgtatctaaaaagcagatgcctcctgtggggtccaagaaatctagcacgagaaaagacaaagaggaatctaagaagaagcggttctccagtgagtcaaagaacaagcttgtcccagaggaggttaccagcactgtgactaaaagccgcagaatttctcgccggccaagcgactggtgggtcgttaaaagcgaagaaagccccgtctatagtaatagttcggtccggaacgagctacctatgcatcacaattcgtccaggaagtccactaagaaaaccaatcagtcttctaagaatataaggaagaaaaccatcccactaaaacgtcagaagacagcaacgaagggaaaccaaagagtgcagaagttccttaacgctgaaggtagtgggggtatagtgggccacgacgagatctcccgatgttcactgtccgagcccctcgaaagcgacgaagctgatcttgcaaaaaaaaagaacctcgattgttctcgaagcacgagaagttccaagaatgaagataacatcatgaccgcacagaacgtcccactgaaaccccaaaccagcggctatacatgtaacatacccacagagagcaatctcgattccggcgaacacaagacctctgtgctggaagagtctggcccctcgcgactcaataataactacttgatgtccggaaaaaacgacgttgatgacgaggaggtgcacgggtcttcggacgactcaaaacagagcaaggtgatccccaagaatcgtatccaccataagctggtccttccatcgaacacacccaatgtgaggcggacaaaacgcacacggttgaagcccctcgagtattggcgaggggagcgtatcgattaccagggtcgaccctccggaggatttgtgatcagtggcgtgctgagcccagataccatctcaagcaaaaggaaggccaaggaaaacattgggaaagtgaacaaaaaatccaataagaagagaatttgtttggataacgacgaaaggaagaccaatcttatggttaatttaggtatccctctgggcgatcccttgcagcctaccagggtaaaggacccagaaaccagagagatcatcctgatggatctggtgcggccacaagatacctatcagtttttcgtgaagcacggcgaactcaaggtatacaagacactggacacaccttttttctctacagggaaattgattctcggcccccaggaggagaagggtaaacagcacgtcggccaagacattctggtgttctatgtcaactttggcgacctgctctgcaccctgcatgagaccccatatatcctaagtacaggagactcattttatgtcccatctgggaattactataacattaaaaacctaaggaatgaagaatctgtgctattattcacacagatcaaacgctag

SEQ ID NO: 111623 - DNA, 8106 bp, synthetic construct
  misc_feature 1..8106: note = Description of Artificial Sequence: Synthetic coding sequence
  source 1..8106: mol_type = other DNA
atggctgaagagggggccgtcgctgtgtgtgttcgggtccgtccgttaaactcgagagaagaaagcctgggtgagactgcacaggtttattggaagaccgataacaatgttatatatcaggtagacggatcaaaaagctttaactttgacagagtgttccacggcaatgaaaccacaaaaaatgtgtacgaggagatcgcggctcccatcattgattccgcgatacaaggttacaacggaacaattttcgcctacggacagaccgcctccggaaaaacctataccatgatggggagtgaagaccatctaggcgtgatccctcgcgcaattcatgatatcttccagaagatcaagaagtttcctgacagggaattcttgcttcgcgtgtcctatatggaaatctataatgagacaattaccgacctcctgtgcgggacccagaagatgaaaccacttattattcgcgaggacgtgaatagaaatgtctatgtggccgatctgactgaggaagttgtgtacactagcgagatggcattaaagtggattactaagggcgagaaaagcaggcattacggggagacaaagatgaatcagcggtcgtcaaggagccatactatttttaggatgatactggagagcagggaaaaaggggaacctagtaactgtgaaggttcagtgaaggtgagccacctgaatctggtggacctagccggatccgagagagccgcccagacaggtgctgccggtgtgcgactgaaggagggctgcaatatcaaccgaagcctcttcatcctaggccaggtgatcaagaagctctctgatggccaggtggggggctttataaattacagggactccaaactgacgcggattttgcagaatagccttggtggtaatgctaaaacacgaatcatttgcacaatcactcccgtgagctttgatgagaccttaactgcccttcaattcgccagcaccgccaagtacatgaaaaacacaccctacgtgaacgaagttagtactgacgaagccctgctgaagcgctataggaaggagataatggatctaaaaaagcagctggaggaagtttcgttggagacccgcgcccaagctatggagaaggatcagctggcccagctgctggaagagaaagatttgcttcagaaggtgcagaatgagaagattgaaaatctcacccggatgctggtcacttcatcctccctaacactgcaacaggaacttaaagccaaacgtaagcgccgcgttacttggtgcttggggaagatcaacaaaatgaaaaattcgaactatgctgaccagtttaatatacctacaaatataaccacaaagacccataaacttagcattaatttactgagggagatcgacgagagcgtgtgctctgaatctgatgtgttcagcaacacattggacactttgtcagaaatcgaatggaacccagccaccaagctgctgaatcaggagaatatagaaagtgaattgaactcccttcgggctgattacgacaacctcgtcttggactacgaacagttgcgcactgaaaaagaagagatggagttaaagctcaaagagaaaaatgatcttgacgaattcgaagccctggaacgaaagacaaagaaagatcaggaaatgcagttgattcatgagatcagcaacctgaaaaacttagttaaacatgcggaagtctacaatcaggatctggaaaatgagctatccagtaaagtagagcttctcagggaaaaagaagaccagattaagaagctgcaagaatacatcgacagccaaaaactggagaacataaagatggaccttagttactctctagagtcgatcgaggaccccaagcagatgaaacagactctcttcgatgctgaaaccgttgcacttgacgctaagcgggagtccgcatttttgagatcagaaaatttggaacttaaggaaaagatgaaggaactcgcaacaacgtacaagcagatggaaaatgacatccaactttatcagtcccagttggaggccaagaaaaagatgcaagtggatttagaaaaagaactgcaatcagcctttaatgagataaccaaactcacaagtcttatcgatggaaaagtgcctaaagatctgctatgcaacttagagcttgaaggtaagattaccgacctccagaaggaactaaataaagaagtggaggaaaatgaggcactaagggaagaagtgatacttttgtctgagttgaagtctctgccttccgaggtcgaaagactgagaaaggaaatccaggacaagagcgaagagcttcatatcatcaccagcgagaaagataaactgttcagcgaggtcgtgcacaaggaatcaagggtacagggtctactggaggagattgggaagaccaaggatgatctggccaccactcagagcaattataaatcgactgaccaggaattccaaaatttcaaaaccctccacatggatttcgaacagaaatacaagatggtgttagaggaaaacgaacgaatgaaccaggaaatcgttaatctgtctaaggaggctcaaaagttcgacagctccctaggagctttgaaaacagagttgagctacaaaactcaggagctccaagagaaaacgcgcgaagttcaggaacggcttaatgaaatggaacaactgaaagaacagctagaaaatcgggattccaccctgcaaactgtggaaagggaaaagacccttattaccgagaagctccagcaaaccttggaagaggttaagacactgacgcaggagaaagatgacctgaagcagttacaggagtccctgcagatagaacgtgatcagctgaagagtgacatccacgatactgtgaatatgaacatcgatactcaggagcagcttagaaacgcactggagagtttgaaacagcatcaggagaccattaacacattaaaatctaaaatatcggaagaggtgtcccgtaacctgcacatggaagaaaacacaggcgaaaccaaagacgagtttcaacaaaagatggttggcattgataagaagcaggacctggaagctaaaaatactcagaccctaaccgccgacgtcaaggacaacgaaatcattgagcagcagaggaagatcttctcactcatccaagagaagaatgagttacagcagatgttggaatcagtaatcgcggagaaagagcaactgaaaacagatctgaaggaaaacattgaaatgacaatcgaaaaccaggaggagcttagattgctgggggatgagcttaaaaaacaacaagagatcgtggcacaggagaaaaatcacgctatcaagaaagagggtgaactgagccggacctgcgatcgcttggccgaagttgaggagaagctgaaggaaaagtcccagcaactacaggaaaagcaacaacagctgctgaacgttcaggaggagatgagcgaaatgcaaaaaaagatcaatgagattgaaaacctgaaaaacgagttgaagaataaagaactgactttagagcatatggaaaccgaacggcttgagctcgcacaaaaactgaatgaaaattatgaagaggtaaagagcattacaaaggaaagaaaggttctgaaagagttacaaaagtcattcgagacggaacgagatcatcttcggggatacatcagagaaatcgaggcaacgggcctgcagacaaaggaagagcttaaaattgcccacattcacctgaaagagcatcaggaaacaatcgatgagcttaggagatcagtaagtgagaagactgcgcagatcataaacacgcaggaccttgaaaaatcccacacgaagcttcaggaggagatccctgtactgcatgaagagcaggagctgttgcctaacgtaaaggaggtgtcagaaacacaggagactatgaacgaattggaactgcttactgagcagtccacgacaaaggactctactacactggcccgcatcgagatggaacggctgcgcctgaacgagaagtttcaagagtcgcaggaagagattaaatccctgaccaaagagagggacaatctcaaaacaataaaggaagctctggaggtgaagcacgaccagctgaaagaacacatccgtgaaacgctggctaaaattcaggagagccagtcaaaacaggaacagtcactaaatatgaaagagaaggataacgagaccacaaaaatcgtgtccgagatggagcagttcaagcccaaggacagcgccttattgcggatcgaaatcgagatgctgggtctctcgaaaagattacaggagagtcatgacgagatgaagtcagtcgccaaggagaaggatgacctgcagaggctccaggaggttctccagagcgagagcgatcagcttaaggaaaacattaaagagattgtggccaagcatcttgagacggaggaggagctcaaagtcgcccattgctgcctgaaagagcaggaggagactatcaacgaactccgagttaacctttctgaaaaagagaccgaaatctcaactatccaaaagcagttagaggctattaacgataaactgcagaataagatccaggagatatacgaaaaggaggaacaattcaacattaagcagattagcgaagtgcaggagaaggttaatgaattgaaacaattcaaagagcacaggaaagccaaagatagtgcactccaatccattgagtccaagatgctcgagcttacgaaccggttgcaggagtcccaggaggagattcaaatcatgatcaaggagaaggaggagatgaagcgcgtgcaagaggcccttcagatcgaaagggatcagctaaaagagaacacaaaggagattgtcgccaagatgaaagaatctcaggaaaaagagtaccagtttcttaaaatgacagctgtcaacgagactcaggagaagatgtgcgaaattgagcatcttaaggaacaatttgagacccagaaacttaatcttgagaacatcgagaccgaaaatattaggctgactcaaatcctacacgagaacctggaagagatgaggagcgtgacaaaggaacgagacgatctcagatctgtggaggagaccctgaaagtggagagggaccagctgaaagaaaacctgcgggagactatcacccgtgaccttgagaaacaggaagagctgaaaatcgtgcacatgcaccttaaggaacaccaagaaactattgacaaactccgcggcattgtatctgaaaagacgaacgagatctccaacatgcagaaagacctggagcactccaacgacgccttgaaagcccaagatctgaagattcaagaagaactccgaatcgcccatatgcatctcaaggagcaacaagagacgattgacaaactgaggggcattgttagcgagaaaactgataagctgagtaatatgcagaaagaccttgagaatagtaacgctaaactacaagaaaagatccaggaactgaaagctaacgagcatcagttgattacgctcaagaaggacgtaaatgaaacgcaaaaaaaagtgtcagaaatggagcaactgaagaagcagatcaaagaccaaagcctgaccctgtctaagctggagatcgagaacctcaaccttgcccagaagctgcacgaaaatctggaagagatgaagagtgtgatgaaggagcgcgacaatctccggcgggtcgaggagactctgaagctggagcgcgaccagctcaaggaatcgttacaagagaccaaggcacgggaccttgagatccagcaggagctgaagactgcccgcatgctgagcaaggaacacaaggagacagtggacaagctgcgagagaaaatcagcgagaaaaccatccagatctccgacatacagaaggatctggataaatccaaagacgagctccagaaaaagattcaggagctccagaaaaaggagctgcagctgctgcgagtgaaagaagacgttaacatgtcacataaaaaaatcaacgaaatggaacagctcaagaagcaattcgaggcgcagaacttatccatgcagagcgtacgaatggataactttcagctgaccaaaaagttacatgagtcactcgaggaaataaggatcgtggctaaggagcgagacgagctccgcaggatcaaggagtctctcaaaatggagcgagaccagttcatcgctactctgcgggagatgattgcacgtgacaggcaaaaccaccaggtgaaacccgagaagagattgctgagtgatggtcaacagcacctgacagagagcctacgtgaaaagtgcagccggatcaaggaacttctaaaacggtacagcgagatggatgaccattacgagtgcctgaaccgactcagccttgatctagagaaggagatcgagttccaaaaagagctaagtatgcgtgtcaaggccaacctttccctgccatacttgcaaacgaaacacatagagaagctgttcaccgcaaaccagcgatgcagtatggagttccacagaataatgaaaaaactgaaatacgttctgagttatgttacaaagatcaaagaggaacagcacgagtctataaataagttcgaaatggatttcatagacgaggttgaaaagcaaaaagagcttcttattaaaattcagcatcttcaacaggattgcgatgtcccttcgagggaactgagagatttgaagttgaatcagaacatggatcttcatattgaagaaattctgaaggatttttccgaatcagagttcccctcgattaagaccgagtttcaacaagtgctgagcaatcgtaaggagatgacacaatttctggaagaatggctgaacactcgatttgacatcgaaaaactgaaaaatggaattcaaaaggagaatgatcggatctgtcaggttaataacttctttaacaaccgcatcattgccattatgaacgaatccaccgaatttgaggagagaagcgccactatctccaaggagtgggaacaggatctaaaatcccttaaggaaaaaaacgaaaaattattcaagaattatcagacactcaaaacctctctggccagtggtgcccaagtcaacccaacaactcaggacaataagaatccacacgtgacttccagagcgacacagctcaccaccgagaagatccgagagctcgagaattcactccacgaggccaaagagtccgctatgcacaaggaaagcaaaattattaagatgcagaaagagctcgaagtcacaaacgacatcatcgcaaagctgcaagccaaggtacatgagtccaataagtgtctggaaaaaactaaggagactatccaggttctgcaagacaaggtcgcgctcggcgcgaaaccatacaaggaggagatagaagacctgaagatgaaactcgttaagatagacctggagaagatgaaaaacgctaaagaatttgagaaagaaatcagtgcgaccaaggctacggtggaatatcagaaggaggtcatccggctcctgcgagaaaacctccggcggagtcaacaagcacaggacacatctgtaataagcgaacacaccgatcctcaaccaagtaacaagccactcacctgcggcggagggtccggtatcgtgcagaacactaaggccttgatcttaaagagtgaacacatccgactcgagaaggaaattagtaagttaaaacagcagaatgagcagctgataaagcagaagaatgagctcttgtccaacaatcaacacctgagcaacgaagtcaagacttggaaagagcgcactctaaagcgggaagcgcacaaacaggttacctgcgaaaatagtccgaagtccccaaaggttaccggtacagctagtaaaaagaagcagatcacaccttcacagtgcaaagaaagaaacttgcaagatcccgtccctaaggagagtcctaagtcctgcttctttgatagtcggagtaaatccctgccctccccccaccccgtgcggtattttgataattcttcactcgggctttgccctgaggtccagaacgcgggcgctgaatcagtggacagccagcccggaccttggcatgctagctctggcaaggacgttccagagtgcaagactcagtag

SEQ ID NO: 111624 - DNA, 7743 bp, synthetic construct
  misc_feature 1..7743: note = Description of Artificial Sequence: Synthetic coding sequence
  source 1..7743: mol_type = other DNA
atggctgaggagggcgccgttgccgtctgcgtgagggttcggccccttaattctcgcgaggagtctctgggcgaaacagctcaggtttactggaagacagacaacaacgtgatataccaggtcgatgggtctaaaagttttaactttgacagggtgttccacgggaatgagacaaccaaaaacgtctatgaagagattgcagctcccatcatcgatagcgccatccagggctataacggaacgatatttgcatacggccagactgcctcgggtaagacatacaccatgatggggtccgaggatcatctgggcgtcatcccacgggcgattcacgatattttccagaagatcaagaagtttcccgaccgtgaatttctgttgagggtgtcctacatggaaatctataatgaaactataacagatctactgtgtgggacccagaagatgaaacctcttatcatacgggaagatgtgaatcgcaatgtgtacgtggccgatctgacagaggaagtggtttacacttcagagatggcgctgaaatggatcacgaagggcgagaaatcccgccactacggagagacaaagatgaaccagcggtccagtcggtcacacacgatcttcaggatgattctggaaagcagggagaaaggtgagcccagtaattgcgaaggctcagttaaggtttcacatctgaacctcgtcgacctcgctggttccgaacgagctgcacagaccggtgcagctggtgtccgtctcaaagaaggctgtaatattaatcgatcactatttatcctcggccaggtgatcaagaagctgtccgacggacaggtgggcggcttcatcaactatagggactcaaagctgacgcggatccttcagaactccctgggaggaaatgccaagacaaggattatttgcaccatcacaccagtgtcttttgatgagaccctaaccgctctccagttcgcgtcaacagctaaatacatgaagaacacaccatatgtgaatgaagtttccaccgacgaggccctgctgaaaaggtatcgaaaggagatcatggatctcaaaaaacagctggaggaagtcagtttagagacgcgggctcaggccatggagaaggatcagcttgctcagctgctggaggagaaagacctgcttcagaaagtccagaatgaaaagattgagaatctgacaagaatgctggtgacatccagctctctgaccctccaacaggagctgaaagccaagcgaaagcgacgcgttacatggtgcttggggaagatcaacaaaatgaagaatagcaactatgcagaccaattcaatatccccacaaacatcactaccaaaacccataaactgtctatcaatcttctgcgtgagatcgatgagagcgtgtgttccgaaagcgacgtgttcagtaatacgctggatacactgagtgagatagaatggaatccggcaactaaactcctcaaccaggagaatatagagtctgaactcaactcacttcgcgccgactatgataatttagtgctggattatgagcagctccgcacagagaaagaagaaatggaactgaagctaaaggagaagaacgacctggacgaattcgaagccctggaaaggaagactaagaaggatcaggaaaacgaactgtcctctaaagtcgagctgctgagggaaaaggaagatcaaatcaaaaagctgcaagaatacatcgactcacagaaacttgagaatatcaaaatggacctgagctactccctggagagtatagaggatcctaagcagatgaaacagacgctctttgacgctgagaccgtcgcgctcgacgctaaacgagagtctgcgttcttgaggagcgaaaacctcgagctgaaagaaaaaatgaaagagctcgcaaccacttataagcagatggaaaatgacatccagctctaccaatcccaactggaggcaaaaaaaaaaatgcaggtcgatctagagaaggaactccagtctgcatttaatgaaatcacgaagctgacctctctgatcgatggcaaagtgcctaaggacctgttatgtaatctggagctggaaggaaaaatcacagatctgcaaaaggagctgaataaagaggtagaggaaaacgaggcactgcgagaggaggttatcctgctgagtgagctcaaaagccttccgtccgaggtcgagcgcctgcggaaagagattcaagacaagagtgaggaattacacattattacaagtgaaaaggataaactgttcagcgaggtcgtgcataaggaaagcagagtgcagggactgttagaagagatcggcaagacgaaagacgacctcgccaccacccagagcaattataaaagtacggatcaggaatttcagaatttcaagacgctccatatggactttgagcagaagtacaagatggtactggaagaaaatgaacggatgaatcaggagatcgttaaccttagcaaggaggcccagaagtttgacagttccctgggagctctcaagacggaactgagctataaaacccaggagcttcaagaaaagacgagagaggtccaagagaggctgaatgagatggagcagctgaaagagcagttagagaaccgtgactctacattacagaccgttgagcgcgagaagacccttattaccgaaaagctgcagcaaacattagaagaagtgaagacgttaacacaagagaaagatgatttaaaacagctgcaggaatcattgcagatcgaacgcgaccagcttaaatctgacattcatgatacagtgaacatgaatatcgacacccaggagcagcttcgcaacgccctcgagtcccttaaacagcaccaggaaacgatcaatacactgaagagcaaaatctcagaggaggtatccaggaatttgcatatggaggagaacactggtgaaactaaggatgagttccagcaaaaaatggtaggaatagataagaaacaagatctggaagctaaaaacacccagacattgacagctgatgtgaaggataacgagattatcgagcagcagaggaaaatcttctccctgattcaggaaaaaaatgaactgcaacagatgctggagagcgttattgccgagaaagagcagttgaaaactgatctaaaggagaacattgagatgaccatcgaaaaccaagaggaactgagactgctcggagacgaactcaaaaagcaacaagaaatagtggctcaagaaaaaaatcatgccatcaagaaagagggggaactttctcgcacttgcgaccggctcgcggaagtggaggagaaactcaaagagaagagccagcagctgcaggagaagcagcagcagctccttaatgttcaggaggagatgtctgagatgcagaaaaagataaacgaaattgaaaatttgaagaatgaactgaagaacaaagaactgaccttggaacatatggagacggaaagactggaactggcccagaagttaaatgagaattatgaagaggttaagtcaatcacaaaggagcgtaaggtccttaaggaactgcagaagtcttttgaaactgaacgcgaccatctgcgggggtacattcgggagatcgaggctacaggactccaaactaaggaggaactgaagatagcacatatccatctcaaggagcaccaggaaaccattgacgagttgagacgctctgtatcagaaaagaccgctcagatcataaatacgcaggacttggagaagagtcacaccaagcttcaggaggaaattcctgtacttcatgaggagcaagagttactgcccaacgtgaaggaagtctcagaaactcaagaaactatgaatgaactcgagttactgaccgagcagtctaccaccaaggattcaaccaccctcgcgcgcatcgaaatggagcgactgcggttgaacgagaaattccaggagagccaggaggaaatcaagagcctcacaaaagagcgagataatcttaaaactatcaaggaggccctggaggtcaagcacgaccagctgaaggaacacatccgcgagacgctggcgaagatccaggaaagccaatccaagcaggaacaaagcctgaatatgaaggagaaagacaatgagactacaaagattgtctcggagatggaacaatttaagcctaaggactctgcgcttctgcgcatagagattgagatgcttggccttagcaagaggctgcaggagtcccacgatgagatgaaaagtgttgccaaggagaaggacgacttacagaggttgcaggaagtgctccagtccgagtccgaccagctcaaggaaaatatcaaggagattgtcgccaaacacctggaaactgaagaggaactaaaggtcgcacactgttgcctcaaagaacaggaagaaactattaacgagctgagggtcaacttatctgagaaagagactgagatttctactattcagaagcagctggaggcaatcaatgacaagctgcaaaataagatccaggaaatttatgagaaggaggagcaattcaatatcaaacagatctcggaagttcaggagaaagttaacgaactgaaacagttcaaagagcaccggaaggctaaagactccgctctgcagagcatcgaaagtaaaatgttggaactgactaacaggctgcaggaaagccaggaggaaatccagatcatgatcaaggaaaaggaggagatgaagcgagtgcaggaggcgttacaaattgagcgcgatcaactcaaggagaacaccaaggaaatcgtggccaagatgaaggagtcccaagagaaagaataccagtttctgaagatgactgccgtgaacgaaacccaggagaagatgtgtgagatagagcatctcaaagagcaatttgagacccagaaactgaatctcgaaaacatcgagactgagaacatccgcctcacccagatcctgcacgagaaccttgaggaaatgcgctctgtcactaaggagagagacgatttaaggtcagtggaggagacactgaaagtcgaaagggaccaactgaaggagaatctcagagagacgataactagagacctcgagaaacaggaagaactcaagatcgttcacatgcatctgaaagaacaccaggagaccatcgacaagctgagaggaatcgttagcgagaagacaaatgagatctccaatatgcagaaggacctggagcattcgaacgacgcgctgaaggcacaagacctaaaaatccaggaagaactgcgaatcgctcacatgcacctgaaggaacagcaagagacaatcgataaactgagagggattgtgagcgagaaaactgacaaactgtccaacatgcaaaaagatttggaaaattcaaacgccaagctccaggaaaaaatccaagaactgaaagcaaatgagcaccagctgatcaccttaaaaaaggatgttaatgagactcagaagaaagtctctgagatggaacagctgaagaaacagatcaaggatcaaagcttgactctctccaagctagagatagaaaatctgaatcttgcacagaaactgcacgagaatctggaggagatgaaaagtgtgatgaaggagcgggacaatcttaggcgagtcgaagaaacgctgaagctcgagcgcgaccaattgaaggagtccctacaggagactaaagcccgtgatctcgaaattcagcaggagttaaagacagctcgaatgttgtctaaggagcataaggagaccgttgataagttgcgagagaaaatttccgagaaaacaatccagatttctgacatacagaaagacctcgacaaatccaaggatgagcttcaaaaaaaacaagatagacagaatcatcaggtgaaaccagagaaacggctgttgtctgacgggcagcagcacctaacagaatccttacgagaaaagtgctccagaatcaaggaactcctgaagcgatattcggaaatggatgatcattacgagtgcctgaatcgtctgtctctggatctcgagaaggaaatcgagtttcagaaggaactgagcatgagagtgaaagctaacctgtccctgccctaccttcaaacaaaacacattgagaagctattcaccgcaaatcagcgctgcagcatggagttccaccggatcatgaagaagctgaagtacgtacttagctatgtgaccaaaatcaaagaggagcagcacgagtcaatcaataaattcgagatggacttcatcgatgaggtcgagaagcagaaggaacttcttatcaagatccagcatctacagcaggattgcgatgtcccatcgagagagctgcgggatttgaaactgaaccagaacatggaccttcatatcgaagaaattctcaaagacttttcagagagtgaatttccttctatcaagacagaattccagcaagtgctctcaaacaggaaggagatgactcagtttctggaagagtggctgaacactcgatttgatatcgaaaaacttaaaaacggcattcaaaaggagaatgatcgcatctgtcaggtgaataacttcttcaataatcgcataatcgcgattatgaacgagtcgactgaatttgaagagcgtagcgcaacaataagcaaagagtgggagcaggatctcaagagcctgaaggagaagaatgagaaactgttcaaaaattaccagactctcaaaacgtccttagctagtggtgcccaagtgaaccccactacccaagataacaagaaccctcatgttacgtcaagggcgacacaactcactaccgagaagattagggaactggagaactcgctgcacgaggccaaggagtccgctatgcacaaggagagcaaaataatcaagatgcagaaggaacttgaagttacgaacgacattatcgcgaagctgcaggcaaaagtacatgaatccaacaagtgcctggagaagacaaaggagacaatacaagtgctacaggacaaggtagccctgggagcaaaaccctacaaagaggaaattgaggatctgaagatgaaactcgtgaagatcgaccttgagaagatgaagaacgccaaagaattcgagaaagaaattagtgcaactaaggctaccgtcgaatatcagaaagaagtgataaggctcctgcgtgagaacctcaggaggtcacagcaggctcaggatacctcggtgatctccgagcatacagaccctcagccttcgaacaagccactcacctgcggaggaggttccggcatcgtgcaaaacaccaaggcactgattcttaaatccgaacatatcaggctggagaaagagattagcaaactgaagcagcaaaatgagcagctcatcaagcagaagaacgagctgctgagcaacaatcaacacctttctaatgaggtgaagacatggaaggaacgcacattgaaaagagaggctcataagcaggtgacctgcgagaactcaccaaagtcacctaaggtcacaggcacggccagtaaaaagaaacagatcacaccttcccaatgtaaagaaaggaacctccaagatcccgtgccgaaagagagtccgaaaagttgttttttcgattcccggagcaagtctcttcccagtccccaccccgtcagatacttcgataatagctcactggggctctgccctgaggtgcagaatgcaggggccgagtcggtggacagccaacccggtccttggcatgcctcaagcggcaaagacgtccctgaatgcaagacacagtag

SEQ ID NO: 111625 - DNA, 7038 bp, synthetic construct
  misc_feature 1..7038: note = Description of Artificial Sequence: Synthetic coding sequence
  source 1..7038: mol_type = other DNA
atggctgaggaaggagccgtggcagtttgcgtcagagtgaggcccctgaatagccgcgaggagagtctgggcgagaccgcacaggtgtactggaaaactgataataatgtgatctatcaagtggacgggagcaaaagctttaatttcgatcgggtctttcatgggaatgagaccactaaaaacgtttacgaagaaatagctgcgcccattatcgactcagccatccagggttacaacggtaccattttcgcttacggccaaaccgcatctggcaagacctataccatgatgggtagcgaggatcacctgggcgtaatcccacgcgccatccacgacatatttcagaaaatcaagaagtttcctgacagggaattcctactgagagtttcctacatggagatatacaacgaaactattaccgacctgctatgcggcacacagaaaatgaaaccactaatcatccgggaggatgtcaatagaaacgtttacgtggccgaccttaccgaggaggttgtgtacacttctgagatggccctcaaatggataacgaagggcgagaagagccgccattacggcgaaaccaaaatgaatcaaagatcctcgagaagccacacaattttcagaatgattctcgaaagccgggaaaaaggtgagcccagcaactgtgagggcagcgtgaaagtctctcatctcaacctggtagacctggctggcagcgagcgcgccgcacaaacaggggctgccggagttagacttaaagagggctgcaatatcaaccggagcttattcattctcggccaggtcataaagaagctcagcgatgggcaagtgggcggattcatcaattaccgggatagcaagctgacgcgcatcctgcaaaactccttgggtggaaatgcaaaaacacgaatcatatgcacaatcacgccagtctcattcgatgaaacgctgaccgcgctccaatttgccagcaccgcaaagtacatgaagaatacgccctacgtgaatgaagtgtcaacagacgaggccctacttaaacgttacagaaaagaaatcatggatttaaaaaagcagttagaagaggtttctctggagacccgagcccaggctatggaaaaggatcagcttgcacagctgttagaagaaaaagacctgttgcagaaggtgcagaatgagaagattgaaaatctgactagaatgctcgttaccagcagttccctgaccctgcagcaggagctaaaagcaaaacgaaaacgacgggtgacgtggtgcctgggcaaaataaacaaaatgaagaactcaaactacgctgatcagtttaatattcccaccaacataacaaccaagacccacaagctgtccatcaatctcctgagagagatcgatgagtccgtgtgctccgagtccgatgtgtttagtaacactctcgacacactctctgaaatagagtggaaccctgccacgaaactgctgaaccaggaaaacatcgagagtgagttaaactctctgagggctgattacgacaatctagttcttgattacgagcaactgcggacggagaaggaagagatggagctcaagcttaaagagaaaaatgacttggacgagtttgaagctctggaacggaagacaaaaaaggaccaagagatgcagctgatacatgagatcagtaaccttaagaatctggtcaagcacgccgaggtttataatcaggatcttgagaacgaattgtcatcaaaagtggaactgctgagggaaaaagaagatcagattaaaaagctgcaggaatacattgattcccagaaactggaaaacattaaaatggatctgagttattctcttgagagtatcgaagacccaaagcagatgaagcagacactctttgacgccgaaacagttgctctggacgctaagagagagagcgccttcctgcggagtgagaatcttgagctgaaagagaagatgaaagagctggctaccacttacaagcagatggagaatgatatacagctgtaccaatcccagttggaggccaagaaaaaaatgcaggtggacctcgaaaaagagctccagtccgccttcaatgagattaccaaactcacttccctcatagatggcaaagtgcccaaggatctcctgtgtaatctggaactggagggcaagatcaccgatctgcagaaagaactgaacaaagaagtcgaggagaacgaagcacttcgggaggaagtgatcctcttatcagagcttaagtccctcccctccgaggtggagcggctcagaaaggagattcaggataagtctgaagaactgcatatcattacatctgaaaaagacaagcttttctcagaggtggtacacaaggagtctcgggttcagggactgctggaagaaattggaaagaccaaggatgatctggcgaccacacagtccaattataaatctactgaccaagaattccagaattttaagaccctccacatggacttcgagcagaaatataagatggttctggaagagaacgagcggatgaaccaggagatcgttaacctgtccaaagaagcacaaaagttcgattcctccctgggcgcccttaaaactgaactaagctacaaaactcaggaactgcaggagaagactcgagaggtccaagaacggctgaacgaaatggaacagctgaaagaacagctcgaaaatagagactccaccctgcagaccgttgagagagaaaaaactctcattactgaaaaattacagcagacattggaggaagttaaaacattgactcaggaaaaggacgatctgaaacaattacaggagagtctgcagattgagcgggaccaactcaagtctgatatacacgacactgtgaacatgaatattgacacccaggaacagctgaggaacgctctagagtccttgaagcagcatcaggagaccatcaacacattgaagagtaagatcagcgaggaggttagccggaacttgcacatggaggaaaacacaggcgaaacaaaagacgagttccagcagaaaatggtcggtattgacaagaagcaggatttagaggccaagaatacacaaactttaactgcagatgtcaaggacaatgagatcattgaacaacaaagaaaaatatttagcctgatacaggagaaaaacgaactacagcagatgctcgagtctgtgattgccgaaaaagaacaattgaagacagatttaaaggagaacatagaaatgaccatcgagaatcaggaggagctgcggctcctgggggacgagttgaagaaacaacaggagatagtcgctcaggaaaaaaaccatgccatcaaaaaagagggggaactgagtagaacgtgcgaccggctggccgaagtggaagagaaactaaaagaaaagtcacagcaattgcaggagaagcagcagcagcttttaaacgttcaggaggaaatgtctgagatgcagaagaagataaatgagatagagaaccttaagaatgaattaaaaaataaagagcttacactggagcacatggaaaccgaaaggcttgagcttgcccaaaaactgaatgaaaactatgaggaagtgaagagcattaccaaagagcggaaggtgctgaaagaactgcaaaagagcttcgaaacggaacgtgaccatctcaggggatacattcgggagatagaagccacaggacttcaaaccaaagaggaattgaaaattgcacatatacacctcaaggaacaccaggagactatagatgagctaaggcgaagcgtatctgagaaaacggcccagatcatcaatacacaggatctggagaaatcccataccaagctgcaggaggaaattcccgtgttgcatgaggagcaggaactgcttcctaatgtcaaagaggtttcagagacccaagagacaatgaacgaattggagctcctgacagagcaatccacgaccaaggattctacaactctagctcgcattgagatggagcggctgaggttaaacgaaaagttccaagagagccaggaggaaatcaaatctttaacaaaagagcgcgacaacctaaaaactattaaagaggccctcgaggtaaaacacgatcagctgaaagaacatatcagagaaaccttagcaaagatacaggagtcgcagagtaagcaggaacaatctctcaacatgaaagaaaaagataatgagactaccaagatagttagcgaaatggagcaatttaaacccaaagatagtgcgttactcaggattgagatagagatgctaggtctcagcaaacggttgcaggagtctcacgacgagatgaaatcggtggccaaggaaaaagacgatctgcaacgcttacaggaggtccttcaaagcgaatccgaccagttaaaagagaacatcaaggaaattgtcgctaagcacctggagaccgaggaggagctcaaggtggctcactgctgtctcaaagaacaggaggaaactattaatgaattgagggtcaatcttagtgaaaaggagacagaaattagtacaattcagaaacagttggaagcgatcaatgataagctccagaacaagattcaggagatctacgaaaaggaagagcaatttaacatcaagcagattagcgaagtgcaggaaaaggtgaatgaactgaaacagttcaaagagcatcgaaaggcaaaggatagcgccttgcagtcgatcgagagcaagatgctggaactaacgaaccgcttgcaggagtctcaagaggaaattcagattatgattaaagagaaagaggagatgaagcgcgttcaggaggctttacaaattgagagggatcagctaaaggaaaacacaaaagagatcgtcgccaagatgaaggaatctcaagaaaaagagtatcaatttttaaagatgacggccgtgaacgaaacccaggagaaaatgtgcgagattgaacatctgaaagagcagttcgaaacacagaagctgaacctcgagaacatagagactgagaacattaggctcacacagattctgcacgagaatctcgaggagatgcgatccgtaacgaaggaacgagacgaccttagatccgtcgaggagaccctcaaagtagaaagggaccagttaaaagagaatctacgagagacaataactcgggacttagagaaacaggaagagctgaaaatcgtccacatgcacctaaaggagcatcaggagacaatcgataagttaaggggtatcgtttcagaaaagacaaatgagattagcaacatgcagaaggatctagaacactctaatgatgccctgaaagcgcaggatctgaaaatacaagaggaactgaggatcgcccacatgcatctcaaggagcagcaggagaccatagacaaactccggggaatcgtctccgagaaaaccgataaactgtctaacatgcagaaagacttggagaatagtaatgccaagttgcaggaaaaaatacaggaattgaaggcaaacgagcatcagttgatcactctgaagaaagacgtgaacgaaactcagaagaaagtgtccgagatggagcagttgaaaaagcaaataaaggatcagagcctgaccctgagcaaacttgaaattgaaaacctcaatctagcgcagaagctccacgaaaatctggaagagatgaagagcgtaatgaaagagagggataatttacgcagagtggaggaaacactgaagcttgaacgcgatcaactcaaagaatccctacaggagacaaaggccagggatttagaaatacagcaagaactcaagaccgctagaatgctcagtaaagagcacaaggagaccgtggacaaattgagagagaagatcagtgagaagacaattcagatcagcgatatccagaaggacctggataagagcaaagatgagctgcaaaagaaaatccaagagctccaaaaaaaagagttgcaattgttaagggtcaaggaagacgtgaacatgtcccacaagaaaattaacgaaatggagcagctgaagaagcagttcgaagcacaaaatcttagcatgcagagcgtgcgaatggataattttcagcttactaaaaagctccacgagtcactcgaggaaatcagaatcgtggcaaaggagagagacgaattgcgccggatcaaagaaagcctgaagatggagagggaccagtttattgcgactctccgagagatgatcgcacgggatagacagaatcaccaggtcaaaccggagaaacgcttgcttagcgacggtcaacagcatctgacagagtccctgcgggagaaatgtagtcgcattaaggaattattgaaacggtactccgaaatggatgatcactacgaatgcctgaaccggctgagcctggatctagagaaggaaatagagtttcacaggatcatgaaaaaactgaagtatgtgctttcctacgtaacaaagatcaaggaggaacagcacgagagcattaacaaatttgagatggacttcatagacgaggtcgagaaacaaaaggagctcttgatcaaaattcagcacctgcagcaggactgtgacgtgccttcaagagagcttcgggacctgaagctgaatcagaacatggatttacatatagaagaaatactgaaggacttcagtgagagcgaattccctagcatcaagacagagttccagcaagtgctgtctaaccgcaaggagatgacccagttcctggaagaatggctcaatacgagatttgatatagaaaaattaaaaaacgggattcagaaagagaacgatcgaatctgccaagttaacaacttttttaacaaccgtatcattgccattatgaatgagtctacagaatttgaggagcgctccgcaacgatcagcaaggagtgggagcaggaccttaagtccctgaaggaaaagaacgaaaaactgtttaagaactatcagacattgaagacctccctcgccagtggggctcaggtgaaccctaccacacaggataacaagaaccctcacgtgacatcgagagctacccaattaactacagagtag

SEQ ID NO: 111626 - DNA, 9345 bp, synthetic construct
  misc_feature 1..9345: note = Description of Artificial Sequence: Synthetic coding sequence
  source 1..9345: mol_type = other DNA
atgagttgggccctagaggagtggaaggaaggtctccccacacgagccctccaaaaaatccaggagctcgagggacagctcgacaaactcaagaaagagaaacagcaaagacagttccagttagacagtctagaagccgcgttgcagaagcagaagcagaaagtcgagaacgagaagactgaaggcaccaacctgaagcgtgagaatcagcggctcatggaaatctgtgaaagtcttgagaagacaaagcaaaaaattagccacgaacttcaggtaaaggaatcgcaggttaactttcaggagggacagctgaactcaggtaagaaacagatcgaaaagctcgaacaggagctcaaaagatgtaaaagtgagcttgaacggagtcagcaagccgcgcagtctgccgatgtttcattaaatccctgcaataccccgcagaaaatcttcactacgcccttaactccttcacagtattattcgggttctaagtacgaggatctgaaggagaaatataataaggaagtggaagagcgcaagcgcttagaggctgaggtgaaagcactgcaagcaaaaaaagctagccagaccctgccccaggccacaatgaaccatcgcgatattgcccgccaccaggcctctagttccgtgttctcctggcagcaggaaaaaactccctcacacttatccagcaacagccagagaactccaataaggagggatttctccgccagttacttcagcggggagcaggaagtcacaccttcaaggtctactctgcagataggaaaacgagacgcaaacagctcattttttgataacagctcctcaccacacttattagaccagctcaaagctcagaaccaagaactgaggaacaagatcaatgagttggagctgagacttcagggccatgagaaggaaatgaaggggcaggtaaataaattccaagaattgcagctgcaactcgaaaaggctaaggtagagcttatcgagaaggagaaagtgctcaataagtgcagagatgagctcgtccggaccacagcacagtatgaccaggcaagcactaaatatacagccctcgagcagaaattgaagaaattgacggaggatctgagctgtcagagacagaatgctgagtctgctcgatgtagtctggaacagaagattaaggaaaaagaaaaggaattccaggaggaattgtcccgccaacagaggtcttttcaaactctcgatcaggaatgtatacaaatgaaggccagacttactcaggagctgcagcaggctaagaatatgcataatgtgctgcaggcagaattggacaaactgaccagtgtgaagcagcagttagagaacaatttggaagagtttaagcagaagctgtgccgggccgagcaggccttccaggccagtcaaattaaagagaatgagttacggcgatcaatggaggagatgaaaaaggaaaataatctgctcaaaagccattccgagcagaaagcacgggaggtgtgtcacctcgaggccgaactgaagaacatcaaacagtgcctgaaccagtcccaaaacttcgccgaagaaatgaaggccaagaacacctcccaagaaacgatgctgagggatctgcaggaaaagattaaccagcaggaaaattcccttactctggagaagctgaagctagccgtcgcggacctggaaaagcagcgtgactgtagtcaggacctcttaaagaaacgtgaacaccatatcgagcagctcaacgacaagctaagcaagaccgagaaagagagtaaggccctcctcagcgctctggagctcaagaagaaggagtacgaggagttgaaggaagaaaagacacttttttcatgctggaaatcagaaaacgagaagttgctgacacagatggagagtgagaaagagaatctgcagagcaagatcaaccacttggagacttgcttaaagacacagcagatcaaatctcacgaatacaacgagcgcgtgagaaccttagaaatggatcgcgaaaatctgagcgtagagatacgaaaccttcataatgtcttggatagcaaatcagtcgaggtggaaacccagaagctggcctacatggaattgcagcagaaagccgagttttcagaccagaagcatcagaaagaaattgaaaatatgtgcttaaagacgagccagctgaccggccaggtcgaagacttagagcacaaactgcagctcttgagtaatgaaatcatggacaaagatcggtgctaccaggacctccatgccgagtatgaaagcttaagagaccttctgaagtcgaaggacgccagcttagtaacaaacgaagatcaccagcgatccctgctggccttcgaccaacagcccgcaatgcatcatagcttcgctaacatcatcggcgagcaaggatcgatgccctccgaaaggagcgagtgccgtctggaagcggaccagtcccctaagaactccgccattttgcaaaatagagtggatagtttggagttctccttggaaagtcagaagcagatgaacagcgacctgcagaaacaatgcgaggaactcgtgcaaataaaaggagagatagaggaaaacctcatgaaggccgagcagatgcatcagtcttttgtcgcggagacctcacagagaatttccaaactccaggaggatacctcggcacaccagaatgttgtggcagagacactgtcggcattagaaaataaagaaaaagagctgcagctgcttaatgataaggtagaaactgagcaggccgagattcaggaactgaaaaagagcaatcacctgctcgaagactctctgaaagagcttcagttgctgtccgagacactctccctggagaaaaaagaaatgtcatcaatcatcagcctcaataaacgggaaatagaggaactgacccaagagaatggaacactgaaggagattaatgcctctctcaaccaagagaagatgaaccttatccagaaaagcgagtcattcgcaaactatatagatgagagggagaagtctatcagtgagctctctgaccagtataagcaagagaaactgatcttactgcagaggtgcgaggagacagggaatgcatacgaagatctcagtcagaagtataaggcagcacaggagaaaaatagcaagcttgaatgtctgctgaatgagtgtacctctctttgtgaaaatcgcaaaaacgagttggagcagttaaaggaggctttcgccaaagagcaccaggaattcctgaccaagctcgcatttgccgaagagcgcaaccagaaccttatgctcgagctcgagactgtacagcaggccctacgctccgaaatgaccgacaatcaaaataactccaaatctgaggccggcggacttaaacaggagattatgaccctaaaggaagagcagaataaaatgcaaaaggaggtgaatgatttgttgcaggagaatgaacagctaatgaaagttatgaagaccaaacacgagtgtcagaacctggagtccgagccaatccggaactccgttaaggagagggaatccgagaggaatcagtgtaacttcaaaccccaaatggatctagaagtgaaggaaatttctctggatagctacaatgcgcagctcgttcagcttgaggccatgctaagaaataaagagctgaagctacaggagagcgagaaagagaaggaatgtctgcaacacgaactgcagaccatccgaggggacctggagacttcaaatttacaggatatgcaatcgcaggagatctctggtttgaaggattgcgagatcgatgcagaggagaaatatatttcgggaccccacgagctatctacaagccagaatgacaacgcccatttgcagtgctcccttcagaccaccatgaacaagctgaacgagttagaaaagatatgtgagattctgcaggctgagaagtatgaactcgtgacggaactaaacgattccaggtctgagtgtattactgccactcggaaaatggccgaggaggtaggcaaactgttgaacgaggtcaaaatcctcaacgacgactcaggtcttttgcatggagaactggtagaggatatcccagggggtgaattcggggaacaaccaaatgaacagcatccagtcagtctggctcctctggatgagtccaattcatatgagcacctgaccctaagtgataaggaggtccaaatgcacttcgctgaactccaggagaaattcttgtctctgcagagcgaacacaagatattacatgaccagcactgccagatgagcagtaagatgtcagaattgcaaacctacgtggattcactcaaggctgagaacctggtgctttccaccaatctgaggaatttccagggagacttagttaaagaaatgcagctcggcctggaggagggattggtgccttctctatcaagctcttgtgttcctgacagcagctctctctccagtctcggggacagttccttctaccgggccctattggagcagaccggcgatatgtcactgctctctaatcttgagggtgctgtgtctgccaaccagtgttctgtggacgaagttttctgctcctctctgcaggaggagaatctgactaggaaagaaacaccaagtgctcccgctaaaggagttgaggagcttgagtctctgtgcgaggtttatcggcaaagcctagagaagctagaagaaaaaatggagtcacaaggtataatgaaaaataaagaaattcaggagcttgagcagcttttgtcgagtgaaagacaggagctggactgcctgcgaaaacaatacctgtcggagaatgaacaatggcagcagaagctgacctctgtgacgctagaaatggagtccaagctcgctgccgagaagaaacaaaccgagcagctgtcgctcgaactcgaagtcgccaggttacaactccaggggctagacctcagcagcaggagtctcctcggtattgacactgaggatgccatccaaggacgcaatgaaagttgtgatattagcaaggaacatactagcgagactaccgagcgaaccccaaagcatgacgtccatcaaatctgcgacaaagacgcacaacaagacctcaacctcgacatcgaaaaaattacggaaactggcgcagtgaaaccaacaggcgagtgttccggggagcagtcccccgacacaaactacgaaccaccaggggaggataaaacgcagggttccagcgagtgtatctctgagctctcattctcaggccctaatgcccttgtgcccatggacttcctgggtaaccaggaggatatacacaatctgcaactacgtgtgaaggaaacctcaaatgagaatctcagactgctgcacgtgattgaggaccgggataggaaagttgagtccctgctgaacgagatgaaggaactggactcaaagctgcacctgcaagaagtgcagttaatgacaaagattgaggcttgtatcgaacttgaaaaaatagttggcgaactgaaaaaagaaaattcagatttgagcgaaaagctggagtacttctcttgtgaccaccaggaacttctgcagagggtcgaaacttctgagggtcttaattccgacctcgaaatgcacgctgacaagtctagccgggaagacattggggacaacgtggcgaaagtcaacgacagctggaaagagcggttcctggacgtcgagaacgagttaagccggatcagatcagagaaagccagcatcgagcatgaagctctgtacctggaagctgacctcgaggtcgtgcagacagagaagttgtgcctggagaaggataatgagaacaagcagaaagttatcgtctgtctcgaagaagagctcagcgttgtgacttcagagaggaaccaactgagaggggaactggatacgatgtcgaaaaagacaaccgccctggatcagttgtcagaaaaaatgaaggagaagacccaggaactcgaaagccatcagtctgaatgcttgcactgtatccaggtagctgaagccgaggtgaaagagaagaccgaattgctgcagaccctgtcttccgatgtgtccgagctcctaaaggacaagacccacctgcaggagaagctccaatccttagaaaaggattcacaggcactgagcctgaccaaatgcgagttggagaatcagattgctcaactgaacaaggagaaggagctgcttgtcaaagagtccgagagtttacaggctaggttaagtgaaagcgactacgaaaaacttaatgtcagcaaggccttggaggcagctctcgtggaaaaaggagagtttgctctgcgtctttcgtcaactcaggaggaggtgcaccaactcaggagggggattgagaagcttagagtacgcatagaggccgacgagaagaagcaattacatatcgctgagaagctgaaggagcgggagagggaaaatgattctcttaaagacaaggtcgaaaacctcgaacgggaactgcagatgtcagaggagaatcaggagttggtgatcctggacgcagagaactccaaagctgaggtagagaccctgaaaactcaaatcgaagaaatggcccgctccttaaaggtcttcgagcttgacctggtgaccctgcgtagtgagaaagaaaacctgaccaagcagatacaggagaaacagggtcagctgagcgaactggacaagctcctgagctcattcaagtccctcttggaagaaaaagagcaggcggaaattcagattaaagaggaaagcaaaaccgcagttgagatgttgcagaaccaactaaaggagctcaatgaagctgtggctgcgctctgcggcgaccaggagattatgaaagccacagagcagagtctcgaccccccaattgaggaggaacaccaattaaggaactcaattgagaaactgagagctcgtctggaggccgatgaaaaaaagcagctgtgcgtgctacaacagctgaaagaaagcgagcatcacgcagacttgcttaagggcagggtggaaaatctcgagcgcgaactcgaaatcgcgcggactaaccaggagcatgctgccctcgaagctgagaattcaaagggagaggtggagacgctcaaggccaagatagagggaatgactcagtcattgcggggactggagctggatgtcgtgactatccggagcgagaaggaaaacttgaccaacgagttgcaaaaggaacaggaacggatctccgagcttgagatcattaactcatcctttgaaaatattctccaggagaaggaacaggagaaggttcagatgaaagagaaaagctcaaccgccatggagatgctccagacacagctgaaagaactgaacgaaagagtggcggcactgcacaacgaccaggaggcctgtaaagccaaagaacaaaatctgagtagtcaggttgagtgcctggaattggaaaaggctcaacttctgcagggactcgatgaagccaaaaataactacattgttctgcaatcgagtgtaaacggattgatccaggaggtagaggatggaaaacagaaactcgaaaaaaaagatgaagaaatatcacgtctgaaaaatcaaatccaggatcaggagcagctggtgagtaagttgtctcaagtcgagggtgagcaccaattgtggaaagaacaaaacctggagctgcgaaatctgacggtggagcttgaacagaaaatccaggtgttgcagtcgaagaacgctagccttcaggacaccctggaggtccttcagagctcatataagaacttagagaacgaacttgaactgaccaaaatggacaagatgtcctttgtcgagaaagtcaacaagatgaccgctaaagaaactgagctccagcgcgaaatgcacgaaatggctcagaaaactgcggagctccaggaagagctgtccggggaaaaaaatcgactggcaggggagctccagctcctattggaagagataaaatcctctaaggaccagctgaaggagctgactctagaaaattcagagctcaagaaatctctagactgtatgcacaaagaccaggtggaaaaagaggggaaggtgcgagaggaaatcgccgagtatcagttgaggctacatgaggcagaaaaaaaacatcaggctctcctcctcgacactaacaaacaatacgaggttgaaatacagacttaccgcgagaagctgacttcaaaggaagagtgcttaagtagtcagaagctggaaatcgatctgcttaaaagtagcaaggaggagctcaacaactctctaaaagcaaccactcaaattctggaggagctgaaaaaaacaaaaatggacaatttaaagtatgtcaatcagctgaaaaaagagaatgaacgggcgcaggggaaaatgaaattgctcattaaatcttgcaaacagctagaggaggaaaaagaaatcctgcagaaggaacttagccaactgcaggcagctcaggagaagcagaagacaggtactgtaatggatactaaggtcgacgagctcacaacagagatcaaggagctgaaagagacccttgaggaaaagacaaaggaggccgacgagtacctcgataagtactgcagcctgctgatcagtcacgaaaagctggagaaagcaaaggagatgctcgaaacccaggtggctcatctgtgttctcaacaatccaagcaggactccaggggctctccacttctgggtcccgttgttcctggccctagcccaattccatctgtcactgaaaagcgactctcctctggccagaataaggcctctggaaaaagacagagaagtagtggtatctgggaaaacgggcgcggaccaacccccgcaacaccagagtctttttccaagaaaagtaaaaaggctgtgatgagcggaatccaccctgccgaggacaccgagggcaccgagtttgaacccgagggtcttcccgaggtcgttaaaaagggcttcgctgatatccccacgggtaagacgagtccttacatcctgagacgaactactatggctacccgcacaagtccccgcctcgcggcccaaaaattagctctgtcccccttgagcttagggaaagagaatttggcagagtcgtctaaaccaaccgccggggggagccgtagccagaaggttaaggtcgcccagcggtctcctgttgactccggcactattcttcgcgaacctactacaaagagcgtcccggtcaataatctgcctgagaggagccctaccgacagcccacgggaagggctcagggtcaagagagggcggctggtacccagccctaaggcaggcttagaatcgaatgggtcagagaattgtaaggtacagtag

SEQ ID NO: 111627 - DNA, 528 bp, synthetic construct
  misc_feature 1..528: note = Description of Artificial Sequence: Synthetic coding sequence
  source 1..528: mol_type = other DNA
ctgatgatcaagggtcgcaagggaaaagtaaacaagatgacggccaaagagactgagctccagcgtgagatgcacgagatggcccaaaaaacagccgagttgcaggaggaattaagtggagaaaaaaatagactggccggagaactgcagctgctcctggaggagatcaagtcctctaaggatcagttgaaggaactcaccttagagaacagcgaacttaaaaagtccctcgactgcatgcacaaggaccaggtcgaaaaagagggcaaggtgcgagaagagatcgcggagtaccagctgagactgcatgaagcagaaaagaaacatcaggcactgctgctagacacgaacaagcaatacgaggtggaaatccaaacatatcgggagaagttgacatctaaggaggagtgcttaagcagtcagaaactggaaatcgacctccttaagtctagcaaagaggaactgaataactcactgaaggcaaccactcagatcctcgaagaactgaagaagacaaaggaaaattag

SEQ ID NO: 111628 - DNA, 4017 bp, synthetic construct
  misc_feature 1..4017: note = Description of Artificial Sequence: Synthetic coding sequence
  source 1..4017: mol_type = other DNA
atgtttcttatgcctacaagctctgagctgaacagcggccagaacttcttgacgcagtggatgacaaatccctcacgcgccggggttatactgaatcgcgggttccccattttggaggctgacaaagagaagagggctgcagtcgacatctctacatcattccctattaagggaacgcacttttccgattccttcagctttatcaacgaggaagatagtctcctggaggagcagaaattggaatcaaataacccttataagccccagtccgataagagtgagacgcatacagcatttccatgtatcaagaaaggaccacaagtcgcagcttgccatagcgcccctggccaccaggaagagaacaagaacgatttcatcccagatctggctagcgaatttaaagaaggagcttataaagatccactctttaagaaactggaacaactcaaggaagtacagcagaaaaagcaggaacagctgaaaagacagcaactggagcaacttcagcgtcttatggaagagcaagaaaagttgttaaccatggtctcgggacagtgcaccctccctggcctcagcctgctgcccgacgaccaatctcaaaagcatcgtagtcctggcaacactacgactggagagagggctacctgctgctttccgagctatgtttatcccgacccaactcaggaggagacttacccgtcaaacatcctctctcatgagcagtccaatttctgccgtaccgcccacggcgactttgtgctgacgtccaaacgcgcctcaccaaatctgttctccgaagcccagtaccaggaagccccagtcgaaaagaacaaccttaaggaagagaatcggaatcaccctaccggggaaagtatactgtgttgggagaaggtcaccgaacagatacaggaagctaatgataaaaatctccaaaagcatgatgactcctccgaggtggctaacattgaagagcgcccaattaaggcagccatcggtgagcggaaacagacctttgaggattacctggaggaacagatccagcttgaggagcaagagttgaaacaaaagcagctcaaagaggccgagggaccactgccgattaaggccaagccaaaacagccatttttaaagagaggagagggcctggctcggttcaccaacgcgaaaagtaaattccaaaagggaaaggagtcaaagctcgtcaccaaccaaagcacatcagaagatcagcctcttttcaagatggaccgtcagcagctccagaggaagaccgccttgaagaacaaggaactgtgcgctgacaatcctatcctgaaaaaagacagcaaagcacgcactaaatctggctcagtgaccctatcccagaagcccaaaatgctgaaatgcagcaatcgcaaaagcctgagcccgagtggcctcaaaattcaaacaggcaaaaaatgcgatggccagttcagggatcagataaagtttgaaaacaaggtgaccagtaataacaaggaaaatgtaaccgaatgtcccaagccgtgcgacacagggtgtaccggctggaataagactcaaggaaaggaccggttacctctttctacgggtccagcaagccgccttgctgccaagagtcccattcgcgagactatgaaggagagtgagtcctccctcgatgtgagcctgcagaaaaaactggagacttgggagagagagaaggaaaaggagaatctggaactggatgagtttctttttttggaacaagccgccgatgaaatttcattttcttctaactcatccttcgtgctgaaaattcttgaaagagatcagcagatctgtaagggacaccgcatgtcaagcactcccgtgaaggctgtccctcagaaaaccaacccagcagatccaatcagccactgtaatcgatccgaggacctggatcataccgccagagagaaagagagcgagtgtgaagtcgctccaaagcagctgcattcactgagctccgccgatgagctgcgtgagcaaccttgcaaaattcgtaaagccgtccagaagtctacatcagaaaaccagacagagtggaacgctcgcgacgacgagggcgttcccaattccgacagttctactgattccgaggaacagcttgacgtgactatcaagcctagcactgaggacagggaacgtgggataagctcgcgggaggactctccacaggtgtgtgacgacaaaggaccttttaaggacacccgcacccaggaggataaaaggcgggatgtggacttggatctgagtgacaaagactacagctctgacgaaagcattatggagagcattaaacataaagttagcgagccaagcagatcttcttcattatccctgtcgaagatggatttcgacgacgagcgcacttggacagatctcgaggaaaatctgtgcaaccacgacgtggtgctcggaaacgagagtacatatggcacaccccagacgtgttaccccaataacgaaataggcattctggataagactatcaaacgcaagatagcccccgtgaaaagaggggaggatctgtcaaaatctcggcggtctagaagtccacccaccagtgagctcatgatgaaattctttccttccctgaagccaaagccaaaatccgatagccacctggggaacgagttgaagttgaacatctcgcaggatcaaccccccggggataatgctaggagccaggttttacgcgagaagattattgagcttgagacagaaatcgagaaatttaaggctgagaacgcatccctggctaagctgaggatcgagcgggaatctgccctcgaaaaactcagaaaggaaatcgcagatttcgaacagcagaaggcaaaggaactggccaggattgaagaattcaagaaagaggaaatgaggaaactgcagaaagagagaaaagttttcgaaaaatacactacagctgctagaacgtttccagataagaaggaacgggaagaaatacagacgctcaaacagcaaattgctgatttgcgcgaggacctcaaacgcaaagagactaagtggtcctcgactcatagccgactcaggtcccagatacagatgttagtcagggagaacactgatttaagggaggagataaaggtaatggagcgattcagattggatgcatggaaacgagccgaggcgattgaaagcagcctagaagtggagaagaaagacaaactcgccaatacctccgtccgctttcaaaactcgcaaataagtagcggaacccaggtggaaaagtacaagaagaattacctgcccatgcaaggcaatccgcctaggagaagcaaatccgctccacctcgagacttgggtaacctcgataagggccaagccgcctcaccacgcgaacctcttgagccacttaattttccagatcccgaatacaaagaggaagaagaggatcaggacattcagggcgagatatcacatcccgacggaaaggtggaaaaagtgtataagaatggctgtagagtgattctgtttcccaacggcacgcgcaaagaggtgagtgcagatggcaaaacgattaccgtgaccttttttaacggggacgtgaagcaggtgatgcccgatcaacgggtaatatattattacgcggcagctcagacaacgcataccacttatcctgagggcctggaagtcctgcatttctcttcgggccagatcgagaaacactaccctgacggaagaaaggagattacatttcctgaccagacagtgaagaatctgtttccagacggacaagaagagtccatttttccagatggaactatcgtgagagtccagagggatggaaacaagctgatcgaattcaataacggtcagagggaattgcataccgcgcagttcaagaggcgagagtaccccgatggcactgttaagactgtttacgctaacggccaccaggagaccaaatacaggagcggacggataagagtaaaagacaaggaaggcaatgtgttgatggacacagagctgtag

SEQ ID NO: 111629 - DNA, 3411 bp, synthetic construct
  misc_feature 1..3411: note = Description of Artificial Sequence: Synthetic coding sequence
  source 1..3411: mol_type = other DNA
atgtttctgatgccaacctcttccgagttgaattccggccagaacttcctgactcagtggatgactaatccatctagggcaggcgtgatcctaaaccgggggttccctattcttgaagccgataaagagaaacgggcagcggtggacatatcgacgtcattcccaattaagggcactcacttttctgactccttttcatttatcaacgaagaagatagcttactggaggagcagaagttggaaagcaataacccttacaagccccagagtgacaaatctgagacccacaccgccttcccctgcattaagaagggcccacaggtggctgcatgtcatagtgccccagggcatcaggaagaaaataaaaacgatttcattccagatctcgcctcagagtttaaggaaggggcctataaagatcccctgtttaagaagctcgaacagctgaaggaagttcagcaaaagaagcaagaacaactgaaaagacagcaattagagcagttgcaacggctcatggaggaacaggaaaaactccttactatggtgtctggtcagtgcacgcttccaggattgagccttttacctgacgaccagagtcaaaagcaccgatcccctggcaacaccaccaccggagagcgggcaacatgctgctttccctcctacgtttatcccgaccccactcaagaagaaacctacccttccaacatcctctcccacgagcagtccaacttttgccgcactgcccatggggactttgtgctgacgagcaagcgcgcctcacctaacctcttttctgaagcccaataccaggaagcaccggtcgaaaagaacaatctaaaggaggagaaccgaaaccacccgactggcgagagcatcctttgctgggagaaggtgaccgaacaaatccaggaagctaacgacaagaacctgcagaaacacgacgatagctcagaagtggccaacatcgaagaacgccctatcaaggcagccattggagaacgtaaacagacctttgaggactatctcgaggagcagatccaactggaagagcaagaactcaaacaaaagcagcttaaggaggctgaggggccgctgccaatcaaggctaaacctaaacaaccctttctgaagaggggggaaggccttgcacgctttaccaatgccaaatcaaaatttcaaaaaggtaaggagagcaagctggtcaccaatcaatccacaagcgaagaccagcctctcttcaagatggatcgacagcagctgcagagaaagacagccctgaagaataaggagctctgcgcggacaatcccatactgaaaaaagactctaaggcccgtaccaagtctggttccgtcacactgtctcagaaacctaagatgttgaagtgtagtaacagaaagtccttgtcgccttccggactcaaaatacaaacagggaagaaatgtgacggtcaatttcgcgaccaaattaagttcgaaaacaaagtcacttctaacaacaaggagaacgtaacggagtgccctaaaccatgtgatactggttgtactgggtggaataaaactcaggggaaggatcggctccctctgagcacgggccctgctagccgactggctgctaaaagtcccattcgggagaccatgaaagaatctgagtcctccctcgatgtctccctgcagaaaaagttagagacttgggagcgagagaaggaaaaggaaaacctagaactcgatgaattcctattccttgagcaggccgcggacgaaataagcttttccagcaatagcagctttgtgctgaagatcctagaaagagaccaacagatatgtaagggccaccgaatgtccagtacgccagttaaggcagtgcctcaaaaaacaaaccccgctgatcccatctcccattgcaataggagcgaggatttggatcatactgctagagaaaaggagtctgaatgtgaagttgctcccaaacaactgcatagcttgtccagcgcagatgagctgcgggaacagccttgtaagataaggaaggccgtgcagaaaagcacctcagaaaatcagacggaatggaatgcgagagatgatgaaggagtccctaactctgatagtagtactgattctgaggaacaactggacgtcactatcaagccatctaccgaggaccgtgagcggggtatctctagccgggaagactctcctcaagtctgtgacgataaaggcccctttaaagacacccgcactcaggaggataaacgtcgcgatgtggacctggacctgtcagataaagactattcctccgatgaatccatcatggagtccatcaaacataaggtgtctgaaccatctcggtccagctccctctcgttaagtaaaatggacttcgacgacgaaaggacatggaccgatctggaagagaacctttgcaaccacgacgtggtgctgggaaatgagtcaacttacggtacgccccagacctgttatccaaacaacgaaattggtatactagacaagacaatcaagagaaaaatcgcgcccgtcaagcggggtgaagatctgagcaaatccaggcggagcaggtcaccgcccacctccgaacttatgatgaaattttttccctcacttaaacctaaaccaaaaagcgattctcacttggggaatgagctgaagcttaatatttctcaggaccaaccaccgggcgataacgctcggtctcaggttctgagggagaaaataatcgaactcgagacagagatagaaaagtttaaagctgagaacgcttctctggccaaactcagaatcgagagggaaagtgctttggagaaactgcggaaggaaatcgcagactttgagcagcagaaggcaaaagaactggcccgcatcgaagagtttaagaaggaggagatgcgaaagctgcaaaaagagcgcaaggtgttcgaaaagtataccactgcggcacggaccttccctgacaagaaagagcgagaagaaatccagacgctgaaacagcagattgccgaccttcgtgaggacttgaagcgaaaggaaaccaagtggtcctcaactcactctcgcctgcggagccagattcagatgctggtcagggaaaacacagacctccgggaagagatcaaggttatggaacgatttcggctggacgcctggaaacgagccgaggcgattgagtcttccctggaagtcgagaagaaggacaaattagcaaatacgtctgttcgttttcagaattcacagatcagcagcgggacacaggtggagaaatacaagaaaaactatctacccatgcagggcaccgcccagcctccccacactccatcgtctctgctagccgaccacctgcctcccctgtcttcattccgaccatttagccgaaatatacagctctgttataccttttag

SEQ ID NO: 111630 - DNA, 3261 bp, synthetic construct
  misc_feature 1..3261: note = Description of Artificial Sequence: Synthetic coding sequence
  source 1..3261: mol_type = other DNA
atgtttttaatgcctactagtagtgagcttaacagcggccaaaacttcctgacccagtggatgacgaacccgtctcgtgctggcgttatcctcaacaggggttttcctatcctcgaggccgataaagagaaacgcgcggctgtggacatcagtacaagctttcccatcaaaggaacccatttcagcgattccttcagcttcatcaacgaggaagactcattactggaagaacagaaacttgaatctaacaacccctataaaccacagagcgacaagagtgagacccataccgccttcccatgtataaaaaaggggccccaagtggcggcctgccacagcgctccaggacaccaggaggagaataagaacgactttattcccgatctggcctcggagttcaaggagggagcatacaaagatcctcttttcaaaaaactggagcagctgaaagaggtgcagcagaagaaacaggaacagctgaagcgccagcagctggagcagctgcagagattgatggaggaacaggaaaaactgctcaccatggtgtctgggcagtgcactttacctggcttgtcgctcctgcccgacgatcagagccaaaagcataggagcccaggtaacaccactacaggtgagcgagcgacatgctgttttccctcatacgtatacccagaccctacacaggaagaaacatatccatccaacatcctgtctcacgagcaaagcaatttctgtaggactgcccacggagattttgtactcacatctaagagagccagtcccaaccttttctccgaggctcagtatcaagaagccccagtcgagaagaacaatttgaaagaagagaatcggaatcacccgacgggtgaatccatactgtgctgggaaaaagtgaccgaacagattcaagaagccaatgacaaaaatctgcagaaacatgacgattcttcagaggtcgcaaatatcgaggaacgacctatcaaggcggccatcggggaacggaagcaaacatttgaagactatctcgaggaacaaatccagttggaggaacaggagctgaaacagaaacagctcaaggaggctgagggccctctcccgattaaggccaaaccgaagcaacctttcctgaagcgcggtgaggggctagccagattcactaacgcgaagagcaagttccagaagggaaaggagtcgaagttggtaactaatcagtctacctctgaagaccagccgctgtttaagatggaccggcagcagctgcagcggaaaactgccttgaaaaataaggagctgtgcgccgataatccaattttgaaaaaagactctaaagcccgcactaaaagcggcagcgttactctttctcagaagccaaagatgctgaagtgcagtaataggaaaagtctgtcacctagcggtcttaaaatccaaacaggtaagaagtgtgacggacagttccgggatcaaataaaattcgagaataaggttacaagcaataataaggaaaatgtgaccgagtgtccaaagccctgcgatactggctgtaccggatggaacaaaacccaaggaaaggacagattacctctgagcacagggcccgcctcccgcctggctgctaagagccctattagagaaacaatgaaggagtccgagagttccctggatgttagcctgcagaagaaactggagacctgggaacgagagaaagagaaggagaacctggagctagacgagtttttgtttctggaacaggcagcagatgagataagcttctcatcgaactctagcttcgtactcaaaattctggaacgagatcagcagatttgtaaaggacatcggatgagcagcacacccgtgaaagcagtgccccagaagactaatcccgcggatcctattagccactgcaaccgaagtgaagacctggatcacacggccagagaaaaggaatctgagtgtgaggtagcccccaaacagctgcatagcctttcatcagcagatgaactgcgggagcagccctgcaaaatccgcaaggccgtacagaaatctacaagcgaaaatcagactgagtggaatgcaagagatgacgaaggcgtgcctaatagcgattcctccactgactcagaggagcagcttgatgtgacaatcaaaccctctacagaagatagagaacgtggcatctctagtagggaagactctccccaggtttgcgacgataagggccctttcaaagatactcgcacccaggaagacaagcgccgcgacgttgatttagatctatcagataaagactattctagtgacgaatccattatggagagcataaagcacaaggtttctgagcccagtagatcaagttcactcagtctgagcaaaatggatttcgatgacgagcggacttggaccgatctggaagagaacctgtgtaatcatgacgtagtgctcggtaacgagtccacctacggcacgccccagacttgttacccaaacaatgagatcggaatactggataaaacaatcaagcgcaagatagcccctgtcaaacgcggagaggacctgagcaaatcccgtagaagtcggagcccccctacctccgagctcatgatgaagttctttccctccttaaagccaaaacctaaatctgattctcatctcggtaatgagttgaagcttaatatttcccaggaccagccaccgggggataatgctcgctcccaagtgctgagagaaaagatcatagagctggagacagagatcgaaaagttcaaggccgagaacgccagtctcgcgaaactcagaatcgagagggaatccgccctggaaaaactccggaaggaaattgctgactttgagcaacagaaagccaaagaactggctcgcatcgaggaatttaagaaagaggagatgcgcaagcttcagaaagaacgcaaggtgttcgaaaaatataccactgcagctcggactttccccgacaaaaaagaacgagaagagatacagacgttgaagcaacaaattgccgatctcagggaagatctgaaacgcaaggagactaaatggagctctacccactcacgcctgagatctcagatacagatgctggtcagagagaatacagatctcagggaggagatcaaagtgatggagcgatttcgccttgacgcctggaaacgcgctgaggccatcgagtctagcttggaagtggagaaaaaagataaactcgcagcaatccacctcgaagatccttcactacacctgctggtgatttag

SEQ ID NO: 111631 - DNA, 1035 bp, synthetic construct
  misc_feature 1..1035: note = Description of Artificial Sequence: Synthetic coding sequence
  source 1..1035: mol_type = other DNA
atggacagttacagcgcccctgaatctacacctagcgccagcagtcgaccagaggattattttatcggcgccacacctctccaaaagaggcttgaaagtgtgcggaagcagtcatccttcatcctgacgcccccgcgtaggaagattccacagtgctcccagctccaggaggatgttgatccacagaaggttgcttttcttttgcacaaacagtggacgctgtacagcctgactcccctgtataagttcagctactctaatctgaaagaatactctcgacttctgaacgctttcatagtagctgagaagcagaagggtctggcagtggaggtgggcgaggacttcaatatcaaggtgatcttttccacacttctcggaatgaaggggacgcagagagatcccgaggcatttctcgtccagatagtctctaaatcccagctgcctagcgaaaacagggaaggcaaagtcctctggacagggtggttttgttgtgtgtttggcgactcattacttgaaactgtgtcggaggatttcacatgcctccccctcttccttgcaaatggcgccgagagcaatacagccataattggaacgtggttccaaaaaacatttgactgctatttctcccccttggctatcaatgcattcaatctgtcatggatggccgcaatgtggacggcctgtaaaatggaccattatgtggccactaccgagttcctctggtcagtgccttgttccccccagtcccttgatattagtttcgccatccaccctgaggatgcgaaggccttgtgggatagcgttcacaaaactcccggtgaagtcactcaggaggaagtggacctgtttatggattgcctatactctcacttccaccgccacttcaaaattcatttgtctgctacccgcctggtgcgggtgtctacctccgtggcaagtgctcacaccgacggcaagatcaaaatcctgtgccataaatacctgattggtgttctcgcttatctgaccgagcttgccatcttccagatcgagtag

SEQ ID NO: 111632 - DNA, 1173 bp, synthetic construct
  misc_feature 1..1173: note = Description of Artificial Sequence: Synthetic coding sequence
  source 1..1173: mol_type = other DNA
atggatagttatagcgcacccgagagcacccctagcgcctcatcaagacctgaagattactttatcggagctacccctctgcagaaacggttagagtcagtacgcaagcagagcagcttcatcctaacgcctcctcgacgcaagattccacaatgctcccagttgcaggaagacgtggatccccagaaggtcgcattcctactccacaagcagtggacattgtattctctgacaccattgtacaagttttcttatagtaatctcaaggagtattcccgactcctcaacgccttcattgttgccgagaaacaaaagggactggccgtagaagtcggcgaagactttaacattaaggtgattttctccaccctgctcggcatgaagggtacccagcgtgatccagaggctttcctggtccagggtctcatattgtcaccacgcctggaatattctggtaccattcttgtggactgcaacttgtgtctgctcggatcctccgacccttccactttagcttttcaggtggccggcactgcaggggcttgccatcatactcggattgttagcaagtcacaactgccgagcgaaaatagagagggaaaagtcctgtggacgggttggttctgttgtgtgttcggagatagccttctcgaaactgtgtctgaagatttcacgtgcctaccacttttcctggctaatggcgccgagtctaatacagcaatcattggaacatggttccagaaaacctttgattgctattttagccccttagcgataaacgcatttaacctgtcctggatggctgcaatgtggacagcatgtaagatggaccattacgtcgccacgacggagttcttgtggagtgtcccctgctcccctcagtccctggacatctcatttgcaatccaccccgaggatgctaaggctctgtgggactccgtgcacaaaacccccggggaggtcactcaagaagaagtggatctgtttatggattgtctgtactcgcattttcaccggcactttaagatccaccttagcgctacgaggttggtcagggttagcacctctgttgcctctgcccatacagacggaaagattaagattctgtgtcataaatatctgatcggcgtacttgcctacttgacggagctagcaatcttccagatcgagtag

SEQ ID NO: 111633 - DNA, 1035 bp, synthetic construct
  misc_feature 1..1035: note = Description of Artificial Sequence: Synthetic coding sequence
  source 1..1035: mol_type = other DNA
atggactcttattctgcccccgagagtactcctagtgccagtagtcggcccgaagattacttcattggcgccacccccctgcagaagcggctcgagtctgtgaggaaacaaagcagttttatcctgacaccaccaaggcggaaaatccctcagtgcagccagctacaggaagacgttgacccacagaaggttgccttcctcctccacaagcaatggaccctttactccttgaccccactgtataagtttagttacagtaacctcaaggagtattcaaggcttctcaacgcctttatcgtggctgagaagcagaaagggctcgctgtggaagtgggcgaggacttcaacattaaggtcatcttctctaccctcttggggatgaagggcacccagcgggacccagaggctttcttagtgcaaatcgtcagcaaatctcagctgccctctgaaaatagggaaggcaaagttctctggaccggttggttttgctgtgtgttcggcgattctctgttggaaactgtctctgaggattttacctgtttgccccttttcctggccaatggtgcggagagtaataccgcaatcataggtacctggtttcagaaaacctttgattgttatttcagcccattggcaattaatgctttcaatctaagttggatggcagcaatgtggacagcctgcaagatggatcattatgtagccactaccgagtttttgtggtctgtaccttgcagccctcagagtctggacatttcctttgctatacatccagaggatgctaaagccttgtgggatagcgtccacaaaactccgggcgaggttacccaggaggaagttgacctgtttatggactgcctgtatagtcattttcataggcacttcaagattcacctttccgccacacgccttgtgagggtatcaacaagcgtggcatcggcgcacaccgatggaaagatcaagatcctttgtcacaagtaccttatcggcgttctggcatatctgactgaactggccatcttccaaatagagtag

SEQ ID NO: 111634 - DNA, 615 bp, synthetic construct
  misc_feature 1..615: note = Description of Artificial Sequence: Synthetic coding sequence
  source 1..615: mol_type = other DNA
atggacgaaacagtggctgagttcattaagaggacaatcctgaaaattccaatgaatgaacttaccactatcctcaaggcctgggatttcttgtccgagaatcagctgcagacggtgaactttaggcagaggaaggagagcgtggtgcaacatcttatccatttatgtgaagagaaaagagcctccatctctgatgctgctctgctggatatcatttacatgcagtttcaccagcatcaaaaagtctgggaggtatttcagatgagcaagggacccggcgaggatgtcgacctcttcgatatgaagcagttcaagaactcgttcaaaaaaatcctgcagagagcgctgaagaatgttacagtcagctttcgggagactgaggagaatgccgtctggatcaggatcgcctggggtactcagtacactaagcctaaccaatacaagcctacgtacgtcgtctactactcccagacgccatacgccttcacttcgagcagcatgttgcgccgtaatacgccgctcctgggccaggaactagaggcgaccggcaagatctacctccgccaggaggagataattctggatattaccgagatgaaaaaggcttgcaattag

SEQ ID NO: 111635 - DNA, 1020 bp, synthetic construct
  misc_feature 1..1020: note = Description of Artificial Sequence: Synthetic coding sequence
  source 1..1020: mol_type = other DNA
atggacgaaacagttgcggaattcataaagagaacaatactgaagatccccatgaatgaactgaccaccattcttaaagcatgggactttctgtccgaaaaccagctgcagacagtgaatttcaggcagaggaaggaaagcgtggtgcaacacttgattcacttgtgtgaagaaaaaagggcgagcatttcagacgctgccctcctagacattatctacatgcagttccaccagcaccaaaaagtgtgggaggtcttccagatgagtaagggccccggggaggatgttgaccttttcgatatgaagcagttcaagaacagctttaagaaaatcctacagagggcactgaaaaatgtgaccgtgtcattcagagagactgaggaaaatgctgtctggatccgtattgcttggggaactcagtatacaaagcccaaccaatacaaacccacttacgttgtgtattatagccagaccccatatgcttttacatcttcgtccatgctgcgaagaaatacccctctgttgggtcaagcccttacaatcgcgagtaagcatcatcagatagttaagatggacctccgaagcagatacttagattctttaaaagcaatcgttttcaagcaatacaatcagacatttgagactcacaattcgacaacaccactgcaggaacggagcttggggctagacattaatatggacagccggattatacacgagaacatcgtcgagaaagagcgcgtccaacgtataacccaggaaacattcggggactacccacagccccagctggaattcgctcagtataagctggagactaagttcaagagcggcctcaacggcagcatcttggcggagagggaggaacccctccgctgcctgataaagttttcaagtccacacctgctagaggccctaaagtctctggccccggctggaatcgctgacgctcctctgtctcccctgctgacatgcatccctaataagagaatgaattacttcaagataagggataaatag

SEQ ID NO: 111636 - DNA, 918 bp, synthetic construct
  misc_feature 1..918: note = Description of Artificial Sequence: Synthetic coding sequence
  source 1..918: mol_type = other DNA
atggacgagaccgtcgccgaattcattaagcggactattctcaagatccctatgaatgagttaaccactatcttaaaggcttgggacttcttatcagagaaccaattgcaaactgtgaattttcggcaaaggaaggaaagcgtggtgcagcatttgattcacctttgcgaagagaagagggcttcaatatccgacgccgcgctgctcgatataatctatatgcagttccaccaacaccaaaaggtgtgggaggtgtttcagatgagcaaaggccccggcgaggatgtcgatctcttcgatatgaagcaattcaagaacagcttcaagaaaatcctgcagagagcactaaagaatgtaactgtgtctttccgggagacagaggagaatgcagtctggattcggatagcctgggggacgcagtacaccaagccaaaccagtacaaacccacttatgtggtgtactattctcagaccccttacgcatttacatctagctctatgctgcgccgcaatacacccctgctgggacagactttcgaaacccacaattccacaacacctctgcaagaaaggtcccttggactagatattaacatggattctagaatcatccacgagaatatagttgagaaagaacgcgttcagcggattacgcaagagaccttcggcgactacccgcaaccccaactcgagtttgcccagtataagctagagactaaatttaaaagcgggctaaatggtagcatcctggccgaacgggaagagcccctgcggtgtctgattaaatttagctcgccacacctactggaagcactgaagtctctcgctcctgctggcatagccgatgcaccactgtcacccttgctcacctgcattcctaataagcggatgaactattttaagatccgggataaatag

SEQ ID NO: 111637 - DNA, 960 bp, synthetic construct
  misc_feature 1..960: note = Description of Artificial Sequence: Synthetic coding sequence
  source 1..960: mol_type = other DNA
atggacgagactgtcgctgagtttattaagcgcaccattctgaagattcctatgaatgagttgaccacgattctgaaggcttgggatttcctcagtgagaaccagctgcagacggtgaacttccgacagcgtaaagagtcagtggtgcagcatttaatccacctgtgtgaggagaagagggccagtatcagtgatgcggccctgttggacatcatctgtgaggacgtggacttgtttgacatgaagcagtttaagaactcatttaagaaaatactccaaagagcgctgaagaatgtaaccgtaagcttccgagagacagaggagaatgccgtatggatacggatagcctggggcacccagtacactaaacccaaccagtacaagccgacttacgtggtgtactacagtcagacaccatacgcttttacctcttcatctatgctgagacgaaatacacccttgctgggccaggctctgaccatcgcaagtaaacatcaccaaatcgtcaaaatggatctgagatcacgatatctcgacagtctgaaagccatcgtatttaaacagtataatcagactttcgaaactcataattcgaccactccactacaagaaagaagtctggggcttgacatcaatatggattcccggatcatccatgaaaatatcgttgaaaaggagcgcgtgcagagaatcacacaggaaaccttcggggattatccccagccacagctggaatttgcacagtataaactcgaaacaaagttcaaatccggccttaacgggtccatcctcgcagagagagaggagccgctgaggtgtcttatcaagttctcctccccccacctgctagaggctctcaagtctttggcccccgcaggaattgctgatgctcctttgtctccactgctgacatgcattccgaacaaacgcatgaactatttcaaaattagagacaaatag

SEQ ID NO: 111638 - DNA, 1062 bp, synthetic construct
  misc_feature 1..1062: note = Description of Artificial Sequence: Synthetic coding sequence
  source 1..1062: mol_type = other DNA
atggacgaaacggtcgccgaatttatcaagaggacaatattgaaaatcccaatgaatgagctgacgacaattctcaaagcctgggactttctgagcgagaaccagttgcagactgtgaactttcgtcagaggaaagagagtgtcgttcagcatcttattcacctgtgtgaggagaagcgggcctcaatctccgatgccgcactgctggatatcatctacatgcagtttcaccagcaccagaaagtgtgggaagtgtttcaaatgtctaaaggccctggagaggacgtggacctattcgatatgaagcagtttaaaaactcctttaaaaagattctgcagcgagccttgaaaaacgtgacagtgagcttccgcgagaccgaagagaatgcagtttggattcggattgcttgggggacccagtatactaaacctaaccagtacaaacccacctacgtggtctattactcccagacaccctacgccttcacctcctcatcaatgctgaggcggaacactccgctgctgggacaggcgctgactattgccagcaagcaccaccagatagtgaagatggacctgaggtcacgctaccttgacagcctcaaggccattgtgttcaagcaatacaatcaaacctttgaaacccacaattctacaacaccgctgcaagagcgctcactggggttggacatcaacatggattctcgaatcatccacgagaacattgtcgagaaggagagggtacagaggattactcaagaaacctttggtgattatccacaacctcagctggaatttgcacagtacaaactggaaacaaagtttaaaagcggcctgaatggctcaatattagcagagcgtgaggaaccactcaggtgcttaattaaatttagttcccctcacctactggaggcacttaaatccttggctcctgccgcgctggtgtgtcgcatccagaagctgctgtgctattccgggagtcactcgcaagggacgcaggacccatcatcatggcaaaaagacctatacctgctgttcgttcctctctatcccagatgctag

SEQ ID NO: 111639 - DNA, 903 bp, synthetic construct
  misc_feature 1..903: note = Description of Artificial Sequence: Synthetic coding sequence
  source 1..903: mol_type = other DNA
atggagcaagctaaccctcttagacctgatggtgagagtaagggtggggttctggcgcacctggagcggctggaaacccaggtcagcagaagtaggaagcaatccgaagaacttcagagcgtccaggctcaggaaggtgcattggggacaaaaatccataagcttcgtaggctgcgcgacgagctccgggccgtggttcggcaccggcgagcctctgtgaaagcctgtatagctaacgtggagcccaaccagactgtagaaatcaacgagcaggaggccctggaagagaaactggaaaacgtgaaagctattttacaagcatatcactttacaggcctgagcggcaagctgacaagtcgaggagtgtgtgtttgcattagcacagccttcgaggggaacctgcttgacagttactttgttgacctggtgattcaaaagcccctgcgtatccaccaccattcagtccctgtttttatcccactcgaggagatcgccgccaagtaccttcagacaaacattcaacattttctgttctccttatgcgagtacctgaacgcctacagcggccggaagtaccaggccgatcgcttacagtctgattttgctgccctgctgactggaccactgcagcgcaatccactgtgcaacctactcagtttcacttataagttagatcccggcggacaatcctttcccttttgtgcccgtttgttgtataaagatctcactgcaacgttgcctacagatgtgactgtgacctgtcagggagtggaggtcctgtctacctcatgggaggagcagcgcgcgtcccatgaaaccctgttttgtactaagcccctccaccaggtgttcgccagcttcacaagaaagggcgaaaaactagacatgtcactggtgtcctag

SEQ ID NO: 111640 - DNA, 903 bp, synthetic construct
  misc_feature 1..903: note = Description of Artificial Sequence: Synthetic coding sequence
  source 1..903: mol_type = other DNA
atggaacaggctaatcccctgaggcccgatggggagagtaagggcggggtgcttgctcatttagagcgtcttgagacccaagtctcgcggtcccgcaaacagtcagaggagttacagagtgttcaggcccaggaaggagccctgggcaccaagattcataagctcaggagactccgtgacgaattgcgggccgttgttaggcatcgaagggcatctgttaaagcctgcattgcaaatgtcgaaccaaatcagactgtggagatcaacgaacaggaggcgcttgaggagaagctggaaaatgtaaaggctattctgcaggcgtatcatttcactgggctgtcaggcaagttgaccagtcgtggcgtgtgcgtttgtatcagcaccgcgtttgaaggaaacctgctcgactcctatttcgtggatctggtcatccaaaagccgttaaggatccaccaccactctgtgcctgttttcattcccctcgaggaaattgctgcaaagtatctgcaaacgaatatccagcatttcttgttcagtctttgcgaatacctcaatgcttactctggtcgaaaataccaggccgatcgtctgcaatctgacttcgcagccctgctgaccggtcctcttcagaggaacccactgtgtaatctcctgtccttcacctacaaactcgaccccggtgggcagagtttccctttttgcgcccgattactgtacaaggatcttacggcgaccctgcctaccgacgtcaccgttacctgccaaggtgtggaggtgctttccacgagctgggaagagcaacgcgccagccatgaaactctgttctgcaccaagcctctgcaccaggtattcgcatcgttcactcggaagggcgagaagcttgacatgtcccttgtcagctag

SEQ ID NO: 111641 - DNA, 885 bp, synthetic construct
  misc_feature 1..885: note = Description of Artificial Sequence: Synthetic coding sequence
  source 1..885: mol_type = other DNA
atggctggcattctggcctctggcttgggcgtactcgcacacttagaacgtctggagacacaagttagcagaagccgtaagcagtccgaggaactacaatctgtgcaagcgcaggagggggcgttgggaaccaagattcataagctgaggaggttgagagacgagttgagggcagttgtgcgccatcggcgggccagcgtgaaggcatgtatcgccaacgtggagccgaaccagacagtggaaattaacgaacaggaggcattggaagagaagctggagaacgtgaaggcgatcttgcaggcttaccattttaccggtctctctgggaagttaacttctaggggtgtgtgtgtatgcatttccacagcctttgaggggaatctgctggacagttactttgtcgacctcgtgattcaaaagcctcttaggatccatcaccactctgtccctgtttttatacccttggaggagattgcggccaagtatctgcagactaatatacagcactttctgttttcactgtgcgagtacctgaacgcatacagtgggagaaaataccaggccgaccggctccaatcagacttcgcagccctgctaacaggaccactccagcggaatccactgtgcaatcttctctcatttacctataagctggacccgggaggccagtcttttcccttttgcgccagactgttatacaaggacctgacagccacacttccgacggatgtgacggtgacctgccagggagtcgaggttctgtcaacttcttgggaggagcagcgggccagccatgagacgctgttctgcaccaagccactgcaccaggtcttcgcctcgtttacgaggaagggtgaaaaactagatatgtcgctggtgtcatag

SEQ ID NO: 111642 - DNA, 309 bp, synthetic construct
  misc_feature 1..309: note = Description of Artificial Sequence: Synthetic coding sequence
  source 1..309: mol_type = other DNA
atgcaggagaaatatcctgacgccgtgtacctgtccgagggcccatccagttgctctatgggtatcaggagcgcctcaagaccgggttttgagctggtgatagtatggcgtattcagatcgatgaggacgggaaagttttcccgaaacttgatctgctgacaaaagtacctcaaagggcccttgagttagacaagaaccgggctatcgagactgctccactgtccttccggacactagttggtctgcttgggattgaggccgcccttgagagcctgatcaaaagtctgtgtgccgaagaaaacaactag

SEQ ID NO: 111643 - DNA, 348 bp, synthetic construct
  misc_feature 1..348: note = Description of Artificial Sequence: Synthetic coding sequence
  source 1..348: mol_type = other DNA
atggaagctccctcatggtcggtgctccagagatccggcgacgaggagaaatacccagatgcagtttatctcagcgagggcccgtcaagctgcagtatggggattaggtccgcctctcggcctggctttgagctggtgatcgtatggcgcatccagatcgatgaagacgggaaagtctttcctaaactcgacctgttgaccaaggtgccccaaagggccctggaacttgacaagaatcgcgctatcgaaacagcacccctcagctttcgtactctggttggtcttctcggtatcgaggctgcactggagtcactcatcaaatctctctgtgcagaggagaacaattag

SEQ ID NO: 111644 - DNA, 867 bp, synthetic construct
  misc_feature 1..867: note = Description of Artificial Sequence: Synthetic coding sequence
  source 1..867: mol_type = other DNA
atggacgccgagctggccgaggtgcgtgccctacaggccgagatcgctgcactcaggagggcctgcgaagaccctccagcaccctgggaagaaaaatcccgcgtccagaagagctttcaagcaatacaccaatttaacctcgagggatggaaatctagcaaggatctgaagaaccagctcggccaccttgagtctgaactgtcattcctgtccaccttgaccggcatcaacatcagaaatcactctaaacagactgaggatttaacatctaccgagatgacggagaagagtatcaggaaagtgctccagaggcacagactgagtggtaactgtcatatggttacatttcagctggagtttcagatcctggaaatacagaataaggaaaggctaagctctgccgtgacggatttgaatatcatcatggagcccaccgaatgttccgagcttagcgaattcgtctcacgcgccgaagagcgaaaggacctttttatgttcttccgtagtctgcatttctttgttgaatggtttgagtataggaaaaggacgttcaaacatctgaaagagaagtatccagacgccgtgtatttgagtgagggaccttcaagctgcagtatggggatacggtctgccagcagacctgggttcgagctagtaatcgtttggaggatccagatcgatgaggacgggaaggtcttccccaaactcgatctgctgaccaaggtgccccagagagcattagagcttgacaagaacagagctatcgagaccgcgcctttgtcgttccgcaccctggtgggattgttgggcatagaagctgcactggagtccttgataaagtcactgtgtgccgaggagaataactag

SEQ ID NO: 111645 - DNA, 744 bp, synthetic construct
  misc_feature 1..744: note = Description of Artificial Sequence: Synthetic coding sequence
  source 1..744: mol_type = other DNA
aagcgcgccgggcgaagcgactcttgtgccgctgggccagcagcagtttctaacgctccttggactcagagctggcagaggtgtgcaccctgtaagctccgctctcgaccatgcggcgaaagagtgaggacccatagacggccgggtaagcgcagccccgaaagttctatacgaaaagtcttgcagcgccatcgtctgtcgggcaattgccacatggtgacctttcaattagaattccagattctggagattcagaacaaggaaaggttaagttcagccgttacagatctgaatattattatggagccaaccgagtgctctgaactgtccgagttcgtgtcccgagccgaagaaagaaaggacctttttatgttctttcggtcactgcattttttcgtcgaatggttcgaatacaggaagcggacctttaaacacctaaaggaaaagtatcctgacgcagtgtacttaagcgaaggtccatcatcctgttccatggggattcggtctgctagtcgccctggattcgaactagttatcgtgtggcggatacaaatcgacgaggatggaaaggtgtttccaaagctggacctcttgaccaaagtgccccagcgggctttggagctcgacaagaaccgagcgattgagaccgcgcccttatcctttaggacgctggtcgggcttttggggatcgaagccgcacttgagtcactgatcaaatctctgtgcgccgaagagaataattag

SEQ ID NO: 111646 - DNA, 807 bp, synthetic construct
  misc_feature 1..807: note = Description of Artificial Sequence: Synthetic coding sequence
  source 1..807: mol_type = other DNA
atgtccggtaaggctaacgcctccaaaaagaatgctcagcagctgaagagaaatccaaagagaaagaaggacaatgaggaagtggttctctccgaaaataaggtgagaaacaccgtcaaaaagaacaagaatcaccttaaagacctatcctccgaagggcagaccaagcatacgaatttgaaacacggcaaaactgctgcttcaaagagaaagacctggcagcccctgagcaagtctactcgagaccatctgcagaccatgatggagtcggtgattatgacaattctttctaatagtattaaggagaaagaggaaatccaataccatcttaatttcctgaaaaagaggctcctgcaacagtgtgagacacttaaggtcccgcctaaaaaaatggaggacttgactaatgtctcgtcactgctcaacatggagagagcacgtgataaagcgaatgaagagggtctggccctgttacaggaggagattgacaaaatggtggaaactactgagctgatgactggtaatatacagtcccttaaaaacaagattcagattctggccagcgaagtggaagaagaagaagagagggtgaaacagatgcatcagatcaacagctccggagtcctgtccctgccagagctgagccaaaaaacattgaaggccccgaccttgcagaaggagatcctggctcttatccctaatcagaatgcacttttgaaggacctggacatcctccacaactccagtcagatgaagagcatgagcacatttatagaagaagcttacaagaagctggatgcaagttag

SEQ ID NO: 111647 - DNA, 807 bp, synthetic construct
  misc_feature 1..807: note = Description of Artificial Sequence: Synthetic coding sequence
  source 1..807: mol_type = other DNA
atgtctggcaaagcgaacgcctccaagaaaaacgctcagcagctaaagagaaaccctaagcggaagaaagataatgaggaagtggtgctgtctgagaataaagtgcgtaacacagtcaaaaagaacaagaaccacttaaaagacctgtcttccgagggacagacaaagcacacaaacttgaagcacggcaagacagccgcatccaagcgcaagacctggcaaccccttagcaagagcaccagggaccatctccagaccatgatggagtcagtgattatgactatattaagcaattcaataaaggaaaaggaagagatacagtatcatcttaatttcctcaagaagcggctactgcagcagtgcgaaactctcaaggtcccgcctaaaaagatggaggacttgacaaacgtgagctccctgctgaatatggagagagcccgagataaggcgaatgaagagggactggcattgcttcaggaggagattgataaaatggtggagactacagagctgatgaccggcaacatccagtccctcaagaataagatccagatactcgcttccgaagttgaagaagaagaagaaagggtcaagcaaatgcaccagatcaatagtagcggtgtgctgagcctcccggagctgagccagaagaccttaaaagcccctacattacaaaaagagattctcgctttaattccgaaccagaatgccctgcttaaggacctggacatcctgcacaattcttcccaaatgaagtcaatgtccacgtttatcgaagaagcttacaaaaagctggatgcttcatag

SEQ ID NO: 111648 - DNA, 384 bp, synthetic construct
  misc_feature 1..384: note = Description of Artificial Sequence: Synthetic coding sequence
  source 1..384: mol_type = other DNA
atgggagacaagcccatctgggagcagatcgggagtagttttatccaacattattatcagttatttgataatgacaggactcaacttggagccatttacattgacgcgtcctgcctcacatgggagggtcagcagtttcagggaaaagcagccattgtcgagaagttaagcagcctgccattccagaagatccagcactccatcactgcccaggatcatcagcccacccccgattcgtgtataattagtatggtggtgggtcagcttaaggccgacgaagacccaatcatgggatttcaccagatgtttctgctgaagaacattaacgatgcctgggtctgcacaaacgatatgttcaggctggccctgcacaactttggctag

SEQ ID NO: 111649 - DNA, 786 bp, synthetic construct
  misc_feature 1..786: note = Description of Artificial Sequence: Synthetic coding sequence
  source 1..786: mol_type = other DNA
atgtcatggtgctgtctgtggctctgccttagttcggtcggccgaaccggtagtgcaggacccagtctccccttctcagagctgtgttcgctgggactactccgtctcagaccggtgttctccccactgcattccggtcctggaaaacctgctcagtttcttgccggcgaggctgaagaagtgaacgcgttcgcactcggcttcctcagcacttcgtccggagtttccggagaagacgaggtggagcctttgcacgacggagtggaggaagctgagaaaaaaatggaggaagagggagtctctgtgagcgagatggaggctaccggtgcccagggcccgtcgcgcgtcgaggaagcagaggggcacacagaggttaccgaggccgagggcagtcaagggactgcagaagccgacggcccaggggccagcagcggcgatgaggacgcctcaggcagagctgcctccccagagtctgctagctctacacccgagagcttacaggcccgacggcaccaccaatttctggaacccgccccggcccctggggcagcagtcctgtcttctgaacctgccgagccgctcttggtcaggcaccccccaaggccacggaccaccggacctaggcctagacaggatccccacaaagcagggctgagccattacgtgaaactgttctcgttctatgccaagatgccaatggaacggaaggccctggagatggtcgaaaaatgcatctttgtgatgatctggagatacctgttacttatgctggccgccagactctag

SEQ ID NO: 111650 - DNA, 1686 bp, synthetic construct
  misc_feature 1..1686: note = Description of Artificial Sequence: Synthetic coding sequence
  source 1..1686: mol_type = other DNA
atggccgaccataatcctgattctgattccactccaaggaccctcctgcgccgagtgttagatacggccgatcctaggaccccccgccggcctcgctccgctagagccggggcccggcgagctctactcgagaccgcatcacccaggaaactctccgggcagaccagaacaattgcacgaggcaggagccacggggctagatccgttggccgcagcgctcatatccaggcctctggacacctggaggagcaaaccccccgcacactgttaaaaaacatccttctgaccgcgccagaaagctccattctgatgccagagtctgttgtgaagcctgtgccagccccgcaggcagtgcagcctagccgacaggaatctagttgcggctccctcgaacttcagctcccagaactggagccgccaaccaccctcgcacctggactcctcgcccccggcagaagaaagcaacgcttgagactaagtgtgtttcagcagggggtcgaccagggactttcactgtctcaagagccacagggcaatgcggatgcctcctccttgacacgcagtttgaacctcaccttcgcgactccattgcagcctcagtccgtgcaacgacccggcttggctaggcggcctccagcacggcgtgccgtggacgtaggggccttcttgcgagacctcagggatacgtcactcgccccgcctaacatcgttttggaagatacacagccgttctcacagccaatggttggctcaccgaacgtatatcactccctcccctgcacccctcacacaggagctgaagacgctgaacaggccgcagggcgtaagacacagtcctccgggcccggcctccagaagaacagtcccggaaaacctgcccaattcctcgctggagaggccgaggaagtcaatgccttcgcactggggtttctgagtacgagttccggagtatcgggcgaagatgaagtagaaccgcttcacgatggtgtcgaggaggccgagaaaaagatggaggaggaaggagtgtccgtctcagagatggaggcaacaggcgcacaaggcccaagtagggtcgaagaggcagaggggcacacagaggttaccgaagccgagggcagtcaaggcaccgctgaagccgacggccctggcgcatctagcggggatgaagacgcttcgggaagagctgcgtcgcctgaatccgctagtagcactcccgagagcctgcaggccaggcgacaccatcagttcttagagcctgcccccgcaccaggggcagccgtcctaagcagtgagccagcggagcctctcctggttaggcatccccctcggccgaggacaacggggccgcgcccccgccaggatccacacaaagcgggactcagccattatgttaagcttttttctttttacgcaaaaatgcccatggagaggaaagctctagagatggtggagaaatgtctcgacaagtattttcagcatctgtgtgacgatctggaagtttttgctgcccacgccggtcgaaagacagtcaaacctgaggacctggagctgctcatgcgccggcaggggttggtgacggatcaagtatcactccacgtgttggttgaaagacatctacccctggagtacaggcagctgctgataccatgcgcctactccgggaacagtgtctttcctgcccagtag

SEQ ID NO: 111651 - DNA, 447 bp, synthetic construct
  misc_feature 1..447: note = Description of Artificial Sequence: Synthetic coding sequence
  source 1..447: mol_type = other DNA
atgccagagtctgtggtcaagccagtgcccgcaccccaggccgtccagccatccaggcaggagagcagttgtggctccctggaactacagttaccagagttagagccccctacgaccttggcaccaggtctactggcacctggcaggcgcaagcagcgccttagactgtctgtgttccagcaaggtgtcgaccagggactcagcttatcccaggagccacaaggaaatgcggatgcctccagcttgacccgtagtttgaacctgacctttgccacgccccttcagcctcaaagtgtccagcgccctggccttgctcggcgcccacctgctcgaagggctgtcgacgtgggggcgtttctgagagacttacgcgatacaagtctggccccaccttccaaggtcggtttttcccctgccggcctatgggggaagctgtcccctctgtag

SEQ ID NO: 111652 - DNA, 1686 bp, synthetic construct
  misc_feature 1..1686: note = Description of Artificial Sequence: Synthetic coding sequence
  source 1..1686: mol_type = other DNA
atggccgatcacaatccagactcggacagtacaccccgtaccctcttgagacgagtgctggataccgccgatccaagaactcctcgccgtcctcgaagcgctagggcaggagcccgccgggctctgctagagaccgcgtcaccccgcaagttgtccggacagactcgcactattgcaaggggccggtcccacggtgctcggtcagtgggaagatctgctcacattcaggcctctgggcacctggaagagcagactcccagaacgctgctgaagaacattttactgacagctccagaatcctcgatcctcatgccagagtctgtggtcaaacccgttcccgcacctcaggccgtgcaaccgtcacggcaggagagcagctgtggctctctggagttgcagctccctgagctggagccgccaacaactctcgctccaggcctgttagctccggggagacggaaacagcggctacgtctctcagtgtttcaacagggagtggaccagggactgtcattaagccaggaaccacaaggaaacgctgacgccagtagtctcacccgatcgctgaacttaacgttcgcaacaccactgcagccccagtccgtacagcgacctggcctcgcaagacgcccacccgcccggcgcgccgtggatgtgggagcgtttctgcgggacctgcgagacacctctctggcccctcctaacatcgttcttgaagatacacagccctttagccaaccgatggtggggagtcctaacgtttaccattctcttccttgcaccccccatactggcgccgaggatgctgaacaggccgctgggaggaagacacagagttcaggacctggcttgcagaaaaacagccctggtaaacctgcccagttcctggccggagaggcagaagaggtgaacgcttttgccctggggttcctgtccacatcttctggagtgagcggcgaggatgaggtggagcctctgcacgacggcgtggaggaggctgaaaaaaagatggaagaagaaggtgtatcagtgagtgagatggaagccaccggagctcaaggaccttcccgggtggaggaagccgaagggcatactgaggtcactgaagctgaagggagccaaggtaccgcggaggccgacggacccggagcaagcagcggagacgaagatgcttccggccgggccgccagccccgagtcagcctcatcgaccccggagagcctgcaggcaaggcggcaccatcagtttttggagccagctcctgcacccggcgccgcagttctttcctcagaaccagccgaacccctcctggtccgccacccacctaggccacgcaccactggacccaggccccggcaggaccctcacaaagctgggttaagccactacgtcaaacttttctcgttttatgctaaaatgcctatggagcgtaaggcacttgagatggttgagaaatgtctcgataaatactttcagcacctgtgcgacgatctggaggtgttcgctgcccacgccggcaggaagacagtgaagcctgaggacctcgagctgttgatgaggagacagggcctggtcacggaccaggtctccctgcatgtgttggtggaacgacatcttcctctagagtaccgccagttgctgatcccatgcgcatattccggaaacagtgtgtttcctgcccagtag

SEQ ID NO: 111653 - DNA, 819 bp, synthetic construct
  misc_feature 1..819: note = Description of Artificial Sequence: Synthetic coding sequence
  source 1..819: mol_type = other DNA
atgagaagatcccggtcatctgccgctgctaagctgcggggacagaagcgctccggggcatcagcagctcctgctgcatccgcggccgccgctctggcaccctccgctacccgcactaggcgatctgccagtcaggccggttcgaaatcacaggcagttgaaaagcccccttctgaaaagccacgcttgcggaggagctctccccgcgcacaggaggaaggacctggcgagccacccccaccggaattggccctgctccccccacctcccccaccgcccccaacacctgcaaccccgacttcttcagcttctaatctcgacctcggcgaacaaagggagcggtgggaaacgttccagaagcgacagaaactgactagtgagggtgcagctaagctcttgctggacactttcgagtaccagggactggttaaacacacaggaggatgtcactgtggagcagttagattcgaagtctgggcctcagcggatctccatatcttcgactgtaactgctccatatgtaagaagaagcagaatcgccacttcatcgtcccagcctcaaggttcaagttattaaaaggtgctgaacacatcaccacttataccttcaatacccataaagcgcaacataccttttgtaagagatgtggcgtgcaatccttctataccccacgctccaaccctggcggatttggcatcgctccccattgcctggatgagggcaccgttaggagcatggtgactgaggagtttaatgggtctgattgggagaaagctatgaaagagcataagacgatcaaaaatatgtccaaggagtag

SEQ ID NO: 111654 - DNA, 2961 bp, synthetic construct
  misc_feature 1..2961: note = Description of Artificial Sequence: Synthetic coding sequence
  source 1..2961: mol_type = other DNA
atggtcagcaaatctgaccaactactcattgttgtgtcaatcctcgagggacgccattttcccaagcggccaaagcacatgcttgtggtggaggcaaaattcgacggcgagcagttagctactgaccccgttgatcacaccgaccagcctgaatttgccacagagcttgcttgggaaatcgaccgcaaagccctgcatcagcatcgcctgcagcgaacccctattaaactccagtgcttcgccctggatccggtgacctctgccaaagagaccatcggttatatcgtgttggatctgagaacggcacaggaaaccaagcaagctccgaaatggtatcaactcctctcgaacaaatacactaagtttaaatccgaaattcagatcagcatcgcattggagacggacaccaagcctcctgttgactctttcaaggccaaaggggcacctccaagggacggcaaagtgccagctatcctggcaggacttgatccaagagatatcgtggccgtgttaaacgaggaaggaggatatcatcagattgggcctgcggaatattgtacagactcatttattatgagcgtcacaatagcctttgccacccagctcgagcagttaatcccttgcaccatgaagttacctgaacggcagcccgaatttttcttttattactcccttttaggtaatgatgtcaccaatgaaccgttcaacgacctgattaaccccaatttcgagccagagagagccagcgtgagaattcgaagcagcgtggaaattctgagagtatacctcgccctgcagagcaagttgcaaatccatctttgctgcggcgaccagtcactcgggtcgactgagattcctctcaccggactgttgaagaagggctccacggagataaatcagcatccggtaaccgtggaaggagctttcactctcgatcctcccaacagggcaaaacagaagcttgcaccaatccccgtagaattggctccaaccgttggcgtgtctgtggctcttcagcgggagggtatcgactcgcagtcgttaatagaactgaagacccagaatgagcatgaaccagaacactctaagaagaaagtgctgaccccaatcaaggagaagacacttaccggtcccaaatcacccactgtaagccccgtccctagccataaccaatccccccctactaaagacgacgcaactgagtctgaagtggagagcctccaatacgacaaggatactaaaccaaaccctaaggctagctcatccgtccctgccagtctcgcacagctggtcactacctccaatgcgagcgaggtcgcctctggtcagaaaatcgccgtgccagccacttcacaccacttctgtttcagcatagacctgaggtctatacatgccctagagataggctttccaatcaactgcatccttcgctatagctaccccttcttcgggagtgcagcccccatcatgaccaatccccctgttgaggtgcgcaagaatatggaagtgtttctacctcagagctattgcgctttcgacttcgccaccatgcctcaccagttgcaggatacctttttgcgcatccctcttctggttgagttgtggcataaggacaagatgtccaaggacctgctgctgggcattgcccgcatccagctttccaatatcttatcatccgagaaaacccgatttctgggatccaatggcgaacagtgttggaggcagacatacagcgaaagtgtgccagttattgctgcccaaggatcaaataaccggattgcagatctgagctacacggttactctggaagactatggactggtcaagatgagggagatcttcatctctgactcctctcagggagtctcagcagtgcagcagaagcccagcagtctgcctcctgcaccttgccccagtgagatccaaaccgaacctcgggaaacactcgaatataaggccgccctagagctggagatgtggaaagagatgcaggaagacatattcgaaaaccaactgaaacagaaagagctggcccatatgcaggccctcgccgaggaatggaaaaaaagggaccgcgaaagagagtcacttgtgaagaaaaaggtagctgagtataccatcctcgaggggaagctacaaaagactcttatcgacttggagaagagggagcagcaattggcaagcgtggagtccgaactgcaacgcgaaaaaaaggagctgcagtccgaaagacaaagaaacctgcaagagttgcaggattccattcggcgagccaaggaagattgtattcaccaggtggagcttgagcgcctcaagatcaagcaattggaagaggacaaacatagattacagcagcagttgaatgacgcagaaaataagtacaagatccttgagaaagaatttcagcaatttaaggatcagcagaataacaaaccagaaatcaggctacagtccgagatcaacttactgacactggagaaagtggagctggaacgaaaactggagtccgctacgaagagcaagctgcactacaaacagcagtggggcagggccctgaaggagctcgccaggctgaaacagagggagcaggagtcccagatggcccggctcaagaagcagcaggaggagcttgagcaaatgcggctgcgatacctggcggccgaggagaaggatacggttaaaaccgaaagacaggaactgctggatattcgaaacgagctcaatagacttcgccagcaggagcaaaaacagtatcaggactcaactgagatagcttccgggaagaaggatggtccccacggctctgttcttgaagaaggactagacgactacctgacacgactgattgaggaaagagacaccttaatgcgaaccggtgtttataaccacgaagatcggattatatctgagctggaccggcagatacgtgagatccttgcaaagagtaatgcaagtaattag

SEQ ID NO: 111655 - DNA, 2883 bp, synthetic construct
  misc_feature 1..2883: note = Description of Artificial Sequence: Synthetic coding sequence
  source 1..2883: mol_type = other DNA
atgttagtcgtcgaagccaagtttgacggcgagcagctggcaacagaccccgtggaccataccgaccaacctgagttcgccactgagcttgcctgggagattgatagaaaagctcttcatcagcacagactgcaacgcacgccgatcaaactgcaatgcttcgctctcgacccagtcacgtctgctaaggagaccatagggtacatagtgctggatctgcgcaccgctcaagagaccaagcaggcacccaagtggtaccagctgctgtctaacaaatatacaaaattcaagtcggaaattcaaattagcattgcccttgagactgacaccaaacctccagtggattcttttaaagcgaagggtgcgccaccgagagatgggaaggtgcccgctatcctggcgggcctagacccccgcgatatcgtcgccgtactcaacgaggagggcggataccaccagatcggtcctgcagagtattgtactgactcattcattatgagtgtgactatagcttttgcaacacagctggagcagctcattccatgcacaatgaaactgccggagagacagccggaattcttcttctactatagcctactcggtaatgatgttaccaacgaaccatttaacgatctgataaacccgaactttgaaccggaaagagccagtgtgaggattagaagcagtgtggaaatactaagggtataccttgccctgcaaagcaagttgcaaattcacttatgttgtggagaccagagtcttggcagtaccgaaattccgcttactgggttactcaagaaagggtccacagaaattaaccagcaccccgtgaccgtggaaggcgccttcaccctggacccacccaacagagcaaaacaaaagctggcacctatccccgtagagctggctcccaccgtcggcgtgtccgtcgccttgcagcgcgagggcattgactcccagtctctcattgagctgaaaactcaaaacgagcacgagcctgaacatagtaagaaaaaagtgctcacacccatcaaggaaaagacattgacgggccctaaaagtcctaccgtgtcgccagtgccttcccacaatcagagcccccccacaaaggacgatgccacagaaagcgaggtggagtctttgcagtacgataaagacaccaaaccaaaccccaaagcatcctccagcgtcccagctagtctggcacaattggtgactacttccaatgctagcgaggtcgcatccggccagaagatcgctgtcccggctacgtcgcatcatttctgctttagcattgacctcagatccatccatgccctggagatcggtttccccataaactgtattctgcgctactcctatccctttttcggttccgcagcccctattatgacgaatcccccagtggaagtcaggaagaatatggaggtttttcttcctcagtcctactgcgcatttgactttgctacgatgccccaccagttgcaggacaccttcctgcgaatccctttgctcgtcgaactgtggcacaaggataaaatgtccaaggatttactgctcgggattgcgagaattcagctttcaaatatcctgtccagtgaaaagacccggtttctcgggagcaacggtgagcagtgctggcgccagacctactctgagagtgtccctgtcattgccgcccagggatccaataaccgaattgctgacctatcttacactgtgacccttgaagattacggcctagtaaaaatgcgcgaaatttttattagcgattcgtcgcagggtgtgagtgctgtgcaacagaaaccttcatcgctgccccctgctccctgtccctctgagatccagaccgagcctcgggagacacttgaatacaaagcagccctggaattagagatgtggaaagagatgcaggaggatattttcgaaaaccagctcaagcagaaagagttggcccacatgcaggctctcgcagaggagtggaaaaagagagatcgcgagagagaatcactcgtgaagaagaaagtggctgagtacactatcctggagggaaagctccagaagaccctgattgacttggaaaagcgagagcagcagcttgcttccgtggagtctgaactgcaaagagagaagaaagaactccagagtgagcggcagcgaaatttacaagagctccaggactccatccgtcgggcaaaggaagactgtattcaccaggtggaactcgagcggcttaagattaagcaactggaggaggataagcatcgactccagcagcagttgaatgacgctgagaacaaatataagatcctcgagaaggagttccagcaattcaaagaccagcagaacaacaagcctgaaattcggctccagagcgaaatcaatttgctaactctagagaaagtggagttagagaggaagctggagtcggcaaccaaaagtaaactacattacaagcagcagtggggcagagcgctcaaggaacttgctcggctgaagcagcgagaacaggagtcccaaatggctagactaaagaaacaacaggaggagctggagcagatgcggctacgttacttagcggccgaggaaaaagacacagtgaagactgaaagacaggagctgcttgatatcagaaatgaactgaatcgtctgagacaacaagaacaaaaacagtaccaggacagtacggagatcgcaagtggcaaaaaagacggaccacatggcagcgtcctggaggaggggttggatgattacctgaccagattgatcgaagaaagagacacgttaatgagaaccggagtgtacaatcacgaggatagaatcatttctgagctcgatcggcagatacgcgaaatcttagctaagagtaacgcctccaactag

SEQ ID NO: 111656 - DNA, 2961 bp, synthetic construct
  misc_feature 1..2961: note = Description of Artificial Sequence: Synthetic coding sequence
  source 1..2961: mol_type = other DNA
atggtctccaagtccgatcagctgttgattgtggtttctattctggaaggacgccattttcccaagaggcccaagcacatgctcgtggtggaggctaagttcgatggggaacagctggctaccgaccctgtcgaccacaccgaccagccagaattcgccactgaactggcctgggagatcgaccggaaggcactccaccagcaccggctgcagaggacccccatcaaacttcagtgcttcgccctggatcccgtgacaagcgccaaggagaccataggatacatcgtgttagacttgagaacagctcaagaaactaaacaggcccccaagtggtaccagctgttgtcgaacaagtataccaagtttaagtctgagattcagatttcgattgcgcttgaaactgacacaaagccgcctgttgacagctttaaggccaagggagcccctcctcgcgacggcaaggtgcccgcaatcttggccggattggacccaagagacatcgtcgccgtcctgaatgaggagggaggctaccatcagattggacccgcggagtactgcacagatagcttcattatgtcggtaactattgccttcgcaacacaactggagcagctgataccatgcaccatgaagttgcccgagagacaaccagaattctttttctactactccttgctgggaaacgacgtgacaaatgagccttttaacgaccttataaatcccaatttcgagcctgagcgagcttctgtcagaatcagaagctcggtcgagatcctgagagtatatctggccttacagtccaagttacagattcacctgtgctgcggcgatcaatctctggggtctaccgaaatcccactgactggccttctcaaaaagggttccacagaaattaatcagcatcctgtcacggtggaaggagccttcacacttgatccacccaatagggcaaagcagaagttggctccaatccccgtggagctggcacccactgtaggtgtcagtgtggccttgcagcgagaagggatcgattcccagagcctgatcgagttgaaaacccaaaatgaacacgagcctgagcactctaagaagaaggtactgacgcccattaaagaaaaaacacttacggggcctaagtctcccaccgtgtctcctgtgcccagtcacaaccaatcaccccctaccaaagacgacgcaaccgagagtgaagtggaaagcttacagtacgataaagacaccaaacctaatccaaaggccagttcttcggtgcctgcatccctggctcagcttgtcaccaccagtaatgcaagtgaagtggcctctggacagaagatcgccgtgcccgccacctcccaccacttctgcttttccatagacctgaggagcattcatgcactcgagatcggtttcccaatcaactgcatcctcaggtacagttatcccttttttggctctgccgctcctatcatgaccaaccccccagtggaagtgagaaaaaacatggaagtctttcttccacagtcttactgtgcttttgacttcgcaactatgccccaccagcttcaagatacatttctgcggatacctcttctcgtcgagctctggcacaaggataagatgtccaaagacctactgctgggaattgccagaatacagctcagcaacatactctcgagcgagaagactaggtttctcggaagcaacggcgagcagtgttggcggcagacctacagcgaaagcgttcccgtgatcgctgctcaggggagcaataatcgaattgccgacctaagttacacagtcactctggaggattacgggctagtaaagatgagagaaatttttatcagtgacagttcacagggcgtgtctgccgtgcagcagaagccatcgtctctcccccccgctccgtgcccatcagagatacagaccgaaccccgcgagacactcgagtataaggctgctttggagttggagatgtggaaggaaatgcaagaggatatctttgagaatcaactgaaacaaaaggagctggcccatatgcaggccctggccgaagagtggaaaaaaagggaccgagagagggagagtcttgtcaaaaagaaagtcgcagaatatactatcctcgaaggaaaattacagaaaacactgatcgatcttgaaaaacgagaacagcagctggccagtgtcgaaagcgaacttcaacgcgagaaaaaagagctccagagtgagcggcagcgtaatctccaggaacttcaagattctattcgaagagccaaagaggactgcattcaccaggtcgagcttgaaaggcttaaaatcaaacaactggaggaagataagcaccgccttcagcagcaactgaatgatgcagagaacaagtacaagatactggagaaagagtttcagcaatttaaggatcagcaaaataacaagcctgaaattagattacagtctgagatcaatctcctgacattggaaaaggttgagcttgagagaaaactggagtccgcaaccaaaagtaagcttcactacaaacagcaatgggggcgtgccctcaaggaattggccaggctgaaacagcgcgagcaagaatctcaaatggcccgactgaaaaagcagcaagaggagttggagcaaatgagactcagataccttgccgcagaggaaaaggacaccgtgaagactgagagacaggagctcctggacattcgcaatgagctaaataggttgcgccagcaagagcagaagcagtatcaggactctaccgagatcgcctctggtaagaaagacggcccccatgggtccgtcttagaggaggggctggacgattacttaacccgcctgatcgaggagagagacaccctcatgcgcacaggcgtgtacaaccacgaggacaggattatcagcgaattagaccggcagatccgggaaatcctcgcgaagtctaatgcatcaaactag

SEQ ID NO: 111657 - DNA, 1143 bp, synthetic construct
  misc_feature 1..1143: note = Description of Artificial Sequence: Synthetic coding sequence
  source 1..1143: mol_type = other DNA
atggtatccaaatcagaccaactgctaattgttgtttccattttggaaggtcggcactttccaaagcgccctaaacacatgctggtcgtggaggccaagtttgatggtgaacagctagccacagacccagtagatcacaccgatcagccagaattcgcaacggagctcgcgtgggaaattgaccgcaaggcgctgcaccagcatagactgcaaaggactcccattaagctgcagtgcttcgcactggacccggtaacttcagctaaggaaaccattgggtacattgtgctggatcttcggactgctcaggaaacaaagcaagcacctaagtggtatcagctactgtcaaataagtacaccaagttcaagagcgagatacagatcagtattgccctcgagacggacaccaaaccacccgtcgactccttcaaagccaagggagcccccccaagagacggtaaagtccccgctatattggctggactcgatccccgtgatattgtggccgtccttaacgaggagggcggctaccatcagatcgggcccgctgaatactgcacagacagctttatcatgtccgtgacgatagctttcgcgacacaacttgagcagctgatcccgtgcaccatgaagctacccgagaggcagcccgagttcttcttctattactcgctgctcggaaacgatgtgaccaacgagccatttaatgacctcatcaaccctaacttcgagccagaacgcgcatcagtcaggatcaggagcagtgtcgaaattctgcgcgtgtacctggcattgcaatctaaactgcaaattcacctgtgctgcggcgatcagtcgctcgggtcaactgaaattcctcttactggattgttgaagaaaggatcaaccgagataaaccagcatcccgtgaccgttgagggggccttcacgctggacccacccaatagagccaaacagaaactggcaccaatcccagtggagctggcccctaccgtcggcgtctcagtggcccttcaacgcgagggcattgacagccaagacgcattctggtacagcgctctcgatattatctttcccctctttatttttctgtttttagtcttagacgcgatcaggaagttcgccaattacgaagagaagtag

SEQ ID NO: 111658 - DNA, 3828 bp, synthetic construct
  misc_feature 1..3828: note = Description of Artificial Sequence: Synthetic coding sequence
  source 1..3828: mol_type = other DNA
atgagcctggactttggatccgtggcgctacctgtccaaaacgaggacgaagagtacgacgaggaagattacgaaagagaaaaggaattacagcagctgttaaccgatctaccccacgatatgctggatgatgacctctcttcacccgagctacagtattccgactgcagcgaagacggaacagacgggcaacctcatcatcccgagcagctggagatgtcgtggaacgagcaaatgctgcctaaatcccagagcgttaacggtccttcctgtcagggtctggagccatacaataaggtaacgtacaagccatatcagagcagcgctcagaacaacggctcccccgcccaggagattaccggtagtgacaccttcgagggtttgcagcagcaatttctgggagccaatgagaatagtgctgaaaacatgcagattatacagctgcaggtgcttaataaggccaaggaacgccagttggagaacctcattgagaagctgaacgagtcagaaaggcagatcagatacctgaatcatcagctcgtgatcataaaagacgaaaaagacggtttgaccctaagccttcgggagagccagaaattattccagaatgggaaggagagagaaatccagctggaggcccaaatcaaagccctagagacacaaattcaggccctgaaagtaaacgaagagcagatgattaaaaaaagcaggaccacagagatggccttggagtcccttaagcagcagctggttgacctccatcactccgaaagcctgcagcgggctagggaacagcatgagtcgattgtgatgggtctgactaagaaatacgaggagcaggttttatctctgcagaaaaatttggacgccactgtgaccgcgctgaaagagcaggaagatatctgctcccgtttgaaagatcacgtaaagcagttggagcgcaaccaagaggccatcaaacttgaaaaaaccgaaatcatcaacaagctgacccgcagcctcgaagaatcccagaagcagtgtgcacatctgcttcaaagcggcagtgtgcaagaagtcgcccagctccagttccagctccagcaagcccagaaagctcatgccatgtctgccaatatgaacaaggcattacaagaagagcttactgagctgaaagacgagatatctttgtacgagtctgcggcgaagctcggcatccatcctagtgactcagagggcgagctgaacatcgaactcacagagagttatgtagatctgggcatcaagaaggtgaactggaagaagtccaaagtgacttcgattgtccaagaagaggacccaaacgaagaactgagtaaggatgagttcatcctgaagctaaaggctgaagtgcaacgacttctaggtagtaactccatgaagcggcatctggtctcccagctgcagaatgacctaaaggattgccacaagaaaatagaagacctccatcaggtgaagaaggatgaaaagtctatcgaagtggagaccaaaaccgacacctccgagaaacccaagaaccagctctggcccgaatcatcaacatctgacgtcgtccgcgacgacattttgcttctgaagaatgaaatccaggtgctccaacagcaaaaccaggagctgaaggagacagagggcaagctcagaaatactaaccaagacctttgcaaccagatgagacagatggtccaagactttgaccacgataaacaggaagccgtggatcgctgcgagcgcacgtatcagcagcatcacgaggccatgaagactcagataagagagtctctgttagctaagcacgcgctagagaagcagcagctctttgaggcgtacgagcggacacacctgcagctgcggagtgaactggacaaacttaacaaggaagtcaccgctgtacaggaatgttatctcgaagtgtgtcgagagaaggacaacctcgaattgaccttgaggaaaacaaccgagaaggagcagcaaacgcaagaaaaaatcaaggagaaacttattcagcagttagaaaaagagtggcagtcaaagttggaccagaccattaaagctatgaaaaagaagaccctagactgcggtagccagacagatcaagtgacaacctccgacgtgatttccaaaaaagaaatggccattatgatcgaggagcagaaatgcaccattcagcaaaacctcgagcaagaaaaagatattgccatcaagggggcaatgaagaagttggagatcgagctagaactgaagcactgcgagaacatcaccaaacaggttgagatcgcggtgcagaatgcccaccagaggtggctgggcgaacttcccgagctggcagaataccaagctctggtgaaagctgagcagaaaaagtgggaggaacagcacgaggtgtccgtaaataagcggatctcttttgccgtctctgaggccaaggagaagtggaagagcgaattagagaacatgagaaaaaacattctgcccggtaaggaactagaggaaaaaattcattctctccagaaggaattggagcttaagaacgaagaagtgcctgtagttatcagagccgaactcgcaaaggcaagaagcgaatggaataaagagaagcaagaggagattcaccgcatccaggagcagaacgagcaggattacagacagttccttgatgatcaccgtaacaaaattaatgaggtcctcgccgcagcaaaggaggacttcatgaagcagaaaactgaactactgctgcaaaaagagacagagctgcagacctgtctggatcagagtcgacgagagtggaccatgcaagaggccaaacgcatccagctagagatttatcagtatgaggaggacatcctgaccgtgctcggagtgctgttatcagacactcagaaagaacacatttcagacagcgaagataaacaactgctcgaaataatgtctacctgttccagcaaatggatgagcgttcagtatttcgagaagctcaaagggtgcattcagaaggcttttcaggacaccctgccgctcctcgtggaaaacgccgacccagagtggaagaagagaaatatggctgagctgtctaaagactccgcctcacaaggcacaggccagggcgaccctggccccgccgccggtcaccatgcccaacccctggccttacaggcaaccgaagcagaggccgacaagaagaaggttctcgaaatcaaagacttgtgctgcggccactgcttccaggaacttgagaaggctaagcaagagtgccaagacctcaaaggcaagctcgagaagtgttgcaggcatttgcaacacctcgagcgcaagcataaggccgtagttgaaaagattggcgaggaaaacaacaaggtagtggaggagcttattgaggagaataacgacatgaagaataagcttgaggagttacagactctgtgtaaaactccaccgcgatcactgagtgctggagctatagagaatgcgtgtctgccctgttccggaggcgcactagaggagttacggggccagtatataaaagctgttaagaaaattaagtgcgatatgttgcgttatattcaggaaagcaaagaacgggcagctgaaatggtgaaagccgaagtccttcgggagagacaggagactgcccgcaagatgagaaagtactatctaatatgtctccagcagatccttcaagacgatgggaaggaaggtgccgagaagaagatcatgaacgccgcgagtaaactagcaaccatggctaaactactggaaacaccgatctcctccaagtcccaaagtaagactacacagtccggaatgagcaaatag

SEQ ID NO: 111659 - DNA, 5133 bp, synthetic construct
  misc_feature 1..5133: note = Description of Artificial Sequence: Synthetic coding sequence
  source 1..5133: mol_type = other DNA
atgagtctggattttggttccgtcgctttgccggtgcagaacgaggatgaggagtacgatgaggaggattatgagcgagagaaggaactccaacagctcttaactgatctgccacacgatatgctagacgacgatctgtcgtcacctgaactgcaatacagtgactgtagcgaagatggcacagatggacagccgcaccacccagaacaattggaaatgagttggaatgagcagatgctcccaaagtcccaaagcgtgaacggctacaatgagattcaatctctgtacgccggggagaaatgtggaaacgtctgggaagaaaatcgaagcaaaacagaagacagacaccccgtgtatcatcccgaagaaggcggggacgagggcggttccggttactcaccaccctcaaagtgtgaacaaaccgatctgtatcatctgcctgaaaattttcggccttataccaatggtcagaaacaggaattcaataaccaagcgaccaacgtaatcaagttcagtgatccccagtggaaccacttccagggaccatcgtgccaggggctcgagccttacaataaagtgacctacaagccctaccagagctcagcacagaataacggctctcccgcccaggaaattactgggtccgataccttcgagggtttgcaacagcaattcctgggcgctaatgaaaatagcgccgagaatatgcagattatacagttgcaggtgcttaacaaagcgaaagagagacaactggagaacctcattgaaaagctaaatgaatccgagaggcagataaggtaccttaaccaccaattggtcattattaaggacgagaaagacgggctgacccttagtctccgggagtcccagaagttatttcagaacggcaaagagcgcgagatacagttggaggcacaaattaaggcacttgagactcagattcaagcccttaaggtgaatgaggagcagatgataaagaaatcccggactaccgagatggccctcgaatctctgaaacagcagttagtcgacctgcaccacagtgagagcctccagcgtgcccgcgagcagcacgaatccatagtgatgggattaacaaagaagtatgaggaacaggtcctgtccctgcagaaaaatctggacgcgaccgttaccgccctcaaggaacaggaagatatatgttctagactcaaagaccacgtgaaacagcttgaacggaaccaagaggcgatcaagctggagaagacagagatcattaacaaattgacacgaagcttggaagaatcccagaagcagtgcgcccatctgcttcagtctggaagtgtccaagaggttgctcagctgcaatttcagctgcagcaggctcagaaagcacatgccatgtccgctaacatgaataaagctcttcaagaagagctcaccgagctgaaggacgaaattagtctctatgagagcgctgctaagctgggaattcatccatccgactctgagggggagctgaacatagaactaaccgagtcatatgtcgacctggggatcaagaaagtcaattggaaaaaaagtaaggttacatcgatcgtccaggaggaggaccccaacgaagagttgtcgaaagatgagtttatcctgaaattgaaggccgaagtccagcgacttctggggtccaattcaatgaagcggcatctcgtctcccagcttcagaacgacctcaaggattgccataagaagattgaggacctgcaccaggttaaaaaagacgaaaagtcaattgaggttgagaccaagacggatacaagcgagaagcccaaaaatcaactctggcccgagagctcaacatctgatgtcgtgagagatgacatactgctcttgaagaatgaaatccaagtgctccagcagcagaatcaagagctcaaggaaacagagggtaaactgcggaatacgaatcaggacctgtgtaatcagatgagacaaatggtccaggatttcgatcacgacaagcaggaggccgtcgacaggtgcgagcgaacttaccaacagcatcatgaggcgatgaagacacagatcagggagagtctgctggccaagcatgctctagagaaacagcagctgtttgaagcatacgaacgaactcacctgcagctcagatccgaactggataaattgaataaagaggttacggctgttcaagagtgctacctcgaagtgtgtagggaaaaagacaacctggaacttacactgaggaaaactaccgaaaaagaacagcagacacaggagaagataaaggagaaattaattcagcagctggaaaaggagtggcaatcaaagttagatcagacaattaaggcaatgaaaaagaaaactctggattgtggctcgcagaccgaccaagttacgacatcagatgtcatcagcaagaaagagatggccattatgatcgaagagcagaagtgtaccattcagcaaaacctcgaacaagagaaggacattgcgatcaaaggcgccatgaagaaactggagatagagctcgaattaaagcattgcgaaaacataaccaagcaagtggagatagctgtgcagaacgcgcaccaacgctggctcggcgagcttcccgagcttgccgaataccaggcactggttaaagctgaacagaaaaagtgggaggagcagcacgaagtcagcgttaacaagagaatcagcttcgccgtctctgaagccaaagagaagtggaagtcagagctggagaatatgcggaaaaacatattgcctgggaaggagcttgaggagaaaatccactctcttcagaaggaattagagctgaagaacgaggaggtccccgtggtcatcagagccgagctggccaaggcgaggtctgagtggaataaggaaaaacaggaagaaattcatcgaatccaggagcaaaacgagcaggattaccgccaattcttggatgaccaccgcaacaagattaatgaagttctggcagccgccaaggaagacttcatgaagcagaaaacagagctcctgctgcagaaggagaccgaactgcagacttgtctggatcaaagcaggcgagaatggactatgcaagaggctaagaggatacagttggaaatttaccaatatgaagaggatattttaactgtgttgggtgttctcctatctgacacccagaaggaacacattagtgatagcgaagataagcagcttcttgaaattatgtctacatgttcatctaaatggatgtccgtgcaatactttgagaagctgaagggctgtatacagaaggcgtttcaggatacactgccgctcctggttgaaaatgccgacccagagtggaagaagaggaacatggccgaactgtcaaaggattctgcctcgcagggtacaggtcaaggtgatcctggcccagcggcggggcaccacgcccagcccttggccctgcaggctactgaggccgaagcagacaaaaagaaagtgttggagattaaggatttgtgctgcggtcactgctttcaagagctggagaaagccaaacaggagtgccaagatctgaaaggaaaactggaaaagtgctgtaggcacttacagcacttggaaaggaagcataaggccgttgttgagaagatcggggaagaaaacaacaaggtagtggaggagctgatcgaagagaataacgacatgaaaaataaactggaggaactccaaactctctgcaaaacaccccctaggagtttgtcagctggagccattgagaatgcctgcctcccgtgctctgggggggctttagaggaactccggggacagtatatcaaggccgtgaaaaaaatcaaatgtgatatgctgaggtacatacaggagagcaaagagcgcgcagctgagatggtgaaagcagaggtccttagagaacggcaggaaactgcccggaaaatgcggaagtattatctgatttgtctgcaacagatcctccaagatgacggcaaggagggggctgagaaaaagattatgaacgctgcctccaagctagccacaatggctaaactactggagactcccattagctccaagtcacagagtaaaacaacgcaatccgccctgcctcttacgtcagaaatgctgatcgcagttaagaagtccaagcgcaacgatgtgaaccagaagataccatgctgcattgagtccaagtctaacagtgtaaacactatcacacgcactctctgcgaacaggctcccaaacgccgggcggcctgtaatctgcagcgcctactagaaaatagcgaacaccagtccatcaagcacgtaggatccaaagagactcacttagaattccagtttggcgatggaagctgtaagcatttaaattctttacctcgcaacgtttctcctgagtttgtgccttgcgaaggcgaaggaggtttcggcctccacaaaaagaaggatctcctctccgacaacggcagcgagagccttcctcactcggcagcgtacccctttctcggtacactagggaacaaaccctcccccaggtgtaccccggggccctccgagagtggctgtatgcacattaccttccgggattctaacgagcgacttggccttaaagtttataagtgcaacccgcttatggaatccgaaaatgcagccagtgagaagagccagggattggatgtccaggagccccccgtcaaggatggaggagaccttagcgactgcttgggttggccctcttccagtgctactttgagtttcgatagcagagaagcgagctttgtccacggtaggcctcagggcacccttgagatccccagtgaatccgtgaaaagcaaacagttcagtccttcaggatacttgagcgacactgaagagtcaaacatgatctgccagactatgaagtgccagcggtaccaaacaccttatctgagtgaagagacgacttatctcgaacccgggaagataagtgtgaactgcggtcacccttcaaggcataaggcagaccggctcaagtccgatttcaagaaactgagctctactctgcccagttccgtgtgtcagcagccatcccgaaagcttattgtgcccctcagtagccagcaggattctggctttgatagcccattcgtcaatttagactag

SEQ ID NO: 111660 - DNA, 4965 bp, synthetic construct
  misc_feature 1..4965: note = Description of Artificial Sequence: Synthetic coding sequence
  source 1..4965: mol_type = other DNA
atgtccttggacttcggctctgtcgcactcccagtgcagaacgaagacgaggaatacgatgaagaagactatgaacgtgaaaaagagctccagcaactgttaactgaccttcctcacgatatgctggacgatgacctcagctctcctgaactccagtattctgattgcagcgaagacgggactgatggacagccccaccatcccgagcaactcgaaatgtcctggaacgaacaaatgctgccgaagtcgcaaagcgtgaatggatataacgaaattcagagcctctacgcgggcgagaagtgcggtaacgtgtgggaagaaaacaggtctaagaccgaagacagacatcccgtgtaccatcctgaggaaggtggagatgagggagggtctgggtattcccccccaagcaagtgtgagcagaccgacctgtatcatctccctgaaaactttaggccctatactaatggacagaaacaggagtttaacaaccaagcgacaaacgtaatcaaatttagcgaccctcaatggaaccacttccagggaccttcttgtcaaggcctggagccttacaacaaagttacatacaaaccttatcagtctagcgcacaaaataatggctctcctgctcaggaaatcactgggtcagatactttcgagggccttcagcaacaattcttgggggccaatgagaattccgctgagaacatgcagataatccaattacaggttctgaacaaggctaaagagcgacagttggaaaatttgattgagaaacttaacgaatctgaacgccaaattcgctacctcaaccaccagctggtcataataaaggacgaaaaagacgggttgacactctctcttcgggagtcacagaagctgttccagaacggcaaagaacgtgaaatccagctggaggcccagataaaagcgctggaaacacaaattcaggctctgaaagtgaacgaagagcagatgatcaagaaaagccgcacaactgagatggctctggagagcttaaaacaacaactcgttgatttacaccacagcgaatctcttcagagggcaagggagcagcatgagtcaattgtcatgggattgactaagaagtatgaagagcaggtgttatctctacagaaaaatctagacgcgaccgtgacagctctaaaggagcaggaggatatttgttctcgacttaaggatcacgttaagcagctggagcgaaaccaagaagcaataaagttggaaaagactgaaataatcaataagctgacccgctccttggaagaaagtcagaaacagtgtgcacatcttctgcaatccggcagtgtccaggaggtggcccagctgcagtttcaactgcagcaagcacagaaggctcatgccatgagcgctaacatgaataaggctctccaggaagagttgacagaattaaaggatgagattagtctgtatgagtcggccgcgaaactcgggatacaccctagcgactcagagggagagctgaacattgaattaacggagtcgtacgtggacctgggcatcaagaaggttaattggaaaaagtcaaaggtcactagtatagttcaggaagaggaccccaacgaagagttgtcaaaagacgaatttatccttaaacttaaggcagaggtccagcgcctcctgggctctaatagtatgaagcgccacctggtttctcagctccagaacgatcttaaggattgccataagaagatcgaagacctacaccaggtaaaaaaggacgagaaatcaatagaagtcgaaacaaagactgatactagcgagaagccaaagaaccagctgtggcctgaatcatcaaccagcgacgtggttcgggatgacatcctattgctaaagaatgagattcaggtgctgcagcagcaaaatcaggagttgaaagagacagaagggaagctccggaataccaaccaagacctctgtaaccagatgagacaaatggtccaggatttcgaccatgataaacaggaagccgtggatcgatgtgagcgtacctatcagcagcatcatgaggccatgaaaacacaaattcgcgagtctctgctggctaaacacgctctcgagaagcagcagctgttcgaggcctacgaacgcacacacctgcagttacgcagcgagctagacaaacttaacaaggaagtcactgcagtgcaggagtgctatctggaagtgtgtagggagaaagacaacctcgagctaacattgagaaaaaccaccgaaaaagagcagcagacgcaggaaaagatcaaggagaaactgatacagcagctagagaaggaatggcagtctaaactggaccagactatcaaagccatgaaaaaaaagacattagactgcggcagccaaacggaccaagtcactacatccgatgtcatctctaagaaggagatggccatcatgatcgaagagcaaaaatgtacgattcagcagaacctggagcaggaaaaagacattgccattaagggagcaatgaagaagctcgaaatcgagttagagttgaaacattgcgagaacattacgaaacaggtggaaatcgctgtgcagaacgcccaccagaggtggttgggcgaattaccagaactagccgagtatcaagctttggtgaaagccgaacagaagaagtgggaggagcagcatgaggtgagcgtaaataaacgcatcagcttcgccgtctccgaagcaaaggagaagtggaagtccgaacttgagaacatgaggaagaacattttgcccggcaaggagctggaagaaaaaatccattcccttcagaaggaactggagttgaaaaatgaggaagtgccggtggtgattcgagccgagcttgctaaagccaggagcgagtggaataaggagaagcaggaagaaattcaccgcatccaggaacagaacgagcaagactatagacagttccttgacgaccataggaataaaatcaacgaggtcctcgctgcagcaaaggaggactttatgaagcagaagacagagctgctgctccagaaagagaccgagctgcagacctgtcttgatcagtctcgtcgggagtggacgatgcaggaggcgaagcggattcagttagagatttatcagtacgaggaggacattctgacggtactgggggtgcttctgtctgacactcagaaagaacacatcagcgacagcgaagataagcagttactggaaattatgtcgacttgcagctccaaatggatgtccgtgcaatattttgagaagctgaaaggctgcatccaaaaggcctttcaagatacgctgccactgctggtggagaatgccgacccagaatggaagaaacgcaatatggccgaactgagcaaggattctgcaagccagggcactggacagggagatccagggcctgctgcagggcaccacgctcagcccctggctcttcaggctaccgaggccgaagcagaggagaacaataaagtggtcgaagaactaatcgaggaaaacaatgatatgaaaaataagctagaagagctacagacgctgtgcaaaaccccgccaaggtcactgagcgccggagccatcgagaatgcgtgccttccatgctcaggcggcgcactggaggaacttcgaggccagtacatcaaagctgtaaagaagattaagtgcgacatgctccggtacatccaagagagcaaggaacgcgcggccgaaatggttaaggccgaggtcctgcgcgagcgtcaagaaacggcacgaaagatgagaaagtattatctaatatgtctgcagcagatcctgcaggacgatggaaaagaaggcgctgagaagaagataatgaacgcagcctccaagctcgccaccatggctaagctgctggagacacccatcagctctaaaagccaaagtaagacgacccagagtgcactccctctgacaagtgaaatgctaattgctgtcaagaagtctaagcgcaacgatgtcaatcagaaaatcccttgttgtattgagtccaaatctaattctgtgaacactatcactaggacactgtgcgaacaggcacctaagcgaagggcagcgtgcaatctccagcgcctgctggagaactccgaacaccaatcaattaagcatgtcggatctaaagagacccatctcgagttccagttcggagacggatcatgtaaacacctgaattctttgccacgcaacgtgtctccagagttcgtgccttgcgagggcgagggcgggtttggcctccataagaagaaagacctgctctctgataacggcagtgagtctttgccacattctgctgcctatccctttctcggcaccctcgggaataaacccagtcccaggtgtacccctgggccgagcgagtccggctgtatgcacataacctttcgagactcgaacgagcggctgggactgaaagtgtacaagtgtaaccccctcatggagtctgaaaacgcggctagtgagaagagtcagggactggacgtgcaggaacctcctgtgaaggacgggggagatctctctgactgcctgggttggccgtcttcctcagccacactgtcctttgatagccgcgaggcaagctttgtgcacggccgccctcagggaactctagagattccatcggaatccgtgaagtcaaagcagttttcaccatccggatacctaagcgatactgaagaatctaatatgatctgccagacaatgaagtgccagaggtatcagacaccttatttgtcagaggagacaacttatctcgaaccgggaaaaatctccgtgaattgcgggcatcctagcaggcacaaagccgatagactcaagagcgatttcaaaaagctctcctctacgcttccgtccagtgtttgccagcaaccttcacgcaagctgatagttcccttgtcctctcagcaggacagcggctttgactccccatttgtcaacctggattag

SEQ ID NO: 111661 - DNA, 1779 bp, synthetic construct
  misc_feature 1..1779: note = Description of Artificial Sequence: Synthetic coding sequence
  source 1..1779: mol_type = other DNA
atgtctctcgacttcggttccgtcgccttgcccgtgcagaatgaggatgaggagtacgacgaagaggattatgaacgagagaaggagctgcagcaactactgacagatctcccacatgacatgctggatgatgatttgtcaagcccagagttacagtattccgattgttcggaggatgggacggacggacaacctcatcatcccgagcagctcgaaatgtcttggaacgaacagatgctacctaagtcacagagtgttaatggttataatgagatacagtcgctttacgctggggagaagtgcgggaatgtctgggaagagaatcggtctaagacagaggacagacacccagtatatcatcccgaggaaggcggtgatgagggtgggagcgggtatagcccaccgtccaagtgtgaacagactgatctttaccatctccctgaaaatttcaggccctacactaatggccagaagcaggagtttaataaccaggctacgaatgtcataaagttcagtgacccacagtggaatcacttccagggcccctcttgtcagggcttggagccttacaacaaagtaacttataagccctaccaatcctctgcacaaaacaatggcagccccgcgcaggaaatcactggcagcgacacgtttgaaggtttgcagcagcaattcctgggagcaaatgaaaatagcgctgagaatatgcaaatcattcaactgcaggttttgaataaggctaaggagagacagctggagaaccttattgagaaactgaacgaatctgagaggcagatccggtacttgaatcaccagctggtgatcatcaaggacgaaaaagacgggctcacgctcagcctaagggagagccagaagctgttccagaacgggaaggaaagggagatccaactggaggcccaaattaaggctctcgagacccagattcaggctcttaaagtgaacgaggagcagatgatcaagaagagccggactaccgaaatggctcttgagagcctgaagcagcagcttgttgatctgcaccacagtgaatctttgcagagggctagagagcagcatgaatccattgttatgggcctgaccaagaagtatgaagagcaggtgctgagcctccaaaaaaatctggatgctaccgtcacagctctgaaggaacaggaagatatatgcagcagacttaaagatcacgtgaagcagttagagagaaatcaggaggccattaagctggagaaaaccgagataatcaacaaactgacacgcagtcttgaggaaagccaaaaacagtgtgctcaccttcttcagtcgggatccgtccaggaggtagcacagctgcagttccaactgcaacaggcacaaaaagcacacgccatgtctgccaacatgaataaggcactccaagaagagttgacagagttgaaggatgagatctcgctgtatgagtctgcggctaaactgggcatccacccctccgatagcgaaggggaactcaatattgagcttacagagtcttatgtggatctcggaattaaaaaggtgaactggaagaaatcaaaagtgacgagcatcgtgcaggaggaggacccgaacgaagagctgtccaaagacgagttcattctgaagctcaaggccgaggtgcaaagactcctggggagcaatagtatgaagcgccacctggtcagccagctacagaatgatctgaaagactgtcacaaaaagattgaggacctccaccaggtgaagaagaagaaaaaaaagaaaaagtag

SEQ ID NO: 111662 - DNA, 207 bp, synthetic construct
  misc_feature 1..207: note = Description of Artificial Sequence: Synthetic coding sequence
  source 1..207: mol_type = other DNA
atgtcgctcgactttggaagcgtggccttgcccgtccagaacgaggatgaggagtacgacgaggaagactacgagagagagaaggagctccagcagcttttaacagatctccctcacgacatgttggatgatgacctctcttcgccggaactgcagtatagtgactgttccgaagatggcaccgacggccaaccgcaccacccctag

SEQ ID NO: 111663 - DNA, 4755 bp, synthetic construct
  misc_feature 1..4755: note = Description of Artificial Sequence: Synthetic coding sequence
  source 1..4755: mol_type = other DNA
atgagcctgacatcctggtttcttgttagttccggcggaacacgtcacagacttccacgggaaatgatcttcgtcggtcgtgacgattgcgagctcatgctccagagcagaagcgtcgataaacaacatgccgtgataaattatgatgcaagcactgatgagcatctcgtgaaagatttaggaagtctgaacggtacctttgtaaatgatgtgcgtataccggagcagacatacataacgctcaagctcgaagataaactcagatttggctatgataccaatctgttcacagtggtccagggagagatgagggtgcctgaggaagctctgaagcatgagaaatttacaatccaattgcaactgtctcagaaaagttcagaaagcgagctgagtaaatccgccagcgctaaatcaattgactctaaagtggctgatgccgccacagaggtccagcataaaacgacagaggccctaaagagcgaggagaaagctatggatataagcgcaatgcctcggggtacaccgctgtatggacagccaagttggtggggcgacgacgaggtggatgaaaaacgcgctttcaagacaaatggcaagcccgaggagaagaaccacgaggcgggcacctctggctgcgggatcgacgccaagcaggtggaagaacaatctgccgccgcgaatgaggaagttctctttcctttctgccgcgagccttcttacttcgagatacctactaaggagtttcagcagcctagccagataaccgagtctaccattcatgagatacctactaaggatacaccatcatcacacattaccggagcgggccatgccagctttaccatagagtttgacgactctacgcctgggaaggttacgattcgcgatcacgtaactaaatttacctcagaccagcggcataagagtaaaaaatccagcccagggacccaggacttgttaggaattcagacgggcatgatggcaccagagaataaggtagcagattggcttgctcagaataacccgcctcaaatgctttgggagcgtacagaggaggactcaaaatcaatcaaatccgacgtccccgtatacctgaagcgtctgaaggggaataagcatgatgatggcacacaaagcgattctgagaatgctggtgcccatcgcaggtgctctaagcgggccacacttgaggagcatcttagacggcaccatagcgagcataagaagctgcagaaggtgcaggcgactgagaagcaccaggaccaggcagtgaccagttccgctcaccaccggggcggacacggcgttccccacggaaagctgcttaagcagaaatccgaggaaccgagcgtctccatcccctttctccagacggccctgctgcgctcaagcggcagtctcggccacagaccgtcccaggaaatggacaagatgctgaagaaccaggctacaagcgctacatctgagaaggataatgatgatgatcagagtgataaggggacatacacgattgagctggagaaccctaattccgaggaggtggaggccaggaagatgatagataaggtcttcggcgttgatgacaatcaggattataacaggcctgtcattaacgaaaaacataaggacctcatcaaggactgggccctgtcatctgcggccgcggttatggaagaaagaaagcctctgaccacctcaggcttccaccacagcgaggagggaacaagctcttctgggagtaaaagatgggtgtcccagtgggcttcactggccgccaaccatacaaggcatgatcaggaagagagaataatggaattcagtgctccgctgccccttgagaacgaaaccgagatctctgaaagcggtatgactgtacggtcgactgggtccgccacatcactcgcctcccagggagagaggcgacggcgcaccctgcctcagcttccaaacgaagagaagtccctggaaagccatcgtgcgaaagtcgtgacgcagcgcagtgaaatcggagaaaaacaggatactgaactgcaggagaaggaaacccctactcaggtctaccagaaggataagcaggatgctgacaggccgttatccaaaatgaaccgcgcagttaacggcgaaactctcaagacgggcggagataataaaactctcctgcatctggggtcctcagccccgggaaaggagaagtccgaaaccgataaggagacctctctcgtcaaacaaacccttgcgaaactccagcagcaggagcagcgggaggaggcccagtggacaccgaccaaactgtcttcaaaaaatgtgtctggtcagaccgacaaatgtagagaggagaccttcaagcaagagagccagcccccagaaaaaaatagtggacattctactagtaaaggagatagggtggcgcagagcgagtctaaaagacgaaaggctgaggaaatcctgaaatcccagacacccaagggcggtgataaaaaggagagttccaaatcacttgtgcggcagggatcttttactattgaaaaaccctcgccaaacatccctattgagcttattccgcatatcaacaaacaaaccagctctaccccatccagtcttgcgcttaccagcgcttccagaatccgcgaaagatcagaaagtctggaccctgacagctccatggacactaccctgatactgaaggatactgaagccgtaatggccttcctggaagccaagttacgcgaagataataaaactgatgagggcccagatacaccatcctacaatcgagataactctatctcccctgaatccgacgtagacaccgcgagtaccatatctttagtcaccggagagaccgaaagaaagtccacccagaagagaaaatcatttacctctctgtacaaggataggtgttccactggcagtccgtctaaggacgtcacaaagagcagctcatcgggcgcgagagagaaaatggagaagaagacaaagtctagatctaccgatgtggggtctcgcgcagacggccgcaagtttgtgcaatccagtggccgcatacggcagccttcagtcgacttgacagatgatgatcagacaagctcagtgccccacagtgcaataagtgatattatgtcttctgaccaggagacctattcatgtaagcctcatggacgcaccccattgacgtccgcagacgagcatgttcactcaaaattggagggcagtaaggtgaccaaaagtaaaacatcacctgtggtcagcgggtcctcttccaagtcaaccacactccctagaccccggcctacgcgcacatccctgcttaggagagccaggcttggcgaagcttctgactccgagctggccgacgccgacaaagcatccgtggcatccgaagtctcgacaaccagtagcacctcgaaaccaccaaccggtagacgaaacatttcccgcattgatctgctggcccagcctcggcgcactcgtctcggcagtttgtccgcaaggtccgacagtgaagcaacaatctccagaagtagcgccagttccagaacagcagaggcaattatcagaagcggcgctcgacttgtcccaagcgacaaattttccccccgcattcgtgctaattcgatctcccggctgtccgatagtaaagtgaaatccatgactagcgcacatggtagcgcctccgtgaattcgcggtggcgcagatttcccaccgattacgcctccacttcagaggacgaattcggctccaatagaaatagtccgaagcatactagactgcgaacatcccctgctctgaagacgacgcgcctgcagagtgccggctccgcaatgcctacatccagtagcttcaagcaccgaattaaggagcaggaggactacataagggactggacggcacatcgggaggagatcgcccggatctctcaggaccttgcactgatcgcccgagagataaacgatgttgcaggcgagatcgactccgtaacatcttctggcacagcgccatctacaactgtgtctaccgcagcaaccacgccaggctctgctatcgacactcgggaagagttagtggaccgggtcttcgacgaatctttaaattttagaaagatacctccattggtgcactccaaaacacccgaggggaataatgggcgctctggcgatccccgcccacaggcagccgagcctcctgaccacttgacgattacacgaaggcggacatggtctcgggacgaggtgatgggcgacaatttactgctgtcttccgtgttccagttctcaaaaaaaattaggcagtctattgacaaaacagctgggaaaatccggatcctgttcaaagacaaagacaggaactgggatgatattgaaagcaagctcagagctgagtccgaggtacccatagtgaagacctcatcgatggagatcagctcgattctgcaagaactcaagagggtggaaaagcagctgcaagcgatcaacgccatgatcgatccagacggcactctcgaagctttgaataatatgggtttcccctcagctatgctcccatctccaccaaagcagaagtcctctcccgtgaacaatcaccattcccccggacagacaccgactctcgggcagccggaggctagggccctgcatcccgccgccgtgtctgcagccgccgagtttgagaacgcggagagcgaggctgacttttccatccacttcaacagatttaaccccgacggtgaagaagaagatgttactgtccaggagtag

SEQ ID NO: 111664 - DNA, 4383 bp, synthetic construct
  misc_feature 1..4383: note = Description of Artificial Sequence: Synthetic coding sequence
  source 1..4383: mol_type = other DNA
atgtctctcacaagctggtttctggtgtcgtcaggcggaacccggcatagactgccacgagagatgatatttgtaggccgggacgattgtgaacttatgctgcagtcaaggtcagtggataagcaacatgctgtgatcaactacgatgcgtccacggacgaacatctggtgaaagatttaggctctttgaacgggacattcgtcaacgatgtcagaatcccagaacagacatacatcacactcaaactggaagataagctccgcttcggatacgacaccaatttatttaccgtggtccagggagagatgagagtgcctgaggaagcgctcaaacatgagaaatttaccatccagcttcagttatcccaaaaatcctccgagtccgaactctctaaaagtgcgtccgcgaagagcattgactccaaggtggctgacgcagcaactgaagtacagcacaaaacaaccgaagcactgaagtccgaagagaaagccatggacataagcgctatgccccgggggacaccactatatgggcaacctagctggtggggggacgatgaggttgatgaaaagcgcgccttcaagacaaatggaaagcctgaagaaaaaaaccacgaggccggcacctccggctgtggtattgacgccaagcaggtcgaagaacagtccgctgcagccaatgaggaggtgctcttccctttctgccgggaacctagttactttgaaattcctaccaaggaattccagcagccttcacagataactgaaagtaccattcatgagatcccaacaaaagacacaccttcaagccatatcactggcgccgggcatgcctctttcaccatagagttcgatgacagcacaccaggaaaggtcactattcgggatcacgtgacaaagttcactagtgaccagagacacaaaagtaagaagtcttctcccggcactcaggacctgttgggcatccagacagggatgatggcgccagagaataaagtggccgactggctggcgcagaataacccaccacagatgctgtgggaaaggaccgaggaagacagtaaatccattaagtctgacgtgcctgtttacctgaaaaggctgaagggcaacaagcacgacgacggcactcagtcagactcagaaaatgcaggggcgcacagaagatgcagtaaaagggctacattggaggaacatctgcgacggcaccactctgaacacaagaagttgcagaaggtgcaagccactgagaagcaccaggatcaagccgtcgtgttcggggtcgacgacaaccaggattataatcgcccggtgatcaacgaaaagcacaaggacctgatcaaggactgggcgctgagtagtgccgcagctgtgatggaggagagaaagccactgaccacctcgggatttcaccactctgaagaaggaacctcttcaagtggctctaagcgatgggtgtcacagtgggccagcttggccgccaaccacactaggcacgaccaggaggagcggattatggagttttcagctcctcttcctttagaaaatgagaccgaaattagcgagtcgggcatgacggtacgcagcactgggtctgccactagtctggccagccagggagaaagaaggagacgcaccctcccccagctacccaacgaagagaaatccttggagagccatcgagcgaaggtggtcactcagaggagcgaaataggagagaagcaggataccgaactccaagaaaaagaaactccgacacaggtgtatcaaaaagataaacaggatgccgatcggcctctgtctaaaatgaaccgggccgtgaatggcgaaactttaaagacaggcggcgataataaaaccctcctgcaccttggctcctctgctcccggtaaggaaaaatccgaaacagacaaagagacttccctcgtgaagcagactctcgcgaaactgcagcagcaggagcagagggaagaagcgcagtggaccccaacaaagcttagctcaaagaatgtctccgggcagactgacaaatgtagggaggaaaccttcaagcaggaaagtcaaccgcccgagaagaactcggggcactcaacttcgaagggcgatagggtagctcagagtgagtccaagcgcaggaaggcagaagaaatacttaaatcacagacccccaaggggggggacaaaaaggagtcttctaagtcactggtgagacagggttcattcacgatagagaaaccttcgcctaacatccctattgaacttatcccgcacataaataagcagacttcctcaacaccgtcttccctcgcgctgacctctgctagccgcattcgggagagatcagagagcctcgatcccgatagttctatggacacgacgctcatcttaaaagacaccgaagccgtaatggcattcctggaagctaaattaagagaggataacaagactgatgagggtccggacacaccttcttataatcgagataattccatctctcctgaatcggacgtagatactgcttcaaccattagtctggtgaccggcgagactgaacgcaaatctacccagaagcgcaagtcttttacctctctgtataaagataggtgttcgacagggtcacctagtaaggacgtgaccaaatccagtagtagtggtgcccgcgagaagatggagaagaaaaccaaatcccgctccacagacgtgggtagtcgtgcagatggcaggaagttcgtgcagtctagtgggcggattcgccagccgtccgtggatctaacagacgatgatcagacttcctctgtgcctcactccgctatctccgacatcatgtcctctgaccaggaaacatatagttgtaagccgcacggaagaactccgctgacaagcgcagacgagcacgtccattcaaaactggaagggagcaaagtgacaaagagtaaaacttctcccgtggtcagtggttctagctcaaagagtaccaccttaccccgaccacgccccacaaggaccagcctccttcgccgggccaggctcggggaggcatctgatagtgagctggcagatgctgataaggcctccgtcgccagtgaagttagcacaacttcgtccacctctaagccaccaacaggacgtcgaaacatatctagaatcgatcttctggcccagccacgcagaactagactggggagtctttcagcgcgcagtgactccgaggctacgatatctagaagctcagcaagttccaggaccgctgaggccattattcgctcaggcgctcgactcgtaccctccgataaattttccccacggatcagagcaaacagcatctctcggctctcggattctaaggtcaagtctatgacatcagcccacggctctgcatccgccttgaaaaccacgagactgcagtcagcagggagtgcaatgccaactagctcatcgtttaagcacaggattaaggaacaagaggactacatccgggattggaccgctcaccgcgaggagattgcccgaatcagccaggacttggctctgatcgcaagggaaataaacgatgttgccggcgagattgattcagtgacctcatctggaaccgccccttctacaactgtgagcacagcagcgactacccccgggagtgccatagatacacgagaagaggtgggcgatctgcacggtgagatgcataaactcgtcgaccgcgtgttcgatgagtcactaaacttcaggaaaattcctccactggtccacagtaagacacccgagggcaataatgggcggtctggagacccaagaccacaggcagccgaaccacccgaccaccttaccatcacacggaggagaacatggtctcgcgatgaggttatgggagataatcttttgctgagctcggtgttccaattctctaaaaagattcgccagagcatcgacaaaaccgccggaaaaattcgaatcttgtttaaggacaaagaccgcaattgggacgatatagagagtaaactgcgcgcagaatcagaggtgcccatagtcaagacctcaagcatggaaatctcctccatactacaggaactcaagcgagtcgagaagcagcttcaggccataaatgctatgatagaccctgatggcaccctggaagccttgaacaacatgggcttcccatccgcaatgctccctagccctcccaaacagaagagctcacctgtgaataaccaccacagccccggccagacgccgaccttaggccaaccagaagctcgcgccctgcacccagccgcagtgtccgcagctgccgaatttgagaacgccgaaagcgaggcagacttctctatccatttcaacaggtttaacccagacggagaggaggaggatgtcaccgtacaggagtag

SEQ ID NO: 111665 - DNA, 4461 bp, synthetic construct
  misc_feature 1..4461: note = Description of Artificial Sequence: Synthetic coding sequence
  source 1..4461: mol_type = other DNA
atgagcctaacttcttggtttctggtgagctcaggcggtactaggcaccgtctgcctcgagagatgatctttgtagggcgcgacgactgcgaattaatgctccagtctagatccgtcgataagcagcacgccgtgatcaattatgatgcatcaactgacgagcatctcgtcaaggatctggggtctctgaacggaacttttgtgaatgacgtcaggatcccggaacaaacatatattaccctgaagttagaagacaagcttcggtttggttacgacacgaacctttttaccgtggtgcagggcgaaatgcgtgttccagaggaagcgctgaaacacgaaaagtttaccattcaactgcaactctctcagaaatccagcgaaagcgagctgtccaaatccgccagcgctaaatcgattgatagtaaggtggcagacgctgctaccgaagtccagcataagacaactgaagcactaaaatctgaggagaaagccatggacataagcgccatgcccagggggactcctttgtatggccaaccgtcctggtggggcgacgatgaagtggacgagaaacgtgctttcaagacaaatgggaagccagaagagaagaaccatgaggccgggacttccggctgcggaatagatgcaaagcaggtggaagagcagagcgccgcagcaaatgaagaagtcctgtttcccttctgtcgtgagcctagctacttcgaaatccctacaaaagagttccagcagccctctcagataaccgaaagcaccatccacgagatcccaactaaggacaccccatcaagccacattaccggagcaggacatgccagttttaccattgaatttgatgattccacacccggcaaagtaacaatacgtgatcatgttacaaagtttacctctgaccagcggcacaaatccaaaaaaagctcacccggaacacaggatctgctcggcatacagactggcatgatggccccagagaacaaggtggccgactggctcgcccaaaataacccaccccagatgctgtgggagcgaaccgaagaggactcgaaatctataaaatctgacgttcctgtttacttgaaaaggttgaagggcaataaacatgacgacggcactcagtcagactctgagaacgctggggctcatcggaggtgttccaaacgtgccacgctcgaggagcacctgaggaggcatcattccgagcacaaaaagttgcagaaagttcaggctactgagaaacatcaggaccaggctgtggtatttggtgttgatgataaccaagactacaatcgccctgtcatcaacgagaaacacaaggatttaattaaagactgggccctctcctctgcagcagctgttatggaagaaagaaaacctctgactaccagtggctttcaccactcggaggagggaacctcctcctcaggaagtaaaagatgggtcagccagtgggcatcgttggcagccaatcatacacgacatgaccaggaagaacggatcatggaattcagcgctcctctgccattggaaaacgagacagagatcagtgagagcggcatgaccgtcaggagcaccggctcagcaacctccttagcaagccagggagagcgcaggcggcgaaccttgcctcaacttcctaacgaggagaagtcactggagtcacacagagccaaagtggtcacccagcgttcagagattggcgaaaagcaggacacggaattacaggaaaaggagacccctacccaagtttatcagaaagataaacaagatgccgaccgaccactgtccaagatgaatcgagctgtaaatggggaaactctaaaaactggcggggataacaagacccttttgcacctggggagctccgctcccggaaaggagaaaagtgagaccgacaaggaaaccagcctggtgaagcagacacttgctaagctgcagcagcaagagcagcgggaagaagctcagtggacccctactaagctgagttcgaagaatgtttcagggcagacggataagtgccgggaagaaacatttaaacaagagagccaacctcctgagaagaactccggtcactctactagtaagggggaccgcgtagcacagtcagagagtaagaggcgtaaggcagaagagatcctcaagtcccagacccccaaggggggcgataaaaaggaaagttcaaagagtctagtcaggcaggggagctttaccattgaaaagccgagcccgaatatcccgattgagttgatccctcatattaataagcagacttccagcaccccaagctctctggctctgaccagcgccagccgcatccgagaacggtccgaaagccttgacccagatagctcaatggatactacattaattttgaaagacactgaggccgtcatggcttttcttgaggccaaactgagagaagataataagaccgacgaaggacctgacactccaagctacaatagagataactccattagccccgagtcagatgtggatacagcatcaaccattagcctggtcactggagaaaccgaacggaagagtacgcagaagaggaaaagcttcacttctctctacaaagataggtgctcaaccggctccccatccaaggacgtgacaaagtcttcctcttccggggctcgggagaaaatggaaaaaaagaccaagtcccggagtaccgacgtggggtcacgggctgacggacgcaagtttgtgcagtcatcaggcaggatacgacagccttctgtggatctcacagatgatgatcagacctcaagcgtgccccacagcgcaatatctgacatcatgagcagcgaccaagaaacttatagttgtaagccacacggccgtacgccattgaccagtgctgacgagcacgtgcacagtaagctggaaggctctaaagtcaccaagtctaagacctccccagtggtgtccggcagtagtagcaagagcaccaccctcccaagacccaggcccaccaggacatctttgctgagaagagccagacttggtgaggcaagtgacagcgagcttgcagacgcagacaaggcttccgtggcttccgaagtcagcactacctcatccacgtctaaacctccaacaggaagacggaacatttctcggatcgacctcttggcacagccccggcgtactaggctaggctccctgtccgcacggtcggatagcgaggctaccataagtaggtccagcgcttcctctcgaacagccgaggccatcatccgctctggcgctagattggtacctagtgataaatttagcccaaggatacgggccaattccattagcaggctgtcagactccaaggtcaagtctatgacgtccgcccatggcagcgcctccgtgaattcaaggtggcgccgattcccaactgactacgcaagcaccagtgaggacgaattcggatccaatagaaactcacctaaacacaccaggctacgcacttctccagcactaaagacaactaggctgcagtccgccggctccgccatgcccaccagtagtagtttcaagcacagaattaaggaacaggaagattatattcgagactggaccgcccacagggaggaaatcgcccgaatctcccaagacttagccttgatcgctcgggagatcaatgatgttgccggcgagatcgattcagtgacaagctccgggactgctcccagtaccacggtctccactgctgctaccacccccggctcagccatcgacacccgagaggaactagttgatagggtgtttgacgagagcctaaacttcagaaagatcccaccactggtgcatagtaaaacccctgagggtaacaacggccgaagcggagatcctcggccacaggctgccgagcctccagatcacttgaccattacccgcaggcgaacgtggtctcgagatgaagtgatgggggacaacctgcttttgtcttcggtgttccaattctctaaaaaaatccgtcagtctatcgataaaacagcaggcaaaatacgcattctgttcaaggataaggatagaaactgggacgatattgagagcaaactgcgcgcagagagtgaggtccccatcgtgaagactagtagcatggaaattagtagtatcctgcaggagctgaaaagagtagaaaagcagcttcaggctattaacgctatgatcgatccggacggcacgctggaggccctaaacaatatgggtttcccatcggcgatgctccccagccctcccaaacagaaatcgtcacccgtgaataatcatcattcccccgggcaaactcctaccctgggacagcccgaggccagggcccttcaccccgccgcagtgtctgctgctgccgagttcgagaacgctgagtcggaggccgatttcagcatccacttcaatagattcaaccccgatggagaggaggaagacgtgacggtacaggagtag

SEQ ID NO: 111666 - DNA, 1239 bp, synthetic construct
  misc_feature 1..1239: note = Description of Artificial Sequence: Synthetic coding sequence
  source 1..1239: mol_type = other DNA
atgagagtcccggaggaggctcttaagcatgagaagttcactatccagttgcagctctcccagaagtccagcgagtcagagctgtccaagagcgcttccgcaaagtcaattgatagtaaggtcgcagacgcggcaaccgaagtgcaacataagaccaccgaggcgttgaagtcagaggagaaagccatggatatcagcgccatgcctcgcggtaccccactgtatggccagccttcctggtggggagatgacgaggtggacgagaagagagcgtttaaaactaatggcaaaccagaggaaaaaaatcatgaagccggtacaagcggctgtggtatcgatgccaaacaggtggaagaacagtctgccgctgctaacgaggaggtattgttccctttctgcagagagccctcttattttgaaattcccactaaggagtttcagcagcctagccaaatcaccgaatccaccattcatgagatcccaaccaaagatactccttccagccacatcactggggccggccacgccagtttcaccatcgagttcgacgactccactcctggcaaagttactatccgggatcacgtcaccaagttcacatctgatcaaagacataagtcaaaaaagtcatctccaggcacccaggacctgttgggtattcagaccggcatgatggctcctgagaataaagtcgctgattggctggcacagaacaatcctcctcagatgctatgggaaagaacagaggaagactctaaaagcattaaatcagatgtcccagtgtatcttaagcgtctcaagggcaacaagcatgatgacggtactcagagtgatagcgagaatgccggcgcccacagacggtgctccaaaagggccacactggaagagcatctcaggcgccaccacagcgaacataaaaagcttcagaaagttcaggctacagagaaacaccaggatcaagctgtgacctcctccgcccatcatcgcggcggccacggcgtccctcacgggaagttactcaagcagaaaagtgaagagccctccgtctccatccctttcttacagaccgccctcctccgctcatcaggctcgctgggacatcggccatcacaagagatggataaaatgttgaaaaaccaggcagactgtggatcagtggccttctgtggattcatgatattcaagctaaatctgatgattacaccattccctttcatcgatctgttctcctttttttag

SEQ ID NO: 111667 - DNA, 402 bp, synthetic construct
  misc_feature 1..402: note = Description of Artificial Sequence: Synthetic coding sequence
  source 1..402: mol_type = other DNA
atgagcttgacaagttggtttctggtaagcagtgggggcacccggcatcgccttcctcgcgagatgatttttgtggggcgagacgactgcgagctgatgctgcaatcgaggagtgttgataaacagcacgccgttattaactacgacgcgagcactgatgaacatctggttaaggatctgggctcgctcaacggaactttcgtaaacgatgtcagaatccccgagcagacctacatcaccttaaaattagaggataagctaagattcggctacgataccaatctcttcactgtggtgcaaggtgagatgcgtgtgccagaggaggccctgaagcacgagaagttcacaattcagttgcagctgtcccagaagagcagtgaaagtgagctgagtaagagttag

SEQ ID NO: 111668 - DNA, 267 bp, synthetic construct
  misc_feature 1..267: note = Description of Artificial Sequence: Synthetic coding sequence
  source 1..267: mol_type = other DNA
atgtctttgaccagctggtttctcgtctccagcggcggcaccagacatcggctccctagagaaatgatctttgtgggcagggacgattgcgagctgatgctgcagtcccgatccgtcgacaagcagcatgctgtgatcaactatgacgcttccaccgatgaacacctcgtgaaagatctgggaagtctgaacggcacctttgtgaatgacgtgcggatcccggaacagacatacataaccctcaagctggaggataaactacgctag

SEQ ID NO: 111669 - DNA, 336 bp, synthetic construct
  misc_feature 1..336: note = Description of Artificial Sequence: Synthetic coding sequence
  source 1..336: mol_type = other DNA
atgagccttacgtcctggttcttagtctctagtggagggaccaggcataggctgcctagggagatgatattcgtcggacgagacgattgcgaactcatgctccagagccgcagtgtcgataaacaacatgcggtgataaactacgacgcctccaccgacgagcatctagtgaaggatctgggaagtctgaacggcactttcgtgaatgatgtgcgtatccctgaacagacatatattacactcaagctagaggataagctacggtttggttacgacaccaatttgtttaccgtggtgcagggcgaaatgagggtccctgaagaggctctcaagtag

SEQ ID NO: 111670 - DNA, 1407 bp, synthetic construct
  misc_feature 1..1407: note = Description of Artificial Sequence: Synthetic coding sequence
  source 1..1407: mol_type = other DNA
atgtctagcgatcaggaaacctacagttgcaagcctcatggccgtaccccactcacatctgccgatgagcacgtacatagtaaattggaaggctcgaaagttacaaagtctaagaccagtcccgtggtaagcggctcaagctcaaaatccaccacccttccgagaccaaggcccacgagaacctctctgttgaggagagcccgactcggagaggccagtgatagcgagctggccgacgcagacaaggctagcgtcgcctctgaggtgtccaccactagctctacttccaagcctcctacggggcgaagaaatatctcgcgcatcgatctgctcgcacaacctagacgaactcgcctggggagcctatcggctcgctctgactctgaggcgaccatctccagatcgagcgcctcctccaggaccgcggaagccataatccgaagtggcgcccgcctagtgccaagtgataaattttcaccccgtatccgggctaattccatttctcggctttcagatagcaaagtaaagtccatgacttctgcgcatggatccgcttccgcgctgaaaacaacgcggctgcagtccgcgggctcagccatgccaacttccagctctttcaagcaccgcattaaggaacaggaggactacatccgggattggaccgctcaccgtgaagagattgcacgcatttctcaagacctcgccttaatcgccagggaaatcaacgacgtcgcaggagaaatcgactccgttacgtcttccggaactgccccgtccactactgtctccaccgccgctacaactccgggttccgccattgatacgcgagaagaggtcggagatttacatggagagatgcacaaattggtcgaccgggtgtttgacgagtctttgaattttcgaaaaatccccccacttgttcactccaaaactcctgagggcaataatggtcgctcgggagacccccggcctcaagcagcagagccgcccgatcacctgactattaccaggcggcgtacttggagcagggatgaagtgatgggagataatttgcttctgtctagcgtgtttcagttctcaaagaaaatcaggcagtcaattgataagacagcagggaaaatcagaattttattcaaagataaggaccgcaactgggatgatattgaatccaaattgcgtgccgagagcgaagtgcccatcgtgaagacaagctctatggaaatctcgtcgatcctgcaggaattaaagcgagtggagaaacagctgcaggccataaacgctatgatcgacccggatgggacattagaggccctgaacaacatgggttttccttcagcgatgcttcctagccccccaaagcagaaatctagccctgtcaataaccaccactctcctgctatgctgtag

SEQ ID NO: 111671 - DNA, 7161 bp, synthetic construct
  misc_feature 1..7161: note = Description of Artificial Sequence: Synthetic coding sequence
  source 1..7161: mol_type = other DNA
atggaaacccggtcccccgggttaaataatatgaaaccacagtcattgcagctagttctggaagagcaggtcttagccctccaacagcagatggctgagaaccaggcagcgagctggagaaagttgaaaaacagtcaagaagcccagcaacgccaggccacattagtgcggaaactccaggctaaggtgctacaatatcgctcctggtgccaggagctagagaagcgactggaagctacaggaggaccaattccccaacggtgggagaacgttgaagaacctaacttagatgagctactggtccgcctggaggaggaacagcagaggtgcgagtctctggctgaggttaacactcagctgcgcttacacatggagaaggctgatgtcgtcaacaaggcactgagggaggacgtggaaaagctgactgtggattggtcccgtgcgcgggatgaactgatgaggaaagaatcacaatggcaaatggagcaggagtttttcaaggggtacctgaaaggggagcatggacggctgctgtccctgtggcgcgaagtcgtcacctttagaaggcacttcttggaaatgaaatctgccacagatagggatctcatggaactaaaagccgaacacgtgcgattgtcaggctctctcttgacctgctgcctgcgcctgactgtgggcgcgcaatctcgggagcctaacggttcaggtcggatggacggccgggagccagctcaattgctgctgctgctggcgaaaacccaggaactcgaaaaagaagctcatgagcggagccaagaactgattcagttgaagagtcagggcgatttggagaaggctgagctgcaggaccgggtgacagagctttctgctctccttacgcagtctcagaagcagaacgaagattacgagaaaatgataaaggccctccgcgagacagtcgagatcctcgagacaaatcacacagagctgatggaacatgaggcttcactttcaagaaacgcacaggaggagaaactgtctctccaacaggtgatcaaggacataacacaggtgatggtggaagagggagataacatcgcccagggttcagggcacgagaattcattagaattggactcttctatcttcagccagtttgactatcaagatgccgacaaggcactgacgctggtgcgtagtgtgctaacgcgccgacgccaggcggtccaagaccttcggcaacagttagctggttgtcaggaggcagtgaatctgctacagcagcagcacgatcagtgggaagaggagggtaaagccttgagacagcggcttcagaagctcacaggggaacgggataccctggccggtcagacggtagacctgcagggcgaggtggactcattgagtaaggagagggagctgctgcagaaggccagggaggagctccggcagcaattagaggtactggagcaggaagcctggcggttgcgtagggtcaatgtggaattgcaattgcagggggatagcgctcaaggccaaaaggaagagcagcaagaggagctgcacttggcagtgagggaacgcgagcgcctgcaggaaatgcttatggggctggaggccaagcagtccgagtctctgagtgagctgatcacactgcgggaagccctggaatcaagtcacttggagggggaactgctgaggcaggagcagactgaggtcaccgcagccctggctagggcagagcagtccatcgcagagcttagcagttccgagaacactctgaagactgaagttgcagatctccgtgcagcagccgtgaagttgtcggcactcaatgaggcactggcgctagataaggtcggcctgaaccagcagctcttacagctggaggaggagaaccaatccgtctgttcccgaatggaagctgcagagcaggccagaaatgcactgcaggtcgaccttgcagaagccgaaaaaagacgtgaggcgctttgggaaaagaatacccatctggaggcccagctgcaaaaggctgaagaagcgggggcagagctacaggcagacctacgggacatacaggaggagaaggaagagattcaaaaaaagctgagtgagagtcgacaccaacaagaagccgccaccacccagcttgaacagcttcaccaagaagccaagcgacaggaagaggtcttggcaagagcagtgcaggaaaaggaggccttggtgcgcgagaaggcagccctagaggtgcgcttacaggccgtcgaaagagatagacaggacttagctgaacagctacagggtctgtcctccgctaaggaactcctggaatcctctttgttcgaggcccagcagcagaactcagttattgaagtcacaaagggacaactggaggtgcagatccagacagtgactcaggccaaggaagtcattcaaggagaggtccggtgcctgaaactcgaactcgataccgagaggagccaggctgagcaggagagagacgcagctgcccggcaactggctcaagcagagcaggaggggaaaaccgctctagaacagcagaaggccgcacatgaaaaggaagttaatcaactccgtgaaaaatggatgcagcttgagacagagaaagagagggtgagcctgttagagaccctgctccagacgcagaaggagctggccgacgcctctcagcaattggagcgcttgaggcaggatatgaaggtgcagaaactgaaggaacaggaaaccaccgggatcctccagacccagctgcaggaggcacagagagaacttaaggaagctgcacggcaacatcgggacgatctggccgcactgcaggaggaatccagttccctgcttcaggataaaatggacttgcaaaagcaggtggaagatctgaagagccagctggttgctcaggatgattctcagcgcctagtagagcaggaggtacaagaaaagcttcgcgagacccaagagtataaccgtatccagaaagagctggaacgcgagaaggcatcccttacactatccctgatggagaaggagcagcggctgcttgtgcttcaggaggccgactcaatccggcaacaagagttaagcgccttgcgtcaggacatgcaggaagcacagggagagcagaaagaacttagcgcccagatggaactccttagacaggaggttaaagagaaggaagctgactttcttgcacaggaagcccagctcttggaagagctggaagcttcccacataacagagcagcagctccgagcctccctttgggctcaggaagctaaggctgcccagctgcagctaaggctgaggtcgacagagtcccaactggaggccctggccgctgagcagcagccgggcaaccaagcacaggcccaagcccagttggcgagcctgtatagcgccctgcaacaagccctcggttcggtatgtgagagtcggcctgagctgtctggcggaggggacagcgcccccagcgtttggggccttgaaccagaccaaaacggggctcggagcctctttaaacgtggaccccttttgactgcgctctccgcggaggccgtggcttctgcacttcataaacttcaccaagatctctggaaaacacagcagactcgagacgtgctccgcgatcaggtgcagaagctagaggagagactgacagacaccgaagccgagaagagccaggtccacaccgagttgcaggacctgcaacgacaactctcacaaaatcaggaagagaagagcaaatgggaaggcaaacagaatagtctggagtccgagcttatggaactgcacgaaacaatggctagcttgcaaagccgtctccgtcgagccgagctccagcggatggaggcgcagggcgaacgggagctactgcaggccgctaaggagaatttaacagcccaggtcgagcacctgcaggctgctgtggtcgaggccagagctcaggcctctgccgccgggatccttgaagaagatttacggaccgcacgatccgccctgaagctcaagaatgaggaggtggagtccgagcgcgaacgggcgcaggcgctgcaagagcagggtgaattgaaagttgcccagggtaaggccctgcaagagaatctggcactcctgacgcagaccttggcggaaagagaagaggaggtcgaaacgctgagggggcagattcaggaacttgagaagcagcgagagatgcagaaggcagccctggaattgctttcactagatctgaaaaaaagaaatcaggaggtggacctacagcaggagcagattcaggaactagagaaatgtcgaagcgtgttggagcacctcccaatggccgtccaagaaagagagcagaagctgactgtgcagagggaacagatccgagagctggaaaaggacagagagacccaacggaacgttctggagcaccagcttcttgagctcgagaaaaaggatcagatgatcgagtcccagagaggccaggttcaagacctgaagaagcagctggtcacccttgagtgcctagcactagagttggaagagaaccaccacaagatggaatgccagcaaaaattgattaaagagctggagggtcagcgcgagacacagcgggtggcgcttacacatctaacactggatttggaagagcgttcccaggaattgcaggctcagtcaagtcagattcatgatctggaatcccacagtactgtcctcgctcgagagctgcaagagcgggaccaggaggtcaagagtcagcgagaacagatcgaggagctccaacggcagaaagagcatctgacacaggatctcgagagacgagatcaggaactaatgctgcagaaggaacggatccaagtactagaggaccaaagaacaagacagaccaaaatactcgaggaagaccttgaacagatcaagctgtccctacgggaaagaggtcgggaactcactacacagcgacaactcatgcaggaacgcgccgaggagggaaaaggtccatctaaggctcagcgaggctccttggaacatatgaagttgattctacgcgacaaagagaaggaagttgaatgccaacaagagcatatacacgagcttcaggagctgaaagaccagctggagcagcagctccaaggcttgcaccgaaaggtgggcgaaacttccctgctcctgtcccagcgggagcaggagatcgttgtgcttcagcagcagcttcaagaggctagagaacaaggcgaactgaaggaacagagtttacagtcccagctcgacgaggcccagagagccctggctcagagggatcaggagctggaggccctgcagcaggagcagcagcaggcccagggacaggaagaaagagtgaaggagaaagccgacgccttgcaaggcgctttggagcaggcgcatatgaccctgaaagaacgacacggggaattgcaggaccataaagagcaagccaggcggttagaagaagaactagcagttgaggggaggagagtgcaagctctagaggaagtactgggagatttgcgggccgaaagcagagaacaggagaaagcgcttcttgctctgcaacagcagtgcgcagagcaagcccaggaacatgaggtggaaaccagggctctccaggacagttggctccaggctcaggcagtgcttaaagagagagaccaggaactggaagccttgcgcgcagagtcacagtctagccgccatcaagaggaggcagctcgggcaagggcagaagcgttgcaggaggccctcggtaaggcccacgcagctcttcagggaaaagagcagcatcttctcgagcaagccgagctttctaggagccttgaagcctcaactgctaccttgcaggcctctctggatgcctgtcaagcccactcccgccagctagaggaggctttgcggatccaggagggggaaatccaggaccaggacttgcgctaccaggaggatgtgcagcaactgcagcaggccttggcccagagagatgaagaactccggcatcagcaggagcgggaacagctcctggaaaaatccctcgctcagcgggttcaggagaacatgatccaggagaagcaaaatctcggccaggagagagaagaggaggaaattcgaggtctgcatcagagtgtgcgggaacttcaactcacactcgctcaaaaagagcaggagattcttgagctgcgagaaacccagcaaagaaacaatctggaggctctgcctcacagccataaaacaagtcctatggaagagcagagcttgaagctggattccctggagcccagactgcagagggagctagaacgactgcaggctgctctgagacagaccgaggctagagagattgaatggcgggagaaagcccaagatttagccttgtcccttgctcagaccaaggcatccgtctcatccctgcaagaggtcgcaatgttcttgcaagcttcagtgctggaaagagacagtgagcagcagcgcctgcaggacgagctggagctgacgcgcagggcccttgagaaagagcgcctccactctcccggtgcgaccagcacagctgaactgggctcgcgtggagagcagggagtgcagctgggtgaggtatcgggagtagaggccgagccgagtcctgatgggatggaaaaacagtcctggcggcagcgcctcgaacacctacagcaagccgtggcgcggcttgagatcgatcgctctcgactccagagacacaatgtgcaacttaggtcgacactagagcaggttgaacgcgaaaggaggaagctcaagagggaagcaatgagggcggcccaggccggatcactggagataagcaaggccactgctagctcccctacccagcaggacgggcgcggtcagaagaattctgatgccaagtgcgtggcagagctacagaaagaggttgtgttactccaggctcaactaaccctggagaggaagcagaagcaggattacatcactaggtcggcccaaacgagccgggagctcgccggtctgcaccactccttatctcacagcttgctggccgtggcccaggccccagaagccaccgttctagaagcagagactagacgcttagatgagtcgctgacacaaagcttgacctcgcccggtcctgtgctgctacatcccagtcccagtacaacccaagccgccagtcgctag

SEQ ID NO: 111672 - DNA, 1020 bp, synthetic construct
  misc_feature 1..1020: note = Description of Artificial Sequence: Synthetic coding sequence
  source 1..1020: mol_type = other DNA
atggagactcggtccccaggccttaacaacatgaaaccacagtctctgcagcttgtgctggaagaacaggtcttagcactgcaacagcaaatggccgaaaatcaggcagcctcatggcgcaaactgaaaaatagccaggaggctcagcagcggcaagctacactcgtgcggaagctgcaggctaaggtgctacaatatagaagctggtgccaagagcttgagaaacgcctggaagccacgggcggaccgatcccccagcgctgggaaaatgtggaagaacccaacctcgatgaactgttggtgcgcctggaagaggagcagcaacgctgcgaatctctggccgaagtgaacactcagctaagattacacatggaaaaggctgacgtagtgaacaaggcgctcagggaagacgtggagaagctaactgtggattggtctcgggccagagatgagctcatgcgcaaggaatctcagtggcagatggagcaagaattcttcaagggatatttaaaaggcgagcatggtcggcttctcagcctctggcgggaggtggtaacgttccgtaggcacttcctggaaatgaaatcagcaaccgaccgcgacctcatggaattaaaggctgagcacgtgagactttctggctcattgttgacatgttgtcttaggctcacagttggagcacagagccgtgagccgaatggctcaggaaggatggacgggcgagaacccgctcaactcctgcttttgctcgctaaaacacaagagctagagaaggaggcccacgagcggagccaggagttgattcaacttaaatcccagggagatctcgagaaagccgagttgcaggatagagtgacagagctgtctgccctgctgactcaaagccagaaacagaatgaggactacgaaaagatgattaaagcactgcgtgagactgtcgagattttggtgcatgaccctctcttatggaaaggcgtggggcggggtctggtcggttcactctgtttcatggacaggtag

SEQ ID NO: 111673 - DNA, 7329 bp, synthetic construct
  misc_feature 1..7329: note = Description of Artificial Sequence: Synthetic coding sequence
  source 1..7329: mol_type = other DNA
atggagacccgttctccgggcttgaacaacatgaaaccacagtccctgcaactggtactggaggaacaggtcctagcgttacaacagcagatggccgagaatcaggcggcatcatggcggaagctgaagaacagccaggaagcccagcagagacaagctaccttggtgcgaaagttgcaggccaaggtattgcaataccggagctggtgtcaagaactggagaaacgtttagaggccactggcggccctattccccaacgatgggagaacgtagaagagccgaatcttgacgagttactggtgcgtctagaagaagagcagcagaggtgtgagtcattggccgaggtgaatactcagctacggctgcatatggagaaagccgatgtggtgaataaagcacttagagaagatgtggagaaactcactgtggactggagtcgcgctagggatgagctgatgcgtaaagagtctcaatggcagatggagcaggagtttttcaaaggctacttgaagggtgaacacggtcgcctgctgtcactgtggagggaggtcgttacctttagaagacacttcctggagatgaagagcgctaccgatagggacctgatggagttaaaagctgagcacgtgcggctatccggatccctgctgacctgctgtctcaggttgactgtgggggcgcaaagcagggagcctaacggatcaggcaggatggacggtcgggagcctgctcagctgttgctactcctggccaagactcaggaacttgagaaggaagcccacgagaggagccaagagctcatccagctaaaaagtcagggagatctggaaaaagccgaactccaagaccgtgtcacagagttatctgccttactgacccaatcccagaaacagaatgaggactatgaaaagatgatcaaggccctgcgcgaaacagtggagatcctggagaccaaccatactgagctaatggaacatgaggctagcctatcgcgcaatgcccaggaggagaaattatcgttgcagcaggtgattaaggacattactcaggtgatggtggaggagggcgataatatagcacagggctcaggccatgaaaattcattggagctcgacagcagtatcttcagccaattcgactaccaagacgctgataaggccctgaccctcgtcagaagcgtactcacccggaggcgccaggccgttcaggacctccgtcagcagctcgctggctgtcaggaagctgtgaatttgctccagcagcagcacgaccagtgggaagaggagggtaaggccctgcgacaaaggctgcagaaactgactggcgagcgggacacattggcggggcagacagtcgacctccagggggaggtggacagcctctccaaggagagggagctgctgcagaaagccagagaagagctaagacagcagcttgaagtgctggaacaggaggcttggcgcttgcgcagagtgaacgtggagttgcagctgcagggtgattcggcacaaggacagaaggaggagcagcaggaagagctgcatctcgcagtgcgtgagcgagagcggctccaggaaatgcttatgggcctcgaagcgaagcagtctgagtctcttagtgagcttattacgctgcgcgaagcgctggagtctagtcatctggagggcgaactcctcaggcaagagcagaccgaagtcactgccgctttagccagggccgagcagagtattgccgagctctcgtccagtgaaaacaccctaaagactgaggtcgcagacttaagggccgccgctgtgaagttgtcagccctcaacgaggcgctcgcattagataaggtgggactgaatcagcagttattacagctcgaggaagagaatcaatcagtctgctctaggatggaggccgctgagcaagcccgcaatgccctccaggtggacttggctgaggccgaaaagaggagagaagccctctgggagaaaaacacacacctggaagcccagctgcaaaaagccgaggaagctggagctgaattgcaggctgatctgcgcgacatccaggaagagaaagaagagatacagaaaaagctgtcagagtcccgccaccaacaggaggctgctaccacccagctagaacagcttcaccaggaagctaagaggcaagaagaggtgttggccagagcagtgcaggagaaggaggcactcgtgagggaaaaagcggccctggaggtgcggttgcaggccgtcgagcgagataggcaggatctggcagagcagcttcaaggactttcatctgccaaagagctgctggaatcttcactgtttgaggctcagcaacaaaatagcgtgatcgaggtcacaaaggggcagctcgaagtccagatacagaccgtgacacaggctaaagaggttatccagggcgaggtgcgatgcctgaaactggaactcgacacggaacgctctcaagcagagcaggagcgcgacgctgccgcccgccagctcgcccaggctgagcaggagggcaagactgctttagaacagcagaaagcagcccatgagaaagaggtaaaccagcttagagaaaaatgggagaaagaaaggtcttggcatcagcaggaactggccaaagccctggaatcacttgaacgcgagaagatggaactcgaaatgaggctcaaggagcagcagaccgagatggaagccattcaggctcagcgagaggaagaaaggacgcaggccgagtccgccctctgccaaatgcaacttgaaacagagaaggagagggtgtctctcctggaaacacttcttcagacgcagaaagagttagccgacgcttcgcagcagttagagagactgcggcaggatatgaaggtccaaaagctgaaagaacaggaaaccacagggatcctgcagacccagttacaagaggctcagcgcgaacttaaagaggctgcgcgccaacacagggatgatcttgctgctttacaggaagaaagctctagcctgctgcaagataagatggacctacagaaacaagtggaagatctcaaatctcagctggtagctcaggacgacagccagcgcctcgtggagcaggaagttcaggaaaagctgcgcgagacacaagagtacaatcgcatacagaaagaattggagcgagagaaagcgagcctgacactaagcttgatggagaaggagcagcgactcctggttttgcaggaagccgacagtatccggcagcaggagctgagcgctctgcgacaggacatgcaggaggcacaaggtgagcagaaagagctctccgcccagatggaactgctacgacaggaggtgaaggagaaagaagcagatttcctggcacaggaagcccagctgcttgaggaactggaggccagtcacatcactgaacagcagttgagggccagcctatgggcccaagaagccaaggcagcccagctgcaactgagattgcggtcaactgagtcccagctggaagccctcgctgcagagcagcaaccggggaaccaggcccaagcgcaagcacagctagcgtccctctacagtgccctgcagcaggcccttgggtcagtctgcgagagtcgccccgaattgagcggggggggcgactctgctcccagcgtatggggtttggagcctgatcagaacggagcgcggtctctcttcaagcgtggcccattgctcaccgccctcagcgctgaggcagtggcgagtgccttgcataaactgcatcaagacttgtggaagacccagcaaacgcgcgatgttcttcgagaccaggtgcagaagctggaggagcgccttaccgatacagaagcagagaaatcccaagtccatacagagttgcaggacctgcagaggcaacttagtcagaatcaggaagagaaaagcaagtgggagggtaagcaaaatagcttggagagcgaattaatggaattgcacgaaacgatggcttcccttcagtcgagactgcgacgagctgaattacagcgtatggaagcacagggagagagggagctgttacaggctgctaaggaaaatctcaccgctcaggtggaacatcttcaggcagcagtggtggaggccagagcccaggcgagcgctgccggaattctggaagaggatctccgaaccgcacgatcagcattgaagctaaagaacgaggaagtggagtctgaacgtgagcgagctcaggctctgcaggagcagggcgaactgaaagttgctcaggggaaagcactgcaggaaaatctcgctctgcttacccaaacgctggctgagagggaggaagaggtggagacactccgcgggcaaatacaggaattggaaaagcagagggaaatgcagaaagcggctctagaacttctgagcctcgacctcaagaagagaaaccaggaagttgatctgcagcaggagcagatacaggagctggaaaagtgcaggtccgtgctggagcacctgcccatggcagttcaggagcgagagcagaagctgactgtgcagagagagcagatcagagagctggagaaggatcgcgaaacccagaggaacgttttggagcatcagctcttagaactggagaaaaaggaccaaatgatcgaaagccagcgcggccaggtccaagacctgaagaagcagctcgtgacgttggagtgcctggccctcgaattggaagaaaaccaccataaaatggagtgccagcagaagctaatcaaggaactcgaagggcaaagagagacacagagggttgctctgactcacttgacactggacctggaggagcggtcccaggagttgcaggcccagtctagtcagatccacgacttagagtcacattcaaccgtgttggcgagagaactgcaggaacgggatcaagaggtgaaatcccagagagagcagattgaggaactccagcgacagaaagaacacctgacccaggacttagagcgtagagaccaggagctgatgttgcagaaagagcgaattcaggttctagaggatcagcggacacggcagaccaagattctggaagaagacctcgagcagatcaagctttctctgagagaaagaggacgcgagctgaccactcaaaggcagctcatgcaggagcgagccgaagaggggaagggacccagcaaggcccagcgtggctcactggagcatatgaaactgatcctgcgagacaaggagaaagaggtggagtgccagcaggagcatatccacgagctgcaagagctaaaggaccagctggagcagcagctgcaagggctgcacaggaaagtgggggaaacttctctgttgctgagtcagcgagaacaagagatagtcgtacttcaacagcagctgcaggaagcacgagaacaaggcgaattaaaggagcaaagcctccagagtcagctcgatgaagctcagcgggccctggctcaacgtgaccaggaactcgaagcactgcagcaagagcagcagcaggctcaggggcaggaagagagggtgaaagagaaagccgacgcactgcagggggcactggagcaggcacacatgacactcaaggaacgccacggggaactgcaggaccacaaggagcaggcccgacggttagaagaggagctggcagtggagggaaggcgggttcaggccttggaggaagtgctgggggatctccgggcagagagtcgcgagcaagagaaggctctgctggcgctccagcagcagtgtgctgagcaggcccaggaacacgaagttgagactagagccttgcaggactcgtggctgcaggctcaggctgtgctgaaagagagggatcaggaattagaagcattaagagcagagagtcaatcttcaaggcaccaggaggaagcggccagggcgcgcgccgaagccctgcaggaagccttgggcaaagctcacgctgccctgcaggggaaggaacaacatctcctggagcaggctgaactgtcccgaagtctcgaagcttcgacagccacgttacaggctagcctcgatgcctgccaggcccactcccgccaactcgaggaagccttgagaattcaggaaggcgagatccaggatcaggacctgagatatcaggaggacgtacaacagctccaacaagcactcgcgcagagagacgaggagctgcgacaccagcaggagcgcgagcagctgctggagaaatctctcgctcagcgtgtgcaagagaatatgattcaggagaagcagaacctgggtcaagaacgggaggaagaggagattcgcggattgcaccagagcgtccgagaactgcagctgactctcgcccagaaagaacaggaaatacttgagcttcgagagacgcagcagagaaacaacctagaggcattgccacatagccacaaaacttcacccatggaggagcaaagtctcaaactcgactcactggaacctaggctgcagagggaattagaacggctgcaagctgcactcagacagactgaggcccgtgagattgaatggcgcgaaaaagcccaagatcttgctctctccctggcccaaaccaaagcttctgtgtcaagtctgcaagaggtcgcaatgtttctccaagcctctgtgctggagcgcgactctgagcagcagagactgcaggatgaacttgaactcacccggagagctttggagaaagaaagattacattcacctggggccacatccacagccgagttggggagcaggggggagcaaggggtccaactgggagaggtgagtggtgtggaggctgagccgtccccagacggtatggaaaagcagagctggcgccagcgcctggaacacctgcagcaggccgtggcgagactggaaatcgatcgcagccgtctgcaacggcacaacgttcagctcagatcgaccctggagcaggttgaacgcgagcgacggaagctcaaaagagaggctatgcgcgcagcccaggcagggtctctcgagatctctaaggctaccgcttcttcgccgacccagcaggacggacgcggccaaaagaatagcgacgctaaatgtgtggcagagctgcagaaggaggtggttttactgcaggcgcagctgacccttgaacgcaaacagaagcaggattatataacccggagtgctcagacatctcgggagctagccgggctccatcacagcttgagccattctcttttggctgtcgctcaagccccagaggctaccgtgctcgaggccgaaactcggcgcctggatgaatctctgacacagagcctgacctctcctggccctgtgcttctgcacccatcgcccagcacaacacaggctgcttcccgctag

SEQ ID NO: 111674 - DNA, 345 bp, synthetic construct
  misc_feature 1..345: note = Description of Artificial Sequence: Synthetic coding sequence
  source 1..345: mol_type = other DNA
atggagacaagaagtccaggcctgaacaacatgaaacctcaaagccttcaactggtgctagaagagcaggtgctggctctgcagcagcagatggctgaaaatcaagctgccagctggagaaaactgaagaattctcaggaggctcagcagagacaagccactctagtgcgcaagcttcaggccaaagtccttcaataccgctcctggtgtcaggagcttgaaaaaaggcttgaggcaaccggcggcccgatcccccagagatgggagaatgtcgaagagcccaacttagacgagctcctggtgcgcctggaagaggaacaacagagatgcgaaagtttggcctag

SEQ ID NO: 111675 - DNA, 2055 bp, synthetic construct
  misc_feature 1..2055: note = Description of Artificial Sequence: Synthetic coding sequence
  source 1..2055: mol_type = other DNA
atggaaactcgctctccaggcctgaataatatgaaacctcaatccctccagctcgtcctggaggagcaagtgctagctctgcagcaacagatggccgagaatcaagcggcaagttggcggaaactcaagaattcacaggaggcacaacagcgtcaggccacactggtgcggaaattgcaagctaaggtattacagtaccgcagttggtgtcaggagttggagaagcggctcgaggctaccgggggacctatcccacagagatgggagaatgtcgaagaacctaatctcgatgaattacttgtcagactggaggaagagcaacagcggtgtgaatcacttgctgaagttaacacacagctccgcctccacatggagaaagcggatgtggtaaataaagccctccgggaagatgtcgagaagttgactgtcgattggtccagagctcgcgacgagctgatgcgtaaggaatcacaatggcagatggaacaggaatttttcaaaggctacttgaaaggggaacacgggcggctcctgtcactgtggagagaggttgtgacatttcgaaggcatttccttgagatgaagtccgctactgaccgggatctgatggaattaaaagcggagcacgtgagattgagtggctccctgctgacatgctgcctgcggctgacagtcggcgctcagtctcgggagccaaacggcagtggcagaatggatggccgagagcccgcccagttattgctgctgttggccaagacacaagagcttgagaaggaggcccacgagcgcagccaagaactgatccagctcaagtctcagggtgacctagagaaagcggaattacaggacagggttacagagctgtccgctttgcttacccagtcccagaaacaaaatgaagactatgagaaaatgatcaaagcccttagagaaaccgtggagatactaactaatcacactgagctgatggagcacgaggcatccctttctcggaacgcccaggaagagaagcttagtctccaacaggttattaaggatatcacccaggtgatggtggaggaaggggacaacattgctcagggatcggggcacgagaactcgcttgagttggattcatcgatctttagccagttcgattaccaggacgcagacaaagcgttgacattggtgagatccgtgcttacgaggcggcgtcaggcagttcaggatctgcggcagcagcttgcagggtgccaggaggccgtgaatcttctgcagcagcaacacgaccagtgggaagaggagggaaaagcacttagacagcgactgcagaagctaaccggggagcgcgacaccctggccggacagacagtcgacctccagggagaagtcgatagtctgagtaaagaacgtgagctgctccagaaggcgagggaggaactccgccagcagcttgaagtgctcgagcaggaggcgtggagactgcggagggttaacgtcgagctccagctacagggcgacagcgctcagggacagaaagaggagcaacaagaggagctccatttggctgtgcgggagcgggaacgcttgcaagaaatgctaatgggcctcgaagctaagcagagcgagtctctgtccgagctaattaccctgagggaggcgctggagtcttctcacctggaaggcgagttgctgcgacaggagcagaccgaggtcaccgctgctctagcaagggccgaacagtcaatcgctgaactgtcaagctccgagaatacactaaagacagaggtggccgaccttcgcgcggccgctgttaaactgagtgcgttgaacgaggccttagcattagacaaggtgggcctcaatcagcagttactccagctcgaggaagagaatcagtctgtgtgtagccgaatggaggccgctgaacaggcacggaacgccttacaggtcgacctggctgaagctgagaaaagacgagaggccctctgggagaaaaacacccatctcgaggctcagctgcagaaggcagaggaggccggagctgagctacaagcagatttgagagatatttag

SEQ ID NO: 111676 - DNA, 495 bp, synthetic construct
  misc_feature 1..495: note = Description of Artificial Sequence: Synthetic coding sequence
  source 1..495: mol_type = other DNA
atggagacaaggagtccaggtttgaataacatgaagccacagagccttcaattggtgctggaagaacaggtgctggcccttcagcagcaaatggctgagaaccaggcggcctcctggcgcaaacttaaaaactcacaagaggctcaacagcggcaggcaaccctcgtgagaaaactgcaggccaaagtgttgcagtatagatcatggtgccaggagcttgagaaaagactagaagccactggcggccctatcccgcagcgctgggaaaacgtggaagaacccaatctggacgaacttttggtgagactggaggaggagcaacagagatgtgaaagcctggctgaagtgaacacgcagctccgtctgcatatggagaaggcagatgtcgttaacaaagcgctaagagaggatgtggagaagttaacagtcgactggtccagggcacgcgatgagcttatgcgaaaggagagtcaatggcagatggaacaagagtag

SEQ ID NO: 111677 - DNA, 1617 bp, synthetic construct
  misc_feature 1..1617: note = Description of Artificial Sequence: Synthetic coding sequence
  source 1..1617: mol_type = other DNA
atggaaacacgatcgcctggtctgaacaatatgaagcctcagtcattgcaacttgtgctggaggaacaggtgttagcactgcaacagcagatggccgaaaatcaagccgcatcctggagaaaactcaaaaactcacaggaggcccaacagcgccaagcgacactggttaggaagttacaggcaaaggtgctgcagtaccgaagttggtgtcaggaactcgagaaaagactcgaggcaaccggaggtcccatcccacagaggtgggagaacgttgaggaacctaacctggacgaactgctggtgaggctcgaagaagaacagcagcgttgcgaatctcttgccgaggtcaacactcagctgcggctacatatggagaaggcagatgtggttaataaagcgctgcgtgaggacgttgagaaactgacagtggactggtccagggctcgcgacgagctgatgcgcaaggagtcacagtggcaaatggaacaggaatttttcaaaggttacctcaagggggagcacgggcggctcctctccttatggcgcgaagtggttacctttcggcggcatttcctggaaatgaagagtgccaccgatagagacttaatggagttaaaggccgaacacgtgcgcctctccgggtcattactgacctgctgcctgagactgacggtaggcgcacagtcccgcgagccaaatgggtccggccgaatggatggaagggaacccgcacaattgctcctgctcctggcaaagacgcaagagttggagaaggaggcccatgagcgcagccaggagctgatccaactcaagtcacagggtgaccttgaaaaggccgagctacaggaccgggttactgagctctccgccctgctcactcagagccaaaagcaaaatgaagactacgaaaagatgataaaggccttgcgggagaccgtggagatcttggagactaatcacacggagctgatggaacacgaggccagtctctccaggaatgcacaggaggagaaacttagtctgcaacaggtgattaaagacatcacccaagtcatggtcgaagaaggggacaatattgctcagggttctggccatgaaaattcactcgaattggattcctcgattttttcacagtttgactatcaggacgcagacaaagcgctcacacttgtcagaagcgttctgacaagacgtcgccaagccgtacaagatttacgacagcagttggctgggtgtcaggaagccgtaaatctgctgcagcaacaacatgatcagtgggaggaggagggcaaggctttgagacagaggctccagaagctaaccggcgaacgggataccctcgctggccaaaccgtggacctgcagggcgaggtggacagcttaagcaaagagagggagttgttgcagaaggcccgggaggaactgaggcagcagcttgaggtgttggagcaggaggcatggcgcctcaggagggtgaacgtggaacttcagctgcaaggagacagcgcacagggacagaaggaggagcagcaggaagagcttcatctggcggtccgcgagagggaaaggctgcagtctagccagctacagtcatgtagggtcttaaagaccccttag

SEQ ID NO: 111678 - DNA, 7446 bp, synthetic construct
  misc_feature 1..7446: note = Description of Artificial Sequence: Synthetic coding sequence
  source 1..7446: mol_type = other DNA
atgcctcctaatataaactggaaagagatcatgaaagtggaccccgacgatcttccacgacaggaggagctcgcagacaatttactgatttccctctccaaggtagaggtgaacgagctgaaatctgaaaagcaagaaaacgtgattcacctatttcggatcacccaaagccttatgaagatgaaggctcaggaggtggaactagctctggaagaagtggaaaaggccggtgaagaacaggcaaagtttgagaaccaactgaagactaaggttatgaagctcgagaatgaattagaaatggctcagcaaagcgcaggagggcgtgatacacggtttctccgtaatgagatatgtcagttggaaaagcagttggagcagaaagaccgcgagctggaagacatggaaaaggagctggagaaggaaaagaaagtgaacgagcagctggcactgcgcaacgaggaggccgagaatgaaaattctaaactgcggcgcgagaataaaaggctgaaaaagaaaaacgaacagctgtgtcaggatattatcgattaccagaagcagattgactctcagaaagagacacttctctcacgtagaggggaggactccgactatagatcacagttgtcaaaaaagaattatgagttgattcagtacctggatgaaattcagacactcacggaggcaaacgagaaaatcgaggtacagaaccaagagatgcgtaaaaacctggaagagagcgtgcaggagatggagaaaatgaccgacgagtacaaccgcatgaaggccattgtgcatcagactgacaatgtgattgatcaactaaagaaggagaacgaccattaccagctccaggtacaagagctaaccgatctgctcaagagcaagaatgaggaagatgaccctattatggtagccgtgaatgcaaaagtggaggagtggaagctgatcctttcgagcaaagacgatgaaatcattgagtaccagcagatgcttcataacctgcgcgaaaagctgaagaacgctcaactcgacgcagataagtctaacgtgatggcactgcagcagggtatccaggaacgtgacagtcagatcaaaatgctgaccgagcaagtggagcagtacaccaaggagatggaaaaaaatacctgcattatcgaggatctcaagaacgagctccagagaaacaagggagcctcaacgctgagccaacagacccatatgaagatacagagcacactagacatcctgaaagagaaaaccaaggaggctgaaagaaccgctgagctggcagaagctgatgcaagagaaaaagataaagagctggtcgaagccctcaagagactgaaggattatgagagcggggtgtatggcctggaggacgccgtggtggagatcaagaactgcaagaatcagattaagattcgcgatcgcgagatcgaaatactgacaaaagagatcaataagttagaattgaagatctcagatttcctggatgaaaacgaagccctccgtgaacgtgtgggcctcgaacccaagacgatgattgacctgactgaattccggaacagtaaacatctcaaacagcagcaataccgcgccgagaatcagatactactcaaagaagcatccatcgagtccttggaggaagagcgcttagacctgaagaagaaaataagacagatggcacaggagagggggaaacgaagtgccacaagtggattaaccaccgaggaccttaatctgacagagaatattagccagggcgatcgcataagcgagcggaagctagacctgttatcactgaagaatatgtccgaggctcaatccaagaatgagtttctgtctcgggagctgattgagaaggaaagagacctggaaaggtccagaaccgtgatagcaaagttccaaaacaagctaaaggagctggtagaggagaataagcaactggaggaggggatgaaagaaattctgcaggccattaaggaaatgcagaaggacccagacgtcaagggcggggagacttcccttattattcccagcctcgagcgcctagtaaacgctatcgagagcaaaaatgccgaggggatcttcgatgcaagcctccacttgaaagcccaggtcgatcagctcacaggtcgcaatgaggagttaagacaggagctgcgtgagtcacgaaaggaagctatcaactattcccagcaattggctaaagcaaacctaaaaattgaccacctggaaaaagagacctctctgctacggcagtcagaaggctcaaatgttgtgttcaagggcatcgaccttcccgatggcattgcacctagcagtgcttccataataaacagccaaaacgagtacctgatccacttgctgcaggagttggagaataaagagaaaaagcttaaaaatttggaagattcactcgaggactataacagaaaattcgccgtgatccgccatcaacaatcattactgtataaagagtacctgtctgagaaagagacctggaagactgaatccaagactattaaggaagaaaaacggaaacttgaggatcaggttcagcaggacgcaatcaaagtcaaggagtacaacaatcttctaaatgccctgcaaatggacagcgatgaaatgaaaaagattcttgccgagaactcccgaaagatcaccgtactccaggttaacgagaagagtctaattcgccagtatactaccctggtcgaattggaaaggcagctgcgtaaggagaatgaaaagcagaagaacgagctgctgagtatggaagcagaggtatgcgaaaagatcggctgcctgcagagattcaaggaaatggccatcttcaagattgcagcgctgcaaaaggtagtcgataactcggtctcactgagtgagcttgagctggccaacaaacagtacaacgaactcaccgccaaatacagagatattctccaaaaggacaatatgctagtgcagcggacaagcaatttagagcatctcgaatgcgagaatatatcactcaaagagcaagttgagtccatcaacaaagagcttgagattacaaaagaaaaactgcacacaattgaacaggcctgggagcaggaaacaaaactcggtaacgagtcaagtatggacaaggccaagaaaagtataacgaactctgatatagtgagtatcagtaagaaaattacaatgttggaaatgaaggagcttaatgaaagacaaagggctgagcactgtcagaagatgtatgagcacttgcgtacgtcccttaagcaaatggaggagcgcaacttcgagctggagaccaagttcgcagagctcaccaagataaaccttgacgcccaaaaagtcgaacaaatgcttcgcgatgagctcgccgacagtgtcagtaaagctgtttcggatgcagaccgccagcggattcttgagctcgagaaaaacgagatggagctaaaggtggaggtgtcaaagctccgcgaaatttccgatattgcccggcgacaggtggagattcttaatgcccagcagcaaagtagagacaaagaggtggaatcacttagaatgcagctgctggactatcaagcccaatctgatgagaagtcactgattgctaagctgcatcagcataatgtttccctccagctaagcgaggcgacagcactggggaagctcgagagcattacctccaaactgcagaaaatggaggcctacaatctgcgcctggagcagaagctggacgaaaaggaacaggcactgtactatgcccggctcgaaggaaggaatagggccaagcaccttcgacaaacgattcagagtctgaggaggcaatttagtggtgcccttcctctggcccagcaggaaaaatttagcaaaaccatgattcagctccagaacgataagctcaaaatcatgcaggaaatgaaaaactcccaacaggaacataggaatatggaaaataaaaccctggagatggaactgaagctcaaggggctggaggagctgatctctaccctcaaggacacgaaaggagcgcaaaaagtgatcaattggcacatgaaaatcgaggaactgcggctgcaggaactaaaactgaacagagagttagtcaaggataaggaggaaataaaatacctgaataacatcatctccgaatacgaacgaaccatatcttctctggaagaagagatcgtgcagcagaataaatttcacgaagagcggcagatggcatgggaccagagggaagtagacctagagagacagctcgatatttttgacagacagcaaaacgagatcttaaacgcagcacagaaattcgaagaagctactggctcaataccagatccatctctgccattgcctaaccagcttgagatcgcgctgcgaaaaatcaaagagaacatccgcatcattctggagacccgggccacatgtaaaagtttagaagagaagttgaaggaaaaggaatccgcgcttagactggctgaacagaatatcctctctcgcgacaaggtgatcaatgagctgcgattgagactacctgctactgcagagagggagaaacttattgctgagctaggccgcaaagagatggagcccaagtcgcatcacaccctgaaaatagcacaccagactatagccaatatgcaggccagacttaatcagaaggaggaggtgttaaagaagtaccagagactcctcgagaaggctcgggaagagcaaagggaaatcgtcaaaaagcacgaggaggatctccatatcttacaccatcgccttgaattacaagccgattcctctctgaacaaattcaaacagacagcgtgggacctaatgaaacaatctcccacgccagtgccaacgaataaacatttcatacggctggccgagatggaacagacggttgccgaacaagacgactctttgtcttccctgctggtgaagttgaaaaaggtaagtcaagacctggagcggcagcgtgagatcacggagttaaaggtgaaggaattcgagaacatcaagctgcagctgcaggaaaaccacgaagacgaagttaagaaggtgaaagctgaagttgaagacctaaagtatctgctggatcaatctcaaaaggagtcacagtgcctgaagagtgaactgcaggcccaaaaagaggcgaattcgcgcgcacccacgaccaccatgcgcaacctcgtggagcgtctgaagtcccaactggctttaaaagagaaacaacaaaaagctctgtcgagagctctgctggaactccgtgccgaaatgactgctgctgcggaagagaggatcatatccgccaccagccagaaggaggcgcacctgaacgttcaacagatcgttgatcgccacaccagggagctgaagactcaggtggaggatctaaacgagaaccttctgaagctgaaagaggctttgaagacctcaaaaaatagagagaactctttaaccgataatttgaacgatctcaacaacgagctccagaaaaagcagaaggcttataacaagatcctgagggagaaagaagaaattgatcaggagaacgatgaattaaagcggcagattaaacggctgacatctgggctacaaggcaaacccctgacggacaacaaacagtcgttgattgaagaactgcagaggaaggtgaaaaaactggagaaccagctggagggcaaggtggaagaggttgatctgaagcccatgaaagagaagaacgcaaaagaagaactgatcagatgggaggaggggaagaaatggcaagctaagatcgagggtatcagaaacaagcttaaagaaaaggaaggagaagtgtttaccctcaccaagcagttgaatacactcaaagatctgttcgctaaagccgacaaagaaaagttaacactccagagaaagctgaaaaccaccggaatgacagtcgatcaggtcctgggcatacgagcattagagtccgagaaggaattggaagagctcaagaaacgcaatctcgaccttgagaatgatatactgtacatgagagcccaccaagccctgcccagggatagtgtggtggaggacctgcatttgcaaaaccgatacttgcaagagaaactacacgctctcgaaaagcagttttcaaaggacacatatagcaagcctagtatctccggtattgaatcagacgaccactgtcagagagaacaggaattgcagaaagaaaacctgaagttgtcgagtgaaaacatcgagttgaaattccagttggaacaagccaacaaggatttgcctcgtctcaagaatcaggtaagggacctgaaagagatgtgtgaattcttgaaaaaggagaaagctgaggtgcagagaaagctggggcatgtccggggttctggccgaagtggaaagaccatccctgagttagaaaaaaccatcggcctgatgaagaaggtggtcgagaaggttcagcgggaaaacgagcagttaaaaaaagcttccggcattctgaccagcgagaagatggccaatattgaacaggagaacgaaaagcttaaagccgaactggaaaagcttaaagcccatttgggacatcagttgtctatgcactatgagtcaaaaaccaaggggaccgaaaagatcatagccgaaaatgaaaggctgaggaaggagctgaagaaagagaccgatgccgccgaaaagctgcggatcgccaaaaataacctcgaaatcctgaatgagaaaatgacagttcaattggaggagacaggcaagagactgcagttcgccgagtccaggggccctcagctcgaaggagctgattccaagtcctggaaatcaatagtggtgacccgcatgtacgaaacaaagcttaaagaactggaaaccgacattgccaagaaaaatcagtccatcacagacctcaaacagcttgtgaaggaggctacagaaagggaacaaaaagtgaacaagtataacgaggacttggagcaacagatcaaaatcctgaagcacgtccccgaaggggcagagacagagcagggtctgaagcgggaacttcaggtactgaggctggccaatcatcagctggacaaagaaaaggccgagcttatacaccagatcgaagccaacaaggaccagtctggtgccgagagtaccatccctgatgccgaccagctcaaggaaaaaattaaggatctggagacacaactgaagatgtcagatcttgagaaacaacatctgaaggaggaaattaagaagttgaaaaaggagctggagaactttgatcccagtttttttgaggaaatcgaggacttaaagtataattacaaagaagaagtgaaaaagaatatcctcttggaggagaaggtgaaaaaattgagcgaacagctgggagtcgaactgacgtcgccggttgctgcttccgaagagtttgaggatgaggaagagtcccctgtgaacttccctatttactag

SEQ ID NO: 111679 - DNA, 4620 bp, synthetic construct
  misc_feature 1..4620: note = Description of Artificial Sequence: Synthetic coding sequence
  source 1..4620: mol_type = other DNA
atggccatttttaaaattgctgcactccaaaaggtggtcgacaatagcgtgtcactgagtgagctggagttggcgaataagcagtacaacgaattaactgcaaaatatcgagacattctgcagaaggataatatgcttgtccagagaacatctaatcttgaacacttggagtgcgaaaacatttccctcaaggagcaggttgagtccatcaataaagagttggagataactaaggagaagctgcatactatcgaacaggcatgggagcaggaaaccaagcttggaaatgagagcagcatggacaaagccaaaaagagtatcacaaattcagatattgtctccatttcaaagaaaattactatgctggaaatgaaggaactgaacgaacgtcagagagcggagcactgtcagaagatgtatgagcatctccgtacctcgctcaagcagatggaagagcggaattttgagcttgagactaagttcgccgaattgaccaagatcaatctggatgcacaaaaagtcgaacaaatgttgagggatgagctagcggattccgtctccaaagccgtcagtgatgctgaccgtcaaaggattctggagctggaaaagaacgagatggaactgaaagttgaggttagcaaactgcgggagatcagtgatatcgctcggcggcaggtggagatactgaacgcccagcagcagagcagagacaaggaggtcgaaagcctgcgaatgcagctgctggactatcaggctcaaagtgatgagaagagtctgatagcgaaattacaccagcacaatgtctccctgcaactttccgaagcaacggctttgggaaagttagagtccattacctccaaactgcagaagatggaggcttataacctccgcctcgagcagaagcttgatgagaaagaacaagcactctactacgcccggttggaggggcggaatcgggccaaacaccttagacagaccatccagtctctgcggaggcagttctccggcgcgctgcctcttgctcagcaggagaagttcagcaagacaatgattcaactgcagaacgacaaactgaagatcatgcaagaaatgaaaaatagtcagcaggagcatagaaacatggagaacaagacgctggaaatggaactgaagctcaaaggactggaggaactaatctctactctgaaggatactaaaggtgcacagaaagtcatcaattggcacatgaagattgaagagctcaggctgcaagagttaaagctgaatcgggaattagtgaaggataaagaggaaataaaatacttgaataatataattagcgaatatgagcgtactatttcctcactggaggaggagatagttcagcagaataagttccatgaagagcgccagatggcatgggatcaaagagaggtagacttagaaaggcagttagacattttcgacaggcagcagaatgagatcttaaatgctgcccagaaatttgaggaagccaccgggagcatccctgacccttctttacccctacccaaccagctcgaaatcgcactgcgaaagatcaaagagaacattcgaatcatccttgaaactagggctacttgtaaaagccttgaggaaaagctgaaggaaaaagaatcagcacttcggctggccgagcagaacatcctgagtcgggataaggtaattaacgagctcagactgcgcttacctgcaaccgctgagcgtgaaaagctcatcgctgaactggggcgtaaggagatggagccgaaatctcaccacaccctgaaaatcgcccaccagaccatagccaatatgcaggcccgtctcaaccagaaggaagaagtcctcaagaaataccaacggctgcttgagaaggcgagggaggagcaaagggagattgtgaagaagcatgaggaggaccttcatattctgcaccacagactggagcttcaggcagactcaagcctgaacaaattcaagcagaccgcatgggacctgatgaagcaaagccctacaccagtccctaccaataagcattttatccgcttagccgagatggagcaaaccgtggccgaacaggatgattctttgtcaagcttgttagtgaaacttaagaaagtctctcaggatctggagcgccagagagaaataaccgagctgaaagtgaaggaatttgagaacattaagctgcagctgcaggagaaccatgaagatgaagttaaaaaggtgaaagccgaagtggaagaccttaaataccttctggatcagagccaaaaggaatctcagtgcttgaagtcagaacttcaggcccaaaaggaagctaattctagagcacctactaccactatgcgcaacttggtagaacggctgaagtcccagctggccttaaaagaaaaacagcaaaaggctctgtccagggcccttctggaactcagggccgaaatgactgctgccgccgaggaaagaatcatatcggccaccagccagaaggaagcccatctcaatgttcaacaaatcgtggatcgacatacccgggaactcaagactcaggtggaggatttaaatgaaaacctgctcaagttaaaggaggcactgaaaaccagcaaaaatagggagaacagcctgacagacaacctgaacgacttgaataacgaactgcagaagaagcagaaggcatataataaaatactgcgggaaaaggaagagattgaccaggaaaatgatgaactaaagcggcagattaagaggttaacctccggactgcaagggaaacccctgacagataataaacagtctttaatcgaagaactccagcgaaaagtcaagaagctcgagaaccagcttgagggcaaggtggaggaggtggatctgaagcctatgaaagaaaagaacgccaaagaggaacttatacgttgggaagaaggtaagaaatggcaggctaagatcgaggggatccgaaacaaactgaaggagaaggagggcgaggtctttaccctcactaaacagctcaatactcttaaggaccttttcgccaaggcagataaggagaaacttaccttacagcggaagcttaagactacagggatgactgtagatcaggttttgggtattagggccctggaaagcgaaaaggaactggaagaacttaagaaaaggaatctggacctagagaatgacattctctatatgcgggctcatcaagcactgcccagggactccgtggtggaggacttgcatctgcagaataggtatctccaagagaagctgcacgctctcgagaagcaattctccaaggacacgtattctaaaccgagtatctccgggatagagagcgacgaccattgccaaagggagcaggagttacagaaggagaatctgaaactgtcatccgaaaacatcgagctgaagtttcagttggagcaggccaataaagacctaccacggctcaaaaatcaggttcgggacctgaaagaaatgtgcgagttcctaaaaaaggagaaagccgaagtgcagcggaagctcgggcacgtcagaggaagtggccgctccgggaaaacaattcctgaattggaaaaaaccatcggactgatgaaaaaagtggtggaaaaggtgcagcgcgaaaacgaacaactgaagaaggccagcgggatccttaccagcgaaaagatggccaatatagagcaggaaaacgaaaaactgaaagccgaactggagaagttaaaagcccatttgggccatcagttgagcatgcattacgagtcaaaaactaaggggaccgaaaaaatcatagccgaaaacgagcgcctgcgcaaggaattgaaaaaggagacagacgccgcagagaaactgagaatcgctaaaaacaacctggaaatcttaaacgagaagatgaccgtccagctcgaggagactggcaaacgtctgcaatttgccgagtcccgggggcctcagctggaaggcgctgattctaaaagttggaagtccatcgtggttacacggatgtatgaaacaaagttgaaggagcttgagactgatattgcaaaaaagaatcaaagtatcaccgatctgaaacaactagtgaaggaggcgaccgagcgagagcagaaggttaataaatataacgaggatctagaacagcagatcaagatcctcaagcatgtgcccgagggcgctgagacagagcagggactcaagagagagctccaggtactcagattggccaaccaccaactggataaagaaaaagctgaattaattcaccagattgaggcaaataaggaccagagcggggcagaatctacaatccctgacgctgaccagctcaaagaaaaaattaaggacttagagacccaactgaaaatgagcgatctcgaaaagcagcatttgaaagaagagatcaaaaagctgaaaaaggaactggagaatttcgatccaagttttttcgaggagattgaggaccttaagtataattacaaagaagaagtcaagaaaaatattctactggaggaaaaggtcaaaaaactttctgaacagctgggtgtcgagttaacttccccggttgcagcctctgaggagtttgaggatgaagaagaatccccagtgaatttccctatttattag

SEQ ID NO: 111680 - DNA, 2415 bp, synthetic construct
  misc_feature 1..2415: note = Description of Artificial Sequence: Synthetic coding sequence
  source 1..2415: mol_type = other DNA
atgccacccaatattaactggaaggagattatgaaagtggaccctgatgatctgccgcggcaagaagagctggccgacaatctgctcatttctctgtcaaaggtcgaggttaatgagttgaagtccgaaaagcaggaaaacgtcattcacctgttcaggatcacacagtcactgatgaaaatgaaggcccaggaagtggagctcgctctggaagaagtggagaaagctggcgaagaacaggcgaagtttgagaatcagttaaagaccaaagtcatgaagctcgaaaatgaattggaaatggcgcagcagtcagccgggggtagagacacaagattcctgcgcaatgagatctgccagctggagaagcagcttgagcagaaagatagggagttagaggacatggaaaaagagctcgaaaaagagaagaaagtcaacgagcagctggcactcagaaatgaggaggccgaaaatgaaaacagtaaacttagaagggagaacaagcgtttaaaaaaaaaaaatgagcagctctgtcaggatatcattgactaccagaaacagatcgacagtcagaaggagaccctgttgtcccgacgtggtgaggatagcgattaccggtcacagcttagcaagaaaaattacgagctgatccagtacctggacgaaattcagacccttacagaggcgaacgaaaagatagaggtccagaatcaggaaatgcggaagaatctggaagagagcgtgcaggaaatggaaaagatgacagacgaatacaatcggatgaaagctattgtacaccagactgacaatgtaattgaccaacttaaaaaggagaacgatcattatcagttacaggttcaggaattgaccgatcttctcaagtccaagaatgaggaagacgatccaatcatggtcgcagtaaatgcgaaggtggaagagtggaaattaatactgtccagcaaagacgacgaaattatcgaataccagcagatgctccataacctccgggagaagctaaagaatgctcagctggacgctgacaaaagcaacgtaatggcactacaacagggaatccaggagagggactcccagatcaaaatgctcaccgaacaggtggagcagtatactaaagagatggaaaaaaacacttgcattattgaggatctcaagaacgaactgcagaggaacaagggggctagcaccctctctcagcagacccatatgaaaatccaatcgacattagacattctgaaggaaaaaactaaagaggcagaacgcacagcagagttagcagaggccgatgcgagggaaaaggataaggagctggtcgaggcgttaaagcgcctgaaggattacgagtctggggtgtacgggctggaagatgcagtcgtcgaaataaagaattgtaagaatcaaatcaaaatacgggatcgagagattgaaattctgaccaaggagatcaataagttggaactcaaaatttccgacttcctggatgagaacgaggctctcagggagcgcgttggactggaacctaagaccatgatcgacctcactgagttcaggaatagtaagcatctgaaacagcagcagtaccgcgcagagaaccaaatactcttaaaggagatcgagtctctcgaggaagagagattggatctcaaaaagaaaatcagacaaatggcacaagaaaggggcaaaaggtcagccacgtccggtttgactaccgaggatttgaatttaactgaaaacatttctcagggagaccgcatctcagaaagaaagctggatctcctgtctttaaaaaatatgtctgaagcccagagcaagaacgagttcttaagtagggagctgattgaaaaggagcgggacttggagcgcagcagaacggtcattgccaagtttcaaaacaaattaaaagagcttgtcgaggaaaataaacagctcgaggagggaatgaaagagatcctccaggccattaaggagatgcagaaggatcccgatgtgaagggaggtgagaccagcctgataatacccagccttgagcgactagtgaacgcaatcgagagtaaaaacgcagagggtatctttgatgcgtctctacatttgaaagcccaggtagaccagttgaccggacgcaatgaggaactccgccaagaacttagggagagcaggaaggaagctattaactatagccagcagctcgccaaagccaatttaaagatcgatcacctagagaaagagacctccctactccgacagtccgaaggaagcaatgtggtgttcaaaggtatcgatctgccggatggcattgccccttcttccgctagcataattaatagccagaacgaatacctcatccacttgctgcaggaactcgaaaataaggagaaggtgaaggagttcaggaggttctcctag

SEQ ID NO: 111681 - DNA, 1650 bp, synthetic construct
  misc_feature 1..1650: note = Description of Artificial Sequence: Synthetic coding sequence
  source 1..1650: mol_type = other DNA
aagatggctcagcagagcgcaggcggccgcgacaccagattcctgaggaatgaaatttgccagttagagaaacaattagagcagaaggatcgggaattagaagacatggaaaaggaactcgaaaaggagaaaaaggttaatgaacagctcgctctgcggaacgaggaagctgaaaacgaaaatagcaaactccggcgggaaaacaagagattgaagaagaaaaatgagcagctatgccaggacattatcgactatcagaaacagatcgactcccagaaggagactttactctctaggagaggagaggacagcgactatcgctcgcaattgtcgaaaaagaattacgagctgatccagtatctagatgagatccaaacccttactgaggcgaacgagaaaattgaggtgcagaaccaggaaatgcgtaaaaatctcgaagaaagcgtgcaggaaatggagaagatgaccgacgaatacaatcgaatgaaagcaatcgtgcaccaaactgataacgtaattgatcagctgaagaaagaaaacgaccactatcagttgcaggtgcaggagctgaccgatctccttaagtcgaaaaatgaagaagatgaccctataatggtcgccgttaacgcaaaagtggaggaatggaaacttattttgtcctccaaggatgatgagattatagagtaccagcaaatgcttcataatctccgggagaagttgaagaacgcacagcttgacgcagacaagagtaatgttatggcccttcaacaggggatccaagagcgtgatagtcagatcaaaatgttgacagaacaagtagagcagtataccaaagagatggagaagaatacttgcattatagaggaccttaaaaatgaactgcagcggaataaaggcgcctccacgttgtcccagcagacacacatgaagatccagagcactctagatattttgaaagaaaaaaccaaagaggctgaaaggaccgcagaactcgcggaggccgatgcaagggaaaaagacaaggagctggtagaggcgttaaaaagactgaaggactacgagagtggcgtgtatggactggaggatgccgtggttgaaataaaaaactgcaaaaaccagattaaaattcgggacagggaaattgagattctcacaaaagagatcaataaactggagttgaagatctctgacttcttggacgaaaatgaagcactgcgggagcgggttggactggaacctaaaaccatgatagacctgacagagttcagaaacagcaagcacctgaaacaacagcagtacagggcagagaatcagatattgctaaaagagattgagtcgctggaagaggaaaggcttgatctgaagaagaagattcgccaaatggctcaggagagaggcaagcgaagtgccacctccggactaaccactgaggaccttaacctgactgagaatatcagccagggggacaggatttccgaacgaaagctcgacctcctctcattgaagaacatgtctgaggcccagagtaaaaatgagttcctctctcgggagctgattgagaaggagagagacctcgaacgctcccgcacagtgattgctaaatttcaaaacaaatgttatcgcattaaggagtgcagaagaaatctttag

SEQ ID NO: 111682 - DNA, 4620 bp, synthetic construct
  misc_feature 1..4620: note = Description of Artificial Sequence: Synthetic coding sequence
  source 1..4620: mol_type = other DNA
atggctatcttcaagatcgctgccctgcagaaagtcgttgataatagcgtctcgctttctgagctggagctggcaaacaagcagtacaacgagcttaccgccaagtatagagacatcctgcaaaaagacaacatgctggtgcaaagaactagcaatcttgagcacttagaatgcgagaacatttctttgaaagagcaggtcgaatcaatcaataaagaactggagatcacaaaagagaagctgcatacaattgagcaggcctgggaacaggagaccaaactcggaaacgaaagctctatggacaaggctaagaaaagcatcactaattcggacattgtgtcaatcagcaaaaagattaccatgctagaaatgaaggagctaaatgaaagacagcgggctgaacactgtcagaaaatgtatgaacacctgaggaccagccttaagcaaatggaagaacggaactttgagctcgagacaaaattcgccgaactgactaagataaacctggatgctcagaaagtcgaacaaatgctgagagacgaactagccgactcggtttcaaaggccgtgtccgacgccgacaggcagcgtatccttgagttagaaaaaaatgagatggaactcaaagtggaggtatctaagctgagggaaatcagtgatattgcaaggcgccaagtagaaatcctgaatgcccagcagcagtctagagataaagaagtagagagtctcagaatgcaactgctggactaccaggctcagagcgatgagaagtctctgattgccaagctgcaccaacataacgtttcgctgcagctgtctgaggcaactgcactgggcaaactggaatctatcacaagcaaattgcagaagatggaggcatataacctaaggctagagcaaaaactggatgaaaaggagcaggctctatattacgcccggctggaagggagaaacagggctaagcatctgcgccaaactatccagtcccttcgccgtcaatttagcggggctctgccattggcacagcaggagaagttttcaaaaaccatgatccaattacaaaatgataaactgaagatcatgcaggagatgaaaaacagccaacaggagcatcggaacatggagaacaagactctggagatggagctgaaactgaaggggctggaggaactgatatcaactttgaaagacactaaaggtgcccagaaggttattaactggcacatgaagatagaagagttgcgactgcaggagctgaagcttaatcgcgaactggtgaaagacaaagaggagattaagtacctgaataacataatctctgaatacgagcggaccatctcctccctggaggaggagattgtccagcagaacaagtttcacgaggagcggcagatggcctgggaccagcgcgaggttgacctcgagcggcaacttgacatttttgaccgtcaacaaaacgagatcctgaacgctgcacagaaatttgaagaagcaaccggaagcatcccggatcccagcctccccctgcctaatcagctcgagattgccctgaggaagatcaaagaaaacatccgcatcatactcgagaccagagctacttgcaagagcctagaagagaaactcaaggaaaaagagagtgctttgcgcttggccgagcagaacatcttatctcgtgataaggttatcaatgaactgcgcctgaggcttcccgctaccgctgaacgcgagaagctgattgctgaattagggcggaaggagatggaaccgaagagtcatcatacgcttaagatcgcgcaccagacaatcgccaatatgcaggcccgcctgaatcaaaaggaggaagtgctcaagaaataccaacgtctgctggaaaaagcaagagaagagcagagagaaatagtaaaaaagcacgaggaggacctccatatcctccatcatagacttgagctgcaggccgatagttccctcaacaagtttaaacagacagcatgggaccttatgaaacagtctccgactcccgtgccaactaacaagcactttattcgactggcagagatggaacagacagtggccgaacaggacgattctctgtcttccctgctcgtgaaattgaagaaggttagtcaggatttggagcgccagcgagaaatcacagaactgaaagttaaggagtttgaaaatatcaaactccagctgcaggagaaccacgaggacgaagtcaagaaggttaaggccgaggtcgaggacctcaagtatctccttgaccaaagtcagaaggaatcccaatgccttaagtccgagctgcaggcacagaaagaggccaacagcagagctcccactacaacaatgcgaaatttagtcgaacggctcaagagtcaattggccttgaaagaaaaacagcagaaggctttgtcacgcgcacttctggagctgcgcgctgagatgactgcagctgccgaggagcggattattagcgctaccagccagaaagaagctcacttgaacgtccagcagatcgtcgataggcacaccagggagctgaagactcaggtggaagacctgaacgagaacctcctgaagctcaaggaggctctgaagacgtctaagaatagagagaatagcctgacggacaatcttaacgacctgaacaacgaactccagaagaaacagaaagcgtataataagatcctgagagaaaaagaggaaatcgatcaggagaacgacgagctgaaacggcagatcaaacggctcacctcgggccttcagggcaaaccgcttactgataacaagcagtctctgatagaagagctgcaaagaaaggtaaaaaagttggaaaatcagctcgagggtaaggtggaggaggttgatctgaagcccatgaaggaaaaaaatgccaaggaagagctgattcgctgggaggagggcaagaagtggcaggctaagattgagggcatcagaaataaactcaaggagaaagaaggggaagtcttcacactgacgaagcagctgaacactttgaaagacctgttcgccaaggcagacaaagaaaagctgactctccagagaaaattgaagacaactggcatgacagttgaccaggttcttggcattcgggctctggagtcagaaaaggagttggaggagctgaagaagcgtaacctggacttggagaacgacattctgtacatgcgggctcaccaagctctccccagggattcagtagttgaggacttgcacctgcagaaccgctacctgcaggaaaagctgcacgcgctggagaaacagttttcgaaagacacatatagtaaaccctccatctccggaattgagagcgacgaccattgccagcgggaacaggagttgcagaaggaaaatcttaaactgagctctgaaaacattgagctcaagttccagctcgaacaggccaacaaggacctgcctcgcttaaagaatcaggtgagagatctcaaagaaatgtgtgaatttctgaagaaagaaaaagctgaggtccagcgtaagctggggcacgtgagaggatccggccgctcgggaaagactatccctgaacttgagaagactatcgggttaatgaagaaagtggtggagaaggttcagagggaaaacgagcaacttaaaaaagcatccgggatcctgactagcgagaaaatggcaaacatcgaacaagagaatgagaaactgaaggcggagctcgaaaaactcaaggcccatctggggcaccagctgagcatgcattacgagtctaagaccaaaggcacagaaaagatcatagccgaaaacgaacgcctgcggaaagagctcaaaaaagaaacggacgcagctgaaaaactaagaattgccaaaaacaatctagagatattgaatgaaaagatgaccgtgcaactggaggagaccggcaaacgtcttcaattcgcagagtcacgaggcccccagctagagggagcagattccaaatcttggaaaagtatagtggttacccgcatgtacgaaacgaaactgaaggaattagaaactgacattgccaaaaaaaatcagtccatcactgatctgaaacagctggtcaaagaggcaacggaacgggaacagaaagtcaacaagtataacgaagacttagaacagcagatcaagatcctgaaacatgttcctgaaggcgctgaaaccgaacaagggcttaaacgtgaacttcaggttctgcggctggctaaccatcaactcgacaaggagaaagctgagctcatccatcagattgaagccaacaaagatcaaagcggagctgaatctacaattcctgatgccgatcagttaaaggaaaagatcaaggatttagaaacccagctgaagatgtcagatctagagaagcagcacctgaaagaagaaatcaagaagctgaagaaagaactagaaaacttcgatccctctttttttgaagagattgaagacttgaagtataattacaaagaggaagtcaagaagaatatcctcctggaggaaaaggtgaagaagctgtctgaacaattgggcgtggagttgacatcaccagtggctgccagtgaagagttcgaggatgaggaagaaagcccagtgaattttcccatctactag

SEQ ID NO: 111683 - DNA, 7440 bp, synthetic construct
  misc_feature 1..7440: note = Description of Artificial Sequence: Synthetic coding sequence
  source 1..7440: mol_type = other DNA
atgcctccaaacattaattggaaagaaataatgaaagtggaccccgatgatctgcctaggcaggaggaattggccgataatctgctgattagcttatcaaaggtcgaggtgaatgaactgaagtctgagaaacaagagaatgtgatccacctgtttcgcataacacagtcactgatgaaaatgaaagctcaggaggtggaactggcactagaagaggtcgagaaagcaggggaagaacaggcaaaattcgagaatcagctcaagactaaagttatgaagttggagaacgagctggagatggctcaacaatccgctggtggtcgcgatacaagatttctacgcaacgaaatttgtcagctagagaaacagttagaacaaaaggacagagagttggaggacatggaaaaggaactcgaaaaagagaaaaaagtgaacgagcagcttgctctgcgcaatgaggaggcagagaacgaaaactcgaaattgaggagggagaacaagcgactaaagaaaaaaaacgaacagctgtgtcaagacatcatcgattatcaaaagcagattgattcgcagaaagagacccttctctctagacgcggtgaggattctgattaccgcagccagctttccaagaagaattacgaactgattcagtacctggatgagattcagaccttaacagaagctaatgaaaagattgaggtgcagaatcaagagatgcggaagaacttggaagagtccgtgcaggagatggagaagatgactgacgaatataacaggatgaaggccatcgtgcatcagactgataacgttattgatcagctgaagaaagaaaacgatcactaccagctccaggtccaggaacttacagacctacttaaatccaaaaacgaggaggacgatccgattatggtcgccgtgaacgccaaagtagaagagtggaagcttattctgtcctccaaagatgatgagatcattgagtaccagcaaatgctgcataacttgagagaaaagctgaagaatgcacagcttgatgcagacaaaagcaatgtaatggcactgcagcagggcatccaggaacgcgacagtcagatcaaaatgttaactgagcaggtcgaacagtacaccaaggagatggaaaaaaacacttgcatcattgaggatctcaaaaatgagctgcagaggaacaaaggcgcgtctacactaagtcagcagacccatatgaaaattcagtccactctggacatcctcaaggaaaagacaaaagaggccgaaaggacagcagagcttgccgaggccgatgctagagagaaggataaagagttggtcgaagccttgaagcgactgaaagactatgagtccggagtgtatgggttggaagacgctgttgtcgagattaagaattgtaagaaccagattaaaatcagggatcgggaaattgaaattctcacaaaggaaatcaataaactggagctgaagatcagtgatttcctagacgagaacgaagccctaagggaaagggttggtttggagcctaagaccatgatcgatcttacagagttccggaactctaaacacctgaaacagcagcagtacagagctgagaaccagatcctgctgaaggagatagaatccctcgaggaagaaaggctggatctcaaaaaaaagattaggcaaatggcccaggaacgagggaaacgatccgcgacgagtggcttgacaactgaagatctgaacttaaccgagaacatctctcaaggcgacagaatctccgagcgcaaactcgacctccttagcctcaagaatatgtctgaggcccagagtaagaatgagttcctaagccgtgagctgatcgaaaaggagcgggatttggagcgtagccggacagtgatcgccaaatttcagaataagctgaaggagttggtggaagaaaataagcagttagaggaagggatgaaggagatcctgcaggccatcaaagagatgcagaaggatcctgatgtcaagggcggggaaaccagcctgataattccatctctggagaggttagtgaacgcaatcgagtccaagaatgctgagggtatcttcgacgcctccctgcacctgaaggcccaggtggaccagttaaccggtaggaatgaggaactgcggcaggaattgcgagagtcaaggaaggaggccatcaattactcccaacaattggcgaaggcaaatctgaagattgatcatctggagaaggaaacttcattattgagacagtctgaagggtcgaacgtggtgtttaaagggattgatctgcctgacggcattgccccgagctcagcgtctattattaatagccagaacgaatatttgatccaccttctgcaggaactggaaaacaaggagaagaagttaaaaaatctggaagattccctcgaagactacaacaggaagttcgcggtgatccggcaccagcaatccctgctgtacaaagaatatttatcagagaaagagacatggaaaactgagagcaagacaattaaagaggagaaacgaaaactggaggatcaggtccagcaagatgcaatcaaggtgaaggagtataacaaccttttgaacgccttgcaaatggattcagatgaaatgaaaaaaatcctggccgagaattctcggaagatcaccgtgctccaggtgaatgagaagtctttgattcgccagtataccactctcgttgagctagaaaggcagctccggaaggagaacgagaaacagaagaatgagctgctcagcatggaggctgaagtgtgcgagaagatcggatgtctccagagatttaaagaaatggcaatctttaagatagccgccctccagaaggtggtggataacagtgtgtcactttctgaactggagttggccaacaagcagtataatgagctgactgctaaatatcgggacattctgcagaaagacaatatgttggtgcagaggaccagcaatcttgagcacctggaatgcgaaaatatctcccttaaggaacaagttgaatcgattaataaggaactagagataactaaagagaaactgcacacgatcgagcaggcctgggaacaagaaaccaagcttggcaacgaatccagtatggacaaagccaagaagagcatcactaactcagatatcgtttctatctcgaaaaagatcactatgttggagatgaaggagttgaatgaacgacagagagccgagcattgtcagaaaatgtacgagcacctccggactagtctgaagcagatggaggaacggaacttcgagctggaaaccaagtttgccgagctgactaagattaacctagacgcacagaaggtggagcaaatgctccgagatgagctggccgattccgtgtctaaagccgtttctgacgccgacagacaacgtatactggaacttgagaagaacgaaatggagctcaaggtggaagtgtcaaagcttcgagagataagcgatatcgcccgtagacaggtggagatcctcaacgcccagcagcagagtagagacaaggaagtcgaaagcttgaggatgcagcttctggattaccaagcacagtccgacgagaaatcccttatagctaaattgcaccagcataatgtcagtttgcagttatcggaagctactgctttaggtaagctcgagtctatcactagcaaactgcagaagatggaggcatacaacctgagactcgaacagaaacttgatgaaaaggaacaggcactatactatgcaaggcttgaggggcggaacagagccaaacacctcaggcagaccattcagagcctgcgtagacagttctctggagctctgcctttggcccaacaggagaaattttctaagaccatgatccaacttcagaatgacaagctgaagatcatgcaggaaatgaaaaatagccagcaggaacatagaaatatggaaaacaaaacattagagatggaactaaagctgaaaggcctggaggaactcatttctacattgaaagacaccaagggggcccagaaggtaatcaattggcacatgaagattgaagagttgcgtctacaggagctgaagttaaatcgggagctggtgaaggataaagaagagatcaagtatctgaataacattatatccgaatatgagcggactataagttcccttgaggaggaaattgtgcagcaaaataagttccacgaggagcggcagatggcgtgggatcaacgggaggtggatttagagcgccagctggatatatttgatcgccagcagaatgaaatcctcaatgccgcccagaagttcgaagaagccactggtagcattccagaccctagtctccctctgcccaatcagctggaaatcgctctgcgtaagatcaaagagaacatacgcatcatcttggagactagggcaacctgcaagtccctcgaggaaaagcttaaggaaaaagagagcgccttgaggttggcggaacaaaatatcttatcccgcgacaaggtgattaacgaattgcgactgaggcttccagcgacggctgagagagagaagttaatagctgagttggggcggaaagagatggaacctaagtcccaccacaccctcaaaatagcacaccagactatcgcgaatatgcaggcaagactgaatcagaaagaagaagtgctgaagaagtaccagcggctgctagagaaagcaagagaggagcagcgagagatcgtcaagaaacacgaagaggatctgcacatccttcaccacaggttggaattacaggctgattcaagcctcaacaagtttaaacagaccgcatgggacttaatgaagcagagcccaacccctgtcccaaccaacaagcacttcatcaggctcgccgaaatggaacagacggtggctgagcaggacgactccctttcctcactcctggtaaaactgaagaaggtgagccaggacctcgagcgacagcgggaaatcacggaattaaaggtcaaggaatttgagaatattaaactgcaacttcaggagaaccacgaggacgaggttaaaaaggttaaggccgaagtagaggatctcaagtatctcctggaccagtcccagaaagagtcccagtgtctgaagtccgagcttcaagcccagaaggaggcgaattccagggcaccaactaccacgatgaggaacctcgtggagaggctcaagtcccagcttgctctgaaagagaaacagcagaaggcactcagtagagcactgctcgagctgcgcgcggagatgaccgccgccgctgaagagcgaattattagcgccacatcccagaaagaagcacatttaaacgtgcaacagatcgtcgatcgccataccagagagctcaagacgcaggtggaggacctgaatgaaaatctgcttaagctcaaggaggctttaaagaccagcaaaaatcgtgagaattcactgaccgacaacctcaacgacctaaacaatgaacttcagaagaaacagaaagcctacaataagattcttcgggaaaaggaggagatagaccaggaaaacgacgagctcaagaggcagataaagcgcctgaccagcggcttacaggggaaacctctaaccgacaacaaacaatccttgattgaggagctccagagaaaagtgaaaaagttggaaaatcagctggaggggaaagtggaagaggtggacctcaagcctatgaaggagaagaatgctaaggaggagcttatccggtgggaagagggtaagaaatggcaggcaaagattgaagggatcagaaataagcttaaggaaaaggaaggggaggtatttaccttgacgaaacagctgaacactctgaaagacctctttgctaaagcagataaggagaaacttacgcttcaaaggaagctgaagaccacagggatgacagtggaccaggtccttggcattcgggccctcgagtctgagaaagagctggaagagctgaaaaaacgcaacttagatctggaaaatgacattctttacatgagggctcatcaagccctgccccgggacagcgttgtcgaggacttgcatctgcaaaaccggtaccttcaggaaaagttacacgctttagagaaacagtttagtaaagacacgtacagcaagccctcaattagcggtatcgagagcgatgatcattgtcagcgcgagcaggaactgcaaaaagaaaacctgaaactgtcatctgaaaacattgaactgaagttccagctggaacaggccaacaaggacctgccccggctcaagaatcaggtgcgcgatctgaaggagatgtgtgaattcttgaaaaaagagaaggccgaggtccagcgcaagctcggccatgtgagggggtccggtagatcggggaaaactatccccgaactggaaaagacaatcgggcttatgaagaaagtggtagagaaagtacagagagagaacgagcagctgaagaaagcgtcaggcatattgactagtgagaagatggccaacattgagcaggagaacgaaaagctcaaagccgaactcgaaaagctgaaggctcacttgggccatcaattatctatgcactatgagagcaaaactaaagggactgaaaaaatcatcgctgaaaacgaacgccttcgaaaagaacttaagaaagaaactgatgccgctgaaaagctgaggattgcaaaaaataacctcgaaatactcaacgagaaaatgactgtgcagcttgaagagaccggaaagagattgcagttcgcagagagccgtggaccccagcttgaaggcgcagatagcaagtcatggaagtccatcgttgtcacaagaatgtacgaaacgaagctgaaagaactcgagacagatattgccaagaaaaaccagtctattacagacctcaagcagctggtcaaagaagccactgagcgagagcaaaaggtcaataaatataatgaagatttggagcaacaaatcaagattctgaagcatgtccccgaaggcgccgagacagaacaggggctcaaaagggagctgcaggtcctgaggttagcaaatcaccagttggataaggaaaaggccgaactgatacatcagatcgaggctaacaaggaccagtcaggcgcagagtccacaatcccagatgcagaccagcttaaagagaagataaaggatctcgagacccagctaaagatgtcagatctcgagaagcagcatctgaaggaggaaattaagaagctgaaaaaggagctggagaatttcgatccaagcttcttcgaggagatcgaggacttgaaatataactacaaggaggaggtgaaaaaaaatatcctgctggaagagaaagtgaaaaaactgagcgagcagctcggtgtggagctgacaagtcctgtcgcagcctcagaagagttcgaggacgaagaagaatctcctgtaaattttcccatatactag

SEQ ID NO: 111684 - DNA, 1512 bp, synthetic construct
  misc_feature 1..1512: note = Description of Artificial Sequence: Synthetic coding sequence
  source 1..1512: mol_type = other DNA
atggaagagcacggggtcactcagacagagcatatggccactattgaggctcacgcagtcgctcagcaggtgcagcaggttcacgtggccacctatacggaacattccatgttatcagcggatgaggactctccaagcagccctgaggatacaagctacgatgattccgatatcctgaactctacagccgctgacgaagtgactgcacaccttgctgcagccggacccgtgggtatggctgccgctgctgcagtagccacaggcaagaagcggaagcggccccatgtgttcgagagcaatcccagcatacgaaagaggcagcagacccggcttctgaggaaactccgcgccacactggatgagtacacgacccgcgtcgggcagcaggctattgttctttgcatcagcccaagcaagccaaaccccgtgttcaaggtcttcggcgctgccccgctggaaaacgtggtgcggaagtacaagagtatgattctagaggacctggagagcgccctggctgagcacgctccggccccacaggaggtgaactctgagttaccaccgctgacgattgatggaatccccgtttctgtggataagatgacacaggcgcagctcagagcttttatccccgagatgttgaaatacagcactggaagggggaagccgggctggggcaaagagagctgtaaaccaatatggtggcccgaagatatcccatgggcgaacgttcggagtgacgtccggaccgaggagcagaaacagcgggtgtcctggacacaggcgctgcgtaccatcgtgaagaactgctataaacagcatggtagagaagatctgctatacgcctttgaggatcagcaaacacagacacaggcaacggcaacacattccatagctcacctggtgccttcccaaacagttgtgcagactttttccaatcctgatggcaccgtcagtctgattcaagtcggtacaggcgctaccgtcgctacattagccgacgctagcgaactcccaacgacagtcaccgtcgctcaggtcaactactctgccgtcgccgacggtgaagtggagcagaactgggctactttgcaagggggggagatgaccatccaaaccacgcaggccagcgaggcgactcaggccgtggctagccttgccgaagccgctgtagctgcttctcaggagatgcaacagggtgctacagtcacgatggccctcaactctgaagccgcagcccacgctgtggcaaccctggctgaagccactttgcagggcggcggccagatcgtgctgagcggagagaccgcagcggcagtcggggccctaacaggtgtccaagacgccaatggtctggtacaaatccccgtgtcgatgtaccagacagtggtaaccagtctcgcccagggaaacggcccagtgcaggtcgctatggcccctgttacaactcgcatttccgactccgcagtgaccatggacggccaagctgtagaagtcgtgacactggaacagtag

SEQ ID NO: 111685 - DNA, 906 bp, synthetic construct
  misc_feature 1..906: note = Description of Artificial Sequence: Synthetic coding sequence
  source 1..906: mol_type = other DNA
atgtctctacgtcggcatatcggaaatcctgagtacctgatgaagcgcatccctcagaaccctagataccagcacatcaagagtagactcgataccggaaattccatgacgaaatacaccgagaaactggaggaaattaaaaaaaactaccgctataagaaagatgagctgttcaagcgtcttaaggttacaacttttgcccagttaataatacaagtggcctctctgtctgaccagacgctagaagttactgccgaagagatccagcggctggaggacaacgatagtgccgcatctgatcctgatgcggagactacagccaggacaaacggaaaaggaaatcccggggagcaatcaccatccccagagcagttcataaataatgccggtgccggagattcttcaagatctacccttcaaagtgttatctcaggcgtcggcgagctggacctggacaaaggaccagtgaagaaggccgagccccacaccaaggataagccctaccccgattgcccctttctgctgctggacgtaagggaccgggactcataccagcagtgtcacattgtcggggcctactcttatcccatcgcaaccttgagtcgaacaatgaatccctattccaatgatattttggagtataagaatgcccacggcaagatcatcatcttgtacgacgatgacgagagacttgcctctcaggctgcaacaaccatgtgtgagagaggctttgaaaatttgttcatgctgtctggggggcggctgaaccaggctaattccagcggtcgcgaatcaaaggtgcctggggcccggagcgctcagaatctgcccgggggcggtcctgcctcacactctaatcctcgctcgttgtcctccggccacttacagggtaaaccttggaaatag

SEQ ID NO: 111686 - DNA, 165 bp, synthetic construct
  misc_feature 1..165: note = Description of Artificial Sequence: Synthetic coding sequence
  source 1..165: mol_type = other DNA
atgagtctgaggagacatattggcaaccccgagtacttaatgaagagaattcctcagaaccccaggtatcagcacatcaagagccgccttgatacaggcgcctgcgtctatcttacaagcagcccagctttgcccgactgcgcgatgaatggtctctgcttttag

SEQ ID NO: 111687 - DNA, 858 bp, synthetic construct
  misc_feature 1..858: note = Description of Artificial Sequence: Synthetic coding sequence
  source 1..858: mol_type = other DNA
atgtctctgcgccgccatatcggcaacccggagtatctaatgaagcgcatcccgcaaaacccccgctaccaacacatcaaaagccgtctagacaccgactaccgatacaagaaagatgaactcttcaaacgacttaaggtgaccacttttgctcagctcatcatacaggttgcatccctttccgatcagactctggaggtaacggccgaggagatccagagactggaagacaacgattctgctgcctctgaccccgatgccgagaccaccgcgagaacaaacggaaaaggcaacccgggagagcagagcccatccccagagcagtttatcaacaacgccggggccggcgattcctctcggtccaccttgcagtccgttatctcaggcgtgggagagctggatcttgacaagggcccagtgaagaaagctgagccccatactaaagacaagccatatccggattgccctttcctgctgctagacgttagggacagggacagctaccagcagtgtcacattgttggcgcttattcttaccccattgcaaccctgtctcgaactatgaacccatactcaaacgacattctggaatacaagaatgcccatgggaaaattattatcctctacgatgacgacgagaggctcgcttcccaagccgccactacgatgtgtgaaaggggtttcgagaatctgtttatgctgtcaggcgggcggctgaaccaggccaattcttcaggcagggagtccaaggttccaggcgctcgcagcgcacagaacctgccaggtggaggccctgcgtctcacagcaacccgagatccctgagcagtggtcacctacaggggaagccttggaagtag

SEQ ID NO: 111688 - DNA, 1200 bp, synthetic construct
  misc_feature 1..1200: note = Description of Artificial Sequence: Synthetic coding sequence
  source 1..1200: mol_type = other DNA
atgtccagcaggagcactaaggacctgattaaaagcaagtggggctccaaaccctccaatagcaagtccgaaactacactcgaaaagctgaaaggagaaatcgcacacctgaagacttctgtggacgagataacttccggaaaggggaaattgaccgataaggagcggcatcgcctgctcgaaaagatccgggtactggaagctgagaaggaaaaaaacgcataccagctcacagagaaggataaagaaatccagcgccttcgcgatcagctgaaagcccgatatagcacaactacattgcttgagcaacttgaagagacaaccagagagggagagcggcgggagcaagtgcttaaggctttgagcgaagagaaggatgtgctgaagcaacagttgagtgccgcaacgtcgagaattgccgaactggaatcaaagaccaacacacttcgcctctcccaaaccgttgcccccaactgttttaactcttccattaacaatatccacgaaatggagattcagctgaaggacgcgcttgaaaagaaccaacaatggttagtatacgaccaacagcgagaggtttacgtgaagggcctgctggcaaagatctttgaactagagaagaagactgagaccgcagcacacagtctgcctcagcagacaaaaaagccagagtctgagggttacctacaggaagagaagcagaagtgttataacgacctgctggctagcgcaaagaaagatcttgaggtggagcgccagaccatcactcagctgtctttcgagttgagtgagttccgccgtaaatatgaggaaacacagaaggaagtccataacctcaaccaattgctctattcccagagaagggcagacgttcaacatctggaagacgataggcacaagactgaaaagattcaaaagttaagagaggagaacgacatcgcgaggggaaaactcgaggaggagaagaagaggtcagaggagcttctgagtcaggttcagtttctgtatacaagtttgctcaaacaacaggaggaacagacaagggtagctttgctggagcagcaaatgcaggcttgtaccctggattttgagaatgaaaaattggacagacaacatgtccaacatcagctgcatgtcattctgaaggaactgcgtaaggctagaaacaataccgtggggatcctggatactaagagctag

SEQ ID NO: 111689 - DNA, 1395 bp, synthetic construct
  misc_feature 1..1395: note = Description of Artificial Sequence: Synthetic coding sequence
  source 1..1395: mol_type = other DNA
atgtcatccagatcaaccaaagacctcataaagtctaagtggggatccaagccttccaattccaaatcagaaactactctggagaagctgaagggggagatagcacatctgaagacgagcgtggacgagattacttccggtaaggggaagctgaccgacaaggagaggcaccgcctgctggaaaagatccgtgtgcttgaggccgagaaggaaaaaaatgcttatcagctgaccgagaaggacaaggagatccagcggcttcgcgatcagctcaaggctcggtactcaaccactaccttactcgagcagctggaggaaactaccagggagggcgagcggcgcgagcaggtccttaaagctctgagcgaagaaaaggacgtgctgaagcaacagctgtctgccgctacctctcgaatcgcagagcttgaatctaagacaaacaccttgagactcagccagactgtggctcccaactgctttaactcatcaatcaacaacatccacgagatggaaatccagctcaaagacgctctggagaaaaatcagcagtggttggtgtacgatcagcagcgcgaagtgtacgtaaaagggcttcttgcaaaaatctttgagcttgagaagaaaacagagaccgcagcccatagcctgccccagcaaactaaaaagcccgaatcagaagggtacctccaagaggaaaagcaaaagtgctacaatgaccttctggctagcgctaaaaaagatctggaagtggaacgccagactatcactcagttgtcgtttgaactgtcagaatttcggaggaagtacgaggaaactcagaaagaggtacataatctgaatcaactcctctatagccaaaggagagcagacgtgcagcatctggaagatgataggcacaagacagagaagatccagaagctgagagaggaaaatgatatcgcacggggtaagctcgaggaggaaaagaaaaggagtgaagaattgctttctcaggtgcagtttttatataccagcttgcttaagcagcaggaagaacagacaagagtcgctctgcttgagcaacagatgcaggcatgcactttggattttgagaatgagaaactggaccgccagcatgtccagcaccagctccatgtaatcttaaaggaactgcggaaagctcgaaatcagattacccaactggagagccttaagcaactgcatgaatttgcaatcacagaaccactggtgacctttcagggagaaactgagaacagggagaaagtggccgccagtcctaaaagcccaactgcggccctaaacgagagtctggttgagtgccctaaatgtaacatccagtatcctgctactgagcatcgagacctgctggtgcacgtagaatactgctctaaatag

SEQ ID NO: 111690 - DNA, 627 bp, synthetic construct
  misc_feature 1..627: note = Description of Artificial Sequence: Synthetic coding sequence
  source 1..627: mol_type = other DNA
taatcttcaatcaacaacattcatgagatggaaatacagcttaaggacgcactggaaaaaaatcagcagtggcttgtttatgaccagcagcgcgaggtctatgtgaagggcctgctggcaaaaattttcgaactagagaaaaagacagagaccgcggcccatagccttccccagcaaaccaagaaaccagagtctgagggatatttgcaagaagaaaagcagaagtgctacaatgatttgttggcatctgccaagaaagatctcgaagtagagcgtcagacaatcactcagctgtcctttgagcttagcgagtttcggagaaagtacgaagagacacagaaagaggttcacaacctgaaccagctgctttactcgcaaaggcgcgccgacgtgcaacacctggaagatgacagacacaagacagagaaaatacagaaacttagagaggaaaatgacatcgctcgagggaagctggaggaagaaaaaaaacgcagcgaggagctcctgagccaggttcagttcctctatacgagcttgctcaagcagcaggaggagcaaacacgcgtggcgctgctcgagcagcaggtgttgattagggtggcttccaagtttaacagcgcgtgctag

SEQ ID NO: 111691 - DNA, 1425 bp, synthetic construct
  misc_feature 1..1425: note = Description of Artificial Sequence: Synthetic coding sequence
  source 1..1425: mol_type = other DNA
atggccgcagcctctgtgagcgctgccagcggttcccatctttctaattcctttgctgaaccatcccggtctaatggatcaatggttagacattcttcctccccttacgtcgtttacccctccgataaaccattcttaaattcagacctcaggaggtctccctctaagcctactctagcatacccagagtctaatagtagggccattttctctgctcttaagaacctccaagacaagatcaggcggctcgaacttgagcgcattcaggccgaagaaagtgttaaaacacttagtagggagaccatcgagtacaagaaagtgctggatgaacagatccaagagagggagaacagcaagaacgaggagagtaagcataaccaagagctgactagccaactgctcgccgccgaaaacaagtgcaatttactggagaagcagttagaatatatgaggaacatgataaaacatgcggagatggaaaggacaagtgtgcttgagaagcaggtcagccttgagcgcgagagacaacatgaccagacacacgtccagagccagcttgaaaaactagacttgttagagcaggagtacaacaagctgaccaccatgcaggcgctggccgagaagaagatgcaggagctcgaagccaaactgcacgaggaggagcaagaaagaaagcgcatgcaggcgaaggctgccgagctgcagacaggcctggaaactaacagattaatttttgaagataaggccaccccttgtgtgcctaatgctagaagaatcaagaagaaaaaatctaagccaccggagaaatccacaagtccatctcatgccgtggttgctaatgtccagcttgtgctccacctcatgaagcagcactcgaaggcgttatgcaatgatagggtgatcaacagcatccccctggcaaagcaggtgtctagtcggggcgggaagagcaagaaactgtccgtgactccaccttcatctaatggcattaatgaagagttgagcgaagtcctccagactctgcaggacgagttcggccagatgagctttgaccatcaacagctggctaaactgatccaggagagccccacggtggaactgaaggacaaactggagtgtgagctggaagcacttgtgggaagaatggaagccaaagctaaccaaatcactaaggtgcgcaagtatcaagcgcagctcgagaagcagaaactcgagaaacagaaaaaagagttgaaggccacaaagaagacccttgacgaggaacgcaactcaagttcgcggagtggaataacaggcacaacgaacaagaaagatttcatgaaactgcgccccggcgagaagcgaagaaaaaatctccagctcctcaaagatatgcagtccatccagaacagcctacaatcctcctcactgtgttgggattactag

SEQ ID NO: 111692 - DNA, 1503 bp, synthetic construct
  misc_feature 1..1503: note = Description of Artificial Sequence: Synthetic coding sequence
  source 1..1503: mol_type = other DNA
atggcagccgcatctgtttctgcggcatcaggcagtcacctgtcaaactctttcgctgaaccctctcggtccaacggatccatggtacggcattcatcctccccatatgttgtctatccttccgataaacctttcctcaactccgatctgcgcagaagcccatccaaacccacccttgcatatcccgagagcaatagccgggctatatttagcgcgcttaagaacctgcaggacaaaattaggcgtctggaactagagagaatccaggctgaagagtctgtgaaaacactgagtcgggagacaatagagtacaaaaaggtgctggatgaacagatacaggagcgcgaaaacagtaaaaacgaagagtccaaacataaccaagagcttacatctcagttattggccgccgagaacaaatgcaatctcctcgaaaaacagctggagtatatgaggaacatgattaagcatgccgagatggaacggacttctgtcttagaaaagcaggtgtcgctggagcgggagagacagcacgatcagactcacgtacagagccagttggagaaactggatctcttggagcaggagtacaataagctcacgacaatgcaagcacttgctgagaagaagatgcaggaactggaggcaaaactacacgaagaagagcaagagagaaagcgaatgcaggcaaaggccgctgagttgcagaccggcctggagacaaacagactgatatttgaagacaaagctactccatgtgttccgaacgccaggagaatcaagaagaagaaatctaagcctcctgaaaaaaagtcttcccggaactattttggagcccagccccactatcgcctctgcctcggggatatgccatttgtggctggaaaaagcacctccccaagtcacgcggtggttgccaatgtgcagctcgtgttgcatctaatgaaacagcatagcaaggcattatgcaatgatcgcgtcatcaactcaatcccactggctaagcaggtgtcctcaagaggaggtaagagcaagaagctcagtgtaactcccccaagcagcaatgggattaatgaagaactgagcgaggtgctgcagacgctgcaggacgagtttggccagatgagtttcgaccatcagcagctggccaaactgatccaggagtctcctaccgtggagttaaaggataagctggaatgtgaactggaggctcttgtgggacgcatggaagccaaggcaaatcagataaccaaagtacgcaaatatcaggcccaactggaaaagcagaaactagagaaacagaagaaggaattgaaggccacgaagaagaccttggacgaagaacggaacagtagctctcgcagcggcatcactggaactacaaataagaaggactttatgaagctgaggcccggtgagaagagaaggaagaatttgcagctgctgaaggacatgcagagcatccagaattccctccaatccagctccctgtgttgggattactag

SEQ ID NO: 111693 - DNA, 813 bp, synthetic construct
  misc_feature 1..813: note = Description of Artificial Sequence: Synthetic coding sequence
  source 1..813: mol_type = other DNA
atggccgccgctagcgtatccgcagcttccgggtcccatcttagtaattcctttgctgagccaagccgcagcaacggaagcatggtcagacatagttcatctccgtacgtggtgtacccatccgacaagccattcctgaattcagacctgcggagatctcctagcaagccaacccttgcctacccagagagcaactccagagcaattttttcagctctcaagaatctgcaggataagatcagacgcctggagctggaacggattcaagccgaagagtctgtcaaaacactcagtagagagacgatcgaatacaaaaaagtcttggacgaacagatccaggagcgagaaaactctaagaatgaagaatctaagcacaaccaggaactgaccagccagctcctggccgcggagaacaaatgtaacttgctggaaaagcagctggagtacatgaggaatatgatcaaacacgctgagatggaacggacgagcgtccttgagaagcaggtgtccctggaacgtgagagacagcacgaccagactcatgtacagagccagctggagaagctggatttactggagcaggaatacaacaaactcacgacaatgcaggcactcgccgaaaagaagatgcaggaattggaggcaaagcttcatgaagaggagcaggagaggaagagaatgcaagcaaaggctgccgaactgcagacaggcctggagactaacagactgatcttcgaggacaaggctactccatgtgtgcctaatgcacggcgaataaagaagaaaaaaagtaaacctcctgagaaagtctag

SEQ ID NO: 111694 - DNA, 1476 bp, synthetic construct
  misc_feature 1..1476: note = Description of Artificial Sequence: Synthetic coding sequence
  source 1..1476: mol_type = other DNA
atgctcacacgcatcgataattcgtttgccgagccgagccgttccaacggcagcatggtgcgtcattccagttccccatacgtagtctatcctagtgacaagccgttccttaactcagacctcaggagatcgcctagcaagcccaccctggcataccccgagtcaaattcacgtgctattttctccgccctaaaaaatctgcaggacaagattcggaggctcgagctggagcggatacaggcagaggaatccgtcaaaacgctgagcagggagactatcgagtacaaaaaggtgttggatgagcagattcaggaacgcgagaactctaaaaacgaggagagcaaacataatcaggagctcacttcccagctattagctgctgagaacaaatgtaatctgctggagaagcagctggagtacatgcgtaacatgataaaacacgcagagatggaaaggacctccgtcctggaaaagcaagttagtctggagagagagcggcaacacgaccaaacccacgttcagtcgcagcttgaaaagctcgatctgcttgagcaggaatataacaagttgaccaccatgcaggcgcttgcagagaagaaaatgcaggagctggaggcaaagttgcacgaggaggaacaggagagaaaaagaatgcaggcgaaggccgcggagctacagacaggcctggagaccaatcggcttattttcgaagacaaggccaccccttgcgtgccaaatgccaggcgaattaagaagaaaaaaagcaagcccccggagaagaaatcctcccgcaattatttcggtgcccagccccattatcggttatgtttgggggacatgcccttcgttgcaggcaaatccacctccccttcccacgccgtggtggcgaacgtacagctggtgcttcacctcatgaaacaacatagcaaggccctctgcaatgacagagtaatcaatagcattccactggccaagcaggttagttctcggggcggaaagtctaaaaagctgtcggtgacccccccttcttcaaacgggattaatgaggagctctctgaagtcctgcagacgcttcaggatgaatttggccagatgtccttcgatcatcaacagctagccaaacttatccaggaaagccccaccgtcgagcttaaagataagctagaatgcgaactagaggctctcgtcggcagaatggaggcgaaagccaaccaaattaccaaagtgaggaagtatcaagcccaacttgaaaagcaaaagcttgagaagcagaagaaggagctgaaagcgacaaaaaaaaccctggatgaggaaagaaatagttccagccgtagcggcatcaccggcacaacaaacaagaaggactttatgaagcttagacccggggagaagcgcagaaaaaacctacaactgctgaaagatatgcagtcaatacaaaacagcctgcagagttcttctctgtgctgggattattag

SEQ ID NO: 111695 - DNA, 1794 bp, synthetic construct
  misc_feature 1..1794: note = Description of Artificial Sequence: Synthetic coding sequence
  source 1..1794: mol_type = other DNA
atgtttccagtagcgcccaagccgcaggactccagtcagccctccgatagattaatgaccgagaaacagcaggaggaggccgagtgggagagcataaacgtattgttgatgatgcatggcctgaaacccttgtctctggtcaagaggacagacctgaaagatctcattattttcgataagcagtcaagtcaacggatgaggcagaatctgaagctgctagtggaagaaacaagttgccagcagaacatgatccaggagttgatagagacgaaccagcagttgaggaacgaattacagctggagcaaagtcgggccgcaaaccaggagcagagagcaaacgacctagagcaaattatggagagcgtgaagtctaagatcggcgagcttgaagatgaatcactctctcgcgcctgccatcagcagaacaagattaaggatctccagaaagaacagaaaactctccaagttaagtgccagcattacaagaaaaagcggactgaacaggaagagactattgcttcactacaaatggaggtatgccggctaaagaaggaggaagaggacaggatagtcacacagaatagagtgttcgcttacctttgtaagagggtgccccacacagtgctggatagacaactgctgtgtctgatcgattattacgagtcgaagattaggaagatccacacgcagagacaatacaaggaggacgaatcgcagagcgaggaggaaaatgactaccgcaacttggacgcctcaccgacatacaagggcctcctcatgtccctacagaaccagctcaaagagagcaaatcaaagatagacgcccttagttctgagaagctgaacctgcagaaggacttagaaacgagaccgacacagcatgagctcaggttgtataaacaacaggtgaagaagctcgagaaggctctgaaaaaaaacgtgaagctgcaagagcttatcaaccataagaaagcggaggacaccgaaaaaaaagatgagcccagcaagtacaatcagcaacaggctctgatcgaccagaggtacttccaggtcctgtgttccataaactctattatacataatcctcgtgctccagtaatcatctacaagcagactaagggtggagtccagaattttaacaaggacttagtgcaggactgtgggttcgagcatctggtacctgtgatcgaaatgtgggctgaccagctgacaagcctcaaagacctgtacaaatccctgaagactctctcagccgagctggtcccctggctaaacttaaagaaacaggatgagaacgaggggattaaggtggaagacctgctgttcattgtggacaccatgctggaagaagtggaaaacaaagagaaagacagcaacatgccacactttcaaactctccaggcaatcgtgagccatttccagaagctgttcgatgttccctctcttaatggcgtgtaccctcgcatgaacgaagtatatactcgcctgggagagatgaacaatgctgtgagaaatctgcaagaactcctggagctggatagcagctctagcctctgtgtgctcgtttctacagtgggcaagttgtgtagactgatcaacgaggatgtaaatgaacaggtgatgcaggtcctagggcctgaagacctgcagagtataatctacaagcttgaggagcacgaggaattcttcccggcctttcaggccttcactaacgatttgctggagattttggagatcgacgacttagatgcaatcgtacctgccgttaagaagctgaaagtcctgtcatactag

SEQ ID NO: 111696 - DNA, 639 bp, synthetic construct
  misc_feature 1..639: note = Description of Artificial Sequence: Synthetic coding sequence
  source 1..639: mol_type = other DNA
atgttcccagtcgctccgaagccacaggactcatcgcagccctctgatcgcctgatgaccgagaagcagcaggaagaagctgagtgggaaagcatcaacgtgttactgatgatgcatggactgaagcccctctcactggtaaagcgaacagatctgaaagatctgattattttcgataaacagtcttcccaacgaatgagacagaatcttaagctgttagtcgaggagacgtcctgccagcagaatatgatccaggagctgatcgaaacaaaccagcagctccggaacgagttgcaattggaacagtcccgcgccgccaatcaagagcagcgcgccaatgacctggaacagattatggagtccgtgaagtccaaaatcggtgaactggaagacgagagtctctctagggcttgccatcagcagaataaaatcaaagacttgcagaaagagcagaagacgctccaggttaaatgccagcactataaaaagaagcggacagaacaggaagaaacaatcgccagccttcagatggaagtgtgtcgtctaaaaaaggaggaagaggatcggatcgtgactcagaaccgggtgttcgcctacctttgcaaacgggtgccccacacagtgctagaccgccagtag

SEQ ID NO: 111697 - DNA, 351 bp, synthetic construct
  misc_feature 1..351: note = Description of Artificial Sequence: Synthetic coding sequence
  source 1..351: mol_type = other DNA
atgtttcccgtagcccccaagcctcaggacagttcacagcccagcgatagactgatgacagaaaaacagcaagaggaggctgagtgggagtcaatcaatgtgttactgatgatgcacggtcttaagcccctgtccttagtcaaacggacagatctaaaagacctgataatcttcgacaaacaatccagccagcgcatgcgccagaatctgaaactgctcgttgaggagacatcctgccagcaaaacatgattcaggagcttatcgaaacaaatcagcaactccgtaatgagctgcagctcgagcagagtcgtgcagcaaaccaggagcagagggcaaatgacctggagtag

SEQ ID NO: 111698 - DNA, 1665 bp, synthetic construct
  misc_feature 1..1665: note = Description of Artificial Sequence: Synthetic coding sequence
  source 1..1665: mol_type = other DNA
atgtttcctgtggcaccgaagcctcaggactctagccagcctagcgaccgcctgatgacagaaaaacaacaggaagaagcagagtgggagtcgattaatgtgctccttatgatgcatgggctcaagccactgtctttggtgaagcgtactgacctgaaagaccttattatctttgataagcaatctagccaaagaatgaggcagaacctgaaactgctggtggaggagacttcatgccagcagaatatgatccaggagcttattgagacaaatcagcagctgcgaaacgaactccagctcgagcagtcacgagcagcgaaccaggagcaacgggctaatgacctggagcagatcatggagtcagtcaagagtaaaataggcgagttggaagatgaatctctcagcagggcctgtcaccagcaaaacaaaatcaaggatcttcaaaaagagcagaagaccctgcaggtgaagtgccaacactataaaaagaaacggaccgaacaggaagagactattgcctccctccagatggaggtgtgtaggctcaaaaaggaggaggaggaccgcatagttacccagaatagggtcttcgcttatttgtgtaaaagggttccccataccgtgctcgaccggcagctgctttgcctgattgactattatgaatctaagattcgtaaaattcacactcagaggcaatataaggaggacgaaagccagagcgaggaggaaaatgactataggaacctcgatgcttccccaacgtataagggtcttcttatgtcactacagaaccagctcaaggagtctaagtctaaaatcgatgctctgtcttccgagaagttgaacctgcagaaagatcttgagaccagacccacccaacatgagctgaggctctataagcagcaggtcaagaagttggaaaaagcccttaagaagaacgtcaaactgcaggagctcattaatcataagaaggctgaagacaccgaaaaaaaagacgaaccctcaaaatacaatcagcagcaggccctcatcgaccagcgctacttccaggtgctttgcagcattaacagcatcatccacaaccccagggcgcctgtgattatttacaaacagacaaagggtggcgtacagaactttaacaaggatctggtacaggactgtggcttcgagcatctggtgccggtgatcgagatgtgggccgatcaattaacctccctaaaggatctttataaatctcttaaaaccttgtctgcagagctggttccctggcttaacctcaagaagcaagacgagaatgaaggaattaaggtcgaagatttgctgtttatagtggacaccatgctggaggaagtcgaaaataaggaaaaagactccaatatgccgcactttcagactcttcaagccatagtgtcacatttccagaaattgttcgacgtgccatctctcaacggagtttatcctagaatgaacgaggtctatacacgcctgggggaaatgaataacgctgtccggaacctccaggagctgctcgagctagacagttctagcagtctgtgtgtcctggtcagcactgtagggaagctatgtcggctcattaatgaggacgttaatgagcaggtgatgcaggttctagggccagaagacctgcagcgatacttattctag

SEQ ID NO: 111699 - DNA, 1794 bp, synthetic construct
  misc_feature 1..1794: note = Description of Artificial Sequence: Synthetic coding sequence
  source 1..1794: mol_type = other DNA
atgtttccagtggctccgaagcctcaggattcttcccagccttctgatcggcttatgacggagaaacaacaggaggaagccgaatgggagagcatcaatgttctgctgatgatgcacggactgaagcccctttccctggtaaagagaaccgacttgaaagacctcattatctttgataagcagtcatcccagcgcatgaggcaaaacctcaagctgctcgtagaggaaacttcttgccagcagaacatgattcaggaacttatcgaaacaaatcaacagctgaggaatgaactccagctggagcaaagtagagcagccaaccaggagcagcgagccaacgacctggagcagatcatggagagcgtcaaaagtaagataggggagctcgaggatgaaagtctgtctcgagcatgccatcaacagaataaaatcaaagacctccaaaaggaacagaaaaccctccaggtcaagtgccaacattacaaaaagaagaggaccgagcaggaggagacaattgctagcttgcaaatggaggtgtgcaggctcaagaaggaagaggaggataggatcgtgacgcaaaatcgcgtttttgcatatctttgcaaacgggtccctcacacagttcttgaccggcagctcttgtgtctgatcgactactatgaatctaagattaggaagatacatacacaacgccaatacaaggaggacgaatctcagtctgaggaggagaacgactatcggaacctcgacgcctcccctacttacaaaggcctgttaatgagcctgcagaaccagttgaaggagagcaaaagtaagatcgacgctctcagcagcgaaaaattgaacctgcagaaagatttggaaacacgcccaactcagcacgagttacgtctgtacaagcagcaggtgaagaagctggaaaaagctcttaaaaaaaacgttaagctgcaagaactgatcaatcataaaaaggcagaggatactgagaagaaagatgaaccttctaagtataatcagcaacaggccctgatcgatcagcgctacttccaggttttgtgcagtataaacagcattatccacaatccacgcgcgcctgtgattatttacaagcagacaaagggaggggttcaaaattttaacaaagatctggtgcaggactgcgggtttgagcatctggtgcctgtcatcgaaatgtgggcggatcaactgacaagccttaaggatctgtacaaatcccttaagaccctttcagccgagttagtaccatggctgaatctgaagaagcaggatgagaatgaggggatcaaggttgaggacttgctgttcattgtggacaccatgttagaagaagtcgagaacaaagagaaggatagcaatatgccccactttcagacacttcaggctatagtctcccactttcagaagctgtttgacgtgccaagcctcaatggcgtgtacccaaggatgaatgaggtttacaccagactcggcgagatgaataacgctgttaggaacttgcaagagctgctggaactggatagcagtagttcgctgtgtgtacttgtctcaactgtgggaaagttgtgtaggcttatcaatgaagatgtgaatgaacaggtgatgcaagtgctggggcccgaggatttgcagagcatcatttacaaactggaggaacacgaagaattcttccccgcattccaggcttttaccaacgacctcctcgagatcctggaaattgatgacctggacgcgatagtacccgccgttaagaagctgaaggtgctctcttattag

SEQ ID NO: 111700 - DNA, 72 bp, synthetic construct
  misc_feature 1..72: note = Description of Artificial Sequence: Synthetic coding sequence
  source 1..72: mol_type = other DNA
atgtttcctgtagccccgaagccacaggattcaagccagccttccgacagactcatgaccgaaaagcagtag

SEQ ID NO: 111701 - DNA, 1734 bp, synthetic construct
  misc_feature 1..1734: note = Description of Artificial Sequence: Synthetic coding sequence
  source 1..1734: mol_type = other DNA
atgaccgagcaggaggaggcggaatgggaatcaatcaatgtgctgcttatgatgcacggcctgaagcccctgtccctggtgaagcggacagatctgaaggatttgatcatttttgataagcaaagcagccagcggatgaggcagaacttgaagctgttggtggaggagacttcttgccagcagaatatgatccaggaactgatcgagacaaatcagcagctacgaaatgaactccagcttgaacagtcgagagcagcaaaccaggagcagcgagctaatgacctggagcagattatggagagcgttaagagcaaaatcggagaacttgaggatgagagtctgagcagggcatgccatcaacagaataaaatcaaagacctgcagaaagagcaaaagaccttgcaggtaaaatgccaacattataagaaaaaacgtacggagcaggaggagaccatagccagccttcagatggaagtttgtaggttgaagaaagaagaagaagaccgaatcgtgacccagaacagagtgtttgcctacttgtgcaagcgcgtcccacacaccgttttggacagacagttgctgtgcctgattgactactacgaatctaaaattcggaagatccacacacagaggcaatacaaagaggatgaatcccagtctgaggaagagaacgactacaggaacctcgacgcatcacctacttataaaggcctgctcatgtcactgcagaaccagctgaaggagagcaagtcgaaaatagatgccctttcaagcgagaagcttaatttacagaaggacctggagacacggccaacacagcacgaactgcgcctgtataaacagcaggtcaaaaagctggagaaggcacttaagaaaaatgttaagctccaagagctgatcaaccacaaaaaggcagaggacaccgagaaaaaagatgagccatcaaagtataaccaacagcaggctttaatcgatcaacggtactttcaggtgttgtgcagcatcaattctatcatacataatcctcgcgcaccagtcattatttacaaacagactaaggggggcgtgcagaacttcaataaagacttggtccaggattgtggatttgaacacttagtaccagtgatcgagatgtgggctgaccagttgacatctcttaaggacctgtataaaagtctgaagacactgtccgccgaactggtcccatggctcaacctcaaaaagcaagatgaaaacgagggcattaaagtggaggatctgctgtttatcgtggacaccatgttggaggaggtcgagaataaggagaaggattctaatatgccccattttcagacattacaggcaatcgtctcccatttccagaaactttttgacgtcccttccttaaatggcgtttatccgaggatgaacgaggtttacacccgtcttggcgagatgaacaatgccgtacgcaatctccaggaactgttagagctggatagttcaagcagcctgtgcgtcctggtgtcgacagtgggaaaactctgccgtctcattaacgaggacgtcaacgagcaggtcatgcaggtgctcggtccggaggacctgcagtcaattatttacaaacttgaagaacacgaggaattcttccccgctttccaagcgtttacaaacgatttacttgagattctcgagatcgacgacttagacgcaattgtcccggctgtaaagaaactcaaggtactcagttactag

SEQ ID NO: 111702 - DNA, 3666 bp, synthetic construct
  misc_feature 1..3666: note = Description of Artificial Sequence: Synthetic coding sequence
  source 1..3666: mol_type = other DNA
atgctgtttccgttacaagtcgcagctgttactagctctgtccgagacgatccactggagcactgcgtcagtcctcgtacacgggcccggtcaccggagatctgcaaaatggctgataacttggacgagtttatcgaagagcaaaaagccaggctggcagaggataaggcagagctggaaagcgacccaccatacatggagatgaaggggaaactcagcgccaaactcagtgagaatagcaagatcctgattagcatggccaaggaaaatattcctcccaattcacaacagacacgcggcagcttgggcatagactacggacttagcctgcctctgggggaagactacgagaggaagaaacacaagctgaaggaggaactgcgccaggattatcgccgatacttaacgcaggaacggctgaaactggagcgcaacaaagagtacaaccaattcttgagaggtaaagaagagtcgtcagagaaatttaggcaagtcgagaaatccacagaacctaagtcacagcgaaacaagaagcccattggccaggttaagcccgatttgacctcccaaattcaaacgagttgcgaaaattctgaagggcccaggaaggatgtccttaccccttccgaagcatatgaagagctcctcaatcaacggcgcctcgaggaagatagatataggcagctggatgatgagatcgaactgaggaacagacgaattattaaaaaggccaacgaggaagtgggcatctcaaacttgaaacatcaaagattcgcatctaaggctggaatcccggacaggaggttccatcgcttcaacgaggaccgggtcttcgatcgccggtaccaccgacccgaccaggatcctgaggtgagcgaggagatggatgaacggttccgatacgagagcgacttcgatcgacgactcagcagagtgtacaccaatgatagaatgcatcgcaacaagcgaggcaatatgcctccaatggaacacgacggggacgtaatcgaacagtctaatatccgcatctcctccgcagagaataagagtgcgcctgataacgaaacaagtaagtctgcgaaccaggatacatgcagcccattcgctggcatgttattcggcggtgaggacagggagcttatccaaagaagaaaggaaaaatacagactagaacttcttgagcagatggccgaacagcagagaaataaacgaagagagaaggatctggaactgcgcgtggctgcatctggggcccaggaccccgaaaagtcacctgaccgcctgaaacagttctcagtcgccccgcgtcattttgaggagatgatcccacctgaaagacctcggattgcattccagactccgctcccacctttgtctgccccctccgtgccccctattcctagtgttcaccccgtcccttctcagaatgaagatcttcggagcggtctgagcagcgccctgggcgagatggtgtcccctcgaattgcccctctccctcctccacccctgctgccccctttggccacaaactatagaacaccctatgacgatgcctactacttctacggatctcggaacacttttgatccttcccttgcatactacggctccggcatgatgggcgttcagccggctgcgtacgtgtcagcacctgtcacacaccaattggcacagcccgtcgttaatactgtaggacagaatgaattgaagattacctctgaccaggttatcaactccggcctcattttcgaggataagccaaaaccatcgaagcagagtctgcaaagctatcaggaggccttgcagcaacagatcagggagagagaggagcgccggaagaaggaacgggaagagaaggaagagtatgaagccaaacttgaagcggaaatgagaacttacaatccctggggcaaaggcggaggcggtgcccccctgagagacgccaagggcaatctgattaccgatctaaatcggatgcatagacagaatatcgatgcttaccataaccccgatgctcgaacatatgaggataagcgagccgttgtgtcgctggaccccaatttagctaccagcaacgctgagaatctagaggatgcagccaacaagtcgtcggggcacatgcagacccagtcttccccgtttgcccgcgggaatgtattcggagagcctccaaccgagctccagatcaaacagcaggaattgtacaaaaatttcctcaggtttcagattgaagagaagaaacagcgggaggaggcggagagagagcggctcaggatcgccgaagagaaagaggagcgcagactggcagagcagcgagctagaatccaacaggaatatgaggaagaacaagaaaaaaaacgggagaaggaggaggaacaacgtctgaaaaatgaagagcacatacgacttgccgaggagcgtcaaaaggaggccgagcggaagaaaaaggaagaagaagagaagtataacctacagctccagcactattgcgagcgtgataatttgatcggagaggaaaccaaacacatgagacaacccagtccaattgtaccagcgttgcaaaacaagattgctagtaagctccagaggccgcctagtgtggacagtatcattcgatctttcattcatgaaagttccatgagtagggctcagtcccccccagtgccggctagaaagaatcagctacgggcagaagaagaaaaaaagaatgtgatcatggagcttagcgaaatgcgcaagcaattacgctctgaggaaaggaggctgcaggaacgattactgcatatggactccgatgacgagattcccatccggaaaaaagaaagaaatccaatggacatattcgacatggcccggcacagactgcaggcccctgttagacggcagagccccaagggtctggatgctgccacgtttcagaatgttcatgattttaatgaactaaaagatcgggacagtgagactcgggtagacctcaagttcatgtacctcgatccccctagagatcaccatactctcgagatccagcagcaagccctgctgcgcgaacagcagaaaaggcttaataggattaagatgcaggagggtgccaaggtcgatctggacgctatccctagtgctaaagtaagggagcagcggatgcccagagacgacaccagtgacttcctcaagaattcgctcctggaaagcgatagcgccttcataggtgcgtatggagaaacctaccccgccattgaggatgatgtgctgcccccaccgtcgcagctcccatccgcaagagagcgacgccgtaacaagtggaaaggtctagacatcgactcatccaggccaaacgttgcccctgacggtctgtccctcaagagtatctcgtccgtaaatgtcgacgaactgagggtgaggaatgaggaaagaatgcgcagacttaacgaattccacaataagcccatcaataccgatgatgagtcttccctggttgaccccgatgacataatgaagcatatcggcgatgatgggtccaattcagtcgccaccgagccatggctccgacctggcaccagcgagacgttgaagaggttcatggcagagcagttgaaccaggagcagcagcagatacctgggaaaccaggtacctttacttggcagggtctgagcactgcacacggctag

SEQ ID NO: 111703 - DNA, 3771 bp, synthetic construct
  misc_feature 1..3771: note = Description of Artificial Sequence: Synthetic coding sequence
  source 1..3771: mol_type = other DNA
atgctgtttcccttgcaagtggccgcagtgaccagctcagttcgagacgatcctctggagcactgtgtatctcctaggacacgtgcgagatctcccgagatctgtaaaatggccgataacctcgatgagtttattgaagagcagaaagcgcgcctggctgaggacaaagccgagctggagagcgatcctccttatatggagatgaaggggaaactgtccgctaagctctctgagaactcaaaaatcctcatctccatggccaaagagaatattccgcctaatagtcagcagactagagggagcttgggcattgattatgggctctcactcccattaggcgaagattacgaacgcaagaagcacaaattaaaggaggagttacgacaggactataggcgctacctgactcaaaaagtgttttcaggtacatccaaaaaaaactttctaagcacctccgagaccgatccaagcaccttgggcgtttctcttccaattggtgagcgcctgtctgcaaaagagcgtttgaagttagagcggaataaggaatacaaccaatttttgcgagggaaggaggaatccagcgagaaatttagacaggtagagaagagtactgagcctaagagccagcgtaacaaaaagcctattggacaggtaaagcctgacctgaccagccagatccaaacctcttgcgaaaacagtgagggacccaggaaagacgtgctgacaccctcggaagcatacgaagagctgctcaatcagcgcaggcttgaagaggaccgctatagacagttggacgatgagatagaactgcgcaatcgccgaataattaagaaggccaacgaggaggtgggtatatccaacctgaagcaccagcgctttgcatctaaggctggcattcctgacagacgctttcatcgtttcaatgaggaccgcgtatttgacaggaggtaccaccgcccggatcaggatcctgaggtcagcgaagaaatggacgagagatttcgttacgaaagcgactttgacagacggctgtctcgagtctacactaacgacaggatgcacagaaataagcgcggcaacatgccacctatggagcacgacggtgatgtcatagagcagtctaacattaggatctccagcgcagaaaataaaagcgcccctgacaacgagactagcaagtccgcaaatcaggatacgtgttcgccattcgcgggcatgctcttcggtggggaggacagggagctgatccaacgccggaaggaaaaataccgactggagctgctggagcagatggctgaacagcaacggaacaaaagacgagagaaggacttggagctgcgcgtggcagcgagtggggcacaggatcccgagaagtctcccgacagacttaaacagtttagtgtggcacctcggcactttgaggagatgattcctccggagcgccctcgtatcgccttccagactccactgccccctctaagtgccccttccgtgccacctattccctctgtgcatcctgtgccttcacagaacgaggaccttcgttcaggtctgtcttctgctctaggagaaatggtgtctcctcgtatcgcccctctcccaccacctccactgttaccaccattggccacgaattacaggacgccttacgacgatgcttactatttctacgggtcaaggaacaccttcgacccctcccttgcctattacggctccgggatgatgggagtccaacccgccgcatatgtctctgctcctgttacacatcagctagcccaacccgtcgtgaatactgtgggccagaacgaactcaagatcacttcagaccaggtgattaattctggcttgatcttcgaagacaaaccgaaaccttcaaaacaaagcctgcagtcttaccaggaggccctccagcagcagattcgagagagggaggagcggagaaaaaaagagcgcgaagagaaagaagaatatgaggcgaaactggaggccgagatgaggacctataatccgtgggggaagggcggggggggggcacctctcagagatgccaaaggcaacttaattaccgatttgaatcggatgcaccgtcagaacatcgacgcttaccacaatcctgatgcacggacgtacgaggacaagcgtgccgtggtgtcgttagatccgaatctggcgacatctaacgcggaaaatctcgaggacgctgctaataaatcatcaggacatatgcaaacacagtcttcaccatttgcgcgagggaatgtgttcggcgagcctccaacagaactacagattaaacagcaggagctctataagaattttttgcgattccagatcgaggagaaaaaacagagagaggaggctgagcgtgagcggttgagaatcgctgaggaaaaggaagagcgacgcctagccgagcagcgcgctagaatccagcaggagtacgaagaagagcaagagaagaaaagggagaaggaggaggagcagagattgaagaatgaagaacacatcaggctagctgaggagaggcagaaggaggccgagcggaaaaaaaaagaagaagaagaaaagtacaacctgcagctccagcactattgtgagagggataacctgattggggaggaaaccaaacatatgcgacagccttccccaatcgtgcccgccctgcagaacaagatcgcatctaagctccagcgtccaccctcggtcgactccattattaggtcgttcatccatgagtccagtatgtcgagggctcagtccccgccagtgccagccagaaagaatcagctgagggctgaggaggaaaaaaaaaacgtgataatggaactctcagaaatgagaaagcaattgaggagcgaggagcggcgtctgcaggagaggctcttgcatatggacagcgatgatgaaatacctatccgcaagaaggagcggaatcctatggacatttttgacatggctcgacatcgtctgcaggcccctgtgcggcgacagagccccaaaggcctggatgccgccacattccaaaacgtacacgacttcaacgaattaaaagatagagacagcgaaacaagagtggatctcaagttcatgtatctggaccctccaagagatcaccatacactcgaaatccagcagcaggcactgcttcgcgaacagcagaagagacttaatagaatcaagatgcaagagggggctaaagttgatctcgatgcgatcccctccgcaaaggttcgagagcagaggatgcctcgggacgacacgtctgatttcctgaagaattccctactggaatcagattctgccttcatcggcgcttacggcgagacttatccggccattgaggatgacgtgctgccccccccttctcagctcccaagcgcgcgggagcgtagacgcaacaagtggaaagggctggacattgatagttctcgccctaacgtggcccccgatggcctgtctctgaagtccatatcttccgttaacgtcgatgagcttcgtgtcagaaacgaggagcgaatgaggcggctaaacgagtttcataataaaccaataaatacagatgacgagtcatccttggtggacccggacgatataatgaagcatatcggcgacgacggttccaactcagtcgccaccgaaccctggctaaggcctggcactagcgagacgctaaaaagattcatggccgagcagctcaatcaggagcaacagcagatccccggtaagccaggaaccttcacatggcagggcctttcgaccgcccatgggtag

SEQ ID NO: 111704 - DNA, 2631 bp, synthetic construct
  misc_feature 1..2631: note = Description of Artificial Sequence: Synthetic coding sequence
  source 1..2631: mol_type = other DNA
atggatgagcgatttaggtacgaatcggacttcgacaggagactgtcccgcgtatacacaaacgaccgcatgcaccggaacaaaaggggaaacatgcccccaatggagcatgatggcgacgtgattgaacagagcaatataaggatctcaagcgcggagaataaatccgcacccgacaatgagactagcaaatcagcaaatcaggacacatgcagtccgttcgcaggaatgctttttggcggagaggacagagaactgatccagcgccgtaaagagaagtaccgactcgaactgctggagcaaatggctgagcagcagcgtaataaacgtagggaaaaagatctcgaactgagagtagcggccagtggcgcccaggaccctgaaaaatccccggatcgcctgaagcagttttctgtggcaccacggcactttgaggagatgattccgccagagcgtccacggattgcctttcaaacccctctccctccactgtcagccccctccgtccctccaataccgagcgtgcaccccgttccctcccaaaacgaagatttgaggtcaggcctgagtagtgccttgggtgagatggtttccccaagaattgcacccttgccgccacctcctttattaccaccactcgccacaaattatcgcacaccctatgatgacgcttattatttctatggaagtaggaatacatttgaccccagtctcgcttactacggctccggcatgatgggcgtgcagcctgccgcctacgtttctgctcctgttacacaccagctcgcccaacccgtggtcaacactgtgggccagaacgaactgaagataacttctgaccaggtgatcaatagtggcctaatctttgaagacaagccaaagcctagcaagcagtctctgcagtcatatcaggaggctctccagcagcagataagggagcgcgaggagagacgaaagaaggaacgggaggaaaaggaggagtatgaggcgaagctggaagccgagatgcggacctataacccctgggggaagggcggaggcggtgccccactccgcgatgccaagggcaacctcatcagccacatgcaaacccagtccagccccttcgcaaggggcaacgtgtttggtgagccgcccactgaactgcaaataaagcagcaggaactgtacaagaactttctgcgcttccaaatagaggagaagaagcagcgagaggaagcagagagagaacgtctgcgcattgctgaggagaaagaagagagaagactggccgagcagcgcgcacgaattcagcaagaatacgaggaggaacaggagaagaagagggagaaggaggaggagcaacggttaaaaaatgaggagcacatacgactagccgaggagcgtcagaaggaagcagagcggaagaaaaaggaggaagaggaaaagtacaacctgcaactccagcattattgcgagcgcgataatctgatcggtgaagagactaagcatatgcgccagccgagccctatcgtgcccgccctgcaaaacaaaatcgccagcaaactgcagcggccaccaagcgtcgactcgattatccgatcctttatacacgaatcatctatgagtcgtgcacagagtccaccagtgcctgctcgaaagaaccagctgagagcagaggaagaaaaaaagaacgttattatggaactgtctgagatgcgcaagcagctgagaagcgaggaacgcagacttcaggagcggttgctccacatggacagcgacgatgaaattccgatccgtaagaaggagcgcaatcccatggacatctttgacatggctcgtcaccggctgcaagcccctgtcagaaggcaatcccccaagggattggatgcggccacatttcagaatgtgcatgattttaacgagctcaaagatcgagattctgagactagggtcgatctcaaattcatgtacctcgatccaccacgtgaccaccacaccttggagatacaacaacaagctttgcttcgcgagcaacaaaaaaggcttaacagaattaaaatgcaggaaggcgcaaaagttgatcttgacgcgattcccagcgcaaaggtacgcgaacagcgtatgccccgagatgacacctcagattttctcaaaaatagtctccttgagagtgacagtgccttcatcggggcatacggtgagacctatcccgccatagaagatgatgttctgccgccgccgtcccagctgccctccgccagggagaggcgccgcaacaaatggaaaggcttggacattgacagttctagaccaaatgtcgccccagatggcctgtcactgaagagcatctctagcgtcaatgtcgatgagctcagagtccggaatgaagagagaatgcgcagactgaatgaatttcacaacaaacccatcaatactgacgacgagtccagtctcgtcgaccccgacgacattatgaaacacatcggggatgacggctctaactcagtcgctacagagccctggctacggcccggcaccagcgagactctgaagcgcttcatggccgaacagttaaaccaagagcaacagcaaattcctggtaagcccgggacattcacctggcagggccttagcacagcgcacggatag

SEQ ID NO: 111705 - DNA, 2631 bp, synthetic construct
  misc_feature 1..2631: note = Description of Artificial Sequence: Synthetic coding sequence
  source 1..2631: mol_type = other DNA
atggatgagcggtttaggtacgagtccgatttcgatcgccgtttgagtcgtgtgtacacgaacgaccgaatgcaccgtaacaagcggggcaacatgccccctatggagcatgacggcgatgtcattgagcaatcaaacatccgtatctcatcagctgagaataaaagtgcccccgataatgaaacttccaagtctgctaatcaggacacctgttcccctttcgccggtatgctgtttggtggggaagaccgggagctcatccagcgcaggaaggaaaaatataggctcgaactgctggaacagatggcggagcagcagcgaaacaaacggcgcgagaaggaccttgagctgagggtggccgctagcggggcacaggatcctgagaagagcccagatcgactaaagcaatttagcgtggcgccccgacactttgaagagatgatccccccggaacggcctagaattgcatttcaaaccccgctcccccccctgagcgccccaagcgttccaccgattccatccgttcatccagtgccatctcagaacgaggatctccgatcaggtctcagctccgctttgggtgagatggtctctccaagaatcgcacccctgcccccacccccgttattgccaccgttagccactaattataggacgccctacgacgatgcttactatttttacggttctcggaacacctttgaccccagcctggcctactatgggtctggcatgatgggcgtccaacccgctgcatacgtctccgcaccagtgacgcatcagttagctcagccagtggtaaataccgtcggacagaatgagctcaagatcactagtgaccaggtgatcaatagcggattaatctttgaagacaaaccaaaaccatccaaacaaagccttcaatcgtatcaggaagctttacaacagcaaattagggagagggaagagagaaggaagaaggaacgcgaggagaaggaggagtatgaagcaaagttagaagcggagatgaggacctacaatccctggggaaaaggcggaggtggcgcaccccttcgggacgcaaaaggcaacctgatcagccacatgcagacccagtccagcccttttgcccgcgggaacgtgtttggagaacccccaaccgaactccagatcaagcagcaggagttgtacaagaactttctgcgattccagattgaggaaaagaagcagcgggaggaagcagaacgcgaacgcctccgaatagcggaggagaaggaagagagacgcctggctgagcagcgcgcacgaatccagcaagagtacgaggaggaacaagagaagaagcgggaaaaggaggaagaacaacggctgaaaaatgaggagcatattcggctagcggaggaacgacagaaggaggcagagcgcaagaaaaaggaggaagaggagaaatacaacctgcagctgcagcattactgtgaacgggacaacctgatcggcgaggaaaccaaacacatgaggcagccctctccgatcgtaccggctttgcagaataagatagcaagtaaactgcagagacccccttccgtggactcaatcatacggtcttttatccatgaaagctccatgtctcgtgcccagagtccacccgtgccagctcgtaaaaaccagttacgcgctgaggaggagaagaaaaacgtgattatggaactgtccgaaatgcggaaacagctgcgctctgaggagagaaggcttcaggagaggctgctgcacatggacagcgatgatgagatcccaatacgaaagaaggaacgaaaccccatggacatcttcgatatggcacgccaccgccttcaggcacccgttcgcagacaatcaccaaagggcctggacgcggctacattccagaacgtacatgacttcaatgaactgaaggatagagactcagaaaccagggtagacctaaaatttatgtacctggacccaccgcgggatcaccatactctcgagatccaacagcaggccctgttacgagagcagcagaagaggctcaatagaatcaagatgcaggaaggagccaaagtcgaccttgacgccatcccaagtgccaaggtgagagagcagaggatgcctagagacgacacttcagactttctaaagaatagcttactggagagcgacagcgcatttatcggagcttatggcgaaacatatcccgcgatcgaggacgacgtcctgcccccaccttcccagctgcctagcgcgcgcgagcgccgccgtaacaagtggaaggggctggatattgacagcagccggccaaatgtggcccccgatggactgagcctgaagagcatcagtagtgtgaacgtcgatgaactgcgggtgcgcaacgaggaaagaatgcggagactgaatgagttccataacaaaccgattaataccgacgacgaatcaagtctggtggaccccgatgatatcatgaaacatattggtgacgacggctctaattcagtcgcgactgaaccctggctgcggcccggtacctcagagacattaaaaaggtttatggccgaacagctgaaccaggaacagcaacagattcctggcaagcctggcacctttacatggcaggggctctccaccgcccatggctag

SEQ ID NO: 111706 - DNA, 1677 bp, synthetic construct
  misc_feature 1..1677: note = Description of Artificial Sequence: Synthetic coding sequence
  source 1..1677: mol_type = other DNA
atgccatggcggcggaggcgcaacagagtgagtgccctggaagggggaagagaggaggaggcacctcccgaagcagccgccgttccccccgccttactcactagcccacaacagaccgaggccgcagcggaaaggatactgctgagaggaattttcgaaattggccgagactcctgcgacgttgtccttagtgaacgagctctgcgatggcgacccattcaacccgaaagaccagctggtgattccaagtacgacctcttgtgcaaggaggaattcattgagctcaaagatatcttcagcgtgaaattgaagagacgctgctcagtcaaacagcaacgctctggcacactgctcggcatcacgctgttcatctgtttaaagaaagagcaaaataaactgaaaaatagcactttggatttgatcaacttgagcgaggatcactgtgatatatggttcagacaatttaagaaaatacttgcaggatttcctaaccgccctaagtctctaaaaattctattaaacccacaaagccataaaaaggaggccacccaggtgtactatgagaaggtggagcccttactgaaactagccgggataaagaccgacgtcactataatggaatatgaggggcacgcactctccttactgaaagagtgcgaactgcagggcttcgatgggggacaccgcaagcctctgttcgcgatacattggtctgttcagcggttattcacaggaatgcagaccctggagcccagcgtcgtgtgcgtcggaggcgacggttccgcctccgaagtggcacatgccctcctgttgcgcgctcagaagaacgctggaatggaaacagacagaattctcaccccagtccgggcccagctccccctcggtcttatccccgcaggcagcactaacgttctagcacattccctgcacggggtgccccacgtcatcactgccaccttgcacataatcatgggccacgtacagcttgtggacgtgtgcaccttcagtactgctggcaagctgctccgttttggcttcagcgcgatgtttggcttcgggggccgcaccctagccctggcggagaaatataggtggatgagccctaatcaacgccgggattttgccgtcgtgaaggcgctggcaaaactgaaagccgaggactgtgagatcagcttcctgccttttaattctagtgacgacgtgcaggaaagacgagcccaagggagtccgaaatccgattgtaatgaccagtggcaaatgatacagggacagttccttaacgtgagcattatggcaatcccttgtctttgtagcgtcgctccccgggggttggcgcccaacactaggctgaacaatggctccatggctctgatcatagctcggaacacctctcgtcccgaattcattaaacatctcaaacgctacgcgagcgttaagaatcaattcaatttcccatttgtggaaacctacaccgtggaggaagtcaaggtgcacccccgcaataatacgggaggctataacccagaggaggaggaggacgaaaccgccagcgagaattgttttccttggaacgtagacggcgacttgatggaggtggcttctgaggtgcatattagacttcaccctcggctgatttcgttatacggtggatccatggaagaaatgattccaaagtag

SEQ ID NO: 111707 - DNA, 1260 bp, synthetic construct
  misc_feature 1..1260: note = Description of Artificial Sequence: Synthetic coding sequence
  source 1..1260: mol_type = other DNA
atgccctggcgtcggaggcggaatagagtctctgcgttggagggtgggagagaagaggaggctccccctgaggcagcagcagtcccacctgcactgcttacctcaccccagcagacagaagccgccgcagagcggattctgttaagggggatcttcgaaatcgggcgagacagttgtgatgtcgtcctgtcggaacgggcccttcggtggagacccattcagccggaacgccctgccggcgactccaagtacgacctgctttgcaaagaggagttcattgaactgaaggacatcttctcagtgaagctaaagcgcagatgctctgtgaaacagcagaggagcggcacgttgctcgggattactctgtttatttgcctgaaaaaggaacagaacaagctgaagaacagtactctcgaccttatcaacttatctgaggaccattgtgatatctggtttcgccagtttaaaaagatattggcgggatctacaaacgtactagcccactcgctgcatggggtacctcacgttattaccgccacactccacataatcatggggcatgtgcaacttgttgatgtgtgcacgttttcaaccgccggcaagttgttgagattcggttttagcgctatgttcggttttgggggacggacactcgctctggccgaaaagtaccggtggatgtcccccaaccagcgacgcgactttgccgttgtcaaagctttggctaagctgaaagccgaggattgcgagatatcattcctgcccttcaatagtagcgatgacgtgcaggagaggcgtgcccaaggatccccgaagtcggactgtaacgatcagtggcaaatgatccagggccaattcctgaacgtgtccatcatggccatcccttgtctgtgttccgtggccccacgaggactcgccccaaatacaaggttgaacaatggcagcatggccctgatcattgcgaggaatacctcacgcccagagtttatcaaacatcttaagcgctacgcgagcgtgaaaaaccaattcaacttcccgttcgtggaaacctacacggttgaggaggtgaaggttcatccccgcaataataccggcgggtacaatccagaggaggaggaagatgagacagccagcgaaaattgctttccatggaacgtcgatggcgaccttatggaagtcgcttccgaagtccacatacgactccatcctcggctaatcagcttgtatgggggctcgatggaagagatgatcccaaagtag

SEQ ID NO: 111708 - DNA, 1392 bp, synthetic construct
  misc_feature 1..1392: note = Description of Artificial Sequence: Synthetic coding sequence
  source 1..1392: mol_type = other DNA
atgccctggcgcagacggagaaacagagtgagcgccctggagggtggacgggaagaagaggctcccccggaggccgccgcagttcctcccgcgcttttgaccagccctcagcaaactgaagccgcagccgagagaattctgttgagaggcatttttgaaatcggtcgcgactcctgtgatgtcgtcctcagtgagagagccttgagatggaggcccatacagcctgaacgcccagctggcgactccaaatatgaccttctctgcaaagaagagtttatcgaattgaaagacatcttctcagtgaaactgaaaaggaggtgcagtgtgaaacagcagcgtagcggcacgctgctagggatcactctcttcatatgcttgaaaaaggaacagaacaaactcaaaaacagtacactcgatctgatcaacctgtcggaagatcattgtgatatttggttccgccagttcaaaaaaatcttggccggctttccaaaccgccccaaatccctgaagatcctacttaacccccagtcccacaagaaggaagcgacacaggtgtactacgagaaggtggagcccctcttgaagctggcgggcattaaaacagatgtcacgcgcagcactaatgtgctggcccatagcttgcatggcgttccccacgtgataactgccacacttcacattattatgggccacgtacaactggtcgatgtgtgcacattcagcaccgcagggaagttgttaaggtttggctttagtgccatgtttgggttcggagggcgcacactggcccttgccgagaaataccgttggatgtctcccaaccagaggcgcgacttcgctgtcgtcaaggcgctggcaaaactcaaggctgaggattgcgagatttccttcctgccattcaattcgtctgacgacgtgcaggagcgtcgtgctcaggggtctccaaaaagcgattgcaacgaccagtggcaaatgatccagggccaatttctgaacgtcagtatcatggccatcccgtgtctttgttctgtcgcaccgcgaggcctcgcacctaacacaagacttaacaacgggtctatggcattaataatcgcccggaataccagtcgtccagaattcattaagcacctgaagaggtatgccagcgtgaagaatcaatttaattttccgtttgtcgaaacttacacggtcgaggaggttaaagttcacccacgaaacaacacaggagggtacaatccagaagaggaagaggatgagaccgcctccgaaaattgcttcccatggaatgtggacggggatcttatggaagtcgccagcgaggtgcacatcaggctgcacccccggctgatttccctttatggtgggtccatggaggaaatgatcccaaaatag

SEQ ID NO: 111709 - DNA, 1599 bp, synthetic construct
  misc_feature 1..1599: note = Description of Artificial Sequence: Synthetic coding sequence
  source 1..1599: mol_type = other DNA
atgccttggcgacggagacgtaatcgagtgagcgctctagagggcgggagagaggaggaagcacctcccgaggccgcagctgttccgcccgccctgcttacaagtccacagcagacagaagcagctgcagaacgcattctgcttcgggggatctttgaaatcgggcgcgattcttgcgatgtggttctctctgagcgcgcactgcgctggagacccatccaacctgagcgccctgcgggcgacagcaagtatgacttgctttgcaaggaagagttcatcgagttaaaggatatcttctccgttaagcttaagaggaggtgctctgtgaaacagcagcgatcaggcacgctgctcggtattacactattcatttgcctgaagaaagaacagaacaagctgaagaattctacgttggatttgataaacttgagcgaggaccattgcgatatatggtttagacagtttaagaagattctcgcaggctttcccaatcgaccaaagtcgttgaagattttgctgaaccctcaatcccacaagaaagaagcaacacaagtgtactacgaaaaggtcgagccactgcttaaacttgcagggatcaagaccgacgtgaccatcatggaatatgagggtcacgccctgagcctgctgaaagagtgtgagttgcagggctttgatggtgttgtgtgtgttgggggcgatgggagtgcttcagaggtggcccatgccctcctgttgcgggcccaaaaaaacgctggaatggagaccgacaggattctgacccccgtccgtgcacagctgcccctgggcctgatcccagcaggctctacgaatgttctggcacatagcctgcatggcgtaccccatgtcatcacagcgactctgcacatcatcatgggtcacgtgcaactggtggatgtttgcactttcagtacagctggcaagcttcttaggtttggtttttccgctatgtttggcttcggcggccggaccctcgctcttgctgagaaatacagatggatgtctccgaatcagagacgggattttgcagtggttaaagccctggcaaaactcaaggctgaggattgcgaaatatccttcttaccctttaacagcagcgacgatgtacaagagagaagggctcagggttcacccaagagtgactgcaacgaccagtggcagatgatacagggacagtttttgaacgtgagtataatggccattccctgtctgtgtagtgtcgcaccacggggcctggctcctaataccagacttaacaatgggagcatggcgctgatcatcgctcggaataccagtcgtcccgagttcatcaaacatcttaaacgctacgcatcagtaaaaaatcagtttaatttccccttcgtcgagacttatacagtcgaagaagtcaaggtgcaccctaggaataatacagggggctacaaccctgaggaagaagaggatgaaacggcctccgagaactgcttcccatggaatgtggatggcgatctgatggaagtggccagcgaagttcacataagattacaccctagacttatatccctgtatggggggtcaatggaagaaatgattccaaaatag

SEQ ID NO: 111710 - DNA, 1545 bp, synthetic construct
  misc_feature 1..1545: note = Description of Artificial Sequence: Synthetic coding sequence
  source 1..1545: mol_type = other DNA
atgccttggcggcgtcgccgcaatagggtttccgctcttgaggggggcagagaagaagaggccccccccgaggccgctgcggtccctcccgctcttttgacctctccccaacaaactgaggctgccgccgaaaggatacttcttagggggatatttgaaattggccgtgattcatgcgatgtcgtgctgtccgagagagctttgcgctggaggcctatccagcccgaacgcccggccggagattccaaatacgaccttctgtgtaaggaggagttcattgaactgaaagacatcttttccgttaagctcaaacggaggtgttctgtcaaacagcagcgaagcggcaccctcctgggcatcaccttgttcatttgccttaaaaaggaacagaataagctgaaaaactcgactctggacttgattaacctctccgaagatcattgcgacatttggttccggcagtttaagaaaatcttggccgtcatggagtacgaagggcacgccctgagcctgctgaaagaatgcgagctgcaaggattcgatgggggtcatagaaagcctctgttcgcaattcactggagcgtgcagcgattgttcaccggcatgcagactctagaacctagcgtggtgtgtgtagggggagacggtagtgcgagcgaggtggcccatgctctcctgttgagagctcagaagaacgctggaatggaaaccgatcgaattctgacccccgtgcgcgctcagctgcctctggggctcatcccggccggaagcactaatgtgctagctcattccctccatggggtgccacatgtcattacagcgactctccatataattatggggcatgtgcagcttgtggatgtttgcaccttttctacagccgggaagctgctgcgttttgggttctccgctatgttcggatttggaggccgcaccctggccctggccgagaagtaccgttggatgtctcctaaccaacgtcgcgattttgcggtcgtgaaagctctggccaaactgaaggcggaggattgtgaaattagctttctgcctttcaactcgtctgacgatgtccaggagcgcagggcacagggcagtcctaagagtgactgcaatgatcaatggcaaatgattcaggggcagttcctgaatgtgtccattatggccataccgtgcctgtgctctgtggccccccgcggcctggccccaaacacacgcctgaataatggcagcatggcattgattatcgcccggaatacttcgcgaccagaattcattaagcaccttaaacggtatgcatcggtaaagaatcaatttaatttccccttcgtggaaacatataccgtggaggaagtgaaagttcacccacggaacaatacaggcggatacaatccagaggaggaagaggatgaaaccgcatcagaaaactgcttcccatggaatgtggacggcgatctaatggaggtggccagcgaggttcatatccgtctgcacccccggctcattagcctgtacggagggtcaatggaggaaatgattccaaagtag

SEQ ID NO: 111711 - DNA, 804 bp, synthetic construct
  misc_feature 1..804: note = Description of Artificial Sequence: Synthetic coding sequence
  source 1..804: mol_type = other DNA
atgcacctgttgctgttccagctcctcgtgctgctccctctgggcaagacaacccgtcaccaggacgggagacagaaccagagctcactgagcccagtgctgcttcccagaaaccagcgagagctgccaactgggaatcacgaggaggcagaagagaagcctgatctgttcgtagcggtcccacacttagttgccacatccccggccggagaaggacaacgtcaaagagaaaaaatgctgtcccgttttggcaggttctggaagaaacccgaacgagagatgcacccgtcgagggacagtgactctgagccctttccacccggaacccagtctttgatccagcccatcgacggtatgaagatggagaagagccctctacgcgaggaggcaaaaaaattctggcatcacttcatgttcaggaagaccccagcgagccagggtgtcatcctacccattaagtcccacgaggttcactgggaaacctgtaggacggtacccttctcccagacaatcacccacgaagggtgtgaaaaggtcgtggtgcagaacaacctgtgtttcggcaagtgtggctcggtccacttccccggtgctgcacagcacagccacacttcctgttcccactgcttacccgcgaaatttacaacgatgcatcttcctctgaactgtaccgagctgagttctgtgatcaaggtggtgatgctggtggaggagtgtcagtgcaaggtgaaaacagaacatgaagacgggcatatcctacacgctggctcacaggactcctttatccccggcgtgtccgcatag

SEQ ID NO: 111712 - DNA, 789 bp, synthetic construct
  misc_feature 1..789: note = Description of Artificial Sequence: Synthetic coding sequence
  source 1..789: mol_type = other DNA
atggcatggcttgaagatgtcgactttcttgaagatgtccctctgctcgaggacatcccactcctcgaagacgtgccactgcttgaagatgtcccattactagaggatacatctaggctggaggacataaacttgatggaggatatggccctgctcgaggatgtggacctactggaggacacagactttctcgaggatcttgacttctcggaagccatggacctgcgagaagataaagatttcttagaagacatggattcacttgaagacatggctttgctggaagatgttgacctgttagaagacactgactttctggaggatcctgacttcctcgaggccattgacctgagagaggataaagatttcctcgaagacatggatagcttggaggatctcgaggccatcggccggtgtggcttctctggcagacatggattttttgggcggcgccgcttctcagggagaccaaagttatcaggaagacttgggctactaggtaggagaggattttccggccgcctgggaggatattggaaaacctggatattctggaagacttggattttttggaaaacttggatcttccggaagacttatattgggtggaaaacatggatatttagcgggcggtgcggccttaccggccgacctggctttggaggtcgtaggagattcttttggaaaacactaaccgattggaagacatggatttccttctggaaaacattaatagactggaaaacttggatctctttttggaagacactgattgattggaaaatatag

SEQ ID NO: 111713 - DNA, 1365 bp, synthetic construct
  misc_feature 1..1365: note = Description of Artificial Sequence: Synthetic coding sequence
  source 1..1365: mol_type = other DNA
atgctggctgagaatcttgtggaggagtttgaaatgaaagaggacgagccctggtacgatcaccaggacttgcagcaggacctgcagctggccgccgagctgggcaagacactcttagatcgcaatacggaactggaggacagtgtccagcaaatgtataccaccaatcaagaacaactacaggagatcgaatacctgacgaagcaggttgaattgctgagacagatgaatgagcagcacgcgaaagtgtatgaacagctggacgtgacagcccgagaactagaggaaacaaatcagaagcttgttgccgactccaaggcctctcaacagaaaatcttgtccctaaccgagaccattgagtgcctccagacaaacatcgaccacctgcaatcacaggtcgaagaactcaagtcgtctggacaggggagacgttcacctgggaaatgcgatcaggagaagcctgctccctcattcgcatgtctcaaggagctgtatgatttaaggcagcatttcgtttacgatcacgtcttcgcagaaaagataacttcgcttcaaggacagccctcacccgacgaggaggaaaatgaacacctcaaaaaaacagtgactatgctccaagcgcagttgagcctggaacgccagaaaagagtgacaatggaggaggagtacggccttgtgctcaaggaaaattccgagctagagcaacaattgggggctaccggcgcctaccgcgctcgggccttggaactggaggctgaagtggccgaaatgagacagatgttgcaaagcgaacatccatttgtgaatggggtcgaaaagctcgtgcccgactccctttatgtgccattcaaggaacctagccagagcttgctcgaagagatgttcctcacggtgcccgagagccaccgtaagccactcaaacggagttcctctgaaaccatattatcttccttggccggttctgacatcgttaaaggccacgaagaaacatgtattcgacgagctaaggcagtaaagcagcgtggtatcagtttgttgcacgaggtggatacacagtatagtgcactgaaggtaaaatacgaggagcttctgaaaaaatgccaagaagagcaggacagtctgagccacaaggccgtccaaacctccagagccgcagccaaagacctgaccggcgtcaatgcacagtccgagcccgtggccagcggctgggaacttgcctcagtcaatcctgaaccagtgtcctctcccacaacaccaccagagtacaaggcgctcttcaaggagatcttctcgtgcattaagaagacaaaacaggagatagacgagcagaggaccaaataccgctctctatcctcccacagctag

SEQ ID NO: 111714 - DNA, 618 bp, synthetic construct
  misc_feature 1..618: note = Description of Artificial Sequence: Synthetic coding sequence
  source 1..618: mol_type = other DNA
atgctcggggccaagcctcattggctccctggccccctgcacagtccgggtctacccctcgtcctggtccttctggccctgggtgctgggtgggctcaggagggctcagagcccgtgctcctggaaggcgaatgcctcgtggtatgcgaacccggaagagccgccgcaggtggtcccgggggcgccgccttaggcgaagcaccacccggtagagtggctttcgccgccgtgcggagccaccaccacgaaccggccggcgagaccggcaacgggacatcaggggccatatacttcgaccaagtattagtcaatgagggaggcgggtttgacagggcctcaggtagtttcgttgcccccgtgcggggcgtatacagctttaggttccacgtggtgaaggtctacaatcgacagaccgtgcaagtgagtttaatgctgaacacctggcccgtgatctcagcctttgctaatgatccagacgttactcgagaggccgcaacatcatccgtgctgctgccacttgaccccggtgacagggtcagcctgcggctgaggcgcgggaacctcctggggggctggaaatacagctccttttccggattcttgatcttccctctgtag

SEQ ID NO: 111715 - DNA, 990 bp, synthetic construct
  misc_feature 1..990: note = Description of Artificial Sequence: Synthetic coding sequence
  source 1..990: mol_type = other DNA
atgatccttatgaaaatgggcttcagcggcattgtggtgcaccaggaatcggtgtgcgctacttatggttctggattgtcgtctacctgcatcgtcgacgttggtgatcagaagacatccgtctgctgcgtggaagacggagtctcacacaggaataccaggatcttcagctggaatcaggacatctcagggctgcaagaccatgaatttcagattcgccatccagacagtccagccctgctctaccagtttaggctgggagacgagaaactgcaggctcccatggctctgttctatccagcgactttcggcatcgtgggccaaaaaatgactaccctgcaacatcggtcccaaggagaccccgaagatccccacgatgagcattacttattggccacacagtctaaacaggagcaaagtgccaaagccaccgccgatagaaagagcgcgagcaagccaataggattcgagggagacctgaggggacagtcaagcgatctccccgagcggcttcactcccaagaggtggacttaggctccgcacagggtgatggcctgatggcgggtaacgacagtgaggaggcattgaccgctctgatgtctaggaaaactgccatctcgctctttgaggggaaggcgctggggctggataaggctattcttcacagcatcgattgttgttctagcgacgacacaaagaaaaagatgtactcatccatcctcgtagtgggaggcggacttatgttccataaggcccaggagtttcttcagcatagaattctgaataagatgccgccttcattcaggcgaatcattgaaaatgtcgacgtgataactcgacccaaagatatggacccaagactcatcgcctggaagggcggcgccgtcctggcttgcctggacacgacgcaggagctgtggatatatcaacgagaatggcagcgttttggcgtgaggatgctccgagaacgggcagctttcgtttggtag

SEQ ID NO: 111716 - DNA, 1131 bp, synthetic construct
  misc_feature 1..1131: note = Description of Artificial Sequence: Synthetic coding sequence
  source 1..1131: mol_type = other DNA
atggaggagttccacggacgcacactgcatgacgatgatagctgtcaagtgattccggtgctcccgcaggtcatgatgatactgattccaggacagaccctgcctctgcagctgttccacccgcaggaggtctctatggtgagaaacctgatacagaaagaccggacatttgccgtgctcgcatactctaatgtgcaagaaagggaggcacaattcggaactacagcggagatatatgcctacagagaagagcaagattttggtatagagatagttaaagttaaagcgattggaaggcaacgcttcaaggtccttgaactcaggacacagagtgatggaatacagcaggcaaaagtgcagatcctgccagagtgcgttttaccaagtaccatgtccgccgttcaactcgaatctcttaacaagtgtcaaatttttccctccaaaccagtaagccgtgaggaccagtgttcatacaagtggtggcaaaagtaccagaaaaggaaatttcactgcgcgaacctcacaagttggccccgctggctgtatagcctctatgacgccgaaacattaatggacagaattaagaagcagctccgcgagtgggatgaaaacctcaaagacgactcccttccttccaacttctcctatcgcgtcgccgcatgcctaccaatagacgatgtgcttagaatccagctgctcaaaattggcagtgccattcagcggctccgctgcgagttggatatcatgaacaagtgcacaagtctgtgctgtaagcagtgtcaggagacagagattacaaccaagaacgagattttctcactcagtctctgcgggcccatggccgcgtacgttaacccacacggctatgtccacgaaacccttaccgtctacaaagcctgcaacctaaacctgataggcaggccttccacagagcatagctggtttccgggctacgcttggaccgtggcccaatgcaagatctgcgccagccacatcgggtggaagttcactgccaccaagaaagacatgtcaccacagaaattttgggggctgactaggtcagccctgctccctacgatcccagatacggaagatgagatatcacctgataaggtcatactgtgcctgtag

SEQ ID NO: 111717 - DNA, 1326 bp, synthetic construct
  misc_feature 1..1326: note = Description of Artificial Sequence: Synthetic coding sequence
  source 1..1326: mol_type = other DNA
atggctggagagggtgaccagcaggacgcagcccataacatgggcaaccacttgcccctcttacctgaaagcgaggaagaggacgagatggaagtggaagatcaggactctaaggaggctaagaaacccaacattatcaacttcgacactagcttgcccacttcccatacttacctcggcgcagatatggaggagtttcacgggcgcaccttgcatgatgacgattcgtgccaggtcattcctgtgttaccacaggtgatgatgattctgatccccgggcaaaccctgcccctacaactcttccacccccaggaggttagcatggtccggaacctgatccagaaggaccggacctttgctgtgctggcgtatagtaacgtacaagagagggaggcccagtttggaacgactgctgagatatacgcatatcgtgaggaacaagattttgggattgagattgtgaaggtcaaagctataggaaggcagcgcttcaaagtgttagagctgagaacccagtcagatgggattcagcaagccaaagtgcagatcctgcctgagtgtgtcctaccaagcactatgagcgcggtccagctggagagtcttaacaagtgtcaaattttcccctctaaacctgtgagtagggaggatcagtgctcatataagtggtggcagaaatatcagaagagaaagtttcactgtgccaacttaactagctggccccggtggctgtacagtctttacgacgctgaaacgcttatggatagaatcaaaaaacagctgagagagtgggacgagaacctgaaggacgatagcttacccagcaaccctatagacttttcctatcgtgtggccgcctgcctgccaattgatgatgtcctgcgcatacagcttctgaagatcggatctgccatccagcggctgagatgcgagctggatatcatgaacaaatgtacttccttatgctgtaagcagtgccaggagacagaaatcactacaaagaatgagattttctcacttagcctgtgcggtccgatggctgcttacgttaatccacacgggtatgtccacgagacccttaccgtatacaaagcctgcaatttgaaccttatcgggcgcccttcaaccgagcactcgtggttccctggttatgcttggaccgtggctcaatgtaaaatctgcgcctcccatatagggtggaaattcaccgcaactaagaaagatatgtccccccagaagttttggggtctgactcgatccgcactccttccgacgatccccgatacagaggacgagatctcacccgacaaggttattctttgtctatag

SEQ ID NO: 111718 - DNA, 1335 bp, synthetic construct
  misc_feature 1..1335: note = Description of Artificial Sequence: Synthetic coding sequence
  source 1..1335: mol_type = other DNA
atggaggaagaagggaagaagggcaaaaaacccgggattgtaagcccattcaaacgcgtttttcttaaaggcgagaagtcccgggataagaaggctcacgagaaggtcacagagagaaggccactacatacagtagtccttagcctccctgaacgcgtggagccagatagactgctgagtgactacatcgagaaggaagtaaagtaccttggccaactaaccagtatcccagggtacctgaatccttccagtcggaccgaaatccttcacttcattgataacgcaaaaagagcccaccaactgccgggacatctcacccaggagcacgatgccgtcctgtcactgtcggcctacaacgtgaaacttgcctggagagatggtgaggacatcatactgagggtccccatccacgacatcgctgctgtgtcctatgtcagggacgatgctgcccacctggtggtactgaagaccgcacaggatcctgggatcagcccatcccaatcactgtgcgccgagagcagccgtggactgtctgctggtagtctgtccgagagcgctgtgggcccagtcgaagcctgttgcctggtcattctggcagcagagtccaaggtggcagcagaggaactctgttgtctgctgggacaggtgttccaggtggtgtataccgaatccacaattgacttccttgaccgcgcaatctttgatggcgctagcacccctacacatcacctatccttacactcggatgacagctcgacaaaggtggatattaaggaaacatatgaagttgaggcaagtaccttttgctttcccgagtctgtagacgttgggggtgctagcccccatagcaaaaccatttcagaaagcgagctgagcgcatcagcaaccgagctcctccaggattatatgctcacactccgaaccaaactatctagtcaggagattcagcaattcgccgccctactccatgagtatcggaacggagcctccatccacgaattctgcatcaacttgcggcagttatacggcgattcccgcaaatttttactgctgggattaagacccttcatccccgaaaaggacagtcagcactttgaaaactttttggagactatcggggtcaaagacggaaggggaatcattactgattccttcggcagacatcgcagagcattaagtactaccagttctagcacaacaaacggcaaccgagctactggttcctctgatgaccggtccgccccatccgaaggggacgagtgggatcggatgattagtgacattagttcagatatcgaggccctcggttgcagcatggaccaggattctgcctag

SEQ ID NO: 111719 - DNA, 1398 bp, synthetic construct
  misc_feature 1..1398: note = Description of Artificial Sequence: Synthetic coding sequence
  source 1..1398: mol_type = other DNA
atgcacagctcctgtaggcagcggagaaatcaaaatctctcaaaagagatcccccagacggagtttcacactggttattctatggagaacgagcccggcattgtgtctccattcaagcgggtgtttcttaagggggaaaagtcccgcgataagaaagcccatgagaaggtaactgaaagaaggccactgcacacagtcgtgcttagcctccccgagcgggttgagccagaccggctactgtccgactacattgagaaggaggtaaaatatctggggcaactcacaagcataccgggctacttgaacccctcatctcggaccgaaatcctccactttattgacaatgccaaaagggcccaccaactgcccggacatctaacacaggaacatgatgccgtgctgagcctttccgcatacaacgttaaactggcatggcgggatggggaagacatcattttgcgagtccctatccacgacattgccgccgtctcatatgtccgtgatgacgctgcccacctagtggtcctaaagactgctcaagatcctgggatctccccaagtcagagtctgtgtgctgaatccagccgcggactgtctgcgggctcactgagtgagagtgccgttggtccggtggaggcatgttgcctcgtcatattagccgcggaatctaaggtcgccgctgaagaactctgctgcctccttggacaggtctttcaggtggtgtatacggaaagtactatcgatttcctggacagggcgatctttgacggcgcttcaacacccacgcaccacttatctctacatagtgatgacagcagtactaaggttgatattaaagagacctacgaggtcgaggcttcaaccttctgcttccccgaatccgtagatgttggaggcgcgtctcctcactcaaagaccatctctgaatctgaactctcggcctcagcaaccgagttactccaagactatatgctcacgttaagaacaaagctgagcagtcaggagatccagcagtttgccgcactgctgcacgagtataggaatggtgcatccatacatgaattttgtataaatctccgccagctctacggcgattcacggaagtttctgctgctgggcctacggccttttataccagagaaagacagtcaacatttcgagaattttctggagaccattggggtgaaggacggaagggggatcataaccgatagctttggcagacacaggcgggccctgtcaactaccagtagttctacaacaaatgggaaccgcgctaccggctcaagcgatgatagatctgcccctagcgagggagacgagtgggaccggatgatctccgacatatcttctgatatcgaagcactgggctgttccatggaccaggactctgcttag

SEQ ID NO: 111720 - DNA, 1317 bp, synthetic construct
  misc_feature 1..1317: note = Description of Artificial Sequence: Synthetic coding sequence
  source 1..1317: mol_type = other DNA
atggaaaatgaacccgggatcgtgtccccgttcaagagggttttcctgaagggagaaaagtccagagacaaaaaggcccatgagaaagtgaccgagcgacgccccctgcatactgtggtactctcattgcctgagcgcgtggagcccgaccggttgctgtcagattatatagagaaagaggtcaagtacctcggacagctcacctcaattccggggtacctgaatcctagctccaggaccgagatcctccatttcattgataatgccaaacgggcacatcaactcccaggtcacttgacccaagaacatgacgccgtcctgagtttatcagcttataatgttaagttggcttggagagacggggaggatatcatactaagggtcccaattcatgacatagcagccgtgagctacgtgagggatgacgcagctcacctcgtggtgttgaaaacagctcaggacccaggcatcagccccagtcagtctctgtgtgccgagagttcccggggtctttccgccggctcccttagtgagtctgccgtgggtcccgtggaagcctgctgcctggtgatacttgcagccgagtctaaagtagccgcagaggagctatgctgtttactaggtcaagtgtttcaggttgtgtacactgagtctacgatagatttcctggaccgggcgatctttgatggtgccagtacgccaacccaccacctgagcctccatagcgacgactctagcaccaaagtagacattaaggagacatatgaggttgaagcatcaaccttctgttttcctgagagcgtggacgtgggcggcgcaagccctcacagtaagactattagcgagtctgaactgtccgccagtgccacagagctgctacaggactatatgctgactctaaggacgaagcttagcagtcaagaaatacagcagttcgcggcactgctacatgaatacagaaatggtgcaagcatccacgaattttgcatcaatctgagacaactgtacggagatagtaggaagttcttactgctcgggttgagacctttcatccccgagaaggattcccaacactttgaaaactttctagagacaattggcgtaaaggatgggagaggcattattacggattctttcgggcgccaccggcgcgccttgtcaactacttcaagctctaccactaacggaaaccgcgctacagggtctagcgacgatcgcagcgccccgtcggagggtgacgaatgggacaggatgatctcggacatttcaagtgacattgaggctctcggctgctcaatggaccaagatagcgcttag

SEQ ID NO: 111721 - DNA, 1161 bp, synthetic construct
  misc_feature 1..1161: note = Description of Artificial Sequence: Synthetic coding sequence
  source 1..1161: mol_type = other DNA
atggaagaggagggcaaaaaagggaaaaagtacctaggccagctgacatcaattccgggctacttgaatccctcctcgcgaaccgagatactgcacttcattgataacgccaagcgcgcccatcagctgccaggccacctgacacaagaacacgacgccgttctgtcattgtccgcgtataatgttaaactggcctggagagatggcgaagacataatcctccgcgtcccgattcatgacattgctgccgtgagctacgttagggatgacgcagctcacctggtggtcttgaagacggcccaggaccccggcatttcacccagtcagtccctctgcgctgaaagctcaagggggcttagcgcaggttccctgagcgaatcggcagtgggcccagtggaggcatgttgcctagtgatccttgccgccgagtccaaagtggccgccgaggagctttgctgcctgcttggtcaggttttccaggtggtctataccgaatcaaccatcgactttcttgatcgcgccatctttgacggggctagcacccccacccaccacctatcactccactctgatgactcaagtacaaaagtggatattaaagagacttatgaagtggaggcctcaacattttgcttccccgagtcagtggacgtgggcggtgccagtccacatagcaagacgatcagcgaatctgagctgagcgcatcggcaacagagctcctgcaggactatatgctgactttgagaacaaagttgagctcccaagaaatccaacaattcgccgctctgctccacgaatataggaacggcgcgtcgatccatgagttctgtataaacctgagacagttgtatggcgacagcagaaaatttctgcttctgggccttaggccgtttatcccagagaaggattcccagcattttgaaaacttcctagagacaattggagtcaaggacggcagaggtattattacggatagcttcggtcgtcatagacgggctctctctacaacatcgtcctccacaacaaacggcaatcgcgctacgggttcaagtgacgaccggtccgctccgtctgaaggtgacgagtgggaccgaatgatctctgacatctcgtctgacatcgaagcactgggatgttctatggaccaggactctgcttag

SEQ ID NO: 111722 - DNA, 216 bp, synthetic construct
  misc_feature 1..216: note = Description of Artificial Sequence: Synthetic coding sequence
  source 1..216: mol_type = other DNA
atggaagaggagggcaagaaaggcaaaaagcctggcatcgtgagtccctttaaacgcgtgtttctcaagggagagaaaagtcgcgacaagaaggcccatgagaaggtaaccgaacgcaggcctctgcacactgtggttcttagcctgccggagcgcgtggaaccagatcgactgctgagtgattacatcgaaaaggaggtgaaaggcagccactag

SEQ ID NO: 111723 - DNA, 1062 bp, synthetic construct
  misc_feature 1..1062: note = Description of Artificial Sequence: Synthetic coding sequence
  source 1..1062: mol_type = other DNA
atggaagaggagggaaagaagggtaaaaaaccaggcattgtttcaccatttaaaagggtcttccttaagggagagaagagtagggacaaaaaagcacatgaaaaggtcacggagagacggcccctccacaccgttgtcctctcacttcctgagagggtggaacccgatcgattacttagcgactacattgaaaaagaagtgaagtatctaggccagctcaccagcattcctggctatctcaatcctagctcccggacggagatcctgcattttattgacaatgcaaagcgggcccatcagttacccggccacttgacacaagagcacgacgcagtcctctccttgagcgcctacaacgtgaaactggcatggcgcgacggtgaggatattattctgcgcgtgcctattcatgacattgccgccgtgtcttacgtgcgcgatgacgctgcccacctggtcgtgctcaaaactgatgattcctcaaccaaggtggacatcaaagaaacctacgaggtcgaggcttcaactttttgctttcccgaatccgtggacgtggggggggcctcaccacatagtaagaccatctccgagtctgaactctccgccagtgccactgagctgttacaggattatatgctcacgctgcgtaccaagctgtcatcacaggagatccagcagtttgccgccctgctgcatgagtaccgtaatggagccagcattcacgaattctgtattaacctcagacagttgtacggtgacagccgcaagtttctgttactgggactacgtccatttatccctgaaaaggactcacagcattttgaaaacttcctcgaaacaattggggtgaaagatggcaggggcattatcacagattcgtttggccgccacagacgagcccttagcacgactagctcctctacaaccaatggaaatagggctaccggaagcagtgacgacaggtctgctccctcagaaggggatgagtgggaccgcatgattagcgacataagcagtgacattgaagccctgggttgttcgatggaccaagacagcgcatag

SEQ ID NO: 111724 - DNA, 1224 bp, synthetic construct
  misc_feature 1..1224: note = Description of Artificial Sequence: Synthetic coding sequence
  source 1..1224: mol_type = other DNA
atgcggaggaatctgaggctgggcccctcctctggagccgacgcacaaggacagggcgcccccagacctggactggctgcgccacgtatgctgctcccccccgcgtctcaggcatcccgcggtagtggatcaactgggtgtagcctcatggcccaggaagtcgacacagctcagggtgcggaaatgagacgaggagctggagccgcccggggcagggccagctggtgttgggcattggccctcctgtggctagccgttgtgcctggctggagtcgcgtgtccgggatcccctctcgacggcactggccagtgccctataaaagattcgacttccggcccaagcccgatccatattgccaggcaaagtacaccttctgccctactgggtcacccataccggtgatggagggagacgatgacattgaggtcttccgtctacaggcccccgtgtgggaatttaagtatggggacttgctcggacacctgaagatcatgcacgacgccattgggttcaggagcaccctaacaggtaagaattatacaatggaatggtatgagctgttccagttgggcaattgcactttcccacacttgagacccgaaatggacgctccattctggtgtaaccaaggggctgcctgttttttcgaggggattgatgacgtccactggaaggaaaatggcacactggttcaggtggcaactatcagcgggaatatgtttaaccagatggccaagtgggtaaagcaggacaatgaaaccggaatttattatgagacttggaacgtgaaggcatctcccgagaagggcgctgaaacctggtttgattcttacgactgcagtaagttcgtgctgcgcacttttaacaaactcgctgagttcggggccgaatttaaaaacattgagacgaactacacacgcatcttcctgtattctggagaaccaacctaccttggtaacgagacatctgtgtttgggccaacagggaataagaccctgggactcgctatcaaacggttctactatccttttaagccacacctccccactaaagagtttctcctcagcctcctgcagatcttcgacgccgtaatcgtgcacaagcagttctatctgttttacaattttgaatactggtttctgccaatgaaattcccttttatcaagataacgtacgaagaaattcctctcccaatcagaaacaagacactcagcggcttatag

SEQ ID NO: 111725 - DNA, 822 bp, synthetic construct
  misc_feature 1..822: note = Description of Artificial Sequence: Synthetic coding sequence
  source 1..822: mol_type = other DNA
atggagggcgacgatgacatcgaagtctttcgcttacaggcccccgtctgggaatttaagtacggggaccttctgggacatctgaaaattatgcatgatgctattggctttcggtccaccctcactgggaagaattatactatggagtggtatgagctgtttcagctcggaaactgcacttttccccacctgaggcccgaaatggacgcccctttctggtgtaatcaaggcgcagcatgcttcttcgagggtattgacgatgtacattggaaggagaacggaaccctggtgcaggttgctacaatctccggtaatatgttcaatcagatggcgaaatgggtgaagcaggataatgagaccgggatctattacgaaacctggaacgttaaggccagccccgaaaagggcgctgagacctggttcgatagttacgactgctccaaattcgtgttacgcacctttaacaagttagccgaatttggagccgagttcaagaacatagagaccaactataccagaatctttctctactcaggcgagcctacatacctaggcaacgagacatctgtgtttggacccacgggcaacaaaactcttggactggctattaaacgcttttattacccgtttaagccgcatctcccgacaaaagagttcctgctgtccttgctccagatcttcgatgccgtcatcgttcacaaacagttctacctgttttacaactttgaatactggtttctgcctatgaagttcccattcatcaaaataacgtatgaggaaatccccctgcctataagaaacaaaacactgtccgggctgtag

SEQ ID NO: 111726 - DNA, 1077 bp, synthetic construct
  misc_feature 1..1077: note = Description of Artificial Sequence: Synthetic coding sequence
  source 1..1077: mol_type = other DNA
atggcccaggaagttgacaccgctcagggtgccgagatgcggagaggggccggagcggctcgagggagggctagctggtgctgggctctcgcactgctctggctcgctgtggtgcccggatggtcacgggtttcaggaatcccaagtaggcgccactggcctgttccatacaagagattcgactttaggccgaaacccgacccgtactgccaggctaaatacaccttctgtccaacaggtagcccaatcccggtgatggagggtgacgacgatatcgaagtattccgtcttcaggctccagtctgggagttcaaatatggagacctactcggtcaccttaaaataatgcatgacgctattggttttagaagcaccctgaccgggaagaactatacgatggaatggtacgagctgttccagctggggaactgcacctttccacatttgcggcccgaaatggacgcccctttttggtgcaatcagggagctgcctgtttcttcgagggcattgatgacgtgcattggaaggaaaacggaactttagtgcaagtcgctaccatttccggaaatatgttcaatcaaatggccaaatgggttaaacaggacaacgaaacaggaatctactacgaaacttggaacgttaaggcgtcaccggagaagggcgctgaaacttggttcgactcttacgactgctctaagttcgtgttaagaacctttaacaaactcgcggagttcggcgcagagttcaagaacattgaaaccaactatacccggatcttcctctattccggcgaacccacctatctgggtaacgagacaagcgtcttcgggcccaccggtaacaaaacgctgggccttgctattaaacgattctactatccctttaagccccacctccctacaaaagagtttctgctctcactgcttcagatcttcgacgctgtcatcgtacacaagcagttttatctgttctacaacttcgagtactggttcttgcccatgaaattcccgtttatcaagatcacttacgaggagatacccctacccatcaggaataaaactctttctgggttgtag

SEQ ID NO: 111727 - DNA, 936 bp, synthetic construct
  misc_feature 1..936: note = Description of Artificial Sequence: Synthetic coding sequence
  source 1..936: mol_type = other DNA
atggaggcaactcggagacggcagcacctgggggccactggaggtcccggtgctcagctgggggcttccttcctgcaggcaaggcacggcagtgtttcagccgacgaggcagctcgcacggcaccgttccacctcgatctgtggttttacttcacccttcaaaactgggtgcttgatttcgggcgacctatcgccatgttggtgttcccccttgaatggttccctctcaacaaacccagcgtcggcgattacttccacatggcctacaacgtgataactccatttctgctgctcaaattaatagaacggtcccctcggaccctgccaagaagtattacttatgtcagtatcattattttcattatgggcgccagcatccatcttgtcggagactccgtgaatcatcgacttctgttttcagggtaccaacaccacctctccgtcagggaaaatcccataataaagaacctgaagcccgagaccctgatcgactctttcgagctcctctactactacgatgaatatctgggacactgcatgtggtacatcccattctttctcatcctattcatgtacttttcagggtgttttactgccagtaaagccgaatcccttatcccggggcctgccctactacttgttgccccctctggcctctactattggtatctggtaactgaaggccagattttcatactgttcatctttacgttcttcgcaatgctcgccctcgttctgcaccagaaaaggaaaaggctcttcctggacagcaacggcctcttcttattctccagcttcgctctcactctgctgttggttgccctgtgggtggcctggctgtggaacgaccctgtccttaggaaaaaataccctggtgtcatctacgtgccagagccatgggccttctacacactgcatgtgtcttcccgccactag

SEQ ID NO: 111728 - DNA, 549 bp, synthetic construct
  misc_feature 1..549: note = Description of Artificial Sequence: Synthetic coding sequence
  source 1..549: mol_type = other DNA
atgaggttacccgcgagattgcccagcaccagtacgagtggaagcacctctcactgtaggactggattctggaccctgggagttccgctcccgtgctggtatagcttgtcaagtggcttccatagcacctcgcccgtgctaggaacgacaagtacgtggccaactacatcatcaaggccatttagctgtagctcggggtgcttcaccgcatcaaaagccgaatctctgattcccggacccgcccttctcctggttgcccctagcggtttatattattggtacctggttacagaaggccaaattttcatcttgttcattttcacgttcttcgccatgctggctctggtacttcaccaaaagcgaaagaggctctttctggacagcaatggactgttcttgttctcctcatttgccctgaccctgttgctggtcgccctctgggtggcttggttatggaatgacccggtgctgagaaagaagtatcccggggtgatttatgttcctgaaccatgggcattttataccttacacgtaagttcccgacactag

SEQ ID NO: 111729 - DNA, 1032 bp, synthetic construct
  misc_feature 1..1032: note = Description of Artificial Sequence: Synthetic coding sequence
  source 1..1032: mol_type = other DNA
atggcggcggtggccggaaaggaaaggagggcacgaggtcgtccgcggcccgaaacactaggggccatcccacggagggagggaggggaagctgggctgagtcgagctttcaagcctctggcccaggcgccactgtcctgcgaaacatctttgaggaagctgaagttcaagggcaagaagcacgggtcagtttcagctgacgaggctgcaagaacagcacccttccacctcgacctgtggttttatttcaccctgcaaaattgggttttggattttggaaggccaatagcaatgctggtgtttcctctggaatggttccccctcaacaagcccagcgtaggagactacttccacatggcttacaacgtgattacccccttccttctcctcaagctgattgagaggtctccacggaccctgccccggagcattacatacgtaagcataattatcttcattatgggtgcatctattcacctcgtgggcgacagcgtgaatcaccgactcctattcagcggataccagcatcacctctccgtccgggagaaccctattattaagaatttaaagcccgaaaccctgatcgacagcttcgaattgctgtattattatgacgagtacctcggccattgtatgtggtacattccattcttcctgatccttttcatgtacttctccggatgcttcaccgcttcaaaagccgaatccttgatccccggccccgccttgttgctggtggccccttccggtctttattactggtatctagtcactgagggacagatcttcattctgttcatatttaccttttttgctatgctggcattggttctccatcagaagcgtaagagactttttcttgacagtaacggcctcttcctgttctcgtcattcgcgttaacccttctcctggtcgccctgtgggtggcatggctgtggaacgatcccgtcctccgaaaaaaataccccggcgtcatatacgtccccgagccttgggctttttacacacttcatgtctctagtcgccattag

SEQ ID NO: 111730 - DNA, 861 bp, synthetic construct
  misc_feature 1..861: note = Description of Artificial Sequence: Synthetic coding sequence
  source 1..861: mol_type = other DNA
atgaatcctgcttccgatggcgggacgtcagaaagcatattcgacttagactatgccagttgggggataaggtccactcttatggtggcagggttcgtcttctatcttggagttttcgtggtctgtcaccagctgagttcctctttaaatgcaacatatcgcagtctggtcgccagggagaaggtattctgggacctcgctgccacccgcgctgtcttcggggtccagtctaccgccgcgggcctgtgggctcttctgggcgatccagttctgcacgcagacaaggcacgcggccaacagaactggtgttggtttcacatcactaccgcgaccggattcttttgtttcgaaaatgtggccgtgcatctgagcaacctgatctttcggactttcgacttgtttctggttatccatcacttgttcgcctttctgggctttctgggctgtctggtgaacctacaggcagggcattaccttgctatgacaactctgctcctcgagatgagtacacctttcacatgtgtgtcctggatgctactgaaggctggctggtcagaaagtttgttttggaagcttaaccagtggctcatgatccatatgtttcactgccgaatggtgctgacctaccacatgtggtgggtgtgcttctggcattgggatggcctggtttcatcgttgtacctcccccacttaactctgttcctggtgggcctggcactcctgacgttaatcattaatccttattggacacacaaaaaaacccagcagctgctgaacccagtcgattggaacttcgcacaacctgaggcgaagtcccgcccagagggaaacgggcagctgctccggaaaaaacggccttag

SEQ ID NO: 111731 - DNA, 1065 bp, synthetic construct
  misc_feature 1..1065: note = Description of Artificial Sequence: Synthetic coding sequence
  source 1..1065: mol_type = other DNA
atgtacagagagtgggtggtggtgaacgtgtttatgatgctgtatgtgcagttggtccagggcagtagtaatgagcacggaccagtgaagaggagcagccagagcactctggaaagatcagagcaacaaatcagagccgctagtagcctagaagaacttttgaggattacccactccgaggattggaagctgtggagatgcaggctgagactcaaaagcttcaccagcatggatagtcgatcagccagccatagaagcaccaggtttgcagccactttttatgatatcgaaacactgaaagtaattgacgaagagtggcagagaactcaatgcagcccgcgggaaacctgcgtggaggtggcatcggagctcggaaagtctacgaatactttcttcaagccaccctgtgtaaacgtgtttagatgcggcggctgctgtaacgaggaaagtctgatttgtatgaatactagcacaagttacatctctaagcagttgtttgagatctctgtaccgctcacctcagttccagagctggtccccgtgaaagtggccaaccacactggatgcaagtgtctgcctactgcacctcgtcacccatatagcattatccgccgaagcatccaaatcccagaagaagacagatgctcccatagtaaaaaactttgtccgatcgacatgttatgggactcgaacaaatgcaagtgtgttctgcaagaggagaacccgttagccggtactgaggatcactcacacctgcaagaacctgcattatgtgggccacacatgatgttcgacgaagacagatgcgaatgtgtgtgtaagacgccttgccccaaagatcttatccagcacccaaaaaactgttcatgcttcgagtgcaaggaaagcctcgagacttgctgccagaaacacaaactgtttcaccctgacacctgttcatgcgaggacaggtgcccatttcataccagaccgtgtgcctccgggaaaaccgcgtgtgccaaacactgccgtttccccaaggagaaacgggctgcgcagggccctcatagcaggaagaacccctag

SEQ ID NO: 111732 - DNA, 504 bp, synthetic construct
  misc_feature 1..504: note = Description of Artificial Sequence: Synthetic coding sequence
  source 1..504: mol_type = other DNA
atggagcgttttgttgtaactgctccgcctgcccggaaccgtagcaaaacagctctctacgtcactcctctggaccgtgttaccgaatttgggggggaactacacgaagacggcgggaaacttttctgtactagttgcaatgtcgtgctcaatcacgtgcgaaaaagtgctatttcagaccatttaaagtcaaagacacacacaaagcgcaaggctgaatttgaagagcagaacgttaggaagaaacagcgaccgttgactgcgagcctgcagtgcaattccacggcacagacagagaaggtgagcgtcatacaggactttgttaaaatgtgcctggaagcgaacatccccctggagaaggccgaccaccctgccgtgcgtgcttttctgagccgacacgtcaaaaatggtggaagcatccccaagtcagaccagctgagaagagcgtatttgccagatggatatgagaacgaaaaccaactgctgaacagtcaggactgttag

SEQ ID NO: 111733 - DNA, 504 bp, synthetic construct
  misc_feature 1..504: note = Description of Artificial Sequence: Synthetic coding sequence
  source 1..504: mol_type = other DNA
atggaaagatttgtggtgacggcccctccggcacgtaaccgaagtaaaacagctctatatgtgacgcctctcgatagggtgacagaatttgggggcgagctgcacgaagatgggggaaaactcttctgtacaagctgcaacgtggttttaaatcacgtgaggaaatccgctatcagcgaccatttaaaatcgaagacacacactaagaggaaggccgagttcgaggaacagaacgtgaggaagaaacagagacctctaaccgcatccctgcagtgtaacagcaccgctcagacagaaaaggtttcagtgatacaggacttcgtaaaaatgtgtctggaggccaatatccctttggaaaaggccgaccacccggctgtccgcgccttcctctcccggcacgtaaagaacggcggaagcattccaaagtcagatcaactacgcagagcttacttgcctgatggctacgaaaatgagaatcagcttttgaacagccaggattgctag

SEQ ID NO: 111734 - DNA, 504 bp, synthetic construct
  misc_feature 1..504: note = Description of Artificial Sequence: Synthetic coding sequence
  source 1..504: mol_type = other DNA
atggaaaggttcgtggttaccgccccccctgcccgcaacaggtccaagacagccctctatgttactcccctggatcgtgttactgagttcggcggcgagcttcatgaggatggtggtaagctgttctgcacatcttgtaacgtcgttctgaatcatgtgaggaagagtgcaatatccgatcacctgaagtctaagacccacacaaagcggaaggccgaattcgaagagcagaatgtgagaaagaaacagcgccctcttaccgcatccctacagtgcaactccaccgcgcaaaccgagaaggtcagtgtgatacaggactttgtgaaaatgtgcttggaggctaacatacctctggagaaggcagatcaccccgcggtccgggcctttctgtcccgtcacgtgaaaaacgggggttcaattcctaaatctgaccagctgaggagagcctacctgccagacggctacgaaaatgaaaaccagctgctcaacagccaggactgttag

SEQ ID NO: 111735 - DNA, 321 bp, synthetic construct
  misc_feature 1..321: note = Description of Artificial Sequence: Synthetic coding sequence
  source 1..321: mol_type = other DNA
atggagcgcttcgttgtaaccgcaccaccagcccgcaatagatccaagactgctttatatgtgacaccattagaccgcgtgactgagtttggcggggagctgcacgaggacggaggcaaattattctgcacatcctgcaatgttgtgctcaatcacgtacgcaagagtgctatatctgaccacctaaagagtaagacacatacgaagcgcaaggccgagttcgaggagcagaacgtgcgaaaaaagcagcggccccttacagcctccctccaatgtaatagcacagcgcagactgagaaggtttcggtgatccaggactag

SEQ ID NO: 111736 - DNA, 504 bp, synthetic construct
  misc_feature 1..504: note = Description of Artificial Sequence: Synthetic coding sequence
  source 1..504: mol_type = other DNA
atggaacggttcgtggtcacggccccacctgcgaggaaccgatctaagactgcgctttatgtgactcccttggatagggtgacggagtttggcggggaactgcacgaagatggcggaaaactcttctgcacgtcttgcaacgttgtattgaatcatgtgaggaagagcgcaatttctgatcatctcaaatcgaagactcacaccaagcgtaaggccgagttcgaggaacaaaatgtgaggaagaagcagcgacccctgactgccagcctccagtgtaattccacggcgcagaccgaaaaggtctccgttatccaggacttcgtgaaaatgtgcttggaggcgaacattccacttgaaaaagccgaccaccctgctgtgagagcttttctctctaggcacgtgaagaatggtggatctatacctaagagcgatcagcttagacgggcctacctgccagatggctatgagaacgagaaccaacttctcaactctcaggactgttag

SEQ ID NO: 111737 - DNA, 1608 bp, synthetic construct
  misc_feature 1..1608: note = Description of Artificial Sequence: Synthetic coding sequence
  source 1..1608: mol_type = other DNA
atggctagccttagcctggctccagtaaacatcttcaaggcaggtgccgatgaggagagggcagagacagcacgactgacctcgttcataggtgccatagcgattggcgatttggtgaaaagcacgttggggcccaaagggatggacaaaatactcttgtcttccggcagagacgcatccctaatggtgacaaatgatggagctaccatcctgaagaacatcggagtggacaacccggccgcgaaggtgttggtggatatgagccgcgtgcaggacgatgaggttggcgatggtacgacgtccgtgacagtgttggccgctgaactgttgagagaggctgaaagcctgatcgccaagaagattcaccctcagacaattatagcaggctggcgggaggctactaaggcagctcgagaagcactactgtctagtgctgtagaccatggcagcgacgaggtaaaatttaggcaggacctgatgaacattgcggggactactctttctagtaaactactcactcaccataaagaccatttcaccaaattagctgttgaggctgtgctgcgtctgaagggatccgggaacttggaggccatacacatcataaagaaacttggtggtagcttggccgatagctatctggacgagggttttctgttggataaaaaaattggcgtgaaccagcccaaaaggatcgaaaacgctaagatcctgattgcaaacactggcatggacactgacaaaattaagatctttgggtcccgggtgagagttgattccactgccaaggtggcggagatcgagcacgccgagaaagagaaaatgaaggagaaagttgaaaggatccttaaacacggcatcaattgctttataaacaggcagcttatttataattacccggaacagctatttggcgcagctggagtaatggccatcgagcacgccgacttcgcaggggttgaacgcttggcactggttaccggaggcgagattgcttctacctttgatcatccagaactagtgaagctcggttcgtgtaaacttattgaagaagtaatgatcggagaagacaagctgatacacttctctggcgtcgccctgggcgaagcctgcaccatcgttctgcggggcgccacccagcagatcttggatgaggcggaaagatcgctacacgacgccctgtgcgtactagcccaaaccgtcaaagactctcggaccgtctacgggggaggctgttctgaaatgctgatggctcacgcggtgacccagcttgccaacaggacacccggaaaggaagcagtagctatggagtcgtatgccaaagcgctcagaatgctccctaccattattgccgataacgccggatatgatagtgcagatctggtagcccagctccgtgcagcgcattctgaaggtaacactactgctgggttagacatgcgggagggcaccatcggagacatggccatacttggaattaccgagtcattccaagtgaagagacaggtcttgctcagcgccgccgaggctgccgaggtcatattgcgtgtggacaacataatcaaggcagcacccaggaagcgggtccctgaccatcacccgtgctag

SEQ ID NO: 111738 - DNA, 1467 bp, synthetic construct
  misc_feature 1..1467: note = Description of Artificial Sequence: Synthetic coding sequence
  source 1..1467: mol_type = other DNA
atggataagattctcctctcttctggccgagacgcttcgctcatggtgaccaatgatggggcaacaatcctgaagaacataggtgtagataaccccgcagcaaaagttttagttgacatgagtagagtacaggatgatgaggtaggtgatggaacaacaagtgtcaccgtgctggccgcagagttgcttcgcgaagccgaatctttaatcgccaagaaaattcatccacaaaccattatcgctggctggagggaggctactaaggctgctcgtgaagccttgctgagctccgctgtggaccacgggagcgacgaggtgaaattccgccaggaccttatgaatatagcaggcacaaccctgtctagcaagttactgacacatcataaagaccatttcaccaagctcgccgtagaggccgtgctgcgccttaaagggtccggcaacttggaggctatccacataatcaaaaagctcggaggaagtctggctgattcttacttggatgagggcttccttcttgacaaaaaaatcggggtcaaccaacccaaacgcattgagaatgccaagatcctgatagcgaacacggggatggatactgataagattaagatctttgggtcgagagtccgggtggatagcacggcgaaggtggctgaaatcgagcacgcggagaaggaaaaaatgaaagagaaagtggaaaggattctgaaacacggcataaattgctttatcaatcgtcagctgatatataactacccggagcagctcttcggcgccgccggagtcatggctatagagcatgcagactttgctggcgtggagcggcttgctctggtcaccggaggggagatcgcatccacatttgaccatcctgagctggtgaaactcggtagttgtaaattaatcgaggaagtgatgataggggaagataagcttatccacttttcgggagttgctctcggcgaggcttgcactatagtgcttcgtggagccacccaacaaattctcgatgaagcagaacgctcattacacgacgcactatgtgtcctcgcccaaaccgtcaaggacagtcggacggtgtacgggggcggctgcagcgagatgctcatggctcacgctgtgacacagctggccaacaggacaccagggaaagaagccgtggcaatggagtcatacgcgaaggccctccgtatgctccctactatcatcgccgacaacgctggttacgacagcgccgacctggtggcccaactgcgtgcggcccacagtgagggcaatacgacggctggtctggatatgagggaaggcaccataggagacatggccatcctgggtatcactgaatcatttcaggtaaagaggcaggtgctgttatctgccgccgaagccgctgaggtgatcctgagagtcgacaatattataaaggccgctcctcgcaagcgcgtccccgaccaccatccatgctag

SEQ ID NO: 111739 - DNA, 1638 bp, synthetic construct
  misc_feature 1..1638: note = Description of Artificial Sequence: Synthetic coding sequence
  source 1..1638: mol_type = other DNA
atgatggggcaccggcctgttcttgtgctatcccagaatacaaaaagggagtccgggcgaaaggtccagtccgggaacataaacgctgctaagactatcgctgatattattcgcacctgtctgggccccaagtccatgatgaaaatgctgctcgatccgatgggcggaatagtgatgactaacgacggtaatgctatcttgcgggaaattcaggtacagcatcccgctgcgaagtctatgatcgagatcagccgcacacaagatgaggaggtgggtgatggaacgacgagtgttattattctagcgggagagatgttgagtgtggccgaacactttctagaacaacagatgcatcctaccgtcgtgatttccgcataccggaaggcgctcgacgacatgattagcactttgaagaagatttccattccagtggatatcagcgatagtgatatgatgctcaacataattaacagttccataacaaccaaggctatcagtagatggagttccctcgcatgtaatatagcccttgatgctgtgaagatggtccagttcgaggaaaacggtcgaaaggagatcgacatcaagaaatacgccagagtggaaaagattcctggtggaattatagaagattcctgtgttctccggggtgtgatgatcaataaggacgtcacccatccaagaatgaggcggtatataaagaatccacggatagtgctgctggactctagcctggaatataagaagggggaatctcagaccgatatcgagatcactcgtgaagaagatttcacacggatcctgcagatggaagaggagtatattcagcagttgtgcgaagacatcatccagctcaaacctgatgtagttataacggagaaggggattagtgacctggcccaacattacctcatgcgagctaatatcacagcaatccggcgcgttcgaaagacagataataataggattgcacgtgcctgcggagctcgaatcgtgtcacgaccagaggagttgcgcgaggacgatgtcggcacaggcgccggccttctagaaatcaagaagataggtgatgaatattttaccttcatcaccgattgtaaggaccccaaggcctgtaccatacttctccgcggtgccagtaaagaaatcctgagcgaagtggaacggaaccttcaggacgctatgcaagtgtgccgtaacgtactcctcgaccctcagcttgtcccaggtgggggagctagcgaaatggccgtagcacacgcactcacagaaaaaagtaaagccatgacaggagttgagcagtggccttaccgggcggtggcgcaggctttggaggttatccctcgcacattgattcagaattgtggggctagcaccattaggcttttaacttcccttcgcgctaagcacacacaagagaattgcgaaacctggggtgtcaacggtgaaaccggcaccctggtcgacatgaaggaattgggcatctgggagccactcgcagtcaaattgcagacatacaagaccgccgtggagaccgctgttctgctgctgcgcatcgatgatattgtgtcaggccacaaaaaaaagggcgacgatcagagtaggcagggtggtgcacccgatgccggccaggaatag

SEQ ID NO: 111740 - DNA, 1524 bp, synthetic construct
  misc_feature 1..1524: note = Description of Artificial Sequence: Synthetic coding sequence
  source 1..1524: mol_type = other DNA
atgatgggacataggcccgttcttgttttaagtcaaaataccaagagggagtcgggacgcaaagtgcagagtgggaacattaatgccgcaaaaatacaagttcagcacccagccgcaaagagcatgatcgagatctcccggacacaggacgaggaagtcggggatggaaccacgagcgtgatcatcctcgccggggaaatgttgagcgtcgccgagcacttcctggagcagcagatgcaccctacagttgtaattagcgcttataggaaagctctggatgatatgatctctactctaaagaaaatttctatccctgtcgacatatcagactccgacatgatgttgaatatcatcaactcctctattaccacaaaagcaattagcaggtggagctcattggcttgtaatattgcactcgatgcagtgaagatggtgcagttcgaggaaaacggacgcaaagagatcgacattaagaagtacgcacgggtggagaagatcccaggcggtataatagaggacagctgcgtgctccgtggtgtgatgataaacaaggatgtgactcacccccgaatgaggaggtatattaagaacccccgtattgtgttattggactcatccctggagtacaagaaaggggagagccaaaccgacatcgagataacacgtgaagaagacttcaccaggattttgcagatggaggaagaatacattcagcaactgtgcgaggatataatccagttgaagcccgacgttgtaatcaccgaaaagggtatcagcgaccttgctcaacattacctcatgcgggccaacatcacagctattaggcgagttagaaagacagataataacaggattgctcgcgcctgcggtgcacgcatcgtgtcccgtccagaagaactgcgcgaggacgatgtaggcactggggccggcttgctggaaatcaagaaaatcggagatgaatacttcacttttattaccgactgcaaggaccccaaagcgtgcaccatcctcctgcgcggtgcctcaaaggaaattctatccgaagtcgagagaaacctgcaggacgcaatgcaggtctgcagaaatgttctcttagacccacagcttgtccctggtggaggcgctagcgagatggcagttgcccatgctttgaccgaaaaatcaaaggccatgaccggcgtcgaacagtggccgtacagggccgtcgcccaagctttagaagttattcctagaacactgatccagaactgtggggcatctaccataaggttgttgaccagtctgagggctaagcacactcaggagaactgcgagacctggggtgtaaatggagaaaccggcaccctcgttgacatgaaggaattgggtatttgggagcccttggccgtgaaactgcagacgtataaaacggccgttgagacggccgtactgctcctccgcatcgatgatatagtgtccggccataaaaaaaagggtgacgatcaaagccgccaagggggagcccctgacgctgggcaggaatag

SEQ ID NO: 111741 - DNA, 1503 bp, synthetic construct
  misc_feature 1..1503: note = Description of Artificial Sequence: Synthetic coding sequence
  source 1..1503: mol_type = other DNA
atgatgaagatgttgctggaccctatgggcggcattgtaatgaccaatgacggaaacgcaatacttagagagatccaggtgcaacatcctgctgcaaaaagcatgatagaaatctctcgcacgcaggacgaggaagtgggagacgggactacatctgtcataatcttggccggggagatgctgtccgttgctgagcatttcttagaacagcagatgcacccgacagtggtgatctcagcctatagaaaagcgctcgatgatatgatttccaccctgaagaaaatcagcataccggtggatatcagtgacagcgacatgatgttaaacatcattaacagctctattaccacgaaagcaatcagcaggtggtccagcttagcctgcaacatcgccctggacgctgtgaagatggtgcaatttgaagaaaatggtaggaaagaaatcgatattaagaaatacgcacgcgtggaaaaaattccaggcggcattatcgaagacagctgtgtcctccggggcgtcatgattaacaaggacgtgacccacccccggatgagaaggtacatcaaaaatccacgcatcgtattactcgactccagccttgagtataagaagggagagagtcaaacagacatcgagattacaagggaagaagactttaccagaatacttcagatggaggaggagtacatacagcagctgtgcgaggacattattcaactcaaacccgacgtggtgatcacagagaagggcatctcggatttggctcagcactacttgatgcgcgctaacattactgctatcagacgggtgcgcaagaccgacaacaacagaatagccagagcatgcggggctaggatcgtatctcggccggaagagctgcgcgaagacgatgttgggacgggagcaggcttgctcgagatcaagaagataggggacgaatattttacatttatcacagactgtaaggatcctaaagcgtgcactatcttgcttaggggtgcctcaaaggagatattaagcgaagttgaacgcaacctacaggacgccatgcaggtttgccgcaacgtgctgttggacccccagcttgtaccgggaggaggtgcctcagagatggcggtggcccacgccctcaccgaaaaatcaaaagctatgaccggggtagagcagtggccatacagagccgtggcccaggctctggaagtaatcccaaggaccctaatccagaattgcggagctagcaccatacggctgctaacttccttgagggctaagcatacccaagagaactgtgagacctggggggtcaacggcgagaccggtactctggtggacatgaaggagctgggcatatgggaacctctggctgtgaagctacagacctataagactgccgtggagacagctgtgctattgctgcgaattgacgatatcgtatccggtcataagaagaaaggcgatgatcaatcgagacaggggggtgccccagatgccggccaggagtag

SEQ ID NO: 111742 - DNA, 831 bp, synthetic construct
  misc_feature 1..831: note = Description of Artificial Sequence: Synthetic coding sequence
  source 1..831: mol_type = other DNA
atgtacgaaggcgatttagagggtcagagtatgaattggactagcgaagaagggagaggggatatcattcgttcaggaactaatatcgatcgtgcctggcaatgccaaaatacaaaaagagaatcaggccggaaggtgcaaagcggcaatatcaacgccgccaagacgattgctgacatcatcaggacatgtttaggtcccaaaagcatgatgaaaatgctgcttgatccgatgggcggcattgtgatgacaaatgacgggaacgcgattctgagggagatccaagtacagcacccagctgctaagtcaatgatagagatctcccgcacacaggatgaagaggtgggcgatggaactactagcgtcataatcctagctggggaaatgctgtccgtagcggaacattttctcgagcagcaaatgcaccccaccgtcgtgatttccgcataccggaaggctctagatgacatgatttccacccttaaaaaaattagcattccagtggatatctcggattccgacatgatgttgaacattatcaattcgagcatcactacaaaagcaatatccagatggagtagtttggcttgtaatatcgccctggacgccgttaaaatggttcaattcgaagaaaacgggcggaaagagattgacatcaaaaaatatgctcgggtcgaaaagatccctggtggcatcatagaggacagctgcgtactgaggggagtgatgatcaataaagacgttactcatcccagaatgcgccgctacattaagaatccgcgcatcgtgctattagattcctcgttggaatataagaagggagagtcatag

SEQ ID NO: 111743 - DNA, 486 bp, synthetic construct
  misc_feature 1..486: note = Description of Artificial Sequence: Synthetic coding sequence
  source 1..486: mol_type = other DNA
atgatggggcaccgaccagtgctggttctaagccagaatacaaaaagggaaagtggacgcaaggtgcagtctggtaacatcaatgccgccaagactattgccgacatcattcggacatgtctgggtcctaaatcaatgatgaaaatgttgctggaccctatgggagggatcgtgatgacaaatgacgggaatgcaatcctgcgggagattcaggtgcagcaccccgcagccaaatccatgattgagatatccaggactcaggatgaggaggtgggcgacggcaccacttccgtcattattctagagagtcatagcgtcacaatgctcgagtgcggaggtgccatacttgcgcactgtaacctatgcctgcccgcaggcgagatgctgtcagtggcagaacacttcctcgagcagcagatgcatcccaccgtggtaataagtgcttacagaaaggcattagatgacatgatcagcacattgaagtag

SEQ ID NO: 111744 - DNA, 567 bp, synthetic construct
  misc_feature 1..567: note = Description of Artificial Sequence: Synthetic coding sequence
  source 1..567: mol_type = other DNA
atgtacgaaggagacctcgagggtcagagtatgaactggacctcagaggaagggaggggcgatataattagatctggtacaaacatcgaccgagcctggcagtgccagaatacgaagagagagtccgggcgaaaggtacagtccggtaatattaatgccgctaagattcaggtgcagcaccccgccgcaaagagcatgatcgaaatctccaggactcaggatgaagaagtgggggacgggactaccagtgtgattatcctggccggcgagatgctgtctgtggctgagcacttcctggaacaacaaatgcatcccaccgttgtaatctccgcatatcgaaaagccttggatgacatgatatcaactctgaaaaaaatttccattcccgtggatattagcgactcggatatgatgctgaatatcatcaactcctcaataactacaaaagctatttctcgctggtccagtctcgcgtgtaacatcgctctcgatgctgttaaaatggtgcaatttgaagaaaatggccggaaagagattgatatcaaaaagtatgcacgagttgagtag

SEQ ID NO: 111745 - DNA, 1503 bp, synthetic construct
  misc_feature 1..1503: note = Description of Artificial Sequence: Synthetic coding sequence
  source 1..1503: mol_type = other DNA
atgatgaaaatgcttctcgaccccatgggggggatcgtgatgactaatgatggcaatgccattctgagggagattcaggtgcaacaccctgccgctaaatctatgattgagatttccaggacccaggatgaagaagtgggagacggtacaaccagtgtaatcattctcgcaggcgagatgttgagcgtggcagagcattttctggaacagcagatgcaccctaccgtcgttatttcagcatatcgcaaggcgcttgacgatatgatcagtacgctgaaaaaaattagcatcccagtagacatctccgacagcgacatgatgttaaacatcattaacagctccatcaccaccaaggccattagcagatggtcttccctcgcctgcaatattgcattggacgcagtgaagatggttcagttcgaggaaaacgggcggaaggagattgacatcaaaaaatatgcccgtgttgaaaaaatcccaggtggaattattgaagactcatgcgtgctgaggggcgtcatgatcaataaggatgtaactcacccccgcatgcgacggtacattaaaaaccctcgcattgttctcctcgacagtagtctcgagtacaaaaagggcgaatcccagactgacattgaaatcacacgcgaggaggatttcacgcggatcctgcaaatggaagaggagtatattcagcagctctgcgaagatatcatacagctcaaaccggacgtcgtgattaccgaaaaaggaatctccgacctggctcagcattacctgatgagagccaatataaccgcgatcagaagggtcagaaaaaccgataataatcgcattgcacgtgcttgtggggcccgcatcgtatctagacctgaagaactgcgggaagatgatgtagggaccggcgctggcctattggaaatcaagaagattggagacgagtacttcactttcatcacagattgcaaagatcccaaagcttgtacgatcttgctcagaggagcgagtaaagagatcctttccgaggtggagaggaatctacaggatgctatgcaggtgtgtcgtaatgtcttgcttgaccctcagttggtgccaggagggggagccagcgagatggcagtggctcacgccctgactgagaagtccaaagccatgaccggagttgaacagtggccctacagggctgtcgcacaggcccttgaggtgattccacgtacccttattcagaactgcggcgcctccactatccggctcctcacaagcctcagggccaagcacacccaggaaaattgtgaaacctggggcgtgaacggcgaaaccggcaccctggtcgatatgaaggaactgggaatttgggaacccctcgcagtaaaacttcagacatataaaacggcagtcgaaacagccgtgcttctgcttcggatagatgatattgtgagcggtcataaaaagaagggagatgatcagtctcgccaggggggtgctccagacgctggccaggagtag

SEQ ID NO: 111746 - DNA, 1620 bp, synthetic construct
  misc_feature 1..1620: note = Description of Artificial Sequence: Synthetic coding sequence
  source 1..1620: mol_type = other DNA
atgcctgagaatgtggcccctcggtcgggcgccacagcaggcgccgctggaggccgagggaagggagcttaccaagatcgcgataagccagcacagattcgcttcagtaacatctctgctgccaaagctgtggccgatgcaatccggacttcgttagggccgaaggggatggataagatgattcaggacggtaaaggggacgtgacaatcaccaatgatggggcgaccattctaaaacaaatgcaggtgcttcacccagccgctagaatgcttgtggagttgtcaaaggcgcaggacattgaggcaggcgatggcaccaccagcgtggttattatagctggctccttacttgattcatgcaccaagctgctacagaaaggcatacacccgaccatcattagcgagtcgttccagaaggcacttgagaagggcatcgagattttgaccgacatgtctcgcccagttgaactgagcgatagggaaactctgctgaacagcgcaacgaccagcctcaactcaaaggtcgtgagccagtattccagcttgttgtctcctatgagcgtaaacgcagtgatgaaagttatcgaccccgccacagccacaagcgtagacctgagggacatcaaaattgttaaaaagcttggaggcactatcgatgattgtgaactggtggagggcctggttctgacccaaaaggttagtaatagtggtattactagggttgagaaagcaaagattgggcttatacaattttgtttgtcagcaccaaagaccgacatggacaaccagatcgtggtgagcgattacgctcaaatggatagggtgttgagggaggagcgagcttatatactgaacttagttaagcagataaaaaagaccggctgcaacgtcctcctgattcagaaatcaatccttagggacgccctctccgacctggctctccatttcctgaataaaatgaaaatcatggtcataaaagacattgagagggaagatatcgaatttatctgcaagacaatcgggaccaagcccgtggcccacatcgaccaattcacagctgacatgcttggaagcgccgagctggctgaggaagtcaaccttaacgggtctgggaagctactcaaaatcacaggctgcgcgtctccgggaaaaactgtgactattgtggtgcggggtagtaacaaactagtcatcgaggaggccgagagaagtattcacgatgccctctgtgtgattcggtgccttgttaagaaacgggctctaatcgcaggggggggagcgcccgagattgaactggcgctgagactcaccgagtacagcaggactctcagcggcatggaatcttactgtgtgcgagcatttgccgacgcgatggaagtgattccctctaccctggcagagaatgccggactcaaccctatctccacagtaactgaactgaggaataggcatgcgcagggggaaaagactgcggggatcaatgtccgcaaaggcggaatatctaacatccttgaggaattagttgtgcaaccgctacttgtcagtgtctctgccctgactctggccacagagactgtccgctcgattctcaaaatcgatgatgttgtcaatacacgatag

SEQ ID NO: 111747 - DNA, 1452 bp, synthetic construct
  misc_feature 1..1452: note = Description of Artificial Sequence: Synthetic coding sequence
  source 1..1452: mol_type = other DNA
atggacaaaatgattcaagacgggaagggtgatgttactatcacaaatgacggagccaccatcctgaagcagatgcaggtgcttcacccagcagcccggatgttggtcgagctgtccaaggcccaggatatagaggcaggtgacggaacaacgtccgtagtcatcatagccggttccctgttagactcttgtaccaagctgctacagaaaggtattcacccgaccataatttcagagagcttccagaaggcgctggagaagggtatcgaaatcctgacggacatgtccaggcccgtggaactctccgatagagagaccctgttaaattcagccacaactagcttaaactcgaaagttgtgtctcagtattcgagcctactttccccaatgtccgtgaatgcggtcatgaaagtgatcgatccagctaccgccacctccgtcgacctcagagacattaagatcgtgaagaaactcggagggaccattgatgattgtgagctggtcgaggggttggtgctgacccagaaagtcagcaactcagggattacacgggtggagaaggctaagatcggactcatccagttctgcctttcggcaccaaagactgacatggataaccaaatagtcgttagtgattatgctcagatggaccgtgtgctcagagaggaaagggcctacatcctgaacctggttaaacagattaagaaaaccggatgtaatgttttgctgattcagaagtccatcctgcgggatgcactctccgacttagccctgcattttctgaataagatgaagataatggtgatcaaagatatcgaacgggaggatattgaatttatttgcaaaaccatcggcactaaacctgttgcgcacattgatcagttcacagctgatatgctggggtccgctgagcttgctgaagaggtaaatttaaatgggagcggaaagctgctgaagatcaccggctgtgcgtcacccggcaagacagtgactattgtggtgagaggatctaacaaattggttatcgaggaagccgagaggtccattcatgacgcactgtgtgtgattagatgcctggtcaagaagagagcgctgattgcaggcgggggggcgccagagatcgagctggcactgagactgacagaatatagccggacgctgagcgggatggaaagttactgcgtcagggcatttgccgacgctatggaagtgattccctctaccctagctgagaacgccggactgaacccaatctccaccgtgaccgaactgcgaaatcgccacgcccaaggagagaagaccgctggcatcaatgtccgtaagggcggcatatccaacattctggaagagctggtcgtccagccccttttggtgtccgtatctgcattgactctggcaaccgagactgtgcgcagtatccttaaaatagacgacgtggtgaatactcgctag

SEQ ID NO: 111748 - DNA, 1530 bp, synthetic construct
  misc_feature 1..1530: note = Description of Artificial Sequence: Synthetic coding sequence
  source 1..1530: mol_type = other DNA
atgcctgagaatgtggcgccccgcagtggagccaccgcgggagccgctggaggacgtggtaaaggggcttatcaagacagggacaagcccgctcagatcaggttcagcaatatatctgccgcaaaagccgtcgctgatgccatacgcacgagcctcgggccgaaaggcatggacaagatgctggtagaactctccaaggctcaagacatcgaagcaggcgacgggacaaccagtgtcgttatcatagcaggatccttgctggattcatgcactaagttgttacaaaaggggattcaccctactattatctctgagagtttccagaaggctcttgagaagggcattgagattttgactgacatgagtaggcctgtggaactgagcgatagagagaccctgcttaacagcgccacaacctctctgaacagcaaagtggtctctcagtactcgagtctccttagtcccatgtccgtgaatgccgtcatgaaggttatcgacccagcaaccgccacttccgtggatctgagagatattaagatcgtcaagaagttaggcggaacaatcgacgactgcgagttggtggaaggcctggtgcttacacagaaggtcagtaactcgggaataacccgggtcgagaaggccaaaatcggtctgattcaattttgtctatccgcccccaagacagatatggataaccagatcgttgtcagtgactatgcacagatggatcgggtgctccgggaagagcgcgcctacatacttaacctcgtcaagcaaatcaaaaagaccggatgcaacgttctgctgatccagaaatcaatcttaagggatgccctttccgatctggctctccactttttgaataagatgaaaatcatggtcatcaaagacattgaacgggaagatatcgagttcatctgtaaaactataggaactaagcccgtagctcacattgaccagtttaccgccgacatgctgggctctgctgagctcgccgaggaggtgaatctgaatggaagcgggaagctgctcaaaatcaccggctgcgcctcacctggaaagacggtcaccattgtggtgagggggtctaacaaattggtcatcgaggaggccgagcggagcattcatgatgcgctttgcgtgataagatgtctggtcaaaaaacgagcactgatcgccggaggtggcgcacctgaaatcgagctcgccctgcgcttgaccgagtactcccgtaccctaagtggcatggagtcttattgcgtccgcgcctttgctgatgccatggaggtgataccatctactttagcagagaatgctgggctcaatcccattagtactgttacagagctccggaatcggcatgcgcaaggggaaaagacggctggtatcaatgtgagaaagggtgggatctctaatatactggaggagctggtagtgcagcccctgttggtgtctgttagcgctctgacactcgccaccgagacagtgaggagcatccttaagattgacgacgtggtgaatacccggtag

SEQ ID NO: 111749 - DNA, 1170 bp, synthetic construct
  misc_feature 1..1170: note = Description of Artificial Sequence: Synthetic coding sequence
  source 1..1170: mol_type = other DNA
atgtctcggccagtcgagctgagtgacagggagaccctgctgaactcggcgacgactagcctcaacagcaaggtggtcagccagtactcttccttattgagccccatgagcgtgaatgcagtgatgaaagtgatcgatcctgctacagccacctctgtggacctgcgagacatcaagatcgtgaagaaactgggaggtactattgatgattgcgagttggtggagggtctcgtcttgacgcagaaggttagtaatagcggcatcactcgggttgagaaggcgaaaataggcctcatacagttctgcctcagcgcgcccaaaacagacatggataaccagattgtggtgtcagactatgcccagatggacagggtgctcagagaggagcgggcatacatccttaatctcgtgaagcagatcaagaagacgggctgtaatgtgcttcttatccagaaaagcattctccgcgacgctcttagtgacctggccctccactttctcaataaaatgaaaatcatggtgattaaagacatagagagggaggacatcgagttcatttgcaagaccatcggcactaagcctgtggcccacatcgaccaattcaccgccgacatgctgggatctgcagagctcgcggaagaagttaacctcaatgggtcaggtaagcttctgaagattactggctgcgcgagtcctggcaaaaccgtcacaatcgtggtccgcggctccaacaaactggtcatcgaagaagcggaaaggtcgatccatgatgctctctgtgtgattcgatgcttggttaagaaacgggcccttatcgccggcggaggcgctcccgagattgagctcgccctgcggctgacagagtactctcgaactctctctggaatggaaagctattgtgtaagggcctttgccgacgcaatggaagtcatcccctcaacacttgccgaaaatgccggtctcaacccaatctccacagttaccgaattgaggaataggcacgctcagggagagaagactgcggggattaatgtgcggaaaggtgggatctcgaacatactggaagagctggtcgtgcagcctctgctagtgtctgtgagcgcattaacactcgccaccgagactgtacgttcaattctgaaaattgacgatgtcgttaacacaaggtag

SEQ ID NO: 111750 - DNA, 1626 bp, synthetic construct
  misc_feature 1..1626: note = Description of Artificial Sequence: Synthetic coding sequence
  source 1..1626: mol_type = other DNA
atggcatcaatgggaactttagcctttgacgagtacggaagaccttttctcattatcaaggaccaagatcgtaagtctcgtctgatgggattggaggctctcaagtctcacattatggctgcgaaagcagtagctaacactatgcgcacatccctggggcccaacggtctggacaagatgatggttgacaaggacggagacgtcaccgtgaccaacgacggagcaacgattctaagcatgatggatgtcgatcatcagatagcaaaacttatggtcgagctatccaaaagtcaggacgatgaaataggcgacggaacaacaggcgtagtcgtgctggcgggggccctgctggaagaggccgaacagctcctcgatcgaggaatccaccctatacgcatcgccgacgggtacgaacaggctgcacgcgttgcgatcgagcatctggataagattagcgattccgtgcttgtagacattaaggatactgaacctctgatccaaaccgctaagactacacttggctccaaagtggtaaatagctgccataggcagatggccgaaattgccgtcaacgccgtactcactgtcgcagacatggaaagaagggacgtggatttcgagctgatcaaggtggaggggaaagtcggtggacggctggaggacacaaagctgatcaaaggggtgattgttgataaagatttttcgcatcctcagatgccgaagaaagtagaggacgccaagatcgcaatccttacttgtcccttcgagcctccaaaacctaaaaccaaacacaagctggacgtgacttccgtcgaggattataaggccctgcaaaaatatgaaaaggaaaagttcgaggagatgattcagcagattaaggagaccggcgctaacctggccatctgtcagtggggatttgacgatgaagccaatcaccttttgctgcaaaataacttgcccgctgtgcgctgggttggtggcccagagattgagctgatagcaattgcaaccggggggaggatagtgcccagattctccgaactgaccgctgagaagcttgggtttgccggtctggtgcaagagattagcttcggcacaaccaaagacaaaatgttagtgatcgaacaatgtaaaaactcacgtgctgtcactatcttcatcagagggggcaacaagatgatcattgaagaggccaaacggtccctgcacgatgccttgtgtgtgataaggaacctaatccgggataatagagttgtgtatggaggtggagctgctgagatcagctgcgccctggccgtttcacaggaagctgacaagtgtcctaccctcgagcagtatgccatgcgcgctttcgccgacgccctagaagtgattccgatggcattatcagagaactctggcatgaacccaatccaaacgatgaccgaggttagagctcgacaagtcaaagagatgaaccccgctctgggtatcgactgcctccacaagggcaccaatgatatgaaacagcaacacgtgatagaaactcttatcgggaaaaagcagcagattagcctcgccactcaaatggtgcgaatgattctgaaaatagatgatatcagaaagcccggcgagagcgaagagtag

SEQ ID NO: 111751 - DNA, 1545 bp, synthetic construct
  misc_feature 1..1545: note = Description of Artificial Sequence: Synthetic coding sequence
  source 1..1545: mol_type = other DNA
atggcaagtatgggcaccctcgctttcgacgagtacgggaggcctttccttattattaaagaccaggaccgcaaaagccgactgatggggctcgaggccttgaaaagccatattatggctgccaaggccgttgcaaacaccatgcggacatctctcgggccaaacggtctggacaagatgatggttgacaaggacggggacgtcacagtgactaacgatgagataggagatggcaccactggcgttgtggtcttggccggtgccctgttagaggaagccgaacaattgctagaccgtgggatacatcctattaggattgctgatggatatgaacaggccgcacgggtcgcgattgagcatcttgataaaatctctgatagtgtcctggtggacataaaggacaccgagcctctgattcagaccgctaaaactactttgggctccaaagtcgttaatagttgtcaccgacagatggccgagattgccgttaacgcagtgctcaccgtggctgatatggagcgcagggatgtcgatttcgagttaatcaaagtggaaggtaaagtgggtggccgcctagaagacaccaagctgatcaagggggtaatcgtggataaagacttttcccatccacagatgccaaagaaagtggaagatgctaagattgccatcctcacttgccctttcgagccacccaagccaaaaactaaacataagctggacgtaacatcagtcgaggactacaaggcgctgcagaaatacgagaaagagaaatttgaagaaatgatccagcagatcaaggagaccggagctaatctggcaatctgccagtggggcttcgatgacgaggccaaccaccttctgcttcagaataatcttcccgccgtgaggtgggttggaggcccagagatcgagctgattgcaatcgcgaccggggggaggattgtgcctagatttagcgagttgaccgctgagaagctgggttttgccggtctcgtccaggaaatatcgtttggcactaccaaagacaagatgctagtgatagagcaatgcaaaaatagcagagctgtgactatcttcattcgcggcggaaataagatgattatcgaagaggccaagagaagcctgcatgacgcattgtgtgtgatccggaatcttatccgcgacaaccgagtcgtctatggcggtggagctgccgagataagctgcgctctggctgtttcccaggaggccgacaagtgcccaacccttgagcaatatgcaatgagagccttcgccgacgctcttgaagtgattcccatggcgctctctgagaattccggcatgaatcctatccaaactatgaccgaagtccgagcccgccaggttaaggagatgaatccagccctcgggatcgattgtctgcacaaaggcacaaatgacatgaagcagcagcacgtcatcgaaaccctcattggaaagaaacagcagatatctcttgcaacccaaatggtcaggatgattttaaagatcgacgatattagaaaacctggggagtccgaagaatag

SEQ ID NO: 111752 - DNA, 1563 bp, synthetic construct
  misc_feature 1..1563: note = Description of Artificial Sequence: Synthetic coding sequence
  source 1..1563: mol_type = other DNA
atgaactcttcgctgggccccactattgaaaagcttagtgttagccacatcatggcagctaaggctgtggccaatactatgcgcacatccctggggccaaacggtctggacaaaatgatggtggataaggatggagatgtcaccgtcaccaatgacggcgcaacaattctgagcatgatggatgtggatcatcaaattgccaaactaatggtcgaactgagcaaaagccaggacgatgagattggagacggtacaacaggcgtggtggtgttggcaggggcactgctggaggaggcagaacaactcctggatcggggaattcatccaatccgaattgccgacgggtatgaacaggcggctcgcgtggcaatcgaacatttggacaaaatttcggattccgtgttggttgacattaaggacacagagcctctcatacagaccgccaagactaccctgggctctaaggtcgtgaactcttgccacagacagatggcagagattgccgtcaacgccgtcctgaccgtggcagatatggagaggcgggacgttgacttcgaacttattaaggtggagggtaaggtagggggaaggcttgaggacactaagctgattaagggcgtgatcgtggacaaggatttctcccacccgcaaatgcccaagaaagttgaagacgcgaaaatcgcgattctgacatgtccctttgagccgcccaaacccaagacgaaacataaactagacgtgacaagtgttgaggattacaaggcactgcaaaagtacgaaaaagaaaagttcgaagagatgattcagcagattaaggagacaggcgcgaatctggcaatctgtcagtgggggttcgacgatgaagcaaatcacttactcttgcagaataatttacccgctgtacgctgggttggaggacccgagatagaattgatcgccatcgcgactggcggtagaatcgtgccacggttttctgagctgaccgctgagaagttggggtttgctggtcttgtgcaggagatctcttttgggacaacaaaggacaagatgctggtgatcgaacagtgcaaaaatagccgagccgtcaccatttttattagaggaggaaacaaaatgattattgaggaggcgaagcgctccctacacgacgccctttgcgtgatccgaaatctaataagagataaccgcgtcgtgtatggaggcggagctgctgagatttcatgcgctctggctgtgtcccaggaggcagataaatgtccgactctggagcagtatgcgatgcgggcattcgctgacgcgcttgaggttatacccatggcacttagcgagaattctggaatgaatccaattcagactatgacggaggtgcgagctagacaggtgaaggaaatgaaccccgcgctgggcatagattgcctgcacaagggtacgaacgacatgaaacagcagcatgtcattgagacgctgattggcaagaaacagcagatctcgctggcaacgcagatggtgcggatgatcctgaagatcgacgacataaggaagcctggggaaagcgaagagtag

SEQ ID NO: 111753 - DNA, 1347 bp, synthetic construct
  misc_feature 1..1347: note = Description of Artificial Sequence: Synthetic coding sequence
  source 1..1347: mol_type = other DNA
atggccgccaaggcagtggccaataccatgcgcaccagcttgggaccaaacgtgcttgccggggccttgctggaggaagcggaacagctgctggaccgaggcattcaccccataagaatcgctgacggttatgagcaagctgcacgagtggctatcgagcacctcgataaaatcagtgacagtgtactggtcgatattaaggataccgagccccttatccagacagctaaaactactcttgggtctaaagtagtgaattcttgccatcggcaaatggctgagatagccgttaacgccgtgctgactgtggcggatatggaacgcagggacgttgattttgaacttattaaggttgagggaaaagttggaggaaggttggaggacacaaaacttatcaaaggcgtcatagtggacaaagacttttcccatccacaaatgcctaagaaagttgaggatgccaaaattgccatcctcacttgccctttcgagcctccaaagccgaagaccaagcacaagttggacgttacgtctgtcgaggactacaaggctctgcagaaatatgagaaagagaagtttgaggagatgatccagcagatcaaagaaacgggtgcaaacctcgctatatgccagtgggggttcgatgacgaggcaaaccacttactgctacaaaacaatttgccagccgtgagatgggtgggaggccctgagatagagcttatcgcaatagcaacaggtgggaggatcgtccccaggttctccgaactcaccgctgagaaattgggttttgccggacttgtccaggagatctcctttggaaccaccaaggacaagatgctcgtaatcgaacaatgtaagaattcacgcgcagtgacaattttcattagaggaggaaacaagatgataattgaggaggccaagcgatcactgcatgatgccctttgtgtgatccggaatctcattcgtgacaaccgggttgtatacgggggaggcgctgcagagatctcatgtgccctggcagtcagccaagaagcagacaagtgcccaaccctcgagcagtacgctatgcgtgccttcgcggatgctctcgaagtcatccctatggcgttgtccgaaaactctggcatgaaccctattcagacaatgaccgaggtgcgcgcccggcaggtcaaggaaatgaatcctgccttaggcatcgattgcttgcataaaggcaccaacgatatgaagcagcaacacgttatcgaaactctgatcgggaagaagcagcagatttccctcgcaacacagatggtgagaatgatcctcaaaatcgatgacatacggaaacccggagaatctgaggaatag

SEQ ID NO: 111754 - DNA, 1461 bp, synthetic construct
  misc_feature 1..1461: note = Description of Artificial Sequence: Synthetic coding sequence
  source 1..1461: mol_type = other DNA
atggcctccatggggacgctggcctttgatgaatatgggaggccctttcttatcattaaggatcaggaccgtaaaagcaggttgatgggtttggaggctcttaaatcccatatcatggccgctaaggccgtcgctaatacaatgagaacatcactgggccctaacgtcctggccggagcactgcttgaagaagctgaacagcttctggaccggggaattcatcctataagaatcgcggatggctacgaacaggccgcccgcgtcgcaatcgagcacctggacaaaatctccgacagcgtcctcgtggatatcaaagacaccgaacccctgatacaaacagccaaaacaactctgggttccaaggtggtcaattcctgccaccgccaaatggccgagattgccgtcaatgctgtgctcaccgtggccgatatggaaaggagggacgtggattttgagttgattaaagttgaggggaaggtaggggggagattggaggataccaagctcatcaaaggcgtgatcgtagataaggacttctcacacccacagatgcctaaaaaagtcgaagacgccaagattgctattcttacctgccctttcgagcctcctaaaccaaaaaccaagcataagctggacgttacgagcgtcgaggattacaaggccctgcagaagtacgagaaggaaaagttcgaggagatgattcagcagatcaaggagaccggagctaacctcgcaatatgtcaatggggttttgacgatgaggccaatcacttgctgctgcagaacaatcttccggctgtacggtgggtcggcggccccgagatcgagctgattgctattgcgacaggtggaagaattgtccctcggttttctgaactgaccgccgagaaattggggtttgcaggcctggtccaggaaatttccttcggaaccaccaaagacaaaatgctcgtcattgagcagtgtaagaacagtcgagcagtcactatctttataaggggtggcaacaagatgataatcgaagaggccaagcgcagccttcacgacgcactgtgtgtgattcgtaacctgatccgagataaccgggtggtatatggcggcggcgctgctgagattagttgcgctcttgccgtcagccaggaagccgataaatgtcccacacttgagcagtatgccatgcgcgccttcgccgacgccctggaagttatccccatggccctaagcgagaacagtgggatgaaccccatccagacaatgaccgaggtccgggcgcgccaggtaaaggagatgaaccctgccctggggatcgattgccttcataaagggaccaatgatatgaaacagcaacatgtgattgaaactctgataggtaaaaaacagcagatctcgctagctacccagatggtgagaatgatcttgaaaattgacgatatcaggaaaccaggcgaaagcgaggagtag

SEQ ID NO: 111755 - DNA, 1512 bp, synthetic construct
  misc_feature 1..1512: note = Description of Artificial Sequence: Synthetic coding sequence
  source 1..1512: mol_type = other DNA
atggcagccaaagctgtggcaaacacaatgcgaacatcacttggacctaacgggcttgacaagatgatggttgacaaagacggcgatgtgacagtgaccaatgatggagctacaatcctgagcatgatggatgtggatcaccagattgcaaaactcatggttgagctgtccaagtcccaggacgacgaaataggtgacggaacaacaggggtggtcgtcctcgcaggcgcgctgttggaggaggccgaacagctccttgatcggggcattcatcccatccgcatcgccgatggatatgaacaggcggctcgcgtcgccatagagcacttggataagatctctgacagcgttctggtcgacattaaggatacggagccgctcattcagaccgccaaaaccaccctgggcagcaaagtggtcaatagctgccaccggcaaatggcggagattgcagtgaacgcagtcctgacagtagcagacatggagaggagagacgtggattttgaactcattaaggtggagggaaaagtggggggcaggctggaggatactaaactgattaagggagtcattgttgataaggacttctcccacccacagatgcctaagaaggtggaagacgcgaagattgctattctcacatgtcccttcgagcctcccaagcctaagacaaaacacaagctcgacgtgacgtctgtggaggactacaaggccctacagaagtacgagaaggagaagttcgaagaaatgattcagcaaatcaaggagaccggcgcaaatctcgcaatatgtcaatggggcttcgacgatgaagcaaaccacctcttactccagaataacttgccagccgtgcgatgggtgggggggcctgagatcgagctcatcgccattgccacgggcgggaggattgtgccgcgattctctgagctgactgctgagaagctgggatttgcaggtctggtccaagagatttccttcggcacaactaaagataagatgctcgtgatcgaacaatgcaaaaattctcgcgctgtgacaatcttcatacgcggaggaaataaaatgattatcgaggaggcgaaacgcagtctgcacgatgcactgtgtgtcattaggaatctaatcagagacaacagagtggtatacggagggggcgccgcggaaatctcctgtgcactggctgtgtctcaggaagccgataagtgccccactctcgagcaatacgcgatgagggcttttgccgatgccctggaagtgatcccaatggcgctgagtgagaacagcggtatgaatcctattcagaccatgacggaagtgcgagcacgtcaggttaaagaaatgaatcccgccctgggcattgattgtctgcacaaagggacaaacgacatgaaacagcaacatgtgatagaaacactgatcggtaaaaaacagcaaatctccctcgccacccagatggtgcggatgatcctaaagatcgatgacatcagaaaaccgggcgaaagcgaagaatag

SEQ ID NO: 111756 - DNA, 1593 bp, synthetic construct
  misc_feature 1..1593: note = Description of Artificial Sequence: Synthetic coding sequence
  source 1..1593: mol_type = other DNA
atggccgctatcaaagctgtgaactcgaaggctgaggtggcgcgtgctcgagctgctttggccgtgaacatttgtgctgcccgggggctgcaggatgttcttcgaacgaatttaggccccaagggcaccatgaagatgcttgtctcaggagcgggcgacatcaaactgactaaggacgggaatgttctgctggacgagatgcagattcagcacccaacagcatcattgatcgccaaggttgctacggcgcaagatgacgtgacgggggacgggactacctctaacgtactgattatcggagaactgcttaaacaggccgacctatacatctccgaaggccttcacccccgcatcatcgccgaaggcttcgaagccgcgaagataaaggctctggaggtcttggaagaagtaaaggttaccaaggagatgaagcgtaagatcctgctggatgtagcccgcacatcactccagactaaggtgcatgcagaattagctgacgttctgactgaggtcgtggtcgatagcgtcctcgccgtgagacgccccggttatccgatcgaccttttcatggtggagattatggagatgaagcacaagctcggcacagatactaaactgatccagggtctagtccttgatcacggtgcccgacaccctgatatgaagaaacgggtggaggatgcattcatacttatttgtaacgtatctttggaatatgagaagactgaggtgaactcggggtttttttataaaacggcagaagagaaggagaagttagtcaaagccgaaaggaagtttattgaggatcgtgtccaaaagattatcgatctcaaagacaaagtttgtgcacagtccaacaaggggttcgtggtgattaatcagaaaggaatagatcccttctccttagattctttggcaaaacacggcatagttgcactgcggcgggcaaagcgcagaaatatggagagactgtcattagcctgtggcggcatggccgtcaactcattcgaagacctgaccgtggattgtctgggtcacgcaggactggtttacgagtacaccctgggcgaggaaaagtttacctttatcgaggagtgtgtgaacccatgcagtgtcactcttctggtgaaagggcccaataagcatacactgacccaggtgaaggatgccatcagggacggtctgagagcgattaagaacgccattgaggatggctgtatggttcccggcgctggggcaatcgaagtagcaatggctgaggcccttgtgacctacaagaattccatcaaaggaagggcgagactgggcgttcaggcgtttgccgacgccctgttaattataccaaaagtattggcacaaaacgcgggctatgacccacaggagaccctcgtaaaggtgcaggctgaacatgtggaaagcaagcagctagtcggtgtcgacctgaataccggcgaaccaatggtggcagcagacgcaggcgtgtgggacaattattgcgtgaaaaagcaacttttacacagctgcaccgtaatcgccaccaacatcttactcgtggatgagattatgagggccggcatgagctccctgaagtag

SEQ ID NO: 111757 - DNA, 1482 bp, synthetic construct
  misc_feature 1..1482: note = Description of Artificial Sequence: Synthetic coding sequence
  source 1..1482: mol_type = other DNA
atggcggcaattaaggccgttaattccaaagccgaggtcgccagagcccgcgctgccctggcagtgaatatctgcgctgcacggggcctccaagacgtcctgaggaccaatcttggccccaagggcaccatgaaaatgctcgtgagcggggcaggagacattaaattaacgaaggacggcaatgttcttctagacgagatgcagatccagcacccaacagccagcttaatagcgaaagtggcgacagcacaggatgacgtgacgggagatgggaccacaagcaatgtgcttatcatcggcgagctcttaaaacaagcagatctgtacatctccgaggggctacatccccggattatagctgaaggcttcgaggcagctaagatcaaggccctggaagtgctcgaggaggtcaaggtcaccaaggaaatgaagaggaagatcttactggatgtcgccagaacctcattgcagacaaaggtgcatgccgagctggctgatgtcttgactgaggtggtggtggattctgtgttggctgtaagaaggcctggttatcctatagacctgttcatggtcgagattatggagatgaaacacaagctgggaaccgacaccaaggaggtgaactcaggatttttctataagaccgcggaggagaaagagaagctagttaaggccgaacgcaagtttatagaagacagggttcagaaaattattgatttaaaagacaaagtgtgtgctcagagcaacaaaggcttcgtggtgatcaaccagaaaggaatcgatcctttttctctggacagcctcgctaaacatggcattgtggccttgcgccgagccaagcgccgcaatatggagaggctatcactcgcgtgcggtgggatggccgttaattcttttgaggaccttactgtggactgcctggggcacgccggtctggtatatgaatacactctgggagaggagaaatttacattcatcgaggaatgcgtcaatccatgcagcgtgacactgttagtgaaggggcccaataaacacacgctgacacaggtgaaggatgctatcagagatgggctgagggcaatcaagaatgccattgaggatggctgcatggtaccaggtgccggtgcaatcgaggtggccatggctgaagcactggtgacatacaagaacagcatcaaggggcgcgccaggctgggggtccaggcttttgcagacgctctattaatcattccaaaggtactggcccagaatgcgggctacgatccccaggagaccctggtgaaggtccaggctgaacatgtcgaaagcaaacagcttgtgggagtagaccttaacaccggtgagcctatggtcgctgcagatgcaggggtctgggacaattattgcgttaaaaagcagctgcttcacagctgcacggtgattgcaactaatattctcctggtggatgagatcatgagagcgggcatgtcaagcttgaagtag

SEQ ID NO: 111758 - DNA, 1458 bp, synthetic construct
  misc_feature 1..1458: note = Description of Artificial Sequence: Synthetic coding sequence
  source 1..1458: mol_type = other DNA
atggcagcaatcaaagccgtgaacagcaaagccgaggtggcccgtgcacgcgccgcactggctgtcaatatctgtgcagctcggggactccaagacgtgctccggactaacctaggacctaagggtacaatgaaaatgctggtctcgggcgctggcgatattaagctgacaaaggacggcaatgtgttgttggatgagatgggcctacacccacgtattatcgctgaaggatttgaggcggctaagatcaaggcactggaggtgctggaggaggtaaaagtcacaaaggagatgaaacggaaaatactgctcgacgtagccaggacgtccctgcagactaaagtgcacgcagaactggctgatgtgctcacagaggtcgtggttgactctgttctagctgtaaggcggcccgggtaccctatcgatctgtttatggtagagataatggaaatgaaacataaactcgggactgatacaaagttgattcagggactggtgctggaccacggcgctaggcacccagatatgaaaaagcgcgtagaggatgcattcattttgatttgtaatgtctctctggaatatgagaaaacagaagtcaactcaggtttcttttacaaaacagccgaggagaaggagaagctcgtgaaagctgagcgaaagtttattgaggatcgggtccagaagatcattgacttaaaggataaggtgtgcgcccagtccaataaagggtttgttgtaattaaccagaaagggatcgacccattctccttggactcattagctaaacacgggattgttgcccttcgaagggccaagcgtcggaacatggagcgcctgtcactggcttgcggcggtatggcagtcaactccttcgaggacctgactgtagattgcctgggccacgccgggttagtttatgaatacacactcggagaagagaagtttaccttcattgaagagtgcgtgaatccatgctcggtcactctcttggtgaagggcccaaacaagcacacgcttactcaggtcaaagatgcaattagggacggtctgagggccattaagaacgcaatcgaagatgggtgtatggtgccaggagccggcgccatcgaggtggccatggcagaggcactggttacgtataagaactctataaaggggagagcccgacttggcgtacaggccttcgcggacgcattattgatcatccccaaggtgcttgcccagaatgccggctacgatccacaggagactttggtcaaagtccaagctgagcatgtcgagagtaagcaacttgttggcgtggacctcaacactggagagccaatggttgccgccgatgccggcgtatgggataactactgcgtaaaaaaacagctgctccacagttgtaccgtcatagctactaatatcctgttggtagacgaaattatgcgagcgggcatgagtagtctgaagtag

SEQ ID NO: 111759 - DNA, 966 bp, synthetic construct
  misc_feature 1..966: note = Description of Artificial Sequence: Synthetic coding sequence
  source 1..966: mol_type = other DNA
atgaaaccaggattttctcccagaggcggtggctttggagggaggggaggcttcggagaccgagggggacggggcggccgaggtggatttgggggcggcaggggcaggggcgggggatttcgagggcggggcagagggggtggggggggcggcgggggcggagggggtggcggcaggggaggaggaggattccattcaggtggaaaccggggtcgcggtaggggaggcaagcgggggaaccaaagtggtaagaatgttatggttgaaccccatcgacacgagggggtgtttatctgcagaggcaaagaagacgccctcgtgactaagaaccttgttcccggggagtcagtctacggggagaaacgggtatcaattagcgaaggcgacgataagattgagtatagggcatggaatccttttcggagtaagctggctgccgctatattaggaggggtggatcagatccacatcaagcccggagccaaggtgttgtacctgggtgctgcttccgggacaacggtcagtcatgtttcggatatcgtgggccccgatggcctggtgtacgctgtcgaattcagtcacagaagcggcagagacctcatcaacttagccaagaagcggaccaacattatcccagtcatagaggacgctcggcatccccacaaatacagaatgctgatagctatggtcgacgttatttttgccgacgttgcacagcctgatcaaacaaggatcgtcgcgttgaatgctcatacattcttgcggaatgggggccactttgtgatcagtatcaaggccaattgtatcgacagcaccgcctctgcagaggctgtgtttgccagcgaggtgaaaaaaatgcagcaggaaaatatgaagccacaagaacagctcacactagagccctatgagcgcgaccacgccgtcgtcgtgggcgtgtatcgcccacctcccaaagtgaaaaattag

SEQ ID NO: 111760 - DNA, 723 bp, synthetic construct
  misc_feature 1..723: note = Description of Artificial Sequence: Synthetic coding sequence
  source 1..723: mol_type = other DNA
atggatgttcatggagaggctgccggggaggccggccaggaagggggcgagggcctccaggggggagccggacaatcagaggagggcccatctgctgagaaatgcagagtgtgtccctgcgtctgcagggagcggcatccacaggaggagcgacggtgcgaacttgccagtgacggtgtgccaaggcggaggtctggactgcagggcgcagattcctgtgattatgaggggggtgatcaggagtatggacctggagatcagtcccctgggcaggggccggaacatcatggcccggcagagggtctcctatcagatggacaagttcgggccgctggggctgaaccagggaggccttacatcggggacggggggctgcacgaactcggacaccacccagaccacgcagccggcgcaggcggccagccccatcatgccgaccggaggggcgagtggcctggcggggccggacctgcccaacctgcagcccgaggcaggctttgtcggggtcgagaactgtgcgcccagccaggaggacccgccgtgaccgaggtgggaagacttgaggaactagctgtcccgaggcgctgcgcaccaccacttccccgagatgtccttgagggaagctgtcctctcccgacggccagttgcctctgtgctgatccggccgggctgcgccctgccgcgactctgcgcctttcccctgcaagacccgcatggccctag

SEQ ID NO: 111761 - DNA, 591 bp, synthetic construct
  misc_feature 1..591: note = Description of Artificial Sequence: Synthetic coding sequence
  source 1..591: mol_type = other DNA
atggacgatacactcttccagctcaagtttacggccaagcagctagagaagttagccaagaaggcggaaaaggacagcaaggcagagcaggccaaagtgaagaaggcgttgctgcagaaaaatgtcgaatgtgccagggtttatgcagagaatgccataagaaaaaaaaacgagggggtcaactggctaagaatggcgtcaagagtggatgccgttgcttctaaagtgcagacagctgtgactatgaaaggagtcacgaagaatatggctcaggtaacaaaggctctagataaagcgttaagtaccatggacttgcaaaaggtctcaagcgttatggatcgcttcgagcagcaggtgcagaatctggatgtgcacacttcagtcatggaggatagcatgagtagcgctacaactcttacaacaccccaggaacaggtggatagcctgatcatgcagattgccgaggagaatggactggaggttctcgatcagctgtctcagctgccagaaggcgcatcagctgtgggcgaatccagcgtacgcagccaggaagaccagttgagccgacgcctggctgcactgaggaactag

SEQ ID NO: 111762 - DNA, 600 bp, synthetic construct
  misc_feature 1..600: note = Description of Artificial Sequence: Synthetic coding sequence
  source 1..600: mol_type = other DNA
atgtcgaacatggagaagcacctatttaatttgaaatttgctgctaaagaactctctcggtctgctaagaagtgcgacaaggaggaaaaggctgaaaaggctaaaattaagaaggccatacagaaggggaacatggaagttgcccggattcacgccgagaacgctatccggcagaagaatcaagccgtgaatttcctgcgaatgtctgcaagagttgatgcagtcgcagctcgggtccagaccgccgtcacaatgggtaaagtcactaagagtatggcaggagtagttaagtctatggacgccactctgaaaacaatgaatcttgaaaaaatttccgcgctgatggataaatttgagcaccaattcgaaaccctagatgtgcagacccagcagatggaggacactatgagtagcacaaccactctgaccactcctcagaatcaggtggatatgcttttacaggaaatggccgacgaggctgggcttgacctgaacatggagttgccccaggggcagactggctcagtgggtactagtgttgcgtctgccgagcaggatgaactgtcccagcgactcgccaggctgagagaccaggtgtag

SEQ ID NO: 111763 - DNA, 669 bp, synthetic construct
  misc_feature 1..669: note = Description of Artificial Sequence: Synthetic coding sequence
  source 1..669: mol_type = other DNA
atggacctgttgtttggaagaagaaagactccagaagagttgttacgtcagaaccagcgtgccttaaatagagccatgcgggaattggatagggaaagacagaagctcgagacccaggaaaagaaaataatcgcagacatcaagaagatggccaaacagggccagatggatgcagtgaggatcatggcgaaagatttggtgcggacccgccggtacgtccggaaatttgtgctgatgagagcaaacattcaggccgtctcactcaagatacagactctcaaaagcaacaatagcatggcccaagcgatgaagggagtgactaaggctatgggaacgatgaaccgccagctcaagctacctcagatccagaagataatgatggagttcgaaaggcaggctgagattatggatatgaaggaggaaatgatgaacgacgcaatagacgatgctatgggagacgaggaagacgaggaagagtccgacgctgtggtcagccaggttctggacgaactcggcctatcattgacagatgagttaagtaacctgccatctaccggagggagcctgtccgtagcggctggggggaagaaagccgaagccgcagcctccgccctggcagacgctgatgccgatctagaggagcgtctgaaaaacctcaggagggattag

SEQ ID NO: 111764 - DNA, 669 bp, synthetic construct
  misc_feature 1..669: note = Description of Artificial Sequence: Synthetic coding sequence
  source 1..669: mol_type = other DNA
atggatcttctgttcggcagaaggaaaacccccgaggaacttctgagacagaatcagcgagcactgaatagagccatgcgggaactagatcgcgaaaggcagaagcttgagacacaggagaagaagatcattgcggacatcaagaagatggctaagcagggccaaatggacgccgttcgcatcatggcgaaggatttggttcgcactcgtaggtatgtcagaaagtttgtcctgatgagggcaaacatccaggcagtaagtcttaagatccagaccctgaaatcgaacaactcgatggcccaggcgatgaagggcgtcacaaaagcaatgggaacaatgaaccgccaactgaaattaccacagatccagaagattatgatggagtttgaaaggcaagccgagattatggatatgaaggaggagatgatgaacgacgcaattgatgacgccatgggcgacgaggaggatgaagaagaatccgacgctgtggtgagccaggtgctagatgaacttggtctctctcttacagacgagctatccaacctgcctagtaccggcggcagtctgagcgtggcagctggaggcaaaaaagcagaggccgcggcgtctgctctggcagacgccgacgcagatctggaggagcggctgaagaatttacggcgggattag

SEQ ID NO: 111765 - DNA, 642 bp, synthetic construct
  misc_feature 1..642: note = Description of Artificial Sequence: Synthetic coding sequence
  source 1..642: mol_type = other DNA
atggcttccctgttcaaaaagaagaccgtcgacgatgtgataaaagaacagaaccgtgagttgagagggacacagagggccatcattcgggatcgcgccgcccttgaaaaacaggaaaagcaactggaactcgagattaaaaaaatggccaagatcggtaacaaggaagcctgtaaagtgcttgccaagcagctagtgcacctcaggaaacagaaaacccgcacgtttgctgtctcaagtaaggtgacctctatgtccactcagactaaagtgatgaactctcagatgaagatggcgggcgcaatgtccacaacggccaaaacaatgcaggctgtgaacaaaaaaatggaccctcagaagactctgcagactatgcagaattttcaaaaagagaacatgaaaatggaaatgacagaggagatgatcaatgacaccctggacgatattttcgatggaagcgatgacgaagaggagtctcaggacatcgtcaaccaggtgttggatgagataggaatagaaatctccggcaaaatggccaaggccccatccgccgccagatccttgcctagcgcctcgacatccaaagccaccatctctgacgaggagatcgagaggcaactcaaagcactcggagttgattag

SEQ ID NO: 111766 - DNA, 519 bp, synthetic construct
  misc_feature 1..519: note = Description of Artificial Sequence: Synthetic coding sequence
  source 1..519: mol_type = other DNA
atggagctggaaataaagaagatggctaagattggaaataaagaggcttgcaaggtgctcgccaagcagttagtgcacctccgaaaacaaaaaacccggacatttgctgtcagttccaaagtcactagtatgtctactcagaccaaagtgatgaactcacagatgaagatggccggagcaatgagtactactgcaaagactatgcaggcggtaaataagaagatggacccccagaaaacactgcaaaccatgcagaactttcaaaaggaaaacatgaaaatggaaatgacggaagagatgattaatgacacactcgatgacatcttcgacggaagcgacgacgaagaggagagtcaggacatcgtgaatcaggtcttagacgaaataggaattgaaatttcaggtaagatggctaaagctcccagcgctgcccgatctctcccttcagcttcaacgtccaaggccaccatttctgacgaagagattgagaggcagctcaaagctctcggagtggattag

SEQ ID NO: 111767 - DNA, 669 bp, synthetic construct
  misc_feature 1..669: note = Description of Artificial Sequence: Synthetic coding sequence
  source 1..669: mol_type = other DNA
atgggcctcttcgggaagacacaggaaaaaccgccaaaggaactggtgaacgagtggtctttgaaaataaggaaagaaatgagagtagttgatagacaaattagggacatccaacgagaggaagaaaaagtgaagcggtcagtgaaggacgccgccaaaaagggccagaaggacgtttgcattgttctggctaaagaaatgatcaggagtcgaaaagcggtttcaaagttatatgcctcgaaggcccacatgaacagtgtcctcatgggcatgaaaaaccagctggcggtcctcagggtggccggatcactccaaaagagtacagaagtgatgaaggcaatgcaaagtctcgtcaagattcccgagatccaggccaccatgcgcgagctgagtaaagaaatgatgaaggccggcatcatcgaagaaatgctcgaggataccttcgagtcgatggatgaccaggaggaaatggaggaggaagctgaaatggagattgatagaatcttgtttgagattaccgcaggtgcgctcggaaaagccccctccaaggtcaccgacgccctgcctgaacccgagcccccaggagccatggccgcgagcgaagacgaggaagaggaggaagaagcactggaggcaatgcagtcccgcctagccacactgcggtcctag

SEQ ID NO: 111768 - DNA, 471 bp, synthetic construct
  misc_feature 1..471: note = Description of Artificial Sequence: Synthetic coding sequence
  source 1..471: mol_type = other DNA
atgattagatcccgcaaggctgtctccaagctttatgccagcaaagcccacatgaacagcgtactgatgggcatgaagaaccagctggctgtgctgagagtggctggaagtttacagaagtccactgaggtgatgaaagccatgcagtctttggtaaagatacctgagatccaggccacaatgagagagctgtcaaaggagatgatgaaggctgggattatagaggagatgctcgaagacacttttgaatccatggatgatcaagaggagatggaggaggaagccgagatggaaatcgaccgcattctctttgagattactgccggcgcattgggtaaggcccctagcaaggttaccgacgctctgcccgagcctgagccacccggagccatggccgccagcgaggatgaggaggaggaggaagaggccttagaagctatgcagagcagactggcaacactgcgaagctag

SEQ ID NO: 111769 - DNA, 756 bp, synthetic construct
  misc_feature 1..756: note = Description of Artificial Sequence: Synthetic coding sequence
  source 1..756: mol_type = other DNA
atggaaggggaactttatagcgccctgaaggaggaagaggcaagcgagtccgtgagttctacaaacttctcgggcgaaatgcatttttatgaattggtcgaagacacaaaggacggaatttggctcgtgcaagttaacgagtggtcactgaagattcgaaaagaaatgagagtggtggaccgacagattagggatatccagagagaggaggagaaagtcaaaaggtcagtaaaggatgctgcgaaaaagggccagaaggatgtttgcatcgtgctcgcaaaggaaatgatacgtagccgaaaggcagtcagcaagttatacgcctccaaggcccacatgaacagtgttttgatgggtatgaaaaaccagttagctgtattaagagtggccgggagcttgcagaaaagcacagaggtaatgaaggcaatgcaaagtctggttaagatacccgaaattcaagcgacgatgagggagctgtccaaagaaatgatgaaggcaggcattatagaggagatgcttgaggacacttttgaatcaatggatgaccaggaggaaatggaagaggaagccgagatggagattgaccgtatcttgttcgagattactgccggggccctcggtaaggccccttccaaggtcacagatgcactgcccgaaccggagcccccgggcgctatggccgcctccgaggatgaggaggaggaagaggaagcgctggaagccatgcaatcgcgacttgccaccctccggtcctag

SEQ ID NO: 111770 - DNA, 549 bp, synthetic construct
  misc_feature 1..549: note = Description of Artificial Sequence: Synthetic coding sequence
  source 1..549: mol_type = other DNA
atgggcctgtttgggaaaacgcaagagaaaccccccaaggaacttgtcaatgagtggagtcttaaaatccggaaagagatgcgagtagtggatcggcaaattagagatatacagcgagaagaggagaaggtgaaacgcagtgtgaaagatgcagctaaaaagggacagaaagatgtgtgcatcgttctcgcaaaggagatgatccggagccgaaaggcgatgcagtccttagtcaaaattcccgaaatccaggccacgatgagagaactcagtaaggagatgatgaaagctggtatcattgaagagatgctagaggatactttcgaaagcatggacgaccaggaggagatggaggaagaagctgaaatggaaatagaccgaatactgttcgagattaccgcgggagctttagggaaagcgcccagcaaagtgactgacgcattacctgagccagaacccccaggggcaatggccgcttcggaagacgaggaagaggaagaggaggccctggaagccatgcagtcccgcctcgctactctacggtcgtag

SEQ ID NO: 111771 - DNA, 798 bp, synthetic construct
  misc_feature 1..798: note = Description of Artificial Sequence: Synthetic coding sequence
  source 1..798: mol_type = other DNA
atgtccagaaggagacctgaagatggactcggtaaagctgggccttgcgtcatgcgccaccaccctccacgctcaaaagcggaagtatggcggaccctgcgtggggggggcggcagaggcgagctcgccatgtccggcctgggccgattgttcggcaagggaaaaaaggagaagggcccaactccggaggaggccatccagaagctcaaggagactgaaaaaattctcatcaaaaagcaggagtttctggaacagaaaatacagcaggaattacagacagccaagaaatacgggaccaagaataagcgagccgccctgcaggccctgcggagaaaaaaacggttcgaacagcaactggctcagacagatggcacattgtctaccttggagttccagcgcgaggcaattgaaaacgctaccacgaacgccgaagtcctgcggactatggaattagcggctcaatcgatgaaaaaggcataccaagatatggacatagataaagtcgatgagctaatgaccgatatcacagagcagcaggaggtggcgcagcagattagtgatgcgatctccagacccatgggcttcggagatgatgtggacgaggacgagcttcttgaggagctggaagagctggagcaagaagaactcgcacaagagctgttaaatgtgggggacaaggaggaagagccttccgttaagctcccgtctgtgcccagcacccacttgcccgctggaccagctccaaaggttgatgaggacgaagaggctctgaaacagctggccgagtgggtgtcttag

SEQ ID NO: 111772 - DNA, 378 bp, synthetic construct
  misc_feature 1..378: note = Description of Artificial Sequence: Synthetic coding sequence
  source 1..378: mol_type = other DNA
atggccggcccgtctctggcatgttgcctcctgggactactcgccctgacctcagcgtgttatatacaaaactgccccctgggggggaagagagctgctccagacctggatgtgagaaaatgtctgccttgtgggccaggaggaaagggccggtgctttggccccaacatttgttgcgccgaggaactggggtgtttcgtgggaacggccgaggccctcagatgccaagaagaaaactacctcccctctccctgccagagtggccagaaggcttgcggatcaggtggcaggtgtgcggtcctggggctgtgctgtagccccgatggttgccacgctgatcccgcttgcgatgcggaagccacgttctctcagcgttag

SEQ ID NO: 111773 - DNA, 831 bp, synthetic construct
  misc_feature 1..831: note = Description of Artificial Sequence: Synthetic coding sequence
  source 1..831: mol_type = other DNA
atggcccccccccccgcaccgcttttagccccgcgccctggcgaaaccagaccaggctgcagaaaacctggaaccgtgtcctttgcggacgtggctgtctacttctcacccgaggagtggggatgtttaagaccggcgcagcgcgccctgtatcgggacgttatgcaggagacatacggccacttaggcgctttgggattcccaggtccaaaaccagcgctgatttcctggatggaacaagagtccgaagcgtggtcacccgctgcccaggaccctgagaagggggaaagacttggaggagccaggagaggcgacgtacccaacagaaaggaagaggagccagaggaggttcctcgagcaaaagggccacggaaggcaccagtcaaggagtcacccgaagtgctggtcgagcgcaatccagacccagcaatatccgtggcaccggccagagcgcaaccgcctaaaaatgcagcatgggatccaacaactggtgcccaaccacctgcacccataccctctatggatgctcaggctggccagagacgacatgtttgtaccgactgcgggcgccgtttcacatatccatctttgctcgtatctcatcgtcgcatgcattcgggagaacgacccttcccatgcccagagtgtggcatgcgatttaaaaggaagtttgcagttgaagcccaccaatggatccacaggtcctgcagtggagggaggagaggtcggcggccaggaatccgagccgttcctagggcgcctgtgcgcggcgacagggacccccctgtgctatttcggcactaccccgacatctttgaggaatgcgggtag

SEQ ID NO: 111774 - DNA, 516 bp, synthetic construct
  misc_feature 1..516: note = Description of Artificial Sequence: Synthetic coding sequence
  source 1..516: mol_type = other DNA
atgaaccgcctgttcggcaaagcaaaacccaaagcccctcccccatctttaaccgattgtatcggcaccgtcgactctcgagccgaatctatcgataaaaaaatttcacgactcgacgccgaactagtaaaatataaggaccaaattaagaaaatgagagaaggaccagcgaagaatatggtgaagcagaaggcacttcgagtgttaaaacagaaacgaatgtacgagcagcagcgggacaacctcgcacagcagtcattcaacatggaacaggccaattacactatccagtccctgaaagatactaagaccactgtggatgctatgaagctgggtgtaaaggaaatgaaaaaagcctataaacaagtgaaaatcgaccaaatcgaagatcttcaagaccagctggaggacatgatggaagatgccaacgagattcaggaggctctgtcccggtcatacggcactccggaactggacgaagatgacttggaggcggggtggtcttccggaggctag

SEQ ID NO: 111775 - DNA, 606 bp, synthetic construct
  misc_feature 1..606: note = Description of Artificial Sequence: Synthetic coding sequence
  source 1..606: mol_type = other DNA
atgggcaacctgttcggccgtaagaaacagtcccgggtcacagagcaggacaaggcaattctgcagctgaaacagcagagagataaattgagacagtaccagaagcggatcgcacagcagctcgaaagagagcgggccctggctcgccaactgttgagagacggccgaaaggaaagggcaaaacttctgctgaagaagaaacgataccaagaacagttgttagaccgtaccgagaaccaaatctccagcctggaagctatggtgcagtccatagagttcacgcaaatagagatgaaagtgatggagggtctccaatttgggaacgagtgcctcaacaagatgcatcaggttatgtccatcgaagaggtggagagaattctggacgagactcaggaggcagtagaatatcaacgccagattgatgaactgctcgccgggtcatttactcaagaggacgaagacgcaatcctcgaggagctctcggcaattacgcaggaacaaattgagcttccggaggttccaagcgagcctctgcctgagaaaattccagaaaatgtgcctgtcaaagcacgccctcgacaagccgagctggtcgccgcatcatag

SEQ ID NO: 111776 - DNA, 1362 bp, synthetic construct
  misc_feature 1..1362: note = Description of Artificial Sequence: Synthetic coding sequence
  source 1..1362: mol_type = other DNA
atgtggagtccggaaagggaggccgaggcgccagcagggggggatcctgccggtctattaccacccgaatgggaggaggatgaggaaaggatgtctttcctattctccgcctttaaacgttcccgagaagtgaacagcacagactgggattccaagatgggattttgggcgcctctggtactttcacactcccgaaggcagggcgtggtgcggctgaggctcagagacctgcaagaagcttttcagagaaaaggatcagtgccactggggcttgctactgttctccaagatttactcagacgcggggaactccagcgggaatctgactttatggcttcagtggattcatcttggataagctggggcgtgggcgtgttccttctgaaaccactcaaatggaccctgtctaacatgttgggagacaacaaagtcccagccgaagaggtgctggtggccgtcgaactgctaaaagaaaaagcagaggaagtgtacagattgtatcaaaattcaccacttagcagccatccagtggtcgccctcagcgaactctcaaccctgtgtgccaacagttgtccagatgaacgaactttctacctggtgctgctgcagctgcagaaggagaagcgagttaccgttctggagcaaaacggcgaaaagatcgtaaagtttgcgcggggaccccgggccaaggtctcaccagtcaatgatgttgacgttggcgtgtaccagctgatgcaatcagagcagctgttatctagaaaagtcgagtcactctcacaggaggcagaacgctgcaaggaggaggcccgacgcgcgtgccgcgccggcaagaagcagctggcactgaggtcactgaaggctaagcaacgcaccgagaaaagaatagaagccctgcatgccaaattagacaccgtgcagggcatcctcgacaggatctatgcctcacagactgaccagatggtgttcaatgcataccaagcaggtgttggagccctcaaactgagcatgaaggatgtcacagtcgagaaagcagagagcctggtggatcagattcaggaactttgcgacacacaggacgaagtgtcccagactctggccggtggcgtcaccaatggtctcgatttcgactcagaggagctggaaaaggagctcgatattctgttgcaggacaccactaaagaacctcttgacctccccgataacccaaggaatcgccattttacaaattccgtgcccaaccctcgcatctccgatgccgagctggaagccgaactcgagaaattgtctctctcagaaggaggcttggtgccttctagtaagtcccctaagaggcagttagaacctactctgaagccactgtag

SEQ ID NO: 111777 - DNA, 1362 bp, synthetic construct
  misc_feature 1..1362: note = Description of Artificial Sequence: Synthetic coding sequence
  source 1..1362: mol_type = other DNA
atgtggtccccagaacgtgaggctgaagcgccggctggcggagatccagcagggctccttccacctgagtgggaagaagacgaggaaagaatgtctttcttattctctgcttttaagagatcccgcgaggtaaactccactgactgggactccaagatgggcttttgggcccccctggtgctgtctcacagccggcggcagggcgtggtccggctacggctgcgcgatttgcaggaagcgttccagcgcaaaggaagtgtacctctgggcctggccaccgtgctccaggacctgttgaggagaggagaactgcagcgcgagagtgacttcatggcttcggttgacagcagctggatatcttggggtgtgggagttttcctcctaaagccattaaagtggaccctgtcaaacatgttgggggacaacaaagttccggcggaagaggtgttggtcgcagtcgagctgcttaaggaaaaagcagaggaggtgtaccgcctgtatcagaactctcctctcagttctcacccagtggtggccctctcagaactctcgactttatgtgcgaattcttgtccagacgagcggactttctatctggttcttctgcagctccagaaagagaaaagagtgacagttctggaacagaacggagagaaaatcgttaaattcgcgcgagggccgagagccaaagtgagcccagtcaatgatgtggacgtaggcgtgtatcagctgatgcagagtgagcaacttctgagccgcaaggtggaatccctatcccaggaggctgaaagatgtaaggaagaagctcgcagggcttgccgcgccggcaagaagcagctggctttgagatccctgaaggccaaacagagaacagaaaagagaatcgaagctttgcatgctaaactcgacactgtgcagggcatacttgatcgtatctatgcttcgcagaccgaccaaatggtgttcaacgcctatcaagcaggggttggggcactgaagttaagcatgaaagacgttacagttgagaaagccgaatctctggtggatcagatccaagaactgtgtgacactcaggacgaggttagtcagacactggcaggcggtgttacaaacggcttggactttgatagcgaagaactggaaaaggaacttgacatactgctgcaggatacgactaaagagcccttggacttacccgataaccccagaaacagacactttactaacagcgtgcccaacccacgcatctcagatgcagaactggaagctgagctggaaaaactgtccctaagtgagggcggactggtcccatctagcaaatcccccaagcggcagcttgaacccacactcaagccactatag

SEQ ID NO: 111778 - DNA, 1992 bp, synthetic construct
  misc_feature 1..1992: note = Description of Artificial Sequence: Synthetic coding sequence
  source 1..1992: mol_type = other DNA
atggaacgacccgaggaaggtaagcagtcaccacctccccagccttggggaagactgttgagattaggcgctgaggagggcgaacctcacgttctgctaaggaagagggaatggactatcggccggcgcagggggtgcgacctgtccttcccttcaaacaagctggtgtccggtgaccattgtcgaattgtggtggatgagaaatcggggcaggtgaccctcgaggatacatccacttccggtacggtgataaacaagctcaaagtcgtgaaaaaacagacatgtcccctgcagacgggcgatgttatttatctggtgtatagaaagaatgagccagaacacaacgtcgcctatttgtatgaatcactcagtgaaaagcagggaatgacccaagaatctttcgaagctaataaggagaacgtgtttcacggcaccaaagatacctccggggccggagccggtcgtggtgccgacccccgggttccaccatccagcccggctacccaggtgtgctttgaggagccacagccctccacatctacgagcgacctgtttcccactgctagtgcatcaagtaccgagccctccccggccggccgggaaagatctagttcttgcggttccggtggtggggggatctctcctaagggcagcggcccctcagtggcttcagacgaagtttcgagtttcgcatcagcactgcccgatcggaaaactgcaagtttttccagcctggagccccaggaccaggaagatctggagccagttaagaagaagatgagaggggacggggacctggacctgaacggccagttactggtggcacaaccccgacggaatgctcagaccgtgcacgaagatgtccgggccgccgctggtaagcctgacaagatggaggaaactctgacatgcattatttgccaggatcttttacacgactgcgtgtctctccagccctgcatgcatactttttgcgctgcatgttattccgggtggatggaaaggtcaagtctctgcccaacttgcaggtgcccggtggaacgaatctgcaagaatcatattcttaacaacctggtcgaagcgtacttgatccagcacccgggaaatagtaggagcgaggaggatgtgcagtcaatggatgcaaggaataaaattacacaggacatgctccagcccaaggtccggcgcagcttctccgacgaagagggaagctcagaagatttgctggagctgagcgacgtggatagtgaaagcagcgacatctctcagccatacgtagtgtgtaggcagtgtccagagtaccgcaggcaggcggcacagcctccccactgcccggctccagaaggagagcctggagcaccccaagcactgggtgatgcacccagtacatctgtatctttgacaactgtgcaagattacgtgtgtcccttacagggcagccacgccctgtgcacctgttgttttcagcccatgccagataggagggccgagagagaacaagacccaagagtggctccccagcagtgcgccgtctgcctccagcccttctgccacctgtactggggatgcacgcgcaccggctgctacgggtgcctcgctcccttctgcgaactcaacctcggggataagtgcctggacggagttctcaacaacaactcgtacgagagtgacatccttaagaattatctcgccacccggggcttgacttggaagaacatgctgacagaaagtttagtcgccctgcagcgtggcgttttcttactctccgattaccgggttactggcgatacagtattgtgctattgttgtggactgcgtagctttcgcgagcttacctatcagtaccgtcagaacatcccagccagcgaactgcctgtggccgtcacctcaagaccagattgctactggggacgtaactgccgaactcaagtaaaggcccaccatgcaatgaaatttaatcatatctgcgagcagacccggttcaaaaattag

SEQ ID NO: 111779 - DNA, 1872 bp, synthetic construct
  misc_feature 1..1872: note = Description of Artificial Sequence: Synthetic coding sequence
  source 1..1872: mol_type = other DNA
atggaaagaccagaggagggtaaacagtctccccctcctcaaccctggggaagactgttgcggttaggcgcagaagagggggagccccacgtgctgcttcgcaagagggagtggacgatcgggcggcggagaggttgtgacctgagcttcccatccaacaagttggtgtctggagaccattgtagaattgtggtggacgagaagagtgggcaagtgactctcgaggacacatcaacctctggtactgtgattaacaaactaaaggtggttaagaagcagacttgcccactgcaaaccggcgatgttatttacctggtgtaccgaaagaacgaacctgagcataatgttgcgtatctgtacgagtctctctctgaaaaacaagggatgacccaagagagttttgaaatggtgccttgctgcgtcgctcaagctggcctaaaactgctcgggagcagcgatccccctaccctggcctcccaaagcatagtgattaccgggtctggaggcggcggaatcagccccaaagggtctggaccgtctgtggcgagcgacgaagtcagctcatttgcctctgctttgcctgatcgcaagacggcaagcttcagctccctggagccgcaggaccaagaagatctcgaacccgtgaaaaaaaagatgcggggggatggagacctggacttgaatggccagctgcttgttgcacagcctcgacggaacgcacagactgttcacgaggatgttagagctgccgcaggcaaacctgacaagatggaggagaccttaacatgtataatctgccaggatctcctgcatgattgtgtgagcttacagccatgcatgcacactttctgtgccgcctgctattccgggtggatggagaggagctccctctgtccaacatgcaggtgccccgttgagcgaatctgtaaaaaccacattcttaataacttggtggaggcatatctgatccagcatccagacaagtccagatcagaggaggacgtccagagcatggacgctaggaataagataactcaagatatgttgcagcctaaggtgcgccgctctttttccgatgaagaaggtagctccgaggacctcctcgagctgagcgacgtcgattctgagagtagtgatatctctcaaccttatgtggtctgcaggcagtgtcccgaatacagacgacaagcggctcagccacctcattgccccgctcccgagggcgagccaggcgctccccaggcactgggcgacgctccatcaacatcagtgtctctgacaaccgccgtgcaggattacgtgtgtcccctgcaaggaagccatgccttgtgtacctgctgctttcagcccatgccggaccgcagagcggagagggagcaggatcccagggtggcgccgcagcaatgcgccgtgtgcttacagcccttctgccatctgtactggggatgcacccgaactgggtgctacggctgtctagcacccttctgtgaactgaaccttggggacaagtgtctggatggcgtgttgaacaacaacagctatgagtcagacatcttaaaaaactatctcgctactagggggctgacgtggaaaaacatgctcactgagagcctggtcgccttgcagagaggcgtcttcctgctctccgactacagggtgaccggcgatacagtgttgtgctattgttgcggcctgcgttcctttcgagaacttacatatcagtacagacaaaacatcccagcttccgaactgcctgtagccgtgacatctagacccgactgctactggggacggaactgcagaactcaggttaaggcacatcatgcgatgaagtttaatcatatctgtgagcagacaagattcaagaactag

SEQ ID NO: 111780 - DNA, 1995 bp, synthetic construct
  misc_feature 1..1995: note = Description of Artificial Sequence: Synthetic coding sequence
  source 1..1995: mol_type = other DNA
atggaacggcctgaggagggaaaacaaagccctccccctcagccgtggggtcgtctgctgcggttgggcgccgaagaaggggaacctcatgtgctcctccgcaaaagagagtggacaatcggtaggaggcgcggctgtgacctgtcttttccttcaaataaactggtgtctggggatcactgcagaatcgtggtggatgaaaagagcggccaggtgactcttgaggataccagtacgagcgggacggtgattaataagctgaaggtggtaaagaagcagacttgtcctctgcagacaggcgacgtcatctacctggtctacaggaagaacgagccagaacataacgtcgcttatctatacgagtcactatccgaaaagcagggtatgacccaggagagcttcgaagcgaataaagagaacgtttttcacggaaccaaggacacctcaggagctggagcggggcgaggcgcagacccacgagtaccaccctccagtcccgctacccaggtgtgttttgaggagccccaacccagtacatcgactagcgacctgttcccaacagcttccgcgtcttcgacggagccctcacctgctgggcgagaacgcagcagctcatgtggatcaggagggggggggatttctcccaaagggagcggcccttccgtcgcctcggatgaagtcagcagctttgcttccgcattaccggataggaagacagcgtcgttttctagcctggagccgcaagatcaggaggatctggagcctgtaaagaagaaaatgagaggagatggggatttagacctcaacggacagcttcttgtggcccagcctaggagaaatgctcaaaccgttcatgaagatgttagggcagccgctggcaaaccagacaagatggaagagactctgacctgcatcatatgccaggacctgttgcatgactgcgtgtctcttcagccgtgtatgcacacattctgtgccgcctgttacagcggctggatggagcgttcttccctctgtcctacatgccgttgcccggtcgaaagaatttgtaagaaccacatccttaacaacttagtggaggcgtatttgattcagcacccggataaaagccgatcagaggaggacgttcagagcatggatgcccggaataaaattactcaggatatgctgcagcccaaggttaggcgctcattctctgatgaagagggatcttcggaagatcttttagagcttagcgatgtcgacagtgagtcttctgatattagtcagccttacgtagtttgccggcaatgtcccgagtacagaagacaggccgcccagccgccccattgcccagcccctgagggagagccaggcgccccacaggctctcggcgacgcccccagcacttctgtttccctgaccacagccgtgcaggactatgtgtgccctttacagggcagccatgcactatgtacttgttgctttcagccaatgccagatcgacgcgcagaacgcgagcaggacccacgcgttgcgccacaacagtgcgcagtctgcctacagccattttgccatctatactggggctgcacgagaacaggatgctatgggtgcctcgcgcctttttgcgagttgaatctcggcgataaatgtctggacggagtgttgaacaacaactcctacgaatctgacatcctcaaaaactacctggctaccaggggtctgacctggaaaaatatgctgaccgaaagccttgtagctctccagaggggtgtatttcttcttagcgattatcgcgtaactggggacaccgtgctttgttattgttgcggcctcagatcttttcgcgaactcacatatcagtatagacagaatatccctgcctctgagctgcccgttgcagtcacctctcgtcctgattgctactggggacgcaattgtcggactcaagtgaaggcgcatcatgcaatgaagtttaatcatatctgtgagcagactcgtttcaaaaactag

SEQ ID NO: 111781 - DNA, 1959 bp, synthetic construct
  misc_feature 1..1959: note = Description of Artificial Sequence: Synthetic coding sequence
  source 1..1959: mol_type = other DNA
atggagcgacctgaagagggcaagcaatctccgcctccgcaaccttggggacgtctcctccgtttgggcgcagaagagggcgagccccatgtgctgctgcgaaaacgggagtggacgatcgggaggcggagggggtgcgatctctcttttccaagtaataaacttgtttcaggggaccattgccggatcgtcgtcgacgaaaagtccgggcaagtgacactggaggatacgtctacatctggtactgtcatcaacaaacttaaggtggtgaagaagcagacttgtcctctgcagacaggagacgtgatttacctggtgtacagaaagaatgagccagaacacaatgtcgcatacctgtacgagtcgctatctgagaagcaaggaatgacccaggaaagctttgacaccagcggtgccggcgccggccggggagctgaccctcgggtgcccccgtcgagtcctgccactcaagtgtgctttgaggaaccccagccatcaacatctaccagtgaccttttccccactgcttctgcttcatctacagagcctagccccgctggcagagagagaagttcgagctgcggctccggtggggggggaatatcgcccaagggatcagggccttccgtggcgtccgacgaagtgtctagttttgcatccgcgctacccgacagaaagacagcatcctttagctcacttgagccacaagaccaggaggacttggaacccgtcaaaaagaagatgcggggcgacggtgatctcgacctaaacggacagctactcgtagctcagcctcggagaaatgctcagactgtccatgaggacgtccgtgccgccgccggaaaacctgataagatggaggagaccctgacttgcatcatctgccaggaccttctccacgactgcgtatcactgcaaccctgcatgcacacattttgtgccgcttgttattctggatggatggagcgctcttccctgtgtcccacatgcaggtgtccagtagagcgtatttgtaagaaccatatcttaaacaaccttgttgaggcctatctgatacagcaccccgataaatctcggagcgaggaggacgtgcagtcgatggacgcccgcaacaaaataacacaggacatgctgcagccaaaggtgcggaggagtttctccgatgaggaagggtcctcagaggatctcttggagctttcggacgtggactccgagtcctccgatatctctcaaccttatgtggtgtgtagacagtgccctgaatatagaagacaggctgcgcagcctccacattgccccgcacccgagggcgagccaggggctccccaagcgttaggcgatgcaccttcaaccagcgtgtccctcacaaccgccgtccaggattatgtgtgccccctgcaaggatcccacgctctctgcacctgctgcttccagccaatgcctgaccgccgggcagagcgggagcaggacccaagggttgccccccaacagtgtgccgtgtgtttacaaccattctgtcatctgtactggggatgtacgcgtacaggctgttacgggtgcctggcccccttttgcgaactaaaccttggcgataagtgcttagatggcgtgctgaacaataattcatacgaatctgacatcctcaaaaattatctagccaccagagggctcacgtggaagaacatgctcacagaaagtttggtggcactacagaggggagtctttctgctctcagactaccgggtcactggggatacagtgttatgttattgttgtgggctgaggtccttccgtgaactgacgtaccaataccgtcaaaatattcctgcatctgagctgccagtcgctgtaacgagccgccctgactgttattggggacggaactgccgcacccaggttaaggcccatcacgccatgaaatttaaccatatatgcgaacaaactagattcaaaaactag

SEQ ID NO: 111782 - DNA, 672 bp, synthetic construct
  misc_feature 1..672: note = Description of Artificial Sequence: Synthetic coding sequence
  source 1..672: mol_type = other DNA
atggaacgccccgaggagggaaagcaatctccaccacctcagccatggggccgcctcctccggcttggggccgaagaaggcgaacctcacgtgttgctgagaaaaagggagtggactatcggacggcggagaggttgcgaccttagctttccaagcaataaactggtatccggtgatcattgcaggattgtggtggacgagaagtctggtcaggttaccttagaggatacctccacctcgggaactgtgatcaacaagctcaaggtggtgaagaaacagacttgtccattgcagaccggagacgtgatatacctggtgtatcgcaagaacgagcctgagcacaatgttgcttacctgtatgaaagcctctccgagaagcaggggatgacacaagaatcctttgacacttctggcgctggcgctgggcgcggcgccgatccacgcgttccaccatcgagtccagccactcaggtttgcttcgaagagccacagccctcgacctccaccagtgatttgtttcccaccgcttctgcgtctagcaccgagccctctcccgccggccgggagcgcagttcctcatgtggctcgggcggggggggcatatctcccaaaggctcaggcccctctgtcgcatcagacgaggtgtctagttttgctagcgccctcccttag

SEQ ID NO: 111783 - DNA, 1050 bp, synthetic construct
  misc_feature 1..1050: note = Description of Artificial Sequence: Synthetic coding sequence
  source 1..1050: mol_type = other DNA
atgacccaggagagcttcggttccggaggcggcggcatctcgcccaaaggaagcggtccttccgtagccagtgacgaagtcagcagctttgcgtccgccttgcctgatcgaaaaacagccagtttctcttcgctggaacctcaggatcaggaggatctggagcccgtgaagaagaaaatgcgcggggacggggacctcgatctgaatggacagctattggtcgcacaacctaggagaaacgcccaaaccgtccatgaggacgtacgagcagccgcgggcaaacctgacaaaatggaggagactctgacctgcattatttgtcaagacctgcttcacgattgcgtatccctgcaaccctgcatgcacaccttttgtgccgcctgctactcgggatggatggaaaggtcaagcctgtgtcccacatgtagatgtcccgtggaacgcatttgtaagaatcatatactcaataatctggttgaagcttacttgatacagcatcctgacaagtcccggtccgaggaggatgtacaaagcatggacgcacgtaacaaaataactcaggacatgctccaacctaaggtccgacgttccttttccgatgaagagggcagctccgaagatcttctcgaactgtccgacgtggactctgagtccagtgacatctcgcagccttacgtcgtgtgtcgccagtgcccagagtacagaagacaggcagcgcaaccaccgcattgccccgcaccagaaggcgagcctggtgcccctcaggctctaggagacgccccctcaacctccgttagcctcaccactgcagtacaggactacgtctgtccattgcagggctcgcatgccttgtgcacttgttgctttcagcctatgcctgatcgaagggcagagcgcgaacaggaccctcgcgtcgccccgcagcaatgcgccgtatgcctgcagcccttctgccacctatattggggctgtacccgaacagggtgttatgggtgtctggcacccttttgtgtctccggaagacagtgcttcccagccacctctttgtag

SEQ ID NO: 111784 - DNA, 1719 bp, synthetic construct
  misc_feature 1..1719: note = Description of Artificial Sequence: Synthetic coding sequence
  source 1..1719: mol_type = other DNA
atggaacgccccgaggagggaaaacaaagtcctccaccacaaccttggggcaggctcttgcgcttaggggccgaggagggagagccccatgtcttgctcagaaaacgggagtggacgatagggagacggagaggatgtgacttgagtttcccgagcaataagctggttagcggggatcattgcagaatcgtcgtagacgagaaatccggacaagttacactggaggacactagtaccagcggaacagtgattaataagctcaaagtggttaagaagcaaacttgtccgctgcagactggggatgtaatctacctcgtatatagaaaaaatgagcccgagcaccgttccgggggtggcgggattagccctaaggggagcggaccttctgtcgcatctgacgaggtgtcctccttcgcgagtgctctgccggaccggaagacagcctcattctcaagcctggagcctcaggaccaggaggatctcgagcctgtgaagaaaaagatgagaggcgacggtgatctcgacctcaatggtcaacttctcgtggctcagccaagaagaaatgcccagacagtgcacgaagatgttcgcgctgcagccgggaaacccgacaagatggaggagacactgacctgcattatttgccaagacctgctccatgactgtgtaagcctccagccatgtatgcacactttttgcgccgcttgctactcgggttggatggaaaggtcgtctctatgcccgacttgccggtgcccggtcgagcgaatctgtaagaaccatatccttaataatctcgttgaagcctacctgattcagcaccccgacaaatctcggtccgaggaggacgtacaaagcatggacgccaggaacaagatcacccaggacatgctgcagcccaaggtgaggcgcagtttcagcgacgaagagggatcctctgaagatctgctagagctgagtgacgtcgattccgaatcctccgatatctcacaaccttacgtggtctgcagacagtgcccagagtaccggagacaggccgcccaacctccccactgtcccgctcctgagggagaacctggagccccccaggctctgggcgacgccccttcaacctctgtgagcctgaccacagctgtccaggattatgtttgcccactacagggctcgcacgcactgtgcacgtgctgctttcaacccatgccagaccgcagagcagagagggaacaggacccacgtgtggcgcctcagcagtgtgccgtctgccttcaacctttctgtcacctctactgggggtgcacacgtacggggtgctacggttgccttgcaccattttgtgaattgaatttgggagacaagtgcttagatggagtcctgaataataactcctacgagagcgatatcctgaagaactacctggctacacggggactgacatggaagaacatgctgacagaaagtttggtcgcattacagagaggggttttcctattgtcagattatagagtgacaggagacaccgtgctgtgctattgctgtggactgcgttcattcagagaactgacgtaccaatatcgccagaatatcccggcgtctgagctgcctgtcgcagtgacaagccgccccgactgctactggggacggaattgccggacccaggtgaaggcccatcatgctatgaaattcaatcacatttgcgagcaaacgcggtttaaaaattag

SEQ ID NO: 111785 - DNA, 345 bp, synthetic construct
  misc_feature 1..345: note = Description of Artificial Sequence: Synthetic coding sequence
  source 1..345: mol_type = other DNA
atgagactgttaattctcgccctgctggggatatgctcacttaccgcgtatattgtcgagggtgtgggttcagaggtgagcgataagagaacgtgcgtgtctctgactactcagcggctgcctgtatcccgaatcaagacttacactatcaccgaagggtccctccgcgctgtcatattcatcactaagagaggattaaaggtgtgtgctgatcctcaggccacgtgggttcgggacgtggtgaggtcaatggatcgcaagagcaatacaagaaacaatatgattcagaccaaaccaaccggcacacagcagagcaccaacaccgccgtgaccctcaccggctag

SEQ ID NO: 111786 - DNA, 345 bp, synthetic construct
  misc_feature 1..345: note = Description of Artificial Sequence: Synthetic coding sequence
  source 1..345: mol_type = other DNA
atgagactgctgatacttgccttactgggtatctgttccctgactgcctatatcgttgagggggtaggtagcgaggtaagtcatcgacgaacgtgcgttagcctcactacacagaggttgccagtctcacggatcaagacatacaccatcacagagggaagcctcagggctgtaatctttattaccaagcgggggcttaaggtgtgcgctgatccccaggccacgtgggtgagagacgtggttagaagtatggatcgtaaatctaacacaaggaataatatgatccagactaaacctaccggcacgcaacaatcgacaaatacagcagtgacgctcaccggatag

SEQ ID NO: 111787 - DNA, 1002 bp, synthetic construct
  misc_feature 1..1002: note = Description of Artificial Sequence: Synthetic coding sequence
  source 1..1002: mol_type = other DNA
atggagtcttcaggtaatcccgagtccactaccttcttctattatgatctccagtcacaaccctgtgaaaaccaggcttgggtgtttgcaacactggccaccaccgtattgtattgccttgtgttcctgctgagtctcgtaggcaactccctggttctgtgggtactggttaaatacgagtcccttgagtctcttaccaacatctttatcctgaacctatgcctctcagatctcgtcttcgcttgcttacttccagtgtggatctctccataccattggggatgggttctgggggatttcctgtgcaaactgctgaacatgattttttccattagtttatattctagcatattttttctgaccattatgactatacatagatacctgtcagtggtatcccccctgtctactctgagagtgcctaccctgcgctgccgggtgctcgtcaccatggccgtgtgggtagcctcaatcctctcaagcattttggacactatcttccacaaggtgctgtcctctgggtgtgattacagcgagttaacctggtatctcacaagcgtctaccaacacaacctttttttcctgctgtcactcggtattatcttgttctgttatgtcgaaatactccgcaccctgttccgcagcagaagtaaacgcagacacagaaccgtgaagctgatttttgctattgttgtggcctactttctcagctggggtccgtataatttcacattgtttttgcaaacgctcttccggactcagattatccggagctgtgaggctaagcagcagctagaatatgcactcctgatctgcagaaatctggccttttcccactgctgttttaatcccgtcctctacgtcttcgtgggcgtcaagttccgcacgcacttaaaacatgtgctcagacaattctggttttgtcgcctacaggccccgagccctgctagcattcctcactctcctggggcttttgcctatgaaggggcttcattctattag

SEQ ID NO: 111788 - DNA, 111 bp, synthetic construct
  misc_feature 1..111: note = Description of Artificial Sequence: Synthetic coding sequence
  source 1..111: mol_type = other DNA
atggagagcagcggtaatcctgagagcaccacgttcttttattatgatctgcaatcacaaccgtgtgaaaatcaagcctgggtgtttgctacacttgccacaacagtgtag

SEQ ID NO: 111789 - DNA, 1002 bp, synthetic construct
  misc_feature 1..1002: note = Description of Artificial Sequence: Synthetic coding sequence
  source 1..1002: mol_type = other DNA
atggaatcttccggtaatcctgagagcaccactttcttctactacgacctgcagtctcagccatgcgaaaatcaggcctgggtcttcgcaaccctggccaccacagtcctgtactgcctggtgttcctgctcagtctggtgggtaactccttagtgttgtgggtgctggtgaaatacgagtcgctcgaatcactcactaatatattcattctgaacctttgcttgagtgacttggtgttcgcctgtctccttcccgtttggataagtccctaccattgggggtgggtccttggtgattttctatgcaagttgttgaacatgattttttccatcagtctgtacagctccatcttctttctcactatcatgactatccaccgctacttgtccgtcgtttcacctctaagcacactgcgggtgccaactctgcgttgccgcgtgctggtaactatggcggtgtgggtcgccagcatcctgagcagcatcttggatacaattttccacaaggtgctgagcagcgggtgcgattactcagaattaacctggtatctcacttctgtataccagcataacctgttcttcctgttaagcctcggcattattctcttttgctacgtcgagatactaagaaccctgttccgatcccgctcaaaaagaagacaccggactgttaaactgatcttcgcgatcgtggtcgcgtacttcctctcctggggtccatacaactttaccctgtttctccagacactctttaggacccagattatcaggtcctgcgaggccaaacagcagctcgagtatgcccttttgatctgccgcaatctggcctttagccattgttgctttaatccggttttatatgtgttcgtgggcgtgaagtttagaacacatctgaagcatgttttgaggcaattctggttttgccgacttcaggcaccttctcccgccagtattccgcattcgccaggtgcctttgcctacgaaggggcctcattttattag

SEQ ID NO: 111790 - DNA, 300 bp, synthetic construct
  misc_feature 1..300: note = Description of Artificial Sequence: Synthetic coding sequence
  source 1..300: mol_type = other DNA
atgaaggtttccgcggccctgttgtgtttgcttctgatggccgctactttctctcctcagggcctggcccagcccgacagcgtgtctattcctattacctgctgcttcaacgtcattaatagaaaaataccaattcaacgattggaatcttacacccgcattacaaatatacagtgcccaaaagaggccgtaatcttcaagaccaaacgagggaaggaggtgtgcgcagaccccaaggagcgctgggtgagagacagcatgaaacaccttgatcaaatttttcagaacctcaagccctag

SEQ ID NO: 111791 - DNA, 291 bp, synthetic construct
  misc_feature 1..291: note = Description of Artificial Sequence: Synthetic coding sequence
  source 1..291: mol_type = other DNA
atgcagattatcaccacagcacttgtgtgtctgctactcgcaggcatgtggccggaagacgtggattccaagtccatgcaggtgccatttagtcggtgctgcttcagcttcgcagaacaggaaatccccctaagggccattctttgctacaggaatacatcatctatttgctctaatgaagggctcattttcaagttgaagagaggcaaggaagcttgcgcccttgacacggtgggatgggtgcagcggcaccgtaagatgcttcgacattgccctagcaagaggaagtag

SEQ ID NO: 111792 - DNA, 282 bp, synthetic construct
  misc_feature 1..282: note = Description of Artificial Sequence: Synthetic coding sequence
  source 1..282: mol_type = other DNA
atgaagatttctgtagcggccattccttttttcctactgatcacaattgcacttggaaccaaaaccgagtcatcaagccggggtccctatcacccatctgaatgttgtttcacctatacgacgtacaagatacctagacagcgcattatggactactatgaaacaaactcacagtgtagcaagcccggaatcgtgttcatcaccaaacggggccactcggtgtgcacaaacccaagcgacaagtgggttcaggactacatcaaagacatgaaggagaattag

SEQ ID NO: 111793 - DNA, 330 bp, synthetic construct
  misc_feature 1..330: note = Description of Artificial Sequence: Synthetic coding sequence
  source 1..330: mol_type = other DNA
atgaaaatttctgtggccgcaatacccttcttcctcctgattactatagccctgggtaccaagactgagtccagcagccagaccggaggcaagcccaaggtggtcaagattcagttgaaattagttggtggcccctaccacccgtccgagtgttgtttcacctacacaacatacaagataccccggcagagaattatggactactacgagaccaactctcaatgtagcaaacccggtatcgtatttatcaccaaacgaggccatagcgtgtgcacaaacccctcagacaagtgggtgcaggactatatcaaggacatgaaagaaaattag

SEQ ID NO: 111794 - DNA, 330 bp, synthetic construct
  misc_feature 1..330: note = Description of Artificial Sequence: Synthetic coding sequence
  source 1..330: mol_type = other DNA
atgaaaataagtgtggccgcaattccgtttttcctgctgatcaccattgcactcggaaccaagacagagagctcaagccaaaccgggggtaagcccaaagtcgttaagatccaactgaagctggtgggcggcccataccaccctagtgagtgctgctttacctataccacttataagataccccggcagcgcatcatggactattacgagaccaactcccagtgttcaaagcctggaatcgtgtttatcacgaaacgcggacatagcgtgtgcactaatccgtctgataagtgggtgcaggattatatcaaagatatgaaggagaattag

SEQ ID NO: 111795 - DNA, 342 bp, synthetic construct
  misc_feature 1..342: note = Description of Artificial Sequence: Synthetic coding sequence
  source 1..342: mol_type = other DNA
atgaaggttagcgtggcggccctgtcctgtttgatgcttgtcgctgtgctcggctctcaggcccaattcattaacgatgccgaaacagagttgatgatgtcgaaactcccattggagaacccagtggtactgaacagctttcatttcgcagccgactgttgcacgtcttacatttctcagagcatcccatgttctctgatgaagtcatactttgagacaagctccgagtgctcaaagcccggagttatcttcttaacaaaaaaaggccgacaagtctgtgctaagcctagtggacccggcgtccaagactgcatgaagaaattgaagccatacagtatatag

SEQ ID NO: 111796 - DNA, 186 bp, synthetic construct
  misc_feature 1..186: note = Description of Artificial Sequence: Synthetic coding sequence
  source 1..186: mol_type = other DNA
tgatgtacatcttatatctcacaatccattccttgcagccttatgaaatcttattttgagacatcctctgagtgctctaaacctggggttatcttcctgacaaaaaagggaagacaggtgtgcgcaaaacccagcggacccggagtacaagattgtatgaagaaactgaagccctactctatctag

SEQ ID NO: 111797 - DNA, 342 bp, synthetic construct
  misc_feature 1..342: note = Description of Artificial Sequence: Synthetic coding sequence
  source 1..342: mol_type = other DNA
atgaaagtctcagtggccgcgctgagctgcctgatgctggtagccgtgctggggtcccaggcacagttcataaacgatgctgaaaccgagctgatgatgtcgaaactgccactagaaaatcccgtcgtgttaaacagctttcattttgccgcggattgttgtaccagctacatcagccagtcaatcccatgcagtttgatgaagagttatttcgaaacatcttcagagtgcagcaagccgggcgtcattttcctaaccaaaaagggccgacaggtctgtgctaagccttccggtcctggcgtccaggactgcatgaaaaagctaaagccttactcgatctag

SEQ ID NO: 111798 - DNA, 342 bp, synthetic construct
  misc_feature 1..342: note = Description of Artificial Sequence: Synthetic coding sequence
  source 1..342: mol_type = other DNA
atgaaggtctctgtcgcagccttatcgtgccttatgctcgtagccgtgcttggttctcaggcacagtttattaatgacgccgagaccgagctaatgatgtcaaagttacccctggagaatcctgtcgtgctgaactcattccactttgcggccgactgttgcacatcttacatctctcagtcaatcccttgctctcttatgaaatcttatttcgagacgagttcagaatgctccaaaccaggcgtaattttcctgacgaaaaagggcagacaagtgtgtgccaagcccagtgggccaggcgtgcaggattgcatgaagaaactcaaaccctattccatctag

SEQ ID NO: 111799 - DNA, 363 bp, synthetic construct
  misc_feature 1..363: note = Description of Artificial Sequence: Synthetic coding sequence
  source 1..363: mol_type = other DNA
atgaaggtctctgaagcagccttgagtcttctggtacttatattaatcattacttccgcgagccgatctcagccaaaagtgcctgagtgggtgaataccccctcaacatgttgtctcaaatactatgagaaggttttaccaagacggctggttgttggctataggaaagccctcaattgccatctccctgcaatcattttcgtcaccaaacgtaatcgcgaggtctgcacaaacccgaacgacgactgggttcaggagtatatcaaagaccccaacctgcctttactgccaacacgcaacctctccacagtgaagattatcactgcaaagaatggacaaccccagttacttaacagccagtag

SEQ ID NO: 111800 - DNA, 1188 bp, synthetic construct
  misc_feature 1..1188: note = Description of Artificial Sequence: Synthetic coding sequence
  source 1..1188: mol_type = other DNA
atggcctggagacaccttaagaaacgggcccaggatgctgttatcatactgggaggaggcggactgctgttcgcaagctacctgatggccaccggtgatgagcgcttctacgccgaacatcttatgcccacactgcaaggccttttagacccggagagtgcccacaggctcgcagtccgtttcactagcctcggactgcttcccagggcccgcttccaagacagcgacatgctggaagttcgggttctgggccataaattcaggaatcctgtaggcatagctgctggctttgacaaacacggcgaggcagtggatggtctgtataaaatgggattcggattcgtcgagatcggttctgtcacccccaagccccaggagggcaatccccgcccaagagtctttcggctccctgaggatcaagcagtcatcaatagatatggcttcaattcacatggcctgagcgtggtggaacatcggctgcgcgctcgccagcagaaacaggccaagttgacagaggatggcctgcctctcggcgtgaatttgggaaagaataagacctcagtggacgcggcagaagattacgccgagggcgtacgggtattggggccactggctgactatctcgtcgtgaacgtgtcttcacccaacacagccgggctcaggtccctgcaaggaaaggctgagctccggcgactgctgaccaaggtgctgcaggaaagagacggcctccgaagggtgcacaggccagccgtactcgtaaaaattgctcccgacctgacctcccaagataaggaagatattgcttctgtcgtaaaggaacttggaattgacggcttgattgttacgaatactacagtctcccggccagcaggacttcagggtgctctgcgcagtgagacgggaggcttatccggcaagcctttaagggacctgtccacccagaccatcagagagatgtacgccctgacacagggtagagtgcctattattggcgtggggggggtttcctccggccaggatgctctcgagaaaatcagggccggcgcctccctcgtgcagctctacactgccttaactttctgggggccccccgtggttggaaaggttaaacgcgaactggaggccctactcaaggagcaggggttcggcggcgtgaccgacgctatcggggctgaccacaggaggtag

SEQ ID NO: 111801 - DNA, 270 bp, synthetic construct
  misc_feature 1..270: note = Description of Artificial Sequence: Synthetic coding sequence
  source 1..270: mol_type = other DNA
atgaaggggctggccgccgcccttttggtcctggtgtgcaccatggctctttgctcatgtgcccaggtcggcaccaacaaggaactgtgctgcctggtgtacacgtcctggcaaattcctcagaagttcatcgttgactacagtgaaaccagtccgcagtgccccaaacccggggtgatcctgctgacaaaacgcggacgtcaaatttgcgccgacccaaacaaaaagtgggtgcagaagtacattagtgatctcaaactgaatgcctag

SEQ ID NO: 111802 - DNA, 297 bp, synthetic construct
  misc_feature 1..297: note = Description of Artificial Sequence: Synthetic coding sequence
  source 1..297: mol_type = other DNA
atggcactcctgctcgctttgtccctgttggttctgtggacatctccggctcctactttgtcgggcaccaatgatgccgaagattgctgtctcagcgtgacccagaagccgataccaggctacatcgtccgtaattttcattaccttctgatcaaagacgggtgccgggtgcccgccgtagtatttaccacactgagggggcggcaactctgtgcacctcctgatcagccatgggtggagcgaatcattcagagactccaacggacctccgcaaaaatgaagcgtcgcagttcatag

SEQ ID NO: 111803 - DNA, 315 bp, synthetic construct
  misc_feature 1..315: note = Description of Artificial Sequence: Synthetic coding sequence
  source 1..315: mol_type = other DNA
atggccctgctcctcgccctgtctttactagtgctttggactagccccgctccgaccctctctgggaccaacgatgctgaggattgctgtctgagcgtcactcagaaacccatacctggatacatagtcagaaatttccactaccttcttattaaagatgggtgtagggtgccagctgtcgttttcactactctgcgtgggcgccagctttgtgcccctccggatcagccctgggtggaacgaattattcagcggctacaaagaacatccgccaaggcatctttggctctgcctggtcctgtaagttccctgtag

SEQ ID NO: 111804 - DNA, 291 bp, synthetic construct
  misc_feature 1..291: note = Description of Artificial Sequence: Synthetic coding sequence
  source 1..291: mol_type = other DNA
atgtgctgcactaagtccctcctgttggccgcactcatgagtgtgctcctcctgcacttgtgcggagaaagcgaagcagcctccaactttgattgttgtctagggtataccgatcgaatactccaccctaaattcatcgtgggattcactcgtcagctagccaacgagggttgtgacatcaacgccattatcttccatactaaaaaaaaactgagtgtatgtgctaacccaaagcagacctgggtgaagtatattgttcgtctgctgagtaagaaagtaaagaacatgtag

SEQ ID NO: 111805 - DNA, 288 bp, synthetic construct
  misc_feature 1..288: note = Description of Artificial Sequence: Synthetic coding sequence
  source 1..288: mol_type = other DNA
atgtgttgtacgaagtctctcctgctcgcagccctgatgagcgtccttctgctgcacttgtgtggcgagtctgaagcctcaaatttcgactgctgcctgggttacacagatcggatccttcatccaaaatttatagtcggcttcactaggcagttagcaaacgaaggatgtgatataaatgccatcatcttccatacaaaaaagaaactgtctgtgtgtgcaaacccaaagcagacgtgggtcaaatatatcgtgaggctgctctccaagaaagttaaaaatatgtag

SEQ ID NO: 111806 - DNA, 405 bp, synthetic construct
  misc_feature 1..405: note = Description of Artificial Sequence: Synthetic coding sequence
  source 1..405: mol_type = other DNA
atggcccaaagcttagccttgtctttgctgattctggtgcttgccttcggcatccctagaacacagggctccgacggcggagcgcaggattgttgcctgaagtactcacaaagaaagattccagccaaggttgtccggtcctatcgaaagcaagaaccatcacttgggtgtagcatcccagccatcctttttcttccgcggaagcggtcacaggccgaactgtgtgccgacccgaaggagttgtgggttcagcaactgatgcaacacttggacaagaccccttcaccccagaaacccgcccaaggttgccgtaaagatagaggcgcttcaaagacgggcaaaaagggcaagggatccaagggctgcaagaggacagagaggagccaaacgccaaaaggaccctag

SEQ ID NO: 111807 - DNA, 375 bp, synthetic construct
  misc_feature 1..375: note = Description of Artificial Sequence: Synthetic coding sequence
  source 1..375: mol_type = other DNA
atggctcaatcccttgccctgtcactgctcattctggttctcgcctttggcattccaagaactcagggctcggacggaggcgcccaggattgttgcttaaagtactcacagaggaagatccctgctaaggtcgtccgatcatatcgcaaacaggagccttcactcggatgcagtattcccgcgattctgttcctgccgaggaagaggagtcaggcagaactgtgcgccgatcctaaagagctctgggttcaacagcttatgcagcatctcgataaaaccccctcacctcaaaaaccagcacagggctgccgcaaggaccgaggcgcgagtaagacggggaagaagggaaagggctctaagggctgcaaacgctag

SEQ ID NO: 111808 - DNA, 549 bp, synthetic construct
  misc_feature 1..549: note = Description of Artificial Sequence: Synthetic coding sequence
  source 1..549: mol_type = other DNA
atggctgaattcccatcaaaggtgtccacacggacaagttctccggcccagggcgccgaggcgtcagtgtcagcactcagaccagatttgggtttcgtaaggtctcgattgggcgctctgatgctgctgcaactggtgctggggcttcttgtctgggctttaatcgcagacaccccttaccacctctaccccgcatatggatgggttatgtttgtggcggtgttcctgtggcttgtaaccatagtgctgttcaacctgtatctctttcagctgcatatgaaactgtatatggtaccctggcccctggtgcttatgatcttcaacatcagtgccaccgttttgtacattaccgcctttattgcatgttccgccgccgtggacctgacctcactccgaggcactaggccatacaatcagcgggccgccgcttctttttttgcatgtctggtgatgattgcctacggcgtttctgccttcttttcctaccaggcttggcgcggagtgggatctaacgccgccacatcgcaaatggctggcggctatgcctag

SEQ ID NO: 111809 - DNA, 414 bp, synthetic construct
  misc_feature 1..414: note = Description of Artificial Sequence: Synthetic coding sequence
  source 1..414: mol_type = other DNA
atgaaagtgagcgtggctgccctcagttgtctgatgcttgtgaccgctctaggttcacaggcccgggttactaaagacgcagagactgagtttatgatgtccaagcttccgttggagaatcccgtgcttcttgatatgctgtggcgccggaagatcgggcctcagatgacgctctcccacgccgccgggtttcatgccactagcgcagactgctgcatttcctacaccccccgctctatcccctgcagtctcttagagtcatactttgaaactaattctgaatgttcaaagccaggagtgatatttttgaccaaaaaaggcaggaggttttgcgctaacccttctgacaaacaggtccaggtctgtgtgaggatgctgaagctcgatactcggatcaagacccgcaaaaactag

SEQ ID NO: 111810 - DNA, 363 bp, synthetic construct
  misc_feature 1..363: note = Description of Artificial Sequence: Synthetic coding sequence
  source 1..363: mol_type = other DNA
atgaaggtgtccgtggctgcactgtcatgcttgatgcttgtaactgccctgggatcccaggccagggtgactaaagatgccgaaacggagtttatgatgagtaagttgcccttggagaacccagtgctgttagacagatttcatgctacctccgcagactgttgcatttcttacacgccaagatctatcccgtgttcactcttggagtcttatttcgagaccaactcagagtgtagcaaacccggcgtgatcttccttaccaagaagggtcggagattctgcgctaatccctccgacaaacaggtgcaggtttgcgttcgtatgctcaagttagacacaaggatcaaaaccagaaaaaactag

SEQ ID NO: 111811 - DNA, 2862 bp, synthetic construct
  misc_feature 1..2862: note = Description of Artificial Sequence: Synthetic coding sequence
  source 1..2862: mol_type = other DNA
atggaggagcaaggacattctgagatggaaataattccttccgagtcccacccccacattcagcttctcaagtccaaccgagaactgttagtgacgcacatacgtaatacccaatgtctagtggataacctgctcaagaacgactattttagtgcagaggacgccgagatcgtgtgtgcatgccctacgcagcccgacaaggtgagaaagattctagacctggtccaatccaaaggagaagaagtatcagagttctttctgtatctgctgcagcaattagcagatgcttacgtcgacctaaggccatggctgctggaaatcggcttctcaccctccctgttgacacagagcaaggtggtcgtgaacaccgaccccgtcagtagatacactcagcagctcaggcaccacctaggtcgcgactctaaattcgtgctgtgctatgctcagaaggaggaactgttgcttgaagagatctacatggataccattatggagctggtgggattttccaacgaatctctgggtagcttgaattcgctagcatgtctgcttgatcacacgacagggattctgaatgaacagggtgagacaatcttcatccttggcgacgccggggtgggaaaatccatgctgctgcaacgtttgcagtccctgtgggctaccggccgcttggacgcgggcgtgaagtttttctttcactttagatgcagaatgttctcttgcttcaaggagtccgaccgactttgtcttcaggatctgctgtttaagcattactgctatcctgaaagagatccagaagaagtcttcgcattcttacttcggttccctcacgtggcgctgttcacttttgacgggctcgatgagctgcactctgatctggatttatctagagtacccgactctagctgtccctgggagccggctcatccactggttctgttggccaatcttctcagtgggaagctgctcaagggggcttctaagttactaacggccaggacgggtattgaggttcccaggcagttcttgcgcaagaaggttttactaagaggattttcaccaagtcatctgcgcgcctacgcccggcgcatgttccccgagcgcgctctgcaagaccgactcctgagccaactagaggccaacccaaatctatgcagcctgtgtagtgtgccccttttctgctggataatatttaggtgcttccagcacttccgcgccgcgtttgaaggaagcccacaactgcccgattgcaccatgaccctgacggatgtgtttctgctcgtgacagaggtccatctcaaccgaatgcaaccttcgtctttggtgcagcgtaatacgaggagccccgtagaaaccttgcacgcaggacgggataccctctgttctctgggccaggtagctcatcgtggcatggaaaaatccctattcgtctttacccaggaggaagtgcaggcaagcgggcttcaggagcgagatatgcagctaggttttctcagggctttgcccgagttgggcccagggggagatcagcagtcctacgaattcttccacttaacactccaggcgttttttactgcatttttccttgtcctagatgatagggtgggcactcaggaactcctgcgattttttcaggagtggatgccaccagcaggcgccgccacaacctcctgctatccaccatttctccccttccagtgcctgcagggctccggtcctgctcgggaggacctgtttaaaaataaagatcatttccagttcaccaacctgttcctctgcggactgctatcgaaggccaagcagaagttactcagacatttggtgccggcggcagccctcaggagaaagagaaaggcactctgggcgcacctgttcagcagtttgcgggggtacttgaagagcttaccgagggtgcaggtggaaagttttaatcaggtgcaggctatgcccacctttatttggatgttacgatgcatatacgagacccagagtcaaaaggtgggccagctggccgcccggggaatatgcgctaactatctgaagttgacctattgcaacgcatgttcggctgactgcagcgcgctcagctttgttctgcatcactttccaaaacggttggccctggatctggataataataatttgaacgactacggcgtacgcgagttgcagccctgtttctcacgtctcaccgtacttcgactttcagtgaaccagattacagacggcggtgtgaaagtgttgagtgaggaattaacaaagtacaagattgttacatacctgggtctctacaataatcagatcactgacgtcggcgctcgatacgtgaccaaaatactggacgagtgcaaggggctgacccacctcaagctggggaaaaataagataacctcagaggggggcaagtacctcgcattggcggtcaaaaacagcaaaagcataagcgaggttggaatgtggggaaatcaagtgggcgacgagggagccaaagccttcgccgaggctctgagaaaccacccaagtctgaccaccttatccttagccagtaacggcatcagcaccgagggggggaaatccctggctcgggcgctgcagcagaacacatccctcgagattctatggctgactcaaaatgaattgaacgatgaggtagcggagagcctcgccgaaatgctcaaggtgaatcagactctgaaacacctttggcttatccagaaccagattactgctaaaggtacagcgcaattagccgacgctttacaatctaataccggtatcaccgaaatctgcctcaacgggaatctgattaaacctgaagaagctaaggtctacgaagatgagaagcggatcatttgcttctag

SEQ ID NO: 111812 - DNA, 360 bp, synthetic construct
  misc_feature 1..360: note = Description of Artificial Sequence: Synthetic coding sequence
  source 1..360: mol_type = other DNA
atggctgggctgatgacgatcgtgacctctctcctgttcttaggagtgtgcgcccatcatatcatcccaacaggtagcgttgttatcccctctccttgttgcatgtttttcgtcagcaaacggatcccagaaaaccgcgtcgtgtcttaccagctctcgtcgaggagcacttgtctgaaggcaggcgtaatttttactaccaagaagggccagcaattctgtggagaccctaaacaggaatgggtccagaggtacatgaagaacctcgacgctaaacaaaagaaggcttctccacgcgccagagcggtcgccgtgaagggacccgttcagaggtacccaggtaatcaaacgacgtgttag

SEQ ID NO: 111813 - DNA, 450 bp, synthetic construct
  misc_feature 1..450: note = Description of Artificial Sequence: Synthetic coding sequence
  source 1..450: mol_type = other DNA
atgaatctctggctcctggcttgtctggtggcaggcttcctcggtgcctgggcccctgccgtgcacacacaaggcgtctttgaggattgttgcctggcatatcattatcccattgggtgggcagtcctgcgacgtgcgtggacatacaggatccaggaagttagtggatcatgcaaccttcctgccgcaatcttttacctgccaaagaggcacagaaaggtgtgcgggaaccccaaatcccgcgaggtgcagcgcgctatgaaattgttagacgctaggaataaggtgttcgcgaagctccatcataatactcagacattccagggaccacatgccgttaagaagctgtcgtctggcaacagcaaactcagctcttcaaaattttcgaaccccataagtagctccaagcgaaacgtctcactcctgatctctgcaaactccggcctgtag

SEQ ID NO: 111814 - DNA, 255 bp, synthetic construct
  misc_feature 1..255: note = Description of Artificial Sequence: Synthetic coding sequence
  source 1..255: mol_type = other DNA
atgaacctgtggttgctcgcatgcctggtggcgggttttctcggggcttgggcacctgcagtccatacacagggagtctttgaggattgttgtctggcctatcattaccccatcgggtgggccgtgctcaggcgcgcctggacatatagaatccaggaagtctcaggaagttgtaatctcccagccgctattcgaccaagctgctgtaaggaggtagaattttggaaattacaggttatcatcgtccaggtatag

SEQ ID NO: 111815 - DNA, 453 bp, synthetic construct
  misc_feature 1..453: note = Description of Artificial Sequence: Synthetic coding sequence
  source 1..453: mol_type = other DNA
atgaatctgtggctcctagcctgcctggttgccggcttcctgggcgcctgggccccagccgtccacacacagggcgtcttcgaagattgctgcctagcctaccattatcccatcggctgggctgtgctacgccgcgcatggacctaccgaatccaagaggtcagcggctcttgtaatctgccagctgctattttttacctccctaagcgacaccgcaaggtgtgcggcaatcctaagagtcgtgaggttcagagggcgatgaagttgttggatgctcgtaataaggtgttcgcgaagctccaccacaacactcagacttttcaggctggaccccatgcggtgaagaaactgtccagcggcaattccaagctgtcctcctccaagttttccaatcctattagttcttcaaagcgaaatgtgtctctgctaataagtgcaaactctgggctgtag

SEQ ID NO: 111816 - DNA, 285 bp, synthetic construct
  misc_feature 1..285: note = Description of Artificial Sequence: Synthetic coding sequence
  source 1..285: mol_type = other DNA
atgatgggactgtccttagccagcgctgttctcctggcgagcttgctttccctgcacctgggcaccgccactagagggtccgatatttccaagacctgctgctttcagtactcccacaagccactaccctggacttgggtgaggagctacgaatttacatctaatagctgctctcagagagctgtgatctttaccaccaagagggggaaaaaggtgtgcactcatcctcgtaagaagtgggttcagaaatacatctcactgctgaagacacccaaacagctatag

SEQ ID NO: 111817 - DNA, 285 bp, synthetic construct
  misc_feature 1..285: note = Description of Artificial Sequence: Synthetic coding sequence
  source 1..285: mol_type = other DNA
atgatggggcttagcctggcatcggctgtactgcttgcaagccttctgtctctgcatctcggtacagctaccagaggctcagacatatctaaaacatgctgcttccagtacagtcataagccactgccctggacatgggtgagatcttacgaatttacctccaatagttgctcacaacgagcagtgatttttaccacaaaacgaggtaaaaaagtgtgtacacatccacgtaagaaatgggtgcaaaagtacatctcactcctgaagactcctaaacagctctag

SEQ ID NO: 111818 - DNA, 339 bp, synthetic construct
  misc_feature 1..339: note = Description of Artificial Sequence: Synthetic coding sequence
  source 1..339: mol_type = other DNA
atgaagggcccacccactttctgtagtttgctcctgctaagcttgcttctgtcacccgatcccacggccgccttcctgctgcctccctctaccgcttgctgcactcaactctatcgaaagccactctccgacaagttactgcggaaggttatccaggtcgaactccaagaggctgacggcgattgccacctgcaggcctttgtccttcatctggcccaacgctctatatgtatccatccccaaaatccttccctgtcacagtggtttgagcaccaagagaggaaactgcacgggactttgcccaagctgaacttcggcatgcttcggaagatgggatag

SEQ ID NO: 111819 - DNA, 384 bp, synthetic construct
  misc_feature 1..384: note = Description of Artificial Sequence: Synthetic coding sequence
  source 1..384: mol_type = other DNA
atgcaacagaggggcctggctattgtggcgctcgccgtatgcgccgcactccatgcatccgaggctatccttccgattgcaagctcgtgttgtacggaggtgagccaccacatctcccggaggttactggagcgcgtaaatatgtgcagaatccaacgagcggacggagattgcgatctggccgccgtcatactgcacgttaagcgacgtagaatttgtgtgagtccccataaccacaccgtgaagcaatggatgaaggtgcaggccgctaagaaaaacggaaaaggcaacgtgtgccatcgcaagaagcaccatggaaagagaaattcgaaccgtgcacaccagggaaaacatgaaacatacggacacaaaacaccatattag

SEQ ID NO: 111820 - DNA, 384 bp, synthetic construct
  misc_feature 1..384: note = Description of Artificial Sequence: Synthetic coding sequence
  source 1..384: mol_type = other DNA
atgcaacagaggggcctagcgatcgtcgcactggcagtctgtgccgccctccacgcttctgaagccatcctgcctatcgcctcctcctgttgcacagaggtctcacaccatataagcaggagactgctggagcgggtcaatatgtgcaggatccagagagcagacggcgattgtgatctggccgcggtgatcctacacgtcaaacgcagaaggatttgtgtgtcaccccataaccataccgtcaaacaatggatgaaagtgcaggccgcgaaaaaaaacgggaagggcaacgtctgccaccgtaagaagcatcatggaaagaggaacagcaatcgcgcgcaccagggcaagcatgagacttatggccataaaactccttactag

SEQ ID NO: 111821 - DNA, 243 bp, synthetic construct
  misc_feature 1..243: note = Description of Artificial Sequence: Synthetic coding sequence
  source 1..243: mol_type = other DNA
atgtgtcgcatacagcgggccgacggggattgcgacctagctgctgtgatactgcatgtgaaaagaaggagaatttgtgtttccccacacaatcacacggtaaagcagtggatgaaagtccaggccgccaaaaaaaacggaaaaggcaatgtgtgccataggaaaaagcatcacggaaagcgtaattctaatcgagctcatcaggggaaacacgagacctatggacacaagacgccttactag

SEQ ID NO: 111822 - DNA, 354 bp, synthetic construct
  misc_feature 1..354: note = Description of Artificial Sequence: Synthetic coding sequence
  source 1..354: mol_type = other DNA
atgcagcagaggggcttggccatagtggccctggcggtgtgcgcagccttgcacgctagtgaggcaatcttacccatcgcctcctcttgctgtacggaagtttcacaccatatctctcggcgcctgctggagagggttaatatgtgtcgcatccagcgtgcggacggagattgcgacctggccgcggtaatgctggagtgttccgacatgataagcgcccattacaacctccacctgcctggtagcaacgattccccaaccagtgcattccaggtcgccggtatcacagcttttatgtcttccgccgaagagtctgtttctgcacgtacaacaatcctgctgtcatccggatag

SEQ ID NO: 111823 - DNA, 282 bp, synthetic construct
  misc_feature 1..282: note = Description of Artificial Sequence: Synthetic coding sequence
  source 1..282: mol_type = other DNA
atgcaggtgagcaccgctgctctcgctgtgcttctttgcaccatggcgctgtgcaatcaagtgctgagtgccccacttgctgccgacaccccaactgcatgttgtttctcctacaccagtagacagattcctcagaatttcatagccgactattttgaaacttcgtcccagtgtagcaagccatctgtgatatttctgaccaaacgaggacggcaggtatgtgctgaccccagcgaggagtgggttcagaagtatgtctcagacctagaactctcagcctag

SEQ ID NO: 111824 - DNA, 159 bp, synthetic construct
  misc_feature 1..159: note = Description of Artificial Sequence: Synthetic coding sequence
  source 1..159: mol_type = other DNA
atgcaagtgtcaaccgctgccctggctgttcttctatgcacgatggctttatgtaaccaggttctgagcgcgcctctctctaggccacgcgaagccggtcgaagcgtcctgactcccgtgcgttcaggttcacgcaacaccagtgtcacatggtcctag

SEQ ID NO: 111825 - DNA, 144 bp, synthetic construct
  misc_feature 1..144: note = Description of Artificial Sequence: Synthetic coding sequence
  source 1..144: mol_type = other DNA
atgcaggtgtccaccgccgcgcttgcagtactgctgtgtacaatggccctgtgcaaccaggtccttagtgcgcctcaggccgggcgtagtgttctcacccctgttcgatctggttcgcggaacacgagcgtgacttggtcttag

SEQ ID NO: 111826 - DNA, 279 bp, synthetic construct
  misc_feature 1..279: note = Description of Artificial Sequence: Synthetic coding sequence
  source 1..279: mol_type = other DNA
atgaagctctgcgtcacagttctgtccctgcttatgttggttgccgctttctgctctcccgcactgtcggctcccatgggaagtgacccacctaccgcatgttgtttctcttacaccgcccgaaaactgccgcggaattttgtagtagattattatgagacctccagtctgtgctcgcaaccagcagtggtgtttcagactaagaggagcaagcaggtgtgcgccgacccatcagaatcctgggtacaggagtatgtttacgaccttgagctaaactag

SEQ ID NO: 111827 - DNA, 159 bp, synthetic construct
  misc_feature 1..159: note = Description of Artificial Sequence: Synthetic coding sequence
  source 1..159: mol_type = other DNA
atgaagctgtgcgtcacggttctgtctttactgatgctcgtggctgccttctgcagcccagccttatccgctccaaactccaagcccaaggaggcttctaagagcgtcctcatacccgtcaacccagggagccggtcaacttgcatgacatggaattag

SEQ ID NO: 111828 - DNA, 159 bp, synthetic construct
  misc_feature 1..159: note = Description of Artificial Sequence: Synthetic coding sequence
  source 1..159: mol_type = other DNA
atgaaactgtgtgtcacagtcctctctctgctcgtgttggtggccgcattttgctccctggcactgagtgcccccaacagtaagcctaaggaggcgtcgaagagcgcgctaacacctgttagccccggaagcagatctacatgtatgacctggaactag

SEQ ID NO: 111829 - DNA, 207 bp, synthetic construct
  misc_feature 1..207: note = Description of Artificial Sequence: Synthetic coding sequence
  source 1..207: mol_type = other DNA
atgaagctctgcgtgactgtgctgagtctgctagtactagtcgcagcattctgctctctagctctgagcgcaccaaccaaatcttctgagtggaagctgcaaggggtatgcttccaatgctgctccaggaaagatccgatccatcagagctgtccaacctggacgatggtgagacagcggaagatgccgactactggcaaaggctag

SEQ ID NO: 111830 - DNA, 261 bp, synthetic construct
  misc_feature 1..261: note = Description of Artificial Sequence: Synthetic coding sequence
  source 1..261: mol_type = other DNA
atgaagctgtgcgtaacagtgctgtcccttctggtgctggtggccgctttctgctcactggccctaagtgcccccatgggatctgatcctcctacagcatgctgcttctcgtatactgctcggaagttgcctcgcaatttcgtggtggactattatgagacaagcagcctctgctctcaaccagcagtcgttgccgcgccgcacggaccatggtcagggagaggccggtgtcttccacaggcccgggacaaggcgcgttag

SEQ ID NO: 111831 - DNA, 279 bp, synthetic construct
  misc_feature 1..279: note = Description of Artificial Sequence: Synthetic coding sequence
  source 1..279: mol_type = other DNA
atgaaactgtgcgtgaccgtgttatccctgctcgttcttgttgccgcgttctgttctctggcactgtccgctcccatgggcagtgatcctccaactgcctgctgtttctcgtatacagctaggaaactgccccgcaatttcgtggtggactattatgaaaccagttccctttgcagccagccagcagtggtcttccagacaaagcggggaaagcaagtgtgcgcggatccaagtgaatcctgggtgcaggaatacgtctacgacctcgagctgaactag

SEQ ID NO: 111832 - DNA, 300 bp, synthetic construct
  misc_feature 1..300: note = Description of Artificial Sequence: Synthetic coding sequence
  source 1..300: mol_type = other DNA
atgaaagtgtcggcggcactcctatgtctcctgctaatcgctgccaccttcatcccccaaggtctcgctcaaccagatgccattaacgcccctgttacctgttgctacaatttcacaaaccggaaaatcagcgttcagaggctcgcttcttacagacgcatcacatcttccaaatgccccaaggaagcagttatctttaaaacgatcgttgccaaagaaatctgtgcagatccgaagcagaaatgggtgcaggatagcatggaccatcttgacaaacagactcagacacccaagacatag

SEQ ID NO: 111833 - DNA, 330 bp, synthetic construct
  misc_feature 1..330: note = Description of Artificial Sequence: Synthetic coding sequence
  source 1..330: mol_type = other DNA
atgttaaagctgacccctctgccaagcaaaatgaaagtctctgctgctcttctgtgcctattgctgatggccgctaccttcagcccccaaggattggcccagcctgatagcgtgagtattcctattacatgctgctttaacgtcatcaatagaaaaattcctatccaacgcctggagtcatatacaaggatcaccaatattcagtgtcccaaagaggccgtcatctttaagaccaagagaggtaaggaggtgtgcgccgaccccaaagaacgatgggtacgcgactccatgaagcacctcgaccagattttccagaacctcaaaccatag

SEQ ID NO: 111834 - DNA, 1068 bp, synthetic construct
  misc_feature 1..1068: note = Description of Artificial Sequence: Synthetic coding sequence
  source 1..1068: mol_type = other DNA
atggaaacccccaatactactgaggactatgatactactactgagtttgattacggcgacgccaccccgtgccagaaggtaaacgaacgtgcttttggggctcaactcttgccaccattatattctctcgtctttgtgataggcctcgtgggcaacattttagttgtgctcgtgctggtgcagtacaaacgattaaagaacatgacttccatttatcttctaaatctggcaattagtgacctcctattccttttcactcttcctttttggatcgactacaagctgaaggacgactgggtctttggcgatgctatgtgcaaaatactcagcggattctactacactggactgtatagtgagatattcttcataattctgctcactattgatcgatatcttgccatcgtgcatgctgttttcgcactcagagccaggacagtgacattcggggtgattacttctattatcatttgggcccttgctatcctggcatctatgccagggttgtatttcagtaagacacagtgggagttcacacaccacacttgtagtcttcatttcccacacgaaagcctccgcgagtggaaactttttcaggctttgaagttgaatctcttcggtctagtcttaccactgcttgtgatgataatctgctacacagggatcatcaaaatcctcctgagacgccctaatgagaagaaaagcaaggccgtccgattgatcttcgtgatcatgattatcttcttccttttttggactccatacaatttaactatccttatcagcgttttccaggactttctttttacccacgaatgtgagcagagtaggcacctcgacttagctgtacaggtgacagaggtgattgcttacacgcactgttgtgtgaatcctgtgatctacgcgttcgttggggaacggtttcggaagtatctccgccagctctttcaccgaagggtggcggtacatctcgtgaagtggctgccgttcctgtcagttgaccgcctagagagggtctctagtactagccccagtactggggaacatgaattatctgctggcttttag

SEQ ID NO: 111835 - DNA, 1089 bp, synthetic construct
  misc_feature 1..1089: note = Description of Artificial Sequence: Synthetic coding sequence
  source 1..1089: mol_type = other DNA
atggggacagaggctacagaacaggtgtcatggggtcactatagcggggatgaggaggatgcctatagcgctgagccactgccggaactctgttacaaagctgacgtacaggcgttctcacgggccttccagccctctgtctccctgacagtcgcggcgctggggttggctggaaatggattggtgctcgctacccacctagctgctaggagagcagcaaggtcccccacaagcgctcatctactacaactggctctggcagatctcttgctagccttgacactgcctttcgcggccgcgggcgcactacaaggctggtctttgggttccgccacatgccgcaccatttccggtctttacagtgccagctttcatgccggattcttattcctggcctgcatctcagctgacagatacgtggctattgccagggccctgccagcaggcccacggcccagcactcccggccgagcccacttggtctccgttatagtctggttgctgagcctactcctcgccctgccagcgctactgttcagccaagatgggcagcgggaaggacaacgacggtgtcgtctaatcttcccagaagggcttacccaaactgtcaaaggcgccagtgcagttgcacaagttgccctcggctttgccctccctctgggcgtcatggtggcttgttacgccttactgggccgcacacttctcgccgccagagggcctgaacgtagaagggcgctgagagtcgtggtggccctggtcgccgcttttgtggtgctgcagctgccctattctctggccctgctccttgatactgctgatctgctcgcggcccgagaaaggagctgccctgccagcaagagaaaggacgtcgcattactcgtgacaagcgggcttgcactcgctcgctgcggactcaatccagtgctgtatgcttttttggggcttcgatttaggcaggatctgcgtcggctcttgcgaggcggatcctgtccatctggcccccagccccggagaggctgcccaaggagaccaagattgtcctcctgttccgcacctacagaaacccactccctcagctgggataattag

SEQ ID NO: 111836 - DNA, 1125 bp, synthetic construct
  misc_feature 1..1125: note = Description of Artificial Sequence: Synthetic coding sequence
  source 1..1125: mol_type = other DNA
atgctgagcacttcccggtcaaggttcattcgcaatactaatgaatctggcgaggaggtgactaccttcttcgattacgactacggggccccgtgccacaagttcgacgttaaacagattggcgcacagctgcttccccccttatacagcctggtctttatattcggattcgtgggaaacatgctggtggttctgattctgatcaattgtaaaaaactgaaatgcttaacagacatctacctgttgaatttggcaatttcggacctgctgttccttattactctgcccctctgggcccactctgccgccaatgaatgggtgtttggcaatgcaatgtgtaagctgtttacaggcctataccacattgggtacttcggggggatcttttttatcatccttctgactattgatagatatctggcaattgtgcatgccgtgttcgccctcaaggctagaacagtgacgtttggcgtagtgactagcgtgatcacctggctcgtggccgtgtttgctagcgtcccgggaatcatcttcacgaaatgccaaaaagaggacagcgtgtacgtgtgtggcccgtattttccccgaggctggaataacttccacactatcatgcgcaatattttggggctagttctgcccctgctgatcatggtcatctgttacagtggtatacttaagaccctcctccgttgccgcaatgagaagaaaagacatagagcagttagagtgatctttacaatcatgatcgtgtattttctattctggacaccttataatatcgtcatcttacttaataccttccaggagttctttggcctaagcaattgcgaatcaactagtcagttggaccaggccacacaggtcactgagacgctgggtatgacccactgttgcattaaccccatcatatacgcctttgtgggggaaaagttcaggtctttatttcatattgccctgggttgcaggatcgcccccctgcagaaaccagtctgcggtgggcccggagttaggcccggcaaaaatgtgaaggtaacgacacaggggttgctggatggccgcggaaagggtaaaagcatcggtagggctccagaggcttccctgcaggataaggagggggcatag

SEQ ID NO: 111837 - DNA, 1125 bp, synthetic construct
  misc_feature 1..1125: note = Description of Artificial Sequence: Synthetic coding sequence
  source 1..1125: mol_type = other DNA
atgctctctacctcaagatcccgctttatccggaatacaaatgaaagcggcgaggaagttacaaccttctttgactacgattacggagcaccttgccacaaattcgatgtgaagcagattggcgctcagctcctgcccccgctgtactcgttggtgttcattttcggtttcgtgggaaacatgctggtggtcctaattcttatcaattgtaagaagctcaaatgtctgactgacatctacttactgaacctcgctatctctgatcttctctttctgatcaccctccctctctgggcccatagcgccgctaacgaatgggtgttcgggaacgccatgtgtaaattatttacggggctctaccatatcggctattttggcggcattttcttcattatccttttaacaatagatagatacctggctatcgtacatgccgtattcgctctgaaggcaagaacggttacattcggcgtcgtgacgagcgtcatcacatggctggtggctgttttcgcttccgtgcctggaataatttttactaaatgccagaaggaggattctgtgtacgtgtgcgggccttacttcccaagaggttggaacaacttccacacaatcatgcgaaacatccttgggttggtgttacctctgctcatcatggtcatctgctacagcggtattctgaagacactgcttagatgcagaaatgagaaaaagaggcatagagcagttcgcgtgatatttacaatcatgattgtgtatttcctcttctggaccccctataacatagtgattcttctcaacaccttccaggagttctttgggctctcaaactgtgagtcaactagccagcttgaccaagcaacacaggtcacagagactctaggaatgacccattgctgtattaaccccattatttatgctttcgtcggtgagaagttcagaagcttattccacattgctctcgggtgtcggatcgctcccttgcagaagcccgtctgtggggggcctggcgtcaggcctggcaagaacgtgaaggtgaccacgcaagggctgctcgacgggagaggtaaaggcaagagtattggaagagctccagaagcaagcctgcaagataaagagggggcgtag

SEQ ID NO: 111838 - DNA, 366 bp, synthetic construct
  misc_feature 1..366: note = Description of Artificial Sequence: Synthetic coding sequence
  source 1..366: mol_type = other DNA
atgttgagtacctctcgctcaaggtttatcaggaatactaatgagagtggggaagaggtgactacttttttcgattatgattacggcgccccctgccataagttcgacgtcaagcaaattggcgcacagctgctaccccctttatactccttggtattcatcttcgggtttgttgggaacatgctcgttgtcttaatactcatcaactgcaagaaactcaagtgcctcaccgacatctatctactcaacctcgcaatctcggatctgttattcctaattaccttgcctctgtgggcccattccgcggccaacgagtgggtctttgggaacgctatgtgcaaactcttcactggcctgtaccactag

SEQ ID NO: 111839 - DNA, 1083 bp, synthetic construct
  misc_feature 1..1083: note = Description of Artificial Sequence: Synthetic coding sequence
  source 1..1083: mol_type = other DNA
atgctgagcacgtcccggagtcggtttataagaaataccaatgaaagcggggaggaagttaccacattttttgactatgactatggcgcaccctgccacaaatttgatgtcaaacagataggggctcaattactgccccctctctacagcctcgtgttcatctttgggtttgtcggaaacatgttagtggttctcatcctcattaactgtaagaaactcaagtgtctgaccgacatttatcttctgaatctcgcaatctccgatctactcttcctgattactctacctttgtgggctcatagcgccgcaaatgagtgggtgttcggtaacgccatgtgtaagcttttcacaggcctgtaccatattggctatttcggcggcatctttttcataattttgctgacaattgaccggtatttagcgattgtgcacgctgtgtttgctctaaaggcccggacagtgacattcggagtggtgacatcggtcataacatggctagtcgccgtgtttgcgagtgtacctggcattatcttcaccaagtgtcagaaagaagattctgtctacgtttgcggaccgtatttccctagaggttggaataactttcataccatcatgagaaatatcctgggcttggtgcttccattgttgatcatggtgatttgctactccggcatcctgaaaacactcttaaggtgtagaaatgagaaaaagcgacacagagctgttagggtaatattcaccatcatgatcgtgtattttctattttggactccttacaatatcgtcattctgctgaacaccttccaagagttcttcggcttgagcaactgtgagagcacctcacaattagaccaggcaacgcaggtgactgagacacttggaatgacacactgctgtattaatccgataatctatgcgttcgtgggcgagaagtttcgcaggtatctgagcgttttcttcaggaagcatatcaccaaaagattttgcaagcagtgtcctgtcttctatcgggagactgtagacggtgtaacctcaactaacaccccttcaacaggagagcaggaggtgagcgctggattgtag

SEQ ID NO: 111840 - DNA, 1068 bp, synthetic construct
  misc_feature 1..1068: note = Description of Artificial Sequence: Synthetic coding sequence
  source 1..1068: mol_type = other DNA
atgacgaccagcctggatacagtggaaaccttcggaacaacctcttattacgatgatgtgggcttgctttgcgaaaaggccgatactcgagccctcatggcccagttcgttccacctctctatagcctggtgttcactgtcggactcttaggcaatgtcgtggttgtgatgattctcataaagtatcggcggctgaggattatgacaaatatctacctgctgaatctagctatctcggacttgttatttctggtcactttacccttttggattcactacgtccgggggcacaattgggtgttcgggcatggaatgtgcaaattgctgtccggattctatcacactggcctctactcagagatcttcttcataatcttgctcacaatcgatcggtatcttgccattgttcacgccgtgtttgccttgagggctagaacagtaacattcggcgtcatcacatcaatagtgacctggggcttggcggtgttggccgcactgccagagttcatcttctatgagacagaagagctgttcgaggagaccctttgctctgccttgtatcccgaggacacagtgtactcttggaggcattttcatacgctccgtatgaccatcttctgcctcgtgctccctcttctggtaatggccatctgctacacaggaattattaaaactcttcttcgctgtccatcaaagaaaaaatacaaagccattaggttgatttttgtcataatggctgtattctttatcttctggacaccatataacgttgccattctactgtcttcatatcagtctatattgttcggaaacgactgtgaacgttctaagcacctggacttggtgatgctggtgacagaagttatcgcctattcccattgttgcatgaatcctgtgatctatgcatttgtgggcgaaaggtttcgtaaatacctgcgccacttctttcatcgccacctccttatgcacctgggcagatacataccatttctcccttccgaaaagctggagcgtacgagtagcgtgtcgccttccaccgcagagcccgagctgtctatcgttttctag

SEQ ID NO: 111841 - DNA, 1068 bp, synthetic construct
  misc_feature 1..1068: note = Description of Artificial Sequence: Synthetic coding sequence
  source 1..1068: mol_type = other DNA
atgaccaccagtctggataccgtagaaaccttcggtactacaagctattacgatgacgttggactcctctgtgagaaggccgacacccgagctcttatggcacagtttgttcctccgctttattcactcgtcttcacagtggggctgttagggaacgtggttgttgtgatgatccttatcaagtacaggaggttacgtatcatgaccaacatatatctcctgaacctcgcgatctcagatttgctcttcctcgtgactctgcccttctggatacactatgttagaggacataactgggtgttcggccacggaatgtgcaaactgctgtctgggttttaccacactggactgtacagcgaaattttcttcatcatcctgctgaccattgaccgctacctggccatcgtgcatgccgtgttcgctctgcgggccagaaccgtgaccttcggggtgatcacaagcatcgttacatggggcttggctgtgttggcggcacttcccgaatttatcttctatgaaacagaggaattgtttgaagaaaccctgtgcagcgccctctaccccgaggatactgtctatagttggaggcactttcacactctgagaatgactattttctgtctggtgcttccactcttggtgatggctatatgctatactgggattatcaaaaccctgctgagatgtccatccaaaaagaaatacaaagccatccgtctgattttcgttatcatggcagtgttttttatattctggactccgtataatgtggcgatactgctaagtagctaccaatccattttatttggcaacgactgcgagagatctaagcacctggatctggtgatgcttgtgacagaagtgattgcttacagccactgttgcatgaatcccgttatctatgctttcgtcggcgaaagatttcggaagtacctcagacattttttccatagacacctgctgatgcacctaggcagatatattccgttcctgccctcagaaaaactggaacggacaagcagtgtttctccctctactgcggagcccgagcttagcatcgtattttag

SEQ ID NO: 111842 - DNA, 1068 bp, synthetic construct
  misc_feature 1..1068: note = Description of Artificial Sequence: Synthetic coding sequence
  source 1..1068: mol_type = other DNA
atgactacgagtttagacacggtcgaaacattcggaactaccagctactacgatgacgtaggcctgctctgcgagaaggccgacactcgagccttaatggcacagtttgtgccccctctttattcactggtgtttactgttgggcttctgggcaacgtggtggttgtgatgattcttattaagtaccggcgcctccgcattatgacgaatatttacctgttgaaccttgccatctcggacctgctgttcctggtcacgctcccattctggatccattacgttaggggccataattgggtctttggacacggcatgtgcaaactcttatcaggcttttatcatacggggctgtactccgaaattttcttcattatcctgcttacaatagatagatatctagccattgtacatgcagtattcgccctgcgcgcccgaaccgtcacattcggagttatcacctccattgtgacttggggtttagccgtgctcgctgccctccctgagttcatcttctacgagacggaagaactctttgaggaaaccttgtgttcagccttgtaccctgaggacactgtttactcatggcggcatttccacaccctccggatgacaatattttgcctggtcctgccccttctggtcatggccatttgttataccgggattataaaaacactcctcagatgcccttccaagaagaagtataaggcgatccgacttatcttcgtaatcatggccgtcttttttatattttggacaccctacaacgtcgccatccttctgagctcgtaccagagcatcctgtttgggaacgattgcgagcggtcaaaacatctggacctggtcatgctggtaaccgaggtgatcgcttactcccactgctgcatgaatcccgttatatatgcctttgtaggagaaagatttcgcaaatatctgcgccacttctttcacagacacctactcatgcatctgggccggtacatcccgttcctaccatccgaaaagttagaaagaaccagttcagtgtccccttcaaccgcggaacccgaattgtcgattgtgttctag

SEQ ID NO: 111843 - DNA, 243 bp, synthetic construct
  misc_feature 1..243: note = Description of Artificial Sequence: Synthetic coding sequence
  source 1..243: mol_type = other DNA
atgactacaagcttggatacagtggagacattcggaacgacctcttattacgacgatgtagggctgctttgcgagaaggctgatacacgcgctctcatggctcagttcgtgccacccctgtattcgctcgtgttcaccgttgggctcttgggaaatgtggtggttgttatgatcctgatcaagtatcgaaggctccgtatcatgactaatatctatctgctcaaccttgcaatctccgactag

SEQ ID NO: 111844 - DNA, 66 bp, synthetic construct
  misc_feature 1..66: note = Description of Artificial Sequence: Synthetic coding sequence
  source 1..66: mol_type = other DNA
atgaccacaagcttggatacagtggaaacgttcggcactacaagctactacgacgacgtcggctag

SEQ ID NO: 111845 - DNA, 1068 bp, synthetic construct
  misc_feature 1..1068: note = Description of Artificial Sequence: Synthetic coding sequence
  source 1..1068: mol_type = other DNA
atgacaacctcccttgacactgtggagacattcggtaccactagctattatgacgatgtcggcctgctctgcgaaaaggccgacacaagagccctcatggcccagtttgtgcctcccctttattctctggtgttcactgtgggcttgctggggaacgtggttgtagtaatgatattgatcaaataccgccggcttcgtattatgacaaacatataccttcttaacctggccataagtgacctcttgtttttggtgaccttacctttctggattcactatgtgaggggacacaactgggtctttgggcatggaatgtgcaaactgctgtctgggttttatcatacaggactctattccgaaatctttttcattattctcttgaccatcgacagatatctggccatcgttcatgctgtctttgccctaagggctagaacagtgaccttcggagtcatcacaagtattgttacctggggcttggccgtattggccgcacttcctgagtttatcttttatgaaactgaggagttgttcgaagaaaccctttgctctgcactgtaccctgaagacacagtatacagctggaggcacttccacactctgaggatgaccatcttttgtctggtactgcctttgctggtgatggctatctgctatacgggtatcattaaaaccttactccgctgtccctctaaaaagaagtacaaagctattcgcttgatcttcgtcatcatggctgtgttctttatattctggacaccctacaacgtcgccattctactcagctcttaccagtccatcttattcggtaatgattgtgagaggtctaagcacttggatctggtcatgcttgttacagaggtgatagcatactcgcactgttgcatgaatcccgtgatctatgcctttgtgggagagagatttcgaaagtatctgaggcacttcttccaccggcacttactaatgcacctggggcgctatattccttttctcccctctgagaagctcgagcgcacaagcagtgtgagcccttctacggctgaacccgaactttccattgtgttctag

SEQ ID NO: 111846 - DNA, 1131 bp, synthetic construct
  misc_feature 1..1131: note = Description of Artificial Sequence: Synthetic coding sequence
  source 1..1131: mol_type = other DNA
atgccgtttgggatcaggatgttgttgcgggcccataaacccggatcctcccgacgaagtgagatgactacatctctggacaccgtcgaaaccttcggcactaccagctactacgacgacgtcggcctgctgtgcgaaaaggctgacacacgagccctgatggcccagttcgtacccccactgtatagcctcgtatttacagtagggctcctggggaacgtggttgtggtgatgattctcattaaatatcgacgcctgcgaattatgaccaacatttacctgcttaacctcgcgatctctgaccttctctttttggtgacactgccattttggattcattacgtgagaggacataactgggtattcgggcacggcatgtgcaagctcctgagtggattttatcacactggcttgtactcagagatattttttataatcctcttgactattgaccgctacctggctattgtccacgccgtatttgccctgcgggctcgcaccgtcaccttcggagtaatcacctccattgttacctggggcttggcagttctggctgctttgccagaatttatcttttacgaaacagaggagctgtttgaagaaacactgtgctcggccttgtatccggaagacacagtgtactcctggcgtcacttccataccctcaggatgactatcttctgtctagtcctccctttgctggtgatggcaatttgctacacagggattattaaaacgctcctcaggtgtccttccaaaaagaagtacaaggcaatcagactgatctttgtgataatggccgtgttttttatcttctggactccatataacgttgctatcctgctctcatcctaccagagtatcctctttggcaatgattgcgaaaggtccaagcatctggacttggttatgcttgtgacagaggtgattgcctactctcactgttgcatgaatccagtgatctatgccttcgtgggtgagagattcagaaaatacctcaggcatttctttcaccggcacctgttaatgcatctgggtcggtacatccccttcctgccgagtgagaaacttgagaggacgtcgtctgtgtctccaagcactgctgagccagaactgtctatcgtgttctag

SEQ ID NO: 111847 - DNA, 1083 bp, synthetic construct
  misc_feature 1..1083: note = Description of Artificial Sequence: Synthetic coding sequence
  source 1..1083: mol_type = other DNA
atgaatcccacagacattgccgatacgaccctcgatgagtcaatttattctaactactacctatatgagagcattcccaagccatgcacgaaagaggggatcaaagcatttggcgagctgttcctgcccccattgtattctctggttttcgtttttggactgctcggaaatagcgtagtagttttggtgctctttaaatataaacgcttacggagcatgactgatgtgtatctgctgaaccttgcaattagtgaccttctttttgttttcagcctccccttttggggctactatgctgccgatcagtgggtctttggcttgggtctgtgtaagatgattagttggatgtacttggtggggttctacagcgggattttttttgttatgctgatgtcaattgacagatacttagcgatcgtgcacgcagttttcagtcttcgcgcacgcacactgacgtacggggtaatcacttccctggccacttggtcagtagccgtattcgccagcctgcctggattcctgttctccacctgttacacggagcgtaatcatacctattgtaagaccaaatattctctgaattccactacctggaaagttctctcaagccttgaaataaacatcctgggactggtcatcccactcggcatcatgctcttctgctactccatgattattcggactttgcaacactgtaagaacgagaaaaagaacaaggcagtaaagatgatatttgctgtcgttgtcttattcctgggattttggactccctacaatatcgtgctgttcctggagacactcgtcgaactggaggtgttacaggactgcacatttgaaaggtacctggactacgctatccaggcaaccgaaaccctcgcttttgtgcactgctgtctaaatccaatcatctactttttcctcggggaaaaatttagaaaatatatcctgcagttgttcaagacttgtcgggggctctttgtgctgtgtcagtactgtggtctgctacagatatacagtgctgataccccctcttcctcatatacacagtcaaccatggaccatgacctgcacgacgctctctag

SEQ ID NO: 111848 - DNA, 1059 bp, synthetic construct
  misc_feature 1..1059: note = Description of Artificial Sequence: Synthetic coding sequence
  source 1..1059: mol_type = other DNA
atggactaccaggttagcagtcccatatacgacatcaactattatacctcagaaccctgtcagaaaattaatgtgaagcagattgctgcgcggctcctccctcctctgtattctcttgttttcattttcggatttgtagggaacatgctcgtcatccttattctaattaactgcaaacgcctgaagtctatgaccgacatctatctgctaaacctggccatttcagacctgtttttcctgttgactgtgccattctgggcccactacgcagctgcacagtgggattttggcaatacaatgtgtcagctcctgacggggctgtattttatcggctttttttccggcatcttttttatcatcctattgacgatagatcgatacctcgctgtcgttcacgctgtgtttgctctgaaggccagaaccgtaacattcggcgtggtcacgagtgtaattacatgggttgtggcggtgtttgctagcctgcccggcatcattttcactaggagccaaaaggagggtcttcactatacttgtagcagtcactttccttacagccagtatcaattttggaagaattttcagaccctgaaaatagtcattctggggctggttctacctctgctggtgatggtgatatgttattccggcatcctcaaaacgctgctgaggtgtagaaacgagaaaaaaagacaccgggctgtcagactgatctttacaatcatgatagtatatttcctcttttgggccccgtataatatcgtgctgttgttaaacacctttcaggagttctttggcctcaataactgcagcagctccaatcgtctagaccaggccatgcaggttaccgaaactctgggaatgacgcactgctgcattaatccaattatatacgcgtttgttggagaaaagtttaggaattacctgcttgtgttctttcagaagcacatcgccaagcgtttttgcaagtgctgcagcatatttcagcaggaggcccccgaaagggcctccagtgtctacactaggagcaccggtgaacaggagatcagcgtgggtctgtag

SEQ ID NO: 111849 - DNA, 1059 bp, synthetic construct
  misc_feature 1..1059: note = Description of Artificial Sequence: Synthetic coding sequence
  source 1..1059: mol_type = other DNA
atggactatcaggtctcatctccaatctacgacattaactattacacgtcagagccctgccaaaaaatcaatgttaagcagatcgccgcgaggttgctgcctcccctgtactccctggtgtttatctttggcttcgtgggtaatatgctagtgatactgattctgataaactgcaagcgccttaagagcatgacagacatttatttgctgaacttagctatatccgatctctttttccttctaaccgtgcccttttgggctcattacgccgcggcccagtgggacttcggaaacacaatgtgccaactgttaaccggcttgtactttattggatttttttctgggatcttcttcatcatactcctcaccatagatcgatatctggccgtcgtacatgcagtcttcgccctcaaggcccgtactgtaacgtttggagtcgtgacgagtgtgataacctgggtagtagccgtttttgcgagcctgcctggaatcatctttactcggagccagaaggagggactgcactacacctgtagcagccacttcccatacagccagtaccaattctggaaaaactttcaaaccttgaaaattgtgatccttggactcgtgttgcctctgttggtgatggttatttgttacagtggcatcctgaagacccttctgagatgtcgaaatgaaaaaaaacgccaccgtgctgttcgtttgatattcaccatcatgatagtatactttctgttttgggctccatacaacattgtgctgttgctgaacaccttccaggagttctttggtctaaataactgcagctccagtaaccgactcgatcaggcaatgcaggtgaccgagacactggggatgacgcactgttgtatcaacccaatcatttatgccttcgtgggagaaaagtttcggaactacttacttgtttttttccaaaaacatattgcgaaacgtttttgcaaatgttgttctatcttccagcaggaggcccccgaacgggcttcaagcgtctatactcgctcaactggcgaacaggagatcagcgtaggattgtag

SEQ ID NO: 111850 - DNA, 999 bp, synthetic construct
  misc_feature 1..999: note = Description of Artificial Sequence: Synthetic coding sequence
  source 1..999: mol_type = other DNA
ctgcctaagaatcagtgtgaggccaacagaagccctcccccggctagcgcactgctcaccggcgtacacctgtggttttgcaacatgttagttattctgatccttattaactgcaagaggcttaaatcgatgactgacatatatctgttgaatcttgcaatcagcgatctgttcttcttactgaccgtccctttttgggcacattacgcagccgcccagtgggactttggcaacacaatgtgtcagctgctaaccggactgtattttataggattctttagtgggatcttcttcattatcctcctcaccattgataggtatctggccgtggtgcacgccgttttcgccttgaaggcccgcacagtcactttcggggtagtaacgtctgtgatcacttgggttgttgcagtgtttgccagtctcccaggcattatctttactagaagtcaaaaagagggccttcattatacttgcagctcacatttcccctattctcagtaccagttctggaaaaactttcagaccttgaagattgtgatcctgggactagtgctgcctctgctcgttatggttatatgttattccggcatcctgaaaactctcctacgatgccggaatgaaaagaagcgccatcgggcagtccggctgatcttcaccatcatgatcgtgtacttcttgttctgggctccttacaacatcgtgctcttactcaatacattccaagagttcttcgggctcaacaattgctcttctagtaacaggctggatcaggccatgcaggtcacagagactttgggaatgacccactgttgtatcaatccaatcatttatgcctttgttggagaaaagttccggaactacctgctggtgttctttcagaaacatatcgcaaagcgcttttgcaaatgttgctctatcttccaacaggaggctccagagagagcgagttcagtttacacgcgtagtacgggtgagcaggaaatcagtgttggactgtag

SEQ ID NO: 111851 - DNA, 1059 bp, synthetic construct
  misc_feature 1..1059: note = Description of Artificial Sequence: Synthetic coding sequence
  source 1..1059: mol_type = other DNA
atggattaccaagtgagctctccgatttacgatatcaattattacacaagcgagccctgccagaaaatcaatgtgaagcagattgctgctcgtctgctcccccccctttactctctggtttttatatttgggtttgtgggcaatatgctggtgatccttatactgataaattgcaaacgactgaaaagtatgactgacatctatctgttgaacctcgctattagcgatctgtttttcctgcttacagtcccattttgggcccactacgccgccgctcagtgggattttggcaacactatgtgtcagctgctgacaggcctttactttattggattcttttccgggatcttcttcattattctcctcacaatagacagatacttagcggtagttcatgctgtgttcgcgttgaaagctcgcacagttacatttggcgtggtcacctccgttataacctgggttgtcgccgttttcgcaagtttgccaggtattatctttacgaggagtcagaaggaagggctccactacacttgtagctctcacttcccatactctcagtaccagttctggaagaactttcaaaccctcaagattgtgattttgggacttgtgttgcccctacttgttatggtgatctgctactctggcatcctaaagactctcctcagatgccggaatgagaaaaagaggcatagggctgtgcgactcatttttacgatcatgatcgtctactttctcttctgggccccctataatatagttcttttactgaacacgtttcaagagttctttggtctgaacaattgcagctcttctaatcgcctcgatcaggcaatgcaggtaacagaaacattggggatgacacattgttgcatcaatcctataatctacgccttcgtgggggagaagttcagaaactatttgttggtgttctttcagaagcacatcgctaagaggttctgtaagtgctgtagcatctttcagcaagaagcacctgagagggccagttcagtgtacacacggtcgacaggtgagcaggagattagtgtaggcttgtag

SEQ ID NO: 111852 - DNA, 1125 bp, synthetic construct
  misc_feature 1..1125: note = Description of Artificial Sequence: Synthetic coding sequence
  source 1..1125: mol_type = other DNA
atgagcggagaaagtatgaacttttctgacgttttcgactctagcgaagattacttcgtcagcgtgaataccagttattactcagtggacagcgaaatgttgctgtgcagtctccaagaggtgagacagtttagccggttgtttgtccccattgcatactcactcatctgtgtttttgggttactgggcaatatcttggttgtcataacctttgccttctataagaaagcccgttcaatgaccgacgtgtatctgctgaatatggctatcgctgatattctttttgtactcaccctgcctttctgggcagtttcccacgctaccggcgcgtgggtgttctctaacgccacctgtaagctgctgaagggcatttacgccattaattttaactgtggcatgttacttctgacctgcatctcaatggaccgctatatcgcaattgtgcaggctactaaaagcttccgcctgaggagtagaactctcccacgtagtaagattatctgtttggtggtctggggcctgtccgtgatcatatcttcctccactttcgtgttcaatcagaagtacaacactcagggatccgatgtgtgtgaaccgaagtatcaaaccgtcagcgagcccatccgatggaagctgttaatgcttggactcgagttactattcggattttttatccctctgatgttcatgatattttgctacactttcatcgtgaaaacacttgtgcaggctcaaaatagcaagcggcacaaagccattcgtgtaattatcgctgtggtcctcgttttcttggcttgccagattccgcacaacatggtgctgctagtgaccgcagccaatctaggcaagatgaatcggagctgccagtcagagaagctcattggttacactaaaaccgttaccgaggtccttgcttttttgcactgctgcctgaatcccgtcctgtatgcttttatcgggcagaaattccgcaactatttcctaaagattctgaaagatctctggtgcgtgagaagaaagtacaagtcatcaggcttcagctgtgccgggcgatattccgagaatatcagccgccagaccagtgagacagcagataatgataatgcaagcagtttcacgatgtag

SEQ ID NO: 111853 - DNA, 1125 bp, synthetic construct
  misc_feature 1..1125: note = Description of Artificial Sequence: Synthetic coding sequence
  source 1..1125: mol_type = other DNA
atgagtggagagtccatgaacttttccgacgttttcgactcatctgaggattacttcgtgtctgttaacacgagttactacagcgttgactcagaaatgcttttgtgctcactccaggaggttagacagttttcacgactgtttgttcctatagcctattccctgatttgcgtgttcggactgctgggcaacatactggtggtgatcactttcgccttttataagaaagctcgcagcatgaccgacgtgtatctcctgaatatggcaatcgcagacatcctgttcgttctgaccctgcccttctgggccgtgagtcatgccaccggtgcatgggtgttctccaacgctacatgtaaactgctcaaagggatttacgctatcaatttcaactgtgggatgctgctgttaacgtgtatctccatggaccgatacattgccatagtgcaggcgacaaaaagtttccgcctgcgctctagaactctcccccgaagcaaaataatctgtctggtcgtctgggggctctccgtgattatttcaagtagcacgtttgtcttcaaccagaagtataacacccagggctctgatgtgtgtgaacctaagtaccaaaccgtgtctgaaccaatccgatggaaactgctcatgctgggcctggaattgctgttcggctttttcatcccactaatgttcatgatcttctgctacacttttattgtcaaaacccttgtgcaggcacaaaactctaaaaggcacaaggccatccgggtcatcatcgcagtggtcctcgtgttccttgcatgccagattcctcacaatatggttctgctggtaacggccgctaatctaggcaagatgaataggagctgtcaatcggaaaagctaattgggtacacgaaaacggtgacagaagtgttagccttcctccactgttgcctgaatcccgtgctgtacgcctttatcgggcaaaaattccgtaattattttctgaagattctaaaagacctctggtgtgtacgcaggaagtacaagagtagtggtttctcttgtgcagggcgctatagcgagaacatctcccgtcaaacgtcggaaactgcggataatgataacgcgtcctctttcactatgtag

SEQ ID NO: 111854 - DNA, 1125 bp, synthetic construct
  misc_feature 1..1125: note = Description of Artificial Sequence: Synthetic coding sequence
  source 1..1125: mol_type = other DNA
atgtcaggagagtcaatgaactttagcgatgtatttgactcctcagaagactacttcgtttccgtcaacacgtcatattacagcgtcgatagcgaaatgctgctgtgttctctgcaggaggtaagacagttctcccgacttttcgtcccaattgcttacagcctgatctgtgtattcggcctactcggcaacatcttggtggtcattaccttcgctttttacaaaaaagccagatcaatgacggacgtctacttactcaacatggccatcgccgacatactgttcgtcttaaccctccctttctgggccgtgtcgcacgcaacaggagcatgggtctttagcaatgctacctgtaaattattgaaaggtatctacgccatcaattttaattgtggtatgcttcttctgacctgcatttcaatggaccgctacatcgccatcgtgcaagccacaaaatcctttcgactcagatctcgcactctgccccgtagcaaaattatttgtctagtagtttggggtctgtctgtgatcatctcttcttctacatttgttttcaatcagaaatacaatacccagggatcagacgtgtgtgaacccaaataccagaccgtcagcgaacccatacggtggaagttactgatgctgggcctggagcttctttttggtttcttcatccctcttatgtttatgattttttgttacacttttattgtcaagacgttggttcaggcacagaacagtaagaggcacaaagctattagggtgattattgctgttgtgctcgtgtttttggcatgccagatcccccacaacatggttctactggtcacagccgccaacctcggcaagatgaaccggtcctgccagagtgaaaaattgatcggctacacaaagacagtgaccgaagtactggcctttcttcattgctgtctcaacccagttctctacgcgtttatcgggcagaaatttcgaaattactttctgaagatcttgaaagatctctggtgtgtgagaagaaaatacaagtcatctggcttttcctgcgcaggccgctactcggagaacatctctaggcaaacttccgagacagccgataatgataatgcatcttctttcactatgtag

SEQ ID NO: 111855 - DNA, 1137 bp, synthetic construct
  misc_feature 1..1137: note = Description of Artificial Sequence: Synthetic coding sequence
  source 1..1137: mol_type = other DNA
atggacctcggcaaaccaatgaaaagtgtgctcgtggtggcgctattggtgatctttcaggtgtgtctgtgtcaggatgaagtgaccgacgattatataggtgacaataccaccgtcgactacaccctgtttgaatcactctgcagtaaaaaggatgtgcggaactttaaggcctggttccttcctattatgtatagcatcatctgctttgtggggctcttaggcaatggcctggtggttttaacttatatctacttcaaaagattgaaaactatgacagacacatacctgctcaacctggctgtggccgacattttattcctccttaccctacctttctgggcctatagcgccgctaaatcttgggtgttcggggttcacttttgcaaattaatcttcgccatttataaaatgtcttttttctccggaatgctactcctgctgtgcatcagcattgatcgttatgttgctatagttcaagccgtctccgcccatcgccaccgagctcgcgtccttttaatctccaaattatcatgtgtgggaatttggattctggcgaccgtgctatctattccggaactgctttattccgaccttcagcggtcgagctctgagcaggctatgcgctgctccctgatcacagagcatgtagaagcttttatcacaattcaggttgcccagatggttattggttttctggtgcccttgctcgctatgtcattttgctacctggttatcatcaggaccctgcttcaagctcgaaatttcgagcgtaacaaggccatcaaagtaatcattgccgtcgtcgtcgtgttcatcgtatttcagttgccttacaacggagtggtgctggcccagaccgttgccaactttaatataacttcctctacatgcgaattgagcaaacaactgaacattgcttacgacgttacttattcactagcgtgtgtacggtgctgcgtcaatccatttctgtacgcctttatcggcgttaaatttaggaatgacctctttaaacttttcaaggaccttggctgtctgtcacaagaacagctgcggcagtggtcaagttgtcgacatatccggcgctcatctatgagtgtcgaagccgaaaccaccaccactttctcaccctag

SEQ ID NO: 111856 - DNA, 1068 bp, synthetic construct
  misc_feature 1..1068: note = Description of Artificial Sequence: Synthetic coding sequence
  source 1..1068: mol_type = other DNA
atggattacacgctggatctgtctgtcacaacggtaacagactactactatcctgacatcttttcttctccctgcgatgcggagttgatccagactaacggcaaactgttgcttgccgtgttttactgcctcttatttgtgttttcgctccttgggaactccctggtgatattagtgttagtggtatgtaagaaactgcgatccattaccgacgtgtacttattaaaccttgctctgagtgatcttctcttcgtcttttctttcccttttcagacctactacttgctcgatcagtgggtctttggcacagtgatgtgtaaggtggtctcaggtttttactatatcgggttttatagttcaatgttttttatcaccttgatgagtgtcgaccggtatctcgctgtggtccatgcggtctacgcgctaaaggtcaggactatacggatgggcacaacactgtgcttggctgtgtggctgaccgccattatggcaaccattcccctgctcgtcttttatcaggtcgccagcgaggacggtgtactccaatgttactcgttttataaccaacagaccttaaaatggaagatcttcaccaactttaagatgaatatcctcggtctgctgattcccttcactattttcatgttttgttatattaagatactccatcagttaaagcgatgtcagaaccataacaagaccaaagcaattcgactggtcttaattgtggttatagcatcccttttgttctgggttccgttcaatgttgtgctgttcttgactagcctgcatagtatgcacatcttggacggatgttccatttcacagcagctcacgtatgcgactcatgtcacggaaattatttcctttacacattgttgcgtcaatcccgtcatctatgccttcgtcggcgagaaattcaagaagcatctgtctgagatctttcagaaatcctgctcacagatctttaattacctcggccgccagatgccccgtgagagttgtgaaaagagcagttcatgccagcagcattcgtcaagatctagctcagtagattacattctttag

SEQ ID NO: 111857 - DNA, 819 bp, synthetic construct
  misc_feature 1..819: note = Description of Artificial Sequence: Synthetic coding sequence
  source 1..819: mol_type = other DNA
atgaggaacttattcagacaaatgacgtattacctgcttgatcagtgggttttcggcacagtgatgtgtaaagtagtgtcgggattttactatatagggttctatagcagcatgttcttcattactctaatgtctgtcgaccgctatctggccgtcgtgcacgccgtatacgctctgaaggtgcgtaccatccgaatgggaactactctgtgtctcgccgtgtggctgaccgccataatggctaccatccctttgctagtgttttaccaagtcgctagcgaagacggcgtcttgcagtgctactccttttacaaccagcagaccctcaagtggaaaatcttcaccaactttaagatgaatatcttagggctgttgatcccgttcaccattttcatgttttgttacataaagatcttacaccaactgaagaggtgtcagaaccataataaaacaaaagccatccggctggtactaatagtagtgatcgcctctctgttgttttgggtaccttttaatgtggtgctgtttctcacaagtctgcactccatgcatatcctcgatggatgtagtatatctcaacagctgacgtacgccacccacgtaactgagattatttccttcactcattgctgcgttaatcccgtcatctacgcgttcgtaggcgaaaaattcaagaagcacttatctgaaatctttcaaaaatcttgctctcagattttcaactacctcgggcgtcaaatgccacgcgagagttgtgaaaaatcttctagctgccaacagcattcctctagatcttcaagtgtggactacatcctctag

SEQ ID NO: 111858 - DNA, 1074 bp, synthetic construct
  misc_feature 1..1074: note = Description of Artificial Sequence: Synthetic coding sequence
  source 1..1074: mol_type = other DNA
atggcagacgactatggatcggaatccacctccagcatggaggattacgtgaacttcaacttcactgatttttattgtgagaaaaacaatgtgagacaatttgcctctcacttcctgcctccactctattggctcgtgtttattgtgggagcgctgggaaactctctggtgattctcgtgtattggtattgtactcgggtgaagaccatgaccgacatgtttctattgaatttggctattgctgatttgcttttcttggttaccctgcccttttgggcaatcgccgccgctgatcaatggaagttccagacctttatgtgcaaggtggtgaatagtatgtacaaaatgaacttctatagttgtgttctgcttatcatgtgcatctccgtggatcgatatattgctattgcccaggccatgagggcccatacctggcgggaaaaacggttactatactcaaaaatggtatgcttcaccatctgggtcctggcggcagccttgtgcatccctgagatcctctacagccagatcaaagaagaatctgggatcgcaatttgtacaatggtataccccagcgatgagtccaccaaacttaagtctgcggtactgacccttaaggttatcctgggattctttctgcccttcgtcgtaatggcttgttgttatacaattataattcacactcttattcaggcaaagaagagcagcaaacataaagctcttaaggtaacgattacagttctcacagtgtttgtgctgtcacagttcccatacaattgcatcctactggtccaaactatcgacgcttacgcaatgtttatttccaactgcgccgtaagcactaacatcgacatctgtttccaggtgacgcagacaattgcattctttcattcatgcctgaaccccgtcctatacgttttcgtgggtgagcgcttccggcgagacctggtgaagaccctcaaaaaccttggatgcatcagccaagctcagtgggtaagctttacccggcgtgaggggagtctgaaactgagctcaatgctgttagagaccacttccggcgctctgtctttatag

SEQ ID NO: 111859 - DNA, 1110 bp, synthetic construct
  misc_feature 1..1110: note = Description of Artificial Sequence: Synthetic coding sequence
  source 1..1110: mol_type = other DNA
atgactccgaccgattttacaagtccaattcctaacatggccgacgattatggctccgaatcaaccagctctatggaggattacgtaaacttcaacttcaccgatttttactgtgagaaaaataatgtgagacagttcgctagccactttttaccaccattatattggttggtcttcatagtaggagcgctgggaaatagtcttgttattctcgtgtactggtactgcacaagggtgaagacaatgacagacatgtttctgttgaacctcgctatcgccgacttattattcttggtgaccctcccattctgggcgattgccgccgcagaccagtggaaattccaaacttttatgtgtaaagtcgtgaacagcatgtataagatgaacttttactcatgcgtgctgctgattatgtgcatttcagtggatcgatacattgccattgcacaggccatgagggcccacacctggcgcgagaagcggctgctgtacagtaaaatggtctgttttaccatttgggtactcgccgctgccttatgtatcccagagattctctattcccagattaaggaggagagtgggatcgcgatctgcacaatggtctatccgtcggatgagagcacaaaactaaagagcgctgtattgaccctgaaagtcattctgggctttttcttgccctttgtggtgatggcctgttgttacacgattataatccataccctgattcaggcgaagaaaagctccaaacacaaggccctgaaggtaacgatcaccgtgttaactgtttttgtcctcagtcagttcccttataactgcatcctcctggtgcagactattgacgcatacgccatgttcatttccaattgtgcagtctctaccaacatcgacatatgcttccaggtaacccaaacgatcgcattcttccactcttgcctcaacccagtgttatatgtgtttgtcggcgaacggttcagaagagatttggtgaaaaccctcaagaatctaggctgcatctcacaagcgcagtgggtgtcattcacccggcgagagggctctctgaaactttcaagtatgctccttgaaacgacatccggggctctctccctttag

SEQ ID NO: 111860 - DNA, 1074 bp, synthetic construct
  misc_feature 1..1074: note = Description of Artificial Sequence: Synthetic coding sequence
  source 1..1074: mol_type = other DNA
atggccgatgactacggttcggagtcgacatcctctatggaggactatgtgaattttaatttcaccgatttctactgcgaaaagaacaatgtcagacagttcgcctcccactttctcccccccttatactggctcgtctttatcgtgggggccctcggcaacagtcttgtgattctggtgtactggtattgtacccgcgtaaaaactatgactgatatgtttcttttaaacctggctattgccgacctcctgttcctggtgacactccctttttgggctatcgccgctgctgatcagtggaaatttcaaacgtttatgtgcaaagttgttaactccatgtacaaaatgaacttttattcttgtgtgctcctcataatgtgtatttctgttgacagatatattgctattgcccaggcgatgcgggctcacacgtggcgcgagaaaaggctgctgtactccaagatggtgtgttttaccatctgggtccttgcagcggccttgtgtatccccgaaatcctctattcacagattaaagaagaaagtggtatcgccatttgcaccatggtgtatcccagcgatgagagcaccaaactgaagtccgcggttttaactctcaaggtgattctgggtttcttcctgccattcgtcgttatggcatgctgctatacaattatcatccacacactgatccaggcaaagaaaagctcgaagcacaaagcactcaaagttactataacagtgctgacagtgttcgtgctgagtcagtttccatacaactgcatcctactcgtccaaactattgatgcctatgctatgttcatatccaattgcgccgtcagcaccaacatcgacatatgcttccaggtcacgcaaacaattgccttttttcactcctgcctgaacccagtgctatatgtgtttgtgggcgaacgatttagaagagacctggtgaaaacactaaaaaatctaggctgcatctcacaggctcagtgggtcagtttcaccagacgagagggatccctgaagcttagctctatgctgctagagacaacttctggggccctgagcctgtag

SEQ ID NO: 111861 - DNA, 1053 bp, synthetic construct
  misc_feature 1..1053: note = Description of Artificial Sequence: Synthetic coding sequence
  source 1..1053: mol_type = other DNA
atggccctggaacagaatcagagtactgattactactatgaagagaacgagatgaatggcacctacgattactctcaatatgagctcatctgcattaaggaggacgtgcgagagtttgctaaggtgtttctccccgtctttctcacaatcgtattcgtgatcggcctggcaggcaattctatggtggtagcaatttacgcctattacaaaaaacagcggacaaaaaccgatgtatacatcctcaatctcgcagtggccgatctgctactgttgtttactctgccattttgggcagtgaacgcagtgcacggttgggtgctagggaagatcatgtgtaagataacttcagctttatacacactgaatttcgtcagcggtatgcagtttctagcatgcattagcatcgatcgctacgtggcagtaaccaaggtgcccagtcagtccggagtcggcaagccatgttggataatatgtttctgcgtatggatggcggctattctgttgtctattcctcagctggtgttttataccgtcaacgacaatgcgaggtgtatccctatctttcccagatacctaggcaccagcatgaaggctctcatccagatgctggagatttgtattgggtttgttgtcccctttctgattatgggggtctgctatttcataaccgccagaacgctgatgaaaatgccaaatatcaagattagcagacccttgaaggtactgctgacagtggttatcgtgttcatcgtgacacagctcccatacaatatagtaaaattctgccgggctatcgacattatctattccctgattaccagttgtaatatgagcaagaggatggacattgccatacaagtaactgagtcaattgctttattccactcttgtctcaatccgatcttgtatgtgtttatgggtgcttccttcaagaattacgtgatgaaagttgcaaaaaaatatgggtcatggcgccgacaaagacagagcgtcgaagagttcccatttgattcggaggggccgactgaacctacctcaacgttcagcatctag

SEQ ID NO: 111862 - DNA, 825 bp, synthetic construct
  misc_feature 1..825: note = Description of Artificial Sequence: Synthetic coding sequence
  source 1..825: mol_type = other DNA
atggccttggagcagaatcagagtaccgactactattacgaagagaatgagatgaacgggacttacgactatagccaatatgagctgatttgtatcaaggaagacgtgcgtgagttcgcaaaggtctttctgccggtgttcctaactatcgttttcgtgattggcctcgcaggtaactcaatggtggtcgcaatttacgcctactacaaaaaacaaaggaccaagacagacgtgtacatcctgaacctggccgtggctgacctgctgctgctgtttactctgcccttttgggccgttaacgctgtgcatggatgggtgctcggcaagattatgtgcaagatcacatccgccctgtacactttgaacttcgtgtctgggatgcagttcctggcctgcatatctattgacagatatgtggctgtgacaaaggttccgtcccaatctggcgtcggtaagccttgttggataatctgcttttgcgtatggatggctgctatactgctctctatccctcagctggtgttttacacggtgaatgacaatgctagatgtattccgattttcccacgttacctcggcacttcaatgaaggccctcatccagatgttggaaatttgcatcggtttcgtggtgccattcttgatcatgggcgtatgctattttattactgcacgcacactcatgaaaatgcctaacatcaaaatctcacgaccgctgaaagtgctcctgactgtggttatcgtgtttatcgtgactcagctcccatttgcttggatccacatgaatgacgcctttccgagtaacaagaccagcgcccttttctag

SEQ ID NO: 111863 - DNA, 1071 bp, synthetic construct
  misc_feature 1..1071: note = Description of Artificial Sequence: Synthetic coding sequence
  source 1..1071: mol_type = other DNA
atgatctacactagatttctcaaaggaagccttaaaatggcgaattacaccctggctccagaggacgagtacgatgtgcttatcgaaggagagctggagagcgacgaggcggagcaatgtgataagtacgacgcccaggcattgtcggctcagctggttccgagcctttgttcagccgtcttcgttataggagtgctggataatcttctagtggtgctcattctcgtgaaatataaggggctgaagagagtagaaaatatttacctgttaaacctagcagtgagcaatctctgttttttgctaactctgccattctgggcgcatgctggaggcgatcccatgtgtaagatccttattgggttatattttgtggggctgtattctgagacctttttcaattgcctgctaacagtgcagcgctatctggtgtttctacacaaaggaaattttttctcagctagaaggagagtgccctgtgggatcatcaccagcgtgctggcgtgggttaccgccatcttggccaccctgcccgagttcgtcgtgtacaaacctcagatggaagaccagaagtataaatgcgccttcagcaggacaccctttttgcctgcggacgagaccttttggaagcacttccttaccctcaagatgaatatcagtgtgctcgtgctgccgctctttatcttcacatttctctatgttcagatgcggaagacccttagatttagggaacagcgttactccctgttcaaactggtgtttgcaatcatggtggtttttctgctgatgtgggctccctataatatcgccttctttctttcaacatttaaagagcacttctccttgagcgattgcaagtcaagctataatctcgacaaatccgtgcacattaccaagttgatcgccactactcattgttgtataaatcctcttctctacgcctttctggatgggactttctctaaatacctgtgccggtgcttccatctgagaagcaacacaccactgcagcctcggggtcagagcgcacaggggacatctcgagaggagcctgaccacagcacggaggtgtag

SEQ ID NO: 111864 - DNA, 1035 bp, synthetic construct
  misc_feature 1..1035: note = Description of Artificial Sequence: Synthetic coding sequence
  source 1..1035: mol_type = other DNA
atggccaattatacgctcgctcctgaggatgaatatgatgtgctcatcgagggcgagcttgaatcagacgaggccgaacagtgcgacaagtatgacgctcaggctctgagtgctcaactcgtacctagcctgtgctctgcagtgtttgtcatcggagtgcttgataatctgctcgtggtgctcatactcgtgaaatacaaggggctgaagagagttgaaaatatatacttgttgaacctggcagtcagcaacctgtgcttcttattgactctgcccttctgggcacacgctggcggtgaccctatgtgcaaaatcttaattgggctttactttgtcggtttgtattctgagaccttttttaattgcctcctgactgtgcagagatacctggtatttctccacaaaggcaatttcttcagcgcccggagacgagtaccctgcgggatcatcaccagcgttttagcatgggttaccgcaatcctagcaactctgccagagtttgtggtctacaaaccacagatggaagatcaaaaatataaatgtgctttctcacgcacacctttcctgcccgcggatgaaacattctggaagcacttcctgacactcaagatgaacatcagcgttctggttctgccactcttcattttcaccttcctgtacgtccagatgaggaagaccctgagatttagagagcaacggtacagcttatttaaactagtttttgcaatcatggtggtcttcctacttatgtgggcaccttacaacatagctttctttctgtccacctttaaagaacacttctccctaagcgattgcaagtcctcatacaacctcgacaaaagcgtgcatataactaagctgatagcaaccacccattgctgcattaatccactgctgtacgccttcttggacggtactttcagcaagtacttgtgcagatgcttccacctccgtagtaacacccctctacagccgagaggtcaatcagcacaagggacatcccgagaggaacctgaccattccactgaagtctag

SEQ ID NO: 111865 - DNA, 1035 bp, synthetic construct
  misc_feature 1..1035: note = Description of Artificial Sequence: Synthetic coding sequence
  source 1..1035: mol_type = other DNA
atggctaattacaccctggcgcccgaggacgagtacgacgttctcatcgaaggagaactggagtccgacgaggccgagcagtgtgacaagtacgacgcccaggcactgtcagcccagctcgttccttccctctgctccgccgtgtttgtaatcggggtgctagacaatcttctggtggttctgattctagtgaagtacaagggattgaagcgagtggaaaacatatacctgctgaatctcgccgtgtctaacctctgtttcctgctgactctgccattctgggctcacgcaggcggtgatcccatgtgtaaaattctgatcggtctttatttcgtggggttgtatagtgagacattctttaattgcttgcttaccgtgcagcggtatctcgtgtttctgcacaaggggaactttttcagcgcgagaagacgggtgccatgtggtatcattacgtccgttttggcttgggtgaccgcaatcttagcaactttaccagaattcgtggtatacaagccccagatggaagatcagaagtataaatgcgccttttccagaacacctttcttgccggccgatgagacgttttggaagcattttctcaccctgaagatgaatattagcgtgctggtgttgcccctgttcattttcacttttctgtacgtgcagatgcgaaagacactcaggttcagagagcagcggtatagtcttttcaagttagtgtttgcaatcatggtggtgtttctcttaatgtgggcaccgtacaacatcgcatttttccttagtacattcaaagaacatttcagcctttctgattgcaaatcctcatacaacctcgacaagtcagtgcacataacaaagcttatcgccactacccattgctgcataaatccactgctctatgcgttcctggatggtactttctctaagtacctctgcaggtgctttcatctgagaagcaacactcctcttcagccccgcggacagtcagcccaggggacaagcagagaagagcctgaccattctaccgaggtgtag

SEQ ID NO: 111866 - DNA, 1035 bp, synthetic construct
  misc_feature 1..1035: note = Description of Artificial Sequence: Synthetic coding sequence
  source 1..1035: mol_type = other DNA
atggcaaattataccctggcccccgaggatgaatatgatgtgctcatagagggggagctagaaagtgacgaggccgagcagtgcgataagtatgacgcccaagcgctgagcgcccagttagtcccttccctttgcagcgcggtgttcgtaattggcgtactggacaacttgcttgtggtgctcattctagtgaaatacaagggcttaaagagagtggagaatatatacttgctgaacctagcagtctctaatctgtgctttctgctaacccttccattttgggcccacgcgggcggtgatcccatgtgcaaaatactgatcggcctatatttcgtcggactctatagcgagacatttttcaactgcctcctaaccgtccagcggtatctggtatttctgcataagggcaacttcttctcggcccgacgccgggtgccgtgcgggatcataacaagtgttctggcttgggtcaccgccattcttgctaccctccccgagttcgtagtctataaaccccagatggaagatcagaagtacaaatgtgctttcagtcgaactcccttcttgcccgccgacgaaaccttctggaaacatttcctcaccctgaagatgaatatcagtgtgctcgtcttgcccttatttatatttacctttttatatgtgcaaatgagaaagactcttagattccgtgagcagcgatatagcttatttaaactcgtgtttgccatcatggtggtcttcctgctcatgtgggccccatataacatcgcattttttcttagcaccttcaaagaacatttcagcctgtccgactgtaagagttcctacaatctggataaatccgtccacataaccaagcttatcgccaccacccactgctgcattaaccccctactttacgctttcctggacggaacattttccaaatatctatgcaggtgctttcacctcaggagcaacaccccactgcagcccagagggcaatctgcccagggtacaagccgggaagagcccgaccattcaactgaagtttag

SEQ ID NO: 111867 - DNA, 654 bp, synthetic construct
  misc_feature 1..654: note = Description of Artificial Sequence: Synthetic coding sequence
  source 1..654: mol_type = other DNA
atggcgaactataccttggccccggaggatgagtacgacgtgctgatcgaaggggaacttgagtccgatgaggcagagcagtgcgacaaatacgatgcacaggcgctatctgctcaactggtcccatctctgtgctccgccgtattcgtaataggcgttctggacaatctgctcgtggtgctgattctcgtgaagtataaaggtctgaagcgggtcgaaaatatctacctgctgaacctcgcagtatcaaacctgtgctttcttcttactttaccgttctgggctcatgctggaggagaccccatgtgtaagatactgataggtctctatttcgtcggactgtattctgagacattctttaactgcctgctgactgtgcagcgctatctggtgttcctgcataaggggaacttctttagcgccagacgacgggtcccgtgcgggatcatcacaagtgtgcttgcatgggtgaccgcaatccttgccacattgccagagttcgtggtgtataaaccgcagatggaggaccagaagtataaatgcgcctttagccgtacgccatttctccctgctgacgagactttttggaaacactttctgaccttaaagatgaatataagcgtgcttgtgctgcctctcttcatctttacttag

SEQ ID NO: 111868 - DNA, 1194 bp, synthetic construct
  misc_feature 1..1194: note = Description of Artificial Sequence: Synthetic coding sequence
  source 1..1194: mol_type = other DNA
atggccccaataagtctgagttggctgctgcggctggccactttctgccacttgaccgttctgctcgcgggtcagcatcatggtgtcaccaagtgcaatatcacatgttctaagatgacaagtaaaatccccgtggcacttctgatacattaccagcagaatcaagccagctgtggaaagcgtgccattatattagaaaccagacagcacaggctgttctgcgctgaccctaaagaacagtgggtcaaggatgccatgcagcatctcgatcgccaggccgccgccctgactaggaacggaggtacattcgagaagcagatcggcgaagttaagccccgaaccacaccagctgccggggggatggatgaaagtgtcgtcctggagccggaggctaccggtgagagcagcagccttgaacctacaccaagctcccaggaggcccaaagggctttgggaacatcaccagagctgccaacgggcgtgacaggtagcagcggcacgaggctacctcctacccctaaagcccaggacgggggccccgtggggacagaactcttccgggtgccgccggtctcaactgctgcgacctggcagagtagcgctcctcaccagcccggcccaagcctgtgggccgaggcaaagacatcggaggcgcctagcacacaggatcctagtacccaggctagcactgcttcttcacccgccccagaggagaatgccccctctgaggggcagagggtctgggggcagggccagagcccccgtcccgaaaattcgctcgagcgggaagaaatgggccccgtgccggcccatactgatgcattccaggattgggggcccgggagtatggctcacgtgagtgttgtgcctgtctccagtgaaggtactccttctagagagccggtagcaagcggatcctggacccccaaagcagaagagcctattcacgccaccatggaccctcagcggctgggtgtgcttatcacacccgtgccggacgctcaagccgccacacgccggcaggctgtagggcttcttgcattcctcggcttgctgttttgcctaggagtggctatgttcacctatcagtctctgcaagggtgcccacgcaagatggcaggcgaaatggctgaaggactacgctacattccaagatcctgtgggtcaaactcttacgtattggtgccagtatag

SEQ ID NO: 111869 - DNA, 1164 bp, synthetic construct
  misc_feature 1..1164: note = Description of Artificial Sequence: Synthetic coding sequence
  source 1..1164: mol_type = other DNA
atgcgggaacccctggaggcattcaaactggccgatctggactttaggaaatcttctctggcctctggatggaggatggcaagcggtgccttcacaatggatcagttccccgagtctgtcactgagaactttgaatacgacgatctggccgaagcgtgctacatcggagacatcgtggtgtttggcacagtcttcctttcaatcttttattccgtgatattcgccatcggcctggtgggcaacctgctggtggtgtttgcattaactaactctaaaaagccaaagtctgttacagatatataccttcttaatttggccctgtctgaccttctcttcgttgccacgttgccattctggactcattatcttatcaacgagaagggcctgcataacgctatgtgcaagtttaccaccgcatttttttttatcggttttttcgggagtattttcttcataaccgtcatctcgatcgataggtatttagcgatcgtgctggcagccaattcaatgaataatcgcactgttcaacacggcgtgaccatttcgctgggcgtatgggcagccgccattttagtagccgcaccacagtttatgtttactaagcagaaagaaaacgagtgtctaggtgattatcccgaggtgctgcaggagatctggccggtccttcggaacgtggagactaattttctcggcttcctcctcccacttctaataatgagttattgttatttcaggataattcagacattattctcttgcaaaaaccacaagaaagctaaggcaataaaactgatcctcttggtagtgattgtattttttctgttctggaccccttacaatgttatgatctttctggaaaccttaaaactttatgacttctttccctcatgtgacatgcggaaagatctgcgattggcgctgtcagtcacagaaaccgtagctttttcgcattgctgcctgaacccactaatttacgcattcgccggcgagaagtttaggagatacctgtaccacttgtacggtaaatgcctcgctgtgctatgtgggaggagcgtgcacgtggattttagttcctccgagagccagagatctaggcatggatccgtactgtcctcgaacttcacgtatcatacgtcagatggggacgctctcctgctgttatag

SEQ ID NO: 111870 - DNA, 1068 bp, synthetic construct
  misc_feature 1..1068: note = Description of Artificial Sequence: Synthetic coding sequence
  source 1..1068: mol_type = other DNA
atggatcagttccccgagtcagtcaccgagaacttcgagtacgatgacctggccgaggcttgctatattggagacatcgtcgtttttgggaccgtgttcttatctatattctactccgtgattttcgccattggcctagtgggcaacttgctcgttgtgtttgcgttgactaatagcaaaaaacccaaatccgtcacagacatatacctgttgaacttagctctctccgatctcctcttcgtcgccaccttgcctttctggactcactacttgatcaacgaaaaagggcttcataacgcaatgtgcaaattcaccactgcttttttctttattggcttcttcggttctatctttttcataaccgtcatttcaatcgacagatatctggctattgtcctggccgctaattctatgaacaacaggaccgtacagcacggggtgaccatcagcttgggagtttgggcagcagccatcctggtcgccgcgcctcagttcatgtttacaaaacaaaaagaaaacgaatgtctcggcgattaccctgaggttttgcaggaaatctggcccgttctgcggaacgtagagaccaactttttgggctttctgttacccctgctgatcatgagttactgctattttcggatcattcagactctgttttcatgcaaaaatcataaaaaggccaaggcaataaagctgatcctgctggtagtcatagtcttcttcctgttctggaccccttataatgtcatgatattcctcgagactctgaaattatacgacttcttcccaagctgcgatatgcgaaaggatcttcggctggcgctctcagtgaccgagactgtggcttttagccactgctgtctgaaccctctgatctacgcgtttgccggcgagaagttccgcagatacctgtatcatctgtacggcaaatgtttggctgttctctgcgggagatctgtacacgtggatttttcttcttcagaaagtcaaagatcacgacacggttccgttctgagctcgaactttacttaccatacatcagacggcgatgccctcctcctcctgtag

SEQ ID NO: 111871 - DNA, 321 bp, synthetic construct
  misc_feature 1..321: note = Description of Artificial Sequence: Synthetic coding sequence
  source 1..321: mol_type = other DNA
atggatcagtttcctgaaagcgtcacagagaacttcgagtacgacgacctggctgaggcttgctatatcggtgatattgtggtttttgggaccgttttcctgtcaattttttactcagttatctttgcaattggtttagtgggcaatttgctcgttgtctttgctctgaccaattccaaaaagcccaagtcagttaccgacatatacctgctgaacctggccctgtctgacctgctcttcgttgcaactttaccgttctggacccactaccttataaatgagaaaggacttcacaacgccatgtgcaagttcacaacttag

SEQ ID NO: 111872 - DNA, 501 bp, synthetic construct
  misc_feature 1..501: note = Description of Artificial Sequence: Synthetic coding sequence
  source 1..501: mol_type = other DNA
atggaccagtttcctgagagtgtgacagagaattttgaatatgatgatctcgcagaggcttgctacattggagacatcgttgtctttgggactgttttcctgtccatattttactccgtgatcttcgccattgggctggtcgggaacctgctagtggtcttcgctctgactaatagcaaaaagccaaagtctgtgaccgacatttatcttctgaatctcgccctgtcagatttactcttcgtggcaacacttcctttttggactcactacctgattaacgaaaagggcttacacaatgcaatgtgtaagttcaccaccgccttcttcttcatcggtttcttcggctccatcttttttattacggtcattagcatcgatcgatatctggctatcgtcttggctgccaatagcatgaacaaccggaccgtgcagcacggagtgacaatcagcctgggcgtctgggccgccgccatcttagttgctgcgccccaattcatgtag

SEQ ID NO: 111873 - DNA, 1092 bp, synthetic construct
  misc_feature 1..1092: note = Description of Artificial Sequence: Synthetic coding sequence
  source 1..1092: mol_type = other DNA
atggcatccggcaaagcttttactatggaccagttcccagagagtgtgacggagaacttcgagtacgacgacctggcggaagcttgctatataggggacatcgtggtctttggtaccgtctttctgtctattttttactctgtaatattcgcaataggtctcgtggggaatctcctagtcgtctttgcgttgaccaactcgaaaaagccaaaatccgtgacagacatctatctgctaaatctggccctcagtgatttgttgttcgttgccacattgccgttttggactcactatcttatcaatgagaaaggactccacaacgccatgtgtaagttcacaaccgcttttttctttattgggtttttcgggagcatttttttcattacagtaatctcgattgaccgatatctcgcaatcgtgcttgcagccaatagcatgaacaaccgcaccgtgcagcacggagtaacgatctctctgggggtgtgggctgctgcaatactcgttgccgcacctcagtttatgtttactaagcaaaaggagaatgagtgtctgggcgactaccccgaggtactgcaggaaatctggccagtacttcgcaatgttgaaaccaactttcttggcttcctgctgccccttctgataatgtcttactgttattttaggattatacagacactgttctcttgtaaaaaccataaaaaagccaaggctataaaactgatactgttggtggttatcgttttcttcctgttctggactccttacaacgtgatgatcttcctcgaaactctaaaactgtatgactttttcccaagctgtgacatgcgcaaagacctcaggttagctctgtccgtgaccgagactgtggctttctctcactgctgccttaaccccctgatttacgctttcgctggggaaaagtttcggcgctacctctatcacttgtatggtaaatgcctggccgtactgtgcggaagatctgttcacgttgacttctcttcgagcgagtcgcaaaggtcacgccatggctctgtcctgtcctcgaattttacctaccatacttcggacggcgacgctctgctactgctctag

SEQ ID NO: 111874 - DNA, 1068 bp, synthetic construct
  misc_feature 1..1068: note = Description of Artificial Sequence: Synthetic coding sequence
  source 1..1068: mol_type = other DNA
atggaccagttccctgagagtgtcacagagaatttcgaatacgacgacctcgctgaagcctgctacattggcgacatcgttgtgtttgggacggttttcctgtccattttttactcagttatcttcgctattggactcgtggggaacttgcttgttgttttcgctttaacaaattccaaaaagccaaagagcgtgaccgatatctatctactcaaccttgctctaagcgatctccttttcgtcgccacacttccattctggacacattacttaattaatgaaaagggcctccacaatgccatgtgcaagttcactacagccttcttctttattggcttttttggatctatattcttcattaccgtgatttctatagaccggtatctggctatcgttctcgcagccaactccatgaacaataggactgttcagcacggcgtgacaattagcctcggtgtctgggccgctgcaatcctagtggctgcgccacagtttatgttcacaaagcagaaggaaaacgaatgtctaggcgattatcctgaggttcttcaggaaatttggcctgtcctgcgtaatgttgagaccaactttctcgggtttttgctgccgttactgattatgtcctattgttactttagaattatccagactctatttagctgtaagaatcacaagaaggctaaagccatcaaactgatcctcctcgtggtgatcgtcttctttttgttctggaccccttacaacgtaatgatcttcctcgaaacgctgaaactgtacgatttcttcccttcctgcgatatgcgcaaggacctgcgcctggccctgagcgtcactgagaccgtcgccttttcccactgctgcctcaacccactcatttatgcattcgccggggagaagtttaggcgatatctgtaccacctgtatggaaagtgcttagctgtattatgtggacggtcagtgcacgtggatttttcctctagcgagagccagcgtagccgacacggctccgtgttgtctagtaacttcacgtatcatacttccgacggggatgcactccttttgctatag

SEQ ID NO: 111875 - DNA, 1068 bp, synthetic construct
  misc_feature 1..1068: note = Description of Artificial Sequence: Synthetic coding sequence
  source 1..1068: mol_type = other DNA
atggaccagttccctgagagcgttacggagaattttgagtatgacgacctggcagaggcttgctatatcggcgacatagtggtgttcggaacagtctttctatccatcttttacagtgtcatcttcgctatcggcctagttgggaatctcctcgtggttttcgcacttacaaatagcaagaaaccaaagtcagtcaccgatatttacctgttaaacttagcactgagcgacctgctattcgtcgcaactcttcctttttggacccactaccttatcaacgagaaggggctgcacaacgctatgtgcaagtttacaacggcttttttctttatcgggttttttgggtcaattttctttattacggtgatctcaatcgacaggtacctggcgatcgtgctggctgcaaactccatgaataaccgcactgtacagcatggtgtgacgatctcgcttggggtctgggctgcagccatactggttgcggctcctcagtttatgttcaccaagcagaaggaaaacgagtgtctgggagactaccctgaagtactacaggagatctggcctgtgctgagaaacgtcgagacaaatttcttgggctttctgcttccccttctgattatgtcttactgctacttcaggattatccagaccttgttctcctgtaaaaatcacaagaaggctaaggctattaagttgatcttgttggtggttattgtttttttccttttttggaccccatacaatgtcatgattttcctcgaaaccctaaagctgtacgattttttcccaagctgcgacatgcggaaggacttgcggctggctctgagcgtcactgagaccgtggccttctctcattgttgccttaacccgctgatttacgccttcgctggggaaaagttcagaaggtatttgtaccacctttatggcaagtgcctggccgtcttgtgcggacggagcgtgcacgtggacttttcctcatccgagagtcagagatcacgccacggctctgttttgtcaagtaacttcacttaccatacgagcgatggggatgcgcttctgttgttgtag

SEQ ID NO: 111876 - DNA, 324 bp, synthetic construct
  misc_feature 1..324: note = Description of Artificial Sequence: Synthetic coding sequence
  source 1..324: mol_type = other DNA
atggccagagctgccctgtccgcagcccctagcaatccgcgcctattgcgtgtggctctgttactcctgttactggtcgccgccgggcggagagcagcaggagccagtgtggcaactgagctcagatgccaatgtctgcagacactgcaagggattcatccgaaaaacatccaatctgtgaacgtgaaatccccaggtccccactgtgcccagaccgaggtaatcgcgacactaaagaatggccgtaaggcttgtttgaaccctgcctcaccgatcgtgaaaaagattatcgagaaaatgctgaatagcgataagagcaattag

SEQ ID NO: 111877 - DNA, 285 bp, synthetic construct
  misc_feature 1..285: note = Description of Artificial Sequence: Synthetic coding sequence
  source 1..285: mol_type = other DNA
atgtcagtcaaaggaatggcaatcgcattagccgttatactttgtgcgaccgtggttcagggttttcctatgttcaagcgagggaggtgtctgtgtataggcccaggcgtgaaggccgtaaaggttgctgatattgagaaggcatccattatgtatccctcaaataattgtgacaagattgaagtaattataacactgaaggaaaacaagggccagcggtgcctaaaccctaaatcgaagcaggcgcgactaattatcaaaaaagtggagcggaaaaacttctag

SEQ ID NO: 111878 - DNA, 285 bp, synthetic construct
  misc_feature 1..285: note = Description of Artificial Sequence: Synthetic coding sequence
  source 1..285: mol_type = other DNA
atgtcagtcaagggtatggctatcgcgttagcggtcattctttgcgcaactgttgtgcaggggttccccatgttcaagcgcggccgctgtctgtgtatcggacctggagtcaaagctgtcaaggtggctgatatcgaaaaggcttctatcatgtacccctcaaacaattgtgacaaaattgaagttatcattaccctcaaagaaaacaagggccaaaggtgtttgaatcccaaatccaagcaggcgcgtctcattatcaagaaggttgaaaggaagaatttttag

SEQ ID NO: 111879 - DNA, 336 bp, synthetic construct
  misc_feature 1..336: note = Description of Artificial Sequence: Synthetic coding sequence
  source 1..336: mol_type = other DNA
atgagcctgttgccaagacgcgcacccccggtcagcatgcgtctgctggccgcagcactgctgctactgctgttggccctgtacacggccagggtggacggatctaagtgtaagtgctctcgcaaaggacctaaaatccggtatagcgatgtcaaaaagttggagatgaagcccaagtatccccactgcgaggagaaaatggtgattattacaacaaagagcgtcagtcgatatcggggccaggagcactgcctgcacccaaagctccaatctacaaaacggttcatcaagtggtataatgcatggaatgaaaaaaggcgcgtgtatgaggaatag

SEQ ID NO: 111880 - DNA, 300 bp, synthetic construct
  misc_feature 1..300: note = Description of Artificial Sequence: Synthetic coding sequence
  source 1..300: mol_type = other DNA
atgcgcctgctggctgcagcactgctgctgctgttactcgccttatacaccgctcgagttgatggatctaaatgcaaatgttcccgcaaaggaccaaagatcaggtactccgatgtaaagaaactggaaatgaagcccaagtacccccattgcgaagaaaaaatggttatcattacaactaagagcgtttcccgctaccgggggcaggaacattgcctgcatcccaagctccagtctacaaaacgatttatcaagtggtacaatgcttggaatgagaaacgccgcgtgtacgaagaatag

SEQ ID NO: 111881 - DNA, 822 bp, synthetic construct
  misc_feature 1..822: note = Description of Artificial Sequence: Synthetic coding sequence
  source 1..822: mol_type = other DNA
atgtctggctcgcaaagcgaagtagccccaagtcctcagtcaccccggtcacctgaaatgggcagagatcttcggcctgggagtcgggtgttgctgcttttactactgttactcttggtatacctgacacagccaggcaacggcaatgaaggcagcgtcacaggctcatgctactgtgggaagagaatatcttctgacagcccgccttcagtccaatttatgaacagactgaggaagcacctgcgggcataccaccggtgcttgtattacactagatttcaactgctgtcctggtccgtctgcggcggcaacaaggatccgtgggtacaggagctcatgagctgtctggacctcaaagagtgtgggcacgcctactcaggcattgtcgcacaccagaagcacctcctgcctacaagccccccaatttctcaagccagcgaaggggcctctagcgacatccacacaccagcccaaatgctgctgtcaacgcttcagtcaactcagcggcctacccttcccgtcggtagcctgagctctgataaggagctcacccggcctaacgaaaccaccattcacaccgctgggcacagtctggcggctgggcccgaggccggtgaaaatcaaaaacagccggaaaagaacgcaggacctactgccaggacctcagctaccgtgccggtcctgtgtctgctggctatcatttttattctgaccgccgctctttcttatgtgctgtgtaagaggcggaggggccaaagtcctcagtcatctcccgacctgcctgttcactacatacctgtcgcgcccgatagcaacacgtag

SEQ ID NO: 111882 - DNA, 822 bp, synthetic construct
  misc_feature 1..822: note = Description of Artificial Sequence: Synthetic coding sequence
  source 1..822: mol_type = other DNA
atgtcgggatcccagtccgaagttgccccttctcctcaaagtccacgcagcccagaaatgggccgcgatctgaggccaggaagccgcgtgctgctgttgttgctattattgctccttgtctacctcacacagcccggtaatggcaatgaaggttccgtgactggttcatgttattgtgggaagcggattagctcggatagtccgccatccgtccagttcatgaatcgactcagaaagcacctgcgagcctaccaccggtgtctgtactacacccggttccagctgctttcatggtccgtctgcggcggcaataaagacccttgggtccaggagctgatgtcttgtttggacctgaaggagtgtggtcatgcttacagcggtattgtagcgcatcagaaacacctgttgcccacgtctccaccgattagccaggcaagcgagggggcttcaagcgacatccacaccccagcccagatgcttttgagtacgctccagagcactcaacggcccacgttacccgtcggctccctgtcatccgacaaggagctcaccagacctaatgaaaccacaattcacacggctgggcattccttggctgcaggccctgaggccggagagaaccagaaacagcctgagaagaacgctggccccaccgcgaggacttccgccaccgtccctgtactgtgtcttttggcgataatctttattctaacggcagctctgtcttatgtcctttgtaagagaaggagagggcagtcaccccaatccagtccagatctgccagtgcactacatccccgttgctcctgattcaaacacatag

SEQ ID NO: 111883 - DNA, 360 bp, synthetic construct
  misc_feature 1..360: note = Description of Artificial Sequence: Synthetic coding sequence
  source 1..360: mol_type = other DNA
atgaaagtactgatctcctctctccttctgcttctgcccctcatgctgatgagcatggtctcaagctctctgaacccgggggtggccagaggccatcgcgatcgggggcaagcgtctcgccgctggcttcaggagggtggccaggagtgtgaatgtaaggattggtttctgcgcgcaccacggcgcaagtttatgaccgtctccggcctgcctaaaaaacaatgcccctgtgatcatttcaagggtaacgttaaaaagacaaggcatcagaggcaccaccgcaaacccaataagcatagtcgcgcttgccaacagtttctcaaacaatgccaactgaggtcttttgcactgcccctgtag

SEQ ID NO: 111884 - DNA, 360 bp, synthetic construct
  misc_feature 1..360: note = Description of Artificial Sequence: Synthetic coding sequence
  source 1..360: mol_type = other DNA
atgaaggtactgatttccagcctgcttctgcttctacctctgatgttgatgagtatggtatcgagtagcctcaacccgggggtagcacgaggtcacagagatcgaggacaggcctccaggcggtggctgcaggaagggggtcaggaatgcgagtgtaaagactggttcctgagagccccacggcggaaattcatgaccgttagtgggctgcccaagaaacagtgcccatgtgaccatttcaagggaaacgtcaaaaagactcgtcaccaaaggcatcataggaaacctaataaacactcaagagcttgtcagcagtttctaaagcagtgtcagctacgatctttcgcactacctctttag

SEQ ID NO: 111885 - DNA, 324 bp, synthetic construct
  misc_feature 1..324: note = Description of Artificial Sequence: Synthetic coding sequence
  source 1..324: mol_type = other DNA
atggccagagcaaccttatccgctgctccgtctaatccccggctccttcgggtagcccttctgctgttattgctggttgcagcctctcgaagagccgccggtgctccattggctacggaactccgatgtcagtgtctgcagacactccaaggcatccatctgaagaatattcagtctgttaaggtgaaaagtcctggaccccactgcgctcaaaccgaggttattgccacactaaagaatggccagaaagcctgcctgaatcctgccagcccgatggtgaagaaaataatagagaagatgttgaagaacggcaagtccaattag

SEQ ID NO: 111886 - DNA, 324 bp, synthetic construct
  misc_feature 1..324: note = Description of Artificial Sequence: Synthetic coding sequence
  source 1..324: mol_type = other DNA
atggctcacgccacactgagtgcggccccctcgaatccccggctgctccgcgtggcgctgctgttgctcttgctggttgcagcctccagacgggctgcaggagcgtctgtggtcacggagctgagatgtcagtgtctgcagacactgcagggaatccatctgaaaaatattcagagtgttaacgtccgatcgcccggtccacattgtgcacagaccgaggtaattgccacactaaaaaacggaaagaaagcttgcttaaacccagcttctcccatggtgcagaagataattgaaaaaattctgaacaagggcagcaccaactag

SEQ ID NO: 111887 - DNA, 345 bp, synthetic construct
  misc_feature 1..345: note = Description of Artificial Sequence: Synthetic coding sequence
  source 1..345: mol_type = other DNA
atgagcctgctctcttccagagctgctagggttcccggtccttccagcagtctgtgcgctctgttggtactgcttttgctcctgactcagcccggccccattgcttctgccggacccgctgctgccgtgctgcgtgagcttcgatgtgtgtgcttacaaacgacccagggcgttcatcccaagatgattagtaacttacaggtgttcgctatcggacctcagtgctctaaagtcgaagtcgtcgcttccctaaaaaacggtaaagagatctgcctcgaccctgaggccccattcctgaagaaagtcatccagaagatccttgacgggggtaataaagaaaattag

SEQ ID NO: 111888 - DNA, 1053 bp, synthetic construct
  misc_feature 1..1053: note = Description of Artificial Sequence: Synthetic coding sequence
  source 1..1053: mol_type = other DNA
atgtccaacattacggacccacagatgtgggattttgacgatcttaattttaccggcatgccgcccgcagatgaggactattctccttgcatgttggaaacagagactctgaacaagtacgtggtgattatcgcctatgccctggtgttcctactgtcacttctgggaaatagcttggtgatgctggtgatactgtactctagagtaggtcggtccgtgaccgacgtgtaccttctgaacctggcgcttgcggacctcctgtttgcactcactctgcccatttgggcagcatccaaagttaacggctggatctttggaaccttcctctgcaaggttgtcagcttgttaaaggaggttaatttctattctgggatactactgttggcctgcatctccgtggatcggtacctcgctattgtgcatgcgactcgcacactgacgcagaagagacacctagtcaagttcgtgtgcctgggatgctggggtttgagtatgaatttgagcctcccattcttcctttttcgacaggcctatcaccccaacaactcctctcctgtgtgctatgaggtcctcggaaatgacacagccaaatggcgtatggtgctaaggatccttcctcacaccttcggattcatcgtcccactgttcgtaatgctcttttgttacggcttcaccttgcgcactctgtttaaggcccatatgggccagaaacatagagcgatgcgcgtgatcttcgccgttgttctcatctttttgttgtgctggctgccatacaatcttgtgctgttagcagacactctgatgaggactcaggtgattcaagagagctgtgaaaggaggaacaatattggccgcgccctcgacgcgacggagatcctgggctttttgcatagttgcctgaatccaatcatttatgcttttattggccagaactttcggcatgggttcttgaagattctggccatgcacggactcgtaagtaaggagtttctggcccgacaccgagtgactagttacacttccagctctgtgaacgtatcatcgaatttgtag

SEQ ID NO: 111889 - DNA, 885 bp, synthetic construct
  misc_feature 1..885: note = Description of Artificial Sequence: Synthetic coding sequence
  source 1..885: mol_type = other DNA
atgagcaacattactgatccccagatgtgggacttcgacgatctcaacttcacggggatgcctcctgctgacgaggactatagcccgtgtatgctggaaactgagactctgaataaatacgtagtcatcatcgcctacgctctggtgttcttactcagtctgctcggaaactctcttgtgatgctcgtgattctctactcaagggtgggcaggagtgtgaccgatgtgtacctactgaacctggccatcgtccacgctactcggaccctgacgcagaaacggcatctcgttaaattcgtttgcttaggctgctgggggttaagcatgaaccttagtcttcctttcttcctcttccgccaggcttaccacccaaacaatagttcgcctgtatgctacgaggtactgggtaatgacactgcaaaatggcgaatggtgctgcgcatcttgccgcatacctttggctttatagtgcccctttttgtgatgctgttctgttatggctttaccctgcgcaccctctttaaggcacacatgggccaaaagcatagagctatgagagtaatctttgcagtggtgctgatcttcctgctgtgctggctgccttacaaccttgtgctgctggctgacactctcatgcgcacccaagtgatccaagagtcttgcgaacgacgcaataacatcggacgcgcactagatgccaccgaaatccttgggttcctccactcatgccttaaccccattatatacgcattcattggtcagaacttccgacatggctttcttaagatcctggcaatgcatgggctggtttccaaggagttcttagcccgtcatcgggtcacgtcatacacctcctcttctgtgaacgtctcatccaacctttag

SEQ ID NO: 111890 - DNA, 804 bp, synthetic construct
  misc_feature 1..804: note = Description of Artificial Sequence: Synthetic coding sequence
  source 1..804: mol_type = other DNA
atggtcttggaggtgagcgaccaccaggttctgaacgacgccgaggtggccgcacttcttgagaacttctcttcatcctacgattacggggagaacgagtccgattcttgctgcacttcaccgccctgcccacaggactttagcttgaacttcgatcgggcctttctccccgcgctgtatagcctgctgttcctcttgggcttgctaggcaatggggctgtggccgctgtgctgctgagccgacgcacagccctgagtagtaccgatacttttctgttgcatctcgccgtagccgatacactgttagtgctgacactcccactctgggcagtcgacgccgccgtccagtgggtcttcggttctgggctgtgtaaagtagccggagcactgttcaacatcaatttctacgccggcgcattgttgctcgcttgtattagcttcgatcgttacctgaatatcgtccacgccacacagctttaccggaggggaccacctgccagagtgaccctcacttgcctggcagtgtggggcctgtgtcttctcttcgccttacccgattttatctttctttccgctcaccacgatgaaagactgaatgccactcattgccagtataatttcccccaaggctcctccagcggcagcgggtgtggatgttgttcctgcgcatgggcagctcctactagagagggctccagggggagtcaccgcctgcccgctggtattcacccagggctccgcccacaaagacctcccacccgggcttgcgaagccggtatcagagccccgttatcccctacttag

SEQ ID NO: 111891 - DNA, 1248 bp, synthetic construct
  misc_feature 1..1248: note = Description of Artificial Sequence: Synthetic coding sequence
  source 1..1248: mol_type = other DNA
atggagctgcggaagtacggccctggcaggctggcaggtacagttattggaggagccgctcaaagcaagtctcagactaagtctgattcaatcaccaaggagtttcttcctggtctgtacactgcccccagctctccatttcctccgagccaggtcagtgaccaccaagtcctgaacgacgccgaagtcgctgccctgctggagaacttcagctcctcttacgattatggggaaaatgaatctgacagctgctgtacgagccccccgtgtccccaggacttttccctgaactttgaccgggcgtttttgcccgcgttatattctttgctttttttgttaggcctcttagggaatggcgcagtcgccgccgtgctgctttcgcggcggacggccctgagctcaactgataccttcctactgcacctcgccgtcgccgatacactgctcgttttgaccctgcccctctgggccgtagatgctgcagtgcagtgggtgtttgggtccggtctgtgcaaggtggctggagctctgtttaatatcaatttttacgctggggcacttcttctggcgtgcataagctttgatcggtacctgaatatcgtgcatgctacacagctctacaggcgtggccctccggcccgggttactctcacctgccttgcagtttgggggttgtgccttcttttcgccttgccagatttcattttcctgtcggcccatcacgacgaaaggctgaacgcgacccattgccagtacaacttccctcaggtaggccgaaccgccctccgcgttctgcagcttgttgccggttttctgttgcctctactggtaatggcgtactgttacgcccacatcctcgctgtgctcctggtttcacgcggtcagcgccggctgagggcgatgagattggtggtggtggtggtggttgcatttgccctctgctggacgccctaccacctggtggtgctggtagacatcctgatggacctgggcgcactggctcggaattgtggtcgcgagtcccgggtggacgttgccaagagtgttacatcagggcttgggtacatgcattgctgcctgaacccattactgtacgctttcgtcggcgtgaagttcagagaacgaatgtggatgttgctcttacgattaggatgccccaaccagagaggcctgcagcggcaaccgtcaagtagccggcgggacagcagttggtccgaaacatcagaggcctcatattctgggctgtag

SEQ ID NO: 111892 - DNA, 1107 bp, synthetic construct
  misc_feature 1..1107: note = Description of Artificial Sequence: Synthetic coding sequence
  source 1..1107: mol_type = other DNA
atggtactggaagtttcagaccaccaggtgctcaatgatgcagaagtagccgcgctgttagagaacttctcatcttcttacgactacggcgagaacgaaagtgattcatgttgcactagccctccatgccctcaggatttttccctcaactttgacagggccttcctaccagcactctactctctgttattcttactgggcctcctgggtaacggcgccgtagctgcagtgctcctgagtcgccggactgcgctgtccagtaccgatacatttctgttacatttggctgtggcggatactctcctggtactgactctgccgttgtgggccgttgatgccgccgttcagtgggttttcgggagcgggctgtgcaaggtcgctggagccctgttcaatataaacttttatgcaggggccctgctcctggcctgtatctcgttcgacaggtaccttaacatcgtgcacgctactcaattgtacaggcgaggacctcccgctcgtgtgacactgacctgcttagcagtatggggtttatgcctgctgtttgctctgcctgatttcatctttctttcagctcaccacgatgagcggctgaatgctacgcattgtcagtataatttcccacaagtggggaggacggccttgagagtcctgcagcttgttgctggatttctgttacccctccttgtgatggcctactgctacgctcatattctggcggtcctgctggtcagtcgaggccagaggcgattgcgcgccatgaggttggtggtggtcgtggtcgttgccttcgccctgtgctggaccccttaccacctggtggtgcttgtggatatccttatggaccttggtgcgctggccaggaactgcggccgagaaagccgtgtcgacgtcgctaaatccgttacaagtggcctgggatacatgcactgctgcctcaacccactgctgtatgcgttcgttggggtaaagtttcgagagaggatgtggatgttgctactgcggcttggctgcccaaatcagcgagggctccagagacagccctcaagcagcagacgcgatagctcgtggtctgagactagcgaagcgtcctatagcggcctgtag

SEQ ID NO: 111893 - DNA, 1119 bp, synthetic construct
  misc_feature 1..1119: note = Description of Artificial Sequence: Synthetic coding sequence
  source 1..1119: mol_type = other DNA
atgaactacccactgactcttgagatggacctcgaaaacttagaggacttgttctgggaactcgaccgccttgacaattataacgacaccagtttggtggagaatcacttgtgtcctgccaccgagggtcctctgatggcaagtttcaaggctgtcttcgtccctgttgcctattccttgatcttccttctcggagtcatcggaaatgtactggtcctcgttatcctggagagacaccggcagacgagatcaagtactgagacgttcctcttccacctggcagtggctgacttgctactggtgttcattctgcccttcgccgtagccgaagggtccgtcggctgggtgctgggcacatttctctgtaagactgtgatcgccctccataaagtgaacttctattgctcttcgctgctgctcgcctgcatcgcggtggaccgctaccttgcaatcgtgcatgccgtgcatgcatatcgccatcgaagattactgagcattcatatcacttgcggcacgatttggctggtgggctttttgctggccctgccagaaatcctgttcgctaaggtctcacagggacaccacaataatagccttccccggtgcacattttcacaagaaaaccaggcggagacacacgcttggttcacaagtcgatttttatatcatgtcgcaggctttctcctccctatgctcgtgatgggctggtgctatgtaggtgtggtccatcgtctgcggcaggctcaacgacggccacaacgacagaaggcagttagggtggcgatactcgtcacttctattttttttctatgctggtccccatatcacatagtgatttttctggacaccctggcccgacttaaagctgtggataacacctgtaagcttaacggctccttacccgtggcaattaccatgtgtgagttcttgggactggcccattgctgtctcaaccctatgctgtacacctttgctggggtgaagtttcgatcagaccttagtcggctcctcactaaattaggttgcaccggccccgcttctctgtgtcagcttttcccctcatggcggaggtcttctttatcagagtcagagaacgcaaccagtctaacaactttctag

SEQ ID NO: 111894 - DNA, 1029 bp, synthetic construct
  misc_feature 1..1029: note = Description of Artificial Sequence: Synthetic coding sequence
  source 1..1029: mol_type = other DNA
atggccgagcacgattaccacgaggactacggattcagtagcttcaacgacagttctcaggaggagcaccaggattttctgcaattctcaaaggttttcctgccgtgcatgtaccttgtggtgtttgtctgcggtcttgtgggtaatagcctggtcctggtcatctccatcttttaccataaactccagtccctgacagatgtatttttggtgaacctgcctctggccgatctggtatttgtgtgcaccctcccattttgggcgtacgccggcatccacgaatgggtctttgggcaagtcatgtgtaagtccctgttggggatctacaccataaatttctatacctccatgctgattctgacctgtatcacagttgatagatttatcgtcgtggtgaaagccaccaaagcatataatcagcaagccaagcggatgacctgggggaaggtaacatcacttctgatttgggttatatcattgctggtaagccttcctcagattatctacggtaacgtcttcaacctcgacaagctcatctgcgggtatcacgacgaagctatcagcactgtggtcctcgcaacgcagatgaccctgggattttttctcccattacttaccatgatcgtgtgttattccgtcataatcaagacactgttgcatgctggcggcttccaaaaacaccgaagtctgaagattatcttcctggttatggccgtgtttctattaacacagatgccatttaatctcatgaagttcattcgcagcacccactgggaatattacgcaatgacctccttccattacactatcatggtcaccgaagcgatagcatacctgcgagcttgcctgaatcccgtattgtatgcctttgtgagtctcaagttccgcaagaacttctggaagctggttaaggatattggctgtctaccttacctaggcgtgtcacatcaatggaagtcctccgaggacaacagcaaaactttctccgcctcccataatgtagaagctacaagcatgttccagctgtag

SEQ ID NO: 111895 - DNA, 1029 bp, synthetic construct
  misc_feature 1..1029: note = Description of Artificial Sequence: Synthetic coding sequence
  source 1..1029: mol_type = other DNA
atggcagaacacgactaccatgaagattatggcttcagtagcttcaacgattcaagccaggaagaacatcaagattttctgcagtttagcaaagtctttctgccgtgcatgtacctggttgtcttcgtctgtggactagtcggcaactcgctagtgctggttatcagcattttctatcataaactgcagagtctcactgacgtctttttggtgaatctgccactcgctgacttggtgtttgtgtgtacacttcctttctgggcttatgccggcattcatgagtgggtgttcgggcaggtgatgtgcaagtcactcctgggaatctatacaataaatttctatacatctatgctgatacttacttgcattaccgtggataggtttatcgtggtggtaaaagccaccaaggcctataaccaacaggccaagagaatgacctggggcaaggtgacttctctgttgatttgggtgatcagcctgctcgtgtcattaccacagatcatctacggcaacgtgttcaaccttgacaaactcatctgcgggtaccacgatgaggccatcagtaccgtggttttagctacgcagatgaccctcgggtttttcctgcctctgctgactatgattgtgtgttacagtgtgatcataaagacactccttcacgctggcggtttccaaaagcacagatctctgaagattatcttcctagttatggccgtgtttttgctgacccaaatgcctttcaaccttatgaaatttatccggagtactcactgggaatattatgccatgacgagcttccactacacaatcatggtcacagaggcgatcgcctatttgcgcgcttgcctgaatcccgtcctatatgcgtttgtctccttgaagttccgcaagaatttctggaagctcgtgaaagatatcggttgcctgccgtatctgggcgtttcgcaccagtggaagagttccgaggacaattcgaagacctttagcgcgtcacacaatgtggaagctacctcgatgtttcaactgtag

SEQ ID NO: 111896 - DNA, 1029 bp, synthetic construct
  misc_feature 1..1029: note = Description of Artificial Sequence: Synthetic coding sequence
  source 1..1029: mol_type = other DNA
atggccgaacacgactatcacgaggactacgggtttagctcatttaatgacagctctcaggaggaacaccaagatttcctgcaattctcaaaggtctttcttccctgtatgtacctagtcgtcttcgtctgcgggctggtagggaactctttagtcctagttatttcaatcttctatcacaaactgcagagcctcaccgacgttttccttgtgaacttacctctggccgacctcgtttttgtgtgtaccctgccattctgggcttatgctgggatccacgaatgggtgttcgggcaagtgatgtgcaaaagcctattgggcatttatacaatcaatttctacaccagcatgctcattctgacttgcattacggtcgaccgcttcatcgtggtggtgaaagccactaaagcctacaatcaacaagccaagagaatgacttggggcaaagtgacaagtttactaatctgggtcatctctctgctggtttctcttcctcagattatctatggcaacgtttttaatctggataaattaatctgcggctaccacgatgaagcaatctctacagttgtgctggccacccagatgactcttggcttttttttgccattactgactatgatcgtgtgctactccgttataatcaagaccctacttcacgcaggtggattccaaaagcatcgatcattaaaaatcatctttttggtgatggccgtcttcttgctgacccaaatgcccttcaacttaatgaagtttataaggtctacacactgggaatattatgctatgactagcttccattacaccataatggtcaccgaggcgattgcctacttacgagcttgcctgaatcctgtcctgtacgccttcgtcagcttgaagttccgcaaaaacttctggaagctggtcaaggatatcggttgtctgccctatctgggcgttagccaccagtggaagtcgtctgaagataatagcaagaccttctccgcatctcataatgttgaggctacttcaatgtttcagttatag

SEQ ID NO: 111897 - DNA, 1029 bp, synthetic construct
  misc_feature 1..1029: note = Description of Artificial Sequence: Synthetic coding sequence
  source 1..1029: mol_type = other DNA
atggccgagcatgattaccatgaagattatggcttcagttcatttaatgatagttcccaagaggagcatcaagattttctgcaattcagcaaagtgtttttgccttgtatgtatctggttgtcttcgtatgtggtctggtcggaaatagcctcgttttagtcatctccattttttaccataaactgcagtctctgactgatgtgttcctggtaaatctgcccttagctgacctggtgtttgtttgcaccctcccgttttgggcatatgccggaatccatgagtgggtatttggacaggtaatgtgtaaatcgttgctggggatctatactattaatttttacactagcatgcttattttgacttgcattaccgttgatcgattcatcgtagtcgttaaggctacgaaggcctataatcagcaggccaaaaggatgacatggggaaaagtgacttcgctgctgatctgggttatctcactgttggtgtcccttccccagataatctacgggaacgtgttcaaccttgataaactgatctgtggttaccacgatgaggcgatcagcacagtcgtcttggctacccagatgaccttgggtttcttcttgccgttgctgaccatgattgtgtgctacagcgtgattatcaaaactctgctccacgcagggggtttccagaaacatagatcacttaagatcatttttctagtgatggccgtgttcttattgacccagatgccgtttaatctcatgaaatttatccggtccacacactgggaatattacgccatgaccagctttcactatactatcatggtcacagaggcgatcgcttacctaagagcctgtctgaatcccgtgctctatgcgtttgttagcctcaagttcaggaagaacttttggaaactggtgaaggacatcggttgtctgccatacctgggggttagccatcaatggaagagttccgaggataattctaaaaccttttctgcatcccataatgtggaggccacctccatgtttcagctctag

SEQ ID NO: 111898 - DNA, 1089 bp, synthetic construct
  misc_feature 1..1089: note = Description of Artificial Sequence: Synthetic coding sequence
  source 1..1089: mol_type = other DNA
atggacctgcacctgttcgactactccgaacctgggaacttctccgacatttcctggccctgtaatagtagcgattgtattgtggtcgacactgtcatgtgccctaacatgcccaataaaagtgtgctgctgtacaccctgtccttcatctacatctttatttttgtgattggcatgatcgctaactccgtggtcgtctgggtaaacatccaggccaagactaccgggtatgatacccactgctacattctgaacctggctatcgctgatctttgggtggtccttaccatacctgtgtgggtggtcagcctggtgcagcacaaccaatggccaatgggcgaacttacgtgcaaggtgacccatctgatattcagtatcaatctctttgggtctatttttttccttacatgcatgagtgtcgacagatacttgtccataacatattttaccaatactccatcatctcggaaaaagatggtgcgccgtgttgtgtgcattctggtgtggcttttggccttctgtgttagcttgcccgacacctactacctgaagacggtaacaagcgcctccaacaacgaaacttactgtcgcagcttttacccagagcactccattaaggagtggctgatcggtatggagctggtgtcggttgtcttgggcttcgccgtgcctttctctatcatagccgtcttctatttcctcttggctagggcgatctccgcaagttcggaccaggaaaaacattccagcagaaagataatcttctcctacgtggtggtgtttctggtttgctggctaccttaccacgtggctgtcctgctggatatcttttccatcctgcactacataccatttacctgccgccttgagcatgcactcttcactgctctccatgtcacccaatgtcttagcctagtgcactgctgcgtgaaccctgttctctacagcttcataaatagaaactatcgctacgagcttatgaaagcattcatttttaagtattctgccaagaccggtctgaccaagctgatcgatgcctcacgggtgagtgaaactgagtattcggcactagagcaatcaacgaagtag

SEQ ID NO: 111899 - DNA, 636 bp, synthetic construct
  misc_feature 1..636: note = Description of Artificial Sequence: Synthetic coding sequence
  source 1..636: mol_type = other DNA
atggacctgcacctgtttgactactccgaacctggaaacttttccgatatctcatggccatgtaactcctctgactgtattgtcgtggataccgtcatgtgccccaatatgccaaacaagtccgtgctgctatacacgctgagttttatttacatctttatcttcgtcattggtatgattgctaactccgtggtggtttgggtgaacatccaagctaaaactactgggtatgacactcactgttatatcctaaacctcgccatcgccgacctttgggtagtgttgacaattccggtgtgggttgtgtcacttgtgcagcacaatcaatggcccatgggggaattaacatgcaaggtgacacatctgatcttctcaataaacttattcggctccatcttcttcctgacctgcatgtccgtggatcgttacttatctatcacttactttaccaatacccctagtagtaggaagaagatggtgcgtcgcgtggtgtgcattttggtctggctcctggctttttgcgtgtctctgcccgacacctactatttgaaaactgtgacgagcgcctccaacaacgagacgtactgcaggtccttctacccggagcattccattaaggagtggttaattggatag

SEQ ID NO: 111900 - DNA, 1155 bp, synthetic construct
  misc_feature 1..1155: note = Description of Artificial Sequence: Synthetic coding sequence
  source 1..1155: mol_type = other DNA
atggcagctactgcaagtccacaacccctggctaccgaggacgcagactccgagaatagctccttctactactatgactacctcgacgaggtggctttcatgctctgccggaaagacgcggtggtgagtttcggaaaagtctttctgcctgtgttttactctctcatatttgttctgggcctgagcgggaacctacttcttctgatggtactgttgcggtacgtcccacggaggaggatggtggaaatctatttgctcaaccttgccatctccaacctgctgttcctggtgactctcccgttctggggcattagcgtggcctggcattgggtgttcggtagcttcctttgtaagatggtgagcactctctatacaataaacttttatagtggcattttctttattagttgtatgtcgctggataaatacctggagatcgtgcacgcccagccttatcaccggctgaggacaagagccaaaagcctgcttctcgctactatcgtgtgggcagtcagcttggccgtcagcattccagacatggtattcgtgcagactcacgaaaatccaaaaggcgtttggaactgccacgccgatttcggcggccacggcacaatctggaagctgttcctccgctttcaacaaaacttgctgggattcctccttccactgctggctatgatttttttctatagcaggatcggatgcgtgctggtgagactgcgcccggccgggcaggggcgggccctgaaaatagctgctgcgctggtagtcgcgttttttgtgctatggttcccatacaacctgacactcttcctccataccctcctggacttacaggtctttggaaattgcgaggtctctcagcaccttgattatgccctgcaagttacagagtccatcgctttcctccactgttgcttctcaccaatcctgtacgctttcagcagtcaccgatttagacagtacctgaaagctttcctagcggctgtgctgggctggcacttggctcccgggacagcccaggcttccctgtctagctgttccgaaagctctatcctgacagcccaagaggaaatgactgggatgaacgacctcggcgaacggcagtccgagaattatcctaacaaagaggacgtcgggaataagagcgcctag

SEQ ID NO: 111901 - DNA, 1155 bp, synthetic construct
  misc_feature 1..1155: note = Description of Artificial Sequence: Synthetic coding sequence
  source 1..1155: mol_type = other DNA
atggccgcgactgccagtccacagccccttgcaactgaagacgccgattcggagaattcatcattttattattatgactacctcgatgaggttgctttcatgctgtgtcggaaggatgccgtggtatcttttgggaaggtttttctccccgtgttctactccctgatctttgtgcttggactgtccggcaatcttctcctgctgatggtattgctacgctatgtgcctcgccggcgcatggttgaaatttacctgttaaacctggctattagcaatctgctatttctggttacactccctttttggggaatcagcgtcgcttggcattgggtattcggctcatttctgtgtaaaatggtcagtaccttatatactattaacttctactccggcatatttttcatctcctgcatgagcctcgataagtacctagagatagttcatgcacaaccctaccatcggctgcgaacaagggcgaagtcgctattgctggccaccatcgtatgggctgtgagtctcgctgtttccattccagacatggtatttgttcagactcatgaaaatcccaaaggtgtttggaactgtcatgctgacttcggcggtcacggcaccatttggaaactgtttctcaggttccagcagaacctgttaggtttcctgcttccacttctcgctatgattttcttctatagtagaatcggatgtgtgctcgtcagactcaggccagccggacagggcagggcactgaagatcgctgctgcattagttgtggccttctttgtactctggtttccttacaatctcactctctttctgcataccctcctggatctacaagtttttggcaattgcgaagtgtcacagcatctcgattacgcccttcaggtgacggagtctatagcctttttacattgttgctttagcccaattctgtacgccttcagctcccaccggttcagacagtatcttaaggcattcttggccgcagtccttggatggcatttggcccctggtacggctcaggccagtctgtcaagctgttctgaatcttctattctcaccgcccaggaggaaatgaccggcatgaacgacctgggcgagcggcaatcagaaaattatccgaataaggaagatgtgggaaataagtccgcatag

SEQ ID NO: 111902 - DNA, 1155 bp, synthetic construct
  misc_feature 1..1155: note = Description of Artificial Sequence: Synthetic coding sequence
  source 1..1155: mol_type = other DNA
atggccgctacagcctctcctcaacccctggcgacagaggacgccgactctgagaacagcagcttctactattacgactatctggacgaagtggccttcatgttatgcaggaaggatgcagtggtctcttttggcaaagtcttcttgcctgtcttttattccctgattttcgtcctgggtctttcaggcaatctgctgctgctgatggtcctcttgagatatgtcccgcgccgccggatggtagagatctacctcctgaatctcgctatctcaaacctgctctttctcgtcacgctgccattctggggaatcagcgtggcgtggcattgggtgtttgggtccttcctgtgtaagatggtcagtactctttataccattaatttctactccggcatttttttcatatcctgcatgtctctcgacaagtatttagaaattgtgcacgcccagccctatcatcgtctcagaacgcgggcaaaatctttactgttagcaactattgtttgggccgtgtctctggccgtgtctatcccagatatggtgtttgtgcagacccacgagaaccccaagggggtgtggaattgccatgccgacttcggaggacacggcactatctggaaactgttcctgagattccagcaaaacctccttggatttctgctgccccttctggctatgatctttttttattcacgaatcggatgtgtcctggtgcggcttcggccggcaggacagggccgggcgttgaaaatcgccgcagccctagtggtggcattcttcgttctgtggtttccctataacctcacactgtttctgcataccctgctggaccttcaggtgtttgggaactgtgaagtgtcacagcacctcgactatgctctgcaggtgaccgagtcaatcgcctttttacactgttgcttctctcctattctgtacgcctttagctctcaccggtttcgccagtaccttaaagcatttttggctgctgttctagggtggcacttggcgcccggcacagctcaggcctctttaagctcatgcagcgaatccagcatccttacagctcaggaggagatgaccgggatgaatgaccttggagagcgacagagcgagaattatccaaataaagaagacgtgggtaacaagagcgcgtag

SEQ ID NO: 111903 - DNA, 1122 bp, synthetic construct
  misc_feature 1..1122: note = Description of Artificial Sequence: Synthetic coding sequence
  source 1..1122: mol_type = other DNA
atgagaatggaagacgaagactacaacaccagtattagctatggagacgagtaccctgattacttagattctatcgttgtcttggaggacctctccccattggaggcaagggtcactagaatatttctggttgttgtatacagcattgtgtgctttctgggcattttaggcaacggattagtgattattattgcgacttttaaaatgaagaagacagttaatatggtgtggtttttgaatctggccgtcgccgatttcctgtttaacgtttttcttcctattcacatcacctacgcagctatggattaccattgggtttttgggacagccatgtgcaagatctcaaacttccttttgatccacaacatgtttacctcagtctttctgctgacaatcatctccagcgacagatgtatttctgtgctgctccccgtgtggagccagaaccatcggtcagtccggctggcatatatggcctgtatggtgatttgggtgctggccttctttctctcttcacctagtctcgtatttagagacacagcaaatctccacggtaagatctcttgcttcaataacttttccctgtctacacccggctcttcatcttggcctacccattcccagatggaccccgtcggatatagtcgtcatatggtcgttactgtgacgcgtttcctgtgcggcttcttagtacctgtccttattattactgcttgttatctgactatagtgtgcaaattacagcgcaaccggctcgcaaagacaaaaaaacctttcaaaataatagtcactattatcataactttttttctctgttggtgcccgtaccatacactgaatctgctagaattgcatcacacggctatgccaggctctgtattctcactaggactgccactggctactgccctagctatcgcgaattcttgcatgaatcctatcctgtacgtgttcatggggcaagactttaaaaagttcaaggtggctctgttcagccgcctggtcaatgctttatccgaggacaccggtcattcaagctatccatctcaccggagcttcactaagatgtccagcatgaacgaacggacctccatgaacgaacgtgagacaggcatgctctag

SEQ ID NO: 111904 - DNA, 1116 bp, synthetic construct
  misc_feature 1..1116: note = Description of Artificial Sequence: Synthetic coding sequence
  source 1..1116: mol_type = other DNA
atggaggacgaggactacaacacctcgattagttatggagacgagtaccccgactatttggattccatcgtggtgttggaagatctctctcctttggaagctcgggtcactcggatcttcctggtggtggtgtacagcattgtgtgtttcttaggtatcctgggtaacggcttggtcattatcattgcaacctttaaaatgaaaaagactgtgaatatggtctggtttttgaacttggccgtggcggactttctgtttaatgtctttctcccgatacatataacttatgccgcgatggattatcactgggtgttcgggactgcaatgtgtaagataagtaacttccttctgatccacaacatgtttacatccgtgttcctgctcacaattattagctcagacaggtgtatctccgtcttgctgcccgtttggtcccaaaaccatagaagtgtccggctggcctacatggcatgtatggtcatctgggtgctggcattctttctgagcagcccttcccttgttttcagagacactgctaatctccacggcaaaatatcttgtttcaacaatttctccctatcaacacccggcagtagtagttggcccacgcactctcagatggaccctgtcgggtattccaggcacatggttgtaaccgtcaccaggtttctgtgcggattcctggttccagtgctcattattaccgcctgctatctgacaatcgtctgcaaactgcaacgcaatcgcttggcaaagactaagaaaccttttaagatcatcgtgacaatcatcattacatttttcctctgctggtgtccttatcacactctgaacctgctggaactgcaccatacagctatgccagggagcgtgttctccttaggcctaccacttgccactgccttagcgatagcaaactcctgcatgaaccccatcttgtacgtgtttatgggacaagatttcaagaaatttaaagtggccttgttttcccgcttggtgaacgcactcagcgaagacaccgggcatagcagctacccaagtcatagatcttttacaaaaatgtcttccatgaacgagagaacatctatgaacgagagagaaactggtatgctgtag

SEQ ID NO: 111905 - DNA, 1122 bp, synthetic construct
  misc_feature 1..1122: note = Description of Artificial Sequence: Synthetic coding sequence
  source 1..1122: mol_type = other DNA
atgagaatggaggacgaagattataatacctcaatatcatacggggacgaataccctgactatcttgacagcatagtcgtgctggaggacctctccccattggaggcacgggtaacaaggatttttctggtcgtggtctatagcatcgtgtgttttctgggcattctgggaaatgggctagtcattattattgcaacttttaagatgaaaaaaactgtgaacatggtctggtttctgaaccttgcggtcgccgacttcctgtttaatgtgtttctcccaatacatatcacatatgctgctatggattatcattgggtttttgggactgccatgtgcaagattagtaatttcctgctcattcacaatatgttcacctccgtgtttttgctgacaatcattagcagtgaccgttgtatctcagtgcttctcccggtgtggtcccaaaaccaccggtctgttcggttagcctacatggcttgcatggtaatctgggtgttggccttcttcctgtcaagccctagtctggtgttcagggatacagccaatctgcacgggaaaatttcgtgctttaacaacttcagtctgagcacaccgggctctagttcttggcccacacattctcagatggacccggtaggctattcccgtcacatggttgtaaccgtgacaaggttcctttgcggtttcctggtccccgtacttattatcactgcatgctaccttacaatcgtgtgtaagttgcaaaggaacagacttgctaaaactaagaaacctttcaaaattatcgtcaccatcatcattacattctttttatgttggtgcccttatcacacactgaatcttttggagctgcatcacactgcaatgcctgggtcagtcttctctttgggactccctttggccaccgcccttgccattgcaaattcctgcatgaacccgatcttgtatgtgtttatggggcaggatttcaaaaagttcaaagtagccctgttcagccggctggtgaatgcactgtctgaggacacagggcactcatcatacccatcacaccgaagcttcaccaagatgagctctatgaacgagcgaacaagcatgaacgagagagagaccggtatgctatag

SEQ ID NO: 111906 - DNA, 432 bp, synthetic construct
  misc_feature 1..432: note = Description of Artificial Sequence: Synthetic coding sequence
  source 1..432: mol_type = other DNA
atgcgtatggaagatgaagactacaataccagtatctcctacggtgatgagtacccggactatctcgatagcattgtggtattagaagacttaagccccttagaggcacgcgtgactaggatcttcctcgtggtcgtctactctatcgtatgctttctgggcatccttggtaatgggctcgtgattatcattgccacgtttaaaatgaagaaaacggtgaatatggtctggtttctcaacttagctgtagctgactttctatttaacgtttttctccccatccacatcacatacgcggctatggattatcattgggtgttcggtactgccatgtgcaagatctcaaacttccttctcatacacaatatgtttacatctgtgtttttgctcacaattatttcctcagaccgttgcattagtgttctgttgtag

SEQ ID NO: 111907 - DNA, 1122 bp, synthetic construct
  misc_feature 1..1122: note = Description of Artificial Sequence: Synthetic coding sequence
  source 1..1122: mol_type = other DNA
atgagaatggaggacgaggactataacacctccatctcttatggggacgagtaccccgactacctcgatagcattgtggtgctggaggatctttccccactggaggctagggtgaccaggattttcttggtcgtcgtttatagtatcgtttgctttctgggtatcctcgggaatgggctcgtcataatcatcgccactttcaagatgaaaaagactgttaatatggtgtggtttctgaatctcgcagtcgccgactttctgtttaacgtattccttcctatccacatcacatacgctgctatggactatcactgggtcttcgggaccgccatgtgcaagatatctaacttcttactcattcataatatgtttaccagcgtcttcttgttgactattatttcgtcagaccgctgtatttctgttctgttgcccgtgtggtcacaaaaccatcgcagtgtgcgcctcgcctacatggcctgcatggtaatctgggtgctggctttcttcttgtcttctccttctctggttttccgggataccgccaacctccacggaaagattagctgctttaataacttctcactgtcaacacccggatctagctcatggccaactcatagccagatggatcccgtgggatacagcaggcatatggtcgtcacggtgacgagatttctgtgtggtttcctggtgcccgtcctgatcataactgcctgctacctcacaatcgtgtgtaaactgcagagaaacagactggccaagaccaaaaaacccttcaaaattattgtaacgatcataattacatttttcctttgttggtgcccttaccacaccctcaatctgcttgaactacaccatacggccatgcctggctcagtgtttagcctgggactcccccttgctaccgccctggctatcgctaattcgtgcatgaatccaatcctctacgtattcatgggccaggacttcaaaaaatttaaggtggcgctgttttcacgtctagtcaatgctctgtccgaggataccgggcactcttcttatccatcccataggagtttcactaaaatgtcctctatgaacgagaggacctccatgaacgagagggagaccggaatgttgtag

SEQ ID NO: 111908 - DNA, 444 bp, synthetic construct
  misc_feature 1..444: note = Description of Artificial Sequence: Synthetic coding sequence
  source 1..444: mol_type = other DNA
atgcgtatggaggacgaggactataatacgagcatttcttatggcgatgaatacccagattatctagatagcatagtggtgctcgaagatctcagcccactggaggcgcgcgtaacccgaatttttcttgttgtagtgtattccattgtctgtttcctgggcatacttggtaatgggctcgtcattattatagctactttcaagatgaaaaagactgtgaacatggtgtggtttctgaacctggccgtggccgatttcctttttaatgttttcctccctatccacataacttacgccgcgatggattaccattgggtgtttggtacagctatgtgtaagattagtaacttcctcttaatccacaacatgtttacttcggtgtttctactgaccattatatcctcagacaggtgtatcagtgttttgctccccgtgtggtcatag

SEQ ID NO: 111909 - DNA, 1116 bp, synthetic construct
  misc_feature 1..1116: note = Description of Artificial Sequence: Synthetic coding sequence
  source 1..1116: mol_type = other DNA
atggaggatgaagactacaacacttctatctcgtatggcgacgagtaccctgattatctcgactccatcgtagtgctagaggatctgagtcctttagaggcccgggtaactcgaatcttcctcgttgtggtgtacagtatagtatgctttcttggcattttggggaacggtctcgtcatcattatcgcgacttttaagatgaagaagactgttaacatggtctggttcctgaatttagctgtcgctgatttcctttttaatgtgttcctgccgatccatattacttacgccgccatggattatcattgggtgtttggcactgctatgtgtaagatttccaattttctgctaatccacaacatgttcacctcagtgtttcttttgaccataatttcgtcagatcggtgtataagcgttctgctgcctgtgtggagccagaatcatcgatccgtcaggttggcgtatatggcctgtatggtgatctgggtgctggctttcttcctgtcctctcccagcttagtttttagagatacagccaacttgcacgggaagataagctgtttcaacaacttctcactgtcgacgcctggctcctcttcttggcctacccattcccagatggatccggtcgggtactcaaggcatatggtggtcaccgtgacaaggtttctctgcggctttctggtgcctgtgctgattatcactgcctgttacttaacgatcgtgtgcaagttgcaaagaaataggttggcaaaaaccaaaaagcccttcaagattatagtcactataattatcacattcttcttgtgctggtgcccttatcacactctcaatctgctggaactgcatcacacagccatgcccggctctgtattcagcctgggtctgcctctcgccaccgctctcgccatagctaactcatgcatgaatcccattctgtacgtgttcatgggccaagatttcaagaaatttaaggtggccctcttctcaaggctagtgaacgctttgtccgaggatactggtcactcatcctatccttcccacagatccttcacgaaaatgtcttccatgaacgaaagaacctctatgaatgagcgggaaacaggcatgctgtag

SEQ ID NO: 111910 - DNA, 1005 bp, synthetic construct
  misc_feature 1..1005: note = Description of Artificial Sequence: Synthetic coding sequence
  source 1..1005: mol_type = other DNA
atgccgagcaaggaaagttggtctgggcgcaaaacgaatcgagctgctgtccataagtcaaagcaagaaggcaggcagcaggaccttttgattgcagccttaggtatgaaactggggtcacccaagtcttccgtgaccatctggcaacccttaaagctgtttgcatacagtcaactcacatcacttgtgaggcgggcaactctcaaggagaatgagcagattccaaaatatgaaaagattcacaacttcaaggtccacaccttcaggggtcctcattggtgcgagtactgcgcgaacttcatgtggggccttatagctcagggggtgaaatgcgccgattgcgggctcaacgtgcacaagcagtgtagcaagatggtgccaaatgactgtaaacctgacctgaaacacgtaaaaaaagtgtactcctgcgacttgacgacgctggtgaaggcacacactacaaaacgcccgatggtcgtggacatgtgcatcagggagatcgagagcagagggctcaattctgaggggctctaccgggtttccgggttctccgacctgatagaggacgtgaagatggcatttgatcgggatggcgagaaagcggacattagcgtgaatatgtatgaggatatcaacatcatcacgggagcgctcaagctctatttccgagacctgcccattccgctgattacttatgacgcatacccaaaattcatcgagtccgcgaagattatggatcccgatgagcagttggagactttgcatgaggcactaaagttgcttcccccagcccactgtgaaactctccgttacctgatggcccacctaaagagagtgaccctacacgagaaggagaatctcatgaacgccgaaaatttaggaatcgttttcggacccacgcttatgaggtccccggagttggacgctatggctgcattaaacgacattaggtatcaacgtcttgtggttgaactgctcataaagaacgaggatattcttttttag

SEQ ID NO: 111911 - DNA, 1302 bp, synthetic construct
  misc_feature 1..1302: note = Description of Artificial Sequence: Synthetic coding sequence
  source 1..1302: mol_type = other DNA
atggcactgactctgtttgatacagatgaatacaggccccctgtctggaaatcctacctctaccagctccaacaagaggctcctcacccaaggcggattacgtgtacctgcgaggtggaaaataggccgaaatactacggcagggagtttcatggcatgatttcgcgcgaggctgccgaccagctgcttatagttgcagaaggctcctatctaattcgcgagagtcagcgacaacctgggacctacacattggctctgcgattcggttctcaaactcggaacttccgtctctattacgatggcaaacacttcgtaggcgaaaagcggttcgagtcaatccacgatttggtaacagacggtctgataactttgtatattgagaccaaagccgctgaatatatcgcaaagatgacaatcaatcccatatacgagcacgttgggtatacgactctcaaccgcgaaccagcctataagaaacacatgcccgtactcaaggaaacccacgacgagcgcgatagcacaggtcaagacggtgtgtcagaaaaaagagtgcacactttcaggggaccccattggtgtgagtattgtgccaatttcatgtggggcttaatcgcacagggcgtgaagtgcgccgattgcgggctgaacgtccacaagcagtgttcaaaaatggtgccaaacgactgtaagcccgaccttaagcatgtgaaaaaggtctattcttgcgaccttacaacactggtcaaagcacacacaaccaagaggcccatggttgttgacatgtgtatcagagaaattgagtcacgcggcctgaattcagagggattgtacagggtctcaggtttctccgatctgatcgaggacgtaaagatggccttcgatcgcgacggggaaaaagcagacattagtgtcaacatgtacgaggacattaatatcataaccggagccctgaaactatactttagggacctgcccatccccctgatcacatatgacgcgtacccaaagttcatcgaaagcgccaagatcatggatcccgacgaacagttagagaccctgcacgaggctttaaaattgctgccccccgctcactgcgagacattacggtatttgatggcacacttgaagcgcgttaccctccacgaaaaggaaaacctgatgaacgctgagaacctggggattgtgtttggaccaacactcatgagaagtccagagctggacgccatggcggctttgaatgacattagataccagcgcctcgtcgtcgagctcctgattaagaatgaagacatcctgttctag

SEQ ID NO: 111912 - DNA, 1380 bp, synthetic construct
  misc_feature 1..1380: note = Description of Artificial Sequence: Synthetic coding sequence
  source 1..1380: mol_type = other DNA
atggccttgacactgttcgacacggacgaataccgaccccctgtgtggaaaagctacctgtaccaactacagcaggaagcaccgcaccctaggcgaattacttgtacatgtgaggtcgagaatcggcccaaatattacggtagagagttccacggaatgatatctcgtgaggctgcggaccagctgctgatcgtggcagaaggttcttacctaatcagagagagtcagcgccaaccagggacctacaccctggccctgcgctttggcagccaaaccagaaactttaggctgtactatgacgggaaacatttcgtaggggagaaaaggtttgagtccattcacgatctcgtgaccgatggactcataaccctgtatattgaaacgaaggctgctgaatacatcgcgaaaatgactatcaatccaatttatgaacacgttgggtacaccacactgaacagggaaccggcctacaagaagcacatgcccgtgctaaaagaaacccatgacgaacgtgactctacagggcaggacggagtttctgagaagaggctcacatccctcgttcgtcgggcaaccttaaaagaaaacgaacaaatccccaagtacgaaaaaatacacaactttaaagtccacactttcaggggccctcactggtgcgagtactgcgctaactttatgtggggtctgattgcccagggcgtgaagtgcgccgactgcggtttgaatgtgcacaagcagtgtagtaaaatggttccaaacgactgtaagcctgacctgaagcatgtaaagaaagtatattcttgtgatctgactacactagtaaaagcccacacgacaaagcgcccaatggtagtcgacatgtgtatcagggaaatcgagagtagaggcctgaactcagaggggctgtacagggtgagtggatttagcgacctcatcgaagacgtcaagatggctttcgacagagatggcgaaaaggcagatatcagcgtgaatatgtacgaggacatcaacataataactggggccctcaaactctacttccgggacctccccatccctctgatcacctacgacgcgtatccaaaatttattgagtctgcgaagataatggaccctgatgagcagttggagactcttcatgaggctctgaaactcttgcctccagctcattgcgagacccttcgctacctgatggcccatttgaagagggtcactctccatgaaaaagaaaatctgatgaacgctgagaatcttggcatcgtgtttggtcccacccttatgagaagtcccgagttggacgccatggcagctttgaacgatattagatatcagcgactagtcgtcgagctattgattaaaaacgaggacatcttgttttag

SEQ ID NO: 111913 - DNA, 1167 bp, synthetic construct
  misc_feature 1..1167: note = Description of Artificial Sequence: Synthetic coding sequence
  source 1..1167: mol_type = other DNA
atgacggcctcagttctgctccaccctaggtggattgagcccacggtcatgtttctgtacgataatggcggagggcttgttgccgacgagttgaacaagaacatggaaggggccgcggccgcagcagcggccgccgccgcagcagccgcggcaggggcggggggtggaggatttccacatcctgctgcagccgccgctgggggcaatttttccgttgctgcagccgctgcagccgccgctgcagccgcagccaatcaatgccggaatctgatggcccacccagcccctctcgctcctggagccgcctcggcatactcctctgcccccggagaagcaccgccctcagctgcggccgcagccgccgccgcggccgcagcagcagctgccgctgctgcggcaagtagttctggtggacctggtccagcgggccctgctggagcagaggcggccaagcaatgctctccttgtagcgccgccgctcaaagctcctcagggcctgctgccctaccatatggctatttcggctcaggctactatccatgtgcacgaatgggacctcatccaaatgccatcaagtcatgcgcccagccagcgtcagccgccgccgccgcagcctttgcagataaatacatggacacagccggaccagctgcagaggagttctctagccgtgcgaaggagtttgccttctatcatcaggggtacgcggccgggccataccaccaccatcaacccatgccggggtacctcgatatgcccgttgtacctggcctagggggcccgggggaatccaggcacgagcccttagggctgccaatggaaagctaccaaccatgggcccttcccaatgggtggaacggtcaaatgtactgccccaaagaacaagcccagccaccccatctgtggaagtctaccttgccggacgtcgtatcccaccccagcgacgcatcctcgtataggcgtgggagaaagaaaagggtgccctacacaaaggtgcagttgaaggagctcgagagagagtacgccaccaataaatttatcacaaaggacaaacgtagacggatctccgctaccacaaatttgtccgagcggcaggtgactatatggtttcaaaaccggagggtcaaggaaaaaaaggtgatcaacaagctgaagactaccagctag

SEQ ID NO: 111914 - DNA, 999 bp, synthetic construct
  misc_feature 1..999: note = Description of Artificial Sequence: Synthetic coding sequence
  source 1..999: mol_type = other DNA
atgttttctgaagaactctggcttgaaaatgagaaaaaatgcgccgtggtacggaaatctaagcaaggccgaaagcgccaggagctcttggctgttgcatttggggtgaaagtgggagtgaagggcggatttctgtggccacctctgaagctgttcgcctgttcacagatctcatcattagtccggcgtgcagctcttactcataacgataaccacttcaattacgaaaaaactcataacttcaaggtacacacctttcgaggcccacattggtgcgagtactgcgcaaatttcatgtggggtctcattgcccagggtgtccggtgtagcgattgtggcctgaatgttcacaagcagtgctccaagcacgtgccgaatgactgccaaccggacctgaagagaatcaaaaaggtgtactgctgcgaccttaccacactggtgaaggcccacaacactcagaggcctatggtggtagatatttgcatacgagaaattgaagccagaggcttgaagagcgagggtctgtaccgggtaagtggctttaccgaacacatagaagatgtgaaaatggcctttgaccgagacggtgagaaggctgatatctcggctaacgtgtaccccgatattaatataattactggggcgctgaaactgtatttcagagatctccccattcccgtaattacatatgacacatactctaagtttatcgatgcagcgaaaatctccaatgcggatgagcgcctggaagccgtccatgaggtactgatgctgctaccgcccgctcactacgaaaccctgaggtacctcatgattcatctgaaaaaggtaacaatgaatgagaaagataacttcatgaacgcagagaatttgggcattgtgtttgggcccacgttgatgagaccccccgaggatagcacgctgacgacgctgcacgatatgcgatatcagaaactgattgtgcagattcttattgagaatgaagatgtgctgttctag

SEQ ID NO: 111915 - DNA, 525 bp, synthetic construct
  misc_feature 1..525: note = Description of Artificial Sequence: Synthetic coding sequence
  source 1..525: mol_type = other DNA
atggctgcctcctccaactcaagcctaagcgggtcctctgtgtcaagcgtttactccgagcctcggagtccgagagaactgcctaagtatgctgaggaatatcagccgcccatctggaagagctatctctatcaacttcagcaggaagccccaaggcccaagagaattatctgcccccgagaggtggaaaaccgacccaaatactacggccgtgaattccacggcatcatctctcgtgaacaagctgatgagttactgggcggggtagaaggagcatacatactcagggagtctcagagacaacccgggtgctacacactcgctttgcggttcggaaaccagaccctcaattaccgactttttcacgatgggaagcattttgtcggtgaaaagagattcgaatctatacatgacctggtgactgacgggctcattaccctctatattgagaccaaggcagcagagtatatatctaagatgacaacaaatcccatctacgaacacattggctacgcaacgctgtag

SEQ ID NO: 111916 - DNA, 825 bp, synthetic construct
  misc_feature 1..825: note = Description of Artificial Sequence: Synthetic coding sequence
  source 1..825: mol_type = other DNA
atgttcagtgaggagctttggctcgagaatgagaagaagtgcgccgtcgtgcggaaatctaagcagggcaggaaacgccaggagttactggcggtagctttcggtgtgaaggtgggggttaaaggggggttcctctggccccccctcaagttgttcgcctgctctcagatcagtagtctcgttcgtagagctgccttgacccataacgacaatcacttcaattacgagaagacacacaacttcaaagtccacactttcagaggccctcactggtgcgaatactgcgctaatttcatgtggggcctgattgcacagggtgtccggtgtagcggcctcaaatccgagggcttgtatcgggtatccggcttcaccgagcacatcgaggatgtaaaaatggcatttgacagagacggagagaaggccgatatatcagccaatgtttacccagacattaatattattacaggtgccttgaagttgtacttcagagaccttcctataccagtcattacatatgatacatactccaagttcattgacgcagcgaagatttccaacgcggacgaacgtctcgaggctgtgcacgaggtgctgatgctgctcccacctgcgcattatgaaacactgcggtatctgatgatacacctgaagaaagtgaccatgaacgaaaaggacaattttatgaatgctgaaaacctgggaatcgtgttcggccccaccctcatgaggccccccgaggactccactttgaccaccttgcacgacatgagataccagaagttgatcgtgcagattcttatcgagaacgaggatgtgttgttttag

SEQ ID NO: 111917 - DNA, 864 bp, synthetic construct
  misc_feature 1..864: note = Description of Artificial Sequence: Synthetic coding sequence
  source 1..864: mol_type = other DNA
atgttctctgaggagctttggctggaaaacgaaaagaagtgtgcggttgtccgcaaatctaagcagggtcgaaaacggcaggagctactggccgtagccttcggggtgaaggtgcataccttccgcggaccgcactggtgcgaatattgtgccaattttatgtggggcctcattgctcagggagttcgatgtagcgactgcgggctcaacgtgcataaacagtgtagcaagcacgtgccgaatgattgccagccagacctgaagcgcattaagaaggtgtactgctgcgacctgactaccttagtaaaggcgcataacacacagcggcccatggtggtcgacatttgtatccgtgaaatcgaggctcgaggcctgaaatccgagggactgtatagagtttccggatttaccgaacacattgaagacgtgaagatggcctttgacagggacggcgagaaggcagacatctcagccaatgtctatcccgatattaatatcattactggcgcacttaagctctattttagagacttgcctattccggtgattacatatgacacatatagcaaatttatagacgccgcaaagatatcaaatgccgacgagaggctggaggccgtccacgaggtgttgatgctgctccccccagcgcactacgaaacactgcgctatctgatgatacatctgaagaaagtgaccatgaacgagaaggacaattttatgaatgctgaaaacctgggaatagtatttgggcccacgctgatgaggccccctgaggactccacgctgacaacactacatgacatgaggtatcagaagctgattgtgcagatcctgattgaaaacgaggacgttctgttctag

SEQ ID NO: 111918 - DNA, 579 bp, synthetic construct
  misc_feature 1..579: note = Description of Artificial Sequence: Synthetic coding sequence
  source 1..579: mol_type = other DNA
atggctgctagttctaattcctcactcagtggatctagcgtttcaagtgacgcggaagagtaccagccccctatttggaagagttacctgtatcagcttcagcaagaggccccgcgcccaaagagaattatctgtcctagagaggtagagaacagacccaagtattacgggcgggagtttcatggcattatcagccgagaacaagccgacgagctgctggggggtgtggaaggagcctacattctgagggaatcccagaggcaacctggctgttatacgctagccctccgcaatccgaccaaaatttcaaacgccgatgagcgcctggaggccgtgcacgaggttctcatgttactgccaccggcacactacgagacactgagatacctgatgatccaccttaaaaaagtaaccatgaatgaaaaggataacttcatgaatgctgagaaccttggaattgtgtttggccccaccctgatgaggccgccggaagactccactcttaccacccttcacgacatgcggtaccagaagcttatcgtgcagattctgattgagaatgaggatgtacttttctag

SEQ ID NO: 111919 - DNA, 861 bp, synthetic construct
  misc_feature 1..861: note = Description of Artificial Sequence: Synthetic coding sequence
  source 1..861: mol_type = other DNA
atgttttctgaggagctttggctggagaatgagaagaagtgtgccgtggtgaggaaatcaaagcagggaaggaagcgccaagaactgctggccgtggccttcggcgtgaaggtgggcgttaaaggcgggttcctgtggccccccctaaaactgttcgcctgcagccagatcagcagcctggtgagacgcgctgctctgactcacaatgacaaccacttcaactacgagaagacacataacttcaaagtacacaccttccgagggcctcattggtgcgagtactgtgcaaacttcatgtggggcctgatcgcacagggggtcaggtgttctgactgtggcctgaacgtgcataaacagtgttctaagcacgtgcctaatgactgtcagccagatttgaagcggatcaagaaggtgtattgttgcgacctaacgaccctagttaaagcgcacaacacccaaaggcctatggtcgtggacatctgcattagagagatcgaagcaagggggctgaagagtgagggcctgtacagagtctccggattcactgaacatatagaagacgtgaaaatggcattcgatcgcgaaatctcaaatgccgatgaaaggctcgaggcggtgcatgaggtgctcatgcttctgccaccggcccactacgagactctacggtacctgatgatccacctcaaaaaagtgaccatgaatgaaaaggacaactttatgaacgctgagaacctcgggatagtatttggaccgaccctaatgcgaccacccgaggattccactctcaccacactgcacgacatgagataccagaagctcattgttcagatcctaatcgagaatgaggacgtcctgttctag

SEQ ID NO: 111920 - DNA, 1446 bp, synthetic construct
  misc_feature 1..1446: note = Description of Artificial Sequence: Synthetic coding sequence
  source 1..1446: mol_type = other DNA
atggcagcctcttctaatagtagtctgagtggaagcagcgtgtcttccgtctatagcgagccacgtagccccagggaactgcccaagtatgcagaggaataccagcctcccatttggaaatcatacctgtatcagctgcagcaggaggcgccacgcccaaaaaggattatctgccctcgggaagttgagaataggccaaagtactatggtcgagagtttcatggtatcatatctcgagagcaggcagacgagctacttggtggggtcgagggggcctacatattaagagagagtcagcgacaacctgggtgctatacactcgcactcagattcggcaaccagacactgaattatagactgtttcacgacggcaagcacttcgttggtgagaaaaggttcgagtctatccacgacctggttactgatggactgattacactgtatattgaaacaaaggccgcagagtatataagcaagatgaccacgaatcctatctacgagcacattgggtacgccaccctactgcgagaaaaggtctctaggaggctctccagaagcaaaaacgaaccacgcaaaacaaacgtcacacatgaggagcataccgctgtagagaaaatcagcagtctggtgcgcagagccgccctcacccataacgacaatcatttcaattacgagaagacacacaacttcaaagtgcacacattcagagggccgcactggtgcgagtattgcgccaactttatgtgggggttaattgcacagggggtgcgctgctccgactgtggtctcaacgtgcataagcagtgctctaagcatgttcctaacgattgtcagccagaccttaagagaataaaaaaagtttactgctgcgacctgaccacactggtgaaggcccacaatacccagagacctatggtggttgacatctgcattagggaaattgaggcacgcggcctgaaaagcgagggactgtaccgggtgagcggtttcacggaacacattgaagacgtgaagatggcctttgatcgcgacggggaaaaggctgatatcagtgctaacgtgtatccggatatcaatatcattactggggcactgaagctctatttccgcgacctgccaattcccgtaatcacttatgacacctattccaaattcatcgacgcagcaaagattagcaatgcggacgagcgccttgaagcagttcacgaggtgcttatgttgctaccccctgcacactacgagaccctgcggtatctcatgattcacctcaaaaaggttactatgaatgaaaaagacaattttatgaatgcagagaatctggggattgtctttgggccaacactcatgagacctccagaagattctactctgacgactcttcacgacatgcgctatcagaagctcattgtgcagatcctcattgagaacgaggatgtgctgttctag

SEQ ID NO: 111921 - DNA, 975 bp, synthetic construct
  misc_feature 1..975: note = Description of Artificial Sequence: Synthetic coding sequence
  source 1..975: mol_type = other DNA
atggcagctagtagcaacagttcactttccggttcctccgtttcctcagacgccgaggagtatcagcccccaatctggaagtcatatctgtatcagttgcaacaggaagccccacggcccaaacgaatcatatgtcctcgggaaatttcgagcctcgtgagaagagcggcacttacccacaacgacaaccatttcaactacgaaaaaactcataactttaaggtacacaccttccggggaccccactggtgcgagtactgtgctaatttcatgtggggcctgatagcgcagggagtgcgctgttcagattgtggcctaaatgtgcacaaacaatgcagcaaacacgtccctaatgattgccaacctgatctgaagcgcattaagaaagtgtactgctgtgacctgactaccctggtaaaagctcacaacacccagaggcctatggttgtggacatttgcattcgggaaattgaagcaagggggctgaaatctgagggcctgtacagagtctcaggattcaccgagcacattgaggatgttaagatggccttcgacagggacggagagaaagccgacatcagcgctaacgtatatccggatattaacattattactggcgctcttaaattgtactttcgcgatctgcctattccagtaattacatacgatacttactcgaagtttatcgacgctgctaagattagcaacgccgacgaaagactagaagccgtgcacgaagttttgatgctgttgccaccagcgcactatgaaactctgaggtatttaatgatccatttgaagaaggtaacaatgaatgagaaggataattttatgaacgctgaaaacctgggcattgtattcgggcctaccctcatgcggcctcccgaggacagtaccctgacgacactgcacgatatgcgctatcaaaaattgatagttcaaattcttatcgaaaacgaggacgtgctgttttag

SEQ ID NO: 111922 - DNA, 1632 bp, synthetic construct
  misc_feature 1..1632: note = Description of Artificial Sequence: Synthetic coding sequence
  source 1..1632: mol_type = other DNA
atgacccaaacacaccgggcaaaatccgccagtagttgtcccaacttgttggtccccgagacgtggcctcaccaagtgagcgctagccacgccgggaggagtaagcagccacagggcgggatccttaagataaacgaggaacatcggcggggcgcaatccaggaccttctcgcttcccccgggttcacgttcgggaagcgcgtggtcttcgacagccactgcctgaagcgacaacatacattcgctgacggcctgcacagttcttgtaccagcaacgcagaagagtatcagcccccgatctggaaatcctacctgtatcagcttcagcaggaggctcctagacccaagcgaataatctgtcctcgtgaagtggagaaccgccccaagtactacggccgcgaatttcatggaattatcagtcgggagcaggctgatgagttgctggggggggtggaaggcgcatacatcctgagggagagtcagaggcaaccgggatgttacacattggctctcagatttggtaatcaaactctgaattaccgtttattccatgacgggaaacacttcgtgggagagaaaagattcgagtctattcacgatctcgtgactgacggtctgatcaccctgtatatcgagacaaaggccgcagagtacatctccaaaatgacgactaaccccatctacgagcatattgggtatgctacactgctaagggagaaggtctcccgacgactgagccggagcaaaaacgaaccacgcaagactaacgtgacccatgaagagcacacagccgttgagaagattagttccctagtgagacgtgccgctctaacccataacgataaccactttaattacgagaaaacacataacttcaaagtgcatacttttaggggcccacattggtgcgagtattgcgccaatttcatgtgggggttaattgcccaaggagtgcgctgttcggactgcggcctgaacgttcacaaacagtgctcaaaacacgtccctaacgactgtcaacctgacttgaaacgaattaaaaaggtgtactgttgtgacctgacaacacttgtgaaagcccacaatacgcagagacccatggtggtggacatatgcattcgcgaaatcgaagcgcgcgggctgaaaagcgaaggactctacagggtttccggctttaccgagcatatcgaggacgtaaaaatggcctttgaccgggacggagagaaggcagatatttctgctaacgtgtaccccgatataaatatcattacaggagcactgaagctttactttagggacctgcctattcccgttatcacatacgacacatactccaagtttattgatgccgctaaaatctcaaacgccgatgagaggctggaggccgtgcacgaggtgttaatgctgctgcccccggctcactatgagacccttagatatctgatgatccatttgaagaaagttaccatgaacgagaaagacaactttatgaacgctgaaaatctgggaattgtgttcgggccaacactgatgagacccccagaggattccaccttgacaaccctgcacgacatgcggtatcagaaattaatcgtccagatcctgattgaaaatgaagacgttctcttttag

SEQ ID NO: 111923 - DNA, 1362 bp, synthetic construct
  misc_feature 1..1362: note = Description of Artificial Sequence: Synthetic coding sequence
  source 1..1362: mol_type = other DNA
atggatgctgaggagtatcagccacccatctggaaatcctatctctatcaactgcagcaggaggcccctcgcccgaaacgcataatctgccctcgcgaggttgagaaccgcccaaaatactacggccgggaatttcacggcataatcagcagggagcaggcagatgagctcttaggcggggttgagggcgcgtacatcttgcgagagtctcagcgtcagcctggctgctacactttagctctacggtttggtaaccagacacttaactaccgcttatttcacgatggcaaacatttcgtaggggagaagaggttcgagtctattcacgacctggtcacagacgggttaatcacattgtatatagaaaccaaggccgccgaatacatttctaaaatgaccactaatcctatttacgaacacattggttacgccaccctactcagggagaaagtttccaggaggttgtccagatcaaagaacgaacctagaaagacaaacgtaactcatgaagaacacaccgccgtggagaagatatcaagcctggttagaagagcagccctaacccacaatgataatcatttcaattatgagaagacccataatttcaaggtccacacatttagaggaccacactggtgcgagtattgtgctaatttcatgtggggattgattgcccagggggtgaggtgctctgactgcggtcttaacgtgcacaagcagtgcagcaagcatgtgcccaatgactgtcagccagatctgaagcgcattaagaaagtgtattgttgtgatttgacaacccttgttaaggcacacaatacccagcgtcctatggtcgtggacatttgtatcagagagatagaagctaggggcctgaagagcgaaggcctgtacagagtgtctggttttaccgaacacatcgaagacgtcaagatggccttcgatagggacggtgagaaggcggacatctctgcgaacgtctaccccgacatcaacatcattactggggcgcttaagctgtactttcgcgacctgcctattccagtaatcacctatgatacatattccaagttcattgatgctgccaagataagtaatgccgatgaacggctcgaggcagttcatgaagtgctgatgttgctaccgccagcacactatgagactttgcgctacctgatgatccacctcaagaaagtaacaatgaatgagaaagacaattttatgaacgcagagaacctgggtattgtgttcggacccactctcatgcgaccaccagaggattccactctcactaccctgcatgacatgcgataccaaaagcttattgtacagatattaattgaaaatgaggacgtgctgttctag

SEQ ID NO: 111924 - DNA, 1152 bp, synthetic construct
  misc_feature 1..1152: note = Description of Artificial Sequence: Synthetic coding sequence
  source 1..1152: mol_type = other DNA
atgggagtcaaggcatcccagaccggcttcgtcgttttagtgctcctacagtgctgctccgcctataagctggtctgttactatacttcatggtcacaataccgcgaaggcgatggatcttgcttccccgatgcacttgatcgttttctgtgcacacatataatttattcttttgccaacatttcgaatgatcacatcgatacctgggaatggaacgacgtgacgctttacggcatgcttaatacgctgaaaaacagaaaccccaatctgaaaaccctgctgtccgtgggggggtggaatttcgggtcacaacgattcagtaaaatcgcttccaatacacaaagcaggaggaccttcattaaaagcgtcccaccatttctacgcacgcacggatttgatggtcttgatctggcatggctgtaccccggtagaagagataagcaacacttcactaccctgattaaagagatgaaggcggagtttatcaaggaagcccagccaggcaagaagcaattactgctctctgccgcgctgagtgctggaaaggtgacaatcgactcgtcttatgacatcgccaagataagtcaacatctggatttcatatcaatcatgacgtacgattttcacggggcatggcgggggactacaggtcaccacagtcctctcttccgcggacaggaagacgcttccccagataggttctcaaacacagattatgcagtcggatacatgctgcggctgggagcccccgcgagcaaactcgtaatgggaattcctactttcgggcggtcttttacacttgccagctccgagacaggagttggcgcacccatctccggtccaggcattccaggacgattcaccaaggaggcaggtactctggcgtactacgaaatttgcgacttcctcagaggcgccacagtgcaccggatccttgggcagcaggtaccgtacgctactaagggaaaccaatgggttggttacgatgatcaagagtccgttaagtccaaggtacaatatctaaaggacaggcaattggctggcgcaatggtatgggcactagacctggatgactttcagggcagcttctgcggacaggatttacgattcccccttacaaatgccatcaaggacgcactcgccgcgacctag

SEQ ID NO: 111925 - DNA, 459 bp, synthetic construct
  misc_feature 1..459: note = Description of Artificial Sequence: Synthetic coding sequence
  source 1..459: mol_type = other DNA
taactgcttctgtctgccgccctcagcgcaggcaaggttaccatcgactcctcgtacgatatagccaaaatcagtcagcacctggatttcatttctatcatgacttacgattttcatggggcatggagagggacaacgggacaccacagcccactgtttaggggccaggaagacgcttctccagaccggttctcgaacaccatttgcgacttcctgcggggggctacagtgcatcggattctggggcagcaggtcccttatgccaccaagggcaatcagtgggttggttacgacgaccaggaatccgttaaaagtaaagtccaatacctcaaagataggcagctcgcaggggccatggtgtgggcgctggacctagacgacttccaaggctccttttgtggccaggatctacgcttccccctgacaaacgcgatcaaagacgctctcgcggcaacttag

SEQ ID NO: 111926 - DNA, 306 bp, synthetic construct
  misc_feature 1..306: note = Description of Artificial Sequence: Synthetic coding sequence
  source 1..306: mol_type = other DNA
atggtgtcaacccctgaaaacaggcagacattcatcacctcggtcattaagtttctccgccaatacgagtttgacggtcttgattttgattgggagtaccctggtagtcggggatcccctccccaagataagcatctgttcactgtgctggtacaaatgaggaaactcaaatatagggaggatctgtctaacctgcccaagatcacacagctagtgggcataatcacttccagcgctgtgtggccacagagccctctgctgctcagtatcaccttggggtgccccctactccttagaaacgcatag

SEQ ID NO: 111927 - DNA, 1431 bp, synthetic construct
  misc_feature 1..1431: note = Description of Artificial Sequence: Synthetic coding sequence
  source 1..1431: mol_type = other DNA
atgacaaagctgatacttctaactggtctggtgttgattctcaatttgcagctcggcagtgcttatcagttgacttgctacttcacaaattgggctcagtataggcctggactgggtcgcttcatgccggataacatcgacccttgtctgtgcacccacctgatttatgcttttgccgggcgccaaaacaacgagataactactattgagtggaacgacgtcactctgtaccaggccttcaacgggctgaaaaacaaaaattctcaactgaagacgctgcttgctatcgggggttggaacttcggcactgcaccatttactgcgatggtgtctaccccagaaaatcgtcagacctttatcacttccgtgatcaagttcttgagacaatacgaattcgatgggctggacttcgattgggaatacccgggctctcgtggcagccccccacaggataaacacctttttaccgtgctggtgcaggaaatgagggaagcctttgaacaggaagctaaacaaatcaataaacctaggctcatggtaaccgccgcagttgccgccggaattagtaacatccagtcaggctacgagattcctcaactcagtcagtatctggactatattcacgtgatgacatacgacctgcatggcagttgggagggctatacaggagagaactccccactctacaagtatccgactgataccggcagcaatgcttatctgaatgtcgattatgtgatgaattactggaaggacaacggtgcccccgccgaaaagctgatcgtggggtttcctacctacggacacaacttcatcctatccaatcccagcaacacggggatcggtgccccgacttcaggagctggacctgctggaccatacgctaaagaatccggaatctgggcctactatgagatctgtacattcctcaagaacggtgcaacacagggttgggacgccccccaggaggtgccgtacgcttaccagggcaatgtctgggtgggatatgataatattaagagcttcgatatcaaggcacagtggctcaagcacaataaatttggcggagctatggtgtgggccattgacttagacgattttacaggcaccttctgtaaccaaggcaaatttcctttgatctcaacactgaaaaaagctttagggctccaatcggcttcctgtaccgcgcctgcacaaccgatcgaaccaatcaccgcagcccccagcggaagtggtaacggaagcggttccagtagcagcggcggaagctctggagggagtggcttctgcgccgtgcgcgctaatggcctctatcccgtggctaacaaccgtaatgccttttggcactgcgtcaatggcgtcacatatcagcagaactgccaggccggcctcgtatttgatacaagctgcgattgctgtaattgggcgtag

SEQ ID NO: 111928 - DNA, 948 bp, synthetic construct
  misc_feature 1..948: note = Description of Artificial Sequence: Synthetic coding sequence
  source 1..948: mol_type = other DNA
atgcgggaggcctttgagcaggaggcaaaacagatcaataaaccccgccttatggtcacggcggcagtggcggctggtatctctaacatccagtccggttacgaaattcctcagttaagccagtacctcgattatatacacgtcatgacttacgacttacacggctcttgggaggggtataccggggaaaacagcccattgtacaagtaccccaccgatacaggatctaacgcctacctcaacgtggattacgtgatgaactattggaaggataacggcgctcccgccgaaaagttgattgtcggcttccctacctacggacacaattttatcctaagcaacccttcgaacacaggtatcggagcccccaccagtggggcagggcctgcggggccatatgccaaggaatccgggatttgggcttactatgaaatctgcacttttctgaaaaacggcgctacgcaaggctgggacgctcctcaggaagtgccgtatgcctaccagggcaacgtgtgggttggctatgataacatcaaaagcttcgatattaaagcacagtggttaaaacataacaaatttggcggtgcgatggtgtgggcgatcgacctggacgatttcaccggaacgttctgcaaccagggaaagttcccactgatcagtaccctgaagaaagctctaggcctgcagtctgcatcttgtacggcccccgcgcaacctatcgaaccaataaccgcggcacccagtgggtccggaaatggctctggatcaagttcatccgggggcagcagcggtggctctggcttttgcgccgtcagggcaaacggactataccccgtggcaaataaccgcaacgccttctggcattgcgtgaatggggtaacctatcaacagaactgtcaggctgggctggtcttcgacacctcatgcgattgttgtaactgggcgtag

SEQ ID NO: 111929 - DNA, 1431 bp, synthetic construct
  misc_feature 1..1431: note = Description of Artificial Sequence: Synthetic coding sequence
  source 1..1431: mol_type = other DNA
atgacaaagttgattctgctcacaggactggtcctgatcctgaatctgcagctagggtctgcgtaccaactgacttgctacttcactaactgggcacagtatagaccaggtctcggacgcttcatgcctgacaacatcgacccatgcttatgcacccacctcatctacgctttcgcaggcagacagaataacgaaattacaaccatcgagtggaatgatgtcactctgtaccaggctttcaacggactgaaaaacaagaactctcaactgaaaactttgctcgccattgggggctggaattttggcacagccccatttaccgccatggtttcaactcccgaaaatcgtcagacattcatcacatccgtgatcaagttccttcgccagtatgagttcgacgggctggactttgactgggagtatcccggctcccgcggttccccgcctcaagacaagcatcttttcaccgttcttgttcaggagatgagagaggcctttgaacaggaagccaagcagattaacaagcctaggctaatggtgaccgccgccgttgccgccgggatatcaaatatccaaagtggatacgaaattccacagctgtcccaatacctggactatattcacgtgatgacctatgatcttcacgggagttgggaagggtatacgggcgagaactccccattgtacaagtatcccaccgataccggctctaatgcgtacctgaatgtcgactatgttatgaactactggaaagacaatggcgctccagccgaaaagttgattgtgggctttccaacctacggccataactttatcctaagtaacccaagtaacacaggaatcggagcacctacgtcaggggcaggccctgccggcccctacgcgaaggagtccgggatttgggcgtactatgaaatttgcacatttctcaagaatggcgcgactcaaggatgggatgcgccacaggaagttccttatgcgtatcaaggcaacgtttgggtgggctacgataatatcaaatcgtttgacataaaggcgcagtggttgaagcataacaagttcggcggggccatggtgtgggcgattgatctggacgacttcaccgggacattctgtaatcagggcaagtttccgctcatatcgaccctaaagaaggcactgggcctgcagtccgcaagctgcaccgcacccgcccaaccgatagaacctatcacagccgctcccagcggaagcggcaatggatccggctcttcatctagtggcggctcctcaggcggttccgggttttgtgctgtgagagcaaacgggctttaccccgtggctaacaacagaaatgctttctggcactgcgttaacggggtgacctatcaacaaaattgtcaggcgggccttgttttcgatacatcctgcgattgctgtaactgggcttag

SEQ ID NO: 111930 - DNA, 1263 bp, synthetic construct
  misc_feature 1..1263: note = Description of Artificial Sequence: Synthetic coding sequence
  source 1..1263: mol_type = other DNA
gaaactagcagctcggtgcacgagcaggtagctgactcaggcgcccaggccgtcgccttccaatcggggggagaatccagtatcgtgtggaactcgcagcttaagacactactagcaatcgggggatggaactttggaacagcccccttcacagccatggtgagtaccccagagaatcgccaaacctttatcacttctgtgatcaaattcctgcgccagtacgaattcgacgggctggacttcgactgggaatacccagggtcacgaggaagtccaccacaggataaacacttgtttactgtcctggtacaggaaatgcgtgaggctttcgagcaggaggcaaaacaaatcaacaaaccccgtctgatggttacggctgcagttgcagctgggatttctaatatccaatccgggtatgaaattccacaactcagtcagtacctggactatattcacgtgatgacgtacgacctccacggctcatgggagggctacactggcgagaattctccactctacaagtatcccaccgacacaggctcaaacgcatatctcaacgtggattatgttatgaattattggaaggataatggggcccccgcagagaaattgattgtgggttttcccacttacggacataattttatactatctaacccctccaataccggaataggagccccgacctcaggtgccggccctgctggcccctatgccaaagagtccggaatctgggcatattatgagatctgcaccttcctcaagaacggtgccactcaagggtgggatgctccgcaggaggttccctacgcatatcagggcaatgtctgggtgggctacgacaacataaagagtttcgacatcaaagctcaatggctgaagcataacaagtttggaggcgccatggtctgggcaattgacttggatgatttcacagggacattttgcaaccaggggaagtttccacttattagcaccttgaaaaaggccctcggattacaatcagcctcatgcactgcccctgcacaacctatagagcctattaccgccgcaccttctggcagtgggaacggctcagggagctctagctccggagggtcttccggcggctccgggttttgtgcagtcagggccaatggcttgtatccagtagccaacaatcgcaacgccttctggcactgcgtaaatggggtcacatatcagcaaaactgccaggctggcctggtatttgatacgtcatgcgattgttgtaattgggcttag

SEQ ID NO: 111931 - DNA, 1107 bp, synthetic construct
  misc_feature 1..1107: note = Description of Artificial Sequence: Synthetic coding sequence
  source 1..1107: mol_type = other DNA
atggtgtcaacccccgaaaaccgccagactttcattacctccgtgatcaaatttctacggcagtatgagttcgacggcctggattttgattgggaataccccggatcgaggggctccccgcctcaggataagcacctttttaccgtcctagttcaggagatgagggaagcctttgaacaggaagctaaacagataaacaaaccgcgattgatggtgaccgctgccgtcgccgcgggtatttccaacatacagtctgggtacgagattccacagctttctcagtaccttgactatattcatgtgatgacatatgatctccacggctcgtgggaggggtacacaggagagaactctccactttacaagtaccccactgataccggatcaaacgcctatctgaatgtagactacgttatgaattattggaaggacaatggtgcgccagccgagaagctcattgtgggtttccctacctatggacataatttcatcctgtcaaacccctccaatacaggcataggcgcccctaccagtggcgcgggcccggcaggaccttatgcgaaagagagtggcatttgggcttattatgaaatctgcacctttctgaaaaatggagcaactcagggatgggacgcacctcaagaagttccttacgcctaccagggtaacgtttgggtgggttatgataatatcaagagtttcgatattaaagcacagtggttgaaacacaacaagtttggaggggcgatggtgtgggctatcgatttggacgacttcactggcacattctgtaatcagggaaaattccctctcattagtacactgaaaaaagctctaggactacagagtgcatcttgcacggcaccagctcaaccaatagagcccatcactgccgcccctagtgggtccggcaacggttctggctcgtcttccagcggcggttctagcggagggtccggcttctgtgcggttcgagccaatgggttgtaccccgtggcaaacaataggaatgccttctggcattgcgtcaacggcgtgacttatcaacagaactgccaggcaggtctcgttttcgacacatcctgtgactgttgcaactgggcttag

SEQ ID NO: 111932 - DNA, 948 bp, synthetic construct
  misc_feature 1..948: note = Description of Artificial Sequence: Synthetic coding sequence
  source 1..948: mol_type = other DNA
atgcgagaggcatttgaacaggaagccaaacagatcaataaaccgagactaatggtcaccgccgcagttgctgctgggatctcgaatatccagtccgggtacgagatcccccagctcagccaatacttggactatatccacgtgatgacctatgaccttcatggttcttgggaagggtacaccggcgagaactcacccttatacaaatatcctaccgataccggttccaatgcctaccttaatgtggattacgtaatgaactactggaaggacaatggggcccctgcggagaaattgattgtcggttttcccacttatggacataactttatactgtccaacccatctaataccggaattggcgcccccacatctggagcaggaccggccggcccatacgcgaaagaatccgggatctgggcatactacgagatctgtacattcttgaagaatggagccacacagggttgggacgctccccaagaggtcccttacgcttatcaaggtaacgtgtgggtgggctacgataacataaaaagctttgatattaaggcccagtggttgaagcacaacaaattcggcggggcaatggtgtgggcaattgatctcgatgactttacaggcacattttgcaaccagggaaaatttcccctgatctccactctgaaaaaagctctcggcctgcagtcagccagttgcaccgccccagctcagcccatcgaacccatcactgcagctccaagcggatctggaaatgggtcaggaagcagctctagtggaggatccagtgggggtagcgggttttgcgccgttagggctaacggcctctatcctgtggcgaacaatagaaatgcattctggcactgtgtgaacggcgttacatatcagcaaaattgccaggcaggtctcgtttttgacacatcctgtgactgctgcaactgggcatag

SEQ ID NO: 111933 - DNA, 948 bp, synthetic construct
  misc_feature 1..948: note = Description of Artificial Sequence: Synthetic coding sequence
  source 1..948: mol_type = other DNA
atgcgcgaggccttcgagcaggaagcaaaacagataaacaagccacggctcatggtgaccgccgctgtcgcagccggcatctctaatattcaaagtgggtatgagatacctcagttaagccaataccttgactacatccacgtgatgacatacgatctccacggcagctgggagggctacaccggagaaaattctcctctatataagtaccccacggataccggctctaatgcttatctcaacgtagactacgtcatgaattactggaaagataatggcgcgcctgctgaaaagctcattgtgggctttccgacatatggacacaacttcattctgtcgaatccctccaatacaggcattggggctcctacatcaggtgccggtccagcgggtccttacgccaaagaatctggcatctgggcgtactatgaaatttgcacctttcttaagaacggagctactcagggatgggacgccccccaggaagtgccctacgcctatcagggtaacgtctgggtgggatatgataatatcaagtcattcgatataaaggctcagtggttgaaacataacaaatttggcggggcgatggtttgggcgatagacctcgatgattttaccggaacattttgtaaccagggcaagttccctctgatttcgaccttgaagaaggctctggggcttcaaagcgccagttgcaccgcaccagcacagcccatcgaaccgatcactgccgcccctagcgggtcagggaatggctcaggctcctcctcttcaggaggctcatcgggtggctctggattttgcgcagtgagggccaacgggctgtatccggtcgctaataaccgcaacgcattctggcattgcgtgaacggggtgacgtaccagcaaaattgccaggcgggattggtgttcgatacctcatgcgactgttgtaactgggcctag

SEQ ID NO: 111934 - DNA, 864 bp, synthetic construct
  misc_feature 1..864: note = Description of Artificial Sequence: Synthetic coding sequence
  source 1..864: mol_type = other DNA
atgagagaagcgtttgaacaggaggcaaagcagataaataagccccgtctcatggtcactgcagccgtggctgctggaatctccaacatacaatcaggttatgaaataccccagctttcacaatatctcgactatatccacgtgatgacatacgatcttcatggatcttgggaaggctacaccggggaaaacagtcccctgtacaagtacccaacggacacgggcagcaatgcctacctcaacgtggactatgtgatgaattactggaaagataatggagctcccgccgagaagctcatcgtgggttttcctacatatggccataatttcatcctcagtaacccaagcaatactggaattggagctccaaccagcggggcgggaccggccggcccctatgccaaggagtccggaatttgggcgtattatgagatatgcacattcctcaagaatggagcaacacagggctgggatgcccctcaggaagtaccatacgcttaccagggcaacgtatgggtaggctacgataacatcaagtcatttgatattaaggcccagtggctcaagcataacaaatttggcggggccatggtttgggccatcgatctggacgactttacaggaaccttttgcaatcaggggaagtttccactcattagcacgctgaagaaggcactgggactacagtcggcctcctgtacggcgcccgcacagccaattgagcccatcaccgcagcgcctagcgggtccggtaacggctccggaagttcctctagcggtgggtcttccggaggatcaggattctgtgccgtcagagcgaatgggttatatcccgtcgctaataaccgcaatgctttctggtag

SEQ ID NO: 111935 - DNA, 1158 bp, synthetic construct
  misc_feature 1..1158: note = Description of Artificial Sequence: Synthetic coding sequence
  source 1..1158: mol_type = other DNA
atgtccagaccgcaactgcgccggtggcgcttagtctcatcaccacctagtggcgtgccagggctcgctttgctcgcactgctggctctgctcgctcttcgtcttgctgctggtaccgactgtccttgtcctgagccagaactgtgtcggccaattaggcatcatccagattttgaagtcttcgtgtttgatgtcggccagaagacctggaagtcatacgactggtctcaaatcacaaccgtagcaacatttgggaagtatgattctgagctaatgtgttatgctcacagtaagggcgccagagtcgtcctgaaaggggatgtatctcttaaggacataatcgatcctgcatttagggccagctggattgctcagaagttaaatctcgctaaaactcaatacatggatggcattaacattgacatcgaacaggaggtgaattgcctttctccagagtacgatgccctgactgcgctggtcaaagagactactgacagcttccatcgcgagattgaaggttcccaggtgacattcgatgtggcatggtcgcccaagaatatcgaccgacgctgttacaactacacagggatagccgatgcttgtgatttcctgtttgtgatgagttatgatgagcagtcacagatctggtcagagtgtatcgccgccgccaatgccccatacaaccagaccctgacaggatataatgattacatcaagatgagcattaaccctaagaagctggttatgggagtcccctggtatggctacgattatacctgtctcaatcttagcgaggatcacgtgtgcaccattgcgaaggtcccgtttagaggcgccccctgttctgacgctgccgggcggcaggtgccatataagacaataatgaaacagatcaattcgtcaatcagtggaaatctgtgggacaaagaccagagggcgccttattacaattacaaggaccccgcaggccatttccaccaagtgtggtacgacaaccctcagtcaatcagccttaaagcgacatacatacagaattaccggctgagagggatcgggatgtggaatgctaactgcctggactattccggagatgccgttgccaaacaacagaccgaggagatgtgggaagttctgaaacccaaactgttgcagcggtag

SEQ ID NO: 111936 - DNA, 2967 bp, synthetic construct
  misc_feature 1..2967: note = Description of Artificial Sequence: Synthetic coding sequence
  source 1..2967: mol_type = other DNA
atggaacagtcccgctcccagcaacgcggcggcgaacagtcatggtggggatcagatccgcagtaccagtacatgccttttgaacattgtaccagttatggcctgccaagcgaaaatggtggattacaacatagattacgaaaagacgcggggccccggcacaacgtacatcccactcagatttacggccaccacaaagagcaattttctgatagagagcaggatattggcatgcctaaaaaaacgggcagttcaagcactgtggactctaaggacgaagaccactacagcaaatgtcaggactgcatccatagactggggcaggttgtgcggcgcaagctgggagaagacgggatatttctggtgctgctaggcttgctgatggccttggtttcttggtccatggattacgtgagtgctaagtccttacaggcatacaaatggtcatatgcccagatgcaaccttcattaccactgcagtttctggtgtgggtgacatttcccctggtactgatacttttcagtgcattgttctgtcacctcattagcccccaggccgtgggcagcggcattcccgagatgaagacgatcctgagaggagtcgtcttgaaggagtacttaactatgaaagccttcgtggctaaggtggtggccctgactgccggattgggttctggcattcccgtcggcaaggagggccctttcgtccatattgcctctatatgtgccgcggtgctttctaaattcatgagcgtattctgcggggtttacgagcagccttattattattctgatattctgaccgtaggatgtgccgtcggggtcggctgttgtttcggcacacctctgggtggagtcctgttctcaattgaagtaacatctacatatttcgccgtcagaaattattggaggggttttttcgccgcgacgttttccgcattcgtctttcgtgtcctggccgtgtggaacaaggatgcagtgacgatcaccgcactgttccgaacaaatttcagaatggacttccctttcgacctgaaggaactgcccgcctttgctgccattggaatatgctgtggtcttctgggggcagttttcgtgtacctgcaccgccaagtcatgctcggagtgaggaagcacaaagctttgtcacaattcctggccaagcacagactgctgtaccctggcatagtcacctttgtgatcgcaagctttacttttccgccaggaatgggacagttcatggccggtgaactaatgccaagagaggctatctctacactgttcgataacaatacctgggtgaagcatgccggtgacccggagtcccttggccaaagcgccgtttggatccacccaagagttaacgtagtgatcattattttcctcttcttcgtgatgaagttctggatgtcaatcgtggccaccactatgccaattccatgtggcggatttatgccagttttcgttcttggtgccgcatttggccgcctggtaggagagatcatggctatgctgtttccagacgggatcctgtttgacgatataatatacaaaatcctcccgggcgggtatgccgtgatcggcgccgctgcactgactggcgcggtatcacatacagttagcacagcggttatttgcttcgagctgactggtcagatcgctcatattctgcccatgatggtggcggttatactggctaatatggtcgcacagtcccttcaaccatcactttatgacagcataatccaggtgaagaagctgccatacctgccagatctcggatggaatcagctgagcaaatataccatttttgtcgaggacattatggtccgcgacgtgaaattcgtgtccgctagttatacatacggagaattacggactttgctgcagaccacaaccgttaagacactgccgctggtggattctaaagatagcatgatactcctcggatcagtcgagagatctgaactccaggccctcctgcagcggcatctgtgtcctgaacggaggctgagagctgcccaagagatggcaagaaaactctcagagttaccttacgacggtaaggctagactcgcaggcgaagggctgccgggcgctcccccagggaggcctgagagtttcgcatttgtggatgaggatgaggatgaagatctgtcaggaaagtctgagttaccaccttctctggccctgcatccttcaacgaccgcgcctcttagccctgaggagcctaatggccctctgcccggtcacaagcagcagcctgaggctccagaaccagcgggtcaacgtcccagtatcttccagtccctcctgcattgtctcctaggccgggcccggcccactaagaagaaaactactcaagattccaccgatttggtagataatatgagccccgaggagatcgaggcctgggagcaggagcagcttagtcagccagtgtgctttgacagctgctgtattgatcagtcccctttccaattggttgaacagaccacactgcacaaaacccatactctcttcagtttattgggtctacatcttgcttacgtgacaagcatggggaaattgaggggggtcctggctctcgaggaactgcagaaggctatcgagggccacactaaatccggcgttcaactgcgacccccgctggcctcgttccggaatacaacttccaccaggaagtcgaccggggcaccgcccagtagtgccgaaaactggaaccttcctgaggaccgcccaggcgcgactggaacaggcgacgtgatcgctgcaagtcccgagaccccagtcccttcaccctcacccgagccacctctgtcattagcccccggcaaggtcgaaggagagctggaggaactcgagctggtggagagtcctgggctggaagaagaactggcggacattctgcagggaccgtcactccgtagcactgatgaagaagacgaggacgagctgattctctag

SEQ ID NO: 111937 - DNA, 2697 bp, synthetic construct
  misc_feature 1..2697: note = Description of Artificial Sequence: Synthetic coding sequence
  source 1..2697: mol_type = other DNA
atggcggcagccgctgcagaagagggcatggagcccagagctctccagtacgagcaaactctgatgtatgggcggtacacccaggatcttggcgcttttgctaaggaagaggccgctcgcattcgtttgggtggccctgaaccgtggaaaggtccaccgtcaagccgcgccgcaccggagctcctggagtatggccggagccggtgtgcgagatgcagagtctgctctgttagatgtcacaaatttttggtcagtcgcgtcggcgaggattggatattcctcgtgctcctgggcctcctcatggccctggtgagttgggtgatggattatgcgattgcagcttgtcttcaggcccaacaatggatgtctagaggcctgaataccagcatcttattgcagtacctcgcctgggtgacttacccagtggtgctgatcacattttccgccggctttactcagattctcgcacctcaggctgtgggtagtggcatcccagaaatgaaaaccatactcaggggagtcgtgctgaaggaatatttgacgctcaaaaccttcatcgccaaagtcatagggcttacctgcgcgctcgggagcggcatgccactcgggaaggagggaccctttgtgcatattgcgagcatgtgcgctgccctgttgtccaaattcctctccctctttggaggcatttatgagaatgaaagtcggaacactgaaatgttagctgccgcctgtgcagtaggagtggggtgttgtttcgccgcacctattgggggagtgctcttctcaatcgaggtcactagtacatttttcgcagtgcggaattattggcgtggcttcttcgcagccaccttctccgcttttatattccgcgtgctagccgtgtggaatagggacgaggagaccatcactgccctcttcaagacaagattccgccttgatttcccttttgacctgcaggaacttcccgcttttgccgtcatcggcattgcctctggctttggcggtgccctgttcgtgtaccttaatagaaagattgttcaggtcatgagaaagcagaagaccatcaaccggtttttgatgcggaagcggctgctgttccccgccctcgtcaccctgttgattagtacactcacctttccgccagggtttggccagttcatggcgggccagctgagtcagaaggaaacgctcgttaccctcttcgacaatcgaacgtgggtgcggcagggacttgtggaggaactggaaccaccttcaactagccaggcctggaatccgcctcgcgccaatgtgttccttacactcgtaatttttatcctaatgaaattctggatgtccgctttggccacaactattcccgtcccatgcggtgcctttatgcccgtgtttgttattggcgccgctttcgggcgactggtcggcgaatcaatggccgcttggttccctgacggtattcacacggatagcagcacctatcgcatcgtccctggcggctacgccgtggtgggcgcagctgccctggccggcgctgtcacacacacagtgagtacagcagtgatcgtcttcgagctcactggtcagattgctcatatcctgcccgtgatgatagcagtcatccttgcaaacgcagtcgcacagtccctgcaaccgtcactttacgactccatcatcaggataaagaaattgccttatctcccggagttggggtggggacgccaccaacagtacagggtcagagtggaagacattatggtaagggacgtcccccatgttgctctttcctgtactttccgggacctcaggctggcactccaccgaacaaagggacgtatgctggccttagtcgagtctccggagtctatgattctcttagggtctatcgagcgatctcaggtggtagcactactgggagcccagcttagcccggccaggcgtcggcagcatatgcaggaacggcgcgccacacagactagtccactgagcgaccaggagggaccccccacccccgaagcgtctgtctgctttcaggtgaacacagaagacagcgcattcccggccgcccgcggggagactcacaagccccttaaaccagccttaaaacgtggcccttctgtgacgaggaatctgggcgagtcccccaccggaagtgctgagagcgctgggatcgccctgcgctctttgttctgtggttcacccccaccagaggctgccagcgaaaagctggaatcatgtgaaaagcggaaattaaaacgggtcagaatttctctcgctagtgatgcggatctggaaggggaaatgtcaccggaggaaattttggaatgggaggaacaacagcttgacgagcctgtcaacttctctgactgtaagattgatccagctccttttcagcttgtagagcggacttctcttcataagacgcacactattttctcattgctcggtgtcgatcacgcctatgtgacctctattggccgcctcatcggtattgtaactctcaaggagttaaggaaagcaatcgagggatctgtgaccgcccaaggggttaaagtcaggcctccgttagcctccttcagggattctgccacctcgagttcggacacggagactacagaagtgcacgccttgtgggggcctcattcacgtcacggactgcctagagaaggatcaccgtctgactctgacgacaagtgccagtag

SEQ ID NO: 111938 - DNA, 381 bp, synthetic construct
  misc_feature 1..381: note = Description of Artificial Sequence: Synthetic coding sequence
  source 1..381: mol_type = other DNA
atgagaaaacgcttgctgttccccgcccttgtgaccttgctgatatctacattgactttccctcctggattcggccagtttatggccgggcagttgagtcagaaagaaactctcgtaacactcttcgacaaccgaacgtgggtccgccagggcctggtagaagagctggagccaccatccacatcgcaggcgtggaaccctccaagagccaacgtgttcttgaccctggtcatcttcattctgatgaaacatttgggcgtttggtgggtaaaggcttggcttcctgggtcgcagatggagtttattaggacagccgcgccaaccggattgtgtctgggggccaccttgtggtctggacaattgcggtggcaggagcgctag

SEQ ID NO: 111939 - DNA, 2601 bp, synthetic construct
  misc_feature 1..2601: note = Description of Artificial Sequence: Synthetic coding sequence
  source 1..2601: mol_type = other DNA
atggaaagcgagcaactcttccaccggggatattacaggaattcctacaattccattacatccgcatccagcgatgaggaactgttagatggcgccggcgtgatcatggactttcagactagtgaagacgacaatctcctggatggggatacggccgtcggcactcactacaccatgactaatggcgggagtatcaattcatcaacccatctgcttgatctcttggacgagcctatccccggagtagggacctacgacgacttccacactattgactgggtgcgggagaaatgcaaggatcgagagcgccataggcgtatcaacagcaagaagaaggaatctgcttgggagatgaccaaaagtttgtacgacgcctggtccggctggctggttgtcaccctgacagggctcgcctcgggggctctggcggggcttattgatattgcagctgattggatgacagacctgaaagagggcatatgtctgtctgccttatggtacaatcacgaacagtgctgctggggatctaatgagactaccttcgaagaacgcgacaagtgtccacaatggaaaacatgggctgaactgataatcggacaggcagagggcccggggtcatacataatgaattacataatgtacatcttttgggctttgtcgtttgcttttttggccgtttcactggtgaaggttttcgccccttacgcctgcggcagcggcatccccgagatcaagactattctatcggggtttatcatcagaggatatctcggcaagtggacactgatgatcaaaaccattacgctcgtgctagccgtggccagtggactgagtctggggaaggaaggacccctagtccacgtggcgtgctgctgcggcaatattttcagttatttgtttcccaaatattccacaaatgaagccaaaaaacgggaagtgttaagcgctgccagcgcggcgggggtttctgtcgctttcggagcccctatcggtggtgtccttttttctttggaagaggtctcctactattttcccttgaagactctgtggagatccttcttcgccgcgctggtcgccgcctttgttctgcgatccataaatccattcggaaactccagactcgtcctgttttacgtggagtatcacacaccgtggtacttgttcgagctgttcccattcattctgctgggcgtttttgggggactctggggcgccttcttcatcagagcaaacatcgcctggtgtaggaggaggaaaagcaccaagttcgggaaatacccggtcctagaggttattattgtggccgccatcactgccgtgatagcatttcccaacccctacactagactgaataccagtgaactgattaaggagctatttactgattgtggccctctagagtcctcctcattgtgcgactatcggaacgacatgaatgctagcaagatcgtcgatgatattcccgacagaccagctggaattggcgtgtacagcgcaatttggcagctgtgtctggctcttatctttaagataatcatgactgtgttcacattcggcatcaaggtgccgtccgggctttttatcccttccatggccattggtgctatagcaggaaggattgtcggaatcgcggtggaacaactggcctactaccaccatgattggtttatattcaaagagtggtgtgaagtgggcgccgattgcattacccctggtctgtacgcaatggtgggagccgccgcttgtttgggaggagttacgcggatgaccgtgtctctggtcgtcatcgtcttcgaattgaccggcggtctggagtacatcgtccccctaatggctgctgtgatgacttccaagtgggtgggcgacgccttcggtcgcgagggaatttatgaggcccacatccgcctcaatggctatcccttcctggacgcgaaggaggagttcacccatactaccctcgcggcagacgtgatgaggcctcgccgcaacgacccaccactggcagtgctgacccaggacaatatgaccgtcgacgacatcgagaacatgatcaacgaaacgagctacaatggtttcccagttataatgtccaaggagtctcaacgactggtaggctttgcccttcgcagggatctgactatcgccatagaatctgcgcgcaagaaacaggagggaatagttgggagttcccgtgtctgtttcgcccagcataccccttcgcttccagccgaaagtccacggcctttgaagcttaggagcattctcgatatgtcccctttcaccgtcaccgaccatacccctatggaaatcgtggtcgacatttttcgaaaacttgggctgaggcagtgtttggtcacacacaatggcatcgtgctgggcatcatcacaaagaagaacatcctggagcacctcgaacagttaaaacagcacgtggagcctcttgctcctccatggcactataacaagaaaaggtatcctcctgcgtacggacccgatgggaaacctcgcccacgctttaataacgtccagttaaacctgacagacgaagagagggaggaaaccgaagaggaagtgtacctgctcaattcaactaccctctag

SEQ ID NO: 111940 - DNA, 2376 bp, synthetic construct
  misc_feature 1..2376: note = Description of Artificial Sequence: Synthetic coding sequence
  source 1..2376: mol_type = other DNA
atggagagcgaacagttatttcatcggggatattataggaactcgtacaatagcatcacctcagcttcgagtgacgaagaacttctggacggagcaggggtgatcatggattttcagaccagcgaagatgacaacttactggacggggacacggccgtaggtacccactacactatgactaatgggggaagtatcaatagtagtacccatttgttggatttgttggacgagcccataccgggagtcgggacgtatgatgacttccacacaattgactgggtcagagaaaaatgcaaggatcgagagaggcaccggcgcatcaactctaagaaaaaggagtctgcctgggaaatgacaaagtctctttatgatgcttggtctgggtggctcgtggtcacgctgactgggctcgccagcggcgctttagcgggcctaatagacattgcggcagattggatgactgacctgaaagaggggatctgcctgagtgcactgtggtacaaccacgagcaatgctgttggggttcaaatgagaccacctttgaggagagagataaatgcccacagtggaagacgtgggcggagctgataatagggcaggctgagggccctggctcatacataatgaactatataatgtacattttttgggcgctcagttttgcgttcctcgccgtaagcctggtcaaggtgtttgccccttatgcttgtggaagtgggattccagaaatcaagaccattctttccggctttatcatccgtggctatctgggtaagtggaccttgatgatcaagacaatcacccttgtgttggcggtcgccagtggtctctccttgggcaaggagggtccgctcgttcacgttgcttgttgttgtggcaacatattctcttatttatttcccaaatacagcacgaatgaggcaaaaaagcgggaagtcagctactatttccccctgaagacactgtggcgctcctttttcgcagcacttgttgcagcctttgtgttgaggtccatcaatcctttcggaaattccaggctcgtcctgttctacgtggaatatcacacaccttggtatcttttcgagcttttccctttcattctcttgggggtgttcggggggctctggggagcattttttatcagggccaatattgcatggtgccgacggcgtaaaagcactaaatttggtaagtaccccgtcttggaggtaattatcgtggcagctatcacagcagtaattgcgttcccgaacccttatacacggttaaacacttcagaactcatcaaagaactcttcaccgattgcgggcccctcgagtctagttctctctgcgattacagaaacgatatgaatgcaagcaagatcgtggacgacattcccgatcggcctgccggtatcggtgtttattccgccatttggcaactctgccttgccctcatctttaagatcatcatgacagtgttcacgttcggcatcaaagttccgtctggcctcttcattccaagcatggcgattggggccatagccggacgaattgtcggcatcgccgtagaacaactggcgtattatcaccacgattggttcatcttcaaagaatggtgtgaagttggagcggactgtattactccaggcctgtatgcaatggtgggcgcagccgcatgtttaggcggtgtgacacgaatgaccgtgtctttggtggttatcgtgttcgaactgactgggggattagaatacatagtgccattgatggcagccgtaatgacctctaagtgggtgggagacgcattcggccgggaggggatctacgaggctcatatcaggcttaacggatatccatttctggatgcaaaagaggaattcacacatacaaccctcgccgctgacgtgatgaggccacgccgtaacgatccgcctctggcagtactgacccaggacaacatgactgtggatgatatagaaaacatgattaacgagaccagctacaatggcttccccgtgattatgtccaaggaaagtcagcgacttgtggggttcgcgctgcgccgcgacttaacgatcgccatagagtcggctcggaaaaaacaggaaggcatagttggctcctcaagagtctgcttcgcccaacacacaccgagcctgcctgcagagagccccagacccctcaagcttaggtctattctcgacatgagcccctttacagtcacagaccacacacccatggagattgtcgtcgacatttttcggaaactggggctccggcagtgtctcgtgacccataatggtagactacttggcataataactaaaaaggatattcttcgtcacatggcacagaccgccaatcaagaccctgcaagcataatgtttaattag

SEQ ID NO: 111941 - DNA, 2406 bp, synthetic construct
  misc_feature 1..2406: note = Description of Artificial Sequence: Synthetic coding sequence
  source 1..2406: mol_type = other DNA
atggtgaccctgcaactgggggaaagtcactacgtcgtccaggcgggacttcagttactcggctcgtccaatccacccgcactcgcttcacaggtggcggaaatcactggcacccactacaccatgactaacggggggagtatcaactcatcgacacatttactggatcttctcgatgaaccgatacccggggtaggaacctatgacgacttccacacaattgactgggtgagagagaagtgcaaagatagggagcgccataggcggattaattccaagaagaaggaatctgcttgggagatgaccaagtcgctctatgacgcatggtctggatggttggtggtgacactcaccgggctcgcatccggagccctggctggtctgattgacatcgcggcggactggatgacagacttgaaggaggggatttgcctaagtgccctgtggtacaatcatgagcagtgctgttgggggtccaacgagacaactttcgaagaacgggataaatgtccccagtggaaaacatgggccgagttaataataggccaggctgaaggaccgggctcttacattatgaactacataatgtacatcttctgggcgttgtcattcgccttcttggcagtcagcctggtaaaagtttttgccccttatgcctgtgggagtgggatccccgagattaagacaattctcagcgggttcatcataaggggataccttggcaaatggaccttaatgatcaaaacaataacattggtcctggctgtagcatcagggttgagcctgggcaaagagggtccactcgtgcacgtggcttgctgctgcggcaatatcttctcctacttattccccaagtattccactaatgaagcaaaaaagagagaggtgctgagcgccgcatctgctgccggcgtcagtgtggcatttggcgctcctatagggggagttctcttctcattggaggaggtgtcttattattttccactgaagacgctttggcgcagcttctttgcagctctggttgcagcctttgttctgcgctctatcaaccccttcggcaatagccggctagttttgttctacgtggagtaccatactccctggtatctctttgaactcttcccctttatccttctcggggtcttcgggggcctctggggggccttcttcatacgtgctaatattgcatggtgtcgcaggcggaagtccacaaaatttgggaagtacccggtgctggaagtaatcatcgttgctgcgataacagccgttatcgccttcccaaacccttacacccggttgaacacatctgagttaatcaaagagcttttcacggattgcggacccctggagtctagctctctatgtgactaccgcaatgacatgaacgcttctaagatagttgatgatattcctgacaggcctgccggtatcggggtgtattctgctatttggcaactgtgtctggccctgatcttcaagataatcatgactgtgttcacatttggcataaaggtcccctcagggttgtttatcccctccatggctattggggccattgctgggcggatcgtcggaatcgccgtcgagcagctcgcttactaccatcatgattggttcatcttcaaagaatggtgtgaggtgggggctgattgcatcacacctggtctctatgctatggttggagctgctgcctgcctagggggggtaacgagaatgactgtgagtctggtcgtgatagtgttcgaacttacgggtggcctggaatatattgtgcccttgatggcagctgtcatgacatctaagtgggtgggagacgcattcggacgtgagggtatttatgaagcacacattagactgaacgggtacccgtttttggacgcaaaggaggaattcactcacaccacactggcagcagacgtgatgaggcccaggcgcaatgaccctccactcgcagtgcttacgcaggataacatgaccgtagacgatatcgagaatatgataaatgaaacaagctataacggatttcctgttattatgagcaaagaatcccaacggctcgtgggattcgctcttcgccgtgacctgacaatagcaattgagtcggcccgaaaaaaacaggagggtatagttggatcctcccgggtgtgttttgcacaacatacaccttcactgcccgcagagtccccgcgtcctttgaagctgagatctatcctggacatgagtcccttcaccgtgactgaccatactccgatggaaattgttgtcgatatctttaggaaactgggcctgcgacagtgtctggttacccataatgggagactcctggggatcatcactaaaaaagatatactccggcatatggctcaaactgcgaaccaggaccccgccagcataatgttcaattag

SEQ ID NO: 111942 - DNA, 522 bp, synthetic construct
  misc_feature 1..522: note = Description of Artificial Sequence: Synthetic coding sequence
  source 1..522: mol_type = other DNA
atggaatccgaacagttatttcatcgtggatattaccgcaactcatataactccataacctctgcctccagcgacgaagagctgcttgacggggccggggtcataatggacttccagactagtgaggatgacaatttgctggacggcgatacagccgtgggaacccactacactatgacgaacggaggttcaattaacagctcaacacatcttttggatctcctggacgagccaatcccaggcgttggcacgtacgatgacttccatacaatcgattgggttcgcgagaagtgtaaggatagggagaggcaccgcagaatcaatagcaaaaaaaaggagtctgcgtgggaaatgacgaagagtctgtatgacgcatggtccggctggctcgtggtgaccctcactggacttgcctcaggagctctggccggcttgattgacattgctgccgactggatgaccgatctaaaggaggggatttgcttatccgctttgtggtacaatcacgaacagtgctgctag

SEQ ID NO: 111943 - DNA, 420 bp, synthetic construct
  misc_feature 1..420: note = Description of Artificial Sequence: Synthetic coding sequence
  source 1..420: mol_type = other DNA
atggaaagtgagcagctgttccacagagggtattatcggaacagctacaattcgattactagtgcctctagtgatgaagagctccttgacggagctggggtgattatggacttccagacctccgaggacgacaacctgctggacggcgacactgccgtggggacacattatactatgaccaatggcggaagcataaacagctcaactcatctgcttgacttactcgacgagcctatcccaggagtgggtacttacgacgatttccacacgattgactgggttcgcgaaaagtgcaaggaccgcgagaggcacaggcgaatcaattccaaaaagaaggagtctgcttgggaaatgaccaagagcctgtacgatgcatggtcaggttggcttgtggttacactgactgggttggccagttag

SEQ ID NO: 111944 - DNA, 2457 bp, synthetic construct
  misc_feature 1..2457: note = Description of Artificial Sequence: Synthetic coding sequence
  source 1..2457: mol_type = other DNA
atggagtcggaacagttgttccaccgcggctactatcggaattcatataacagtattaccagtgcctctagtgatgaagagctgctggatggagccggcgtgatcatggatttccagacaagcgaggatgataacctacttgacggcgatacagctgtgggtacccattacactatgacgaacggcgggtccatcaactcttccacccacctccttgatctgctggatgagccgatccccggcgtgggtacatatgatgactttcacacaattgactgggtcagggagaaatgcaaagatagggagaggcacaggcggatcaatagcaagaagaaagagagtgcctgggagatgaccaagagcctgtatgacgcctggagcggatggctcgtggttactctaaccggcctggcctcgggcgcattggccgggctgatcgatattgccgccgattggatgaccgacctgaaggagggtatctgtttatccgcgctgtggtacaaccatgaacagtgctgctgggggagcaacgaaaccaccttcgaggagagagataagtgtccacagtggaagacctgggcagagctcatcatcggccaagcggaaggacctggttcgtacatcatgaattacattatgtatatattctgggctctttctttcgcttttcttgcggtgagcctcgttaaagtatttgccccatatgcgtgcggctcgggaattcccgagatcaagaccattctttcaggctttattatcagggggtacctcgggaagtggaccctcatgatcaagacaattaccctggtactcgccgtcgctagcgggctgtctcttggcaaggagggacctctggttcatgtggcatgctgttgtggaaacatcttttcctatctatttccaaaatacagcaccaatgaagccaagaagcgggaagtcttgagcgcggcttcagctgccggggtgtcagtagcctttggcgcgcccattggaggagtactttttagcctggaagaggtcagttactatttccctctgaaaactctctggcggtctttctttgcggccctggtagcggccttcgtgcttcgctccataaatcctttcgggaacagcagacttgtgcttttctacgtggagtaccacactccctggtatttgtttgagttatttccttttatcctgttgggagtgttcggtggactatggggggcattctttattcgggctaatattgcttggtgtaggcgacggaaatcaaccaaattcggtaagtatcccgtactcgaagtaattatcgttgcagcgataacagcagtgatcgccttccctaacccttatacccgtttaaataccagcgaactcatcaaagagctatttacggactgcgggcccctcgaatcctctagcttgtgcgactatcgaaacgatatgaacgcgagcaagatagttgacgacattcctgaccgccccgctgggattggcgtttattccgcgatctggcagctgtgcttagctctgatcttcaaaatcatcatgacggtcttcactttcggcataaaggttccctcaggtctcttcattcctagcatggcaatcggggctattgccggaagaatagtgggcattgcagtggaacagctggcttactatcaccacgattggtttatctttaaggagtggtgtgaagttggcgcagattgtattacccctggactgtatgccatggtgggcgccgccgcatgtctcggaggagtgacgagaatgaccgtatccctggtcgtgatagtttttgagctgaccggcgggctggagtatatcgtgccccttatggctgctgtgatgactagcaaatgggttggggatgcttttggaagagagggcatctatgaagctcacatacggctgaatggctacccatttctggacgccaaggaagagtttacccacaccaccctggccgcggatgtgatgaggccaaggaggaacgacccccctctggccgtcttgactcaggataatatgacagttgacgatatcgaaaacatgattaacgaaaccagttacaacggatttccagttatcatgtctaaggaatctcagagattagtcgggtttgccctgagacgcgacttgacgattgctattgaatccgcaagaaagaaacaggagggaatagtgggatctagccgcgtgtgcttcgcacagcataccccgagcttgcctgccgaatcaccccgccccctgaagctgagatctattctcgacatgtcgccattcaccgttaccgaccacacccctatggaaattgttgtcgatatctttcggaagctggggctgagacagtgtttggtcactcacaacggacggttgttagggatcatcaccaagaaggatatactgaggcatatggcccagactgccaaccaggaccctgcttccattatgtttaactag

SEQ ID NO: 111945 - DNA, 576 bp, synthetic construct
  misc_feature 1..576: note = Description of Artificial Sequence: Synthetic coding sequence
  source 1..576: mol_type = other DNA
atggagtccgagcagctgttccaccggggctattaccgcaatagttacaatagtattaccagtgccagttcagacgaagaacttcttgacggtgcaggtgtgatcatggactttcagacctctgaggacgacaacttgctcgatggcgatactgctgtaggcactcactacacaatgactaacggaggaagcatcaactcaagcacccacttgttggacttgctggatgagccaatcccgggggttggcacctatgacgacttccacacaatagattgggtgcgcgagaaatgcaaggacagagagcgccacaggcgtataaactcaaagaaaaaggaatctgcatgggaaatgaccaagagcctttacgatgcttggtcgggctggttggttgttacactgacgggactcgcttccggagcgcttgccgggctcatagatatcgccgccgattggatgactgatctcaaggaagggatttgccttagcgccctgtggtacaaccacgaacaatgttgctgggggtcaaacgaaaccacattcgaaaaaaagaagaaaaaaaaaaaaaaagcatag

SEQ ID NO: 111946 - DNA, 2190 bp, synthetic construct
  misc_feature 1..2190: note = Description of Artificial Sequence: Synthetic coding sequence
  source 1..2190: mol_type = other DNA
atggtcaacgcaggagcgatgagcggatctggaaacctgatggacttcctcgacgaaccttttcctgacgtgggcacatatgaggacttccataccatcgactggcttcgggaaaagagccgggataccgaccgacatcggaagatcacttcaaaatcaaaggagtccatctgggagttcattaagtcgctgttggacgcctggtccgggtgggtagtgatgctgcttatcggattactggcggggactttggccggggtgatcgacctagccgtggactggatgacagatctgaaggaaggggtatgcctgtccgcattttggtacagccacgaacagtgctgttggacatcaaatgagacaactttcgaggatcgagacaagtgtcctctctggcaaaagtggtctgaattgttggttaaccagtcagagggcgcctctgcttacatactgaactatctgatgtatatcttatgggccctgctctttgcgttcctagcagtctcactcgtccgggtatttgcaccatacgcttgtggatctggaatccccgagatcaagaccattctctccggcttcatcattcgtggctacctgggcaagtggactctacttataaagaccgttacgctggttttggtggtgtcaagcggattatccttagggaaggaaggcccactggtgcacgtcgcctgttgctgtgggaacttctttagcagcctgtttagcaagtactcaaagaacgaaggtaagcgcagggaggtcttgtcagccgcggcagctgccggcgttagtgttgcatttggcgccccaatcggcggagtgcttttctcccttgaagaggtctcatattactttccattaaaaaccctgtggcgctcttttttcgcggcacttgtggcggcattcacgttgcgctcaatcaatcccttcggcaatagtcgtttggtgttgttttacgtggaatatcataccccatggcgtagaaagaccacaaggctgggtaaatatcctgtattggaggtcatcgtagttactgccatcacagccatcattgcgtatcccaacccttatacgagacagtctaccagcgagctgatcagcgagttgtttaacgattgtggagcccttgagagctcccagctttgcgactacattaacgaccccaatatgaccagacccgtggatgatatcccagacaggcccgctggggtgggcgtttacacagccatgtggcagctggccctggccctgatattcaaaattgtggtgactatttttaccttcggaatgaaaattcccagcgggctgtttatcccatccatggccgtgggtgctattgccgggcgaatggtggggattggcgtggagcagctggcctaccatcatcatgactggataatctttcgcaactggtgtcgtcccggtgctgactgcgtgacgcctggactttatgcaatggtcggtgctgccgcgtgtttaggcggcgttaccaggatgacagtctccctcgtggtgattatgttcgaactgactggaggcctcgagtatattgtgcctctgatggctgctgcagtgacgagcaaatgggtcgccgatgccttcggaaaagaaggaatttacgaagctcatatacacctcaatggctacccatttttagatgtgaaagatgagttcacgcataggacactggctaccgatgtgatgcgaccccggcgtggcgagcctccgttatcggtcctgacccaagacagcatgacggtggaggatgtcgagactcttattaaggagacggactataatggatttccggtcgtagtgagccgggattctgagcgcctgatcgggttcgcgcagcggagggagctgattcttgctattaaaaacgctaggcagcgtcaagagggtatagtctctaattccataatgtattttaccgaagagcctcccgagctgcctgctaattctcctcacccgttgaagttgcggcgcatccttaacctgtctcctttcacagttactgaccacacacctatggaaactgtggtcgacatttttaggaagctcggcctgaggcagtgccttgtgacacgatctgggcgactgctggggatcataactaagaaagacgtgttgagacatatggcccagatggcgaatcaggaccccgagtccataatgtttaactag

SEQ ID NO: 111947 - DNA, 2283 bp, synthetic construct
  misc_feature 1..2283: note = Description of Artificial Sequence: Synthetic coding sequence
  source 1..2283: mol_type = other DNA
atggtgaacgcgggcgccatgtcgggatctggcaatctgatggactttctcgatgaacctttccctgatgttgggacctacgaggacttccacacaatcgactggcttcgcgaaaaatccagggataccgaccggcatcgcaagatcacttcaaagagcaaagagagcatttgggaatttataaagagcctgcttgacgcgtggagcggatgggtagtcatgcttctcatcggcctcctcgctggaacattagccggagtgatcgatctggctgtggattggatgactgatctcaaggaaggagtatgcttatctgcattttggtatagtcacgaacagtgttgttggacgtctaatgagaccacctttgaagatagggacaaatgcccactttggcagaagtggagcgaacttctggtaaatcagtccgagggggccagtgcctacattttgaactatctcatgtatatcttgtgggctttactgtttgctttcctcgccgtgagtttagtaagagtgttcgccccttacgcatgtgggagcgggattcccgagatcaaaactatcctgtctggtttcattatcaggggttacctaggaaagtggaccctgctcatcaagaccgtgacactggtacttgtcgtgagcagcggtctctccctagggaaagagggacctctggtccacgtggcctgctgctgcggaaattttttctcaagtcttttctcgaaatactcaaaaaatgaggggaagcggcgtgaagtactttctgccgctgcagctgccggtgtttccgtcgcttttggggcccccatcggcggcgttctgtttagtctcgaagaggtcagctactactttccactgaagactctatggcggtctttctttgctgcattggtcgctgcattcaccctcaggagcatcaacccatttgggaattcccgcttggtgcttttctatgtggaatatcacactccatggtacatggcagagcttttcccattcatcctactgggtgtgttcgggggcctgtggggcacgcttttcattagatgcaatattgcatggtgtcgtcggcggaagactacccgcctgggcaaatatccagtcctggaagttattgtcgtgaccgccatcaccgccatcattgcatacccaaatccatacacgagacagtctacttccgagctgatctcagagctgtttaacgattgcggggccctcgagtcctcccagctctgtgattatattaatgaccccaacatgacaaggccagtcgatgatatccccgaccgacccgcaggagtgggcgtgtataccgcgatgtggcagctagcccttgcgttgattttcaaaatcgtggtcacgatttttacttttgggatgaaaattcccagcgggctattcattccctctatggcagtgggcgcaatcgctggacgcatggtgggtattggggtggagcagctcgcttatcaccaccacgactggataatcttccggaactggtgtaggccaggcgcggactgtgtaactcccggactgtacgccatggttggggctgcagcctgtttaggaggcgtgacccggatgacggtgtctctagtggtaatcatgttcgagctgaccgggggactggagtacatagtgccccttatggcagcagctgttacttccaaatgggttgcagacgcattcggcaaggagggcatatatgaggctcatattcacctaaacggatacccctttttggacgtcaaagacgaatttacacatcgcactcttgctactgatgtgatgcgacccagacgcggcgaaccccctctcagtgtactgactcaggacagcatgaccgtcgaagatgtggaaaccctcattaaggagactgactacaacgggttccctgtcgtcgtgagtagggacagcgagcggctgattggttttgctcagcgccgggagctgattttggccatcaaaaacgcccgccaaagacaggaggggattgtttctaactcgatcatgtatttcacggaagagccgccagagttacctgctaatagccctcatccgctgaagttgaggcgaattcttaacttgtctccattcactgtaaccgatcatactccaatggaaacggtggtggacatctttagaaagttaggtctccgacagtgcctggtcactcggagcgggcgtctcctagggatcataaccaaaaaagacgtgttaagacacatggcgcagatggctaaccaggacccggaatccatcatgttcaactag

SEQ ID NO: 111948 - DNA, 2001 bp, synthetic construct
  misc_feature 1..2001: note = Description of Artificial Sequence: Synthetic coding sequence
  source 1..2001: mol_type = other DNA
atgacagacttaaaggagggcgtatgtctgtccgctttctggtactcccatgagcaatgctgctggacctctaatgagaccaccttcgaggatcgggacaagtgtccgttatggcagaagtggtccgagctcctggtgaatcaatcagaaggcgcgtccgcctacattctgaactacctaatgtatatcctgtgggctttgctttttgcctttctggcggtgtcattggtgagggtgtttgccccatacgcctgcggctctggcattcccgagataaaaacaatccttagtggcttcattattcggggatatctggggaagtggacactgctgataaagaccgtgactctagttctggtggtctctagcggcttatccctcggcaaagagggtccattggtgcacgtcgcctgctgttgtggcaacttctttagctctctgttctcgaaatacagcaagaacgaagggaaacgcagggaggtgctgagcgctgccgccgccgcaggggtgtctgtagctttcggcgctccaattggcggtgtgctattcagccttgaagaagtgtcctactatttcccactgaaaactctttggagatctttcttcgccgctttggtcgcggcattcaccctgaggagcattaacccatttggaaactctcgcctggtccttttctatgtcgaatatcacactccctggtacatggccgaactgttcccttttatactgctgggtgtgttcgggggactgtgggggacacttttcatccggtgcaatatagcttggtgccggcggagaaaaacaacaagattggggaaatatcccgtgcttgaagttatcgtggtcactgccattaccgccatcattgcatatccaaacccatatacaagacagagtacaagcgagttaattagcgagttgttcaatgattgtggagctctggagtctagccagctgtgtgattacattaatgatcccaatatgactagacctgtggacgatatcccagatcgccctgccggagtgggcgtttataccgccatgtggcagctggctttggctctcatctttaaaattgtagtaacgatattcaccttcggaatgaagatcccctccggcctatttatcccatcaatggctgtgggggcaattgcaggccggatggtggggatcggcgtggaacaacttgcctaccaccatcatgactggatcatatttcggaattggtgccggccaggcgcggactgcgttaccccaggactttatgccatggtgggcgccgcagcttgcctgggcggagtgactcgcatgaccgtcagtctcgtcgtcatcatgttcgaattaaccggtggcctggagtatattgttcccttgatggcagctgccgtgactagcaagtgggtggcggacgcctttgggaaggaaggtatctacgaagcgcacattcacctgaacggttacccttttctcgacgtgaaagatgagttcacccaccggaccctcgctaccgatgtcatgaggccccggcggggcgaacccccactgtcagttctcacccaggactctatgaccgtcgaagacgttgagactctcatcaaagaaaccgactataatggatttcctgttgtcgtcagccgagattctgagcgtttgatcggctttgcccaacgccgagaactcattttggccatcaagaatgcgagacagcgccaggaaggtatcgtctctaactctattatgtacttcacggaggagcctccggagcttcccgccaattctccccacccattgaagttgcgcaggatcctcaacctgagccccttcaccgtcaccgatcatactccaatggaaaccgttgtggatatctttcgcaaactggggctccggcagtgcttggtcacgaggagcggaagactactgggcatcatcacaaaaaaggatgtgctccgtcatatggcgcaaatggccaatcaggatccggaaagtataatgttcaattag

SEQ ID NO: 111949 - DNA, 459 bp, synthetic construct
  misc_feature 1..459: note = Description of Artificial Sequence: Synthetic coding sequence
  source 1..459: mol_type = other DNA
atggtgaatgcgggggcaatgagcggcagcgggaatcttatggattttctggacgaaccattcccagatgtagggacatatgaagattttcatacaatcgattggctgagggagaaaagcagagataccgatagacacaggaagatcacttccaagtcgaaggagtccatttgggagtttattaaaagtcttctagacgcgtggagtggctgggtcgtcatgctgctaattgggctgctagcgggtaccctcgcgggagtaatcgatctggccgtggactggatgactgatctgaaggaaggagtgtgcctgagtgctttctggtactcgcatgagcaatgctgctggacaagtaatgagactacatttgaagaccgagacaagtgccctctttggcagaagtggagcgagcttctggtcaaccaatcagaagtgctgtcagccgccgcagctgcctag

SEQ ID NO: 111950 - DNA, 2241 bp, synthetic construct
  misc_feature 1..2241: note = Description of Artificial Sequence: Synthetic coding sequence
  source 1..2241: mol_type = other DNA
atggactttctggaggagcctatacccggcgtcggtacctatgatgattttaatactatagactgggtgagagagaagtctagggaccgagatcgccaccgcgagattactaataagtcaaaggaaagtacttgggctctcattcattccgtgtcggatgctttcagtggctggctgctcatgttgttgataggcctactgtctgggtctttggcgggcttgatcgacatctcggcacattggatgactgatttgaaagagggtatctgcaccgggggcttttggttcaatcacgagcattgttgttggaatagcgagcacgtcaccttcgaagagcgggacaagtgtccggaatggaactcctggtcccagctgatcatttcaactgacgagggggccttcgcatacatagtgaattacttcatgtacgtgctttgggccctcctgtttgccttcttggcggtctctctggtgaaagtattcgctccgtacgcatgtggctccgggatccccgaaattaaaacaattttgtcaggtttcatcatccgtggttacctgggcaagtggaccctagtgattaagaccatcaccctcgtgcttgctgtgagttcaggcctctccctggggaaagaaggccccctcgtccacgtggcctgttgctgtggtaatattctgtgccactgttttaataagtataggaagaacgaagccaagagaagggaggtattgagtgccgcagctgccgctggagtgtctgtggcctttggcgccccaatagggggagtcctgtttagcctagaggaggtgagttactactttccactgaaaactctgtggagatcattcttcgccgcactcgtagccgcctttactctgaggtctattaatcccttcggaaattcgcggctggttctgttctatgtcgaattccatacgccgtggcatcttttcgaactggtgccatttattctgctgggaatcttcggtgggctttggggcgccctgttcatcaggactaatattgcttggtgtcgcaaacgcaaaactacccaattaggcaaatatcccgtcattgaagtgttagttgtcacggcgattaccgcgatcctggcattccccaacgagtatacacgaatgtccacttcagaactcatctcggaacttttcaacgattgtggacttctcgattcatccaaactgtgtgactatgaaaatcggtttaatactagcaagggcggtgaactgccagacagacccgctggcgtaggcgtctacagcgctatgtggcagttggccctcaccctgattctgaagattgtaatcaccatcttcactttcgggatgaaaattccatcgggtctgtttattccttcaatggccgtgggggcaatagccggcaggctgctgggcgtagggatggaacagctggcttactaccatcaagaatggacagttttcaatagctggtgcagccaaggagcagattgtattactcctggcctttacgctatggtgggcgcagctgcctgcctgggaggagtgacacggatgaccgtgagccttgtagtcattatgtttgagctgactggtgggcttgagtatatcgtgcctcttatggctgctgccatgacctcaaagtgggtcgcggatgcactgggccgcgaagggatctatgatgcacatatccgtttgaacgggtacccattcctggaggcgaaggaggagttcgcccataagacactggccatggatgtgatgaagcccaggcggaatgacccactacttacagtcttaactcaagattctatgaccgttgaggacgttgaaaccatcatctccgaaactacctattcaggtttccctgttgtggtctccagggagtcccagcgactcgttggctttgttctgagacgggatcttattatctccatcgagaatgcccgaaaaaaacaggatggggtagtgagtacatcaattatttacttcacagagcattctccccccctgcccccctatacgccgcctactctcaagctgcggaatatcctggacctgtccccttttactgttactgacctcacacccatggagatagtcgttgatatctttcggaaactggggctgcggcagtgcctggtgacccacaatggacgcctactcgggatcataaccaaaaaagacgtactaaaacacatcgcacagatggccaatcaggaccccgacagtatcctgtttaattag

SEQ ID NO: 111951 - DNA, 2451 bp, synthetic construct
  misc_feature 1..2451: note = Description of Artificial Sequence: Synthetic coding sequence
  source 1..2451: mol_type = other DNA
atggctatgtggcaaggagcaatggacaataggggtttccagcaggggtccttcagtagcttccagaacagcagtagcgatgaagacctgatggatattccagctaccgctatggatttttcaatgcgagatgatgtaccccccttagaccgcgaggtgggcgaagacaagtcatacaacgggggtgggatcgggtcaagtaataggattatggattttctcgaagagccgattcctggcgtggggacctatgacgactttaatactattgattgggtgagagagaagtcgcgggatagggatcgccaccgcgaaattactaacaaaagcaaggaaagcacttgggcactgatccatagtgttagtgacgcgttctcaggttggctgttgatgctcctcattggcctcctgtcaggctcgttggcaggtctgatcgacatcagcgcacactggatgaccgacttgaaggaggggatttgcaccggaggtttctggtttaatcacgagcattgctgttggaacagcgaacacgtcactttcgaagagagggacaaatgtccagagtggaattcgtggtcccagctgataattagtacagatgagggtgcatttgcctacatcgtgaattattttatgtatgtgctgtgggctcttctattcgcttttttagccgtctccctggtgaaggtgttcgccccgtatgcttgtgggtctggcattccggaaataaagacgattctgtcaggattcattatccgcggttacctgggcaagtggaccttggtcataaagacaattacactagtattggcagtgtcgagcggcctgagcctcggaaaggaggggcccctcgtccatgtcgcctgttgttgtgggaacatcctgtgccactgcttcaacaagtatcgaaaaaatgaagctaagcggcgcgaggttctgtctgccgccgcggccgccggcgtgtcggtcgcctttggcgcacccatcggtggtgtactgttctccctggaagaggtgtcctattactttcctctgaagaccctttggcgctcattttttgctgcccttgttgccgcctttacccttagatctatcaacccgttcggaaactcccgccttgtcctattctacgtggaatttcataccccttggcacctctttgagctggtaccatttattctgctcgggatcttcggcggtctatggggcgctcttttcatccggacaaatatcgcatggtgtagaaagcggaaaaccactcagttagggaagtaccctgtgatcgaagttctggtagtgacggctatcactgcgattttggccttccccaacgaatacacccgtatgagcacatccgagctcatttccgagctctttaacgattgcggtctacttgactcgagtaaattgtgcgactatgagaatcgtttcaacacatccaaagggggagagctccctgataggccagcgggtgttggggtgtattctgcaatgtggcagctcgcacttaccctgatcctgaaaattgtgataaccatttttacattcggaatgaaaatcccgtcaggtcttttcatacccagtatggctgttggggccatcgctggccgccttttaggcgtggggatggagcagttggcatattatcaccaagaatggacagtcttcaattcttggtgtagtcagggggcggattgcatcacacctggtctctatgcaatggtgggtgcagcagcttgtctggggggcgtgacaagaatgaccgtcagtctggtggtgataatgttcgaattaacaggcggactggaatatatcgtgccactgatggcggccgccatgacaagtaaatgggtggctgatgctctgggacgggagggtatctatgacgcgcacatacgcctgaatgggtatccatttctggaggccaaggaggagtttgcccacaagactctggcgatggatgtcatgaaacctcgacgtaacgacccactattgacagtgctgacccaggatagtatgaccgttgaagacgtggagacgattatctctgagactacttacagcggctttcccgtggtcgtgtcccgtgagtctcagaggctcgtggggttcgtactcaggagggatctcatcatttcgatcgagaatgctaggaagaaacaggacggtgttgtgtccacctcaatcatatattttaccgagcactcgccccctctgccgccctatacccccccaacgctgaaactcaggaacatcctggacctgtccccgtttaccgtgactgatttgacacccatggagattgtggtggacattttcagaaaactagggttacgccagtgtctagtgacccataatggtaggctgctgggcattattaccaagaaggatgtgttaaaacatatcgcgcagatggctaaccaggatcccgactctatcttattcaattag

SEQ ID NO: 111952 - DNA, 2451 bp, synthetic construct
  misc_feature 1..2451: note = Description of Artificial Sequence: Synthetic coding sequence
  source 1..2451: mol_type = other DNA
atggccatgtggcagggcgccatggataaccgcggctttcagcagggcagtttctctagctttcagaacagctctagcgacgaagacttaatggacattcctgcaacagcgatggatttctccatgcgcgatgatgtgccccccctggatcgcgaagtgggggaggataagtcctacaatggcggaggtatcggttctagtaatagaattatggattttctagaggaaccgattccaggggtgggtacatacgacgactttaacacaattgattgggtgcgtgaaaaaagtcgggatagagatagacatcgcgagattaccaataaaagcaaagagtccacatgggccctcattcattcagtgtctgacgctttttcgggatggcttctgatgcttctcatcgggttgctgagtggttccctggccgggctcatagatatttcagcacactggatgacagacttaaaagagggcatctgcaccggcggcttctggtttaaccatgagcattgttgctggaactccgaacacgtaaccttcgaggaaagagataaatgtccagagtggaactcttggtcgcagctgatcattagcaccgatgaaggtgcctttgcctatattgtcaattattttatgtacgtcctgtgggccctgctattcgcattcttggcagtttccctcgtcaaggtgttcgcgccctatgcctgcgggtcaggtattcctgaaattaaaactattttgtccggattcataataagggggtatctcgggaagtggactctggtcattaagacaatcaccctggtgctcgcagtgtcctccgggctgtcgttgggcaaggaggggcccctggtccacgtggcatgttgttgtggtaacatcctctgccattgctttaataagtatagaaagaacgaggccaagaggcgggaagtgctcagtgcagcagccgctgctggagttagcgtggcattcggagccccaattggcggagtgcttttttccttggaggaggtgagctactatttcccactgaaaactttatggcgatccttcttcgcagcactcgttgccgctttcacattgcgatccatcaatccattcggaaattcacgcttagttctcttctacgtggaatttcatacaccttggcacctgttcgaactggtgcctttcatactgctggggatcttcgggggcttatggggcgccctcttcatcaggacgaacatagcatggtgccgaaaacggaagaccacacaattgggaaagtatcctgtcatcgaagttctagtggtaaccgctattactgctattcttgccttccccaacgaatatactcgtatgtctacaagcgagctcatctccgagctgtttaacgactgtggcctgctggacagcagcaagctgtgcgactacgaaaaccgcttcaatacctcgaagggcggagaactgccggacaggcccgcaggagtgggagtatactcggcaatgtggcagcttgccctgacccttatcctgaagattgtcatcacaatttttacatttggcatgaaaatcccttccggcctctttattcccagtatggccgtgggtgccattgccggccgcttgctcggggtaggcatggaacagctagcgtactaccatcaggagtggactgttttcaattcatggtgcagccagggagctgattgcattacccccggactttacgctatggtcggggccgccgcatgtctaggaggggtaaccaggatgactgtgtctttggtggtgattatgtttgaactaactgggggactcgagtacatcgttccgctcatggccgccgcgatgacttccaaatgggtggctgatgcgttgggaagagagggaatttatgacgcacacataaggcttaacggctatccgtttttggaggcaaaagaggaattcgcccacaagacactggcaatggacgtcatgaagccgcgaaggaacgatcccctgctgacagtcttgacacaggatagtatgactgttgaagatgtggagacaatcatcagcgagaccacctattccggcttcccggtggtggtgagccgagaaagtcagaggctcgttgggtttgttttacggcgcgacttaattatcagcatcgagaatgctcggaagaagcaagacggcgttgtgtccaccagcatcatttactttacggaacactcccccccactacctccttatacacctccaacactcaaacttaggaacatactcgatctctccccatttaccgtgacggacctgacacccatggaaattgtcgttgatattttcagaaagctcggactgaggcagtgtctggtgacacataacggtcggctgttgggtattattaccaagaaggatgtgctgaaacacattgcccagatggcaaaccaggacccagattcgatactctttaactag

SEQ ID NO: 111953 - DNA, 2241 bp, synthetic construct
  misc_feature 1..2241: note = Description of Artificial Sequence: Synthetic coding sequence
  source 1..2241: mol_type = other DNA
atggacttcctagaggaacctattcctggtgtgggaacttacgacgacttcaacaccatcgattgggttcgggaaaaatcccgggacagagacaggcatcgggagatcacaaataaatccaaagagtcgacttgggccttgattcattcggtgagcgacgccttttccggctggctgcttatgttgctcatcgggctgctaagtggatccctggctggcctaatagatatttcagcccattggatgacagatttgaaggagggtatctgcactggagggttttggttcaaccacgagcattgctgttggaacagcgagcatgtcacatttgaagaaagggacaagtgcccggagtggaatagctggagtcagcttatcatctccacagacgagggagcattcgcctacatcgtgaactattttatgtatgtgttatgggccctactatttgcttttcttgccgtttcactcgtgaaagtctttgcaccttacgcctgcggtagcggcatcccggagataaagacgatcctctctgggtttataattcggggatacctgggcaaatggaccttagtaattaaaactatcaccctggtgcttgctgtctcatcgggcttatcactgggcaaggagggacccttggtgcacgtcgcgtgttgctgcggcaatatattgtgccactgttttaacaaatatagaaagaatgaggcaaaacggagggaagtgctcagtgctgcagccgccgcaggtgtctctgtggccttcggcgcgccaattggaggagtgctcttctccttggaggaggtttcctactattttccccttaaaactctctggcgatccttctttgctgccttggtggctgcctttacccttcgctccataaacccctttggcaattcacgcctagttctgttctacgtggagttccataccccgtggcacctttttgaactcgtgccattcatcctgcttggcatcttcgggggcctgtggggagctctgtttatccgtacaaacatcgcttggtgtcggaaaagaaagactacccagctaggaaagtacccagtgatcgaagtgctggtggtgacggccattaccgccattctcgctttcccaaacgagtatacacgtatgtccacatcggaactgatttccgagctctttaacgattgtggactcctcgacagttccaaactttgtgactacgagaaccggtttaatacttcaaaaggaggagagctgcccgaccggccggcgggagttggtgtgtacagcgctatgtggcagctggccctgaccttgatcctgaagatcgtgatcaccatttttacttttgggatgaagatcccttccggtctttttataccctctatggctgtgggtgccattgccggacgactcctgggcgtgggtatggagcagctggcatactatcatcaagaatggacggtcttcaattcctggtgcagtcagggagccgattgcataacacctggattatacgctatggtcggagcagccgcgtgcttagggggagtcacacggatgacagtgtcattggtggtgatcatgttcgagttgaccgggggcttagaatatattgtgcccctgatggccgctgccatgacatccaaatgggttgcagatgccttaggaagggaagggatttacgacgctcatattaggctgaacggctacccgtttcttgaggcaaaagaggagtttgcgcacaaaacattggccatggatgtaatgaaacctagacgtaatgacccactcttaactgtattgacacaggattcgatgacagtggaggatgtggagactatcatttcagagacaacttactctggatttcctgtagtcgtaagcagagaaagtcagcggttggtgggctttgtgctgcggcgggatcttatcatctcaattgagaacgcccggaagaaacaagacggagtcgtgagtacatccattatttatttcacagagcacagcccacccctccctccctacaccccacccacattgaaactccggaacatcctggacctaagtccatttacagtcactgacctaacacctatggaaatcgtggtggatatttttcgcaagcttggactccgacagtgccttgttactcacaacgggaggttactcggcattataaccaaaaaggacgtgctcaaacacattgcgcaaatggcaaatcaagaccctgacagcattctgtttaattag

SEQ ID NO: 111954 - DNA, 1947 bp, synthetic construct
  misc_feature 1..1947: note = Description of Artificial Sequence: Synthetic coding sequence
  source 1..1947: mol_type = other DNA
atgaatatcgtggctggtactttatccatgtctccccttaaaagggacaagtgccccgagtggaacagttggtcacagctcattatatctactgacgaaggtgccttcgcgtacatagtcaactacttcatgtatgtgctgtgggcccttctgtttgccttcctggctgtttcactcgtcaaggtctttgcaccctatgcctgtgggtccggaatccccgagatcaaaaccatactttccgggttcatcatcagagggtatttgggtaaatggaccctggtgattaaaaccattacgctggtgctggctgtgtccagcggactgtccctgggcaaagagggccccctggtacatgtggcctgctgctgtggcaacatcttatgtcactgtttcaacaaatatcgcaagaatgaggcgaagcgtagggaagtgttgtctgccgccgcagccgcaggggtgtccgtagcatttggcgctccgatcgggggcgtcctttttagtttagaggaggtgtcatactactttcctttgaagaccctctggcggagtttctttgccgccttggtcgccgcatttacactgaggtccattaatccattcggcaattctcgccttgtgcttttctatgtcgaatttcatactccttggcacctattcgagctagtcccattcattctcctgggcattttcgggggactgtggggtgctttattcattcgcacgaatattgcgtggtgccgaaagaggaaaacaactcagctgggtaaataccctgtgattgaagttctggtggtaacagccatcaccgcgatcctggcattcccaaatgagtatactcggatgtcgacaagtgagttgataagcgaactgttcaacgactgtggactactggacagcagcaaactatgcgattacgagaacaggttcaatacgagtaagggcggggagctgcctgaccgacctgctggagtgggagtgtacagtgctatgtggcagttggctcttacactcatcttgaagatagtcatcactatcttcacatttggcatgaagataccttccgggctgttcataccgtccatggccgtcggggcaattgctggtcgactgttgggtgtggggatggaacaactagcctactaccatcaggagtggaccgtatttaactcttggtgctcacagggagccgactgcattaccccagggctgtacgccatggtcggcgccgccgcttgcttgggcggagtgactaggatgacagtgagcctggttgtcattatgtttgagctaacaggtggcctggaatacatcgtgcctctgatggccgcagccatgactagtaagtgggtcgccgacgcactgggtcgcgagggaatctacgacgcccacattagactgaacggttatccattcttagaagccaaggaagaattcgctcacaagactctggcaatggacgtcatgaagccccgacgcaatgaccccctcctgacagtcctaacccaggattctatgacagttgaggatgtagagacaatcatctcagaaaccacctactcaggatttcccgtagtggtatcacgcgagagccaaagactggtgggctttgtcctccggcgagacctaattatctctattgagaacgcaaggaaaaagcaggacggcgtggtatccacaagtattatttactttactgagcattctcctcccctgcccccatacacccccccgactttgaaactgcggaatattctcgacttaagccctttcacagtgacggatttaacacccatggaaattgtggttgacatcttccggaaactgggccttcgccaatgcctggtgacccacaacggtagactgctgggcattatcacgaaaaaagatgtgctaaaacacattgcccaaatggccaaccaggatccagattctatcttgtttaattag

SEQ ID NO: 111955 - DNA, 1062 bp, synthetic construct
  misc_feature 1..1062: note = Description of Artificial Sequence: Synthetic coding sequence
  source 1..1062: mol_type = other DNA
atggctggttgccgtggtagtttatgctgctgttgtcggtggtgctgctgctgtggggagcgagagactcggacccccgaagaattaacgatcctgggcgagacccaggaagaagaggatgagattctgccacgcaaagattacgagagtcttgactacgacaggtgcatcaacgatccctatcttgaggtgttggaaactatggacaataagaagggtcgccggtatgaagcggtgaagtggatggtggtctttgccattggggtctgcacaggattggtggggctcttcgtggattttttcgtcaggctttttactcagctcaaatttggcgtggtgcaaacctccgttgaagagtgctctcagaagggatgcctagctctctctctgctggagctgctcggattcaatctcaccttcgtgtttctcgcaagcctgctagttttaatcgaacctgtcgcagcaggcagtgggatccccgaggtgaaatgttatctaaatggtgtgaaggtacccgggatcgtgcggctgcgtacgctgttatgtaaagtactgggggttttgttttctgtggctggtggcctgttcgtggagaaggaaggccctatgatacactcaggatccgtcgtaggcgctggtctgccacagtttcagagcatttctctgcggaagatccagttcaactttccgtactttcgctctgaccgggacaaacgcgattttgtctctgctggtgctgctgctggggtggcagccgcctttggtgcaccaataggaggaactctgttctcactcgaagaaggcagttcattctggaaccagggattaacatggaaggtgctgttttgttcaatgtctgccactttcaccttgaatttttttagatctggaattcagttcggatcctggggaagttttcagctgccaggtttacttaatttcggggagttcaaaagcctgcgggagcctccttgcgtctctggcaatcaccggggaggcgtgtgcggacttgacggagtcagaaggatgcctactgatgtgctgtttgaatctaacaggtag

SEQ ID NO: 111956 - DNA, 2610 bp, synthetic construct
  misc_feature 1..2610: note = Description of Artificial Sequence: Synthetic coding sequence
  source 1..2610: mol_type = other DNA
atggccggttgcaggggaagtctctgttgttgctgcagatggtgctgctgttgcggggagcgtgagaccaggacacccgaggaattgaccattcttggtgaaacgcaggaggaagaggatgaaatcctgccgcgtaaggactacgaaagtctggattacgatcgttgtatcaacgatccctatcttgaagtcctggagaccatggataacaagaaaggcaggagatatgaggccgtaaaatggatggtcgtctttgctatcggcgtatgcaccggcctggtgggcctgttcgtcgacttttttgtgcggctgttcacacagttgaaatttggcgtcgtgcagacctcagtggaagagtgctcccagaaaggctgtctcgcactgagtctcctggagctgctagggtttaatcttaccttcgttttcttagccagcctgcttgtgctgatcgagcccgtggctgcaggttccgggatcccagaagtgaaatgttacttaaacggagtgaaggtgcctgggatcgtaagattgcggactcttctgtgcaaagtgctcggagttctattttcagtggcaggcggattgttcgtcgagaaggaagggcctatgattcactctgggagcgtagtcggtgcaggcctgcctcagtttcaatcaatttccctgagaaaaatccagttcaatttcccttactttcgttctgacagagataaacgtgatttcgtttccgcgggagctgccgctggggtcgcagctgcgttcggcgcacctatcggaggaaccctattcagcctcgaggaaggttcttctttctggaaccaaggccttacttggaaagtgctcttctgttcaatgtcagcaacgtttaccctgaatttttttagatccgggatacagttcggttcttggggctccttccagctccctggcctgctgaactttggagagttcaaatgcagcgatagcgacaaaaagtgccacctgtggaccgcgatggacctcggtttcttcgttgtgatgggggtgatcgggggattgctgggagcgaccttcaactgccttaacaagagactggcaaagtacaggatgagaaacgtgcatcctaaacctaagctggttcgggtgttagagagcctgctggtttctctcgttaccacagttgtggtgtttgtggccagtatggtactgggcgaatgtagacaaatgagctcatcttcacaaattgggaatgacagcttccaactgcaggtgaccgaagacgtcaattcaagcattaagacattcttctgccccaacgacacctataacgatatggctactctgtttttcaacccgcaagagtccgcgatactgcagctgtttcaccaagatgggacattttcccccgtcacacttgcactgttctttgtcctctactttctgttagcttgctggacatatggcatctccgttccgagcggactttttgtgccaagcttgctctgtggggcagcatttggcagactggtcgctaacgtgcttaagagttacatcggcctggggcacatttactccggcacttttgctctgatcggagctgctgcttttctcgggggggtggtaaggatgaccatttcactcacagtgatcctaatagaatccaccaacgagattacttatgggctgcccattatggtgactctaatggtagctaagtggacaggggatttcttcaacaagggaatatatgatatccatgtgggcttgcgtggagtacccctcttggagtgggagaccgaggtcgaaatggacaagctcagagccagtgacattatggagcccaacttaacatacgtgtatccacacacaagaatccaaagtttagtctccatcctaagaaccactgtgcaccatgcattccccgtagttaccgaaaatcgcgggaacgaaaaggagttcatgaaagggaatcagctgatttccaacaatattaagttcaaaaaaagttccatactgacacgcgccggcgagcagcgcaagcgctcgcagtccatgaaatcctaccccagttcggagctccgcaatatgtgcgacgagcatattgcctctgaggagccggccgagaaggaggacctgttacagcagatgctcgagcgtaggtacacaccttatcctaacttgtatccggaccagtccccttctgaagactggaccatggaggaaaggtttcggccccttacattccacggcttgattttgcggtctcaattggtgactctgctggtgaggggggtgtgctacagcgagtcccaatcttccgcctcccagccgagactgagctatgctgaaatggcagaggattacccccggtatcctgacattcacgatctagacctgaccctgctaaacccaaggatgattgtggatgtaaccccatatatgaatcccagcccctttaccgtgtcaccaaacacccatgtctcccaagtttttaatctgtttagaaccatgggcctgaggcatctgccggtagtgaatgccgttggcgagattgtcggcatcataacacggcacaacctcacttatgaattcctgcaggcccgcttgaggcagcattatcaaactatctag

SEQ ID NO: 111957 - DNA, 2544 bp, synthetic construct
  misc_feature 1..2544: note = Description of Artificial Sequence: Synthetic coding sequence
  source 1..2544: mol_type = other DNA
atggccggatgtcggggatcactgtgttgctgctgcagatggtgctgttgctgcggagagagggagacccggaccccagaagaactaacgatattgggcgaaactcaagaagaagaggatgagattctcccgcgtaaagactacgagaaggggcgaaggtacgaagccgtcaaatggatggtagtcttcgctatcggcgtctgtacaggtctcgtggggctgttcgtggatttctttgtccgtctatttacacagttgaagtttggcgttgtgcagacatccgtggaagaatgctcgcagaaaggttgtctcgctctcagccttctcgagttgctaggatttaatctcacattcgtttttctggccagcctgcttgtgctgattgaacctgtggcagccggcagcgggattcctgaggtcaaatgttacctcaacggcgtgaaggtgcccggtatcgtgaggctgcgtactttgctgtgcaaggttctcggtgtgctttttagcgtggccggtggactgttcgttgaaaaggagggacctatgatacatagtggatcagttgtgggagcaggccttccacaattccagagcatttccctgagaaagatccagtttaatttcccatatttcaggtcagatagggataagagagacttcgtgtcagctggcgccgctgctggagtagccgcagccttcggtgcccccatcggcggtactctgttcagcctggaggagggatcctccttctggaaccagggacttacttggaaagttctcttttgttcgatgtccgcaacatttacactaaactttttccgttctggtatccaattcggctcatggggctccttccagctgcccggcctgctcaatttcggagagtttaagtgtagtgactccgataaaaaatgtcatctgtggaccgccatggatctcggcttcttcgtggttatgggagtgatcggaggccttttgggagccacctttaactgcctgaataagcgtctcgctaagtatcggatgcgcaacgtccaccccaagccaaaattggttcgtgtgctggaatccctgctggtgtccctcgtaactaccgtggtggtgttcgttgcctccatggtgcttggcgagtgtagacagatgtcttccagcagtcaaattgggaatgacagctttcagcttcaggtgaccgaggacgtaaattcatcaattaaaactttcttctgccccaatgatacttataatgacatggctaccttgttttttaacccacaggagagcgccatcctgcagttgtttcaccaggatggtaccttcagtcccgtgacactggcactttttttcgtattatattttctcctggcctgttggacctatggcatttccgtgcccagtggcctgtttgtacccagcttgctctgtggtgctgcattcgggcgcttagtcgctaacgttttaaagtcgtatatcgggttaggccacatatacagtggcacattcgcccttatcggagccgccgcctttttggggggcgttgtccggatgacgattagcctgacagtcattctgatcgagagcactaacgagattacctacggactgcccataatggtaaccctgatggtggccaagtggactggggattttttcaacaaaggaatttatgatattcatgttggcctacggggggttcctcttcttgagtgggagaccgaagttgagatggataaacttagggcatccgacataatggagcctaatctgacttacgtgtaccctcacaccaggatccagtcactggtgagtattctgcgtactactgtccatcacgcattcccagtggttaccgagaacagggggaacgaaaaagagttcatgaaaggaaatcagttgatttcaaataatataaagttcaagaaatcaagtatcctgactcgggctggcgagcagaggaaaagatcacagtctatgaaaagctaccctagctccgagctgcgtaatatgtgcgacgagcacatagcaagtgaggagccagcggagaaggaagatttacttcagcagatgctcgagagacgctacacaccttacccgaatctctatcccgaccagtctccttccgaagactggacgatggaagaaagatttcggcccttgactttccacggattgattctgagaagtcagctggtgaccctgctcgtgcggggggtgtgttacagcgaaagccaatccagcgcttcacagcctaggttgtcttatgccgagatggcagaggattacccaaggtatccggacatccatgatctcgatttaaccctgctgaaccctagaatgatcgtggatgtgaccccttatatgaacccaagtccattcacagtatctcctaatacgcatgtgtctcaggtgttcaaccttttccgtactatgggcttaagacatctccctgtagtcaacgccgtaggcgaaattgtgggcattatcacgcgacataacctcacctatgaatttcttcaggccaggctgaggcaacattaccagactatttag

SEQ ID NO: 111958 - DNA, 963 bp, synthetic construct
  misc_feature 1..963: note = Description of Artificial Sequence: Synthetic coding sequence
  source 1..963: mol_type = other DNA
atggcaggatgtcggggttcactttgctgttgttgccgctggtgttgttgctgtggtgaaagggagaccagaaccccagaggaactcacaattctgggcgagacccaggaggaagaggatgaaatattgccacggaaagattatgaatcattagattatgacagatgcatcaatgatccctacctggaagttctggagacgatggataataagaaggggagaaggtatgaggctgtaaagtggatggtcgtcttcgccattggcgtttgcactggcctggtggggttatttgtagacttcttcgtgcgactcttcactcagcttaagtttggagtcgtgcagacttctgtggaggaatgtagccagaaaggttgtctggctctgtcccttctcgagctcttaggattcaacctgacatttgtctttctggcgagtctgcttgtgctcatcgagcctgtggccgctggttccggaatccctgaggttaagtgctaccttaatggtgtgaaagtcccgggcatcgttcgattgagaaccctcctgtgcaaggtgttaggggtgctcttctctgtggcggggggcctttttgtcgaaaaggaagggccgatgatacactccggcagcgtcgtgggagccggactcccccagtttcaaagcatttcactgcggaaaatacaatttaattttccttatttcagatcggaccggtatggaaagcggcaggaacggttatgtataagtagaagtggctgctggtcttgctgttcttttcgcggtgccaatcggggatatcttgtgcaaagtagggggggctttgttttactggaaccacgtgctcacgtggagtctgcactgctctttcacgtctgtcatctccatcctcagcttctacctttttgggactcggtatggaagctcggctttctgcccgctccttggatcgccgagctgtggagggtgtag

SEQ ID NO: 111959 - DNA, 927 bp, synthetic construct
  misc_feature 1..927: note = Description of Artificial Sequence: Synthetic coding sequence
  source 1..927: mol_type = other DNA
atggcagggtgtcgaggtagtctgtgctgctgctgtcgttggtgctgttgttgtggcgagcgcgaaacccgaacgcctgaggagctgactattctcggagagacgcaggaggaggaagacgagatcctgccccgtaaagactacgagtccttggattatgatcggtgtattaatgacccatatctcgaggtgttagagacgatggataacaagaaggggcggcgttatgaagccgtgaagtggatggtcgtctttgcaattggtgtatgtacagggctcgtcggcctctttgttgactttttcgtcaggctgtttacccaactcaaatttggcgtggtgcagaccagtgtggaggagtgctcacagaaaggttgcctagccttgtcactcctggagctgctcggcttcaatctgaccttcgtcttcctcgcgagcctgcttgtcttgatcgagcctgtggccgccggttctgggatcccagaagtgaaatgctatctgaatggagttaaagtaccaggtattgtgcggctcagaacccttctgtgcaaagtactaggtgtgttgtttagtgtggctgggggtctgttcgtggaaaaggagggaccgatgattcacagtggaagcgtcgtgggagccggactcccacagtttcagagtatttcgctgcggaagatccagtttaactttccctatttcagatccgacaggtcgggatgttggtcttgctgttccttccgcggtgcaaatcgcggctacctagtccaatcgcgtggaggatttgtcctcttggaaccgagagcgcatgtggaatcggcactccttttccatgtctgtcatctgcacccgcagcttctgcccttctgggattcggtttggaagctgggctttcttcctgctccgtggatcgccgagctctggagagtctag

SEQ ID NO: 111960 - DNA, 1062 bp, synthetic construct
  misc_feature 1..1062: note = Description of Artificial Sequence: Synthetic coding sequence
  source 1..1062: mol_type = other DNA
atggcgggttgtcgaggaagcctgtgttgttgttgtaggtggtgctgttgctgcggcgagcgcgaaacccgcacccccgaagaactgacaattctcggggagacccaggaagaggaggatgagattttacctcggaaagactatgagtccctcgattacgaccgatgtataaacgacccctatcttgaagtgctggagacaatggataacaaaaagggccggcgttatgaggccgtaaaatggatggttgtgttcgcaataggggtctgcaccgggctggtgggcctgttcgtggactttttcgtgcgtctatttactcaattgaaatttggagtcgtccagacctcagtggaggagtgcagccagaaagggtgcctggccctttccttgctcgaactcctaggttttaacctcacctttgtctttctggcatcccttctagtactgatcgagccagtcgccgctggctcgggcatcccggaagtgaagtgttaccttaatggagtgaaggtgcctgggattgtgcgattaaggaccctcttgtgcaaagtgctaggggtattgttctcagttgcaggcggcctcttcgtcgagaaagagggccccatgattcacagtggttctgtagtcggtgcgggtctgccacagttccagagtatctctctgcggaagattcagtttaactttccatattttagaagcgaccgggataaaagagactttgtctccgctggtgccgcggctggagtggccgccgccttcggagctcccattggtggcacactcttttctcttgaagagggcagttctttttggaatcagggcctgacatggaaggtcttgttttgttcaatgtcggctaccttcacgctgaatttcttccgctccggcatccagtttggctcctggggtagttttcagctgccaggcctcctcaacttcggagagtttaagagcttgcgggagccaccctgtgtgtccggaaatcacagaggcggcgtgtgtggtctggacggagtcagaaggatgccaactgacgtcttgtttgaaagcaaccgctag

SEQ ID NO: 111961 - DNA, 2862 bp, synthetic construct
  misc_feature 1..2862: note = Description of Artificial Sequence: Synthetic coding sequence
  source 1..2862: mol_type = other DNA
atggcagggtgccgaggatccttatgctgttgctgccgttggtgttgttgctgtggcgagcgcgaaacccgcacccccgaggaattgacaattctcggggaaacccaagaggaggaggacgaaatccttcccaggaaagattacgagagtctagattatgatcggtgtataaatgacccgtatctggaggtgctggaaactatggacaacaaaaaggggcgcagatacgaagcagtgaaatggatggtggtcttcgctattggcgtatgcactgggctggtaggtctcttcgtcgatttctttgtccggctcttcacccagcttaagtttggagtcgtgcaaactagcgtggaggagtgcagccagaaggggtgtctggccctgtcattgcttgagctgcttggctttaaccttactttcgtcttccttgccagtctgttagtcctcattgagcccgtggctgcaggttcagggatccccgaggtgaagtgctacctcaatggagtgaaagtgccaggaattgtccgcttgcgcacactcctgtgcaaggtactgggcgtccttttcagcgttgccggggggctttttgtcgagaaggaagggccaatgatacatagtggcagcgtagtaggagccggactccctcagtttcagagcatttccttaagaaaaatccagtttaacttcccgtacttccggtcagatagggacaaaagagactttgtaagcgccggggcagcagcaggggtggccgcagccttcggagcacccatcggcggtaccctgttcagcttggaggaaggttccagtttctggaatcagggcctcacctggaaggttttgttctgttccatgtcggccacttttaccctgaattttttcaggtcaggcattcagttcggctcttggggttcttttcagttgcccggacttctgaacttcggcgaatttaaatgctccgattcagataaaaaatgccacctctggacagcgatggatctggggttttttgttgtgatgggcgtgatcggaggcctgctaggggcaacttttaactgtctgaataagagactggccaagtacaggatgagaaacgtccaccctaaaccaaagctggtgagggtcctggagtcactgctggtcagtctggtgacgaccgtggtggtcttcgtagccagcatggtcctcggagaatgccgtcagatgtcctcttcctcgcagattgggaacgactcctttcagctgcaggtaaccgaagacgtgaattcttctataaaaacttttttctgtccgaacgacacctacaacgatatggccacactgtttttcaaccctcaggagtccgccattctgcaactcttccatcaagacgggaccttcagcccggtgaccctggccctcttctttgtactgtacttcctgctcgcttgctggacatacgggatctctgtcccctcagggttgttcgtcccctctttgttgtgcggcgctgcttttggccggctggtcgctaacgtacttaaaagctatattggtctggggcacatctactcaggaactttcgccctaatcggagcagccgcctttcttggtggagtagtccggatgaccatttctctgaccgtaatcctgatagagtcaacaaacgaaataacatacgggctgcccataatggtcacgctcatggttgcaaagtggacgggtgatttttttaataagggaatatacgatatccacgtcgggctacgaggcgtgccattgttagaatgggagacagaagtcgagatggacaaactgagggcaagtgatatcatggaacccaatctgacatatgtgtatccgcacaccaggatccagagtctggtcagcattctacgcaccacagtccaccacgcatttcctgttgtgaccgagaaccgaggcaacgagaaggaattcatgaagggcaatcaactgatcagcaacaacatcaagtttaaaaagtcgtccatcctcacccgcgctggcgaacagcgaaagcgctcccagagtatgaaatcttaccccagctctgaactccggaatatgtgcgacgagcatattgcatctgaggagcctgccgagaaagaggacctgttacagcagatgctcgaacgcaggtacactccttaccctaacctataccccgaccaatctcctagtgaggactggaccatggaggagcgcttccgcccactcacgtttcacggactgattctccgcagccaactcgtgaccctattggtgagaggggtgtgttactccgagagtcaatcctctgcaagtcagccaagattaagttatgcagaaatggcagaggactacccaaggtatccggatatccatgacctggatctgacgcttctcaacccgaggatgatagttgatgtgaccccttacatgaatcccagtccctttaccgtttcccctaatactcatgtgtcccaggtcttcaacctttttagaactatggggctcaggcatttacccgttgtaaacgcagttggtgaagtttcagaggctccggccttgcctcctcccctccgagaggaccccttggcgcgctgttgcctgtgcactcaagcttcccaccaaaagcgccgtcatcccacacggagaggcgagtgcggccctaccctcgctctcaaccccgctcgcttgccttgtacacgggaccccttcccttgtttgccagctgacggtacctccgttcctctcgcggtattgagctctcagagccgtgcctccacccgtctttgcttaccccccgaaatgttgctatttacaccgtaccattggtgtagcttagttctccacctgcgtcgcgatctgcgcatccgatag

SEQ ID NO: 111962 - DNA, 369 bp, synthetic construct
  misc_feature 1..369: note = Description of Artificial Sequence: Synthetic coding sequence
  source 1..369: mol_type = other DNA
atggccgggtgccgggggtcactctgttgctgctgccgatggtgctgctgctgcggagaaagagagaccagaactcccgaggaactgactatcctaggcgagacacaggaggaagaggacgagatcctcccaagaaaagattacgaatccctcgactatgatcgttgtattaacgatccatacctcgaagtgctcgagacaatggacaacaaaaaaggacgccgttacgaggccgtcaagtggatggtcgtttttgccattggggtttgcactgggcttgttggcctgttcgtcgatttcttcgtgagattattcacccaacttaagtttggcgtagtgcagacatacaagtttcagatgaaaatgtag

SEQ ID NO: 111963 - DNA, 2277 bp, synthetic construct
  misc_feature 1..2277: note = Description of Artificial Sequence: Synthetic coding sequence
  source 1..2277: mol_type = other DNA
tcacctagatcggccttattcagggtagggcacatgtcttctgttgagctcgacgacgagttgctagatccagacatggatccacctcacccttttcccaaggaaataccccataatgagaagctcctgtctctcaaatatgaaagtctggactatgacaattccgagaaccaactgtttctcgaagaggagaggcgcatcaaccacacagcctttcgcaccgtagagataaaaaggtgggtcatttgcgctctcattgggattctgacaggtctcgtggcctgcttcatcgatatcgtcgtggagaatttggcaggcctgaaataccgtgtgatcaagggtaacatcgataaattcacggagaaaggtggtctctccttctcactgctcctgtgggccacactgaatgctgcgttcgttctggtagggagcgtcatagtggcctttatcgagcctgtggccgctggaagtggaattccccagattaagtgtttcctgaatggggtcaagattccccacgtcgtccgactgaaaacactcgttattaaagtgagtggcgtgatcctgtccgtcgtcggtggactggctgtggggaaggagggacccatgatacactctgggtccgtaattgccgccggaatcagccaggggcggagtacttccctgaagagggacttcaagattttcgagtacttcaggagagatacggaaaagagggattttgtttcagctggggccgccgccggcgtgtcagctgcctttggcgctccagtcgggggggtactgttttctctggaggagggtgcctccttttggaaccaatttctgacgtggcggatcttttttgcctccatgatctccacctttactttgaacttcgtcttatctatttatcacggaaatatgtgggatctgtctagccctggactgattaacttcggtaggtttgacagtgaaaagatggcctatacaattcacgagattccagtgtttattgccatgggcgtggtagggggtgtgctcggtgccgtattcaatgccctgaattattggctgactatgtttcgaatcaggtacatacataggccctgcttgcaggtgatcgaagccgtgctcgtcgctgctgtgacagctacagtggcgtttgtattaatatactccagcagggattgtcagccgctccaagggggaagtatgtcctacccgctgcagctcttctgtgcagatggggaatataacagcatggctgctgccttttttaatactcccgagaagtctgtggtgtcactgtttcatgaccctcctgggtcctacaaccccctgaccctcggcctctttacactcgtatatttttttctggcttgttggacttacgggctcacagtgtctgctggcgtgttcattccaagtctccttattggggcagcctggggccgccttttcgggatcagtctgagctatctaaccggggcagcaatctgggctgaccctggaaagtacgcgctgatgggcgcggccgcacaactgggtggtatcgttagaatgactctgtcattgactgttatcatgatggaggccacatctaatgtgacatatggcttcccaattatgctcgtccttatgaccgccaagatcgtgggagatgtcttcattgagggattgtacgatatgcatatacagttgcagagcgtcccattccttcactgggaggcacccgtaacttcccatagtctgactgctcgggaggtgatgagcactcccgtaacatgtctacgaagaagagagaaagtgggcgttatagtcgatgtcctgtctgatacagcctcgaaccacaacgggttccccgtggtggaacatgctgatgacacgcaacccgcccggttacagggcttaatactgaggtctcagctgattgtgctgctgaaacacaaagtttttgtggaaagaagtaaccttgggcttgtccagcgacgtctaagacttaaggactttagagacgcctaccctagatttccaccaattcagagtatccacgtcagtcaggacgaaagagagtgcactatggatctaagtgaatttatgaatccgagtccatacaccgtaccgcaggaagccagcctgccccgagtattcaaattattccgagctctgggcctgagacacttggttgtagtggacaaccgaaaccaggtggtgggcctagttacccggaaggacctcgctcgatataggttaggtaaaagaggattggaagaattgtcactggcacagacttag

SEQ ID NO: 111964 - DNA, 2418 bp, synthetic construct
  misc_feature 1..2418: note = Description of Artificial Sequence: Synthetic coding sequence
  source 1..2418: mol_type = other DNA
atggctaatgtttccaaaaaggtgtcatggagtggacgagatcgcgacgatgaggaagctgctcctctgctgcgaagaacggcccgaccggggggtggcaccccactgctcaacggtgctgggcctggggcagcacgccagagcccaaggtcagctctctttcgggtggggcacatgtcaagtgtggaactagatgacgaattattggatcccgacatggacccaccacaccccttccccaaagaaatcccccacaacgaaaagctgctgtccctgaagtatgagtccctggattatgacaattctgaaaatcagctcttcctggaagaagaaagacgcatcaaccacaccgcttttcggacagtggaaattaagcggtgggtgatctgtgctcttatcggaatcctgactggtctggtagcatgcttcatcgatatcgtggtcgagaatttggccggactgaagtatagggttattaaggggaatattgacaagttcactgagaagggcgggctaagtttcagtctgctgttgtgggccactctgaatgccgcctttgtattagtcggcagcgtgatcgtggcattcatcgagccagtggccgccggaagcggtattccacagatcaagtgcttcctgaatggcgtgaaaataccccatgtggtgcgactgaaaacgctcgtgataaaggtgtcgggcgtgatcctttctgttgtgggtggcttggccgtaggcaaagagggaccaatgatccacagcgggtccgtcattgccgccggaatcagtcaagggagatcaaccagcctcaaaagagattttaagatctttgaatactttcgacgggacacagaaaaaagggactttgtttccgccggcgcagcagcgggcgtgtccgccgccttcggtgcccctgtagggggggtgctgttctcactggaagagggagcctctttttggaatcagtttctgacctggaggatttttttcgcgagcatgatttccacttttaccttgaacttcgtgctaagtatataccatggcaatatgtgggatctgtctagtcctgggctgatcaattttggccgctttgactccgagaaaatggcgtacaccattcatgaaatcccagtctttatcgccatgggcgttgtgggtggagtgttaggagcagtgttcaacgcgctgaactactggctgaccatgtttcgaattcggtacattcacaggccttgcctccaagtcatagaggcagtgcttgtggccgcagtaactgcaacagtggcctttgtgttgatatactcaagccgcgattgccaaccattgcagggtggatcgatgagctatcccctccaactgttctgcgccgacggggagtacaactcaatggctgccgccttttttaataccccagagaaatctgtcgtgtccctttttcacgatcctccgggctcatacaaccccctgactctcgggctttttaccctggtgtacttctttctggcctgctggacctacggactgaccgtgtccgctggcgtgttcattccgtcccttcttatcggcgcggcatgggggcgactattcgggatctcattgagctatttgactggtgctgccatttgggccgatcccgggaagtatgcgctaatgggggcggctgcacagctggggggcattgtgagaatgaccctatccctgacagtaattatgatggaggctacttcaaatgtcacatacggcttcccgattatgctagttctcatgacagccaaaattgtgggggatgtcttcatcgaggggctctacgacatgcatatacagttacagtctgtcccgttccttcattgggaggcacccgttacgtctcatagtctgaccgcccgggaggtcatgtctactcctgtcacttgcctacggcggcgcgagaaggtgggggtgatcgtggacgtcctctctgacactgcctctaaccacaacggctttcccgtcgtcgagcatgctgatgacacccaaccagctagactgcagggtctcatccttcgcagtcagctgattgtgctgctcaagcataaggtcttcgtggagagaagtaaccttgggcttgtccaacgtcgcctcagactgaaggactttagagatgcctatccacgttttccacctattcaaagcattcacgtaagccaggatgagcgggaatgcaccatggacctcagcgagttcatgaatccgagtccctacacagtcccacaggaagccagtcttccgcgtgtgtttaagctctttcgagcattgggtctgcgccatctggtcgtggtagacaacaggaaccaggtggtcggcctcgtaaccaggaaagatctggctaggtatcggcttggcaagagaggtctggaagaattaagcttggcccagacctag

SEQ ID NO: 111965 - DNA, 2244 bp, synthetic construct
  misc_feature 1..2244: note = Description of Artificial Sequence: Synthetic coding sequence
  source 1..2244: mol_type = other DNA
atgagcagtgtcgagcttgatgacgagttactcgatcccgatatggatcccccacacccattccccaaggaaattccccacaacgaaaaactactcagtcttaagtacgaaagcctggactatgacaacagtgagaaccagctatttctagaggaggagcgtaggataaaccacacagctttcaggacagtggagatcaagcgctgggtgatctgtgccttaataggcatcctgactgggctggtcgcttgcttcatagacatcgtggtggagaacctggccggcctgaagtaccgagtaatcaagggcaatatcgataaattcactgagaaagggggactgtcattttctctgttgctgtgggcgacgctgaatgccgccttcgtacttgttggttcagtcatcgtcgcctttatcgagcccgtggctgccggcagcggaatcccgcaaatcaagtgtttcctgaatggcgtgaagatcccacatgtcgtccgtctgaagaccttggtgatcaaggtttcgggggtgattctctcggtggtcggtggactggctgtcgggaaggagggacccatgattcattctggttccgtaattgccgctggaattagccaggggaggtctaccagcctaaagcgagattttaagatattcgagtactttagacgcgacacagagaaaagagacttcgtatccgcaggtgcggccgccggggtttcggcagctttcggggctcctgtgggaggagtgctttttagtctagaggagggagctagcttttggaaccaattcctcacctggaggatcttttttgccagcatgatatccactttcaccctcaatttcgtgttaagcatctaccatggcaatatgtgggacctgtcctctcctggtctcattaactttggtagatttgatagcgagaagatggcttacacaatccatgagatccccgtcttcatcgccatgggcgtggtgggaggcgtcttgggcgctgtgttcaatgctcttaattattggcttaccatgttcaggataaggtatatccacagaccttgcctccaggtgatagaagccgtgctggtggcagccgttactgcaactgtggctttcgtgctcatctattcaagccgagattgccagcccttacagggagggtctatgagttacccattgcaacttttctgcgctgacggcgaatataatagtatggccgcggcgttctttaatactcctgagaagtcagtggttagcctgttccacgatcccccaggctcttataatcccctgaccctgggactgtttaccttggtgtacttctttcttgcctgctggacctacgggttaaccgtgtcagccggtgtatttataccatcactgctgattggcgctgcatggggacgcctttttggaatctcactgtcatatctcaccggagcggccatctgggccgatccggggaaatacgccctgatgggtgctgccgctcagctgggtggcattgtcagaatgacactctcgctgacagtgattatgatggaggccacttcaaacgttacatatggatttccaatcatgctggtgctgatgactgcgaaaattgtcggcgacgtgttcatcgaaggtctgtacgacatgcacatacaacttcagagtgtacccttcctccactgggaagcaccggtgacatcgcatagcctgaccgcgcgtgaagtgatgtccactcccgtcacgtgtctgcgtagaagggagaaagtcggcgtgattgtggatgtgctctctgatacagcttccaatcacaacggctttccagtggttgagcatgccgatgacacacaacctgcccggcttcaaggactgattctgcggtctcaacttatcgtgttgctgaagcacaaggtgttcgtagagagatctaatttgggcctggttcagcgccggcttcgcttgaaagactttcgggacgcctatcctaggtttccccctatccagtctattcacgtttcacaggatgagcgagaatgcactatggatttatcggagttcatgaatccttccccttacactgtcccacaggaagccagtctcccaagggtcttcaagctgttccgagccctgggcttgaggcacttggtggtggttgataacagaaatcaggttgtgggtctcgtgacaagaaaggatttagcacggtacagactggggaagcgtggactcgaggaactcagtctggcccagacgtag

SEQ ID NO: 111966 - DNA, 2346 bp, synthetic construct
  misc_feature 1..2346: note = Description of Artificial Sequence: Synthetic coding sequence
  source 1..2346: mol_type = other DNA
atggccaacgtgagtaagaaggtctcttggagcgggagagatcgggatgacgaggaagccgcacctttattacgccgaacagcccggccaggggggggtacaccccttctgaacggcgctgggccaggcgctgcccgccaggacatggacccaccacaccccttccctaaggagatacctcacaatgagaagctactgagtttaaaatacgagtcactcgactacgacaattcagaaaatcagctgtttttagaagaggagcggagaattaatcatacagcctttcgcaccgtggagattaagcgctgggttatttgtgccttgatcggtattctgacaggtctggtagcctgcttcatagacatcgtggttgaaaacctggccgggttgaagtacagagtgataaagggtaatattgataaatttaccgagaagggaggcttgtcatttagtctcctgctgtgggccacgcttaatgctgcattcgttttggttggtagcgtgatcgtggcctttattgaacctgtggctgccgggtctggtattccacaaatcaaatgctttctgaacggcgtcaaaatccctcacgtggtaaggctgaagaccctagttatcaaagtgtccggggttatactcagcgtggtgggtgggctagctgtgggtaaagagggccccatgattcactccggcagtgtgatcgccgccggcatttcacagggccgatcaacctctctaaagagggacttcaagattttcgagtatttccgacgggacaccgaaaagcgtgactttgtgtctgctggagccgcggccggggtgtctgctgcgttcggagctcccgtgggaggggtgctcttttcactggaagaaggcgcatccttctggaaccagttcctgacatggaggattttctttgccagcatgatttccacatttacattgaacttcgttctgtccatataccatggtaacatgtgggatctcagttcaccaggtctgatcaactttggtcgattcgactccgagaagatggcctatactatccatgaaattccagtttttattgccatgggagttgtcggcggcgtgctgggtgccgtgttcaacgctctgaactattggttgactatgtttcggattcgctacattcacagaccatgtctgcaggtgattgaagcggtattggtagccgcggtcaccgctaccgttgcatttgttctaatttattccagccgcgactgtcagcctctgcagggagggtctatgtcttatccactgcagctattctgcgctgacggcgagtataactcaatggccgcagctttttttaacacccccgagaaatccgtcgtgtcactgtttcacgatccacccgggtcgtataatccactgacattggggctgttcaccttggtgtatttttttctggcctgttggacctacggactcacggtgagcgccggagtgttcattcctagcctcctgataggggccgcctgggggcgactcttcgggatctctttgtcatatctgacaggcgccgctatctgggctgatccggggaaatatgctttgatgggggcagcggcacagctgggcgggatcgtacgaatgacgctgagtctgacagtcatcatgatggaagctacaagtaatgtgacctacgggttccccatcatgttggtgctgatgacagctaagattgtcggcgacgtttttattgaagggctgtatgacatgcacattcaactgcagtccgtcccctttcttcactgggaggccccggtcaccagccacagcctgacggcaagggaggtgatgagcacacccgtgacatgcctacgcaggcgagagaaggtcggggttatcgtggatgtcctgtctgacacggcttcaaatcacaacggttttcccgtggtcgagcatgcggatgacactcagccagctaggcttcaggggttgatcttacggtctcagcttattgtgcttctcaagcacaaagtgtttgtggagcggtctaacctgggcctcgtgcagcggcgcctaaggcttaaagatttccgggatgcttatccccggttccccccaatccagtccattcacgttagccaggatgaacgggagtgcaccatggatctgtctgagtttatgaatcccagtccctatacagtaccccaggaggctagtctgcctcgtgtattcaaactcttcagggctctcggactgagacacctcgttgtggtggacaaccggaatcaggttgtcggtcttgttactcgcaaagacctggcaagataccgtctgggaaaacggggccttgaagagttgagcctggctcagacctag

SEQ ID NO: 111967 - DNA, 1545 bp, synthetic construct
  misc_feature 1..1545: note = Description of Artificial Sequence: Synthetic coding sequence
  source 1..1545: mol_type = other DNA
atggtcctggatctcgacctcttccgtgtggacaaagggggtgacccagcactaatcagagaaacacaagaaaagcggttcaaagaccccgggctggtcgaccaactagtgaaagccgatagtgaatggcgacgatgccgcttccgggcggataacctgaacaagcttaagaatctttgctctaagactataggtgagaaaatgaagaagaaggagccagtcggcgacgacgaatccgttcccgagaacgtcctgagttttgacgacttgaccgcagatgctcttgccaacctcaaagtgtctcagatcaagaaggtcagactactgattgatgaggctattctaaaatgcgacgctgaacgcattaagctcgaggccgagcggtttgagaatttgagagaaatcggtaacctcttgcatccctccgttccgatcagtaatgatgaggacgtggataacaaagtggaacgcatctggggtgattgtaccgtccggaagaagtattcccacgttgatctggtggttatggtcgatggttttgaaggggaaaagggggcagttgtggccgggagtaggggttacttcctcaaaggcgtactcgtttttcttgaacaagcacttattcagtacgcattgaggaccctagggagtaggggctacatccctatctatactccattttttatgcggaaagaggtgatgcaggaagtggcccagcttagccagtttgacgaggagctatacaaggtaatcgggaagggctccgagaagagtgacgataatagctatgatgagaaatatctgatcgccacctctgaacagccaattgccgccttgcatcgcgacgaatggctacgcccagaggatctccctataaagtacgccggtctgtcaacctgctttcgccaggaggtcgggtcacatggccgggatacacgcggtatcttcagggtacaccagttcgaaaagatcgaacagttcgtgtactcctctccccatgataacaagtcgtgggagatgttcgaggagatgattacgactgccgaagaattctaccaatcccttggcattccttaccacatcgtgaacattgtcagcgggtctctcaaccacgcagcctccaagaagctggatctggaagcgtggttccctggcagcggggcctttcgagagctcgtgtcctgttctaactgcaccgactatcaggccaggagactgaggatacggtatgggcagacaaagaaaatgatggataaagtcgagtttgtgcacatgcttaacgccacaatgtgcgctacaacacggaccatctgcgcgatactggagaattaccagaccgaaaagggcatcaccgtgcccgaaaagctcaaagaattcatgccccccggactccaggaacttatcccgttcgtaaagccagctcctatcgaacaagaaccaagcaagaagcagaaaaagcagcatgagggctccaagaaaaaggcggctgctagggatgtgactctggaaaataggctacagaatatggaggtgacagacgcctag

SEQ ID NO: 111968 - DNA, 2745 bp, synthetic construct
  misc_feature 1..2745: note = Description of Artificial Sequence: Synthetic coding sequence
  source 1..2745: mol_type = other DNA
atggggcctttcaaaagctcagtctttatccttatattgcacttactggaaggagcactgagcaattctctgatccagcttaataataatggatacgagggtatcgtagtggccatcgatccaaatgtgccagaagatgagactctgattcaacagatcaaagacatggtcacccaggcctcactatatctcctggaggctacaggtaaaaggttttattttaagaatgtggccattttgattcccgaaacttggaagaccaaggccgactacgtaaggcccaagctcgagacatataagaacgctgatgttttagtggcggagtctacgccccctggcaacgatgagccatacacagaacagatgggtaactgtggggaaaaaggcgagcgcatccatctcacgccagattttattgccggtaaaaaattagccgaatatgggccccaaggccgagcattcgtccatgaatgggcccatctgaggtggggggtgtttgacgaatataataacgatgaaaaattttatctttcaaatggcagaattcaggccgtgagatgctctgcaggtattacagggactaacgtagtaaagaaatgtcagggaggaagctgttatacaaaaaggtgtacctttaacaaggtgacgggactttacgaaaaagggtgtgaatttgtcctccaatcccggcagactgagaaagcctcaataatgtttgctcaacacgtggatagtattgtggagttttgtactgagcagaaccacaataaagaggcacccaataagcagaaccagaagtgcaatctgcgaagcacctgggaagtcatcagagattccgaagattttaaaaagacgacaccaatgactacacaacccccaaaccctacgtttagcttgctacagattggccagaggatcgtatgcctggtcctggacaaatccggaagtatggccacaggtaacaggctcaaccggctgaaccaggcggggcagctattcctcctccagaccgttgaactgggttcctgggttggcatggtgacatttgactccgccgcacacgtccagaatgagctgatccaaatcaactctgggtccgacagggacactctggccaaaagactgcccgcagccgcatccggaggaacttcaatatgtagcggtctgagatctgcatttaccgtcatccggaaaaaataccctacagacggaagcgaaatagtgctgttgacagacggcgaagataacacaattagtggatgctttaatgaggtcaaacagagtggtgccattattcacaccgtggcactgggtccatccgccgcccaggagctggaggagttgtctaagatgaccgggggtttacagacttacgcatctgatcaggtgcaaaacaatgggcttatcgatgcctttggcgccctgagctctggcaatggagcggttagccagaggtctattcaactggagagtaaaggattgacgctgcagaactctcagtggatgaacggtacggtgattgtggattcgaccgtgggaaaggacaccttgtttttgatcacatggactatgcaacctcctcagatccttctgtgggatcctagcggccaaaagcaaggtggctttgttgtggataagaacaccaagatggcgtacctgcagattccagggattgccaaggttgggacttggaaatactcactgcaggcctcttcccaaaccttgactctgacagtgactagccgggcctcaaatgctacactgcctcccataacagtgacctccaaaaccaataaggatacatcgaagtttccctctcccctggtggtatacgcaaacatacgacaaggcgcatcacctatcctccgcgcatccgtcactgcccttatagaaagcgtaaacgggaaaacagtcacactagaactcctcgataacggagcaggggccgatgctacgaaggatgacggtgtttatagcagatacttcaccacctatgataccaatggccgctactccgtgaaggtacgagcattgggcggagtgaacgctgctcggaggcgggtgataccccagcagtctggcgcactgtatataccagggtggatagaaaatgacgaaatacagtggaatcctcctaggcctgaaattaataaggatgacgtgcagcataaacaggtatgcttctctcggaccagctcaggtggaagcttcgtggcgagcgatgtgccgaatgctccaataccagacctcttccccccaggccagattactgatttgaaggccgagatccacggaggatcacttattaacctgacctggaccgcccctggagatgactacgaccacggcaccgctcataagtatattatcaggatttccaccagcatcctcgatttaagagataaattcaacgagtccctgcaggtcaataccacagcactgatacccaaagaagccaacagcgaggaggtattcctgtttaaacccgagaacataacatttgagaatggaaccgatctgtttatcgccatccaagccgtcgacaaggtggacttaaagtcagagatctcgaatatcgcacgagtctctctgtttatccctcctcagacgccaccagagaccccttccccagatgagacttcagcaccttgccctaacatacatattaatagcaccataccagggatccatattcttaagatcatgtggaaatggatcggggaacttcagctgtctattgcttag

SEQ ID NO: 111969 - DNA, 987 bp, synthetic construct
  misc_feature 1..987: note = Description of Artificial Sequence: Synthetic coding sequence
  source 1..987: mol_type = other DNA
atgacaacacaaccccctaacccaacattctccttgctacagatcggtcagaggattgtgtgcctggtattagataagtctggatcaatggccactggaaaccggctgaatcggctaaaccaggccggccagctcttcctgcttcagactgtcgaacttggcagctgggtgggtatggtcacatttgattcagccgctcacgtccagaatgaattgattcagattaactctggctctgatagggacacattagctaagagactgccagctgccgctagtggcggaacctctatatgctcaggtctccgttcagcgttcacagtcatcaggaagaagtatccgaccgacggttctgaaattgtgctactcactgacggggaggacaatactatcagcggctgtttcaacgaagtcaagcaatcaggagcaattattcataccgtagccctggggccctccgccgcgcaggagctagaggagctgtcaaagatgacaggtggcttgcaaacgtatgcctctgatcaggtgcagaataacgggcttatcgacgcctttggcgccctctcttctggaaatggcgctgtgtcacagcggtccatccagctcgaaagcaaaggtttaacactgcagaactcccagtggatgaatggtaccgtgatcgtagattccactgttgggaaggatacactctttctaattacatggactatgcagccgcctcagattcttctgtgggatccctccggccagaaacagggcggtttcgtggtcgacaagaataccaaaatggcctacctccagattccagggattgccaaggttggcacatggaaatattctctgcaggcatcttctcagaccctcacactgacagtcacatctagggcttcgaatgcgacactgccccctatcacagtgacaagtaaaactaacaaggacaccagtaatctccctaattctcagggccaatgtcacagcccagactag

SEQ ID NO: 111970 - DNA, 2064 bp, synthetic construct
  misc_feature 1..2064: note = Description of Artificial Sequence: Synthetic coding sequence
  source 1..2064: mol_type = other DNA
atggaggagctggtcggcttgcgcgaagggttctcaggcgatccagtcactctgcaggagctctggggaccgtgtcctcacatcaggcgggcgatccagggtggtctggagtggctcaaacagaaagtgttcagacttggcgaagattggtactttttgatgactctgggagtcctaatggccctcgtgtcttatgcaatgaatttcgctatagggtgcgtggttagggcacaccagtggctttaccgggaaattggtgactctcacctgctccgctatcttagctggactgtctatccggtggccctagtgtctttctcgtctggattctcccagtccatcactcctagctctggcggatccgggattcccgaactgaagaccatgctcgccggagtaatactggaagactacttggacatcaaaaacttcggcgcaaaagtggtaggactcagctgtacgctggccactggctcaactctctttctcggtaaagtggggccctttgtccacctgtccgtaatgatagcggcctacttaggccgagtgcggaccacaactattggtgagccagaaaataagtcaaagcagaatgagatgctggtcgccgcagcagctgtgggagtggccactgtatttgcagctcctttctccggggtgctcttcagcattgaagtcatgagtagtcatttttctgtgcgggactactggcgggggttttttgccgcgacctgtggcgccttcattttcagattgctggccgtgttcaacagcgaacaggaaaccatcaccagtctgtacaaaacctccttcagagtggacgtgcccttcgacctgccagagatctttttttttgtagctctgggaggcatctgtggagtactctcttgcgcctacctgttttgccaaaggaccttcctcagtttcataaagaccaatcgatactcaagtaaactcctcgcaacttctaaacctgtgtactccgcgctggctacgctgctcctggcatccattacctatcctccaggagtgggccatttcctggcttcacgcctgagtatgaaacagcacctggactccctgttcgataaccattcctgggcattaatgacacaaaatagttccccaccctggcctgaggaactggaccctcaacacctgtggtgggagtggtaccacccaagatttactatatttggaacactggcatttttcctagtaatgaagttttggatgctcatcctggctactaccattccaatgccggccggatatttcatgccgatttttattctgggggcagctatcggccgactgctgggggaggccctggcagtcgcattcccagagggtattgtcactgggggggtgacaaatcccatcatgccagggggatacgcccttgccggggctgccgctttcagcggcgccgtcacccacactattagtacagccctgctggccttcgaacttaccggacagattgtccacgccttgccagttctaatggctgtgctcgcggccaacgcaatcgctcagtcttgccagcctagcttctatgacggcactatcatcgttaaaaaattgccgtacctgccccggatcctcgggcgtaatataggcagccaccatgttcgggtcgagcattttatgaaccactccatcacaacacttgcaaaggatacgcctctggaggaggtcgttaaggtcgtgaccagcacagacgtcaccgagtatccccttgtggagtccacagagtcccagattctggtggggattgtccagagagcacagctggtgcaggccctccaggccgaaccccctagtcgtgcaccagggcatcagcagtgtctgcaggatatcctggcccgcggatgtccaaccgagcctgtcaccctgacactgttctcggagaccactctccatcaggcgcagaatctgttcaagctgttgaacctgcagagtcttttcgttacttctcggggaagagctgttggttgcgtgtcatgggtcgaaatgaagaaggcaatttccaacctaactaatcctccggcaccaaagtag

SEQ ID NO: 111971 - DNA, 2061 bp, synthetic construct
  misc_feature 1..2061: note = Description of Artificial Sequence: Synthetic coding sequence
  source 1..2061: mol_type = other DNA
atggaggaacttgtgggcctcagagagggcttcagcggcgatcctgtgacccttcaagaactgtggggtccctgcccacacattaggagggccatacagggcggcctggaatggctcaagcagaaggtgttccggctaggcgaggattggtactttctgatgacactgggcgttcttatggctctagttagctatgccatgaactttgctattggctgcgtcgtcagggcccaccagtggctgtacagggaaataggtgactctcacctgctgcgttacctcagttggacggtctatcctgtggccttggtgagctttagctcagggttcagccaatcaattactccttctagcgggggcagcggaatacctgaactgaagaccatgttggcgggagtgattctcgaggactacctggatatcaaaaacttcggggctaaggtggtagggttatcctgcaccctggccacgggcagcaccctttttctagggaaagtgggaccattcgtgcacctctccgtaatgatagccgcgtacctgggtagggtcagaacaaccacaattggtgaacccgagaataaaagtaaacaaaatgaaatgctggtggcagccgccgccgtgggggttgctacagtttttgccgcgccatttagcggggttctgttctctatcgaggtgatgtcctcacacttctccgtaagggactactggcggggcttcttcgccgcaacctgtggcgccttcattttcaggctgcttgcagtatttaattctgaacaggaaaccattacctctctctacaagaccagctttagagtcgatgtcccctttgacttgccagagattttcttttttgtggctctcgggggcatatgtggagtactcagttgtgcatacctgttttgtcagaggactttcttaagctttataaaaacaaataggtattccagcaagctgttggccaccagtaagccggtctactcagccctggcaaccctcttgcttgcctctattacttaccctcccggtgtgggacacttcctggcaagccggctaagcatgaagcagcacctggatagcctctttgacaaccattcatgggctcttatgacccagaattcttccccaccctggccagaggagttagatcctcaacatctgtggtgggagtggtaccatcctaggtttactattttcgggactttagcctttttcctagtgatgaagttttggatgctcattctggcaaccactatcccaatgcctgcaggatatttcatgccaatcttcattctcggagctgccatcggacgcctacttggggaagccttagccgtggccttcccagaaggaatcgtgacaggaggagtgactaaccccattatgcccggaggctacgcgcttgcgggcgctgcagcgttcagtggtgccgtgacacacaccataagcaccgcactgcttgcctttgaacttacgggacagatcgtccatgccctgccagtactgatggctgttctggccgctaacgctattgctcaatcctgccaaccatctttctacgatggaacgatcattgtcaagaaactcccatacctgccacgcatcctcggtcggaacatcgggtcccaccatgtgagggtcgaacatttcatgaatcattccattaccactctggcgaaagacacaccactggaggaggtcgttaaagtggtgacttcgaccgatgtgacagaatatccgcttgtggagtccactgagagccagatacttgttggcatcgtccaacgcgcacagctggttcaggctctgcaagccgaacccccgtcccgcgctccaggccaccagtgcctgcaagatattctcgccagaggttgtcctacagaacctgtgaccttgactctgttttccgaaacaactttgcatcaggctcagaatctgttcaagctcctcaatctgcagtctctgttcgtgacttcccggggcagagccgtgggctgtgtttcatgggtggaaatgaaaaaagcgatcagcaacctgactaatccgccagctccaaagtag

SEQ ID NO: 111972 - DNA, 2061 bp, synthetic construct
  misc_feature 1..2061: note = Description of Artificial Sequence: Synthetic coding sequence
  source 1..2061: mol_type = other DNA
atggaagagctggtaggactacgtgagggcttcagtggcgaccccgtcactcttcaagaactgtggggaccatgtcctcacatcaggagagcaatacaggggggcctggagtggctaaaacagaaagtgttcaggcttggtgaggactggtattttctgatgactctgggcgtactcatggctctcgtttcttacgccatgaactttgctatcggctgcgttgtgcgtgctcaccaatggctttaccgcgaaatcggagattctcacctgttgagatacctgtcctggacggtctatcctgtggctttggttagtttctcttccgggttctcccagtccatcaccccaagcagcggaggaagcggcatccccgagctaaagaccatgctagccggcgtgatcctagaggattatctggacatcaaaaactttggcgccaaggtcgtcgggttgtcctgcactctggcaactggctccaccctcttcctaggcaaagtcgggccatttgtgcacttgtcggtgatgatcgctgcctatctcggcagagtgcggacaaccacaatcggggaacctgaaaacaagtctaagcagaacgagatgttggtagcagccgctgcagtcggagtggcaacagtgtttgctgcccctttctctggcgtgctgttctccatcgaggtcatgtcaagtcacttttccgtgcgggactactggcgcgggttcttcgcagccacctgtggggcttttattttcaggttactcgcagtgttcaactccgagcaagaaactattacgagcctttacaaaacctcctttcgcgtggacgtgccatttgacctccctgaaatttttttcttcgtagcattgggcggaatctgcggcgtcctttcttgcgcttatctgttttgtcagaggacctttctttctttcataaaaaccaatcgctattcatctaagcttctggccactagcaagccggtgtattctgccctggcaaccctgctgctggctagcattacgtatccccccggcgtcggacacttcttggcctcccgcctctccatgaagcagcatctggattcgctattcgacaaccatagctgggccctgatgactcagaattcatctccaccatggccagaggagctggatccccagcacctgtggtgggaatggtaccacccaaggttcacaatctttggtacccttgccttctttctcgtcatgaaattttggatgctgatcctcgcgaccacaataccaatgcccgcagggtatttcatgccaatcttcattctgggcgcggccatcggcaggctgttaggagaagcactggctgtagcctttcctgagggcattgtaacaggcggcgtgacaaaccccattatgcccggaggctacgcattggccggcgccgccgccttctcgggggctgtgacccacactatctccaccgctctcctggcttttgagttgaccggccagattgtgcacgcactacccgtgcttatggccgtcctcgccgccaacgccatcgctcaatcctgtcagccatccttctacgacggaaccatcattgtgaaaaagctgccatatctgcccagaattctaggccggaatattggcagtcatcatgtgcgggtggaacattttatgaaccactctatcacaactctggctaaagacaccccactggaggaagttgttaaggttgtgacgagtaccgatgtgactgagtaccccctggtagaaagcacagaaagccagattttagtaggaatagtacagcgggctcaactagtgcaggcgttgcaggcagagccaccgagccgcgctcccggtcatcagtgcttacaggatattctggcccgcgggtgccctacagaacccgtgactttgaccctattctcagagacaacactgcatcaggctcaaaatctgttcaagctgttgaacctacagagcctgttcgtaacttcgcggggacgcgcagtcggatgcgtttcttgggtcgagatgaaaaaggccattagcaacttaacaaaccctcctgcccccaaatag

SEQ ID NO: 111973 - DNA, 1935 bp, synthetic construct
  misc_feature 1..1935: note = Description of Artificial Sequence: Synthetic coding sequence
  source 1..1935: mol_type = other DNA
atggaggagctagtcggtcttagggaaggtttcagcggggatcccgtgacattacaggagctgtggggcccctgccctcacattaggagggctatccagggcggcctggaatggctgaaacaaaaggtgtttaggttaggggaggattggtatttcctcatgaccctgggggtcctgatggctctcgtcagctatgccatgaatttcgcgattggttgtgtggtgcggggctccggcattcctgagttaaagaccatgctggccggagttatcctggaggactatctggacatcaaaaattttggggctaaagtggttggattgtcctgtactctcgctactggtagcacattgtttttgggtaaagtgggccccttcgtgcatctgtcagtgatgatcgccgcatatttgggccgggttcgcaccaccacaatcggggagcctgaaaacaaaagcaagcaaaacgaaatgttagttgcagcagcggccgtgggagtggccaccgtcttcgcagcccctttctccggggtgttgttttcaatcgaggttatgtcctcccacttttccgttagggactactggcggggtttctttgctgcaacatgcggggcttttattttccgcctgttggctgtgttcaattctgagcaggagaccattaccagtctctataagacctctttccgagtggatgtaccatttgacctgcctgagatcttcttttttgttgccctcggcggaatctgcggggtgctgtcatgcgcgtaccttttctgccagagaaccttcctgagcttcatcaagacgaatcggtattccagtaagcttctggcgacgagcaaacccgtgtactctgcgctcgctaccctgctgttagcctcaataacctatccacctggcgtgggacacttcctcgcatctcgcttgtccatgaaacaacacctagacagcctgttcgataaccactcatgggcgttgatgactcagaactcttcacccccatggccagaagagctcgatccccagcacctatggtgggagtggtatcaccctcgctttacgatttttggcacccttgcattcttcctcgtcatgaaattctggatgctcattctcgctactactatcccaatgcctgcaggctatttcatgccgatctttatcctgggggccgccatcggtcggctcctcggtgaggcactggcagttgcttttccggaaggaattgtgactggaggggtgaccaatcccattatgccgggtggatatgccctggccggcgctgctgctttctccggcgcagtgacccacactatctccaccgctcttctcgcgtttgagctcacaggacagattgtccacgctctccctgtgctgatggctgtcctagcagccaacgctattgcccaaagctgtcagccttctttttatgatggcacaatcatagtgaagaagctaccctatctcccccgtatcctgggccgcaacattggctctcaccatgtgagggttgagcactttatgaaccactctattactacactggcgaaggacacccccctggaggaagtggtaaaagtggtcacttcaaccgatgttaccgagtatccactagtcgagtctacagagtctcaaatcctggttgggattgtacaaagagcacagcttgttcaggctctccaagccgaacctccaagtagagccccaggccaccagcaatgcttgcaggacatcctcgctagaggatgccctaccgaacccgttacactgacactgttcagtgagacgacgcttcaccaagcacagaacctgtttaagcttctgaacttgcagagtctgttcgtgacatctcgtggccgggcagtggggtgcgtatcttgggttgagatgaagaaggctatttccaacctcactaacccaccagcaccaaagtag

SEQ ID NO: 111974 - DNA, 1389 bp, synthetic construct
  misc_feature 1..1389: note = Description of Artificial Sequence: Synthetic coding sequence
  source 1..1389: mol_type = other DNA
atggaggagtttgtaggactccgggagggtagctctggcaacccagttactctgcaggagttgtggggcccctgcccaaggattaggaggggaatcagaggtggactggaatggctgaaacagaagctgttcaggttgggggaggactggtattttttaatgactcttggagttctgatggcactggtttcatgcgccatggatctcgctgtggagtccgtagtgcgcgcccaccagtggctctacagggaaatcggagactctcaccttctcaggtacttgtcgtggacagtgtacccggtcgctctcgttagttttagctcgggcttcagccagtccattacacctagcagtggcggatcaggcatccctgaggtcaaaacaatgttagctggagttgtgctggaggactacctggatataaagaatttcggagccaaagtagttggcctgtcctgcaccctcgcatgcgggagcactctattcttgggcaaagtcgggcccttcgtacaccttagtgttatgatggcagcctacttaggtcgcgttagaaccaccaccattggcgagccggaaaacaaatcgaagcctgtgtactctgccttggccacccttgtacttgccagtatcacatatcctccttctgccgggcgatttctggcatctagactcagcatgaagcagcatctggattcactgtttgataaccattcttgggccctgatgacccagaacagtagcccgccctggcccgaggagctggaccctcaacacctatggtgggaatggtaccaccctcggttcaccatcttcgggactttggcattttttttggtgatgaagttttggatgttaatactggccacaacaattcccatgcccgctggttacttcatgccgatcttcgtttacggggccgccattggccggttattcggggagacactgagctttatttttcccgagggcatagttgcaggcggcataaccaaccctattatgccagggggctacgcactcgctggagccgctgccttcagcggagcggtgacccacaccatatccacagccctcctcgctttcgaggttaccgggcagatagtccacgcactgcccgtactcatggcagtcctagcagccaacgctatcgcccagtcatgtcaaccgtccttttacgatgggacagttattgttaaaaagctcccctatctgcctaggatccttggacggaacatcggctcccaccgcgttcgcgtcgagcatttcatgaatcactcaattacaacactcgccatcactctgatgaacgacgagatcggtgtccattgccaccaaggtcaagcccagatgccaagtggcgttgtgtggtttccggtccggggctcatag

SEQ ID NO: 111975 - DNA, 1554 bp, synthetic construct
  misc_feature 1..1554: note = Description of Artificial Sequence: Synthetic coding sequence
  source 1..1554: mol_type = other DNA
atgccttgcccccccctgctgtccgtgccagttcgcgccgctggcgagcaggatcgttgggtccgtgaggaagtgacttggggcggcggaccaacagtcaccggcggatggggctggagggcccacctccgctccgtcagcccaccaggcgtcctattttccatagaggtgatgagtagccactttagcgtgtgggactactggcgcggcttctttgccgctacctgtggagcctttatgtttcgtctgctggctgtctttaattctgagcaggagaccatcacgagtctgtataagacaagttttagagtggatgtgccattcgacctacctgaaatttttttcttcgtggctctgggtggcctttgcgggatcctcggctctgcgtatctattttgtcagagaattttcttcggttttatcaggaacaatagatttagctctaagttactggccacttctaaacccgtgtattcagccctggccacactggtcctcgcctcaattacctatccacctagcgccggccgcttcttagcttctcgcttaagcatgaagcagcacctagacagtttgtttgataaccacagctgggcactgatgacacagaattcttctcccccgtggcctgaggagctggatcctcaacacctctggtgggaatggtaccacccgcgcttcacaatctttggcacgttagcctttttccttgtcatgaagttctggatgctcattctcgcaaccaccatcccaatgcctgcgggatacttcatgccaatatttgtgtacggcgcagccatcggtcgcctgttcggtgaaactctgtcatttatttttcctgagggcatcgttgcaggcgggatcacgaacccaatcatgccagggggttatgctttggcgggagcagctgccttcagtggcgccgtgacacatactataagcacagcccttctggccttcgaagtgaccgggcagattgttcatgccctgcctgtgctgatggctgtcctagccgctaacgccattgcgcagtcatgccagccttccttctatgacggaactgtcatagtcaagaagctcccatacttacctcgcattctgggaaggaatatcgggagtcaccgtgtccgggtggagcattttatgaatcactcaattacgacactcgccaaagatatgccactcgaagaggtcgtaaaggtggtgacctcaaccgatgtcgccaagtatccgctggtcgagtcaaccgaaagtcaaatcctggttggcatcgtgcgaagagctcaattggtgcaggcattaaaggctgaacccccctcctgggcacctgggcatcagtgccttcaagatatcttggcagctgggtgtcccactgagcccgtgactttgaagctgtccccggagacttccttgcatgaagcccacaatctcttcgaattgctgaatttgcatagccttttcgtcacaagtaggggccgagcagtggggtgtgtgagctgggtagagatgaagaaagcaatctccaacctaacaaatccacctgctccaaaatag

SEQ ID NO: 111976 - DNA, 468 bp, synthetic construct
  misc_feature 1..468: note = Description of Artificial Sequence: Synthetic coding sequence
  source 1..468: mol_type = other DNA
atggctgtactggcagctaacgctatcgctcagtcctgccagccaagtttctatgatggcactgtgatcgttaaaaaattgccttatttaccacgaattcttgggaggaatattggctctcatagggtgcgggtcgagcatttcatgaaccactcgataactactcttgccaaggatatgccattggaagaagtggtgaaagttgtgacctcaactgacgtggccaagtaccccctagtcgagagtacggagtcacagatcctcgtaggtattgttagaagagcccagctggtgcaggcgcttaaagcggaaccaccttcctgggctcccggccatcagtgtctgcaggacatactagccgctggttgtcccaccgagccggtgacgttaaaactatcgcctgaaacgagcttacacgaggcccagatgcccagcggggtcgtgtggttccctgtccgcggttcttag

SEQ ID NO: 111977 - DNA, 2064 bp, synthetic construct
  misc_feature 1..2064: note = Description of Artificial Sequence: Synthetic coding sequence
  source 1..2064: mol_type = other DNA
atggaagagtttgtgggtctgcgtgagggctccagcgggaaccctgtaactctccaggagctgtggggaccttgtccccggattagacggggcatcaggggaggcctggaatggctgaaacagaaactgtttcgcttaggcgaggactggtattttctgatgaccttgggggtattgatggcactggtgtcttgtgcgatggatctcgccgttgagagtgtcgttcgcgcacaccagtggctgtatagagagatcggggatagccacctgctgcggtatctcagctggaccgtgtatcccgtcgccctcgtgagcttttcttccgggttctctcagtccattactcccagctccggcgggagcggcatccccgaggtgaaaacgatgttagctggcgttgtgctggaggattacctcgacatcaagaactttggagctaaagttgttggcctgtcttgcactttagcatgcggttccaccctctttctggggaaagtcggccctttcgtgcacctctctgtcatgatggctgcctatctaggacgtgtacgtactaccaccatcggagaacccgagaacaaatctaaacagaatgagatgctggtggctgctgccgccgtgggcgtcgctaccgtattcgccgcccccttctccggggtactcttttctatcgaagtcatgtctagccacttctccgtatgggactactggcgcgggtttttcgccgccacatgtggagcctttatgttcaggctccttgccgtcttcaactccgaacaggaaacaatcactagtttgtacaaaacttctttccgggtggacgtgccttttgatttgcccgagatttttttcttcgtcgcactgggaggcctttgtggcattctcgggtcagcatatctgttttgccagcggatcttcttcgggtttataagaaataatagattttcttccaaactgctcgctaccagcaagccagtgtatagcgcccttgctactctcgttttggcatcgataacatatccacccagcgccggacgctttctggcatctagattgagcatgaaacagcacctcgacagcctcttcgacaatcactcatgggccctgatgacccaaaatagtagcccaccttggccggaggaactcgaccctcagcatctctggtgggagtggtatcaccccagattcaccatctttgggacacttgcgttctttctcgtcatgaagttttggatgctcatcctagctaccacaataccaatgcccgctggatactttatgccaatctttgtatatggggctgcgataggacggcttttcggagaaacactgagctttatctttcctgagggtatagtcgccggcggcataaccaatcccatcatgcctggtggttacgccctggctggcgcggcagcgttctcaggtgcggtcacccataccatcagcactgcattgttggccttcgaggtgacagggcagattgtacatgccctgcccgtcttgatggcagtgttagcagcgaacgctattgcccagtcatgccagccaagcttttacgatggaacagtgatcgtgaagaagcttccttacctccctaggattctcgggagaaatatcggaagtcacagggtgcgggtcgaacattttatgaaccactccatcaccaccctggccaaagacatgcccctggaagaggtggtgaaggtcgtaaccagcacagatgtggccaaataccccttggtggaatccactgagtcccagattttggtaggcattgttcgaagagcacaactggtgcaagccctgaaagctgagcctccctcctgggctcctggtcaccagcagtgtctgcaggacatcctggctgcgggctgccccaccgagccggtcacattgaaactgtcgccagaaacatcactgcacgaagcccataacctctttgaattactaaatctccatagcctgttcgtgaccagccgaggcagggcggtcggctgcgtgagctgggtggaaatgaagaaggccatcagcaacctaacaaacccgccagcccccaaatag

SEQ ID NO: 111978 - DNA, 441 bp, synthetic construct
  misc_feature 1..441: note = Description of Artificial Sequence: Synthetic coding sequence
  source 1..441: mol_type = other DNA
gctcaaagctgccagcccagcttctatgacggcactgtgatcgtgaagaagttgccctacttgccccgcatcttgggacgcaacattgggtcccatcgcgtgcgcgtagagcatttcatgaatcattccataacaaccctggcaaaggatatgcctttggaggaagtcgtgaaggtagtcacatctaccgacgtagctaagtatcctctggtagagtctacagagtctcagattctggtagggatcgtccgtcgggctcagctggtgcaggcactcaaggcagaacctccttcctgggcccctggccaccagtgcctgcaggatatcctggccgccggttgtccaacagaacccgtcaccctcaaactatccccagaaacatccctccatgaggctcagatgccgtcaggagtggtgtggttccccgtcagaggatcctag

SEQ ID NO: 111979 - DNA, 2646 bp, synthetic construct
  misc_feature 1..2646: note = Description of Artificial Sequence: Synthetic coding sequence
  source 1..2646: mol_type = other DNA
atggctgccgctgcagctgaagagggcatggagcctagagcccttcagtatgagcagacccttatgtacgggagatatacacaggacctcggggctttcgctaaggaggaggctgcgcgaatccgcttgggcggccctgagccctggaagggccccccaagctcccgggctgcgcctgagttgcttgagtatgggagatcacggtgtgcacgctgccgcgtgtgttctgtccgctgccacaagttcctggtctctcgtgttggcgaagattggatttttctagtgcttctgggactcttgatggctctcgtgtcgtgggtcatggattacgccattgctgcgtgtttgcaagcccagcagtggatgagccggggacttaacacttctattctcctgcaatatctggcatgggtgacttatcccgtcgtcctgatcactttcagtgccggcttcacacagatactagctccgcaggcagtcgggtccggaattcccgagatgaagacaatactacgaggggtggttctcaaggagtatctgacactgaagacatttattgccaaggtgatcggcctgacctgcgctctgggttccggtatgccattgggaaaagaagggccatttgtgcacattgcctctatgtgcgccgcactgctgagtaaatttctctccctgttcgggggaatctatgaaaacgagagtcgcaatactgagatgttggccgctgcctgcgccgtaggagtagggtgttgcttcgctgccccgatcggaggcgtgctctttagcattgaggtgacatccacattcttcgccgtccgaaactactggcgcggcttcttcgccgctactttttctgcctttatctttcgagtgctggctgtgtggaatagggacgaagagacaattactgctttattcaaaacaaggttcaggctagactttccttttgatctgcaggagctgccagcctttgccgtcatcgggatcgctagtggttttggaggcgctttgttcgtctatctgaatcgaaagatcgtccaggtcatgcggaaacagaagactatcaaccggtttctgatgcgcaaaagactgctgtttcctgcccttgtaaccctgctgatttcaaccctgacattcccccctggttttggtcagtttatggcaggtcaactcagccagaaagaaaccctggtgacgctgtttgacaacaggacttgggtccgccagggtctggtcgaagagcttgaacctcccagcacttctcaggcgtggaaccctcccagagcaaacgttttcctcacactcgtgatatttattttaatgaagttttggatgtctgctctggccacaacaataccagtgccttgtggagcttttatgcctgtgttcgtcattgacggaattcataccgattcatcaacataccggatcgtccccgggggttacgcagtcgtaggggccgccgcccttgccggggcggtgacccacacggtgagcacagccgtgattgtgttcgagctgaccggtcagatcgcccatattctgcctgtgatgatagctgttattctcgcgaacgccgtcgcacagtctttgcaaccttctctatacgattctataattcgcattaaaaaactgccctatctacctgaactgggatggggccgccatcagcagtacagagtgagggttgaagatattatggtccgggacgtcccgcacgtggccctgagctgcaccttccgggatctccgcctggctctgcacagaaccaaagggagaatgctggccctggttgaatctcccgagtccatgatacttctgggctctattgaacggtcccaggtggtggctctcctcggagctcagctgtccccagcgcgacgcagacagcatatgcaggagcgccgagcaacacaaaccagcccgctcagcgatcaagagggacctccaacgccagaagcatcggtttgctttcaagtcaataccgaggactcagcctttcctgcagcacgcggagaaacccacaaacccctaaagcccgccctcaaacggggaccctcggtgacgcgtaatcttggagagtctcctaccggcagcgcagagtccgccggcatcgccctccgctcacttttttgcggatccccaccccccgaagccgcttcagagaagcttgagtcctgcgagaagaggaagctaaagcgggtaagaatcagtctcgcttctgacgctgatctggagggcgagatgtcacccgaggagatactcgagtgggaggaacagcagcttgatgagccagtcaacttttcggattgtaagatcgatccagcgccgtttcaattagtcgaacgtaccagcctgcacaagacgcacaccattttttcactacttggcgtcgaccacgcctatgttacaagcattgggcgcctgatcggcatagtgaccctgaaggagctcagaaaggcgattgagggaagtgtgactgctcagggcgtgaaggtgagaccacctttggcatcattccgcgatagtgccacctcatccagtgacactgaaacaactgaggtgcatgctctgtggggcccccacagccgccacgggcttcctcgagaaggttctccaagtgatagcgacgacaagtgccagtag

SEQ ID NO: 111980 - DNA, 2565 bp, synthetic construct
  misc_feature 1..2565: note = Description of Artificial Sequence: Synthetic coding sequence
  source 1..2565: mol_type = other DNA
atggccgccgctgctgctgaggagggcatggaaccacgagcactccagtacgagcagaccctgatgtacggccggtatactcaggatctgggagcctttgctaaggaagaagctgctcgtatccgactgggcggacccgagccatggaaaggtccccccagcagccgagctgcccctgagctgctcgagtacggcaggagccgctgcgccaggtgccgggcccagcaatggatgtcccggggtttgaatacctcgattctacttcagtatctggcttgggtgacctatccagtggttcttattacctttagcgccggttttacacagatcctcgccccacaggcagtcggctcaggcatccccgagatgaagaccattcttagaggtgtggtgctgaaagagtacctgactcttaagactttcattgctaaagtgattggcctgacatgcgccctcggatctgggatgcctttgggaaaagagggcccctttgtccacatcgcgagcatgtgtgccgctctgttgtctaagtttctgagcctctttgggggaatttacgaaaacgaatctaggaacactgagatgctggctgctgcctgcgcagtgggcgtaggatgttgtttcgcggcacctatcgggggagttcttttctctattgaggtcaccagcactttctttgccgtacggaattactggcgaggcttctttgccgccacctttagtgcttttatcttcagagttctcgccgtctggaacagggatgaagagacaataactgctctgttcaaaacacgattcagactggattttccatttgatctccaggaattaccagcattcgctgtgatcggcatcgcatcgggatttggaggagcattatttgtgtatttaaatagaaaaatcgtgcaagtgatgaggaaacaaaagactatcaaccgcttcctgatgcgcaaaaggctgctgttcccggcactagtaactctgttgatatcaacgctgaccttccctcccggattcggacaattcatggcggggcagctctctcagaaagagacacttgtcacgttattcgacaatcgcacttgggtgcggcagggcctggtggaggaactggagcccccaagcacctctcaggcttggaacccccctcgtgcaaatgtttttctgaccctggttattttcatactcatgaagttttggatgagtgcgctggccactaccatcccagtaccctgtggcgctttcatgccggttttcgtgataggcgctgctttcgggcggctagtgggagagagtatggcggcgtggttccctgatggaatacataccgattcctcaacctacaggatagtgcctggaggttatgccgtcgtaggcgctgcagccttagctggcgccgttacccataccgtatccaccgccgtaatcgtgtttgaactgaccggccagatcgcccacatcctcccggttatgatcgccgttatcttggccaatgctgtggcccagtccctacaacccagtttatatgacagcatcattaggattaaaaaactcccttaccttcctgaacttgggtggggcagacaccagcaatatagagtgagagtggaggacatcatggtccgcgacgtcccgcacgtggccctgagctgcacctttagggatctccgcctcgctctccacagaaccaaggggcgcatgcttgcccttgtggaatcacctgaatctatgatcttgctgggctctattgagaggagtcaggtggtggccttgctgggtgcacaactgtccccagcccgacgacgccaacatatgcaagagcgtagagctacccaaacctctcccctcagcgaccaggaaggcccaccaacaccggaagcctccgtttgcttccaggtaaataccgaagactctgctttccccgctgccaggggcgagactcacaaacccctgaaaccggctcttaaaagaggcccctccgttactcggaatctgggtgagtctccgacaggcagtgctgaaagcgcaggaattgccctgagatctcttttttgtggatctccccctccggaggccgcttcagagaagctggagtcctgtgaaaagcgaaaactgaaacgcgtcagaatttcactggcctcagacgccgatctcgagggcgaaatgtcgcctgaggaaatactagaatgggaggaacagcagcttgatgagcctgtgaattttagcgactgtaaaattgatcctgccccctttcagctcgttgagaggacctccctccacaaaacacacacgatcttctccctgctaggtgtggaccacgcctatgtgacatcaattgggcgcctcatagggatagtgaccttgaaagagctgagaaaggccatcgagggatccgtcaccgctcagggtgtgaaggtgcgccccccactcgccagctttagagactccgctacttcaagttctgacaccgagacaaccgaggtgcatgccctttggggtccacacagcagacacgggttgcctagggagggatctcccagcgactctgacgataagtgccagtag

SEQ ID NO: 111981 - DNA, 2610 bp, synthetic construct
  misc_feature 1..2610: note = Description of Artificial Sequence: Synthetic coding sequence
  source 1..2610: mol_type = other DNA
atggcagccgccgctgccgaggagggaatggaaccccgggcattacagtacgagcagactctcatgtacggtaggtacacacaggacctgggcgctttcgctaaggaagaggcagcgcgcattcggctggggggtcccgagccctggaaaggccctccatcgagccgggctgcccctgaacttctggagtacggacgctcaaggtgtgctcgctgccgcgtatgctctgtgcgatgccataagttcttagtgtcccgcgtcggagaggactggatcttcctggtgctcctaggtctgctaatggccctggttagttgggtcatggattacgccattgctgcctgcctgcaggcccagcagtggatgagtcggggccttaatacctccatcctgttgcagtacttggcctgggtaacttacccagtggtgctgattacattcagtgcaggatttactcagatcctggcccctcaggcagtaggatccggaattcctgaaatgaagacaatcctcaggggtgttgtgttgaaggagtacttgaccctgaagacctttatcgctaaagttatcggtctcacctgcgcccttggctcaggaatgccattgggcaaggaaggcccctttgttcacatagcctcaatgtgcgctgcattgctgtctaaattcttgtcactgtttggcggaatttacgaaaatgaaagccggaataccgagatgctcgctgctgcctgcgccgtcggcgtcggatgctgtttcgccgcccccatcggtggtgtgcttttttcgatagaagtcaccagtactttcttcgcagttcggaattactggcgcgggtttttcgccgcgacgttcagtgcctttatttttcgggttctagccgtgtggaatcgcgatgaagaaactatcaccgctctgtttaagacccgtttccgactggatttccctttcgatcttcaagagctgcccgcattcgccgtgataggtattgcctcaggattcggtggcgctctgttcgtgtacctcaaccgaaagattgtacaggttatgcgcaagcagaaaactattaacagatttctcatgcggaagcgcctgctttttccagccctggtgaccctactcatatctaccctgacctttccccctggtttcggtcagttcatggcgggccagctctcacagaaagagacgcttgtaaccctgtttgataatcggacatgggtgagacaaggattggtagaagagcttgaaccgcccagcactagtcaggcatggaatcctccccgagcaaacgtgttcttgacactcgtgatctttatcctgatgaagttttggatgtcggccctggctacgactattccagtgccttgcggcgccttcatgccagtcttcgtgattggtgctgcatttgggcgtctggtgggggaaagtatggccgcctggtttcctgatggaatccatactgactcgtccacgtatcgtatcgtgcctggaggctacgccgtggttggggccgctgcattagctggtgccgtgacacatacggtgtccaccgcggtcattgtgttcgagctcactgggcagatagcccatatcctgcctgtcatgatcgccgtgatactggcaaatgcagtggcgcagagtcttcagccctctctttatgatagtattattcgaattaagaaacttccatacttgcccgagctgggatggggtcggcaccagcagtatagggtgagagttgaagacattatggtgagagatgtccctcatgtagccctttcctgtactttccgcgaccttagactggccctccataggaccaaagggcggatgctggccttggtagagtctcctgagtcaatgatcctcctggggtcaattgagcgctcccaggtggtggcgttgctgggcgcccagttgagcccagcccggaggagacagcacatgcaggaacggagggcgactcagacgagtcctctatccgatcaggaaggaccaccaaccccagaggcctctgtgtgctttcaggtgaacacagaggacagtgcctttcccgccgcgaggggagagacacacaaaccactgaaacctgctttgaagagaggccccagcgttacaaggaatcttggagaatcccctactggctctgctgagtcggcggggatcgccctgcgatcactgttctgcgggagccctccgcctgaagccgccagcgaaaaactggaatcttgtgaaaaacgaaagctcaagcgcgtccgaatctcacttgcctcggatgcagacctcgagggtgagatgagtcccgaggaaatactggaatgggaggagcaacagctggatgagcccgtcaactttagtgattgcaagatcgatcccgcccccttccagttagttgagcgtacttccctgcacaagctgaggaaggctattgaagggagcgtaactgcccagggcgttaaagtgcggccacctctcgcctcctttcgcgactcagccacatccagtagtgacactgagacaactgaagttcatgctttgtgggggccccattcacgtcacggtctacctagagaaggctctccaagcgactcagatgacaagtgccagtag

SEQ ID NO: 111982 - DNA, 714 bp, synthetic construct
  misc_feature 1..714: note = Description of Artificial Sequence: Synthetic coding sequence
  source 1..714: mol_type = other DNA
atgtctttcctcaagagcttcccacctcccggaccagcagaagggttgctcagacagcagcctgataccgaggccgtcctgaacggcaaggggttgggtacaggcaccttgtacattgcagaatctcgactctcctggctggacggttctggacttgggttcagtctggaatacccaaccatcagccttcacgccctgtccagagaccggtccgattgccttggcgagcacctctatgtgatggtgaacgcaaagtttgaagaagaatccaaagagccagttgccgatgaggaggaggaggacagcgacgacgatgtcgaaccaatcacggagttcaggtttgtgccttccgacaaaagtgccctggaagcaatgttcacagcgatgtgcgaatgccaagcgctacacccggacccggaggatgaagactccgatgattacgacggggaagaatacgatgtagaggcccatgaacagggacaaggggacatccctaccttctatacatatgaggagggactgagtcaccttacagctgagggacaagcaactctggagcgcctcgaaggcatgctctcacagagcgtttcttcccaatataacatggccggggtacgcacagaagactctattagagattatgaggacgggatggaagtggatactaccccaacggttgccgggcagttcgaggatgctgacgttgatcactag

SEQ ID NO: 111983 - DNA, 714 bp, synthetic construct
  misc_feature 1..714: note = Description of Artificial Sequence: Synthetic coding sequence
  source 1..714: mol_type = other DNA
atgtcattcctgaagagctttccgccaccaggtcctgctgaaggtttgcttcggcagcagcctgacacggaggcggtgctgaacggtaagggcttggggactggaaccttatatattgccgaatctagactttcctggctggacggcagcggactgggcttctctctggagtatccaacgattagcctccacgctttgagtcgggataggtccgactgcctcggagagcatttatacgtgatggtcaatgctaaattcgaggaggaatctaaagagccagtggcagacgaagaggaggaggattctgatgacgacgtggagcctattacagagttcaggtttgtaccatcggacaaatctgccctggaagctatgttcacagcaatgtgcgagtgtcaggctctgcaccctgaccctgaggacgaagactcagatgactatgacggagaggaatacgacgtggaggctcatgagcagggacagggcgatatccctacgttctatacctatgaagagggcttatcacaccttacagccgaaggccaggccaccctggaaagattagagggtatgctttctcaaagtgtctcaagccagtataatatggcaggagtgagaacagaggattcgattcgggattatgaggacggcatggaagtggacacgacacccacagtggctggccagtttgaagatgctgacgtggatcactag

SEQ ID NO: 111984 - DNA, 504 bp, synthetic construct
  misc_feature 1..504: note = Description of Artificial Sequence: Synthetic coding sequence
  source 1..504: mol_type = other DNA
atggtcctgcttctgaagggggtgccattcaccctgacaaccgtagacactcgccggtcccccgacgtactgaaggactttgcccccggatcacagttgcctatcctgctctatgattcggacgcgaagactgatacgctgcagattgaggacttcctggaagaaacgcttggtcccccagactttccctctttggcgccaaggtaccgggagtcgaatacagccggcaacgacgttttccataagttttcagcgtttattaaaaatccggtccctgctcaggatgaggcactctaccagcagctgttgcgggcactcgcacgcctggactcatacctgagggctcctttggaacatgagctcgctggtgaaccacaactccgcgagagccgccgcagattcctcgatggggatcggcttactcttgcggattgttccttactgcctaagctccacattgtggacaccgtctgtgcccactttagacaagcacccataccctag
